(19) United States
(12) Patent Application Publication
(10) Pub. No.: US 2006/0134663 A1
(43) Pub. Date: Jun. 22, 2006

(54) Transcriptome microarray technology and methods of using the same

(76) Inventors: Paul Harkin, Antrim (IE); Patrick Johnston, Antrim (IE); Karl Mulligan, Belfast (IE)

Correspondence Address: JOHN S. PRATT, ESQ;KILPATRICK STOCKTON, LLP, 1100 PEACHTREE STREET, ATLANTA, GA, 30309, US

(21) Appl. No.: 11/266,748

(22) Filed: Nov. 3, 2005

Related U.S. Application Data
(60) Provisional application No. 60/662,276, filed on Mar. 14, 2005.
(60) Provisional application No. 60/700,293, filed on Jul. 18, 2005.

(30) Foreign Application Priority Data
Nov. 3, 2004 (EP) 04105479.2
Nov. 3, 2004 (EP) 04105482.6
Nov. 3, 2004 (EP) 04105483.4
Nov. 3, 2004 (EP) 04105484.2
Nov. 3, 2004 (EP) 04105507.0
Nov. 3, 2004 (EP) 04105485.9

(51) Int. Cl. C12Q 1/68; C12M 1/34

(52) U.S. Cl. 435/6; 435/287.2

(57) ABSTRACT

Arrays containing a transcriptome of a diseased tissue and methods of using the arrays for diagnosis, prognosis, screening, and identification of disease are provided herein. The transcriptome arrays from diseased tissue are useful for diagnosis of a disease by analysis of the genetic profile of a tissue sample specific to a disease state. The genetic profiles are then correlated with data on the effectiveness of specific therapeutic agents. Correlating expression profiles to the effectiveness of therapeutic agents provides a way to screen and select further patients predicted to respond to those therapeutic agents, thereby minimizing needless exposure to ineffective therapy.

### CLAIM OF PRIORITY AND CROSS-REFERENCE TO RELATED APPLICATIONS

[0001] This application claims priority of European Patent Application No. 04105479.2 filed Nov. 3, 2004, European Patent Application No. 04105482.6 filed Nov. 3, 2004, European Patent Application No. 04105483.4 filed Nov. 3, 2004, European Patent Application No. 04105484.2 filed Nov. 3, 2004, European Patent Application No. 04105507.0 filed Nov. 3, 2004, European Patent Application No. 04105485.9 filed Nov. 3, 2004, and to U.S. Provisional Patent Application No. 60/662,276 filed Mar. 14, 2005, and U.S. Provisional Patent Application No. 60/700,293 filed Jul. 18, 2005, each of which is incorporated herein by reference.

### FIELD OF THE INVENTION

[0002] This relates to the field of gene and RNA expression array technology, and more particularly relates to arrays containing transcripts expressed in diseased tissue and their use in diagnosis and therapy decisions.

### REFERENCE TO DOCUMENTS CO-FILED ON CD-R

[0003] A total of three (3) identical CD-R discs (labeled “Copy 1”, “Copy 2” and “Copy 3”) are submitted herewith each containing the following electronic text files. The CD-R discs were created on Nov. 2, 2005, and the sizes of each file are listed parenthetically as follows. All electronic files on the CD-R discs are herein incorporated by reference in their entirety.

| | | |
|---|---|---|
| GeneListA.txt | (30.7 | Mb) |
| GeneListB.txt | (1.9 | Mb) |
| GeneListC.txt | (2 | Mb) |
| GeneListD.txt | (1.1 | Mb) |
| GeneListE.txt | (58.6 | Mb) |
| GeneListF.txt | (3.5 | Mb) |
| GeneListG.txt | (30.7 | Mb) |
| GeneListH.txt | (4.1 | Mb) |
| GeneListI.txt | (30 | Mb) |
| GeneListJ.txt | (18 | kb) |
| GeneListK.txt | (20 | kb) |
| GeneListL.txt | (9.7 | Mb) |
| GeneListM.txt | (5.1 | Mb) |
| GeneListN.txt | (238 | kb) |
| GeneListO.txt | (35.8 | Mb) |
| GeneListP.txt | (11.8 | Mb) |
| GeneListQ.txt | (3.9 | Mb) |
| GeneListR.txt | (10.1 | Mb) |
| GeneListS.txt | (6.1 | Mb) |
| GeneListT.txt | (29.6 | Mb) |
| GeneListU.txt | (1.7 | Mb) |
| GeneListV.txt | (13.3 | Mb) |
| GeneListW.txt | (18.9 | Mb) |
| GeneListX.txt | (10 | kb) |
| GeneListY.txt | (28 | kb) |
| GeneListZ.txt | (5.7 | Mb) |
| GeneListAA.txt | (14.6 | Mb) |
| GeneListBB.txt | (5.1 | Mb) |
| GeneListCC.txt | (34 | Mb) |
| GeneListDD.txt | (26.6 | Mb) |
| GeneListEE.txt | (4 | kb) |
| GeneListFF.txt | (324 | kb) |
| GeneListGG.txt | (8.6 | Mb) |
| GeneListHH.txt | (18.8 | Mb) |
| GeneListII.txt | (9.6 | Mb) |
| GeneListJJ.txt | (46.1 | Mb) |

[0004] A total of three (3) identical CD-R discs (electronic medium labeled “Copy 1—Sequence Listing Part”, “Copy 2—Sequence Listing Part” and “Copy CFR—Sequence Listing Part”) are submitted herewith each containing a Sequence Listing of all of the sequences described herein. Pursuant to 37 CFR 1.823, the Sequence Listing is being submitted on compact disc (CD-R) in compliance with 37 CFR 1.52(e) and in Computer Readable Form on compact disc in accordance with 37 CFR 1.824.

[0005] The Sequence Listing submitted on the above-mentioned CD-R discs is herein incorporated by reference in its entirety.

### BACKGROUND OF THE INVENTION

[0006] The pharmaceutical industry continuously pursues new drug treatment options that are more effective, more specific or have fewer adverse side effects than currently administered drugs. Drug therapy alternatives are constantly being developed because genetic variability within the human population results in substantial differences in the effectiveness of many drugs. Therefore, although a wide variety of drug therapy options are currently available, more therapies are always needed in the event that a patient fails to respond.

[0007] Traditionally, the treatment paradigm used by physicians has been to prescribe a first-line drug therapy that results in the highest success rate possible for treating a disease. Alternative drug therapies are then prescribed if the first is ineffective. This paradigm is clearly not the best treatment method for certain diseases. For example, in diseases such as cancer, the first treatment is often the most important and offers the best opportunity for successful therapy, so there exists a heightened need to chose an initial drug that will be the most effective against that particular patient's disease.

[0008] Identification of the optimal first-line drug has been impossible because no method has been available for predicting which drug treatment would be the most effective for a particular cancer's physiology. Therefore, patients often needlessly undergo ineffective, toxic drug therapy. For example, in colorectal cancer, no method exists for determining which patients will respond to adjuvant chemotherapy after surgery. Only one third of the 40% of patients at risk for relapse after surgery derive benefit from chemotherapy. This means that the administration of adjuvant chemotherapy exposes numerous patients to unnecessary treatment. Cancer treatment and colorectal cancer clinical trials are still being pursued on the basis of the availability of new active compounds rather than the integrated approach of pharmacogenomics that utilizes the genetic makeup of the tumor and the genotype of the patient.

[0009] The advent of microarrays and molecular genomics has the potential for a significant impact on the diagnostic capability and prognostic classification of disease, which may aid in the prediction of the response of an individual patient to a defined therapeutic regime. Microarrays provide for the analysis of large amounts of genetic information, thereby providing a genetic fingerprint of an individual. There is much enthusiasm that this technology will ultimately provide the necessary tools for custom-made drug treatment regimes. However, problems have been encountered with the ability to assemble the correct information needed to adequately characterize and predict the response of an individual to a particular drug therapy, and the high expectations of applied pharmacogenomics have been met with some disappointment. (Nebert et al. 2003. Am J Pharmacogenomics; 3(6):361-70).

[0010] A major problem with current arrays is that they are typically based on generic information content that has been derived from partial sequencing projects that generate Expressed Sequence Tag (EST) information across a range of different tissue types. Alternatively, the information may be generated from genome-based sequencing projects that utilize algorithms to predict the presence of genes. A significant problem with this approach is that microarray manufacturers must constantly update the information content as more sequence information becomes available. This in turn has led to multiple versions of arrays each with more information content than the previous build. This has created a significant barrier to the routine application of this technology in patient management as researchers are faced with multiple different array platforms with different content making data validation extremely difficult. Even within a specific manufactured array platform it is difficult to cross-validate information between earlier and later versions of arrays, which in turn makes long term study design extremely difficult.

[0011] Another problem with currently available microarrays is that different forms of a disease may exist that present different responses to different therapeutic agent treatments. The usefulness of arrays is limited by how representative they are of the particular diseased tissue. The conventional whole genome array is therefore disadvantaged because the extraneous signals provided by genes not related to the disease state provide a high volume of experimental noise, thereby complicating analysis of the diseased transcriptome.

[0012] Conventional generic arrays provide limited information across multiple tissue types. However, they do not contain detailed information content regarding the specific transcripts expressed in a given discrete setting. The general approach of the generic microarray industry is to increase the density and content of information as more information becomes available. This has caused confusion in the general adoption of this technology in pharmacogenomics-based studies. The major issue relates to the difficulties in comparing studies across different builds of generic array. That is, it is extremely difficult to correlate data derived from a 20 k sequence array with data derived from a 40 k sequence array. This confusion is caused by problems with annotation and differences in control.

### SUMMARY OF THE INVENTION

[0013] Arrays containing biological molecules corresponding to transcriptomes from diseased tissues and methods of using the arrays in assays are provided. Arrays containing nucleic acid molecules corresponding to transcriptomes from diseased tissues and methods of using the arrays in assays are described herein. A diseased tissue transcriptome is a collection of nucleic acid transcripts, for both coding and non-coding nucleic acid sequences, expressed in a particular diseased tissue. Arrays containing other biological molecules corresponding to transcriptomes from diseased tissues are also described herein. Such biological molecules include proteins, polypeptides and antibodies. The arrays provide powerful tools for studying the entire expression profile of diseased tissues and identifying novel transcripts related to disease states.

[0014] The microarrays described herein provide a solution to the difficulties encountered in previously available arrays by taking the unique approach of defining the complete transcriptome information content in given disease settings and placing this information content onto an array. The complete information content is derived from multiple diseased tissue samples at varying stages of disease progression thereby encompassing population and disease heterogeneity. This approach ensures that all of the relevant information in a given disease setting is available for interrogation thereby dramatically increasing the potential for developing robust signatures that are diagnostic, prognostic or predictive of response to therapy in that given disease setting. In addition, this approach results in the generation of arrays with complete information content that do not require multiple updates and therefore lends itself to long-term stable study design. Furthermore because this approach represents a complete and stable platform it facilitates cross-validation studies across multiple patient populations in a given disease setting.

[0015] Disease specific transcriptome arrays contain complete information content in a given disease setting and therefore represent a stable, long term solution for pharmacogenomic-based study design.

[0016] In one aspect of the methods provided herein, the transcriptome arrays are useful for diagnosing a disease by determining the genetic profile of a diseased tissue sample from a patient. The genetic profile is determined by reacting transcripts from a diseased tissue sample, or tissue sample suspected of disease, with the transcriptome array. Hybridization or binding of the transcripts with complementary sequences on the array is then detected. Preferably, the transcriptome array is an array immobilized on a computer chip and hybridization of the nucleic acid molecules from sample to the array is detected using computerized technology. The genetic profile of the diseased tissue sample is then correlated with data on the effectiveness and responsiveness of that profile to specific therapeutic agents. A correlation of the resulting expression profile to the effectiveness of therapeutic agents provides a method for screening and selecting further patients predicted to respond to a particular therapeutic agent, thereby minimizing needless patient exposure to unsuccessful therapies.

[0017] Another aspect of the present method includes use of the transcriptomes described herein in methods, such as array assays, for detecting an early stage disease or disorder in an organism that is otherwise undetectable. Such organisms include humans, animals, plants or bacteria.

[0018] The arrays and methods of using the array, described herein, provide and utilize transcriptomes to detect, monitor and identify numerous diseases and disorders. All disease may be generally grouped into neoplastic diseases, inflammatory diseases and degenerative diseases. These categories include, but are not limited to diseases such as, cancer, arthritis, asthma, neurodegenerative disease, cardiovascular disease, hypertension, psychiatric disorders, infectious diseases, metabolic diseases or immunological disorders.

[0019] In one embodiment, a transcriptome array provides what is believed to be the most complete compilation of the colorectal transcriptome identified to date. Approximately 69,000 transcripts derived from colorectal tissue have been assembled to generate a colorectal, transcriptome-based, high density, oligonucleotide array. Approximately 40,000 of these transcripts are described in U.S. provisional patent application Ser. No. 60/662,276, which is incorporated herein by reference in its entirety. Approximately 23,000 additional transcripts and approximately 5,000 antisense transcripts derived from colorectal tissue are described herein to supplement the colorectal transcriptome sequences described in U.S. provisional patent application Ser. No. 60/662,276.

[0020] The transcriptomes provided herein for use in the arrays are believed to be the most complete version of transcriptomes identified to date for lung, breast, colon/rectum, liver, and brain tissue. Transcripts have been assembled herein to generate transcriptome-based, high density, oligonucleotide arrays for diseased tissue from lung, breast, colon/rectum, liver, and brain.

[0021] Therefore, the arrays described herein provide a vast amount of information on important changes that may underlie disease progression or resistance to therapy.

[0022] Pharmacogenomics has the potential to dramatically reduce the estimated 100,000 deaths and two million hospitalizations that occur each year in the United States as the result of adverse drug response (Lazarou et al. JAMA. Apr. 15, 1998. 279(15):1200-5.) Instead of the standard trial and error method of matching patients with drugs, the arrays and assays described herein enable physicians to analyze the genetic profile of a patient sample and prescribe the best available drug therapy for that patient from the initial diagnosis stage. The arrays described herein not only provide a method for improving the accuracy of prescribing the most effective drug first, but also provide increased safety because the likelihood of adverse drug reactions is reduced.

[0023] Accordingly, it is an object of the present invention to provide arrays containing nucleic acid arrays of genes, polynucleotides, nucleotides and fragments from diseased tissues for screening the expression of disease-related genes in a target sample.

[0024] It is another object of the present invention to provide methods to identify novel nucleic acid transcripts expressed in a diseased tissue.

[0025] It is another object of the present invention to provide methods for screening for genetic variants in a tissue that indicate the presence of an otherwise undetectable disease or disorder.

[0026] It is another object of the present invention to provide methods to diagnose a disease based on analysis of the transcriptome from a diseased tissue.

[0027] It is another object of the present invention to provide methods for a complete analysis of RNA expression changes affecting all identified genes or transcripts in a specific disease.

[0028] It is another object of the present invention to provide methods for characterizing an individual's specific gene/RNA expression profile in a diseased tissue and correlate the RNA expression to a suitable and effective drug treatment regime.

[0029] It is another object of the present invention to provide methods for differentiating between different forms of a disease and correlate to an expression profile for a successful therapeutic agent treatment regime.

[0030] It is a further object of the present invention to provide methods for correlating an expression profile with a suitable and suitable therapeutic agent treatment regime.

[0031] It is another object of the present invention to provide methods for predicting the recurrence of cancer after treatment.

[0032] These and other objects, features and advantages of the present invention will become apparent after a review of the following detailed description of the disclosed embodiments and the appended claims.

### BRIEF DESCRIPTION OF THE FIGURES

[0033] The file of this patent contains FIG. 1 which is executed in color. Copies of this patent with color drawing will be provided by the Office upon request and payment of the necessary fee.

[0034] FIG. 1: Provides a diagram of a transcriptome microarray showing the expression profile for a therapeutic agent-sensitive and a therapeutic agent-resistant tumor.

[0035] FIG. 2: Provides a schematic diagram of the BLAST comparison of all publicly available data for colon, prostate and breast tissue.

### DETAILED DESCRIPTION

[0036] Transcriptome arrays and methods of use are provided herein. Transcriptome arrays containing nucleic acid molecules from diseased tissue transcripts arranged in an array format are described. The nucleic acid molecules on the array hybridize to complementary nucleic acid transcriptome sequences from a diseased tissue sample. A disease specific transcriptome is defined herein as a collection of coding and non-coding transcripts transcribed in a specific diseased tissue. Additional arrays are described herein that contain other biological molecules, such as polypeptides or antibodies, representative of transcripts from diseased tissue transcriptomes.

[0037] Thus, the arrays provided herein encompass nucleic acid arrays, polypeptide arrays, or antibody arrays. In this specification, unless the context demands otherwise, where specific embodiments are described with reference to nucleic acid arrays, it should be understood that corresponding protein arrays and antibody arrays are also contemplated. In such embodiments, the nucleic acids are replaced by polypeptides encoded by the transcripts or antibodies specific for the polypeptides.

[0038] The compositions and methods described herein may be understood more readily by reference to the following detailed description of specific embodiments. Although the compositions and methods have been described with reference to specific details of certain embodiments thereof, it is not intended that such details should be regarded as limitations upon the scope of the invention. The text of the references mentioned herein are hereby incorporated by reference in their entirety, including European patent applications EP 04105479.2, EP 04105482.6, EP 04105483.4, EP 04105484.2, EP 04105507.0, and EP 04105485.9 and U.S. provisional patent application 60/662,276 and 60/700,293.

[0039] It is well understood by those skilled in the art that cellular DNA in the form of genes is transcribed into RNA; coding RNA is translated into proteins; and RNA is optionally reverse-transcribed into cDNA. Preferably, the transcriptome array described herein contains all or substantially all of the RNA transcripts of the diseased tissue.

[0040] The disease specific transcriptome contains transcripts of known and unknown function and optionally includes proteins translated from coding RNA transcripts as an extension and reflection of gene transcription within the transcriptome. The disease specific transcriptome may change as the disease progresses or in response to external stimuli or influence such as chemotherapy or radiotherapy treatment.

[0041] As used herein, the term “transcript” means an RNA molecule that is derived through the process of transcription from a DNA or a cDNA template. Transcripts may also be represented by proteins translated from RNA transcripts or cDNA molecules that are reverse-transcribed from RNA transcripts.

[0042] As used herein, the term “gene product” means both RNA molecules derived through the process of transcription from a DNA or a cDNA template and polypeptide molecules that are translated from such RNA molecules.

[0043] As used herein, the term “transcriptome” means a collection of RNA transcripts transcribed in a specific tissue, whether coding or non-coding, and preferably contains all or substantially all of the RNA transcripts generated in the tissue. These transcripts include messenger RNAs (mRNA), alternatively spliced mRNAs, ribosomal RNA (rRNA), transfer RNAs (tRNAs) in addition to a large range of other transcripts, which are not translated into protein such as small nuclear RNAs (snRNAs), antisense molecules such as short interfering RNA (siRNA) and microRNA and other RNA transcripts of unknown function. The transcriptome also includes proteins translated from the RNA transcripts within the transcriptome, which is an extension and reflection of gene transcription within the transcriptome.

[0044] As used herein, the term “diseased tissue” means tissue derived from a particular organ or tissue type which has a particular class of disease associated with the tissue. (e.g. colorectal cancer, breast cancer, neurodegenerative disease, etc.). Diseased tissue may also refer to individual cell types such as epithelial cells, stromal cells or stem cells all derived from that diseased tissue. For example, diseased colorectal tissue is any colorectal tissue that has been diagnosed as having a disease or disorder such as cancer. In most embodiments of the present transcriptome array, no attempt is made to differentiate different types of cancer in the tissue, although in certain embodiments, differentiation of cancer type may be performed.

[0045] In addition, it is to be understood that in sampling diseased tissue, there may be a some normal, non-diseased tissue or cells that are sampled with the diseased tissue.

Nucleic Acids

[0046] The nucleic acid molecules, nucleic acid elements or polynucleotides composing the arrays provided herein may be any type of nucleic acid or nucleic acid analog, including without limitation, RNA, DNA, peptide nucleic acids, or mixtures and/or fragments thereof. As used herein the term “fragment” refers to a nucleotide sequence that is a part of a sequence such as those provided herein that retains sufficient nucleotide sequence to permit the fragment to maintain specificity and selectivity to the whole sequence from which it is derived. Fragments may be complementary to the whole sequence and retain the ability to selectively hybridize to the whole sequence. The nucleic acid molecules are isolated, cloned or synthetically produced. The nucleic acid elements may include vector sequences or may be substantially pure. The nucleic acid elements are capable of hybridizing, under conventional hybridization conditions, to complementary transcripts in a nucleic acid sample containing transcript-specific molecules or elements derived from a tissue sample. One of ordinary skill in the art may adjust hybridization factors to provide optimum hybridization and signal production for a given hybridization procedure and to provide the required resolution among different genes or genomic locations.

[0047] The following lists of transcripts provide sequences specific to a particular diseased tissue. The lists are summarized in Table 1 below. The term “gene list” as used in this table and throughout this specification means “nucleic acid transcript list” and includes both coding and non-coding regions.

TABLE 1

Summary of Sequence Listing Transcript Lists

Number of

| | | |
|---|---|---|
| Tissue/Gene List | Sequences | Sequence Listing Range |

| | | |
|---|---|---|
| Colorectal Sequences | | |
| Gene List A | 16,350 | SEQ ID NO: 1 to SEQ ID NO: 16,350 |
| Gene List B | 2,773 | SEQ ID NO: 16,351 to SEQ ID NO: 19,123 |
| Gene List C | 1,805 | SEQ ID NO: 19,124 to SEQ ID NO: 20,928 |
| Gene List D | 1,318 | SEQ ID NO: 20,929 to SEQ ID NO: 22,246 |
| Gene List E | 10,556 | SEQ ID NO: 22,247 to SEQ ID NO: 32,802 |
| Gene List F | 7,134 | SEQ ID NO: 32,803 to SEQ ID NO: 39,936 |
| Gene List G | 22,376 | SEQ ID NO: 39,937 to SEQ ID NO: 62,312 |
| Gene List H | 5,672 | SEQ ID NO: 62,313 to SEQ ID NO: 67,984 |
| Lung Sequences | | |
| Gene List I | 36,431 | SEQ ID NO: 67,985 to SEQ ID NO: 104,415 |
| Gene List J | 24 | SEQ ID NO: 104,416 to SEQ ID NO: 104,439 |
| Gene List K | 22 | SEQ ID NO: 104,440 to SEQ ID NO: 104,461 |
| Gene List L | 9,727 | SEQ ID NO: 104,462 to SEQ ID NO: 114,188 |
| Gene List M | 5,208 | SEQ ID NO: 114,189 to SEQ ID NO: 119,396 |
| Gene List N | 452 | SEQ ID NO: 119,397 to SEQ ID NO: 119,848 |
| Gene List O | 42,790 | SEQ ID NO: 119,849 to SEQ ID NO: 162,638 |
| Breast Sequences | | |
| Gene List P | 17,291 | SEQ ID NO: 162,639 to SEQ ID NO: 179,929 |
| Gene List Q | 3,278 | SEQ ID NO: 179,930 to SEQ ID NO: 183,207 |
| Gene List R | 6,915 | SEQ ID NO: 183,208 to SEQ ID NO: 190,122 |
| Gene List S | 4,857 | SEQ ID NO: 190,123 to SEQ ID NO: 194,979 |
| Gene List T | 34,141 | SEQ ID NO: 194,980 to SEQ ID NO: 229,120 |
| Gene List U | 3,911 | SEQ ID NO: 229,121 to SEQ ID NO: 233,031 |
| Gene List V | 16,666 | SEQ ID NO: 233,032 to SEQ ID NO: 249,697 |
| Liver Sequences | | |
| Gene List W | 24,744 | SEQ ID NO: 249,698 to SEQ ID NO: 274,441 |
| Gene List X | 13 | SEQ ID NO: 274,442 to SEQ ID NO: 274,454 |
| Gene List Y | 32 | SEQ ID NO: 274,455 to SEQ ID NO: 274,486 |
| Gene List Z | 6,565 | SEQ ID NO: 274,487 to SEQ ID NO: 281,051 |
| Gene List AA | 14,789 | SEQ ID NO: 281,052 to SEQ ID NO: 295,840 |
| Gene List BB | 11,851 | SEQ ID NO: 295,841 to SEQ ID NO: 307,691 |
| Gene List CC | 39,979 | SEQ ID NO: 307,692 to SEQ ID NO: 347,670 |
| Brain Sequences | | |
| Gene List DD | 33,275 | SEQ ID NO: 347,671 to SEQ ID NO: 380,945 |
| Gene List EE | 5 | SEQ ID NO: 380,946 to SEQ ID NO: 380,950 |
| Gene List FF | 341 | SEQ ID NO: 380,951 to SEQ ID NO: 381,291 |
| Gene List GG | 8,486 | SEQ ID NO: 381,292 to SEQ ID NO: 389,777 |
| Gene List HH | 19,081 | SEQ ID NO: 389,778 to SEQ ID NO: 408,858 |
| Gene List II | 21,845 | SEQ ID NO: 408,859 to SEQ ID NO: 430,703 |
| Gene List JJ | 53,293 | SEQ ID NO: 430,704 to SEQ ID NO: 483,996 |

[0048] The sequences in each of Gene Lists A-JJ are included with this specification on the enclosed CD-R and are incorporated herein by reference in their entirety.

Transcripts from Diseased Colorectal Tissue

Gene List A (SEQ ID NO:1 to SEQ ID NO:16,350)

[0049] A collection of 16,350 transcripts that have been previously identified as being expressed in colorectal tissue are provided herein.

[0050] Accordingly, in one embodiment, an array of nucleic acid molecules complementary to at least 4,000 of the nucleic acid molecules set forth in Gene List A is provided. In other embodiments, the array contains nucleic acid molecules complementary to at least 6,000, 8,000, 10,000, 12,000, 14,000 or 16,000 of the sequences set forth in Gene List A.

Gene List B (SEQ ID NO:16,351 to SEQ ID NO:19,123)

[0051] An assembly of 2,773 transcripts that do not hit against either publicly available expressed sequence tag (EST) libraries generated from colorectal cancer or annotated genes in Genbank are described. These genes are newly identified herein.

[0052] Accordingly, in one embodiment, an array containing nucleic acid molecules complementary to at least 1,000 of the nucleic acid molecules set forth in Gene List B is provided. In other embodiments, the array contains nucleic acid molecules complementary to at least 50, 100, 500, 1,000, 1,500, 2000, or 2500 of the sequences set forth in Gene List B.

Gene List C (SEQ ID NO:19,124 to SEQ ID NO:20,928)

[0053] A cDNA library has been generated from diseased human colorectal tissues, and 1,805 nucleotide sequences have been identified herein by high throughput sequencing, which have not previously been identified as being expressed in colorectal cancer tissue.

[0054] Accordingly, in one embodiment, an array of nucleic acid molecules complementary to at least 500 of the nucleic acid molecules set forth in Gene List C is provided. In other embodiments, the array contains nucleic acid molecules complementary to at least 50, 200, 500, 750, 1,000, 1,400, or 1,750 of sequences set forth in Gene List C.

Gene List D (SEQ ID NO:20,929 to SEQ ID NO:22,246)

[0055] Alternative pre-mRNA splicing is a major cellular process by which functionally diverse proteins can be generated from the primary transcript of a single gene, often in tissue specific patterns.

[0056] A collection of 1,318 nucleotide sequences that exist as significantly altered (spliced) forms of previously annotated genes or ESTs, which are expressed in colorectal cancer tissues, have been newly identified herein. Accordingly in one embodiment, an array containing nucleic acid molecules complementary to at least 500 of the nucleic acid molecules set forth in Gene List D is provided. In other embodiments, the array contains nucleic acid molecules complementary to at least 50, 100, 250, 500, 750, 1,000, or 1,250 of the sequences set forth in Gene List D.

Gene List E (SEQ ID NO:22,247 to SEQ ID NO:32,802)

[0057] A cDNA library has been generated from diseased human colorectal tissues, and 10,556 nucleotide sequences have been identified herein, which have not previously been identified as being expressed in colorectal cancer tissue.

[0058] Accordingly, in one embodiment, an array of nucleic acid molecules complementary to at least 500 of the nucleic acid molecules set forth in Gene List E is provided. In other embodiments, the array contains nucleic acid molecules complementary to at least 1,000, 2,000, 5,000, or 10,000 of sequences set forth in Gene List E.

Gene List F (SEQ ID NO:32,803 to SEQ ID NO:39,936)

[0059] A cDNA library has been generated from diseased human colorectal tissues, and 7,134 nucleotide sequences have been identified herein, which have not previously been identified as annotated genes.

[0060] Accordingly, in one embodiment, an array of nucleic acid molecules complementary to at least 500 of the nucleic acid molecules set forth in Gene List F is provided. In other embodiments, the array contains nucleic acid molecules complementary to at least 1,000, 2,500, 5,000, or 7,000 of sequences set forth in Gene List F.

Gene List G (SEQ ID NO:39,937 to SEQ ID NO:62,312)

[0061] A collection of 22,376 nucleotide sequences have been identified herein, which have not previously been identified as being expressed in colorectal cancer tissue.

[0062] Accordingly, in one embodiment, an array of nucleic acid molecules complementary to at least 4,000 of the nucleic acid molecules set forth in Gene List G is provided. In other embodiments, the array contains nucleic acid molecules complementary to at least 6,000, 8,000, 10,000, 12,000, 14,000, 16,000, or 19,000 of sequences set forth in Gene List G.

Gene List H (SEQ ID NO:62,313 to SEQ ID NO:67,984)

[0063] A collection of 5,672 nucleotide sequences have been newly identified herein that constitute antisense and corresponding reverse complement transcripts.

[0064] The inclusion of antisense transcripts and their corresponding sense transcripts is an important feature of the array. Generic commercially available arrays focus primarily on measuring sense protein coding transcripts. With the increasing interest in the role of endogenous antisense RNA transcripts in cancer and other diseases, antisense sequences within the colorectal transcriptome have now been identified.

[0065] Accordingly, in one embodiment, an array of nucleic acid molecules complementary to at least 2,000 of the nucleic acid molecules set forth in Gene List H is provided. In other embodiments, the array contains nucleic acid molecules complementary to at least 3,000, 4,000, or 5,000 of the sequences set forth in Gene List H.

Transcripts from Diseased Lung Tissue

Gene List I (SEQ ID NO:67,985 to SEQ ID NO:104,415)

[0066] A collection of 36,431 transcripts previously shown to have been implicated in lung cancer are provided herein.

[0067] Accordingly, in one embodiment, an array of nucleic acid molecules complementary to at least 4,000 of the nucleic acid molecules set forth in Gene List I is provided. In other embodiments, the array contains nucleic acid molecules complementary to at least 6,000, 8,000, 15,000, 20,000, 30,000, or 35,000 of the sequences set forth in Gene List I.

Gene List J (SEQ ID NO:104,416 to SEQ ID NO:104,439)

[0068] An assembly of 24 transcripts that do not hit against either publicly available EST libraries generated from lung cancer tissue or annotated genes in Genbank are described. These genes are newly identified herein.

[0069] Accordingly, in one embodiment, an array of nucleic acid molecules complementary to at least 5 of the nucleic acid molecules set forth in Gene List J is provided. In other embodiments, the array contains nucleic acid molecules complementary to at least 6, 10, 15, 18, 20 or 22 of the sequences set forth in Gene List J.

Gene List K (SEQ ID NO:104,440 to SEQ ID NO:104,461)

[0070] A collection of 22 expressed sequence tags identified by high throughput sequencing that have not previously been reported to be expressed in lung tissue have been identified herein.

[0071] Accordingly, in one embodiment, an array of nucleic acid molecules complementary to at least 5 of the nucleic acid molecules set forth in Gene List K is provided. In other embodiments, the array contains nucleic acid molecules complementary to at least 6, 10, 15, 18, or 20 of the sequences set forth in Gene List K.

Gene List L (SEQ ID NO:104,462 to SEQ ID NO:114,188)

[0072] A collection of 9,727 transcripts identified as containing sequences that exist as a significantly altered (spliced) form of previously annotated lung cancer-associated genes or ESTs have been newly identified herein.

[0073] Accordingly, in one embodiment, an array of nucleic acid molecules complementary to at least 3,000 of the nucleic acid molecules set forth in Gene List L is provided. In other embodiments, the array contains nucleic acid molecules complementary to at least 4,000, 5,000, 7,000, or 9,000 of the sequences set forth in Gene List L.

Gene List M (SEQ ID NO:114,189 to SEQ ID NO:119,396)

[0074] A collection of 5,208 annotated genes that have been identified as being expressed in diseased lung tissue has been newly identified herein.

[0075] Accordingly, in one embodiment, an array of nucleic acid molecules complementary to at least 2,500 of the nucleic acid molecules set forth in Gene List M is provided. In other embodiments, the array contains nucleic acid molecules complementary to at least 3,000, 4,000, or 5,000 of the sequences set forth in Gene List M.

Gene List N (SEQ ID NO:119,397 to SEQ ID NO:119,848)

[0076] A collection of 452 transcripts were identified herein as singlet nucleotide sequences, which are expressed in lung cancer tissue and which have not previously been identified as annotated genes.

[0077] Accordingly, in one embodiment, an array of nucleic acid molecules complementary to at least 200 of the nucleic acid molecules set forth in Gene List N is provided. In other embodiments, the array contains nucleic acid molecules complementary to at least 250, 300, 350 or 400 of the sequences set forth in Gene List N.

Gene List O (SEQ ID NO:119,849 to SEQ ID NO:162,638)

[0078] A collection of 42,790 transcripts that constitute antisense and corresponding reverse complement transcripts for sequences expressed in lung cancer tissue have been newly identified herein.

[0079] Accordingly, in one embodiment, an array of nucleic acid molecules complementary to at least 20,000 of the nucleic acid molecules set forth in Gene List O is provided. In other embodiments, the array contains nucleic acid molecules complementary to at least 25,000, 30,000, 35,000, or 40,000 of the sequences set forth in Gene List O.

Transcripts from Diseased Breast Tissue

Gene List P (SEQ ID NO:162,639 to SEQ ID NO:179,929)

[0080] A collection of 17,291 expressed sequence tags that have been previously shown to be expressed in breast cancer tissue are provided herein.

[0081] Accordingly, in one embodiment, an array of nucleic acid molecules complementary to at least 3,000 of the nucleic acid molecules set forth in Gene List P is provided. In other embodiments, the array contains nucleic acid molecules complementary to at least 4,000, 5,000, 7,000, 10,000, 12,000, 15,000, or 17,000 of the sequences set forth in Gene List P.

Gene List Q (SEQ ID NO:179,930 to SEQ ID NO:183,207)

[0082] An assembly of 3,278 transcripts that do not hit against either publicly available EST libraries generated from breast cancer tissue or annotated genes in Genbank are described. These genes are newly identified herein.

[0083] Accordingly, in one embodiment, an array of nucleic acid molecules complementary to at least 1,000 of the nucleic acid molecules set forth in Gene List Q is provided. In other embodiments, the array contains nucleic acid molecules complementary to at least 2,000 or 3,000 of the sequences set forth in Gene List Q.

Gene List R (SEQ ID NO:183,208 to SEQ ID NO:190,122)

[0084] An assembly of 6,915 transcripts identified by high throughput sequencing that have not previously been reported to be expressed in diseased breast tissue have been identified herein.

[0085] Accordingly, in one embodiment, an array of nucleic acid molecules complementary to at least 2,000 of the nucleic acid molecules set forth in Gene List R is provided. In other embodiments, the array contains nucleic acid molecules complementary to at least 4,000 or 6,000 of the sequences set forth in Gene List R.

Gene List S (SEQ ID NO:190,123 to SEQ ID NO:194,979)

[0086] An assembly of 4,857 transcripts identified as containing sequences that exist in diseased breast tissue as a significantly altered (spliced) form of previously annotated genes or ESTs have been newly identified herein.

[0087] Accordingly, in one embodiment, an array of nucleic acid molecules complementary to at least 1,000 of the nucleic acid molecules set forth in Gene List S is provided. In other embodiments, the array contains nucleic acid molecules complementary to at least 2,000 or 4,000 of the sequences set forth in Gene List S.

Gene List T (SEQ ID NO:194,980 to SEQ ID NO:229,120)

[0088] An assembly of 34,141 transcripts have been identified herein as being expressed in breast tissue. These transcripts were not previously confirmed as being expressed in breast cancer tissue.

[0089] Accordingly, in one embodiment, an array of nucleic acid molecules complementary to at least 10,000 of the nucleic acid molecules set forth in Gene List T is provided. In other embodiments, the array contains nucleic acid molecules complementary to at least 15,000, 20,000, 25,000, or 30,000 of the sequences set forth in Gene List T.

Gene List U (SEQ ID NO:229,121 to SEQ ID NO:233,031)

[0090] An assembly of 3,911 transcripts were identified herein as singlet nucleotide sequences, which are expressed in breast cancer tissue and which have not previously been identified as annotated genes.

[0091] Accordingly, in one embodiment, an array of nucleic acid molecules complementary to at least 1,000 of the nucleic acid molecules set forth in Gene List U is provided. In other embodiments, the array contains nucleic acid molecules complementary to at least 1,500, 2,000, 2,500 or 3,000 of the sequences set forth in Gene List U.

Gene List V (SEQ ID NO:233,032 to SEQ ID NO:249,697)

[0092] An assembly of 16,666 transcripts that constitute antisense and corresponding sense transcripts for sequences expressed in breast cancer tissue has been newly identified herein.

[0093] Accordingly, in one embodiment, an array of nucleic acid molecules complementary to at least 8,000 of the nucleic acid molecules set forth in Gene List V is provided. In other embodiments, the array contains nucleic acid molecules complementary to at least 10,000, 12,000, 14,000, or 16,000 of the sequences set forth in Gene List V.

Transcripts from Diseased Liver Tissue

Gene List W (SEQ ID NO:249,698 to SEQ ID NO:274,441)

[0094] An assembly of 24,744 transcripts that have previously been identified as being expressed in liver tissue associated with hepatitis are provided herein.

[0095] Accordingly, in one embodiment, an array of nucleic acid molecules complementary to at least 4,000 of the nucleic acid molecules set forth in Gene List W is provided. In other embodiments, the array contains nucleic acid molecules complementary to at least 6,000, 8,000, 10,000, 12,000, 14,000, 16,000, 19,000, or 21,000 of the sequences set forth in Gene List W.

Gene List X (SEQ ID NO:274,442 to SEQ ID NO:274,454)

[0096] An assembly of 13 transcripts that do not hit against either publicly available EST libraries generated from liver tissue associated with hepatitis or annotated genes in Genbank are described herein. These genes are newly identified herein.

[0097] Accordingly, in one embodiment, an array of nucleic acid molecules complementary to at least 8 of the nucleic acid molecules set forth in Gene List X is provided. In other embodiments, the array contains nucleic acid molecules complementary to at least 10 or 12 of the sequences set forth in Gene List X.

Gene List Y (SEQ ID NO:274,455 to SEQ ID NO:274,486)

[0098] An assembly of 32 transcripts previously identified by high throughput screening but not previously reported to be expressed in liver tissue associated with hepatitis have been identified herein.

[0099] Accordingly, in one embodiment, an array of nucleic acid molecules complementary to at least 15 of the nucleic acid molecules set forth in Gene List Y is provided. In other embodiments, the array contains nucleic acid molecules complementary to at least 20, 25, or 30 of the sequences set forth Gene List Y.

Gene List Z (SEQ ID NO:274,487 to SEQ ID NO:281,051)

[0100] An assembly of 6,565 transcripts that exist as significantly altered (spliced) forms of previously annotated genes or ESTs and are expressed in liver tissue associated with hepatitis have been identified herein.

[0101] Accordingly, in one embodiment, an array of nucleic acid molecules complementary to at least 3,000 of the nucleic acid molecules set forth in Gene List Z is provided. In other embodiments, the array contains nucleic acid molecules complementary to at least 4,000, 5,000, or 6,000 of the sequences set forth in Gene List Z.

Gene List AA (SEQ ID NO:281,052 to SEQ ID NO:295,840)

[0102] An assembly of 14,789 transcripts have been newly identified herein as being expressed in liver tissue associated with hepatitis.

[0103] Accordingly, in one embodiment, an array of nucleic acid molecules complementary to at least 8,000 of the nucleic acid molecules set forth in Gene List AA is provided. In other embodiments, the array contains nucleic acid molecules complementary to at least 8,000, 10,000, 12,000, or 14,000 of the sequences set forth in Gene List AA.

Gene List BB (SEQ ID NO:295,841 to SEQ ID NO:307,691)

[0104] An assembly of 11,851 transcripts have been identified herein as singlet nucleotide sequences, which are expressed in liver tissue associated with hepatitis and which have not previously been identified as annotated genes.

[0105] Accordingly, in one embodiment, an array of nucleic acid molecules complementary to at least 6,000 of the nucleic acid molecules set forth in Gene List BB is provided. In other embodiments, the array contains nucleic acid molecules complementary to at least 8,000 or 10,000 of the sequences set forth in Gene List BB.

Gene List CC (SEQ ID NO:307,692 to SEQ ID NO:347,670)

[0106] An assembly of 39,979 transcripts that constitute antisense and corresponding sense transcripts for sequences expressed in liver tissue associated with hepatitis have been newly identified herein.

[0107] Accordingly, in one embodiment, an array of nucleic acid molecules complementary to at least 20,000 of the nucleic acid molecules set forth in Gene List CC is provided. In other embodiments, the array contains nucleic acid molecules complementary to at least 25,000, 30,000 or 35,000 of the sequences set forth in Gene List CC.

Transcripts from Diseased Brain Tissue

Gene List DD (SEQ ID NO:347,671 to SEQ ID NO:380,945)

[0108] An assembly of 33,275 transcripts that have been previously identified as being expressed in brain tissue associated with neurodegenerative disease are provided herein.

[0109] Accordingly, in one embodiment, an array of nucleic acid molecules complementary to at least 15,000 of the nucleic acid molecules set forth in Gene List DD is provided. In other embodiments, the array contains nucleic acid molecules complementary to at least 20,000, 25,000 or 30,000 of the sequences set forth in Gene List DD.

Gene List EE (SEQ ID NO:380,946 to SEQ ID NO:380,950)

[0110] An assembly of five transcripts has been newly identified herein as containing sequences that do not hit against either publicly available EST libraries generated from brain tissue associated with neurodegenerative disease or annotated genes in Genbank. These genes are newly identified herein.

[0111] Accordingly, in one embodiment, an array of nucleic acid molecules complementary to at least three of the nucleic acid molecules set forth in Gene List EE is provided.

Gene List FF (SEQ ID NO:380,951 to SEQ ID NO:381,291)

[0112] An assembly of 341 transcripts have been identified herein by high throughput sequencing. These transcripts have not previously been reported to be expressed in brain tissue associated with neurodegenerative disease.

[0113] Accordingly, in one embodiment, an array of nucleic acid molecules complementary to at least 150 of the nucleic acid molecules set forth in Gene List FF is provided. In other embodiments, the array contains nucleic acid molecules complementary to at least 200 or 300 of the sequences set forth in Gene List FF.

Gene List GG (SEQ ID NO:381,292 to SEQ ID NO:389,777)

[0114] An assembly of 8,486 transcripts have been newly identified herein that exist as significantly altered (spliced) forms of previously annotated genes or ESTs and are expressed in brain tissue associated with neurodegenerative disease.

[0115] Accordingly, in one embodiment, an array of nucleic acid molecules complementary to at least 4,000 of the nucleic acid molecules set forth in Gene List GG is provided. In other embodiments, the array contains nucleic acid molecules complementary to at least 6,000 or 8,000 of the sequences set forth in Gene List GG.

Gene List HH (SEQ ID NO:389,778 to SEQ ID NO:408,858)

[0116] An assembly of 19,081 transcripts that have been newly identified herein as being expressed in brain tissue associated with neurodegenerative disease are provided.

[0117] Accordingly, in one embodiment, an array of nucleic acid molecules complementary to at least 8,000 of the nucleic acid molecules set forth in Gene List HH is provided. In other embodiments, the array contains nucleic acid molecules complementary to at least 12,000, 15,000, 17,000, or 19,000 of the sequences set forth in Gene List HH.

Gene List II (SEQ ID NO:408,859 to SEQ ID NO:430,703)

[0118] An assembly of 21,845 transcripts have been identified herein as singlet nucleotide sequences, which are expressed in brain tissue associated with neurodegenerative disease and which have not previously been identified as annotated genes.

[0119] Accordingly, in one embodiment, an array of nucleic acid molecules complementary to at least 10,000 of the nucleic acid molecules set forth in Gene List II is provided. In other embodiments, the array contains nucleic acid molecules complementary to at least 12,000, 15,000, 17,000, or 20,000 of the sequences set forth in Gene List II.

Gene List JJ (SEQ ID NO:430,704 to SEQ ID NO:483,996)

[0120] An assembly of 53,293 transcripts that constitute antisense and corresponding sense transcripts for sequences expressed in brain tissue associated with neurodegenerative disease have been newly identified herein.

[0121] Accordingly, in one embodiment, an array of nucleic acid molecules complementary to at least 30,000 of the nucleic acid molecules set forth in Gene List JJ is provided. In other embodiments, the array contains nucleic acid molecules complementary to at least 35,000, 40,000, 45,000 or 50,000 of the sequences set forth in Gene List JJ.

Arrays

[0122] As described above, the lists of transcripts provided herein may be used to prepare diseased tissue transcriptome arrays using nucleic acid molecules complementary to the sequences provided herein. The terms “array” and “microarray” are used interchangeably herein. The latter term is frequently used by those skilled in the art to refer to a type of miniature array associated with a computer chip. As used herein, the term “tissue specific element” refers to a biological molecule on the array that binds to a transcript-specific element from a diseased target sample and includes nucleic acid, polypeptide and antibody molecules.

[0123] Gene Lists A-H provide the sequences of transcripts associated with diseased colorectal tissue. In one embodiment, an array containing at least one nucleic acid molecule complementary to diseased colorectal tissue transcripts provided in Gene List B, Gene List C, Gene List D, Gene List E, Gene List F, Gene List G, Gene List H, or combinations thereof, is provided. In another embodiment, arrays containing nucleic acid molecules complementary to at least 70%, for example at least 80% or at least 90% of the diseased colorectal tissue transcripts provided in Gene List B, Gene List C, Gene List D, Gene List E, Gene List F, Gene List G, Gene List H, or combinations thereof, are provided. In another embodiment, arrays containing nucleic acid molecules complementary to at least 70%, for example at least 80% or at least 90% of the diseased colorectal tissue transcripts provided in each of Gene List B, Gene List C, Gene List D, Gene List E, Gene List F, Gene List G, and Gene List H, are provided.

[0124] Gene Lists I-O provide the sequences of transcripts associated with diseased lung tissue. In one embodiment, an array containing nucleic acid molecules complementary to diseased lung tissue transcripts provided in Gene List J, Gene List K, Gene List L, Gene List M, Gene List N, Gene List O, or combinations thereof, are provided. In another embodiment, an array containing diseased lung tissue nucleic acid molecules complementary to at least 70%, for example at least 80% or at least 90% of the transcripts provided in Gene List J, Gene List K, Gene List L, Gene List M, Gene List N, Gene List O, or combinations thereof, are provided. In another embodiment, an array containing diseased lung tissue nucleic acid molecules complementary to at least 70%, for example at least 80% or at least 90% of the transcripts provided in Gene List J, Gene List K, Gene List L, Gene List M, Gene List N, Gene List O, are provided.

[0125] Gene Lists P-V provide the sequences of transcripts associated with diseased breast tissue. In one embodiment, arrays containing nucleic acid molecules complementary to diseased breast tissue transcripts provided in Gene List Q, Gene List R, Gene List S, Gene List T, Gene List U, Gene List V, or combinations thereof, are provided. In other embodiments, arrays comprising nucleic acid molecules complementary to at least 70%, for example at least 80% or at least 90% of the diseased breast tissue transcripts provided in Gene List Q, Gene List R, Gene List S, Gene List T, Gene List U, Gene List V, or combinations thereof, are provided. In another embodiment, arrays comprising nucleic acid molecules complementary to at least 70%, for example at least 80% or at least 90% of the diseased breast tissue transcripts provided in Gene List Q, Gene List R, Gene List S, Gene List T, Gene List U, Gene List V, are provided.

[0126] Gene Lists W-CC provide the sequences of transcripts associated with diseased liver tissue. In one embodiment, arrays containing nucleic acid molecules complementary to diseased liver tissue transcripts provided in Gene List X, Gene List Y, Gene List Z, Gene List AA, Gene List BB, Gene List CC, or combinations thereof are provided. In other embodiments, arrays containing nucleic acid molecules complementary to at least 70%, for example at least 80% or at least 90% of the diseased liver tissue transcripts provided in Gene List X, Gene List Y, Gene List Z, Gene List AA, Gene List BB, Gene List CC, or combinations thereof are provided. In another embodiment, arrays containing nucleic acid molecules complementary to at least 70%, for example at least 80% or at least 90% of the diseased liver tissue transcripts provided in Gene List X, Gene List Y, Gene List Z, Gene List AA, Gene List BB, Gene List CC, are provided.

[0127] Gene Lists DD-JJ provide the sequences of transcripts associated with diseased brain tissue. In one embodiment, arrays containing nucleic acid molecules complementary to diseased brain tissue transcripts provided in Gene List EE, Gene List FF, Gene List GG, Gene List HH, Gene List II, Gene List JJ, or combinations thereof, are provided. In other embodiments, arrays containing nucleic acid molecules complementary to at least 70%, for example at least 80% or at least 90% of the diseased brain tissue transcripts provided in Gene List EE, Gene List FF, Gene List GG, Gene List HH, Gene List II, Gene List JJ, or combinations thereof, are provided. In another embodiment, arrays containing nucleic acid molecules complementary to at least 70%, for example at least 80% or at least 90% of the diseased brain tissue transcripts provided in Gene List EE, Gene List FF, Gene List GG, Gene List HH, Gene List II, Gene List JJ, are provided.

[0128] In another embodiment, an array containing nucleic acid molecules complementary to the nucleic acid sequences provided in Gene List A-H, J-O, and Q-V from two or more different cancer tissues provides an array directed to multiple types of cancer. In other embodiments, arrays comprising nucleic acid molecules complementary to at least 70%, for example at least 80% or at least 90% of the transcripts provided in Gene List A-H, J-O, and Q-V and combinations thereof are also provided.

[0129] Preferably, the array in each of the embodiments described herein contains one or more of the nucleic acid molecules newly identified herein or combinations of the nucleic acid molecules newly identified herein. Combinations containing newly identified nucleic acid molecules for a particular disease, type of disease, or broad range of diseases are included.

Expression

[0130] To obtain expression of nucleic acid sequences encoding proteins, the sequences are incorporated in a vector having one or more control sequences operably linked to the nucleic acid to control its expression. The vectors optionally include other sequences such as promoters or enhancers to drive the expression of the inserted nucleic acid, nucleic acid sequences so that the peptide is produced as a fusion and/or nucleic acid encoding secretion signals so that the polypeptide produced in the host cell is secreted from the cell.

[0131] In another aspect of the invention, there is provided a vector containing an isolated polynucleotide of an aspect of the invention.

[0132] In yet another aspect of the invention, there is provided a host cell containing a vector of an aspect of the invention.

[0133] Peptides are obtained by transforming the vectors incorporating specific nucleic acid sequences into host cells in which the vector is functional, culturing the host cells so that the peptide is produced, and recovering the peptide from the host cells or the surrounding medium.

[0134] Thus, a method of making a polypeptide is included within the scope of the present invention. The method includes expression of the polypeptide from a nucleic acid molecule encoding the polypeptide. This may conveniently be achieved by growing a host cell in a culture medium containing such a vector under appropriate conditions that cause or allow expression of the polypeptide.

Vectors and Host Cells

[0135] Suitable vectors can be chosen or constructed that contain appropriate regulatory sequences, including, but not limited to, promoter sequences, terminator fragments, polyadenylation sequences, enhancer sequences, marker genes and other sequences as appropriate.

[0136] Vectors may be plasmids, viral e.g. phage, or phagemid, as appropriate. For further details see, for example, MOLECULAR CLONING: A LABORATORY MANUAL: 2nd edition, Sambrook et al., 1989, Cold Spring Harbor Laboratory Press. Many known techniques and protocols for manipulation of nucleic acid, for example in preparation of nucleic acid constructs, mutagenesis, sequencing, introduction of DNA into cells and gene expression, and analysis of proteins, are described in detail in CURRENT PROTOCOLS IN MOLECULAR BIOLOGY, Ausubel et al. eds., John Wiley & Sons, 1992.

[0137] Systems for the cloning and expression of a polypeptide in a variety of different host cells are well known. Suitable host cells include bacteria, eukaryotic cells such as mammalian and yeast, and baculovirus systems.

[0138] Thus, a further aspect of the present invention provides a host cell containing heterologous nucleic acid as disclosed herein.

Array Manufacture

[0139] Polynucleotides are used in the design and construction of the transcriptome arrays described herein. In one embodiment, nucleic acid elements are arranged to produce a single transcriptome array, although the array may contain nucleic acid elements corresponding to a plurality of transcriptomes if desired. The transcriptomes may include a plurality of diseased tissue transcripts from one disease or a plurality of diseases. Disease-specific arrays contain transcripts that are transcribed in one given disease setting.

[0140] For example, in colorectal cancer, these transcripts may be transcribed in a range of cell types found in the microenvironment of colorectal tumor cells and may include, for example, stromal cells, epithelial cells, lymphocytes, endothelial cells, stem cells, etc. In another embodiment, pre-malignant or malignant cells alter the expression of transcripts within surrounding cells (such as stromal, endothelial or lymphoid cells found in the microenvironment of the tumor) through physical interaction or secretion of specific proteins, and thereby produce transcripts characteristic of colorectal cancer, which are contained on the disease specific array. Furthermore, when utilizing disease specific arrays as tools to identify genetic signatures that are diagnostic, prognostic or predictive, the actual signature may include transcripts that are derived from some or all of these individual cell populations.

[0141] The arrays provided herein may be used for any suitable purpose, such as, but not limited to, diagnosis, prognosis, drug therapy, drug screening, and the like. For a given array, each nucleic acid element may be a whole sequence or a sequence fragmented into different lengths. It is not necessary that all fragments constituting a whole sequence be present on the array.

[0142] In one embodiment, tissue-specific nucleic acid elements representative of the transcripts and transcript fragments are immobilized on an array at a plurality of physically distinct locations using nucleic acid immobilization or binding techniques well known in the art. The fragments at several physically distinct locations may together compose an entire transcript or discreet portions of the transcript. The fragments may be complementary to contiguous portions of a transcript or discontiguous portions of a transcript. Hybridization of a nucleic acid molecule from a target sample to the fragments on the array is indicative of the presence of the target transcript in the sample. Hybridization and detection of hybridization are performed by routine detection methods well known to those skilled in the art and described in more detail below.

[0143] In one embodiment, multiple probes are used that distinguish a target sequence from other nucleic acid sequences in the diseased tissue sample. In some embodiments, at least 2% of a target sequence is represented by the combination of probes on an array. In further embodiments, at least 5%, at least 10%, at least 20%, at least 30%, at least 40%, at least 50%, at least 60%, at least 70%, at least 80%, or at least 90% of a target sequence is represented on an array. Alternatively, at least 60% of a sequence from Gene List A to Gene List JJ is represented by the combination of probes on an array where the sequence is indicative of a larger target sequence or transcript. In further embodiments, at least 70%, at least 80%, or at least 90%, of a transcript from Gene Lists A to Gene List JJ is represented by the combination of probes on an array. Hybridization of nucleic acid fragments in the sample to those on the array is representative of the presence of the full transcript in the tissue sample.

[0144] In another embodiment, a nucleic acid element corresponding to a whole transcript or fragment of a whole transcript is immobilized on an array at only one physically distinct location in a “spotted array” format. Multiple copies of the specific nucleic acid element may be bound to the array substrate at the discreet location. Preferably, this type of “spotted array” includes one or more of the nucleic acid molecules newly identified herein.

[0145] As mentioned above, the array preferably contains one or more nucleic acid elements corresponding to the transcript-specific elements provided in Gene List A-JJ or fragments thereof. As mentioned above, arrays specific for certain diseases, such as a specific cancer, can be designed to contain all or a predetermined percentage of the transcriptome for that particular disease. For example, in one embodiment, the array may include all or a select subset of the nucleic acid sequences set forth in the Gene Lists provided above associated with a particular disease, such as colon cancer (Gene Lists A-H). In another embodiment, the array can include transcriptomes such as all or a select subset of the nucleic acid sequences set forth in the Gene Lists provided above associated with a general type of disease such as cancer (Gene Lists A-V). In yet another embodiment, the array can include transcriptomes such as all or a select subset of the nucleic acid sequences set forth in the Gene Lists provided above associated with a particular type of organ and disease such as liver tissue associated with hepatitis (Gene Lists W-CC) or brain tissue associated with neurodegenerative disease (Gene Lists DD-JJ).

[0146] In another embodiment, the array includes nucleic acid elements corresponding to at least 50% of a given transcript-specific element provided in Gene Lists A-JJ. In other embodiments, the array includes nucleic acid elements corresponding to at least 60%, for example at least 70%, at least 80% or greater than 90% of a given transcript-specific element provided in Gene List A-JJ. Hybridization of a target transcript-specific element from a diseased tissue sample to the corresponding nucleic acid element on the array is indicative of the presence of the target gene in the sample. Other nucleic acid elements or fragments thereof that correspond to other transcripts provided in Gene Lists A-JJ may be localized to other individual physically distinct locations on the array.

[0147] One of skill in the art will appreciate that nucleic acid elements on a given array are complementary to the transcript-specific sequences in a given target sample. Arrays containing the native sequences may also be designed to identify the presence of antisense molecules in a target sample. Endogenous antisense RNA transcripts are of interest because recent literature has implicated endogenous antisense in cancer and other diseases.

[0148] In one embodiment, the array is an array of nucleic acid elements representative of a diseased colorectal tissue transcriptome, diseased lung tissue transcriptome or diseased breast tissue transcriptome. In such an array it is preferred that more than 75%, 80%, 90%, 95%, or 98% of the total number of transcripts transcribed in a diseased colorectal, lung or breast tissue transcriptome, are present respectively. In some embodiments, the remaining nucleic acid elements are control elements.

[0149] The arrays provided herein for use in the assays described herein are constructed using suitable techniques known in the art. See, for example, U.S. Pat. Nos. 5,486,452; 5,830,645; 5,807,552; 5,800,992 and 5,445,934. In each array, individual nucleic acid elements may appear only once or may be replicated. The arrays may optionally also include control nucleic acid elements.

[0150] Any suitable substrate can be used as the solid phase to which the nucleic acid elements are immobilized or bound. For example, the substrate can be glass, plastics, metal, a metal-coated substrate or a filter of any material. The substrate surface may be of any suitable configuration. For example the surface may be planar or may have ridges or grooves to separate the nucleic acid elements immobilized on the substrate. In an alternative embodiment, the nucleic acids are attached to beads, which are separately identifiable. The nucleic acid elements are attached to the substrate in any suitable manner that makes them available for hybridization, including covalent or non-covalent binding.

[0151] In another embodiment, the polynucleotide or protein molecules in the transcriptome may be grouped on the array by whether the expression of a transcript correlates with sensitivity or resistance to a particular therapeutic agent. Such groupings provide regions on the array where a collection of transcripts is indicative of whether an individual with a particular array profile will be responsive or unresponsive to a particular therapeutic agent (for example see FIG. 1).

Diseased Tissue Sample

[0152] Any suitable target tissue or cell may be used as the diseased tissue sample in the methods described herein. It will be understood by those skilled in the art that the term “diseased tissue sample” includes abnormal samples, samples suspected of being diseased, and normal samples that are analyzed as part of a routine screening examination.

[0153] The diseased tissue sample is preferably processed to obtain one or more transcript-specific elements, which are then combined with the array to allow hybridization and detection of transcript-specific elements bound to the array. The term “transcript-specific element” as used herein, includes any suitable nucleic acid derived from an RNA transcript in the sample, such as DNA or RNA. The nucleic acid derived from the RNA transcript may be a cDNA reverse-transcribed from an mRNA, an RNA transcribed from such cDNA, a DNA amplified from the cDNA, an RNA transcribed from the amplified DNA, etc. Where it is of interest to determine alterations in the copy number of a gene, genomic DNA is preferably utilized. Alternatively, where expression levels of a transcript or transcripts are to be detected, RNA or cDNA is preferably used. For example, in order to quantify expression, the transcript-specific element may be any type of transcribed RNA molecule such as messenger RNA (mRNA), alternatively spliced mRNA, ribosomal RNA (rRNA), transfer RNA (tRNA), and a large range of other transcripts which are not translated into protein, such as small nuclear RNA (snRNA), and antisense molecules such as siRNA and microRNA. The transcript-specific element may also be a nucleic acid derived from RNA.

[0154] A person of ordinary skill in the art will select the appropriate diseased target cell or tissue depending on the purpose of the method. For example, in methods to identify transcripts associated with a particular pathological condition, any biological sample or cell or tissue known to display or express symptoms of the pathological condition may be used.

[0155] The arrays described herein are useful for identifying transcripts that are differentially induced in cancers. In such cases the target cells may be tumor cells, for example colon cancer cells or stomach cancer cells. The target cells are derived from any tissue source, including human and animal tissue, such as, but not limited to, a newly obtained sample, a frozen sample, a biopsy sample, a sample of bodily fluid, a blood sample, preserved tissue such as a paraffin-embedded fixed tissue sample (i.e., a tissue block), or cell culture.

[0156] For diagnosis, the diseased tissue test sample is preferably derived from a biological sample obtained from an individual suspected of being afflicted with a disease. The tissue sample ideally corresponds to and is combined with the array that contains a substantial portion of one or more complete transcriptomes from the same tissue. The term “substantial portion” is defined herein as approximately greater than 50%, 75%, 80%, 90%, 95%, or 98% of a complete transcriptome. For example, for a diagnosis of lung cancer, transcript-specific elements from a lung tissue sample is applied to an array containing all or a substantial portion of a complete transcriptome for diseased lung tissue.

[0157] The population of transcript-specific elements may be obtained from the diseased target tissues or cells using any suitable nucleic acid separation or purification process known in the art. For example, commercially available kits for nucleic acid separation, such as the QIAAMP® tissue kit for DNA isolation from QIAGEN®, (Alameda, Calif.) are useful in the methods described herein. In addition, methods of isolation and purification of nucleic acids are described in Chapter 3 of LABORATORY TECHNIQUES IN BIOCHEMISTRY AND MOLECULAR BIOLOGY: HYBRIDIZATION WITH NUCLEIC ACID PROBES, PART I. THEORY AND NUCLEIC ACID PREPARATION, P. Tijssen, ed. Elsevier, N.Y. (1993).

[0158] Depending on the sample size and method of isolation, the transcript-specific elements obtained may be used with or without amplification. Suitable amplification methods include, but are not limited to, polymerase chain reaction (PCR) (Innis, et al., PCR PROTOCOLS: A GUIDE TO METHODS AND APPLICATION, Academic Press, Inc. San Diego, (1990)), ligase chain reaction (LCR) (see Wu and Wallace, Genomics, 4:560 (1989), Landegren, et al., Science, 241:1077 (1988) and Barringer, et al., Gene, 89:117 (1990)), transcription amplification (Kwoh, et al., Proc. Natl. Acad. Sci. USA, 86:1173 (1989)), and self-sustained sequence replication (Guatelli, et al., Proc. Nat. Acad. Sci. USA, 87:1874 (1990)). Details relating to quantitative PCR are provided in PCR PROTOCOLS: A GUIDE TO METHODS AND APPLICATIONS, Innis et al., Academic Press, Inc. N.Y., (1990).

[0159] In certain embodiments, only the presence or absence of a particular transcript-specific element need be detected. In such cases, the detection of a hybridization signal is indicative of the presence of the transcript-specific elements in the sample. In other embodiments, it may be desired to quantify the expression of one or more transcript-specific elements in a sample. In such cases, the concentration of transcript-specific elements in the sample is proportional to the detected hybridization signal. The skilled person will understand that the proportionality need not be strict (e.g., a doubling in transcription rate resulting in a doubling in mRNA transcript and a doubling in hybridization signal). A more relaxed proportionality, for example, where a 10-fold difference in concentration of the target mRNA results in a 5 to 15-fold difference in hybridization intensity may be acceptable. Where more precise quantification is required appropriate controls can be run to correct for variations introduced in sample preparation and hybridization.

Hybridization

[0160] In the methods provided herein, the transcript-specific elements from a diseased tissue sample are hybridized to the array under conditions selected to provide a suitable degree of stringency. The skilled person is well aware of techniques for varying hybridization conditions in order to select the most appropriate degree of stringency for a particular sample. For example, using a non-stringent wash buffer (such as 6×SSPE, 0.01% Tween-20) and a stringent buffer (such as 100 mM MES, 0.1M [Na⁺], 0.01% Tween-20) a person or ordinary skill in the art can alter the number of respective washes (typically 0-20), the wash temperature (typically 15-50° C.) and hybridization temperature (typically 15-50° C.) to achieve optimal hybridization. Methods of optimizing hybridization conditions are well known to those of skill in the art (see, e.g., LABORATORY TECHNIQUES IN BIOCHEMISTRY AND MOLECULAR BIOLOGY, Vol. 24: Hybridization With Nucleic Acid Probes, P. Tijssen, ed. Elsevier, N.Y., (1993)).

[0161] In one embodiment, hybridization is performed at low stringency to eliminate mismatched hybrid duplexes with successive washes performed at increasingly higher stringency until a desired level of hybridization specificity is obtained. Hybridization specificity may be evaluated by comparison of hybridization to the gene specific elements with hybridization to various controls that can be present.

Labelling and Detection

[0162] The transcript-specific elements hybridized to the nucleic acid elements of the array provided herein are preferably detected by detecting one or more labels attached to the sample transcript-specific elements derived from the diseased tissue sample.

[0163] The labels may be incorporated before, during or after hybridization by any suitable means of attaching labels to nucleic acids known in the art. Suitable means may include addition of a label directly to the original transcript-specific element of the sample (e.g., mRNA, polyA mRNA, cDNA, etc.) or to an amplification product during or after amplification of the transcript-specific element of the sample, e.g. using labelled primers or labelled nucleotides.

[0164] Labels suitable for use in the methods described herein include, but are not limited to, biotin for staining with labelled streptavidin conjugate, magnetic beads (e.g., Dynabeads™), fluorescent dyes (e.g., fluorescein, Texas red, rhodamine, green fluorescent protein, and the like), radiolabels (e.g., ³H, ¹²⁵I, ³⁵S, ¹⁴C, or ³²P), enzymes (e.g., horse radish peroxidase, alkaline phosphatase and others commonly used in an ELISA), and colorimetric labels such as colloidal gold or colored glass or plastic (e.g., polystyrene, polypropylene, latex, etc.) beads.

[0165] Depending on the choice of label, the skilled person will be able to choose suitable means for detection of the label well known in the art. For a detailed review of methods of labelling nucleic acids and detecting labelled hybridized nucleic acids see LABORATORY TECHNIQUES IN BIOCHEMISTRY AND MOLECULAR BIOLOGY, Vol. 24: Hybridization With Nucleic Acid Probes, P. Tijssen, ed. Elsevier, N.Y., (1993).

Protein Arrays

[0166] In another embodiment, protein arrays are designed and constructed. As used herein, the terms “protein” and “polypeptide” are interchangeable. Tissue-specific elements in these arrays may include proteins, peptides, antibodies, peptide-nucleic acids and the like. Antibodies generated to the encoded polypeptide molecules of the diseased transcriptome may be immobilized on the array in discreet locations and conjugated to polypeptides conjugated with detectable labels specific to the antibodies. A protein isolate from a target sample may be contacted with the labelled array and any displacement of the labelled protein from the immobilized antibody will be visible by a loss of the detectable label in that discreet location on the array. Profiles of protein displacement on the array may be correlated with the responsiveness or unresponsiveness of an individual expressing the array profile to a specific therapeutic agent.

[0167] Alternatively, the protein arrays may contain encoded polypeptide molecules of the diseased transcriptome. The polypeptide molecules may be affixed in discreet locations on the transcriptome protein array and detected with antibodies isolated from an individual expressing the diseased transcriptome.

[0168] Antibodies can be polyclonal, or more preferably, monoclonal. An intact antibody, or a fragment thereof (e.g., Fab or F(ab′)₂) can be used. The term “labelled”, with regard to the probe or antibody, is intended to encompass direct labelling of the probe or antibody by coupling (i.e., physically linking) a detectable substance to the probe or antibody, as well as indirect labelling of the probe or antibody by reactivity with another reagent that is directly labelled. Examples of indirect labelling include detection of a primary antibody using a fluorescently labelled secondary antibody and end-labelling of a DNA probe with biotin such that it can be detected with fluorescently-labelled streptavidin. The term “biological sample” is intended to include tissues, cells and biological fluids isolated from a subject, as well as tissues, cells and fluids present within a subject. That is, the detection method can be used to detect RNA, protein, or genomic DNA in a biological sample in vitro as well as in vivo. For example, in vitro techniques for detection of RNA include Northern hybridizations and in situ hybridizations. In vitro techniques for detection of protein include enzyme linked immunosorbent assays (ELISAs), Western blots, immunoprecipitations, and immunofluorescence. In vitro techniques for detection of genomic DNA include Southern hybridizations. Furthermore, in vivo techniques for detection of protein include introducing into a subject a labelled antibody. For example, the antibody can be labelled with a radioactive marker whose presence and location in a subject can be detected by standard imaging techniques.

Kits

[0169] Kits for detecting the presence of or quantifying transcript-specific elements in a diseased tissue sample are also provided herein. For example, the kit can contain an array of one or more transcriptomes from one or more diseased tissues. The molecules on the array may be polynucleotide, polypeptide or antibody molecules as described herein. The kit optionally also include a detectable label or a labelled compound or agent capable of detecting expression of a gene product in a biological sample and the necessary reagents for labelling the sample and affecting hybridization to complementary sequences on the array. The kit optionally also include means for determining the amount of transcript in the sample, such as a colorimetric chart or device.

[0170] More than one array may be included in the kit wherein each array corresponds to a tissue afflicted with different diseases and wherein each array contains a plurality of transcriptomes corresponding to a tissue afflicted with a disease. The compound or agent can be packaged in a suitable container. The kit can further include instructions for using the kit to detect protein or nucleic acid.

Methods of Use for Predictive Medicine

[0171] Methods of using the arrays described above in the field of predictive medicine are provided. This field includes diagnostic assays, prognostic assays, predictive assays, pharmacogenomics, and the monitoring of clinical trials for different diseases.

[0172] The term “disease” or “disease state” includes all diseases which result or could potentially cause a change of the small molecule profile of a cell, cellular compartment, or organelle in an organism afflicted with the disease. Such diseases may be grouped into three main categories: neoplastic disease, inflammatory disease, and degenerative disease.

[0173] Examples of diseases include, but are not limited to, metabolic diseases (e.g., obesity, cachexia, diabetes, anorexia, etc.), cardiovascular diseases (e.g., atherosclerosis, ischemia/reperfusion, hypertension, myocardial infarction, restenosis, cardiomyopathies, arterial inflammation, etc.), immunological disorders (e.g., chronic inflammatory diseases and disorders, such as Crohn's disease, inflammatory bowel disease, reactive arthritis, rheumatoid arthritis, osteoarthritis, including Lyme disease, insulin-dependent diabetes, organ-specific autoimmunity, including multiple sclerosis, Hashimoto's thyroiditis and Grave's disease, contact dermatitis, psoriasis, graft rejection, graft versus host disease, sarcoidosis, atopic conditions, such as asthma and allergy, including allergic rhinitis, gastrointestinal allergies, including food allergies, eosinophilia, conjunctivitis, glomerular nephritis, certain pathogen susceptibilities such as helminthic (e.g., leishmaniasis) and certain viral infections, including HIV, and bacterial infections, including tuberculosis and lepromatous leprosy, etc.), myopathies (e.g. polymyositis, muscular dystrophy, central core disease, centronuclear (myotubular) myopathy, myotonia congenita, nemaline myopathy, paramyotonia congenita, periodic paralysis, mitochondrial myopathies, etc.), nervous system disorders (e.g., neuropathies, Alzheimer's disease, Parkinson's disease, Huntington's disease, amyotropic lateral sclerosis, motor neuron disease, traumatic nerve injury, multiple sclerosis, acute disseminated encephalomyelitis, acute necrotizing hemorrhagic leukoencephalitis, dysmyelination disease, mitochondrial disease, migrainous disorder, bacterial infection, fungal infection, stroke, aging, dementia, peripheral nervous system diseases and mental disorders such as depression and schizophrenia, etc.), oncological disorders (e.g., leukemia, brain cancer, prostate cancer, liver cancer, ovarian cancer, stomach cancer, colorectal cancer, throat cancer, breast cancer, skin cancer, melanoma, lung cancer, sarcoma, cervical cancer, testicular cancer, bladder cancer, endocrine cancer, endometrial cancer, esophageal cancer, glioma, lymphoma, neuroblastoma, osteosarcoma, pancreatic cancer, pituitary cancer, renal cancer, and the like) and ophthalmic diseases (e.g. retinitis pigmentosum and macular degeneration). The term also includes disorders, which result from oxidative stress, inherited cancer syndromes, and metabolic diseases known and unknown.

[0174] In general, the methods of use for predictive medicine are performed as follows: transcript-specific elements from a diseased target cell or tissue or a cell or tissue suspected of a pathological condition are combined with the array described herein and are incubated for a sufficient amount of time under conditions that allow hybridization of the transcript-specific elements to the nucleic acid molecules of the array, and hybridization is detected; detection of hybridization indicates the presence of diseased tissue in the sample or a pattern of transcript expression is analyzed and compared with a reference pattern of transcript-specific element expression from a reference sample to provide information about the sample concerning diagnosis, prognosis, drug screening, resistance, choice of therapy, and the like, as described in more detail below.

Diagnostic Assays

[0175] Diagnostic assays utilizing the arrays described herein are provided for determining protein and/or nucleic acid expression and activity in a biological sample (e.g., blood, serum, cells, tissue), to determine whether an individual is afflicted with a disease or disorder or is presymptomatic and at risk of developing a disease or disorder associated with aberrant protein, nucleic acid expression or activity. Early diagnosis will facilitate treatment and enhance the success of therapy and may allow a physician to prophylactically treat an individual even prior to onset of symptoms of the disease or disorder.

[0176] The arrays described herein may also be used to identify nucleic acid molecules that are differentially expressed in pathological conditions, such as pathological conditions of a colorectal tissue, lung tissue, breast tissue, liver tissue, or brain tissue.

[0177] An exemplary method for detecting the presence or absence of an RNA transcript or gene product in a biological sample involves obtaining a biological sample, which contains nucleic acid elements, from a test subject and contacting the biological sample with a compound or an agent capable of detecting protein or nucleic acid such that the presence of a transcript that hybridizes to an array described herein is detected in the biological sample. An agent for detecting RNA or genomic DNA is preferably a labelled nucleic acid probe capable of hybridizing to RNA or genomic DNA from the sample. The nucleic acid probe can be, for example, a full-length nucleic acid or a portion thereof, such as an oligonucleotide of at least 11, 15, 30, 50, 100, 250, 500, 1,000 or greater nucleotides in length and sufficient to specifically hybridize under stringent conditions to RNA or genomic DNA.

[0178] The biological sample is combined with the array to detect transcript-specific elements in the biological sample. In one embodiment, the biological sample contains protein molecules from the test subject. Alternatively, the biological sample contains nucleic acid elements from the test subject such as RNA molecules or genomic DNA molecules. A preferred biological sample is a biological fluid (e.g., serum), cell sample, or tissue biopsy sample isolated by conventional means, such as needle biopsy, from a subject.

[0179] The arrays may also be used to identify mutations in a gene that cause production of transcripts present in the transcriptome of diseased tissue. Thus, the invention provides a method for identifying a disease or disorder associated with aberrant RNA expression or activity in which a test sample is obtained from a subject and protein or nucleic acid (e.g., RNA, genomic DNA) is detected, wherein the presence of protein or nucleic acid is diagnostic for a subject having or at risk of developing a disease or disorder associated with aberrant gene expression or activity.

[0180] The diagnostic assay provides a method of identifying one or more transcript-specific elements in the sample associated with a predisposition to a pathological condition (such as an early stage cancerous condition that is presymptomatic and undetectable by any other means), or the actual presence of a pathological condition. If the sample hybridization pattern, or pattern of expression, is compared with a reference pattern of transcript-specific element expression from a non-diseased reference sample, a difference in expression between corresponding transcript-specific elements of the target cell and the reference sample is indicative of association with the pathological condition. Likewise, if a pattern of expression is compared with a reference pattern of transcript-specific element expression from a diseased reference sample from a particular pathological condition, the presence of a hybridization pattern or pattern of expression substantially corresponding to that of the reference pattern indicates the presence of the pathological condition or predisposition to the pathological condition in the sample tissue or cell.

[0181] The pre-determined reference pattern may compose a pattern of expression across the whole array or of a subset of nucleic acid molecules, for example, a subset determined to have particular relevance to a particular pathological condition. Such novel subsets of nucleic acid molecules may be used in the construction of arrays of nucleic acid elements of relevance to particular pathological conditions. Such novel arrays form a further aspect of the present invention.

[0182] Differences in expression may be qualitative or quantitative. For example, the difference may be up-regulation of expression or down-regulation of expression of one or more transcript-specific elements of the target cell of the sample compared to its expression in the reference sample. The measured difference in expression may be an increase in expression of one or more transcripts compared to the expression of the corresponding transcript(s) in the non-diseased reference sample (or control), a decrease in expression of one or more transcripts compared to the expression of the corresponding transcript(s) in the non-diseased reference sample (or control), or an increase in one or more transcripts and a decrease in expression of one or more other transcripts compared to the expression of the corresponding transcript(s) in the non-diseased reference sample (or control). Thus the pattern of modulated expression may be indicative of a particular cell or tissue function.

[0183] In a preferred embodiment, the RNA species or gene associated with a pathological condition hybridizes to a nucleotide sequence complementary to one or more sequences from Gene List A-JJ. The pathological condition may be any disease condition. For example, the pathological condition may be cancer. The arrays described herein may be used to distinguish between types of cancer (e.g. breast, colorectal, lung, etc.) as well as subtypes of cancer associated with a given tissue.

[0184] In one embodiment, expression of a transcript-specific element is considered to be up-regulated or down-regulated in the target cell if the expression is more than 0.1 fold, 0.5 fold, 1 fold, 1.5 fold, two-fold, five-fold, ten-fold or greater different from that of the corresponding element of the reference sample. Of course, in assessing such quantitative differences, correction factors may be made to measured expression levels, for example based on measured expression of a reference nucleic acid element, which is known to be expressed in both target cell and the reference sample. Any suitable non-diseased reference sample (or control) may be used. For example, the reference sample may be a cell from the same tissue and/or organism and/or subject as the target cell or may contain an average for expression values of such genetic elements in a number of such cells in the absence of the relevant pathology.

[0185] As described herein, the arrays described herein enable assessment of expression of a very large proportion of the transcriptome for a particular diseased tissue and thus may be used in the evaluation of patterns of differential expression of a large number of genetic elements associated with a particular pathological condition.

[0186] Having determined an association between a transcript or gene and a pathological condition, the presence, copy number or expression level of such a transcript may be used in methods of diagnosis of the presence or of a predisposition to such a condition. Such uses represent further independent aspects of the methods described herein.

Prognostic Assays

[0187] Prognostic assays are also provided herein for determining whether an individual who has been diagnosed with a disease or disorder associated with aberrant protein, nucleic acid expression or activity will recover or relapse in the absence of, or after, preliminary medical intervention such as surgery.

[0188] The prognostic assays described herein can be used to determine a positive or negative overall survival absent any therapy or after preliminary medical intervention to determine if a predictive assay should be performed to identify the most effect further treatment or treatments. For example, the assays can be used to determine whether a patient should receive surgery only or may be effectively treated with a pharmaceutical agent, biological agent, or therapeutic agent combination cocktail prior to, or following surgery. These assays are particularly useful for individuals with a poor prognosis and who would not recover from a disease or disorder absent treatment and medical intervention. In one such embodiment, hybridization of a transcript-specific element with an disease transcriptome array indicates the likelihood of relapse following surgery or chemotherapy or progression of disease in the absence of surgery or chemotherapy.

[0189] In preferred prognostic assays, the array is used to correlate hybridization patterns from the sample with patterns from known diseased tissue that responded adversely or favorably to a particular therapy and did or did not experience a relapse of the disease, such as a relapse of cancer following remission.

Predictive Assays

[0190] Predictive assays are also provided for the selection of appropriate therapeutic or prophylactic agents specifically for treating the type of disease or disorder affecting the individual. Therapeutic agents include, but are not limited to, small molecule compounds, agonists, antagonists, proteins (including peptides and antibodies or antibody fragments), peptidomimetics, nucleic acids, gene therapy vectors, radiotherapy, chemotherapy, as well as other therapeutic agent candidates.

[0191] The information obtained may then be used to determine the response of a disease-associated tissue to a medical treatment method. These methods include determining the patient response to a particular therapy after tumor resection, after extramural recurrence of a tumor, and a tumor response to radiotherapy, post-operative radiotherapy, or chemotherapy.

[0192] As well as enabling the screening of candidate agents for modulatory activity, the arrays described herein may be used as tools in the determination of the mode of action of an agent, for example, a therapeutic agent.

Pharmacogenomics Assays

[0193] The arrays described herein are also useful in assays for determining protein, nucleic acid expression or activity resulting from an individual's genotype to determine the ability of the individual to respond to a particular agent and thereby select appropriate therapeutic or prophylactic agents (e.g., drugs) specifically for that individual (referred to herein as “pharmacogenomics”).

[0194] In this capacity, the arrays described herein may be used in prognostic or predictive assays to identify a patient's responsiveness or resistance to a particular medical treatment based on genetic profiles. In this assay, historical data of patient responses to medical treatment are correlated with hybridization patterns for transcript-specific elements from diseased tissue samples from those patients. This information may then be used to determine the response of future patients to the same medical treatment. These methods include determining the patient prognosis after tumor resection, after extramural recurrence of a tumor, and a tumor response to radiotherapy, post-operative radiotherapy, or chemotherapy.

[0195] Exemplary therapeutic agent treatments to be assayed using the transcriptome arrays provided herein include, but are not limited to, an arthritis medication, a chemotherapy drug, a therapeutic antibody, a therapeutic protein or peptides, a therapeutic nucleotide, an antipsychotic drug, an antidepressant drug, an anti-asthmatic drug, an anti-viral drug, and anti-bacterial drug, an anti-hypertensive drug, a cholesterol-lowering drug or an antifungal drug. The arrays may also be used to identify disease progression, aggressiveness of the disease, and identification of the staging of a tumor recurrence.

[0196] The arrays provided herein may also be used to determine the degree of adverse response of an individual to a particular therapeutic agent in order to accurately titrate the dosage at the time of treatment and to provide fewer adverse drug reactions. Different polymorphisms may confer increased or decreased metabolism of a particular therapeutic agent. A standard dose may bring about more adverse effects than usual if normal degradative enzymatic activity is reduced by polymorphism. Genetic polymorphisms in drug metabolizing enzymes, transporters, receptors, and other drug targets are linked to interindividual differences in the efficacy and toxicity of many medications. For example, polymorphism in thiopurine methyltransferase (TPMT) results in altered degradation of the commonly prescribed agent 6-mercaptopurine (McLeod and Yu, 2003, Cancer Invest. 21(4):630-40). This genetic variant has significant clinical implications because patients with functionally relevant homozygous mutations in the TPMT gene experience extreme or fatal toxicity after administration of normal doses of 6-MP. In this embodiment, the pattern of expression of a sample is compared with a reference pattern of transcript expression from a reference sample where the presence of a pattern of expression substantially corresponding to that of one or more of the pre-determined reference patterns indicates the chance that the individual may experience an adverse reaction to the treatment.

[0197] In a preferred embodiment, a control sample containing cells or tissue of the target cell or tissue that have not been contacted with the therapeutic agent are also combined with the array for comparative purposes.

[0198] The arrays described herein are also useful in the monitoring of clinical trials for new or existing therapies. In particular, the arrays are useful for preselecting patients in a patient population having a pathological condition, or prescreening a patient having a pathological condition, to which an experimental therapeutic agent or other therapeutic agent undergoing clinical trials will be administered to treat the pathological condition, so that the patient will be optimally responsive to the drug.

Drug Discovery and Research Assays

[0199] The arrays provided herein may be used in drug discovery and research methods. For example, the arrays may be used to determine responses of one or more transcripts/genes of the transcriptome to experimental therapeutic agents, newly synthesized compounds and other agents of interest. The agents may be known to have therapeutic use or may be newly created candidate therapeutic agents.

[0200] Therefore, the arrays described herein are useful for screening one or a large number of candidate agents for the ability to modulate target cell or tissue function. In accordance with the method, a hybridization pattern for a sample treated with the therapeutic agent candidate on one or more of the arrays described herein is compared with a hybridization pattern for an untreated control sample. A difference between hybridized transcript-specific elements of the treated sample and the control sample is indicative of the ability of the candidate agent to modulate the target cell or tissue function.

[0201] The compositions and methods provided herein will be described in greater detail by way of specific examples. The following examples are offered for illustrative purposes, and are intended neither to limit nor define the invention in any manner.

### EXAMPLES

### Example 1

### Preliminary Listing of Colorectal Cancer Transcriptome Sequences

[0202] The following methods were employed to derive the preliminary colorectal cancer transcriptome array sequences disclosed in European patent applications EP 04105479.2, EP 04105482.6, EP 04105483.4, EP 04105484.2, EP 04105507.0, and EP 04105485.9 and U.S. provisional patent application 60/662,276 and 60/700,293.

Materials and Methods

Filtering of Public Data

[0203] All the public expressed sequence tags (ESTs) from all the downloaded libraries were retrieved in FASTA format and all 921 libraries were concatenated into a single sequence file containing 272,686 single ESTs. These ESTs were then filtered using a specific combination of filters within Paracel Filtering Package (PFP) (available at the website www.paracel.com) to ensure that undesired sequence elements did not enter the assembly process. Settings were selected to mask low-complexity regions, vector sequences and repeat sequences. Sequences containing contaminating E. coli sequence, mitochondrial DNA or ribosomal RNA were filtered. Subsequent to these filtration steps, low quality end-regions masked in previous stages and any sequences which consisted primarily of low complexity repeats were removed using the “trimjunk” algorithm (Paracel Filtering Package). Finally, any sequences consisting of fewer than 100 good bases were filtered out.

Filtering of Data

[0204] The filtering of the ESTs was carried out on the “Phred” output files rather than the raw FASTA sequence files. The “Phred” files contain quality information about the sequence, i.e. how statistically significant the call for each base was. This allowed the use of an additional filtering algorithm known as “qualclean”. Qualclean excises low quality sequence from the start and end of the sequence files. The other filtering algorithms used were identical to those listed for the public data.

Clustering of Data

[0205] The assembly of both the public and the in-house data was carried out using the Paracel software “Paracel Transcript Assembler (PTA)” (see the website www.paracel.com), using a clustering threshold of 50. Those sequences that assembled together (contigs) were BLASTed against the Genbank NT database for annotation purposes and to identify the orientation of the sequence. In the cases where the contigs were identified as being in the reverse orientation compared to that listed in Genbank, the sequence was reverse complimented and both orientations were included in the final data set.

Results

Reassembly of Colorectal Derived Sequences from Public Databases

[0206] In order to identify sequences that may be expressed in colorectal tissue, Cancer Genome Anatomy Project (CGAP) gateway at the United States National Institutes of Health website (see the website cgap.nci.nih.gov) was examined for sequence information that had been derived from colorectal tissue, colorectal tumor tissue, or colorectal derived cell lines. A total list of 921 EST libraries was identified using the CGAP. The libraries themselves were then retrieved from the UniGene database. The information was collated in a single database to generate a total of 272,686 individual sequences. The individual sequences were subsequently assembled using the Paracel transcript assembly tool to generate a total of 18,721 contigs and 41,023 singlets. The 18,721 contigs were then compared to the contigs generated from the sequencing project set forth below. This comparison revealed some limited redundancy giving a final number of 16,350 publicly derived contigs.

Identification of Novel Colorectal Expressed Sequences

[0207] In order to identify additional transcripts that may be expressed in colorectal tissue, whether normal or malignant, a cDNA library was generated from a pool of RNA that had been derived from over 80 normal and malignant colorectal tumor tissues. This RNA was reverse transcribed and directionally cloned into a cloning vector. The library was subsequently transformed into bacteria and plated to generate individual clones. A total of 50,000 clones were selected and sequenced to determine their identity. The 50,000 clones were subsequently assembled to generate a total of 10,396 unique sequences that were assembled to give 4,129 contigs and 6,267 singlets. The sequence information derived from the 4,129 contigs and the 6,267 singlets was then BLASTed against publicly available databases including Genbank to identify totally novel sequences, and against a database generated from all publicly available colon tissue libraries to identify sequences that had not previously been reported to be expressed in colorectal cancer. From this analysis a total of 2,773 novel sequences were identified that had not previously been reported in Genbank as annotated genes or ESTs.

### Example 2

### Further Identification of Colorectal Cancer Sequences

[0208] Additional colorectal sequence information was derived by the identification of other transcripts expressed in colorectal tissue through detection on a microarray containing publicly available information. These sequences compliment the preliminary transcriptome array sequence information to provide a more complete array representing the transcriptome for colorectal cancer.

Method

[0209] RNA from 40 colorectal tissues (27 tumor and 13 normal) was labeled and hybridized onto the microarray containing publicly available information. From these arrays a list of transcripts was derived for those targets which were called present and above background in at least one of the arrays (i.e. identifying transcripts expressed in at least one of the colorectal samples).

[0210] Initial work using the GI or accession numbers associated with the probe sets on the chip showed some discrepancies between the target sequence and the full sequence of the annotated target. As a result of this, it was decided to use the actual sequence of the targets to interrogate the public sequence databases in order to retrieve those sequences from the public databases which best represent the targets which have been empirically determined by the array experiments to be expressed in colorectal tissue.

[0211] These sequences were then extracted from the full sequences and these were BLASTed against the provisional patent sequence list (i.e. those transcripts identified from the in-house sequencing and public database mining). From this a list of 21,909 transcripts was derived not represented in the sequence list of U.S. provisional patent application 60/662,276.

[0212] This entire list of sequences was BLASTed against the public EST database (dbEST) with a high stringency applied (90% target coverage). Those sequences that hit against dbEST were then retrieved from the public databases. A collection of 16,377 sequences were successfully retrieved by this method.

[0213] The remaining 6,635 sequences were BLASTed against the RefSeq database. A collection of 1,663 of the targets produced a solid hit against RefSeq. Once more, these sequences were retrieved from the public database.

[0214] For the remaining 4,972 targets, the GI numbers were extracted, and these were used to retrieve the associated sequences from the public databases.

[0215] These three lists of sequences were concatenated together into a single file and reviewed with in-house duplicate sequence detection software. This produced a final list of 22,376 sequences with no duplication.

### Example 3

### Antisense Sequences from the Colorectal Cancer Transcriptome

[0216] With the increasing interest in the scientific community in the role of endogenous antisense RNA transcripts, the colorectal cancer database was examined for the presence of antisense transcripts.

Method

[0217] Subsequent to assembly, both the in-house and public data contigs were BLASTed against the Genbank NT database for annotation purposes and to identify the orientation of the sequence. In the cases where the contigs were identified as being in the reverse orientation compared to that listed in Genbank, the sequence was reverse complimented and both orientations were included in the final data set. Therefore, antisense and corresponding sense transcripts were combined to form a gene list of 5,672 transcripts (Gene List H).

### Example 4

### Listing of Lung Cancer Transcriptome Sequences

[0218] The methods employed to derive the lung cancer transcriptome array sequences described in Gene List I to Gene List O were similar to those used in deriving the colorectal cancer sequences.

[0219] These 55,626 lung cancer sequences are the result of an in-house assembly of publicly available lung EST libraries. They are a unique assembly of data previously shown to be implicated in lung cancer. A proportion of these sequences are expressed in lung cancer and have not previously been identified as annotated genes.

Results

Reassembly of Lung-Derived Sequences from Public Databases

[0220] In order to identify sequences that may be expressed in lung tissue, the CGAP gateway. was examined for sequence information that had been derived from lung tissue, lung tumor tissue, or lung tumor derived cell lines. A total list of 301 EST libraries was identified using the CGAP gateway. The libraries themselves were then retrieved from the UniGene database. The information was collated in a single database to generate a total of 471,630 individual sequences. The individual sequences were subsequently assembled using the Paracel transcript assembly tool to generate a total of 36,431 contigs and 19,195 singlets.

Identification of Novel Lung Expressed Sequences

[0221] In order to identify additional transcripts that may be expressed in lung tissue, whether normal or malignant, a cDNA library was generated from a pool of RNA that had been derived from over 80 normal and malignant lung tumor tissues. This RNA was reverse transcribed and directionally cloned into a cloning vector. The library was subsequently transformed into bacteria and plated to generate individual clones. A total of 4,032 clones were selected and sequenced to determine their identity. The clones were subsequently filtered to generate a total of 3,450 unique sequences that were filtered to give 602 contigs and 1,589 singlets. The sequence information derived from the contigs and the singlets was then BLASTed against publicly available databases including Genbank to identify totally novel sequences, and against a database generated from all publicly available lung tissue libraries to identify sequences that had not previously been reported to be expressed in lung cancer. From this analysis a total of 24 novel sequences were identified that had not previously been reported in Genbank as annotated genes or ESTs.

### Example 5

### Listing of Breast Cancer Transcriptome Sequences

[0222] The methods employed to derive the breast cancer transcriptome array sequences described in Gene List P to Gene List V were similar to those used in deriving the colorectal and lung cancer sequences.

[0223] These 87,059 breast cancer sequences are the results of an in-house assembly of publicly available breast EST libraries. They are a unique assembly of data previously shown to be implicated in breast cancer. A proportion of these sequences are expressed in breast cancer and have not previously been identified as annotated genes.

Results

Reassembly of Breast-Derived Sequences from Public Databases

[0224] In order to identify sequences that may be expressed in breast tissue, the CGAP gateway was examined for sequence information that had been derived from breast tissue, breast tumor tissue, or breast tumor derived cell lines. A total list of 1,130 EST libraries was identified using the CGAP gateway. The libraries themselves were then retrieved from the UniGene database. The information was collated in a single database to generate a total of 288,854 individual sequences. The individual sequences were subsequently assembled using the Paracel transcript assembly tool to generate a total of 17,291 contigs and 24,178 singlets.

Identification of Novel Breast Cancer Expressed Sequences

[0225] In order to identify additional transcripts that may be expressed in breast tissue, whether normal or malignant, a cDNA library was generated from a pool of RNA that had been derived from over 120 normal and malignant breast tumor tissues. This RNA was reverse transcribed and directionally cloned into a cloning vector. The library was subsequently transformed into bacteria and plated to generate individual clones. A total of 157,260 clones were selected and sequenced to determine their identity. The clones were subsequently filtered to generate a total of 127,306 unique sequences that were assembled to give 14,489 contigs and 24,308 singlets. The sequence information derived from the contigs and the singlets was then BLASTed against publicly available databases including Genbank to identify totally novel sequences, and against a database generated from all publicly available breast tissue libraries to identify sequences that had not previously been reported to be expressed in breast cancer. From this analysis a total of 3,278 novel sequences were identified that had not previously been reported in Genbank as annotated genes or ESTs.

### Example 6

### Listing of Transcriptome Sequences from Liver Tissue Associated with Hepatitis

[0226] The methods employed to derive the transcriptome array sequences for liver tissue associated with hepatitis described in Gene List W to Gene List CC were similar to those used in deriving the colorectal and lung cancer sequences.

[0227] These 86,122 diseased liver tissue sequences are the results of an in-house assembly of publicly available liver EST libraries. They are a unique assembly of data previously shown to be implicated in liver tissue associated with hepatitis. A proportion of these sequences are expressed in liver tissue associated with hepatitis and have not previously been identified as annotated genes.

Results

Reassembly of Diseased Liver Sequences from Public Databases

[0228] In order to identify sequences that may be expressed in liver tissue associated with hepatitis, public databases were examined for sequence information that had been derived from liver tissue, liver tissue associated with hepatitis, or cell lines derived from liver tissue associated with hepatitis. A total list of 63 EST libraries were identified. The libraries themselves were then retrieved from the UniGene database. The information was collated in a single database to generate a total of 326,079 individual sequences. The individual sequences were subsequently assembled using the Paracel transcript assembly tool to generate a total of 24,744 contigs and 37,503 singlets. The contigs were then compared to the contigs generated from the sequencing project set forth below giving a final number of 24,744 publicly derived contigs.

Identification of Novel Sequences Expressed in Liver Tissue Associated with Hepatitis

[0229] In order to identify additional transcripts that may be expressed in liver tissue associated with hepatitis, a cDNA library was generated from a pool of RNA that had been derived from over 40 normal and diseased liver tissue samples. This RNA was reverse transcribed and directionally cloned into a cloning vector. The library was subsequently transformed into bacteria and plated to generate individual clones. A total of 4,944 clones were selected and sequenced to determine their identity. The sequences were subsequently quality filtered to generate a total of 2,869 sequences that were assembled to give 45 contigs and 2,300 singlets. The sequence information derived from the contigs and the singlets was then BLASTed against publicly available databases, including the NCBI RefSeq collection, to identify totally novel sequences, and against a database generated from all publicly available liver tissue libraries to identify sequences that had not previously been reported to be expressed in liver tissue associated with hepatitis. From this analysis a total of 13 novel sequences were identified that had not previously been reported in Genbank as annotated genes or ESTs.

### Example 7

### Listing of Transcriptome Sequences from Brain Tissue Associated with Neurodegeneration

[0230] The methods employed to derive the transcriptome array sequences for brain tissue associated with neurodegeneration described in Gene List DD to Gene List JJ were similar to those used in deriving the colorectal and lung cancer sequences.

[0231] These 136,326 diseased brain tissue sequences are the results of an in-house assembly of publicly available brain EST libraries. They are a unique assembly of data previously shown to be implicated in brain tissue associated with neurodegeneration. A proportion of these sequences are expressed in brain tissue associated with neurodegeneration and have not previously been identified as annotated genes.

Results

Reassembly of Diseased Brain Tissue Sequences from Public Databases

[0232] In order to identify sequences that may be expressed in brain tissue associated with neurodegeneration, public databases were examined for sequence information that had been derived from brain tissue, brain tissue associated with neurodegeneration, or cell lines derived from brain tissue associated with neurodegeneration. A total list of 674 EST libraries was identified using public databases. The libraries themselves were then retrieved from the UniGene database. The information was collated in a single database to generate a total of 656,559 individual sequences. The individual sequences were subsequently assembled using the Paracel transcript assembly tool to generate a total of 33,275 contigs and 65,022 singlets.

Identification of Novel Sequences Expressed in Brain Tissue Associated with Neurodegeneration

[0233] In order to identify additional transcripts that may be expressed in brain tissue associated with neurodegeneration, a cDNA library was generated from a pool of RNA that had been derived from over 20 normal and diseased brain tissue samples. This RNA was reverse transcribed and directionally cloned into a cloning vector. The library was subsequently transformed into bacteria and plated to generate individual clones. A total of 7,200 clones were selected and sequenced to determine their identity. The sequences were subsequently quality filtered to generate a total of 3,115 sequences that were assembled to give 346 contigs and 1,671 singlets. The sequence information derived from the contigs and the singlets was then BLASTed against publicly available databases, including the NCBI RefSeq collection, to identify totally novel sequences, and against a database generated from all publicly available brain tissue libraries to identify sequences that had not previously been reported to be expressed in brain tissue associated with neurodegeneration. From this analysis a total of 5 novel sequences were identified that had not previously been reported in Genbank as annotated genes or ESTs.

### Example 8

### Comparison of Sequences from Colorectal, Prostate and Breast Tumors

[0234] Sequences from colorectal tumor, prostate tumor and breast tumor were compared for commonly expressed sequences. FIG. 2 provides a schematic representation of the BLAST comparisons of all publicly available sequences for colon, prostate and breast tissue. This is a comparison of all sequences post-assembly of the publicly available sequences, obtained as outlined above. The parameters used for BLASTing these sequences were a cut off E-value of 0.1, a percentage identity of 90%. The standard cut off values were derived from manual inspection and visualization of thousands of individual BLAST results. The hits satisfying these criteria can be fairly classified as being “identical” hits while allowing a fair margin for nominal differences that exist between sequences. Hits failing to meet the criteria are different to such a degree that they cannot be considered to be identical for the purposes of array design. Two values are given for each result. The “zero homology” result shows the number of sequences which have no homology whatsoever to the database against which they are BLASTed. The second value is defined as “no hit” and in this case, the query strand has a “percentage coverage” of less than 50%, i.e. the query sequence has less than 50% of its length represented by the target sequences.

[0235] The zero homology sequences are a subset of the no-hit sequences. The number of total sequences minus the number of no-hit sequences provides the number of sequences common between the two populations.

[0236] All documents referred to in this specification are herein incorporated by reference.

[0237] Various modifications and variations to the described embodiments of the inventions will be apparent to those skilled in the art without departing from the scope and spirit of the invention. Although the invention has been described in connection with specific preferred embodiments, it should be understood that the invention as claimed should not be unduly limited to such specific embodiments. Indeed, various modifications of the described modes of carrying out the invention which are obvious to those skilled in the art are intended to be covered by the present invention.

We claim:

1. An array comprising a transcriptome from a diseased tissue.

2. The array of claim 1 wherein the diseased tissue comprises a tissue afflicted with a neoplastic disease, an inflammatory disease or a degenerative disease.

3. The array of claim 1 wherein the diseased tissue comprises a tissue afflicted with colorectal cancer, lung cancer, or breast cancer.

4. The array of claim 1 wherein the transcriptome comprises nucleic acid molecules derived from coding and non-coding transcripts from the diseased tissue.

5. The array of claim 4 wherein the nucleic acid molecules are localized to more than one distinct location on the array.

6. The array of claim 4 wherein the nucleic acid molecules are spotted in one location in the array.

7. The array of claim 1 wherein the transcriptome comprises nucleic acid molecules having sequences complementary to transcripts from diseased colorectal tissue sequences from Gene List B, Gene List C, Gene List D, Gene List E, Gene List F, Gene List G, or Gene List H, or combinations thereof.

8. The array of claim 1 wherein the transcriptome comprises 70% of the nucleic acid molecules having sequences complementary to transcripts from diseased colorectal tissue.

9. The array of claim 1 wherein the transcriptome comprises nucleic acid molecules having sequences complementary to transcripts from diseased lung tissue sequences from Gene List J, Gene List K, Gene List L, Gene List M, Gene List N, or Gene List O, or combinations thereof.

10. The array of claim 1 wherein the transcriptome comprises 70% of nucleic acid molecules having sequences complementary to transcripts from diseased lung tissue.

11. The array of claim 1 wherein the transcriptome comprises nucleic acid molecules having sequences complementary to transcripts from diseased breast tissue sequences from Gene List Q, Gene List R, Gene List S, Gene List T, Gene List U, or Gene List V, or combinations thereof.

12. The array of claim 1 wherein the transcriptome comprises 70% of the nucleic acid molecules having sequences complementary to transcripts from diseased breast tissue.

13. The array of claim 1 wherein the transcriptome comprises nucleic acid molecules having sequences complementary to transcripts from diseased liver tissue sequences from Gene List X, Gene List Y, Gene List Z, Gene List AA, Gene List BB, or Gene List CC, or combinations thereof.

14. The array of claim 1 wherein the transcriptome comprises 70% of the nucleic acid molecules having sequences complementary to transcripts from diseased liver tissue.

15. The array of claim 1 wherein the transcriptome comprises nucleic acid molecules having sequences complementary to transcripts from diseased brain tissue sequences from Gene List EE, Gene List FF, Gene List GG, Gene List HH, Gene List II, or Gene List JJ, or combinations thereof.

16. The array of claim 1 wherein the transcriptome comprises 70% of the nucleic acid molecules having sequences complementary to transcripts from diseased brain tissue.

17. The array of claim 1 wherein the transcriptome comprises nucleic acid molecules having sequences complementary to transcripts from cancer tissues from Gene Lists B, C, D, E, F, G, H, J, K, L, M, N, O, Q, R, S, T, U or V, or combinations thereof.

18. A method for diagnosing a pathological condition in a patient comprising:
a) contacting an array comprising a transcriptome from a diseased tissue with a transcript-specific element from a biological sample from the patient; and
b) detecting hybridization of a transcript-specific element with the array;
wherein detection of hybridization indicates a diagnosis of the pathological condition.

19. A prognostic method for determining whether a patient who has been diagnosed with a disease or disorder will recover or relapse after preliminary medical intervention comprising:
a) contacting an array comprising a transcriptome from a diseased tissue with a transcript-specific element from a biological sample from the patient; and
b) detecting hybridization of a transcript-specific element with the array;
wherein detection of hybridization indicates prognosis for recovery of the pathological condition.

20. A method for determining responsiveness of a patient afflicted with a pathological condition to a therapeutic agent for treatment of the pathological condition comprising:
a) contacting an array comprising a transcriptome from a diseased tissue with a transcript-specific element from a biological sample from the patient; and
b) detecting hybridization of a transcript-specific element with the array;
wherein detection of hybridization indicates responsiveness of the pathological condition of the patient to treatment by the therapeutic agent.

The application's sequence listing, which the Patent Office published only in electronic form, follows.

SEQUENCE LISTING (483996 sequences)

SEQ ID NO: 1 - DNA, 181 bp, Homo Sapiens
ggctgtgtacatagagcataggaagaagcgcaggtccggcgagcattggatctccaccagcggccagaactggtgcacctccaggcccgcctcgtcctgcgtgtcgtggttgaactggttgggcatgtgcgtcaggttgtacccgatgccgcggcacatgggcaccgtgatttcctggcac

SEQ ID NO: 2 - DNA, 399 bp, Homo Sapiens
cagctcggcacctgctgcttctcctcctcgacattgctactgctgcctcacactgccactgttgctcaggactgctctgtggagcagccagtttgctgtacactgctcctctgggctactctgggctactctgtctatgggacagccctgccctgtctgcggagccaccattttgctatacactattgctctaataaacttgctttctttcactgtcaactcactcttgaattctttcttgagcaaagccaataaccctcccaggctaagccccaattttggggttcatcctacgatcaggctcagagagaccttctccgatcatccaaaatatacagtccatccaatgtatctaacatatttcctattttattctcttcatagcactgaccacaaatg

SEQ ID NO: 3 - DNA, 348 bp, Homo Sapiens
tttaaactataaacatatattgtaaatgttagcatattatatacattgcatattaacataagctaaaatcattgatataaatttatataaacaaaaggtagaaaatatgacaatgttcttcttgttttttgtctttgcatatttctttattggcccttgtcaaacgtgacccactaactcctgaatgctatctctctccccatggattcctaaggatgtcaccacagtgctggccagatgcacagatcacaggtgactgaacctcatcaccccacgaacacacccttcaggttttgccaagaatgacactgtaaatataacaaagctcctgtgcttgttagtgaacac

SEQ ID NO: 4 - DNA, 452 bp, Homo Sapiens
cacacatcacttgtaaatgtgaactgtgatactatgaagaggtggaaggctgaagaattcaaaatgttcgccccagaaaatattgtctgctttggtcttgctggttgtacgagcaaagagggtatcatcaaggcacagttcgcagaaatatttctttttaggggcaaggtccttggcttcaatgatccataaacgaagaacattttcagctcagcctgcaattgtccttattaggttgaactgtcctgcgaaggttttccatccacttgtctctctcagaagcagaattacagctgaagcatttacttccacttaagtaggtaacctcaaagcagaagtcttgtccaaggatgctactatgaagtggtttcactgatacaggttcccctctaccaagatccagacattccactgtgctgcatgggctcagcaaggattcatgggaacgtgac

SEQ ID NO: 5 - DNA, 439 bp, Homo Sapiens
gatggccaaacctacaacaatccctgcatgctctgtcatgaaaacctgttacgccaaccaaatacacacatccgcagtacagggaagtgtgaggagagcagcaccccaggaaccaccgcagccagcatgcccccgtctgacgaatgacaggaagattgttgaaagccatgagggaaaaaataaaccccagttctgaatcacctaccttcaccatctgtatatacaaagaattcttcggagcttgtcttatttgctatagaaaacaatacagagcttttgggaatggactcactgattttcagtctttgccatctctttcctcctagactctgtgatctgagggtataaagacatctccaccaagtctgagccctcaaaatgtcctgattacaatgctgtctgtccaactgcctgttcaataaaagtaaactcagcagaa

SEQ ID NO: 6 - DNA, 481 bp, Homo Sapiens
gggccgtgctgcgtccttgtggtggccgcgtgcgtcctgcccggagccggcgggacatgcccggagcgcgcgctggagcgccagcgaggaggcgaacgtggtgctcaccgggacgcaggaggagatcctcaacgtggacccggtgcagcacacgtactcctgcaaggttcgggtctggcggtacttgaagggcaaagacctggtggcccgggagagcctgctggacggcggcaacaaggtggtgatcagcggctttggagaccccctcatctgtgacaaccaggtgtccactggggacacaaggatcttctttgtgaaccctgcacccccatacctgtggccagcccacaagaacgagctgatgctcaactccagcctcatgcggatcaccctgcggaacctggaggaggtggagttctgtgtggaagataaacccgggacccacttcactccagtgcctccgacgcctcctgatgcgtgc

SEQ ID NO: 7 - DNA, 421 bp, Homo Sapiens
agcaaaaaggaatagtcactaaacagcgaaggaaagtggtggaattattaaaagacctagcacttacctgctgggatgagtctctaaccccacagaattgatttcaaacacaggatcttattcaagataaggataataacagctatcttcttgggttgtaaaaagtagcattagactgcattttaaacatttggtatgattttgaggacataaccgtaaacagctatttaatactattccaggtagtcaaaggccaatgtataaaagttaaaaatataggtcttgtcagctttttaagcgtctgtcccactgactaccatatctctacaagagaatagatgaggaattgaggttatgtgggaagtacgtgtaagtttacagtattaagaaatgtacaataaaatttgtttctatgtcagcg

SEQ ID NO: 8 - DNA, 499 bp, Homo Sapiens
ccatgcggaactgttgaaatatacactacctgaagctggataactcatgaactctgttgacaattatattctttgtctttttaattaactcatttggagttggtgtcctgaggacctaagcctaagaatcttcaagatggaagagtagagtgaacaatgaatgagccagagggctcttgtcctctgtgtgcagctctgggcagccagcaggtggatatgggacttggcctgctggaggggccctggcaagaggagctggcaggagcagatggcaaaggataaagcgctcccttgttggtgtccccacagtccaggctggtgctgatgccgtcctgccgtcctgcatcagagccactcatgcccgtgtgcgcactctttgtcggggtctgacaccgttgcatcgtatatcacctgtgttgtcatggtcagtgctcaacaaatgcccctactgattcaagtatatgagcaagtcaaataaaaaaataatatggccgggaaa

SEQ ID NO: 9 - DNA, 565 bp, Homo Sapiens
ggcacgaggcgggaactcagcttcaacctcgatgtcttcagggtcttgtccagaatgtagatgggttccgtaagaggcctggtgctctcttactctttcatccacgtgcacttgtgcggcatctgcagtttacaggaacggctccttccctaaaatgagaagtccaaggtcatctctggcccagtgaccacagagagatctgcacctcccggacttcaggcctgccttttccagcgagaattcttcatcctccacggttcactagctcctacctgaagaggaaagggggccatttgacctgacatgtcaggaaagccctaaactgaatgtttgcgcctgggctgcaaaagccagggtgcatgaccaggctgcgtggacgttatactgtcttcccccacccccggggaggggaagcttgagctgctgctgtcactcctccaccgagggaggcctcacaaaccacaggacgctgcaacgggtcaggctggcgggcccggcgtgctcatcatctctgccccaggtgtacggtttctctctgacattaaatgcccttcatggaaaaaaa

SEQ ID NO: 10 - DNA, 543 bp, Homo Sapiens
cagtgcaattgaaggttgaaagggaagatcctccaatgcacaaagaattcatgcttcagaaacattctcttcctgaggatacatttgggaatttaggtagaaattaactgtcttgccttcatatacagtgtagtggagaccactgtaggtctccaactttttgtcttttcttaataacaagtccccagtttttgctaggtacatagctacccagagaaaagattatgtggccaccttactatgttctggccaatgagatgtcagcagaggtaatatgcggggcctctgagaaggccctttcctgctacctggtacctggctggaggctgaaaagccattagggacgagacatgctaaggttggagggtcagcgtattacatggagcctccttccctgatggccttgggctgccataccagccctggattgcctaattcccgacttcttttgtaaaagggagaaataagggtcaatttttaaaaaagcatctattactttgacattttctgtcacacacagccaaatataatcctaactactaa

SEQ ID NO: 11 - DNA, 485 bp, Homo Sapiens
tgttccccacccactccgggtgttactgatcctcgatgtcaaggaacccgcgcgtcatcgccctccacatcggtctcaacccgaaactaggagcttcgaacctccaagtaccggatcgccccaagcttgagcctaggcctctcggctcttctgagaaacaagattcaggcgtccgcccctgactcctgcccatcccccacagaagtcagatggaccgctctccagtccctctttacctttgatcaaattcggaagtctcggcccactaaggatcgctcctggttcctcggaaccctgagtccaaacgtcctagctcaccaatagactaccctccctcccagggagcgtttcctgcctggggggaggaacatacaggattcgtttgttcaataaacgttttttatgtgcaaggcccatgcagaaataaatttaaccaaaataccgattccatcctcaaggaggtcgcagtctgtcaaaaaataaaa

SEQ ID NO: 12 - DNA, 542 bp, Homo Sapiens
tgggatgatgttggtcaaatgacctagaaacaagaaggatacaaggtaagtttcagtggagctcagaggacggggagatagaactgtggcacttaggggagatgacatttgctttgggcagaggcagctagccaggacacatttccactataattttacaaagttaaatttataagctagcattaagtaaagtgaagtccagctcccttgctaaaaataactagaggtaataattggtattcaggtaactcatttacagtcataatgtgttgtgaaaatttaatcttaaaaattaaatttttaaactatgtgggtctgtgaatttctttaatgtctaagaaatccagcttcataatttccatgatacaaagatcttttttcaggtggatttttacctttgttccttttgctctgatagacaaaatcagtttaggactattaaagaatgttttggaataaactgtctttttcctcaatgaatgggatgtctaatgtatttcaaaatcacccaaaacttttggcaaataaaagcatttaaaaag

SEQ ID NO: 13 - DNA, 536 bp, Homo Sapiens
cagtctcctgtgcctttcacactcaggtagtgtctgcacaggccactctatgtcttttccatgctgaagaaattcctttccaggccatgtctgtgttcctcctgccacacaggaaatttttgagcatgttcatcctccaagctgaatgcagggtcttgggtagtggtcctcacctgctccagagacttctccagccattgccactctccactcaggtgatgaagctggatgagggactgcacccaccagagtcaggccagggtcctgtctgctctgtgagtccctccaattgttcttattccgagatttccattgttctgccccctcttgactcccagggctctcaagggagtgggggtagtgaagggagccctttcccaagctcccccaagagctctagtcacatcacttctgatacttcttttcccaccagctggaagaaagaactttcatttgtcttgaaatgagaaaaatgttcttagaatattttgtattactctctgctctgtcatttatggtaaacaaaataaaataat

SEQ ID NO: 14 - DNA, 580 bp, Homo Sapiens
ccctcaaaaaaataaggcctccaggtatcaagatctcatattaggattttctgtccttaattttttgagcaaaatctggaaaatgtgaaagcatatttagattttatatactatctgaaatgtgatttgttaagattcttaaatttgggcctcttagaataattttgaatgagatctaccgactcacttgtgagaatatttttcacagattatctttgggccttttcattagaaagctgtttgtttgtccccctgttggtacatttggttacctcattttgccgtttcagattgtgaaagctcacaggggtgttttttggaatcatttgctgagtcattttctcaaatcatattccattgtatcagttaacatatagttttaaatgtatgtattataaatatctgtaaccaaatcatttgaaggcttgataaatttttaacaaagtttgtacattttttatgaaagttactagtaatgctttactaagtagtgcaatgaatttttatttttaatccctgtgcccaattttggagttgagagggttgttggtaataaatgtatgatgtacacttgaaaaca

SEQ ID NO: 15 - DNA, 460 bp, Homo Sapiens
  misc_feature (335)..(394): n is a, c, g, or t
ccacgccaccggcggccactgcggcagcgccgccgccggcacccgcctctccccctcccccgccggctccgctcagctggggcacgctcaggaggctcaggggcaccatggtcggcatcttcatagcacccgaggggacccggccggccttggctcccgtgtggatggcttcgtgcctccggagattgtagccgttcttgaactccttggcgcacagagcgcagatgtagggccccttgctctttgtcttcttctccaaggcagacgcgaccggggccacggcgaccgtcgaggttggggctacgacggcggtggccgccgccgcggcgatagtnnnnnnnnnnnnnnnnnnnnnnnnnnnnnnnnnnnnnnnnnnnnnnnnnnnnnnnnnnnnagggggcgccggaggctgcttcagggccgctgtgtccaccgcacagccggcggcaggggccggggg

SEQ ID NO: 16 - DNA, 436 bp, Homo Sapiens
acgtgagaaggacggattgacgaactgatggattgacgcgcgggcggtaggagggaggaccgacgccaaacccagaccgccgccgtcgtgctcctgccgcagcccggagccggccgcttcggggccacaggccgccggcctcccagcagcgttctcctccgacgctcctccgggcttgccctggagccctcaggctatcaatatgacggctgaagaaacagtgaatgtaaaagaggttgaaatcattaagctaattttggacttcctgaattcaaagaagcttcacattagtatgctggccctggagaaggaaagtggagtcataaatggcctgttttcagatgatatgcttttcctgaggcagctaatacttgatggtcaatgggatgaagttcttcagttcattcagcctctagaatgtatggaaaaaatttga

SEQ ID NO: 17 - DNA, 545 bp, Homo Sapiens
gcagcacgacatggtaagcagaaagagaacgacgtggtggacaagatgaacctcttcttggatctgctgcagtcctataaggacctgtgcgagcggcatgagaagggcgtgttgcacaagcaccagcgggccctgcacaagtacagcctgatgaagaggcagatgatgagcgccaccgcgcagaaccgcgagccggagtccgtggagcagctggagtcccgcatcgtggagcaggagaacgcgattcagacgatggagctgcggaactacttctccctgtactgcctgcaccaggagacgcagctcatccacgtctacctgcccctcacctcccacatcctccgcgccttcgtcaactctcagatccaagggcacaaggagatgagcaaggtgtggaacgacctgaggcccaagctcagctgcctctttgcgggaccacacagcaccctgaccccaccgtgctccccgccggaggacggcctgtgtcctcactagcgcctgaggctgaggtggtgctccctgcggccgcactaaaacctctttcc

SEQ ID NO: 18 - DNA, 536 bp, Homo Sapiens
gccactcgccgtgtgctgggcggtgatgtcacctgattagcataacagcattgtattagaaatgcaggctataccacgaggaggggcgcgggggagcctagccggcccgcgaccccctaccggtcccgcacggtccgcggtcgccccagccgcccggcagccgccgacccccggccgggccctggactcgccgcggtagtgccttcccaaacagagctgctggaattacaatcttttgttgagcctcatgtaacggaaaagtctccgattactatcacttgaaaaggctagcgcgcccacgggacggcctggagagtgaagagccccaagggtcccgggcccgcgcggctcattcactctctagcgtctgctgaggtaacgcggcccgcacctgggcgcgcgcgactgccccagtgcgctggcgccaaccacgcggcggcggcccggcgagccaccgggaagaagtcagacaaagtcactctcagggcgctgtgcagcgccacagccaggggaggtgtaagttcgggctcagtgaa

SEQ ID NO: 19 - DNA, 448 bp, Homo Sapiens
cacctggggagggatgtgggaaaggaaggatgggagggaggaccctctgggaaaatgtggatttgagctggtgagagtgttgctaaggctgggctaaagcctggagagggtaggaggaggcaagaggggtccaggcagggctgatcctggcctttgacctgtccagggcgacccctgaagcccctgctgcctctgggcattgctgggagaggccaaggcaggactcacgtttgaacagagatcccctcgggcattgctgatgggccaccttcagctgcagggaagaagcctaggagaggaggcatgggagggacctgggccttgttcagattggccacctctgctgagaagtccataccagtacacccctaataagttatgccacataccaacgtactgtggatattataacctgcattaaaacaactttaaagaacgctgctcattt

SEQ ID NO: 20 - DNA, 416 bp, Homo Sapiens
ctgaaaagagagaaaaggataataaggtttttttgatgctgagtttttcttggaagattagaaaggattctgaatttaaaaagaggcgattctggcatgagaatttttctatctttcttttctttataagctatagtgatgtatgtagtagatacggtattattagagtatatggtttaagctaataaagtttaataaaatttaagtaaagatggagcttatggcccttaccctttggaaatatccccagattagtttagattgaacctgaatttgaataaagagaagcaaaatgtagggggaagaaggattataaaatattgggattgatattggtatcagtgatttgaagttgatttccaagctattctgttcagtcagaggctttcttagcctttaacgggagaagagaaata

SEQ ID NO: 21 - DNA, 474 bp, Homo Sapiens
tgctgcttctcctcctcgggaataaataaaatttgaaccttttggagctgtgtgctaaatcttcagtgggacaatgggttcagacaaaagagtgagtagaacagagcgtagtggaagatacggttccatcatagacagggatgaccgtgatgagcgtgaatcccgaagcaggcggagggactcagattacaaaagatctagtgatgatcggaggggtgatagatatgatgactacctgagactataacagtccagagagagagcgtgaaagaaggaacagtgaccgatccgaagatggctaccattcagatggtgactatggtgagcacgactataggcatgacatcagtgacgagagggagagcaagaccatcatgctgcggggccttcccatcaccatcacagagagcgatattcgagaaatgatggagtccttcgaaggccctcagcctgcggatgtgaggctgatgaaga

SEQ ID NO: 22 - DNA, 589 bp, Homo Sapiens
  misc_feature (209)..(209): n is a, c, g, or t
ctcatgggattacataactgtgtctatcagcaagcgtcattgtggtttcattcgctcaaattatccctaaagaatcggatactcaatcactttggtcccatgccggagaaagacgccgatcctcagatgaacccgaatggcccagcctggtgctggtggatgttagcagttcttcccttggaaagccgagctcagctccccctttcctnagcaatggaggtccttaaaaggacagactgaatggtattcgacgagtcctggccttcatatcccgaaaccaaaactagtgagtggattgccgaagaggagctcccacctttccccactgccgtcggggggagtcttcttgtaaatatatctaattgcaataatatcttaacagaagggggtgtcaaacagaggcatcagcctgctgttgatcacagagagaaattgagtagaaagaccaaaagaatgtgacctatttgaaactttctgtcttaagatgcttcttgacatgctgcataaatacataaacagcagaggtgtttaagagcccagaaaaacataatttgattttaacattaaaatttccaaaagtttaaaaaaa

SEQ ID NO: 23 - DNA, 497 bp, Homo Sapiens
gcaataagcccagccagagcacttgctaatctctgctgatgttgctttgcccaggccagcacctcctcaaacctcgcccggatgattgttatccagtgcttaatggtagtgatggagtcggggtggcagatagccaaaacggtgtcgcccatagtggtggctttatttagttcagctctcttttcttccagtttcttcatgaattctttatgctgatcaatgagagtccggagagcatcctcatcatctgggaggacaccatggaaacgcagggtttgctccgcctcagccagccactccaagagggcatgtaccaccgagtggaattcctctgcctgacgcagggctgcttctaaccgtgtttgctctgataaagaaagtgcacacacggtctcccagcgtgtgcttaattcctgcatctggaccttgacccaggaggagtcatcccgactgccttctatgagttctcgggctgagcgcttcagggcctgcacact

SEQ ID NO: 24 - DNA, 514 bp, Homo Sapiens
  misc_feature (66)..(78): n is a, c, g, or t
tgcaaaattaaatatatacttgtattcatgatcaataagtacaaactaacatttccagttaaaagnnnnnnnnnnnnnctcttccaattatagaatacagagagctcttcctttcttatttccagatttctataaccctttttcagaacatttcttcacactgcagtacgtgcctttagtgcaggagtgtaacataagtggtattcctcttgagggtcccagtagtaaacatagcttaactcacaggagagcaatcagttcttacaaaacacctatgaaaactatgcatatgacctctataaaatgtaagattgccaacatcccataataggaattccatggctgcttataaatatagatctcaaagaaatgtttgggcaatgcctgtaaacccataggctggcaaaccatatgtcaatccaatgcttttatgacccccaatttaacttcactctattgaaaatctgattagtcaagaaataaacaaagatgtggagtgatcccaaaagcaatt

SEQ ID NO: 25 - DNA, 532 bp, Homo Sapiens
tgacgagggagacagagtactcacttacgttggtacgcagagcacacagaaaccactgattgcttggtgtggagaaacagctattaggagaacatttaacagcaattctgcagaaagggctcgaccacttactggatgagaacagagtgccggacctcgcacagatgtaccagctgtacagccgggtgaggggcgggcagcaggcgctgctgcagaactggagcgagtacatcaagacttttggaacagcgatcgtaatcaatcctgagaaagacaaagacatggtccaagacctgttggacttcaaggacaaggtggaccacgtgatcgaggtctgcttccagaagaatgagcggttcgtcaacctgatgaaggagtcctttgagacgttcatcaacaagagacccaacaagcctgcagaactgatcgcaaagcatgtggattcaaagttaagagcaggcaacaaagaagccacagacgaggagctggagcggacgttggacaagatcatgatcctgttcaggtttatcca

SEQ ID NO: 26 - DNA, 622 bp, Homo Sapiens
ttcaaaacgaaagattcctcaatgttcgcaagcgatctgtgccagaatacatctaccctgttaatgtgcagactccaagtggtgagcagctttcaagaatatgactattcattatggatgggcaataaggccaatgctccagcgaattggtaaaatgcaccctgacattccagtttcagtgatatttggcgcccgatcctgcatagatggcaattctggcaccagcatccagtccttacgaccacattcatatgtgaagacaatagctattcttggggcaggacattatgtatatgcagatcaaccagaagaattcaaccagaaagtaaaggagatctgcgacactgtggactgaacacactgaagctctgatgggaaaacctggtgactgatatagttgttcagcaataattcatagtctgtgatgaagagtagtgaatacaacacacaaccaggcagccttcttgactaaactttgcacatgttttctttaggaattcactcacacatttaaaccagttagtgccttctagaagaatggctttcctttctcctacacaaaattgaaatatacaagtctctaaatataatacctttaaataaaaggttatttgtccctctg

SEQ ID NO: 27 - DNA, 385 bp, Homo Sapiens
tcctcgatcttgctgcccaggatgtaaacccgcaagctgacctccacaaaggggtccaccaagttcttcttgttactctcgaagccaaagatctgtttcacgttgtccatcacggcatcgtccacccacgcactctgcggcaagtcctcggcccgtgtaagaccttcaggcagaagtgggctcctcgcagggctacgcctgtgggccggagcaggttgctttcaatgtcctccttgtcttcagaggggtcttttctctccagaggcgcttcgtccccaggccccagcacacaaaggcttgttttcaggtaacctctggccccagcaagagaaattcatcgggtctgagagcaggcaaccaacttcctgaaattggccgttccggg

SEQ ID NO: 28 - DNA, 453 bp, Homo Sapiens
tttttacatcatcggcactttatacattactgttaccatgaaaaagaaatgaacagcagcacgtctgataccatcagctgggcagatgcattaaggttaaatctaagtgtcaagaaaaccctatttctttataatatttatgcagctgttaacgtaacatggtggcagcttcacaacaagaaccgtgatcatgcatgcagtcatgtctccagtattctgtgaaaagccaggatacgttaggatgtgagtttagaaactgagtccattcggtgcatggaaatccaccgcggagtcacacaatgctcctcactgtagtccaagcgattggtgggccgccagcaccctgcgggctgtcacagggacgcgtgctcgttctccaagccccgcaacccttactgtgcacacaacatcgcacacacctttgtttttgaaattaaaatgtttatagttatt

SEQ ID NO: 29 - DNA, 683 bp, Homo Sapiens
cgatgaaggtgatgccaatgcccagctggtactcctggagggcagatgggacgggatgagggcaaggctttgtggtcagtgcgtgaggcttgggacagggagaggaagggaaggtggtgcaactcagggactggggggggtgcccaggagggagacagcaggggacatgggaggctgggcagggtaaggggctgcaggttcagggcccacacagcaatgaacagaggtgcgggggagcaagggccagggcagggactggagggcagtgctcagagcctgggggaagtggtcagaacttgggggagcgaggacatatccaggcaaagggctgggcccagtacaggaaaagagggaacagaaaaggcagggctaaggccctaggtcagcctggggcagggtaggtggacatgggcaggggagaggttccatgaccccttagcacctctagattcttgtagagctgcactttgtccccgaccacggccacgtacagcttattcttgaagccacgaagctccaggctgccagcgcggtcaggctgctctgagcctggaactcccagcagataagcgctagagagccgggcccgggcacgctgctcagccatggcctgctgcagggcctgcatccactccttccgctccactgcaggagaagggtagaggagtaagcccaaggttgca

SEQ ID NO: 30 - DNA, 446 bp, Homo Sapiens
ataatcacttgtgtaaatcacttgatgatttttactcgtgtaatcacttgatgattctaattgcttctcttgtataatcgctcactctctcagatggccttgcatccctctggcttctttccctaagatggcatctgatgttgggggatggggagtgtggctgtttcgttctgtggccgttgaggaagagagggcccctgggctcctgcaggcatgaaggcatctgctttgtggtatctgctggcctctggtgtaaagtccctcatctgcccggctgttgcttgtcacacctgtctgggagtccaaagtctatggctattgagttcatagtctgctcagttcccgtgagcaagcaatcatccttggggtgctggggttgactgggcctcccctcgtttcccgttgactgtggataccctcatattcccaataggaaaaaaatcaat

SEQ ID NO: 31 - DNA, 451 bp, Homo Sapiens
catcatggcaaccgtagctgctacctgccctgctcaagacttacgatattagaccactttacttaccatccttcatggttgccaaaatgcaaaagcttatccaaaattgtgattactggtaaagaagagagacagagaggtatgccagtaagagttttatctcttattgagagatagtccctaaaactttccaagtggctggtcaatcctaaaatgaaacaaggttacacatgtgtgatgcctgctgcctccttatctaatacagcacctggttcagggcaagggctgtggagttgccaaggtcaggagagggcaggcctatctcgtcccatccaggatctcatcagggcactgaagagcactgggaactaacttgagggtggctggaatttttcccatagccaatagggtaccattagtggatttcaagaagaaaagtacagatcaacca

SEQ ID NO: 32 - DNA, 818 bp, Homo Sapiens
  misc_feature (480)..(480): n is a, c, g, or t
  misc_feature (617)..(617): n is a, c, g, or t
tgcccacgggcatagctacagcaacccctgcgggatttggtgtccacacccgagaggccaggccagacgggaaagggattagcgcctcttccctcacactctgccaggctgccgggagcttgggccaggtctaaggtaatgaggtgctcctcttcctgctggaaaaaccggacagactcagaaccacaaaggcaggtgctgccagcctggcgccttcctctctgcttaggctgggtgagcttgtccaggcctgtgcctcaccccttctctcttctaggctcagtgtatgcttaatcaggcatggtgcatcagagcgggaaggagccatcaacagtgtatacttctggagccttctactgataaacagaggccccagaagacgatttgacttacctgagctcccagctgggacttaaacccaggtgtgtctgagtcacaactcttcggggatgccgtggtgagctggggctgagctcctgntattcccactcccccaccccacccccactcctgccatatcagggctggtctctgtggactcagcccagggctgcctcctctttgtcaccccaaagtggggcagccagggacagccagggtgtgttcagaatgggttncttcctgcagggcaggaagggcagattgttaaagcggctgcggcccagaccaccctggtccctcctccggcagtgactcagacccacactgtgccgtgcagctgtgtgccctgcacacactgcttgacggcgcactgctcacttctggggggccctttcagaggcacttttaaagcaaataaaacatttattgttcagaaa

SEQ ID NO: 33 - DNA, 338 bp, Homo Sapiens
ccacagatgcatcctcagccaggggagacacagggaaatgatgcaaaagaaatgatgcaaaggatctgagcagaacactgccccttccccactccctgaatgtgtgagtgctgagttatggccttcagtatccaagctctctgtttgacagtagatatattgtcagatgcactgtgctgcttagttttgagtgcagtgtgattttctgaaagggcaatgagatgatggatgtagcatgctctagcactgacctggcccatagtgatcacttttaaacctgggaaccagctatggcatgcataatcctagctgatggataacgatctactaagacagaa

SEQ ID NO: 34 - DNA, 404 bp, Homo Sapiens
gcgaccgcgctgggacaggagcgcgcagaggtgaagatgcgaggacccgaggggttgctgatcagactgcgagcagcaggggggctgccactggcagagctggaagcatgtagatcagagatggcagcagcagctcgaggcgctcggggctgtccagcagcctaccccgctgcggtgtcaggagtcgacgagttgggtgccccagagcctcgaggcaagggctgacaggcggggggcgcagaccaggcaggcactcccttctccctgtccccgaccccacggcgggcggcggggctgcggaggcactcacctacccagggctggggttgggtcgcggcactgcgaagtttgtcgcctcctccgggggtctcctccgggtgcacggctcagtcctgcagctgcag

SEQ ID NO: 35 - DNA, 648 bp, Homo Sapiens
  misc_feature (331)..(339): n is a, c, g, or t
tatatagatacccgtctcgggtctaccttagttctggttaatcatattaatagatcaagatcgtaggtacggatgaacacaaaataagagcaattgtgccgagcccatcatgttgactttatctggaatttgaaacaaatattaagtctaatgctgaagacatttggaacaatatttgaatgtttttataaaaattgtaaatgacacgtatttaagagaacaattaggaaatcttaaattttgattcactgaaattagtaatttattttggaaggtacatataaaaaactttaacaacatatatttcattggttcataatagtctctgtannnnnnnnnaaagatcatttttacagtgagttagtatctctctttgacccattttggatcaaaatgtttaacaacatatcattgggatttgtgaactaaccaaataaatgaaaaaataaagttctagtataaaagtacagatgaatgtatttctccaagaaaagtgctcttttgacaaaaggtagttgagactcttttaaagtaaaactcaaatattttagagggcctctttgataccttgttatgttttaaaaacctaaatgaggaaatgaatattctggctaagaaaaatattttcccattatacaattgatgtgt

SEQ ID NO: 36 - DNA, 501 bp, Homo Sapiens
ccagtgacatccctaatacagaattcatcaatagaaaattgcagtgtggacattcaaacagagcaagaataaaaccaacagagagaccgggtctcttaaactgccccaatatactggcagcaactccgagagaaatgcttgttattttctcacactgtcaacccttggaataacagtctagctgatggtccaccaaagaatccagcctgctgcttattcgagataaggatgaattgatacacacacagaacctgatacgtgacaaagcaattctgttttggattggattaaatttttcattatcagaaaagaactggaagtggacaaacggctcttttttaaattctaatgacttagaaattagaggtgatgctaaagaaaacagctgtatttccatctcacagacatctgtgtattctgagtactgtagtacagaaatcagatggatctgccaaaaagaactaacacctgtgagaaataaagtgtatcctgactcttaaa

SEQ ID NO: 37 - DNA, 339 bp, Homo Sapiens
atctcccagcatattagtgagaacatgtggtatttggtgcgtgatgtgagtccacttaggggaatgggttctccacctccatccatgctgctgcagaggacatgatctcggttgtttttcctttaattaattttattcattatgatttatactaagacaggtaaaaataactcaaaaaagtctgagtctttttgcttctgagtaacagtggtaacagtaccagcaacagtagcaaggatggtaaaaccaattcttagtttccaagcccgataagaaatgtttctatggaaaggaatcagtgaaaacaatgttactgtctttacacagtaaaatatgtgc

SEQ ID NO: 38 - DNA, 356 bp, Homo Sapiens
gatttctctaagaatagcacccccttccccattgccccagcttagcctcttctcccagggagctactcaggactcacgtagcattaaatcagctgtgaatcgtcagggggtgtctgctagcctcaacctcctggggcaggggacgccgagactccgtgggagaagctcattcccacatcttgccaagacagcctttgtccagctgtccacattgagtcagactgctcccggggagagagccccggcccccagcacataaagaactgcagccttggtactgcagagtctgggttgtagagaactctttgtaagcaataaagtttggggtgatgacaaatgtttccaggcaaaaaaaa

SEQ ID NO: 39 - DNA, 224 bp, Homo Sapiens
cactggcccggttcctgccatgtctgtcacaagctcccgtgctcaaggaccgccatagaaaatggctgcagcaacatatggaattttttttactaaagcaaattcttgtattatatcaatggggcttagatgagagacataaagtgaagccagaggtcaaaagcctagaatgcctggttaaggagtttatcatacaggaatccattcaataaatacatcagttc

SEQ ID NO: 40 - DNA, 383 bp, Homo Sapiens
gggttgatcacagaccaagagtgacgagtgatgcaccctgtgactcatggccggaccttcttgcccctattgtctcagcacaacattattcgacttttccctcagcgtgggtgggcagaggaaaagccctgtggctctggggacttgggatccagagttgaagacccttcagcatgctctgccctgccagtgccacagagtccatggcccaggaagacaggttttcttccatctaggccaggccatccagtggccatcctccgtgtcctcccgcctcctcctggtgtgacttctgaaaaccaagaatttgttcctgttgactttttctgtgctatggaccattgtcctctcacccactcaataaatcttgaaacatgcaaaaa

SEQ ID NO: 41 - DNA, 995 bp, Homo Sapiens
taccctatcatcaccagtaaaacaatgtaacctataaacagtggggtattccttcccaggcagagtttccagaagctgcaagctacagtcatataaaacaacactgtaagcactgagaaggcggtttcaggacaggcttgcaagtggtagcctggggtagatggatctggccatcatgacccctaatgatagaaatgccatgctgccactcaaattcacaaagatccacagtctcttttcaaggaaagcagagtgaaacaaaatgtatttcttactttctacgaaacatttctgcaaatatgcagccaacactccagagatccacgggggtggcgtagctggactggagcaagacttcgggtgctctgtaccacagcgtgacgaccactgaggttagagccatctggaaactatagatgcgggcaaggccgaagtcagcgagttttatttgtccgctgctggtcaccagaatgttctgtggttttagatcgcgatgcactactcggtgtgaatgaagaaagtccagacctcggagaagctgaaacatcatatcctttatggtttcagtgggcactccaggctctggaactttatccaagtaagtggtcaagtcttgatcgacatgttcaaacactaaagttagtttggtttctctgtctgttcgtgacactgtgcacacatcaaacaacctgaccacgttggggtgctcgaaggtctccaggtgcctcagcaccgccacctcgcggatggtggagagcggcatgccctcctcgccggtctgcacccgcacgcgcttcaacgccacgaaacggcctccgttcttcaagtcgctggccttgaacaccttcccataggcgccctccccggatctccgccacgcattcgtactgctggtcagcgcggcacaggccgtccttctccatgccgcctggacgccgcccgccgcggcgccgctggggcgggcggggggtgcgctcaactagctggcggccgca

SEQ ID NO: 42 - DNA, 134 bp, Homo Sapiens
gcggccgcggcggcgacccgcacgctcgccctacggtgcggcctacgagtctcgacgtgcaagctgcgagcgaggccagaaacgggcacagcgggccgctgagctgccccgagactaccccaccaaagtcttct

SEQ ID NO: 43 - DNA, 252 bp, Homo Sapiens
cccctcccctcccgccggccgcagacccgcaggtgcccggcagatggcacgcgcggcccgcggaggtttcgcgccttcttttctcgcctccagaagtcccagaggtgccccgtgcccagggcgcggtgtcgctccttcggatcccaacctggacccccggttggaggtatccccgctgtgaagtggggcaatcagaggcacattgtgaattataccggtcttaggcactttacttttgagggccccttctat

SEQ ID NO: 44 - DNA, 242 bp, Homo Sapiens
atacggaagtactgtccactattggtctccactacccagtcactgaccctgggagaccccttctgtgtgggagggagcgggggctggctagcgggccccccagccaggtatcccaaaggctgagggttggggaaaggaagccatcatctcattacctctgtcagtgcaggggtggctgctgcttcccttgtgcacttgggtcgctgtgattgtgaataaaagtgatttcgtaccagcctgaa

SEQ ID NO: 45 - DNA, 299 bp, Homo Sapiens
tgtgatcgtattacttatgcaaaacgagcccagtcacttgcgcggccagagaggggcaggtgctgggcggcggctgacgggcgcagcaccctaggcccagtgtctggctccagccccgcatccggcgccggccccgcatccagctctggccctgcgacaatagagtccggaagtgcaggcaaagcggctcccgggagcgccgcgcggtcctgcgcgggatcagcgagggccgcgccccggcgggcgggcggcatggctgcagtgctggctctcagggtggtcgcggggttggcggccgc

SEQ ID NO: 46 - DNA, 723 bp, Homo Sapiens
acgtcgagtcctaggctcaatatgtgtacatttggtgcacggagtatcataggatgttggctcctggggtaggtacatgcgtgagggcttgtgtggaggtgtcatctcttcacccaagggggtcttcttgggcagcatattactgggagtgtcagggtcagaggcctctagcagtgttgttggggtccaagggcatcatttaggggagctgattgtgctcaggaacctgcaggaggacagcaggttcatgacgaggcgcccccaggccgccatgccgaggttcatctgcgaagccctcaggaagtcctggcctctgcgtttagagaagatgcgttcctgcctctgcagccggggccgcctctcaatgacaggatcgcagaaggtcacctgggcaaaaagcagtccctgcggtaccaggctgagggacagttggtgacaggcattgtccaggaagtcctcaagtctcaggaaggccacgccacatagctgccgccagtcccgccagtgtaccccaatctccagctcacgggctcgctccagtggaatgacaaaggtctggtcccaggactgttcggccacctgcccccagcccgtctgccccacaacacggttgtccacctttagcacagccagcacctcgctggcaagctcgcctcggccacgctggtgcttggccttggtcagaagccagccctcggaggggctgctggccagtgcggccgc

SEQ ID NO: 47 - DNA, 278 bp, Homo Sapiens
gtctagctttacttgctccccgccggctcaggcgctcgggcgctggggctttcgccgctgcagaagctggatggagagacctccccgcggggctggcgtaaccctggtgccgccgccgcgaaacttcgcctgcagagtcgccgccgccggcgccgccggaggagcgagccgatccctcctcttccctcctcgaagcgaagtcctcaacacagacacgattacatagcctctgcccaagcgcgtctcagtccagaatcattgcacttttctttccctgc

SEQ ID NO: 48 - DNA, 475 bp, Homo Sapiens
agcagagaacagtgcacccccctgtacccatcattgtgtaggtagttcatgccccgggccacatgcacagcccagttgaccagcacgtgaggtggcacccggcgacctgccagcaccctgctcagtgcaccaccccgggcatactccatcactaggcagaggtgtggggggttgaggcaggcgcccctaagggcaattatgttggggtgctgcagggctccaaagagccgggcttcctggcacacctgctccgctgtcactgccgggtccttctcagggtccagccgggcggccttgactgccacctcctcgccacgccacagggcccgatagaccttgccaaagccccccacaccgatgatctcctctagctgcagctcgtggaaggggatctcctggggcagctggaggcccgcgggtgcagcgggggcgccgggggccacgtagttgctggggaagacgcccacgcggccgc

SEQ ID NO: 49 - DNA, 833 bp, Homo Sapiens
  misc_feature (617)..(642): n is a, c, g, or t
aacgtaggctaggtacgaggctgggtgcgaattcggcacgaggccgcaccaggacatcagccgccgcgtggacgccttccagctttgagctgcgcgaggacgggcgccccgagctgcccccgcaggcccacggtctcggcgtagacggtgcctgcaggccctgcagcgacgctgagctgctcctggccgcatgcaccagcgacttcgtaattcacgggatcatccatggggtcacccatgacgtggagctgcaggagtctgtcatcactgtggtggccgcccgtgtcctccgccagacaccgccgctgttccaggcggggcgatccggggaccaggggctgacctccattcgtaccccactgcgctgtggcgtccacccgggcccaggcaccttcctcttcatgggctggagccgctttggggaggcccggctgggctgtgccccacgattccaggagttccgccgtgcctacgaggctgcccgtgctgcccacctccacccctgcgaggtggcgctgcactgaggggctgggtgctggggaggggctggtaggagggagggtgggcccactgctttggaggtgatgggactatcaataagaactctgttcaccgcnnnnnnnnnnnnnnnnnnnnnnnnnncaaacacccggccacaaatgggtgtgaaaaagagaaaaagaattggcgacacagtgcacacaacgaggctcctcctgtgaccagagaatttgttgtacaaaatgtggtaaaaatactcgcgcagcccccctatataacaacaagaattaaaaaccgataaagcacgaggtacccggcctaagcacaccctc

SEQ ID NO: 50 - DNA, 478 bp, Homo Sapiens
  misc_feature (452)..(452): n is a, c, g, or t
caggtcagaggcaagaaaacctctttacaggtttttagtggggggcttatggagtatttcaggagttctttgcaaattaaatcatcttttcacttgtattgtttttcaaaactttgttgatttctaaaatgtgccaactgtgagtaaactatggtatttgcaagtggtttttacataatatttgagatgaggaagtgagattgtgcatgacatacttctcctttgtattctctcagtgccttacagcaggttactccattctgctatgacaactcgtttcaaatgttaatttacataggattttttataagccattaaggcatatgtatagtatatcagtaaagatggatggtgcatatataaatagtcttctgtaatagtgatgggatttacttctcaattatgagagacaaaaattatcccctcacctgtctctattctttcaacaggtngatcccttttcatgatttttcattag

SEQ ID NO: 51 - DNA, 444 bp, Homo Sapiens
gcggccgcctcactggtcgtagtcgccctcgcccgccgcctccgcccgccaccgcctcgttctctttcgctgccgccaccgccggggctcatgcgggacccgcgcttccttatccggaaaacgaggccgggaaagggagcgccggggccgccgaaatcccggcgttcgtcgccagccgccgctgcctgtccacaccggggggctgaggggccctcctgccaggggctacaggccgcgagctattccgaggaggagccgaaggaggcgccgccgcccgcagccgagcgcgccgggtcggcagaggtgaagcgtaagtaggcggcggatggcgggcgcccgcgctggcggatggctacgcggcggaggggtgcgcgagcgagcgaagcctggtgtgtcgggtcctggcgaagggaaaaggccccgggggctcctgttgtcaccccg

SEQ ID NO: 52 - DNA, 515 bp, Homo Sapiens
cccaagagggggaaccagttcccccaggagcagggcacgctggtcacgccagttgaagccatagcccaattccagcaccagaaggagcgcatggattccacccaagtaggcgatattctggaagacagcgcaaaggttcaacaaggaggtgacgaacgcctacggggaccaacttgacttctgggaaaaagaatttgtcacagccctacggacattcctagaaggtttccgcccacctggagaagcccaaaagattcaccgatcaatggagaagtttgccgcaagatacatagaatgcaaccaagggcaaactctgtttgctagtgctgacactgcttatgtcctagcgtattcaattattatgctgactacagacttgcacagtcctcaggtaaaaaataaaatgacgaaagagcagtatattaaaatgaatcggggtatcaatgatagtaaagatctgccagaagagtatctctcaagcatctatgaagagatagaaggcaagaaaaatgcaa

SEQ ID NO: 53 - DNA, 476 bp, Homo Sapiens
ccctgcccaggtagcatgtaatctttgtacctggtaaggagtgaaatggcttccaattttacggactggttgcttttcattcatatcttcttgccatccctgtctcatgggtgagcacatttcctggatttaaaatgtatgggacagcctgtgagaattacagattccagggaagggccccttttggcacggggggtctgacggtcagagctaatcaggtgtggaagaagctgcctggagaggatccccatctgcatggaatgcccccttcgtggggatggctggcacagctcacacacggaggcactacttcagtcctcccattaccaaactccagggcacacgtgccactgtgtcttgcccacaaacatgcacacagagtatcgatctgtctgatgtttcagggacccagccatgtcatggagggtacatgggcaggtaccatctctgcctgtacatgggcaggagcccggccc

SEQ ID NO: 54 - DNA, 646 bp, Homo Sapiens
  misc_feature (49)..(49): n is a, c, g, or t
gaggggccaggcttgcagcacgtggggctgtatacgcctaacattgtgnaggccactgagagggtggcaactgctggaggccagttcctggctccccatggggcatactacagcagccaggaaaggagaggcagatccgagctgcagggcacgagcctcatctgcttgctcgacaggggatcctgctagatggtgataaaggcaagtttctgcttcaggtcttcaccaagtccctttttactgaggacactttcttcctggagctgattcagaggcagggggccactggctttggtcagggcaacatcagagctctgtggcagtccgtacaggagcaatctgccaggagccaggaagcctaaggatgcccagggctgggtgcagccagctgtcctgcagctttgggaagaccagcacagaactgaggaacatctgcaggaggcccaactagtgaaaggctttgcctccggggggcaggtgtgacttccatttcatcagtgcctgccagaagctgtgtctctcattgggctccaaagaggtgggattttttaaaactaaaacatttcttatatacagtctataataaatatgtaagatacaaagaacaataaaagaattacacactaggaaatagaacataaccaaa

SEQ ID NO: 55 - DNA, 439 bp, Homo Sapiens
gtatatcctatatctacagtaacaaattgctgaaacaactataatggttccccaaacaagggacatgggtaattcaaacacggctaccacacagatgttgaaaagaccaaggcagacatgaactacagatatgcggtgcttacccagatgtactagtaactcaacagtccacagtgcaagacaggctgtgtggtgtacccacgcctgtacagctttacacatacacaggttctctggaaagaaactgcagcaactggccatgacggtggcctctgtgggaagggagcgctgggggttagagaaagatgccactgaatcacccacaggatttgaagttcaaacatgtgcaggtatggctttgaacagttttcacacatctattcataggtgaaattaactggaaggaaactagcaaagcatttgccattgggccagcggg

SEQ ID NO: 56 - DNA, 340 bp, Homo Sapiens
ctgcgcgctcgttcgtccgccggccgcgccgcgggctctgggcttcgctcctgggtttctcccccaccgcggagggcgaggacagggaggcggcgacacctcaggaacagcgtcccccgagcgtcccttacagcacttctttccggctctgcgagcgccgcgggaccagttgtccacccgatccctccctctaaaaagtcggcgcgtctctcggtccctcccctgcgcgcgccctcccgcccccgcgcgcagccggagctcagcggggacccacggcccaatcaaaaattggaaattaaaaaaagattaggagcccagcgagcctggcctgccagccctg

SEQ ID NO: 57 - DNA, 446 bp, Homo Sapiens
  misc_feature (310)..(310): n is a, c, g, or t
  misc_feature (359)..(359): n is a, c, g, or t
  misc_feature (365)..(365): n is a, c, g, or t
  misc_feature (394)..(394): n is a, c, g, or t
  misc_feature (433)..(433): n is a, c, g, or t
gcacgagggaggcctccccacctaccccagcacacacactccctgccactgttctgcgctttaattgtgggagaagagaggagaggagggctcagcggtggggcagcctgtccggggcgctgacccaccatcaccctgtctctgcccagcctcgcgtgacctcagagaggtggggataggggacaccttcagcctccagcatgtgtggccactgtacccccacccacccttgggggagcatgatgggcaggtgagggcaggatggagaccaagggagtcagtgagcagaggccctgggagtgtccggttngggttggactgaggacagaggggcccacacttccttgcccctttgtgtnccaggnctggtgcccagactccttgcatggttgtntggtctcagacttcgcacagcgagcgtaggtctctgggnttcagatgaagtg

SEQ ID NO: 58 - DNA, 653 bp, Homo Sapiens
cgcacaaccaaccaggccctcaaacccttcgccctggtgcggctggccgctccctcctggccagctcctccgtggggtcctcgtagcaaaggcgaatttaagggttgcccgggcgcccctcgctccaggcgggtagctgtggggacctacacccgcggtactccctgagcggccggtccctgcctggagtgccctggtagggccggcggcggctccgtttgggacggatcctgcgttgaatttgacttttcgagggcggccgcgggtaaactcgcctctcccggggaccgcagggattatttacagggagctcgccaaccaaacacaacagtctaacctttccaagtcctcgtaaatttttacagctgggagccacggcgaggcaaacgaatctgttggtcgtttccgacttcccgccagcctgtgtggcttctgaaacaataactccttatgaaatatcataaatatagagattctgaatgatagtcatactcctggaacaaaggtgtatgaggttgtaaatgaagatccagaaactgctttctgtactcttgcaaacagggaagttttcaatatctgatgagtgttcaatccaacattgttatatcagttcacccgtaatgagaacttcgagagcgaactgactgctgccc

SEQ ID NO: 59 - DNA, 296 bp, Homo Sapiens
tggtccttcctgccatgtcattatccgtttacaggtgtgcctcaaatggtctctagaaaaaagagtcaataatacgccatcaggggatctaaagacatagatgctgaataccgatgctgatgggagaatagtccttggattctatacaactgaggtgtgcactatggtatgaactgacccagtataggccttcttgggatcaccgagtcagaaaaatgagagaagctgttaattgtacatctgtaggaagactctgaaagacttcagttttaactaaactcagttacaaccaagtc

SEQ ID NO: 60 - DNA, 425 bp, Homo Sapiens
taatgtgaataaagttatgttctgatagtttgtacagaaaaaataaaatggatgcccatgttttattgctattactaaatgtcaagattgtatgctaattatgtcttgtaaatttcttttgttggtgtaaatatggaaatgccacattggttaagtgccatcatttgtaatgcaatgtgtcacttgaaaagagatttgaagaaactgacaacttcaaaaacaaatgagaagcccaaggaactgtgagcaattaaaagcaaaccgcgacaccctttgtctccaccacacatagtgtactttggaagcacaacgtccaggctggtaccgcagcgccatgcccatgcctcgcctcgttcataggacacttcactgccattttctattcacataaaagaaaaataaatgtggaaatttcatccttggaa

SEQ ID NO: 61 - DNA, 310 bp, Homo Sapiens
ctcctgcccatgtacccgaagtagctcaaaacattctggtctgattttttctggccctctgttcacactagtttctgagatttcaaagtttctcacaatgttccatgccaagttcatatggtccaactcccccatggtccatgctttcatttaactgacccccctcctccagctcatcctcagagcccgcgtcctctggctggtccaggtctatgtcaaacactcctgccatgtcctcagcttccctgtactcggaagtccggggctgggtaaaagccgtcccgcctccttcgtcgccacatggcagagc

SEQ ID NO: 62 - DNA, 179 bp, Homo Sapiens
cagaactccaaagtcctgaaaattttggtggacaattgatttttaaaaaactaactttgtataacctaatatttgtattctctcatctatattttcatattcactataatcatgatactcttctaatagacttaaaagttaatcattgacaacgaaaaataaaatgttattttaaaaaa

SEQ ID NO: 63 - DNA, 421 bp, Homo Sapiens
cagggccatgtacaggcttcgtgccatgtaccagccttctgtgccatgtcacaaccttccatgcatgtgtacccagccttccatgcccatgcagacttccatgctcatatatccagccttctatgcccatgtatccagatttctgtacccatgtagcagcctttcatgaccacataccagcctttggtacccagcctgctagccttcagagagctaacattctatttagagggtgatgagatgggtgtcatttgcagcctgttgcaggccaaagccagacgtcagcctttcttgcaggcctcaggagagcgttaccatgtggagccccacccagaacatctctgcggggcctacccctacgcctacccgcccatgccagccatggtgccacaccatggcttcgaggactggtcccagatcc

SEQ ID NO: 64 - DNA, 655 bp, Homo Sapiens
gttaagggtgtgtacgtatggcagtgatgtctatgttgagattaacttatgtattgaggaaaatttgaagtttattttttcgatgaataaggctgtcaaatgatttagtatagattaatgacatcttttttagaaatattaaagtgagtattcctcattatgtcatcatttctgataattagagtgctaatttgaatgttagataatgtttccacatctatacctatttctttctagggcacttctgaccctggggcttggggatgcctttaggccacagtagtgtctgtgttaagttcactaaatgtgtatttaatgagaaacattcctatgtaaaaatgtgtgtatgtgaacgtatgcatacatttttattgtgcacctgtacattgtgaagaagtagtttggaaatttgtaaagcacaaaccataaaagagtgtggagttattaaatgatgtagcacaaatgtaatgtttagcttataaaaggtcctttctattttctatggcaaagactttgacacttgaaaaataaaaccaatatttgatttatttttgtaagtatttaggatattattttaaataaatgattgtccattatcaatataatagttgtgaaatgatttaagtaaataaactttatgcttctgtgtctgttg

SEQ ID NO: 65 - DNA, 210 bp, Homo Sapiens
tgagccaccgaacctggcctgcctgtttaaccttttaagatgtgacttagacgcaagaggaaagttctaccttcttcctgtcccttaggaatggcttaagtaaaaggatgatagggttaagagtttttttaagagatggcctcaaccatttcctaccccttacctacctgcttcagtggatttcatatttttctttttgacatgggcagg

SEQ ID NO: 66 - DNA, 469 bp, Homo Sapiens
catgacagatacattcatgcacaatccataatttgagttttacataaaatagaaatttgttagaatttgttagattttattgcaatgatgcctaccaaacatttccagacttaacattttggtctctgcagttaagtgccatgaaaatgcgcttgaattattcattatgcagtgttattggtaagtgtatttccacttttagtttagtgaattctaacacataattcttgaattctctactactggcatgtaacgaatttaaattttttataacatagtgcaagctgcctaaatatgtattatttgagaattgtgaaacagatagttatatgtatacaagtcaaagaacaacttaaatattgctgcaacaggtttttcttaatggttatcctcttaaatacacctgctggtacttggtgtggttaaataggaaaattgttattaaataaagaatttgtatgaaacttta

SEQ ID NO: 67 - DNA, 391 bp, Homo Sapiens
atgtggtctgtacgagcctctaaggagaagattcccttcatgctgtaggtgacatgctttctgcttaacagaacagttcattctttcattctagaaacatttactacatattttagtgagcacttaatgtgtacaagatacctgtcctaagtgctttaggtacggcttattttaatgaagccttagaataactcaaggaggtaagcatttttaggtgaaattctctttacaggtaaggaaactgaaagtttaagtaatctgcccaaggatctccatttaggaagtggcagggctagcacctgaatccaggaggactgacactagggctctgaagcacagtttttatgggtgccccaggagcaatcagagatgtagtctgagaagagagaga

SEQ ID NO: 68 - DNA, 606 bp, Homo Sapiens
agcgttaaatgagttcttaaagatcagttgtaattatagcataatatctaaacttggcgcgtgtcttcaaagttaaatattgagtacgattccgttccagttaacatggatagaccttagggagtagcgaaataggatgttagtggttttattcctttaaatcacatctcaaaaggccaccaatggctagtttgggatcttattccgaaaatagattgatcctcatgcagtcttcgtgaggacagagcgatttccttgttgcctaccctgtccatagtgcctggcacataggcactgaaacactgcatgttaatccacaccccaccccacctatgagtgtagtcaaagctggtaagtgacaagggctttcgtggaaacttggcctgacctaatgttgggcatcaggttacccaaagagcttcagggaaatgagaaaggacttgcaggtcttgatgagaatggaggggtaactgccaatgagggctttggctttagcgaaagtctgaaagggaagccataggaacttaaacgtaccgactataaagctctgagaaaagctgatgttttagaaagaccatacattctaggtacaaatacctaaaaact

SEQ ID NO: 69 - DNA, 330 bp, Homo Sapiens
ggtggtgttattgactcagttaaaacaatctgtgttggggatcatattgaatccataaatggagaaaatattgttgggtggcgtcactatgatgttgctaagaagttaaaggaattaaaaaaggaggaactctttactatgaagttaatagaacctaagaaggcatttgaaatagagctgaggtcaaaggctggaaagtcatcaggagaaaaaattggttgtggaagggcaacacttcgcctgagatcaaaaggtcctgccaccgtggaagaaatgccttctgaaaccaagcaaggcatgaaaagatgatgatgttctgagtgtacatgg

SEQ ID NO: 70 - DNA, 1005 bp, Homo Sapiens
atggtttataaaattatgtttcatttattctctcatttgatcctgttaacaacccaatataaaatagaaggcaagcattattatttccagtttacaaaagaaacacaatcagagaacttgggtgacttgcccaaagttacagagctcataagtggcagagttgagaatcttactcaagtggtcggattcctagcacagggcacttttaattagatggagatataaaatttaaaataaagtttgcatttaaccattaatgtctttttaaaaatcacatcttagttacgctgctaaagccatgagcaaggaagctccttcttctgtagcctgtatcttaccaactgagagtggtttccattccactagcttccagtatgttaagtaaaatataattgatcgtaactgttttccaaccaagtgacaaagaatatgctcatcatatacagaaactataaaaaataaagttacttaagttcaaattcacttttctaaagatgatcgtgttttttatcaatgaactataaaagcagtaagtttacaaggtaatacataatcaacttcctcattcgttattttcagtgcttcccattatgcccaatacacgcagacactggccaaatttagtttagctatttcaaaagactatttctgctgaattatatcaccaaacagagggctctgaatatttcaggcattattttagtcatcatgccttgaaaaacgtgtttttactacttacgtcgatattcagctccaagtctcaacatcagacggataggaaatactttagcccaaggagtttcccatttctggataagaatcccaaacaagtaaggtggggttgggagtactaggtcttgcagtgactggtaggtagatgtcacatataagaatccaccatgttctttactgccaaggaaactttgactgaagaaggaatgtcccaagttgctcaccacattccctaaaaacaaaaaagtttattagctactttgtatcaataaa

SEQ ID NO: 71 - DNA, 422 bp, Homo Sapiens
  misc_feature (154)..(287): n is a, c, g, or t
atcactttaataccttttttgaacatatgtttatttttcagactactcagtatcctccctcacttcttcaaataacaatctcaaaaataataatgtctattaacatgtactgagaatccacgtgccaggcagtgttgtaaagtccttagagggnnnnnnnnnnnnnnnnnnnnnnnnnnnnnnnnnnnnnnnnnnnnnnnnnnnnnnnnnnnnnnnnnnnnnnnnnnnnnnnnnnnnnnnnnnnnnnnnnnnnnnnnnnnnnnnnnnnnnnnnnnnnnnnnnnnnnncttacaggtattttaattcttacaacagtttatgattacgtgtgacttgcccatttatttggcctaaaatgatcctttttcaagtttgtcgtttagttccttattttaatgtgttcagatttagcaaacaatttc

SEQ ID NO: 72 - DNA, 750 bp, Homo Sapiens
  misc_feature (646)..(646): n is a, c, g, or t
  misc_feature (701)..(701): n is a, c, g, or t
cttacttagtagtttaacagtgcactaactggaaggcagagtaaagacagacagatcttgtttcggtaactctgttcttgaatggagaagcgtgatatttcattgccctaacagtggagtctgggccaagggcatgtgagtgagagtgtgctgctgactggtgcagttagtggagcaagactagagaaggcaccagcccttctgggcacacatcacaaacacagacctgcctaggttcctctctccttcccatcagtgtgtgcctgccatgtaactcagcaagttggagaacttcttagcttatttaatcttcttaaagtacccttggattttgccttccccatcaagttcctacaacccaaacctgtggaccagccgttctcttcttcacggttgacaatgtgagaagactcttctcgtcctttttttggacaccagacatatattggtggagaatatcagccatttaggcaggtgtattgaggtgtaacttatatacagttaaatgtactgttattagtatgtagttctatgatttaaaaactgcatataggcctgtaactaccaccatcatcaagatatagaacaatccatcttgcacaaaattcccctgagcatcttcagagtcggcttcctcctctctctncccagcccccaccttataatctctaatggtttctgccctaatggttttccttttncaggatatcatataaatggaataatcctctgggtaacttttggagtctg

SEQ ID NO: 73 - DNA, 349 bp, Homo Sapiens
tttaaaacaagcaactggcgatgaatgtgtaactttatttatacacgaagttgattggactgtgtcatcatgcctgattttgtatgggctgttgcatttatccctggggaacaggtttagctgaagtcaccaacacagatgtactccacagtgagaaaacaagtgtgggaacatggctctgaagagtgctttccacagtgacatacgacaggataaagttagtgccttttaggctctgcaattttgaattctgtggatatcataaaaggacacttggccgtagtgctcctctgtcttagaaaatctttttgacactgataatgcatatcagaatgcaggttaaaagcag

SEQ ID NO: 74 - DNA, 497 bp, Homo Sapiens
tttgtgacggtcaatgtctttacttctaaagcatacattggactcactatatattaacatcaaaagtggctacctaaatatggagtcattctttttaaaaatccaaatcctcacatttttatataagatccaaaatgacatgaaattaaactctacaatgttatgaatagtataacaaactgctttcagaaagcaaaatgaaaggaaaagaattagcagttgtgacggttgtaggcctgggttccatgtcttttgaggcattgtgacagagagccagcaccaaggggaaggaccagcccctccctgtggccacaggaaggaactcagtcagacagaggaggtgggcgtggctggtcagccttcttacggtgacagagaagcatggtggcatctccctgcccctcagggcccttggtgtgcccactgattagtcttggctctgaagcaggactgggttgagctgactggggctgtgccccaagcccctgacgctttgg

SEQ ID NO: 75 - DNA, 696 bp, Homo Sapiens
  misc_feature (553)..(553): n is a, c, g, or t
  misc_feature (620)..(620): n is a, c, g, or t
gtgagaggagtcggcgtttgaagaggtggaactcctagggcttttttgagagtgctgatttagaagaatacaaatcatggctgaaaatagtgtattaacatccactactgggaggactagcttggcagactcttccatttttgattctaaagttactgagatttccaaggaaaacttacttattggatctacttcatatgtagaagaagagatgcctcagattgaaacaagagtgatattggttcaagaagctggaaaacaagaagaacttataaaagccttaaaggacattaaagtgggctttgtaaagatggagtcagtggaagaatttgaaggtttggattctccggaatttgaaaatgtatttgtagtcacggactttcaggattctgtctttaatgacctctacaaggctgattgtagagttattggaccaccagttgtattaaattgttcacaaaaaggagagcctttgccattttcatgtcgcccgttgtattgtacaagtatgatgaatctagtactatgctttactggatttaggaaaaaagangaactagtcaggttggtgacattggtccatcacatgggtggagttattcgaaaagactttaattcanaagttacacatttggtggcaattgtacacaaggagaaaattcagggttgctgtgagtctaggtactccattatgag

SEQ ID NO: 76 - DNA, 306 bp, Homo Sapiens
ctgagcagaagtcgtccgcttatagtggaggctgctaggagccggtcagagggtgagtggggagcaggcgagcgagccacagcaggcaggagggagcgtcgcgcggcgcagaggagcgccggggcagggccgcggcggaaccacagccggagaggggcagcccgagccgggcgccgcagggtccccacccccacccggccggacagtgcccggtgttcccccgtgcgggggacggcggcggcggctgacgggaccgccgggacagcgggggtgttgccacctccaccgaggagccggcgcggccgc

SEQ ID NO: 77 - DNA, 652 bp, Homo Sapiens
agggcaggcgcgaggcgagcacacgcagcccggcggctcgcggaagcgagcgcgcgtagcgagcccagtctcaacttagcgctcggccccggcgcgctccggccaggccccgcgaggtctcggcgcggaagatggccggcggcgtggacggccccatcgggatcccgttccccgaccacagcagcgacatcctgagtgggctgaacgagcagcggacgcagggcctgctgtgcgacgtggtgatcctggtggagggccgcgagttccccacgcaccgctcggtgctggccgcctgcagccagtacttcaagaagctgttcacgtcgggcgccgtggtggaccagcagaacgtgtacgagatcgacttcgtcagcgccgaggcgctcaccgcgctcatggacttcgcctacacggccacgctcaccgtcagcacagccaacgtgggtgacatcctcagcgccgcccgcctgctggagatccccgccgtgagccacgtgtgcgccgacctcctggaccggcagatcctggcggccgacgcgggcgccgacgccgggcagctggaccttgtagatcaaattgatcagcgcaacctcctccgcgccaaggagtacctcgagttcttccagagcaaccccatgaacagcctgccccc

SEQ ID NO: 78 - DNA, 439 bp, Homo Sapiens
  misc_feature (12)..(12): n is a, c, g, or t
actaaacggaantaagcttgcgggccgcgtcggggccgtgccatgcggcagctctggcgcttgatgtggcggtgcaggtggtcagagcgcgtgaagctcttgtagcagaactcgcactggtagggccgcacgcccgtgtggatgcgcatgtggttcttgaggtcgtagttgtgcacgaacttggcgttgcagtggatgcacaggtagggccgctcccctgtgtgcttccgcatgtggattttcagcttgtcctgcctggtgaagcggacctcgcagatggtgcacatgtatggcttctccccggtatgggtcctcatgtgccgcggcagcttcccggcccccatgatgactttgtggcagatggggcactgctgagaggccttgggcttcagcttgcgctcttctaccaggggccagggtgggaagaggcctcccaggt

SEQ ID NO: 79 - DNA, 728 bp, Homo Sapiens
gcggccgcggtctcctacctgcggatggagcagaagctgcgccggggcgtggccccgcgccagccccgcatcccgcggccccagcacaaggtgcgcggttaccgctacttggaggaggacaactcggacgagagcgacgcggagggcgagcatggggacggcgcggaggaggaggcgccgcccgcagggcccaggcctggccccgagcccgctggactcggccgccggccctgcccgtacgaacaggcgcaggggggagacgggccggaggagcagtgaggggccgcctggtccccggactcagcctccctcctcgccggcctcagtttaccacgtctgaggtcggggggaccccctccgagtcccgcgctgtcttcaaaggcccctgtctcccctcccccacgttggggacgcccctcccagagcccaggtcacctccgggcttccgcagccccctccaaggcggagtggagccttgggaacccctcggccaagcacaggggttcgaaaatacagctgaaaccacgcgggcccttagcacgcgccccagcgcccgagcacggtcagggttttcttgcgacccggcccgctccagatccccacagctctcggccgcggacccgggccgggtgtgagcgcactttgcacctcctatccccagggtccgccgagagccacgattttttacagaaaatgagcaataaagacattttggactgtcctgaaaa

SEQ ID NO: 80 - DNA, 205 bp, Homo Sapiens
ctgttaaccttcaagttaaagtgtgcaaaggaatctgaaatttgctttcaatattgcagtctatcttcaatttacagaccttggcttttctaccccaattcaagaagtcacttcttcagtcaaccaaaccaattacaaaattgtgttccaatgtcacatgttcaaaaataaacagttcctgaaaagatgtaagctttaaaaaaaa

SEQ ID NO: 81 - DNA, 549 bp, Homo Sapiens
ccctacggcctctacctctgttcacatcttgtgatggggtcaaggttgccctcccagagtagaaggacaggcaaaaggtgatgctgcaaggatggtgccgagacagcagtggcacgctgcaggcgctgcccgggccagggaacttaatggagtggggacggacgtgcggctccactggttcccggactcctggtctccactgctgggcactcaggatctgcccggaggccttggacacaggcaccactggcagagcttgcccatggccctgctgccccattgcatggcttcgggctgccccccgaggggtcagacctgacgcccccacataaggttttcatgtatgaggggctccgggctgcttccctcccacctggggctagactgtgtgtggttcagagggagatgctgggttgggggcgcccaccacactggcatggggaccctgggccagcgggccctactctgggtggtggtttctcccctctaagacaaagaagaagtgggttgcaaatctttctgtaaataaaatgccacatggcaaaaaaa

SEQ ID NO: 82 - DNA, 565 bp, Homo Sapiens
tcgtgcctgccctgcctctccacgcacagtgttaaggagccaagaggagccacttcgcccagactttgtttccccaccgcctgcggcatgggtgtgtccagtgccaccgctggcctccgctgcttccatcagccttgtcgccacctggtccttcatgaagagcagacacttagaggctggtcgggaatggggaggtcgcccctgggagggcaggcgttggttccaagccggttcccgtccctggcgcctggagtgcacacagcccagtcggcacctggtggctggaagccaccctgctttagatcactcgggtccccaccttagaagggtccccgccttagatcaatcacgtggacactaaggcacgttttagagtctcttgtcttaatgattatgtccatccgtctgtccgtccatttgtgttttctgcgtcgtgtcattggatataatcctcagaaataatgcacactagcctctgacaaccatgaagcaaaaatccgttacatgtgggtctgaacttgtagactcggtcacagtatcaaataaaatctataacagaaaaaaa

SEQ ID NO: 83 - DNA, 550 bp, Homo Sapiens
  misc_feature (214)..(239): n is a, c, g, or t
  misc_feature (332)..(347): n is a, c, g, or t
ttctgggttgcctgtcggctttcttatctgcctgttttgcaagcaccttctcctgtgtccttgggagccctgagacttctttctctccttgcctccacccacctccaaaggtgctgagctcacatccacaccccttgcagccgtccatgccacagcaccccaaggggccccattgccaaagcatgcctgcccaccctcgctgtgccttagtcannnnnnnnnnnnnnnnnnnnnnnnnnttgggggctggggggtgggtagctggggattgggccctctttctcccagtggaggaaggtgtgcagtgtacttcccctttaaattaaaaaacnnnnnnnnnnnnnnnnttggaggtcagtaatttccaatgggcgggaggcattaagcaccgacccggggtcctctaggccccgcctggcactcagccttgccagagattggctccagaatttttgccaggcttacagaacacccactgcctagaggccatcttaaaggaagcaggggctggatgcctttcatcccaactattctctgtggtatgaaaaaa

SEQ ID NO: 84 - DNA, 724 bp, Homo Sapiens
gagcgtgaagaaaagccaatagttacggacttaggtgataaggttgatgacccaacatatcttaatcagttacaatctgaagttagccgctggatccgagaaattcgaaaagtgaccaaactggatcgagatcctgcatcaggcactgccttacagagaattagtttttggctaaacttggaacgtgcgttataccgcatccaggagaaacgggagagcccggaagttctcctgactctggatatcttgaaacatggcaagcgcttccatgccaccgtcagttttgacactgacacaggtctaaaacaggctttggaaactgtgaatgactacaatcctctgatgaaagatttccctctgaatgatttgctgtctgccacggagctggacaaaataagacaggcgcttgttgccattttcacacatttgagaaagatccgaaacacaaaatatcctattcagagggcactgcgtttggtggaggcaatttcaagagacttgagttctcaattactcaaagtattgggcactaggaaattgatgcatgttgcttatgaagaatttgaaaaagttatggtagcatgctttgaagtttttcagacttgggatgatgagtatgagaaacttcaggtattgttgagagacaacgtccaaagaaaaagggaagaaaatctgaagatggtgtggcgtatcaaacctgtccacaggaagccgcaggtcccaa

SEQ ID NO: 85 - DNA, 552 bp, Homo Sapiens
gctgttttatagcctttttcttccctcccccaaagaattctgtttgcctaactcccaaactgttggggtggtacattcctttaggaccaattaaaacataattgagggtcagtgatacatttggctgactctggttcagtattctcttaggtgattatattctctcatgtacagttacaggaaattaaaatgttaaagtaacctaaaatgaattcagaccaataaaatcaagggaaatacaagttgattgcattacttctgtatgttgcttgctattaaaaaggttaagaggccaggttacccaccagtccttgcactgttctgacactttccccaggaggaaaacaagtacaaaggttacggtggaggcataagtagaagagattgttaagaagggtattcatgtgtctttgctctttctgctttatgcctcagtttggtttaaaaacttctgtactggcaaatggtggtattcagtgtgggatagtgtcataactaatttgacaatttattaatcataaaataacaataaatctctagcttttacacttg

SEQ ID NO: 86 - DNA, 501 bp, Homo Sapiens
tggtattttgtatggcatctttttttatcaaaattcaagtttctccgggaactggtgggagacacaggatcccaagagggagatcatgagccttcagggtctgaaactgaagaagacacttcctcctctccacacagaatcagatccgctcgccaaaggagggcacctgctgatgaaggccacagacccctgacatagtcctgtacttgtgaaggatgaaaaggcagttgccagcttctgtcttttactgacttcgctttgaaatttacaaatgactgaagaacatttgtattggattttaagtcgaattttaaaaaagatttacatgtaagccatataaaaataaagggaactgaaaccaaattggactattataaatttcatcttaaaaataatcttttgtttcaccagctttctacttatacacttattccttggcttttgggcttattttcttgcactggtgcagatctggtaaacattaaaggcttgaaaaaccat

SEQ ID NO: 87 - DNA, 367 bp, Homo Sapiens
tgggtcctgcccatgtacaggactcaactccctgctcacactgcccagccacacagcctcactgctgtgcctcaaacacaacaggcacactgctttatcaaggagtccatgcatgctgttttcctgccctggaatgttcctcccttagatggttgcacagcttacttcccaggtcttttctcaatgtttcccctgacaagagctttctttgagtgtcctgtttaaaacttcttccctctacctccaccttgggcctccccagccctcttgtctatttctcagcattgcacttatccacatttaacatactatatattttatgtataggtctggcttgtctgccttgccctaccagaatacatattcc

SEQ ID NO: 88 - DNA, 499 bp, Homo Sapiens
cccacccaacctctctgcctggccagggtcctggccctgccactgtgtggcgaggtgtccttctagaccacatcagccccaaggctgggagcagtcgctccagggccgcagcagttcactcccacacatagaacccaggtcactgctggggcgattgaacaggttgcctggcttttctctgctgtcagtttggtgtggaggcctatgttctgccccatacaccccacaggccctgcttatggaaaggaacacaggcctccagcccagaggactgtgccgccctgttcttggccgtccacgtttcctctccctctagcaccagcaatacatttccctggcatggacagaaaagacagagaggacttatacaaaggctttgtaaaaccagaggctagcttctatctttgtctactgttatttcagctcagggcgggtaattaacatcattggaactagctattaggaaagaaaaaaaacttggttttttttacaacaaaaa

SEQ ID NO: 89 - DNA, 334 bp, Homo Sapiens
  misc_feature (18)..(18): n is a, c, g, or t
  misc_feature (74)..(172): n is a, c, g, or t
cctggacagcgtgtgtcntttggcaggagttctgctaccgaggctgtccatccggagggtggtgaagctggccnnnnnnnnnnnnnnnnnnnnnnnnnnnnnnnnnnnnnnnnnnnnnnnnnnnnnnnnnnnnnnnnnnnnnnnnnnnnnnnnnnnnnnnnnnnnnnnnnnngcggtggtgggagacactgagactacaaccaccagctctttgaacccctgcccctgacacggggtttccttgatggccttccagccatgttgattctaacgtgagaactgatcctttcttccacttatttgttatatacatgggcaggacccggcgagatcc

SEQ ID NO: 90 - DNA, 631 bp, Homo Sapiens
cggtgctcgttcatagcacaagcttacgctgagttttgaactgtcgttcacagctgcgtgtctgcatggtgtcgcatctgttgtacctttggggaaaatttgtatgtaaatgtacagaaataaaaacgttgccccattaacagatttcctctggaatgtcttccctacctcacctgatggtatccaccgaagggcatttcactaccattaatggtgagtaataaaatcctccgtgttcattcagacctcactgcgtcactactttgaacgcctctgtaagctgtgtcttcactcgcaccgaggtgggtggaggcaggcctctcactctgcttcgagtcctggtcttaaaggtagccaagagccagaggctggattaaacacacactgtttaccaagtgccactctcagaccacctgagagacggggggccatcagtaaaattaagaggaatttttttcccttgttcgtgtatgttctgctgatccgtggcctaaaggttcctagagacgtcaagaaatgaatatcttacactgtgattctgtcaggaaagactggtaacccaaaactctcttctctaatgtattttttaacgaaaatgacaaaaaatctttaataaagtatttataccaaa

SEQ ID NO: 91 - DNA, 383 bp, Homo Sapiens
tccattctggccatccacttctcccctctccattccggccacccacctcccatcttagttcaggccttcctttctcacctggaccacggtcacagcccccttcatggccactagatggagggcagactgaaagggacagctgctaagacagggaagtggcaatggtaacagcagagtttatgggcacctcacaacctgaaggtggtgagacggcagtaagctgggatgaggatgtgggcacctgctgcacagagatcaacaaacgcagagagaaggcagtgtctcggggctggagctcagaggtaaggggtggttgaagtgtaccctggaaaatcagtcaaggtgatgctaatgactgcttggggagacccaggactgaggct

SEQ ID NO: 92 - DNA, 296 bp, Homo Sapiens
ctcgaacacaccaggcacacccccaccttagggcctttgctctagccaaagcttcttgcaggaaagctcacatccagggagctgccagctaactcccttcttcaagattttcctcagctcccatcttctcagttagacttccaaggaccaccccgtctaatactgcatcctgcactctacccattcctcctgtctttttactctgctgtgccattcaccacagctcttatcctttcatgtatatttattgtgtatattgtttgtaactggcctccctctgctagagtgtaagctcc

SEQ ID NO: 93 - DNA, 316 bp, Homo Sapiens
tctatgttaggagggagacaatatctccctaattcaagttcgttaatctgaattttctataaccgcctaaaacagaatccaaacataatgtggaagccagactgcaggctctgaacttcggtctactactaactggtgtaacagactaaccttcagcactcatcaagatcctgggtttgtcctctcataccactaagttacttgtgggatttcatcatgggcacagtaaactgaccagaccctaaagccaccagatagataactactgcggtcatcctaagggcagaaacagccaaaagagccaaataatcatctt

SEQ ID NO: 94 - DNA, 306 bp, Homo Sapiens
gagcatctctcttaccagagtgtctgatggggaaaacgtactggtgtctgacttacggtccaaagacgaagtcgtggatgcctaggtatgtacctgcttcatgcctatctacagtggccttatccctccttccttcagaggcgtgcgatatgtggatggaggagtgagtagacaacgtacccattcattgatgccaaaacaaccatcaccgtgtcccccttctatggggagtacgacatctgccctaaagtcaagtccacgaactttcttcatgtggacatcaccaagctcagtctacgcctctgc

SEQ ID NO: 95 - DNA, 221 bp, Homo Sapiens
actcaccgagtaatgggactacaggtgtgcaccaccatccaacccaagctcttaaacactgcctgatacttcaagtcgccccctcacccagaatgacagctctctgaaactcactgcaaagataaaatgagctggtgagaacagtcaacccagcagcacttactgggcaccaggctcactggtgcccaaacatggccatgacgactgttctcatcactgcc

SEQ ID NO: 96 - DNA, 339 bp, Homo Sapiens
gctccctgcccatgtccacacaagcatcttcgttcactcaggactgttttgcgccccatccagccacactcaccgtagaagccactgcagcacagagccatgtggcacccctgctctcaggaccctccatctatagggtgggggatggtgctagaggagtttacgagggaggactgtgatcaactcacatgtgacagggggcaagaagtgcttcagggttatggaaggggtatgttgcctttgaacttgaagtagcttctccaatctccctgcccaccctaagctctccatgacatccactgtaattccctaaatgcaggtgcagcttccggaagagga

SEQ ID NO: 97 - DNA, 431 bp, Homo Sapiens
tgggccgggttcctgcccatgtcttgcagaatcttgaaagtagtttgttcctaattcaccttggtggtttccaatgctccatgcatacccaacaaatatttggagactagaaagtgaatatactcagagcacagagtcattatactgaacatgaatgaacagattaattgctctgttttctcaaatgtctttctttactcatgtctttcctctcaaaagatgattaagaggacatgcatctctcaagttcttaggagagaaaaattcaaacaagtcagcaatagctcactaatttcaaggcttattcaagcttgggctgcccccctgggagacattatagtggccctgagggaggcggcgcagatgatgatccagactgccactcatctctgtattctgtggagacagaggccatgccggggaccaaaaag

SEQ ID NO: 98 - DNA, 775 bp, Homo Sapiens
cggtgcctgacacaggctgatgcaggctgaaagctgctgaaagctacaggccatggggctctgctttacttctgccttccatatcttgtgtcctgcatcttaagtggtggaatcagagtttgcatccagaatactagctataaaggagtctggaaaagacagtttttagttttccaacttctgcgtttcaggaaggcatactacaaggaggaagtcgctgagtgatagctgatcctggcccaggcactcatcttcttaaacatagtatattaattacaatttagcccattcttgatggctcattgtcatttctgtgagcttctcttttcataatggcctgtagttggaataatcatagggccaagggattttaacatctgtagtaactttttgtcctaggttagcttgtatctctcccacctcccataactgctgctgagacatctatgtttgatatcatttgacgtcaacctcccctgcaagccacaggcagggagagcacctcacccaaagcaaccagtttataggctggtcagcaacctgtgatttctgtagcttaaaaagatgagtggggcttattgtcttttgaactaagacaaaaaggaaagaatttccaataaagggtgggagcttcagctgagaggttttgaagtgagttggctgtattcttttgcaagaccaattgttaaattttcaagaattttgtgagttgtcaaacagccatttttaagaattaagttgcataataatttaataaaaacaaagataaatactc

SEQ ID NO: 99 - DNA, 332 bp, Homo Sapiens
gtggctctagcctcaggctccagccccagtggggtactgtacagttaactgaagaagaattttaaagacgatttgaacaagaaaatgaaggcagtgggaaagcaatgccaaatggttgtggagaaagtggccggagcctccctggagtggagcagccctgaagcctgtgccccccgacccgcgggccgctgttttggtttgacatgacaaggaaaggacttcctgctgaccctgagagcctctggggtgccgcggcaccacggggcatgcatgattgtgctagcgtttagtctgagttgatatttttaaaactgcaagtgttgaatactaaa

SEQ ID NO: 100 - DNA, 560 bp, Homo Sapiens
gcagcggccccccgcgcccctcccgcggccctgctgcggcccaaggctcggctgctgccccggctgagcctaaaatcatcaaagtcacggtgaagactcccaaagagaaagaggagttcgcggtgcccgagaacagctcggttcagcagtttaaggaagcgatttcgaaacgcttcaaatcccaaaccgatcagctagtgctgatttttgccggaaaaatcttaaaagatcaagataccttgatccagcatggcatccatgatgggctgactgttcaccttgtcatcaaaagccagaaccgacctcagggccagtccacgcagcctagcaatgccgcgggaactaacactacctcggcgtcaactcccaagagtaactccacacctatttccacaaatagcaacccgtttgggttggggagcctgagaggacttgcaagccttagcagcctgagcttgagctcaaccaacttctctgagctccaaagccagatgcagcagcagcttatggccaaccctgagatgatgatccaaataatggaaaatcccgtgttcagagca

SEQ ID NO: 101 - DNA, 905 bp, Homo Sapiens
gcggccgcccggagacaccgagctcggccaccgcccgccccagcaatggctgcaccatgcacgtgaacggcaaagtggcgctggtgaccggcgcggctcagggcataggcagagcctttgcagaggcgctgctgcttaagggcgccaaggtagcgctggtggattggaatcttgaagcaggtgtacagtgtaaagctgccctggatgagcaatttgaacctcagaagactctgttcatccagtgcgatgtggctgaccagcaacaactgagagacacttttagaaaagttgtagaccactttggaagactggacattttggtcaataatgctggagtgaataatgagaaaaactgggaaaaaactctgcaaattaatttggtttctgttatcagtggaacctatcttggtttggattacatgagtaagcaaaatggaggtgaaggcggcatcattatcaatatgtcatctttagcaggactcatgcccgttgcacagcagccggtttattgtgcttcaaagcatggcatagttggattcacacgctcagcagcgttggctgctaatcttatgaacagtggtgtgagactgaatgccatttgtccaggctttgttaacacagccatccttgaatcaattgaaaaagaagaaaacatgggacaatatatagaatataaggatcatgtcaaggatatgattaaatactatggaattttggacccacacattgattgccaagtgggattgataacactcattgaagatgatgctttaaatgggtgctattatgacagatcacaacttctaaggggaattcattttcaaagactatgataacaatcatttcaagcaaaagccatgaacaggttatgtgttagacaagctgaacataggccaatgcttatg

SEQ ID NO: 102 - DNA, 667 bp, Homo Sapiens
gttagaaccgagatcaggtctaagaagtttactaacgtgacactgcagcgattagtcagcaagaaagcatctgaagatggtgagatttcccttggaggggctgggctcctactgctattagagatgtacctctctcagcgatgaactggtataaatatgaaattttaaagaagtggtcatggagaaatctggtttatatgagccaacatttatgatcaactttacttcaggggcattgtctggttcttttgctgctgttgcaacttaaccatttgatgtagtaaaaacacaaaagcagacacaactttggacatatgaaagtcataaaatttctatgcctttgcatatgtcaacctggattataatgaagaacattgttgctaaaaatggattttccgaattattttcaggcctaattcctcgcttaattaaaattgctcctgcttgtgccattatgatcagtacatatgaatttggaaaggcttttttccagaaacaaaatgttcgaaggcagcaatactagtgatgctgtttcaacttgaaacaacaactatagccaaagaagatggagactcttaggcaagaatgtttttcaccattattctctcacaatgattttatgtctttctttcctataatttaaataaataatttcagctctacctct

SEQ ID NO: 103 - DNA, 644 bp, Homo Sapiens
cttctatgtctacatgaagtgccatttagaaataatcaactcttaatcagcctgggatagtcagtactaaaagcaccttcatgagctgtgaaaaatttaatgcatttatttacatatttagttttaaattttagtatattgttagttgaggtatagtttccaaacaaagagccgtgaaatgtttagtaactgtctctgtacctctggatgaggacagctcagccgggaatggagggggactgggtgaggagaccagaatgtcagtgtggccacgcagcacacttttgttttgtcttctgtccttgagcactggcttgttcctggataaactaggcataataatacctatcctgctgtgtgggtggaagggttaaatgtgataatgatgtgtgtgagatgcctgcacagtgcctggaggtattgaagaattatttgctgccttttctttttctacctaccacttacccgctacccccgggtgctacatgttagaaaacactgtgtaaagtgtggatgcttctgaaaaatctccctgccagcagttagtgccaatagcgtgcagaaaataagatgcaatgatttggcttcttttctgtttggcaataagaagcttatttgcacatagcctgatttctttcaatctg

SEQ ID NO: 104 - DNA, 590 bp, Homo Sapiens
gtaatgagaggtcactcacttgaactttgccattccaggcattctcagagtggcgaggggccacctgcaagtggagcacaacttggtgctcttactgtgtccttcagaaagaataggtgtacagaaaggaaatggcaatcttatgtgtgctgaacaaagttttcaacaattcctagttgtgccttttaaaccatgcaatattcaggatagtttgaatcaaagaagtaagaagctgctatttgggtaacttatttctctgtgggaaggggcagggagagtcaccaaacaatctacctccaactctcttctcttttgtctagagacattacaaagtgcacttgaggctgcccccaacctctgacatttgttcttgcatgtgatgatagaaagtcttcagatggacttatacattctgtgctttggaagcacaagaagaacaaaatatgtgtatatttcctttaatgtttatacaaaagtttatatggagcagtattgttatgtttgtatgaatttgcaaaaattaaagtgtacaaagagattttgattttgcatatataaaataaatcattttattgattttcacaagttca

SEQ ID NO: 105 - DNA, 527 bp, Homo Sapiens
tcgcatgggatctacaaaaccgaactgccttaaagacctctttcacacggacgtgaagtcacagaactgacaaaatcccatcctgtcaaagtgcacgggtctttgaaatctaacacaaaaagccatagaaagattctctaaacaccctgtactaagaggaacacggacagggcactgcgttctgaagtagaggccagggcactggcccttagacacgtctcgctgtcaccgggctaacaacattggcaagggcggcggcagcagcactgatatttgcagcccccaagggctctggcgaaaccccctctattactctgtatcctgcctgcttccaagatgaacctgttgctgggaaagaacaggctaaattagaaaagggagtattttgtcaaagttgaaggtgagtgatagcctgcccgcctcaaataggatgggaaaaactaaggatattggggatgatgacactgtcgcctccgaattctggtcaggggctttctcccagccctcaagtgtccccacgcggccgc

SEQ ID NO: 106 - DNA, 243 bp, Homo Sapiens
cggctgcaacagatccgcgaccgccggtcagagagcttccactgcgtgctcggcaaatttcttggtttttgcgacttcacaaatctgccctatcatccggatgcgattgttgaggccacattccatgctcagttctctcagtatttccgcggtgatgataaactccgtctgtttaccctctgcagacctgggatttggcctcggtgttcccagtcccaacagaatcttaaacttctccttcaa

SEQ ID NO: 107 - DNA, 241 bp, Homo Sapiens
ctggggttctccgtgggcggccgacgggcgcgtgggggagggggttcgggccgcccagcgcggcaaggagcgagtgtgtgcacgcagagggccggggctacggggcagcgccccgggcgatgaggggccggcgttgaccgggaagagcgggcaccgcggcagtggctccgaggggacccgcgatggcagcgccctgagaggaggctccaggcagggcgggctgcgctggcagcgggccgca

SEQ ID NO: 108 - DNA, 672 bp, Homo Sapiens
tgtgcgtcgatctgagatccggtgtcccaaagatgcttagcatactccagaatctcatttcctgatcacggcatgcatgctgagaatggtctcagtcagggttctcaaaattgaagagggatccgaacctttctgggaagcctcctgcatggcaaatgttggcttgccaaggcacaaagccaagcgcagtcatgtaagctcaactgaaagaccccgcaaagttagtataaggcttgtgaactgccttgaataaatataggtaacaacttcttcaaacaggcttttttgtgagtttcaatcctgcacaactcccaagacacggttcctcggctccacaaatctttgataaataaaggtagcaaaaggtttctattaccatctacccaacagcatgagcatttcgcttgatgaaagacaagctgcaaactaacctggaaattcctgtccttttgcgaagacagtgggaaaactaagccaattagaaagcagattgaaagattccttacctggcccttcctggacatccctaaagcaacccttaatatgagcaaaatccccttcgaaaaatcacagtatatactatggacgcatcttctaagaggtgctgagtgggtgctgcgtgctgtggatggaaaggatggagcgccaactctctaaatacaagtcaccagg

SEQ ID NO: 109 - DNA, 354 bp, Homo Sapiens
gcggccgcctgctgccctgacgcctcaggcttgcctgcacctggaaggagcttcgccaggtgggccatgagcctctgagcacacccagcctgctgcccggctccaagagtcaggcccctgccaccacctcctgagcctccagccctcagcaccttcaccctactgaccgcggttctacccccacaccagccaccggccccaccggggcacttcccactgctccagccgaccactcagcgagccccaggcccacctctcctctcccttaaagcccttcccttgcccttgcccattcgctcctgccttctccctggggacaggaggcatgcttctccccagtttccacaataaaat

SEQ ID NO: 110 - DNA, 260 bp, Homo Sapiens
tgagttattgactgagagcaaataaaataagacagcagcagctgatcaccagtccttgcccaaggatgtggagacagaggaaatccacatctttggcgcctcttccccaacaagcatgtagatatcccagcctcaaccaccctgactccaactccccaacaagcatgtagatatcccagactcatccacccagaatccaaatccccaacaagcatgtagatatcccagactcatccaccttggctccaaactcgccaaca

SEQ ID NO: 111 - DNA, 540 bp, Homo Sapiens
tcgattggcggcacttacttggagttagagcaagctgtcgacggtgcccagcacacattaatgttagcttctttctgagaaaaaaatacctcttccaggccctgaaacaaaaaatacatttgctgtgaagattgaaaatgaacaaagttagaaaaaaaacagcaaaatcagtgatttagtcagatgagtttttcgttgtaggagcacttgatttctagtgtgttttgtacagtatataactacaagatagtacattttgtagcagttcaaagccaaagttgctagcatcattttgctgttgtgccagttaatcataggatcccattaaataagtgtgctaacatcgaatatagagaaaactggtaaagaacattccagtaggaaaagaaaagaacaatcttccatttctgggcttggccaccatcaccctggtcggacctgtcctggacttccaaccttgactgctgagctcctggcttagcttcttgggttcctaattcctggtgtttaataattctctccacgatcatgtttttctga

SEQ ID NO: 112 - DNA, 439 bp, Homo Sapiens
tgacccatgttgaatctgtttgtccgagtaaaccagtagagctttctggtaagtgtccagatcatgtttatgtctttatcaacagtgttatatggactaatacaatcactctatcaaatgagataatatttattcccttaccactgacaaatctctctcggctcttctattcaatcatgttactgatagacgcttagctatcggtctccgttgtgtaacctgattcgtcatatgcttattgcatgaatagctgttcttcttttaattttacaacaattttactatttctccttacatgtttataagtcatatggagactccttctcatctaccctgaccccagaatattaaaacttttcagagtttcaggattaattccattatatggacatgattccttgagataggaaaaactgattggattgtgacattagactta

SEQ ID NO: 113 - DNA, 222 bp, Homo Sapiens
ccatgtactggtctgactcatgatacagtagtagaatcagtagaagtgatgctgtacagagctaggccctttttaaaaggcctgacagctgccatgttcactctcttgtacactggcaccatgacagaaggaagtccaggctatcctgccgaagcacacatggaaagccctggagaaggtgccatcacctgtggagagagttgcttgaagaactgaggcctc

SEQ ID NO: 114 - DNA, 653 bp, Homo Sapiens
actgcgacctagtggaggcagttttgagtgaggtcctcagcaccacggcccatgcaagtgcccagagcttgccaggaggctcacggcggaccaaggaggaggagcagcagtgctaaagtccagccagcgagcagctgcatccagaaaccggccactacccagcccatctctgcctgtgcttatccagataagaagaccaaaatcccgctgggaaaaacccaggccttgacattgttattcaaatggcccctccagaaagtttaatgatttccatttgtatttgtgttgatgatggaccacttgaccatcacatttcagtattcatagatgactgtcacattttaaaatgttcccacttgagcaggtacacaactggtcataattcctgtctgtgtaattcgatgtatatttttccaaacatgtagctattgtttgctttgatttttgcttggcctcctttatgatgtgcatgtccttgaaggctgaatgaacagtccctttcagttcagcagatcaacaggatggagctcttcatgactgtctccagcaataggatgatttactataaatttcatccaactacttgtgatctctctcacctacatcaattatgtatgttaatttcagcaattaaaagaattgattaaaaaaaa

SEQ ID NO: 115 - DNA, 342 bp, Homo Sapiens
taacttactgccagacggcgacttactgtgggccaccctcagtgaaccggggtgtcctcagctggccctacagagcacttctgtgctggggatgagtaggaactctgggcgaggagggtcccagcgccgcccctcgatacagccaggatctgccctctgcccgtacttataccaggtgggatccctgccctgcattacctggggattggctgggcttgggcccgccctgctgtggaactggatgttttcagggagcccagcctttcctcatgtcaacacagttcacaatatagttttcaaagtacagtttaaaactcaaaagtaaacttttcagcaactcaa

SEQ ID NO: 116 - DNA, 349 bp, Homo Sapiens
aaggcaaggaccaagaacctactccgcccaaggcatagctgcttcgcaaccagatccatactgcaggagctcaaatggcccaacggacttacgaaggggaactctgtgaaataagggacctatatctcagcattacatcatgaaattcaatggattggaagccagacttacacatatggactgaccatctgtccagaatttgcggtgggggggaattacaggaacactggttatgaggttattttcctgggtttatatattttcaaatgattataaaaggacaaaccaagatgggtagattttgtcctatagctaaaaaattccaatgaggccaggagcagtggcttat

SEQ ID NO: 117 - DNA, 439 bp, Homo Sapiens
  misc_feature (193)..(193): n is a, c, g, or t
catagagtaagtgagagctggtatttgaactcaggtctctgggtaggaacgttgctaatccacataaaagcttcttttgtgcagatcttaaaaaggtggcccttcttctgggtagatacgtcctcatgccagtgtgcatggcctggcgattggagcttgggctagatgtcagccccaactcacccctttagancgagagccaatgtgcaatatgccacactacacagccttaagtgctgggcctgtcagtgtgcgtccacagtttgtgctcctagagcacaggaaccattctagcctcgggggcctcctggagttgtgagaggaggctttgttttttgtaaatactgaggaccacttggtcggtgatcttcctccctgaggggattttagcccaaggagagaagggggctcaggaacaaagttgaacaccaggccctgt

SEQ ID NO: 118 - DNA, 545 bp, Homo Sapiens
gagctcgggccgggttcctgcccatgtgcactcctgatcagcctcactctcacgcgttatgtctgcagtgccttcacacaagctgtttctttggcctggaatgacgcttcttcctccgttgaattaatccaccccgtattgcttcaatattcagctcaatcaggcccctcttgggagccttcattaactgttgggccagcagtgagctatggacgcactttccctgctccatggctgtgctcatatcacagtgggctcttaccatgaacttcctatcaacctcttgcaccggacctcagacactctgaggacagagccccagtgtgattcagctccatacccctatatccacatgactcagctccgtacccctatatccacgactcagctccatatccctatatccacaactcagctccgtacccctatattcacatgactcagctccgtacccctatatgcacatgactcagctatgtacccctatacccacatgactgagctctgtacccctataatccacgactgtccgtacccctatatcc

SEQ ID NO: 119 - DNA, 251 bp, Homo Sapiens
gccggtctcctgcccatgtgcacagaatacccacacagcaccagaaaatgacaaatgaccatcaaaagtggagagtacaaataaatttgtgcagtgttcctggagtgaaattgaactacagcgacttgcaataactgtaatatttgtcatatttggataataatatctgtgtattaacaaatggactccatcaatgaataaaacctacaaaagaatgcatacagtataattccttttagcaaaaattttac

SEQ ID NO: 120 - DNA, 257 bp, Homo Sapiens
  misc_feature (45)..(45): n is a, c, g, or t
tcagctcggccggttcctgccatgtagctgggactatgggctcanaccaccgtgctggctttttatttgttactttaaatttaatttattgttagtactgacacctaaacaatattaacaattttaattttttaagaccttaatatattttgaaggaatgattttcaccattgtatatttcttggtatttaaagtggtcatgtttactagagctggtgcagaagtgaatgtgttgaatgacatgggacatgggcagg

SEQ ID NO: 121 - DNA, 253 bp, Homo Sapiens
tcacgccgggctccgcccatgttgtgtaggacagtgttgtgcatagccaggcatggctacttatccttagaaaggctgcgtactaaggcccttggctggagtctaagaactcaaatttcaggagggttcccacaatttccagactgataaaaagtggctcaatgtgcctaaactgttcatacaaacaatttggtttatcataaacacctgtttccttctgggagtcttaaaattttagtacatgggcagggag

SEQ ID NO: 122 - DNA, 494 bp, Homo Sapiens
gtccttagaatcaggtgttttaaatccagtttcttttaattaaatgggactgtagtgatccctaccctgtagagaaatcaacagaactagagaagctaagggcttgatcaggtttcccctagaacctgtgttgcctgcctgctgtatcttccatgtctttcttattcaacttctagaagtagagaaggttgggacttgagtgtagaagaaacatcagaataatttcaaaaaacaggaagttggaactataatttttaaattattgtattgtttttacggattttacatgtatagttaaatattaaaattcatctcttgcagttcaataaaagctatagtatagattttatttttaagaagtttatataattcttttgtgaaccaatatgtaaaactagaatatttattaaactaataatatgtattagtatcaataaaatatgtatttatttttaaattggtatgaaacaaaataaaaatttgtagacactctt

SEQ ID NO: 123 - DNA, 498 bp, Homo Sapiens
gaggggggtggcacagcagcttgggtaccccccacacctccaggagctagtggaggggtgtgtaacagggtcataccccctccctcttgtccaccctacccccagggtaaggggagcctctctccttccccatcagactggatgtgcctttatcctctaatgccccaatctctctctgaacacccccattctccacctgttggtggggggtgctcctcgacccacccagatttgaccgttcagggggcctcccctgctatccctcctcccatcctgtaccccccatttctggggcctcatcactgtggaagacggggatagtaagagataagtgggtgggaggcacggggaaggttttggagtagaaccaggggtgtgtatgaaggggggtgacaaggtccccctggggaggggaccaaccttgtctggtggatgagaaggcgtatttatttttcactgtacagtatttaaaaagagaataaaaaaatccaaatgcca

SEQ ID NO: 124 - DNA, 731 bp, Homo Sapiens
  misc_feature (607)..(607): n is a, c, g, or t
  misc_feature (661)..(661): n is a, c, g, or t
  misc_feature (693)..(693): n is a, c, g, or t
tgcggccgcccgcaacagtgaaccccaagtctcccatcacagagctcctggagcagaatggaggctacgggagcgccacactgtcccgagggccaccccctcccgtgggccccgctggcagtggctacagtggaggcctggcgctggcggagtacgaccagccgtatggcggcttcctggacattctgcggggtgggacagagcggctcttcaccaacctcaaggacacctcctccaaggtcatccagtccgtcgctaattatgcaaagggtgacctggacatatcttacatcacatccagaattgcagtgatgtcattcccagcagaaggtgtggagtcagcgctcaaaaacaacatcgaagatgtgcggttgttcctggactccaagcacccagggcactatgccgtctacaacctgtccccgaggacctaccggccctccaggttccacaaccgggtctccgagtgtggctgggcagcacggcgggccccacacctgcacaccctgtacaacatctgcaggaacatgcacgcctggctgcggcaagaccacaagaacgtctgcgtcgtgcactgcatggacgggagagccgcgtctgctgtggncgtctgctcctttctgtgcttctgccgtctcttcagcacccgcgaggcccgcgngtacatgttcagcatgaaagcgctgccaccangcatctggccatcccacaaaaggtacatcgagtacatg

SEQ ID NO: 125 - DNA, 668 bp, Homo Sapiens
aggccagatatattgaccctgcaatcctgcgccggcccgctgggcaaaacactgtttgtgggttaaccgccccctgcagatcgccttgccatcttaaaaactatcacaaaaaatggtaccaaaccaccactggatgcagatgtaaatttggaagcaattgctggtgaccttcgctgtgattgctatacgggcgcagatctctctgctttggtacgagaagcttctatctgtgccctgagacaggaaatggcaagacagaagagtggaaatgaaaaaggtgaactcaaggttagtcataagcattttgaagaagctttcaagaaagtaagatcatctatatcaaaaaaggatcaaatcatgtatgaacgtttgcaggagtccctcagccggtgatgtctccagcagccggcttagaggagctagcccatcaagccggcagagaatcccccacacgctctgaaggacccactttcagctggacacaggcgcggcctcatgtaaacattttattttcaaatgaatgaggccaagctgaagctgaagctgaagattcttcccatctggccagccttgtgtgaaaatgccttcttcctctttaagaaaaaggacaatttttaaactgctgaaataaaatgactgttacatttttcaaataaaacttttacttt

SEQ ID NO: 126 - DNA, 456 bp, Homo Sapiens
  misc_feature (193)..(270): n is a, c, g, or t
acctgctcatctactcgggcgcgctgctggtgttcctgagcctgctgggctggatcctctggtacaccggcaacatcgagatctcgcgccaggagctggagcgcgactacggcctgcggccctcggcgctcgcccgcctggcgcgcaagctctcccgccgctggtcggcgcccgccgccgcgggccagcgccnnnnnnnnnnnnnnnnnnnnnnnnnnnnnnnnnnnnnnnnnnnnnnnnnnnnnnnnnnnnnnnnnnnnnnnnnnnnnntgcagctcgccacgctcgaggccgggcccggggcggcgggcgcgggcagcgagtgaggcccagacaaccccttggctccagctgtcaggaccagactgagatgtgcagctgcccctacatccgtggccagacggacgctccctgtaccccctccctcctcacttggataaaaagcagatttgcctt

SEQ ID NO: 127 - DNA, 432 bp, Homo Sapiens
cttctttagcaggtaacaaaggagcatcaggggcaggctgccctggtggcatcacactggctagtgaggccgtgaatatcttgtcccccagcagggccgacagtttctatcacagaaaacagtgtgttcagtggtgaaaatcgttgcatgcatgttttcatctgagcgtgtccttctcccatactccctatcagccagccctgcctgtagctgctgtatggtgattgcacttggacatcagtccaatgactgcaagtcggcctggattttcacttgcagaggctacagctgcattgtcaggtctccccgccctgcagagagctccctccactggttagcagtgtgttgtgttttccattcatttcagaagagctacattgtgtcactggacatttttaaaaactgtgatttttaataaaaatttaaaatttg

SEQ ID NO: 128 - DNA, 471 bp, Homo Sapiens
  misc_feature (92)..(92): n is a, c, g, or t
ctgtgctgcagattggcccatgtgggaagtcgggggggacctgatttcctgcttggaagacttggggggctgccgagcatatcaaagtgttnatagtcaccaagtgaactgcagcacgaccatctcctctccagcaagccctgaagtcagtagtgcctgcaggtgaaaccaaccagccctgtgttagaggaggaaaagcggagatgacatggaagtctccaagcctgtgccatccacctgccaaggaaaagcacaaggtgctatctacttttctctctaggatttagattatcatttatgtgctgttgcacagtgaaacctcacctgtgtgggcgtgaaagctgattggcattgtttttgattcagctttttggatggctaattgttttcactgtgctgtgggaatgcctctgtattttttcccctctttggccatctttttctgaaaataaagtgatggatcctctagcc

SEQ ID NO: 129 - DNA, 613 bp, Homo Sapiens
tccggaggccccggcgcccgcaccaccccggcccggccccgagagcaggctcgaccgcgcccccatggacccctcgcccaggccggggctggagggattcggccgcggcctccggtcctgggcgcttcccttttaagcaagggcgcctcacctgctcttcaagaaacagcgagagggagacccagggggctgaaacttgaactctggttcttttaaaattaattttggttggtgttgggggaggcgcgagtgcgtgtgagaagaaccgacccaccccgcgcaaggggaagcctcctgtctcccctttccccgcgtccgagaaggcggaaacccacagtgttacctgacttatgaaacttgaaaccgcctctggagccgccattctgcagagtatttggaaaaagaaaaaagggtttatgcttacgtctctggggtcggggggattatgtcacgagcgttcaaactgctggaaatctcaaaactgtactgtctttatttttgtatattgtatttatatataaaaagaaacgtctacgtatgcatgctaaattattatttagcttctcccatcgcccacgatggaatgtaaaataaattggttttgtactggaaa

SEQ ID NO: 130 - DNA, 473 bp, Homo Sapiens
tagacttctgtattatgaatataattgatatttaaattaatgtcttgttcacatatgtgtactttcatatttgattttaaaatgtacattataacctgtatggtattttatttaaaggagataaacagccaaatagcaaataggtcactgaatgataagatttgcaccttagaacaataatcattttaaggataacaagtaaatgtctgaaagcatgaggggctttatttgcctttacctcatatgagtctttgatcttgaaccgatacttttggatctcattgttgatatacctgaatttactttgtaagagattttaacttcacttcatgctgatgatgtatcaaattcattttatagaaagatttaaagtttttttctggaagtgatatatgtcaaattacatttcctactgcagtatttgagcagggacagtcattttttaaatgtttttggccgggcgtggtgctcat

SEQ ID NO: 131 - DNA, 337 bp, Homo Sapiens
  misc_feature (99)..(123): n is a, c, g, or t
gcgtgggaaccccgggaggccggagccttgcaatgaagccggagagtcgcacccaatgcaacttcaaacctggggcaaaaagcccaaatcaattttccnnnnnnnnnnnnnnnnnnnnnnnnngtaaacttaggtcataaagcagtttgagtgtccacacttgtaggttgctgctgggttcagtgtccacacttgggtagaagctgcaggtccctgcttggtacagtgtccacacttgagtagaagctgcaggtcctgctgggttcaatgttcacacttgggtagaagctgcaggtctctgctgggttcattttccacacctgggagtaatcacgta

SEQ ID NO: 132 - DNA, 627 bp, Homo Sapiens
caatgtacagctgctgtgaggatcaaataagagactagaagtgaaagcaccactgacttactcttcaataatgctatatttattgggcacctactgatcgtctggtgctagacagtgagagtataagagaagacacagtctcttccctgatggcgtttaaatctgctgctgacgcttaaaacaatttcaacatagtaggacaagtgctgggacagggaggtaccaggtgctgtggagcaggagagaggaagctaacccagttgggtaactagaggaagacacagctaagcctcaatacctgagggatgggtgggacagggctgaggcctggaagagagtgtcccagaccaaggaagggcacaggctgaggcctggaggagggacacagggccggtgggggccactggtgatcactcaggctggcaggggcacagagcacatgggaggagggatgacattagctcacaagcagtctcatcgtcatcgatgataataaatgtctccattcctaggcatacgtttatcttgttttctccattaaaataggaatgcatgtttcgtctctttgtaaaacctgtgagtgaacgagcactgatggtactgaaggtatagtaagtgtgaaggata

SEQ ID NO: 133 - DNA, 393 bp, Homo Sapiens
gcctcgagctcgcgcgtgccagctcctgccgtggagatctcaaagtaggtggtcttgttggcgatgttgccactgggctccaggccgggaccttgggctgtcacttttgctggcgtcaccctgtgacttatccacgtacacctcgaaggggctcttggcgatgtgctggccagcaaagagcacagtaaccttatgagtccccgtcaactcggggacgtaccagacggagaaggtgcggttcttgtcgttattggcggtcacttttgcctcctcctggtgtccggccgggtcctccacgtacaccagcacctctccctggccagcacctctggtctccacagtgaactctacccgcttcttcacaatgcacgtgatcaaatcctgtagagtcac

SEQ ID NO: 134 - DNA, 1119 bp, Homo Sapiens
  misc_feature (932)..(932): n is a, c, g, or t
tgaagactggtctaggtgctgctcctgaacttggtctctgagccatggcttcccatagacactcaggtccctccagctacaaggtgggcaccatggcggagaagtttgactgccactactgcagggatcccttgcaggggaagaagtatgtgcaaaaggatggccaccactgctgcctgaaatgctttgacaagttctgtgccaacacctgtgtggaatgccgcaagcccatcggtgcggactccaaggaggtgcactataagaaccgcttctggcatgacacctgcttccgctgtgccaagtgccttcaccccttggccaatgagacctttgtggccaaggacaacaagatcctgtgcaacaagtgcaccactcgggaggactcccccaagtgcaaggggtgcttcaaggccattgtggcaggagatcaaaacgtggagtacaaggggaccgtctggcacaaagactgcttcacctgtagtaactgcaagcaagtcatccgggactggaagcttcttccctaaaggggaggacttctactgcgtgacttgccatgagaccaagtttgccaagcattgcgtgaagtgcaacaaggccatcacatctggaggaatcacttaccagggatcagccccctggaattgccgattgctttgcgtggggttacctgctctaagaagactggctgggcaaccgtttcaccggctgtgggaggaccagatattactggcgtggaattgctacaaaaacttttgggggccaaaaaactgtgcctggaatgcaaaaaactcccattcactggggttttggaaaaaggcttccaatggtggggggccctatgaacagaccattcctggggaccgaataccttgctttccacctgcaaaaaaagtctccctgggaaatcctggcccaacaaaagagctttgttntttccccccagcgaacaaagggtatttgtccctgaatgtgtgccaaaaaacacgtgtaaacactaacaaggaggctctcttggaccttcgaaaaaagggcaattggaaatctccggccccttttgaggcccttgactttcatggccctcatccccagtcgataaggggcaaaaaacgagatctcttc

SEQ ID NO: 135 - DNA, 501 bp, Homo Sapiens
  misc_feature (487)..(487): n is a, c, g, or t
ctgctccgcccctctctgcagcccaaatggaaaacaattatttactccattggagggaaaggaagagtcggtagaattcctaagggaaccttagcataaaggttttggggaaggaggccgtagcccggcccggaggaagcaattccacttggtttgacaacttctgccactcccatgtcagatgacttgcacttcttaaagagattgctttataacactaagacatcctttctaaagattcaagtggacttgactaagctgagggtccacgaaatagaatatgacatgtgagctgtttttggaaaacgaagatggagagagcacttccccgtaacgaaagcaaagtggtaagcacagggtgagacccttttacacagaatggtggagagaaaagagaatgctgaaaagtggctcagatgcagagtgttctgtggagaaactgcagccccacttctgttcccctggagtctcccaatggatcattcangagtgtcctatgtg

SEQ ID NO: 136 - DNA, 438 bp, Homo Sapiens
gaggatccccccaccccgtccgtgtcgtcaatgggcagactgcaaccatagccaaaacgttccccatggcccagctcaccagcattgtgatagctactccagggaccagactcgctggacctcaaactgtacagcttagcaagccaagtcttgaaaaacagacagttaaatctcacacagaaacagatgtagaaacacaacagagagccgcaccatcaccccacctgctgcacccaaaccaaaacgggaggagaaccctcagaaacttgccttcatggtgtctctagggttggtaacacatgaccatctagaagaaatccaaagcaagaggcaagagcgaaaaagaagaacaacagcaaatccggtctacagtggagcagtctttgagccagagcgtaagaagagtgcagtgacatacctaaacagcactatgctcct

SEQ ID NO: 137 - DNA, 543 bp, Homo Sapiens
gtgcctcaacttccgtggccgggtcactcaggcgtctgtgaagaacttccagatagtccacaaaaatgaccctgattatatagtcatgcagtttggacgtgtggcagatgacgtgttcacactggattacaactacccactttgtgcagtacagcgctttggcatcggtctttctagctttgacagtaagctggcgtgtgaatgagagaacagtcaggcagggagcccttctccccacagagctttcaggagcagacagtggcctccccttcccctccctgccccaggacttaaagagcaatagtttgccccttttggaatgatctctgaatatataaaacacacacacaaagagcaatagtttgccccttttggaacgacccctgaatatataaaacacacacacgaagagcaatagtttgccccttttggaacgacccctgaatatataaacacacacgaagagcatagtttccccttttggaacgacccctgaatatataaaacacacacacgaagacaatacttggcccttgaggaagt

SEQ ID NO: 138 - DNA, 490 bp, Homo Sapiens
acttttcatgtaaaattttaattatttttgaatgtgtggatgtgagactgaggtgccttttggtactgaaattctttttccatgtacctgaagtgttacttttgtgatataggaaatccttgtatatatactttattggtccctaggcttcctattttgttaccttgctttctctatggcatccaccattttgattgttctacttttatgatatgttttcataagtggttaagcaagtattctcgttacttttgctcttaaatccctattcattacagcaatgttggtggtcaaagaaaatgataaacaacttgaatgttcaatggtcctgaaatacataacaacattttagtacattgtaaagtagaatcctctgttcataatgaacaagatgaaccaatgtggattagaaagaagtccgagatattaattccaaaatatccagacattgttaaagggaaaaaattgcaataaaatatttataacataa

SEQ ID NO: 139 - DNA, 385 bp, Homo Sapiens
  misc_feature (24)..(24): n is a, c, g, or t
ggactcaggggcctgactgattanagcttggccaagcacagaatctttcccactctccagaagctcaccctgacctctccttttcactcaggccctgtctctcattaacagccagtagcttattggtgatcctagatgcagcctgcaaccttttgtacaactcacagaagcactgatttgctgtcaaatggtggaaaagttcaagctgccaaactttttcttaaaggaccaaacagtgaatactgtaggccttaactgttgcaacaccatagcctctgttgcaacaactcaactctgtccttgtagtacaaaagcagccactgacaatatgtccataaatgaatgcgcatggttgtgttctaataaaactttatttacaaacggg

SEQ ID NO: 140 - DNA, 779 bp, Homo Sapiens
  misc_feature (620)..(679): n is a, c, g, or t
gcaccgtgcccgaagcgacgtgccgggggatttttcattctcgatctgttgactggctcccccgctgcatgagcagagtcggagttgagactggcttgttgctggccccagcgcctggtgcaggaagcgactcacgtttgtctgggtggccggagccggagcagagcctgggtttggagtgagtgcctggaacgtgaattggactcaactcgagtagcagcaaagaccagcgggctggcaggcgggggaggctgcaggctcattccccacctcttcccagccccactgcccgtctgccggagcggttctggccccttccgacagagcggggactagagccggggattctccgcccgctgaggggatgactctgggttgggggagcgccgaacccgcggcgcgcagtgtcccgtgaactgtgagtactgcgactgaacggcggcaggcgagcgggcgattagcacccattgcatgaattatgaaacaataactttcggaagaagcaggaggaaaaaaagaagcatctatcgctgccctcccacccccattcccggccaactctccacgccgcttttgccccctccctcccttccgtctcgctccttcctttccgggagagnnnnnnnnnnnnnnnnnnnnnnnnnnnnnnnnnnnnnnnnnnnnnnnnnnnnnnnnnnnntgtggttagaaggagcagtagcagcagcagcaggagaagatgatgaggatgcgtactgcgggatgggcgcgcggctggtgcttggctgctgcctcctact

SEQ ID NO: 141 - DNA, 499 bp, Homo Sapiens
gccggagcccgaggcggggctggagcccgagcgggagccggggcccgcggggagcggcgagcccggccgcaaacaaagggtccggcggggccgaagtcgcgccgacctcgagtccccgcagaggaagcacaagtgccactacgcgggctgcgagaaagtttacgggaaatcttcgcacctcaaggcgcacctgagaactcacacaggtgagaggcccttcgcctgcagctggcaggactgcaactaagaagttcgcgcgctccgacgagctggcgcggcactaccgcacacacacgggcgagaagaagttcagctgccccatctgcgagaagcgcttcatgcgcagcgaccacctgaccaagcacgcgcgccgccacgccaacttccacccgggaatgctgcagcagcgcggcgggggctcgcggaccggctccctcagcgactacagccgctccgacgccagcagccccaccatcagcccggccagctcgccctgagc

SEQ ID NO: 142 - DNA, 510 bp, Homo Sapiens
ctgggaaaaatgtgcgagtcttgagcgcggagccgctcaagccacagctcccaggcccctggctcaaagacgcagacaaggcctgagcagtgctctcggcatcggaccaaagcctgggcacaccctgcctctctccccagagcagggtccctgccgaggactggcctagagcaagcactggaaaagaggccctgccatacaccctgcgtacccactgccaggaccctctcagacaagcgtggcacagccatgctgaccttccatctggtgaaccaagtggcagccccaggggcctgccctgcaggtcacagctaaacaagtctggcagaagccacgcttgttccccatgtacctctagagaagcagaaaccaaagtccccctgtgccctgggagggtggggccgtctaatttattactgcccagcattccttccaacgggaagtagatgggcgactgctttgttcacacacacttgattaaaaataaacaaacagcatctccccaaaaaa

SEQ ID NO: 143 - DNA, 346 bp, Homo Sapiens
  misc_feature (188)..(203): n is a, c, g, or t
aggtgggtgcaacctgtgtgtgtgtagatgagtgtgctgaaggtggggagggcagcacacagcagctcatggcagagccgcctcctaggtcttggcaaagaggcaagctgacgatagacatctacctatattgttaagaaaggggtcggggggatcagccaaggtccatcattgcttttttgccgcgnnnnnnnnnnnnnnnnatagattgtcagctgtaagtgaaactcctagtgaaaaagaggggagccctgtgttaggagtccccataaacatgtactgtaattctttgtatatagaaaaaaaatttactgtaaagtaaagtttaactttactcataaaaaaa

SEQ ID NO: 144 - DNA, 914 bp, Homo Sapiens
gtttacttggtattttctgttcaaggatctggacatttccagggattttctaggatgtcttctgagattggaagggaaaagagtcaggactggggctctgctggactaggaggagtatttaaggtggagtggatacgaaaagaaagccttccctttcaatttgcacaccatttactcaatccatggaatgacaacaagaaagtgcagataagcagggatgggcaggaactagaacctctggttggtgaacagttgctccagttatgggaacgtcttcccttgggagaaaaaaacacaactgattgatactcagaactcttagctgtggaagaacatcatgcctatttataaccactgaatgcactgactttcaaaaactgaggtggggtgtgtgttacgaatgggctttttaacacttttagagtgttgctttagaactaccatcttcatatacaggagaaaggaagcatttaaatttttatagtgattatagagaatgattatatgatgtttgtaatgaataaaatagtagtttcattatttggcacaatagcagtttattttaaacaaacaatttgaagttaaacatttcattgtttaaaaacagctgaattacagttcttattgatgactttttaatgcagagtaagttgtttaagaaaggcctgaatatatcagaacatctgagcaccattttagaagagtcaactcttaagattatcattagaaaacaaatacgtcaacacctatgaaaagaagcggggaaaacaacaacaaggacaacaacaaaaaaccagtgaaattctacaagtgtcccttttaaaaatagtatgtgctaactaagggctattcattctgccatttaaaacttgagacacatttaagaataaagttggatgttaaaatttctgtga

SEQ ID NO: 145 - DNA, 431 bp, Homo Sapiens
gaatttcgagcttcggtaccctcctccccagcctacaattgagggggcgcccaaccaacgtacccccttccaggctcagacttcacgccaaccatggagcaccaaggggggtccgcaggtgggctgcagcatgtgttcccccacgagtggggtgcagagcagaggggagcggctgtgttcccccacgagtggggtgcagagcagaggggagcggctgtgttcccccacgagtggggtgcagagcagaggggagcggctgtgttcccccacgagtggggtgcagagcagaggggagcggctgtgttcccgaccccatgttccgcgttcccctcccccaggccagggcacagggaccccgccccgctacaacggcagggaataaattaaattaaaaactcaagtctttttgatccaaccacgaaaaatacact

SEQ ID NO: 146 - DNA, 432 bp, Homo Sapiens
tgcagtctgtcgcggggtatgtgcctttgagacgaggtgggccctgtggagttggggaggctccctggacaaggcagactctgaaggctccaacagcggcgggacctggcccaaggccatgctcagctccacggcagtccctgagaagctctctgtttataaaaagccaaagcaaagaaagtccatctttgaccctaacattttcaaacgcccccagacaccccccaaaatagattacctgcttccaggtcctgggcctgctcactctccccagccctccaagagggcgggccctcttgtattacccaaaaaactcccagaaggagcgactccattaagttccagcacaggctggagaactagctccgagtcaagaagccaactctggtgggcagttcccccatccattagtcccccgagcgccctgcccct

SEQ ID NO: 147 - DNA, 1652 bp, Homo Sapiens
ctcttgtttctgtacctgatttctggttcctgtacatcactttacctttttgtctataaattcattttgaccacgaggcacccccggagcctcggtgaatctgctgtgattttgtaggctgccggattcacaaatggttgttgcttaatgaaactcctttaagtttaattcagctgaagtttttcttttatcagatggtgtcacaagaaggatctgaagtggagcttctagtatccccaggagcgcgaagtgaacacggaaggtacctgcaggatccaattgtgtccattgatctctcagagtggctgaggataatagagtttcttcttcaaggtctcaaggtctgaagcatcccacagaatgatcctactgaataactcccataagctgctggccctatacaaatccttggccaggagcatccctgagtccctgaaggtgtatggctctgtgtatcacatcaatcacgggaaccccttcaacatggaggtgctggtggattcctggcctgaatatcagatggttattatccggcctcaaaagcaggagatgactgatgacatggattcatacacaaacgtatatcgtatgttctccaaagagcctcaaaaatcagaagaagttttgaaaaattgtgagatcgtaaactggaaacagagactccaaatccaaggtcttcaagaaagtttaggtgaggggataagagtggctacattttcaaagtcagtgaaagtagagcattcgagagcactcctcttggttacggaagatattctgaagctcaatgcctccagtaaaagcaagcttggaagctgggctgagacaggccacccagatgatgaatttgaaagtgaaactcccaactttaagtatgcccagctggatgtctcttattctgggctggtaaatgacaactggaagcgagggaagaatgagaggagcctgcattacatcaagcgctgcatagaagacctgccagcagcctgtatgctcggcccagagggagtcccggtctcatgggtaaccatggacccttcttgtgaagtaggaatggcctacagcatggaaaaataccgaaggacaggcaacatggcacgagtgatggtgcgatacatgaaatatctgcgtcagaagaatattccattttacatctctgtgttggaagaaaatgaagactcccgcagatttgtggggcagttggtttctttgaggcctcctgtgagtggcaccaatggacttgctacccacagaatctagttccattttagacaatgaagctgcttagtaatctctgccaagccatctcttaatattaaagcagacaccacagaatagatttcttcacttacaaatgcatattgggcacttataatacagcaggaactcttctcacctggagccttgatgttaaaagacacagccatgctcttgaggagcttacaatcctggctggaggcaggggagggtatattctttaaatatgcttaagtgttatagggaaagacggggttaccagtaaacatgtaactagaaagccaggctcagttcttacctctgggaatcagaactctttatgcaacttggttaatagaatctactatctggaagataaatgaaggattttaataaaattttcaatagaataaacctaa

SEQ ID NO: 148 - DNA, 414 bp, Homo Sapiens
gacgcgggcgggactgggatgaggggcatggtggcgaggtggccgggaatgtgagagcggagttcgtggcgggatgtgcaggccacctccaggggcgccagtcacccagctaggaagtgaatggcgtcccttgctgtgatgcagtccacgacctgcacaccctcacatggcagcctgggaaggggcagatacactcacttctccatggcctccatggtgttctccagcagctctccagatcctgtggggggcactggagtgggcctctggggcttggggtctaggggcctggcccaacctcatcacccacattccctctctgggctccatcctccctctggcctcacctccccagccagcccaggctgcgccagcatcttcttcctcgtccacacccagccctgccacttcgct

SEQ ID NO: 149 - DNA, 437 bp, Homo Sapiens
gggccgggccgggctgggagaagaaagaacaccagccacgcagagatacaaataagctcatcaaatgagcagctggtttgtctcactcagcctgaattttgcattaagtgttccaaaagtgagtttctggcttgcactagtgttttgccctaaatctaaggatggtgcctagtggtggccctgtgttctgaggacagagagagctggaggggtggaggggaatgcatcggcactcatttggtgtaaccaagaagagggggaaagatgtcttgatagaatcaaagttgccaaaaacaaagaagagtctatcaagcagatttctaacatttagctagaaactacttcatagctctcatttttagcggggttctatctataatccatggtaaatagttgggaggcaaagggaccacatgtgtgtgccccgctcctccccc

SEQ ID NO: 150 - DNA, 386 bp, Homo Sapiens
gggccctgtgctaatgcgtggttaagccctttaggttccttgttgcactggaactatgcagactgtgaaggcggcctgggcttctgtctggctccagcatctgcagctggcagccttggcaagtcccagcagctcagattctgcctttgctgtcagtagcacagcagggggcaagcatgtgtgtgaatttgcagggggtcctgtaattcatagcaggcccactggggctgctcaccgagctccattctctccccctggctgaggcggtcagaggggatgagacagagagatgcataaggatccaccctcccagccgacctcctgctgccctgaaacctgctgctgatttctctggcccatcctgggcttgcacacctgcccacaag

SEQ ID NO: 151 - DNA, 286 bp, Homo Sapiens
cggtgaggaccccagacttaggatgtgatgtatctgtcccttaagcgcgggctaaataagagagccagaacaccgtgattagcaggctggatcaaaccgctcacttcctccctgtttgtccttcgcaggtcccctctccatggttttctcacccaatccttccctctggctcccttggggaaaaagccacgtggagctcactgggcccctcaccccagctgaagggacatgaccctcctctgccctcttccctccagacaccagctgacaactggtgcagaaacgt

SEQ ID NO: 152 - DNA, 526 bp, Homo Sapiens
gagggtgaccaccacacgcttggatgcccccagccagatcgaggtgaaagatgtcacagacaccactgccttgatcacctggttcaagcccctggctgagatcgatggcattgagctgacctacggcatcaaagacgtgccaggagaccgtaccaccatcgatctcacagaggacgagaaccagtactccatcgggaacctgaagcctgacactgagtacgaggtgtccctcatctcccgcagaggtgacatgtcaagcaacccagccaaagagaccttcacaacaggcctcgatgctcccaggaatcttcgacgtgtttcccagacagataacagcatcaccctggaatggaggaatggcaaggcagctattgacagttacagaattaagtatgcccccatctctggaggggaccacgctgaggttgatgttccaaagagccaacaagccacaaccaaaaccacactcacaggtctgaggccgggaactgaatatgggattggagtttctgctgtgaagaagaca

SEQ ID NO: 153 - DNA, 422 bp, Homo Sapiens
aattctgccacccacagcccagtgggaaaccaaggtatgtactgatctccattatgcccttgcttccccaatcccaccctcacagatgttcattgttcacggtagcctctgaaagactccagtgaggagaagaaataaaaatgaaaacatgttttctattttagaaataaaacgtgaaaacacacagatcaagactgccctgttcctagcagtacacagatatatggcctttaagatgactccaaaggacatttattaaaatatgcactcagcctggttatgtcagaaatgtttattgcctcatgttctcagtttaagtttgagcccatccagtgttactacttttgaaaatccaggctggacacagtggctcatgcctgtaattacagcctttgggaagctgtgggtgcagaattaggtcc

SEQ ID NO: 154 - DNA, 207 bp, Homo Sapiens
ggatccttaattctgcacccacagcatactaattacggagcggactgggtgatgagagtcacctctcctggcttacctggaaacgaagctgccactccccatttcttgcttctgctgcaaagcaaagctgggcgtcctggggtgcttttagcctttgacctctggtgagacccctaaacctctcagtgaacgggctgtgggtggcca

SEQ ID NO: 155 - DNA, 537 bp, Homo Sapiens
agtgacgatcggatgaatgagcctccaacctctcttgggcttgtgcctcaccagatccggggatttctttcacggtttgataatgtccttcccgtcagcctggcatttgacaaatgtacagcttgttcttccaaagttcttgatcaatatgaacgagaaggatttaacttcctagccaaggtgtttaattcttcacattccttcttagaagacttgactggtcttacattgctgcatcaagaaacccaagctgctgagatctgggacatgagcgatgatgagaccatctgagatggccccgctgtggggctgacttctccctggccgcctgctgaggagctctccatcgccagagcaggactgctgaccccaggcctggtgattctgggcccctcctccataccccgaggtctgggattcccccctctgctgcccaggagtggccagtgttcggcgttgctcgggattcaagataccaccagttcagagctaaataataaccttggccttggccttgctattgacctgggaaaaaaa

SEQ ID NO: 156 - DNA, 801 bp, Homo Sapiens
gcggccgcgctcgggcgcccctcgcgcagcgctccatgcccgtgtggtgctgccgctgctccctggccggtcatttcagaaactatagtgacactgaaactgaaggagagatttttaattccttagtgcaatactttggtgacaacttggggcgaaaagttaaagcgatgccattagttaaagaaacttctcaactggaagattcgtcagtgacttttcctgtggtaataataggaaatggaccctcaggaatatgcctttcttatatgttatcaggctacagaccgtatttatcatcagaagcaatacacccaaatacaatcttaaatagtaaattagaagaagcaagacatctttccattgttgatcaggacttagaatacttgtctgagggccttgagggccgatcatccaatccagttgcagtacttttcgatacacttcttcatccagatgctgactttgggtatgattatccatccgttttgcattggaaattagagcaacatcattatatccctcacgtagttcttgggaaaggtccacctggtggggcttggcataatatggaaggctccatgttgacaatcagctttggaagttgggatggaactacctggacttaaaattaaggactgggtatcaagtaaacgaaggtaaagattgaactgtattaaaattctttggtgtacgttgaaaaagagaatgtggaaaaatttcaaaatatttgtgattttgtcatggctgaagaatataaatgtacgtctttcaaataaaaatgtgtccttgaagcagtgatta

SEQ ID NO: 157 - DNA, 460 bp, Homo Sapiens
  misc_feature (239)..(239): n is a, c, g, or t
gtggtccctctggtgggtcttcaactcggccggctactacctggtggtctactacgtgcacatcctgtggaacgaggtggaccccaccaccaacagtgcgcgggtctacaacggcgcggcagatgctgcctccacgctgctgggcgccatcacgtccttcgccgcgggcttcgtgaagatccgctgggcgcgctggtccaagctgctcatcgcgggcgtcacggccacgcaggcggggnctggtcttccttctggcgcacacgcgccacccgagcagcatctggctgtgctatgcggccttcgtgctgttccgcggctcctaccagttcctcgtgcccatcgccacctttcagattgcatcttctctgtctaaagagctctgtgccctggtcttcggggtcaacacgttctttgccaccatcgtcaagaccatcatcactttcattgtctcggacgtgcg

SEQ ID NO: 158 - DNA, 521 bp, Homo Sapiens
gtccgaaaagatactttattttataatcaaaatacgcaatacaaacaaatggacataacaaagattcatataaataactggttataaactttatgaggaaaaatacccgtcagcatgggggctgggctcccaatgcacagggtggagaccaaccaggcggctctgcctttaagcaacaggagcccaaaggctgaagggctggctgggtggggctgctctgaatggaagggataagtcactccataaataaaacacaaacttggaaaaacacttaaggaaagagcctcattcaggcccaggcatgaggtccaagatgctgccaacagcccaaagcttagcaaaaatcttgtagtggctgactggcccacacgtggcccctgcctggcctggctccagatctagaggaggcacggctggcccaacaaccagatactaacaagtgtgagatgctccctaaaccaggaggcaagaaaaaccagagggcaaaggtccctcactaaagccccagagaaacaacccag

SEQ ID NO: 159 - DNA, 678 bp, Homo Sapiens
cttaagcgtgctggactcatgctcaagaagcagataactgggcggcaaacagtttgttactccgcagatggggttcaggcaatcctaaacttaatttagcttgtgtagctaatttgtttaacacatacccatgcctgcacaagccgaataataatgacatcgatatgaatttactggaaggagagagcaaggaagagagaacatttcggaactgaatgaattccttgggagtcaacccatacattaatcatttgtacagtgaccttgcagatgctttagtgatctttcagctctatgagatgatccgagtgccagtcaactggagccatgtcaacaaacctccttatcctgcccttggagggaacatgaagaaggtgaatgaaataatggccatggatatattgttattgttctgatatgaaacaaagaatttagagtttcatgaagttatacgtgctctgtccccacaattctgattcagaccaaaatgtgttaagcttaatagcctttttacaagtttgctttaataaatttaaagatgaaggcaatccctctagtcagacactttatataactattttcatctttatcaagtcatagtacttaatgttctttgagatgtcctgtaaatgtattctttttttacaattggtataacgttctgaatgtttattggtt

SEQ ID NO: 160 - DNA, 811 bp, Homo Sapiens
  misc_feature (616)..(616): n is a, c, g, or t
  misc_feature (622)..(632): n is a, c, g, or t
  misc_feature (654)..(709): n is a, c, g, or t
  misc_feature (711)..(711): n is a, c, g, or t
tccccaagtggtgactatgctatttcagttcgtaatggacctgaaagtggcagcaagattatggttcagtttcctcgtaaccaatgtaaagaccttccaaaaagtgatgttttacaagataacaaatggagtcatcttcgtgggccattcaaagaagttcagtggaataaaatggaaggtcgaaattttgtttataaaatggagctgcttatgtctgcacttagcccttgtctactatgattttttccagatgtttcctaaagaagtttccagaaactttgacttgaaatgtttgcagatcaactataagcacaaagaagagataacttccaaaagagtgctgtttttaaaaataataattaggaaatgtttatttagcactttcaaacttttcactttataaatgacaagtgctttgaaatgcagaagtttatgtacagttgtatatacagtatgacaagatgtaaaataatatgtttttcatgcagtttaaaatattactaacttaagggtttctatgtgctttttaaaatattccttctttgatgttgacatcaaataaagtaagtggtttaaaaaaatctccaaatacctttttttccccccaaatactttntaaacnnnnnnnnnnngagatggtatctcactctgtannnnnnnnnnnnnnnnnnnnnnnnnnnnnnnnnnnnnnnnnnnnnnnnnnnnnnnngnttaggtgatccttctgtctcagccttccgagtagctgggaccacaggcatgcacaaccacggctggctaatttttgtattttttataaagacagggtttt

SEQ ID NO: 161 - DNA, 507 bp, Homo Sapiens
gtgcgggccagagtctctgccctcgtgggccgtgagtgacactgattctcgcgtgtctccggcctctccggcagggagtcctagcgcagactttgcggttcatggagagtctctgggagacaggcacctgcggacgctgcagataagttacgacgcagtaagtgagcgtcgcggcgccctctggcacagcgcctgtccgagcggcttctcccggggagaacctggagccatcctacctcttgggtggcctggtttgatttccaggacaaggcgatttgcgtgacagcctgctatccactttccctttgactttgcttctggttacacgtgggaatagaaccggctaaagaggactggtgagctagaagctgtgaattggatgcagttgggcacttacagggctgtaccctcagtaaaggcaggctgcagtcgccagcttgctaagtattccaagaggaggaaaatttttaaaaaattataatcacctaaaaggttataagctctgaa

SEQ ID NO: 162 - DNA, 384 bp, Homo Sapiens
  misc_feature (139)..(151): n is a, c, g, or t
tgctcaggaattgataggaaccctaaaaactaggataccccctcctcggcccatgaggcacgcacagtgacttatttaagacttcccccttaatttatctgcccccaggatgcgtcagtctgttcagtggtcagcaggnnnnnnnnnnnnngccgaatgccctcgccatcgtggtcagacccccctcccaacacaacacgctgctggtctgtgtcagcctttgtaacgtgggaggctctgccgtgtcttccgggtgaactgtatttggattgcgcgcattgtcacggtccgcccctgggctgcaggcgccccttcctctgggcacccctgcattctgcatccccacctctaaacgctgtaataaacagactgttttcactcgga

SEQ ID NO: 163 - DNA, 398 bp, Homo Sapiens
gcggaacagcaggcccgagcccaccgcgccgggccccggacgccgcgcggaaaagatgaatttacaaccaattttctggattggactgatcagttcagtttgctgtgtgtttgctcaaacagatgaaaatagatgtttaaaagcaaatgccaaatcatgtggagaatgtatacaagcagggccaaattgtgggtggtgcacaaattcaacatttttacaggaaggaatgcctacttctgcacgatgtgatgatttagaagccttaaaaaagaagggttgccctccagatgacatagaaaatcccagaggcaacaaagatataaagaaaaataaaaatgtaaccaaccgtagcaaaggaacagcagagaagctcaagccagaggatattactcagatcc

SEQ ID NO: 164 - DNA, 319 bp, Homo Sapiens
  misc_feature (156)..(156): n is a, c, g, or t
  misc_feature (168)..(168): n is a, c, g, or t
tgtccctaacaagggccttgcagaaggtggaggtcactctccaaagaagcatctccaactactcttgggcaaggccatctctccagtagtcttacgcatgaggctaaacctcttctcttacctcaaagatggcttcagtatccctcccgttacctncaacagggcatngaaatgtaccaaaagcaacacacaggaggccacagtggggctgagaggacccaggtacacatgctgtttcctgcctggtttctccccacctctgccgtgtgtcatcaacgctcctcctgggctgtgggtgcagaatatgggatcctctaga

SEQ ID NO: 165 - DNA, 388 bp, Homo Sapiens
ctgccaccacagcgatgccttgagtaggcagatgagggagtggccctgatcaggtgggggaccaggctcacccaatgcagctttcttggccagttatatctggcttcagaaatgaggttttattttttcgtcaatcggctgtcacgttttattatatctttcaatgccagagcttctcagcttgtgccctgtagccctgtacgttagcccactcagaagagagctctctttaagggtgtccacggagcctctgacactataggtacgacattggtatcactggacatcatgacaacacgcactgaaacttttgtgaccactgggcacggacaaaccccacaaaaccaggtttctagtcactttttttgtgctgtgggtggcacaactt

SEQ ID NO: 166 - DNA, 352 bp, Homo Sapiens
tgccacccacagcttaagtttaacaacaaacccagagtcctcacccaggaagtctagatttgaaccttgggccccactgctgttgggctaaggggtcttacatagtcatttatgctctcctagtcttccttacctaattttaaaatagggataattatcctacctcacagggctgttgggacaattacaaggtaaaagataaatgaacggttcgggcaaacaggaatccctaaatctgaacacaaataccaacttagtagaatggaaagcagtgacatcaatacgtcctccctttttgctaagaaacagtctgttgataaaagaaatggttgctcttattaaagaataaaat

SEQ ID NO: 167 - DNA, 504 bp, Homo Sapiens
ctcggtgctctagaggatcgcaattctgcaccacagcaggctgaatacttgttacaactataagtctagaacttctaattccgaaacatccttcagttccatagactgaacagttgagaatagttggatggaaagaaaagaggaaggcaagagagaggtagggcagggagaggagagttgagcaaaggaggaaaagaaagtgaattatagctagcctgctgagtgtctggccatgttcgtttaccatggtaaaaaaacaaacaagtagattgagttgggggctgaaaggggcaggcagaaagccttctgtgaagagacctgaagtgtcaatcaacaaagtagtctgaaagtcacaggtatatgaaggtaaggacagttcttatccctgtccttggatttacaactagctttttaacgtactcttttaagttgttaagactgttgtttattttgaaattaccagcagctccggtgtgggtgcagaattccggctcggcgcttggg

SEQ ID NO: 168 - DNA, 237 bp, Homo Sapiens
accaattctgcacacaccacaagccatgtacatgggccattgctacatccaaggggcaggcaagcaggacatccgcaggactctgagcagcaccctgaaggcagacagcccactgagagtgtagccttggctcttaattgggtcatggagccctgtccagttgtcagtgtggtttggattaggctgatagcagagattgcaagagaagcagaaagtgccaagatcctgtagagtcac

SEQ ID NO: 169 - DNA, 201 bp, Homo Sapiens
tagaggagcttaattctgcacccacagccgcagccgcggtagccggatctggtcctaggggtactgctttatgggtgcagctcttcactgtgaggcttcagtccctcttctgcaaggaagaagtaggtcatagtggtccctaagggcattttttgttccaagtcccctttaatttaattacatttgctgggtggcagaatt

SEQ ID NO: 170 - DNA, 837 bp, Homo Sapiens
aggtttctatgagccaccccgtgcagtgccacgggatgacatggaagacctcgccttgtgggctgttgctcaacagcattgggtataagtacccgtctctgtcgacctcaagcgtgcccttgttgactccaagtcttgggcctcatcgcgcaatgtggagggccgggttatggatgtgctcaggctctctactgccagccggctggtgtgaagagaggacctacaggtgtcatagccacaatccatgactgacagcttcctcaccggcaagatgctgctgcaggacctgaaggctgggttgctcccctctggccccaaggccatggcaacgcagccatcccaggccactgctcagcagccgaggggtccggccagtctctttctcagactgggagaagctggatgccgaggaggtggcccggggccagggcacggggaagcccagggagaagctggtggatcctcaggagatgctgcgcctcctgggccactgagcccagccccagccccggcccccagacagggaagggatgagtgttgggaggggaagggctgggtccgtctgagtgggactttgcacactctgctgatcccggccggccctggcttggaggcttggctgctcttccagcgtctctcctccctcctggggaaggtcgcccttgcgcgcaaggttttagctttcagcaactgaggtaaccttagggacaggtggaggtgtgggccgatctaaccccttaccaatctctctactgctggactgtggaggtatacagccttggacatgctgaatccacgctgtgttcgcgtgttttgccgctcgcgtcggggctgcga

SEQ ID NO: 171 - DNA, 302 bp, Homo Sapiens
tgctgcacccacagcaaccgttgtatctacccactacccctctgatcatttcggggatgataccacaccgtccctaaaacatctaggcttccctgttccccgcagagcctttgtcacattcctgatataacccccccaacactaatcctctggctcattccaggatgatatcatccccccacacttcaacccttcctgttttcccccactactacccaggtgtctcattactggaagacaccatctctctaaacccaatgtaccctgtctcccccactactacccaggtgtctcattcctgg

SEQ ID NO: 172 - DNA, 236 bp, Homo Sapiens
  misc_feature (123)..(123): n is a, c, g, or t
aggtctgtattcagtcattcagcatgtagatactaaaaatatactgtagtgttcctttaaggaagactgtacagggtgtgttgcaagatgacattcaccaatttgtgaattatttcaacccanaagatacctttcactctataaacttgtcataggcaaacatgtggtgttagcattgagagatgcacacaaaaatgttacataaaagttcagacattctaatgataagtgaactg

SEQ ID NO: 173 - DNA, 362 bp, Homo Sapiens
tctagaggatgtgattctgcaccacagcccacccctcaaagtgctatttgaaatcactcagcctccttaagggtagaaactctgcccctccggaacaggagggtgaccccaggtcctggacaggtgtccagagtggtctgatacccttggcaaaccccctgccccctctccctccaggctgcaaactgttcagcatgaggctccagcaaatcccagcaggagaggtggggctgcccagcaactggttcttgtataaacataaacccattcgataattagcaaacagcccacttctaagataaacaaataggagatttggactccaaaagccccaccctagatttctcccttcccacctccca

SEQ ID NO: 174 - DNA, 587 bp, Homo Sapiens
gaaggcctgagggaaagacatgctggagaccctggttcccaaggcagagggtgaccgtgtgatggtggtgctgggcccacagactggaagggtgggacatttgctgagccgggacagagcacggagccgggctttggtgcaactgccaagagaaaatcaggtggtggagcttcactacgatgccatctgccagtacatgggccctagtgacacagatgatgactgacccatgggactcctcccatcccccaggctggtaccagttctgtaccatatgagaaagttgccttcagaaggtgggaagatcattgttccatcctctacttctggtgcagtcctgggacaaggacaagggaaagggatgggtgaaccagtagggaagctagaaacaaacccaatatttaccaaaatttagggtataataaaaaccatttcaagtacttaatagaaagatgaaatcataagtggtatgatgagctgcgagttaaggtgggaactgagttgactgaggtgggaaccgatttcacttgtaagcacgtgctattctgctcagggtccaggaccagttagaagtgactcgtcaggcg

SEQ ID NO: 175 - DNA, 497 bp, Homo Sapiens
tgcagtaaggaggatggctgtcgggggctggggtctgtgtttctctttcatccgtgttgtgatctgcctgagataggaactgctaaggtgcccacgaattcccaagagacatagtctcatcctcagaggtcacctgtagcaccttcaagaccccatgtatatttcatttcccctagaaggctcccaagccttctggaatattctgcggcaaaatcggtcgcagctagtgcactttgttcatcatatgtatctgtgacaggaactgagtcttaaatctccctgtctggcacatgggtgcgtgagtgatgtgaggtcaccgtctaacgcagcgtgtaattaggtgctgggaccagttgtgtccatccctggctggttccgtctgtaatgcaaagtatagtgtagggcatatggaggcagccggtatacatgcattgattgactgttgatactttccggatgtaaacggctgtaggcggggctttggcttaggttcccca

SEQ ID NO: 176 - DNA, 1045 bp, Homo Sapiens
actctagcaggactacacactgggtcgagttctcagacgaatgttaaaactgagatttggcaccaaaatctccttttaagtgtacaaactcttggaggttgtaggctgtacctccatattgataggcgtgctctattgctctagggctgttggaaaggtggcaatgagagtttcttggagtattccgctctgggagtttcagagcaacaggatcccatgaaggtgcatctttacttttccctccctttttattctgacttgctttaggcttggataaattttttccttttttatggaggagaaacaatggtgaagactcaatgggacactcataaagagaagtgtggaccttttcagtataccgttggaaatcttcaacctccacatctctatccaccctggtaaagtaggcattacttatgcagccagtgaaattagcatactgagcactgattggtgagccaccgaagtaaaacttcttttcacttgcttgtgtctgttctattttccctttggtaggattcttactccccactctgcttttatctactatcagttcatatcttgtgggtgagacagagctaatgacgaagtgggacagcccatcattgtactgcttatctactgactgaactttgattccctttacatccatgatgacagtaccattatccagtgagatggagaacacgtctgaccctgaagcataatagaatagtaacccatttggttgtaatgttcggaaattaaaacctccttcaaagccatcaaagaaagatattttctgaattgaagcaatgaagctctgtccattgaaatatgctctgcgagatataagtgagtcttctgggcatccataaccaactcccagggtttctgtctgctccagtaaattgaagtccttcttttggaactggaagcccttcatgcatcctctgaggttgatatctaggggaaggtgtgctctgagggccctggattgtaagatttctggaggagctcctccaatgtatacatctgtaaaaggtattttcatcttttcatt

SEQ ID NO: 177 - DNA, 226 bp, Homo Sapiens
aattctgcacccacagctgtattctgttaaagatcaactttcaactgtttgatagcagttaaatgtcactggaatgtttaggcaattgctttgtaatgtgacaggcatctctaagttttgccgaagtaaatgtattaaatctgagtcagcctgtgacatgtaaatcacattcaggattccatgggcgtggaggtgggagaatgacttgtaatttctggaagtaatt

SEQ ID NO: 178 - DNA, 168 bp, Homo Sapiens
cctataatgttctgggtttaaaagccatcttttccacatttcctgtaaataatggataatcattttaaaaaattttatttttagtgctgttttaacaatgtagatagatcataaatgtacttgctgaattcaatcatttttaacaagccaataaagtttgataattca

SEQ ID NO: 179 - DNA, 732 bp, Homo Sapiens
  misc_feature (104)..(389): n is a, c, g, or t
  misc_feature (396)..(549): n is a, c, g, or t
cgtggatttcggtacgcacaactactgggttagttctaccgcaatcctgctcaaaaactttccgttacttcccaatttctataaagtacaaattccttatcctnnnnnnnnnnnnnnnnnnnnnnnnnnnnnnnnnnnnnnnnnnnnnnnnnnnnnnnnnnnnnnnnnnnnnnnnnnnnnnnnnnnnnnnnnnnnnnnnnnnnnnnnnnnnnnnnnnnnnnnnnnnnnnnnnnnnnnnnnnnnnnnnnnnnnnnnnnnnnnnnnnnnnnnnnnnnnnnnnnnnnnnnnnnnnnnnnnnnnnnnnnnnnnnnnnnnnnnnnnnnnnnnnnnnnnnnnnnnnnnnnnnnnnnnnnnnnnnnnnnnnnnnnnnnnnnnnnnnnnnnnnnnnntaataannnnnnnnnnnnnnnnnnnnnnnnnnnnnnnnnnnnnnnnnnnnnnnnnnnnnnnnnnnnnnnnnnnnnnnnnnnnnnnnnnnnnnnnnnnnnnnnnnnnnnnnnnnnnnnnnnnnnnnnnnnnnnnnnnnnnnnnnnnnnnnnnnnnnnnnnntcctgtcaaacaagaaaagaagaagaaagcagcattcaaatgtaagacaactgtaaaatatcgagccccacttggtctaaaattcaaaaagaagaacgcctgtacatcgcctttttataagtccttctctccacacctaaaagcagctgcagctggaagggcacaaattccactgtgtaaaat

SEQ ID NO: 180 - DNA, 415 bp, Homo Sapiens
tgccacaataacaaaaaaagaattttcttatttacaactgtgaatagactcatttggtctatacgttactaacttgataagtttctttagggcctcacctttgaaaacgcatagtaaatactgtgagaagggagggataaggaaaggacataaatctgaatagaaagtcattacataccagggactggctctgggacatactggagagctagtatcatttcacactctgttttctgcttcaagggcaactggtgctgtctgaaaagtgaagaaatgtcagcaggtgggagacaaacttttcatcctgtttgttggtataggtctcattacagaaccatatctgtcccatttctgggaccatgtgtcactcatgagtgctctggattaaaatttctctctgcatcagaactagact

SEQ ID NO: 181 - DNA, 554 bp, Homo Sapiens
cggagcaagatttccaatggagagggaagagaaactcgttcttgaatgggaagagagtggggaggtgcagagtaagaaagtgggaacgcgtcagtcccttccttgcaggagaggtggcggcaggagggggctcccagcagctacaatcccaacactgcttggccgcagagaaaatgccctggccaggaagccggctggggtgtgtgatgatcaccgttctccggcctccgtcctgaacgtgaagggggcccgaggccgaggaagatccggagcccggctagaagggtcggcctgagagaagccagtcccgcgcctgatagacccccgccccgctgtctgggccttggggacacggtgccgcgggcgacggcggctcggccgaccgaaagcgctcccgcccggagtttgaggtctccggcacgggcaactctcggccactcacacgcgcaggccccactccagccgcgactccggcccctgctccggcttcggccgcggctgctcccgacacgttgttgttggcgttggtggcggcggttgcgcgcggcggccgc

SEQ ID NO: 182 - DNA, 319 bp, Homo Sapiens
gcggccgcggcggaacccggctccggacctggatcacagcatccagcgcgcggccggcgaggcgcctcctgttaccctggggccggcgtccctcgtcccatcggagcgagcgaggatgctgcggtgcccggcgacaggtcgtcggatagcattgacagcaccttcctttcaaggtgctttatgcctgccctctccacgtgcggagggcagggtgaccaacgcaaaaacctgagctgcgcctccagacccgtgcgcccctttgatgggcatctgtggtgtttatctgtcccccgaaagcggtgaccgagaagtaaataaa

SEQ ID NO: 183 - DNA, 683 bp, Homo Sapiens
gcggccgccaacgccgcccggactggagccctgacattgctgcgctcggggggctccaggcagcccgtatcggggcctttatttctcgtcggcggcgccctgcaccgcgcctcgcaaagccaaacaccagagcaccctagaaggtttaactaaaagaatgctcatgtttgacccagttcctgtcaagcaagaggccatggaccctgtctcagtgtcatacccatctaattacatggaatccatgaagcctaacaagtatggggtcatctactccacaccattgcctgagaagttctttcagaccccagaaggtctgtcgcacggaatacagatggagccagtggacctcacggtgaacaagcggagttcacccccttcggctgggaattcgccctcctctctgaagttcccgtcctcacaccggagagcctcgcctgggttgagcatgccttcttccagcccaccgataaaaaaatactcacccccttctccaggcgtgcagcccttcggcgtgccgctgtccatgccaccagtgatggcagctgccctctcgcggcatggaatacggagcccggggatcctgaccgtcatccagccggtggtggtgcagcccgtcccctttatgtacacaagtcacctccagcagcctctcatggtctccttatcggaggagatggaaaatt

SEQ ID NO: 184 - DNA, 477 bp, Homo Sapiens
  misc_feature (257)..(310): n is a, c, g, or t
gcggccgccatggcttgccacatgcacatccccacctcgggcgcaccgggcagccctgggacgctggcgctgcgcagcccccaccacgcgctgggactcagcagccgctaccacccctactccaagagcccgcttcccacgcctggcgcccccgtgccggtgcccgccgccaccggaccgtactactccccctacgccctctacggacagagactgaccaccgcctcggcgctggggtatcagtgagggcggccggnnnnnnnnnnnnnnnnnnnnnnnnnnnnnnnnnnnnnnnnnnnnnnnnnnnnnncgggatcacggcccaggctgctgacacccgcgcgtggggaggactcgggccacgaaaggaaagaaatgtataccgtatctatctacccgacagcagcgaccgagacccggtgggacactccccttctccccactttcacctccccacccaaactttataaaagttga

SEQ ID NO: 185 - DNA, 498 bp, Homo Sapiens
  misc_feature (486)..(486): n is a, c, g, or t
gcggccgccgccggagccgagcggggcggaagcgcgcgtcgcgctgctgctcgggcccgaccgcgccggcccgcacctcccggcccggagctgcgggctgcggtcagggcgatcccggggccctaggcggctgccgccgggcaagtttccgcgaagcctggctcgccggttccgggaaccaagcgggggaggctggagggtgttgaggtttcgtttctgccagccgaccgggcgcttggtttcacaggtgccaggggtcgggggtgcgacctctccctctgggccattagacagacccaggctcggggaagaggctgcgccgacgcccgagggtttgcgtttccttcgcgtctcgtttgcacaccattttctcccccaaaagcaaagcttctgaccttctgggggttcgaagaggttaagtcattttcccccaggtaatctagtcagcgaaaggcttcagctgggagggcctcccgcctgggcggngacccgctggag

SEQ ID NO: 186 - DNA, 531 bp, Homo Sapiens
actcctctgcatactgcagcaatgcatggccatttggaggcagtcaaggtgcttcttaagaggtgccaatatgaaccagactacagagacaactgtggcgtcaccgccttgatggacgcaatccagtgtggtcacatcgacgtcgctaggctgctcctcgatgaacatggggcttgcctttcagcagaagacagcctgggtgcccaggctctgcacagggcagctgtcacagggcaggacgaagccatccgattcttggtctctgaacttggcgtcgatgtagatgtgagagccacatcaacccacctcacagcacttcattatgcagctaagccctgcatctggcctgtgcaggtcagcacttggcctgtgccaagtttctcctgcagtcgggactgaaggattctgaagacatcacgggcaccctggctcagcagctcccaaggagagcagatgtccttcggggctctggccatagcgcaatgacataaggatgtttccaagaggaggcaataaagtgcatggtaattc

SEQ ID NO: 187 - DNA, 490 bp, Homo Sapiens
gcggccgcagtccgtgcacacgtggcgccgctggccggcctgagcatccatgctgggtatgggagccgggggctgtgctcctgtggtcgggtcccaggcagcatttttgggtggctgtgcccgtgccggggccacgctaatagctgggtcagggttgcgttccaccagcacttcaggactctccttcacaggagcctttctaggccctttggctcttgggacttcctccggttcctcttccttcctgtttgggacatctcctctccgagctcctcccagtctttccccccttctcaggatcctgggcggcggggctccaagcctcactctcctgttccatccaagagatgagggctggtttggggcctgggaatccgagcgcgcccaggtggccgtaggtctcctgcatcacgtcccggtacagagccctctgcgcgggccgcagacagccccactcctccggggagaagtacacggccacgtccgcgaa

SEQ ID NO: 188 - DNA, 613 bp, Homo Sapiens
aaagatgcaaatatagggaacggaacatagaacgtcgtaggtgaaggtggggcaggagcagatgaggaaaaggagcagtcgcacagacctttcctcatgctgcaggcccggcagtctgaagaccaccctcatcgccggcgtcggcggggcttggagtgtgatggcaaggtcaacatctgctgtaagaaacagttctttgtcagtttcaaggacatcggctggaatgactggatcattgctccctctggctatcatgccaactactgcgagggtgagtgcccgagccatatagcaggcacgtccgggtcctcactgtccttccactcaacagtcatcaaccactaccgcatgcggggccatagcccctttgccaacctcaaatcgtgctgtgtgcccaccaagctgagacccatgtccatgttgtactatgatgatggtcaaaacatcatcaaaaaggacattcagaacatgatcgtggaggagtgtgggtgctcatagagttgcccagcccagggggaaagggagcaagagttgtccagagaagacagtggcaaaatgaagaaatttttaaggtttctgagttaaccagaaaaatagaaattaaaaacaaagc

SEQ ID NO: 189 - DNA, 355 bp, Homo Sapiens
gtctagttctgcaccacagctcagcgtgatcgctattccgcagaggctggggacattgatgacgcattgcttgtgaacgttcatatcgcaggtgtcacatttcatcccttgatggataagtccatagagcagtgacccacagtgatcgcagaaggtggggcttccgtaagctgtggattttgaacttgtgcttgctcctggggtcatcagtgtcgggtcccttatacgcacccggacaagaaaaagtaacaaattcatggcacctcttgttggaccacaaaacagcaaactttggcactggaacccttgtctccccaaaaccccagatgaggtcggtgctgtgggtggcataatt

SEQ ID NO: 190 - DNA, 287 bp, Homo Sapiens
tattctgcaccacagcgttctcagaaatgtaagtggcactgcttttaaatggacacatgctccacttcttggaatctgtaagtgtttcataagggatggctgtttttgagtagttaagggtataccttcaaacttccaagattctaggtgagcctagggttccagttttgactctagaattctggcttagcctttcagtcttccacttcctcacaagccctttacttcgaaagtctcccaaaccagctatgaaccccttggatcagcaggcactcccttggtaaaat

SEQ ID NO: 191 - DNA, 322 bp, Homo Sapiens
tgattaccgagattatttgcaccaagcattctgcagcgtagtcagaggctcctgcaggcagggtccccagcgtcacctgttgcggagagaagaaagggggttcagaggccggtacctcccctacagcagcccttgggtcattgggccctctaggagtgaccctagtgacttcccctgggagccgcattttcactatctggaaaatgggctcaatgcaaaggtggcagacatttatggacacccgccacgtggtcccggagtggaacggctgcctcccactgcagcctctgactgctctgccgccgaaccccggggatgggat

SEQ ID NO: 192 - DNA, 401 bp, Homo Sapiens
  misc_feature (227)..(227): n is a, c, g, or t
tattgcaccacagcagcagctcagctgttagttcaaccatcaatctaatggtgagcacagaaccatggctctcactgaaacaggtgacgtgtgaaacttattaggtccattaatggcactaagaaaatacccatcttgatttcaatttaacttcctgggttctaagtcttagcccaggcatgacttctatgggggaaaaggtccacgtcagtctctgtgcagcccanacatcatcttattctgcataactcccaggcgtaaataggagtcttacgtttacctgtgcatacagactcagtgaaaatctgatgggaggtgctttaggggctatcactagaactcacgtatccattagacatttctcctgtgcctcatactgggactcgagttgatctgcggtc

SEQ ID NO: 193 - DNA, 371 bp, Homo Sapiens
tcggtagccgttctgccagcccacagccctggacatggcacgcctgccggagaggcatgcagacatgcaccagaaaggcaagtgcagaagacaagtccgtgttcatagctgtgatttttgcaatagcctgaattggaaataactcaatgtccgtcaacaatagaaagaaaaaataaattgctgtatgttctgtcaatagaaatatcgtacagtgatagaaaagaattagctactgctaatgcagcagcccagatggatctcataaacgatgttgagtggaagtagccaaataaaaagggtatgtacagaacagttttgtgtctgtacagcacagaaataggcagattagctgtggtgcagaattggacttg

SEQ ID NO: 194 - DNA, 478 bp, Homo Sapiens
gtcgatctagaggatctcaattctgcaccacagcaggatgggagagcttactcccaggcccccacacccaggtcagacatcacgtgcaccctgaatgtaggcaaggtgctggccctgcagcccagtgctcatattcctgctctttccacttcctctttccccaccgtcctgcactagcaccaggcccaggccaaggcaagaatcagacagctactccacagacagagaaacaacttccagctaagtatgacatcaggacttgtcttccctactaagcctccatccccgcccctcccctgaggcccacgtcctgctgaatcacccggactccgcacaagctgcgcctccctctcagcccaacaaacatatcctgagcacccactaccagcaacccagccgccacgcgacgcacactgccagcaggagggagggaagaaagccagtcatccggcagatctgggctgtactgggcgggaga

SEQ ID NO: 195 - DNA, 568 bp, Homo Sapiens
aagcgtgcaccagtctatcagacagagagatatgagaaattcaaccagatttcaactgccctctcgcgtaaattggaacctcctcctgtaaagcaggcagagcttggataacctctcccacagaaccctttagaatatcttttcaagtttccccagcttcatctttgggaaagcttactgtttttgataaagtaataatgtgcaaatctgacaatatacaagcttttagtatccacaggatattaaacgtgtaaattgcacagagcacacttatttatgaattgtctaaagttactactgattttaaaatgaataatttattattaaggtaactactgctaatgttgatcagcaaatttaagagaagacctagctatgttggctggttgctttctattatcatggtatttgaccattttagttttaattccatgtcagataagtgtaaatagaagagtttaaaagcatgaaacatttcagaaggtatcagttatatgatattctttaaacaaatatgaaaaatgtaaatactcatgaatgaaaatacatctttttgtgaaacagttaa

SEQ ID NO: 196 - DNA, 415 bp, Homo Sapiens
  misc_feature (113)..(113): n is a, c, g, or t
cttgccgttgtaccaactttcagataagttacgcagttactgaaatcttgtaagtatttaagtgatcgttacattttaggacactgcgttagatggtaataatgctggaagtntggttacaacacgcaagaggccagttgtaaacatctgcttgtccttcttaggtcgccattcacctttgcatgttaagcgtctgctcaggtaaaccttagtgaaattccctaccgttgttgtacgttctgcaaaacattttatgtatagatttagaggggaaacgagaaggtactgaaataatgatcttggaatatttgctgtgaagggagaaagggagagaaaactcttctgaggatcatttgtcttggtagtatagtaaaaccaaccagctgaacctttcaggctacaagagaacccgggt

SEQ ID NO: 197 - DNA, 351 bp, Homo Sapiens
ctgcaccacagcgatctaggggttacgtatagtgtattacgaggacgtatgtgtgaaatatggactttagtgtattcatcacctaaataatgtacatgtacccagtaggtggcatttcatccatcacccctccatcctctcgctgtgtggagtcctcagtgtctgttattcccctctgtgtgtctgttctgtgtgcacccatcgtttagccccgctcttataagggagaacatgcagattttggtttactgctcctgagtcatagtgcgcatcctgtattctatatggcaacactaaagacaggtagtgtcatcggtgctgtgggtggcagcaattgtgtcacgagatcga

SEQ ID NO: 198 - DNA, 635 bp, Homo Sapiens
gtccccactgccgtcccctcctgaaatgatgcccactctccccagagtccccgggatgctgagttcattgttgaggccaagtactgcgtcaacacaaaggccgcttggaagccaggatgcaaatcctggaagaccacaataaacagctggagtcacagttacacaggctaaggcagctgctggagcaaccccaggcagaggccaaagtgaatggcacaacggtgtcctctccttctacctctctacagaggtccgacagcagtcagcctatgctgctccgagtggttggcagtcaaacttcggactccatgggtgaggaagattttttcagtcctccccaggacacaagcacagggttagaggaggtgatggagcaactcaacaactccttccctagttcaagaggacacaatgtaggaagtcttttccacatggcagatgatttgggcagagcgatggagtccttagtatcagtcatgacagatgaagaaggagcagaataaatgttttacaactcctgattcccgcatggtttttataatattcatacaacaaagaggattagacagtaagagtttacaagaaataaatctatatttttgtgaagggtagcggtaaaactggtgcggctcgat

SEQ ID NO: 199 - DNA, 555 bp, Homo Sapiens
  misc_feature (31)..(32): n is a, c, g, or t
ggggccctgctacctgttcttgggcctcagnntctgcacagacaagcagcccttgctttcggagctcctgtccaaaagtagggatccggatcctgctggggccgccacggcatggcatggtgggaaggccggcagcgggcggaggggatccagccacttccccctcttcttctgaagatcagaacattcagctctggagaacagtggttgcctgggggcttttgccactccttgtcccccgtgatctcccctcacactttgccatttgcttgtactgggacattgttctttccgggccgaggtgccaccaccctgccccccactaagagacacatacagagtgggccccgggctggagaaagagctgcctggatgagaaacagctcagccagtggggatgaggtcaccaggggaggagcctgtgcgtcccagctgaaggcagtggcaggggagcaggttccccaagggccctggcacccccacaagctgtccctgcagggccatctgactgccaagccagattctcttgaataaagtattctagtgtggaaacgc

SEQ ID NO: 200 - DNA, 418 bp, Homo Sapiens
tatctgcaccacagccacactgaattcccctcactggcctctcctagactctcttggtgactttgcacattctgttctttcagcctgaaacaaccttccctgctgtttccttggtgaggcggttttcagggcttagcccaagcatcacctaatctgtggggattccctgcaccggctcctctctgggctgccctagttctatgccatgaagccctcacagccaggctgggcaggactggtttaactttttggtttgactacccagctaggatggtgttcctggaaggaagggggacgtctcattcctcgctgtgccactgatgtctagcacgcatgcctagcacacagagctgtgtaagggtatgaatagaatacatgacacaggatttaattaatcttccagaatgaaaggactgga

SEQ ID NO: 201 - DNA, 582 bp, Homo Sapiens
  misc_feature (460)..(470): n is a, c, g, or t
gtatgatcccatccgcatggagtttgaaaataaggaagacttgtcgggaacacaggcagggctcaacgtcattaaagaggcagaggcgcagctgtggtgggcagccaaggagctgagaagaacgaagaagctttcagactacgtggggaagaatgaaaaaaccaaaattatcgccaagattcagcaaaggggacagggagctccagcccgagagcctattattagcagtgaggagcagaagcagctgatgctgtactatcacagaagacaagaggagctcaagagattggaagaaaatgatgatgatgcctatttaaactcaccatgggcggataacactgctttgaaaagacattttcatggagtgaaagacataaagtggagaccaagatgaagttcaccagctgatgacacttccaaagagattagctcacctttctcctaggcaattataattttnnnnnnnnnnnggccacttactgccctctgtaaaagatgttaacatttctagttttcttttagtgtgaatttttaaaatagcagttattcaaggttttagaacttaataaatacctagtcaga

SEQ ID NO: 202 - DNA, 444 bp, Homo Sapiens
tgctggccagacttcagctgccttgggaactgaagccctgccactgttgctagtcaggggcttggttctcccacttacactgttgacatctattttctgaagtgtgtttaaattattcagtgctaatcattgttttttcctttgtaaatgttgattcagaaaaggaaagcacaggctaagcagttgaaggttccccaccattcagtgagagcagaacccccattccccagcctctgctggtagcatgtcgcagtttccatgtgtttcaggatcttcgggctgtcgttagacaggttaatgaagaacacttctcaacagtttcctttttgttttcctttataattcactaaaataaagcatctattagtgtctgatttaggaatgtaaaatgattctgtattaatgtaaataagattatctattgcaaaaagatatttcaaacct

SEQ ID NO: 203 - DNA, 312 bp, Homo Sapiens
tcgcatactcatgcacattttccttcatttccagatcctttatttcagagcagcccattttcctctggattcattgatgaatacaagtacccacacctttggccagtaatgtcagttacctgctgcaggttctgtgtatgaggccttcatgaacggttaccttctccatacactagggaagcatttgtcagactctgcagactgggttctagaaaggcagagtctttaagagtattcatttcttctggaaggtggagctttacccaaagtggaagttagccttgctcaaaaatgtgttttgtggtaggtggt

SEQ ID NO: 204 - DNA, 599 bp, Homo Sapiens
ggacggggacttgcctggagacccatcgctgccagggtccgcggcggccccctcctcgacagctgagggggcagcctcttcagccaccggggctgggtctggggctggctcggggctggcctcaataggggcctcagtggggcttgggggtctatgggcttcctcctccttctctaacattgggaagccgagtgcttctgaaggttcatcaggggacacgatcggggagagttggcttaaaggtggcagcatcactgtcatcgccagtagtcggctccggcacaaggtcttcctccagcttgatgggagtgctgggaggcgggtgggggaccgcaggctggtctggaggactcttttctttctgttctctagcctcgtccagattctcttcagagcccttctgcttcctctccacctccctgcggtactcctccagctcacggtctgtgagtgtggtgaaggggttggggcccgtggtgctcacaatgacgtggggctggtactccttttcaatgatggccttggaagccgtcaccagctctccctggacgaagctcctgtccatcactacaccacacaaaaacctgggactgagggcc

SEQ ID NO: 205 - DNA, 553 bp, Homo Sapiens
  misc_feature (20)..(20): n is a, c, g, or t
cccgcagtgaatcctgctcncagcccgtgatgaatggcaaatccaagctgaactccagcgtgctggtgccctatggcgccgagtcctctgaggactctgacgaggagtcaaaggggctgggcaaggagaatgggattggtacgattgtgagctcccactctcccggccaagatgccgaagatgagaaggccactccgcacgagcttcaagaacccatgaccctaaacggtgctaatagtgcagacagcgacagtgacccgaaagaaaacggcctagcgcctgatggtgccagctgccaaggccagcctgccctgcactcagaaaatccctttgctaaggcaaacggtcttcctggaaagttgatgcctgctcctttgctgtctctcccagaagacaaaatcttagagaccttcaggcttagcaacaaactgaaaggctcgacggatgaaatgagtgcacctggagcagagaggggccctcccgaggaccgcgacgccgagcctcagcctggcagccccgccgccgaatccctggaggagccagatgcggccgc

SEQ ID NO: 206 - DNA, 588 bp, Homo Sapiens
gcggccgcgagaaccggatgccgatcctcatctccaagatcttcccggggctggctgccgaccagagccgggcgctgcggctgggcgacgccatcctgtcggtgaacggcaccgacctgcgccaggccacccacgaccaggccgtgcaggcgctgaagcgcgcgggcaaggaggtgctgctggaggtcaagttcatccgagaagtaacaccatatatcaagaagccatcattagtatcagatctgccgtgggaaggtgcagccccccagtcaccaagctttagtggcagtgaggactctggttcgccaaaacaccagaacagcaccaaggacaggaagatcatccctctcaaaatgtgctttgctgctagaaacctaagcatgccggatctggaaaacaggcaaaactagatggtggaagacagcaatggagacctgtcctcatggctgtgactgagaaggattggctgctctatgactgtatgccgtggacaagagatgcctgggcgtcaccatgccacagctacccacttgttgccaccaggtaagtaagactaaagataaggaagtaaaatatttatcctactct

SEQ ID NO: 207 - DNA, 976 bp, Homo Sapiens
  misc_feature (381)..(381): n is a, c, g, or t
tgcgcttcctcatcacccacaacccaccaacgccacgctcagcaccttcattgaggacctgaagaagtacggggctaccactgtggtgcgtgtgtgtgaagtgacctatgacaaaacgccgctggagaaggatggcatcaccgttgtggactggccgtttgacgatggggcgcccccgcccggcaaggtagtggaagactggctgagcctggtgaaggccaagttctgtgaggcccccggcagctgcgtggctgtgcactgcgtggcgggcctgggccgggctccagtccttgtggcgctggcccttattgagagcgggatgaagtacgagaacgccatccagtttcatccgccagaagcgccgcggagccatcaacagcnaagcagctcacctacctggagaaataccggcccaaacagaggctgcggttcaaagacccacacacgcacaagacccggtgctgcgttatgtagctcaggaccttggctgggcctggtcgtcatgtaggtcaggaccttggctggacctggaggccctgcccagccctgctctgcccagcccagcaggggctccaggccttggctggccccacatcgccttttcctccccgacacctccgtgcacttgtgtccgaggagcgaggagcccctcgggccctgggtggcctctgggccctttctcctgtctccgccactccctctggcggcgctggccgtggctctgtctctctgaggtgggtcgggcgccctctgcccgccccctcccacaccagccaggctggtctcctctagcctgtttgttgtggggtgggggtatattttgtaaccactgggcccccagcccctcttttgcgaccccttgtcctgacctgttctcggcaccttaaattattagaccccggggcagtcaggtgctccggacacccgaaggcaataaaacaggaggccggtgggccaaaaagaaaaacaacacaac

SEQ ID NO: 208 - DNA, 558 bp, Homo Sapiens
gcggccgccatcaaagtcaatgactcagtgcccttccacctgggctggaacagcacggagcgctcgctgcggcttcaggcgcgctaccacgacacgccctacaagccacccgccggccgcgccgcagcgccagagctgagctaccgagtgtgcgtgggctcagacgtcacctccatccacaagtacatggtgcgtcgctacttcaacaagccgtcaagggtgccagcacccgaggccttccgagaccccatttggtccacatgggcgctgtacgggcgcgccgtggaccaggacaaggtgctgcgttttgcccaacagatccgcctgcaccacttcaacagcagccacctggaaatcgacgacatgtacacacctgcttatggcgacttcgacttcgatgaggtcaaattccccaacgccagcgacatgttccgccgcctgcgcgacgccggcttccgcgtcacgctctgggtgcacccttttgtcaactacaactcgtcgcgcttcggcgagggcgtggagcgcgagctgttcgtgcgcgaacccacgggccggtta

SEQ ID NO: 209 - DNA, 723 bp, Homo Sapiens
  misc_feature (631)..(631): n is a, c, g, or t
gtgattaaagtaaaatgcaattcatgtaaatatctccatcaaggaatcatacagggaagacccaagtggccatggggaacagactgggtgttagttttttaaatacagaggcataaataactgtacacaaggcagttaaatacacagtggtgcgatagcacctcctggtggtcacttgaagtggtgcactcagcagcaagttccatctttcacccacttgccaggcctggcatttaagattttgtctccaagggaccagggaggccccagtttgagagaggaggctccgatcaatccagggtgctacttgttaggaggtcaagtaaagggcttgatggggagcaacgttgaggaaataagacttgaggctgggggatatcactttcctccatctccccaggccctgtgacctcagataatgcagagctggctccatccttaagttctgtgccggcagctttaacccctcctgtaggccctcagagcgctgacatctccaggctgatgagctgcaccgacacactgtccttcttcgcctcgtaaggaaatacagcaccaaagatatcttcgtgatagcgcttctggctcttgagctgaaagaaatagtcctcgacctggctctcattcaatntcagcttggcagccaccagctgctttcaggtgtgggcacgtcccgggccatgcgcacatccccgcaaaacatagagtgcctgggctcttgtg

SEQ ID NO: 210 - DNA, 838 bp, Homo Sapiens
ccctgcctccggagttcttgcattgatgtgcagtcctgcaagaagctaagttcacacagcgcaagtcctggaagtggtagtacggggcgggccaggtctcacacacttacctgtccaggtagaagttgcggcaggccacgcacttggtggggtcgtcgggctgagaacagttgccagggcactcgctgtggcaacagaggccttcggcgggtgcagcccgtgtgacttacagatggtcgggcaaactttctggcagtgactatgagtccaacatcgttcgacaaactgcccgttgatgacggtggcggggcagttggtcttgcccttcgcggtacccggacagatgtctccacactcctcgttgtcatctttgttcaacacgatgtaattatcctccacggaatccaggatacgggaccagtcgatagtggccaagtaacagagctcattgttcttctcgatgcggacagaaccccgggtgatgttcatcaggttgtagaggccgagttccatgaggtgaaccatctcgaagatgaccagcgcgtagttaaagaacagtcgtgatccccggatgaccgtgaggttggggaacaggtccttcaggctctcgagcccatagacccggaagagcagcaagtaatcagtgatcatgatgagtttggggaaactgaggtctcggaaatcttcgggcctcgttttgaacatcaagagtatctgcaagtgtccttcgatgacagagcaattctccagctcatgcaacctagtgaggttgttccggatatccatgccgggacacacctctccggggtacaggtggcccgcggcgcacagtagcagc

SEQ ID NO: 211 - DNA, 928 bp, Homo Sapiens
  misc_feature (885)..(885): n is a, c, g, or t
gggacggcagcccgtctcccgttaggagccggggaggcaaggtccagcgtacggtccgggggaaccttaactgtcgtttctgtgcctggacagtaggttggagagtagggtctgaatgagctacagtagtgaacgccgacggcttgtgttgagggcaggaaagggtgcacacagctccggcaggtgcttccgcgagaaaggtgactgatacaacaacgtagaggaccctgcaatgtggagaggcatgaaactggaggtccagtgccgtgagttaacaatcaagacgtccatacaggagatgcattggtggatgggtgaagagatgataaaacggataattcagtggtgatcttcagaaaaattcccacaaaaaaccaaattaacagatcgaaacaatctcataagccacttggaaactgaatttctctaaaaacaacactctataaaaattttttgatcaaacacccagctggaacaactctatttaccgtggatccaccattagtttggagagcctgcgagagatacgggggacttgaagtacgcctccacccccttgtcccttccaggagttcaagagacccagtggaggcagatgtatgtcgggtcccgccctacctgctctgacgagcttctcctgatattaatgcgtatccgcttttgtatgaccccttctattgatgtcacacgttcgtctattcgcccgcgcgcctagcaggcagggccgctctcagctccgccgtgacttgcacgtttctgcccgcctcctgctcgagatggagaggcgcatcctgagccgcagctggccgactatctggtgcaagcctgccacgaggctgtggttgaagagtctaaggctacgtaagggtgccgcccgactgactnacaagctattctgtcacaacacctccaccccacgacggtccgc

SEQ ID NO: 212 - DNA, 945 bp, Homo Sapiens
aaggatccccttagcaggctgatgccgaaacaaaaaaggcagtcatgtttgttacgtgattggaatggaacccgaaaagagagcatgctgtgttcttgtgggacaggaaagcttgtgtgcaccaagtcttaaccaccaccttcattggtgacatagattatgtgctggaacatatttcacaccggtctggcagtaagcacttgtagtgttgtgcagtggaaacagtcatcttccgctaaggcatggcgtgttgtgcagtggaaatggtcattttccgctaaagcatggcgtgttgtgcagtggaaatggtcatctgacgctaaagcacagcatgttgtacagtggaaatggtcatcgtctgctaaagcacggcgtgttgtgcagtggaaatggtcatctcctgctaaagcacagcttccatcataaggtatgctccttgctcaaagagtgtggtcccaaacagcttttgggaggtcctccttgactcatggatgaaacccagaacatcttgaggactgagttaaccacaggtccttaaataactctccacacatttttcttagtttatctctacatgcagggtgtgcagcagcctgttcaaagtcacattttctgggaaatattttcagtgtttatttgcaatttagcccactctgtgtagtcttaacttatttcttctaaactcaccattaacctaaataatagtcaaatttaggggggctgtatttgtcttactcgagtcttctaccatagttgaaactgtcgtacccaaacgagttacagagaaatgccacactttgagacgaattcaggagtcctttattagctggtgactgagagacggctaacacaggaaatactctcggccctaaagaatgggctagattttcttttatacattggtttagagaggggaggggggattccagctgcaataaacttaca

SEQ ID NO: 213 - DNA, 693 bp, Homo Sapiens
agaagaatagtatttatttaataaaacatatattatattgaactatgtgttaattcatttgtatcttttaaaaaattatcactgttaaagccattgactcctttagtacactgagaaaaatcttatagtaaaactagcctttcacattaaggttttggtgtgtattttgttaaataactaacatgctgctctattttctgggtgtagaaagtattgggctctaggaaacatttacttgtgtgtgaaaacaataccccaaggtaataggaaaagtttgaattaagtgtttttaattcagtcagtgaattcagaataagtacattcatgtataacatagggacagttctgctgctgttatttatatgcaattcttctggtaaatagcaatagaataaaacatatttcaatgtttgtgtataggttttatattattattccactaggaatggcataagaatttatagataaattcttgtaacattaaaggattaaaatgtttttacattgtttttgggtgtctccttcttgtgcccatatctgataagctttatggattattgcatttaattccttttatttggagggttttacttccttgttaacatataaagttataaatgaaggacaaggaggagatggaaaatgtgtatttattgttaattcttaaaatagcgcgtaaataaaataacacca

SEQ ID NO: 214 - DNA, 554 bp, Homo Sapiens
aaccttaaatcattgagcagccttcacacatctggggcggggatgactccaaatggacaccttcccgatctctcctctgaactccagacccataagccccagttgtctactcagcatctcccttatgggtctggagatcagaggagacattaagtcctcagacttgatccccgcccagctgagcttgctgcaccctcttgccactaccttctccaggattcctggtgctcccagcaaaccctcacgtcatccttgactgatctctcctcccctcgtttacctctccctagacaaggggccaagaaattacagcctgaggaccaaatctggcctcctgcctattcctgtcaatatggctgtcctggaacacggatacgccccttgtgttgtccatggctacatgtgctctgcaatggcattaggctgagtagctgtggggaagaaagccacccagccccttatagcaacagtctgtgagccctgacctggcccctgagccaatgctgaatgttagaaaagacagcgtaaccccagccacctcctgccagtcccat

SEQ ID NO: 215 - DNA, 1706 bp, Homo Sapiens
  misc_feature (919)..(1136): n is a, c, g, or t
  misc_feature (1141)..(1144): n is a, c, g, or t
  misc_feature (1150)..(1252): n is a, c, g, or t
  misc_feature (1254)..(1254): n is a, c, g, or t
  misc_feature (1258)..(1376): n is a, c, g, or t
  misc_feature (1451)..(1510): n is a, c, g, or t
  misc_feature (1552)..(1591): n is a, c, g, or t
  misc_feature (1632)..(1640): n is a, c, g, or t
gggcagtgggagctcattgccgctcgctaggaacttatcctgactggttttttttctgctcttttattgggatgtttgtgttttattgcgctcattggcagacttatgtttcaggcatgttgagatttggaaaagtggatgtaactgaaattcagatagctttagtgattgtctttgtgttgtctgcatttggaggagcaacaatgtgggactatacgattcctattctagaaataaaattgaagatccttccagttcttggatttctaggtggagtaatattttcctgttcaaattatttccatgttatcctccatggtggtgttggcaagaatggatccactatagcaggcaccagtgtcttgtcacctggactccacataggactaattattatactggcaataatgatctataaaaagtcagcaactgatgtgtttgaaaagcatccttgtctttatatcctaatgtttggatgtgtctttgctaaagtctcacaaaaattagtggtagctcacatgaccaaaagtgaactatatcttcaagacactgtctttttggggccaggtcttttgtttttagaccagtactttaataactttatagacgaatatgttgttctatggatggcaatggtgatttcttcatttgatatggtgatatactttagtgctttgtgcctgcaaatttcaagacaccttcatctaaatatattcaagactgcatgtcatcaagcacctgaacaggttcaagttctttcttcaaagagtcatcagaataacatggattgaagagacttccgaacacttgctatctcttgctgctgctgtttcatggaaggagatattaaacatttgtttaatttttatttaagtgttatacctatttcagcaaataaaatatttcattgcttatattnnnnnnnnnnnnnnnnnnnnnnnnnnnnnnnnnnnnnnnnnnnnnnnnnnnnnnnnnnnnnnnnnnnnnnnnnnnnnnnnnnnnnnnnnnnnnnnnnnnnnnnnnnnnnnnnnnnnnnnnnnnnnnnnnnnnnnnnnnnnnnnnnnnnnnnnnnnnnnnnnnnnnnnnnnnnnnnnnnnnnnnnnnnnnnnnnnnnnnnnnnnnnnnnnnnnnnnnnnggggnnnnaaaggnnnnnnnnnnnnnnnnnnnnnnnnnnnnnnnnnnnnnnnnnnnnnnnnnnnnnnnnnnnnnnnnnnnnnnnnnnnnnnnnnnnnnnnnnnnnnnnnnnnnnnngnaagnnnnnnnnnnnnnnnnnnnnnnnnnnnnnnnnnnnnnnnnnnnnnnnnnnnnnnnnnnnnnnnnnnnnnnnnnnnnnnnnnnnnnnnnnnnnnnnnnnnnnnnnnnnnnnnnnnnnnnnaaaaagagggaaaaaggggcccccggccgccgcccagagacccaaaaaaagaggggccccgggggaaacaaacannnnnnnnnnnnnnnnnnnnnnnnnnnnnnnnnnnnnnnnnnnnnnnnnnnnnnnnnnnnaaaacacaccaacgggcggggacaccccccacaagaggaagnnnnnnnnnnnnnnnnnnnnnnnnnnnnnnnnnnnnnnnnccccctccaatggtgcggcggcccctcttttatttgacgcnnnnnnnnnccacaccccccggggggagagtggtgggaggaacaaaacagtgttgttatactcgctaacccgggt

SEQ ID NO: 216 - DNA, 880 bp, Homo Sapiens
  misc_feature (448)..(501): n is a, c, g, or t
  misc_feature (667)..(722): n is a, c, g, or t
gacacttacagaacccagagtcagatgatgacagcgacagggagaataagggagaggatacagatatgcagaatgactccttccattcagacagccatatggacagaaaaaaagtttcacagttctgatagtgaggaggaagaacccttaaagcaaaaaatggacagtgatgaagatgaaaaagagggtgaggaggagaaagtagcgaagagaaaagctgctgtgctttctgatagtgaagatgaagagaaagcatcagcaaagaagagtcgtgttgtctctgatgcagatgactctgacagtgatgctgtatcagacaagtcaggcaaaagagagaagaccatagcatctgacagtgaggaaaaagacaaggaaaaggacagagagagagaacgggaaaaagagcatgagaaggatcgagacaaagagaaggaaaaggaacaggacnnnnnnnnnnnnnnnnnnnnnnnnnnnnnnnnnnnnnnnnnnnnnnnnnnnnnnaaggataaaaaatccagaacaccacccaggagttacaatgcatcgcgaagatctcgtagttccagcagggaaaggcgtaggaggaggagcaggagttcttccagatcgccaagaacatcaaaaaccataaaaaggaaatcttctagatctccgtcccccaggagcnnnnnnnnnnnnnnnnnnnnnnnnnnnnnnnnnnnnnnnnnnnnnnnnnnnnnnnnccgggacaaggaacgggaaaaggaccgggaaaaagacaaggaaaaggacagagagagagaacgggaaaaagagcatgagaaggatcgagacaaagagaaggaaaaggaacaggacaaagaaaaggaacgagaaaaagacagatccaaagagatagatg

SEQ ID NO: 217 - DNA, 1238 bp, Homo Sapiens
  misc_feature (601)..(691): n is a, c, g, or t
  misc_feature (695)..(695): n is a, c, g, or t
  misc_feature (701)..(704): n is a, c, g, or t
  misc_feature (712)..(712): n is a, c, g, or t
  misc_feature (849)..(859): n is a, c, g, or t
  misc_feature (894)..(906): n is a, c, g, or t
  misc_feature (1176)..(1176): n is a, c, g, or t
cgaggagacagacatcctggcccaaagcctgcaccgtgtcttccagaagagttgatgagggctacagctgttggggctctgccaggtcccctgggaccaactacagctccaatcagaaaccctgcgcttccttgagtgtggcttcccacttttcctgcattgtggagctgactgagtacaccggtgaggctggggtctctgcaggggaggtcactggaacagcgagcaagggactggtgcctcgctggtgctgggtctctggtttgctgcagagccgtaggacactcctggctcctcagtaggacagacagacgcaggcgggtttattttggaggggtacttgtggcattttcctgtattgtcttggacatgggatgtggggaggtggaaatgatgagcagtagcatcatttctccctgttgggttttagccagtttgccagcaagcgcatcctagcagggtccccgagcagcaggttgtgtggatgaagggacaggcacttgcatccagctgatctaggtcacacctggctcttggctgccatgtggcttattaacagcttccagtggaagtcgcaataaacagtttttggtaaatctcnnnnnnnnnnnnnnnnnnnnnnnnnnnnnnnnnnnnnnnnnnnnnnnnnnnnnnnnnnnnnnnnnnnnnnnnnnnnnnnnnnnnnnnnnnnaaanttgggnnnnaaccaccnccccaacgaaaaacttttcaaaaccatttcttttggggcccccggccccaaatagggtaaaacgaaatttggttcgtagccgggtgccccaagagagaaaccgggaaagaaactaaaggcctgggtatcctcccccnnnnnnnnnnncccccccggggagggcagcgggatatcgttttctnnnnnnnnnnnnncaaactggagggttttctcgaggggccgtttttccgggactctttatcccaagaggggaggcccgcgggggggagccctcatataagagaaaatttaacgcgccgcgagccctgtgggaaaatattttcggaagaaaaattgttttaagagctcgcttctcgggcgctctttcctctggaaaatgagaaaaccccaaataataaaactgggaccaggtgctccgccccctacatgtggaacacgcccgtgctataaccgcgactttgttntgcccctgtgaggaatatacagaatattcgcgccccggagacggatacacggcggtgggggg

SEQ ID NO: 218 - DNA, 978 bp, Homo Sapiens
  misc_feature (82)..(85): n is a, c, g, or t
  misc_feature (87)..(87): n is a, c, g, or t
  misc_feature (90)..(90): n is a, c, g, or t
  misc_feature (92)..(109): n is a, c, g, or t
  misc_feature (180)..(180): n is a, c, g, or t
cccccgggcgcccaaaagagaattggttctttagaaaagctttttccgaaggggcccgaaggccggcccgacaatgtttttnnnntnttntnnnnnnnnnnnnnnnnnntccgggttcaaccaggatcccaccctcggattattctaaacttatcatccaattggaaaggtctagttccntcattaaaccatgcttttctaatctcccatgtcaagttctggattctgtatatgcaatgatatcaaactctcctgaccttaagagggtcatccaggttgggatcattagtttccaaattatctaaagtatccaattcaactaccttgccatcctctgtatctaaatttaagttttcaagatcttcatcatctaagtctttgacttcaaccccctcaaggtctttaacatccagttccttcacagaagggtcatcagaatcaagtttttcctctaagaccatcagaaggctgggtggttatctgtaaattatcagacgttgtttcagacggtacagatgttgacaaaaggagcttctgaaaattcaccacctagtggatggttcagagtcctcatgaccatagaagatgaatggacagaatgaccttgctcttgttgaagatggtggcaactttgttccaaaatctgggtgcacaggtagctgattaggtagaccctggggaggtcgtcgcatggggtctgtagtgtctagggcccggaaagtctggccgggggaatgaagtttccatgtctcagattagaagatgcctctacaacgctgccaggtggagcactgaaaggcagccgttgccttccgtcaggagccctatgtctcagttcaatatatgcttggcccacgtatgttgtgctgctgaactggcaagctctgtggtgaaaaatgctgaggaagtccaactggattattcatttgtgagttatttaaaggcctaggcatatctacagatactgatcttcttagc

SEQ ID NO: 219 - DNA, 1561 bp, Homo Sapiens
  misc_feature (685)..(760): n is a, c, g, or t
  misc_feature (787)..(787): n is a, c, g, or t
  misc_feature (806)..(806): n is a, c, g, or t
  misc_feature (821)..(836): n is a, c, g, or t
  misc_feature (862)..(871): n is a, c, g, or t
  misc_feature (1013)..(1019): n is a, c, g, or t
  misc_feature (1021)..(1021): n is a, c, g, or t
  misc_feature (1023)..(1023): n is a, c, g, or t
  misc_feature (1027)..(1027): n is a, c, g, or t
  misc_feature (1030)..(1031): n is a, c, g, or t
  misc_feature (1033)..(1033): n is a, c, g, or t
  misc_feature (1037)..(1037): n is a, c, g, or t
  misc_feature (1048)..(1048): n is a, c, g, or t
  misc_feature (1052)..(1053): n is a, c, g, or t
  misc_feature (1428)..(1428): n is a, c, g, or t
tgaggagcatggcttagcttgagacacacacagacactgtgtacttcagtgaagggcttaatatacagtttccaaacctgacgactcttcttcttgtaatggctgcccttttcctacctgaggccgtcttaaagaaagggcccagtctcctctaatgctcagatttcccatagttggcttttgctgtgtctcccccctcaggcagtggtcatttctggaagcaggtggttgtagtccaagccccctccccaagcagggtctgccccaggctccttcgagcccctttccccgcctcctctcagcctgtccggatgacagtgttcgcctcctgtttagactgtacactcttcaggggtaggggtgccgtcagttcttcaatcagctggcacacacttgtatagtgaaatgtttacatgtgggaaaactccgccttagacaaactaccaaagtacaatcgtgtctctctctagccggaatgctacagagagaaatggaaccttagatttgcaacaaaagtctgtaaactggtctgtttgccaaagtgaacactggatgactaaggagctgaagaaggcccccagaagcggatttgtggtgggttattttattttgcctgtggccaatcttctgtgaaatacaatgtgctgttggtgcaacagatgattcaataaatgtctacagcagnnnnnnnnnnnnnnnnnnnnnnnnnnnnnnnnnnnnnnnnnnnnnnnnnnnnnnnnnnnnnnnnnnnnnnnnnnnncacaccaaaccaccacaaacttttacncataactaaccacccaacncaaaaaattcgtcgnnnnnnnnnnnnnnnnaaaaatttttcaaaaatattcgattnnnnnnnnnncccccaaaaaaaagggaacgcggccaaccctgggttcccaagaaaacccgggtaaagacaaaggggcggggatcccccccaaaaaaaccccgggacccggtcgaaaacaggggtcgggttggtaccggggagtaacccaatnnnnnnnangncggngcnngngggnggaccgccgcngcgnngggccggtgcgatcggggggggcgcgcccgcggcgggcccttgccggctgctcgccttcgacgcgcccccgcgcacgcgcggctccatgacgcccgggctggtccgtggcatctccgaggagccgagctgccatgaccgcgctctagccggcccggacggccctgcgcgcgccgcccgggctggtatatcgccggggcgacggctgagtcctgcctgaagggcgccaatcgtgcttcgcacgttggtgggtttgtatttgctgcgattgacgagactgagattggatgagtggaagccacacgatcatccgtccgatggagtgctcatgagcatgagatcagctgcgacatcgacgccacggggcgcgcctctgnttgagcggcacggcgtgtaggcgcaccgccgtgcgcactggacaggcgcgggtgagaggcaccagctgcgcgcgccttacgtacgggactctcacagcgtgcgggacggttgcgggatgcgtcggaacgaggg

SEQ ID NO: 220 - DNA, 389 bp, Homo Sapiens
actgcaagcttgcaccaccacaccagactaaaacatacaatatactgattacattttctcccctataagaaatatttttagaataactgttaacttttttttatctgcagttaatgatgcttgagacacggaaacagcctctatcctctcaatgtgtaatagccattattatgcccagtaatgtattagccaagatcatctcaaatgacaaatcataccatactaacaattttatattttaggtagaaatagaacacagctttatagttttgaaaaatatcaagtggataaaatttttcaatttgaagccatcttatttggaaaaatattcaaaagtctggcatgactaccttggtcaagtttttaatacctcattctctaaagtgagg

SEQ ID NO: 221 - DNA, 950 bp, Homo Sapiens
tttaaatggttttctttttgaggcaagttggatgaacagagaagggaaagaaggaagacccagaggaaaagaagggaaggaagtgtttgtgtagaagagagagaaagccgaatagagttaggaaaaggaagacaagcaggtgggcaggaaggacatgcaccgagaccaggcaggggcccaactttcacgtccagccctggcctggggtcgggaaaggtgggcgctaaaaaatgcagcccaggatgtggcaatcaatgacactattggggtttcccaggatggattggtcagggggaaaaagaaaaaggcaaaacactccaggacctctcccggatctgtctcctcctctagccaacagaatggacagccggacccctgaacttcctctcctcttacctgggcagagtgttgtctctccccaaatttataaaaactaaaatgcattccattcctctgaaagcaaaacaaattcataattgagtgatattaaatagagaggttttcgggagcagatctgtgaatatgaaatacatgtgcatatttcattccccaggcagacattttttagaaatcaatacatgcccctatattggaaagacttgatcttccacggtgaatacagtacaagctgaagcgtgccgcttcagccctcatttaaatcaatttgtaagtagcgcagcagcctatgtgggggaggataagctgcaaaaaaaagtgggctcgtatttatctacaggactccatatagtaatatataggcactataaatctattcttcttctctgtatttgtctatcttcctatctttcaaagatttgcattaactgtgttacaaagtagttcctaataggggcatagaggagcgttcctcattcctgggacaactgagaaaacccatattctcctaagacaacccgtaatagcgtgattgccgcctcgaggcaggacag

SEQ ID NO: 222 - DNA, 895 bp, Homo Sapiens
cttataagaaggcacttgtttgtaagccagagaagaaactgtaatggcatcctatcagattgttgagtgtggatgtgatagtcttcaggtgcagagcgttcatgcactaacgctcactggcagtgcccatgtctgctagcggcctccatgtgactagtgagctgctggtgaaagtcgtgtgaaatcctgtacactgtgtatagaacaatgtaattttatgttaattgttattactttaaaacatatctaccatctgattggctggtaccgagagctgtgggtaaaatttgaaaattgtatttagaataagaaattttacattttaaaccctattgtcctttatgcattttcaatgaaatggaatgaaggctaatatgcttgctttatttacttttgtaatcttggattttgtagcttttaaaactagaaaccattgttctaacaaagcaggcaactttattctataaacacaactttattaagcagaatacactgtagatgcttttccccaacgtatctggctggcagtctttgtcgttgttcattctggggataaaggggaactaggctagcagttctaatgtgacattctttaagcatatcttaaaatagtatttaagtaaatggtctaatttctacataattattgcactgaacttttttgtttattaaggtgtttaaataagctcagctaattcaagacactgtagccacttgtgcatcagtgtgcttgaatttagtagcttacagcattatttatgaaggaaaaaatacataaatatgaagtacctcatgttgaatgttattgtactgtatttttaatgtaacagtgcagatcttgttagacacatgaatgtgtataatcatgttaaatgcaaataaaactagttcatag

SEQ ID NO: 223 - DNA, 1009 bp, Homo Sapiens
  misc_feature (635)..(643): n is a, c, g, or t
cggtccggaattcccgggatcgaacacacaggaaaaagacacatcagtgtcagatttgtaagaaagcgtttaaacacaagcaccaccttatcgagcactcaaggcttcactcgggcgagaagccctatcagtgtgataaatgtggcaagcgcttctcacactcgggctcgtactcgcagcacatgaatcacaggtattcctactgcaagcgggaggcggaggagcgggaagcggcggagcgcgaggcgcgcgagaaagggcacttggaacccaccgagctgctgatgaaccgggcttacttgcagagcattacccctcaggggtactctgactcggaggagagggagagtatgccgagggatggcgagagcgagaaggagcacgagaaagaaggcgaggatggctacgggaagctgggcagacaggatggcgacgaggagttcgaggaggaagaggaagaaagtgaaaataaaagtatggatacggatcccgaaacgatacgagatgaagaagagactggagatcactccatggacgatagttcggaggatgggaaaatggaaaccaaatcagaccacgaggaagacaatatggaagatggcatgtaataaactactgcattttaagcttcctannnnnnnnnccagtagtattgttacctgcttgaaaacactgctgtgttaagctgttcatgcacgtgcctgacgcttccaggaagctgtagagagggacagaaggggcggttcagccaagacagatgtagacggagttggagctgggtattgttaaaaactgcattatgcaaaaattttgtacagtgttaaggcctaaaaactgtgtggttcagagactaattcctgtggttaatagcatttatactttaagcacaactagaaaattgtaagaatttgcactctacttatgtatcactacaaactttaaaaaacaatgtctaatttatattaatacatttttaaaaggtgccccgcactaccatacatcaagtatt

SEQ ID NO: 224 - DNA, 400 bp, Homo Sapiens
agaacaagtgccacaaaaatgaaaacaggccacttctcaggagttgaataatcaggggtcaccggaccccttggttgatgcactgcagcatggtggctttctgagtcctgttggccaccaagtgtcagcctcagcactcccggaactattgccaagaaggggcaagggatgagtcaagaaggtgagacccttcccggtgggcacgtgggccaggctgtgtgagatgttggatgtttggtactgtccatgtctgggtgtgtgcctattacctcagcatttctcacaaagtgtaccatgtagcatgttttgtgtatataaaagggagggtttttttaaaaatatattcccagattatccttgtaatgacacgaatctgcaataaaagccatcagtgctaaaa

SEQ ID NO: 225 - DNA, 269 bp, Homo Sapiens
acccaatagagctgggattgcaggtgtgagccaccgtacccggcatagagcagcctcttccttttcctgttgggtctctgctcagatgtcatgtcagagaggcagacctctggggcggtctatctgagggaatgcacccatctcccttcctctgaccagttagttaccttggcttattctttcaaagctcttaccaccacctgaagtcatctatctggtttggttattttattgtttagtagcagcctgggtgacagagactctgtctc

SEQ ID NO: 226 - DNA, 448 bp, Homo Sapiens
  misc_feature (89)..(99): n is a, c, g, or t
tgagacacatgcttaattacaattaaaatttcgggtcagactttgccataatgatagactcaatttagctctctgaactagttggtaannnnnnnnnnnaattcccactttggctgtgtacatcaaatgaaatgagaagtgtgtatgctgaccaaaccacaagaaactttctttaagttgtgttaaagaggaaagacctagaatccaagcgtgttacatgaaaattgtaacagagcagctgcttccacctttcagatatagatgttggaaccacagcagaagttatagagcgacaacttatatacacacctagaatgtaagttaaacaaaataccggcttccagagaccccttttctccagccatattacatcaggctagaagtaattaatgttgatttatttcatctacaagcagttggtccctaagtgaaaggctctgcttgaaaa

SEQ ID NO: 227 - DNA, 698 bp, Homo Sapiens
  misc_feature (356)..(448): n is a, c, g, or t
gttaggctttgtgtctccacccaaatctcatcttgaattgtaatccctataataaccataatccccatgtgtcaaaggagagaccaggtggaggcaactgaatcatgggggcggtttcccacaggctgttctcatgatagtgagtgagttctcatgagatctgatggttttataaggggctcttcccttcacttctccttcctactgtcttgtgaagaaggtgccttgcttccccttcgccttccaccatgattgtaagtttcctgaggcctccccagccatgctgaactgtgagtcaattaaacctcttttctttataaattacccagtctcaggtagatctttataacagtgtnnnnnnnnnnnnnnnnnnnnnnnnnnnnnnnnnnnnnnnnnnnnnnnnnnnnnnnnnnnnnnnnnnnnnnnnnnnnnnnnnnnnnnnnnnnnngtggtacccactgtcatccttttagatccctttctgtgcttggaaaatgtccttccttatgaaacatggtgggcagcagagtccaccacccagtgggaaaaatacaaatgcagagattcactttccagcatcctttgcagctagggtgtgggccctacaggtccgtgtaatcatcctgatctctgatggagagccagtggcaccaaaagctgagcgactatgaagagctcagtctgctgtgggcggatcc

SEQ ID NO: 228 - DNA, 685 bp, Homo Sapiens
gatcaaggaagtgtgtgtaagcccctgtctggtgtcctaccctcggtgtagaagagcgggaaaggtatctgatagtatctgtatagaggccctgtgcggattaagtcaaggagagcaggcccctaagtgggctgcagtcagcatgcgcctctcgtcactccccctagtaaggttagcactcacctacctatcacctatccactcagagtcgtccataaggccccacagtgccagctgcttccacctcctgcccacctaccttcctacctgagcccgtagagactccgaggtacccctaccagcccccctgagccccaggacttgagcagcagcgtctgcaaagaggagcaagatgcccagaggaggctcactggagagcgtacggctagcaccaaggagccagcctaagactcagccctgacggttgccatccgccgccacggccgcagaaaagtacaaacaccgaggggagggagagcgcaaagacattgtttcatcctccatgccaacggccaaacagagaggagcctgtggacagcccgacgcccgtgaccgagagagttagctgactttactacggagcaggaatgcaaagcaaaccaacaagaataaaggcagctgttgtctctactcccttaggggtagggctctgacaaagcttcccgattaactgaaataaaaaata

SEQ ID NO: 229 - DNA, 419 bp, Homo Sapiens
  misc_feature (165)..(213): n is a, c, g, or t
atgggtccagaaagggggacaaagtacgctttaatttatgagaagatcagctactagaaacttcagcgattccattgtgataagcgcacaaacagcactgtctgtcggtaatcggtactgctttattaatgattttctgttacactgtatagtagtcctatggcnnnnnnnnnnnnnnnnnnnnnnnnnnnnnnnnnnnnnnnnnnnnnnnnngtgtgtataagctggcatttcgccagcttgtacgtagcttgccactcagtgaaaataataacattattatgagaaagtggacttaaccgaaatggaaccaactgacattctatcgtgttgtacatagaatgatgaagggttccactgttgttgtatgtcttaaatttatttaaaactttttttaatccagatgtagactatattct

SEQ ID NO: 230 - DNA, 1810 bp, Homo Sapiens
  misc_feature (1305)..(1360): n is a, c, g, or t
aacctcaccaaccacctgcaccagacgcccctgcacctggcggtgatcacggggcagacgagtgtggtgagctttctgctgcgggtaggtgcagacccagctctgctggatcggcatggagactcagccatgcatctggcgctgcgggcaggcgctggtgctcctgagctgctgcgtgcactgcttcagagtggagctcctgctgtgccccagctgttgcatatgcctgactttgagggactgtatccagtacacctggcggtccgagcccgaagccctgagtgcctggatctgctggtggacagtggggctgaagtggaggccacagagcggcaggggggacgaacagccttgcatctagccacagagatggaggagctggggttggtcacccatctggtcaccaagctccgggccaacgtgaacgctcgcacctttgcgggaaacacacccctgcacctggcagctggactggggtacccgaccctcacccgcctccttctgaaggctggtgctgacatccatgctgaaaacgaggagcccctgtgcccactgccttcaccccctacctctgatagcgactcggactctgaagggcctgagaaggacacccgaagcagcttccggggccacacgcctcttgacctcacttgcagcaccaaggtgaagaccttgctgctaaatgctgctcagaacaccatggagccacccctgaccccgcccagcccagcagggccgggactgtcacttggtgatacagctctgcagaacctggagcagctgctagacgggccagaagcccagggcagctgggcagagctggcagagcgtctggggctgcgcagcctggtagacacgtaccgacagacaacctcacccagtggcagcctcctgcgcagctacgagctggctggcggggacctggcaggtctactggaggccctgtctgacatgggcctagaggagggagtgaggctgctgaggggtccagaaacccgagacaagctgcccagcacagaggtgaaggaagacagtgcgtacgggagccagtcagtggagcaggaggcagagaagctggggcccaccccctgagccaccaggagggctctgccacggggcacccccagcctcagtgtgcactgacctgctgactgccccaagccccctccccggaccccctgtacagaggttcccactattgtcaaaatcttatttaaaaccaagaacccagccggtcaagatcgggacacacttagacggactacgccatgggcaagcgcgagggacccctccgttcccaacgtnnnnnnnnnnnnnnnnnnnnnnnnnnnnnnnnnnnnnnnnnnnnnnnnnnnnnnnncggagggcagacacaagaggaatacaccacacagcgggcgggcaccaaaacgagacagaagagcgcaccgagcgacgagtagagaacgaaaaacgagggggccgcaaatgcggagagcagaagaaatcacccagcaccacaagcagcagcgcaggagaagaagacggcagcacgagagagagacagggacacatgaatagtgaaaaataagtggtatagaaagaacaacctataaataatatggtaggtgtggagaggaacttaaaattgtgaagataagacgtaccgaagagatagacattaaaagaacggagtaagtagagtaatatatagtaagtatatgaaagagtgataaacagggtggagagataaacaaagctgtatatagaaatggggtgaagaaagaagatagtggaaagaaaatagaagttaattatatagaacaatttt

SEQ ID NO: 231 - DNA, 444 bp, Homo Sapiens
gactattcaaacagagggagaggagacagacagctgaatggctcagcttctctctggtggtggtttctggctggatagaataagcctgacgaaacctagctattgtaagctagtttcttcagttattcttttccctatccctgtctaagctagatatatacagagaggtccagttttatgaatgcttattagatggaattttataagtctaatgcagtatcagaatagcaaatatgtgtattgcccagtttaatttactgaggtcaaattatcatgggcacttggctatcccctcctacccatgcacttatctgtaggtgtgttatcaactgatgattttctggagtttttgacccattaccatttaagatatacagagaattttatggtagtttagcccactattctgagctaaacaggtctaactcagaacttctatatttt

SEQ ID NO: 232 - DNA, 207 bp, Homo Sapiens
ctgcaccccccaccttccccaacccttcctcaagagctgaagggatcccagcccctaggtgggcagaggcagaccctccccagagctccttaggaagaagacagactggttcattgaatgccgccttatttatttctggtgaggatgcatgcgtggggctgctggtgtttagagtgggggctacccaataaatcactgatactcaca

SEQ ID NO: 233 - DNA, 500 bp, Homo Sapiens
acgcgagatccgcgctcgccgcctgcccttccaggcggcgatgacacggcgcccgcggcggcccggaggcgccgggtgggccgtttgctgaccggatcgcggctacccgccagcgtgtccgcggcgccgccgccagcatgggctgtgccccgagcatccacatttccgagcgcctggtggccgaggacgcgcctagccccgcggcaccgccgctgtcgtccggcgggccgcgcctcccgcaggcccagaagacggccgccttgccccggacccgcggcgccggcctcttggagtcggagcttcgcgacggcagcggcaagaaggtagcagtagctgatgtgcagtttggccccatgagatttcatcaagatcaacttcaggtacttttagtgtttaccaaagaagataaccaatgtaatggattctgcagggcatgtgaaaaagcagggttaagtgtacagttaccaaggaggctcaggctgtccttgcctgtttcctgg

SEQ ID NO: 234 - DNA, 544 bp, Homo Sapiens
  misc_feature (81)..(81): n is a, c, g, or t
  misc_feature (119)..(119): n is a, c, g, or t
  misc_feature (142)..(142): n is a, c, g, or t
  misc_feature (331)..(366): n is a, c, g, or t
  misc_feature (384)..(466): n is a, c, g, or t
aatagctaggaaaacacagggaaagaagagttttgagcagggcttagttttagaaaatattaaaacatattatgaagcgtntgatatttaaacaggatggggttggtaagtaaataganaaatgcagttaggtggctctttnaaagagtgtggggaaaaaaagtagtaaaaagttaaatgcaatcaatcagcaattgaaagctaagtgagagagccagagggcctccttggtggtaaaagagggttgcatttcttgcagccagaaggcagagaaagtgaagaccaagtccagaactgaatcctaagaaatgcaggactgcaaagaaattgnnnnnnnnnnnnnnnnnnnnnnnnnnnnnnnnnnnnttaatttttaaaaagttnnnnnnnnnnnnnnnnnnnnnnnnnnnnnnnnnnnnnnnnnnnnnnnnnnnnnnnnnnnnnnnnnnnnnnnnnnnnnnnnnnntatacttggtgtctattcataagacttatatccagcatattcataactagagccatatcacagatgcattcatcataa

SEQ ID NO: 235 - DNA, 610 bp, Homo Sapiens
  misc_feature (475)..(475): n is a, c, g, or t
ggcacccaatggaagtggatacttgtaaagtctacaccactgtacttggcgttaaatcttgctgaattcgtggtaagctgttaccatgtctacattttgtagaatgattttggtctgcagcaaaattcgatttcacttctcatacccctttccttccacttgaaatgcaatttagacagaggccctgtggtgaaagttgcaatattaagtttacctttagaagatcccttctcaaactcagaaccctagcagtgttaccttaaacaaaaatgagctcgagaaaaaagtagctcagttacagagaagcaaatcgagttatttcccacataaaaagtttcccagattctaagaattgcagtatcctgtaccctaaaatttttcaaggtgactcctgttgtcgtctgttgataactttaataaaggtcatttaaagacataagtttttaaagactcccaaagtgaaacttaaacattnttcgggattatcgattgcatatatcagtttatgctgtgtgctgaaatactatgccatgtgctattttagtgtttggggaaaatgaaaaataaaatttgttctttagcttaataaatatgtcttattttaaaaaaa

SEQ ID NO: 236 - DNA, 658 bp, Homo Sapiens
cgctctatactagagagctctgctgcaccacctgcaactttgtgagcaacgaggtcctgggccgcctactccacggctctcccaacctgcgcttactggatcttcgtggctgtgcgcgcatcacgccggctggccttcaggatctgccatgtcgggagctggagcagcttcatctgggcctgtatggcacgtcagaccggctgactctagccaaggagggcagcccctttttgacccagaagtggtgccatacactgcgagaactggacttgagtggccaggggttcagtgagaaggacctggagcaggccctggctgccttcttaagcacccctgggggctcacacccagccctgtgctctcttaacctcaggggcacccgggtcacaccaagcactgtcagctctgtgatcagcagctgcccgggcctgctctacctcaacctggagtcctgccgctgccttccccggggtctgaagcgggcctaccggggcctggaggaagtccagtggtgtctggagcagctgctcaccagcccctcacccagctaggcagccacagacctgggacacctcagccagcttgcccaccctccacctttgcccaatttcagatatttgagcattttgttaaaataaaacatttttaggaaaaaaaa

SEQ ID NO: 237 - DNA, 880 bp, Homo Sapiens
ggggcacacgctggtcacgcggtcagctattgacacttcctggtgggatccgagtgaggcgacggggtaggggttggcgctcaggcggcgaccatggcgtatcacggcctcactgtgcctctcattgtgatgagcgtgttctggggcttcgtcggcttcttggtgccttggttcatccctaagggtcctaaccggggagttatcattaccatgttggtgacctgttcagtttgctgctatctcttttggctgattgcaattctggcccaactcaaccctctctttggaccgcaattgaaaaatgaaaccatctggtatctgaagtatcattggccttgaggaagaagacatgctctacagtgctcagtctttgaggtcacgagaagagaatgccttctagatgcaaaatcacctccaaaccagaccacttttcttgacttgcctgttttggccattagctgccttaaacgttaacagcacatttgaatgccttattctacaatgcagcgtgttttcctttgccttttttgcactttggtgaattacgtgcctccataacctgaactgtgccgactccacaaaacgattatgtactcttctgagatagaagatgctgttcttctgagagatacgttactctctccttggaatctgtggatttgaagatggctcctgccttctcacgtgggaatcagtgaagtgtttagaaactgctgcaagacaaacaagactccagtggggtggtcagtaggagagcacgttcagagggaagagccatctcaacagaatcgcaccaaactatactttcaggatgaatttcttctttctgccatcttttggaataaatattttcctcctttctatggaaaaacccaccccc

SEQ ID NO: 238 - DNA, 1227 bp, Homo Sapiens
  misc_feature (86)..(86): n is a, c, g, or t
  misc_feature (179)..(179): n is a, c, g, or t
  misc_feature (259)..(259): n is a, c, g, or t
  misc_feature (418)..(418): n is a, c, g, or t
  misc_feature (609)..(609): n is a, c, g, or t
  misc_feature (623)..(731): n is a, c, g, or t
  misc_feature (751)..(752): n is a, c, g, or t
  misc_feature (760)..(760): n is a, c, g, or t
  misc_feature (764)..(765): n is a, c, g, or t
  misc_feature (767)..(767): n is a, c, g, or t
  misc_feature (769)..(769): n is a, c, g, or t
tccctgcgcgcacactcgtttgcatcgctcgagccatcactcgctcgcacccgacctgccgccagcacgcaggaccatgcggcgcngcgtgccgcctcctcctcgctccgctcactcaggtgccgccgcgtcagagacggcgcgccagtgcacatgtgttcgcgcgctcgagcagcacngcgcgttctcctcgtaccaggtgccagccgacgtcggagaaccgtctccgcgccagccgcgttcccgccacctgcaactntcatcgcctgcgttgcgcgttgctcaccctctagcttcgtacatgacgcacaaatccttcaacatgtggtggggcggaggcgccccgcggccgctgcccgcgcgcgcgtggcgctactcgactctgacagccttgtgtcgcgcctgttatgggcgtggnagcgggtgtccgagaggtcgatgcctccgcgccctggacgctccagtcagttgccctcggctccctttgtgttgtcagtggtttggtcctgcggttgcttggtctggccggcgtccccggtggtgccgcggtgggcgtgtgtctgggggcgggcgggtctccgggccccctcgccgcccgtgctctgtcgnggcgtgcgggtgtnnnnnnnnnnnnnnnnnnnnnnnnnnnnnnnnnnnnnnnnnnnnnnnnnnnnnnnnnnnnnnnnnnnnnnnnnnnnnnnnnnnnnnnnnnnnnnnnnnnnnnnnnnnnngtcgggcccccttccccccnncccctccncccnncncncccgcgcgtctcagggcagcgaaatcaaggggttcacgcctgttccccgcgccgttgtgccgctcaccggggcacgtctttcctcccgcgcgctgggcccggtgaccccgcgctccacctttcctctgcatggaccagactggaattggttagcagactgcggtgacaacctggtagctctccctagagaggtaacagagcctgcctttcaggctctccccatcaccattcgtcgggcctctgtttcgtggtatcatatgctcttatcacttcagactgtgaaacgattccattttcatcttgagagaacgcatacccatggagcagattttgttgcaaggattcagagcggtacaagttcacgtggttcttcttaaagacgttcttgagcagttgcgccctctcggtcagctttttccaagtacaactgctcctgggtcttgactttgcatccagag

SEQ ID NO: 239 - DNA, 707 bp, Homo Sapiens
ggtcattttaacattatattctctacaaagaccttatttccaaataagataatatttggaggtattgggaataaaaactccaacatataaatttgaggaaggcacgatttcactcataacaatcttaccctttcttgcaagagatgcttgtacattattttcctaataccttggtttcactagtagtaaacattattattttttttatatttgcaaaggaaacatatctaatccttcctatagaaagaacagtattgctgtaattccttttcttttcttcctcatttcctctgccccttaaaagattgaagaaagagaaacttgtcaactcatatccacgttatctagcaaagtacataagaatctatcactaagtaatgtatccttcagaatgtgttggtttaccagtgacaccccatattcatcacaaaattaaagcaagaagtccatagtaatttatttgctaatagtggatttttaatgctcagagtttctgaggtcaaattttatcttttcacttacaagctctatgatcttaaataatttacttaatgtattttggtgtattttcctcaaattaatattggtgttcaagactatatctaattcctctgatcactttgagaaacaaacttttattaaatgtaaggcacttttctatgaattttaaatataaaaataaatattgttctgattattactgaaaa

SEQ ID NO: 240 - DNA, 820 bp, Homo Sapiens
  misc_feature (661)..(663): n is a, c, g, or t
ggggagttccggtgagtccgtgggtggggtccccacctggttggaaggctgtgggtccgggaacccgagcccaaggagtgggggcggccccggagcgaggctcacactccctgccctgcagatgactgtccacaacctgtacctgtttgaccggaatggagtgtgtctgcactacagcgaatggcaccgcaagaagcaagcagggattcccaaggaggaggagtataagctgatgtacgggatgctcttctctatccgctcgtttgtcagcaagatgtccccgctagacatgaaggatggcttcctggccttccaaactagccgttacaaactccattactacgagacgcccactgggatcaaagttgtcatgaatactgacttgggcgtgggacccatccgagatgtgctgcaccacatctacagtgcgctgtatgtggagctggtggtgaagaatcccctgtgcccgctgggccaaactgtgcaaagtgagctctttcgctcccgactggactcctatgttcgctctctgcccttcttctccgcccgggctggctgaagcaacctacctcaagtctcaggagaattcatgtctgcctggggcccttccgaacctgtgccaactaaggggccccagtggaaaggcccctgcaacccgcannngcccagagcaacagcctaaaggcctgccctgatgctctcctcctaccagagtgaagcccacagagtccctccacctccacaccaggccctctctccagttttatcccctgcctaatgctgcgagaagcacagaataaactttttgtcactctcaaaa

SEQ ID NO: 241 - DNA, 562 bp, Homo Sapiens
cgttgtcctccaccagcatttcccttactctgaagttccggcattcacatcattcatgttttcttttgtcttttagctaaaggaaaagcattggcgatttgtctgattctggttttgagttactctttgttcagtaatgcactttattttattgtccaaagagagtcagagctaagcatacaggcttgggggtgagccctgctgtgagagttcaggccctgggaggctcagccacctcctcttgtgggaaggaggtctcagccccacctcgcatcttcacctgcccttggtgtggacacaccctctcatgctaccagcaccataatccagtgggggtgactgggtgcacacctgcccaggtgaacacagcggctgccagtctcctggtcccgagaggaggtggggcctggccctggctccctccaaccagctgctcctgggacacaggtgctcctgcttcggctctgtttcggctcacaggtgtgcatcactgggcttggatttgcattacattgaccccagccctgcagtggaacctaataaaagcgcctgaagcaaaaaa

SEQ ID NO: 242 - DNA, 994 bp, Homo Sapiens
tctggatgcaagtggctgtggggctccagtctaagatgttataattgcctaactggagcatatgggcttattccccatgacagacctcccagctaaagtggaatccattactttcccggctttgttctttaacacaggaaggaatgtttgggaaagtggcattgattgcatcgcccggtttgaggctacctgcagctaggaatgttaaggcatctcctttgccatgatgtagccataattgtgtttgggcaggtacacagggttagaacctttataacttacacacagtgggaggatagtggaatgatatgtagtgttacctggcaccttagtttaatgtgtgccattaatgagggaccccactgggggtaaatctatccctcctagccaagcagttatgttattaaaggctgagaaggaggtgtctgcccaggtgacagggtgaaagaaaggtggatctaaaatatgagcccaatagagtgcaccaggtacaggttgcagacaaagcaagagcatatgaagtatcaataccctatgcgagttgcaatgtacaacagagagcatagcaagcaacaaattatctggagtgaatggtgtctgtgtctggagcaggattcattcagcctcctcagttgccgccttcagcatcccccaggtaatgtccagagcttgttgccgtccgaaggtacactgcattatccagggttgtgagtcctgtagggttcaggttccttttattttttaggttgggtcctagtcacgtcatgggtatgggtttgaatgcgtcgtgctggatatccaaagaggacctgagggggtgtgatacacaagctatatcctcttccccaagttaacaattcatttggacctacatctatacattactgttctactatatttcctataaaactgcagttttatgtcttgagaggttttagcaaagtgctttcgtacatatggactgaaatttgtctatctaaattttaaaaatagt

SEQ ID NO: 243 - DNA, 524 bp, Homo Sapiens
caaatactgagatgtttattgcattttaaaaatatccacactcttaaatatcctgtttcaaattcctcctaaaatcctttacagcacacaacatcaactactgcagtagcgttctcacaatattacacttgaaaataccatttaggaacaatattttaggaaatagagggtttaaggcaagacattcatttggaaaagttaatttctctctatcatccagattgacacgattatttttccacctcttcagtgccttgggatacgcaacatacattcagcaacagggcacgcgtgtgaccctacggacaagtgctgaggttgggagtgcccactgaaatatggaaatattcttacataaggcgtggcccacggggacatggcatgggagggcttgtttcactccatttccaatctggtgtacaggaaattccttatctataactgtccatttccccccagttaactgcttttccaacaaactcaaaccccttgaaaaggtgctaagattggtttctgttaacatc

SEQ ID NO: 244 - DNA, 495 bp, Homo Sapiens
ctcaacgctttatacttccctgcagggcgggacccctgggaaatcgaggaggtgggacgggctgggccctgtgtcccaggtttcacagggctcagggttatgctcccgcttgaatctggacgtgaatctggtaaaaatatcaagtacctgtggaactccctgattctataccctcttccttctttctgcaaggcagaggaataatatttttaaaggttattttgttttagttttaaatagcaaaacacaagctgcatttttatttattttgcataagaaaggtaaatctttttacaaaaaaaagtatagagttggaaactctgggaaaacttacggaaatacacaaatgcttctctgtaatgtgcaatatgctttgcaactgtagatgatattttatgtttaatctgtaaataagaaatgtatttaaattaaaagggatctttttgtaaaaggaccaaatgttcttttataaatgtaataaggaatatcttgctc

SEQ ID NO: 245 - DNA, 1114 bp, Homo Sapiens
tgtctcattgttgatggggacattgaataaacctgagtattgtgtgcctgtattttgactgcgacctatcagatgagatcaggtcaagagacaactgcctttgaaagagagtgagtgactgtttccaaaacagcaagcatagggagagccgccggaagtattgacggaaagcttgaattacctacatgattgatgatggtctccagctgtcaaagaagattgtggttgccaagagaaaggtaaccatttctcatccccttgagtggaattggatgcctctaggagcccacattggctggcagtagacatggccgaatttacaagctacaaggagacggcctccacccgccacttgcggtttaagctacagagtctaagccgccgccttgatgagttggaggaagccacaaaaaacctccagaaagcagaggatgaactcctggatctccaggacaaggtgattcaggcagaaggtagcaactccagcatgttggcggagattgaagtgctgcgccagcgggtgctgagaattgaaggcaaagacgaggaaattaagagagcagaggatctgtgtcgtctgatgaaggagaaacttgaagaggaagaaaacctcacccgggagctgaaatctgagattgagcggcttcagaaacgaatggctgaattagagaagctagaagaggccttcagcaggagtaagaatgactgtacccagctgtgtctgagcctgaatgaggagagaaatctgaccaagaaaatctcctctgagctggaaatgctcagagtcaaagtgaaagaactagaatcttctgaggaccgcctggataaaactgagcagagtttagcgtcagagttagaaaagctgaaatcattaactctgagctttgtaagtgagagaaaatacttgaatgaaaaggagaaagaaaatgagaaattgataaaagaactcactcaaaaactagagcagaacaaaaaaatgaaccgagattatacaaggaatgcttctaatctggaaagaaatgacctacggattgaggatggcatctcttccacactgccgtccaaagaatcaagaaggaagggtggtctggactacctaaagcaggtagagaat

SEQ ID NO: 246 - DNA, 490 bp, Homo Sapiens
  misc_feature (339)..(339): n is a, c, g, or t
gaggaacagttcactgatttattagatgaatatatacccatataatcaatgaaaactgtatgatataaaataatttaagaaatgttgggaattagcagcaccatctgttattgaaatagcaaggaaaacttcacatattttaagcaaacacgagaagggagtaactactttaagacctaataatgccattggtctgggatgaaaaagaagggaattgttttagattgttttaggcaaacacacttccttctatgctgaagatttagtaagcatatctgatgactaaggttttagaaaaatgctactgatgtaagagatactgcatagtattttaattgnggacaagactaactgtagcatggctcaacacttctatgaaaaatttagttctgaattatgaaatcagaaataaaaaataatgtttaaaagacacttggctctaagaaacattaagtgaaacacaggtcactatgaaaatactatgcagttt

SEQ ID NO: 247 - DNA, 382 bp, Homo Sapiens
ctagtttgggaggagcagatttttgcaataccaagtatagcctatggcagaaaaaatgtctgtaaatatgtttttaaaggtggattttgtttaaaaaatcttaatgaatgagtctgttgtgtgtcatgccagtgagggacgtcagacttggctcagctcggggagccttagccgcccatgcactggggaactccgctgccgtgccgcctgcactcctcagggcagcctcccccggctctacgggggccgcgtggtgccatccccagggggcatgaccagatgcgtcccaagatgttgatttttactgtgttttataaaatagagtgtagtttacagaaaaagactttaaaagtgatctacatgaggaactgtagatgatgta

SEQ ID NO: 248 - DNA, 798 bp, Homo Sapiens
tcctggtgtccagttctctcaattaagaatttcatttcgtagtgtggaagcataacaagtgcctctgggtccccagtcttggtgctgtgaatggggttagtggctgtgccatgactgtatgacctggccatcacaggtgaacttacaacatagtccctagcctcaaaggcatacgtgggtttccctatcgtcctcttcatgagttctttgtgaaaacagaaagactgagtctgccaataaccagcaagagaacaagataaaataaataaaattaaccataagactttaacatatgacaaacaactggtaaggattttcaaaatcttttggtcaactttgatggtatttttccatacaatgaactctaaaatatgaaaaacgtacatccatattttagatataaaagtctcttgcacaggccagaaaatgaaactttaatttaagcaataaaattcccctttgtagactgcaaatggagaacatgctatctagcttcatttgtcttcaacttacataaaaatgaaacaatggttaatgttctggcggcatctctaaacatattcagtgaaacaaaatttccttacaaatgtcagcagcttacaacaaataacattttatcctgtttaattatttagaaacaaaatcagttatgctgagatatgtttgcatgggatttatatactctgatcatagaaacaaattattgacatctgaatctgaaagctgcaaaacatgataaaagacataataaaatcacagatttgttattctctcaggaactttttctagctgttgtaa

SEQ ID NO: 249 - DNA, 233 bp, Homo Sapiens
gagaatcacttcttggccacagcacatcacagacacagtttctggaatacaggtttgaggatacagtgttggcagcttcaagaagagaagaccttcttgccaggacataaaatgataccctcctctgggagcctgcttcgaatagtgggactcagggagataagaccttcttgctggatttttatgacacaatctctttataattttacaaataaaggaaaaaagacccatgt

SEQ ID NO: 250 - DNA, 517 bp, Homo Sapiens
tgcactgacagaaagtcatactccttagctgctggcttggccctgggcatggtctgcttggggcacggcagcaatttgataggtatgtctgatctcaatgtgcctgagcagctctatcagtacatggttggaggacataggcgctttcaaacaggaatgcatagggagaaacataaatcaccaagttatcaaatcaaagaaggagataccataaatgtggatgtgacttgtccaggtgctactctagctttggctatgatctacttaaaaaccaataacagtgtcttctaggaagcccagacacatggagaagttctgagtgttttggccgatagtcccagatgaggttccagcaacagctgggatcacccatgagatgtgagtgaggaaggctttgagatggtttcagccctagccaccactgacctcataagagaccacaagaatgagaatcacctggccaagcccagcagaccttcagaattcagaaataaaataattcatcttattttaaaag

SEQ ID NO: 251 - DNA, 1178 bp, Homo Sapiens
  misc_feature (1002)..(1002): n is a, c, g, or t
  misc_feature (1058)..(1058): n is a, c, g, or t
  misc_feature (1075)..(1075): n is a, c, g, or t
  misc_feature (1094)..(1094): n is a, c, g, or t
  misc_feature (1115)..(1115): n is a, c, g, or t
  misc_feature (1122)..(1122): n is a, c, g, or t
  misc_feature (1136)..(1136): n is a, c, g, or t
cccagtgtagcctcctgtcagtgggggctggacccttctaattcagaggtctcatgcctgcccttgcccagatgcccagggtcgtgcactctctgggataccagttcagtctccacatttctggttttctgtccccatagtacagttcttcagtggacatgaccccacccagccccctgcagccctgctgcaccatctcaccagacacaaggggaagaagcagacatcaggtgctgcactcacttctgccccctggggagttggggaaaggaacgaaccctggctggaggggataggagggcttttaatttatttctttttctgttgaggcttccccctctctgagccagttttcatttcttcctggtggcattagccactccctgcctctcactccagacctgttcccacaactggggaggtaggctgggagcaaaaggagagggtgggacccagttttgcgtggttggtttttattaattatctggataacagcaaaaaaactgaaaataaagagagagagagatctgggtgttggtggttgcatttgttaaggaattgaagcagttcttgcccaggcaacctgcccccagccagaagactcaggggcaggccaagaacacaggcctccccctttcttcagctctctgaagtttccattgttcattgctctctggtggctgatagccttatctgcagctcacagtcggccaatcccagaggattagtgggtccggtttctgtataaattagggggcaggggtgctgtagaggcttcttatcgatgattgacgccgaggcccaggctgttgtcctcacaggagcaggcacctagcctctcctccagcagcagcacctggtcgctgagagattcgatccggtcaccccggccccacagctcagccacctgttctggctgcagctcttcaggcggcacgggcagcaccgctctgacccaggccccagcctgaccggcccactagaaaggaagagatgcctcanggtattgacagtgacgtctggcctcgccccacccagcaggcttggctcacctgctncagccgctccaggcgcnctcgcagctcgtgaatctnctgcttcagagcgcgctcatncttttcncgctcccgaacggncacgctgagtatgctggcactggttgggggctctgggacccc

SEQ ID NO: 252 - DNA, 721 bp, Homo Sapiens
gaagcccgccgcctccccgcggccccggcgagcagccgccgcccgccgcacccatgagcatgtcagtgaaaaaaccagtgaatcgccttccaaaccaggagaaaagaaaggatcagatgagaaaaaagcagcaagcctcggcagcagtcaatcctccagaacctatgctggtggaacagcctcggccaccaaggtgtcagcttcctctggtgcaaccagcaagtcttccagtatgaatcccacagaaaccaaggctgtaaaaacagaacctgagaagaagtcacagtcaaccaagctgtctgtggttcatgagaaaaaatcccaagaaggaaagccaaaagaacacacagagccaaaaagcctacccaagcaggcatcagatacaggaagtaacgatgctcacaataaaaaagcagtttccagatcagctgaacagcagccatcagagaaatcaacagaaccaaagactaaaccacaagacatgatttctgctggtggagagagtgttgctggtatcactgcaatatctggcaagccgggtgacaagaaaaaagaaacagaaatcattaaccccagctgtgccagttgaatctaaaccggataaaccatcgggaaagtcaggcatggatgctgctttggatgacttaatagatactttaggaggacctgaagaaactgaagaagaaaatacaacgtatacttggaccagaagtttcagatc

SEQ ID NO: 253 - DNA, 467 bp, Homo Sapiens
ggactgctcaaaccaaaaagcaaggtgggatcacatctgaccaagctgctgtcatttccaaattctggaagagccacaagacaaaaatccgtgagagcctcatgaaccagagccgctggaatagcgggcttcggggcctgagctggagagttgatggcaagtctcagtcaaggcactcagctcaaatacacacacctgttgccattatagagctggaattaggcaaatatggacaggaatctgaatttctgtgtttggaatttgacgaggtcaaagtcaaccaaattctgaagacgctgtcagaggtagaagaaagtatcagcacactgatcagccagcctaactgaagatgatgtatgaaggagttggagttgttgaaaccaaggtgtccatgatccctccccactgaccttttctaagaaaattcttgtgcccgcattggtattaaatcctcgcattcagtcaaa

SEQ ID NO: 254 - DNA, 483 bp, Homo Sapiens
gggttcttgaattatatctgcatttaccactgtatatgcatatagtgacagtataacctgtctatactacagtagttccagtcctaactttctgaattatttttaaagatcttctctaacaagctatgggaatttggcttcatactctttctttgcaacagcagtgttctgggtgataattttgaattgatacctgttcctttttttgggttttgttggctttttgaaaaattgtctttccttatcattggtgggaggcttggtagcaaagtaacattttttggaaaagaggacagaaaaattgaactacagcttgagaacgtattctttttttcctactttgttattgcaaattgaggaatcacttttaactgttttaggtgtgtgtgtccagagtgagcaaggattatgtttttggattgtcaaagaggatgcttagtcttaaaataaaaataaatttaaaaatcatcttataattagaaa

SEQ ID NO: 255 - DNA, 502 bp, Homo Sapiens
  misc_feature (89)..(89): n is a, c, g, or t
aagactttcgcttgcggggtcctgcttgtcagggtgaatgtaaagatcccagcaggccctcaaggagctggtaaagatgtgtatctggnccgactgcacattgatcctcgcctgaagcaccgaggaagctgggcggtacctggagacctacaaggcctatgagcagaaaccagcggacctcctgatggagaagctagagcaggacttcgtctcccgggtgactgaatgtctgaccaccgtgaagtcagtcaacaaaacggacagtcagaccctcctgaccacatttggatctctggaacagctcatcgccgcatcaagagaagatctggccttatgcccaggcctgggccctcagaaagtaagagctctgggaaagaacccaaggagttgggggaaggagagagccccaaataaacacaacctgagaccccaaagttttaaggtgaaaaaagaaccaaagacctgagaagccaggagacctgagcaggagacctgagcagcc

SEQ ID NO: 256 - DNA, 511 bp, Homo Sapiens
  misc_feature (215)..(254): n is a, c, g, or t
gggaagttgtggttgttaggttcacaccctgttttataaacaacatcaaaatggcagaaccattgctgactttaggttcacatgaggaatgtacttttaacaattcccagtactatcagtattgtgaaataattcctctgaaagataagaatcactggcttctatgcgcttcttttctctcatcatcatgttcttttaccccagtttccttacannnnnnnnnnnnnnnnnnnnnnnnnnnnnnnnnnnnnnnnagattgtgaggcaattattaaatcaaaattaattcatccaatacccctttactagaagttttactagaaaatgtattacattttattttttcttaatccagttctgcaaaaatgacctataaatttattcatgtacaattttggttacttgaattgttaaagaaaacattgtttttgactatgggagtcaactcaacatggcagaaccatttttgagatgatgatacaacaggtagtgaaacagcttaagaattcca

SEQ ID NO: 257 - DNA, 587 bp, Homo Sapiens
caacaagtgccttcggggtttcgggaagaactgcagcattccagtctgggctgatgtcccaccgtcccataccagcaatgccccatgcttccctaagggtcaggtccagagcagggcccacaagggggattagagtgcctggcccctccccctctacctcagtagcccccaggcctgagatggctgagaagggaagggtatccttttcccacagttctgggacaaataaaggggcttcctttggtaccccacataatagtgctaggtacctttgacccatcatcttgggaggtggggaggaatgagagggtccaggcagggtgtaggggaatgtattagtccaatgagatttccctcttcatccgcagcagtgtatctattctatacctggctatgggagagaccccttgcatgggagggaccccttgctatggcccctttagccaggcagtgggatctacctgtggcccggcctccctaatgtcattcacattgaatggggatgaggtcggacagttgctcatagagccgagtatgagccctagctgtgggctagaaatgtccttaataaacatccttatttttca

SEQ ID NO: 258 - DNA, 385 bp, Homo Sapiens
taacttgaacagggaaagtttaatatagagaattactggctttaacagtgaactggaataatgagggcttcactggtaaaatgcttctgaattgactggaaatccatttggggtgctggggaacgttattcccagagaggtgcctcagtggaggcgctgtgtctcctacgcaacttctgagggctggagggtgccaagggaggctgctgaccgcctggtgcttcaggagctgggtgctggggaagccacatgcactgcggcgtccagaggcagaagcacaaccaacaagaaccacgaaggaggcgcctttcctcctataatgcctgtttggtgccctctactgacaaagcttatcccctttcaaaaaacagccaactgaaaaagc

SEQ ID NO: 259 - DNA, 803 bp, Homo Sapiens
cggacgtgaatgtgatagctggagctgaggcgtggaaacacgtggaagcgtatatatagacattgcagatcgaagccaagtgctcagcaaggattacaaggcagaggaagacccagcaaaatttaaatctatcaaaacaggccgaggacccttgggccccaattggaagcaagagcttgtaaaccagaaggactgcccatatatgtgtgcatacaaactggtgaccgtcaagttcaagtggtggggcctgcagaacaaagtggagaacttcatccataagcaagagaggcgtctgtttacaaacttccacaggcagctgttctgttggctcgataagtgggttgacctgaccatggacgacattcgaaggatggaagaagagacgaagagacagctggatgaaatgagacaaaaggacccagtgaaaggaatgacagcagatgactaaagccgcctttcccctctgcactttttgcaagacagtggtcaacaggaagacccagcagctccaccctcccaagtgacaggccattttcggacgcagccgttctgtgcccattcttcaggcaactttcgattccttactgtagctaattctagatgcccttcagtattgtgaacaaatagaccgtctggtgtcacagagcccgcgtgtgcaggagcctgctcctccgagatacgtggcgtgtaggttgctgtagttacagcgcctccgtctctctccattgtgttccgatccatttctgtgtgttcccccaacctttatttccaagtgacattttcagtctttcaaataaaaaaaa

SEQ ID NO: 260 - DNA, 1097 bp, Homo Sapiens
  misc_feature (559)..(578): n is a, c, g, or t
ttgaaataggtgtcatccttcaatggccattttttggggaacccatcccagcctgggagtccaagggaggtgccttttttccttgggcccccctttaaagagttcctttcttaagaactcaatggtcccattttagttttggcctcaggatgccattcagccaacttggattgaaccgcctttcaggcatttttgccttaaatgtcttagctgtttctgaaaaaatatttccccttcaaaggaggaagatgtgtcagcgtttaagacattcccctgaatatgttcccaattttgaaaacagttcacaaaaatatgcttccagtatgtgggagccatggccttaccacgggaacaaggcaagcagctctcagatggatgtgtatgtctgactgcacttgtcagaaacccaggtccttgccttccacttcctataccaaagccacgtgccagtgtgcttcttgctgagcacaagccagccactattttcttaatgacaagtgtataagaattacatataaaaaacaatctgaaagcacattttcaaaagggtagtcagcannnnnnnnnnnnnnnnnnnngcatttcacgtcactaatttggttacttcttaaaaataatattaaggttccttaaaaaaataacttatctttaaagccctttctctcttgccctctttgatatttaaggtatacaggatggtgaggggtgtgccaggacagtaaggcagggggctacagtgggcagagtagctgggggagtcaggcggacaagggtttcagtcctgcttctacagggcaagctatttatcctctctgaaggtttctgtacctgagaaatgggcacttccatgcccacctctcaaggatactgtgaggagccttgcccagagcctggtcatggtaggagcatgtcagttcatccgcctaaagaaacagactccagggccttaggctggctcaaggggcagaggaaaagacaatggcaataagaccctctggagcttaaaccaaaccactgatgccagggagccagccagccacccttccctgctgcagtgttaacgggacacacagactccatcccgaaaattccggacc

SEQ ID NO: 261 - DNA, 815 bp, Homo Sapiens
  misc_feature (737)..(752): n is a, c, g, or t
ttccggatatggcaccaggcgcccggccaccaggaccgaacatacaaggtgtcccaagacaagccaagaagagttcatgcgctggacgaggatccagagcttaaggcatcggagcagccacaaagggcaggtggcccagtgagcgtcctttacagggctccttctcccccagacatgggtgaccacgagtgtacgccgcctcctgcccagcactcgctgagcatgctgggcatcgaccagtgcgtggaatgtgagagcggggtgctggtgctgaacaccacctcgggccccaagtggaaggtggcctgcaacaagtgcaacgtggtagcgcactgcttcgagaacgcccaccgcgtgcgggtgtccgccgacacctgcagtgtctgtgaggccgccttgcttgatgtggacttcaacaaggccaagtccccactcccgggcgatgagacgcagcacatgggctgcgtcttttgtgaccccgtcttccaggagctggtggagctgaagcatgcggcctcctgccaccccatgcaccgcggtggaccagggagaaggcagggtcgagggcggggccgggccaggaggccccctgggaagcccaaccccagacggcccaaggacaagatgtcagccctggccgcctactttgtatgatgaccctgtcctccctcacccaggctgcagtgccatgcagacacctcatggcacttcaaactattaaaatgcattttatcttnnnnnnnnnnnnnnnngggcggccctcgcgatctagacggacgcgtgggcggacgcgtggctagttctagatcgcgagc

SEQ ID NO: 262 - DNA, 642 bp, Homo Sapiens
taactctggtcttagggtaatagaagacatacaggaaaggactgtttatagaacacctgaggttctcaagaaattactattcaatggttctgtttttgcttacattaaaaatcagactgaagattcaaagatcttaactattaaaggatgaaaggaatttgacagtgctttgaacagtgataaaatggtacccaaatttggtgttcatatagctatttaaaaaagacagtagcttaaaagttgcaggaaaaaatgtgaacacagagaacaacagaaacagtccaggaagatgatgcagcccggacacagcaagtttaatgtctctgctgtacatagaattaagaccctttccccctcctcatccttatgctggcaataggatatgcactagaaaatttgactcttagagtcaatgaataaaaggatgggctcatacaccttcatagctcttttcaaaaaggatgcttataatttaaaggatgtcctaatgggaaggaaaggtacagggcaagaggctgtttcacattttagtccattagtctttggcagagcccaaccaaggccaaattcacctaggatgcccaatggctgtggggatctccacagggtcaagtaagcaaacccaaatgaacatgttggatt

SEQ ID NO: 263 - DNA, 450 bp, Homo Sapiens
ttcatgaagctttcattcattctggagtctactaatttacctgaatggtgtttgcattctgtgaaatgcctctccacgttgcatatgtcacacttttgtctgcacataactcttttttcacaagaagggtcactgccacaacagcacagtcagcgggtgaattacaggtgcctgctgcctgcctacctgggtaatctgatcttgtctgtatcgccgtgtgctcatcactgaagaattgcagcccactcatgtcagtgaccagatttgtggcttataaacattagcagtttatttatgttttaagatgcaaagatgtgtgtttgatattcactttaataattagaaatggatcttgtaaacagggcatatatcaaagatgaccttataatatgtacccgaatatacagttcaagaattttgtctgactggaaataaatgcattttgtagca

SEQ ID NO: 264 - DNA, 573 bp, Homo Sapiens
aatttgccctgagccaagaattcgcagcgaggttaaactcagcaagctcggtgctttaaacctgcacattccaaagaaagctctgaccccagtgctgaccttgactggctactgggaaatgagctctgagcccctggataggaatgtttctgtttgcctgaggcctttgaccatgccagatagtttatgctaacaatgtgatttatagtgaatacctgttttcctgtgtctaagaccctgggctgcactgtattaatttgaccttgggtatttggggagctgagactgagtagctgaagtgagtcacataagcactaaatgcttacctgactgacccccagtaaaactctggacatccagacttggatgagcttccttgggtggcaacacttttacgtattgtcacacaccattgctggggggattaagcactgtctgtaaaactccactgtgaaatgacaactggaaacttgcacgtggtctctcctgattctgctctattcaccttttccctttgctgattttaatctccattcttttgttgtaataaaccataatggtgaataaaaaaaa

SEQ ID NO: 265 - DNA, 743 bp, Homo Sapiens
gagaggcggtcagacaccttaggaaggaaatcgcctgcactggagagttctcagcctcggacagctcccgcacagacatccaggagacccgcacgcagcgtatgcccgaccctcggccctgatggcccctgcctgacactgcagcagacatggattggtccaacctggtaagatgctgcaagaagcctatgaggtcaagagagcctcatttgtttgctgcatagtgatgaaaaccatcgcccccttgagtgctgcatccaacagtgatcagctggaggacaaggctctggcccagatgaagcctggacagcagcagtaaagactcctcgtcccactcatggcttctaaagtggaccagctggaaggtatgctgaagatgcatcgggaagaattcgaagaaggaaaaagaagacaaagctcaccttcaggcggaggtgcagcacctgcgagaggacaacctgaggctacaggaggagtcccagaacgcctcggacaagctgaagaagttcacagaactgggtcttcaacaccatatgacatgagctagggaaggctaagaagaagcagaagaacgggtcccagacactccctccagtgagtgtcctgcagcccttattccctccatagaaagcactcctcaggagcaccttccatggcttcctactctgccccctttcggggagtgcacaacacaatagttgcagatcaacaatcatcacctgcaaattcttgtagaaaagaaa

SEQ ID NO: 266 - DNA, 531 bp, Homo Sapiens
tttttagctagggggacctcaggaatctactagttgaatttcttcattttccagaagaggccctgaggcctggagagggcaagcagcctactgaggctgcacagcttgttatatctgcttgggggtcatggataggggcagaggggctgcagtgagcaatacaatgcaggggaaccttgcacaccacatggtgagttacattcagacccccctgcaaatgaaaacttcccacccctgggctgtttcccgttgatttgtcacagaagtggacaggtccttggactgagcttgtccatgggcttccctcaggaggcgaggaggaatgcaggagtctctttacttcccagttcgggaggccatctggatggctctgatccactctgtgcgctccttgggggtggctgcttgcaagaaatagtgcacttcatctgctgtgatgatctcaaaaaggttctcttcctcactcttcctgccatttgagttgctctccactgaagtcaccacacagcctctcaagtgaattgctccccc

SEQ ID NO: 267 - DNA, 1227 bp, Homo Sapiens
  misc_feature (943)..(952): n is a, c, g, or t
  misc_feature (1054)..(1075): n is a, c, g, or t
aggagttaacctcgagcgcatgggcgccgccatgggcccggccctgggcgctggcattgagcgcatgggcctggccatgggtggcggtggcggtgccagctttgaccgtgccatcgagatggagcgtggcaacttcggaggaagcttcgcaggttcctttggtggagctggaggccatgctcctggggtggccaggaaggcctgccagatatttgtgagaaatctgccattcgatttcacatggaagatgctaaaggacaaattcaacgagtgcggccacgtgctgtacgccgacatcaagatggagaatgggaagtccaaggggtgtggtgtggttaagttcgagtcgccagaggtggccgagagagcctgccggatgatgaatggcatgaagctgagtggccgagagattgacgttcgaattgatagaaacgcttaagcagttgccttttttaaacatcgatacgagacctctgaatttgtattttttcttgttaaccattttaatttgttggctggatgtataaagatgtttaaaaaattcagttgctttttggggtaatttgaattacttttttaatgactggggttccatttgactgtttgcattgagattgcaatgtgcgcaattttttttgtagttgtggcatcttgttgacatcgaatatgactttgataataaataccggttcctgaaaaattaaatcttaaaaataaccccgctaagagtaatataaaaaacacccctgtgaaaaagtccacccaatcctttttcccgcgagaaagaaaacaacaaatgaaaacttggttttgggggccgccccgcggcctccagaaattttttaaaccttttctttgggccgcgggcccccgagggaaagagaagtgggccatactgttttccaaagaaaccccggccataaatagggttgggatccccccnnnnnnnnnnccccgggggggaacgagtggttttaaaaaattccagatgggcctccaggggcttttggggttcttctaccggggacccaggggccctttaatcctatttaannnnnnnnnnnnnnnnnnnnnngcggaggggggaaaatcctgaacgactttcccccgctcggacaacccttccaaaacgggggggtgaaaaccgatccccccccgggagttttaccctctgtgtcccccctcgcggatagaattttcgcgtacggggggggaaacccgggagcg

SEQ ID NO: 268 - DNA, 417 bp, Homo Sapiens
  misc_feature (287)..(297): n is a, c, g, or t
ggggagccctccctggctgcacttggctgggtttgcagtcagatacacagatttcacctgggagaacctctttttctccctcgactcttcctacgtaaactcccacccctgacttaccctggaggaggggtgaccgccacctgatgggattgcacggtttgggtattcttaatgaccaggcaaatgccttaagtaaacaaacaagaaatgtcttaattatacaccccacgtaaatacgggtttcttacattagaggatgtatttatataattatttgttaaattgtnnnnnnnnnnngtgtaaaatatgtatatatccaaagatatagtgtgtacatttttttgtaaaaagtttagaggcttacccctgtaagaacagatataagtattctattttgtcaataaaatgacttttgat

SEQ ID NO: 269 - DNA, 716 bp, Homo Sapiens
tttttttgccaaagacaaactagagcaatgcctatgtaagaacaaggactctcaagatcctgctacacagtattcacaatcaaaagggcccaagattcaggaccacctaaagacaactgacaaaaagtgtcagagccagaggccaacctctgctagatgaagcagcagcacatgactccatttctatctgataaggagacagagaagaggcatctcgaacagatgaaaaaccaaaggctggtgtcctaaaaaaaacagattggcttcaaagaaaacactaaggaagacccacagagctgtattaattttagtaaaaataatcatatgccaacaggggaattgaaccactttctaaatcatagtatgaactcatctcttcagatacttggtaagtggtcaaagcttgtttttataattactttcactgtcttgggcaaaaagtctttcttatctttggtccttaggtgtggtatcagtttcttccatttttttatgtgttacaaaacaatcttttttttacttgacatcaacaaccaaggtgcagtataaacacgaagttgctgatattgttgcttttatacacataaaataccaacatctcccatacattttataggctatacgaaggtctcaaagaattaataaccgttatccaaaaatattataacatttaaggctgagtgaaatacagtaaagcctggtaatatatgttaagg

SEQ ID NO: 270 - DNA, 1180 bp, Homo Sapiens
  misc_feature (955)..(955): n is a, c, g, or t
gggtgtcttggctgttctccatagtggtgttcggctccatcgtgaacgagggctacctcaacagcgcctccgagggggaggagttctgcatctacaaccgcaaccccaacgcctgcagctatggcgtggccgtgggcgtgctcgccttcctcacctgcctgctgtacctggccctggacgtgtacttcccgcagatcagcagcgtcaaggaccgcaagaaagccgtcctgtccgacatcggtgtctcggccttctgggctttcctctggttcgtgggaattctgctacctggccaaccagtggcaggtctccaagcccaaggacaacccactgaacgaagggacggacgcagcccgggccgccatcgccttctcctttttctccatcttcacctggagcctgaccgcagccctggccgtgcggagattcaaggacctaagcttccaggaggagtacagcacactgttccctgcctcggcacagccgtaggcctccccggcttgcagaggccggcagccctgtatcacccctggcagtgaggtggcaggagcagcctagtgccagaaatgtccaagatgccagggcatgcagggcagtggaaggctggcttgaggaaccaattcaggttctccactgactcattcattccttcaccgcctccttcattgattcttcatgcgttcattcattcagtaaacatttattgagcagctgttttgtgcctagtgatgaattaggtggggtccttggctccaggagcccacaggctggggaggagaaaacaaacacatcaatatctcttccaaatggacagccgtggacagttaccaggtaggtagcggccccatacatgggctgccctagaggcgttcatggtccccattgctgagctgtgggtgcagagcaatagcctctcccttcacagcggtgtgaagagtgacctcactgtccttanggttagcatcctggccgaggatgtcacagggctcctggtctggctctgtcctcatgtgctatgtgaccctgacaaacccgtgcacctctctcagcctcagtccacttaccctgaactgaggggtgataatggaccaacctctccaggctgttgtgcccatgaaacaaggccagcccaggggcttagcacaagcatgcttcataaatggaagctccttttggttcc

SEQ ID NO: 271 - DNA, 802 bp, Homo Sapiens
  misc_feature (608)..(608): n is a, c, g, or t
gggccacttggcgagtgagacgctgatgggaggatggacgtactggtgtctgagtgctccgcgcggctgctgcagcaggaagaagagattaaatctctgactgctgaaattgaccggttgaaaaactgtggctgtttaggagcttctccaaatttggagcagttacaagaagaaaatttaaaattaaagtatcgactgaatattcttcgaaagagtcttcaggcagaaaggaacaaaccaactaaaaatatgattaacattattagccgcctacaagaggtctttggtcatgcaattaaggctgcatatccagatttggaaaatcctcctctgctagtgacaccaagtcagcaggccaagtttggggactatcagtgtaatagtgctatgggtatttctcagatgctcaaaaccaaggaacagaaagttaatccaagagaaattgctgaaaacattaccaaacacctcccagacaatgaatgtattgaaaaagttgaaattgctggtcctggttttattaatgtccacttaagaaaggattttgtatcagaacaattgaccagtcttctagtggatggagttcaactacctgctctgggagagaatanaaaggttatagttgacttttcctcccctaatatagctaaagagatgcatgtaggccacctgagggtcactatcataggagagagtataagccgcctctttgaatttgcagggtatgacgtgctcagtatctgagaatggacatgtgccccgcaatcattactctctggatgctagaaaagacggatactctgtg

SEQ ID NO: 272 - DNA, 1055 bp, Homo Sapiens
  misc_feature (499)..(499): n is a, c, g, or t
ggtaatccagaagttcatggtcaagtagaagtgaaaactgagaagaggccaaacttcgttgatcgacaggcatccacagttgagtatctcccaggcatgctacattcaaattgccctaaaggtctcctacccaaattctccagctggtctttggttaaactaggccctgctaagtcttataactttcatacaggtttggaccaacagggctttattccaggaacaaattatcttatgccttgggacattgtcatcaggactagagctgaagatgaaggagacttagacacaaactcttggcctgctccaaataaagctattcctggaaagagaagtgcggttgtaatgggaagaggaagacggcgagatgacatagctcgagcttttgtgggctttgaatatgaagactctcgaggtcggagattcatgtgctctgggcctgacaaagtaatgaaagtaatgggaagtgggccaaaggaatcagctttaaaagccctanatagtgacatgcccttatatattctgtcatcctctcaaggtagagggctgaaacctcattatgctcaacttatgaggctttttgttgtggttcctgatgctcctttgcagataatactaatgcctcaggttcagccaggcccaccaccatgtccggtattctacccagaaaaacaagaaatcacccttccacctgatggcctttgggttgagatttccttatgcatatgtgactgagagaggaccttgtttcccccctaaggaaaatgtgcagttaatgagctacaaggtgctccgtggggttcttaaggcagtaacacaataagtgttttccagccagttcaatcctatacttgagctggtttttgtttttggtatttgtggctgtgtttttggtatgtgtttactgtgttttcccaaatccaaaatgtgttttggttacaggagttcagtatttggaaactaatttgttctactttttcattatattgttgatatttattgtaaacgtgactacaactttctaataaagattggttgttctaaaaaagaaaaaa

SEQ ID NO: 273 - DNA, 1040 bp, Homo Sapiens
  misc_feature (278)..(278): n is a, c, g, or t
  misc_feature (496)..(496): n is a, c, g, or t
ggtggctggggcggtgtccggggagccgctggtgcactggtgcacccagcagttgcggaagactttcggcctggatgtcagcgaggagatcattcagtacgttttgtcaattgagagtgctgaagagatacgagaatatgttactgatctcctccagggaaatgaaggcaaaaaaggtcaattcatagaagaacttataaccaaatgggcaaaagaatgatcagggagttgatttcggatcctttgcagcagtgcttcaaaaaagatgaaattttagnatgggcagaaatcaggcgaccatctaaagcggggtaggaagaaagggagaaacagacaggaagttcctgcatttactgaacctgacacgactgcagaggttaaaacaccttttgatttggccaaggcacaagagaacagcaactccgtaaagaagaagacaaagtttgtcaatttatacacaagagagggacaggacaggcctgcagtcctgctcccnggtcgtcacccttgtgattgcctgggccagaagcacaagctcatcaataactgtctgatctgtgggcgcattgtctgtgaacaagaaggctcaggcccttgcttattctgtggcactctggtgtgtactcatgaggaacaagatattttacagcgtgactcaaaccaagagccagaaactgctaaagaaactcatgtcaggagtggagaattctggaaaggtggacatctcttacccaaggaccttcttcctcatcaagaattgcgaattaagtctggtctggagaaggctatcaagcataaagacaaactgttagagtttgacagaactagtattcgaaggacccaagtcattgatgatgagtcagattactttgccagtgattctaaccaatggttgtcccaaacttgagcgggaaaccttgcagaagcgagaggaggagctgagagaacttcgacacgcctctcgactttctaagaaggtcaccattgactttgcaggaaggaagatcctggaagaagaaaattcactagcagagtatcaa

SEQ ID NO: 274 - DNA, 643 bp, Homo Sapiens
ggattcgtcgaccacgcgtccggaaaaggaattttagagaatgaatcagcagaagtatctggaaacagtgtggtgtgcagctttcttcagtatatggagaagtaaaaccttggcagaaagcttggtgtgtgatcccaaagcaagaccctcttgtgctgtacatgtatggtgccccccaggacgtcagagcccaggccaccattccacttctgggctatgtggtggatgaaatgccaaggagcgcagacctgccacacagtttcaaactgacccagtctaagtccgtgcacagctttgctgcagacagtgaggaactgaagcagaagtggctgaaagtcatccttttagctgtcacaggtgagacaccaggtggtccaaatgagcatccagccaccttggatgatcatcctgaacctaagaaaaaatcagaatgctgaactcctccaggaccagccatggtgtggaggtctcaggacttacagctcaagacattcccagctcttcttacacatctgctagcactttatgttgaaaaatataggcccataaatgcatcttttgaggactattttcctatgtttatgtactcttagtgaaattagtgtgcagagtcattctaccgataaagttttgaaataatgtg

SEQ ID NO: 275 - DNA, 464 bp, Homo Sapiens
aggagaaattatattaacgaccctgctaatatcctttcttagttatttgctccttgcaaattaaaaaagcaactaagagaaagaaaaacattgtagatatctatttatatttaaagtttatgtttcatgaactgcagctgcaggattctggcattttgcatgccattctccatcagatctgggatgatggctcagaacatgtacacagactaagagtaactgtgtgatctgttaaggggtggataacataatatgcagcttaggatgctattttgagatgtatgatattcagttcattcacctgattactttggttgcagcacaactgtatatattgtataaccgaaattgattattttcattgtccttaatgcagtgatttataattagagcatgtttaataagtttactcttcttgttaactagtcatttgactggaaaaaaatacaatacttttaaatgga

SEQ ID NO: 276 - DNA, 426 bp, Homo Sapiens
aaatgttaatcattaattattttaaattatcctagccaacataacagaaaataattgcctttctagtttttttaaaaacctaagtgatgtctgtaacttcctttgtaatatatccaaaaattacgttattaggtggatagatatctgataaagcaaatacggcaaaatattagttatagaaactagatggtgggcatgtgaatgttcattgttcaatttgttcaacttttctgtatgtctggaaattattgtagtaaaatgtttggggggtggtgaggagaaaaaataccttttgctatggaagtaacatagtacctctgttatatggcttttccttaaactctgccatcttttacaaactagaggtttaaacccttgcttcctaattggaaaaggattaagaaaatgctgggtatggtaactcat

SEQ ID NO: 277 - DNA, 470 bp, Homo Sapiens
  misc_feature (81)..(81): n is a, c, g, or t
  misc_feature (239)..(239): n is a, c, g, or t
tacctcacccccatcccacccataattcttacccagagcatggggttggggcggaaacctggagagagggacatagccccntcgccacggctagagaatctggtggtgtccaaaatgtctgtccaggtgtgggcaggtgggcagccaccaaggccctctggacctttcatagcagcagaaaaagcagagcctggggcagggcagggccaggaatgctttggggacaccaaggggactgnccccccacccccaccatggtgctattctggggctggggcagtcttttcctggcttccctatcgccagctcctggcctctggtagagtgagacttcagacgttctgatgccttccggatgtcatctctccctgccccaggaatggaagatgtgaggacttctaatttaaatgtgggactcggagggattttgtaaactgggggtatattttggggaaaataaatgtctttgt

SEQ ID NO: 278 - DNA, 450 bp, Homo Sapiens
cattcatgacccttaagtgccacccttcttggaagaccccctccagaagcatactggaagccacctctggaaaagcctcatatggtgatatgccaaaatatttatgtcaatgtccaaacaaagtccaatgccatgagactgaagtctttgtggaaaccactgttacagacaagcttatttccaaagccacctcatttccaaacatctcactcaggaaaggaggctcaatgtaacctcaggggccagttttagcatttgaaatggttctgcttggaaaatgatgccctgcaactaaccctggtctttcccatggcaatttaaccacatttggaaggcactgccttcagctgagtttatgaacaatgaatgccaaccttcaggttctagaagattggttgcactcccaaacctttattctattatattactattaaaatattctaattttgc

SEQ ID NO: 279 - DNA, 443 bp, Homo Sapiens
ccgcctccatccccgcctctgtcccctggccttggcggctatttttgccacctgccttgggtgcccaggagtcccctactgctgtgggctggggttgggggcacagcagccccaagcctgagaggctggagcccatggctagtggctcatccccactgcattctccccctgacacagagaaggggccttggtatttatatttaagaaatgaagataatattaataatgatggaaggaagactgggttgcagggactgtggtctctcctggggcccgggacccgcctggtctttcagccatgctgatgaccacaccccgtccaggccagacaccaccccccgcccaacagtcgtggtggccccagatctctgtaattttatgtagagtttgagctgaagccccgtatatttaatttattttgttaaacatgaaagtgcatcctt

SEQ ID NO: 280 - DNA, 222 bp, Homo Sapiens
aaaggaagtaatgagattcttttgtgtgacttgtagtctctttgtataccaaatagtggggtgtgactcctgtgtgttttgcaagaatgtgtggtaagcctgggtaaagagaaggaactgcggtgttgggagagtctttgtgttggggagtggcaggggatgatttgtttcaggggaaaatgcccacattttaacttttaaacttctgaataaactgtgtac

SEQ ID NO: 281 - DNA, 503 bp, Homo Sapiens
ggggcttccgttgagcaccaagcaagatggcagcttccgagacggttaggctacggcttcaatttgattacccgccgccagctaccccgcactgtacggccttctggcttctggtcgacttgaacagatgccgagtcgtcacagatctcattagtctcatccgccagcgcttcggcttcagttctggggccttcctaggcctctacctggagggggggctcttgccccccgccgagagcgcgcgccttgtgagagacaacgactgcctcagagttaaattagaagagagaggagttgctgagaattctgtagtcatcagtaatggtgacattaatttatctcttagaaaagcaaagaagcgggcatttcagttagaggagggtgaagaaactgaaccagattgcaaatattcaaagaagcattggaagagtcgagagaacaataacaataatgagaaggtcttggatctggaaccaaaagctgtcacagatcagactgtcagc

SEQ ID NO: 282 - DNA, 973 bp, Homo Sapiens
  misc_feature (333)..(430): n is a, c, g, or t
  misc_feature (441)..(442): n is a, c, g, or t
  misc_feature (444)..(444): n is a, c, g, or t
  misc_feature (446)..(447): n is a, c, g, or t
  misc_feature (452)..(454): n is a, c, g, or t
  misc_feature (591)..(638): n is a, c, g, or t
  misc_feature (885)..(894): n is a, c, g, or t
attatgttaaagatcaagtattaattttagttgtactctagaaagctaaagtgccacattcggggctatttttatgattcagcaatcttttctaaattgtgtagcatgtgtatgagactatttatacccaaggatatgaaggaacataagtgactacaaggctctaataagccacggtggcaggaggttcaagcggttctgttcactaaatttttctcctgtaagctttgaatggaaacttctgtatcacatgatgtgtttcacttatgctgttgtgtatatacctaatatttctatttttgattttattttaatacacctcgtccaataacnnnnnnnnnnnnnnnnnnnnnnnnnnnnnnnnnnnnnnnnnnnnnnnnnnnnnnnnnnnnnnnnnnnnnnnnnnnnnnnnnnnnnnnnnnnnnnnnnnaaaaaattttnnancnnctctnnnccctccaaaaaacctttcctaaaaaccattttttttggcggccccggccccccttaaggaaaaggggaaccggggggcatagcttggttccccggggaaaaacccctgggtcctaaaacaaagggcgcgtgggaatnnnnnnnnnnnnnnnnnnnnnnnnnnnnnnnnnnnnnnnnnnnnnnnncggggttccttaaacaaaacactcccacattgggtggcttttctgggaggggcccctttgacggcgggggacctctaactccaaaaaaggagaggcccccaggcggggaaggcccccaaataaaaacaaaaatttcaccggcccccgcgcgcccttgggcacatattatatttgccgggagggaggtggggggtgaaaaatctcccttaaaaaacaaatttttcgtcgcccgcaacagggaaaaaannnnnnnnnnacaaggggggagcgtatgagaccccctgaaaatctctccgggagggaatttaccaacccccttggggcccccttggggg

SEQ ID NO: 283 - DNA, 1443 bp, Homo Sapiens
atcatttttttgtattctgaagtccttcagcacttgattcctttaagtttaatcctggtattctattgggaatcatatggaaatgtacaatgatatttattgaatgaacaggaaacagggaaagacattgaccagaaaaagtgtttattcatcaagtctttaaagatacaaaaacacgtgtcttctgtggagctctgagaacaggactccagcaaagcacttttcagccttgtggtcttcaagcatttccaagatctttgctgcaaggagcattgtactcagcaattgcaaactcatccgtctcgtagtaatcatagactttcactatggctggtttcagatctcttactgggacatcttgcagaaccgtgaagaacaagctcagtgtctgatttgacaccttatcaaggtaaatcaagacatggttgctgctgacttctgtccggctcacatggttagatctttcaagcattttcactgttggcttcaggggaatgaagccagagaccatcttcacatcaacgatcgccatgttggaggcagagcggctccctgtgtaactgacacttagggagatttggaagctggtgtgggctttgggttcatcacaagtttgaggcagagtctgcactcctaaagcaaaggggaactcttccttttctgggagaatattgtatttcaaggatgtctggaggtagacacatccttctcctgtcactttcatgctgtattccccaggcagctctggcaatgagacctgctgcagtaacaggcggttgttgttgtccacttggaatttgctggaaaatgtccctgaagactggatagtcacctgtgcagccttcccagtcctggtaaatgtggctgctccatatttggacagagcatggagagccaccactgtgtcctgggtggaggagaaaccgccctgggcattctgctgcttcgtgatccacttcacgatgttggttgcagaggtcaggtcctccgaggttggggctggctgggccgtgagataagcgaggagcacataggatgtcatctccacctcagcagagggagcctggggttcgtaaaaatgccccactggtgccttgggtttctgagggcgctcccaatggacagagttgtctttcttcacagcttcctcattaagtgacttgagtacttccttcctcttgtcctggttacctgccagggcaaaagcataggccagcagtgctttggtatatacatggctgccatggtccccttcttgtgctgtcttccaggctgactccaggcaaaacagggcattgcggacaacagggtgagtgactgtgagaggaatctccagaagggcgatggtgatataggcggagagggtcacttcatcttctactcctccctttatggcattgttgagcagtgacccagaggtcctggaacagccattgtccttct

SEQ ID NO: 284 - DNA, 935 bp, Homo Sapiens
  misc_feature (572)..(591): n is a, c, g, or t
tctctacagccttctaatcatcattaatgatgtgattggtatataggaacatcatgtctgctgcagagaaagaaagtaacatattaaggagaatgggggtggataagaacaaatataatttataataatcaatgttgtataacttttattctttattattggtaacacgccctaactatcctgtgtgagaatgggaatttcaagtcccatcttgtaaattgtatatgttgtcatgcaggggtctcggcgccaagcaaagcatgcagaacaaaaatgccatgtcgattgtaattatcctggattcagaataatactgtgatggggagccagatccgcagtggtggagagttctaatgttgactgtttgcaggccaaaagatgattgctttataattttaacaaatcattgtcttttagtaacatccttgtttagtgtcttctcaagctttctttactgaggaattcagcttgtgacacagatacatcccactagcttgtgaggtggaactagtaataaagaccttgaatttggattgaaaagtttcctatctttacattgttgaggaagtccnnnnnnnnnnnnnnnnnnnnaattgctcaagaaatgattctctcacaggcttgggaaatcctgttagcatgcagaataatgtggtaactttgtcaatttcccattttatttttttaaataaatatatgatctaaaagccaactttttctcagttttactcagtggaaagataaactaagttttaatgttatttttttaaatttaagcaaaatttatttctgttctttaataaataagaaaatgtggtccactgcattgttgtgatgtgtcttgtgacatttctattttgtagaaactttaaaaaggagaactatgttcatttttcctgtcaatggtttttttgtgttgtagttgtcacctgtcc

SEQ ID NO: 285 - DNA, 801 bp, Homo Sapiens
gggacgccggaccggagagcgcggaggcagccatggtgcggttcaagcacaggtacctgctctgcgaactggtgtctgacgacccccgctgccgcctaagcctcgatgaccgagttctgagcagcctcgtacgggacacgatcgccagggtgcacggaactttcggcgcagccgcctgctccatcggcttcgcggttcgatatctcaatgcctatactggaatagtgctacttcgatgcagaaaagaattctatcagcttgtgtggtcagctcttcccttcatcacatacttggagaacaaaggacaccgttacccatgctttttcaacacattacatgtgggaggtacaataagaacatgtcagaagttcctaattcagtacaacaggagacagctgttgatcttgttgcagaactgcactgatgaaggagagcgggaagctatccagaagtctgtgacaagaagctgcttactagaggaggaggaggagtcaggtgaggaggctgcagaagcaatggagtgaacctctgctccccacacagctggctacactgctcaggcttcaggcccacttgttgaacagaacaatctgggtagcaacagcatcttccacagttttccaaactggatagctgccaaccagcagacattacccacttgaaatggagtactcagttaaactgaagttgcctttacctagcattccctggtgaagtgttgcaggttgtgaactctgtagacatctttattgcttggctaagagtagatttaataaatgtatctggtttccgtggcaaaaa

SEQ ID NO: 286 - DNA, 629 bp, Homo Sapiens
gggcgcccactctggagatcctcaaaaaaggccctcctctgtggctggcagcctctgacctttccctgggcttcaaaggaaggctatggagtttgctgtgggccctgcaaccttcccagccactcctgctgcactaaggacttaggatccttttatcacaaatcgggattctctcccccaccccgaattctgtctgcttaaactggaatacacaggagcccttcctggcctggatggtgtctcccagcttccccgcccagcttgcccaccccatagttggtgagatgccaagtttggtctgagttgtgaccccttcagagtagatgcccggcaggctggggttggcccctggagggtcaggggaccatcttcttattccctcttttctcattcctccaacttcctcccctccttcaattatttttttgtaaagttgatgccttactttttggataaatatttttgaagctggtatttctatttctttggattttttttaatgtaaggttgtttggggggatggagttagaaccttaatgataatttctttcgttgggtgtaggttttagagattggtttggtggagaggtttttattctttggatgtaataaaatttaaaatggaaatg

SEQ ID NO: 287 - DNA, 1062 bp, Homo Sapiens
  misc_feature (970)..(988): n is a, c, g, or t
  misc_feature (992)..(993): n is a, c, g, or t
  misc_feature (995)..(996): n is a, c, g, or t
  misc_feature (998)..(998): n is a, c, g, or t
  misc_feature (1000)..(1000): n is a, c, g, or t
gatatctggagagtgagattctgaaacggcttgcgatggaattataaaggtgggaccccgactgcagactgtggtaagatgtcccaatgactggagagggccggatcctttctgtgtcaagccaccctatgcagagccacttgtggccccccagcttctacccgcctcatcttgggaagttgtcccagaaacagcccagaacaatccaggggaggaagtcacagaaactgcaggtgaagggtcagaatccatcattaaggaagaaacagaagagaacagtcactgtgatgctaacacagagaggcagcagattctcacacgagttcggcagaactttggtaaaatcaacgtggtgcctcagttttctggggatgacctggttcctgtggaggtgtcagatcttgaggaagagcttgagagcttttctgatgaagaggaggaggaacaggagcaacaaagagatgatgcggaagagtcttcctcggagcctgaggaggaaaatgtgggaaacgacaccaaagccgttattaaagcactggatgagaagattgccaaatatcagaagtttctagacaaagccaaagccaaaaagttttcagcagtcagaatatccaagggactgagtgaaaagatatttgcaaaacctgaagaacaaagaaaaacactggaagaagatgtagatgacagagcaccttccaaaaagggaaagaagcggaaggcacaaagggaagaggaacaggaacattcaaataaagctcccagggcgcttacatcaaaagaacggaggcgagcagtacgacagcaacggccgaaaaaagttggtgtgcgctactatgaaacacacaacgtgaaaaataggaacaggaacaaaaagaagaccaatgactcagagggacagaaacacaaacgcaaaaaattcagacaaaagcagtaatgtttaaaaggtttttattaaattatacaaaagccnnnnnnnnnnnnnnnnnnnaaannannancngttcgggccgcctcgggccctccaaaaaggctttcctagaacccattcgttttgggcgccgg

SEQ ID NO: 288 - DNA, 605 bp, Homo Sapiens
gcaatacgttatggcgaccaaacgccttttcggggctacccggacgtgggccggctggggggcctgggagctcctaaaccccgccacttccggaagactcctggcccgggattatgccaagaaaccagttatgaagggggccaaatcgggaaaaggtgcagtgaccagcgaggccctcaaggaccccgacgtatgcacagatcctgtccagctcaccacatatgccatgggcgtcaacatctacaaggaagggcaggatgtacccctgaaaccggatgctgagtaccctgaatggctgtttgagatgaacttgggtcccccaaagaccctggaggagctggaccccgagagccgggagtactggcggcggctgcggaaacagaacatctggcgccacaaccggctgagcaagaacaagaggttgtagcatggagggcccggcatcgctgacccccacgccgagggcttgccgttttcccggaggacgtggacttttgtgagacaaaaggcggctccccagcctgggtttccatgtgaccccccagtggggctggaccagggccctggaggccaataaagagctctctgggtagaccctaaacaac

SEQ ID NO: 289 - DNA, 343 bp, Homo Sapiens
aaatcaaaaattgttaatgttagaaacatactatgaagtgcctttatctgcttagacctaaggaagattttaaagttgggttgcacaggaaatgatgatgcttcaatttcttaatagttaaaaagtgctaaatactacttgaaattattgtttacagattagtgacaagagctggggttaggatccggttggactctgacatcggatgccctcaaacatacagaacttccaaactcaagtccagccataagctattttgccaacatgtcagagtaatctgtatttttgtatgtgatttctacttttatagacttgttttaaaacaataaaacacatttttata

SEQ ID NO: 290 - DNA, 741 bp, Homo Sapiens
atcatcctgacgacgtgctgggccctggctgtatgcatgggtgccatcaatgagagacaaagggccctctggccccgttctccatcggctttgccgtcaccgtgaatatcctggctgggggccctgtgtctgaaggctgcatgaatcccgcccgtgcttttggacctgcggtggtggccaaccactggaacttccactggatctactggctgggcccactcctggctggcctgcttgttggactgctcattaggtgcttcattggagatgggaagacccgcctcatcctgaaggctcggtgaagcagagctcgtgggattcctgctgctccaggtgtcctcagctcacctgtcccagactgaggacaggggagttcctgcatttcctgccagggcagaggcccagaggagcgaccccctgcttccactgcttgggcctgctttctcagatagactgactgctgaggaggctctaggttcttggaattcctttgtgctcatcagagaccccagcctggggaacacgctgcccgcactgcccagagagcagtgcaaacaccacaacacgagcgtgtttcttgagaggaatgtccccgagttggacaaggaggctgtttctgcacatcagctcatttcccgcaccccatttcttgcttgattgctttgttgggggcctggccacttccttgcttctcaagctgacaattctcactttgcaataaatagtccagtgtttccttcc

SEQ ID NO: 291 - DNA, 1049 bp, Homo Sapiens
cggctgtcgcgagagcccggggcgagtgggcctctgctcgtgggtggttctcgtggaggtcagctcccgcgtgtctccgctcgacagggtgcttgggcagagcccatcgggtaggcgcgggccatggcgcagtacaagggcaccatgcgcgaggcaggccgtgccatgcacctcctcaagaagcgcgaaaggcagcgggagcagatggaggtgctgaagcagcgcatcgccgaggagaccatcctcaagtcgcaggtggacaagaggttctcggcgcattacgacgccgtggaggccgagctgaagtccagcacggtgggcctggtgaccctgaacgacatgaaggcccggcaggaggccctggtcagggagcgcgagcggcagctggccaagcgccagcacctggaggagcagcggctgcagcaggagcggcagcgggagcaggagcagcggcgcgagcgcaagcgtaagatctcctgcctgtcctttgcactagacgacctcgatgaccaggccgacgcggccgaggccaggcgcgccggaaacctgggcaagaaccccgacgtggacaaccagcttcctgccagaccgcgaccgcgaggaggaggagaaccggctccgagaggagctgcgccaagagtgggaggcgcagcgcgagaaagtgaaggacgaggagatggaggtcaccttcagctactgggacggctcgggccaccggcgcacggtgcgggtgcgcaagggcaacacggtgcagcagttcctgaaaaaaggccctgcaaggggctgcgccaaggacttcctgggagctggcctccgcccgggttggaccaccttctggtccatccaaggaaggacttcattccttgggcgcactaaccaacaccttctaagaacttcattcattcacccaagggccaagggggcaaaaaacggggccgcctttctttaaccttccaatgtggcaccaattaaaaatggggcccttggttccaacggaaaccccacccctgggggaaaaaggagctaaatttcccataccccgggcaaca

SEQ ID NO: 292 - DNA, 652 bp, Homo Sapiens
  misc_feature (56)..(56): n is a, c, g, or t
  misc_feature (72)..(72): n is a, c, g, or t
cgatggtgcgctgaagtctgcgtgcgcgcaagcccggccagacgcccctcgcttgncaggtgtttcagcagnaacaggtgtactggacggcatcgtgcgcatttgcgacatgccagaccatcgatttccgttgctgacctactgggcaaggtgtcctatgaggatgtggaccacttcgggccccatggggtgctggataatacccgggtgccccacttcatgcaggacttggcacgctaccggcagcagctggagcacatcatggccaccaaccggctggatgaggcggagctgggtcgcctgctacccgactgatgtccgttgagggctgcagtcagaggccctggacagaagctccagataggcccctagaacatgaagcagtttgctctgtgcgtccacggcctaggtgtttcttggggggtgttgggagggcaggagcattccttgaggaggagtggcaacatcaaagtgtttgtgtcccttgccagcctccctggggtctggggacctgcagcagcatgtctggcaaactgagtcgccctcctgcctccagctctctgttgagcagagggaaggcatgggggcaggaagagagctgagcattgatggggatgggggtggtttgggaatagaaacttgttcttgcatg

SEQ ID NO: 293 - DNA, 450 bp, Homo Sapiens
tgctgacccctcagaaaccccttcccccaacttgaccccaggctgaacagaccactgcatctcactgggccagcagcccccccagcccccagccttggtggggaccaagcagcctttcccgtcccctcctcgacccgtacagttgagagccaggggctggtgtgtgggagctgctacctggcagtttctcgaggggtcaccgagcctctggtgggacacctgggcagggagtgctctcaccacgaggctgcttccgcagggaaccctggcctgcccgcgacttcgcatcagggaccgcatgctgatttgtactgctctctgctgggttttctatgttcttttcgagtgtgggaaaagggttttagtagaagggtgaatcgtattttacacagcggtcttatttatataaatgtcttggtttttacaattaaaatgaccaaaaaaagaaaa

SEQ ID NO: 294 - DNA, 765 bp, Homo Sapiens
  misc_feature (83)..(83): n is a, c, g, or t
ttgcagcttacgtttactggtttcctcacaaaaatggatagccatcaacaaattcagaaatggacaaagtctgtttaccctgnaagtcctgcttgtgaagtttgccacacaaaaagaaaggatgtaagttgtccaataaggcaagttcccacaggtaaataagcaggtgccttatgaatcctgacctcaatcaaacaaaacccggaaatttcccgtcccttgcagtttccagtaatgaatttgaacctagtaacagccacatggtgaagtcttacccggttgctatttagagtgactcgtccaagaagaagagagtttaatggaatgattaatggagaaaccaatgaaaatattgatgtcaatgaagagcttccagccagaagaaaacgaaatcgtgaggatggggaaaagacatttgttgcacaaatgacagtatttgataaaaacaggcgcttacagcttttagatggggaatatgaagtagccatgcaggaaatggaagaatgtccaataagcaagaaaagagcaacatggggagactattcttgatgggaagaggctgcctccattcgaaacattttctcagggacctacgttgcagttcactcttcgttggacaggagagaccaatgataaatctacggctcctattgccaaacctcttgccactagaaattcagagagtctccatcaggaaaacaagcctggttcagttaaacctactcaaactattgctgttaaagaatcattgactacagatctaca

SEQ ID NO: 295 - DNA, 386 bp, Homo Sapiens
cctcttcagtaacttttgcaacattattgcatagaagatccctgaccatttactaggaacctggttaagcaagcactaatctcttttcctggagatcaaggatgcaacctcaggttgagaaagaaacagggttccctgggcccattagactgtttgcagggcatcactgcttccccctgacacctcacaactagcaaaaattgtctttgtctttggaaattatagagggatttgggtatccagattgtgcagatgcaaacttaggctgtcttgatgcaaacttagaaccacagaaatgcttttaaaatgcctgttttaagatggaattgttgtttttataatttgattttagtgctaaataaatgattggctttgtacatgaaaaa

SEQ ID NO: 296 - DNA, 470 bp, Homo Sapiens
caagagcatatgggagggcaggggtttgggtgtgggtgcacacaaagcaagcaccatctgggattggcacactggcagagccagtgtgttggggtatgtgctgcacttcccagggagaaaacctgtcagaactttccatacgagtatatcagaacacacccttccaaggtatgtatgctctgttgttcctgtcctgtcttcactgagcgcagggctggaggcctcttagacattctccttggtcctcgttcagctgcccactgtagtatccacagtgcccgagttctcgctggttttggcaattaaacctccttcctactggtttagactacacttacaacaaggaaaatgcccctcgtgtgaccatagattgagatttataccacataccacacatagccacagaaacatcatcttgaaataaagaagagttttggacaaaaatgtatgtgtaaattatcaaataaagg

SEQ ID NO: 297 - DNA, 841 bp, Homo Sapiens
  misc_feature (25)..(25): n is a, c, g, or t
  misc_feature (637)..(642): n is a, c, g, or t
  misc_feature (644)..(648): n is a, c, g, or t
  misc_feature (650)..(658): n is a, c, g, or t
  misc_feature (660)..(727): n is a, c, g, or t
  misc_feature (735)..(737): n is a, c, g, or t
  misc_feature (740)..(754): n is a, c, g, or t
acttctccgtgcccaagtggattcnatcattcctttccctctatgacagccacgtagcaaaggagattcttcttcgagtacttacgctatttcagaatataaagaactgcctcaaaatagaaggccatttagctgtgcagcctactttcactgaaggttcattgtttttcctgttacatggagaagaatgtgcccagaaaataagagctttagttgatcaccatgatgcagaggtgaaggaaaaggttgtaacaataatacccaaaatctgattggtcatatttttccaaagagtaatgcagtctggatataaatgtattttctgtcttccttataaggggattctcccagctgctaaatttaaacagtaaatatcacattttgtcattaacacagctataacttgccgtggttctcagatttattttggactattttgatgccaagtgaatataagagcttgtactgaaaccatttatttctttctattttgctatttgcaaatgcttgttatcttccctacatgaagtggcagtaacctttttcacatttaagctacccttctaccttttgaagtgatttgcagttactcatctgagacagcatcagtatttgactaaatcattgtttcacaaannnnnnannnnnannnnnnnnnannnnnnnnnnnnnnnnnnnnnnnnnnnnnnnnnnnnnnnnnnnnnnnnnnnnnnnnnnnnnnnnnnnnaaaaaaannnaannnnnnnnnnnnnnnaaaaaaggggggccccccctgggcccccgaaaaaatatttttaaaacaatttttcggggggcgccgcggcgcccccaaaaagaataa

SEQ ID NO: 298 - DNA, 965 bp, Homo Sapiens
gggggcgcccgcagcacctcctcgccagcagccgtccggagccagccaacgagcggaaaatggcagacaatttttcgctccatgatgcgttatctgggtctggaaacccaaaccctcaaggatggcctggcgcatgggggaaccagcctgctggggcagggggctacccaggggcttcctatcctggggcctaccccgggcaggcacccccaggggcttatcctggacaggcacctccaggcgcctaccctggagcacctggagcttatcccggagcacctgcacctggagtctacccagggccacccagcggccctggggcctacccatcttctggacagccaagtgccaccggagcctaccctgccactggcccctatggcgcccctgctgggccactgattgtgccttataacctgcctttgcctgggggagtggtgcctcgcatgctgataacaattctgggcacggtgaagcccaatgcaaacagaattgctttagatttccaaagagggaatgatgttgccttccactttaacccacgcttcaatgagaacaacaggagagtcattgtttgcaatacaaagctggataataactggggaagggaagaaagacagtcggttttcccatttgaaagtgggaaaccattcaaaatacaagtactggttgaacctgaccacttcaaggttgcagtgaatgatgctcacttgttgcagtacaatcatcgggttaaaaaactcaatgaaatcagcaaactgggaatttctggtgacatagacctcaccagtgcttcatataccatgatataatctgaaaggggcagattaaaaaaaaaaaaagaatctaaaccttacatgtgtaaaggtttcatgttcactgtgagtgaaaatttttacattcatcaatatccctcttgtaagtcatctacttaataaatattacagtgaattacctgtctcaaa

SEQ ID NO: 299 - DNA, 1895 bp, Homo Sapiens
  misc_feature (1628)..(1628): n is a, c, g, or t
ttatagatttagctttcattttattttagttataaaacgattgccaaaacacaaagttttagaaaaacacacaaacacaagtttttattccttttttagttgcagaaaataaatacaatcacatattccatatgcttgtctacaaaagcatctctaaaaatgtcatttactggacttgacagtataatcttttcggcttttcaattgcaggtatcatacagatcattttattttattaactttttaagcacttggctcaagcaactttggaagaaggctttgtgagcttacaaatcttattccaagtgttattttttaaacagttacaactaaaacgaggtcttaccttttcaaaagaggagaataaagtttttcttttataaaaattgctccccaaactcacaaacacccaaaccgacataaaaagttggtctatcttcttaggaatcaataagaagtgaggttacaggggagagggaggaacaagcatgacggttcctgtgaaatccatcccaccgagcagtcactcttatgtttccagtttggccctcgggagttttcctaaaggaaaactcagtcatctaagcctatgtttctgaaaaggtaggacatggactccccattgtggatccgacggatcgcctctgaaaggatcatgctgatatccacagttttaatcttggggcactggagcttctggacatcagtgtggaattgtattggtgaccaccacctcatcaatggcagactcttcaatccgccggggggcgtcagaagacaacaagccatgagttgccatcacaaagatcttatatgcacctctttccttcagggtctctgctgcagcaagaaagctgtcaacatcatcaatgatgtcatccacgatgatggcaatccttcctccaacatcacccacaaccgtgattgggggcttttctttaggaatcagcatggggatctccaggctggggtggatggcagccacacttctgaccatgggtggggaatgccgtccatccaccaagtccgactcggcatcctgcgcctctccatgaatcactgcaattcccaggcgcaggcgctcagcaaaagactgtgccctcttcgccgaggctggagacttggccacgattactgcattcctgtaatctgggatctcttcttgaatatactgtaataagaagggagatgctcttaaattgtcaacaggaatattgaagaagccctgaatttccttctggtgtaaatccatagtaataagatgagttagaccagctttgcacatcatggaagccagcaatttagagacaatggagcctctttttctcatcttgcactgcttgctgtaaggaaagtagggtatcacgccaatgatgctcatggcacaagaggtcttacatgcatacaccatgatcaggagctccatgatggtggtgttcacgtccttcgaaacagtttggatgatgcaaaacatcttttcccctcacagactctggaatttgtactctcgtttctctgttaggttcctggtaaacctgcactttgcccatctccacccctagccgctctgcaattatgtctcttgatagctccatacatgatgaattcgagtgttgcgtgaaaacaancaccagaccaccatttggctatatgttcatcttggtttctaattcaggtggcgtcacacaagacatcaaaccttcttggtcttccaatgtttcagagccagaaagccggagctgaagagctcaatgttttactgattgcatgcgttaaagtcaatctatggacaacctccttttattctctgacgacctattcctcctggccccgaccccacccccggccccgccacagcctcatgctgcagaaggaagaaagcgccgggtctcctg

SEQ ID NO: 300 - DNA, 411 bp, Homo Sapiens
tatattaattcaactctgatctgatatatcacttaaactaaaggggtgtgtgtggtgtatgcttgtttcctatttctgctctttaaagatactttgaatcaataaaaccattagtctacaaatcaaattgtgaacttaatctctagaaagagaatataactcagccatttataggaatttaggttcaagtacaggatatatgaaatcttttcccagtatttcagaatgtacttaattcacaggcaggatgcttcaatgcaaaatcatgaatatttttaattcaaaactaaaatgtcattaatatgtatgtatgcaaatgttttatcttattttctgaaatgcatctactttcatgggctttgtacgtttctgagatttctcagtgtaataaaaagagctcccaaacttaaa

SEQ ID NO: 301 - DNA, 634 bp, Homo Sapiens
  misc_feature (528)..(528): n is a, c, g, or t
taatccagtcccccccaagaaaggaatgaagtgctataatgagaaaaatcctagtacctaacatatagtagacagtggagagtggttctctttcgtttctcaggggcagacagatggggtgctggagtcctctatcaaagagtcagagctctatcccagatgtgtaatgaacgtggtcacagacatattgtcccattaccatttaccttccctataaccactgtgcctccagccttgtagaatagacacataggagcgcagcaatacgtctaaaaataggagtgagagagggcagggcatgcccgttcttgtggtagaagaaaagaatgtcaaagaaagcagctgggactaatgaactttacattagccatattccattatttcagcttaagtcaaatgtcggtcctcatgaggcaactggctttgacaggagctacgctaattaccacttaccaacctttaatttctgggtaaaagcaaaagagaaaaactaatggatttttcattttccagagagacaagaataanaataatagtagtctgtagaaaaaagaaaacctgcatcaattacaaggaattattaatgtatctttaataaataaccacattatttagctgtttaatttcctaaaaa

SEQ ID NO: 302 - DNA, 735 bp, Homo Sapiens
  misc_feature (11)..(11): n is a, c, g, or t
cggatccgatnatcagttgagagcagctgtaagagctggctgagctccatgacgatgaacagtgaagatggcgaccagacgtgtgtgtctgaggactccagcagggggtgccttcagtcggcagacgagtacagatgatgagtgctttatccccaaggagggggatgattttctgaggaggtcatcttcaaggaggaaccggagcatcagtaacaccagcagcggatccatgtctcccttgtgggagggcaacttatcaagcatgtttgggaccctgccccggaagagcagaaagggaagtgtccgaaagcaactcttgaaatttatccctggccttcatcgtgctgtggaagaggaagaaagtcgcttttgacggattgtggtgtcctttcaaattagcttatttcacaaatatctctagactcacccagatcccagcttggtgggaaagtgcagaagaattgcaaaactgacatcccatttcacagcaatagtgacctttatttaaattgttgtgttatagtttatgcttcttaaatcatttttcaacctaaacagccaatttctaagcagacaggaaaactaaataataagttaattaatataacaaagatgcaggttcctgctcattccagtaatgtctttgaaagcaaaactaatatttattttctagattatccctgtgaataattgagaactttttggagtcaagtatgaataaaggtgtggcagaat

SEQ ID NO: 303 - DNA, 653 bp, Homo Sapiens
  misc_feature (199)..(199): n is a, c, g, or t
aatgaaaggaggggtcagtcagcatcatctatcaatctctgacctaaaggaaagcagcaagcagctgcatgctctcaggacttttgcaattgtttgttggcaggcaggacaaacctcatgatgtcccagagggaatcactgatgtcccatgcaatagaactgaatcagggagcaataagaacatcacattgctctggcntacattggccctgaactattctgtttgttttcataaagaccataacattgaagggaaagcccaatgtttgtcactaattagcacaatcttggaagtagtacaagacctagaagccacttttagacttcttgtggctcttggaacacttatcagtgatgattcaaatgctgtacaattagcccagtttcttaaggtgttgattctcaaataaaaaagtattcctcagtatcagaaccagctaaagtaagtgaatgctgtagatttatcctaaatttgctgtagcagtggggaagagggacggatatttttaattgattagtgtttttttcctcacatttgacatgactgataacagataattaaaaaaagagaatacggtggattaagtaaaattttacatcttgtaaagtggtggggaggggaaacagaaataaaatttttgcactgctaaaaa

SEQ ID NO: 304 - DNA, 384 bp, Homo Sapiens
ctggtagtgatatttaatccaatccaacaactataggctgggttaaataaaaggtcattattgtctatattccaagtggaattaaatgtagtcacagagattccctaacattttcccttaaatttaaagggaaatcacttctaaaaaaacacactaatcagaactgtgatgctctaattagaaacaactcatctggccaactatttgctgctcagagtttcttatttcttagatgaaaaaaactcatcagttatattcatgtgatcgcggctaaaaagtcagtattttctttttgttctaatgtggcttcatttgaaatttctcagattctacattgtactaattatgaataacaaattataaattaaaaactaataaagagaa

SEQ ID NO: 305 - DNA, 970 bp, Homo Sapiens
ggtcgccgggggagcgccgggcggtgggcaggcgggcccggaggcccccagtgggccggcggcagctgggtcgggtaggatggcggaggtgagccaggaacgggcggaaccggcgaagggggttggcgccagtcggcggcaggacgtgcatgcagcggtgaggagcgcgtgcgagcgacggtagagccttggggagccacgcgccagtcaatcgtcgcaccagggggagtgagtggaaggtcgcggcgagtggttgcactggctgtgaaaggaggcctggtgcaaccaggggtctcgtgcccagggccgaatgaacacggcagatcgtgtctgagtgcgtggggcggtgggcgtacagggagcaggtagttggactggggtcggtagggatgactgcgcagtgcgcgcgccacaagcaggggcgccccgcgtgtgagcaggcagggcctcgcccatcatccccggcagacacagcagaagagtgagtggaggatgccccggctgtgcggggcttctgggaagctgctgacttggtggtcacctcgaggagatggccacgcgttctccaggggccttcccagaccccctcccctggcggccgcggtcgccggccgccctgtgattactgggggtgcggtgggagtcagctggagctcgctgccgatcgctaggagcccagcacggccccgcacccggggggggcccaaagcccgaccgtgggggacctcaaaccagaggccctcaaggcccgttccacccggcctgtggcgcagtgctgggcacttgggaacggaggtccctgtcttctcgctgcaagcccctccgtggtgcgcgccgtgggtctgcgggttggtctttttcctcgatttatgaagttcttttcactccgtcagttactattttgtaagttcaccatttaaaaattcgacgcgtgggtcgacgatatcccggaaatccggaggcgtaccag

SEQ ID NO: 306 - DNA, 654 bp, Homo Sapiens
  misc_feature (115)..(115): n is a, c, g, or t
tggcactgagaagtctccctgacagcctctagtgtccgggacttgtggacgagtccaacacgctggtcctggccctccctgctcccaggttaggtgcgctcacctcagagcaggnccaaagcacagctgggcatgccatgtctgagcggcgcagagccctccaggcctgcaggggcaaggggctggctggagtctcagagcacagaggtaggagaactggggtccaagcccaggcttcctgggtcctgcctggtcctccctcatcaaggagccattctgtgtgtgactctgggtggaagtccccagcccctgcccatatgggcgctgcagcctcccttccatgccccaggatcactctctgctggcaggattcttcccgctccccacctacccagctgatgggggttggggtgcttcctttcaggccaaggctatgaagggacagctgctgggacccacctccccctccccggccacatgccgcgtccctgcccccacccgggtctggtgctgaggatacagctcttctcagtgtctgaacaatctccaaaattgaaatgtatatttttgctaggagccccagcttcctgtggttttaatataaatagtgtacacagactgacgaaactttaaataaatgggaattaaatattt

SEQ ID NO: 307 - DNA, 422 bp, Homo Sapiens
taccgagggcacgatggcgcgcctagtggagcaggagagacaaaaatatcttcatgaggaagagaagatcgtcaagaagttgtgcgagttggaagactttgttgaagacttgaagaaggactccacggcagccagccgattggttactctgaaagacgtggaagacggggctttcctcctgcgtcaagtgggagaggctgtagctaccctgaagaggagaatttccaaccttacaaaacaagatgcgagccatcctgcgcatagaagtggaggccgtgcggtttctgaaggaggagccacacaagctggacagtctcctgaagcgtgtgcgcaggatgacagaggtcctgaccatgctgcggagacttgtcactgatgggcccctgaaaggcacggacgcgccatcgtgccgctgcgggaac

SEQ ID NO: 308 - DNA, 664 bp, Homo Sapiens
tgctccatgtggcaaggtggaaggcatgaacgtgtgtaggaggcgctggagctgaagaaatggacgagccctgggaggagggcagaaggctacgcagggctgaggatgaagatgcagcccctggatggtcccagactctcaggacatgcccagctcaggggcttcgagccacaggcctggcctcatatggcatgagggggagctggcataggagccccctccctgctgtggtcctgccctctgtcctgcagactgctcttagccccctggctttgtgccaggcctggaggagggcagtcccccatggggtgccgagccaacgcctcaggaatcaggaggccagcctggtaccaaaaggagtacccagggcctggtacccaggcccactccagaatggcctctggactcaccttgagaagggggagctgctgggcctaaagcccactcctgggggtctcctgctgcttaggtccttttgggacccccacccatccaggccctttctttgcacacttcttcccccacctctacgcatcttccccccactgcggtgttcggcctgaaggtggtgggggtgagggggggtttggccattagcatttcatgtctttccccaaatgaagatgccctgcaaagggcagtaaccacacaagtttgtgagtga

SEQ ID NO: 309 - DNA, 564 bp, Homo Sapiens
tcccacgtggtgaatgacgtgaatgaggctgtgcagctggtcttccgcaaggagggctgggctttggagtgagggcagtgcggtggaggtgagggggtgagcctggacctgtgggcgagtcccattggctgggctctggcctgatcactgggctcaggtcagggcttggttcccttgccacccttcttgctgccccatgagtgtggcattactggtcacttggaagaagacagtgactctttttccctgctgggtagcattttgtatggaacggttggaattttctgggcccagttcccacgtgcctttcgtggcagtctaacctcaggccattctcttcccctgtgtgcctcagtgtccttctcatttcagtagggacttctgaaatgggggaggcagtgtggaatactgtggatgtctgtgcagagcctttgccggcactgaaggcatgcagcctgtcggcagagtgtcttaacaccagatgctactttttactgtattgtagtttattgcccggagatgtggggctttttccttaaataaaataatcataattaatgtacc

SEQ ID NO: 310 - DNA, 1075 bp, Homo Sapiens
  misc_feature (945)..(945): n is a, c, g, or t
  misc_feature (998)..(1012): n is a, c, g, or t
gtcaggcatccccctaggccccggaccaccggccccaggccccggcaagatccccacaaggctggactgagccactatgtgaaactctttagcttctatgccaagatgcccatggagaggaaggctcttgagatggtggagaagtgcctagataaatatttccagcatctttgtgatgatctggaggtatttgctgctcatgctggccgcaagactgtgaagccagaggacctggagctgctgatgcggcggcagggcctggtcactgaccaagtctcactgcacgtgctagtggagcggcacctgcccctggagtaccggcagctgctcatcccctgtgcatacagtggcaactctgtcttccctgcccagtagtggccaggcttcaacactttccctgtccccacctggggactcttgcccccacatatttctccaggtctcctccccacccccccagcatcaataaagtgtcataaacagaaaacccaaacaccacccccctactacatccctgtcgggccgcctcggcccctcgaagaagcttttctaaaaccattccgttttggcggcccgggggccccagataggttaaggtgcacacctgggcccataagcgtgttttcccccaagggagaacccccgggggcccatggaccctaaggggccttggggcattttctctcccccaaaaataaacaaaaacaccccccgggggcgggcacaaccccggaaagcgggttccctgtgaaacaaaaattcccccgacaagggggagttttcctgggagggcgccctcttacctggggaactccccactcccacccgcgcggggttcccccaagagcgcgaagcccttccgagattattccaaaatttagatccgcccccccggcccccgtgcgcgcatttacaattgggccagaaaaaccaggagcggagaanaaattgccatataagagggcagttttcccgtgccccggaaatctggggaaaannnnnnnnnnnnnnnataaagcggcgtctattggtatgttacaccctgccgtaagttcgcggcccgcggccggtcaca

SEQ ID NO: 311 - DNA, 758 bp, Homo Sapiens
  misc_feature (558)..(665): n is a, c, g, or t
  misc_feature (670)..(670): n is a, c, g, or t
  misc_feature (674)..(687): n is a, c, g, or t
caagtatggtgttttgtacacaggtatttaataagtgacttccagttttggctctgctatgaataaaaagagatttcagttctcttcactttgaaatctaacaactcagagaacattgaagaaattggaatttagttgggatgaaatacttgtggtttaaaatatttctgttcatattttctaatttgttgccggaggtcttgggttttctatttgagtgcttgcaaactcaatgtgatttctgtcagcatatcttaggtttgtttgttatgaaacttatgcagtgtgaggttctatctgaaaatgttatttagctatcttctgggactatttaatgaaagtggggtcatgaatccttaaaattcttgtgcagctttgagaaacatttctgttatttgggtatcagtttgtaagtgtggtaaagccaagatggaaacgagcactttgctttcttggttgttgttactggtctaacctcctgcttgaactagtctgctgtcctgtcaaatgcatctttttatttacatgtcccttaaattaaagctgatcatgaaagtnnnnnnnnnnnnnnnnnnnnnnnnnnnnnnnnnnnnnnnnnnnnnnnnnnnnnnnnnnnnnnnnnnnnnnnnnnnnnnnnnnnnnnnnnnnnnnnnnnnnnnnnnnnntttgnaggnnnnnnnnnnnnnnaaaaagtttttaaaacctttcctttggggccccggccccagtggggacgcaccccggccaaaattttttcc

SEQ ID NO: 312 - DNA, 970 bp, Homo Sapiens
cgtaatcgccgagggcacgtgcatgccccctggttaagagttgcaggtagcggtagcgatggacactctggatcgagtagtaaagcccaaaacgaaaagagccaagagattccttgagaagagagaaccgaaactcaatgaaaatattaaaaatgccatgctgattaaagggggaaatgcaaatgcaacagtgacaaaagtacttaaagatgtgtatgcactgaaaaaaccatacggtgtactatataaaaagaaaaatattacaagaccttttgaggatcagacatcactggaattcttttcaaagaagtcagactgttctttattcatgtttggctcccataataagaagcggccaaataatctagtaataggtcgtatgtatgactaccatgtgctggatatgattgaattaggtattgagaattttgtctctctaaaagacattaagaacagtaaatgtcctgagggaacaaaacccatgctgatatttgctggcgatgatttcgatgtaacagaagattatagaagactaaaaagtcttcttattgatttcttcagaggccccacagtatcaaatatccgcctggctggattagagtatgttctgcacttcactgcactgaatgggaagatttactttcgaagctataagttgctgttgaagaaatctggttgcagaacaccacggattgaattggaagagatgggaccctcattggatctggttctgaggaggacacacctggcatcggatgacctttataaattatctatgaaaatgccaaaagctctcaagccaaagaagaagaaaaatatttcccatgatacttttggtacaacttatggaaggattcatatgcagaagcagacctaagcaaactacaaaccaggaaaatgaaggggttgaagaagcgacctgcagaaaggataacagaaggaccacgaggaaaaaagtcaaaaagaattt

SEQ ID NO: 313 - DNA, 693 bp, Homo Sapiens
  misc_feature (111)..(124): n is a, c, g, or t
  misc_feature (134)..(240): n is a, c, g, or t
ggggggaatcccacccctattcttggcccgggtttctttggaaaacagtttggccccttttctttcccttttggggcccggccccaaaaaaaaggttttaaaaattttttnnnnnnnnnnnnnncccccaaaannnnnnnnnnnnnnnnnnnnnnnnnnnnnnnnnnnnnnnnnnnnnnnnnnnnnnnnnnnnnnnnnnnnnnnnnnnnnnnnnnnnnnnnnnnnnnnnnnnnnnnnnnnggttgtctcaatagataactttatttgaaatgaaatgcattttgaaaatatgaaaaataaatcacatctccccaaaatcatctaagagacatatttacacaagttctgaccatgctaaaaaattcatgaatgtgatggtgtataaagcatttggtacatgatgatacttgctttccagaagctggcatttgcatattataaaacgttaagaagaaggctgacctcggaatgtaacagacaatagttttatgtttcttctcaatatacagtgacctggaaggactccctgttgttaaaacctgcttccccactgctcagcctgccatcagccatccagctgcagagcagtggagagtaggtctcaccagtttttgtgcagatgcttctaacccagagtccttctgcttacttcattggacaatattgccctttctaagaaaacccttttagatc

SEQ ID NO: 314 - DNA, 1123 bp, Homo Sapiens
  misc_feature (995)..(1021): n is a, c, g, or t
  misc_feature (1041)..(1041): n is a, c, g, or t
ggggctgcagtcgccacacctttgcccctgctgcgatgaccctgtcgccacttctgctgttcctgccaccgctgctgctgctgctggacgtccccacggcggcggtgcaggcgtcccctctgcaagcgttagacttctttgggaatgggccaccagttaactacaagacaggcaatctatacctgcgggggcccctgaagaagtccaatgcaccgcttgtcaatgtgaccctctactatgaagcactgtgcggtggctgccgagccttcctgatccgggagctcttcccaacatggctgttggtcatggagatcctcaatgtcacgctggtgccctacggaaacgcacaggaacaaaatgtcagtggcaggtgggagttcaagtgccagcatggagaagaggagtgcaaattcaacaaggtggaggcctgcgtgttggatgaacttgacatggagctagccttcctgaccattgtctgcatggaagagtttgaggacatggagagaagtctgccactatgcctgcagctctacgccccagggctgtcgccagacactatcatggagtgtgcaatgggggaccgcggcatgcagctcatgcacgccaacgcccagcggacagatgctctccagccaccacacgagtatgtgccctgggtcaccgtcaatgggaaacccttggaagatcagacccagctccttacccttgtctgccagttgtaccagggcaagaagccggatgtctgcccttcctcaaccagctccctcaggagtgtttgcttcaagtgatggccggtgagctgcggagagctcatggaaggcgagtgggaacccggctgcctgcctttttttctgatccagaccctcggcacctgctacttaccaactggaaaattttatgcatcccatgaagcccagatacacaaaattccaccccatgatcaagaatcctgctccactaagaatggtgctaaagtaaaactagtttaataagcnnnnnnnnnnnnnnnnnnnnnnnnnnnacatgtccggccgcctcggnccctccaagaagcttttctaagaccaattcggtttgggcggcccggggccccagtaaggtaaagtggaacattggggccaaa

SEQ ID NO: 315 - DNA, 598 bp, Homo Sapiens
gaagaccagctcaagtgggcatcttggaagctccattcctaagggcactgtgatgatgatggtaggactgaaaatggagcactagctccaaagcaggagcttccttcagcattagaatcccatgaagttcctggcactctcagtatgggtgttcctcaaatttttacatatggagaaacctgtttccccaagggcaggtttgaaagaaagagaaatccctctcgaaagaaacaacatatatgtgatgaatgtggaaaacacttcagttcagggctcagcccttattcttcatcaaagaattcacagtggggagaaaccttatggatgtgttgagtgtgggaaagcattcagccgaagttccattcttgtgcaacaccagagagtccacactggagaaaaaccttacaaatgtcttgaatgtgggaaagcctttagccagaattcggggcttattaatcatcagagaatccatactggggagaaaccttatgaatgcgttcagtgtgggaaatcgtatagtcaaagctcaaatctttttagacatcagagaagacacaatgcagaaaaacttctgaatgttgtgaaagtttaagaaatt

SEQ ID NO: 316 - DNA, 626 bp, Homo Sapiens
  misc_feature (402)..(402): n is a, c, g, or t
ctccgagtgtggagacaaaaactacgggaggaaatcttacaacgaccattgctgccaccagctgcaggccagcttctcactaggatggaaaagaagcgtaactgaggaacaattcacattagtacaaaaaaatgatacagccatttccaaagagcagagtaatgatcacaatggcagtttcgaggaatccagggtcagtcctcacacgggcctcacccagcctctcccgagtggcgacggcgctgagagccagaaagggggcaacgcgaagacgagtttctagcgacccttgggaaaagcctacgctacacatttcagaggagattaaaacattccatatgccaattaactttaacctaaaaaaatagagtgggagggaaccttgacattcggagaaattcnagtgtgccggtaacgctgaggagtgaggctgtttgtccaggaacgctgagctgggctcagacggtcatcagtgcagacgcagcggacgctgctgaggatggctcagtggtggggaggcgctccctcccgaggaggcctgtacgtctgtgtcctggcggctcgagctgggtcctccgggccagttcatgctcgccctctcccgcaggcagggccggccgccctgc

SEQ ID NO: 317 - DNA, 495 bp, Homo Sapiens
catatgaaagagcaaattcagaacatgagcatggaagtccctgcgaacgtcagatctccgtgtgcatccttacccccttgctgctttcatgctcactctcctcttgcgtggctcgctttcaggtttatctccatccctggaagcagagttgctctggcccaggctctccatgagagtttggcttgaacattcattgtctggccccctcctagttctcatctcccaaagtcaagccaatgtgtgaagaaatgaccagctcagcagccaagggcccagggtgcacaggtcttcgttgggaaaggcatctgcaggcctttccttgcccactgggatccttgcctagcatagtgacgatgttcagccctggagacaaacaagaaggggaacaccaacatcaatagaagtatatatttacaaattgcatttttgctgtattgaaactaacattttgccctttaaaatcctgaaaataaaatttcagtatgaaatgaaaaa

SEQ ID NO: 318 - DNA, 531 bp, Homo Sapiens
  misc_feature (147)..(160): n is a, c, g, or t
  misc_feature (453)..(453): n is a, c, g, or t
tctgagacagggcctgactctgtcccccaggatggagtgcacgatcacagcacaccgtagtctcaaccttctgggctcaagcaaatctcccacctcggcctcctgagtacctgggaccacaggcatgcaccaccatgcccagctaannnnnnnnnnnnnngtagagatggggtcttcctatgttgctggtctcaaactcccaagctcaagcgatcctactgccttcacccttccaaaaggggtgggattacaggcgtgggccaccatacctggctcatatttgaatttaatgaataaagaaactgaggctcagagaggcaaagtaacttgcctgataggacacagcaagtaaggagcagtctgcatcactgcaaagtggtgtcttcagatgcccccgcttgcccggtctccagtagccccaccacagccacttttgtcaccatgactgacaangattgaccaactaacacacacttccctgaatccccaccaagtcaggggcttccgacttgcatcttggaaaggaaaaaa

SEQ ID NO: 319 - DNA, 682 bp, Homo Sapiens
atggtgaatgctcatcctgcctggattcaaggaattagctcagagattggcccctagcttttctgcctttgtagggacagcaaaaggggaaagtttgctgcagaaaattccaaaagattgctgttagctctcacagggaagtggtaaagatcagctaaacctgggttggggtgctttctgcccagtgggtcttggcataagtagattaatcctgctcttttaagaaaaggcaacttattcaggcagtctggaaagggggttctcagaaaactcagtttctttattccttcttttctcccaactactgttactggttatagaggtctttggactctaaagaccaatgtttggccactaactggactaatatgtatctttctgtgatttcatcatagaggtctgttttgtgagggtttggggtgcagaaaactttgattaaatcttaatgggaggctgggtgacctggattatctacagtgagcagacttaaatggaacagaagtttatgtgtccaaatgatggaatcattaaacctgagtgacgtgacctgtgtggttccttaatagtatctatatatctagacgggaatagattgtgaatgttaatggtggatgaataaggatggatataatgttttgcatatgtgaagccatgagcgtgaagccagggtatgtgtatacct

SEQ ID NO: 320 - DNA, 737 bp, Homo Sapiens
  misc_feature (444)..(444): n is a, c, g, or t
  misc_feature (471)..(471): n is a, c, g, or t
cggcagaaagaccagaggcaagtggccggcctcctctcacagatagaagacctcaacgtgtgccacatctctggggcctataaagacctcaagtctcgggaggagactcgaaacgctgcctggaggaagagaggctgggatgaaaatgtctactatacagtccccctggtgcgacacatggagtctaggatcatgatcgcccttgaagatctcgcctctgcagtgatgctgcctacacctccacctccttccccttctccctcaggcaaccccgacagacagtggcactcctggtcctgctgtcttggttttgtcttggctctgggaggactctgaggggcagtgctcagttcagacaagggggaactgaaggctgacaagttctgaggattacagctctgcccaggccctttctactttccctgccgtgccacccgtcccccntgcgtagaagtagtttctgatttcccntgaatgaaagatagtgatcttttaggcctttcatataatcttctaaaattcctcatctcaaggccaccagtcccaagttatcacccttggaaatcctctgtttagcttagttgcacaaaaggtagtatgtccagtggctagaggtggggtgggaagagaggaggccaggccaggccctcaggaattccctggtttccactgggccacccacttgctggacagtctgagccaagtccctcctgctggagaaaagcctggaactgcca

SEQ ID NO: 321 - DNA, 588 bp, Homo Sapiens
tatgagcccagaaaacggaggatgggggtggggcgccttcctggaggtgacacttgatgggggtgtgttctggttactgttctaaggctgtgccatcagctccttcctcccctgttcattctgcattctctagtcagttggctaagaagtgactcttgcaactaaaaaaattaagaaattcacttcccctctaggaggtgatgatagggtttctaatggttatatgtatatcacattcccatttgcttagaaagtctgattgtagctatgattgtccgtaggcccatactagagttcatggatatgttatactgaaccaggccagagcaaacagaaaaagaaggttgagggcaatggacaaggaaggaataaagggagaagagggaaaacacaaaacctgatgctggggacacagcatcagctcaagacgtcaccctccattctgtcactcagaaaatggcacttgggggactgggcgcagttggtctttaaccacttttcaatgtctaaaaacatttgtttgtggtctataagatgaaacatcatttcaatcgtaaaatttcccattaaagaagttattttttctaa

SEQ ID NO: 322 - DNA, 674 bp, Homo Sapiens
ttgggctactgagtggtccttaggatactggcacagattttgccactgggtatgtcagatcattttctaccatggcctgctgctcttgtagtggacttcctgagtccaatcccacctcctggtgtagaatttacactgctgcacctgaggtcgatgtttcaaagtaagatcaagccagtgttttgatctgggctctgagcacaagtcaggaaacaccaacatattcacactctcccagtaggttcctcagtccgatggtgaatggctattcgtaaatggctggtctggctctttggtgttggagcctttccaatagccccatgaaaagaagcatcacccaaggatattgtaaaaaggatgtaacaaggagatagggtagacattgtactcagtgggccttggggcctagcccagctctgagcagaggactgtggcattcactgtccttgagtgtttcaccttcttggataacacacgggccttctcttctggatttcatcagagattacagccagatgggggctgaagaccatcctcttgaccacagaggtgtgactgtgggaattcctcccaatttatggtttcccagaaaatcttagttccttttatttatagaatgcatgtcttttgtgttaagaaaccaaagagaaataaagagaacactcctaataaaa

SEQ ID NO: 323 - DNA, 574 bp, Homo Sapiens
  misc_feature (103)..(395): n is a, c, g, or t
gctcggtacccaagctttgaccgcaatgtctaatgggaaataaagtgcgcacacaggagatttaccattgactctaatcacagaactttatttattaatttannnnnnnnnnnnnnnnnnnnnnnnnnnnnnnnnnnnnnnnnnnnnnnnnnnnnnnnnnnnnnnnnnnnnnnnnnnnnnnnnnnnnnnnnnnnnnnnnnnnnnnnnnnnnnnnnnnnnnnnnnnnnnnnnnnnnnnnnnnnnnnnnnnnnnnnnnnnnnnnnnnnnnnnnnnnnnnnnnnnnnnnnnnnnnnnnnnnnnnnnnnnnnnnnnnnnnnnnnnnnnnnnnnnnnnnnnnnnnnnnnnnnnnnnnnnnnnnnnnnnnnnnnnnnnnnnnnnnnnnnnnnnnnnnnnnntgaatgagccttaaatgagatccagagatatgaaaagcaggtagttagttaccatttggagagggattccggaacctagagagagatgaggctgaagaggcgggaagaaaccagatggcaaggactttgtctcatgcgcaaagcatataatttatagaaagcagagaaaaatggaagct

SEQ ID NO: 324 - DNA, 469 bp, Homo Sapiens
caagtctccactggtgttattacgttatcaggcacaaaccccctccagacacctgagcatcccccacaggctcccagtgaggagccatcacatgcccaggccagccgaggggccctcaggcatggggatctgggcaatggcagcaagctgggctggggggtgcagccaggatgacagcagatctgcagggcggggtcctcgccccgggccacctggctggggccgaacgtcacagcatgcgtctaactgggacttgagcagctgaaagctggttcagggcttgcagcacctctgcggtggccccggcgaattcccccagcaggttgatagttctcaccagggtccttggacaggtcatagagcagctgggggctcatgagctgtcagagagccctaagggtagcaggcaaggtctgcagtgggtataaaatgttggcagaacagttgctgaatgaagtggacccttgta

SEQ ID NO: 325 - DNA, 774 bp, Homo Sapiens
cactatgtatgatggagacaggatggaaatcatgaactggcaatcatccttatttggtgggtccagttccatcctgagttttcttctaggccgatgaagccttcccctccgtatctggggctgttacttgcagcaactgggaacctgaatgcctacttgcaacagggttgcaaactgtcttccagtgatagatacagtgatgccagtgatgacagcttttcagagccaaggatagctgagttggaaataagctgaaatgaatacatgactgggaataatggggactgcctgtgaggcctctgaaataattgaaggcaagatgaaggaactatctgaagaaatcactacactcttagagaatccctctgttctccagcaaacatgggatgtaaagcctcacagggaatctgataatacatacttctgtcaaccagaaccagaggggtagttttcttttccctccagaggcagcctttggtacttaaaatatctgtagctgattaaatttttcccaacaacctcactggggagaaagtgtgttcatgtttggtccagcggttcaggatgttaggatgacgagcaagagtccaggtcactgtgcctttgctgtgtggtatggaaaggatggcagggaacatgctgtaagtaattttgagtaagaaaatgagtcactgtgttacctggaactcagccacagatttgtgtgtggtccaagatcattgcagtttctcaccctgtttatttcctggtaaaagtaaaattgaataggtccaa

SEQ ID NO: 326 - DNA, 1400 bp, Homo Sapiens
  misc_feature (1210)..(1245): n is a, c, g, or t
cggtacgcatccggatttcccgggatatcgtcgacccacgcgtcggaaagcacccgggcgcagccggagccggtgccgcagctgcgaatggccgtggccgtggggagaccgtctaatgaagagcttcgaaacttgtctttgtctggccatgtgggatttgacagcctccctgaccagctggtcaacaagtctacttctcaaggattctgtttcaacatcctttgtgttggtgagacaggcattggcaaatccacgttaatggacactttgttcaacaccaaatttgaaagtgacccagctactcacaatgaaccaggtgttcggttaaaagccagaagttatgagcttcaggaaagcaatgtacggctgaagttaaccattgttgacaccgtgggatttggagaccagataaataaagatgacagctataagccgatagtagaatatattgatgcccagttcgaggcctacctgcaagaggaattgaagattaaacgttctctcttcaactaccatgacacgaggatccatgcctgcctctactttattgcccctactggacattcactaaagtccctggatctggtcaccatgaaaaagctggacagtaaggtgaacatcattccaataattgcaaaagctgacaccattgccaagaatgaactgcacaaattcaagagtaagatcatgagtgaactggtcagcaatggggtccagatatatcagtttcccactgatgaagaaacggtggcagagattaacgcaacaatgagtgtccatctcccatttgcagtggttggcagcaccgaagaggtgaagattggcaacaagatggcaaaggccaggcagtacccctggggtgtggtgcaggttgagaatgaaaatcattgcgattttgtgaaacttcgagagatgctgatccgcgtgaacatggaggacttgcgagagcagactcacacccgccactatgaattgtaccgacgctgtaagcttgaagagatggggttcaaggacactgaccctgacagcaaacccttcagtcttcaggagacatatgaagcaaaaaggaatgaattcctgggagaactgcagaagaaagaagaagaaatgagacaaatgtttgttatgagagtgaaggagaaagaagctgaacttaaggaggcagagaaagagcttcacgagaagtttgaccttctaaagcggacacacnnnnnnnnnnnnnnnnnnnnnnnnnnnnnnnnnnnngagcttgaggaggaggtgaacaacttccagaagaagaaagcagcggctcagttactacagtcccaggccagcaatctgggggcccagcaaaccaagaagacaaggataagaaaaatgcaagcttcacaataaagcctggcagcccaggaagttcc

SEQ ID NO: 327 - DNA, 556 bp, Homo Sapiens
gggtttctttgtataacttgtgagttccatgtgttttgtttttattatgtaaatatcattataaataaacttatttataaatcaaagatttgttaatttttggaaatcatgcttttcaaagcatcctaacttgctaagatgctaggtagtacgaccctctggatttggaaggcaaataaaactcttacagtgattatttagatattaaagactgagaactcacggcttaaccccagtcttgatggtatattgaacagactgaatatattttaccattacagggctaaaaggagtcttcatgtgttaatactacctccttgtacatcactatacccaaatcagttattcaaattgttaggaattttaccttttaaaatctcataatggatatctcatgttttctgtattaatgtattttcaatgataggctgtttctttttttgttgttattgttgttgttgttatatccatacttttatctctaatgaaatgtagttgggttcttcctgtaatgcgctattatgtcttgggcttaataaaaatatttgtgatcata

SEQ ID NO: 328 - DNA, 474 bp, Homo Sapiens
ctctactccattatttctctacttttccttccagcaaacctgaaacgtgagggagatggattaatgtgagtaacaggaatgtgtctttaaaaagctagagtggttacatttaatcaggcagtaagataatttgggttcttgagttgttttggagtaatatcccacaactggggtaggaagctcaggacttttttctttaaagctagtcatttcaaaagcatattgtatttttttgaatgactacagtatggacaatttcaaaaaccaaaacccactttggattggtggaagtaaaaactggtaactcactcaagtgaatgaatggtcttgcattttaaaagcttatgggaaactcaatttgaaatgattagaaaatgtcaagtattataagctggtatttaagatgcttgtaaatactatttatgtttttaattttgtaaaataaagatttctttttaaccactggcaaaaaaa

SEQ ID NO: 329 - DNA, 435 bp, Homo Sapiens
ggggtgaagacatagctgcgggtggctgtgctggtggcgttcaagatgtcgaccaagaatttccgagtcagtgacggggactggatttgccctgacaaaaaatgtggaaatgtaaactttgctagaagaaccagctgtaatcgatgtggtcgggagaaaacaactgaggccaagatgatgaaagctgggggcactgaaataggaaagacacttgcagaaaagagccgaggcctatttagtgctaatgactggcaatgtaaaacttgcagcaatgtgaattgggccagaagatcagagtgtaatatgtgtaatactccaaagtatgctaaattagaagaaagaacaggatatggtggtggttttaatgaaagagaaaatgttgaatatatagaaagagaagaatctgatggtgaatatgatgagtttggacgaaac

SEQ ID NO: 330 - DNA, 1867 bp, Homo Sapiens
  misc_feature (628)..(628): n is a, c, g, or t
  misc_feature (1629)..(1629): n is a, c, g, or t
  misc_feature (1708)..(1708): n is a, c, g, or t
  misc_feature (1717)..(1717): n is a, c, g, or t
  misc_feature (1775)..(1810): n is a, c, g, or t
gggacgctttgcggctgtcgtcggagaggcatctgggttcggactggggccgccatggggaaagtgaatgtggccaagttgcgttacatgagccgagatgacttcagggtcttgaccgcggttgaaatgggcatgaagaaccatgaaattgttcccggcagtttgattgcttctatagccagccttaaacatggtggctgtaataaagttttaagagaattagtgaaacataaactcatagcttgggagcgtaccaaaactgtccagggctatcggttgacaaatgcaggatatgattacctagctttgaaaacactttcttctaggcaagtagttgagtgtgttggaaaccagatgggtgttggcaaagaatcagatatttacattgttgcaaatgaagaaggacaacaatttgcattaaagcttcacagactaggaagaacctcgtttcgaaatttgaaaaacaaacgcgattatcataaacataggcacaatgtgtcttggctttatttatctcgtctctctgccatgaaggaatttgcctatatgaaggcattgtatgagaggaaatttccagttccaaagccaattgattacaatcgtcatgcagtggtcatggaactcatanatggttatccactatgtcagatacaccatgttgaagatcctgcatcagtatatgatgaagctatggaactaattgtcaaacttgcaaatcatgggctgattcatggagattttaatgaaattaatctcattttggatgaaagtgaccatatcaccatggattgattttccacagagggtttcaacttctcatcccaatgctgagtggtattttgacagagatgttaaatgcattaaagatttctttatgaaacgtttcagctacgaaagtgagctttttccaacttttaaggatatcaggagagaagacactcttgatgtggaggtttctgccagtggctacacaaaggaaatgcaggcagatgatgaactgcttcatccattaggtccagatgataaaaatattgaaacaaaagagggatctgaattctcattttcagatggagaagtggcagaaaaagcagaggtttacaggtcagaaaatgaaagtgaacggaactgtctagaagaatcagagggctgctattgcagatcatctggagaccctgaacaaataaaggaagacagtttatcagaagagagtgctgatgcacggagttttgaaatgactgaattcaatcaagctttagaagaaataaaagggcaggttgttgaaaacaactctgtaactgaattttctgagggagaaaaacaaaactggaaaattacaacaggccaagatggtccagagaggttcaaggaggagtcccctgctggctctgacgagtatgaagatgaatgccctcatctaattgccttgtcgtcattaaatagagaattcaggcctttcagagatgaagaaaatgtgggagctatgaatcagtatagaacaagaactctgagtatcacttcttcaggcagtgctgtaagctgttcaacaattcctccagaactggtgaaacagaaggtgaaacgtcagttgacaaaacagcaaaaatcagctgtcagacgtcgattgcaganaggagaagcaaatatatttaccaagcaacgtagggaaaacatgcaaaatatcaaatcaagtttggaagcagctagcttnttggggagnaataatatatttaggatccttggatatggtttaatatatttttttaaagttactggtnnnnnnnnnnnnnnnnnnnnnnnnnnnnnnnnnnnngagccaaagcctaatcataatatttaataaaataaaacccctcttttccatcttatt

SEQ ID NO: 331 - DNA, 1544 bp, Homo Sapiens
  misc_feature (676)..(691): n is a, c, g, or t
  misc_feature (714)..(904): n is a, c, g, or t
  misc_feature (1233)..(1293): n is a, c, g, or t
gggctctggcgatcgaggggtcctagtacaccgcaatcatgtctattatgtcctataacggaggggccgtcatggccatgaaggggaagaactgtgtggccatcgctgcagacaggcgcttcgggatccaggcccagatggtgaccacggacttccagaagatctttcccatgggtgaccggctgtacatcggtctggccgggctcgccactgacgtccagacagttgcccagcgcctcaagttccggctgaacctgtatgagttgaaggaaggtcggcagatcaaaccttataccctcatgagcatggtggccaacctcttgtatgagaaacggtttggcccttactacactgagccagtcattgccgggttggacccgaagacctttaagcccttcatttgctctctagacctcatcggctgccccatggtgactgatgactttgtggtcagtggcacctgcgccgaacaaatgtacggaatgtgtgagtccctctgggagcccaacatggatccggatcacctgtttgaaaccatctcccaagccatgctgaatgctgtggaccgggatgcagtgtcaggcatgggagtcattgtccacatcatcgagaaggacaaaatcaccaccaggacactgaaggcccgaatggactaaccctgttcccagagcccacnnnnnnnnnnnnnnnngaaataaaatagcctgtctttcnnnnnnnnnnnnnnnnnnnnnnnnnnnnnnnnnnnnnnnnnnnnnnnnnnnnnnnnnnnnnnnnnnnnnnnnnnnnnnnnnnnnnnnnnnnnnnnnnnnnnnnnnnnnnnnnnnnnnnnnnnnnnnnnnnnnnnnnnnnnnnnnnnnnnnnnnnnnnnnnnnnnnnnnnnnnnnnnnnnnnnnnnnnnnnnggcaagcgaccacggagaccaacaacaaacgaaaacagcgcccgggggaccggcgaacccgcgcgcggacaaactcacgctctaaaaaccccgagcgcgggagaggggcgaccgcgggcgcgcagaagaccaacaacccaacccagatgccctgcgtactcctccgcccctttttcccagaatttgggtgcaggcgctccccaacacgaacaaagcaccggtgtggggccaaaccctcgatcgcccctatcaaccttatccgcctgagaaatcgtccacaaactccattttttgcaccctctccgtccaggggggggccatttagggannnnnnnnnnnnnnnnnnnnnnnnnnnnnnnnnnnnnnnnnnnnnnnnnnnnnnnnnnnnnttgtgtggggttattctctccacacacaccttttgtgggcacgtagcgaaaaaataaccctggtctctgttaccgctggctggcacttacttaccctttttccgcgcctttttatcacccacctctggggcgtgagaaattaggtccacccggatttattaccccgcccgccgagggactatagaccaatacggtggggggtgacatacaagaatcttccttacacatcgttgttgggtgcccattgttcc

SEQ ID NO: 332 - DNA, 1178 bp, Homo Sapiens
gctcctgcgatatgtgtgagctggcccgcaacagcgtgctcatgagcggcttctcgcacaaggtaaagagccactggctgggacccaactataccaaggaaggccctgaggggaatgacatccgccggaccaatgtgccagacatccgcgtgggctaccgctacgagaccctgtgccaggagctggcgctcatcacgcaggcagtccagagtgagatgctggagaccattccagaggaggcgggtatcaccatgagcccagggcctcaatgagcctggtccatgaagtgcccaccacatcgcagcacttttaccacgttttgccctcagaccccgcccatgctgtgtggtctctgcatgtctccattcttctctgtctctgtcttgcatgtctcctaccatgtcactgtccctgggccacccagtgaaagcaaagcctgggaatctgctcattgttgtttgggctcaggtattgagcctgatggcccaggtattgagggcctcccctgctggtggccctgtcctgggatcctcaggaagcctgactgtcctatgggcttctccagtgtccacaggggcttgggatggttgtggggggctggcccctctagcctttccggtccttcctgggcaaatctaagccttggccagggccgaagtttaggcccctgtcttgttcatgtagccgaggggcaggcgggggacctctacacctctgctgtgggcacggggctgctgagggtctgtggaactccagcagctctgcactgggtagagctgggcctagagctcagtcacaggcctgggcttcctggcctgagtgggtagacgcaggcggcagaggtgctggaccacatctccgccaagtcactgcccagcagccttctccgtcctgtccccagcccacgtgctccttgggtgtcagcttcctgtgcctctgtgggagagggcagctgccttgtgttatgtctggggccacagttgctgcaaagtcctggatctgccactcaaccccgggagtggtgttcccagtgtggctcccagagctttgaccagattgtgatcccagctggcccctatgttgtgttctggactgaggcctttgctgtgaactgcagtgtttcatacgaaccatctttcctagtgcatgagaaataaagattatttaagtaatgaaaa

SEQ ID NO: 333 - DNA, 546 bp, Homo Sapiens
tcagtcccagcagttcccttcgtgcgcggggggcggcgagggtcttcagcagtcgggagaggcccttgacggcgccatgtcggcgggcggtccatgcccagcagcagccggagggggcccagggggcgcctcctgctccgtgggggcccctggcggggtatccatgttccggtggctggaggtgctggagaaggagttcgacaaagcttttgtggatgtggatctgctcctgggagagatcgatccagaccaagcggacatcacttatgaggggcgacagaagatgaccagcctgagctcctgctttgcacagctttgccacaaagcccagtctgtgtctcaaatcaaccacaagctggaggcacagttggtggatctgaaatctgaactgacagaaacccaagcagagaaagttgttttggagaaagaagtacatgatcagcttttacagctgcactctattcagctgcagcttcatgctaaaactggtcaaagtgctgactctggtaccattaaggcaaaattggaaagagagcttgaggcaaa

SEQ ID NO: 334 - DNA, 425 bp, Homo Sapiens
ggaggctggctgggcctctgtccagtccccagatggataaactgccttttctcacatcccctcttggtgcctgatcttctcttcccccggggccagacccactgtgctgttttctgtcagtctgtggcacagcaccaagctctgccagcaccagtccctgacagggctaggaggacagcctggtcagcagggctgcagtcccccagtgccgtgtttcgggggtcaagggatgtaagtggagtcattgcacagagacagaccagtcaggagaaggagctggaatctggcctcttgtcctaacctcaggagccccctcccatcctctccccaccctccctatcggggtacttcactgtttcttttctacttgtgtatactcgagaaagggaagatggttaataaaagggatttgtgctgctgaaaaa

SEQ ID NO: 335 - DNA, 230 bp, Homo Sapiens
  misc_feature (27)..(28): n is a, c, g, or t
taggttcatgctgcatctcttgatctnntcaggcaggaaaaggtctttcctgctccccttcctcctggcacatgacaaaatcctagtgccttaaggtctgcaggaggagagagtttatatagtgttttccagttcaagttccttatcatataatcatactccccccacctgcatctcctttgttacactgtgcacatattaaacatcacaataaagtacgtgcatcctgc

SEQ ID NO: 336 - DNA, 415 bp, Homo Sapiens
ggatgcttggtgaacataacaccacttataatgaacatccctggttcctatattttgggctatgtgggtaggaattgttacttgttactgcagcagcagccctagaaagtaagcccagggcttcagatctaagttagtccaaaagctaaatgatttaaagtcaagttgtaatgctaggcataagcactctatatatacattaaattataggccgagcaattagggaatgtttctgaaacattaaacttgtatttatgtcactaaaattctaacacaaacttaaaaaatgtgtctcatacatatgctgtactaggcttcatcatgcatttctaaatttgtgtatgatttgaatatatgaaagaatttatacaagagtgttatttaaaattattaaaaataaatgtatataatttgt

SEQ ID NO: 337 - DNA, 756 bp, Homo Sapiens
atccagctcctggagggcaaccctgggccacctgcggacccggatggcggccccaggccacaagccgaccggaagttccaggagagggaggtgccatgccacaggccctcacctggggctctgtggctccaggtggctgtgacaggggtgctggtagtcacactcctggtggtgctgtaccggcggcgtctgcactcagtgaagccctgggctcttcccaccacccatctgttccgttcctgcagtacacctggcccctctccgaagccccttgtccctttcttggggattgtggaggctgggtcagaggggagttaagggactgcaggcctggcagcaggacatgccttggctgaaccaagtcctgagagcagcatctctgtccccacggtgccttgcgtgggtccccgtccttggctatctgagccctgggctgcccccagtgctccagaccttccccactggcaatccaggttatcatccatgtcctccagaggagcttcctcctccaggcctcagccctgttggcccaggtggagcaggagggaccactggaacatgtggtgcttgggaatgcctctcctgtagcattggtccctgaaggcctcagggcaggtatgtggtgtgtgggcgactccacaagacctgcctcccatcctggcagcccagcctgagaccgttgcattgacggcaggcaggagcggcagggtggctgctctccaggagcccaactgccttgagttcctgccccactgg

SEQ ID NO: 338 - DNA, 513 bp, Homo Sapiens
taaagtgcgaacgtctgagacctcggatccggcgtcggggcctagggcccccagccgccgctccagctcgtcgacggattccgcggacgccagccctgtgcacgccgctggccctgccggcgcctaccactcggcgtcggcagagtccgtggacgagattccagtggcgcagacgcgcctgggcagcgccgctctggccgccccgcggggccggggccgacagcccacgctggcgcggcaggcgcgtgcgcccgccgttttcgtgagcccgagcagcggcgagcccagggcgccgggcggccgggaggctggtctggcttagctgggccgagaggccggagggccgagttagagcggccggcctgactctctatgcaacaccccatccttgccgcaccgagtgcactttaggggcccctacggccggcgggatcggcctccctcccccacgactcagcaatacccgcaacaccggctgtgatgctccaataaacttttttatgcttttgcgga

SEQ ID NO: 339 - DNA, 566 bp, Homo Sapiens
  misc_feature (252)..(308): n is a, c, g, or t
ttaaaggctgggcgtatcccttccctgcagctgtgcttccgtagcattaggattaaaccgcagacactgagaagagagcttcctccctcctggggctgttggcgagctgccctgttttgaaaaatagggcatgtctcctgtgaatgcgaattgcgagggttgccaaagcctcccttccaagaaacttgcttaggtgtctggtgtccacagaccagactcttctcccgacagggacaaaaattcttgcctgcnnnnnnnnnnnnnnnnnnnnnnnnnnnnnnnnnnnnnnnnnnnnnnnnnnnnnnnnntttaggtatgatgccccccaaaaaactaagcaagattaacttgggacaggcagttctaactgggaagcctgagctcacaggctgtttggattactttccaattgtgtttcaaagatgtttagacttttcccaaggccagctgaatccttataatcagcccaaaagttcctttctgtttctgtctgtcccctttgagggtgttgactcagagaacctggggcaatatgagatgttaaaataaaaatagcgtccaacgtc

SEQ ID NO: 340 - DNA, 1168 bp, Homo Sapiens
  misc_feature (1011)..(1021): n is a, c, g, or t
gagactccagcgcgtgagaagcacggggcagaaaccgacctccaagaccttcgccatgggacaggaacgggcacacagcttctgagatccatacaggagaagaaagatcggtagtcctctcctgcgggccttcctgtctcctgggctggggactccagggtgtgcccagggagactgggcagcacaccgagcgagaacagaccctgtggcgccccgtgccctggctcaccccagcccatttgctgctcccctagagacctcttgtacaggaagttgcccaccaggtggatggggcccctccattgccctaggctggttggtaaaagagaggaggtcaacactccagctctagccacctctgcctcttgggtcagcacctcctggactgtgtcccagccagcaccaggccagcatgcctcatcccgtgccattcagggctgttccagagattcgatcctcttaaggcattatcagtgagcaaatgtgaaggaaatggtgtctggaagaaagttctggttcacatgccgagtagctaagtctttctgcaaacaacctcccttccccccgtcgagtcatttggtgactttgatagggggagttctggttatgtcaaggctctggagacaggaagggcctttggccgcattggagtagttgacctgccttttgctgactccgggacgagccagtcctaggctgcctccgggagcacttgaggtatcccgcaggccatgaggacccactgggcagctcctggacagcctcttggctccagcccccacccgaaagtggacactggctccgccctggccacctggggactggcactgtggtgcacagtggcccaatgtggccaacggaaatttttataaaagacaaaatgtatatcaataaaacattttataacttgcacgccaggaaggcttcatgccaaaaaccaacaccgcccccgccatccctcctcaccgaccatcactcactccttcccctttgtccacccttcatgggcgnnnnnnnnnnnaagagaaacccctccaggggcgccaaagtttaacgcggacccccctttctttggtaaaagaggcgccctttataagggggccgtcatctaaacctatggccccgtgccccccatttttttacccaccccgggatacgggaaaaattc

SEQ ID NO: 341 - DNA, 450 bp, Homo Sapiens
  misc_feature (18)..(18): n is a, c, g, or t
  misc_feature (33)..(33): n is a, c, g, or t
  misc_feature (51)..(51): n is a, c, g, or t
  misc_feature (63)..(63): n is a, c, g, or t
  misc_feature (420)..(420): n is a, c, g, or t
ggcctggtgcgagtgccncctgtataccctgcngggatggtgtaggaggcnctgcctaccttncctggagaattccctttattggctctgcgcgggagcagttacttgaagctctccaggacttgggactgctgcagtctggctctatttcaggccttaagattccagctcatcactagaggcagccctccatggacccatgaaaactgagatgaggaccttggtactagggagggagggaaggacgtgggaatgttttcttattggatctgagagatgatacatgataccagatgaaaagaaggagaagtgtgtaccatatgttttgagcagaggaccctccaacttatggcatcaggggcaaaaagtcacagcttatcccaggcaccctggcaggttctcagagcctgcctcctcccngtttatatgcgtacagcctggtaaccccca

SEQ ID NO: 342 - DNA, 516 bp, Homo Sapiens
  misc_feature (107)..(126): n is a, c, g, or t
aaaaaacccagctgtttccgccagggggaaccattcatattccccttgtggccccttatcgtggaagctttaaaaataaaaaacccctctggttttccacacccttnnnnnnnnnnnnnnnnnnnncaaacaaacgcacacacacacgtatatctatttatgcacatattggggccaatttgatttgctagtattagacaataaactgtacaaggaaatttattatctcagtgtctttatttagcataaaagtggccttagaagaagggtgaaggttagatagatggaatctctgtcaggggacaaacagctgtagcatccccttagcatctttctagccaatgagccccctccccaggaggagggatggcctgactgaaacaggtgagagtttgcttccccctttcagcagcattctttttagatttaggtactgaagaatcccagtgagttctgcatttgtatcttgcaagtttgtataaacccaatacaggaaataaaatgaatggtttgtat

SEQ ID NO: 343 - DNA, 1076 bp, Homo Sapiens
  misc_feature (861)..(861): n is a, c, g, or t
  misc_feature (866)..(891): n is a, c, g, or t
gggggcgaaggcggcggctgtcagagctggagggccgggcaccgcggccatggagggtcaacgctggctgccgctggaggccaatcccgaggtcaccaaccagtttcttaaacaattaggtctacatcctaactggcaattcgttgatgtatatggaatggatcctgaactccttagcatggtaccaagaccagtctgtgcagtcttacttctctttcctattacagaaaagtatgaagtattcagaacagaagaggaagaaaaaataaaatctcagggacaagatgttacatcatcagtatatttcatgaagcaaacaatcagcaatgcctgtggaacaattggactgattcatgctattgcaaacaataaagacaagatgcactttgaatctggatcaaccttgaaaaaattcctggaggaatctgtgtcaatgagccctgaagaacgagccagatacctggagaactatgatgccatccgagttactcatgagaccagtgcccatgaaggtcagactgaggcaccaagtatagatgagaaagtagatcttcattttattgcattagttcatgtagatgggcatctctatgaattagatgggcggaagccatttccaattaaccatggtgaaactagtgatgaaactttattagaggatgccatagaagtttgcaagaagtttatggagcgcgaccctgatgaactaagatttaatgcgattgctctttctgcagcatagcttgtcaataatggaaacaccaaaaactgtattatttgcaactaaattttctctgccatacactaactcaaaaattttgatattttcattaacttgatgattaaactttatgtgagttngaaannnnnnnnnnnnnnnnnnnnnnnnnncttgtcgggccggctcggcctcgagagcttcagacatcgttgcgcgcggccatagtagtgactgtcaagtgtttctagagactggctgacaggctggatctcacataaaacgcggggacgacgttgacatcaagagttagctatgactcacgacacagcgatatagcgcgccttcaacggatata

SEQ ID NO: 344 - DNA, 1325 bp, Homo Sapiens
  misc_feature (1244)..(1278): n is a, c, g, or t
ggctctgtatgagcttgcaggaggaaccaacttcagcgacacagttcaggctgatccccaaacggttacccgcctgctctatgggttcctgattaaagccaacaactcatggttccagtctatcctcaggcaggacctaaggtcctacttgggtgacgggcctcttcaacattacatcgctgtctccagccccaccaacaccacttatgttgtacagtatgccttggcaaatttgactggcacagtggtcaacctcacccgagagcagtgccaggatccaagtaaagtcccaagtgaaaacaaggatctgtatgagtactcatgggtccagggccctttgcattctaatgagacggaccgactcccccggtgtgtgcgttctactgcacgattagccagggccttgtctcctgcctttgaactgagtcagtggagctctactgaatactctacatggactgagagccgctggaaagatatccgtgcccggatatttctcatcgccagcaaagagcttgagttgatcaccctgacagtgggcttcggcatcctcatcttctccctcatcgtcacctactgcatcaatgccaaagctgatgtccttttcattgctccccgggagccaggagctgtgtcatactgaggaggaccccagcttttcttgccagctcagcagttcacttcctagagcatctgtcccactgggacacaaccactaatttgtcactggaacctccctgggcctgtctcagattgggattaacataaaagagtggaactatccaaaagagacagggagaaataaataaattgcctcccttcctccgctcccctttcccatcaccccttccccatttcctcttccttctctactcatgccagattttgggattacaaatagaagcttcttgctcctgtttaactccctagttacccaccctaatttgcccttcaggacccttctactttttccttcctgccctgtacctctctctgctcctcacccccacccctgtacccagccaccttcctgactgggaaggacataaaaggtttaatgtcagggtcaaactacattgagcccctgaggacaggggcatctctgggctgagcctactgtctccttcccactgtcctttctccaggccctcagatggcacattagggtgggcgtgctgcgggtgggtatcccacctccagcccacagtgctcagttgtactttttattaagctgtaatatctannnnnnnnnnnnnnnnnnnnnnnnnnnnnnnnnnnaaatatatatataatgagtttcattaaaatagattatcccacaaaaa

SEQ ID NO: 345 - DNA, 1060 bp, Homo Sapiens
gggactcacgcttggtgcgtgcgcggcgactgcgacgggcagtggcagtcatggcggctcagtgcgtgaggttggcgcggcgcagtcttcctgctttggcgttgtctctcaggccatctccccggttgttgtgcacagccacgaaacaaaagaacagtggccagaacctggaagaggacatgggtcagagtgaacagaaggcagatcctcctgctacagagaagaccctcctggaagagaaggtcaagttggaggaacagctgaaggagactgtggaaaaatataaacgagctttggcagacactgagaacttacggcagaggagccagaaattggtggaggaggcaaaattatacggcattcaagccttctgcaaggacttgttggaggtggcagacgttctggagaaggcaacacagtgtgttccaaaagaagaaattaaagacgataaccctcacctgaagaacctctatgaggggctggtcatgactgaagtccagatccagaaggtgttcacaaagcatggcttgctcaagttgaaccctgtcggagccaagttcgacccttatgaacatgaggccttgttccacacaccggttgaggggaaggagccaggcacagtggccctagttagcaaagtggggtacaagctgcatgggcgcactctgagacccgccctggtgggggtggtgaaggaagcttagctgctgttgatggggtgggtgtttttaaactcacttgatgtaactctcaaggctggttcattgtttctcatctatgagtacgtgtgaccttttcccaaaccttattggaaaccttaagtaaccagtggctaaacagaaaagccggttgcccaactgcattaatgaactctaattcgggagtctgttcccttttagtgccacgcggttgaataattccacatacttttcagaagagctcagcagggcccctgcctggtctccccgagcatcatggagtaacggggtctgctcaaactcctgctgacaccaaaagtatttttaaacaaataaaaggtccttggggaaattccgggttg

SEQ ID NO: 346 - DNA, 884 bp, Homo Sapiens
tcaagtttaatttttaatttattagaacccagtaaatgatgattttaaaagcagagtttccatcaaattaacacttaattcagggcaaaaatacatttaaaaaacctaaatcttaaggcagaagtaaaacattataaaaacagtatgtctaatacagactgtaaaatgtcagatttttaagagattcacatagtattttatagcactaaaatattaatacagtcagaaatattatcaattggtccaagatttctgtttataaaatgtctagactgctaattgaagaaatgttgctgtataagtaatagctacaatacaaccaaccaagtgattgtttttatgacaaaagaactaaggcaggtaattgcatggtttccatttgtaaagcttttgcagtattaaaatataaagcattactaggggtattttttgattcatctccctaccctaatgcccccgaaatgtacatcacttccctttaactctattttaaaattctgtgaaaccaccatacctattcattgtaggcctgaccctataaaggcatgaattgtttaatttgatatggtagaaaaacaattttagtaaactactacatcttttcctagtcattgagcaatttcaaacagaagtcttaagaatttttgcacctcagcaagtgaacaacctgtttctttaccactataagtttgaattttgcctagaatgtgttagtacacaggggaaaacacatttcatgtttatgtgcaattaacagtagcccttctgaaaaacagggttaacaatcttaaatttccccttgtgatcaaaacattttgtttttagggggcaggataagatttaaaaggggttctctgcgtcatctgtgtaccctctagagtcgg

SEQ ID NO: 347 - DNA, 1129 bp, Homo Sapiens
  misc_feature (599)..(599): n is a, c, g, or t
  misc_feature (938)..(957): n is a, c, g, or t
ggggcaaaggcttaagggtgtaacctcagaatggggccctgaatcagctgtgggcgagctcctagagtatcttaattcctgcttcatctctttccattttgcagttgggcaaactgcggctcagaaagataaagaacttctccggagcgaaaaagctgctaagaatgtatccaaaactccgcacgaagtctggaacgtttttttcttagagttccagaattgtgactgaagtgtacccagagacacaaagaaatacagaagtccagaatgatcaaatgagatcactacccaatgaaatgataggccgaggagccagaaattgtcctactacctgctttccaggtccagattccacgagagccttctgggctcccaccagagaccctcagtgaagactctgttgaagactttaagaccatgctagaaagcctcccggcagaggttcaggaagttctgctatgaggatgcagctggccccagggatgtcctcaggcatctctaggaccttgctggacggtggtggctgagacctgatatccacacaaaggagcagactgtggaaatgctggtgcaggagcaattccaggctgtcctgcccngagagctcagagctcaagcacagagatgtcatcctggaatcagtatcactggctaagtcttgctgcttgcttcttgctcagcctggcatatgagaagtcaaccaagcattctctttggatgcaagatccaactgcacccaaggggaaatctgaacttccactttctttgagcttgtctttggttgtaataagaatccatcaaaacccatgtctggatctctctttggctgaggcagctttatttcctacagaaagagtttctctgtcctcttgttaggacaatcagcctgctgctttgggcttttccaagagcctatttttcatctgctggatgcctcnnnnnnnnnnnnnnnnnnnngcactgtgtgacatgctttaatatatatattttttatggatccaaagaggtaatcaactttaactttcagaattcatgaatcttggtttggtggcatgaatgaaaggttatgtaaccccaccagtaactcatttggggtgcccttgaaatattaaagtttggtcctcaatta

SEQ ID NO: 348 - DNA, 544 bp, Homo Sapiens
gggagaaaccagagactgtagcaactctggcagggagaagctgtctctgatggcctgaagctgtgggcagctggccaagcctaaccgctataaaaaggagctgcctctcagccctgcatgtctcttgtcagctgtctttcagaagacctggtggggcaagtccgtgggcatcatgttgaccgagctggagaaagccttgaactctatcatcgacgtctaccacaagtactccctgataaaggggaatttccatgccgtctacagggatgacctgaagaaattgctagagaccgagtgtcctcagtatatcaggaaaaagggtgcagacgtctggttcaaagagttggatatcaacactgatggtgcagttaacttccaggagttcctcattctggtgataaagatgggcgtggcagcccacaaaaaaagccatgaagaaagccacaaagagtagctgagttactgggcccagaggctgggcccctggacatgtacctgcagaataataaagtcatcaatacctcaaaaagaaaatcacctaacg

SEQ ID NO: 349 - DNA, 244 bp, Homo Sapiens
  misc_feature (99)..(137): n is a, c, g, or t
tttaaagaccaatttatgggagaattgcacacagatgtgaaatgaatgtaatctaatagaagcctaatcagcccaccatgttctccactgaaaaatccnnnnnnnnnnnnnnnnnnnnnnnnnnnnnnnnnnnnnnngcactggacggtgacgtcagccatgtacaggatccacaggggtggtgtcaaatgctattgaaattgtgttgaattgtatgctttttcacttttgataaataaacatg

SEQ ID NO: 350 - DNA, 551 bp, Homo Sapiens
ggggaggctaaagaactttgggatcagtttcacaagcggggcaccgagatggtcattaccaagtcgggaaggcgaatgtttcctccatttaaagtgagatgttctgggctggataaaaaagccaaatacattttattgatggacataatagctgctgataactgtcgttataaatttcacaattctcggtggatggtggctggtaaggccgaccccgaaatgccaaagaggatgtacattcacccggacagccccgagactggggaacagtggatgtccaaagtcgtcactttccacaaactgaaactcaccaacaacatttcagacaaacatggatttactatattgaactccatgcacaaataccagccccggttccacattgtaagagccaatgacatcttgaaactcccttatagtacatttcggacatacttgttccccgaaactgaattcatcgctgtgactgcataccagaatgataagataacccagttaaaaatagacaacaacccttttgcaaaaggtttccgggacactggaaatggccg

SEQ ID NO: 351 - DNA, 962 bp, Homo Sapiens
cctgttgtgaggttccctatgggcctttcttggtctcttcccttttgggctggagtaaccacattgggccgggctggctgcccctctactctaggactgcactctttcgtcgaggaatatgcaccgccgtcttccagttggaccagctacttgtggggctccctcccattctgggctcttgcactagtggcgtacctgtggctatctcccaagtaagccgggggggcacgagaatcagccctgccctgccaagcttcccctcttcatcctgccttagcatactctcttccccagtcacccattgtccgagccttctttgggtcccagaataacttctgtgccttcaatctgacgttcggggcttccacaggcctggctattgggaccaacactacctcagctggtcgatgctcctgggtgtgggcttccctccagtggacggcttgtccccactagtcctgggcatcatggcagtggccctgggtgccccagggctcatgctgctagggggcggcttggttctgctgctgcaccacaagaagtactcagagtaccagtccataaattaaggcccgctctctggagggaaggacattactgaacctgtcttgctgtgcctcgaaactctggaggttggagcatcaagttccagccggccccttcactcccccatcttgcttttctgtggaacctcagaggccagcctcgacttcctggagacccccaggtggggcttccttcatactttgttgggggactttggaggcgggcaggggacagggctattgataaggtccccttggtgttgccttcttgcatctccacacatttcccttggatgggacttgcaggcctaaatgagaggcattctgactggttggctgccctggaaggcaagaaaatagatttattttttttcacagggcaacccaactacaccaactccgccacaaacaaggggg

SEQ ID NO: 352 - DNA, 935 bp, Homo Sapiens
  misc_feature (650)..(660): n is a, c, g, or t
  misc_feature (819)..(870): n is a, c, g, or t
atacttatttctgccgacttttgtgggggttttccccaaagcccatttttatttcccaaaagttccatggaattttattccataaaagttaaaaattgggttttaaaaaaaaccggggaaccaagaggagccaggtgagaaaaccgagaaaaagccagggctttcgatattacacctaaaaacacagaagatgcccactttatgaataagcagaattaactacattcttaaaatagttttagtgcattgcattttagaaaagggaaactcccccacccccaagaaaaggttcctgcaacactgaacagtttgtgtgactattctaatgtaaccacctgtctgctaccaacccctctacatcgagaacaatgagatcttgtgtcatgggctgcagttgccccatcaacctctaatggtgaatctggtaaaaacaaagcattctggtttctaaacttgtaagtaaactgcatcagccttaaggctatttcccatcttcatggacagttcttgtgcctgctgatttgtgacaataaaagtcaaacttcaatctggtcgttttggtattaagattaaattaaacattaatggtttcttccaaaaacatataaactaaatcacctctcaatgcattaagaacaatgaggtaggcnnnnnnnnnnntaaacatgtggtttgaatttttttctttcttctgcaagtgcagactgtggtaaaacttttgttgcacgtctaggtttaaacaaaaattaaacctttaactgaggcagtgctaatactgtcacacgacaaagttctggccattatacaaaatgcacacgnnnnnnnnnnnnnnnnnnnnnnnnnnnnnnnnnnnnnnnnnnnnnnnnnnnnagaaccatctgcacatgatttaggcaacctggtacacagaaaaatgactgagttcttggccagga

SEQ ID NO: 353 - DNA, 492 bp, Homo Sapiens
  misc_feature (405)..(405): n is a, c, g, or t
ggggacttctatttataagttacctgtatttatatttatatgcccgctctcatggtgaaggctggacaaggtggtcctctggcccctccttcttacctcagatgcctgaacagaacaaggcaaacccgtagcagcctctcaggagctgacaggtcctctttcggggctcaggagggtgggcacacacccagtcggcctgcagagtaagcttattacccacaactgtgcccgctttgtgcttctaaggtgcacacctagcctaggtgagacactgtcagccaggcaaccaccgacacacgccccttctcaaagccagaggtgagtggggcaggtgcccggggctgggtgagtggaattaggacacacacaggcttgggcgttcaagttcatttagttgcatgcatncggcttggacacaaataaaagccacaatggtctatcaacatagaacacaatcacaagaaacaatcaaaacaaaaatccaaaagggcg

SEQ ID NO: 354 - DNA, 684 bp, Homo Sapiens
  misc_feature (436)..(446): n is a, c, g, or t
cgatagtgactatagaccacgtggttaaaaaaagcaggtggtaccggtcggaatcccgggatatgtcgaccacgcgtccgaatctgcaaggatgatcaggagcagcaattagaatttgtggcggtatatactgctccaataactgaaatcagagatactggtgtaatggtaaaattatatccaaatatgactgcggtactgcttcataacacacaacttgatcaacgaaagattaaacatcctactgccctaggattagaagttggccaagaaattcaggtgaaatactttggacgtgacccagccgatggaagaatgaggctttctcgaaaagtgcttcagtcgccagctacaaccgtggtcagaactttgaatgacagaagtagtattgtaatgggagaacctatttcacagtcatcatctaattctcagtgannnnnnnnnnnaaagagaattctagaattctattttgtctagggtgatgtgctgtagagcaacattttagtagtatcttccattgtgtagatttctatataatataaatacattttaattatttgtactaaaatgctcatttacatgtgccatttttttaattcgagtaacccatatttgtttaattgtatttacattataaatcaagaaatatttattattaaaagtaagtcatttatacatcttaga

SEQ ID NO: 355 - DNA, 817 bp, Homo Sapiens
  misc_feature (172)..(175): n is a, c, g, or t
  misc_feature (179)..(179): n is a, c, g, or t
  misc_feature (182)..(186): n is a, c, g, or t
  misc_feature (188)..(193): n is a, c, g, or t
  misc_feature (196)..(197): n is a, c, g, or t
aaattccccaaggcccccttagggtccattggccccggggttttttcctaagggaaacccaggctattggcccccctgttccacctttaccttactggggcccccgcggcgcccaaaccgaatgggtcctagaaaggcctctccgaggggcccgaggccggccgaccaggtnnnntttnttnnnnntnnnnnnttnntttgagttaaagaaagctgaatttattaaacttatggtatatgtttaggtatactaggtagtgacttaaatttcttttatttacttgtgcttctgtttgggggcactttgattgaagagaaattcaattcacaggattacatcttgctaaagcattccttagcattggtccaaacttgaattccctttttgcacatactgatctgcatgactgcatagcttatgagggcctcctttaagtctcggttcttttgttctttgaagcgttcaatatcagcccatgcgtttttcacaaattctctgccttccagatttttagactttagctggtggtctccttcatttatttggtgcttctagcacctttattctgggcttctctctgctctggagtttctggaccaaagagctgggtagtcattcccttcaaagagaatgttctcacagtcccagttaccagttcctcacactgctgcttctgggatgctaagtcctgagcagccatctccaagtcatactgcataagttcatgtttcctgcacacagcccgcaatgcttctgcataaaaaagatactcttttaactgatctgcataatgttcttcatcttccaaaatatccc

SEQ ID NO: 356 - DNA, 638 bp, Homo Sapiens
atttacagaatcaaatcaacacccttgaaatcttaattgaagatgacaagcagaagagtattcaaatagaacttctcaagcacgaaaaagtccagcttatttctgagctagcagccaaggaatcactaatatctggtttaaggacagaaagaaaagtatggggacatgagctggcacaacaaggatcttctctagcccaaaatcgtggaaaattggaggctcaaattgagagtttatctagagagaatgaatgtctgcgaaagacaaatgaaagtgatagtgatgcattaagaataaagtgcaaaatcatagacgaccaaactgaaactattagaaaattaaaagattgtttacaagaaaaagatgaacacatcaaaagattacaagaaaagatcacagaaatagaaaaatgcactcaagaacaacttgatgaaaaatcttcacaactggatgaggtacttgagaagttggaaaggcacaatgaaagaaaagaaaaactaaaacaacagttgaaaggaaaggaagtagaacttgaagaaatcagaaaagcttacagtacactgaatcggaagtggcatgataaaggagaacttctatgtcatcttgaaacacaagtaaaagaagtgaaagaaaaattt

SEQ ID NO: 357 - DNA, 437 bp, Homo Sapiens
aattcaaaataccattgtacagcttatccttctgaaatgatctattccctttgtcttgctattctaactatgtaaattttcctgccagatttaattcacacctatgaaagagggcaacacaacagacattaccactatcagaaaaccactcaagtagggccatcagtatcaccttcaaatgtcatcacaccgttattagtattgctgttatctatgaaacaaaatctaaattattaccagctctgccttccacaactagtgcctccccattcctctcacgtgacaggacgccctgaaatccccgctagccaacaatgctaaatgaaactggcagtcttcccttctcatgtggcatcaggctttttctgtcttgagtaagggctgtctttaccatgcatgattcccaacagcactgctcttgatccctgagtggagac

SEQ ID NO: 358 - DNA, 799 bp, Homo Sapiens
tgttcgttggattctagtcatgattgccctgggcatctcaggatctctcttggcaatgacattttggccagctgttcgtgaaggataaccgacgcgttgcattggccacaattgtgacaattgtgttgctccatatgctgctttctgtgggctgcttggcatacttgttttgatgcaccagagatggaccatctcccaacaactacagctactccaaaccaaacagttgctgcagccaagtccagctaatgaggaaattctcttttgtttatttggagcatggttctttgggaagtggcatccactgcaggaaagcagaatgagcagagccagcagaactgatggagtggcacaaattcccagtgtctggatggtgccacactggcgcctaatcacccgtttaacaagcagaaattaaatgttgctcagcacatgtgtctttcagctcttccttttcacccatggatgatcattgcgagcatgcgctgattggactgaaatgccggggaataggttaggcatgctcagtgccgtccctttgccaccacagtcaaatgacatgcttcactgtggtaccttaatacctgaaatagaaccatggaaaattctgatgtcctctctctgaattatgtacagactacctgggggatcctcttctctccaaatgttagccatcctgaagtagccgaacagtagaaactttggtggggattaaccgggagcttgaaaatttgtctttggtaacctgatactggacagctgaactgaatggctgcaaaataaatacctcacatgaaag

SEQ ID NO: 359 - DNA, 600 bp, Homo Sapiens
ctgaatgtaaaggagtaatggaaataaaggaagcatcatctgtgtctgactttaatcaaaatttggaggtcccaaacagaattatcgaaatagcaaataaaactcccaagatcagtcaactttacaagcaagcatctggaacaatggtgtatgggttgtttatgttacaaaagaaaagcgtacacaagaagaacacaatttatgaaatacaggataatacaggatccatggatgtagtggggagtggaaaatggcacaatatcaagtgtgagaaaggagataaacttcgactcttctgccttcaacgtgagaacagttgaccccaagctgaaactggtgtgtggaagtcacagcttcatcaaggtcatcaaggccaagaaaaacaaggaaggaccaatgaatgttaattgaaatatgaaagctgaaatgcaacaaacaacttccgcttaaaacaattaagttgttaataactgtgattttgtaaatttcagtaattcatttaaatgatgtttcagtagatatattctagcatattaagagcttttataactgagttatagattagtttgctttctggaataaaattttcttcttatactc

SEQ ID NO: 360 - DNA, 533 bp, Homo Sapiens
tggaccccaaagggcagcagcagaaccgccagactctcgcataagccttcgagcgcgacacttgtgggcaaataaacgtcattgaaaggcagcccttaggtggggagacgaggttcctgaggcgcagcggccagggggtcatccccgggcagacggtgcccctccaagctgacggcacccccctccaccctccccgcggaacctgccttcaaggctcagtccgcacacaaagaatctggagctgccgaggccactccctaccactcacccatcaatcctccactgggctcaggaaagacgggccattgtagcaaagtagccagtcctgtagccccagctggacctcctggtgaggcagcttgccagatggtggggatcgctcagtcctctggggcagaacagggtgagtggggctgtctccctttgattcacttagccctctttcttctttacacatttgcaaaatgtgacagtagtcatattactattcattctaataacagtccttgctggctattaaacctctatactag

SEQ ID NO: 361 - DNA, 357 bp, Homo Sapiens
ctctgtgagctttttacttgggaaactcgaactgcacattgagggccacactgcctaccccaccctttaagctgccaccgagttgtttgcataccatcgaatgtagccagctcgccaactgaccgccgactgtggctaccaccctgggaaacaaaatgaagcatgtcatagttttccgatgaaagacaatcaaagatgcaaaaggatcacaattgcaacagtgtgagaagcagccagcaaataaccattcactatggagtgggtgacctttcctgcacaaccctcaaagaacttacctcttttagccactccactgtgaaaactagaggcttcaaataaaagctatgctgagaatgg

SEQ ID NO: 362 - DNA, 796 bp, Homo Sapiens
gccataccaaggttattgtcctagttaggaatgtgggacccttacactgggatggggacatctggatcgatactctagaactctagaaaacctggacaccccagccccgccaccctcccccacaccctgaaacctctaagcccactcctccctgttaagggccggtgctttgctcttgtttgaaggtcatgcccaggcctctgccacctccccttaggatctgtgctcaccacccctcctggccgctggaccaagaaggtcagcaggagggtgctgggcctgccagagaagaaagaagatgagctgcctggggggagcaggagtgtgcctgagacaagggcatggccatatggggctctgctatgacctaggactcagcacccttgcagagcccccaggaagcagtgcccgtaggctgccagctcggtcggctctctgaaacttcccaggaagccatggcccacaaggaagagaatagcaacctaggggcaaccgtggcagctctgcaagaagcgaagggaatagagtaccctaggcctttgggaagtgtaagtggaggagtgactgtgaccttgagagagatgttgcgggggttataggtgatacctcggagaaagataatgaaaagctgatcatgactaatcactagaaaagacacgatgtgagatccgttagaggcctccttggcagccaggcaagagggtggacacagctgaagggatcaggcatggggttgttactaaggcttcagagctccaagaaggtagaactttcaacctagccgagagtggaaatg

SEQ ID NO: 363 - DNA, 498 bp, Homo Sapiens
gcagcctgcaggggaaaggcaaactccctccttgcaaggaaaggagatgtccagccaatgatgcccggcttctgaggcccagaggagcaggtgggatgggagcagcccctggggctggtgtcccgaagatgaaatgaagggggctgcctatctcagttggcgggaggtgttagaagtggatgtgcaagaccagccactggaggtagctctctggagtcaaagagaggcctgcttttctaccagacatgggagcagcatgtaggatacaagggcctacccagagaccagagagagtcagcctagtccttgcagcctcaggaagtcctcggcccaagtgagtcctggtccaaggatccccctggagagccgcagttcagtgggctccaccgcagcccctggccacggcctatgccctccctgggcccctgtggggctgggcattgtgtctgacctgtgcatctcccatgggagggctgggcacaggcagtgctatggcct

SEQ ID NO: 364 - DNA, 773 bp, Homo Sapiens
gaatcggccacgaagtgaaagcctaaggctctttgtggctcagcactggccggcacttccaaccctgctgggtgggtccgccagggggcgccgggggcgagaaagcccgtagttcccagccacagtcacccaccgggggccctggaggcaccgctcggcacccatcacccctgggcctggccgccctggggcgtggtctccgtccggcgcaaacccaagtacttgggctagggccagagggaagctgagtccccctcttcaaatagtggtaaaacaggcaaaaccgaaccggggttaaatttcggagctcgcccagggtgagggcggggctcgacgacctaggacgttcgagtgcggccgggtgtcgccaagggtcggtttaccccatcgcctcagaaattccgacgaggccctttgggctgcacaaccttgggaatccccaacgggcggccccgaatctgcgccgattttcccaagccgtacttcgggcccaaggcgttttcattgccgccttcccggaggatgtgtggtgggggtggttccgcccggaccgacgggcggggcccggagcccgttggactcgaagatcaaagaaccgcccctctggacactccaggaaaccgagacgaccacctaatttgtttgttttctgtttcaggccacgtaaactcttagtaaatgcaaatgcgtattttactgaactgcaattgaaagaaccgttatagaaaagaacacaaaatgacagaattattaaaagagaagaaaaacattaa

SEQ ID NO: 365 - DNA, 725 bp, Homo Sapiens
tgaactcaagcttggggcaggacaggtgggggggtgccctttaaggaattttgaagaatggggtagggtcatccattaaggggccatgggcacgttggggtctgtcagccttgccagcaggaagtgccagtgcttcctttactgtgggatgatccagaacagcatctttggaatggggccccacttccatggtcactcaaaggaaggagtttctttactcacccttggccctctgcatttgcacccccgtgtctttctctaggacaagctcccagtgatcactcaagaatctggctctcattctaagaggctgtgctgcccagtatggtggttgtgataaatctaaaccagccctgcatgaaacagagtccaagctgtctcccaacagcctgggttcggtccttggctggcccaggcccagttaagcctgtggccaccaagcagctcatctgagcactttgggatgtattcagcctacgttgccctggaaaaggaagcaggagatgtctccctgtgggaaaggagaagagaagttgtctctgagtcccctgtcaccagttggattcatttcttggaagagccagaatgagccactttgaccaccctcgggtgctatgggtgacacaagagctgtccactgggtgtttgcagaataattacactatcttatgtctggatcctgatgatttcacagctaaatggcaaaaataaaacatgtttcccat

SEQ ID NO: 366 - DNA, 606 bp, Homo Sapiens
ctgcgccctcctgctctttgcagccatgctactgggcaacccaagtctggtcttctctcgtctgagccctgagtactacgacctgcaagagcccacctgcgtgatgaggagaaatcctgcccgtgcccttcccaggagggcccccagggtgacctgttgaccaaaacacaggagctgggccgtgactacaggacctgtctgacgatagtccaaaaactgaagaagatggtggataagcccacccagagaagtgtttccaatgctgcgacccgggtgtgtaggacggggaggtcacgatggcgcgacgtctgcagaaatttcatgaggaggtatcagtctagagttacccagggcctcgtggccggagaaactgcccagcagatctgtgaggacctcaggttgtgtataccttctacaggtcccctctgagccctctcaccttgtcctgtggaagaagcacaggctcctgtcctcagatcccgggaacctcagcaacctctgccggctcctcgcttcctcgatccagaatccactctccagtctccctcccctgactccctctgctgtcctcccctctcacgagaataaagtgtcaagcaagatttt

SEQ ID NO: 367 - DNA, 453 bp, Homo Sapiens
ggaggcaactccaagcctggcccccagctgaagcatggcaatctggctgctctctacagggacccccaagcgctgtgggtggagggcaggggtcgggggggttgaccttcttgggtcttcacactgcctaggccagtctccggtcagactggtgtcaagcaccgtggtgcaaaattcctcttctggcccctccagtacccagagaaactggctgggccattaactgctgcagcaccaagggtggtagaaagagctgtgaagagcccccaaaccagtaccaggacacctgggttctcctgtgacctggggcacagttcttgccctctaggccttgatttccccacctgcaagtggggatgccagccctgctctgcctccttcatgaggctctggaagactggccaaggttgtggaggagcttgtgaacttgattaaagtgtcgtattttggaaa

SEQ ID NO: 368 - DNA, 759 bp, Homo Sapiens
ggaggccagacagagggacgtggtcactctctgaaaagttcaacttgagagacaaaatgcagtggacctccctcctgctgctggcagggctcttctccctctcccaggcccagtatgaagatgacactcattggtggttccactacctccgcagccagcagtccaactactacgatccctatgacccttacccgtatgagacctacgagccttacccctatggggtggactgaaaggccagcctacacctacggctctccatcccctccagatccccgcgactgcaaccaggaatgcgactgcccacccaacttccccacggccatgtactgtgacaatcgcaacctcaagtacctgcccttcgttccctcccgcatgaagtatgtgtacttccagaacaaccagatcacctccatccaggaaggcgtctttgacaatgccacagggctgctctggattgctctccacggcaaccagatcaccagtgataaggtgggcaggaaggtcttctccaagctgaggcacctggagaggctgtacctggaccacaacaacctgacccggatgcccggtcccctgcctcgatccctgagagagctccatctcgaccacaaccagatctcacgggtccccaaacaatgctctggaggggctggagaacctcacggccttgtacctccaacacaatgagatccaggaagtgggcagttccatgaggggcctccggtcactgatcttgctggacctgagttataacac

SEQ ID NO: 369 - DNA, 428 bp, Homo Sapiens
gaacatgtcctgtatatatcacatacatggtaatggagtcttaatgataagtgcaagataataatttaatgatgggattagtctgatcgcttaatatgcacaatcctggaagtgaattacttgcatcagatatagtgatatttattattctgtacagagagaaaaatacatataaaacatatgcttacattacatgcacgcggatttcatgctccataatcttttctattttttaatttacctttctgtaaatgatgtgcatggaatatgccttatagaaaaatgctgttcataatttgactacgtggaaaagtgcctatatggtggtaatgctagtaaggcaaataagacaaattatcatgttggtttactacatcaccagttaacattttatattgtgatgtttaaaaaagaaaaatttatacctc

SEQ ID NO: 370 - DNA, 470 bp, Homo Sapiens
ttttttccaaaataacttttattactatataaaagaagtcaagaaaaaatagatgcatatttttcctacaaaattataaaatattcaggacagttaatattttttccataaatgcgctaagataaaaagatagaaatctttttcacttaaggttttcaagtaccttgtaggaattaaagaataataatgttctttcttctacattttcctaaagacatagcagttacagtttcctgctggagttatctaaaaaaggacataccaagataaattttctatcatattgaaataaaattagcataaagctttacttctgtctttgtgcttttagattggcaactgtggtcaatcagtgctgcactggaatttccaactcagcaggggaaagaatctaattaaaaatgacacacactctggtattttgtcctttagaaaacagaaactgcttgtcgatatcccttaaaaagtgc

SEQ ID NO: 371 - DNA, 308 bp, Homo Sapiens
tgcagggctgaaattaaatggatttaaactagactttaaaaaatcaaccaaccaatgagcacattcaacgtgattatgagataacaggagtttcaacataagagctgaagaggaagaaggatgaggatgctgcttaagaagtaaaggggcaggtggaacagaaatgagtgggcagaagaggtacaaataagcagcactgggaatggggaggtaatagggctttgggtaaaagtttctccttggtccccctaccctccttccaggccttcctctaagctggaactaggataagaattaacgagcccagc

SEQ ID NO: 372 - DNA, 220 bp, Homo Sapiens
ctagtaatattactagtgattagcagactgaataagataatgacagatagattttggctcctgaggcttttcaaaatgataaagtattcttggaaatggtatgaagaacaaatgttgaatgtaagctatgattagtctcatacaagatggtcatacaattaaactcctgattgagttattcagaagcaacagaatggttcattaaaagtaatcctgacct

SEQ ID NO: 373 - DNA, 712 bp, Homo Sapiens
actagtaatattactagtgattcactagtaattgcacatttttacactacacttctaatcctttgtgtaatgatcatggtagaaataaatggtgaaatgaggaggtcccacttagatgagtttcaggggtccttccagtcccaattttccaggattcttaaggggaaaaagtaattttacatgtctggaaggttccaggtttgcacagaagggaactctcctatcgagagtcctgaggacttcagcagacctccagggaggcctgtccaggatgttctcctacgtctgtaaaggagtgagcactttgtgctagtttagggaaagacagcttttctgttgggattttagacttaccctgcttgaaattggtggaaaaatacctgtctgggatggggctcaataatctgcagctgtattaggaaatgcaagtagttttgatgtgggtggtttcaagacatatttggaaaatgtgagggaaatgtgtatgtgcatttgctgagcgggggactggtgaaggatcaccgatccatttattcctaatgctcatctcagctttttattgtgccgagtaccttgataaggcttgggttattttatgagcgtttatatataaattgatagtgtccatcagatcatgtatatttagaggcatgctcctactttgagtaaatggaaagctttagagatatacactaaataaacatcagttact

SEQ ID NO: 374 - DNA, 378 bp, Homo Sapiens
actagtaattgaattctctaggcatcagcatgcaataaacttgttttcaaaggcactctgttaggtggcatacagccctgattaaaaacagcactgaacttagacatgtttcatttttttctctaacctagtaccttttttacagattgcatattaacagcttatttttgcatttacctctgtaaaccctcaatcaaaatttaatttaaaatattgggagcttttagtttaaagtgatacctactggcccctcaaaacatccagcattaaaaaactaagactggcagtgaaataattatcaaaattataggaagaattttcatttagccagaactgaattgaaaaatccatttggtggccaggtgcaatggctcacac

SEQ ID NO: 375 - DNA, 652 bp, Homo Sapiens
ctagtaatattactagtgattactagtgaattcactagtaatcacttttaaagtaggtgttatcaatctaatttctgaacgttatgggtcagaaaaatcactagcaagtggctcagaaaaagggaaaaggtacacttctgcaatcagctgaggagttcacacctttttttctaaatcaacatcatatcttgctgttcagaggcaatctgaaaagctgcaaattcagctcacctcaaccccataatttcaaacgttagaggctggtctctgtggtttcctactggttcctgtggggagctcccgctttctttctccatagagcttagggtatttctcatatgccccattggctacctagtgtctcaggtaataaacgtatccgaagataaagcaaagattgctatgggagagtgttgtctcctaaaataggactgtcttgccaggccaggcctcaagaaccagagagaataataaacagcacaggatgaaatcagcatgattgcaaaaggactggactcaggaaaaacaagtttgtttgcccagaacaaattaccagaagggatcaaaaacatcttgtttttctttggtgataaccatatgctaccggattggaatgtttaccagaaaatggaataaagaccttcccactggc

SEQ ID NO: 376 - DNA, 432 bp, Homo Sapiens
ctagtaatccctgaggcagtggctgttcacaattgattttagtggattttaatgattaatcacttgctcttgtgggcagcttttcaaaaatcacgtctttgtatttgcagctacagactgggtccaccagctaagaggttggtttttattagggttgtaaaatagatttaaaatccgcttgttgttggctgagatttaaaagcagatttctactatttaaaaaagatagtttgaagatactcccctaaaaagtaaagattcttccatactcggctcggatgagttgttttccttgtttgagggattctaggtcacacacttctatgttttaattcccgtggtaattcaaaatgtttgagaagtgggttgcgactgtgtcgttttaaaattgtacattaagctgacggtaataaaatcttcaagaccaaaaaa

SEQ ID NO: 377 - DNA, 706 bp, Homo Sapiens
  misc_feature (53)..(53): n is a, c, g, or t
  misc_feature (137)..(402): n is a, c, g, or t
  misc_feature (479)..(513): n is a, c, g, or t
actagtaatattactagtgaattcactagtaatagcattcctgacttggtctnccacgggaaggcaggacaaggaatgactgacatgattgacttcctctctctgtgtgttttatagagacaaagtcttgctgtcannnnnnnnnnnnnnnnnnnnnnnnnnnnnnnnnnnnnnnnnnnnnnnnnnnnnnnnnnnnnnnnnnnnnnnnnnnnnnnnnnnnnnnnnnnnnnnnnnnnnnnnnnnnnnnnnnnnnnnnnnnnnnnnnnnnnnnnnnnnnnnnnnnnnnnnnnnnnnnnnnnnnnnnnnnnnnnnnnnnnnnnnnnnnnnnnnnnnnnnnnnnnnnnnnnnnnnnnnnnnnnnnnnnnnnnnnnnnnnnnnnnnnnnnnnnnnnnnnnnnnnnnnagtgtgagccaccacatctggcctgacgttctcgttgcatcaagccatcatccaccgggcgcccctggacgcgcgtnnnnnnnnnnnnnnnnnnnnnnnnnnnnnnnnnnnaatgctgacccactcagtagagcaggggccagccagagggggacgaagtcaccaatccaggcaccaccttcccacatgtccctgcaacttctctctttccagtgtgctgaagaagggaggtgccacccctcctccagataaatggccccagaaaacgatccaaaaaaatacccagggagcgattccttatgta

SEQ ID NO: 378 - DNA, 456 bp, Homo Sapiens
ccagctggaatccatgaagaagctgagtgacctggaggcacagtgggcacccagcccccgcctgcaggcccagagcctcctgcccgccgtgtgccaccaccctgctctgcctcaggaccttcagcctgtctgcgcctcgcaggaggcttccagcatcttcaagaccctgaggaccatcgctaacgacgactgtgagctgtgtgtgaacgttgcgtgtaccggctgcctctgagatagccctgggtaccctgagcccaccagggacacctcgcccttcagcccaccaccctggcaggcttccatccccgtccatgctcaagatgggtccctggccaccatggtcatcaccacccttccagggcctgagcagctggatctggtacaaagcaatcggacatagagttggagggggaggcccctgaggcagcccagctcctgaataaagattctacaaca

SEQ ID NO: 379 - DNA, 387 bp, Homo Sapiens
actagtaatctcaaagtagaatagcaaactttaaagttcccaaggtgtttacctacttagccacacataccatgggcccacttctcagtggctttgatatacctagcatggtctaaagaagtgtcagactaactcatcttacaaaaggaaccgcttaataataaaagagctgtgcaagtagcttgtttcatcttaattagcccaagatgatgcttctgaagtgctgtgctttcttatctatccttcctgctgcaagggaagaagactttgacatctttaacaactcagcctcaggaaccagaatcaggagtagcagatcttgcattggcattgtcaaagaagctgtaaaaatgggtgcctaaaataaatttgcctttgtattggaaa

SEQ ID NO: 380 - DNA, 562 bp, Homo Sapiens
tgcggccgccgtgctgccgcgcactctgggctgctctgggcgctgcgggtgaagggcgactggacgctaagtgcggctgcgatggtgagcacaggctccaccaggctgaacatggagcccaggatcagcatcttcccaatcacaacgtccacaggcagctgggctagcagggacccaatgggtgtgagggcctctgagctgtccagggccccctggtcccggaggtagaggatggcggtttccaggctggctggtggtgggggctcgatgaaggggaaggttcgggggtcccccacactcatgctcttcatctgcagcaccaacgagtccagggccaccctccgaatttctgggacggggtagggggcgaaggcatcatagtccgattcggcatagaggccgaaccagactccggggcccgtgcggccgcccggcccttccgctgctctgcgctggactgactaatccagaactcctgcagccgttgaagcttggcctgcggatcgtaactcatctccttcacctttccggaatccactacgaagcggatcacgtcaatggt

SEQ ID NO: 381 - DNA, 1981 bp, Homo Sapiens
  misc_feature (195)..(319): n is a, c, g, or t
gtgaaaggataccccgcaacaggacaggtcttcctttcccatgtgggctctttatccagaacccagagctgcggagagtctggcttctgggacccttgactggggagaaagcaggtgggggccacggagggaaggccccagagcagagaggcaccaggctggctgagcctgggcagctgccctttgccttagctnnnnnnnnnnnnnnnnnnnnnnnnnnnnnnnnnnnnnnnnnnnnnnnnnnnnnnnnnnnnnnnnnnnnnnnnnnnnnnnnnnnnnnnnnnnnnnnnnnnnnnnnnnnnnnnnnnnnnnnnnnnnngaatggtggcaagaactcaaacctggactaggcctgctgggcccagaggcctttgggccaaaggcagccccgccggtccttctttgaatccttcatccggaccctcatcatcacgtgtgtggccctggctgtggtcctgtcctcggtctccatttgtgatgggcactggctcctggctgaggaccgcctcttcgggctctggcacttctgcaccaccaccaaccagagtgtgccgatctgcttcagagacctgggccaggcccatgtgcccgggctggccgtgggcatgggcctggtacgcagcgtgggcgccttggccgtggtggccgccatttttggcctggagttcctcatggtgtcccagttgtgccaaggcaacaaacacttcacaatgtgcaagtgggtcatgggttccatcctcctcctggtgtctttcgtcctctcctccggcgggctcctgggtttgtgatcctcctcaggaaccaagtcacactcatcggcttcaccctaatgttttggtgcgaattcactgcctccttcctcctcttcctgaacgccatcagcggccttcacatcaacagcatcacccatccctgggaatgaccgtggaaattttaggccccctccagggacatcagattccacaagaaaatatggtcaaaatgggacttttccagcatgtggcctctggtggggctgggttggacaagggccttgaaacggctgcctgtttgccgataacttgtgggtggtcagccagaaatggccggggggcctctgcacctggtctgcagggccagaggccaggagggtgcctcagtgccaccaactgcacaggcttagccagatgttgattttagaggaagaaaaaaacattttaaaactcccttcttgaattttcttccctggactggaatacagctggaagcacaggggtaactggtacctgagctagctgcacagccaaggatagttcatgcctgtttcattgacacgtgctgggataggggctgcagaatccctggggctcccaggttgttaagaatggatcattcttccagctaagggtccaatcagtgcctattcttccaccagctcaaagggccttcgtatgtatgtccctggcttcagctttggtcatggccaaagaggcagagttcaggattccctcagaatgccctgcacacagtaggtttccaaaccattttgactcggtttgcctccctgcccgttgtttaaaccttacaaaccctggataaccccatcttctagcagctggctgtccccctctggggagctctgcctatcagaaccctaccttaaggtgggtttccttccgagaagagttcttgagcaagctctcccaggagggcccacctgactgctaatacacagccctccgcaaggcccgtgtgtgcatgtgtctgtcttttgtgagggttagacagcctcagggcaccatttttaatcccagaacacatttcaaagagcacgtatctagacctgctggactctgcagggggtgagggggaacagcgagagcttgggtaatgattaacacccatgctggggatgcatggaggtgaagggggccaggaaccagtggagatttccatccttgccagcacgtctgtacttctgttcattaaagtgctccctttc

SEQ ID NO: 382 - DNA, 349 bp, Homo Sapiens
tgcggccgcagagtcccggggtgcccatgcagacgccctgcttcacgctgcagtacgctgcccccgagctgctggcgccgagggctacgacgagtcctgcgacctctggagcctgggcgtcattctgtacatgatgctgtcggggcaggtccccttccagggggcctctggcaagggcgggcagagcaggcggccgagatcatgtgcaaaatccgcgaggggcgcttctcccttgacggggaggcctggcagggtgtatccgaggaagccaaggagctggtccgagggctcctgaccgtggaccccgccaagcgcatgaagctcgagggactgcggggcagctcgtggc

SEQ ID NO: 383 - DNA, 787 bp, Homo Sapiens
ttggaagcaagtcggacccattgccgttggctccttctgcctcttcatatttgacatgtgtgagagaggggtacaactcacgaatcccttctacagtatctggactacagacattggaacagagctggccatggccttcatcatcgtggctggaatctgcctctgcctctacttcctgtttctatgcttcatggtatttcaggtgtttcggaacatcagtgggaagcagtccagcctgccagctatgagcaaagtccggcggctacactatgaggggctaatttttaggttcaagttcctcatgcttatcaccttggcctgcgctgccatgactgtcatcttcttcatcgttagtcaggtaacggaaggccattggaaatggggcggcatcacagtccaagtgaacagtgcctttttcacaggcatctatgggatgtggaatctgtatgtctttgctctgatgttcttgtatgcaccatcccataaaaactatggagaagaccagtccaatggaatgcaactcccatgtaaatcgagggaagattgtgctttgtttgtttcggaactttatcaagaattgttcagcgcttcgaaatattccttcatcaatgacaacgcagcttctggtatttgagtcaacaaggcaacacatgtttatcagctttgcatttacagttgtcacagtcacattgattgtactggtatacgcacacaaatacactcatttagccttttatctcaaaatgttaaatataaggaaaaaagcgtcaacaattaatattcttta

SEQ ID NO: 384 - DNA, 652 bp, Homo Sapiens
gaatcctcagtgcaatcattattttgattcgtttggtacctgttttcctggagttcccgattttattattttggggtggctccaagcattaagaggtttaatctttgatggcattgttctagttttgaaatttctagtatatttcagagtctcttagaagacttgtgtgggaagtttcactttgttttcagtggaagatcacaaacctccttcttcctttactcaagaggaaaggtcccagtatacatatttgaatggttgatggttttcaagaccttcagggagctccctgcattttacctagaaacagaaaaggcccgcaaaatcttaagtttcctggcctgcatttcccgggtaggggcaaatgactccaagctggtctctaagccaatacccttataaaccagagcccaggaaagacagctcgagtgtataattctctggagctcaattctatgcagttgtgctgatatttcattaagtcactgtgtatttttaagtgttgatacattaaaagtcgctttatggaagatgagtaaattttttaaatacttggaaattttatttccttgttaacttctacagatcagggcatgcaaccaaaagcagcttaaatgaaatattttaaaataaaatatcaggaagctaaaaa

SEQ ID NO: 385 - DNA, 356 bp, Homo Sapiens
agaatgccaggtcagatgttgggctggaccccgcgggtggatgggaggtggcgtgtgtcatccaccaccctcacccatccttgttctttgtgcaactctcacttctcttttcttttcactgttgctttctggcctgacccaggtccctgagtccccctatgccctgcctgcctcctgttcctgtgttgtgaagagtggggagcaccccctgaaaagcagtgcctgccagacgccagcacattctgtgtgccagtggggcctcatgcgacagtgggaatgagaaaaattcactctttcaaaactcactgtcagtcctttaattttcctcaaaataaaagttttcttctggtgtccgt

SEQ ID NO: 386 - DNA, 401 bp, Homo Sapiens
tctgaatgtgggtgtcaacaagaagaggggccttcgaactccacccaaaagtcacaatgggttgcctgtctcctgctccgaaaacaccttgagtcgggcacgaagtattttaatgcacaagtgccggtggtagcagcagcagccaacaaaattctccacagatgaagaattcccccagctttccttttcatggcagatcggcctgcagggctgccaggcctgggctctagtacccaaaacggtcacccaccgggtgctgggccccgtcagaggtaagccagtctgggagcccctgcaacatgtgttcggttgtctggggcattgctgggggaagtaagagcttgaagatatactgttggcccaggaccaaggggtgaatcaataaaattagtttgtagcag

SEQ ID NO: 387 - DNA, 699 bp, Homo Sapiens
aagctacttgtcataggtgtggatctgaaaactgggccggttttcccatgggggttgaccattttgctgactgccatcctcctgcaaacgtacgggattggctttcaatggatggactactctatttttgcaaatttgtaaacttggcttctccaaatacaagtactaggttgcccatttatggtacctatttggtgctagtaaattttcaaactggatttataaatgcactgtaatatgtacacaacttagaaaccaaattacaggtattcagttccaatacttcattaattccatccaacccaaatttagttcaggggcctatccccattttggagtataatacattacatgtaaattaagtgtgtgtatactgtaatcgtgctattttttatcattgaaacatttataaactagaataataatgcccttaatgtgagggtttgtaatggtgcttattaagaccaaagacttgttaaatgtatacaccaagtggtaatgaaatttctgtgactggcccacacgtgcatagaggtctgggaggaccaggaaacagcctcagtggccagaggatcaccactgcatccttcatcacagctatgtgcaatatgccaagatcaccctcggtcattcctgtcaacaaggggtcaatgtcataaatgtcacaataaaacacatctccttcttctttttagttta

SEQ ID NO: 388 - DNA, 540 bp, Homo Sapiens
tcttcaccatcatctgcaccatcgtcatcctgatgtcgctctccaacttcgtggaggccgtgtccaaagactttgcgtaaccacgcctggttctgtacatgtggaaaactcacagaatggccaaggcctttggcttggcgagatttgggggtgctaatccaggacagcattacacgccacaactccagtgttcccttctggctgtcagtcgtgttgcttacggtttctttgttactttaggtagtagaatctcagcactttgtttcatattctcagatgggctgatagatatccttggcacatccgtaccatcggtcagcagggccactgagtagtcattttgcccattagcccactgcctggaaagcccttcggagagctccccatggctcctcaccaccgagacagttggttttgcatgtctgcatgaaggtctacctgaaaattcaacatttgctttttgcttgtgtatcaaacccagattgaagctaaaataaaccagactcactaaatcctttccaataattgactggtggaagg

SEQ ID NO: 389 - DNA, 213 bp, Homo Sapiens
taattactagtaatattactagtgaattcactagtaatgccttttcttaccttctcagatattcactggacaaatgcgtgtactgagtgttggggagagaaggtagctatcaatgtgtcatggctgctcatgttcccaagggacctttaaaaagtctaatgcactctttggggatcagttgtaaacagattaattaaataaacattccaagtc

SEQ ID NO: 390 - DNA, 554 bp, Homo Sapiens
actagtaataaactgtcctccatcagactggaaggttcatgattacaagggctatgtctcctcccttagactggtacttctaagattgggctctctctccttccttagattagggattccctgaaggttggcactgctcttgcaggatgtcttcagctaatgaaattacatatgataaataacccagaatcatttgctccctggccaatgtcacataagctatataaatctctggagtatatacaggagatgtttcttaatttacattcttcgttacatgttggatgaggtaatctggcaaaattgcatttagagaccacatctgttatcctccggagaatgcatgactgatgtggaaggaatgacccggggatccatataggatgactaattaagaggatgtttgtgcctcttgtctgtatccttgaaattacaaatagagcttgatactggatgagatctctgactcagttgaggctgattggtcaatctgatcctgtgtgttagtgctacattatacttccattaaaaagcagcatgtgtaatgctcctct

SEQ ID NO: 391 - DNA, 850 bp, Homo Sapiens
  misc_feature (64)..(79): n is a, c, g, or t
  misc_feature (452)..(452): n is a, c, g, or t
tcacagcccgccgggcggctctatggggggcccccccagttttagaaagttccaaagccccccnnnnnnnnnnnnnnnngttaacttgctgtatacctcagtgtaatgtccattcaaggagtattaaatgaggatttccctgcgaggacatttactgtattgctacttaaattatggaagacaatatatcttcaactttaataaaacctattcagaaaattaccaattcagaattcggagttcttatccaggtgctctaactaacttcagggaaattggaacaataagttatgttacatgcacactcaaattctttattttctccactttaagcaggaaagggtaaaaactgttttggtactcaagcccagccttacatactgtgtttctctctctgtctgcatgcatattaaagtggaaaaattgtatttatatcttagttattaccatangtacctatgaaccttatcaaaattgcttatttgactggtgttacagctgctattaatctaagtctattgtttttctattttagtagataatttagttttaaaatacgtagggtttgagagcagatatatttatttaatctgttttctctagtaactattgctgaagggttaggcattcagtattcctatttgtcctaattttgaagttaaaaattttggttacagatagatagagggagaaaagttcaaaatgagtgagagagaactttatgcaggttgagataatgcctaaaataatgagctggccagactgtggaggtactctttgtattttgtaacattgactttggataaatgcttattcactcttaataaatatatatcctgtatacaaaaat

SEQ ID NO: 392 - DNA, 849 bp, Homo Sapiens
actagtaatatttcattggaaagcatgtgtgttggggggtgcgtatcattttaccatgtgataagcacttttcataggtagcaaagacacattatgtaaacttaggaggaggagagaatgcaaatttgcatgtgaattttattttgattaatcgctttttttgcttttcagcaatgttatttatgaacaacaaaattatagaaaaagtgagaaaaagtcaattatcaattattttctgatgaacaacaacaaagacaaaaaaatggtgggattgatttattttcccctgacagaattgattgtttctttaggttctatgcaacttgcagactcactgagggtgaatggaatgtgctgaaaattcagcctgacttggcagctccaagggacacacctcaatgtagagaaagcaggaattagagatgaggttttttaatccctgtctcagttttgccttatagatgaaccacaatgagtctcaagcaatctgagttgaagtaagttggtattaagcaggagtggtttggccatgagtataaaaatctagttgtgtcttaccagtggatgaggaggcaacagcctgtgctacctcatttgggagagggtgagcaatacctcattctgaaaggtgacatgtattccatcaatggaaatcactgagttcatactccaccattagtggctttaccattggtcttcctcaaggctgtcagagaactagtaacttgtatggaaaggagtatgcaggtatagacagaagaagggtttgaaaaagggagtcggaggatattaaaaacaaatcttatcagtcacattttcatgtaggcctgccttgcaggaaccagttac

SEQ ID NO: 393 - DNA, 636 bp, Homo Sapiens
  misc_feature (489)..(489): n is a, c, g, or t
cgcctgaatctctctatgaactttccattcaaaactttccaagtttttccttatgtggaaccgaaatctttctttctcccgtgaaactttactactatcagataattgaagacagatctctttgtattctcttcaagcccaaaccaattctgttccttcaatctaaatagtggtaatatgaatgtttaagaaatgaaataagaaacatgtgcaggcactttggaaggtgctaagtgactgccctaaggaatgaaaagcaagggccaggtgggagtagcccagcgaaggcacttgggctgccaggaacaggaggcgtgggaaactctggcttaggaaaacatgaacacaggggcaacagaggcaaactgttgttcgagttaaatataaatctcaggctctttaaaggtaaaaggtttaaggataatccatttggaagaagaaaagagtgaggctgaaagtaaagccacatgacaagcatataaaaaaaantgcagatgatacaaatatgaaagaggccttcagtgtttgtttattaagaatcttaatgcagtttactgatggattaaaaacagctaacattgtctgaaaattatgttacctataagaagttggaaataaataaaagcataatcacta

SEQ ID NO: 394 - DNA, 419 bp, Homo Sapiens
ccaacttcaccatccgggaagatgccaaccccagctcccgacagcgaggactcaagcgcttccaggctaacccggaggccaactggggtccccggcctcgtgcccggccagggggcaaggcggccgacgaagctatggaggagagacgcaggctgcttcagaacaagcggaaggagccgccggaagatgtggcccagcgggctgcccggctcaagacatttccttgcaagaggtttaaggagggcacctgtcaacgcggggaccagtgctgctactcccacagccccccgacacccagggtttctgctgatgctgcccctgactgtccagagacctccaaccagaccccccctggacctggggtgccgctgggccaggcatagactgaaccaataaagagatgtcacgtcaccttcaaa

SEQ ID NO: 395 - DNA, 502 bp, Homo Sapiens
tggatttcacaaatagacaaaaaagaagaaaactaccttctgatcttgtattttgaaagattgatgtttgcattttacttcagtaaacaattgctaaagacatcacactagaaacatatgcaatgtttttattacatacttctactggacatcacagaattctttgggttctttgtaatttaatgaataggtctgaaaacttatgaccaatacttgttataacttagaggactttgttttattccaaataaggaatgaatttgcatttaaaatcttaatgaatgttttcaaaactgaatagataacatagtactctaactaaagtctccaagttatgtattataatattacatagtagtatgcttaggctttactatgtattagccttttgttggactgtgtatgtattttaccatatgggttttaatgataatggtgtatgactgctttacatgagtccttatgcatccagatgttataataaagtggaatggtctcttta

SEQ ID NO: 396 - DNA, 666 bp, Homo Sapiens
gacccctccctagggccacacctggcagaaggtggcttacgatgttcgcagcttgaaagtagtgtaaaccaaagataaaattctaagcccactcccccagccatcggaatggacccctcctctttggccagggcactccaaagttaacctgatataccggttcaggctgtgaagagaaggtggagtggacatgcctcatttatgtcctcctcccttttggaattcagcaaagctgaccagcatgaacattaacacagaccttaagtctgattagtggcatttacaatctatactctttgaagcgtgctacctggagtcttcctttgcatgataaaactttggtctccacaaccccgttatcataacctagacactcctttctagtgataataactctttcaaccaattgccaataaaaaaattttgaatctacctataacctggaacctccccgctccaccttcgagttgtcctacctttttggacagaagcaatgtggatcttgcatgtatttgattgatgtctcatgtctccctaaaatgtatacaattaggctgtgcccagatcaccctgggcacatgttctcaggccctcctgaggtttctgtctcgggccattggtcactcagattcggctcagaataaatctcttcaaatattaaaaaaa

SEQ ID NO: 397 - DNA, 757 bp, Homo Sapiens
  misc_feature (187)..(223): n is a, c, g, or t
agtaagagactcactcactgcacttctgctcagttggcttctgcatcgggatcacacagccatcagcaggactgcccagttggtgagcacactccattgaccacgtggcgccagcgcttcctcaatgcacatgattgagaggaaagaaagttctcttagatgttactgcttttgctcagactttgcnnnnnnnnnnnnnnnnnnnnnnnnnnnnnnnnnnnnnattattaatcacttttgtccttgagaaagtcttgaatgaacagagaatttattccattgcaatatttgattgtatagaggcacactgtttcatcgacagaagaagcaaaaaggctttgtgtaagtttttggtactatgtaccacctctgttattcttttaaagctgaagtattcatgtacttaaaccatattatatttaattgtgtttgattttaaaatatatatatatgaattctatttaaaattgtgtcaactttctgctttcagggcatttatggctcttctgttgaaatatattgatctttccaaatattttcatttgctttctaaaaacccagaacatgagccactactggactttgccttgtgtttgaagtgtatggcataaacccaaggtttttattagtcatctatgctgtgattaattcattttgttcttttaacaaaatatttccatccacttcacattgcttcaatctttaacagaaaagcaatataaaggttatagaataaaatgtggttttgggcaactct

SEQ ID NO: 398 - DNA, 379 bp, Homo Sapiens
tctccatgccacactctctccaggtgccctctgcctcttcaccccacaagaagccttatcctacgtccttctctccatctatcggaccccagtttccatcactatctccagagatgtagctattatgcgcccgtctacagggggtgcccgacgatgacggtgccttcgcagtcaaattactcttcgggtcccaaggtttggctttcacgcgctccattgccccggcgtggcaggccattccaagcccttccgggctggaactggtgtcggaggagcctcgggtgtatcgtacgccctggtgttggtgttgcctcactcctctgagctcttctttctgatcaagccctgcttaaagttaaataaaatagattaaatgata

SEQ ID NO: 399 - DNA, 956 bp, Homo Sapiens
cgggcttcccagcgcaccctgaggagattggggtcctggtttctccccgcgagctgtctggtccagtccgggcttgggcggcgcaagtggccgttgggctcccccgggagcggactgggcaggagccggcaccccccactgcggcttccttgcttttctttctgctggttggtgagcgatttccaccaggggcccgagctgccagcatcgccgctgtcggccatggccggagggcctaggggctcccggcacccagatggaagggccaaagcggcccctttctccacgtggtctccggccgttcactccaccccttccccggcttgccacacgtgggctgcggggtggatgctgaggcagcggcctgtgctgctcgggcttaacaggacccggaggcctcgcgcggtgaacgcggccgagagcacgaagggggcgcgctcgggtcaacctggaagccggggctcgagtccctgggcgcggacttggagagatcaggcttctggaaagtgtacaggtcggaattcccgcagcccagctaaatcaagtgctgctgctggtctcctctggcacctccaattgctgcgcgctgcggcggaagcccggggctcgcagcgcagtctgttctggtcggagggggcggcggcgaggggccgccagactcgctgcccgggtggaaggtccagggcggctttccgggctagtagtgtttcattcgccggcgcgtccctcttccctgctagcaccgcccgggagccggctgagagatgggacctggctgttcactccggcgcatcgaacttgcctacgcgtccgtaggaacgcaaaaaagacatctgcccacctgctggttatttgccaagtgattcgggaaaccagaacctggggcagctgggggagaaaagaaaataacccaggaggcggtcaccgctgccacaggtgcaggtaggaacttcgcg

SEQ ID NO: 400 - DNA, 823 bp, Homo Sapiens
ggcaaatggtgttatattgcctgggcaggtctcgaaatcctgggctcaagctatcctcctgcctctgcctctgtaagagtgtgagccaccatgccccacccaaaccatttttcatatcagttatagcaaaacaagacaaaccagttcttaataatgttcaaagttggacccatagagacatgctaagcactacatcatgctaagaagaacagttattactcagctgccatacttcagccattctacttttacaccaagaacaaaatggctagagatttttttaaaaatacaaatgccagtaccttgccgagacttgttcactgatttgccccaaccccaaggtaatggtcatctactttgcaacctatggagatcctgatagctcccatacaaagtgaggtacactgttgccaatttggaggcaggaagccatcaaactaaacgtagtttaattcagatgaacacctatcgatattcaaaaggcaaaacaaaaaaactaattccagggacattagaccttggtgaaatgccaaatggaaaatggtgctttaaaaggtagtctcttaccatataaggaataagtaaaacattagcttgtgatttctcattattcaggtcaatgttttagacacgactaacaagggacagttcaaactattaaagagaacaaatttttacttaagcactttgaggtatccactccccttaaatgtaagttatgtattttatctgttgattaaggggaggtccaagcatttgtacttggcaggaatgctggcaatagcttgtgccagattactgtataaacttgaaagtaataaaa

SEQ ID NO: 401 - DNA, 442 bp, Homo Sapiens
  misc_feature (186)..(186): n is a, c, g, or t
acggagtgcaaggtcatggagaataactctactttctgcatacttctaaactgcttttattattattggtatgtttccgtagagtgactccacattcgttattttaattcttatgatagccttgtaaacttacatgttataatcccattttgtagacgaggaaactaaggttttgatgttcttttnccttacggtgagtgaacttgacaactattctcatacatttcttggactgaagggcagaaaatatgagctgttgagacagagtctaatgatagaagatttgaaatgtttccaacacaaagaaatggtaaatgttcaaggggatggaaaccttaaacaccctgatttcaccattacacatgtatgcatgtatcaaaatatcacacgtaccccataaatatgtaaaattattatgtaacaataaatttttttaagaaat

SEQ ID NO: 402 - DNA, 1135 bp, Homo Sapiens
ggcagtaccagggtgggggcagaaataaatcaaagtccttgtccttgaaaaacaatctcttgctggaaggctggattcagtagactgcttgggcaggcttgggaaggacccaggtgagcacagcatccaccaggctggctggcaggtaggaggcaggcagccagagcagcttggcatcccaacctgggctgtagcgggttcgggggtgtcgagcagtcagggcatgctccaggcatcggctcaccttggttaggtccgggtcacagatcaggttcatgatgcgctgttgcattttcaggtacttggtgaaggaaggccccccccatagtgggccctgtaatagcaggaaggcagccgtgccccagcaagcctgcagggttttctccagactctccaagttggtcaaaggggttcggaagaagccaagctccacgatggagactcgtatcccaaatggagctacatcccgcctcaggctgtcagagaaggcctccaggccaaatttggagacacaagtagcccccaccattggctgccaggcgacccaaggacgctggtgatgttgatcacccggccccgggcttgctgcagcagaggcagcagggcaagggtgaccccgatgggacccattgtgttcacattcagcacccgctggaaatcgtcccgggtcagccatggtgtgggtccgatgataccagccacaccagcattattcaccagaccaaaaagccctgcttccttaacgtgcatctccacccacttggctgcctgctggacgctctggggatcagtgatatccaacagggtggtgtggaggcgggaggaggccacccgctgcaggtcctcggccccggagggggtcaggcagctggccaggactcggaagcctctctggtccagctgcagtgccagaaggcgcccaaagcctgagtcacagccggtgatgaagacaaaggcattgctggcgggcaggctctgccggtccctgagcaaccacagcactgcccagagtaaggcacccagcagaagaggcagccacatagctggagcccaagtgacctacaggtggcagcctaggctcctgtggcgaaagctggcaggtactacagcgcccgaagcttattcttttgctttg

SEQ ID NO: 403 - DNA, 260 bp, Homo Sapiens
gtcagggcacaatgcaaagcagtacaatctgattttagcttgaggtttaatccccatcttttccctcaaaccaacaatgtccattcaaaccagttaaagacatgctttcaggatctagctttcaagattaagtcactggatgcctagaagatggtggtgctggtagcagcatagtttttggatttccctgaatcctcacataaaaatagaaagcacagctagagaggcgaacgaataaatccatggacaaaatttacaac

SEQ ID NO: 404 - DNA, 561 bp, Homo Sapiens
tctacagccgccgcgtatcacgcccactccctcccggccgcagttccacgcacagcagcgaacctcgcacttatgccttagaaaggaaggcgtccccaaagccaggctgtagcatctgattttgaagcaagctgattgcggttctacgctgtccagacgcgcaggtggcattcttcatcgtttatcccgtctgcgccaggccctgcggccacagtggtgaccgacagccagagctcctatccaagaggagctgagtccccgggaggctgaccaagaaagaagcagtgagggcgcgggggctgggggaggaaagtgcatgacaggagactcagagttccagaaaccggcagtgtttatagagggtggcttcctgtggggctgggctccagggcacggtgggctgcgggaaaatccagcaggttctaagctggagagtgtcatggttggacctgtttcacaatgtcatgctggcttccgtgtgtggagtttccaggtgaccactagtggtggggaatagtgccaccttaacttcagtttcctgacccttacaattagggttga

SEQ ID NO: 405 - DNA, 1260 bp, Homo Sapiens
  misc_feature (1008)..(1008): n is a, c, g, or t
cccatgcatagctgcctcccgggagccgcttgatcacaggactagcagtgagcaggcggatccctcagcaccctgccttgccccatccagcttgctgtcccctgaggcctcaccctgccggaatgacatgaacactaggactccccctgaaccctcagccaagcagcggtcaatgcgctgttaccgaaaagcctgcaggtcagccagcccctcaagccagggctggcagggccgccgaggccgcaacagccgttctgtcagctctgggtccaaccggactagcgaagcatcttcctcatcctcatcatcgtcttcctcatcccgatctcggtccaggtccctctcccccccacacaagaggtggcgaaggtccagctgtagttcctctggacgttctcgaagatgctcttcctcttcttcgtcatcatcttcctcttcgtcttcctcatcctcatcatccagttctcgaagccgctcacgatccccatccccccgccggagaagtgacaggaggcggcggtacagctcttatcgttcacatgaccattaccaaaggcaaagagtgctacaaaaggagcgtgcaatagaagacagaagggtggtcttcattggaaagatacctggccgcatgactcgatcagagctgaaacagaggttctccgtttttggagagattgaggagtgcaccatccacttccgtgtccaaggggacaactacggcttcgtcacttatcgctatgctgaggaggcatttgcagccattgagagtggccacaagctgcggcaggcagatgagcagccctttgatctctgctttgggggccgaaggcagttctgcaagaggagctattctgatcttgactccaaccgggaagactttgacccagcacctgtaaagagcaaatttgattctcttgactttgacacattgttgaaacaggcccagaagaacctcaggaggtaaccttgggcccttccctgctatcctttttctcctttggaggtgcnccaacctcctccacccccttcccctactctaggggagagagctgctagtgagatgactgttttataaagaaatggaaaaaagtgaaataaaaaatatgttgaatcagattttttaaaaggggtatttgtttttttataacaggtattgaaacaagttaacttgcattcctatgtaagataggaggggctgaggggatccccagtgtttggaacataagtcactatgcagactaataaacatcaactagagag

SEQ ID NO: 406 - DNA, 292 bp, Homo Sapiens
ggacgcagaaggtgtacaacgactcccaaagaaaatgtacagatttacttcctagccaaaagtatttagatttgaatttgaaaatgatgttattatttgaatttttatggaatattagaatgtttgaatcatatactcttctttcacccaatatcttttatttttaaaagaagaaactctatctaatgttatcaaaagagaaaccacttctttctttctgtttttgcccctgacggaggtgatggtggaagcccacctgccctggagggcagctgtcgttgttacacattct

SEQ ID NO: 407 - DNA, 517 bp, Homo Sapiens
cttggggctacttggctgaagacgtgtctcgcagaggatttgttaggacttgccctttttgtctgaactcaagggcaaaggagaatgatggagacttaggacagagctgaccctggcaccaggctgggaggctgcagcccttttagatgccacttactgtaagtggccagaataccagagaggtgggttccatggtcaaatgcacagtaggtgtttacctttacatttggatcaccttgtagtctttaaattcttggtccctgaggccaagtccacaacttgccttctagtcacttgcctgcccgcagtggtggtggatgtgttagctggtagatttggaatcagtcaccagtctttctgtactgtcttggttagctctatataagtaggggcagcttagccctgaggcccagagacctgctgtcctttttctccttgagggaggaaataaaactgcggaatacaatgtccttccatagcatgggaagaagaaaataaacatctcctttccaacaaa

SEQ ID NO: 408 - DNA, 660 bp, Homo Sapiens
ccaaggccactaacacaacgaaaagaaatcatgcagaatccaaatggcaatttgcattctggggattgtttggcctctaatcgatattctcgtcttcctaaaccaaagatacattaagtacatagccatcacctgccaatttgtttcttaaaaacaatctcttctgtaatagctttatgtcgcagttgcagcttgctactgtggtggaggttccattgaaagcctgcaaatcttaaattaaaatgtggaagcttctactagtttggctccttcattttatatcctggttgaagtacatgccatttgagcataattatctcaggtaaacacgaaagtttgcttacccacttcagaggcctgccaaaggcccaaatcatgttatccatccctctccacgtcagaaaattcataatattttactgagcaggcaagaagtgtgctttgctggtttagtcctattaaggtctgtatttattgtggttgtcagaacctcaccccttttcacttgtctctcctgtgaatatggctactattttaactaaagatatggtgataatggaagatggtagtctgtaagcagagttctggccagtgttttgtatatttaaaaggtctatgcaaaagctttgtgatgaataaaggagattaggcttttaatgg

SEQ ID NO: 409 - DNA, 645 bp, Homo Sapiens
aatgggcagcctcggcgggctgtggcaacgagaaagagggagtgcagtatagctactccttattccacctcatgctttgcttggcttccttgtacatcatgatgaccctgaccagctggtacagccctgatgcaaagtttcagagcatgaccagcaagtggccagctgtgtgggtcaagatcagctccagctgggtctgcctcctgctttacgtctggacccttgtggctccacttgtcctcaccagtcgggacttcagctgaacctctgagtgccaaggacaccactggaactcacaaaggtctccttcaccgaaaacccatataccttttaagtttgtttcaactaaaatattaagtgaatgctttgcaagtttgactgtatgcaggtttatatcagaaggtgagattgaataatgcttgatgcagaatcgaaacttctcatttatctgtatattatgtttacttctaaggatatagcacaaagggaacattttttgtttaaagtgaactacagctgtgctgtgaagagagttctttataaagcctgtaggttcttttaactttggtttaaaatgtaagataggaaaatgttggatatttgaggccatgcttaatatatttatattgcagtatcctttaaaag

SEQ ID NO: 410 - DNA, 398 bp, Homo Sapiens
ccttacctggggaattcagctggtttgaatatttgtagcccgctcccagaatgtcttattttgtaatgactgaactacatttagtaatagttacacatgtatatggttaatacatatggaaattcaatatattttgtagttaacgtattctgaagtaacggatgtttctcgccaatcgtagtgacttcagctaacgaaatgttcttttgtagtaccacggtcctcggcctaacgaaggacgtgaaccttgtaagaggagagctctgaaacgcggtcacctttgtttagtggaagggaaagtgtgttcccggcatgaggtgcctcggaattagtaaagaattgtgggcaatggattaaccactgtatctaagaatccaccaattaaagcatttgcccag

SEQ ID NO: 411 - DNA, 688 bp, Homo Sapiens
tgatgagccaacttcccagaatctgggcaacaactactctgatgagccctgcataggacaggagtaccagatcatcgcccagatcaatggcaactacgcccgcctgctggacacagttcctctggattatgagtttctggccactgagggcaaaagtgtctgttaaaaatgccccattaggccaggatctgctgacataattgcctagtcagtccttgccttctgcatggccttcttccctgctacctctcttcctggatagcccaaagtgtccgcctaccaacactggagccgctgggagtcactggctttgccctggaatttgccagatgcatctcaagtaagccagctgctggatttggctctgggcccttctagtatctctgccgggggcttctggtactcctctctaaataccagagggaagatgcccatagcactaggacttggtcatcatgcctacagacactattcaactttggcatcttgccaccagaagacccgagggaggctcagctctgccagctcagaggaccagctatatccaggatcatttctctttcttcagggccagacagcttttaattgaaattgttatttcacaggccaggcttcagttctgctcctccactataagtctaatgttctgactctctcctggtgctcaataaatatctaatcataacag

SEQ ID NO: 412 - DNA, 1273 bp, Homo Sapiens
gatgtcttctcctgaacacaaccaaccaccagttgcactgttggatacggaggagatgagtgtaccccaggactgtcacctccttccctccactgaaagcttttccgggggagtcagtgaagatgtcatttctaggcctcattctcctcctgaaatagtcagtagagaagaaagtcctcagtgctcagaaaatcagagttccccaatcggcttggagccccccatgagtctgggaaaggctgaggacaaccaaagcatcagtgctgaggttgagtctggagacacccaggagctaaatgtcgacccactcttgaaggaaagcagcacttttactgatgaaaaccccagtgaaactgaggaaagtgaggcagcaggtggtataggaaaattagagggagaggacggtgatgtaaaatgcctgtcagaaaaagacacgtatgatacaagcattgactcactcgaagagaatttggacaagaagaaaaaaggtaaaaaattccctgaggcctctgataggtgcctaagaagtcaactttcggattcttcctctgctgacagatgcctaagaaatcagagttcagattcttcctcagcttgtcttgaaatcaaagttcctaaaaatcctagtgcaaaacgttcaaaaaaagaagggcaccctggtgggacaacacctaagggccttctacctgacagtttccacacggaaactctggaggacacagaaaagccaagtgtcaatgaacgcccctctgagaaagatgctgagcaggagggcgaaggcggggggatcatcaccaggcagactttgaaaaacatgctggacaaagaagtcaaggagttacgaggagagattttccccagcagggaccccataaccacagctggacagccactgcctggagagagattggaaatctatgttcagtctaaaatggatgagaagaatgctcatatcccctcagaaagtattgcttgtaagagggacccagaacaggcaaaagaagagccagggcatattcccacacagcatgtggaggaggctgtgaatgaggtagacaacgaaaacacccagcagaaagatgatgagagtgatgccccatgcagctctcttgggttgtcgagtagtggaaagtggtgatgctgctagggccccaaaatcggtgcaggctaaaagattgacctcttcaactaacaacctaggacacgcctcattctctgggctccttggatgcttcaaagtgacttccgaaaaggaagtgggaagtataaccca

SEQ ID NO: 413 - DNA, 259 bp, Homo Sapiens
gttggagaggtcactagtagaggagctggaatggtagctttggtgccaaggagggccgatcataccctgagatatctgcatcatgctggcatcgggttgcttctccccagatttagttgtgtgccacgagtgaggtcggcctgcaggctcactgcgcctgtgcttcagccgaagtttaacccctcctgaccacgctgctttcctgtgctgggggccagaggtgaggtgttctgcgctgacgaagctagaggcaccagtc

SEQ ID NO: 414 - DNA, 1114 bp, Homo Sapiens
  misc_feature (149)..(157): n is a, c, g, or t
gtcacggggcggcgcggagggccccagcccagtcagggtgtggccgccgccaccgtaaggctaggccgcgagcttagtcctgggagccgcctccgtcgccgccgtcagagccgccctatcagattatcttaacaagaaaaccaactggnnnnnnnnntgaaattccttatcttcgcatttttcggtggtgttcaccttttatccctgtgctctgggaaagctatatgcaagaatggcatctctaagaggacttttgaagaaataaaagaagaaatagccagctgtggagatgttgctaaagcaatcatcaacctagctgtttatggtaaagcccagaacagatcctatgagcgattggcacttctggttgatactgttggacccagactgagtggctccaagaacctagaaaaagccatccaaattatgtaccaaaacctgcagcaagatgggctggagaaagttcacctggagccagtgagaataccccactgggagaggggagaagaatcagctgtgatgctggagccaagaattcataagatagccatcctgggtcttggcagcagcattgggactcctccagaaggcattacagcagaagttctggtggtgacctctttcgatgaactgcagagaaggaggccacggatcgaatgagagatgccaaagcccatcactcccacggagacaccatgactgtcatggatccaaagcagatgaatgttgctgctgctgtttgggctgttgtttcttatgttgttgcagacatggaagaaatgctgcctaggtcctagaaacagtaagaaagaaacgttttcatgcttctggccaggaatcctgggtctgcaactttggaaaactcctcttcacataacaatttcatccaattcatcttcaaagcacaactctatttcatgctttctgttattatctttcttgatactttccaaattctctgattctagaaaaaggaatcattctcccctccctcccaccacatagaatcaacatatggtagggattacagtgggggcatttctttatatcacctcttaaaaacattgtttccactttaaaagtaaacacttaataaatttttggaagatctctg

SEQ ID NO: 415 - DNA, 569 bp, Homo Sapiens
agctgtgattaatcgtggaatgtgctgatgtgcccactaaagatgcctggtaagcagtggctcctctaacaagtgggcagcttggaactgggaacgagagagccaccgaaacagaatgagggagacaaagaagtgggcatcacccttaactccacaagggcttcccaagggcgctgtaccgtacgcaggcccaggacgaactttatttctcgccccagcatcgctgtccttgtcggtgagaccctggctttagggcagacaggaccacgtttcataagttcatgctgtcccagcagaggaataacgccagaaagtgttccagtacaaccagagaaagagagtccatgagaaatctgcccttgtgaagttggaatcccctcaacctcaccccgctgacttgaatgaagcgactgagacgggctatgatggagcagatccggttgctcgaccttctcccttgcaccaacacatgtagttaatagttactggacatgcatattcagtgggttccaggtaccaaacttgtattgaatggtatgtgccagacaccgtcttgagatctggagaat

SEQ ID NO: 416 - DNA, 569 bp, Homo Sapiens
ccggggtgcaggtgccaggcaggtggctccggccagcccagccccagcatgagctccttcgacctgccggcgccctccccacctcgctgcagcccccagttccccagcatcggccaggagccccccgagatgaacctctactatgagaacttcttccacccacagggcgtgcccagccctcagcggccctccttcgaggggggcggcgagtatggggccacccccgaacccctacctctggttcaacgggcccaccatgaccccgccaccctacctgcccggccccaacgccatgccccttcctgcccctaggcctatggagtgcatgaggccgctgctgcccagcgtgtcggggcttgggagggagcgacctgggctggctgcaccatcccctcgcagggaggaagctgatgaagcttggtgcggccaccctattcctactcggctctcatcgccatggccatccacggggcacccgacaagcgcctcactctcagccagatctaccagtacgtggccgacaacttccccttctacaacaagagcaaggccggctggcagaactccaa

SEQ ID NO: 417 - DNA, 419 bp, Homo Sapiens
gctgaccagaataaactccctgctgagttcaagctttgaatggaatggatgcaaatgatgttgtttccattagagcaggtgctcacagcattctgattggcctgagcagaccaaggctatggctgttgggacaagcttagcatcctggacatcttgtcaaagaacctcactcacccctttggcctttacagccctcagaggagagaaaaccaattctccaacaaacaggtctctccaacatggtggtgctggcaggcttaggtttagaaaatcctgactgttaaaggcgtttgaatacatcacattcctatgcaaatgtttttaatctccagtttaatgtagtttatttttcctatatgtaaagtatttttatacggcttgtatcatgatagtttagcaataaaacagttggaagcaaa

SEQ ID NO: 418 - DNA, 450 bp, Homo Sapiens
agggatggtgatggagatgccaatccatggaatcaggtggcacagctatgttggtagctatagcagaagtcttcttggcaaagattcctccagggaaggaaggtaccattggagaaccatgcatgaagacagggaagaaatgattggaatcatgaaacattaaactggaaggaagccctaggcaaacctaactcatgggaaaacagacacccacatgttacccagtttagtaccaaaaccaaggctggtatttgcataaatatacttttcttctctatctaatatcaaggccttcttagtattgttaataggccttaagcttggtttgtctacatagaaatcaaaataacaatgtcaacccatgaaagaattaaaagaagtcccaaacagttctgatttcctccaatgtgactatttctgatatattataaaataacagaaatcaaactc

SEQ ID NO: 419 - DNA, 262 bp, Homo Sapiens
ctctgccagctccacgcttctggagtcccccatccgtcttggggcccagctgcccactgtctgagttcagaccttctcaacactccctggcttctctgccctagttttgccttctccaatccactcttggtgggtggaagtacggttaccatggtaacttgaagacaacgcaaatctgatggtatcattacaatgacctgggaaaacctccagtgccacaaaataaagctcaagtcactagctttgcgctcgcacctgagtt

SEQ ID NO: 420 - DNA, 691 bp, Homo Sapiens
  misc_feature (523)..(540): n is a, c, g, or t
acagaacacctaatctcttcttaaatttgacaaagatccagggtaataaggaaagaagattttaatttgccagaatagtatgcctatgttgttaaaatacacaatgaatccatggtatgaatagcagtttctggataaacattacttgaggtcctaaaatgcagaagggaaaaagcaacttttgtcagatgcctactttgctttcatttcatctctaatattttggatggggaatcatccaaagcttctgactgcatgaaggtcaggtgtgccagtgtgcagctgggtttcttttccagaattaaaagtactttgggtggtggtgagggtcagaggaagaagtaaagattgtgagaaaggggaagaaacatgggcttggggagaacccagaattggggccagaagacctggcactaggctacagcacttagcacctctgatcttgtttttcctcatctgtaaaaggaggttaacaaagcttttctgcccacttcttggggagaagggaataacataattggtnnnnnnnnnnnnnnnnnngttttgaaaaataagcaacactgactttatgtaaccaagcattattaattctccaccccatatcactggtagatacctgtattcaagctatctggacatgaaagtagtcacattttagaagtcatgaagttgatgctaataaacctaatct

SEQ ID NO: 421 - DNA, 649 bp, Homo Sapiens
  misc_feature (207)..(207): n is a, c, g, or t
cagcaccagcagggctatgacagtgataaggaggtggacagcgagctgggcacctggaagcaccagctgcggcgcatggagatggataagaccaggaatggggcgaagcagctgacaaagatgggccggggcaagcacttcatcggagacttcctgcctccaaacgagctggaaaagtttatggagaccttcaagggccctgaaagnaggcccgtgagcctgactactcagaagtacaaagagttccaagctgactgtggagaacatcggctaccaaattgctgatgaagatgggctggaaggagggcgaggggctgggctcagagggccagggcatcaagaacccagtgaacaagggcaccaccacagtggacggcgctggcttcggcattgaccggccggcggagctctccaaggaggacgacgagtatgaggcgttccgcaagaggatgatgctggcctaccgcttccggcccaaccccctgaacaatcccagacggccttactactgagtgttctggaaatacatactttctgaatgaccaaccgtccctggactgtggaatgttccggcctgcatttctgcccaccccttccgttgtcacgagtgccgtgccgtgtaataaagtcccagtgctcatccaccaaa

SEQ ID NO: 422 - DNA, 496 bp, Homo Sapiens
tattttaaagtgtttatttttttctataatacatttcattcaaatcataaaagtctgatacatttttttctcaagaacaacttacactcatttgagatgctttttctttcctttaatcttataggatggacaaagatacactttaatggacaaaaaacaccagagttcattacaaatacagcttcccaggccccacctccagcacttctgactgagcgtctgggaccaatcctaggatcgcaaaactgtaaaattcccccagtcaactccacggcaggcaggcctggaaccacccttagtggaacactgcttaggacttgtctgttatctaccagaagcaatttcagaaaatcaggagtaattacgtatacagaaatagctcttctataaaatttccatataaaaataatggcatttatttacaaagtctgagatactacaaaataatatatcatattaggttgtgtacttcaatctaataaaggaaagtctacat

SEQ ID NO: 423 - DNA, 392 bp, Homo Sapiens
tggagcatgcatttcctagaagtggtttcatagctcctgtgtgttcatggaaaaggggagtataatgatggggatgctggaagcttttttaatgttttccaaaggaaaggaacccacactgctccccagagttcctttccaatggccctgcagtaagaacggaggacaatgtattgctgggtgcttaaaatcctccctcagtgaagcacaaagagacactttgtaaagaaaaaaagagcaagcataggttctctgtgggaccttgtggagtggtgttttcacgttggtctctttggctcaattgagcataatcagaaagaaatgtgggttattgggaagagacaaaaagcagtggctaaaataccaaagttggcatgtgttctttttttaaa

SEQ ID NO: 424 - DNA, 1740 bp, Homo Sapiens
  misc_feature (1179)..(1226): n is a, c, g, or t
gggcatgactgtcgccacacgcctctgtgtacatgtgtgcagagcagacaggctacaaagcagagatcgacagacagccaggtagttggaactttctgttccctatggagaggcttccctacacagggcctgctattgcagaatgaagccatttagagggtgaaggagaaatacccatgttacttctctgagttttagttggtctttccatctatcactgcattatcttgctcattcttcagttctctactccctcttgtcagtgtagacacaggtcaccattatgctgttgtatgtttatcaaagagcacttgagactgtctgaagcccaaagcctgaggacagaaagaccctgatgcaggtcagcccatggaggcagatgcccttgctgggcctgggggttttccaagccctcagctggtcctgaccaggatggagcaagctcttcccttgctcatgagctcctgatcagaggcatttgagcagctgaataacctgcacaggcttgctgtatgacccctggccacagccttccctctgcattgacctggaggggagaggtcagccttgacctaatgaggtagctatagttgcagcccaaggacagttcagagatcaggatcagctttgaaggctggattctatctacataagtcctttcaattccaccagggccagagcagctccaccactgtgcacttagccatgatgcacaacggcaacagaaaccaagagacacaattacgcaggtatttagaagcagagggacaaccagaaggcccttaactatcaccagtgcatcacatctgcacactctcttctccattccctagcaggaacttctagtctcatttaacagataaagaaactgaggcccacggtttcagctagacaatgatttggccaggcctagtaaccaaggccctgtctctggctactccctggaccacgaggctgattcctctcatttccagcttctcagtttctgcctgggcaatggccaggggccaggagtggggagagttgtgatggaggggagaggggtcacacccaccccctgcctggttctaggctgctgcacaccaaggccctgcatctgtctgctctgcatatatgtctctttggagttggaatttcattatatgttaagaaaataaaggaaaatgacttgtaaggtcnnnnnnnnnnnnnnnnnnnnnnnnnnnnnnnnnnnnnnnnnnnnnnnncagaaaagcaaaacacaaacgccaagaacaacgacaacaatgaacgagcaacacacgagacaacatcaccaccgccaacgcaagacacacagacacataaaaaaacaacggcgacgcggatcctcagcgcggctgtcgcgcagcggcgcggttacatagtcagacacaaaacaagcaaactcatcgcgtaacccacgtacacccacacgccatgggccgcacccgacgacgctgctgccgccagtcactataaaactaaggtcgtcgaggacagaaatcgtagcataaacaactcatacggtcggcgcaggcgaagaccagatatccccgtagtgcggtgcatagtgcatgttaggtagccgctaagaagagaagcatacatagtcacagtagggcggtggaaccggtcgcacaacagagaggactccacacaaccatagtcagtatactagctgacatcctccatgtagatgagacgacccgtcgctctcaccctcgggtaacgaacaacgag

SEQ ID NO: 425 - DNA, 749 bp, Homo Sapiens
acgggatgccgcagcccgaacgagcggaccgagccgaccgggcaggtgcacggctgcggggacggcagcggcatgaccggccaccacggctggggctacggccaggacgacggcccctcgcactggcacaagctgtatcccattgcccagggagatcgccaatcacccatcaatatcatctccagccaggctgtgtactctcccagcctgcaaccactggagctttcctatgaggcctgcatgtccctcagcatcaccaacaatggccactctgtccaggtagacttcaatgacagcgatgaccgaaccgtggtgactgggggccccctggaagggccctaccgcctcaagcagtttcacttccactggggccaagaagcacgatgtgggttctgagcacacggtggacggcaagtccttccccagcgagctgcatctggttcactggaatgccaagaagtacagcacttttggggaggcggcctcagcacctgatggcctggctgtggttggtgttttttgggagacaggagacgagcaccccagcatgaatcgtctgacagatgcgctctacatggtccggttcaagggcaccaaagcccagttcagctgcttcaaccccaagtgcctcctgcctgccagccggcactactggacctacccgggctctctgacgactcccccactcagtgagagtgtcacctggattgtgctccgggagcccatctgcatctctgaaaggcagatgc

SEQ ID NO: 426 - DNA, 824 bp, Homo Sapiens
gctcgggggacccaggcccagctaccttccctccgcccccgggctctgttctcactttccagcagtggaaggacgggaagcgggagccatgcagtccgaatcggggatcgtgccggatttcgaagtcggggaggagtttcatgaagagcccaaaacctattacgaactcaaaagtcaaccgctgaagagcagcagttccgccgagcatcctggggcctccaagcctccgataagctcctccagtatgacatcacgcatcttgctacgccagcaactcatgcgtgagcagatgcaggagcaggagcgcagggagcagcagcagaagctgcaggcggcccagttcatgcaacagagagtgcccgtgagtcagacaccagccataaacgtcagtgtgcccaccacccttccctctgccacgcaggtgccgatggaagtccttaaggtgcagacccacctcgaaaaccccaccaagtaccacatacagcaagcccaacggcagcaggtaaagcagtacctttctaccactttagcaaataaacatgccaaccaagtcctgagcttgccatgtccaaaccagcctggcgatcatgtcatgccaccggtgccggggagcagcgcacccaacagccccatggctatgcttacgcttaactccaactgtgaaaaagagggatttataagtttgaagagcaaaacaggccagagagcgagtgcccaggcatgaacacacattcacgagcgtcctgtatgcagatggatgatgtaatcgatgacatcattagcctagaatcaagttataatgaggaaatcttggggcttgatgg

SEQ ID NO: 427 - DNA, 1195 bp, Homo Sapiens
catgaagcagttccgtcgatcctcaggtcacagtggtggaagggcaaatgcacccttggtggcacactggtctcccccgtagccgatgtccacagacgtcacgagcactcttcctcccggaaccgtccgtgcacacactgcaggctgcacctcacttggcagtatctgcccgtgtagccagggggacagtggcagtggcaggtgctgatgttgagacgtccatggttctggcagctcatgcgacaaggattcctggggacctcacagagcccccctgcatggtcccaggctttgaagcagcctgagacactggctgtgcagagcgaacaccaggcacccttcttataggggacgattgtcttcccgttgacctcccagttgcctctgggggagtaggcacagacaaaggcttctatcgctgcctggcctgcagagcacaggtgccgcccacagcccagctggcttgaggtggcccacacgagctgcgtgtagtgggtgcaggtggcgttgcgagcacactctcctgccgcgtggctgtaccgctgcccctctgcaaaccataggctgaccacttcgacaaaggacgccaagcccgcgggtagcagctgcatgttccagcccacttgcagggtgcgccacaggccggacgccaggctcggggttggggttccacagagggctgccctggcttgagccagctgggccaggctgtcactccagtccagcctccgcatgtcagccgcagggggctggacccagctgcgcaggcggttgtgcagggagaggagcaagaaactctccttcctgttcagggctccggccatcggagcctgctcctgcagctggggtggccacacctctgcccaggcggtgccaaggagggccaggagcacagccaggagatgcccccggccaggggaggtctctggatgcagcatgggtctgttgggcccgtcaggcgctccgtgcacagcctggctcagccacccggcttgtttctcaggctggatggagctattcacaatctccaggagtcaggctgggctggtggacaaaagagggaggctggtgagtgagtaatcagtgtgtccagacagcctcctgttgacgctggcatgaaaagagacaactccgggggatgcctgccatgctccggccatcggccatggccagcccgcccccgacagcaggcaga

SEQ ID NO: 428 - DNA, 814 bp, Homo Sapiens
cagcctcggccgccgggcaagtagctccgagcggctgcttcccggttgcctcgacgaagacagggggcgccgcgctccgcttgctccgcgcctgagccatgcccagcagccctgtgtaaccaccgagtcccggccggagccgaccgacccagtgtgcgccgtctttcggccgagctgagctttcgtgcacgcaactccctctgccccagccggccccgcgccaccatgccccgggcgactgcacttggggccctggtgtcactgctgctgctgctgccgctgcctcgcggcgccgggggactcggggagcgcccggacgccaccgcagactactcagagctggacggcgaggagggcacggagcagcagctggagcattaccacgacccttgcaaagccgctgtcttttggggagacattgccttagatgaagatgacttgaagctgtttcacattgacaaagccagagactggaccaagcagacagtgggggcaacaggacacagcacaggtgggcttgaagagcaggcatctgagagcagcccagacaccacagccatggacactggcaccaaggaagctggaacaggatggccgggagaataccatactcctgcacagccctgggaccttgcattgccgagcaagaccttctctccccgggtccgaagagccacaacctcaaggacagagaggatatggcctggaggagtcatccctacgtcattggagggaacttcactgggaagccagagggccatttttaagcaggccatgagacactgagaagcacacctgtgtgaacttcatagaa

SEQ ID NO: 429 - DNA, 840 bp, Homo Sapiens
gccctgggcatgtggatcccgctctacctgcaccgcgcccaagttgtgcagaagacagcagagacgtgcaacagcccgccctgtggggccaatggacagcctcatctttggggccatcacctgctttacgggatttctgggcgtggtcacgggggcaggagccacgcgctggtgccgcctgaagacccagcgggccgacccactggtgtgtgccgtgggcatgctgggctctgccatcttcatctgcctgatcttcgtggctgccaagagcagcatcgtaggagcctatatctgtatcttcgtcggggagacgctgctgttttctaactgggccatcactgcagacatcctcatgtacgtggtcatccccacgcggcgcgccactgccgtggccttgcagagcttcacctcccacctgctgggggacgccgggagcccctacctcattggctttggtgaaccagctggcgatgccgcccgcatctgtgaaagtctgaggtggtgccattgggacaatgaagaacccacactcccacctcgtctgggaggtgtcctacagcgtccgggaccggctgggctgccccaaagctttctgtgtgatccacggctaggcacccaccctctctggcccaggcctgctgagtggccctggcatcaagaagaggctgtgtcctcagttaccctggaaggatgtgtgtgtaggagccacacggttggacaggttcccagccctaggtttgggccgcagggcccctggggccaagaagaagacaggcccaagtggtgtccggggagagcctggctgcaccagcttatgtgatcttgggcagtcctgcctcc

SEQ ID NO: 430 - DNA, 724 bp, Homo Sapiens
cagaacacgatggcaactgtcgtgagagtacgacagaccagtacaacacaaacgctctgcagagagatgctccacacgtggaaccggatttctcttcccagaaacttcaacatctggaacatgtgatggaaaattatactcagtggctgcaaaaacttgagaattacattgtggaaaacatgaagtcggagatggcccagatacagcagaatgcagttcagaaccacacggctaccatgctggagataggaaccagcctcctctctcagactgcagagcagaccagaaagctgacagatgttgagacccaggtactaaatcaaacttctcgacttgagatacagctgctggagaattcattatccacctacaagctagagaagcaacttcttcaacagacaaatgaaatcttgaagatccatgaaaaaaacagttttactaaagggaggaaaaagagaggaagagaaaccatttagagactgtgcagatgtatatcaagctggttttaataaaagtggaatctacactatttatattaataatatgccagaacccaaaaaggtgttttgcaatatggatgtcaatgggggaggtggactgtaatacaacatcgtgaagatggaagtctagatttccaaagaggctggaaggacatctaaaatgggtttggaaatccctccggtgaatattggctggggaatgagtttatttttgccattaccag

SEQ ID NO: 431 - DNA, 814 bp, Homo Sapiens
tctccctcgagttgggacccgggaagaaccatgaagtggctgctgctgctgggtctggtggcgctctctgagtgcatcatgtacaaggtccccctcatcagaaagaagtccttgaggcgcaccctgtccgagcgtggcctgctgaaggacttcctgaagaagcacaacctcaagcccagccagaaagtacttcccccagtgggaggctcccaccctggtagatgaacagcccctggagaactacctggatatggagtacttcggcactatcggcatcggaactcctgcccaggatttcaccgtcgtctttgacaccggctcctccaacctgtgggtgccctcagtctactgctccagtcttgcctgcaccaaccacaaccgcttcaaccctgaggattcttccacctaccagtccaccagcgagacagtctccatcacctacggcaccggcagcatgacaggcatcctcggatacgacactgtccaggttggaggcatctctgacaccaatcagatcttcggcctgagcgagacggaacctggctccttcctgtattatgctcccttcgatggcatcctggggctggcctaccccagcatttcctcctccggggccacacccgtctttgacaacatctggaaccaggcctggtttctcaggacctcttctctgtctacctcagcgccgatgacaagagtggcagcgtggtgatctttggtggcattgactcttcttactacactggaagtctgaactgggtgcctgttaccgtcgagggttacctggcagatcaccgtgggacagatcaccatg

SEQ ID NO: 432 - DNA, 712 bp, Homo Sapiens
gaatcctaaaggaacttggaaagactgggcacagactgcttttgatgaaagcattaacctttcagctgttggatacttcagaggttatgagtcagacatgaactgggagaaaggcgaaggccagcccttcgaatactttgtttatggagctgcctgttccgaggttgaaatagactgcctgacgggggatcataagaacatcagaacagacattgtcatggatgttggctgcagtataaatccagccattgacataggccagattgaaggtgcatttattcaaggcatgggactttatacaatagaggaactgaattattctccccagggcattctgcacactcgtggtccagaccaatataaaatccctgccatctgtgacatgcccacggagttgcacattgctttgttgcctccttctcaaaactcaaatactctttattcatctaagggtctgggagagtcgggggtgttcctggggtgttccgtgtttttcgctatccatgacgcagtgagtgcagcacgacaggagagaggcctgcatggacccttgacccttaatagtccactgaccccggagaagattaggatggctgtgaagacaagttcacaaaaatgattccgagagatgaacctggatcctacgttccttggaatgtacccatctgaatcaaatgcaaacttctggagaaaacagagtgcctcttcccag

SEQ ID NO: 433 - DNA, 777 bp, Homo Sapiens
gcctgccccagcaaggcagggttctcccggaacatcatgaacatcatcgatgtggtggccatcttcccctacttcatcaccctgggcaccgaactggcagagcagcagccagggggcggaggaggcggccagaatgggcagcaggccatgtccctggccatcctccgagtcatccgcctggtccgggtgttccgcatcttcaagctctcccgccactccaaggggctgcagatcctgggcaagaccttgcaggcctccatgagggagctggggctgctcatcttcttcctcttcatcggggtcatcctcttctccagtgccgtctacttcgcagaggctgacaaccagggaacccatttctctagcatccctgacgccttctggtgggcagtggtcaccatgaccactgtgggctacggggacatgaggcccatcactgttgggggcaagatcgtgggctcgctgtgtgccatcgccggggtcctcaccattgccctgcctgtgcccgtcatcgtctccaacttcaactacttctaccaccgggaaacggatcacgaggagccggcagtccttaaggaagagcagggcactcagagccagggccggggctggacagaggagtccagcggaaggtcagcgggagcaggggatccttctgcaaggctggggggacccctggagaatgcagacagtgcccgaaggggcagctgccccctagagaagtgtaacgtcaaggccaagagcaacgtggacttgcggaggtccctttatgccctc

SEQ ID NO: 434 - DNA, 921 bp, Homo Sapiens
  misc_feature (58)..(58): n is a, c, g, or t
  misc_feature (79)..(79): n is a, c, g, or t
gatgaaggtcagactgatgggattatggaattattgatgctggaggttggcataacgngctgaattgatatccccggantaagtggatcccagtccaagctttagcacaagttttgtgagtgcaatttctgtggcaagtaaatctcctacagctgttaagctgtgcctcaccagggaagaggtttaagtcagtatggtgtgagtggctcaccaacgaaatctaaagtcacaagttgtcctggctgtcgaaaaccacttcctcggatgtgcgctttgtctcattaatatgggaacaccagtttctagctgtcctggaggaaccaaatcagatgaaaaagtggacttgagcaaggacaaaaaattagcccaatttaacaactggtttacatggtgtcataattgcaggcacggtggacatgctggacatatgcttagttggttcagggaccatgcagagtgccctgtgtctgcatgcacgtgtaaatgtatgcagttggatacaacggggaatctggtacctgcagagactgtccagccataaaatgttaccaccttaagagaacccttcaagtgtggagctttctagtaggtgtccttcatagctcagaaacatacctcagaacaagccattcatgacttacctgtaatgggaaaataaatcattctatcagatcagcagttttgatgtttgagtgattttgatatgcttcacagagacaaatgctgccaaaataaacatcgaagtatagacatgagttctgttcagcaggttgaaaagtctgatttagaaaaactttctaagttttggttgaaattatgaacactctagaagcagaatttctggaagagccaagaacagactttgagcctatatcttcaaagctgaaactggatatctttcaataaaatatgtgcactttt

SEQ ID NO: 435 - DNA, 384 bp, Homo Sapiens
  misc_feature (41)..(41): n is a, c, g, or t
tatgaaccggacaccaaaactcaggaattggtggcttaatnttagatcagtgcttgtactaggcttagttatatgaatctttataacacataattacttaactttgtagccatatatgtaattgactttgaatgttatttacctgaaattaatcttccttcacacatggaccgtaaacggttcccagttgtctgagagcctcatgagggtttctaggatttatgaccttatgaccagtttttttcatttaccaagattttattttcctacatgaaaatttaattgagtaataattattcacatgtgcattttctttttagctgttaaatgtactatgccatcatccaccatttagtaaaatgtagctggcccagggacatgtaa

SEQ ID NO: 436 - DNA, 744 bp, Homo Sapiens
aaaatttagtcagaatgtaagacgcttcacgagaaaagaaaagcatgtcagagaaagaactcagaagtgacagtctaaaggtaactaggaaagcaaatgtaataaagacacgaagtctgttcattattatcattgctattacttttccttctagtaataaaattatatagtaaggggaaagaaattccccatggcaagtcctgtctctataagtatcaaaatttaagagaaaacagctttgaatttgatttatattgcacatacataataatgtacaccctgtcagcctttagatttacttttactggcttcctgggtttccaaatgtgcttttgttacttttgctggtctttagggtgaggcctgcttggtggtgtgatgaataagggcatttcctgcattctttgtctaccagtatattatcgcccctctatctatatgtattatattatacaaacaaatggttgaggatgagtacacttcttgcaaagccagtatcaattaaatcctatctgcacttcgtttaaattcaaaagtaattcacagagtgactgcctcagtcaatttcatcctctcagaagagaatgaagcctgaaataagatcatcatcatatattgaagatttttctaacacatgggaaaagtcacttcttcaaaaggcttcataaagtctggaaaatgaaagtctattatttaaaaattccatgctagcctttaaaaagaacccaaaatttagaaaaaaaa

SEQ ID NO: 437 - DNA, 230 bp, Homo Sapiens
ctagacaaatgaaaacatgttttatttacaagaaaaaagtctgtacattgggtatacataaaaatatacaaaaccaaaatagaaaatatccaagtgttaaaatgtgtacaaacacttttaaaatgcgactcctggaaaacttcaagctttaattagtttgaagagtacacatttcattttaaaaattatcatacaaaagaattcccaaagctgttaaaaaaagttcactg

SEQ ID NO: 438 - DNA, 422 bp, Homo Sapiens
tggcacaaagtggtagcacaattaaattcagtatgggtggagcatggtacagtcttggtgccatagaaggagtagttgcatagtcacacatcatttgataagttggatgttccattacatagaggaacacaaaattccagggtttttggaggaagggattagatagtgactaagccgccagaattgaggtggccattcctttttgtataggctaagaaacaggttatcagtgaaaagttaattatggctttggcactagaatagcactgttgcaaagtatttaagcaccccccatctcagccctttattttatctttcatgtgggctaatgtgaggataatcttacagatattataggaatttcttttctatctttatgaaaacaacgtatataaaatatatctagaaaacctttaaaaaaa

SEQ ID NO: 439 - DNA, 441 bp, Homo Sapiens
gttcccaagacccgatccttcccctgcaaccagacagtctacaactgccccctccagcccattttctgccgtgaaaccccagccagccacaccagactctggaaccctttttcgactgccccaactcttggacaccaggccaactagaacacccaacaccaaactgtacagactctcccaccccaacctccccagactctgcacggatgtcctaggccccctccccaactctaaccagaccccatccccctaagtccctttgtcttgacccccaagtcttcaaccagatatcctcggcaacccacctcccaccctcctcctcttctccttcaagacccaactgagcacccgctctgattccccacagcctttctccctgccaccactcccttagtctttcccaggcttactctcccaataaatgtgctagagctctgcaaa

SEQ ID NO: 440 - DNA, 458 bp, Homo Sapiens
aagtaacatacatttacaataaaaatctacaagttctgacccataggagagtggaaaactcaaaggctgcttttgtcctgaaagaatttgcctattctaataaaacagctgaggttgaaacggctcagcctctgaaaggggtctgacccttccttgagcccttgcctccagtgacaatctcccaagctaagggagaaaaggaaccaaaagtctgcactcctctctacctctagcagtgcagggagcgaaggaaagacaagggaagaaacccttcagattttcagatcaaattcacatcactggccatccaagaaatcttaagctctgcgtttatcgtcaaccatttctgcatgagggaagcaaacagtccttgctgaaggaaggtgcctgcatcctgggcctcggaacccactgaaataatttagcgaagtgcataataaaaataatatttgccctta

SEQ ID NO: 441 - DNA, 577 bp, Homo Sapiens
cagccccaggcccctctgcccacgctgcacccagcaccaccagcgccctgacccccggacctgccgctgccgctgccgacgccgcagcttcctccgttgccaagggcggggcttagagctcaacccagacacctgcaggtgccggaagctgcgaaggtgacacatggcttttcagactcagcagggtgacttgcctcagaggctatatcccagtgggggaacaaagaggagcctggtaaaaaacagccaagcccccaagacctcagcccaggcagaagctgctctaggacctgggcctctcagagggctcttctgccatcccttgtctccctgaggccatcatcaaacaggacagagttggaagaggagactgggaggcagcaagaggggtcacataccagctcaggggagaatggagtactgtctcagtttctaaccactctgtgcaagtaagcatcttacaactggctcttcctcccctcactaagaagacccaaacctctgcataatgggatttgggctttggtacaagaactgtgacccccaaccctgataaaagagatggaaggagctgtcc

SEQ ID NO: 442 - DNA, 730 bp, Homo Sapiens
  misc_feature (581)..(591): n is a, c, g, or t
ggtgtcctgtccagggtgggttgccgccttgcaccccgagcttccaggatagcctccagccacccttgatgaccctgaactggaagaagtgccttagaaaatgaatggatacaaatgattgtaataaagcatccaataatcatacaaatgtacaacaataaatgatgtcgtaggaaagtgctcaatgagcccaccatatttgtgattgttttgagctgtatggtgggaggaggggctccttacagttttatctttgcaaatatttattccctgatttaacccaccaccacaactgctgttactcagtaattggccaaaaattgggcaattatcttgtttttattaatttaaaaaaatgtgcatatggctgacatttatttcaatgcttaatattataagtgttttgggttttgatttagaagctgggtgatatttttgtgactagaaatatgccagaggaacttaactcttgtttatattagcctatggtaaaaatggttttgttatatgtcacttcgcttaaaagtcacagtttccatgaacctatcaacattgttaagtgagaatttattatactaccnnnnnnnnnnncactaaaagaacagtactagacattgttgataaattcggattcttttcttataaaatgatcacgtgaggcctgaggaaacaatctggggaaagtgagttaagtgctgactggtcttcaggtctgacctctaaaagccgt

SEQ ID NO: 443 - DNA, 261 bp, Homo Sapiens
  misc_feature (126)..(140): n is a, c, g, or t
tcagtgaagcactcccttccccactatagcctttagtgaaccctcgtttcttgcttctttattatctggactgttgtccacttggcaattgttcaggcctctgtgttgttactgatttttgtatgnnnnnnnnnnnnnnngtcttgtttttccaactagattgtgagctccttaagggcagagccatgaattatacctctttgtatccccagtgccttgcatacagtaagcactcaataaatatttaatgatgaaaaaaaa

SEQ ID NO: 444 - DNA, 808 bp, Homo Sapiens
cctacttgcgaacaagtttgagttgggtttctgtcacttgcagccaaaagaaacctgccagctactgtcagcatcggtcaaccatctgtgaaactgtgagctgacaacctgtcccctccctgtgaaggccacaacatcccaacaccattagtcaccaaggaagtctgggagaaatttctaccagaaaggggcaagggaggaaacattttgttactgctggcccactctaccctctgaaacagggcggcaggatctggcagaaagaaagtttacaaggggcttctaagcaggcagtgctgccccatgccccccgggcttctcctcccagcagggcagcagcatatggcaccctgggataggaggtctgcaggggcgggggcggggaggctgaacatcctgggggcaccactttatgaggaaccatttatggccagaactctacaggggcttcagggacctgaatgaactcatctctgtagagtgagagtcctgggcaggaggagaggtttccatagcccaggaccacatgctggaaatttggtctctgcagcttaaaatctgagagaagatggtgtctgcagcattcaaaagggggaccagagggaccctccacccctggcccccccagctattacaaacatgagccctgggaagattcctatcaaaaacccaagctggggcccatgagtcaagtctggacgtgcagtttggggcaagaggacagatggaccccacaggccatctgtctaaatatttccaaattataaattaaactaacagggtgttaaataaagtatgttctaacctc

SEQ ID NO: 445 - DNA, 920 bp, Homo Sapiens
acggtgtctgctactgttaaatgtcagcccacagagctaataatacctcagtataatgtcatgagcagttgaaattcatcacatgaaaagtaatctgctgaaagacttggttgcccactgcctaactgtgtacagtgttaccagtgtcccattatggataattctcaatatgttaacacctaggtgttcccaatacctttttcccctcatgtcactactgaattttgacaggaggaaggaatagaatgatagcttgttttatttgtaaagctttcagtgaaacactacatacacgaagaaaaggaacaaggtttaactatttaagaaccatttgctgccgcatagtgccattggatagggaagaacttcagaaatctgtggtactcttggcctagtctttgtcttccctgaacgtgtctccactctgtgaagccagcatctaggggctaaagatgcaaaggaaagcagcatgcattgtctgtacaaatgtgcagcgaaataccccaaagcttttcctactgtacagatctctcgagtctgctttaagtgatttcttttcttcttgattattttcttatatttctatatgtatagtgtaatagccttttgttaactaattttcttttttccttttagtaattaagcacgatcatgtccctttttaagccttacctgagaggaacaatgccttaaaataaaaaagcattaatgagatgaaagtgtgcacagaataactttcctctacttattctgtactttgccctcatgagttccaatgttgtgtgaagacaggcagatgctgcacagtgaattgcagatgatattacagaagtgatgtctgtaggtcacattaaatactgacttgagcagtgggtgacacaacacagtgtttgtcttccacagggaagcttaaacaaaga

SEQ ID NO: 446 - DNA, 391 bp, Homo Sapiens
gtttccacctgcacccttcgacacttattagaactttcatgaaacagtgtgacaactcttattcctatcaaacaaaacagaactttcttccttgtatgtaaagaagtttgcaccctctacaccgaataaggagatgcacagttccaacagttattgtatacatcactgaccatattagtcactcctcaaaatccatcataggtccaccaaatattctgttaccttaagactacattgtaagattaaactccaacaacatgtatatacaacaaatgaatggagagaaaaataaaagtggtgagcgtataatattaatgtgtacatattacaaatatgcaaagctactaccacacttgattttgtaatttatcatgaggccccgcccccccat

SEQ ID NO: 447 - DNA, 376 bp, Homo Sapiens
ccgccccaccccacgccttagttgcaggcccttttgggcaaaggggcccatcctaaaccaaaggagcccaggccctggccctgctggggctgaaggtcaaaagtaatcctgaaaaatgtttcaggcctggggagggaggggagccccccgacgcctctgcaataactggaccagggggagctgctgtcactcccccatccccgaggcagcccagtccctagtgcccaaggcagggaccctgggcctgggccatccattccattttgttccacatttcctttctactctttctgccaagagcctgcccctgcatttgtcctgggaaacacggtatttaagagagaactatattggtattaaagctggtttgttttaa

SEQ ID NO: 448 - DNA, 949 bp, Homo Sapiens
ctgaggcatgttcatttcaaacatgcagcatattcccaatgagccttataaggtcaagggagaacccttctataaaaagggtgttggcaattccgtccaagtaacacaagctctaagaaccagaggaattcaagggagacagcaatcccgtttcttcgtgtctccccctccccaagttttcttgtttttactcatcctaagtctgtaaccaaagactgtcatttaattaaattctttttgtaaaagattttgggaaagctataaagagatgaggaagatccttatgatttcaaagcctttgtggggaggagtgtctaatcgtgtcaaagatcatctatttgacaaaatccatgaggaaaaccaccctgtgcgcatcttgtccttgctcctcctggctgatttcaggtgagctgatgaattgcctagtctatccaataggataacgtttcatttgattgaaattctttacatatacacatgtatgtattctgtttacaaagtttcattacatgaaactaaattatgtcattatgtattttttgaggtcgaagaccccaatttgactgtactatgaagagttgttctttaaatgctttgtctgcagaggttttacatgatattcgtagattttcagagcaggccccaattttaactgaagtcctgtcaacacatcatttcttgtcatcaatagcagggattttccatcaatttcctgttcctgaaaagcactagcttgctcctcaaatcccacggttcggaaataattgacgacatccatcacggcccagtctgcaggatcaggtggtctcccattttccatggaattttttacaccgacagagccattttccttgttttccatgtcaacagatagcatgggaaggctgcagggttcctttacttcagcaactcacattctcaacgaaagcctcaaaaacccgtctgtgag

SEQ ID NO: 449 - DNA, 342 bp, Homo Sapiens
tgtatagatcaacttattttttaacttcagaaacaaaatcatagaacttcattataagatttttattacatatcacatttatatgtattcttaacattttaagttatatataattaaagtctgagatacaatgggtaatttttaattcttgtattcctcttttaaacattgttatatagggttttgttttgttttactgttattttcagtttatcttattcactacaatatgaagtctaaaaggccagtggggctcaggactgtctgcaagacaatctataggtcaatctgtataataggcctctactccaatcatattaaagtaagattttctaatttttt

SEQ ID NO: 450 - DNA, 551 bp, Homo Sapiens
aacattgtcaagttctgccgagccatagacatcatctactccctgatcaccagctgcaacatgagcaaacgcatggacatcgccatccaagtcacagaaagcatcgcactctttcacagctgcctcaacccaatcctttatgtttttatgggagcatctttcaaaaactacgttatgaaagtggccaagaaatatgggtcctggagaagacagagacaaagtgtggaggagtttccttttgattctgagggtcctacagagccaaccagtacttttagcatttaaaggtaaaactgctctgccttttgcttggatacatatgaatgatgctttcccctcaaataaaacatctgcattattctgaaactcaaatctcagacgccgtggttgcaacttataataaagaatgggttgggggaagggggagaaataaaagccaagaagaggaaacaagataataaatgtacaaaacatgaaaattaaaatgaacaatataggaaaataattgtaacaggcataagtgaataacactctgctgtaacgaagaagag

SEQ ID NO: 451 - DNA, 565 bp, Homo Sapiens
ctagtttgactccttggggtagatccaagagactgagaagatggaggcatcctagtcatggcctcaacaaagctggggaaagaaaaactccttctgtcctctcttgacctttcatggaggggcactgtgtgttctactcaccatcctcactggaaacagaagagaggaaaaagcatcagattttagcagaaaggatagagggaagacatatggaaaaacttactcatgggatgaaagacttcagattggacctgcttctcttctgagatttttcttctgcctgccggtttgtttttgtgtctacctaagaggcattggatgaagcacagttacttttccaggcctcttccagacagcctcagcacagtttccatacagtgcactgcttcttggttcttctaaatgtcatgtagtatgtgtggtggttagatcacaagttttggagacagacagccctgggttccagtgccatctctgccacttaccagctgtgctaccttggtaattcacttaacctctttgagtcctagtttccttgtaaaatgcaaaaaaacaactactcctt

SEQ ID NO: 452 - DNA, 857 bp, Homo Sapiens
gccctgctttcaacatgcccccccaaggtcctggctacccacccccaggcaacatgaacgttcccagccaacccttcaaccggcctctgggtcaaaactttagtcctcccagtgggcagatgatgccgggcccagtggggggatttggtcccatgatctcacccaccatgggacagcctcccagagcagagctgggcccaccttctctgtcccaacgatttgctcagccaggggctccttttggcccttctcctctccagagacctggtcaggggctccccagcctgccgcctaacacaagtccctttcctggtccggaccctggctttcctggccctggtggtgaggatggcgggaagcccttgaatccacctgcttctactgcttttccccaggagccccactcaggctccccggctgctgctgtcaatgggcaaccagcccagtttccccccgaacagcccctcggccgcggtggcgcccctccagcctgccctccgcttcggcccgcctggcccggccgtgccggcctccgggcccccgcctcccccaggctcggcgtacccatgtggtgcctgtcgcgcgctcgacggtgaacgactgaccaggatgcccttctgtgtgccggcctcctgcctgacctggttcccacgtgagtgcccgggcctgtcctgcccgcgcctctggcgctgctgcctcctgccgccttctgccgctctgggcctgccctctctgcctcgtgaccccggccatcccgtctgtctacgtccgcttccggctgcggctcctcggtggtcgcctccgctgcgtgcgctgttccgtggcccgcgccgtccccgtcgcctccgcttcccccg

SEQ ID NO: 453 - DNA, 688 bp, Homo Sapiens
agctgcatgctgcatacacaagtcatacaggagataaactcagagtcccagccccaaatagaccccatctcttgctcagttgctgtcatcctagacctgtttctttcgccacatttctataatctgccagtgtctgcaaggagaagacatggggggttttctacctaaggcagaagggcccgggagccaactccagaaacttctgccctcctttctggtcagagaacaagactgggaccagcacctggacaagcttcatatgctgcagcagaagaggattctagagtctccactgcttcgagcatccaaggaaaatgacctgtctgttcttaggcaacttctactggactgcacctgtgacgttcgacaaagaggagccctgggggagacggcgctgcacatagcagccctctatgacaacttggaggcggccttggtgctgatggaggctgccccagagctggtctttgagcccaccacatgtgaggcttttgcaggtcagactgcactgcacatcgctgttgtgaaccagaatgtgaacctggtgcgtgccctgctcacccgcagggccagtgtctctgccagagccacaggcacgtgcttccgccatagtccccgtaactcatctacttaggggagcaccctatgtccttaggtgcctgtgtgaacagcgaggagatcgtgcgga

SEQ ID NO: 454 - DNA, 826 bp, Homo Sapiens
ccgaggcttcctcgctgccagctgagtcgtgggcacctgagggactacctaccactgctcccggctgtgccatcgccaccagctcccagcctcctgctcagacccgggacagcccctccatggcccccgagatggaccagttctacaggtccaccatggccatctacaagagcatcatggagcagtttaaccccgccctggagaacctggtgtacctgggcaacaactacctgcgtgccttccacgctctgtccgaggcggccgaggtctacttcagtgccatccagaagattggggagcgtgccctgcagagccccacctcacagattctgggggagatcttggtgcagatgtctgacacccagcggcacttgaactctgacctggaggtggtggtgcagacattccatggaggcctgctgcagcacatggagaagaacaccaagctggacatgcagttcatcaaagacagccgccagcactatgagctcgagtaccgccaccgagcggccaacctggagaagtgcatgtctgagctgtggcgcatggagcgcaagagagacaagaacgtgcgggagatgaaggagagtgtgaaccggctgcacgcacagatgcaggccttcgtgtctgagagtcagcgggcggctgaattggaagagaagcggcgctatcgcttcctagcagagaagcacctgctactttccaacaccttcctgcagttcttcggccgggccgggggatgctccagaaccgcgtgctgctgtggaaggagcagtctgaggccagccgcagccgtcgcgcgcccatccccccggctgctgggccc

SEQ ID NO: 455 - DNA, 308 bp, Homo Sapiens
cagcagctctgtttctgatagaggtggttggggctctcatccctagatcctaaccctttagtatgctggaattctactcttcacttactgcattgactgttgttgattagttattattgcaaagcactgtcaccggcctcagggagtttatgtgtaatagaattaaaaataatagctgtgtataacacttagctcaagccacgcatgtgtgaggcatttggtatgtatctgaattaattctcactaaaattaagcaaaggacttgatagcctctccccgccttttcaataaaggatgaatgaaggttg

SEQ ID NO: 456 - DNA, 928 bp, Homo Sapiens
gtgcggacatccctgaagacccaggcagcggaggccctggaggcggtggaaggggccgctttctttgtgtcactggatgctgagcccgcggggctcaccagggaggacccggcagcgtcgttggatgcctacgcccatgctctgctggccggccggggccatgatcgctggtttgacaaatccttcaccctaatcgtcttctctaacgggaagctgggcctcagcgtggagcactcctgggccgactgccccatctcaggacacatgtgggagttcactctggctacagaatgctttcagctgggctactcaacagacggccactgcaaggggcacccggaccccacactaccccagccccagcggctgcaatgggaccttccagaccagatccactcctccatctctctagccctgaggggagccaagatcttgtctgaaaatgtcgactgccatgtcgttccattctccctatttggcaagagcttcatccgacgctgccacctctcttcagacagcttcatccagatcgccttgcaactggcccacttccgggacaggggtcaattctgcctgacttatgagtcggcatgactcgcttattcctggaaggccggacggagacggtgcggtcttgcacgagggaggcctgcaactttgtcagggccatggaggacaaagagaagacggacccacagtgcctcgccctgttccgcgtggcagtggacaagcacccaggctctgctgaaggcagccatgagcgggcaggcaagttgaccgcacctggtttgccctgtacttcgtgtcccgattcctccacctgcagtcgcccttcctgacccagggtcccattcggagcaggtggcaagtgtccacccggccagatccctggtcaggcaattggctcttttgacgtccccaattaccc

SEQ ID NO: 457 - DNA, 713 bp, Homo Sapiens
caggctggtacggtcggagtgtatggatcgcactcgcccaaggatggcagttccgtgcactctaccactgcgtcggcgcggcgaaacagcagcagcccagtctcgccggcctccgtgccggggcagcgccgcttggcatcacgtaacggggacctgaatttacaggtggcgcccccgccgcctagcgcccacccgggcatggaccaagtgcacccccaaaacattccggattcccccatggccaacagcggacccctctgctgcaccatttgccacgaacgtttggaggatacgcatttcgttcagtgcccttccgtccccagccacaaattttgcttcccttgctctagagagagtatcaaggcccagggggccaccggcgaggtgtattgccccagcggagagaaatgccccctagtcgggtcgaatgtaccttgggccttcatgcagggcgaaatcgcgactatcttagctggggatgttaaagtgaaaaaggagagagacccttgaaccactgggcagccacctcctttgccctagaccagctcctctccaatcctgagggccccctcccccaacccaaggtcgcacctccctcccctcaccccaaggtgtagaattgtgactatcacgatagactgcagaaagttagtcttatgtatagacattattttcgtcgtatgtctctatcttttgaaacacaggtatgtaaa

SEQ ID NO: 458 - DNA, 792 bp, Homo Sapiens
gctagtgcaaatcttcaggggccgtccaggactacagagctgtttcaccctaccttggcttcaatctcttcccccatgctcgaaggtgcggagctgtacttcaacgtggaccatggctacctggagggcctggttcgaggatgcaaggccagcctcctgacccagcaagactatatcaacctggtccagtgtgagaccctagaagacctgaaaattcatctccagactactgattatggtaactttttggctaatcacacaaatcctcttactgtttccaaaattgacactgagatgaggaaaagactatgtggagaatttgagtatttccggaatcattccctggagcccctcagcacatttctcacctatatgacgtgcagttatatgatagacaatgtgattctgctgatgaatggtgcattgcagaaaaaatctgtgaaagaaattctggggaagtgccaccccttgggccgtttcacagaaatggaagctgtcaacattgcagagacaccttcagatctctttaatgccattctgatcgaaacgccattagctccattcttccaagactgcatgtctgaaaatgctctagatgaactgaatattgaattgctacgcaataaactatacaagtcttaccttgaggcattctataaattctgtacagaatcatggtgatgtcacagccagaagttatgtgtcccattcttgagttgaggccgacagacgtgctttaatcatcactcttaactcctttggcactgaattgagcaaagaagacgagagacc

SEQ ID NO: 459 - DNA, 911 bp, Homo Sapiens
cgatgggccctactccaaaggaggcaaggacgcaggaggggccgacgtttccctggcgtgccgcagacagagcattccagaggagttccgagggatcactgtggtggagctgatcaagaaagaaggcagcacgctgggcctgactatctcaggtggcaccgacaaggatggaaagcccagggtctccaacctgagacctgggggacttgcagccaggagtgatctgctgaacattggtgactatattcggtctgtgaacgggatccacctgaccaggctccgccacgatgagatcatcaccctgctcaagaatgtgggcgagcgcgtggtgctggaggtggagtatgagctgcccccgcccgctcctgagaataaccccaggatcatttcaaagacagtggacgtctccctctacaaggagggcaatagctttggctttgtccttagaggaggtgcccatgaagatgggcacaagtcccgcccgcttgtcctgacctacgtgcggcccggtggccctgccgacagggagggctccctgaaggtgggcgacaggctgctcagcgtcgatggaatcccgctgcacggggccagccatgccaccgccctggccaccctgcggcagtgcagccacgaggcactctttcaggtggagtatgatgtggcacccctgacacggtggctaatgcttcgggaccctttgatggttggaaatagtcaagacgccagggtctgcctgggggatctcgctcacacaacttccctccggaacaaagtcaagtcattaccatcgaccgatcaagccagccagcgtgggtggacaggagcggagccctggaccctggagaccaaattctgtcatcggatggacaccagattggaacactggtcctgctagaaggcaccaaggtccg

SEQ ID NO: 460 - DNA, 390 bp, Homo Sapiens
atccacgtgccattgtggatccacgtgccattgtgaatctagtattctgttaacatttgtgtggcatttggagtttgtcatccccattgaagggagagccttctcagacatgaagcaagggaaacatactgaatagttttacacaaatttgatctggcttccatttgtccccctcatttcccaaatgtttaaatgtattggatttggattctcaatgtataagttgccttatctgttaatgtctatcttctgtctctttaattttgtatatctgctgttttgcttttggatacattttctaattagaagtcacatgataaatataatcagtatagtaataataccacaatgtgcacatactcaataaataaatgactgcattgttgtaaa

SEQ ID NO: 461 - DNA, 536 bp, Homo Sapiens
ttacacaatcattaatgagatttgtcttcagccaccagtgttggccttgaagcaaagggcacagcccttggtgtttgtaaaataagtatgaatacacagtgtggcagtgttgtggtttttgttgttgtttttcctctccttttgagaattttcttttgtaaaagaaaaatattttttaaaccgaaatctgtggatgaaatagaagctggagccctcctcttggaatattcagcctaagaacctcataggactatgaattcacccgaaattctcatttgccatcaggccgagcttttaaagaaaaattgttctctaaccaggattgtaacaaaagtgtaaatactgtttcagagttgagagttggtggtgcaaatatgtatataatgaactgtatttttacaatgatcgccgcatgactatttcacaccctttttatactccatatctgtcttccagaaacgtcacctgcctttctcctgtggtctcttaatccagtaattgtattactgccattaaaggatgcagttattttaaaa

SEQ ID NO: 462 - DNA, 459 bp, Homo Sapiens
gttgacattttttattttcattttatatcttttgtaaagctctacaaggcagtgttttgtaatttggtttcattatgaagatccagtacttggcagccatagtttagacaatattgttcagtgctgtttgcttgcatgttaacaacaaaaccttttagaggacccacaaatcatgatattgaacacagttccgaggcattcagagcatcagagcaagtaccatggcaatacatgtgtagactgttggagatgtcccgggccaatttcaagaaagaaaactgtaaatactagttctacttgctctgaaattatgagtttatgcgttttcccagccctccgaatcactgactggggcgttttgtgccccagcaataactggcagcatggcatacctgcagtaccccttacaatattaaagcaaagtttttattctaaaacagaataaaactgttcaataaa

SEQ ID NO: 463 - DNA, 948 bp, Homo Sapiens
cccaggccggcaaagagcagctcagtgagtactgggtatgtgtcacattgccaaatcccggatcacaagtctccatgaactgctggtgagctagataataaaacccctgacatcaccattccagaagcttcacaagactgcatatataaggggctggctgtagctgcagctgaaggagctgaccagccagctgacccctcacactcacctagccaccatgggacatcgccatcccaccacaccgggatccgccgcccccttctttcctttccactcccccagccgccctctttgaccagttcttcggagagcacctgttggagtctgatctttccccgacgtctacttccctgagtcccttctaccttcggccaccctccttcctgcgggcacccagctggtttgacactggactctcagagatgcgcctggagaaggacaggttctctgtcaacctggatgtgaagcacttctccccagaggaactcaaagttaaggtgttgggagatgtgattgaggtgcatggaaaacatgaagagcgccaggatgaacatggtttcatctccagggagttccacaggaaataccggatcccagctgatgtagaccctctcaccattacttcatccctgtcatctgatggggtcctcactgtgaatggaccaaggaaacaggtctctggccctgagcgcaccattcccatcacccgtgaagagaagcctgctgtcaccgcagcccccaagaaatagatgccctttcttgaattgcattttttaaaacaagaaagtttccccaccagtgaatgaaagtcttgtgactagtgctgaagcttattaatgctaagggcaggcccaaattatcaagctaataaaatatcattcagcaacagataactgtcttgtgtttgaatattccacacacttttaaataaatatacagataccacag

SEQ ID NO: 464 - DNA, 129 bp, Homo Sapiens
cccccactcagtaaccacgtgcgtgcacccccgcatcctttctcagtagttaagacgttctaggcaataccatagacacatctgactgtgtctctctctttgagtgcaagaaactcaagtcatcttaaa

SEQ ID NO: 465 - DNA, 309 bp, Homo Sapiens
gtgtcagccactgcacccagcctagtacctcttttcttgatccaagttctactgtaaaacatttttggcttgaaagaataattctcaagttttctatgctaaaaatgactgacaattttttcacatgaccacagaacaaaccttgggcatctgtataccacttagtttactaaagttacaacatggtgttgtaactgaaataaatgatttaataacttattcaaaactctttgggaagagttcctccaggattcctacatgagtttgaggcgcttgtccaaggatggggagaaaaatgttgtctgttga

SEQ ID NO: 466 - DNA, 678 bp, Homo Sapiens
  misc_feature (22)..(22): n is a, c, g, or t
  misc_feature (474)..(474): n is a, c, g, or t
  misc_feature (524)..(524): n is a, c, g, or t
  misc_feature (536)..(536): n is a, c, g, or t
  misc_feature (549)..(549): n is a, c, g, or t
  misc_feature (565)..(565): n is a, c, g, or t
  misc_feature (576)..(576): n is a, c, g, or t
  misc_feature (588)..(588): n is a, c, g, or t
  misc_feature (640)..(640): n is a, c, g, or t
  misc_feature (654)..(654): n is a, c, g, or t
ctcgcctgcactgctctccctncgctgtggggaagcgacaacgtcccgataacttgcagactgtggcgcaactggtcttggtagcggaggcacccgaatgctgcccgggtgagaaacctggcaaagaaaacggtctcgacaatgagtaggccacccatcactactaactacagatgacttgccatttcatttacaaagatgtcttctgctgctgaaaatggagaggcagcacctggaaaacaaaatgaagaaaaaacctataaaaagactgcatcatctgctattaaaggtgctattcagctgggaataggatacacagtgggtaatctcacttccaagccagaaccgagatgttcttatgcaagacttttatgtggtggaaagtgtgttcctacccagcgaagggaagcaatcctgaccccagcacatcactacccaagactttagatttaaggacatacgctccattagcantccggtatttcagagaactttttgggtatcaagcctgatggattacttgnattccatcctgnagtgaaacctctnatagaactggtctaancctggagccanttggatccttgntttttggtgaccagttggatgatgaatttaatcatccaaaacagtttcagcnccaaggaagctggngtttcttccagaagctacttgcca

SEQ ID NO: 467 - DNA, 225 bp, Homo Sapiens
aaagaatggtatttcacaaaaatgtcttttgaaattggctttggagtttacatatactgaacatgaaagtttataataatgatgatacaactttcaacattgtcattttttcttagaacttcagctgattgcagagatataatgattacattgttattaaatttttttaacacaagtaagtgtcaccattttatgacatgaaataaaaggttatgactgttaaaa

SEQ ID NO: 468 - DNA, 591 bp, Homo Sapiens
taaaggtatataaactctgagttattgagaattaagtattcactgtatattaaggggaagcttttgccaagttgtggtcttcaaatttatgtttactcttcctattggcagaataggtgctatttaagagtaaaccaaaggataagcagagggagtccctataaccaaagatggacagcatagccctggatagccagataaaccactctttgtattaagaaatgtttctttcctagtggtgaggggtgggtaactgtgaaagagctttatatcttgtctattcatggtattatagctgtatattcccaggatgataagcttgattgaaatcctgtatttagtcatatattatttgcgctgcttcatttgtatcatgtgcaatctctagaccaaccctatttttaaactctggtacagcatcattttgtacatattcccagctgcagaactagtatcacttatctcagcaaaagagattgtttgcatggaaagattaatagcactgattagatttctaatattttgcatttttgaaatgtttgttttctacgtgattatatttaaaactttagtaaatactaacatgaaacc

SEQ ID NO: 469 - DNA, 184 bp, Homo Sapiens
ctggagaaagtttctaactttctacgatcctaaaaggttagaaattattgctttagatatgtttcttgcttttgcgttaaataatcttattcttggcttgagagtcccttaaaaatttttcttcatttgcatttcacagctgaatatttgagttctttgttctcaccttaatagtcgtctcatt

SEQ ID NO: 470 - DNA, 374 bp, Homo Sapiens
atttttatttgctttaatataacctctttgcagtatatcacaaatgagtttacaaactacttttttttctctttaatttaggtgtttgcagataattttcattatacaactatatccatagctgtatgtgtgtatagttacataatggtaactacacacgatacagaagaatcagtaaattcatggattattttgctgaggttttaaattttaaagcctctgtttcagaattttacacttgatcaaggagaaaaataaatgtgtagtctaacatttgctttctggagttaattaactgatctgtaagaaccactgcatatgtcttaaaatgtaaacatatttacatttgttgtatttgttattgagcctttaag

SEQ ID NO: 471 - DNA, 400 bp, Homo Sapiens
cgccggccacagcttctcgctccttgtcccgctggtcgggccaggggatgccccatgcatgcgcaaaagggccaccaacacccacacagcacagatgcacagttgcatggggcacacaagacggggtggaggctggcttgttagaaacatgaatgacacaggtaacaaggtcctctctaggagcagctggggtgaggggacagccataacttgacagggaatggagtgtgggaaggggtttgatggactgcaggcagaaatctagagaatacgcgaatagctaaactcaaaggggtatggatccaaaaagggtttctataggcatgagtagctaagtcaggaggggtatctagatctagtgagggggtacctgagtccaggaagagaatctctcgcaatc

SEQ ID NO: 472 - DNA, 776 bp, Homo Sapiens
gtcatcacaaggatgccagttatacagtcatagaaagcagtggtgcccaagagcatggcactcacgtctctgtctataaactggtgctgtgatcccgtggggactgtggaactggagaggctctatgggttgccgttggggcctaagatctgtgctgtctcttctgctgctgcatttaactccttaggatacaggttcattttcctgacgacagcagtcacaaacagcgctcgccttatggaggccatgagtgaggtgaaagcctgatgtttttcccggccagtgttgacatcttccctgaacacattcctcagtgagatgcaggcatctggcacccagctgctataaccaagtgtccaccaactacctgctaagagccgggagcatggaacgtgttgggatttagagaacattatctgagaaaagagttcacttcctgctcccaggatatttctcttttctgtttatgaagtacaacccatgctgctaagatgcgagcaggaagaggcatcctttgctaaatcctgtttgaatgtcattgtaaataaagcctctgctctcagatgtaatacgttggtcgttctggacacgcacttccatctttattagtgaaagcccattggagcttgctacaggggcttcctgtgcttcttggcctggactttgtagtggctccaggcctggtctggttcttccctgtaaaaatcactctaccactctgtacctgagtttcctctaccataaaatgagggagatggctgaggtgaccagcaagc

SEQ ID NO: 473 - DNA, 356 bp, Homo Sapiens
agtgaattcaccatccaggagagactgtgatatatattttaaacctgttgggccaatgagaaaagaaccacactggagatcatgatgaacttttggctgaacctcatcactcgaactccagcttcaagaatgtgttttcatgcccggcctttgttcctccataaatgtgtcctttagtttcaaacagatctttatagttcgtgcttcataagccaattcttattattatttttgggggactcttcttcaaagagcttgccaatgaagatttaaagacagagcaggagcttcttccaggagttctgagccttggttgtggacaaaacaatcttaagttgggcagctttcctcaacac

SEQ ID NO: 474 - DNA, 842 bp, Homo Sapiens
atgagtggacagcctttttcacaaggcaggacacatcctgggcggggacacgcttggtctttgcacccatgttcttcacctcaaggacatccacagaggcagtgacgccaggcccagcacacgatgcggggatacgccaccagctgatttaattgtgccatagtctgtgctctctgctgcctcccatcacgggggccgtagtagaaggccaagagccacagcagggccgtggggggttcggctgccgacatcagtaattgctctgccaccatctcagcccatcctccgaagtgaatgaacaggaaccagctctcaaagggacctccgcaggacccatgagtctggtcttcaactgcttctctgagcagttcagaaatatgcttcagtgtctggagccagtgtccccgagggatatcttgagggtcttgcagcagcaccatggcaagagatggagaagtgtaaggaaagtaggtcttgagtgcaaaccgcagctgcttgcttgctttctccagagcttctacaaagcactgcgtaaacacctgaatagtggctatgatttccagggccccatcggtttccaggagtgcacacctgaacatctcatcaacaacccggaatatggcagggtggcaggctgcttgaggcagcgatgaatcttttataaagcattcgatccttctcagacaatttctctcactggagattagcttttcaaaaagatgcagcattgctttttcaaggctgggaaggtgccgaagccagaggcagactacagctgacatggggagagaaatcttcttcctttcagaaagaaataaacaaaattttaaacagaaatggct

SEQ ID NO: 475 - DNA, 717 bp, Homo Sapiens
  misc_feature (486)..(503): n is a, c, g, or t
gttgcctgcatgagtgtgtgctctgtgtcactgtggattggagttgaaaaagcttgacggggcgtcattcaggagctggatggcgtgggacatgtgcaaccaggactctgagtctgtatggagtgacatcgagtgtgctgctctggttggtgaagaccagcctctttgcccagatcttcctgaacttgatctttctgaactagatgtgaacgacttggatacagacagctttctgggtggactcaagtggtgcagtgaccaatcagaaataatatccaatcagtacaacaatgagccttcaaacatatttgaggtaaggacatcctttggaaacattaatttttcattgagtttggcttgggcccgactaacatggtaatagacctgaatgcataatgagttcttactttgctatcatcaaaagacttttcatcacagttacatactttctaatttatggaaaaacagcatttggaaaacaaatgnnnnnnnnnnnnnnnnnnaaagatttaaaaaataaatcaactagggactaggaatcaacaactgtgagtgagttaaactgtgttgaaatactaaagggttgtgaaagattagtgacaaagaagaacaaaagtctaaacctgtttattcctgtctatttcccacagaaagaatgagcaataaatggtacctcatataaattaataaataagaaggcctttctttttaacaagg

SEQ ID NO: 476 - DNA, 494 bp, Homo Sapiens
ttgctcagggtcgggctcccccagctctgcctcttgcttctcagtaggcctcgggcaggtctcaaaagagcagctgctcttgtttttttcctctggcaacgagctggtcgacatccggggcagtggtcgggtgcacgtgcttcatgatggtctggatccagttccgccgaatcccagatgtcatggccgacagggtaaactcgccctcctttgtatgtatctggaagccatagtttctctgaagtggatactctgtgacatcgtaacatgcggacaagtcaatttctccatccaagtcggctgcctcctcagccactgaatccctgtagtatctcaggctttgatcggcgaggacaaaccagtgtttcttccactggccgtcctcatactgcttagtcagccagcctttcttgaaattcagcaggtcgggcgtcacggagggctccgtggacctcctgtcccgtgacttggctcttcggtgtggacaccggggg

SEQ ID NO: 477 - DNA, 581 bp, Homo Sapiens
ggtgacctcccactgtcagacagtggaaggggctgcttgtcagaaggacaggccctccgtctccactctttgcccctgactggaatacaagagttctgtggcccttcacattgtcacagggctatcgctgctgctcaggccctggggacccgccagagtgggacaccgtgctccaacacaggtgcgttcacacactcctcacctccttggaagttctcctggaggggcaacagacagtagagccttggcctaaccggccggcgcctgcacccttacacacaccttgtggatgtggctggctgagatggggagcctccctctcaccccggtggtttccatcaattcctctgcactagccaagtcatccggggcatttcaatgagcccggggctgcccagtctgagagagatccaggacgctagtgatccagcccaccctgcctggagcttgggcccccatgctgactgagagggtgggtttccctagccagggagctggagctggcgcctgggacctcaggagagcctgcctgaaatgcacccactgctcctgtccagctaaagggatcctctagatcacag

SEQ ID NO: 478 - DNA, 696 bp, Homo Sapiens
agggtattaggtgcaaaagcacaagttgtgacatacctggtgtgctgagtcaatgtgtgaagtatattctcagtattagtatcatatactatgacagacttatccactgaccctgagactagcatctgcccatcatgggaaaaagcacaagccagaacaggagcacagtgcccactcagtgtacttttatattttaattcaaaacctaagatatgggtaaaagaaacaatccaaattttgacttggcaatcctgaccacatgatgccagtcgaaaaaactgaagaccttgttctccatcagaaactggctgtgaagaaaaatcgcagcaggtaattccaagatcatgtgctttttcactatgcagacacctcattttatcatcccacactgttaaatcaccacatgaggagccagtgacaaagaagcttccattaggagaaaatgcacatgccgccaaggagccatctttaacactaccacatctatataatttgtatgactgtgcattccacaaaaccacagttccatcagctgcccctgatgccaaacacgtggagtctggggaaaactggcaaaccctcacagggctgccactaggctgttccatcactgccagcatctgtccattttcagtattccataggacagtggtaccatctgttgaacacgatgccaaaatatgtcctgcaggagcg

SEQ ID NO: 479 - DNA, 400 bp, Homo Sapiens
ggacaagcaagacacgaagaggttaaggagctgtaccaaaggttacctgctggagctggtctgtaagatattctgggacagcactgttgccattaagtgccttgtttttttatgttcacaaatgtatatgaagaaactttctcaaacttactctttctaataacccactaaagccagcttaaacactctaaaagtactttgtaaaccaacaataacttgatgtgtagcattccatattatttcattacgttgtactcctaaaaatgggaagctgcttaataaattataacatttaggtcagcactctgcatccactgagtagttgtagatacttatattttgtgagatattaacttgtttagaaaaatccgagttggtattcactatgaaaaagcaacct

SEQ ID NO: 480 - DNA, 899 bp, Homo Sapiens
cctgcggcgggctttagggagtggtccctggctgtggatagatctgctgatgagtccaggccccggtccattctcctcgcgctgcaaggatgctcctgggatttcggagaggccgcaggagtcatttcaaacacatcatccatggccttttacctgcagccagcgttgctccgaaggcagctgtgccacgcacacctcctccccgcagccccaacccatctccagagagaccaagatctgctctggcagcagccattctggcgacaacattgactgggcggacggttgctattcctcagcctcgccagaggtcccggtctgagagtgatgtgagcagtgttgaacaggacagcttcatcgagccctatgccaccacctcacagctgaggcctcggccaaattggcagagtgagatgggaagaagatcttctttgccatcctttgaaacactggactatggggacgaagaggacattgaaactcagctgtcatccagcggcaaggaattgggggatgtcagtgcccgggaggacagaggaggccacagtgatgacctgtacgctgtgccacacagaaatcaggtgccattgttacatgaggtgaacagtgaagacgatgaaaatatttctcatcaagatgggtttccaggctcccctcctgcaccacaagggacacaacaaaaagatggtaaacaccctgttctgaatttaaaggatgaaaaaacctccattatgtgagaaacctccaccctccccagatataactggtagagcacgtcaaagatatacagaaataccagagaaaagttgaggcttacaaagaggacaatatggacctaaacaatatgaatcaagccttacccttgtaactaaaccaatgaacatgcatgaaggaactcg

SEQ ID NO: 481 - DNA, 538 bp, Homo Sapiens
agaatagggtctttctacacatgctgactgggatattccatcggtctccgtcatcgaagttcacactttcagagatatcatgcttttggagacgctcctgaagtcctggcttggaagcagtatccacggtgttttcagcatcttctttccacaacagaggagcttactgatggagcatgaacttcgtccggtttcaggacagcagctggaccatcaataccatgtaagatgacattgctgtggggagtatgacagttcaccaagggagtctgctcatcactggcccttggctttgcccgacgtagcctggcttctggattgggctgcaccataaatggctcaaggcgcttattcctttgcctcttctcaagtagtagcctctgataatccagcttagcctgtcgcatcttcatcatttcttcatggaagacactgtcgccgctgggactgagccggcagcgcgaagcctccatgcccgccaccgaggaagcccccaccacgtacacactctgccccgccgtcccaaagcataaggatc

SEQ ID NO: 482 - DNA, 1128 bp, Homo Sapiens
  misc_feature (26)..(26): n is a, c, g, or t
  misc_feature (880)..(880): n is a, c, g, or t
  misc_feature (895)..(895): n is a, c, g, or t
  misc_feature (928)..(928): n is a, c, g, or t
  misc_feature (932)..(932): n is a, c, g, or t
cggtccggaatttccgggattgaacncgggaggtactaccaggtcgccgtcgttgctccgctcgctctgagagagcatggccctgagaggcgtctccgtgcggctgctgagccgcggacccggcctgcacgtccttcgcacgtgggtctcgtcggcggcgcagaccgagaaaggcgggagaacacagagccaactggctaagtcctcgcgtcccgagtttgactggcaggacccgctggtgctggaggagcagctgaccacagatgagatcctcatcagggacaccttccgcacctactgccaggagagactcatgcctcgcatcctgttggccaatcgcaacgaagtttttcatcgggagatcatttcggagatgggggagttgggtgtgctgggccccaccatcaaaggatatggctgtgctggggtttcgtctgtggcctatgggctcctggcccgagagctggagcgggtggacagtggctacaggtcggcgatgagtgtccagtcctccctcgtcatgcaccctatctatgcctatggcagcgaggaacagcggcagaagtacctgccccagctggccaagggggagctcctgggctgcttcgggctcacagagcccaacagcggaagtgaccccagcagcatggagaccagagcccactacaactcatccaacaagagctacaccctcaatgggaccaagacctggatcacgaactcgcctatggccgatctgtttgtagtgtgggctcggtgtgaagatggctgcattcggggcttcctgctggagaaggggatgcggggtctctcggcccccaggatccagggcaagttctcgctgcgggcctcagccacaggcatgatcatcatggaccgntgtggaggtgcccanaagaaaatgtgctccctggtgcatccagcctgngggngtccccttcggctgcctgaaacacgccccgttagggcatcccgttggggcgtgccttggagacttcggaagttctgcctggcacaccagcccggaagtacggcttccaaacggggatgccccttgtgggggtccccccttggcccaggaacccaccttgattcccaaaaaaacctgggcaaacaatggcttccctt

SEQ ID NO: 483 - DNA, 1217 bp, Homo Sapiens
  misc_feature (1201)..(1201): n is a, c, g, or t
ccggcagtggcgaccggcgcaggtaatcgcgcaggttgcggctgaggtcagaccagcgagagacagagacccgcagacatttagtccagagactgtagcaaaggagggggacgaggggccagagccggaatttcgggggaggacttgggagcgcggcgaccagagtcgcttgctggcacttgcgagggcgaatgcaggggcttggccgagatgaccttggaccagagctcccttccggcctgcagagatgagcttggggcttagccgagtaaggagtgagcggcttttcagcctcagtgctgcggcagaggcggatggaggatgaactggagccgtccttacggcctcggacgcagattcagggcaggatcctgctcctgaccatctgcgctgccggcattggtgggacttttcagtttggctataacctctctatcatcaatgccccgaccttgcacattcaggaattcaccaatgagacatggcaggcgcgtactggagagccactgcccgatcacctagtcctgcttatgtggtccctcatcgtgtctctgtatcccctgggaggcctctgttggagcactgcttgcaggtccattggccatcacgctgggaaggaagaagtccctcctggatgaataacatctttgtggtgtcagcacgcaatcctgtttcggattcagccgcaaagcaggctcctttgagatgatcatgcctgggaagactgctcgtgggagtcaatgcaggtgtgagcatgaacatccagcccatgtacctgggggagagcgcccctaaggagcctccgaggagctgtggccagagcatcagccatgcattacggctctggggatcgctgactagggacaggtggtcggactcagcactacggcagctcacggggctccggggacgtgcgcaggggagccggaggagctggaggaggagcgcgctgcctgaccagggctgccggcccggcgcccatgggagctgttccagcatcgggcccagaggagacaggtgacaagcctcgtggttctgggcagtgccatggagctctgccgggatatgactcggtgacgcctacgcctcctccgtgttccggaaggcaggagtgccggaagcgaagatccagtacagcgatcatcgggactgggagctgcgagctgctcacggcggttgttagtgtgagtctgtactgccntgcctccaccaagccc

SEQ ID NO: 484 - DNA, 1050 bp, Homo Sapiens
caggagctgaaaaccagaagttgaggcgtgagtttggccactccgtagtgtgcacttggtgagggcagcagctcgccacagctgccagccatctgtccattcacccatctgtccatctggcagcccgctgttcagacctgtctgtctgtccgcccatctgtaagcccatctctgtcccattgtctatctgaccatctttctcttactgtcctctttgtctagctatctggcctatctgtcgatccatcttcgtgtctgtcttcagcccccacctgtttgtccatctgtccaattacctgtgactctgtgcatcttcttgtccattcatctgcccacccatccgtccctccgtctgcccaccagccgcccctctcctcctgggctgcagagccatggcccggggctacggggccacggtcagcctagtcctgctgggtctggggctggcgctggctgtcattgtgctggctgtggtcctctctcgacaccaggccccatgtggcccccaggcctttgcccacgctgctgttgccgccgactccaaggtctgctcggatattggacgagccatcctccagcagcagggctcacccgtggatgccaccatcgcggctctggtctgcaccagcgtcgtcaaccctcagagcatgggcctgggcggaggggtcatcttcaccatctacaatgtgacaacagggaaggtggaggtcatcaaatgcccgggagacggtgccggccagccacgccccgagcctgctggaccagtgtgcaccaggctctgccactggggcacaaggggcccagtggatcggggtgcccgggggagcttccgtaggctatgccgaaggcccaccgccgccaaggccgctggccctgggcgcagtgttccagaccacaatacgcgctgctccgagaggggcatgtggtggcccctgttcttcagcagttctggaacaacaaatcctgggacttcattgaggcgtcaaccttggcaggcatttcaacgggaaacacctgaggctcggaccaaccccatgcctgagaggacac

SEQ ID NO: 485 - DNA, 410 bp, Homo Sapiens
ctctgaagccaagcctcttcttacttcacccggctgggctcctcatttttacgggtaacagtgaggctgggaaggggaacacagaccaggaagctcggtgagtgatggcagaacgatgcctgcaggcatggaactttttccgttatcacccaggcctgattcactggcctggcggagatgcttctaaggcatggtcgggggagagggccaacaactgtccctccttgagcaccagccccacccaagcaagcagacatttatcttttgggtctgtcctctctgttgcctttttacagccaacttttctagacctgttttgcttttgtaacttgaagatatttattctgggttttgtagcatttttattaatatggtgactttttaaaataaaaacaaacaaacgttgtcct

SEQ ID NO: 486 - DNA, 580 bp, Homo Sapiens
tgatccgagagtttagatgaggcaaataacagagtaatcaaaaatggcttcaggtagtcggtaaaatttgaacaggtagaatcagctaggaaaaagatattccatatagagtgaatatcctaggcaaatgcagagaatgaggagggagtttgtaaaggacagagtgatttgtaggcctcttatctcacactcttgaaactgattttgggggtctaccctcagtgcagtgttcagaaataagcattttttaaaagttacctgtcttatctgcacaatgaattttcagaattatcctgctaggtgatggaaggtttagacattttcctgtgtcaaatctgcccaactgtcattgttgttgctgaactcctaaatgtctttattggtgatgggtatgggaaggatgggcgtgaagtcccctaatctgagattgtgttattttagtccctgatgcttcctgcgttgatgaagttgtataggaatttttccaccatacatgatacatgatcatatctaagatgtcagcatgttcataaagaggattatttttgtaaaactattaaaagttttgcttttctcgagc

SEQ ID NO: 487 - DNA, 382 bp, Homo Sapiens
ctaagcaattttcccattcctgcctctccctgccccggaaccacctgtggtgctagtgttgggatcgggggcgtttaacgctggtgggcagcaataaggggcagatgtgcccagatgcctgcatccccagggtgccgagggcagcaggaaaaagtggggacctcggtgcatttgccccacccctcccctccctgggataaagcacaatgttctccccgcagattaatgaccctgcaccctccaggcccctactcacatcctcccccaaccggcttcgggtcctcccaccacactctggttttctatgctgttttggtgcaagtacaactgtcgtagtcatggctttgggatcggttctgtttattaaaatcctattgatcct

SEQ ID NO: 488 - DNA, 604 bp, Homo Sapiens
agcttgtgttgctaccagcagttcacaggtaaagcagaaattctctttaaccagcaagttcctgcctttttaaggttacttttagaataaatcatcagggaaacagagaggatgctttgctttgggttgtagtcaaaaactgatttaaataatttaatgtctctggcacacactaaaaaccatacacttcagttgtgatctcagtggcatatttatttggttaggtttcgttacatttattattacagatgttcagttgaccaagtagttcagtgttttctttcctttttttggaaattttagtttgagtttgtgactgcagtgttcaagaactcagcatccttgttttctacaaatactgattaaaataaaatgctgtaaaatgtgatgtaaaacattatcatgatcttcccatgcctttgttgtacttgtgccgaagtgttttgatattcctttgtctggaagaaaatgtttgctttcattttgatcattttgttcaccttggaatcaacaggttttgatattttctcttggaagattttatatctttttgggaatatgtaatataagatctctaataaaagataatcttatcatgtaaaaa

SEQ ID NO: 489 - DNA, 443 bp, Homo Sapiens
  misc_feature (60)..(60): n is a, c, g, or t
caccttctccgaccatgtctacgccgggcggcagcagcccccggccactgcaaaaccatngccctgggtcccccggctcccccagggaggcatccccgtgccaatgtcccccagtggtggcagcagatcctgtggccggcctggcggacgggacccagtgatacttgtatattacacagtcctgatttcagacaatttcaaccttaatctatttaaaaaagaatattctatacaagctgtttttaagccttttaccatttgaaatgcatgtgttgtgcgcgttggggatgggaggaggggctgaggagcggctcagtgtcacctcccacagccaccggccctgacccttaatccagacaccgatggaagtcgacttttcatatctttctcctgaaatgaactctgttttaaattggaataaattttgttcctaaaagctgaaa

SEQ ID NO: 490 - DNA, 556 bp, Homo Sapiens
agggagtagtgaccagtaagattcgtacaggcaagcgaggggctgtccgtgatccgtagcacggagaatgggcgacccaggggtccaagaacactcgctgggctcaacatagtcctcgacacaggactgagaaagaaagtgtctcctttccgggaaagcacatgtaaacagtaaagggcctgaatctcttctaaaccaataattgacctctaggcacccaccataatactgctaccttcagggcagaagacactgctctatgtaacccaaccaccaccaaaaagcaaacagaaagaaggaaggatggttaagccattggataatactgaatctgtttccctaagtgacttaaccttagagcaagcacaacatccaggttaattttttgtaagatttctccttttattattgccctcatcatagttcctgattgtctcttaaagtaagtggtttatagacattactattttgataataatttacaaactactataaacaaatttataaacattactaatttctgatgcaaataaagttgtttctccctccaaaaaaa

SEQ ID NO: 491 - DNA, 459 bp, Homo Sapiens
gcactgaaaatgaagtatttcagtaatccgccagggccaacacctggatgtcagctgccaagaccaaactgtccagtggaaaccttaaaggagcaatcaaatccagctttggcaataaaaaggaaaagaacagaggccttagaacaaggaggattgcccaagaaactaattttttaaagagaacactggacaacattttactactgagggaaatagccaaaaaggcaaataatggaaaaatagtaaacattaagtaaatgctgtaaagtgagtttgtaaatattctacacatgtaaaatatgtaaaactatgggttatttttattaaatgtattttaaaataaaaatttaattctggtttttctgattagagtgcaaaagtgagaaaagttcaatactcttgaaatgtagaattgaaaatgcattagggaaaacttaataaaaattattaccagttaaa

SEQ ID NO: 492 - DNA, 415 bp, Homo Sapiens
tgtcaggcccactagaacaagggtccccaatcgccaggctgcggaccggtacctggcctattggaaccgggccacgcagcaggaagtgaacggtgggcgggcattcctgcctgagctgcacctcatgtcagatcagcactgcattagattctccagcgcacgcacgcgcgcaagggatccagcctgcgcgctcctcatgacaatctaatgcctgatgatcgggggtggaacagttttatccctaaaccattcccgtcaccccagtctatggaaaaattgtcttccacaaaaccagtccctggtgccaaaaaggctggggaccactgccctagaaggcaaatcgcctacgttacacagtgtaccatgtggcaaacacgcacatgtacccccgagtctaaaataaaaattttttaaa

SEQ ID NO: 493 - DNA, 745 bp, Homo Sapiens
  misc_feature (29)..(29): n is a, c, g, or t
  misc_feature (618)..(620): n is a, c, g, or t
  misc_feature (622)..(623): n is a, c, g, or t
gaagcttattcaatcgatgggtacagggnacgactggtttacagccccagagcggttcactgcgtgtcccgtcagtaggggtactgtaccatgaggcaagtgcagcactgcccagtggccccgtgcagctgtgtgtccatctccatctacacggctgggggcgagcactgtgagcacctgagcatgaaactcgacgcgttcttcggcatcttctttggggccctgggcggcctcttgctgctgggggtcgggacgttcgtggtcctgcgcttctggggttgctccggggccaggttctcctatttcctgaactcagctgaggccttgccttgaaggggcagctgtggcctaggctacctcaagactcacctcatccttaccgcacatttaaggcgccattgcttttgggagactggaaaagggaaggtgactgaaggctgtcaggattcttcaaggagaatgaatactgggaatcaagacaagactataccttatccataggcgcaggtgcacagggggaggccataaagatcaaacatgcatggatgggtcctcacgcagacacacccacagaaggacactagcctgtgcacgcgcgcgtgcgcacacacacacacnnnanngagttcataatgtggtgatggccctaagttaagcaaaatgcttctgcacacaaaactctctggtttacttcaaattaactctatttaaataaagtctctctgactttttgtgtcttcaaaaa

SEQ ID NO: 494 - DNA, 714 bp, Homo Sapiens
cggttaagagtaatatctgtccccacgcagtgtaaacccagtggcttctctgacctggagctgatgggccgtgaagggggcccatttttctccaaaggccatgccttttggggccacctggctccaaggagcatcgctggtcttggggacgggaagggaaccctcttccaggagctctaagggtacttgggaatcaattgtgtccattctgaggtctctccagtgggagggcggcagctcctgtccctgggttcaggctgtgcttctggaagcatcgaaatgggatgtctgagccttgaggaaaagcagcagggttagcattaaagtcaagaggggcagctcaggatgctaccagggagcacatcgtttctggtgcctcatctaaaggtaaacctcccctacattcaccagccggatgtcccaaatccctttagccagattgctttttgcaaccaaagctgtggacagaaaagcctccttaagtgagctgaggggacaggaaatccaatcagatgacctttgtgttcgtaatcgggcttgagccagaggctggggagctgagtcccagccaaacctcactggcccgtttgcttttcacgcccagggctcagtggcccaggaagtgtgctgggcagcctgttcttactccagctcaacccattgggtgttggctgtttttgggtttaagtggttgttttgtattttgttgtttta

SEQ ID NO: 495 - DNA, 556 bp, Homo Sapiens
ggcacgaggggacttttgtacaaaccaatgcctatctatctatcatttctgaaaactttttcctcctatgcaatattttctggcctctgtgaacaacttgtagttccttgagatttctattatcacttatgtttttgcaaatctgcaattgaaatgcccttgttccttgttaatgcctattgaatctatatgaacctgtacgtgtgtttctcactgtgataatataatcattgcatgttttatctttcccactagaaagcttctagaaagctaggactatcttttttgtctgtgtaatttttgcatcacaagctatatttaaatgtgggtgcagtgagtggctgttttctgccacatggagaaacatggtctgcagtgagagagaagaatgaagccatgatgaaagcaaaatcaagaaagagtcccgattgtgttccagtacctggttcttctggtcttcatgttcaggtccacctctgcccttttcatgtcttgattgttgaattcttctgtgagatactccaaatatcctaataaattctcatgtttgcttaaa

SEQ ID NO: 496 - DNA, 527 bp, Homo Sapiens
ttacatgttgtggatgctttgtaaacatttccctgtatgtttaaattgtgtttcagcaggatgtaattgcccttgtgtgtagttaaaatgagtcatcatctggtcctttgtgaaatggaattcatggtattttctgtaacgttttcctgaagctgtttctggagagccacacatttaaatacagacagctttcctgatcatttgatttattgtgcacctgatttttggtctaaaaggaattattgccacaatatattttatttattctttagattttagccttgtaagttaaagtgctttacatgatgatgtgaaaagctgtttgtccctttactgggtttggggggttgttaaaagatagggaatgaagaatgcaaaatggtttatcgttcaaactgtccactctgatccaaccctgtactgatagtacttcccagtatgatattgtgatgtttcatacaatgcagtgaacataaccaacttgttacctaaataaagaattgataaaaacagtgtgacatattact

SEQ ID NO: 497 - DNA, 1452 bp, Homo Sapiens
  misc_feature (529)..(607): n is a, c, g, or t
cacatctccccctgggggggagtcatgtgggccaacattcaccccctgcagacacacttccgctgccagtgctacttgggctggagtggtgagcaatgccagtgggaccataggcaggcagctggaggtgccagcgaggcctgggctgggtcccacctcaccagtctgctggctctggcagccctggcctttacctggaccttgtaggggtctcctgcctagctgcctagcaagctggcctctaccacaagggctctcttaggcatgtaggaccctgcagggggtggacaaactggagtctggagtgggcagagcccccaggaagcccaggagggcatccataccagctcgcacccccctgttctaagggggaggggaagtccctgggaggccccttctctccctgccagaggggaaggagggtacagctgggctggggaggacctgaccctactcccttgccctagatagtttattattattattattttggggtctcttttgtaaattaaacataaaacaattgctnnnnnnnnnnnnnnnnnnnnnnnnnnnnnnnnnnnnnnnnnnnnnnnnnnnnnnnnnnnnnnnnnnnnnnnnnnnnnnnggttacccgtacaaaaatatcctgcaaggggcccaacctaaagcgaacccaattataaggaacaaactggccccaaaattaaaacgaattaaaaggtaaaaatggtaccttgttatcaacggaaggaatgtaaaaactgtgaggtgggaaaattggagaaagaacctacatagagggaagggacaaaagtgaacaaaaaacttacaaaaatataatgcgctaaggtaaatacaaaagtttgaagcgtaaagagggtgacaaaagcggatgatgcttgaaaatagaaaactctggatccagagattcaatttggaagattatataacaggcactaccgcacccaaatgtttgggaatttaaaactcacagtccgagggtgattttaagcccccataccacctccggacagggcaataatcgtatttaaaaaaacccccattcgtaaaggctttaacctgaaataaaaaaagattgcaaattgtctcctggaaaacctgaaatattaaaaggaaaagaaagtggtacatagtaaagctggtattaatcccaatttataagggtaaacaaataaagtcaaaatcgcccacaaaattcccccaaataacccaaattttttcaaagggatttttatagatggggggtaaccaacaaatttaattaagggaatcctaaccatgcccgggaacaaaaccgggaaataaaaaaccccgcacaacaaagggggcaaaaacgcgtttcacccaaaaagccttcaacacaaaaacccgacaaaagccctaaccgacaaacccctcccccaacatgtcaccaccacataaaggcccaaaacgcatacgccccactaa

SEQ ID NO: 498 - DNA, 516 bp, Homo Sapiens
taaaagagaggcatatgtattaaaatgcttcctcttcccctgcagggggactggctctccagtttccgagctggccgcattccagtttgtccatttggaatgagctgtattgctgtggggggtaagggtttgttctcagctttgtcttcatcttggtatttttgggtttcactaatttcctagtttcttgtgaggtagacaaggcggtcctccaggagtcctgggacttggcagtggacacctgctccagggacagctgaagttccttgtattcaatctccgtgagtacataagtgacactcacgatgcagtggggccgggacgagcggctgttgtgcaccacggtggcgtagctctgcacccacacccagccgccccgcttggacagcagccggtagtacttggtggtgacctggcccttcaccaacaggagttggtgtgcgtagcggaggtgtacacgtcgcacggtgcacgtgatggtataggtcttctcgatcaggtctgcagctcgtccat

SEQ ID NO: 499 - DNA, 749 bp, Homo Sapiens
ccagccacgtccacacggtcaccctgccccctgcctcagagaccttccccccggggatcccgtgctgggtcactggctggggcgatgtggacaatgatgagcgcctcccaccgccatttcctctgaagcaggtgaaggtccccataatggaaaaccacatttgtgacgcaaaataccaccttggcgcctacacgggagacgacgtccgcatcgtccgtgacgacatgctgtgtgccgggaacacccggagggactcatgccagggcgactccggagggcccctggtgtgcaaggtgaatggcacctggctgcaggcgggcgtggtcagctggggcgagggctgtgcccagcccaaccggcctggcatctacacccgtgtcacctactacttggactggatccaccactatgtccccaaaaagccgtgagtcaggcctgggttggccacctgggtcactggaggaccaacccctgctgtccaaaacaccactgcttcctacccaggtggcgactgccccccacaccttccctgccccgtcctgagtgccccttcctgtcctaagccccctgctctcttctgagccccttcccctgtcctgaggacccttccccatcctgagcccccttccctgtcctaagcctgacgcctgcaccgggccctccggccctcccctgcccaggcagctggtggtgggcgctaatcctcctgagtgctggacctcattaaagtgcatggaaatcaaaaaaaa

SEQ ID NO: 500 - DNA, 490 bp, Homo Sapiens
acttcaccagggtggttgtgaggaatcaaaatctaactgagataactaaccaggtgtgacagtgctgtgaaacctgtacacatgaaaaacacatcattacaagtgatggtaacccagggaaattagaagacgcatcaagtggagacagtaaacagggaacactgctcagtttggggtgggtggggatgtctggttgtctgtgaactggggtcattggcattcagacaattcagatgtgttccatgaagcattagttctctgggatgcttgtaagtcataagaggaaaaaaatggttagatgggtttgggaaatactgagttaaacagttaatataggaagtctcaaagctttatgtcactgtagatcactgaaaaggccatctgtaatttgctgtattcctcaagtgtatttgaccagtatatcttttgagttgcatcttgaaggaccaggagtcttggattaaatcaagcaatatatgcgtgaactgta

SEQ ID NO: 501 - DNA, 370 bp, Homo Sapiens
ctgctccgcccctctctgcaggaagaactcaattcccgatgggaaagggccactgaggttactgtggctcggcaaaggcagctagaggaatctgcaagtcatctggcctgcttccaggctgcagaatcccagctccggccgtggctgatggagaaagaactgatgatgggagtgctggggcccctgtctattgaccccaacatgttgaatgcacaaaagcaacaggtccagtttatgctaaaggaatttgaagcacgcaggcaacagcatgagcaactgaatgaggcagctcagggcatcctaacaggccctggagatgtctctctgtccaccagccaagtacagaaagaactccagagcatcaatcaaa

SEQ ID NO: 502 - DNA, 479 bp, Homo Sapiens
gactgcctggtggttaaaatacgattcctcatatccaaggctacttttgaagatccctctgccaaaaatatagctcacttatctaaaggtgagagctgcatagatccagtaatgtacataaagcctgaatgatgagcctatgtccctgcctaacgctggtgtctcactcatctcttttacctaaattgtcctgaactttgttaagtgttctggacaaggccaagcttttctttattaaaacctcagcatgtctccctgatctgaactatttgctttctcttcaagataagttgtattttaccatggaaaaatacagtatctaacattaccattcacgttaaatgaagtttcctcataacatttatctttagttttatgaagtcatcgtgaccaatgttacagtaatttctgttagctgattgtggtaaacaatgtttaatgtgaaaagaaattaaaactttcttcatctgttgtagaat

SEQ ID NO: 503 - DNA, 394 bp, Homo Sapiens
  misc_feature (311)..(311): n is a, c, g, or t
ctgctccgcccctctctgaatcagagcggagttttgtgtagtttaacattttccttacacaggaaggagatcattctttttacagggacttgatacgtaactcacagagtatagtccttccaagtcagaggcgcgcttttcatgaactccagcatctcagctgaggccacatctggaagtgccttagagaacgcctcattgtctcggcccgcggggtcttgaccctgcgcgggagaccctcacaccagctgccccggggaagaaagcagaacccggtcaggtccttcaggccactgtcatgcgaggagtgngggagagacagggaccagagaaggaaatgttcaaaattcctcttcccgatgaaacacatgcccatgctctgaaatgagaagac

SEQ ID NO: 504 - DNA, 905 bp, Homo Sapiens
cacccagagtacgtgtctagcaggctatccagatcaccttcctgtggggtgaacgtaatgaggcggggctggtccttggaatttcccctggaaaatggtaacagactccatccttgacccggggacgagcatgaaggcattgtcccaaaggcagaggccaccgtggtaggaattccaccaaggccagaagggaaaaaggaagaacccaccgtgtctggctgtgcgggccctggggagggtcgtgagtgcagcccctctctacttctgtgcctttgtaaaacgtgtagataaccgcagtggttggctgagccaagaactctcctaaatcagtggctttctccccaccccttgctggggagtcatttttaaaaaaatctgtgggatataaaattggcctcctgctgcttcagcctacctctccctctgctgacttaatgtcgtgactctgtttcttcagatatttaaggctgttaggttgtgtgagccttgaagtgtgtgtgtgtcccagcgactgtccactgtccaggagatgcatgtctttgtattggagatatttctgtaactcattctcttggtgctcacgattgccatggccatagggccacagtgccgtatctgctgcagacatgattgtttcttgttctagaggttttcttgttttcgaatcttgcctgatgaatccagccagaccaaggggcctagatttgacctctgtcctgggctcctgggccaggtgcaggaacatctgaggccactctgctggccacctccagtgggtgctgaccacaggatgggctttgtttacactcattttcaccctgattcttgcccccactttcataaaagaaacttcaaaaatgctgacgctttggagagtaagaaaatcaatcttggctgggcacggt

SEQ ID NO: 505 - DNA, 489 bp, Homo Sapiens
cctgctccgcccctctctggggtgagcgtctcctctcggggtctcctaggccgggctcgggctgggcgggcaggcccaggcccactggtagttccgctggtggaaggcccaccactgccactcgctccgccactgctgtagccactcatgcctggtgtggagtagctggttcccggcatgtcgtaggggtcgacgaccgggggctgggaggccagtggctgcccctgggactgggccatggaagagatgagggtgggttgcacaagccactggaggtcctggctggttgtgatcgcggtgaccgtgggcacgaaggaaccgggcatttccccgagaccggcgcactcctgggaggcggcggcggtgggtggactgccgaaggagtccaccgaagacagatattgagactcggcagagggtgaggagctgcaccgggagccggagtcgtagtctccggggaaagcctgaaacatttccctctctcacggg

SEQ ID NO: 506 - DNA, 553 bp, Homo Sapiens
ttcatgtttaacatctttaattcaaatgtaaaagttcaatacaagccatttatagggcttgagatttgttggtcttttaaaaacaagaaatggggaaatgcaacaaaatgacctttccacttttcaaaagctttcaagtaaaggatagatcatagggccataaaagatccatttaatcaaacccactttcaccccctaccaattgtcttacacccattccacaatcttaatacatattcctgaagatttacagttcagctttgcttacataaccatttaaaaaatacttagcaccagcgtgcttcctatatgccaaacaaatcatcaaactacttcaatatgcatttcttctttttaaaacaaagggggcaattatttgtagaaagcaatacttagcctccagatgcatttcccagaaatggcatatgcattcaaaggcctagacactctcatgctttcaatgtggaatacgtagcctaatatgcatagaagcatgaatggcaaagttgaagatcaatattataactatttttctatttatttgaagcacagt

SEQ ID NO: 507 - DNA, 576 bp, Homo Sapiens
  misc_feature (69)..(69): n is a, c, g, or t
  misc_feature (74)..(74): n is a, c, g, or t
ctgctccgcccctctctgtgacatgcatccaatgagagcactgtttctcattcccagaaaccctcctcncggcntgaagtcaaaaaaatggtcgaagaagttttttagttttatagaagggtgcctggtgaagaattacatgcagcggccctctacagagcagcttttgaaacatccttttataagggatcagccaaatgaaaggcaagttagaatccagcttaaggatcatatagatcgtaccaggaagaagagaggcgagaaagatgaaactgagtatgagtacagtgggagtgaggaagaagaggaggaagtgcctgaacaggaaggagagccaagttccattgtgaacgtgcctggtgagtctactcttcgccgagatttcctgagactgcagcaggagaacaaggaacgttccgaggctcttcggagacaacagttactacaggagcaacagctccgggagcaggaagaatataaaaggcaactgctggcagagagacagaagcggattgagcagcagaaagaacagaggcgacggctagaagagcaacaatgcagagaggggcggagcag

SEQ ID NO: 508 - DNA, 863 bp, Homo Sapiens
caggctggtaccggccggagaggtaggataaaactccccagctaaacacccgtaagacttcatacaacacaatactctatactgtgatgatcacagctgccaaggctacctaaaagaagacagttatctcatatttggcggccagctttttatctttctctcgaccacttaaaacttcaggacttcctgtcctgctggtatcatggagaaagtccaatacctcactcgctcagctataagaagagcctcaaccattgaaatgcctcaacaagcacgtcaaaagctacagaatctatttatcaatttctgtctcatcttaatatgtctcttgctgatctgtatcatcgtgatgcttctctgaagttctgctacaacctctagatctgcagcttgccacatcagcttaaaatctgtcatcccatgcagacaggaaaacaatattgtataacagaccacttcctgagtagaagagtttctttgtgaaaaggtcaagattaagactaaaacttattgttaccatatgtattcatctgttggatcttgtaaacatgaaaagggctttattttcaaaaattaacttcaaaataagtgtataaaatgcaactgttgatttcctcaacatagctcacaaatttctatcccaaatcttttctgaagatgaagagtttagttttaaaactgcactgccaacaagttcacttcatatataaagcattatttttactcttttgaggtgaatatacatttcatattacaatggaaaagcttcttttaatactaagtattttcaggtcttcaccaagtatcaaagtaataaccaaaatgaagtgtcattattccaaaatagtccactgactcctcaa

SEQ ID NO: 509 - DNA, 502 bp, Homo Sapiens
gcaggctgctcggtccgcaatctttggatcaggctcgaggcgtctgccgcacctcagcccacgacctgccccgctgggaggtgcgggccgctggccaggccctgaccgcaacctggcccagaggccccagccctcaggcaaggttctccggtgaagccacagcctggccacctgtcttgatctccccaccgagaaggccccgcccctcccgctgcagccccacagcatgcagccccaggagagccacgtccactatagtaggtgggaggacggcagcagggacggagtcagcctaggggctgtgtccagcacagaagaggcctcacgctgccgcaggatctcccagaggctgtgcacgggcaagctgggcatcgccatgaaggtgctgggcggcgtggccctcttctggatcatcttcatcctgggctacctcacaggctactatgtgcacaagtgcaaatagattgctgccccgcaatgcacgcgggaggctggccgcaag

SEQ ID NO: 510 - DNA, 483 bp, Homo Sapiens
  misc_feature (414)..(414): n is a, c, g, or t
  misc_feature (452)..(452): n is a, c, g, or t
ctgctccgcccctctctggaccccatgtgatgggaggatgtgctctcctgtgtgaattaaggaaaggactcgatggtgtgtggggatggcaagaaaccgagatggtacaaagagcactgtcctgagttggcagtccttgctgccactcccagctgcccttcacccagctctgctggctttgggccataatgtcccatctttggaaatcagagccagattgaatgattcctgggggccttccagtttttctagtttatgaatctgtgaagtagagcccacatagagaagggaaggtttcaccctagttaccaagcagttttgacttagccctgaagggccacgggaatgggagattttggggttgaggaatacctgcttatacttttaggcagaggaaggacagagcagagaggnggaatttgaagatgcaaaagagacggtaactggcaggngcaccatggcgggtagaaagccaagggttag

SEQ ID NO: 511 - DNA, 927 bp, Homo Sapiens
tcgttgttctgggtactacagcagaagggtatgcggaagcgagcaccccagtctgagatggctcctgccggtgtgagcctgagggccaccatcctctgcctcctggcctgggctggcctggctgcaggtgaccgggtgtacatacaccccttccacctcgtcatccacaatgagagtacctgtgagcagctggcaaaggccaatgccgggaagcccaaagaccccaccttcatacctgctccaattcaggccaagacatcccctgtggatgaaaaggccctacaggaccagctggtgctagtcgctgcaaaacttgacaccgaagacaagttgagggccgcaatggtcgggatgctggccaacttcttgggcttccgtatatatggcatgcacagtgagctatggggcgtggtccatggggccaccgtcctctccccaacggctgtctttggcaccctggcctctctctatctgggagccttggaccacacagctgacaggctacaggcaatcctgggtgttccttggaaggacaagaactgcacctcccggctggatgcgcacaaggtcctgtctgccctgcaggctgtacagggcctgctagtggcccagggcagggctgatagccaggcccagctgctgctgtccacggtggtgggcgtgttcacagccccaggcctgcacctgaagcagccgtttgtgcagggcctggctctctatacccctgtggtcctcccacgctctctggacttcacagaactggatgttgctgctgacgaagcattgaccggttcctgccggctgtgacaggattgcgcgactgggtggtccctgacgggagccagtgttggccgcgacctggcttttcacacttacgtccactccccgggcaccaccacgggcgtctccctggtgggcgggcccccg

SEQ ID NO: 512 - DNA, 547 bp, Homo Sapiens
  misc_feature (55)..(392): n is a, c, g, or t
ctctacaggaccccctgctcccccctctctgagcaactgcaggagaggttagtannnnnnnnnnnnnnnnnnnnnnnnnnnnnnnnnnnnnnnnnnnnnnnnnnnnnnnnnnnnnnnnnnnnnnnnnnnnnnnnnnnnnnnnnnnnnnnnnnnnnnnnnnnnnnnnnnnnnnnnnnnnnnnnnnnnnnnnnnnnnnnnnnnnnnnnnnnnnnnnnnnnnnnnnnnnnnnnnnnnnnnnnnnnnnnnnnnnnnnnnnnnnnnnnnnnnnnnnnnnnnnnnnnnnnnnnnnnnnnnnnnnnnnnnnnnnnnnnnnnnnnnnnnnnnnnnnnnnnnnnnnnnnnnnnnnnnnnnnnnnnnnnnnnnnnnnnnnnnnnnnnnnnnnnnnnnnnnnnatctgcgtatcgtgggataattgacatgagggcttgagagaactccagaaaaaaatgggtcagcattttcccagagctgttatcattgggtctctcttaccaccatagcccaaaaagggtgaggagaagagccactgctggaatctgcagacaga

SEQ ID NO: 513 - DNA, 318 bp, Homo Sapiens
acccctgctccgcctctagttctgtctcatttctggggttgcacacaggcttttcctgggccttcatgtttggggaagccccacacaggccagctccagtggaagaaaacgcccccagaagcctcttgttcaccccagatggctctgcggagtcctgtgtctgaccctgactttagcttgggcctgagggactggcatttgtggacttggtctggagatgtgggcagagcccccctcaagcataagggctcagccaggcacagggggtggctcctcagaggaagatcagggtgctactagcagagaggggcggagcag

SEQ ID NO: 514 - DNA, 1265 bp, Homo Sapiens
  misc_feature (1135)..(1135): n is a, c, g, or t
  misc_feature (1167)..(1167): n is a, c, g, or t
ctaagcgggactaggagggcgcgccacccgcttccgctgcccgccggggaatcccccgggctggcgcgcagggaagttcccgaacgcgcgggcataaaagggcagccggcgcccgcgcgccacagctctgcagctcgtggcagcggcgcagcgctccagccatgtcgcgcggcctccagcttctgctcctgagctgcgcctacagcctggctcccgcgacgccggaggtgaaggtggcttgctccgaagatgtggacttgccctgcaccgccccctgggatccgcaggttccctacacggtctcctgggtcaagttattggagggtggtgaagagaggatggagacaccccaggaagaccacctcaggggacagcactatcatcagaaggggcaaaatggttctttcgacgcccccaatgaaaggccctattccctgaagatccgaaacactaccagctgcaactcggggacatacaggtgcactctgcaggacccggatgggcagagaaacctaagtggcaaggtgatcttgagagtgacaggatgccctgcacagcgtaaagaagagacttttaagaaatacagagcggagattgtcctgctgctggctctggttattttctacttaacactcatcattttcacttgtaagtttgcacggctacagagtatcttcccagatttttctaaagctggcatggaacgagcttttctcccagttacctccccaaataagcatttagggctagtgactcctcacaagacagaactggtatgagcaggatttctgcaggttcttcttcctgaagctgaggctcaggggtgtgcctgtctgttacactggaggagagaagaatgagcctacgctgaagatggcatcctgtgaagtccttcacctcactgaaaacatctggaaggggatcccaacccaatttctgtgggcaggcctcgaaaaccatcacatgaccacatagcatgaggccactgctgcttctccatggccaccttttcaccgatgtatgcagctatctggtcaacctcctggacatttttttcagtcatataaaagctatggtgagatgcagcctgaaaaagggtcttggggaaatattgaatgccccccagcctggcccngtggacagactccctgaggaacagctggtccntcttctgccatctggggggaactccccctttggaattttccgggggtttggctgggaacaaagcccagaatggtttttacaccctggggaagaaaatt

SEQ ID NO: 515 - DNA, 268 bp, Homo Sapiens
ctgctccgcccctctctgccaggcatggcgctaggtgctttgtattatttcatttcttcttcacaacaacccatgaggtgttgattattatcatccccatgttactgttaactgaagaatcacaaggttcagaaacttggagaggagagctttacttctaacaaaaggttacagcctgcaggtggccatcctgataggctgggaagcatagcctccagcagacaccaaaagcaggcacttcaagggagagaggggcggagcaggggta

SEQ ID NO: 516 - DNA, 1857 bp, Homo Sapiens
  misc_feature (74)..(74): n is a, c, g, or t
  misc_feature (1003)..(1031): n is a, c, g, or t
  misc_feature (1112)..(1112): n is a, c, g, or t
  misc_feature (1155)..(1155): n is a, c, g, or t
  misc_feature (1168)..(1168): n is a, c, g, or t
  misc_feature (1199)..(1200): n is a, c, g, or t
  misc_feature (1202)..(1202): n is a, c, g, or t
  misc_feature (1207)..(1207): n is a, c, g, or t
  misc_feature (1372)..(1380): n is a, c, g, or t
  misc_feature (1461)..(1461): n is a, c, g, or t
  misc_feature (1587)..(1603): n is a, c, g, or t
  misc_feature (1664)..(1685): n is a, c, g, or t
tgcctacccgccgccctcgagtacctcaccctccacaccgtccgcccgctctctcccacccgcggccaccgcgncccggcaaatttaccaaatggcgggcggaggcgcgcggaacactcgccgaggcgattcccgcccaggctcctgtaacctgccaggcagcggccccgccatgtcccagaccccggaccccagagcaggcactggatacaccgtggggactgccccccaggcaggagagacgaggacgctggggaggggatccagtgctcccaacgcatgctcaggcttcagtgacgccctgctgtccatcatcgccaccgtcatggtctgtacggggcccctgcttaggcctgccccaccccgagcctctcgaggcactgcccagcccacctcagacctgtctaggtcttgccagcatccttgggtcccccagctcctcaggcagcttaggggggcccagcactgccctcgagtccccagtactgccacacccaatccaacacgcgtctcttgctctcctgcttccttctgtctctttgccccctcaaatcctgcctgtgacccacacggagatcctccccagaacaggtaacggggccggctgtgctctgcgtggtgcggcccctgcgaagatataaggcccccgacgctccgacctggtacacggtgcctgacccacccatgcccccccaactttccgagggcattgtgaccggtccaccgtcttccctaccgcctcccacctcccgtgaaccccctcccccgcaccacctccgtatttcccccatatcctccgcgatgcccgcgaaaagacacggttccaaacccctacgcgtgaacacctattccgcgcaatcccccttgacctgggcgcgccgcggcagcgattaacacacataggctagcggccggatacccagatgcgcgaatccgccgaaccacgcgaataccccgccccgtattgttgcgccgcagcaaaacaacgcggcgtggtggccgnnnnnnnnnnnnnnnnnnnnnnnnnnnnntccaattgccgttccgccaccccccgaaacgcagcaaggaccgcccccaaaccaacaaacaacaccctaatatttgttggntggccgcgcccccatagctcaaccccccaacccacagtcgggnagggaaaaggaangttagcagaagcccttttaccctcccgtttnngncggancaagcccccccgcgcggagagggtcgaagtaaaaacaggatgtaaacgcccacgaccacacacccttgatccccgccgcgggtatctgcaacaccccccaaataaaaaattcgtcccccggcccataccatgggggcccgctggagcggagaaagggccccttgnnnnnnnnnaactactacaatccccaccctataactccccccccagcacataaaataaaacccaggcgcaaccggcccccgggattattnattttggaatccatcccccaaacacccccgcgcgcctgattcgagccgaaaataactcccccgcgccgacgccccccgaatataacacctcggacccgtaatattccccccgaaaacccgccctgnnnnnnnnnnnnnnnnnccgccccgcatacctccccttttttatccccgccggcctcataatgcataaaccctacggnnnnnnnnnnnnnnnnnnnnnntcatccgcataagcataacaccacccgcgcgggtaacgacgagaccgccacaccacaaaatacaccacccgaccgacgagaaaacgcagaaatatgaggccatatcacgaatcccccgcaaatgcgccctaaaacaccgccggagtgcgtgctcactaaacccccggtactt

SEQ ID NO: 517 - DNA, 549 bp, Homo Sapiens
  misc_feature (377)..(400): n is a, c, g, or t
  misc_feature (532)..(532): n is a, c, g, or t
ctgctccgcccctctctggctcttctgctctgcgccggacaagtcactgcgctccctgtgaacagccctatgaataaaggggataccgaggtgatgaaatgcatcgttgaggtcatctccgacacactttccaagcccagccccatgcctgtcagccaggaatgttttgagacactccgaggagatgaacggatcctttccattctgagacatcagaatttactgaaggagctccaagacctcgctctccaaggcgccaaggagagggcacatcagcagaagaaacacagcggttttgaagatgaactctcagaggttcttgagaaccagagcagccaggccgagctgaaagaggcggtggaagagccatcatccannnnnnnnnnnnnnnnnnnnnnnnccaccaacacccaccctccagccagcctccccagccagaaatacccaggcccacaggccgaggtggacagtgagggcctctctcagggtctggtggacagagagaaggcctgagtgcagagccagggtgcangcagagagggcggagca

SEQ ID NO: 518 - DNA, 1236 bp, Homo Sapiens
cgggtctgggcccgtgcgcgggccggtggtcttctggttgcccctagcccgctttgtctcggcttgtttgttgcgtgctgtgtgcctctgttttgccctgcgaccgtgtttccttgtcgcatctcagttgttgttcacccgctgcggtggtcttcccaccgtgggccctcatatccgttcctcgcctgtccctggcactttccctggattgtgggttgctgcgtgccctggtctgcttgctttctttggtggtatcttggcgctgtggtccgcgtgtgtccgaagtgcccccgtctcaggtcacctctcggtcggggccacttttcgatcctcatatgtttccctggttccttgttcgatgtcctgtcgggccacgtcgtttcttccgtccttcttgcgaagggaattgcattcgcacgcatgtgctgcgtcctcgctgcctggcgttctgttccatcttctggtatgtcttcctgttgtggctctacctttccgccccctcccgcttgttgttgtcgttccgttcatgggcttcagtatgatttgtctcattaacgggcctctcgatgtgatatctctctgctgcctatgcactgggcttcctcgcgttgtcttacgacggtctatggctccagggtggttctctgggagctagtgtagcgatgagatggagtggtccctatgtagtcctgctgtctctgattcttacatggtgtccctgctccatctcccatcttccgctccctctctgtttcctctggttctccatagtccaggtcatggcaagaggggccagttggaagtggtggtagtggataggcaagggccttttccttttcctaccaggaatcctagatttggacaagggagaggttacaatccagggcagaaggaggagggttaaggagctgaggagaggcctatggccctgtccacttctgttgactggtgtaatgactagatttgaggctcacccttttaactgcattgccccaagagagcactgagctcctaattgggggctgttgagaaagttcttcgtgggcgctcaaaggtgctcactgatttggggagactgctgcagatcttcccatgggagggcccctctggggccaataaggtgtggaaaccacatggtcagcatcagccctagaaatttaagaaatggggccacgaagcagagagaagagagacttcttcaggcaccttctttaggaaagagagctggaccttggg

SEQ ID NO: 519 - DNA, 899 bp, Homo Sapiens
gtggaccggtccggaattcccgggatcaggagcgcagcagccggagggagtggggacaagctcgctgaacactgggcgtctcgacagggaccagagcctgcaggactgttccgagacgctgcggtggcggcggcgccggaggacgcggaggactccctggccacccgccctccgtgcgctctgccaccgggcgctcagcagagaccccgggctgcggctgcacttgctgagtgcctctccccgccgccgcagcccagaggcgcccagcacctggagctcactggagctgagggtccgagctgagcgggctgttgtaaagccgaaaggcgagtcagtgactgggacctctgtcctggtggcgacggagagaaacagtgagcccgaggggcgcgggcacagaactgtccagctccgagaactggggtccgccagccggcggggaaagcagctgagcgcggaggcgagtgagcggacgcgtcccggggtctttgcagtccccgccggccccaaggcaccgactctcggtcagttgggcgcggcagggcgggaggggcgcgccatggaggcgccgggtcgcgccagtatgctccaggccaagtgaagcggtccggctggggtcggcgggacccgcgggccatgtacggcgacatattcaacgccacgggcggccccgaggcggcggtaggcagcgcgctggccccaggagccacggtcaaggcagaaggcgctttgccgctggagctggccactgcgcgcggtatgagggacggcgcggccacaaagcccgacctgcccaacttaccttgctgctcttcttcctgctgctgctctcgggtggcgctcgttcggcctcttcatcggttgccagctgcgccattcggccttcgccgcgctgccca

SEQ ID NO: 520 - DNA, 1031 bp, Homo Sapiens
  misc_feature (982)..(983): n is a, c, g, or t
ctgaagataaagtaagtgctgtttgggctaacaggatctcctcttgcagtctgcagcccaggacgctgattccagcagcgccttaccgcgcagcccgaagattcactatggtgaaaatcgccttcaatacccctaccgccgtgcaaaaggaggaggcgcggcaagacgtggaggccctcctgagccgcacggtcagaactcagatactgaccggcaaggagctccgagttgccacccaggaaaaagagggctcctctgggagatgtatgcttactctcttaggcctttcattcatcttggcaggacttagtgttggtggagcctgcatttacaagtacttcatgcccaagagcaccatttaccgtggagagatgtgcttttttgattctgaggatcctgcaaattcccttcgtggaggagagcctaacttcctgcctgtgactgaggaggctgacattcgtgaggatgacaacattgcaatcattgatgtgcctgtccccagtttctctgatagtgaccctgcagcaattattcatgactttgaacaagggaatgactgcttacctggacttgttgctggggaactgctatctgatgcccctcaatacttctattgttatgcctccaaaaaatctggtagagctctttggcaaactggcgagtggcagatatctgcctcaaacttatgtggttcgagaagacctagttgctgtggaggaaattcgtgatgttagtaaccttggcatctttatttaccaactttgcaataacagaaagtccttccgccttcgtcgcagagacctcttgctgggtttcaacaaacgtgccattgataaatgctggaagattagacacttccccaacgaatttattgttgagaccaagatctgtcaagagtaagagggcacagatagagtgtccttggtaataagaagtcagagatttacaatatgactttaacattaaggtttatgggatactnncagatattactcatgcatttactctaatgctttatgctttaaaaaagg

SEQ ID NO: 521 - DNA, 681 bp, Homo Sapiens
ctgccatcaaaccctaccacagatgaatacgctgtcccgccgcttggagcacaaagcccctccttgcttcccaagccccagggcccagccttccctgaacctggtactgcaactggcagtggcatcaaaagccacaactcagccctgtacagccaggtccagaagagcggggcctcagggagctgggactgtgggctctctagagtagggactgacaagactggggtcaagtcagagggctctacctgagaaggacggcaaggctgaggtggctaagggggaccatggggaggtggcactagggatcaaagaagatggttagaaccagcagaagccagagggtgggaggggccatgctgtgtgagaccaggggaccagagggatgggagagtcaagggaaggacaatcccaggaagtcctaagaagtggggcagatggcagggctgaggatgggctctgcatcccccaaagccatcccttccctacttccccaaatgaagggacggctgtgggaccaggtctgtggaaagtggtgcatggtcagaatgggtgcagtttgaggggcctgtgtggaggcctcagggagatgttggactgtgcctggatccttactcctgcattgttctttgccagagacctatttaaaaattttaaaattctcattaaagtcagcttgggttt

SEQ ID NO: 522 - DNA, 637 bp, Homo Sapiens
  misc_feature (450)..(473): n is a, c, g, or t
ctgttgtaggccataacggtaggcctattcatctgcacatttggtaatgtattcctggtgacaaagcagctactcttcaatcaaaagccgtgtaagaagcagttgaggaaaaaaagtcctggttgagctctgaaaaccttgcgttgataatttcattgaccaggatggcatcagtatcaaacttgaagaatgggtgtcagtgtctaagaaaaagattccagagacaatggtggtgtgctctttaacgaaatgcccatcaccactgctcttaatagcatgaagaccacatgctgtgagaaaacacaaacatcaattaccaagtcaagaaacagacactgaatgtgaaaaaggttttgaaataccttaagtaatttattttgtttctatttttccttctgtttgtgtacaagagtaatttaaaagaaaaagctatgtgaaaatagttggggnnnnnnnnnnnnnnnnnnnnnnnnggtggtgaaggaggaggcctaatgtccagaggactgtttatccctgaagtatgatatactaaaatatttcttattatttgtatcaattttccttggagctcaatgtgcccttgcagtcttcagactttattttaggaaaatatatttgcatgttttccccccaa

SEQ ID NO: 523 - DNA, 598 bp, Homo Sapiens
gcggccgctccaacatcagcgccgcctccgagcaccttccagccgcccggcgcgggcttcccgtacggcgggggcgccctgcagccgtcgcctcagcagctctacggcggctaccaggccagccaaggcagcgatgatgactgggacgacgagtgggacgacagctccacggtggcggacgagccgggcgctctgggcagcggagcatacccggacctcgacggctcgtcttcggcgggtgtgggcgcagccggccgctaccgcctgtccacgcgctccgacctgtccctgggctcccgcggcggctcggtccccccgcagcaccacccgtcggggcccaagagctcggccaccgtgagccgcaacctcaatcgcttctccaccttcgtcaagtccggcggggaggccttcgtgctgggggaggcgtcaggcttcgtgaaggacggggacaagctgtgcgtggtgctggggccctatggccccgagtggcaggagaacccctacccgttccagtgcaccatcgacgaccccaccaagcagaccaagttcaagggcatgaagagctacatctgctacaagctggtgcccacgcacacgc

SEQ ID NO: 524 - DNA, 258 bp, Homo Sapiens
  misc_feature (241)..(241): n is a, c, g, or t
tagtttggctacatttttattcgagcatggtcattttcaaaagaaattacaaattgaaaattcaataatacttttacaaagacaattcaggaaagatttttgtcatggtatcatacattgtatttaacagtccctctttttagctaaaaaacaagatgaagaaagtggaattttcagtcgaaaatacagtgttttcacaagaatcgtatcaaaaagttcccaaatttgggaattttccagntaattggggaaaaaaac

SEQ ID NO: 525 - DNA, 543 bp, Homo Sapiens
  misc_feature (20)..(20): n is a, c, g, or t
  misc_feature (37)..(37): n is a, c, g, or t
  misc_feature (311)..(346): n is a, c, g, or t
cggcacgagctcttcgactncctgaaagccgaaagcnttaccctcctgcaaatgtcagccacatgtagtaggacaccagtatcctagggacagagagccataagtagcccctttggaggactgatggtgtccaaccaaaggcatgtgattgattaatgattcccccttagaaaagccaagtgttacccaaagttgtgttatcttgaaagcattacaggtaagggcatgttatggttatttatcattgtttaatgaatagtagaggtgtcaagggactatgtatacatgattagggtaagatagaatgtatnnnnnnnnnnnnnnnnnnnnnnnnnnnnnnnnnnnngctgaatctttggtgtattgaaataggcagcactctgaaagacagaagcttcgtccagccactcttcagcacattcctttactaagcagtttaaagccgtcctagtggagcaagccctaaagcagatttaatttttgccattttccaagaatgacggtggtggcttttagtcagaaaatggccttctgtgctttcaa

SEQ ID NO: 526 - DNA, 366 bp, Homo Sapiens
tggcagtgggctatgtgagcctggagactgtgctgcgagttgttgatctacagccagtggggctgggctctcccaaggcggtggagtgagaagacaggtgagacaccaagcatgaggccgtggcggaggagatggagcctggggcccaactgctgagcagtagcagagaaaaagaaggaaaaccaggaggcctggcccgagaaagcccaagaaggagaggattttaaagagcaaacactggacagaagtcaggccagaggaagattgtcaggcctctaagccggagcaaggtccttgtaacccctgtgacctgcccgtatacatccaaatggcctgcaggagccacaaagtctggagcagccaaaa

SEQ ID NO: 527 - DNA, 499 bp, Homo Sapiens
cctccagcccctcccattgccatggcaaaacaggtacctttggggcatgggggcattacatgggatgcttgtgtaatcgaccacctagccttctctctcccctcccgtcctcccccagaatcacttcctaggacacccgagctgcttgcccagggtcctgtttccctgctaactccagagaagcatcccagggctttgtgacagtctctaattcccttcccttctcgttaagaatcatattgtatagtagctttcagaccatacagtattcattgggttactcctattattatcaagtagctggaattgtgaaggtcggagtagttagatctttagcttttattccttatttttttgtattactctccatgtgtataaattattgatcatgttgctggcttttataaactctaagcgaaggaggagcactgcctcagcctttgcacatggtaatgaagcactgtttttaaataaaagagagaaacaccaaaaataaaaa

SEQ ID NO: 528 - DNA, 528 bp, Homo Sapiens
ctgactagattattatttgggggaactggacacaataggtctttctctcagtgaaggtggggagaagctgaaccggcttccctgccctgcctccccagccccctgcccaacccccaagaatctggtggccatgggccccgaagcagtctggcggacaggcttggagtcaaggggccccatgcctgcttctctcccagccccagctcccccgcccgcccccaaggacacagatgggaaggggtttccagggactcagccccactgttgatgcaggtttgcaaggaaagaaattcaaacaccacaacagcagtaagaagaaaagcagtcaatggattcaagcattctaagctttgttgacattttctctgttcctaggacttcttcatgggtcttacagttctatgttagaccatgaaacatttgcatacacatcgtctttaatgtcacttttataacttttttacggttcagatattcatctatacgtctgtacagaaaaaaaagagctgctattttttttgttcttga

SEQ ID NO: 529 - DNA, 195 bp, Homo Sapiens
ggatataaatccattagggtgagagaagattaaaaagatacattacaattaaaatgttaatgaaatccgtatcacacaacttttgaaaccctttaggcattaatcttgcctgtgtcatgtccattaactttggctattcttattccacactgaccccccccgagagatttgtgctataattggaaaaatttttaa

SEQ ID NO: 530 - DNA, 175 bp, Homo Sapiens
ttgtatcccagcttttgggatgccgaggtgagtggatcaccgaggtcaggagttcaataccagcctagtcaagatggtgaaaccctgtctctactaaaaatataaaaattagccgggcatggtggtgagcacctgtgatcccagttactggggaggctaaggcagagagttgctt

SEQ ID NO: 531 - DNA, 269 bp, Homo Sapiens
gcggccgcgccgggagagagcggcatacagagcaggggcggcggcgggcgcggctgcctctcgctcgctagctcgcgcgctcccaaccgcccggaaccgaccgcgcggcggcgcccctcccccccacaacacgcccacgtgaccggccggcgtcagcaccgcccctcttcgcgccgtggcccgccgcctccgccccccgaaatacgcggggggtgcgtcggggcgacgttttactttaaaggcaaaaaaaggggacgccgcgatgcccc

SEQ ID NO: 532 - DNA, 368 bp, Homo Sapiens
  misc_feature (186)..(186): n is a, c, g, or t
cctgtttgggcccatttattgtttattttgaataggtaatacagtcacatggttcaaaattcaaaatgtacaaaagggtgtaagtgttaaaacccttccctctcctgtcctcaacctactggttcccctcccaaaagtaatccagtgttacccatttattctgaataggcatacataagcaattantgtgtttatattctactcctttctgaaacacaaatgggaagtgcgctatacacatttctgtggcttgcctttttcacctgaagattattacatattagtatataaagacatacaattattttttagctgcatactattgtattgtaaggctgtatcagaattgatttaaccagtcctttaga

SEQ ID NO: 533 - DNA, 738 bp, Homo Sapiens
gcacagcagaacccacgctgctggcagagctgcggctgctgaggcaaaggaaggatgaactggagcagaggatgtcggccctgcaggagagcaggcgggagctgatggtccagctggaagagctgatgaagttgctgaaggctcaggccacagggtcaccacatacatcgcccacccatggaggcggccgtgccaatgcccatgccagtgcgctccacgtctgccggctccacccccacccgactgtccgcaggactcgctgagcggagtcgggggagacgtgcaggaggccttcgcaacaaggtacgaggagaaacctccgcaatgacctgctggtggcagctgactccatcaccaacaccatgtcatccctggtgaaggagctccattcaggttagcagaggagccggacacagaggaagctcaggcacagaggacgaggagcaagctggcgccgacatggcgaaggcaaggtcttcccccagaggcacattcctctccatctttccaccgcacacctggaccaggcttgcaggctgccagacgtcactccacccgccagggagaggggagccagagccggtgggaagcggggaggggctgcgtggcacagctagtgggcctccccctgcacagccctgcatgtactagcaccttcatcactcccctcagggcatggtctcatctccgcatcaggaattcacctggaggttgaaaagagaaaagaaaaagcaccaa

SEQ ID NO: 534 - DNA, 392 bp, Homo Sapiens
ctccaaaggattgtataattcttaggtgattttaaaatagctgatgaagaatccactttaatcttttttgggtgggtgatgaagggctgaagagcatcgctaagacacttttgacagaatcattaacaagaaataagccgtcagcactcagttgcaaaaccagcagctcctaaaaccaccatcttttacacattccgagggccacagaggcttcctggatgaccagagtgtgtgagggggcaaccaaagaagaggcctggccagaccaggcctccccagcaactcccacgggtcacagacttcccttctgagacgagcagaaacaccaccactgacatgatcttctttcacgacccatggaggagcaattcacctttaccaaaatagggtga

SEQ ID NO: 535 - DNA, 609 bp, Homo Sapiens
  misc_feature (330)..(357): n is a, c, g, or t
  misc_feature (546)..(546): n is a, c, g, or t
tgcggccgcggcaggggcctcccatgatccaccccaacgtgccggccatcatgatcacgcccatctgcccccactcgctgtccttccggcccatcgtggtccccgcaggggtcgagctgaagatcatgctgtcacctgaagcaaggaacacagcatgggtgtcctttgatggacggaagagacaagagatccgccatggagacagcatcagcatcactacctcatgctacccgctcccctccatctgtgtgcgggaccccgtgagcgactggtttgagagcctcgcccagtgcctgcattggaacgtccggaagaagcaagcccacttcnnnnnnnnnnnnnnnnnnnnnnnnnnnngctaggtcaagcccctatccaggcccgaatccttccgctgccctccaagcgccctctggggacagaccaatctgcgtgtgtctgtgaccgcctgtctcagtggcacggccacttcctttctgtagctgggttagagcctgggtctgccttttgtccagatcagctgtttttttaaaatctctgactttntttgcatttctaaagaagcgtgagaaatgggctgggagtgcttctgtcctgctgacaccccgc

SEQ ID NO: 536 - DNA, 457 bp, Homo Sapiens
tagaggatccctctgctccgcccctctctggggtggagcagcaagctccaggataattcctgagtttccagaaacactgaggccagcttcccttagacttgctctctagccagtgccgctgatgatgattgggggctgaacattcctagggtggggccctaggcctagggcctggcagggctgagtgtcagagggagttacaccttgaggggtggccaggcatggtggaccccatctccaattaggggacatcctttgtatcagtagaactgatgactctcaagccagggctctgaggttgggcttgagagcttgactcagtagagtgagtaggaatcttggaaacctggaatgcactacaaagtatggaatgcagtagatagatagtaggattaggacacaggatttggaatctgattgtcctgggttcaagtctcacactagccactaacagctg

SEQ ID NO: 537 - DNA, 455 bp, Homo Sapiens
tctgagactcaatctacagcccagctcatccagatgcagactcagtccctgcaattgggtctctggcaggcaatagttgaaggactcctgttccgttggggccagcacaccgggatggatggagggagagcaaaggcctttgcttctctgcctacgtccccttagatgggcagcagaggcaactcccgcatcctttgctctgcctgtcggtggtcaaaccggtgagcgaggtgggttggagactcagcaggctcccgtccaagcccttgggaacagtgagaggttgaaggtcataacgagagtgggaactcaacccagatcccgcccctcctgtcctctgtgttcccgcggaaaccaaccaaaccgtgcgctgtgacccattgctgttctctgtatcgtgatctatcctcaacaacaacagaaaaaaggaataaaatatcctttgtttcctaaaa

SEQ ID NO: 538 - DNA, 490 bp, Homo Sapiens
  misc_feature (56)..(56): n is a, c, g, or t
cagtgctggctttgagagcagctgcccttgatgaaactcaacccagcaaccccacnccacaattaaaagcttggagcagccctgtcaactggcagagctgccagcccaggctccaccccttacctgtcctgtcactgtgcaagttgcttcccctactgggttcctgcttcctccctgtaaaatggggatagtgatctgagtgtgccctgccttcctcccatgcaggtgggaagattaatgctgttgtggaggggagagtactttgtgaccccaaggaggcggacagcagaggagcatggtgatttcagttactaaccatctagctagatcctgtccaccctgctggggccacttcatgtagaagcttccaaaatgctctacctttctttggtgtggagaagacaggagttgataggaatggtactctggggcttgttctcatttcattctgatctgatggggccttggaattcagagagaggcggagcag

SEQ ID NO: 539 - DNA, 489 bp, Homo Sapiens
cggcagcagaagatgtgtccttccattgagtgagggtaaccttatgtccaccaaggatactttgagaaagcccctaaggaacaagcctcagtcccacggtttcagactatttattctctgaacacaagagtattggttaattatgttctcagctctccctgctgttgtatgtgtgcattcactgcaagtaacttatatctttttatttgaatgtattttaaagcagtagatagaataacaaaggaatatgaaaaccatggactgaatggaccattttatgtattcagagagagaagccactcatcattgccagaaataccatgtaaaaattggcagttcagaggttgcaatacttagtatagtaaataaataaacggtcaacattgtgcaaccactaccaaaaagtgtgttgtaatgcatcaaaaatcaacacaattttattcactaatgagtatcaataaaataagttcaaatgatggaaaccacaaa

SEQ ID NO: 540 - DNA, 602 bp, Homo Sapiens
atgtacgaggatccccctgctccgcccctctctggaaatatcgaatagtgctgctgacattctgatcaattcttcagaagcagaggaggatggaatccgggatgagaaggctcggatcaaccagaacatggatgctgttacagaagagctgcaggccaaaacagggtcactcgaagaaatgactcagaggctcagggagttccaggaaagctttaagaatattgaaaagaaggttgaaggagccaaacaccaacttgagatctttgatgctctgggttctcaagcatgtagcaacaagaacctggagaagctaagagctcaacaggaagcgctgcaggccctagagcctaagggagactatctgaggaactttactcagggtctggtagaagatgccccagatggatctgatgcttctcaacttctccaccaagctgaggtcgcccagcaagagttcctcgaagttaagcaaagagtgaacagtggttgtgtgatgatggaaaacaagctggaggggattggccagtttcactgccgggtccgagagatgttctctcaattggcagacctggatgatgagctagatggcatgggtgctattg

SEQ ID NO: 541 - DNA, 647 bp, Homo Sapiens
  misc_feature (31)..(31): n is a, c, g, or t
  misc_feature (124)..(124): n is a, c, g, or t
atggaagatttgagaaagtgtaaaattattntcataattggtggtcctggctctggcaaaggcacacagtgtgaaaagctggtggaaaaatatggatttacacatctctcaactggcgagctcntgcgtgaggaactggcatcagaatctgaaagaagcaaattgatcagagacattatggaacgtggagacctggtgccctcaggcatcgttttggagctcctgaaggaggccatggtggccagcctcggggacaccaggggcttcctgattgacggctatcctcgggaggtgaagcaaggggaagagttcggacgcaggattggaaacccacagttggtgatcgggaaggaatggctcgccagacaccatgaccaaccgccttctccaaaggagccggagcagcctgcctgtggacgacaccaccaagaccatcgccaagcgcctagaagcctactaccgagcgtccatccccgtgatcgcctactacgagacaaaaacacagctacacaagataaatgcagagggaacaccagaggacgtttttcttcaactctgcacagctattgactctattattttctgaaggcaaaaatgcatgtttgttagaatggaaacagaaaaacataaaaaagttcattccttaa

SEQ ID NO: 542 - DNA, 218 bp, Homo Sapiens
gacccccgagggggcccccggcgccggagcggtacggggcacggcgcggacggaccatgagcgggcgcagggcacgagccgggcggggagcttgccgcgggccacaaggggggctgcgggctccaccgactgaggggcgcagggcgcagggcgcgcggcttcgggggagacgggctgagccgtaccaagctcggggacgcgccgccggagtggggtcg

SEQ ID NO: 543 - DNA, 636 bp, Homo Sapiens
ggggccctggggctggcctggcctgctctgtggagctttctttcctcctaagagagaagatggggcttgtctgccagtagccggggttccctgccttgcacgggccccaccctgcgtggccctgcagttgtctaagtaggggggaccctgcctccctggcccttctccccctcacacctgccaagagatgatcctgctccctgtctcctggccctcttccatcctgggatccaaaagcaccttgcaataaggaagtctgcagggatgtttgatgaagtttatatgaggactctttttgtctgggcagtagcttgagagaggagagccaagctttgctggacatcttccctgtgccagtggtgtgttgtgttggctcacccagcatgtttgctcagataccactgtacgttgaaaatgtcacctgcccaacatccaactcctggtcttcccactgaaaccactactcccagaatgccttgtctcctccagtgactgttctatctctccactccggctgcttggcgaaaaccctgctgcagagtcatgcttgactctctttctcacccacaacatacaatccatctgcagagctctttgcctccaccttcgaaatatagcccaaatccaccacttcta

SEQ ID NO: 544 - DNA, 1476 bp, Homo Sapiens
  misc_feature (1034)..(1034): n is a, c, g, or t
  misc_feature (1211)..(1211): n is a, c, g, or t
  misc_feature (1234)..(1236): n is a, c, g, or t
gcttccgagacgcaacgtcacggggactcctctcaccggggacaaggatgacgaagaggttgacacccacttcgcctcccaggagttcttctcggctaacgccatctctgaccagctgctgggcgcaggctctgacttgaaggacttcaccctcaatgagactgtgaacagcatctttgcacagggcgccccaaggagctccctggccgagagcttcttcgtggattatgaggagaacgagggggctggcccttacctgctcaacgggtcctacctggagctgagcagcgacagggttgccaacagctcctccgaggccccattccccaacgttagcaccagcctgctcacctcggccgggaacaggactcacaaggccaggaccaggcccaaggcgcgcaagcaaggcgtgagtcccgcggacatgtaccggtggaagctctcgtcccacgagccctgcagtgccacctgcaccacaggggtcatgtctgcgtacgccatgtgtgtccgctatgatggcgtcgaggtggatgacagctactgtgacgccctgacccgtcccgagcctgtccacgagttctgcgctgggagggagtgccagcccaggtgggagacgagcagctggagcgagtgttcgcgcacctgcggagagggctaccagttccgcgtcgtgcgctgctggaagatgctctcgcccggcttcgacagctccgtgtacagcgacctgtgcgaggcagccgaggccgtgcggcccgaggaacgcaagacctgccggaaccccgcctgcgggccccagtgggagatgtcggagtggtccgagtgcactgccaagtgtggggagcgcagtgtggtgaccagggacatccgctgctcggaggatgagaagctgtgtgaccccaacaccaggcctgtaggggagaagaactgcacgggcccgccctgtgaccggcagtggaccgtctccgactggggaccgtgcagtggaagctgcgggcaaggccgcaccatcaggcacgtgtactgcaagaccagcngacggacgggtagtacctgagtcccagtgccagatggagaccaagcctctggccatccacccctgtggggacaaaaactgtcccgcccactggctggcccaggaactgggagcggtgcaacaccacctgccgggcgcggggtcaagaaagcggctggtgctctggcatggagctggncaacgggaagccgcagacgccannntggcccccgagtgcggggctcgccaagaaacctcccgagggaaagcacggtggtttcgagaggccctggcttcaaggtggtacaccagccccctggtcagaggcccaaaaacttcttcccggggggggccgtgagggatgccaaaaccttcagtgcttacagggggaccaaaattgctcccgggggttggccaatccgttgggggaaaccccgttgggcaaaacaggccctgggaatcta

SEQ ID NO: 545 - DNA, 406 bp, Homo Sapiens
ttcagcaactgcaccgagcccttccccaacagcaccaacttgctgcccacggagatcagccagtccctgctgtaccgggggcccgtggaccctgccaactggtttggggtgcggaaagggttccccaacctgggctacatccagaaccacctgcaagtgctgctgctgctggtattcgaggccatcgtgtaccggcgccaggagcactaccgccggcagcaccagctggccccgctgcctgcccaggccgtgtttgccagcggcacccgccagcagctggaccaggatctgctcggctgcctcaagcacttcatcaacttcttcttctacaaattcgggctggagatctgcttcctgatggccgtgaacgtgatcgcgcagcgcatgaactttctggtgaccctgc

SEQ ID NO: 546 - DNA, 896 bp, Homo Sapiens
tgggcaccagcggactggtcagcctcgccgtggcccggcaggcctgggtctctctcctcctcctcctggatgccttttttcctttcccggaaccttctccgcagcatgctgttgaggccgaagtcgtccttccaggcgctctgggcctcctggatgtggctcagtgtgggcagcgccttcttgagtgtgctgcggtcggcctcgccatgctccagccggaacatggcgtccgtctccagcttctgcttcttctcatgctctgtggtcagcacctgctcattgtccgccatgtcccagcgctcctccttgcgctgggcgccactcacgatcacgtagtcgcagttggcggggtccgtctgcatctcgatgtagttgacacagaggtggcatttcatccggaacctgtagatcggggttgtgtagtaattgcccaccttcttcttttctgcattgtaacgaacacccatgccgatgtggttcttgcagccatcgcaccagatgttatatggcatttcgaatcggatgatgaggatgccctgtgacagcttccgagcccgctcccgaagcgggtggctgttgtggtatcggttgagagagccatgcttctcagggttgaagtctggaggatagtacttgttgacccctttcctttcacccatcttgggagctgcctactggtcctcagcctcggggcggacgatcagaaactggccttgtgaacacactgcactgtcctgacctcttgtggagcctggcagagggtccacaggcttccctgcgaagatgtcgtgggccgtgtggtggtgccagctcagacaagactcccgccaggcataggaggcatccaaaaagcggcgtgtctgccctcctcccgacgtcacgcctgaccgtgcccg

SEQ ID NO: 547 - DNA, 923 bp, Homo Sapiens
  misc_feature (510)..(510): n is a, c, g, or t
  misc_feature (713)..(722): n is a, c, g, or t
  misc_feature (740)..(799): n is a, c, g, or t
  misc_feature (826)..(834): n is a, c, g, or t
  misc_feature (862)..(862): n is a, c, g, or t
gtggaccggtccggaattcccgggatcggccgacctcctggtggtgcacctggacttccgggcggcgctggagacctgcgagcgggcctggcagagtctggccaaccacgccgtggcagaggaacccgcgggcacctcattggaggtgaagtgctccctgtgtgttgtggggatccaggccctggcagaaatggatcggtggcaagaaggcctctcctgcgtccttcagcattaccaggtccctgaaaagctaccccccaaagtcctggagctgtgcattcttttatacagcaaaatgcaagagcctgcagctgtgctggatgtggtgggtgcctggctccaagacccagccaatcaaaaccttccagaatatggagccttggcagaatttcacgtgcagcgggtgctgctgcctctgggctgcttatcggaggctgaggagctatgtggtgggctctgcagcctttggtgaggagcgacgactggatgtacttcaggccattcacacangcgaggcagcagcagaaacaggaacactcaagctcttgaggagcccaaaagtccaaaactggaaggctctgtcttccacaagttcccgtcactaaccgaaggtgggtcgcccagctttgggaactcttgcggggagccactttcttttctcttgcccttttaaaaaaaagctcccggggtgcccttgaacccctgggcccccnnnnnnnnnnaaaattttgatccaagtnnnnnnnnnnnnnnnnnnnnnnnnnnnnnnnnnnnnnnnnnnnnnnnnnnnnnnnnnnnngtggggatccgcgaaggagggtgccannnnnnnnncgccccttaaaaaaattctcccaatttngggggaaagtagggggggccccttggtaaacccaaaagatttctttggttttctctaaaaa

SEQ ID NO: 548 - DNA, 1202 bp, Homo Sapiens
cagaaggacgcacgcgccgacggtgctggcactgggcttcatggcactctactccctcctgccacacaaggagctacgcttcatcatctatgccttccccatgctcaacatcacggctgccagaggctgctcctacctgctgaataactataaaaagtcttggctgtacaaagcggggtctctgcttgtgatcggacacctcgtggtgaatgccgcctactcagccacggccctgtatgtgtcccatttcaactacccaggtggcgtcgcaatgcagaggctgcaccagctggtgcccccccagacagacgtccttctgcacattgacgtggcagccgcccagacaggtgtgtctcggtttctccaagtcaacagcgcctggaggtacgacaagagggaggatggtgcagccggggaacaggccatgctggcatacacacacatcctcatgaaggcggcccctgggctcctggccctctacagggacacacaccggggtccatggccagcctcgtcggggaccacaggcgctgagtctgaacctgacccaactggccccccttcaacgtccacctgcagacaaagctggtgcttctggagaggctcccccggccgtcctgagggggaccaggcagccctcagcagccacaggccttccaggagcctgtatcactaccagtttctggcacaattccagcacaattatgacaattcagagaagcaagtcaaaggactgggcacctgcctctgacagacaccagaaccaggtccagggcctcctccacagcctcagactggggctctcagcaccaaagaacgaggggcccaggtcttgttggcaccccgggagccactgcccagggtgatggtggccagctcagggcttcctgcgggtgactgtcgcccagaccaggtgccattcatgactaatcaggagcagcgggctcacccaggcacctgtctgccaggaggcaacgtgtgtcctgcccacccagggggagctgtattttggcagcaccgccacgcttgctgcccgagggccttcttggggcacctaagacagcaccccctgcttcaggggagaaccatggtggaccccggccgcacccaccccaccctggtgccaccactgcaacttttgtattcacaggcatcccatctccatcacagataaaatcataagagatatgcacattcaaaaa

SEQ ID NO: 549 - DNA, 673 bp, Homo Sapiens
agggaaaccgagataggccatggagcaattctaggggcttatagctccaataatggaatggttctgccatcttgaaacccccattctgtttccagcccagaagaaatgctgcccctaccagatccctccttgaaccagtgatctaaggacccctcttttccctatctgcctaacagtgcctcacaaggcttgggggctggactccctctactccctctggccatagcccctcctggagatggggtcaaggcagcaggactgatcaagtgactactggttagccagaggagctcagctgaagccctggaaaccctcaggtctgagataggagttctctaggaacctggaatgagttcctgtctcctgaatgatggtctgggtgccacctgtttttaaactcttaaacctggaactccttaaatggggtaggtgggtgagattatcaaagctgaagctggctttgctgagaagctccctacctccctgcccttctcctccttcctgctggaatgaactaaagcagatgtcaagcaggggctggtgggggtgcctactcccttttccactctatctttagatttcaaaccttaggcttacagcccctcaatatctctctgctaacaccagtgtctctttctagttaggcctctaatcttctgtttctggttaccag

SEQ ID NO: 550 - DNA, 679 bp, Homo Sapiens
tagcctggagtaccaggcccccatgcctgccactcttgtcctggggctggaatttggttcgtattgatcaatgctggaattaatgggtcaacgggagggacctgactcagtaatactagccatatagagtttgccttgtcttattctgaggataaagaaagtacatctgttaaaccttatctgtcaccagtgcaattcccatgtgagaagttacagaaagctgcaaagcagcattcccctcagggacaaagtggctcaactggatcacagtttatcttcaaagtccgcctcttgcaggtggccaggccaggagtctccagccagctttcaccgcacccttcaagtcaacaaatcctgagagcccactctgggtcaagtatgtgctgacctggggcggcggggaacagtagtgatcacgacagccaagattctcccgaactcactctgggaaatgtgatctgaaaaccttcctggtttcatttcttggatttctcactgagtagcatgtttccttctctaaaaactcagaccacaggtattgacacaaagaaagccacaacttcagggccacactctgtttccatgtggtgcatgaaagagagaggtttctctgctctcttatacagaagaagttcaatataacctgtgaaggggtaaaatcactgcatctcttatttct

SEQ ID NO: 551 - DNA, 575 bp, Homo Sapiens
  misc_feature (35)..(35): n is a, c, g, or t
  misc_feature (53)..(53): n is a, c, g, or t
  misc_feature (67)..(67): n is a, c, g, or t
gttggtgtgtggtctgccattagattaccacctcnaatggcagcttgtcttcnctgttcgtcacctngtgcatggtaaggacagagtataggctcctccacaagttggagaggattggcggacctgaagataaagtgggccaggtctgagggtgtctccagcttcataaaaatggcatgatagagttggaaatggccttagataccacctaatccaatcacctcattttatagatggaaaagctgaggcccagagatggagagatcacctgcttccctgagttaacagctgctccaggtctagaagctgagtgtctggactccgaaggcactattccttgtaccgtattagcaagggatctttactcatgacaatgtaaaccttaggaatgctatgtatggtaaagggggtttgttatcccttgactttatattcatcaacagaggttaagctgggtcacagaccctgagactaagggacagttgtgtgtgtagatgacacattttgcagattctctcatgcagcagcaagagtccagtcaagttatctcagccacagttaatggttaatgctgg

SEQ ID NO: 552 - DNA, 447 bp, Homo Sapiens
cgcaactttatagttcctcagccccacctccggctcggcgggcgtcctcaggatgcactgaggctgaggggaggggaggcggcggagggtcgaggtcgcggtccctctcctccgagcgcccggctggaggggagggagtcacgatgtctggtagccgacaggccgggtcgggctccgctgggacaagccccgggtcctcggcggcctcctcggtgacttccgcctcctcgtctttatcctcttccccgtcagccgccttcctgtggctggtttcaggcggcatgcgctggctgtcacggctggggttggcccatggcctgcccgggctcgtggctggccctcgtgggtgcccgagtgctggccctgtgtaagggtgggcgccctgccggtattcgggtaagcgtgctgtgtggtggctggatgtaccacgtgggccttgtaccctgg

SEQ ID NO: 553 - DNA, 224 bp, Homo Sapiens
ggggtgatctcaagcttctatcctatacctgccccatgagaatattacaggtggggaaactgaggcacagaaggctttggtgacgtgctcaaagttagcagcaagtgcacgtctggggaagcctgtgcctgtcaccaccatcctaaggtagacacaaccttagcaaaccaaagacaggggccctgtccttccctgccctccttggtgcagctccggtaccgagc

SEQ ID NO: 554 - DNA, 1498 bp, Homo Sapiens
  misc_feature (289)..(349): n is a, c, g, or t
  misc_feature (809)..(825): n is a, c, g, or t
tcagcgggccgggcgttataccgcgtctccagagcacgaagaaaaggctcggggatccagcgcggagagtccaggagaagagccggcagactgcagtggcaggtggaaggcttgcagctggcaaaagtagggtgggggcgcggtcgtgaagggtgggacttctggagcaacgctgggtgggttgggggccggtcggagccggacatgcggctgggaggtgggatggcggggcgcttgggcagcgacgatggggggactagggcgtggctacagctaaattcgccgcagnnnnnnnnnnnnnnnnnnnnnnnnnnnnnnnnnnnnnnnnnnnnnnnnnnnnnnnnnnnnncgtacggcacccttcaggttagcccgtcggctccccgggctctccctggcgccgagtcccacccctttcccggcccagatgagtgtgcgtctgcgatgcatcctgagctgtcagtgtgtacgagagtttgtgagtccgaggttgcctatgttggagcccctgggcaggaggtgtttccgcgcggaggctggtggcccgcggtggacgcggcgccctggcctgcgtagtctgcggagctgagcaccggtccagcggttgtgtgtgtctcaggcgactccctgggggcacgctcgtgcctgctgggctcccgagggacgtctctggagggccagagggtcgcctcagtctgcaagtcctccagcaggctttttcttcttcggctcctccctgattccctcccaccacgcggttcccaggctcgcgcacgcccggagcccaccccctcttttgggcgcgaggnnnnnnnnnnnnnnnnnttgcctctgccgcaaagtttatttgcaacaaaagggtgccaggagcgagcagccaagggcgttgggcaggcggacgcagagtcgaggaaccaagcgctgggatcccgcccaggcggtgccgcggtgcccctggtcgctccagccgcggcgggggctgggcctgggggtcggcgctgaggctgggaggggccgcccgggatggagacgttgcggccggtggccacagaaacttgagccgcggcagagaaacctctgctccggtctctgcgtcctcttcccacactcccgtgcgctgctttcggcgtgggccgctgcgctcctagggagtggctgggcgcagggggggttggccgctggctgcccgaggccatgcccccccggagtgacgttacgccactatggcggacgtgggcacccctggccccagctttaccgcagcgtctcgttcaagctgctggagcgcatggagcggcggcccgggctgagggaggaggacacggacacccccggcttgaggcgacgcgcctcgtgccggccgagcacggcatgccggggccagccctctcgggcgcgtgtccaagctggcgtctgggcccctgtgccgacccgcgcagccgcgccctgatccgcagcctctcgccgtcggttcgcagctctcccgggagcttcgacc

SEQ ID NO: 555 - DNA, 724 bp, Homo Sapiens
ggaggcgcccgcggctgcagagctgcagagcgggatctcttcgagctgtctgtgtcagggcagccggcgcgcaactgagccagaggacagcgcagcctttcggcgcgggccggcagggcccctgcggtcggcaagctggctccccgggtggccaccgggacccccgagcccaatggcgggggcggcggcaaaatcgacaacactgtagagatcacccccacctccaacggacaggtcgggaccctcggagatgcggtgcccacggagcagctgcagggtgagcgggagcgcgagcgggagggggagggagacgcgggcggcgacggactgggcagcagcctgtcgctggccgtgcccccaggccccctcagctttgaggcgctgctcgcccaggtgggggcgctgggcggcggccagcagctgcagctcggcctctgctgcctgccggtgctcttcgtggctctgggcatggcctcggaccccatcttcacgctggcgccccccgttgcattgccactacggggccttcccccctaatgcctctggctgggagcagcctcccaatgccagcggcgtcagcgttcgccagcgctgcccttagcagccaggcgccgcagccgtgtcggcaccagtaccgacccctcgtgcagcggcttcgcccccgcggacttcaaccattgcctcaaggattgggactataatggccttctgttgctcaccacaa

SEQ ID NO: 556 - DNA, 972 bp, Homo Sapiens
ctgactcggagcgaggagacccgagcgagcagacgcggcctggcgcccgccctgcgcactcaccatggcgatgcatttcatcttctcagatacagcggtgcttctgtttgatttctggagtgtccacagtcctgctggcatggccctttcggtgttggtgctcctgcttctggctgtactgtatgaaggcatcaaggttggcaaagccaagctgctcaaccaggtactggtgaacctgccaacctccatcagccagcagaccatcgcagagacagacggggactctgcaggctcagattcattccctgttggcagaacccaccacaggtggtatttgtgtcactttggccagtctctaatccatgtcatccaggtggtcatcggctacttcatcatgctggccgtaatgtcctacaacacctggattttccttggtgtggtcttgggctctgctgtgggctactacctagcttacccacttctcagcacagcttagctggtgaggaacgtgcaggcactgaggctggagggacatggagccccctcttccagacactatacttccaactgccctttcttctgatggctattcctccaccttattcccagcccctggaaactttgagctgaagccagcacttgctccctggagttcggaagccattgcagcaaccttccttctcagccagcctacatagggcccaggcatggtcttgtgtcttaagacagctgctgtgaccaaagggagactggcgatccagcggtggcagggttactgagccatgacaatgcttctctgtgactcaaaccggaatttccaagatttcaagccgggagcaaggtcctgggatgcagcttggacctggaccctcagtctcccgcttgtgccttctacggagctccccttggcttccggccctttttcttggggccggacccctaatctttttccctttgcctgggcccttactt

SEQ ID NO: 557 - DNA, 896 bp, Homo Sapiens
gtgccgagccaggccggcctccccgccccctccctggaaaggaaaggccccggcgacaacagagccagacccgctcatcccgatctcccagaaggcgactgacagctgactgccagaaggagatcgcgccaggagactgactgctctgtgcccacccggggacccgggcccgttcagccgggctggctggtgcgccctctgcaaagcctgcgccagggaggaggcaggctcaaccttcagattcccagggcctctctgtcgctgtcgccgtcgccgtcgcccgaggtcccagcggctctaccagattgttgtggaggcctctcacccgcacagatctcccctgcgaccatgtcttccattaagattgagtgtgttttgccagagaactgccggtgtggtgagtctccagtatgggaggaagtgtccaactctctgctctttgtagacattcctgcaaaaaaggtttgccggtgggattcattcaccaagcaagtacagcgagtgaccatggatgccccagtcagctccgtggctcttcgccagtcgggaggctatgtttgcccaccattggaacaaagttctgtgctttgaactggaaagaacaatcagcagcttgtcttggccacggtggcataacgaccaatgaaaaaccaatcgcttcaatgactggcgaacgtggatcccgccgggagggtactttgctggcaccatggcctgaggaaacaggctccagcagttcttgaacggcaccaggtggccctgtactccctctttcctgatcaccacgtgcacaacgtactttgaccaggtggaccatttccaatggttggattgttcctagaacacaaaatccttttttcattgacagcctgtctatccgggatgccttgatttaa

SEQ ID NO: 558 - DNA, 625 bp, Homo Sapiens
gtatactggtggttgaggacgagcgttgtacgtgggcggctgggcacggagtggacgaccactacgggttatgtggtgaacgagaacccggagtgggtgaaggtggtgggctacaagggcagcgtggaccacgtagaactgggtgtccaactacaacgccctgcgggctgctgccggcatccagccgccaggctacctcatccatgagtctgcctgctggagtgacacgctgcagcgctggttcttcctgccgcgccgcgccagccaggagcgctacagcgagaaggacgacgagcgcaagggcgccaacctgctgctgagcgcctcccctgacttcggcgacatcgctgtgagccacgtcggggcggtggtccccactcacggcttctcgtccttcaagttcatccccaataccgacgaccagatcattgtggccctcaaatccgaggaggacagcggcagagtcgcctcctacatcatggccttcacgctggacgggcgcttcctgttgccggagaccaagatcggaagcgtgaaatacgaaggcatcgagttcatttaactcaaaacggaaacactgagcaaggccatcaggactcagcttttataaaaacaagaggagtgc

SEQ ID NO: 559 - DNA, 424 bp, Homo Sapiens
ctcttgcttctaaggggtggtggccaccactgtttagaatgacccttgggaacagtgaacgtagagaattgtttttagcagagtttgtgaccaaagtcagagtggatcatggtggtttggcagcagggaatttgtcttgttggagcctgctctgtgctccccactccatttctctgtccctctgcctgggctatgggaagtggggatgcagatggccaagctcccaccctgggtattcaaaaacggcagacacaacatgttcctccacgcggctcactcgatgcctgcaggccccagtgtgtgcctcaactgattctgacttcaggaaaagtaacacagagtggccttggcctgttgtcttcccctattttctgtcccagctcatccgtgtctctgaagaacaaatatgcttttggaccacgaa

SEQ ID NO: 560 - DNA, 467 bp, Homo Sapiens
cagaggatgtgaagaaagtccgggagacggggctgcacctgatgcggcgagcgctggccgtgctccagatctttgctgttagccagtttggttgtgccacaggccagatccctccaaccctgtggcagagggtccaggctgacagagactactctcccttgctgaagaggctggaggtgtcagtggacagagtgaagcagctagccttgaggcagcagccacatgaccatgtcatcacctctgccaacctccaggacctctctctgggaggcaaggatgagctgactatggctgtgcggaaggagctaacggtggctgtgagggacctgctggcccatggactgtatgcctcctccccagggatgagccttgttatggctcctattgcttgtttgctgccagccttctcctcggccccagaggccatgcacccgtgcgagctctttgtaaagtactaccatgctaag

SEQ ID NO: 561 - DNA, 613 bp, Homo Sapiens
  misc_feature (17)..(17): n is a, c, g, or t
gacgggcccgctgctgnccgctctcttctctgcctctcaccaggacagcgccccccaggggtactctgccccttgcttgactcagtttccctcctttgaaagggaaggagcaaaacggccatttgggatgccagggtggatgaaaaggtgaagaaatcaggggattgaggacttgggtgggtgggcatctctcaggagccccatctccgggcgtgtcacctcctgggcagggttctgggaccctctgtgggtgacgcacaccctgggatggggctagtagagccttcaggcgccttcgggcgtggactctggcgcactctagtggacaggagaaggaacgccttccaggaacctgtggactaggggtgcagggacttccctttgcaaggggtaacagaccgctggaaaacactgtcactttcagagctcggtggctcacagcgtgtcctgccccggtttgcggacgagagaaatcgcggcccacaagcatccccccatcccttgcaggctgggggctgggcatgctgcatcttaaccttttgtatttattccctcaccttctgcagggctccgtgcgggctgaaattaaagatttcttagaggctgaaaaaaa

SEQ ID NO: 562 - DNA, 513 bp, Homo Sapiens
cgtcagaacatttggggttttaaactgatttgttgctccctatccagcctagacaccagtaactcttgtgttcaccaggacccagacccttggcaagggataggctcgttggtgacattgtgaatttcagatttgttttatccactttttttgctatttatttaaatggtcgatcaacttcccacaaactgaggaatgaattccacgagcctgttctgaaaatgtggacgtaagacaaacacgtgctcgtcctttaatggagttcaccagcacacttgttaaccagtcctgtttgctttcgtctttttttgtgcgtaataaagtcaactgaccaagtgaccatgaaaaggggctgtctggggctcctgttttttagctgctgttcttcagctccgaccatgttgctgtgtgattatctcaattggttttaattgaggcagaaactgaagctctaccaatgaactgtttagaaacaagacacacttttgtattaaaattgcttgcaaccatcgt

SEQ ID NO: 563 - DNA, 515 bp, Homo Sapiens
atcctctggggcacccattacagtgtctgtaccaaggaggcaacaaagaacggcggaacagactggagcagaaggaccacccagcagagccaagccaaatcactgaccctcagaggcctgatgtgaatgcttatggcttcagtccattggattctgcagtaatctgccgatctacagtattaccacagtaaataaccgatagacctgaaaacgaatgcatgcctcgtgccaaaattgcaggaaacctcaccaggagaaacaattttatatgagggaatgtactctctcctttgcattttccctcaaatctatatttttagcccctcacttgtctctacagagcctcagttgcttaatctaattgctgactgaacatctccaggaaactgtgtgtacgtgtttgtattcatagtatatttatttattatctgtttacttccatgggatatagtctccataagagagtagtcatcattgtatttgttgatgcttaataaataatcattgaatgggca

SEQ ID NO: 564 - DNA, 633 bp, Homo Sapiens
aggaagacacctccagaccttggggtccccgcgcttcctcttgctcctcgctgctcccattagctggtgcaggcttccgttaaggggtccctcccttggcctggcttcccggcgcacctcagcttccctgctggtggggggatccccaggagaccagcatgtgctgaacctctccgtgcctctgcctccgcaccctagacacccacctccagtttgaaggtggcgggccaggggctttcttgctgaattgacgactccgagagccctgactcccgccttgccactcacggctctgtccactagggctcagccctgctgagaaaggacctccgatgcttgggagacgctgctccggcaggtgcagccccggaagtttgtccatgggggtccccgcggctggggctcatggaactgcgagacccgggaccctcctgccctgcgggtccccgagccaccagcagccaggaccggaggctgtggggcatggcgtgacttctcgtgcacagggctggtttggttatgagacgatctcgctgggaccgcccctgcccgtggaaagccacaaggacaaagggagcggccacctcgacccccagacaggccggcccgtattaaagttggccctgcacgccc

SEQ ID NO: 565 - DNA, 1266 bp, Homo Sapiens
ggaaaagaaatactgttttagagaaataacattttcaacaaaacatccctggagtcagattttgagttggggtgggctaatcagggagtcggggctctctgcgtgatgtcagttctatggctaactggtttttctaaaccagccagctgcctatcaaaacagtacaacttttctaggaaatgcaattggcaaagacacttacgatgctgagaagtacacaaggtgaaactgctccagtttttctcatagcagggtcagcaggaaagcaagtggtgcccctggtcccatctcacacaggtgagactgcaccgagaggtaacgtggccctcacagcccaccacgcctggccttcgcccaattctgaaacttcgtaggatagagctggaaagtgccacatggtgaagcgagatccagctgtctgggtggatgtcggagtccataggctgagcagagatggttcttagtgaggttctcgctgccagttgacggtgaaatcatagctgccatttacattttgtgagattatgaaaaacataagactaaagaaactaaatgtgttattcctgtggacacaaaaatgtgtgtttttcagatggggaggggaccaaaaaggaaaaacatttcatcttaaaactttcctaagacaaaggaaaacaaaaaaccatgctctacaacttcaaatttttcttacaaagaaaaatttaatattcgatgagcaggttgaaccaggcttaaagcagacatactaggaaatggtgcagcctgtaagaatgccagtttgtaagtactgactttggaaaagatcatcgcctctatcagacacttagggtcctggtctggcaattttggcctgatgtgatgccaaaagacccaacagagagagacacagagtccaggataatgttgacagtggtgtagccctttaggagaaatggcgctccctgcggctggtattaggttaccattggcaccgaaggaaccaggaggataagaatatccataatttcagagctgccctggcacagtacctgccccgtcggaggctctcactggcaaatgacagctctgtgcaaggagcactcccaagtataaaaattattacacagttttattctgaagaacattttgcattttaataaaaaaggatttatgtcaggaaagagtcatttacaaaccttgaagtgtttttgcctggatcagagtaagaatgtcttaagaagaggtttgtaaggtcttcataacaaagtggtgtttgttatttacaaa

SEQ ID NO: 566 - DNA, 468 bp, Homo Sapiens
ctatcaagtgatgaatggattaaaaattgtgttataccccaacaccagactattactcagccatacgaaggaggtgcgcactcacgttacaacacaaataaaccttgaaaatattatactaagtgaaagaagctggttaccaaaaaaacccccacatattatatgattcgatttatatgaaatgtccagaacaggcaaatccatacaagcacaaagtagattcttggtttcccagggctggagatggaggagatgagggaagttaaggggtgacagctgaaagggtgacagctaaaagggatggaggtttctctgagaggctggggaaaatgtgtgaaattgtactgtggcaatggttggtggcacagctctgtgaatatagtaaaagccactgagtggtacaattgaaaccagtgaattgtgtggtatgtgaattatatttcaataaaaaaagtacatatctaattg

SEQ ID NO: 567 - DNA, 862 bp, Homo Sapiens
  misc_feature (543)..(639): n is a, c, g, or t
catttatactgtattctcacgttacattatttcatttgatctctacaacagccctgtgaggtaggtagggttatgtattactggttatgcccatttcacagaatgaacaaatggaggtggctcacctgaggtgagtgacttgcataaagtcacacagcatgttagtggcttcactgcttctgcaacttctctaaagtcaagctgcttgtgattagggagcaccgaaaagatggacagttttatggaaaaggagaaagggcagtggtgatttgtaagatttcttcctcaaattgttttgtctatgaccacagcttctgctacttggtctaacactaggttctccatgagcgggctctcccagagtacccttggcctgggacagctgtctttttttgggatggagtctctctgcaatggcacactctctagctcactgcaacctctgctatctgggttcaagcgattctactgcctcagcctcccaatatagctggggttgtatggcgcctgtcaccagcacccagctaatattatgtgtatatnnnnnnnnnnnnnnnnnnnnnnnnnnnnnnnnnnnnnnnnnnnnnnnnnnnnnnnnnnnnnnnnnnnnnnnnnnnnnnnnnnnnnnnnnnnnnnnnncactggcatgtgcctctgtgcctggcagcacacagctggtctgagtagactcctgggtccaaccgtaggggaaatagggccttttgtgctcagagcggcctgtcgctgcccatggccagtgtacgagctccctactcacagggcctttctatgggacagcccctttctgggccacactcgcgatgttgcctttgttatcagcttctgcgtgtgtagaccctgc

SEQ ID NO: 568 - DNA, 570 bp, Homo Sapiens
ttttttttgccatgtaaaacccgaaggcattaaaatttattaaatgatgcaataacaacagaattctttatttacaatagcattatttaacatcaaataagcaaatagcatcagcaaagcaatattaacttgcataaatgtatttaaaatttctctgaatatatctacctttgcataaactgctcacactagaaatacaaacatcaatgcaggtgaacaaagtgatgttcagagtcaactccattttgaaaataaatcacaacctgaaacactgtaagctttctcctgaagaaccatagttaatatattgcttaattttacccttgtataatcttttcatatacacacatctcagatgcaacttcatgaggaactgtacaaataaaactcacaaatgacaaaggaaaaaaatgacagttaaatgtctgaagaaatgtatcatcatcactattcaaacaacataaaggttaagtgatgatgcacttattcaaaaattgtacacaattcactatacaaatataatacatcggacagctatgtaggaatatacaagacttaaaaacagatcta

SEQ ID NO: 569 - DNA, 354 bp, Homo Sapiens
ccacctgggtctcgctggtcaccctcccaccatggggtttgccagatgctttctggaccactgtcctccctccctggcgcagccctcaggtccctcctctcctctgcagtggctcctgcggaatgaggtgcccctgtgtgctgtggccaccatcccagcccaccagcgctaaggagccaacacattttctcatcttatgctcaaattcctgttcaatcatgtgtgctctttcccaggtgaatgggacagatcactggctgtgagcacagcccgtctcccccggctctcacagattcctctgtcatccctgaagtcccctacaggtctgaactctgcttcaccgacctcaaatcc

SEQ ID NO: 570 - DNA, 175 bp, Homo Sapiens
tcacatgcaatcacatacaacacacatatgcattctcatacactctcacacacccacagtcgcatgcactcatacgccatcacatacacactcacataaaccacagttaattacatgcacacaatcacatacaaaacacacatgcattctcatacactctcacacacccacattc

SEQ ID NO: 571 - DNA, 520 bp, Homo Sapiens
acagagatgaacatcattggtcaaaccacaaagagttagaaagatgatctgtatcaacagatctagtttcttgcatttttattatgttgctatatacttttgttatccgtatactaaaaaaaaggaataaataaatgttttgattgtttgaatttgaaaaatacacacgaatgtcctcagtatccaggaacataaaggcaagaagcaagtcaacttacctattaaatattcctctattagatgtttcaacactataatttaattgggaaaaattgctttcagaattttattatgccatatttcccttcattatagtaaaatatatgctcacgaatcaatgctgatttttaaaatatgtataatctgaagtggaaattgtttgcttagagtttttaaaaacctagtctttgaaaagcagtttgtgctatacttttcccccaaccctccaataaatcttaaatttaaaacctacatatgtagtgtctcccctttaggttcatcaaactgatgaaaatatttc

SEQ ID NO: 572 - DNA, 505 bp, Homo Sapiens
aaatccaaatgcaaagttaagtgacgacagagaactcgggtggacggacacaatgcggaaaccaagacagaattcaagtaccgaggcacccagccaggcgcggcccgccgggctcacagtatctgtcacacctccggtccctcctggacctctccatgcaacccagctgcctcctgggcccatccccttggggaagaggaaggcagggcaggagaggcggctagatcccaggcccaccacctgccaggcggcagctccaacacggtccagtcccttctgtcctcctcaaaaggtgtggagataacgtagctctgtaatagattctatataggatatgcgtattgctaatagtcaggcttagggataaaggtgcagacatctcataaatactgagtggctcgtctctctctacagggtctggatgagtcagggtcacactcacaggacaggacaaccccggattctagaattagtcatcttgtaaacaaaggagggaagggtccgg

SEQ ID NO: 573 - DNA, 506 bp, Homo Sapiens
cgggtaacgtgaacgttattcagcctaactatcctgcggcagcccgtgacttcctgcagactttccgccgtgggctgctgggttccgtgatgctggacctcgacgtcctgcggggccaccccccggctgagactttgccctgaacttgtccgggtagggagggccggaggcatgtggcctcccagacctcctgacctgggtggttgaggctcaagacagctcacccggtccagaagctccatgctggtcactagggtgctgtgctctctggcgccccacagcctggccagctccagggaccccagttgcagggcccaagcaggtgggagtggacaccaggcttcccagtggacgtccctgagcagctccgcatgcttggttctcccggagcttcctgctcaggcctcttgagaaatggatgctgtctcagaaggagttaaagctataacctgtaacctttaaaatctccagttaaagggcctgtttcttactggcctgtgaggtgc

SEQ ID NO: 574 - DNA, 190 bp, Homo Sapiens
tgagccactgcacctggcctgttaaatatacttttgtagttactgttccttctgcctggtagcctgggttctcttccccgtgtttatctatttggtaaactccatttcttactcaaaagattgtatttaaaagctgaatgtaatggcttctttgctccgttccagattcacccaggcaagtagtgagctc

SEQ ID NO: 575 - DNA, 694 bp, Homo Sapiens
tgatctttgaagattgtgatgaagtccctggccagtgtaggaattgcttacgcaacaccaccggattcaagtgtgaacgttgcgctcctggctactatggggacgccaggatagccaagaactgtgcagtgtgcaactgcgggggaggcccatgtgacagtgtaaccggagaatgcttggaagaaggttttgaaccccctacaggcatggactgcccaaccataagctgtgataagtgcgtctgggacctgactgatgacctgcggttagcagcgctctccatcgaggaaggcaaatccggggtgctgagcgtatcctctggggccgccgctcataggcacgtgaatgaaatcaacgccaccatctacctcctcaaaacaaaattgtcagaaagagaaaaccaatacgccctaagaaagatacaaatcaacaatgctgagaacacgatgaaaagccttctgtctgacgtagaggaattagttgaaaagcactggaacaagccaagaagaagactggaattgcaggaaggagtataatgactcagaagacagtgtccattcagagagcccacagtttatgaagggactgatgaccacattgccgctgcacagtgggctctgtgactacaggagccttgctctgtagggaggggattacccttctccaataaaaagcctctgggcatgtgtttgtt

SEQ ID NO: 576 - DNA, 1037 bp, Homo Sapiens
tctcacatctccagtccctggcggatctggtcagtcccacccctaggtgggagtgaccagggggctctggcccaggattcccaaccctggaaggcagctccaaggcaggaagagaattgggcatcgggtacgaacctggcagctcaggagtcggggctccactcaccccacacaaaaagatgaaaaagcgcaaagagctcaatgcattgattggtttggctggggacagccggagaaagaagcccaagaaaggcccaagcagtcaccgcctgcttcgcactgagcctcccgactcagactctgagtccagctccgaagaggaagaggaattcggtgtggttggaaatcgctctcgctttgccaagggagactatttacgatgctgcaagatctgttatccgctctgtggttttgtcatccttgctgcctgtgttgtggcctgtgttggcttggtgtggatgcaggttgctctcaaggaggatctggatgccctcaaggaaaaatttcgaacaatggaatctaatcagaaaagctcattccaagaaatccccaaacttaatgaagaactactcagcaagcaaaaacaacttgagaagattgaatctggagagatgggtttgaacaaagtctggataaacatcacagaaatgaataagcagatttctctgttgacttctgcagtgaaccacctcaaagccaatgttaagtcacctgcagacttgattagcctgcctaccactggagagggacttcacaagagtgaagcctccattgggaatactttaaacagccgtcctccttgctgtggaaagcactacggaaaactgggggatgaaccccagaaaaacgatgggattacctgccgaagggatatgaaatcccccacttccttggaaggagactacctgggaagcaacccggatcatttccggccccctttcaggccccaatcagaaaccttggccaataaaacacccaccagggggaggattttgaacacaaaaaggggggggataaaaatctgcgcccactcctgc

SEQ ID NO: 577 - DNA, 733 bp, Homo Sapiens
cagactcagccaagtcgcagagcagaggagaccgtgggctgggattccacctgtgggcaccctggcagcatcccacctcctgagtcctctcggcacccagcaaggttgaagttcatgagttcgcccagcctcagtgacctgggcaagagagagccggccgccgccgcggacgagcggggcacgcagcagcgccgggcctgcgccaacgccacctggaacagcatccacaacggggtgatcgccgtcttccagcgcaaggggctgcccgaccaggagctcttcagcctcaacgagggcgtccggcagctgttgaagacagagctggggtccttcttcacggagtacctgcagaaccagctgctgacaaaaggcatggtgatccttcgggacaagattcgcttctatgaggagactcacctgtcaagatgtgtccccataccactacgtctggcaagcccagctcctatagccagcttggatgctcttcctccaggaagccctccctgcctgaccctctgcaccctcttcttccttcgacgtggtgctgctattggaaggggtctccgtggatccccagacctgaccacaggcagagctggcctggccctgggtcctctgggccactgactggtggtgcaccctttcctcggaggctcagcctctgtctgcttggtggggggtcgatcacccctggccactgcccttatgatcctgctcagtgtcccacttccct

SEQ ID NO: 578 - DNA, 364 bp, Homo Sapiens
tgatgaggaacgccctagcctggaggcactctgaacagctggctccacgctcccattccaaagggcacgcgcctctcggtctgcccaggctcagtgcccctggcataggaacagcagcttggccactgcccacccaggtcactgagcttcagttggaagtggcagcaatgggcttatccagttcaaggtcaatgctggagcttgtgggatgtaggctgctatagcaagactcgcatacgtcgactgggttcaaagagctgctggctgggaactggaaccttctggttacaacaactggagcagaatacgttcccacaattccacgtttgatcaacacggtcagtgtccctgcagtgttgcttcc

SEQ ID NO: 579 - DNA, 376 bp, Homo Sapiens
actgggaccaggggctgggcagtggtgggaggccctcaggccttggcctctagagcatcacattgaactcagtgaccagaaagtcaatgtagtcacggtccttagtcttgaaggcctcggcgataatgcgggcggcctcccggtgctccttgccccgaagcgtcagcccattcacttccagaatcacgtggcccaccttgagctgcccacagttgtgagctgagccgcctctctgaatagtgacaatcctaggcaggggctggcgggtgttggcgccaccctcgatggcgatgcccagggtggccgcacttttcttcacacggaccagagtggacgtgggctccagaagtccaggcggtttgttggccccgcgagt

SEQ ID NO: 580 - DNA, 299 bp, Homo Sapiens
ggcctcagtgccaggtaaggacagccaccttcctgggaagaagaggtgaccccgggtctggtggatttcccacaggggccgtcagaggatgtccacagaggcagagcccttggggcctgtgggctgggttgggctggtggatgtggggcctgggacttctccagaagcttacttcctgctgcatgctttgccgactgtccttccacctctaagtgtccatcgtgcctgtgggggctgctgcaggctcctgctccgtcagcccacctgctgctgcgctgctctgggagtgagctccctgc

SEQ ID NO: 581 - DNA, 1046 bp, Homo Sapiens
gcggtaaaaggctaggtagaggcctggtttaatcggcacgaggggcggcgggagagtgctggcggctggactggcccgagagggatccggttcccagaacagacctaggaggcggctcgagggcggacggcagggagggccagcatgccccgactgctgcaccccgccctgccgctgctcctgggcgccacgctgaccttccgggcgctccggcgcgcgctctgtcgcctgcccctacccgtgcacgtgctgcgccgaccccctgcgcacctggcgctggcacaacctgctcgtctccttcgctcactccattgtgtcggggatctgggcactgctgtgtgtatggcagactcctgacatgttagtggagattgagacggcgtggtcactttctggctatttgctcgtttgcttctctgcggggtatttcatccacgatacggtggacatcgtggctagcggacagacgcgagcctcttgggaataccttgtccatcacgtcatggccatgggtgccttcttctccggcatcttttggagcagctttgtcggtgggggtgtcttaacactactggtggaagtcagcaacatcttcctcaccattcgcatgatgatgaaaatcagtaatgcccaggatcatctcctctaccgggttaacaagtattgtgaacctggtcatgtactttctcttccgcctggcccctcaggcctacctcacccatttcttcttgcgttatgtgaaccagaggaccctgggcaccttcctgctgggtatcctgctcatgctggacgtgatgatcataatctacttttcccgcctcctccgctctgacttctgccctgagcatgtccccaagaagcaacacaaagacaagttcttgactgagtgaggggcacagagcctgggacaacaaaaacggacaaggccagaaacagcttcatatggacactgggacttagccccaagcctgggtgtcctctgaggccagcctctccaccttctgagcctgcgcccacactattgaaaacactaatgaaagtaaaaa

SEQ ID NO: 582 - DNA, 351 bp, Homo Sapiens
  misc_feature (192)..(208): n is a, c, g, or t
caggctgtgtgggtttcaattcccatccttcccaccccggctaggtgtcgtccaccctgtatcctgtgtctgagtgtgtgtgggggggttctgtactaatttccatggccggtggcttttccttccatgcatcactcccccccgcatgcccaggggccacccgcctggcattaccgcatgctggggtcattnnnnnnnnnnnnnnnnnctcacgctgtcctgtggtcttgagatttttatttttgcatatgtaatccattctgtacaggtagctaactttgtaaacgctgtgtattccctctgcccccatggctgctggtgtaaataaactgcatctcccgttggtaaaaa

SEQ ID NO: 583 - DNA, 840 bp, Homo Sapiens
ccagagtcctggccctgagcgggaatcgcagtggccgaggctgagcggcaggcggatcgccccgaccctcactcctggcgtctgagtctctggcgtagcccatgctgagtgggcggctggtcctgggtctggtctccatggctggccgcgtttgtttgtgccagggcagcgcgggatccggggccatcggtccggtggaggccgccattcgcacgaagttggaggaggccctgagccccgaggtgctagagcttcgcaacgagagcggtggccacgcggtcccgcctggcagtgagactcacttccgcgtggctgtggtgagctctcgtttcgagggactgagccccctacaacgacaccggctggtccacgcagcgctggccgaggagctgggaggtccggtccatgcgctggccatccaggcacggacccccgcccagtggagagagaactctcagctggacactagccccccatgcctgggtgggaacaagaaaactctaggaaccccctgaaccccaagagagggaggaccaggatccgaatgggctgggtgagcacgaattaccgaggccttccctttgatacagtccaggatttgtaagggatgaagacccctgggccccattctgttggggtccatacatactctccgaagatagcaacttgcttcaggtcaaagtgaacccgagaaaagagaagaatcactcactactgctcttgccctggactattcaggaagggcagcccggatgttccatgttaaatcgtgacagaattgcaccagacctgatgagttggaaacaatcctatacattaaaagaaattacctatgaaaac

SEQ ID NO: 584 - DNA, 331 bp, Homo Sapiens
cctcctgctgctcaacatccatcccgccgcctggtccccctcgacggcagtccctcccggaggagggcttgccctcgggcggcgccgggttcttgtgccgggaggacagggaaggttcgtgctctgcacccggcgcccccctgcggctcccggccccagacagcgtcccttgagggccgggctcgttctccagagcctcccgttccggccggtggacgacgccgcagcttgacgtcttcggggacgtcctggggtggcggttcgcgcccccaacgttctcggtctcttcctccccggacacccggaggcctgcgggcggctcagaggacgt

SEQ ID NO: 585 - DNA, 611 bp, Homo Sapiens
ctagagccaaggcgagagaccgtgccagccccgaggctcccggggcccatgggcccgggcatcgggctggtacagggccccggggctctctcagcccatctgtcacccctcccccccaacacccagatgtcccgtcttggcagtgctgtcccggactgccacattaatgctccagaacccgccagctgggccctggggccggtggggctcctgcagagccctggacaaaggcgagggagggagggaaggggatcctaagcacccctccctccctggccctaggaggcagacatgcccgatgagatcaacattgatgaattgttggagttagagagtgaagaggagagaagccggaaaatccagggactcctgaagtcatgtgggaaacctgtcgaggacttcatccaggagctgctggcaaagcttcaaggcctccacaggcagcccggcctccgccagccaagcccctcccacgacggcagcctcagccccctccaggaccgggcccggactgctcacccctgaccctcttgcactctccctgccccccggacgccgcccagcttgcttgtgtataagttgtatttaatggttctgtaacaataaaaaaa

SEQ ID NO: 586 - DNA, 1010 bp, Homo Sapiens
gcggccgccaccgactccccgtctgcttccctccgggcggcagccgcggtttggagcttgctgacagctctgcgaccggcgggcgcagcctcgtctcgtgcttccacgttatcctatcagggacggggcggggcggcggcctccgcagcctatcagcgcgaaccacgaccccggcgagcccgggaggaaagccgccagaaagaaggcgattggatggcggcggcgctctggggcgtagcgtcgcccgggccccgcccaccgctgccttcctctgctgggctccagagccactgaggcctgagcgagagccgacggcgggcgggcgcagctgctgccggagcgccggcgcgtgctggtgggccacacacctttcctcctcttcactcgtcgagccctcggacatggtggcccccggctccgtgaccagccggctgggctcggtattccccttcctgctagtcctggtggatctgcagtacgaaggtgctgaatgtggagtaaatgcagatgttgagaaacatcttgaattgggcaagaaattacttgcagctggacagctagctgatgctttatctcagtttcatgctgccgtagatggtgaccctgataactatattgcttattatcggagggctactgtctttttagctatgggcaaatcaaaagctgcacttcctgatttaactaaagtgattcaagttgaatgatggacttcactgcagcaagattacacgagaggtcacttattactcaaacaaggaaaacttgatgaagcagaagatgattttaaaaaagtgctcaaatctaagtccaagtgaaaatgaacgaacaaggaagcacagtctcaacgttataaaatctgatgaaatgcagcgtttgcgttcacaagcacttaacgcttctggaagtggagattatactgctgctatagccttccttgataagatccagaggtcgtgtcgggatgcagaactacgggaacttcgagctgaatgttttactagcgaagg

SEQ ID NO: 587 - DNA, 235 bp, Homo Sapiens
cagagacaatgctataaagtattttaatgtcagtaacaatatacactacgaagggcacttccattacaaattaacatggggatatacagatgaacaccaccacccaaaacaaaccataaatgagcaacagttaaaacattaaatttataaatagcaaaaccacaaaataaagtatatacattttatagatttacccttgaacaaatatatatagtgtatctgggaaagccaaaaa

SEQ ID NO: 588 - DNA, 700 bp, Homo Sapiens
  misc_feature (537)..(537): n is a, c, g, or t
  misc_feature (594)..(594): n is a, c, g, or t
  misc_feature (606)..(606): n is a, c, g, or t
  misc_feature (615)..(615): n is a, c, g, or t
  misc_feature (675)..(675): n is a, c, g, or t
ccccactccaaacatggcctccgcctgctccccgatgcgatccaggttcatgttggcagtggtagagtcgaaggcaggggctgtgccatcagccccactgtcctgcatgggaaacacctccacaaactccttcttgaagacagacagcaggtaggatatgcggtaatccaggcggacgttgaggatgaactgaaggattcccaggatcttcagcttggtctccatcaccacaatgtcctcattctcctcaaacttgcttctgtccagcggctcagaagcactggccccagcagacaggctgggggcactgaagacggactgcttccggcgtcagaaccatggtggacatcatgtgccccacgccctggatggaccgccgcacattcttgccaccggggtcctcataggcctgcagcatggccgggggcccctgcacacagtcgatgatgcccagcagtgtgcgagtgagccgcagcagctcgctgaagctgtagaagccgaagtagatgagattgtgcgccaggctgaccacctcanaagtgagcttgttcttctcctcgttggcaaagggcacgggctcgctgactacatggntgagtagtcctncacgaactncatggtgtggcaaactttgttctcttgtcatctcgggacgccgtgaggtgggatcatagntccttgtggtgatggctggggggat

SEQ ID NO: 589 - DNA, 564 bp, Homo Sapiens
ctcccaagatgaggaactgaggtacttcataaaaccacttacccaaggtgtcttgagtctggtacaactggcattcaaatctaggtcagtctgcccccagagccactacccttacccctcactgaatctgcctttatattgttgagcccatgaccccaaactgctctttccaatttgaacttccagggattttattgtgaacttacatagcaacattaaaatgaagttgaattgtttttaatggcaacgccgtctgtctcctctagcttaccgcttctcacctttcaaccccatctgtggcctttgtccaggcccacagcttagccatggcttccctcctgcatccctgccgtgggttgctggcctcacacttgcagcagctggacagtgattttagaaggccaccagtccccatagctatgtgacaatgagaagcaaacttttttgtgacagattgtattggcataggcatgatagatggggattggtacgttttgaatcagcatttgcaaaaaaattgtcttgaattttaaaataaacaacaaagatttgttcattgagtgc

SEQ ID NO: 590 - DNA, 317 bp, Homo Sapiens
  misc_feature (224)..(245): n is a, c, g, or t
gtcgctctagaggatctccttggacgagacgacctatttctatgtcattttaaatgtatctatttgtacaattttaaagttcttattttagtatacatataaatatcagtattctgacatgtaagaaaatgttacggcatcacacttatattttatgaacattgtactgttgctttaatatgagcttcaatataagaagcaatctttgaaactacaaaaagaannnnnnnnnnnnnnnnnnnnnngaggcatttaaagagcttttaagtggacataggcataatatttaccagatagggccacaagttgagaggtac

SEQ ID NO: 591 - DNA, 610 bp, Homo Sapiens
  misc_feature (26)..(26): n is a, c, g, or t
gacacaaaaggtgctgaggactaccntgaccctcaaatacccacagctatttctagtgataggattcacagcttgagctcaaataagccacagcgtcctgtgtttactcatgaaaatattcaaggtgggggggaccgtttcaggctctgtataactatactcccaggaatgaagatgagctggagctcagagaaagtgatgtcattgatgtcatggaaaagtgtgatgacggctggtttgtggggacctcaagaagaaccaaattctttggtactttccccggaaactacgtcaagaggctgtgaattgcgctccctccttctgtagaggccgcctgccagccatgcacctgcgtcaacgcgcctgaaacaccccgcgggcctcccgttgtcatgccttacggtttccaatgcgccgtcaccatctccacctgccaccaaaccaccagcagagtagccgccgctgctgtgagcctggggacgacatggcaggctggtccccctccgtgaaagtgtggattcctacttcctgctctaagctttgacacgtcaaaatgtgggatcagaaagaaaaaaatcatgatatttaaaaatggtcaaatatttgaggc

SEQ ID NO: 592 - DNA, 666 bp, Homo Sapiens
ttacatatggccttttttcagattcagaaagacaggggatcttaaatgcctctccagcttctgcagtgcattgttgatgaggattcgccggtccttcagtgggagagttctcggagccatttgtacatttcatcactcagtgtatgcgaaaacagccaaaagaaaggccagcacctgaagaattgatgggccacccgttcatcgtgcagttcaatgatggaaatgccgccgtggtgtccatgtgggtgtgccgggcgctggaggagaggcggagccagcaggggcccccgtgaggctgccgcagggcactgaaagcccaggaccagtaaccaaggagaacaacccacccgtcgcccttctccgtatgctgcctgcgccagaagagctttgctgggccctggcttccctgccctcgccttcacctctgtcagcaggtggccttgcctggggagccccatgtgtggcccaccccaccaggccatccccataccttctggtttgaaggcgctgacactggcagagaggtaaagggtggggcattgagaatggaggctcccagggtccctgcccacttctgttttcctaatgtttttctctataaagggtcaggcccgtcagcatcactgatgggaataaaagtattaatgctttgtgacagcctctgcc

SEQ ID NO: 593 - DNA, 475 bp, Homo Sapiens
ataaagaaggttctgggaccccgaagtccacggaacacccaccattacctgatctttggagcttgtcatttggccagtggaccctaataaacgtccacggggatgtggggatagaatgccggagcctggctcgctagggcatccaggttcttccttcctctttgccctgctgtctccaggcaccaagaatctcctacagttccccaaagatgaaccccccattatctcaggtcactctgtttcccccgatctttaccaaattcctgactcagagttcctcccatttgcttctgactctcattttattcttacctctcattttattcttatgatgtttaccatttctcttctcctcagtgtccctctctgagtggtaagagtatgttaataagccagtgctgagaccggagcacgaggcaactgctcaatgttggtcattgtcactgttattaaatgtaacttaagggaaaaaaaa

SEQ ID NO: 594 - DNA, 299 bp, Homo Sapiens
agcgccagatggttctcctgcttgaaaagctccttggccccaggagtgaagcctgcagggcggggaacaggaactagggccatgccctggcaataccctgccaggtccattaagtcccgtgaggagttggtactgggcctcttctaggaggcgggtccagccagccatcccctgccatggggacctgtaccaatgaggcgggcaagctcgcagaggccccagggcacatggacgggcagcacggcgctgtggctctcttgcagggcaatgttgcacaggtggtcggagaatcggcacag

SEQ ID NO: 595 - DNA, 497 bp, Homo Sapiens
cagaaacataccctcgctggtcttgggtccacatatcattggactctgggggacacaaagatgcctgtgacactttggtgttgccgagttagtcaacaattattctgggaaaaagcagaattgaattcttctctagatgtcctaccagggttggccaagggccacaaagcaggctaataaattcccacaggatccagacaccaggcaaaattgctctaagaagccagttactgtcatccctctatggttctagaaaaaatagtacaaaaatgacaggtcatcctatgagcgtcatgccaatgaaaccccatcttctggagaagcccttgaatcagaattatcttttttcttgatgtcgtcagatgcagccagtttcttaatttttttaaaaactgtatgtttctgtggtatgtatatttgtacacctaactacctggcacttggaaatcacagcactactcagaggcaattgaataaagagaaatttaattttaaaa

SEQ ID NO: 596 - DNA, 426 bp, Homo Sapiens
cctgtgagaaattagaaaaagccaggaatgagttacaaacagtgtatgaagcattcgtccagcagcaccaggctgaaaaaacagaacgagagaatcggcttaaagagttttacaccagggagtatgaaaagcttcgggacacttacattgaagaagcagagaagtacaaaatgcaattgcaagagcagtttgacaacttaaatgctgcgcatgaaacctctaagttggaaattgaagctagccactcagagaaacttgaattgctaaagaaggcctatgaagcctccctttcagaaattaagaaaggccatgaaatagaaaagaaatcgcttgaagatttactttctgagaagcaggaatcgctagagaagcaaatcaatgatctgaagagtgaaaatgatgctttaaatgaaaaattgaacccag

SEQ ID NO: 597 - DNA, 221 bp, Homo Sapiens
aaaaaaatggtttcattaaaatgtgtaaggttggctgggtgcagtaactcatgcctgtaatcccagcattttaggagaccaagggaggaagatctctgaggccaggagtttgagagtggcctgggcaacatagtgaggctctgtctctaaaaataaaatttaaaaatatccaggcatggtggtatgcacttgtagtccctgctattggaaggctgaggtgg

SEQ ID NO: 598 - DNA, 250 bp, Homo Sapiens
gattttatacaagcaatatatatatggatttctataatcactcgatgtgatacagtataaatatgctatggtttgtttgttatgaacagatagccaccagttacggccattgtgtgtaactcctaagtactgtagtctctgggtgtcgggggtggccagggcgggggcggggtgcatttccatccttgtaaacccttcatagtactcagtcctgtatcgctcagtaaacattgctcttacttaaaaaaaa

SEQ ID NO: 599 - DNA, 404 bp, Homo Sapiens
  misc_feature (348)..(348): n is a, c, g, or t
cgactagacaggatcccacagggagctcactgacggagagttgaagagggcccaggcgcgtactgaggtaccatccaggagctagggactggagtcgagaaaccttagaagtctttctggtgttctgctgtcctgcagctgtgctggcactcaaaccagaagacacagtacttctcacctttctttcccatttctactggcagaggagcctcagcccatgaccgccactactacaggctcatggagaatactgctgggctaccaccaatattcagttaaggccctagggctcttaagtcagtttgtggtgaatagtgccagcctgggactcacccttccggacactgngctccccgctggcccagaactggtaaagaaatgctaagagccaaggcctggaatgg

SEQ ID NO: 600 - DNA, 446 bp, Homo Sapiens
acaattggtccttcagcctgggcgagacggagcaggacttggcctaagtgggggctcccctggggcttcaactccagttctactcaaccgcggcggggcccctgaacgccaaggtgaggctcttcgagtcaagaatgctgtctactgtgcagtcattttccctgaatttctcaaggagttggctgccatctcccaggctcatgccgtcacctcgcctttcttgttggagacttcagaggaaggatctggccctctcatctcaggctgtgggcccctcaatccttaactttcttccatggacaatcagggccatgggtggcccgggctggggctagggcacaggctcctttttatgtttggaggcagtggcaaaaggactttttaatttatttcagatgaatgttttatggagaacttgttgcaatatgtataaaagggaaatctct

SEQ ID NO: 601 - DNA, 400 bp, Homo Sapiens
  misc_feature (334)..(334): n is a, c, g, or t
gagggagcacttggacgagaacagccccccaggggacttgctgcggggggtcttggatgtgccggcttgtcagattgccatccgtcctgagggcaagaacaaccggctcttcgtcttctccatcagcatggcgtcggtggcccactggtccctggatgttgctgccgactcacaggaggagctgcaggactgggtgaaaaagatccgtgaagtggcccagacagcagacgccaggctcactgaagggaagataatggaacggaggaagaagattgccctggagctctctgaacttgtcgtctactgccggcctgttccctttgatgaagagaangattgcacagaacgtgcttgctaccgggacatgtcatcctttccggaaaccaaggctgagaaatac

SEQ ID NO: 602 - DNA, 412 bp, Homo Sapiens
  misc_feature (395)..(395): n is a, c, g, or t
cacacacttctgaacttccccctgctctgatgccaaagggagctcagctaaggaggtggtcacggcattaggctgctgctcctgggctatctgcagttcttgggcccaaagcccctgaatccccatagttagttgctgtcattcttgatgacgacctctaatccgtggtgccgcaactgagctcgaagcagcagattcttgtttttaagatcttcaacctgacatgggaaggaggcagtaaagggaatgggtagtaaagctggcacttccaagcccctgaatgtattcagacatccactggtgagggggaaaagatgaagccttctccatggagaacaaagtagagggtgtcaaactgggtcagtggctagcagaactgagaaggctgcactggnggtaggagtctgaccct

SEQ ID NO: 603 - DNA, 354 bp, Homo Sapiens
atatatgcacgcacagtcacatacttgcgtacagacacacatgtatgcacacacatgcattcacacatgtgcatgctcacacagagacggttctggagttgtggagggaagcctgccccgccttccggccccactccctgaacctacagctctctccatggcccccctcacctgctcgggctgggccggggcttagggcgagaggcaggggcagggactttcagggatccggcagtctcagtgatgagagcacaccagctggggagaaaggccaaatccctgggcagtcagagcccccagaccctatgccagggcctccccacagccctccagtctctgggtctcgggggctcc

SEQ ID NO: 604 - DNA, 453 bp, Homo Sapiens
  misc_feature (36)..(36): n is a, c, g, or t
  misc_feature (68)..(68): n is a, c, g, or t
atctggggtccaccttagtgaatgtacctaggtctntgtatgacgcaatatttggtataacacttatnttaaaaaatgagagctgatgtgcgcctgtaatcccagctactgagaaatgtcagcccagcagtgaggcctgtccagtctcagccctgtccgtgtgagtgctgtgctctgtgtgtggcccccacagtgccacggtccacggaggtggggtcggctggctctggctgggagttgggggcccagttgctctaatgcaggcaacaccctgagtggggctgggagtcaaggaccaggctgggggctcgatgtcacaggtgtgggcaggagcccatggccctctgagagctttgtggccacggtaggggctgggccatgggggaggcaacgtaacatgcctccggtcagttcctgcctggccagagatggagcaaggatgcttactgtctt

SEQ ID NO: 605 - DNA, 1739 bp, Homo Sapiens
atgaaaggagcaagccaggaagccagacaacaacagcatcaaaacaaggctgtttctgtgggtgaggaactttgcctgggacgataaaattagacctagagctttctgacagggagtctgaagcgtgggacatggaccgttcactgggatggcaagggaattctgtccctgaggacaggactgaagctgggatcaagcgtttcctggaggacaccacggatgatggagaactgagcaagttcgtgaaggatttctcaggaaatgcgagctgccacccaccagaggctaagacctgggcatccaggccccaagtcccggagccaaggccccaggccccggacctctatgatgatgacctggagttcagacccccctcgcggccccagtcctctgacaaccagcagtacttctgtgccccagcccctctcagcccatctgccaggccccgcagcccatggggcaagcttgatccctatgattcctctgaggatgacaaggagtatgtgggctttgcaaccctccccaaccaagtccaccgaaagtccgtgaagaaaggctttgactttaccctcatggtggcaggagagtctggcctgggcaaatccacacttgtcaatagcctcttcctcactgatctgtaccgggaccggaaacttcttggttgctgaagagaggatcatgcaaactgtggagatcactaagcatgcagtggacatagaagacgaaagggtgtgaggctgcggctcaccattgtggacacaccagggtagggggatgcagtcaacaacacagagtgctggaagcctgtggcagaatacattgatcagcagtttgagcagtatttccgagacgagagtggcctgaaccgaaagaacatccaagacaacagggtgcactgctgcctgtacttcatctcacccttcggccatgggctccggccattggatgttgaattcatgaaggccctgcatcagcgggtcaacatcgtgcctatcctggctaaggcagacacactgacacctcccgaagtggaccacaagaaacgcaaaatccgggaggagattgagcatttcggaatcaagatctatcaattcccagacttgtgactctgatgaggatgaggacttcaaattgcaggaccaagccctaaaggaaagcatcccatttgcagtaattggcagcaacactgtagtagaggccagagggcggcgagttcggggtcgactctacccctggggcatcgtggaagtggaaaacccagggcactgcgactttgtgaagctgaggacaatgctggtacgtacccacatgcaggacctgaaggatgtgacacgggagacacattatgagaactaccgggcacagtgcatccagagcatgacccgcctggtggtgaaggaacggaatcgcaacaaactgactcgggaaagtggtaccgacttccccatccctgctgtcccaccagggacagatccagaaactgagaagcttatccgagagaaagatgaggagctgcggcggatgcaggagatgctacacaaaatacaaaaacagatgaaggagaactattaactggctttcagccctggatatttaaatctcctcctcttcttcctgtccatgccggcccctcccagcaccagctctgctcaggccccttcagctactgccacttcgccttacatccctgctgactgcccagagactcagaggaaataaagtttaataaatctgaaaaa

SEQ ID NO: 606 - DNA, 610 bp, Homo Sapiens
ttctcggcacccagccacagcaccagcctcctgcagggcctggccaccctccgcgctcagggccagctcctcgatgttgtgctgactattaacagagaggcctttcctgcacacaaggtcgtcctggctgcctgcagcgactacttcagggccatgttcaccggcggcatgcgggaggcaagccaggacgtcatcgagctgaagggcgtgtcggcccgtggcctgcggcacatcatcgacttcgcctacagcgccgaggtgacactggacctggactgcgtgcaggacgtgctgggcgcggccgtgttcttgcagatgctgcccgtggtggagctgtgcgaggagttcctgaaggcggccatgagcgtggagacctgcctcaacatcggccagatggccaccaccttcagcctggcctcgctgcgagagtcggtggatgccttcaccttccggcacttcctgcagatcgccgaggaggaggatttcctgcgcctgccactggagcgcctggtcttcttcctgcagagcaaccggctgcagagctgtgccgagatcgacctgttccgcgcggccgtccgctggctgcagcatgacccggcccggcggccgc

SEQ ID NO: 607 - DNA, 766 bp, Homo Sapiens
aaagttcatctcccctgccccaaaaaactgatagcatgtgccatatcagaaaaatcctggtcttagcagatcaatatacatagttatttggtcattcgacatatgcactttttaaggaggttcaggcttcattttctgttgaagagtttgttaccatagagtctggctttcgagtcattctatccagttcttcctgaacatttgacaacacagtcttttgtcctgacttcttggctgtgctctgcaccccaccagcaccaggacttccaggagagcctgtctttttactcaacagactgttgaagaagctggccaacaccccttcacttgctgcattatttttgaatgttgggtccggcttttttactgacagtgcctggggaggagctaggcacactggctggccctccccgaccctgggtccttggagagccagagggtcctcttgcaggagattcagaagctctcgtgggagtggctggttgcttggcaaggagtgactgttgcttcattaggaacacctgctcatcttctgctgccaactctttgtcgtggaccagctttctcacgggaggtttcacaataaagtcttcatatgcatattccggcttcacggttgtaaaattttcatgtaaaatagctattttcttttcattgtcccagcctgcaggtctaaaggcaaagagagagggactgaattgcttttcctggggctgccttagagcatactcagatcacattcaggactcctgggtaggacacttct

SEQ ID NO: 608 - DNA, 837 bp, Homo Sapiens
  misc_feature (51)..(51): n is a, c, g, or t
  misc_feature (92)..(93): n is a, c, g, or t
  misc_feature (118)..(118): n is a, c, g, or t
  misc_feature (126)..(126): n is a, c, g, or t
  misc_feature (143)..(143): n is a, c, g, or t
  misc_feature (167)..(167): n is a, c, g, or t
  misc_feature (192)..(192): n is a, c, g, or t
gctacaaagtccagtcagatgtaacatccactgaggtttcgaccctctcgncaagaatggcgtcctctgggggatcagcactgccaaagtgnnatgccattgaactagagcttggtgncggcaagngtcttgttccatgtcancaatggtgctggcaggatacagcntgcatatgagcccaaaaccgccacntgtgctctgtgatgaaaaatggcacactcttcaagctaacaaaagcaaacaccgtatcactctgattgttgatgggaacgcagttggcgctgaaagtccacacacccagtctacctcagtggacaccaacaatcccatttatgttggtggctatcctgctggtgtgaagcaaaaatgcctgcgcagccagacctcgttccgcgggtgtttgaggaagctagctctgattaagagcccgcaggtgcagtcctttgacttcagcagagcgttcgaactgcacggagttttccttcattcctgtcctgggaccgagtcctgaacttcaagcagaatcctcagttggaatcattgctaatattttgaggagaagtgtatgtgtgaattaagaatctcttcagttcatatttcatttccaactcaggttaagtgtttctggggagagatgttgtgtttacgttacactaaaaccacatgtgcaacaaatacctccattaaatggtctaaaatgtaaattgaattccctggctctctttttaaacgtatttttaaaaaaatctttatacacattgaatgttctgttgattacttgatagtattttatgttcctcattttgagctttttaaaaaagtatcaaaaaagatgat

SEQ ID NO: 609 - DNA, 932 bp, Homo Sapiens
  misc_feature (143)..(143): n is a, c, g, or t
  misc_feature (879)..(879): n is a, c, g, or t
  misc_feature (918)..(918): n is a, c, g, or t
gcacgagcgctgccgaggctcggggcgcgcgcagttggcgtctgccagtgccaagactgtgccggccccacagccgaggcgcgaaagggggacgcccggcctctgggccgctgccttcgctttctcttcgttgttgcgaacgncgtccgctcaggaggcgccccgcgaccggcgcgatgagtgccaacgaggaccaggaggtgaaaatggtgatcccaaagccttcttaatagagatttcctggacagaaacatatccccaaacaactccaattctatctatgaacgctttttttaacaacaccatatcatcagctgtaaagcagagtatattagccaagctacaggaagcagtagaagctaatcttggaaccgctatgacctatacattgtttgaatatgccaaagacaataaagagcagttcatggagaatcacaatcccatcaattccgcaacatcgataagcaatatcatctcaaatgaaacacctaacacagccccatcaagtaagaaaaaagacaaaaaagaacaactttcaaaagcccagaagcgtaagctggcagacaaaacagatcacaaaggagaacttcctcgaggctggaactgggttgatgttgtgaagcatttaagcaaaactggctctaaggatgatgagtagcacttggaatttgagacaaggaaagagcattctttaaagagtaaaactgggttcaaaatctttcattactattttctggtattgaggcgactttttataaaacacaattttttgtatgtttcttacattaaaaaggttgtaagttgaaagttcatgaagagatcttgttgtattaaattattttcacaaacttgccttaataaaaggtgaaaatgttactntttagtatactttatgaagccccttgagctttataaatngacaggcatgggga

SEQ ID NO: 610 - DNA, 783 bp, Homo Sapiens
gcatttcaaatattttaatagttttatttcgcaaagagaagcctaagaatttttttaaaaacatttccagagagaacactttataccataaaataaacttgtataatttgggaggacaaatcatctcaaatgtatatttttgaattatgtgccaattttataattagtacaaaaatgacagctgaaatattttaaaaatgtaaaaaccagtccaggcaacataactataccatcttgctgtaaaagtacttatatcgaattccgcacaaaatatttttgcaatatgctaaatttagttcttcaagtcactcttcactgccggctggcttttccattttctgttgtctccatcccattttcctctttaagatgttgatatagttcagctctgttattaacagagttcaaacgtccagcaaattcctgatgttttctggaattggcagtattgattctattactccacaaggataataacgacactggcccttttgatttttccacttgtggagtttcatccatttcaacaaggggttttttgtatggaggttctggggaatcaggcgaatcttttataatctcagcttcagccaattcttcttttccacgctctaagattccttttaatctctctgagtcttgccaagacttttcctgttcataatctttcactgctttctctgacttgtcctctttgtcttccctctttcttcctcgtttctttcgttcttcctcttctgggggtttgctcctgcatgccatcagacattccaagatgacttc

SEQ ID NO: 611 - DNA, 360 bp, Homo Sapiens
agggaatgcagagcctctccgcatgtgtgcgcgtggccgtgtctgtgtatttatacgtgtgtcgctcttcagaagcaacctagttcatggggcagctggactttgcatgatagtgtgagcccccagccccatgcccgccgccccctccccagggccttgcctcctccccaccccctcgtcagccagcgttgctgttccttgcagagaaaaggattgtgggaaactccaggactcttcccaccgcctcccagcgcctgcctgctggggctgcctgcatgcctcccctgcacctgggggtacccgcatccacttcctttcccccttttaacaaaagagaagaacgaattccaaaccacaaaa

SEQ ID NO: 612 - DNA, 956 bp, Homo Sapiens
cccgcgcgctggagaagtgcagttccccctggttaccaactcgcccgcttttccttcggagtaagggagccgtcgaagagcgctcgccaaaggcgcagccgtttctccctacggtgccgccgctccgtcctgcagccgcccgtaggtagcgggccgttttcctcacctgtccctgacaggcgccctcagggagccgcggtccgcgatgtcaagcgaggaaagctaccgggccatcctgcgttacctgacgaacgagcgcgagccgtatgcgccgggcaccgagggcaatgtcaagcgtaaaatccgaaaagctgccgcctgctacgtggtgcgcggcgggactctgtattaccagcggcggcagcggcaccgcaagaccttcgcggagctggaggtggtgctgcagccggagcgacgccgggacatcatcgagacggcgcacctgggtcccgacggcactcaccacacccggcatcagacctggcaatacttgtccaacacgtactggtggcgaggtatattgaagcaagtcaaagattacattaaacagtgtagcaaatgccaggagaaactagatcgatcccgtccaatatcagatgtttcaaaaatgtcggaagaatcgggactagaccttgaatctggagaagaaagtaatgaatcggaagatgacatgagcaactttacttcatctccaactacagcatccaagcctgcaaaaaaagaagccagtatccaaaacatgaacttgtgtatgtaagtggtactctccagtcagctttaagatttgtaactagtgtactagtatttgcagccttggtgacttatttttctcaaaccactaagactgcttattgaataagacaaaatggcagtgtactgtgttatataagctgaactgcctcttcatttatcataaatgttcctgttattttttcagaatgaacttaaaaattacc

SEQ ID NO: 613 - DNA, 262 bp, Homo Sapiens
cattcaccccgagaggtggaaactctcagactctcaggactgacagccgagtggctggggactataaatccgcgagaactgccctcgcgctgccatccagctgggtagccgggggagcgcgcgtgggggctccgcgagtcgctcgcccttggtttctggggaagcctggggaacgcggctgtggcgcaggcgccctgggactcaggtcgcctggagcgtggcacgcagagccccaggcgcggagctcaccccgcgcggccgc

SEQ ID NO: 614 - DNA, 704 bp, Homo Sapiens
gagatggaagcagatattaaagctggaaagtatttggaacatggggaatatgaaggaaatctctatggaaccaaaattgattctattcttgaggttgtccaaactggacggacttgcattctggatgtcaacccacaagcactgaaagtattgaggacatcagagtttatgccctatgtggtatttattgcggctccggagctagagacgttacgtgccatgcacaaggctgtggtggatgcaggaatcactaccaagcttctgaccgactctgacttgaagaaaacagtggatgaaagtgcacggattcagagagcatacaaccactattttgatttgatcatcataaatgataatctagacaaagcctttgaaaaactgcaaactgccatagagaaactgagaatggaaccacagtgggtcccaatcagctgggtttactgatgattcagtaaggttaacaatgaaaattaaactcttaaaaagtgactgcaacaaataaaccttctactgagaaaatacatcacagatagaagattatctgctaagtccaggcatttttatggtgtaaaataaaataatagtacacttctgaatttttatataaaatgtggttggaaggtgtactaatatataatttatcttaatttttctaactttgtatggataatctttctattcatatcacataaagaaatgcgttg

SEQ ID NO: 615 - DNA, 184 bp, Homo Sapiens
tgagccactgcacccggactgtgctttctttttcaatcgaggttagagttggccatgagggaacttatataagatttggaaggcagaagcaaaagagcagccattactctcagaaggtcactgtggttggatatggtgttggccaataggtcaaacctccatgtccatctgctctttcttatgt

SEQ ID NO: 616 - DNA, 643 bp, Homo Sapiens
gtgtgctggtggaatggcagagggaacttcacaggaaccttagtgttcttttacctcaaagccacagacaggaaatagaaagtggaaaagtaatatctccttttcttttccataaggagtttcaacactgaactttaaaaagtctatcatattccagcaatattttttctttgtcctttatgttgtaagttgtgtggaaaaactacttcggtaagaaatgttactgagataacaacaactggctaatactgcatgtagattgcttaggttttaaagtgactgcctgacttcacatgttattgctacagcctccagtatgttcgcattatctcaaactcagggaccccacaggacaggagacaccctttctgaaactgagttggaagtgaaagggtggtgatggtttggccaagcctgcgggagggaaagtatgtatcgggagcacccttgggaccaggaagagggatgcccaggttcacactctgggacccctaagacattgtcagtgggtaaggtggagggccactgccagaggctgctgcagtgccctctgggaagtgccaggaccctcagctgcagacccaggggatcccaatcccttatctctgctgaaaagtggctattgctgcttcgtatcctccag

SEQ ID NO: 617 - DNA, 476 bp, Homo Sapiens
cgggcccagagggtggggtaggaaaagcaggcacattttaaagaacttgggtttaaagctcatgagaaggcacgacatcacttttatgtatgaatgtgagaagaatgaaacactacattaacagagaacaagacaaatcagacggtgagaccggacacagcttttgtccaaagtcggcttgcaggaggcggcaggattcagcgccatggggtggccacagaggacacacaggggtcagcagaggacatgtggggtccgtggccgcgaacgctgctgaggaaaggccccagaacccctggtgtatacagtccccgaaagatgacggacgatgagtgctatgtgctcaggaggccgggaggctgagcaagccattccacaggggacgcacagcctcagggctgcgaccccacgggcagcaggcagtctttctccgagtttcaactgcagcgctggaaagagccgctccaggctcaacc

SEQ ID NO: 618 - DNA, 474 bp, Homo Sapiens
ggcgggcttggaggaggacagggacaccctcagatgtcagacgacaaggtggacagggtacaacgagaggtccatgcagaagcatggaagcttaaaaccaccagactggaagagggagctgcacccagaacacagaatgtgcagaagggaagaatggagagtgcgaaaccgtgccaggagatgcgggctctgctgtgtgaagccatcggattctggaacaaaatgacactttgatccaagatttagaaaaagcatcaccgtaacaatgtaaagactggcaagaaaaaaacctgacggcaggaagactaggagagaaacgattccttccccgcctggaaaagaggtagggacagacgaaaaagagggaaagggacaggccaagagatattctgggttcaagcagctggactgcgagctgccgccgtgttatgcccttcttttcgtagctctggatccctgaccacctggggcagt

SEQ ID NO: 619 - DNA, 579 bp, Homo Sapiens
  misc_feature (328)..(502): n is a, c, g, or t
tggaaagccagataactattactctgtatgatagtgcagggaacgttctgtgtgtggttgtgttatgttgacattccatccagtgtgccactccgtataattccgtctgacgtgccactccatataattgggatgctgtctgttcacttagctgatagaggtgggattcagagactgtggtgtctgtgatgctgtgatcctagacatggtaagtgcgtaatacctctagatgctgatagattaagctatgattgaatttatagtttccagaatgaatattgtactttgagaggctataaagaatatcaggctgggcatggtggcgcannnnnnnnnnnnnnnnnnnnnnnnnnnnnnnnnnnnnnnnnnnnnnnnnnnnnnnnnnnnnnnnnnnnnnnnnnnnnnnnnnnnnnnnnnnnnnnnnnnnnnnnnnnnnnnnnnnnnnnnnnnnnnnnnnnnnnnnnnnnnnnnnnnnnnnnnnnnnnnnnnnnnnnnnnnnnnnctagccttgggtcggcatctataggatgggcttgacttcgctctgcaaggtgctgttgtgcatgtctctgggcgccg

SEQ ID NO: 620 - DNA, 336 bp, Homo Sapiens
tcagttatttgaatatgcctaggattctaaaaccacagaaaataggcacattaatttccttagcctattactccctatggccagttggctacctcccaggtatcttcttattcttgcctgaccagcttaaccagttccatcatctgttcacatttgttcctcttcttagagcaacagagttaggtatacaagtaattaaataaagactaagcactaatgccctaatcccagctaattttaacaaggacactcaggaggataaagaatcaagaagagaaatattttttaaaaaagaatagaagtattatataacttttgttcttctaaacatcaaaa

SEQ ID NO: 621 - DNA, 588 bp, Homo Sapiens
  misc_feature (435)..(435): n is a, c, g, or t
taactttgcgaacattagaactctgggcgtgttctggaacatcggtttgcaagctcttccgagctggtatgacttttctttctcttctctatgttctcattgtttcaggattgctgcccccctaccgcctcacccctccagctcctggttctttgtcccagccatctcctgtggtactgtgctgtgtctgccttgtggagaccctgaggatgttctggatggagttaccaagcccccgacaggctggtccagttcctggcctcaacaaagtatgtgtccttttgcctcaggagaccagctgctccctaaaggctgcagcccccagcagagtttggcctgtttttctgcctgtttcacaagagagtgagcccccctggctccagctgcccacctgcacgaagctctgttaatggctgggacccccgaagcacctgngcccccagcctgttgctgggcctgggcttcagcttctctccaactcccatctactccacatccggtcctgggagatgttttctttccttctgagcctgaaagatcaaaagccctaaagtctaaaatcctgaaaatacaatcccaaagatcaaa

SEQ ID NO: 622 - DNA, 377 bp, Homo Sapiens
cacgcccaaggaccttcaggtttctgaaactgcagagaccagcctgaccctgctctggaagacaccgttggccaaatttgaccgctaccgcctcaattacagtctccccacaggccagtgggtgggagtgcagcttccaagaaacaccacttcctatgtcctgagaggcctggaaccaggacaggagtacaatgtcctcctgacagccgagaaaggcagacacaagagcaagcccgcacgtgtgaaggcatccactggtgagtctgccctgagcttcctccaaactctaggttgattctgaggttagcagatctcctcagccagggtgtcctcacatgagaaagccaaatgcaaaagcaagccactttctccagtct

SEQ ID NO: 623 - DNA, 446 bp, Homo Sapiens
cattgtgagcgagcgcaagagcagtgcagaggatgtgcgcggctgctcggacgccctgcggcggcgggcagagggccgcgagcacctgacggcctccatgtcacgagtggcactccagaagtcggccagcgagcgggcggccaaggactactacaagccccgcgtgaccaagccctcgaggtcagtggatgcctatgacagctactgggagagccggaagccacccctgagggcctcattgagtcttcggaaggagcctgtggcaacggatgtgggggacgacctcaaggatgagatcatccgcccatccccttcgctgctgaccatggccagctccccccacggcagcccggatgtgcttccacccgcctcccccagcaacggtccggccctgctgcgcggtacctacttctccactcaggatgacgtggatctgtacacagact

SEQ ID NO: 624 - DNA, 211 bp, Homo Sapiens
aagagtttgagatctgaatgtgatttctaattgtatcagacgttaatgttttaaagctataacaaagtttaaaatttctactttttgtttttcatttattttaactgttcttttatctattaaattgttgtatgtggatggggaagttttgtttctcctcttagcatttgtttctataaccagaaataaaattctatattcaagaaaaaaa

SEQ ID NO: 625 - DNA, 635 bp, Homo Sapiens
gaactcactcgataaaagattttcccaaaaggaagggtgttcagatgacaaaagtccactacaccactttccttggctatctgatgcacccccatcttcccatgcgcgcacctcagaaatcaggctcccacctgacataacacaaccatgcctcacaaaaagacagtggtttatcccttccctaggagaaaagagaggcaatgccaagctgcttcatcaactgttaatacttcttccagcccgcaacccaggatatctgcaggtgtctctccctctggtttggtcatggctctctctgttctagaatgtatgggttaaagtcggctgccacaccatgccctcggcagtgtggtccaaggacccctgagggtcctcaaggtccttcctttcccaaccccacgtggttttcttcagtcaggataccatactgcaacagaccgaaggcggaagcagctatgaggatgcagcagccttctgttaagccaggctttaaggatctgcaaaaatgtaaaacgatgccactcctactgatgaaatatattgttttggaaaatataggtttaaaaatttttttaaggtaacatgtaatggatgtatagtcttcaaatggatgaataaatgtttttcagagttaa

SEQ ID NO: 626 - DNA, 388 bp, Homo Sapiens
  misc_feature (366)..(366): n is a, c, g, or t
aggaccgactccccaaagctcttcagcaagttcttgctctcgtgcagccagttcaggttggtcagctcttcatcttccatggcccccttcttataatcggatgtcaggcagagaaaacgtcgaggtcactcgtcttcctgaagggccttggagaaaccgctgcccccgtaacactgactcagtccactggagacactaattcctgagctttctggcttcttactgggaggcatgactggacccatttacgtgaaggctcctggccggagcggggcacgggggtgcgggggcgccgctgcccttcagcaggagccgacaaactttcgcgggcgcccggcgggcatcgctcggtggccccgctaagtnaggcggggcggcgcggcgagcc

SEQ ID NO: 627 - DNA, 704 bp, Homo Sapiens
  misc_feature (69)..(95): n is a, c, g, or t
  misc_feature (329)..(338): n is a, c, g, or t
  misc_feature (397)..(418): n is a, c, g, or t
  misc_feature (480)..(480): n is a, c, g, or t
tggcagttacttttgaagcttcactctgctttctgtataaagggcagtctgtggtcacgcaagcctttnnnnnnnnnnnnnnnnnnnnnnnnnnncttttccaggcagcttcatgatgtgcaggcagtagccagacagggtcatgggaagggggccctgtgcttctaaactgagtggttgctggttagtttggtattcaaaagaggataaaaatctggtagattagttcattctcagcatgtgtagctagacatgagtaaagataacagcatgagaaactgttagtacgcatacctcagttcaaacctttagggaatgattaaaatttnnnnnnnnnncatttcactcagttgcacttagtcgtatgtcttgcatgcttagtctaaagactgtagcnnnnnnnnnnnnnnnnnnnnnnttagattttacaaatctttgcaggtatcacaaccttgcaagaagaaccaactgaaaaaaaanttctcaggctttacagcaagcaaacttcactatgatttttacaattctgattctgtatcccctgggggttatcccagttgcttctttaggatggggtttattacgttgtacatatatcccgatgtgtctgtgtgaatctttgtcttttttgggggagggcagagggcggttctttttttagatattgttcctaaaaaggaataaatgcatacacctgtttgtca

SEQ ID NO: 628 - DNA, 663 bp, Homo Sapiens
atattaatattattggtactttaatataccataataaatctagtcataagacaccataactaactcttagtccatagtcacttgcattatatgataatccagtgctgaaatataaagaaatttctgaattaagtacccagaagtgccttccttctgtactcctccctctctttcaaatggctatcattgatcatataacacccccacctccttgtcttaatatatttatactctgtaaaactagctcaaccacagaagggacatctagaaacagcaatattgatttggtttggcctgtttgtttttaaggactttccagttgctgaattctgaacatccaatccgagtccttggaattctgcagacttctctggggtggagtggcctcaccggaggcttggttctgttttctctgtggcaattggctatgattcacagatgtgtttccagaacagcccaactgtgggtctcagggaagtaaactgcctcttaggtcatcctgcctgtgctgtaaattcggggaaggatttctgagtacagcaggatttcacactaattaaaaggctttcgggatcatttcagccctcatcccccaggaggccagtttgggcttttccctacagtaaaaaaggactctttcctcaccagttctcctagtacatc

SEQ ID NO: 629 - DNA, 673 bp, Homo Sapiens
aagatgactgccaaacatgaacccaaggttgttcatctgggtaacagcatgcattcagatatattcccagctcgtcacgatagtaattggagaccagtcatcatcatggaagaatcagaagtgtatgaaggcacgaggagtcagagccttgaggagtcagagcctctagagaagagaggaaaatatgagggaccaaaagcaaatcctttaaatacttcatctgaaaaatggggctctttttttattgattcagttttgggactggaaaatacagaagactccttggtttatacatggtcttgtaagagaatcagtacttacagcactattgcaattccaagtattgaagcaatcgcagaattacctctggactacaaatttacaagattctcttcaagcaattcaaaaacagctggctactatccaaatcctccactggtcttatcaagtgatgagacactgatatccaaataagttgtctttactgaaaaatgaagtgaagacccatatatgcagttaaaaaaaagttaattttcaaaaaatactgtaaaagactttaaggaacaagttttattgaccaataagttgatatttgtccataggtctcctttctataaatcatcttgatgtttaacaactcttattatattaaaatctcagtatcctaaaactt

SEQ ID NO: 630 - DNA, 702 bp, Homo Sapiens
tacccccaaacaacatacgaacactctcaacaaacacaaccacaccacaacctatcaagccatagtactatagaccgtgttaaaaaaaagcaggctggtaccgcctccggatttcccgggatatcgtcgacccacgcgtccgttttaaaatttggattgtcagcagttggcctttgttgagaaaatgtgtgactttgcccaagcccagtaacttggagccttgaatttgagatgctggaaagggagtccttcctcctttctgcagtgtttgtctgggttgtcccctagcttataccaaagctccagttttgaactgtaccgatcccacaggccgcaatcttccatgccctcacatgcactcagatggcaccagcaacctgccagtaggtggagtagcactgtcttcctggtcccggacctcagagggctttgcctgttagggtactcttatcactcagagatgggccttgagttttcagagaacagaaacccattaagctgtttcccctattgtattcatgtgccctttgtgtttctggcaataatatattttatatttcaactaaattttaaatttctaattcatgtatcgttccttgtgtaatttgtactgtaccattcagcttatcaaccattactccttgataaccaccatttgtaaattcagcatgtaatcagagctttcagaaaaaccatgtagaa

SEQ ID NO: 631 - DNA, 258 bp, Homo Sapiens
gcggccgccgcggccctggccgcccccggggagctgggctcgggggcgaacatagaggccgggaccggcgagtccatcgcggagcgactgcgctccgtcgccatctttaataacttaggctaattcgtagccggcttccctccctcccaggctcatttgactaatctatgcacagagccccgccccgctccttatcggaataatttatgcaaaactccagccgcgtactgggtgacacgtacctctagctaagaaaca

SEQ ID NO: 632 - DNA, 482 bp, Homo Sapiens
caagatccaaaggaaggggacagagactcagaggaagatgaaactaggagagggaaagagagagaagtggggagagggaaagagacaagacccgaagaaaggggacagggaccctgagacaggcaaagggagggagccctggagagtagaggcgggaggttctggagcccacgccatgagggctggaagacacccccacccactgctgcaccgagaccccaggaccgtcctcttctcttcccaggcccctccccacggtctccaacacacaaagcagggtgctgcagctggcctcccagggcctggggggccacagcgacctcaggagcctgctgtgcaccttaacttgctgtccgtccccaatccgcggcattcagtggcacccgcttttctggggaggggatccccaactttttcatattctcagcagtgtccaaaccccctcaaaagttccaaagctgctgactgggagccacgctatg

SEQ ID NO: 633 - DNA, 318 bp, Homo Sapiens
  misc_feature (76)..(76): n is a, c, g, or t
aatgcattggccattgtctcacttggtattcaaaacaatcctgaaaagaggggaatcaaggttgagatatctttcnatgtattgatgaagagactgaggctcagagagcttgtgattggtcaaggtcagtaagtgcaagtcagatcatgagcttaagtcctcagagttcaagtccagttctttttctgttacaggaatgctatctcctagcctatataggtggggcttaggtgaaggacacttagcctagcccatagttagtagctattgaaaaggactcctggccaggcgcggttgctcatgcctgtaatcccagca

SEQ ID NO: 634 - DNA, 648 bp, Homo Sapiens
gtcagtacccagagggcagagaaaaggcctcccaaagaacgtggagatcaggttacttgctaaaatgtacataatttacttttgtcccttttcaccaacactgctaatcccttcacctctacacttaatcccagagctccagggcccctctcactgccccgccctgcccttccaactgggcttgtactgcttcctccctcccatgtctcctggaagaattagctccttcctggacccactgcctgctccaactccccctccctcctttctcagccagacccagttcattccccccacaccaagaggagcttctgccccgtgccccaaagttgctgtgacaaaagtccccaaaggccaggtctaggagatgcctgagcctccactgacctctgtgcatgtggcccaccagtggccactctgtccttttggaaactgtcctctggctttctaggaaccccatgtttttggtcttctcctctggcccctccttctcagtctcctcagcaggactctattcctgtacccattcctaaaatgtcacgaactcgtttctggccttgtccttctttgagtgcatctctggttcttcatctatccctgttgagatgctcacccttctttggtgagctcccaaccggtacaggtaca

SEQ ID NO: 635 - DNA, 835 bp, Homo Sapiens
ccctccagaaggagcagcatgtttcctcagatttgcagggacaaactccagaaggccaaatgaaacagccagagaacattctaaaggccaatctgcttgtgtccacttcagacccaatgaaggcagtgatggaagcaggcatccaggagttccctctgttgagaagtccagagagctccgactgcagataattcagagagaacgaaggaggaaggagctgtttcgcaaaaagaacaaggcagcagcagtcatccagcgcgcctggcgaagctaccagctcaggaagcacctgtcccaccttcggcatatgaagcagcttggagctggagatgtggacagatggaggcaagagtctacagcattgctcctccaggtttggaggaaggaactggaactataaattcccccaaaccactgcagtaagcaaggcccccaagagtccatccaagggcacctcaggcacaaagtccaccaagcactcagtgcttaagcaaatctatggttgttctcacgaagggaaaatacatcatcctacaagatctgtaaaagcctcttctgtgctgcgtctcaactcagtgagcaacctacagtgtatacatctccttgagaacagtggaagatcaaagaacttttcttataacctgcaatcagctactcagccaaaaaacaaaacaaaaccttgactgcctatggaggaagactgtgttcgggggagctggcatagctagtgcagagttcagattttctgctgataatcttttacaccttgggaaaactttaatatccgtacctgaaggctgattcacctaaaaatgtgttaactgaaagaaaaaaa

SEQ ID NO: 636 - DNA, 666 bp, Homo Sapiens
  misc_feature (301)..(537): n is a, c, g, or t
tgggcgccccggacccgcccacccgcaagtggccatggaggatgccttcggggcagccgtggtgaccgtgtgggacagcgatgcacacaccacggagaagcccaccgatgcctacggagagctggacttcacgggggccggccgcaagcacagcaatgtgaggcgggcctctgtgggcggggcccgggcaccagggggctgcatgctcggggctccagagtggagccgggacgcccgccctgaaccctggcccctccgcccatccctgtcttggctctctttgtcccctccgccccacctnnnnnnnnnnnnnnnnnnnnnnnnnnnnnnnnnnnnnnnnnnnnnnnnnnnnnnnnnnnnnnnnnnnnnnnnnnnnnnnnnnnnnnnnnnnnnnnnnnnnnnnnnnnnnnnnnnnnnnnnnnnnnnnnnnnnnnnnnnnnnnnnnnnnnnnnnnnnnnnnnnnnnnnnnnnnnnnnnnnnnnnnnnnnnnnnnnnnnnnnnnnnnnnnnnnnnnnnnnnnnnnnnnnnnnnnnnnnngtccgtgggaggtgacggatgctcagctctcacgtcttgcaagagggccaccccttcactccaggcctccaggatattgctcttctcagaagggctcaggtccaaggtgtgagggtactgctccagatg

SEQ ID NO: 637 - DNA, 499 bp, Homo Sapiens
  misc_feature (297)..(419): n is a, c, g, or t
tatatgcctccagaaagattaatagtatctagtgctagcctgccagctgcagatgtacaaactttctatcctatacataaatcatacacaagacatatggtgtattttaaagactgctgatgtcacagtgattttaaattactcatgttctgaaataaaccatgtagatgttgatgaatatggcaatatattccggatttttcatataaatgttataaaatgtaacaccattaatgagaagatggcattgggaattaagaagagagaatgcaaacatatttaaaatcaaggagtatnnnnnnnnnnnnnnnnnnnnnnnnnnnnnnnnnnnnnnnnnnnnnnnnnnnnnnnnnnnnnnnnnnnnnnnnnnnnnnnnnnnnnnnnnnnnnnnnnnnnnnnnnnnnnnnnnnnnnnnnnnntacaaaaatcagccgggagtggtggcatgcacctatagtctcagctacttggggggctaaggcgggaagatcgcttgaaa

SEQ ID NO: 638 - DNA, 346 bp, Homo Sapiens
  misc_feature (225)..(225): n is a, c, g, or t
acgcacgccccgagacaatggactggacacaagaggaatgtgcgaatgatgtctgacagatgaagtgaggagtccggctccttcacagggaagtgaaggcgcagggactcccctgctacagaacatgcactgaatgcttcccgatgccaggacctttgctgagagtctcacagagcatcatcttcctggcaggcctggagacgggtgggactggtctctccattntacgtgtgagggaatgggttcagtgacaacaccaggccaccctagtaagtggtgcctccagaacttgaactgaagttcaagttgtctgactccagcacttgtgctcttaagctctgtgcag

SEQ ID NO: 639 - DNA, 581 bp, Homo Sapiens
ccccggtctggggcggggacccacgccaggtggccagtgcatctggaaacccatttgccttggagctgaatgtagctgacagcagagctaaaacggtcgctgccttccaccgacacgagactccggccagaccagaggtacctggaggaggggaacatacaggccgctgaggcccagaagagaaggatcgagcagctgcagcgagacaggcgcaaagtcatggaggaaaacaacatcgtacaccaggctcgcttcttcaggcggcagacagatagcagcgggaaagagtggtgggtgaccaacaatacctactggaggctgcgggccgagccaggctacgggaacatggatggggccgtgctctggtagccctggccccgggggcaggaggctctggttcctcactcctcctgcctccaccccctaccatggacacatgggtgaggccgggctccccgcctcactgcccttgagaccaaaggggcagccctggccctccctcccctctgctggccacagggtatgcatctcagcccgcttccgacgcctccgtctggggtgagaatcaaaatgggtgcgtc

SEQ ID NO: 640 - DNA, 347 bp, Homo Sapiens
ggatgctgctgttcccaccctctcggatacaactcagtgcactcaggaggctgcctgagaagtcagagacaggagagacaggcagccacaatggcttttggcttaggaagggaagggcctggttatcacgtgtgggatcctgctaacagcagccaaccctctgctcacaaggaagaaagtttggtgttgaggggggtgacagaaggctgaaagaatgtgagcaaacatatagctgagcctggcctgatgcactgttctctcccaaattctcagggtccaaaggatttgccgcttagctttgaaaagctattgcttgccttggtcacatagaaactgatatgctctgc

SEQ ID NO: 641 - DNA, 461 bp, Homo Sapiens
ctaagctaaacatctttcagtacaggtaagaagactggcatcacatctgggaaatgccttaacagatatctgaggagttactgcacattaagtcagtaacaacacacttcagtttcaaggcgtacataatctccccttgatgctcttcaacagagacaaggttcctgtctgcagatcaaataaatcacagtattaggaaaaaaacataacagcaaatttggaagtacaatcaatttaaggagaagcaaaagggaaagacttagaaatgggacattattgtctacatctagaggatacatacacctgaaagcttaagaaagcccttatcttaggaacttgaagctgaggataatctcaagttcacttagtgccagtcactttagttttttaaaaaatttaacttaaaccccagcctaggcaacatggcaaaaccctatctctactaaaaatacaaaaattag

SEQ ID NO: 642 - DNA, 1057 bp, Homo Sapiens
  misc_feature (883)..(883): n is a, c, g, or t
gctggaccggtccggaattcccgggatgggactggctagggcgtttgaccgccggcggtgaaggggaggcggtgggcgtcttggagaacagagcgagatggagaagcgaggccgaggcgtgaagtcgagccccatccagaccccgaaccagacccctcagcaggctccggtgacgcctaggaaagaaaggaggcctagcatgttcgagaaggaggcagtgagtgcggagactgctaggggcccgagacggctatgtccgaccgtttaagtgaaatcgctccccagtgggccccgctcccgtcaccacccccagagccaaggaggcagcatctcccttttgtgtttcttttttccccagatgcgaaattgaagcctgagactgagttgggcagtcccctttggacttgagtgctaaagttttcttgttttttaattagggccatagaaccctacataagtcgattggaagggtggttacaagatcttcttttcaaatttactcagcttgcggatttcctgagagtactctgagtattattgctttgtactaaaacacagtatgttagtgtatttagtgccattataagcagttttgctagcgaaaaatgagtgtgttgtattaaaaaaataatttgataaaccaggcagaatagtgccatgttttgggtttttaaaacatcagcagtctggatatttgaagaatgtacaggagaaaaaaacttaagttgaaaataccctgtccaaaacttactgatattgatggaaagggtcattattcagttttattggtggtataacaggtatttctatatgaataggcttttgaaaaccggtaatgtattaaagactctatattttattgatactttaacagaaaattagnttgccccagggatacaaagctgtaatgatagagctggggaccagaacctgtatggctagtacttcggcccattgggcctatacggggtttctcttcgaactttacttcgggaacctattattagggatgaagaattaaattgaccgggcaaaccaattttttttgagagaaccc

SEQ ID NO: 643 - DNA, 474 bp, Homo Sapiens
aaggggacttcggttccgcacgtcgtcatgttgttgcatggcaccagtatgtcacgttcctaggaactcagctctgaggaaaaaacaaagcaaaccggggaagtacgtagccttgaaccggagtaaccagggacagaaaggaaggaaaagggtttcataccttcacggaacgacgctcacttcgtccgcctgaggaggaaaaataagtttaaacctttctgtgaaaaagaacgtggagccctttctgccgaatggaaacccgctaaaccccgttatggagtctgctacaattaagcatctaaccaggaattgtctatggacacaactctccaggcaattcatgcagaaagtgtgttgacgatttcctgtttcttgcagagcgcttcaccgttaaggctcttagtagctggcgattgtaaagcacattttccgcttcatgaaaatacagtgctcttcttgtgtttgtaaccttgg

SEQ ID NO: 644 - DNA, 557 bp, Homo Sapiens
tcgaacagcatgctctgcacgtcgaagtgggcgaagctattctgacacacccacggcctgctggcttccggggggctccggccctcgtcggcctcccccggggaacgcccagcctccccctcgggtttgctgctccttagcttccgaaagatggacgagtccaccgtgtccccgccgccgaggccccgcgcaggtttcttccgggccttctccttctccttcgtgggctgcagtggcaggaggctgtccttggcgggctgcccgttgtgggagtcccccttggctccgccgccgccccccatgaggtgtgggccaggatctgcccggaggagctcggtgagggcctggcaccctcgggcgtcgggctgctcgctgcggaactcgttcaggatgtcgaagaagctctgctcgggcatgccctgcacgtcgatggacgaggtgctcccgtactcgcggaagaggggcagcgcccccgtgtgccgggccccccgcggctcccccgcgtcctccgcgtcacactcgctgagggtgatctcgctgctgctgcggtgccgaag

SEQ ID NO: 645 - DNA, 1612 bp, Homo Sapiens
tttacaagtccttccactttctctctgaggcagaaagagcaagggtttttctctccattttatgtttgggaaaattgaggcctgcctgagtgtgtgacttgtggcaagtcactctggtcatctagggcagaggctccccagatcccaggcctcctgcctccagtccccagcccgcagcccaggattaggcagagccagctgctttcccgtggctgccctgactccttacagggatcactgagattctgatgaacagaccttctgcccgcaatgccttggggaatgtcttcgtcagtgagctgctggaaactctggcccagctgcgggaggaccggcaagtgcgtgtcctgctcttcagaagtggagtgaagggcgtgttctgtgcaggtgcagacctgaaggagcgggaacagatgagtgaagcagaggtgggggtgtttgtccagcgactccggggcctgatgaatgacatcgcagccttccctgcacccaccattgcggctatggatgggtttgccttgggcggaggcctagagcttgccctggcctgtgacctccgagtggcagcttcctcggcagtcatgggactgattgagaccacgcgagggctcctcccgggggcaggagggactcagagggctgccccgttgtctaggggtgggccctggcgaaggagctcatcttcacgggccgacgactgaggtggaactgagggcccacgtactggggctggtgaatcacgctggtggcccaaaacgaggagggggacgccgcctaccagcgggcacgagcactggcccaggagatcctgccccaggcccccattgccgtgcggctgggcaaagtagccattgaccgaggaacggaggtggacattgcatctgggatggccattgaagggatgtgctatgcccagaatattccaacccgggaccggctagagggcatggcagccttcagggagaagcggactcccaaatttgttggcaaatgacccccattttaaccttcagcatgggagatgcatgccctgaagagcaggatccagaaggaagatttgtggccagattgccttcatcatttcacctctccagacttccatttcttcacaaggatgatgatggaaataaaatgactggcgtgatgcctggaaccaaggtgctgatcctaccacctactgctaccttccttagcttcaccctggctagaaataatcacgagggttgggtttgctttggaaaatgcctgtctctctacttgaatgataaagaattaaattagaaaaacacaaccaaccacacacaagcaaacaacacagaataacaaaacaacgccatcgcccatcgatcacacctccacccagccgccgcgccgcgactgagccctacatacacccaggggcacctcgaagagcacagcagaatacactagaagagaagaacaactaagaagacgacatcaatgaacgagggcgcgcgggtagcctaccgcacgacacacacagagcagcagccgcgacacgacgacagaccgcatgcacacaccagacccgagaccagagcaagacaacgaagcacctcggtgagcacctacatagcgagacacggagaca

SEQ ID NO: 646 - DNA, 555 bp, Homo Sapiens
agaactgattcctactgaaaattcaaattctattaccattctaactttcataaaaagttgggatcaagaagcagctgatttcctgccagggcttatattaggggggtgattcttaaaggacattaggattggtgctcagaaatggttaatcatgctgtgtgctagccagggccagctggtaccttctttgccatgagcattcaagggacagctaacctttattgacaatctatattgcaaaagtcaggaaagaggttgtgagctgattggattaaagacctggcacttcagtaactcagcacgcttccacttcactcaacttaagagagttcattgacagtgttaggatgtgaaggctgggaaacacttattttgcttcaagagttccacttggctctcccaaataggtacctcaaaaactgttagcaagcggcatttggatgtcttgacaggggctttgcagggatttttagggttttttccacattgtccacattaatggttggcatgattgtgcttgcaggccaagaaatgatcataccccttgccaaaggt

SEQ ID NO: 647 - DNA, 406 bp, Homo Sapiens
gagggtgccacctcctgcgagtgtgaggaaggcttcttccgggcacctcaggacccagcgtcgatgccttgcacacgacccccctccgccccacactacctcacagccgtgggcatgggtgccaaggtggagctgcgctggacgccccctcaggacagcgggggccgcgaggacattgtatacagcgtcacctgcgaacagtgctggcccgagtctggggaatgcgggccgtgtgaggccagtgtgcgctactcggagcctcctcacggactgacccgcaccagtgtgacagtgagcgacctggagccccacatgaactacaccttcaccgtggaggcccgcaatggcgtctcaggcctggtaaccagccgcagcttccgtactgccagtgtcagcatcaaccaga

SEQ ID NO: 648 - DNA, 499 bp, Homo Sapiens
gacccagatgggcccttccccagcagccagacctgctctaccaggaagcagagcctgagaggagggtgcaaggccctcacccaggcaccggaggcaccgtgtcacctcaccttccgtgtgatgcactccagtctgcagtcctgcactgagccagtcctgggccgacagctgggagcccctcttgtaccagacctgggctgatggcatgcagttctcagagacagtccctgaatgcattggtgcaggcagccaagttcaacagccccagacagcacaggggaccccatggggagccaggtcctcccaccaccagactgggaagccgcagccactctcggccttcggacttggctcatacctgtgagtcaagcctttatcaccaagtgattcccaagtacattgagttgaagggtgtcctccccaaaattcacatccctcctgaaacctcggaatgtaaccttatttggaaataaagtttttgcagttgtaattaaactaa

SEQ ID NO: 649 - DNA, 125 bp, Homo Sapiens
cccagagtctagagtttctaatcaggcgaccatcatggaagaataggggaggggtaccaggggtgctctgcctctctttatcttaaaccttggtctgaagccttctgggacctccctggggagta

SEQ ID NO: 650 - DNA, 355 bp, Homo Sapiens
tgtggctggggagagactttaggcagaagctgtgatgcaggctgactgccagccgaggggctgggtagtgccgtgcgggagctgatggtacagggcactcgctgtccccctccggccaccctagaccagggtccgagaggcaggcaggagccactcatgtcttccccattgcccgacgcccatagacgctccttcctgtgtggggctggggtactccctggtcgtactgcagtcagcacccgtaacccggctatgaccagggatctgtaagccctgtggctccacaggtgccgcttctcactggcccagactctgagctccaccgtgcccagtccgcccggcccgggtaaccgga

SEQ ID NO: 651 - DNA, 422 bp, Homo Sapiens
tttccacgcactgcccttgccatctgattggacaaagagaactaggacagaaggaagtgggtgtcccacggaagtcttggagaggtggcaggagagggactaggagaaaaacaaaacagacggagagaaatggtttgcttgctgtccaagagcaacgttccttttctccaggtgacttcatagctttaaattgttgctgtttaaaaagagagtggcttggagcaaagttagaagttgccgctcctgtttgcttctgacaggttatatgaacgcgccccccaaccaagggcacaatcactttggttgggtgtacacctgctctctctgttccccaagcctgggccctgtctgagcttggaggtggagcctcagggacgtcctggctcagaagatgtcctgggcctcttccccaccagtccccg

SEQ ID NO: 652 - DNA, 578 bp, Homo Sapiens
cccttactgctcagatctcaagcctcataaatagtatttttggcacagatgtatctgaaagtatatcacttcgagaatcccctacagacaggctgaatgtctggagcattctggcctacatattgtttcaaacataagagaggtcatttcttggatagctgagtactcctgcccttatccatagtttcagagtctttgactattatcttctacgtcatgaaccaacacttgccataaaggtgagttcacataattaaccacaagcctagcacattctgctccccagtaggcctctgtctcactgttcaccctcaacattgaaggccacgtcagtgtgaggctgatagatggggtgactgctgccaccaagtacatctgcaacctttgctggctgtatataagatggccagaagaccttggggcaccccaaaacgtgtatccctcaatcagtagggctttccctctttcacttctaacaaaatctgactataatttgtgccccaaacacccactcacaaagaaacctgcttgcacaggttcactgataggcatagtgaattacctccaaagtgcccgtc

SEQ ID NO: 653 - DNA, 413 bp, Homo Sapiens
cccacacttgaacagtctcctaggtgagtaacactgcttctgcccttgtactcctttagcctactctcaacagttgccagactgactctttaaaagtccaatcatgtcactattctgttccaagctcatccaatgtctttctataccacgtatcacttagtctaaaagctgaagtccttaaaatggtctataagactcttgcttgacactggcagcacaagccagcccatcaccagtgccatcattacctttctgacttcatgcctatattacccagtcctttactcaactccaatgacaagcttcttcaaatgtaaataccgcaggcatgctccaacctcagagacttggcatttgctattccctgggcctagaatgatttgtatttgtgtcatatctccttcactgactgt

SEQ ID NO: 654 - DNA, 355 bp, Homo Sapiens
agcttcgcgtgtccctaagctaggacacctcatttatctgaatcctgggtaagtgcctctttcatttcaagattcacatactaaaggaagtcatcagctttgacgggaagtcccagcctagtaacgcttagaatactacatactctatgagcacctgcctcccctttgcttcatcctcatcctcactcactttttagaagggtcatgcatttttggtttcaagtcctaattaataatgggagtctagatattgttcttgttcctacagggtcctgctaaattctgaagaatggcaataacctccaactttttgccagactatgaaaggccccaagacacagaaaaaaaggggcaa

SEQ ID NO: 655 - DNA, 827 bp, Homo Sapiens
  misc_feature (297)..(365): n is a, c, g, or t
atcatacgcagggaaagaacaagaaataacatttcaaaggaaaaacataaagtgagcaatgaatatatacaaaggatgtctaaacccatttactttttgcttatcagataggcaaagattgaaaagatcgataatatctactgctaataaggatatggtgaaactagcagaaacttttgatagtaagctgccactatccattaaagtgtaactacccttggacttaaaaattcaatttttataacagaaatgcattctgtggcaatactgtcagaagcatgccaagtgaggcattcnnnnnnnnnnnnnnnnnnnnnnnnnnnnnnnnnnnnnnnnnnnnnnnnnnnnnnnnnnnnnnnnnnnnntaaatggaacagatattcacccactgaacaaattttaaacacccttggttactggtattacaataacaatgagtaagagagtcagcaagatcatacatacagtgaagcttatattctactgttagggaattaagcaatttaaaagaaaatttagagtaagaaatactaataaacaagtttatgagctagaagatgtgctactctagtgggtgggcagggaaggcctgtgaggaagagacatttcatcagaggaggagcagctggccacgtaaagatggggcagtacatctccagtcagagaaagagtgaaaagtaaggaatgaactcaatgtggtaaagtttttgtaatgtgtcgcctatccgatgtcatgcctgcatgtgttcctggccttctgctgcctgcagctccatggactagtagcttctgtgggaagtgtacctcagataagcttgtgggttcat

SEQ ID NO: 656 - DNA, 226 bp, Homo Sapiens
tcattcttaaagccttcccatatttaaccagtccccagcagatgacgtacattataccctgcattctgtttctcatacatgttcttgcgcaaatttaactgcagggtaagtttctagaagggaaattccatagtctagactaaaggttactggtaggccaggtatctcaacctatatttggttctcagatccaaaggtaggatttacagaacaaaactgcttcatg

SEQ ID NO: 657 - DNA, 400 bp, Homo Sapiens
catagtcaagtaagggaaaaaatcactatccaagttggagttcagcaaaagaatcacaaagcagaggaagaaaaatactaatttgctatgaaaagtaattccattgggtaagtgaaaagatgcttgtgtacgtatgaatgatgaatgagaaacaagaagaaattgacatagaaagttacttatgacaattaactaaaaatccatatattgccaataaccaacaggcaaagaaatgagcctctctaagcctcagcttctttctcctaaataccataccctgactcttctatggaattcaggatgccacacaagtatctagcaaacataaatttgaagttcagaagaagcaaggaaaaccaacattcaatgttcaattcaaaatagccagtaaggggtaagg

SEQ ID NO: 658 - DNA, 241 bp, Homo Sapiens
  misc_feature (174)..(174): n is a, c, g, or t
gaattgggactacaggcgcccgccaccacacccggctaattttttgtatttttagtagagacggggttcactgtgttagccaggatggtctcgatctcctgacctcatgatcctgcctgccttgtgccttcccaaatgtctgggattacagtgtgtgagccaccactgcctggncccgaatattcttggtctatgtatacgaagggtctttacttatataacttcagtttctcactccttg

SEQ ID NO: 659 - DNA, 531 bp, Homo Sapiens
gcaaccattgtactcccatccaaccagtatgcatactcactcacagccctattcagcacgctctcgcctctctgccattgaaattgacattccagtagtttcacacaccacttaatggggaaatagttaattgttaaagaaaacttcttgtagcctcacattccccttgtgcaaagagctcttttggacctacatacattttcctttgtttttgaccaatcaatgaagccaaatttatatgtcctagtagaatgaagtgctgctagtttttatgagaagtatattatattaaatgtgaattttttaaattttgcttcttatactggaaggaattttagccttcatattgatatctaattaattatttaagtggaagaggcctgcatcacaattgaggtaatgtagagcaacatgttaaagaatgatggttagcagaagctgttgtatacaatcttcatgaaaatttcagtgtgtatttttctttttctataataccttaacctgcaaagaaaaggcaatttcaaagataag

SEQ ID NO: 660 - DNA, 407 bp, Homo Sapiens
cacgtaaaatcaagacacgtaaggaagagtgggagaaaatgaagatggggcaagaatttgtggagtccatagaaaagctgcggacttctgggtatccacccactttggtgtaccagaatggcagcattggctgcgttgaaaacgtggatgcaagtagctatccgccaccaccacagtcagactctgcttcttcacctcctccttccttctccgaggacaacttgcctcctccaccagcagaattcagttacccagtggacaaccaaagaggatctggcttggctggacccaaaagatccagtgtgaacagcccaagccatccaccaccagctcctcctctaggctctccaccaggccctaaacccgggtttgctccaccacctgccactcccgtaccaggggtaccg

SEQ ID NO: 661 - DNA, 362 bp, Homo Sapiens
ccctaccttacgtgatgtaagaatcattaataatgtatgtaaaatgtgtataccacacatagatcaataatgtcaactattactgttattatggttcaataaatatttgacagttggtcacacaggtgtgttggcttcctggactcttcttcccccttaactttcctaaaaagccaagctattgaagtcattatctttttttgtttcttaaatcacatttgagttcatatggtgagccttggcagagcccccaaaaataatgaaacgaaaggaaacatgtctaaacaggtctacaattttggcatagcactgatttggtacaaacctattgcagcctagggaaatggagaatataatatctc

SEQ ID NO: 662 - DNA, 568 bp, Homo Sapiens
tggtagtagatttcaccgagctttagaagaacagctccatcccaaggctggacggccgcatgccacagtggggcttcatcagtactgtgctggctgcaaatggtcgctgaagcagtacagcgctccacggctctgcggccagtcggcgtggctccaaaccctggccctgccatacactcgctttgtgacccaggttaattgctcccacgcctcggattctgcatctgagactgagaagaacagtatttccttccttcttcggtggtgtgaagattcactgacataggaaaagcactgcgagcaatctctagcacagaatgaccactcagcaactgttacctatcatgaccttcgtgctgggtcctctacaagggctggggtgggaagggggacagccagccttcaagcttgaggagctcagtctaccagagagagaagcaaaggatgaaataccatgtgacattgcaaaacacatcacatgctgaatgaagtacgttccaggagagggagcaggggctgggtgaaggtgattccataacatgcagaaaaaatctgcacaacagttaac

SEQ ID NO: 663 - DNA, 859 bp, Homo Sapiens
agatagcgtggtggcggagcgggagatcccagctaaacagtgcactagaacacatccatggaggctttgctttctcaatgaaatctactgattgtccaaccacggcaaaattttctcacaaaagctgtcattcacaggcacacgcaggaaatgagactcggggataaagtcaggcttgggacaggtatagctggcatttaacacataaccaatcccattctgctgtatcagctccttgttgaggacatctcgctggcagccaagataaagattgggaagaattcgggttggcccaatgttggcaacaggtaagcaaggctgagaaatgcaggtagggactagagtggattttccttcacagaggccagggaaacaacgagagaactcagcaaacccacctgcaagcaggtgaacagagttgaagctcttctccagtttacccagaagtacagtgagaaaacagtctgaagagagagaggcaacatcttgggagctttgatcgtaaactacaaccttctgactgcaatcaatgtcaaccttatgtttcgctgaatgctggatgagctctgtaattaacactttgtcctgttgcaaccttcgcttcataagcttggagcagttgatattaatggcttccaaaatgtgggatgtattgtattccacaaatggccggctatcaattagcagcactttttccgttccactttccagcagagccaccaacctctcagtaacaatttgagttccaatcatctcatgggccatgacaacaataagtcctcttttcccacctccttctttaatttgccacgatgatgtaatggtggtgtgctcaaaggctcagccactcccgtaccag

SEQ ID NO: 664 - DNA, 440 bp, Homo Sapiens
cactgttcagttctgggatgctttcagcagtgtcccaaaacccgtggtagtgtacatagtacaggttatccccaatgtcttccacccaggaaggcctactggctatgcagctacttggactcccgttcaggtgcagagaaccgcacaactcagggttagctctcagggtcttctctggctcctcagtcccactaatgcagagagaaccctggctactcggaaacggctgtcctggggctaatccactgctaattccgttagttcctgtcaagcactggccattcctgctttccatcccactgagcggggtcgtggaggggaagtccaaatgtccattgatgacacatccatttgtcaatgtattcgatacggagctactgtttttcatatctgttacaacagcaaactccctatcaacgtgcattctgtcgagcatgtag

SEQ ID NO: 665 - DNA, 1060 bp, Homo Sapiens
  misc_feature (295)..(382): n is a, c, g, or t
  misc_feature (908)..(908): n is a, c, g, or t
  misc_feature (911)..(911): n is a, c, g, or t
  misc_feature (915)..(916): n is a, c, g, or t
  misc_feature (918)..(919): n is a, c, g, or t
  misc_feature (925)..(926): n is a, c, g, or t
  misc_feature (987)..(987): n is a, c, g, or t
  misc_feature (1010)..(1010): n is a, c, g, or t
  misc_feature (1022)..(1022): n is a, c, g, or t
aattcccgggatgccgacccgggaccgccgctggctggctgctggctcactcgaccgtcatggagaccctgggggcccttctggtgctggagtttctgctcctctccccggtggaggcccagcaggccacggagcatcgcctgaagccgtggctggtgggcctggctgcggtagtcggcttcctgttcatcgtctatttggtcttgctggccaaccgcctctggtgttccaaggccagggctgaggacgaggaggagaccacgttcagaatggagtccaacctataccaggaccnnnnnnnnnnnnnnnnnnnnnnnnnnnnnnnnnnnnnnnnnnnnnnnnnnnnnnnnnnnnnnnnnnnnnnnnnnnnnnnnnnnnnnnncaacttgggactggatctggaggaaaaagagcccggagaccatgagagagcaaagagcacagtcatgtgaagattcctggctgcctcttccaggcagtcccccagagatgcctcttctgccccctaaaagcagtgccctggacttgaagcccgtgaaatgactccatctgggattcagaatacagtgttctcaagtgaagaaggcttggaacccaccccacctccctcattgggggctctctgggcaaacatggttttcatgcacccctcttcctgagcttggtccctgcctggtgattcttcttatactcggagagcatccctggttgaggagacacccgcaatcctccacgatctcatggctccacctgcttctccccactgcctgatttcttttctctctgcctgatgtctactgaacagaacttcccctctcccatgcacccactgccagctgagagctgcttcccaatggcctgcattaaagcattcgtaacagcccctttgaaagggctcctgtcaaaanaanaaannannaaaaannggggcggccggttctagaggtatcccctcggagggggccccaggcttaacgcgtacccagncttttccttggtacaaagtgggnccccctaatagnggaggtccgtattataaaagctagggccactgtggccg

SEQ ID NO: 666 - DNA, 563 bp, Homo Sapiens
cgaactcgagcttagacctagcttgggtaagcagtgatagttaccagtgccacagagagaggcacggcacggaggtcgggggcccagagcgcaaacagcacgcctgtgtctgcggctggcgcggatatgagccacgacttctacttcccaggttgattcagtcccgacgtccagaggggtccgcatgtagtccaggctgtagaaggcgaagccgctcccggggtagaaagagcctctctccgtcaccgagaagcactgcatcctcgtgttcactttcaccgtttcctggatggtggtgtcttctctccgttcagccagttccagctcctcatgcagccatccagacgagggtttataggctgcacgaggtccttctcatggaagggaatacctcccacggtcaggttcagatgatacagtcctcgctccggtgggaacaagtccccgaccaccgcgattttcatgacagcatccctgttgaccttggatgaccagattccgcgccagctcctcaacagagatctgaagagaggcagcgccatgagaaaagatgggagtgcacg

SEQ ID NO: 667 - DNA, 156 bp, Homo Sapiens
agctcggtaccctaatagtctatgttaatgacggttcgggtttcttctacattgtttgtgacctgagaaagtttaaaagagcctcagtgtctttcatctataaaaataaaagagatagaaggacagtttacctaaggaataaatctggtaacatgt

SEQ ID NO: 668 - DNA, 685 bp, Homo Sapiens
  misc_feature (86)..(86): n is a, c, g, or t
  misc_feature (447)..(494): n is a, c, g, or t
aaggacaagcataggaaggaggcggaactgacggagatttacccgcgggcacatcattgagtcagtcactccatcccgtcggctgnagaaggcccagaagcagcggcatgaccgtcttgtggctgggcagcagcagggtcctgcaacagctggcagaagaggagcccaagctgctggcccagctggcccaggagtgtcaggagcagcgggcgaggctcccccaggagatccgccggagcctgctgggcgagatgccggaggggctgggggacgggcctctggtggcctgtgccagcaacggtcacgcacccgggagcagcgggcacctgtcgggcgctgactcggagagccaggaggagaacacgcagctctgaactggctgagcgaggtggccacagggccagggcgggcgctgggtggagggcaggaggcaatgacactaacgcnnnnnnnnnnnnnnnnnnnnnnnnnnnnnnnnnnnnnnnnnnnnnnnnaacccggggcaagtacctcagctaactcccttcatcctcctggggcccctccttcctgccctcagtcttaggttagggccttggtcagggctttgctccctgtgacacccacaccctcgagctagcagcgtctcctcccttccccgggagagctggctggagacttggagctccgggaagtaggagtcaca

SEQ ID NO: 669 - DNA, 286 bp, Homo Sapiens
cgatagattgggaaagctaaagaaactcccatacacaccttggtaccaccaatcaacttaaacatgacatcctcagagagacagtctcagatcatccaattagcaccttctattatttattcacttcctagacacttgtcaaaatctgaaaaggcggggtattcgatggtttgactatattgacagactgtaactggatgaaggcaagagaccttgtcttgtacatagttgtgtcctcagcacttggcagaatgtctagatggagcaggtgcttaaatacttgttg

SEQ ID NO: 670 - DNA, 950 bp, Homo Sapiens
  misc_feature (489)..(628): n is a, c, g, or t
gggccttgctctgtgggtctgcccacggtcaggtgacagccacctccagggcaccgtcagggtggtgctggccacagaggctgcatgacctcccctcccggcgtccctcccccaacctccttccgcaaatgggcttccagggccgtaggtgcctttctgcacacaggccgccaggactcgtggtgtctccaggctgtgtgactgcagggccacatgctgcctgcaaacagggcaagaccacggaggcacaggggtcctgctcctgatggggcctcaggaggggcggagaggggtggaagggagggagctgccccacctggacccccgctctccctgctgttgtctgagcagatggatggagtccaggcctgggggcttctgctggccagcccggcctcccacacccacttggagggtgagactgcagtgggggttgtttttattaaaagcatctggacactccaatcccagttgcacacgccgagaatnnnnnnnnnnnnnnnnnnnnnnnnnnnnnnnnnnnnnnnnnnnnnnnnnnnnnnnnnnnnnnnnnnnnnnnnnnnnnnnnnnnnnnnnnnnnnnnnnnnnnnnnnnnnnnnnnnnnnnnnnnnnnnnnnnnnnnnnnnnnagttttctgcctacccatagacagcaatcacaggaggtttttcttagtggcttctagggatgtgaacagggaggagaaaagactgagagtaaagggggagatgagggaagggtgagatgtaatcaggaacagagagcagcagttttgcttggctggagcaggtggtgtgagggatggactaggatggattgtggaggacctcgaatgggaacagtttgtctaattcattaggcacaaatgaatgggggagggatgtaatcagagctgtgctttttgaagattaatatgtagcgtgtggttgttcggcgtttcacgccgccct

SEQ ID NO: 671 - DNA, 483 bp, Homo Sapiens
ttcaactttgatttgggttgtaaaatgtgttaaatcctgttcattgaactcccatcaactcttataaaattcatgctgatcttcattaccgttgcatgattggaaatgtttaaaacattgtacagttttagtatagagaaatgtaatggtttttgtgaccagtttctgtctgcatgtaatttggatttctcaaatacattcattagtaatttatcagtaacattagttttatttttgttcatctccttatctataaaaaggggatattcttaggataaatacatgaaaaatttaaacttgatagcttaactataatcagctatttttgtatttttgtaatatttgtccactaagctggagaagcagcctcatacagttgattttgtgtatgtggctagtcttattgtcactatgtaagtaatccaatggttttagaaactaaactttctagagcaataaaatgactataatgttaagtaaaaa

SEQ ID NO: 672 - DNA, 677 bp, Homo Sapiens
gcggagcacagcaggtcctccatgccggtcatgaagaagcggcgccgagcgcgtattaacgagagcctcgctcagctcaaaaccctcattcctggacgccctcagaaaagagagctcccgccactcgaagctggagaaggcgaacatcctggagatgaccgtgagacacctgcggagcctgcgtcgcgtgcaggtgacggccgcgctcagcgccgaccccgccgttctgggcaagtaccgcgccggcttccacgagtgtctggcggaggtgaaccgcttcctggccggctgcgagggcgtcccggccgacgtgcgctcccgcctgctgggccacctggcagcctgcctgcgccagctgggaccctcccgccgcccggcctcgctgtccccggctgcccccgcagaggccccagcgcccgaggtctacgcgggccgcccgctgctgccatcgctcggcggccccttccctctgctcgcgccgccgctgctgccgggtctgacccgggcgctgcccgccgcccccagggcggggccgcagggcccgggtgggccctggaggccgtggctgcgctgaggctgtggccctgagactgcatcggaggcggcgccccgttctagggccgtggcctttgccgagactgtagcagagaaaacgtatttattattccagaaaaaaa

SEQ ID NO: 673 - DNA, 1256 bp, Homo Sapiens
  misc_feature (343)..(407): n is a, c, g, or t
tccaaccctggtccccctctgtctccagccaccctctgcttgggcttctgagctggtgccctggcccagaggtctggcggaggcccaggcagcagccatggcggggtgtctctacaggggagaggcgggagcctgccaccctcttcctgccctacctcctactaacacttcctgccccatttggacccgtaccatggggctcaggacagagggagctagcagctggcctccatggccccacagcctccttcgaggctgtgctgggtgcagaaccgccagagccacccaaaaggtgtttctcttctgctccctgaacctcttaacttaataaaacgttccagcnnnnnnnnnnnnnnnnnnnnnnnnnnnnnnnnnnnnnnnnnnnnnnnnnnnnnnnnnnnnnnnnngaggagggggggcgcagagacagccacctcccaggagggagccaaaacaggcgacagcgcacactgtaatagcaaaaaggcgggaccacacacgaggcgagagtaataaaaaaagccgaagagccgcggagcgagagacaaaccacaggagcggcgaagcggagcaacaaagccgaggagccagcggcgacgagcccgaagagatcagaaaggacaccacgcagcgaggagaggaagagaaaaaagacagagggggcagaacaaacagcgaaaccagagccggagagacacgagagaagcacaggcaggaggacgaagaaggagaaacaacaaaacacaaacagcagaagagcaacaagcgaagcaccgaggggagagagcacacacagaccggagagcgacaacgccaacacacgagaacgcgacacacgagcaagacacacgaagcgagcgctgaacaaagagcaaggccgcgcctaagcaccgaaggagccaccggacagaagaccagctagcccacaaaccaacagccagaacgaagacgcggtgcacgacgaaacacagaacaagagcaccaggagagatcaacagcagaagagggcaaggatcgacaggcggaagcgacggaaagcagagacagagacaccacagcccaaggacgcgagcaggcgcccagctcggaaagagcgaggcaggagagagccagagcccccacgcgaaagaggcgagagcaggcgagcaaaagaaggaaggcactgaaacacaagacagagcagagacacgagcagagagacgatgggaaccacaaggagtagcaagccgagagcagacacaggagagaaacacgca

SEQ ID NO: 674 - DNA, 643 bp, Homo Sapiens
gcggccgcaaacgtaaaaaccaataggcaaagaagaggaacaaaaaggattccaggacaaactgaggtcacatctatgatccttgactttattgtgtctgtttaaagtatctacagtaacctgtatcaacttagtcagtgtattaatactaaatttagctccttcaaagcagttggaactatgtgctacataaatttcagcttcacacaaggaagggaaggagtgaaattagtgaacaggcagttacagcaaaagaaaaaacataaaaattgaatagctggctctggtgaaatgagcaaggactttagagtcaaactggcctggatttgaatcctgatcctcattgcttgtagctgtatgatctggacaaatgacagtaactgtttctaaccttgattttctcatctgtaagatgccaattgtaactcctaaggatactgaggattttttaaaatgcgtgtacagttcctgaccagtggtttgtgcctaataacttattacaaattattacccagtaaaaaccttgagacaagagtgaaaacgtaaagctaattaatccattacttgttagcaagcaaactacgtgcttgagaaaattactcaactttcatgttttacttccagacagtagtttgattaaaag

SEQ ID NO: 675 - DNA, 665 bp, Homo Sapiens
tcagaagacttgcatagcaatgtggtaaatgagcatgcatgtacattaatagagttaagtgataagtataacaatggtgaacatggacagtatagcctcttaagcaaaattacctttgacaaatgtaaaaacttctttgtatgtcaagtatgtggttttcggagtagacttcaccacaaatgttaacaggcatgttgctattgaacatacaaaaatttttcctcatgtttgtgatgactgtgggaaaggcttttcaagtatgctagaatattgcaagcatttaaattcacatttatctgaagggatttatttatgtcaatattgtgaatattcaacaggacaaattgaagatcttaaaattcatctagatttcaagcattcagctgacttgcctcataaatgtagtgactgcttgatgaggtttggaaatgaaagggaattaataagtcaccttccagtccatgagacaacttgattattctctttaacttacagaatgttagtttaaaataataaattcatcctttttttggagatgattaaatggatgattgtaaacacaacttatgaaatctgcctttaacaagtaacttttttaaattataaaattttattggcattgctccattttctgtatataaatatatctttaatgtggtattttc

SEQ ID NO: 676 - DNA, 467 bp, Homo Sapiens
  misc_feature (405)..(405): n is a, c, g, or t
gaaagagacaaagagaaaagatgaaagccacagaagataaatacaggggtcaaaaccagactatcagttttagaaagtgaaaaaagttaaaaaagaaatgggggcagtgggttattagaaataacataaatggctggtatggtttgtctgtgtcctcacccaaaatttcatctcgaattgtaatccccataatccccatgtgtctagggagagacctggtgggaggtgattggatcatgggggtggtttcccctacgatgttctcctgatagtgggtgagttctcacaagatctgatggttttataaaaggctctgcccctttaactcctcactctttctcctgaagccttgtgaagaaggtgctttgcttcccctttgcgttcccccatgattgtaagtttctntgaggcctccctggccatgctgaactcttcagtcaattaaacactttcctttataaaaaaaa

SEQ ID NO: 677 - DNA, 556 bp, Homo Sapiens
ttcagaagtatagtatattcagtaaactatctctttagtgagagtgatgatgttgaccataaggccttgtgagagtgacaacaatgaatgggttacacattgctgatctagatcaagaagcttgtcagatgttacagtatgctcacacattaaagttacactatgcggcaattaccctaagtttattttgtgtcagttacagcatgatggggatgccaatcacagagctctccttgcaggtaggttagcatttctattctaggtccccatattcaaaagcgttcataacttggtcataaaaactaatcatggaatgaatcttggcatataaaagtcatttctcagaagattaaaaaaatacaaattagaaaaaagccccaagtgctttgccattctgatgttacccacaggccccaaaatgaattagcaagtcagcaagtccttttcacttatttttttcctttctccaagaaaactgtgtacttcagggcctttgggtcagttttaaagctgacttgtctggaaaaggttatcacttggagggaaagaagttctt

SEQ ID NO: 678 - DNA, 215 bp, Homo Sapiens
accacagcaagaagaacgaggccaacctccatgggtagtgcagaccggctcaggccctgcccttcccgccggggtcccctgtgacaggacgcaagggcacagctgcggagcagggtgggctgttagagctgggcagaggccacagtggccagagggctggtgagagtggctctcctgctgccctagccactggctgaagatctgcctggggagga

SEQ ID NO: 679 - DNA, 436 bp, Homo Sapiens
cgactgtacactctcaaagacagctgtcctcattgagtcaatggtagaggcatggggtgggcacagctgctctaggctcatgtgtgtctgcacgctaggcctcctctttggcattgctcttctcgctgagttctggtttgttgctctgtggagactgtgaaggtcctagcgctcagcagaaaacacagtgcccttcccccagagggtgctccattaatgggagagttgactccattcactgctgggcagaaggtggatagaaagccagtgccaagctgagttcaggctgtcaaagagaggagatgaagaagttagttcccagtctccactatcgttccgcttagaaggacactgtgaccttgaggaccaaaaatgtaaatgtcataagtcagccgtagacgttacaggagaagcctactacgcaacacctccagag

SEQ ID NO: 680 - DNA, 201 bp, Homo Sapiens
ccattttattctctttaaaagatgactgcattgaaggtgattgctaacaggtacaggatttccctttttgcacgatggaaatgttctgcagttagtggtgatggttgcacaacattgtgaattaaagaaatagtagctttaaaaagatagtgtgcataaagcaagaaataataatgcattataggtttgacttttcacaca

SEQ ID NO: 681 - DNA, 468 bp, Homo Sapiens
aggctgggcgcacacgtgcattacagttatgaggctccttgtcatcaggcagtgtggactcaggccctgggagtcatgtggatgccagtagcctgggcccacagagctgctgggatatggggggcatatcaagttgaaaatggcaactctgatctgacgcctctgtgctcagggcccctggaggaggggctactgccccttggcccttaaacaacaggacagagaccagagggactgggcggcttgtcccaggctactgggctgtggtctctgaccccctggaggcccccccacgcctcacagaacacagtgcagacggtgggcgggaagagctcgaggggaggcccagccctgcaggtgggactggctctccctccccagccacgagtatgccacagggggctttcaaaaccaggcagggccaagccttggacccactggaggtagagcaccttctgtggctcccgg

SEQ ID NO: 682 - DNA, 444 bp, Homo Sapiens
gtcctcggggccacgtcggaccctctggagctgttcttggtggatgaatgtgaggacatacagctttcatatatccacagcaaagtgaaagtcatctacaaagccccctccgaaaactgggccatggagggaggcatggatcccgagtccctgctggagggggacgacgggaagacctacttctaccagctgtggtatgatcaagactacgcgagactcgagtcccctccaattaaacccagccaacagaggacaacaagtccaaattctgtgtgagctgtgcccgtctggccgagatgaggcaaaaagaaatccccagggtcctggagcagctcgagcacctggatagccgggtcctcgtactactcagccaccaagaacggcatcctgtaccgagttggtgatggtgtgtacctgccccctgaggccttcacgttcaacatc

SEQ ID NO: 683 - DNA, 788 bp, Homo Sapiens
tatcctgtaggcacagatcgtcacatctggaaccaatgtatccaggatcacaaacacaggcagcagtaaagtaacaggtatcttggttgcagctccggggcaaactggcgtccgactgtcgggaccatctgggcaagggcaagggcggcagtgatctcctgtacccaatgatggggtcgccatagtaaccagccaagcacctttcacagttatgacccatggtgtagtcctggcagttcaagcactccccagtcactgggtcgcagtcatcggcgtggccattgcactggcagggctggcaacttggaaagccccagtgcccaggtaagcaccgatcacactgccgagcatacactccctggaaacagtggcactggccagtgacgggattgcagaaggcattgacagatccttgcagatggcactcacaaggtttgcatccactggggccaaagccaaaagttccaggtgcacatctgttgcaggttcttccaaccacgttgggccggcactggcactggcctccgttgggatcacacacggaacttaacgaaccctgagggtcgcattcacaagccaggcctgtctggtgtaacagggcagaaatgctaaagatgatatttctgcaaacatctgtcatcggggttttcacaaacgcttctgctgttctctagacatcggtatctctgaaaggtttcccaggcactgttggtgaccaccccatctcctgaacctcccacggtgaagatgtccagtgatttacagtatggcatgagaacaagagaatc

SEQ ID NO: 684 - DNA, 712 bp, Homo Sapiens
ggctgggcatggggctggctggcatgccggggagccgacggcgacggggagcccgggggcggggagggcggcgcagggcagcgggtgcggtgacacctgtgggcacagccctaggggacctctttctcctggacattgaagatatggccctttggaggtgacccaggagagacagggatgaaggcctttggtcctccacagtgagggccccctccaaggactcgtggcctcccgcattgagacttatgggggccggcatcgagcctctgctcagagcactgctggcagactctatccccgaggataccctgtgctggatcccagtcgccgacgcctccagcagtatgtcccctttgccaggggttctggccaggcccgaggcctgtcacccatgagactgcgagatccagagcccgagaagaggcacgggggccatgtgggggctggcctgcttcactcccccaaactcaaggaactcaccaaggcccatgagctggaggtgaggctgcacactttcagcatgtttgggatgccccggctgccccctgaggaccggcggcactgggagatagagagggtggcgacagtggcctgaccatcgagaagtcctggagggagctggtgcctgggcacaaggagatgagccaggagctctgccaccaacaggaggccctgtgggagctcctgaccaccgagctgatctacgtgagaa

SEQ ID NO: 685 - DNA, 611 bp, Homo Sapiens
tatgcagggaggttggtcatggagtggcggtagcggcctgacacagggccagttctgctgccactgaggcactggtggcaagagcaggcgacgcctgtgtggcccggcggagcgatgatggtggtcactgggtaaggcggccctgcttgacgccgcaccgctgcagcagaagctggaagtcttgttggtctgcgtgtgggtggtgtaagtagacagtgtagttgtaccccaggggggccaagtccacgagctggttgcccctggccacctgctgctccagatcgtcacagacgccggcttcataggcagtccaggagccatcgtcgctcagccactcccagacgacacctcggccaggggctgagtgctgggggaacaggttgtctccgcacagcccgcatggtgccggtgtcctggcggaactgggtccagctggggaggtcaataatgtaaggggccagcgaggggtctgcctggcccaaggggatgctgtgggccaggctcccaagcccaaaacgttggcccttctgctggacaaactgctgctcgatgaagctgcagacggtgcactgtagggtgccagtccagccgccgcccggatcctctagatg

SEQ ID NO: 686 - DNA, 151 bp, Homo Sapiens
tgagttcaagcaatccttctgtctcagtctcctcagtagctggggctttaggtgggcactgccacaccgtactaatttttgtatatttttgtagagacgaggtcccaccatgttgcccaggctggtgtcaaactcctgggctcagtcagtc

SEQ ID NO: 687 - DNA, 562 bp, Homo Sapiens
ggcgagggtgtctcgctcggtcacccaggcgggagtgcaggggtgtagtccagctcacggcagcctcaaagttctgagttcaagcaatcctctggcctcagcctcccaaggtgcggggatctcaggggggagccatggcgccgggcccgaaaccaagctttcttatcccaagcacggacctttatcaggtggacctaatcctttatcatctcctaggtgtccctcatgagtgatcacttcacattcctcccacagtgagagctcacccacgggggcatattttccccatgggaaaagtgtggtcatgggaagttccctgttttgggaaagaacaggatgggaggtgctctcgggggtgtcctcctaccaagcagcctgttgaaggcctcgtgggtgctcaggaagcacgagcaacactcgccgtcgcttcagcttcatctggaggccacacagaatctccgccaccggccacccagatctcctcgggctcaggggcgagcaccttcgggggctcctcctcaaaggattcctcagattcgtcccacaattccctcttcttttt

SEQ ID NO: 688 - DNA, 510 bp, Homo Sapiens
ggcgggcagacttgggggagtgacggtggagcagggaaagtccctcatcaactatgagcctcacggcacacgtactgcaggcttcacggcacaccctcccaaaagcacgtcagtctgcgtgtgtccaggcagcatatctgcacctgtgtgtgcatgtgtgtccggaagtgtgtgcccaggcagcatatctgcatgtgtgcgtgcgtgtgtatccggacagcatatctgcacgtgtgtgcatgtccagacagcatatctgtgcacatgtgtgtgtccaggcaatatctgcacgtgtgtgagtgttgaggcagcattatctgtgtgtgtgtccaggcagcatatctgcgtgcgtgtgtgtgtccggacagcatatctgtgcatgcgtgtgtgtgtccggacagcatgtctgcgtgtgtgtgtgactagacagcatatctgcgtgtgtccaggcagcatatctgcgcctgtgcacgtgtgtctggaagtgtgtgatcaggcagcatatctgct

SEQ ID NO: 689 - DNA, 389 bp, Homo Sapiens
actccactctttgcagttttgccctgaaacttcttgcgagagaaaagatgaaacttctcgctcacaaccctattctggtcgcaatgtagaaatacggtttatagggcaaagccaccttaaatctgcttccgtcatcttgaataaagtagtaatccactgcactgcctaagcgcttatcttcatctaaaatctcggtaggatgcatgttaatgagccagcctgtcttctcaccaggctccttcagccgctcaaaaccaaaccgcaaatccatcttatccgtccactgactccgttccaggcgcttgagtgccgaaactgaggaagtggcgccatcatccctgctggcctcgccatccgcgcctgggtccgcgcgtccccgcccgcggccg

SEQ ID NO: 690 - DNA, 385 bp, Homo Sapiens
  misc_feature (190)..(190): n is a, c, g, or t
  misc_feature (252)..(252): n is a, c, g, or t
agcaagatcaagatctgtgaaatgccctctagaatcagagaagatatcagcactaagatatttgagtattaaatacagtgtttcatgatcctagaaaagtggaatgggtacttccaaagtaaactgggcaaatccaatatgcaaggtcactgaaatagagaaacgtcattactgctttctcagactccgncggtggacactggacacagcgtagtaattaacaggacagcctctggaaccaggctgccaggntttcaaacaagctccaccacattcctaccatgtcaccttgagcaagttttcttcacttttggcctcgtttccccactataaatagagaccatactatacctactctcataaatcataatataggctagcacag

SEQ ID NO: 691 - DNA, 200 bp, Homo Sapiens
aataatgttgatggctttaaaacttctgcaatcaagtaaggacctgagccaaacattgggccgtgttattctgccaggtgaagaatcttcaatacaggcacaaaccaaatgtgaaccactataatgacggttctgtcagtgcttgagtgcctataggaaggaaggtagtcccataagattataactgtattttgactgta

SEQ ID NO: 692 - DNA, 307 bp, Homo Sapiens
ttggtttaagatgtgtttaggagttcagactatgaacatgggtgtgtccgttgtgctgggaatctgtgaccttcacaagtgatgcagaattacgaaagccctgcccaggtggcgtgtccccagccactcccactgagtaacagtaaacagacacccacaagctattttgtgactcggaagtggactgtctcatccaaaactcccccttctccaagtctgtttccccggccaggggagtctctcaatctgacatcctgtcttcctactgactgacctggctttcacaccctcaccacccccggaactc

SEQ ID NO: 693 - DNA, 797 bp, Homo Sapiens
  misc_feature (310)..(440): n is a, c, g, or t
  misc_feature (442)..(614): n is a, c, g, or t
tactcgccatgactgtagtcatttgccctataccccagcaggagggtcctgtccatctagtctcttccaagttatcaaagtatggtttaaaacaggaccttataatttcaaggtgccaaccagccatcattctaggtaaagaacctgtcatatttagtaacttctgtggtgaaatttctttcttcaagccagcacactcatactagtcaaggtgagttctgtttctttcttaatgtcaggggagacatttgttcacagaagagactattttctttttatattttgtcctgttttaaataagtgcttgggnnnnnnnnnnnnnnnnnnnnnnnnnnnnnnnnnnnnnnnnnnnnnnnnnnnnnnnnnnnnnnnnnnnnnnnnnnnnnnnnnnnnnnnnnnnnnnnnnnnnnnnnnnnnnnnnnnnnnnnnnnnnnnnnnnntnnnnnnnnnnnnnnnnnnnnnnnnnnnnnnnnnnnnnnnnnnnnnnnnnnnnnnnnnnnnnnnnnnnnnnnnnnnnnnnnnnnnnnnnnnnnnnnnnnnnnnnnnnnnnnnnnnnnnnnnnnnnnnnnnnnnnnnnnnnnnnnnnnnnnnnnnnnnnnnnnnnnnnnnnnnnnggagccatgttctaatcccagctctacttctcactagctatgcggttttaggtaagatattaatacttaagtgctatgaatctcagtgtcaccatctatacaaataggactgagaacacctatctttcacagtttaaggtgagaattaaaagcattcaaatatatgaaaggtcctgtaagtca

SEQ ID NO: 694 - DNA, 742 bp, Homo Sapiens
tatgtacaatctagagataatattaactatagataaaggataatcgataggattatatgcttatgagataatgcatatgagtagagataatgagtgatctgagattggacatataggtaatagataatatatgccctttatcaatcatacagattgaaggatgcttatggagctgtcttgcgtatattcgtgcgcgtcagatctttctggagaagttctaagaagatgaactgtttccgcagcgatgatcatgaataacaatcgcttaaagcttttgttaacatgttgttgtttttttgtcagaagggcaatactagttggtttacctatccctcagttatacctgcatgtgacctggaacacgtggcagttcatggtttttcattatatttttattactgctgaatttttacatttttcaatgtagttactgaccctttactttttatattttataagctgtctgatcttctcattagcccatttttttcattaatgtgaaaatatgttttcaggatacagagctgcactgtacagtactaatgcatttggctcgtaaggcaactgaaacatggccagttctcactgggacatgctatgagtataaaatatacccccgattttgtagacttagtaagaaaagaaagactgtaaaatatctcaatacctgttatgctgaatccctgtttaaatgataatattttggatatattgggttgaataaaatatattctttaatttt

SEQ ID NO: 695 - DNA, 443 bp, Homo Sapiens
aaaattgaggctgtgataactacttctagttaaatctaatataaagtaaagagcttattaaagacttactgaatgcattaccaaacatgttcaccaatacaagagaaacacacagtgcccttggtcctgcacttcaggctgcctttaaattaatgtctccaacaggtggccgtgtgtctgtatttcagacacagttaccttccttgggtgcaggacttctgcaatccagagaagatcctaatcagagatcaagtacaaaggtggtacaacatcttggccctgcaactgatttttataagaaacttgcattagattgctcgggacagcaaactgcagtggatttgttccttttaagttcacagtattctgatcttgcttctctagcttgcatgtccaagtattctgcagggtgcatctattattatccatcattccagtatact

SEQ ID NO: 696 - DNA, 930 bp, Homo Sapiens
agctggtggagacggtggaactaaagattccagaggagaaccagccacccagcaagcaggtgaagccactcttccgccacttccgccggatagactcctgtctgcagacccgggtggccttccggggctctgatgagatcttctgccgtgtatacatgcctgaccactctaatgtgaccatacgcagccgcctttcagcatctgtgcaggacattctgggctctgtgacgaagaaacttcaatattcagaggagcccgcggggcgtgaggattccctcatcctggtagctgtgtcctcctctggagtagaaggtccttctccagcccactgaggactgtgttttcaccgcactgggcatcaacagccacctgtttgcctgtactcgggacagctatgaggctctggtgcccctccccgaggagatccaggtctcccctggagacacagagatccaccgagtggagcctgaggacgttgccaaccacctaactgccttccactgggagctgttccgatgtgtgcatgaggtggggaccgaggctggtgctatgctggggggctggagggagaaatgtgccattgggagacggtgttcgcagcacaacgtcctggttccaaggctcacttgcagcaagcccttgggcaacgcatggccgtaacctttgttcccccatctgaaaaaaatcgcaaagagagagaccccagagcacagtggctcagggcccaagtgctgtttacacagaacctgacccaggatttctatttttaaaatattcactattaaagaaataaaataaggcagagacaataactgcctagcagatggttgtcttgaggatgtcagccgtgagcgaatgcctggcacctagtaagtgctcagtagctggtgaaatattataactgctggttcttctcttttataccgaata

SEQ ID NO: 697 - DNA, 347 bp, Homo Sapiens
  misc_feature (75)..(75): n is a, c, g, or t
aggggggacacaccccgtccttcccttctcctcgggctgttttcttctctcacgtggccactgtcatcccggaantactgtggcccaactccctccctgaagccctgaacccgaagggtagggattccggagcccctgccacagagactacactacttagagagtcattccaaaagacaaaggggaacctccaaaatgccttccttttcattctgaggagtctgtcccttctgtgcatatttatagtctacacgggagtgtctgatgcaactttgaattatgcaaatgggaaatagtgcacttgtgtacaatctttatattaaaaaatgtgaaataatgcaatcacc

SEQ ID NO: 698 - DNA, 204 bp, Homo Sapiens
  misc_feature (130)..(130): n is a, c, g, or t
aagcaatcgtgttgaattaggagtatacttggtgtggaaagagtatgaatttgccatgtgatttgcaaatggggggaagctactgtgagcgtgtgtttttttaatttacactatagagtgattttttttncccccaacgtcaagtttttaccttgcatgtactggagtatttatttcatctattaaaatgttatgtttctcaga

SEQ ID NO: 699 - DNA, 501 bp, Homo Sapiens
acttacagaaaccaaatgcccagccaaacctcaagtgcaacaccaagtactggaccccgagggaatcagggggctgagagacaaggcatgaactggtcctgcaggaccccggagccaaatccagtaacagggcgaccgctcgttaacatatacaactgctctggggtgcaagttggagacaacaactacttgactatgcaacagacaactgccttgcccacatggggcttggcaccttcgggcaaggggaggggcttgcagcaccccccaccagtaggttcgcaagaaggccctaaagatcctgaagcctggagcaggccacagggttggtataatcatagcgggaaataaagcaccttccaagcttgcctccaagagttacgagttaaggaagagtgccaccccttgaggcccctgacttccttctagggcagtctggcctgcccacaaactgactttgtgacctgtcccccaggagtcaataaacatgatggaatgcta

SEQ ID NO: 700 - DNA, 541 bp, Homo Sapiens
ttcgttatccataatatagtcacaccagtcctgaaaaaacatggaacagactccagatctttatatttcatactctaaagtcatacaagccaatctgcatttcctctagtggaaactgtatagctggtcatctttccagggcccttttatcaagaaacaatgcagcttctacatttgtgctgcttctacaccaaaacagctggaatgtatatagtatggttctggatgctcttgtatacctcactcttcatttctcacctaacccatgtgctatgatttgaatgtttctcccctgcaaaactcatgttgaaatgtaattgccatcataacagtattaataggtggaatatttaagaggtgattagggtgggattggtgatgttataaaagggtaagttcagccccttcttgctctctctgtcacccttccaccttcctctgtgtgatgatgcaacaaaaaagcccttcccagatgccagcatcttgattttggacttctcagcctacagaactataagccaataaatttctgttatttgtt

SEQ ID NO: 701 - DNA, 893 bp, Homo Sapiens
cccaattccattgtgatgtttacctttatagccaggtgagtgcagtttgaacttgagatacagtcaactgagtgtttgctaggatcctaaggaacataaagttaattaaaaacttacacctaattatgtaaattgccttgttaaagacatgtgatttgtattttagatgcttgtttcctattaaaatacagacatttctaccctcagtttctaaatgtagactatttgttggctagtacttgatagattccttgtaagaaaaaatgctgggtaatgtacctggtaacaagcctgttaatatattaagattgaaaaagtaacttctatagttactccttctaaaatatttgacttcctacattccccccacccaaaatctttcccttttgaaaatactaaaaactaagttatgttattataaagtgtaaaatggtttgtcttaattataggagaaaaaggccttgttagaaataaaataaactgacttatttcactaatgaaaaaaatctacaatgttaacccagcatgctgttggcaattgttgtaaacaaacaagttaaaggcaaaaattcttgccaagagaattaatgtgcgtatcgagcacattccgcaatatattatccaaaatatctttctgacacgcgtgcccgaaagtgatcagaaaaggaactaagccttttcacaaaggaacctggggttcaactaaaggggccgggcctgctcccccctaaaaaaaagcccccctgtgttgacaaaccaagtgtataagaaacctgcacgcagggggggacccagatgcccctatgggggttcctgggccataaggggggtgcttaagcgaagcctaaaattaatggaattttcgggccccctcccgttggaaattttttatg

SEQ ID NO: 702 - DNA, 756 bp, Homo Sapiens
gagcagaacgaggccagcaagaccaatgggctcgggggcagcagaggcattccctcatggttgtacagcgcgagatggcagagaagtcagcagcctcgaagtcacgtaccagtaggacgatcgatggggcagtctccgcagccggtgttcgcagatgctgatgtggatgtgtctgcagttcaggcgaagttgggagcctggtactgaccagagggatgctgcagctgaaactgagctcagggtgcacccaccctgccatcggcactgcccagagccgccgagtgcacccgaagaaaacaaagccaccagcaaagctccccaaggcagcaactcaaaaacccccatctttagcccttttcccagcgtcaagcccctgcggaaatctgctactgccaggaacttgggattatatggccctacagaaagaaccccaactgtgcactttcctcaaatgagtaggagcttcagcaaacccggcggtggaaacagtggcacctaaaaaaccgatgatgtctcccccgaaactttggatctggactcaccctttcacagtagtataagggttgcagctgaatggctctaaaagagttttatttgtccagtgaaaatgaataggttcagggatgagccacagcccataaaaaatgggaactggaagttttataataggagttagaacagggctgttttcccagctacctgctaactgacgaagtggattcttgtggcaaaataaatattgtggttttatagtgt

SEQ ID NO: 703 - DNA, 725 bp, Homo Sapiens
  misc_feature (156)..(156): n is a, c, g, or t
gggggagggtggcgcaaggagaggacacctctctcctggccctgtcgccatcttccctcatcaatagctaaaaatggcaaagaagaaagagccaggaccccgtgccatcaaatcctccggccttgtgctgccctgtctcggcactgcttgccttangagatcaggagtgttcctagccactgggagatgggatgcctgccactggcagctctgccgtccatcctcaccatcccaccgtccccccaagacagctctccatcccatcctctgcctcccttctagcctcaaccttaactcaggggctcccccgtctcacacctgggttgcaggaacatcctcttcaccaacccccttcacatccctcctcacgtgcgcctagggcagctacaaaaaccaggccagcctctgaaaagtgctccacatctcattaaaaaccgtgaaatcgcactgccccactatcagaatagctcagaggagaaggtctgccagtaccaagtgctggtggggatacggagaagagcagctcccaggcgctgctggtgcaaatgtgctttgttgcacccacggcaggaaactgaacagcttctcatcaagttaaatacgcatctaccctatggcctagcatttccactcttgcttacacatccaggagaaatgagtccttacatgcacaaaaggatgagtaccgtaatactcacgatcagcaaataaacaatacagctgtg

SEQ ID NO: 704 - DNA, 728 bp, Homo Sapiens
taaactactgtggcagcgttggtaccctgcatcactgccatggttgtgctattctcatctcaacatagaattggtgggttctcctaagggtgtcaggaacctctaaaaagatgtgattctttgggaggggatatttgaaattccaacttccattccccctagcaaaaggaagcagctgctgtttaagggttttatctgagccactttaaagatgaatccatggtattactctggatactagccattccttaggattttaaggtcacattttattcctggatgctttatgtccccacctccacctgagccctcatcctctgttccctactatactcccaacttctactctttgttttatccacctatccctattacctgaccctttgtcttccctgtctcccatccttggggggacatgtagccctgtggtcatggttctgatgacatcatcagggcagcccccctgcccaggtattatggcctgtcagcattccctgtgccctccaaaccttaggcctagaatgcggagctgccaacataacattcacccttttgaacagatggagtcaggcacactaacacagccttctgtcctcaataacacagccattattgccacttgctcagtcgtcaatgtaaaccctcagagtcagctgaactattttaggccaaacatactgtttttgtaaagtatttttcattaataaatctataagacagttctattt

SEQ ID NO: 705 - DNA, 1076 bp, Homo Sapiens
gggattcccgggatctcggctctctcctcttcccagcttgatgagagtgatgcctcttgcacaatcaagcatgccaatgacattcggggaccatcaccaaacgaaccggcaaagttaaacctcctccacaaatttcacccagcaaatcgatgggcggagaattttgtgtggctgctatcttcggaacatccaggtcatggtttgcaaataatgcaggtctgaaaagagaaaaagatcaggccaaacaagttgtagttgagtccctgtacattatcagttgctatggcaccttactggaacacatgatggagccgcgacccctcatcactgcacccaagattagtgacgacacaccactggaaatgatgacatcgcctcgagccagctggactctggttagaacccctcaatggaatgaattgcagccaccgtttaatgcaaaccaccctctgctcctcgctgcagatgcagtacagtattatcagttcctgcttgctggcctggatccccctggaagtcctgggcccattactccacatgggtcttacgacagtttagcttctgaccatagtggacaggaagatgaagaatggctttcccaggttgaaattgtaacacacactggaccccatagacgtctgtggatgggtccacagttccagttcaaaaccatccatccctcaggccaaaccacagttatctcatccagctcatctgtgttgcagtctcatggtccgagtgacacgccacagcctcttttggattttgatacagatgatctttgatctcaacagtctcaggatccagcccagtccgctctgaccccgtcagcatgaccagggtcatcccgtccagtctctgatccaagggcgagtttccacagtggattgatgctgcctcaagtacctttgacaggagcgtgacccctcctgaagcgttccgagtacttgacctgagggtttccggattaggaacatggtcctcaggaacccctcgggagaagggccttccggaacctacttgccgagcccctggtccaaccctcttagccggacccaattggcttaacggaacct

SEQ ID NO: 706 - DNA, 2125 bp, Homo Sapiens
  misc_feature (372)..(372): n is a, c, g, or t
  misc_feature (974)..(1061): n is a, c, g, or t
  misc_feature (1789)..(1789): n is a, c, g, or t
  misc_feature (1798)..(1798): n is a, c, g, or t
  misc_feature (1848)..(1848): n is a, c, g, or t
  misc_feature (1865)..(1865): n is a, c, g, or t
  misc_feature (1881)..(1881): n is a, c, g, or t
caccaaattaattagctggttttttcccctggggttccgggcctctattaaagggaagagcacattaaaagttgcattgccagcctttacttttccccatatggccggtcctcttatacctagcgggccaggtttatccagaattggcctttgcttaacccaaggggcttggatagaaggttgggggcttggggaagagagtcccctaaggtctgccacgtcgcccaaacaattgtggtgatcaattaatgtaggtataataagttgaaggctcggtgagtgaccatcattataacgtaatgatcacctgttggtcaagggccagtggaaacggcctccaaggaaaaggtcaaaaagttctttcagggtttnaaggtgccacttactaaaatttccagcttcatttgaaggtgtcactactcacagtctcttaaatctccagttttatctttaatctcctcttttatcttggactgacatttagcgtagctaagtgaaaaggtcatagctgagattcctggttcgggtgttacgcacacgtacttaaatgaaagcatgtggcatgttcatcgtataacacaatatgaatacagggcatgcattttgcagcagtgagtctcttcagaaaacccttttctacagttagggttgagttacttcctatcaagccagtacgtgctaacaggctcaatattcctgaatgaaatatcagactagtgacaagctcctggtcttgagatgtcttctcgttaaggagatgggccttttggaggtaaaggataaaatgaatgagttctgtcatgattcactattctagaacttgcatgacctttactgtgttagctctttgaatgttcttgaaattttagactttctttgtaaacaaatgatatgtccttatcattgtataaaagctgttatgtgcaacagtgtggagattccttgtctgatttaataaaatacttaaacactgnnnnnnnnnnnnnnnnnnnnnnnnnnnnnnnnnnnnnnnnnnnnnnnnnnnnnnnnnnnnnnnnnnnnnnnnnnnnnnnnnnnnnnnngaaacacgtggcgcccccccacgcccctccaagaaactttcccaaacccatgcgtttgggccccccaggcccccttaaggtaaccggaccggtggtccaaacccggtttccctaagaaaacccctgtcccttggccatagggcctgggattccccccccacaaacaaaaaacctcccgccgccgcgaaaccagagatgtgtatctgtaaacaaatgcccgcggagtgggggttttccgcaggcgcgcattcaccgtgggattcctctctccgagcggggcgccccccacgcggggaggcccgggggagaaataggagtgtgagaaacggcccgcggccgcgcggacactggtggtgtgggcggaacgtcactggggtatggaacatctcaattatataatggagtctcctccgcgcccaaataccgggggagatatgccctcctccccagaaatggtgggtgacttggtcgggtgttagaccgtcgtcgtgaactgtcgcgccccctggcgcctgtgggttaacactattttactccactcgtgtgtctctacgacgcctctctttcgccgcgagcaattcataacattatcgtttctggcccgccgcccatggcgcagagggcacaacaacaaaactagggtgagggtccccatatacccaaacaactgctccttcttgcgtgtaacaagaatggtgggcgcgaccacaaacctgttcctcataatnaatttatangtgaataatgtgtaggggcgtggaagaattcacccactcaccccgcgagngtgaggatattttttgnctgcgtcgtccctacntggcccgctacaacacacaatgtgatctttctctccgcgactactaacaccgccaccctctgtatgagaggtgtgtaatatgatgcgcgcgcacccactgtgtttctccgcggctagagtaatcgcgggcgctgaattgcagtccatgtgtggtggggactgtatgtgtgagtggggatgacaaaaacacttaattgtcgcgtgttatcactacgaggcgtccgagatgggtgagatcgttcaa

SEQ ID NO: 707 - DNA, 299 bp, Homo Sapiens
atcatgtggtgaatatgttttcattttcctcctaataatgtttctcttttgttaacttatttatttttcaaacactgagccatagtcttaaatttaaatgctaaaaacaattgtatcatgtagtcgggcagcctattgatactgtcaggggaaaaaaatgggtcagaactcagcatctgtcatgaaaaaaatcaattgaaaaacaagcagattttaaattttgaagtaatcaaaataatggaaagtgtctgttttgtggtgtatatactatgaataaaatcacagcattttctaagcaa

SEQ ID NO: 708 - DNA, 859 bp, Homo Sapiens
acccatatatagtctattaatggacacttctataaccatgaaacatcaattttcattccagcctttgaatcagaaactaaggtcagagtaaacagtaacatgagaactgaagaagtaataaagcaacttctccaaaatttaagattgaaaatagtccccaggatattgctcttcacattatttttgcaacaggagaacaaagacgactaaagaagacagacattccgctactgcagaggctcctacagggaccttctgaaaagaatgctcgcatttgcctcatggataaagatgcagaagaaattagcagtgatgtggctcagtacattaactttcacttttctctcttggaatccattcttcaaagattaaatgaagaagagaaaagagagattcaaagaatagtaacaaaattcaataaagaaaaggcgattatactgaaatgtcttcaaaataaactagtaataaaaacagagacaacagtttagcagtacaagcttctattgctaaaacatttcaaaaaactcagagatattactctttgatgaatgcataagttctgtacttgcatttatacgaacatatatgagacttgaatcgtagaaaattgaatgtcaaaaaaagctcatttctttttgaagtgatgaggttaactagggttcacagttggacaaaatgagtttgagtttagtttcagtaactgaaataagcttgaatactgcatatgccaaatagcttttatagtaaaccatgtaatgaactcaaatttaaatggtgtcttcagataagcagttttaacttcatttagcttggactctcaagagaactgaaacataatcaatggattcagaaatgactc

SEQ ID NO: 709 - DNA, 1151 bp, Homo Sapiens
  misc_feature (382)..(396): n is a, c, g, or t
  misc_feature (708)..(716): n is a, c, g, or t
aattcatggctttggcgcttcctggtgtgaaaactaaggaccaaatgaccttaatgaacatgatggcgtggtccaggtgcagactaatggtgaacgggattacaacatagcaaatactgtttgactttcagaagaagattggtttatttccctttaaaatgattaggtatatactgtaatttgattttttgctcccttcaaagatttctgtagaaataacttattttttagtattctacagtttaatcaaattactgaaacaggacttttgatctggtatttatctgccaagaatatacttcattcactaataatagactggtgctgtaactcaagcatcaattcagctcttcttttggaatgaaagtatagccaaaacatnnnnnnnnnnnnnnntcctcagtatagcttgcaattaagacctagatcacagtatttaagtgttttgcgttttatacatgaggtcagtgctacagccacctagcatgaactaacccagcttccacctccataaagttacctagagttgttgagttggaatatgttctggcatttacctgacctgccaatcattagggagaggcaacaaggtaattcagcctttcctcctatcagcacaaagaaactcaaagctgttttttcccctttctgttccaaagcagtcttatcctgacaggagcggtctatactagtgcagatttcaacacnnnnnnnnnaacgttttaattactatagtgttatgtaaagatttgatttgagcagctaatgtttctgaactttacttactaattttcaggggccttaaaggttctgtagtgttatcaaagcaaaaagaaaatgctgcataaaaataccaaacttcagcaactgttaatactcagatcatatacctcttaataaatagcatcttatgctaattagccctgctaaactatgtacagaggaaactgttcaagtattggatttgaaagtaagtgacttatgtttaacagaactaatgatgtattgaaacactgtattatgaaaagctaaattatacatcattgtaactatgtagaaagtgtagactaatgtataatcaaaatgctaaggatttttatatggccttgtatgaggggagtttgaatgttaataaacatgttttccacttt

SEQ ID NO: 710 - DNA, 320 bp, Homo Sapiens
gacaagcatccacacgatgggagtcactccacatgcagaagagcctgacacaggccagcctcaccctgctcctgccagcagagcagcctcgggcaagtcatttaatctcacccagcctcagcttcctcaatcaataagatggggtcagtgccacccactttacaagactatcataaaaatggaatggtggcagagcagcagcggtccaggtaactgttgcttttgatgattggttacacagagggagacaaacggaatgtgtctcctattaacagcaagccttgacccgtgacgcatccctacacggttctgtatctctc

SEQ ID NO: 711 - DNA, 628 bp, Homo Sapiens
tgccgcccttgttcggcaccgccccgtcgacagtaagtagtccagggcactctgccgcaacccccggcaggctccctccgcaccagcgtctccctccaggtagaagcgggaccagcggcgcctggaagtgggctcgaggcccagctcacccagcgacctgaggatgcgttgatcccgaaggttttttgctgcccactttcaggttactggaagcgcttctgctagttctggtgctcggcccaaccgtgcccgtgcctcggtccttccagccggatccccgtagaagcccaagcatgagctcgtaggcccggacaaatccgctcctggatctcctgggagcttttaaacacctcgacctccctgagcgtgaggggcttggcatgccagttcactcctggttctcgcagaggaaacagccactggatgtaggagtgattgtcctcaaaggaggtcatagttgtccgtccagttctgaagaaatgtcctcaatgaaacacgccgttgggcaggaagcggatctcatttctgtagaaactcaggtttggcgtgtccccattgcagtctcgttccaccagatccggatagtttgaccctcacgccaacgggatcctctagatctaccccagac

SEQ ID NO: 712 - DNA, 355 bp, Homo Sapiens
ccagaatgtgtagaagaccgtacagcgcatcgagatctctgcggctcctgaggaatccgtctgcctggaaattctggaactgtggctttggcagaccatctccagcatcctgcttcctaggccccagagcacaagttccagctggtcttttgggagtggcccctgcccccaaaggtggtctgcttttgctggggtaaaaaggatgaaagtctgagaatgcccaactcttcattttgagtctcaggccctaaaggttcctgaggatctagcttcatgcctcagtttccccattgacttgcacatctctgcagtatttataagaagaatattctatgaagtcgttgttacacattct

SEQ ID NO: 713 - DNA, 316 bp, Homo Sapiens
  misc_feature (109)..(132): n is a, c, g, or t
ggtgaggtggggggggtcaacctgagcccccaaattttaaggtgccaagggccccgggttcccccccgcccgacaaccctggggggcccctggggacccgaattttttnnnnnnnnnnnnnnnnnnnnnnnngataactagaacttctagaacatcttgtttacagttagccagaaactatacaagtggtttaacatgcattatcttactctatccatacaaaagtcttatggaggtgttagcactctttctactgatgaagaactgaggtacttcataaaaccactaccacagtgtctggtctgtggccgctata

SEQ ID NO: 714 - DNA, 396 bp, Homo Sapiens
gaccgtgaataggacagcaagagttgcagcggctgctccaactcactgctcaccctcttctgtgagcaggaaaagaaccctactgacatgcatggtttaacttcctcatcagaactctgcccttccttctgttcttttgtgctttcaaataactaacacgaacttccagaaaattaacatttgaacttagctgtaattctaaactgacctttccccgtactaacgtttggtttccccgtgtggcatgttttctgagcgttcctactttaaagcatggaacatgcaggtgatttgggaagtgtagaaagacctgagaaaacgagcctgtttcagaggaacatcgtcacaacgaatacttctggaagcttaacaaaactaaccttgcttgtcctgttc

SEQ ID NO: 715 - DNA, 492 bp, Homo Sapiens
gtggggatgaggtgggattgggcctcggagagctgaggaggcgaggcactgacacacaccgcccatggaaccagtcctgacacaggtcacactgcagagctcccgccccagccagcacctgcccacacacacagatagaagtcggagaagaggccatgagcgatgataccagtggactgggcttggccgaattggtgcgacgcagctgcaggataccctccttctccttctgttccccctccttgaaggccacaatcacagagcctgggtccctgagatcctgcgcagacagccccagcagctctgtgtcacactggtacaaccccagcgccttctccatccaccggctacgcttggtgctgtctgagccagcatctgcacacgggcaaagaacctcaagcagtgtgtagcaagaattcttcttgagaaaggtcttggaggccttctctctgccaggaatgtgctgtcaatacatgcagctctcgctgttaa

SEQ ID NO: 716 - DNA, 1075 bp, Homo Sapiens
ataggggaagatgacctgaaatatatggtggtaggagtgggaatgatgaggagtggtcaaattcaggtacacagtattttagatgtaaaactgacaggaacggcggtgagtggattagatgtgggaggtgagggaaagtgagacataccatgttttgggttcatcctactctgtcaaagccaagcttacagtaaatatgcttccctcattcaccaagacccccatggatctcaccatccgagctggggccatggcacgcttggagtgtgctgctgtggggcacccagccccccagatagcctggcagaaggatgggggcacagacttcccagctgcacaggagagacgcatgcatgtgatgcccgaggatgacgtgttctttatcgtggatgtgaagatagaggacattggggtatacagctgcacagctcagaacagtgcaggaagtatttcagcaaatgcaactctgactgtcctagaaacaccatcatttttgcggccactgttggaccgaactgtaaccaagggagaaacagccgtcctacagtgcattgctggaggaagccctccccctaaactgaactggaccaaagatgatagcccattggtggtaaccgagaggcacttttttgcagcaggcaatcagcttctgattattgtggactcagatgtcagtgatgctgggaaatacacatgtgagatgtctaacacccttggcactgagagaggaaacgtgcgcctcagtgtgatccccactccaacctgcgactcccctcagatgacagccccatcgttagacgatgacggatgggccactgtgggtgtcgtgatcatagccggggtttgctgtgtggtgggcacgacactcgtgtgggtggtcatcatataccacacaaggcggaggaatgaagatagcagccaataaccaacacagatgagaccaacttgccagcagatattcctagttatttgtcatctcagggaacgttagctgacaggcaggatgggtacgtgtcttcagaaagtggaagccaccaccagtttgtcacatcttccgctgctgaatgctgacagt

SEQ ID NO: 717 - DNA, 130 bp, Homo Sapiens
gaatgggagagtccaagagaatggccgagttcatgagctgcacacgatgtaagttgtactctctgaaattgttggtccacctttcatcttcatcaaatgagcatcccctccaatacctggcctggtgagc

SEQ ID NO: 718 - DNA, 870 bp, Homo Sapiens
atattcggaggcattctccaaaatgaggttaactgcctcatatgtgggacagaatctagaaagtttgatccattcctagacctttcattagatattccaagtcagttcagaagtaagcgctctaagaatcaagaaaagggaccagtttgttcgttacgagattgtcttcgcagttttaccgacttagaagaacttgatgaaacagagttatatatgtgccataaatgcaaaaagaaacaaaagtccacaaaaaagttttggattcaaaaactacccaaggtgctatgcttacatttgaaaagatttcattggacagcatatttaagaaataaagttgatacatacgtagaatttccactgagaggcctagacatgaaatgctacttactagagcctgagaacagtggcccggagagctgcctgtatgacctcgccgctgtggtggtgcaccatggttccggggttggttctggacattacacagcatacgcaactcacgaaggccgctggttccacttcaatgacagtactgtaacactgactgacgaggagactgtggtgaaggcgaaggcctacatccttttctacgtggaacaccaggccaaagctggatcggataaactttaatacctcctccaaatcatcattcaccaaccataccagagaaacatttccagttttccacaaatacttgatacaagatttaatttcattatgcacttttcaatttcctattttggatttagtatggtcaactggtagtgacttactggaacattgggcaccaactaattttggtgatgttctaccagaaaaactcagcagatgtttggatttgctgctttaagtggtaataaattcaattttatg

SEQ ID NO: 719 - DNA, 993 bp, Homo Sapiens
  misc_feature (585)..(599): n is a, c, g, or t
ccttcatggtaatggcttgagtaacatcatctttgggattttttaaatactggtccagtctaggagaacctggaagatgaccagaggtatttcagtttccctagggagagcttcgttatccatgtggatgataagtctgcttgatttattattaaatcattatagcagtgaagtggtgccattttctctctcttaagccccatttgaaaggctagagaaggggatatatatactatgttcaaggtttgtaaggttgttaatgtacataattgcagattgcaataaaaagcttagatacattttgtaaacccaacccactaaatggagcaggttacaagacaaatgtcaccagcctcaagtattttatgaactatttactgagggtagttatgttaaatagattataatgtggtaaattatttcctgaatcctttatcacaggaaaaacacagaccctcataaaagggataattaaaacggatgtgtctgaacatttagtgaagatgagacttaaaacatgaaagtgtatttgtgtattttgagggttttagaaaccggttgccttagaggttagacttttgaagnnnnnnnnnnnnnnngatacagatcttttcccctggccaaagggaagttgtattagtctgtgacatcttgtgatgctgtttatcttggtttgacattggagatacgctagtaactgtgataccatactataaaacagaagaattttctgctactaaaaactgcctttttacaaaatgactgtaaatatttgtaaaataaaataacactaaactttaagcccaaaaggagagatagagccatgtgttcagttgtggacctgtccgtggggcacagtgccaccccatcacagtgttgctgtcatcaggcaaaagtgaatgtttgtttatggcaaattcgtcttttgcgaatggcttaattctgacactacctttctgggaaatgttaataaatttttaatattcacttcaa

SEQ ID NO: 720 - DNA, 240 bp, Homo Sapiens
gggaggctgtggagagagcgcggagacaagcgcagagcgcagcgcacggccacagacagccctgggcatccaccgacggcgcagccggagccagcagagccggaaggcgcgccccgggcagagaaagccgagcagagctgggtggcgtctccgggccgccgctccgacgggccagcgccctccccatgtccctgctcccacgccgcgcccctccggtcagcatgaggctcctggcggccg

SEQ ID NO: 721 - DNA, 609 bp, Homo Sapiens
gcggccgccgctgccaacgagctcaacaacaacctcccgggcggcgcgccggccgcacctgccgtccccggtcccgggggcgtgaactgcgcggtcggctccgccatgctgacgcgggcggcccccggcccgcggcggtcggaggacgagcccccagccgcctctgcctcggctgcaccgccgccccagcgtgacgaggaggagccggacggcgtcccagagaagggcaagagctcgggccccagtgccaggaaaggcaaggggcagatcgagaagaggaagctgcgggagaagcggcgctccaccggcgtggtcaacatccctgccgcagagtgcttagatgagtacgaagatgatgaagcagggcagaaagagcggaaacgagaagatgcaattacacaacagaacactatacagaatgaagctgtaaacttactagatccaggcagttcctatctgctacaggagccacctagaacagtttcaggcagatataaaagcacaaccagtgtctctgaagaagatgtctcaagtagatattctcgaacagatagaagtgggttccctagatataacagggatgcaaatgtttcaggtactctggtttca

SEQ ID NO: 722 - DNA, 383 bp, Homo Sapiens
gcgccgcctccggcccaagcgggcctccaaaaagcgattcaaccagttggaacgagagctggccgagcagccctggcccacgctgccccccggccccctaaggtagtgcagggcccacgggcaccccagaccactggaactccctgcctttgagccaccaactggacccctctccagcaacaccaccgccaccacctcccacatccctgaggttggcgactgtctacactcctcccccgagaccacccccaccctggggaagcgttgactactgtcccctaccttggaccatcccgcgtaggggtggcagcccccagctcccctcagtgctgctgtcagtgtagcaaataaagtcatgatattttcctggcaaaaaaaagaaa

SEQ ID NO: 723 - DNA, 469 bp, Homo Sapiens
tgttcttttcttgaaaagtcatactaaaggttaatttcaagtaaaatgaatttccttccaagtagcctattagtaaaacacaacttagtgtttcatccattggggtgagcatatactgccctttgcagccctgcctgtgttctgattggctccattcatgagcaaaggtgattgtgagctgtatattacacaggtgtcgcccaggtttcgtaacctccactttaatgcagtaagccgcaagaatgacttctgcaagtgaaatgaggaagcttcactagcttgctccattggaaggtaaactgaaattttatacgttgaagcttaaaatctaaatttatgtatgtttggaaatggaatggacattaacataaaatgtattttatcaaaaaagtgtttagactttgaccaaatacatgttggtattatcatgttaatgttctctgtttataaaaattgagtgcacatagat

SEQ ID NO: 724 - DNA, 350 bp, Homo Sapiens
gcggccgcagcgctggtcgcctgcgcccgcggggacccggccagcaagagccggagctgcggcgaggtccgccagatctaccgagccaagggcttcagcctgagcgacctgccccaggcggagatctcggctgagcacctgcggatctgtccccagggctacacctgctgcaccaggcctgtcagagcaggaagggcagaagacctcggctgccagctgcccccagcccccgaccttcctcctgcccctcctcctcttcctggcccttacagtagccaggccccggtggcggtaactgccccaaggccccagggacagaggccaaggactgactttgccaaaaatacaac

SEQ ID NO: 725 - DNA, 320 bp, Homo Sapiens
aatttgaaactttttgagcaccagtatgatgccccaagtggaaaatcccacacccgacctcatgtgatgagtccaaactgttgtatgcacaaaattatttaaaatattgcataaaatgaccttcaggctatgaatagaaggcgtctatgaaacataagtgaatttcgtgtttaaacttgggtcccatcccccacatatctcattttatatatgtgcaagtattctcaaatccaaacatataccgagtctgaaacacttctggtcccaagcgtttttgaataagggatactcaacctgtagtcttttcttttaggaggggg

SEQ ID NO: 726 - DNA, 635 bp, Homo Sapiens
  misc_feature (106)..(106): n is a, c, g, or t
gaagtactcacccgcctgcgcaaggcccgcgccccagcctcagtcctgcccgccgccacccacgccagaagcttgggccaccccccgccagaacccggcccggacngtgtcgccgacgccaaaggggacagcgagtcggaggaggacgaggacttggaagttccagttcctagcagatttaatagacgagtatcagtctgtgctgagacctataaccctgatgaggaagaggaagatacagatccaagggtgattcatcctaaaactgatgaacagagatgcagacttcaggaagcttgcaaagatattctccttttcaaaaatcttgatcaggaacagctttctcaagttctcgatgccatgtttgaaaggatagtcaaagctgatgagcatgtcattgaccaaggagatgatggagacaacttttatgtcatagaacggggaacttatgacattttagtaacaaaagataatcaaacccgctctgttggtcaatatgacaaccgtggcagttttggagaactagctctgatgtacaacaccccgagagctgataccattgttgctacctcagaaggctccctttggggactggaccgggtgacttttagaagaatcatagtgaaaaagaatgc

SEQ ID NO: 727 - DNA, 487 bp, Homo Sapiens
ttttaccagtttgaccatggacccttccttttattaaaaaccttaggggaccatttgttataaaaaaacttcctgtatataaaagacaaaagccagagccaacagcggttcagtgaaaaacaccatgattattcttacattctagtattattattaggaatattattggttttggttttcccggttatcagctctcagggagaccccatgcctgctcacatgaagtcagagtttacgggagagaaaatatttccatccccctacccctgcgctgcatgcccttgtccagctggccctggggacgacacatcagccttttgtgggaggtctcctgccttgttaaggtgactgagcccctcacccttgcagcccccacctcgttactgcacattgtcgagacactgaccacttggttatttgactgtgaggtatgccactagctttaaaacgggaaatgggaaaaataggaagaaactgcgtatgagcc

SEQ ID NO: 728 - DNA, 358 bp, Homo Sapiens
  misc_feature (269)..(317): n is a, c, g, or t
ccgcaagccccgcgtacggggcggggcgcccgaccccagcccgggggccaccgcgacccccggcgcccccgcccagcccagctcccccgacgcccggcgcaacggccaggagaagcactttaaggacgaggacgaggacgaggacgtggccagccccgacggcttgggccggttgaatgtagcgggcgccggtggaggaggtgacagcggaggtggccccggggccgccaccgacggtaacttcacagccggactcgcctaaaaaccannnnnnnnnnnnnnnnnnnnnnnnnnnnnnnnnnnnnnnnnnnnnnnnntccacaaattccaatgtcacaaaagcaataaaacaaactag

SEQ ID NO: 729 - DNA, 1076 bp, Homo Sapiens
  misc_feature (883)..(892): n is a, c, g, or t
  misc_feature (1008)..(1008): n is a, c, g, or t
ggagcagctcaaaaagaaatgtttcactctgctctgctactatgatcccaattcagatgctgacagtgaaaccgtgaaggcagcaaaggtgtggaaactcgcagaggtcctggtgggtgagcagcagcagtgccaggatgccaagagccagcagaaggagcagatgttgctgctggagaagaagagtgctgcttactcccaggtgcttctccgctgcctcactttgctgcagaggcttcttcaagaacaccggctgaagactcaatccgagctagaccgcatcaatgcccagtacctggaagtcaagtgcggtgctatgatccttaagctgaggatggaggagctaaagattttgtccgacacttacactgttgagaaagtggaagttcatcgtctgattagggaccgtttggagggagccattcacctacaggagcaggacatggagaactcaagacaggtcctgaactcctatgaggtccttggggaggagtttgacaggctggtgaaagagtacaccgtactcaagcaggcaacagagaacaagcggtgggccctccaggagttcagcaaggtctaccgttgagctctggcagggccaggagacatggcttctgcatagctgctgcctcctaatcttcctgctagtgggaccaccttcacctggggctgccttcagtacaagggagtgtggaaatgcttacgcttgaaacactgcagtcatttaggcactctcctggtttctctttattttttatgactgggcctcttctggaaaatctagcaaggagatttatataatttttatgcatagctgtgtgtcagtgtcagccctgtattgtatttgattatctcctgaataaagttatgatattatatcccnnnnnnnnnncgcaacgaaagggggagaacattggtcggccggcctcggcccctcgaaaaactttctagaaccatttcgtttggggccgcgggcccccgtagggaaaggggaaccatgggccatancgtggtgttcctaagggaagatcccggggtccatggacctaagtgcgttggggagttcctcccccaat

SEQ ID NO: 730 - DNA, 497 bp, Homo Sapiens
tgcacacgccgagtgcccagactgcacacattatctaccacagcctggatcatctgttgcagatcatccactccattcccagatgctgcagggataggaacagccccatccaggtgggcgtcctcttcagcctgtttcctcaaaagactgacatcctgctggcactcctcttcttcccaatgtgtctgcagatactctttaacattttcttcgatgtaaggaaataaaatgtccttcacgaaagcaatcggggttgtggtaccttccgatatctaacaggatcacggtgacttcggcggggaccgaaagcacgaccattgccctaccggatgctacgggactcggcctgctgttggggagggcggagggcggcgccggctgcggctgcggcccccggtaccgtcttgggcttccggcggccccgcgcgatctcggagccagcgaccaatgtgcagcccgccgcgcgtggggagaggacacttctgcacactctggaa

SEQ ID NO: 731 - DNA, 882 bp, Homo Sapiens
gggagttttgtcttcattttgtgatggatggctctttcctttgcagccaaacagggaaaaagttaatggcgaagtgtcgaatgcttatccaggagaatcaagagcttggaaggcagctgtcccagggacgtattgcacaacttgaagcagagttggctttacagaagaaatacagtgaggagcttaaaagcagtcaggatgaactgaatgacttcatcatccagcttgatgaagaagtagagggtatgcagagtaccattctagttctgcagcagcagctgaaggagacacgccagcagttggctcagtaccagcagcagcagtctcaggcctctgccccaagtaccagcaggactacagcttctgaacctgtagaacagtcagaggccacaagtaaagactgcagtcgtctgacaaacggaccaagtaatggtagctcctcccgccagaggacgtctgggtctggatttcacagggagggcaacacaaccgaagatgactttccttcttctccagggaatggtaataagtcctccaacagctcagaggagagaactggcagaggaggtagtggttacgtaaatcaactcagtgcggggtatgaaagtgtagactctcccacgggcagtggaaaactctctcacacaacaaatcaaatgacacagactccagtcatgaccctcaagaggagaaagcagtgagtgggaaaggtaatcgaactgtgggttcccgccacgttcagaatggcttggactcaagtgtaaatgtacagggttcagttttgtaatattttttcagcaaatttttatacagtgtcatttaatttgggagaggatactgtccagaaaattaatgcatactttggtcacaattggccttttg

SEQ ID NO: 732 - DNA, 515 bp, Homo Sapiens
taatttataaataagtttaattgattcataattctacatggctcaggaggcctcaggacttacaatcatggcagaaggcaaaggagaagcaagcaccttcttcacaggtgtcaggagacggcacgtgcacaggggaaactgccacttttaagatcatcagatcttgtgagaactccctcactatcatgagaacaggatgggagaactgcccccatgatccaatcacctcccaccaggtccctccctcaacacgtgggaagtataattcaagatgagatttgggtgggacacagagccaaaccttaccacataccaaacatgctccggccttgggatctctgaactggctgtccgttttcccaaatcacattctctttaataaatatctacgtatctagttcccacatctccttcagatctttaatcaaatagtactttttctgtgaaattttccctgaccagcaacttacttggcaattcctaattcttctgcaacactgtttctatccatagta

SEQ ID NO: 733 - DNA, 526 bp, Homo Sapiens
tcacctatttgaaatcatggctatattgtttttattttctagattccaaaaatacaaacactagttgttccagcattgtactttgataagtctgtacattgacgtgtatggactaaatccagggtaaaatcaatgttacaaaatttaagggtatgttaactaaaggatagcatttcgaagatattttgaatattagggtcatttggcacttctcagcaagtaggatacttctcatgttttgaaattatatgaatatggaaaaaaatggcttaagaccagcgtctctgtatgacattgtgtggttgaccctctgagataactgttttcatctacagaattgcatttttgcttttaaagaggtcttataatggaactaggaatcaccgttttgagagaacctgcatatataccagtcattatctgtttggtccttatacagttttaacttacttagatttattctagttaagccataagttcaacgtgtaaacttgttttcattaaagaatttttcaatcaaaaaaaa

SEQ ID NO: 734 - DNA, 1170 bp, Homo Sapiens
ggcctgggtttaatcggcacgaggctcacacgtgaatcctgtgacactagagacagtcctgaggtgcctgcaggcccggtacatggcagacacattctacaggcaagtgctggcggcaccctggtagccttgaaccccttcaagcctgttcctcagctctactcgcccgagctaatgagagagtaccatgctgcgcctcagccccagaaactgaagccccatgtgttcactgtgggtgaacagacctacaggaatgtcaagagcctgattgaaccagtcaaccagtctattgttgtcagtggagagagtggtgctggaaagacatggacgtctcgctgcctgatgaagttctatgctgtggtggccacctcacctgcatcttgggagagccacaagattgcagagaggatagaacagaggatcctgaactccaaccctgtcatggaagcttttgggaatgcgtgtacactgaggaataacaacagcagtcgctttgggaagttcatccagctccagctgaacagggctcagcaaatgactggagccgcagtccagacctacctcctagagaaaactcgagtggcctgccaggcttccagttgagaggaacttccacatcttctatcagatttgcaaaggcagccagtgaggacgagaggctccagtggcaccttcctgagggagctgccttctcctggctgcccaacccagagaggagcttagaagaggattgttttgaggtgaccagagaggccatgctccatttgggcattgacacccctacccagaacaacatctttaaggtcagaagaaaagccacgccacttaagtttggcagagatgacgggcagccctttgcatagagcttttccctggacttggagttggtctttccctgaggatctaggactttgggcccttctgtgctacctccaaggaatcagtcacctctgttctgctgagtctggagaccaggtggtggggtggacggggcataaggaagagtgatgcatacacagtgctagagtacagaatgcagtaagtgatccatgggggcagagagcaaggtaccgcatgatcagaagagagaactagtgctaccgccttgcttgtctagtacattaaaacttacaagtcatgttcacacttctctgctcacttagttttcta

SEQ ID NO: 735 - DNA, 1132 bp, Homo Sapiens
  misc_feature (824)..(824): n is a, c, g, or t
  misc_feature (1073)..(1073): n is a, c, g, or t
tgactatatagtgtctaatgatcttgggcagatactgtcaaacttacaatatctatatagatgtaggtctttttaaatttacctagtcattcttctatcatgtatattgatgctgaaagaggaactggtcagctcctctggacaacaaattcttagtctataatattaggagacatcttctgttttgcaaatgtctgtgaatctgagcaacctggcattctgcttactggccagaaagctggcgggtgacattggtaacatttcctctttgagactctgagttcacctagagaagtctaagcataacagctttctttcccagcacgagcctttatagctctctttagctcaaccactctgtccatccagccaatggatgtcccttcccctgtaccccaatttcaagcttattttaggaagccttgaactaccatgtatcctggctcctagctgagtttattagaggtatggagcagtgcaacttaaactcaagttgcacttacattttgaattttaaaatgatggttttatctgttgtgtgaagtggttcacccttgaggaccaggagcctccatatcctgactgaaaaccttttctgagacttagagtaacagtacttttggttccttgagttctcctgtctccagataccaaatgaccttgacttttctgccttgtgaattcgtagtccaatcagctgaaattaaatcacttgggagggacgcatagaaggagctctaggaacacagtgccagtgcagaagtttctccaggtggcctccctttccaacaatgtacataataaagtgtatgcactttcacccngggaaaccaatcacaccgagattgtataaatgtggggccgcctgcggccttcgagaagcttcctagaccctttgttttggccgcggtgggcccagtaaggtaaatggaacatggtttataaccttgtttcccaaagagaaatcctgggcacaggattaaggggtttggaattcccccccaaataaaaaaagcgccccgggcggttcatcccgagccgttcttgtaaaaacaattcccgagatgggcggntttcttggaggtgcactctcaccggggcattctctttcacccgcgagaatttccccgga

SEQ ID NO: 736 - DNA, 827 bp, Homo Sapiens
  misc_feature (399)..(471): n is a, c, g, or t
ttcctgggatgtctctgcccttggacaaagaggaaaaaacatctggccagatcgacaaagctgtctaactaatacactatctacaaatcttgaaaaatggtggacttagagagaaagggaattttagcaaacaagcgggcggaggagcactaggaggcactttcttatatcttatctgctataggaactgcaggagttatactcacagaaggagagtttccggcataaatttaataggaacggtggatgatttgagaaagtgattttatgcctggttgcaaacagcaagcaataattgatacccggccctggttctactcttacccattattgaaatgtggaaagacttacctagaaatctaaggtattatttcagctgcagttttgcatgtctgcaannnnnnnnnnnnnnnnnnnnnnnnnnnnnnnnnnnnnnnnnnnnnnnnnnnnnnnnnnnnnnnnnnnnnnnnncttttgccagtgcccaacaaaaatcacataatctaagagaaaacaatgtagtccaaacagttccacccaacactccctgagcagctcctaaaatattttgagagcttcattaaggcacctgcatccaaaagatcaaaataatacagctgggataattctgcctttgctttccatatggatgctccaattcatcagtatggggacactcatgaatcacagagctatgttcctgataattctgggtctgcaagaggatctgggagtaaataacaatcaattttcttaaagatatgctagaaagtagttagtacttccaatttctcatccaaatcccaaaaagggccagccctgagacc

SEQ ID NO: 737 - DNA, 1162 bp, Homo Sapiens
gggtttagggttttctgtgtatggggaaatgatgagaccccatactttcaacattattactttgggggaataaataccagctccctgccataaacgcatgacatgtgtgtagtctatgcaaacgtgtaaacatatgaagctattctctactctatgcccatttcctccactggcaaatatggagcagtgatttcacagtaggctctagcaggtagtgaaataaaaatttgagactctgtggggtcacaaaaaaatgaaactctttctatagtctgcaaatctgtaattacccatccccctgctccaactcctaagaggctaaatgttattaccataatgttagagatgagtattttccttcttacactgcatcacatatattactctgtaggactgtttcataaaattggcttgacctttgtacaattagtacaatttagtgtcttttagagtacaatttagtgtcttttaaaagcttcctaaatatttaaaacattttcaagggaagcttacaaggactatgtcccatctgtattctacattataatgttatctttaattttttaagacttaaaacaagaccaaggtaaacaaaaaatctgtattttcctcaagtctcttggccacttactaacaatacttttacagaaaacacggtgcagctggtggtctactttatcaagtttcattttagaaaacatcatagaaattaaggttagcaacccaactccaggataccaagtgaaaacagcaagtctgctgttaggccagaactgtgggctacttgctgaactattttatggtttacaatcaaaatggtcttatttgactcaccacatgacaaaagtcttaaacttagtaagggggaaagttcttaatatccagttttggattcaagagattataatagttaatttccccttcaaatcaatggaaagaatgctagttgagaatattctaaaaatctagcctttaaaatgttttctgcattccagaaatgaacctgtccactcaggttttctttgggttcttttccaggtcccaaacagaacaacttaactgagttaaagaggcataacagggaaggggtaggaagtaagacaaataaagattgcccccctgtggcagcattaatccctgggtattgtggcaatattgaaaa

SEQ ID NO: 738 - DNA, 646 bp, Homo Sapiens
tggtcgtcgtgtaatcccaacacgaaaagcacacagcaaagacaaagaggtccgcatgtattacactgcggcaagacttcagccgccatcttttcctgtgtgaccgcacatgtccaccaccatgctaaccacgttaacaaagcctcgcccatcatgatgtggccttcccgccacttgaacactgcgacagaactggatccgccatttgggacaacctaacaaagcacagcccgccatgctgagcaatgccgcaatgtcaaaatcgccattttaagccctgcaccttagtctttcctaaccttccatttttaactagtcccttgtactgataaaagatgattcttactgcctcccgatacaacaatcacgcaaagctcctaacaagccccaaatcaattcattcagataggtttagctcatgcaatgcacatgacttcctctgcctgacctgctatcatccatcttgcctccctagtttaacttagcacaaacgactagccctaagccgagttatgcggcaagtctaaatatggcggccactgttgtcctccacaatctgaacacgcccttagcttaactgcagagtcattctctgccaaagcggtaggtacactctacactaccaccaaatgatctagcagacata

SEQ ID NO: 739 - DNA, 239 bp, Homo Sapiens
ggtaaccacagatgtgagcggcaagctcaagacagtcaaaatccgaaatgcagacgtggcatgttgtagtccatgagcagtagctgtggacagaggaagagaggagctgggggccggacgtggtgaagcatctgctgggagacgggaaggaaggcaatgctttgtggaagtttggccatcgagagagtgttgcagcctggagggcctcaggtggagagaggaagcgcactctacccagc

SEQ ID NO: 740 - DNA, 1395 bp, Homo Sapiens
  misc_feature (456)..(490): n is a, c, g, or t
  misc_feature (1139)..(1190): n is a, c, g, or t
tttcatcctttcctcatgaatctttctttgttcttcaacaattctcaactgttcttcggccagtttggcttgtgcttctgcaatttttcggttattctcttccagtattcgctctagctcctcacgttttgcacgttcttcctcctaaaggggaggatatgttaagatattagaaaaacaaaatgtttatttttactgataaatatttactaatcttccctctgaacttttttgatatgacttacagggtagctttatagctaccttctgtctgacaaatgataaactgtgcagtcactaaaattgggtttctagcactaaatttaaatcatccctcccagtccaaacagcaaccaactaaacccaccctaatgatagtttcctggcaattattactaatactttaatatcacacaaatcaacaaggacaactacaaagctggatagtatttaccnnnnnnnnnnnnnnnnnnnnnnnnnnnnnnnnnnntgaatatttgtctcaccaattatgtatacctacgtattctttacctatactcctttaatcagcattaaaagttgaatatttactgtcttgtccagtgtcctgcagagtgtgctcctcggctgccatacgcgccagcttcctctttaaaatgatttgtactgttagcttggcaatacctgcatcagcagctcaaccatttataaagaaacaacatacaaggaaggctgagctgaggaatgcagatgtttatggtaagaaggaacaaaaaatgtaattcatcattcctaaggcaaacaattaataagaaaaatgcatttactgttagctgaaaaatacaaatggtaatccatacttcatggaactacgggcttcttccatgggggaaaatggacttaacattcagatgttgacaatttcggaaggcagcttatattgtcatctacaatctgaactgaaactcagaaatccaggggatgcatggtcaggaaataaaattcttcaacttattttttcttggagaatttaatgagattttataatgcaaactgtatgaagactgcttgatggcttgagcagtgttcagatcacagcatacatattcaaatgattttaatatttggaaagactgtcagagggttgtgtccgtgtnnnnnnnnnnnnnnnnnnnnnnnnnnnnnnnnnnnnnnnnnnnnnnnnnnnncttactatgattaataactcgctacaagacagcaccattactccaaaaatatcttcattattaaaagcactgatataaataaaaatttcatacattcaattttatagtctgtgaaacccactataaatataagcatgtatatctagttaaagacaggacaagggaaaatgcattttaaaagctaagcttaccagaaagcaaagag

SEQ ID NO: 741 - DNA, 703 bp, Homo Sapiens
ggattccgccggtgaaggctgaaggcagctaccttaaagatgccgggatccgcagcgaagggctcggagttgtcagagaggatcgagagcttcgtggagaccctgaagcggggtggtgggccgcgcagctccgaggaaatggctcgggagaccctagggttgctgcgccagatcatcacggaccaccgctggagcaacgcgggggagctgatggagctgatccgcagagagggcaggaggatgacggccgctcagccctccgagaccaccgtgggcaacatggtgcggagagtgctcaagattatccgggaggagtatggcagactccatggacgcagcgacgagagtgatcagcaggagtccctgcacaaactgttgacatccggaggcctaaacgaggatttcagcttccattatgcccaactccagtccaacatcattgaggcgattaatgagctgctagtggagctggaagggacaatggagaacattgcagcccaggctctggagcacattcactccaatgaggtgatcatgaccattggcttctcccgaacagtagaggccttcctcaaagaggctgcccgaaagaggaaattccatgtcattgtagcagagtgtgctcctttctgccagggtcatgaaatggctgtgaatttgtccaaagcaggtattgagacagctccgacttccagaatatggg

SEQ ID NO: 742 - DNA, 504 bp, Homo Sapiens
tgttctggtgccatcctttgttcctccacccctgaccaaggtgcccagcagcctgtcttcaccagtcaaggaatccgccatcttggctgtagacatacataagtctggagaaatctctccctttttccttgatttctttttaaaggtaccttatctctccccactcctttcttccctcctcaatctagttaaatttcctaagctttcacaaaaatccgggaagagataattaagagcttagcatccctcttagagtagaaggcagtacagataacaaagaagttgtgagtatattatctacattttagaaaaatttctgactctagatccatagattctgttgtatttatttgccggacactcatttgattgatttgcaccttgaacactatactaagtcttttcagttacgttgcttgggttaagacactttgctaaaattacagcctgaatcctttctttaattgaaagaaagggtatgtgtgtgcaagtgggtgtgtgtgg

SEQ ID NO: 743 - DNA, 1224 bp, Homo Sapiens
ctcgggcgagttgttcctgccgcccacaggcgtacatcagccacagcccacccacagcaagccagggcccaggccccgctcacgcaggcaccgtgcaaggtccagccaaccggagccaggtgccgtcactggggttgtaagcctccaggtagctgagcgactgtcggaagtagccgcccgcggtgtagatcaggcggcccaccttgggcgcccggcagggcatcacctgcgtgggcttgtgcagggtgagctcctcgaagatcttgaccaggtagtccttgcagcgggagtcggactgcaggatctcgcacttctgcagctgcatctgcaagaagttcggcgtcaacgagtggcagcgcacggcccgcagcagcgcctggacgtagaaccgtcgctgttcgcagtcgtacttgacccagttgatgcaggcgtggaagacctcggactcgcagcgcacgttcaggtcgtcccggctgatgagggtcaccagttggcagtgggacaggttgaagaactcctcttgcttggccacctccccaaaatgcatgtagatgtactcccgggcacgctggtgcaactccacacagccaatctgctcagcgaagttggcgatgccgatggcattgctggggtccagctgctgcaccaggaagtcactgcaggcacggacaacgctgtcgatctggtacatgacagcaccgttcatgacgtggaggacacacttctcgcccatggagatggagccagtgtaggcgaattcaatgaggcgctccatgaccttggggtggataccctcaatggacaccacctccatgccctgctcccgcagcccgttggtgaacatggccttgaagacagggctggatgaggccagcaccaccttgtgggccatgaactgggcggccggtgcatcctggtacttgacctgcagtgtgacgtcacacagctgctggctgagccgcagctcgttcatgatgccaaaggcctgcttggtatgatcctccagggtgtagctgaaggtgcggttgccatgctgggagggcgtcacctccgccttgcactcagtggaggcgtacatcaccgcgtcccctgccccctcagggcactgtgactgcaggggcaggaatcggcagcaggccccagccccgctaggcctgggatctggctgcatggggttccagaagataagcaacaccaccacctctggcactcagggaccccgcc

SEQ ID NO: 744 - DNA, 973 bp, Homo Sapiens
acagttataggctcatcagcggagatgttgaagttacctgaagcagagacgcaagaagagtctttgctaatatccaagaaggtctttcccatcagggcaggtaagacctgggctgcagcgtttggattgctgaatgctccttgagaaatttccgtgagcactgtattcagagtttgttggcaattccagtcattttcattataatagtctgatgatacaaagagggcctgcatggcttctcctgtgctaaatgtgtttccaatgagaccattttcttttttctcagacagaatcttttctaccagtgactttgtataaatactgatgttctttaaactgccttcatctgctttgatctgcccatttattagactcttcttcacacaggtcagagccaggacagccattgcaccagtatctactgagaactggctaccaaaataatagtttttattttcaggagtgaagtggttgacaacttcggcggttgagtagttcccattgaacagacacaaggccaaaacgtccaggctgagctggtagtagttagtcaggggagtgccattgtgtgcttccatattttcaatttctgcttggaatttattttctagcttgtcgatcaggtggtaatcatatattaagttttcctcagcgttacgacatactcccaaagccagtataatcaaggcaagctctcccgagcttacatctgacaatctgcttttcacattgtatttgatttgttggatcatcttttgcatcagggtttggatctggattccaacaagtcttgagggacaacacaacattgacagcgctggttcccctgttatagtttgactggatcattgtattcaacagaggttttaggcggatgtagttttcttcacttacctcacaaatctcgcatagttggcttggaataaaagaaaacagtaagagccccactaggggcagctggtgtgactgtctc

SEQ ID NO: 745 - DNA, 1437 bp, Homo Sapiens
gtgccgccggagggatggtgagcccttgcagaggaagataggatgccgcgggttccgagaaaaggggggattccccctggcagggccaagataaaaaggaatgagttccctaaagctccagcaagttcaacaggcacgggtaatgcccagcaggtccccatcagaaaccaagaacctccgggcgccaagtagggtgggggttccacataaggttcttcatgagagaggtctctcccaaaatcctggagtgcccaaaatccagtaatctttataaggacagtcctcttcttgagatgacagtaaaacattctctggctttaagtcacggtgtataataccgttttcatgaaggtactgcacagccaagagcatctggtaaaaatagagcttgcaggtagcttctttcaggcgtttattccccaccactttgtcaaacagctctcccccttccatcaattccaaaacaatataataatcttctgcatcaaaaaagtttttaatcttgatgatgcaaggatgatttagctttttcaaaatttctatttctgtttcaacattgagagctgggtctgcctctcttgctgaaccaatagcaaacttccttttgctgatgatctttatggctactttcttacatgttttcctctcgaaagccagctttacctctccacaggcaccacttccaagagtttttgacatgatgtattcatctcttaatgccttaggataaactgactgatcatctacagtcagatcaaaaaagacaaaaactttatttctgcttagtgacagtgcaatttcagaattgttattcaaaggacggcgttttcctttccctacaagctctgtatttacaaaggttccattgccactgtgatcttctatgtatgcaatgtaagagtttttaggacccacttccctgaaaatccgaaagtgtttcttgctgtatgttcggtatttatctgttcttttcagcagtggttcatcaaagcaatattcacagcttttgtccctcccaaaccagtagttgtcattcacacattcaagattggcaaatccatcctgaagggcccatatatcgagcccagggggcaggggtaggctcctcaggttcttggtcctcaggttcttggtcctgcatggaatagaatagagttcctgagtggacactgtctctaacggagctcagtgtcccagagctggtagtgagaggactggctggagtttggcatcgtgctggtagaggagtctggatatgccctgggactgtgaggaggagtccttgggactgggtaacgtctgtccatggggtctgtgaacaggcactgctgtccatgagactgtctgagcctcaacatccgactccacgagacatcacgaccgcatcgacgcgtgggtctgactgatatgcccgggtaatccggagccggtacctaa

SEQ ID NO: 746 - DNA, 1392 bp, Homo Sapiens
atatccgacacgtacttttgatccatcattaatgagaactatgactatccgaaggggttcttggtagacctggcacctccagagcgcagcagcctaattcaggattgggaaacatctgggcttgtttacctggactatattagagtcattgaaatgctccgccatatacagcaggtggattgctcaggtaatgacctggagcagttacacatcaaagtgacttcactgtgcagtcggatagagcagattcagtgttacagtgctaaagatcgcctggctcagtcagacatggccaaacgtgtagccaacctgctgcgcgtggtgctgagtctgcatcatcctcctgatagaacctccgactcaacaccagaccctcagcgagtccctttgcgcctcttggctccccacattggccggcttcccatgcctgaggactatgccatggacgaactgcgcagccttacccagtcctatctgcgagaactggctgttgggagcctgtgagccccaggcactttgcatcacagtcacatgcccattcacaccacacagaggttccctgccttgtttggattggcactgtttgccattctctgggttggctgtggcatctaccctccctccctgctgccagaagcagcatcctccacttgttcagggcttttcttaatactgaacgtagcataagggcttctggaacccagaagaggagacagtttaccatcctcaagatcattcagtgtttttcctttaaaaaaatggtcaataaagctcctttggcagaatcccccaaagaaccagggtattctttttccatccctagccattctggatcttgtgaccctccatgccaaccagcttccctactcctaccctggcccttttatactaggactccttaggaggagtgagacaggtgataatggatccttaacagatgaacgatccacagaaggaagagggatccgtctctaaagtaattggttagttaacactgaattttggaggcaaaggagggttggcctgagttaagaaacaaaatgggatctttatgacacacatagggccaaaagtgaatgcctgtcacggaaggggattgatcttccaggggctgtttttttgttccctgcccctttaagagttcccatggaacccccataaccttttggctacctacttattgtgccagggaaaccccttggggtcaacaatggtggaccagtggtcctggtgggggaaaagcctcccccacaaaaattatggggactttggggtgcgccttgtggggaagttcccaaagtcagttagggctgaaaaaaacacccagccccccccaggagaatatatagacaactcccgcacagaaggttcaatcaaaaaaacctaagaact

SEQ ID NO: 747 - DNA, 802 bp, Homo Sapiens
  misc_feature (342)..(358): n is a, c, g, or t
ggcaggaagctgtgaaattagaagtaattttaaagcatactttacacctctatataatcaaagtaagggcaagataaaacttgttagtaaaacatgttttattattttttagataggtagcctgcaacataaaatatattttgaaagctgttaaggggtgtataatctgttaaaaaataccatgattagtatttcacatttagtgactcagatccctttgtgtaagtcctttgcgttgtgcaaagaagtttttctatgagatgagaattatgaacacttcatataggtaaattccataggttgagctggggcagaaattaatggctcctggagattgcatcnnnnnnnnnnnnnnnnngagcttagaattcccatttggacagaatttagcttttgtgctgttgattaattctgtactaaactggtagccaattgttcacttctaaatggaagggaaaaagttacccacacaagttagaaaatgatttaccgaattatttttttgagttagtatgtatatactgttttaaatcagtaatgtttgttccttttgctgcccatttggggagtatgtgggcaattcctagtgctcttgtatgacattactccttcttgaaacttgtatatgcaagaaaagtatatataaaaagatgcctggggggtaacctttgtatctgagattctgaattcattatgggaccttttagaaatcctatttagaataattggggtccatactagggggctccaattacctctgaaccttgggggggcttaatccccttaaataaattgcttttag

SEQ ID NO: 748 - DNA, 943 bp, Homo Sapiens
  misc_feature (711)..(876): n is a, c, g, or t
  misc_feature (883)..(900): n is a, c, g, or t
gcatcactctgttctagcattctttgtggagatggtctggtgcctagctgggagtgagcagcagcccatcccctgttcactttctctagcccatcattacctgtgaactgcagtggggcagtcatggcaaatagaattgggctggggtttctccttcttttcagttcattgtttgccctgctaggaattagaagacagacaccatgtcccaggacagtgttacttcttctgcatgatgtgtggtagactccctttgctggcttgtgcagtgatactgagaaaatacatgaacagaaactgcccaggtggaacagcacgtaacctagtgagtgactgtactcctttctaggaatgctgattcagagtgcacctctttgactaggtcccaggatccccttgtccctggagtagggactaactatagcacaaagtaatatgtgccaatgctatttgtgaaatgtttggtctttctaaacgactaaaggatttgttgggtttttgcttaagttttgaaccaaatcctagagccagctgataatatttaataatctggaggagagaataatgatgtaccaataagtggagattcctccttatgatgtatgctaggttatggaagatgtaaaatattcaactttttcctcctttttttggactttgtattttactgcatgttttcttcatttttaatcaataaagagtaaattgtcnnnnnnnnnnnnnnnnnnnnnnnnnnnnnnnnnnnnnnnnnnnnnnnnnnnnnnnnnnnnnnnnnnnnnnnnnnnnnnnnnnnnnnnnnnnnnnnnnnnnnnnnnnnnnnnnnnnnnnnnnnnnnnnnnnnnnnnnnnnnnnnnnnnnnnnnnnnnnnnnnnnnnntttgtgnnnnnnnnnnnnnnnnnnaaaaaattttttaaaaccttttttgggggggggggcccccccg

SEQ ID NO: 749 - DNA, 743 bp, Homo Sapiens
ggctttgggggaaatgtaagattctgagctctctctctgttttgttctagccatgaatttgcctgagaaacttgtaacctatgtgcctcaatatattccatagaaagtaggtccccctgccttctcccactcctcacactcttctacagggataggcttttgcaaatatatcagataaattttttgtttcttgtttatttttaggttattttcttggaaggttgggaaaagatgtttgttttaacaggtcatgtactacgttgttgttttcatttctgttataagtaaaactaaaagcacagaatggtgggaaaggggctataatgtggttcattaataatgttagcagcttttttctaaccatcctgtctaatggttaagacacccagtaacaaaaacacatgatttggaaatactttggctttttcatatacctagtggtgccttatcataatagcactgttacatgaaataagcccctaccttcttactttctggtttgttgaaaaaatacactggtgctctttgaagtgataaaatgagtgtttatgaatgggtgtaattaggaaatacttctcatctgacagctacaaataactaagtttggaggtattttcactctatatgaataaatatttttccataaaatagttgtgattatatttttgttttatataggtcccaaattataattgtcaaatatatattttaaattaataaaagttgtcattcttaggaaaaaa

SEQ ID NO: 750 - DNA, 959 bp, Homo Sapiens
tgtcagtgaaatagacatcttgcctcctgaagtagcttcatcacagagtgtcatgaagacagacagtcaggctgaaatggacagttctttgtggactctacccttcccttcaaggagtatgtcatatatcacaaaagaaattgccttacactggttcatgtttgcagttactgttgtacattgcatagatgtacacacgaatttaaatgtgatgtctttgtatatatctgtataatgttgagattacttacgaaatatgtctgagtgacacttttcacccttgtacagccaaaataatgtatatatggaaagtgacagacaaattctctaatctctttggtacctataacttattagaatcctctggatgagggttagaagagactttttccaaacttctacatgtagaagtatcataaatgtgctacacatttatgtttgtggatttaattaaagtattttaatatggttttcagtgctaaaattggagtcagatacttcttggttttaagctgtctacctaattgctgtctcccagcagactggtggcatgcccagtggctttgggggcaaggatagaaatgccatcaggaaatagctgaattcattgtgaaacatgaattcagtcatggtgataattggaaactcctttcaggtttttgcaagtagattttgtaatgtttgtgtatgcagccttgctgttgagtcagtccaaggggttttacttaggacaagttgtaccttgccctctctccagctctgctcccacattttcacatacctagctgtttctacctcattgggtaagtcatttaccactctgtgcctcagtttactctgtagtttaccattagactgtgagctccttgagggactttgtcataatcactgttacatcccagtgcctcacaccatgcctggcccttaagaagtgctcaataaatgtctgaacaaaaaaa

SEQ ID NO: 751 - DNA, 587 bp, Homo Sapiens
ccatttcctcaatcacaatttgtacaactcagtgttatggaattcggcagcaatagtgtatgttccttattctctttgtgtcacgttaaaaagaaaagcaattggaccatattaaatgtcactgctaaacaacaactgtaagaacgccccttcataaagtgaccaagctattttgagagggttgatgctgacatgtccagtaatgacgttacaatttgtagcttaaactcaataactttaaggtccacatatccagtttactttgaaaactaaaaaagttttaaaacttcatgaatacatcaacctgaggagtattttaggtcccaaatccagtttttaaatttatactccacaaaaaagaaaatacatacataaaaatttaaaccacagttctgggcccattaaaacaccaaaaaagaccccccaaaaagttaagatttccagcttatttctggaggggtgggacaaaataagaatgtatattaaaaacatttttccttaattcagacaaactaaaatcttaagaggaaacccagaccaaaatatcactcatgcaacattaagtgtattaactgattgatatgccc

SEQ ID NO: 752 - DNA, 1041 bp, Homo Sapiens
  misc_feature (922)..(960): n is a, c, g, or t
agtcggagctgtcaacacaatagacatgaatgctccaaatgcctctttgctccatatcctccacaatattctgggctgcaagtgcccgataaagaccaccattcccatctggagccatagaaactttgttcttctcttccaaaataattttcccatcaaaactcatggcggggagcattccttgctgaaaaaagattacattctctttttttaaaccaaagtacttgtgcttggtgaagaactcctttgtagattccattgttctgccactggtcattatataccatggaataatgcatttgttgccataatatttttcagcaacctgctgtagcttcaggatacgctctgcttgaatctgaaaaagtgtcttacgggatggcaaaccaacatcatacatccccttaggatatgcaacgccgagtcttgtcccctgcccaccagctagaagaagaactgctactttattctgagaaatctggaaaagtccttcactttcccaggcctggagctgatcttgatcccttgtagcactgcctaatacctctcgaggcacaggttccattcgtgcatccacattcttttggtgagaagactggttaaaaccttcaatggccttttggaaaaagaagttcagctcctcaaagttcatggcctggagctctgcataaagttctacctgttgggcttcttcaagctcattccagaaacgtagtaggtgctcttgcccagctttggacaacgtgagtttgaggtcattaatgttcataatgctctaatagccaagctttgtagaaataggggtgtaatgtatgtacctgtaaacctttctcggcgcgaccgcagctacgaccgtctccagctccttccgcgcggccactcatcggcgtcccgcgctcgctccgaatatataccctcatcnnnnnnnnnnnnnnnnnnnnnnnnnnnnnnnnnnnnnnncaagtggagcatcccgggaattccggaccggtaccagcctcttgggtgaaactgtgcggggggcgggcggaaggagagggg

SEQ ID NO: 753 - DNA, 821 bp, Homo Sapiens
  misc_feature (804)..(804): n is a, c, g, or t
aacgccacctaccactgcatcaaggataactgcccccatctgccaaattctgggcaggaagactttgacaaggacgggattggcgatgcctgtgatgatgacgatgacaatgacggtgtgaccgatgagaaggacaactgccagctcctcttcaatccccgccaggctgactatgacaaggatgaggttggggaccgctgtgacaactgcccttacgtgcacaaccctgcccagatcgacacagacaacaatggagagggtgacgcctgctccgtggacattgatggggacgatgtcttcaatgaacgagacaattgtccctacgtctacaacactgaccagagggacacggatggtgacggtgtgggggatcactgtgacaactgccccctggtgcacaaccctgaccagaccgacgtggacaatgaccttgttggggaccagtgtgacaacaacgaggacatagatgacgacggccaccagaacaaccaggacaactgcccctacatctccaacgccaaccaggctgaccatgacagagacggccagggcgacgcctgtgaccctgatgatgacaacgatggcgtccccgatgacagggacaactgccggcttgtgttcaacccagaccaggaggacttggacggtgatggacggggtgatattttgtaaagatgattttgacaatgacaacatcccagatattgatgatgtgtgtcctgaaaacaatgccatcagtgagacagacttcagggaacttccagatggtccccttggatcccaaagggaccacccaaattgatnccaacttggtcatttgg

SEQ ID NO: 754 - DNA, 392 bp, Homo Sapiens
gcccaggccataaccaagtatgacatttctgttctgttcgctagggaaatggtagtcgtaagagagactgcaacattgcttcaatgagtacaacggatgaggggacctgctgtcctaggaggggaggggaagaagtagtgtcttactgaagaaggagaagtcctaccccaaaatgtctccccctatctctcaaatcatttgtatcgctgacaacgaagtatctggaaaaatgtgtcattgtaaggtaacttctttggtaggtagatgtcactatacttcgttgcagaggtataaaagcagagcaattatgaccttggactccaaagccattcttctagggtttaaaatcctggctctgctggttaagagcttgtatgactctggacaggtcc

SEQ ID NO: 755 - DNA, 615 bp, Homo Sapiens
  misc_feature (558)..(558): n is a, c, g, or t
tgatctagacgatccctgatgcatctgtgctcggacacgagtctgtagaccagaattctcctgcaagggaccccagatggcccagatgacagaggatgccgtcgacgcggaacggctgaagcacctcattgtgaccccctcgggctgcggggaacagaacatgatcggcatgacgcccacggtcatcgctgtgcattacctggatgaaacggagcagtgggagaagttcggcctagagaagcggcagggggccttggagctcatcaagaaggggtacacccagcagctggccttcagacaacccagctctgcctttgcggccttcgtgaaacgggcacccagcacctggctgaccgcctacgtggtcaaggtcttctctctggctgtcaacctcatcgccatcgactcccaagtcctctgcggggctgttaaatggctgatcctggagaagcagaagcccgacgggctcttccaggaggatgcgcccgtgatacaccaagaaatgattggtggattacggaacacaacgagaaagacatggccctcacgcctttgttncatctcgctgcaggaggctaagatatttgcgaggagcagtcaacagcctgccagcac

SEQ ID NO: 756 - DNA, 350 bp, Homo Sapiens
cctcgggccggaggccaagctttggcacttgaacaagtgcagaggcggcagcactgccctcagatggttcacgtcaccaaagacttcatgatcccactctggaattcatcttcatttcaaagtttaaacaaacacaatccaatgtttaaatgctccacaatcacttccgtaactaatattttgaatactacagtacagatgttgaaggtgacttttaaaaagtctggtttttcatttagctctcatgagatatgaggatcctgaaagctactaattcaggctcaacactttggaaattcaggtaggggccgactgtaaagtatggtgaggctaattcttccgtaggagat

SEQ ID NO: 757 - DNA, 678 bp, Homo Sapiens
  misc_feature (202)..(237): n is a, c, g, or t
acatggatttactataatgcacttgaaattgtgtatgtgaccttatcaggcatttaaggaccataatctctccttgacctaagaaatcagcttgaagtaactcacttagatttcaaattttaatgtggatacccaaggctgcaaatctgttattcagtacctgctacacttttggggttgcctcttttatgcactgttagannnnnnnnnnnnnnnnnnnnnnnnnnnnnnnnnnnnatatcttgttagaaagtattcccagaaaatgaggaaagctacattttaactgtgtcttgattttacagggagaaaaataaagttaatattttgaggaaaaaataaagcttttaaaatgacatgctatatagtagacaaatagtttaactcggtgcctacttcatgtacactggatgtgttaacatgaatttatgaccctcagtgactttttattaccaaaacagcttccttaaagcaaacacacacacatgcctctacagtattggaaaattccgtctccttagataaaacaattaggatttttcttgggccaactagaataattagggctgcagagttggagcctttatataaggagtttgcagctcatatccgaagagaagaatgtatttcgaaggtcaaaagtgtagttaagtgagaaagcagagtagtttcagcttg

SEQ ID NO: 758 - DNA, 1158 bp, Homo Sapiens
  misc_feature (463)..(473): n is a, c, g, or t
ggacgccagcgtatggatatctgcagaattcggctttgggtcagtgtcttcggggaggaaaaactgacacactgacaaggctcccgaaattggacagaatggttaaggatatagctcttccttttgggtttttctaccagtagggcttctagcacctgaattttcacacactgcaccacagaccttctccaaacgcctctccgaccccacagcttctgcacccagctgcgcccgccagcacgaggcgcagtaggaaacgccccagtgcagagtgggtgacggcagtgtgatccctgaggagggagctgcagcaccttccagaagcgggatgtactctgcaaaataccaacacgatccatgacatacagacctgaattttctctatttttgtggcgtttcacgtttctctcaagaggattaataattttggtggtggatttacgttaagaggaaagaaggaccnnnnnnnnnnntcccacagccacctgccgagcacctatgaaccaaaaacctgaagtcgctttcattctcatttagcctaggagaccgatcaacagcaaaaccaacctggataaggctgaataaggatgttaaagcccaaacaactagcaaaggaaaagtacacaatcgatggcttgatgttacatatggctgtaatgtagaaatactgtaaactgcaatttagtgttaatactgtcaactaatcagagacttcggaaaactggcaaggcctaaaccataaggatgaatgagacctcaggttctaagtctgtcagtctgggatttacactgttccatgtctgtaggctacaccctggaaaacatgcagagccgagacagatgagatagaaagtacccaaaacgagagacgagagcgtatgtacataaaaatccttactggaaccacagaacttactgaatgagggccattcctctttaagttttcttttcatctgaaaaccctattatctagcaataagttaaattagagacagacagctccacttgcatgaatctacagaacagtccagacgccagtgtgaggctgctattccaataccagcacagctagcctgactttccactagtggtattttggcaaaaatgtcaaagaggcgatcaaagacaggacaggtcgtgggtttctccctgggaagg

SEQ ID NO: 759 - DNA, 1445 bp, Homo Sapiens
taacactgcggcatatcagtctgtccgcatcctctctgtctctcccattcaagcagagcaggagctggaggaccttgttgcggttgacttgcagtggtctaagcccacctcagaaaacttaggccatggatatttcaagtacatgtcagcagtgtgctggctctttggacgtcacctttatgacactctgcagtatcccatcgggctgatcgcctccagctggggcgggacacccattgaagcctggtcatctggacggtcactgaaagcctgtggggtccctaaacaagggtccattccatacgattctgtaactggtcccagtaagcactctgttctctggaatgccatgatccatccactgtgcaatatgactatgaaaggggtagtatggtaccaggaggagtccaatataaattataacacggatctgtacgattgcacattccctgcactcatcgaagactggcgtgaaaccttccaccgtggttcccaggggcagacggagcgtttcttcccatttggacttgtccagttatcttcagatttgtctaagaagagctcagacgatggatttccccagatccgttggcatcaaacagcagacttcggctatgtccccaacccaaagatgcccaatactttcatggctgtagctatggatctctgtgatagagactcgccttttggcagcatccaccctcgagataaacagactgtggcttatcggctgcatttgggggcccgtgctctggcttatggtgagaagaatttgacctttgaaggaccactgcctgagaagatagaactcttggctcacaaggggctgctcaatctcacatattaccagcaaatccaggtgtagaaaaaggacaacaagctcctgttgcagtgaccatcgatgcaagtggcttccagcttctatgaacaccgtctccacccagtccctgaccctggcgatcgattcttgtcatggcactgtggttgctctccgctatgcttggaccacgtggccttgtgaatataagcagtgtcccctataccaccccagtagtgccctgccagcccctcccttcattgctttcattacagaccagggtcctggacatcagagcaatgttgctaaatgactgtttcagtatgatcagaacttagatataaggatgggtccttcagattttagcatttaggagtttacactctgcagtatcccatcgggctgatcgcctccagctggggcgggacacccattgaagcctggtcatctggacggtcactgaaagcctgtggggtccctaaacaagggtccattccatacgattctgtaactggtcccagtaagcactctgttctctggaatgccatgatccatccactgtgcaatatgactctgaaaggggtagtatggtccaatataaattataacacggatctgtacaattgca

SEQ ID NO: 760 - DNA, 580 bp, Homo Sapiens
  misc_feature (167)..(177): n is a, c, g, or t
gaatccaatttagccgcgctgtgcatttgcttgggggcgtgcagccccgtcccgcgaggtccagaccccctcagccatcgctgattgtgggatggattgctggcggggcctttctcaccccggacaccgcccccagacgtgcatgcagttgcttgctgttatttaannnnnnnnnnngagacggagtttggctcttgttgtcgagggaaacataaaaacagaacaaacaaagattaattagtttacaaataagggtctctgaagacttcctgctactttctgggtccatgcccctcctctccgtactccacttcccaccaagctcttcaggctccagcctaaataacaccaggttaaattttgatctcccggggactgggtgtcgggagggaaaggcggagggagtgtcagagaggggatggatttctcccaccacacttggggaggcctccggatggatatgtccttccagctgatggacctcaggattgggagaaagatcggggacaagagacgggcacaacagtcacctggtttctttttcttcctttattttttgagactgagtctcgctgtatca

SEQ ID NO: 761 - DNA, 1026 bp, Homo Sapiens
  misc_feature (844)..(862): n is a, c, g, or t
  misc_feature (864)..(869): n is a, c, g, or t
  misc_feature (976)..(976): n is a, c, g, or t
ccacgcgtccgcggacgcgtgggggacgctgggccggtgggcgggggccggcaggtgctccgcagccgtctgtgccacccagagccggcgggccgctaggtccccggagaccctgctatggtgcgtgcgggcgccgtgggggctcatctccccgcgtccggcttggatatcttcggggacctgaagaagatgaacaagcgccagctctattaccaggttttaaacttcgccatgatcgtgtcttctgcactcatgatatggaaaggcttgatcgtgctcacaggcagtgagagccccatcgtggtggtgctgagtggcagtatggagccggcctttcacagaggagacctcctgttcctcacaaatttccgggaagacccaatcagagctggtgaaatagttgtttttaaagttgaaggacgagacattccaatagttcacagagtaatcaaagttcatgaaaaagataatggagacatcaaatttctgactaaaggagataataatgaagttgatgatagaggcttgtacaaagaaggccagaactggctggaaaagaaggacgtggtgggaagagcaagagggtttttaccatatgttggtatggtcaccataataatgaatgactatccaaaattcaagtatgctcttttggctgtaatgggtgcatatgtgttactaaaacgtgaatcctaaaatgagaagcagttcctgggaccagattgaaatgaattctgttgaaaaagagaaaaactaatatatttgagatgttccattttctgtataaaagggaacagtgtggagatgtttttgtcttgtccaaataaaagattcaccagcaaannnnnnnnnnnnnnnnnnnannnnnnacatgtcggccggccctcggcccctcgaagaagcttttctagaccattttcctttttgggcgccgccggggcccccaggtaaggggtaaagtggaaaacatggggcnccaataaggcctggttttcccccttaagggaagaattccccctggggacc

SEQ ID NO: 762 - DNA, 745 bp, Homo Sapiens
ggggtctgtcctcacatgtgcactggtaacagactcacacagctgatgaatgcttttctctccttatgtgtggaaggaggggagcacttagacattggctaactcccagaatgggatcatctcctaagatgtacttactttttaaagtccaaatatgtttatatttaaatatacgtgagcatgttcatcatgttgtatgatttatactaagcattaatgtggctctatgtagcaaatcagttattcatgtaggtaaagtaaatctagaattatttataagaattactcattgaactaattctactatttaggaatttgtaagagtctaacataggcttagctacagtgaagttttgcattgcttttgaagacaagaaaagtgctagaataaataagattacagagaaaattttttgttaaaaccaagtgatttccagctgatgtatctaatattttttaaaacaaacattatagaggtgtaatttatttacaataaaatgttcctactttaaatatacaattcagtgagttttgataaattgatatacccatgtaaccaacactccagtcaagcttcagaatatttccatcaccccagaaggttctcttgtatacctgctcagtcagttcctttcactcccaattgttggcagccattgataaggaattctatcactatagggttagtttttcttttggttccaagaacatcaatggaaagcgggcggtcatggtaactggggta

SEQ ID NO: 763 - DNA, 756 bp, Homo Sapiens
ggattacataaaataacttttcaaatatagtttaataacacttagaagtgtttacttacctggaaaataattgctatgccgtacattcagagtgccccctcccctgcaaggccttgccatgattaacaagtaacttgttagtcttacagataattcatgcattaacagtttaagatttagaccatggtaatagtagttcttattctctaaggttatatcatatgtaatttaaaagtatttttaagacaagtttcctgtatacctctgaactgttttgattttgagttcatcatgatagatctgctgtttccttataaaaggcatttgttgtgtgagttaatgcaaagtagccaagtccagctatatagcagcttcagaaacatacctgaccaaaaaattcccagtaaccaggcatgatcaatttatagtggtcgtttacatctaataattatcaggacttttttcaggagtgggttataaaaacattcaagttggtctgacagtattttgttaaggatatttgtttgtatgtttattcagtatacttacataaaaattatttcgccatcagccaaaactcagtaatcatgacagctgtctgttgttttatgaagtttattttctcaagaaaatggggaataaattttggggattttgttccagctttttttaactaaagaatgcctaaaaggccacagggttttttattggccctaacctttaaagcccatgaacctttttttagaatatgaagaa

SEQ ID NO: 764 - DNA, 443 bp, Homo Sapiens
  misc_feature (207)..(215): n is a, c, g, or t
tttttgcaaaacaccaaatctatatttacacttccacatataataacataactttaagctgaaatatatcataaataaaacaagtaatgtctactgttcgacaacttaagtatcaacaattaaaataaatcaaactggaatgaaataaatacataaacaaaaatccaacgaattgtacctctattatatgtactgttgtctcaaagnnnnnnnnntataaaaccagtagtataccaatagttaatactgatggacacaaaaacatattttgaagtacaaagggctgtaggaaaataattggtatttttatacattcagaaatgtggttaaaaagagaaatctgaaagcccaaaaaattccagcataatacaaatcgacttgttttcaaatagatttggtgattcttttttttaaatacaggtttaaattccagccctctatcc

SEQ ID NO: 765 - DNA, 793 bp, Homo Sapiens
ccccttttatacccgggtttttccaggggcgccctcctccgggaaaaaaagggggttaaggttaatttaaaaaaccctttcgggggttgggaaaaattccccggattccaattaggggtttttggaatttttcggggctagggggtttttaaaattttttgggacagcttggggcgggcttgccgttttgtcatttccagggaaaaatccttatttttttcatagttacccatcaagatctgaataaaatacacgttttttgaaagctctgtttatcccatgaattcttgtttggtggaaccctgaaattggagttgactgtgaacatggaacaaagtcttgactattttcaaaattatattctgaatctgattgaaaatgaggtgttggagagcatgttcttgaatgcctagagtcagataggctttgcaaggataatttttgtgaaggctggatgaagtcttcagaaagtgatctcagtgaaaaatcagactctgaagggtgactttctgccaaagatgttccccattttaacaaaatatcctgtgattttttggtaatctcagttgcaatgtccatttctttagcaatatcatcaaagagatcagcagaggcatcatagctaccttcataaccaatagaatagctctgtgttacgttgttattgatatgtccccaaggcatttctttcaatgtatttgtacttctatttggactattgcaaagagtttctaaaggatatgtaagtttcctgcaaattgtaaaactgtcatcttggttcttggaccacccc

SEQ ID NO: 766 - DNA, 1710 bp, Homo Sapiens
  misc_feature (1515)..(1528): n is a, c, g, or t
  misc_feature (1530)..(1532): n is a, c, g, or t
  misc_feature (1534)..(1535): n is a, c, g, or t
  misc_feature (1537)..(1543): n is a, c, g, or t
ggggctggggtgagagaggaaagacctacattccctctcctgcccagatgccctttggaaagccacttgaccacccaccatattatttgatctacttcatagctccctggagcaggcaaaaaaagggacacacatgccacttggtctcggatcagggaatccagctccctagactgcatcccgtacctcttcccatgactgcacccagctcacaggggcccttgggacagccagagctgggtggggacagtgataggcccaaggtcccctccacatcccagcagcccaagcttaatagccctccccctcaacctcaccattgtgaagcacctactatgtgctgggtgcctcccacacttgctggagatcacggaggcctccaaacacatttaatcaccatgggaaactgttgtgggcgctgcttccaggataaggagactgaggcttagagagaggaggcagccccctccacaccagtggcctcgtggttattagcaaggctgggtaatgtgaaggcccaagagcagagtctgggcctctgactctgagtccactgctccatttataaccccagcctgacctgagactgtcggagaggctgtctggggcctttatcaaaaaaagactcagccaagacaaggaggtagagaggggactgggggactgggagtcagagccctggctgggttcaggtcccacgtctggccaggcactgccttctcctctctgggcctttgtttccttgttggtcagaggagtgattgaaccagctcatctccaaggatcctctccactccatgtttgcaatgcttttatatggcccagccttgtaaataaccacaaggtccactccctgctccacgaagccttaagccataggcccaggatatttctgagagtgaaaccatgactgtgaccaccttctgtccccagccctgtcctggttccttcctatgcccaggtaccacccttcagaccccagttctaggggagaagagccctggacacccctgctctacccatgagcctgcccgctgcaatgcctagacttcccaacagccttagctgccagtgctggtcactaaccaacaaggttggcaccccagctaccccttctttgcagggctaaggcccccaaacatagcccctgccccggaggaagcttggggaacccatgagttgtcagctttgactttatctcctgctctttctacatgactgggcctcccttgggctggaagaattggggattctctattggaggtgagatcacagcctccagggccccccaaatcccagggaaggacttggagagaatcatgctgttgcatttagaactttctgctttgcacaggaaagagtcacacaattaatcaacatgtatattttctctatacatagagctctatttctctacggttttataaaagccttgggttccaaccaggcagtagatgtgcttctgaaccgcaaggagcaaacactgaaataaaatagtttattttttcacactannnnnnnnnnnnnnannnannannnnnnnacatgtcgggccgccctccggcccttcgagaaacttttcataaaccatttcgttttggcgccgcggggccccagtaaggtaaaggggaaattgggtcaatagcctggtttccctaaggaaattcctggggccatgaactaaggggctttggaattcctccacccatt

SEQ ID NO: 767 - DNA, 737 bp, Homo Sapiens
  misc_feature (584)..(584): n is a, c, g, or t
attccatctcttgcatatttgatcagatagtgacatctttctgtatataaactctttaactgctattttagggaccttgcagtttgcacataattgttttatatcatagcagtaaatatttgcaagaaatcccactcatcgaccccgggtaaaatgttatggtaagcatgcacagtttgcagtctacagtttttttatgtagcacaaaataggtgtacctttataagtacattcaattttatgatttacatttatcatgtaatttttaaaaaaatccatctatctaggatatgttgatacaaagtctgcttttgctattctttttgcttaaatactcctatcattttctgaattacttggtatttagaactcctagcaccacggggaagaatagaggtatcatcaaacgtggcaaattttctttcaggaataataaagagcatgattccacagcttttctgggatgtttgagattcttttttagtactaagcaaaattctcatcacagaatgtagcccaggccaatttataactaaatctctatttgttcggatgatgcttctaaaacagcattgataggttanagaagcttggtatttttaatttacttcaatgattagctcagttgcttaactggagttttaatcctgtgatatgtacatttggattcatgactgtgccagcattttttaatttatgggggtgttttgggcagaatggacaattaaggttttttt

SEQ ID NO: 768 - DNA, 339 bp, Homo Sapiens
cagtaatcgaagtcatcaatgataaggatatgagttacatgacagtggataactttcaaagaggcatctttgtgtggcccatgaactttggttggagaacaattcctccagatgtcactgcaaaaaaacagaattaaagaaactgatacaataaggtgccctgtcatggctggtggattgttttctactgacaaaagttacttttttgaacttggaacatacgaccctggccttgatgtttggggtggggaaaatatggagctctcattcaaggtgtggatgtgtggtggtgaaattgagatcattccctgctcccgagtgggccatatattcagaaat

SEQ ID NO: 769 - DNA, 648 bp, Homo Sapiens
  misc_feature (537)..(537): n is a, c, g, or t
taaggctataaaggtcaatttgaaagccaggtacggatccaccgtgtttcataaaagtgtcttacactcatgtttggctttcaagaagtgatatgcctactaaagctgttattttgagactatatgcatctcagaagtaattttgaaaatagagccaaagagcagtttttcttaccttgtggagcagaatgttaactaatttctcattcataatttgaatccaaaaaagttatgcagtatgacatctaccctgaaggagccgttttaagcaaaacacaaaatgaaaaaattcactcattggaaaaactgcgtagctggttttttccccaatgaaatgattacagaattaacaaagccagaacatcttcagaaggcatgcatttcacttccagtttagagaagaaccttaagtcaataaatcatgtccaaactacatattaaaatgtttataaaaagtaagttttaacatttatttctagctttccacatgtgtgtgcagacaaggaataagattgcacgtaagtgtaagcagtgcanaaatgtggaagtggaggagtcacagatgtgctagaactttaagaaataaagcagtgaacaaaatcaaaataaacaggaaaaatgtaaaactatgggatcagaattaggaaa

SEQ ID NO: 770 - DNA, 539 bp, Homo Sapiens
gacctgtaaacctgaaatcccctgaacagaaaggagctgccacggctaggctgcagccctagaactctgtacacaaattcagcccagtaccttgtcccctgcctactcccattcctagaagaatggtataataaacgggcagcccggcccacatttcagtaaattgaactgtcacggggagaataaggcaccccaaacagttgcagcgacagtggttaacaggaagtctctctgtcctccaaaccaataatcaaagggatacataaggaactcactgctttcttagaaggccacatgcaccccgggatgtttgctcatcacgtcactctggcctttaaccagggagcaaagagacagttgtgggtaaaaccctatttccaagctaacaattatccttccttatggtagactggggggtgcacggtacactcttgattacacaagcagtcttcttcccccctagaacaaatgacagaccaacaaaaaggagaaaatgatatgctggtgtttatctcttctgccagcctgaactcaagctc

SEQ ID NO: 771 - DNA, 455 bp, Homo Sapiens
gttaaacatccaggtggataggggatagagttcaagggggaggttagggcctgcacctgaccatggctgtgacaggtggtacctagaacccttgcagcagactctcccagcagacaagtcaggacagaggagtcaggacctgggcagtgagttagaaggattgctgggaaaaggtgtcaaggcagccacctaaagaaggcctgttgcagaagaaagcctgatctgcaattggatttggtgacacgagatcagtattgacaggagtggcttactgcagtggtgggggcaaaagcctaatggtgagggctcaaggaagaagtggagagaggaaatgcaggtagcttttccagggagctgtgcagtaaagggggaaagacagggagggatggctggagggggtgagttttcttagcagtgatattagatatcaaaaaataaataaataataacagcct

SEQ ID NO: 772 - DNA, 751 bp, Homo Sapiens
  misc_feature (53)..(65): n is a, c, g, or t
  misc_feature (278)..(328): n is a, c, g, or t
gagttgtctttgctagatgacatgatcacctagaaaatatgaaagaatgaccnnnnnnnnnnnnnctggatctaaagtgattatataacatggttgcaggaaacaagtttaatatacaaaagttgatcacttttctgcataccagcaatgtacaagcagaatctgagataaaaatacattaccattagcacccccccaaatgaaatatttatgtataaatctaatatgtacatggtctatatggggaaaatgcaaaattctaatgaaggatatccaannnnnnnnnnnnnnnnnnnnnnnnnnnnnnnnnnnnnnnnnnnnnnnnnnncagtatttctaactcaatctagaaatgcagtgcaatctatcaaaattcctgcaagattttgaggatactgacaaagtaattttaaagtttatatcaagaggcaaaagaccaataaatgactgtatatatagccttttcagactgctttttttacttagtaataggcaaaagaatagccaactcaatactgaaggagaaaaacaatgtcagaggactgacactacatgattgcaagacttactctaaagcctaagttaacaagatagtgtggtattggtgaaagtctagacaaatatatcaatggaacagaataaagagtccagaaacagaccacttaattataatcaactgatctttgacaaagtagcaaaggtaatacaataaagcaaagatagtctttaagaaatggtacgggaacaactg

SEQ ID NO: 773 - DNA, 648 bp, Homo Sapiens
gagttgtcttgggtatccaaaaccccatttccccctttttaactgtcctagaaaacatcatgcttccctcctttatgcaggccccgtgcagaccacaggtgctcagatgccaggcaagcctgccttccatgctccctccaccatcgtcctcctcggggagctaacacagctgcttggtgagcatcagtcaatgagggaatccgatacacctgttccccttgacttcagctgtctgattttcatcttcatgaatattaaaaagattcaccttctcctggaatttttcattctccatgcccacatgctttcagacacctctcttctcctttttcatctggacctacattgcaacctttcctttctctttattttctgattatgaaatttggcataccaacgtagaaaatctggacaggacaaaaatacaaagatgccagaggcaactccccttaaatcccatcatctatgggcaactcctcttaaatcttgctacccaggggcaacttcccttaaatctcacaatccagggacaacttcccgtaaatcccaccactcaggggtaacccccgctatatcccaccactcaggggcaactccccttaaatcccgccacccagggacaactccccttaaatcccgacactcagg

SEQ ID NO: 774 - DNA, 1172 bp, Homo Sapiens
ggtcaaggatatgccaagtaagaatgaaaaaaacacacataccgactcagaatggtgagcaaaaaaactttgaccaaaatcaagtgctcttctcttgtccatccacattcatctatttccaggtctttaaatataatctgtgtgagaacggcccctacatttatatctccctccagctctggccaaagctccagacttatatattcaatttggtatcttctcacagacatctgcatctaaaactttccataccccaaacaaaactctttattcccctctttaccataccccctcaatactgctcctccctctgtcttcccccatctccataaattattctacctagctgctcaaacaaaaattctgggccacatctgatttctttctttttctcaccacccctcatatcaaaactactagcaaattccatcttctctacctccacaatatatactgaaattgtctatgtttccagctactgatagcctagactaagctagcctagactagaataaattataataactcttctaactggtctccatgcctccagttttgacctgttggctgctcaaactatgcaacagattcagataacttggacagcacagactgcaacagtgagagtagcagtggtggtaaaagccaagagttaaattattgagatggatgtgaattcctctaaatacccctcactgctccttcattcccaagaagaaaagacaagtactgcgacttccaaaactcagacacgacttgaaggtgaagtgactcctaattccttgtcaaccagctacaagacagtgtcattgccattaagctctccaaacataaagctgaatctcactagccctaaaaggggtcagaaaagagaagaagggtggaaagaagttgtacgaaggtcaaagaaattgtctgttccagcctcagtggtgtcgaggataatgggaagaggaggatgcaacatcactgcaatacaggatgttactggtgcccatattgatgtggataaaccaaaagataagaatggcgagagaatgatcacaataaggggtggcacagaatcaacagatatgcagttcaactaatcaatgcactcattcaagatcctgctaaggaactggaagacttgattcctaaaatcatatcagaacacaagcatcacccggagg

SEQ ID NO: 775 - DNA, 413 bp, Homo Sapiens
gtcggagttgtcaggacggtagaaatgttaggtacaaaacctcccccaaactatcaggtgatcacagtggagctacaagcagagcctctgagatcattaatccaggaaacctcaaagaaagctgaactaggatgaggaactccttgataagataaacaaaccttcgtaacacaaacatgcagaagttatacctttaaggggagagcaggggcgtttcacaggcatgagagacatggacattgcgaagattctagatgtgggtcccagaccacccagcatgtagatgtcagcctcaaaggcacatctctccccaagacagggctggtttctcatttcgggagctttcccccagcaccttggccaggcctgtgggcagctgcaccaggaccctcagtgaagacaaatacagcgtg

SEQ ID NO: 776 - DNA, 1205 bp, Homo Sapiens
ggtccggaattctcgggatgggaataagatggcggggaagaagaatgttctgtcgtctctcgcagtttacgcggaagattcagagcccgagtctgatggcgaggctggaatcgaggcggtgggcagcgcggctgaggagaaaggcggattggtatctgatgcctatggggaggatgacttttctcgtctagggggtgatgaagatggttatgaagaagaagaagatgagaacagtagacagtcggaagatgacgattcagagactgaaaaacctgaggctgatgacccaaaggataatacagaagcagaaaagcgagacccccaggaactcgtggcctccttttctgaaagagttcggaacatgtcgcctgatgaaatcaagatcccgccagaaccccctggcagatgttcaaatcacttgcaagacaagatccagaagctttatgaacgaaagataaaggagggaatggatatgaactacattatccaaaggaagaaagaatttcggaaccctagcatctacgagaagctgatccagttctgtgccattgacgagcttggcaccaactacccaaaggatatgtttgatccccatggctggtctgaggactcctactatgaggcattagccaaggcccagaaaattgagatggacaaattggaaaaggccaaaaaggagcgaacaaaaattgagtttgtgacgggcaccaaaaaaggcaccacgaccaacgccacgtccaccaccactaccactgccagcacagctgttgcagatgctcagaagagaaagagcaagtgggattcggctatcccagtgacaacgatagcccagcccaccatcctcaccaccacagccaccctgccagctgttgtcacggtcaccaccagcgccagcggctccaagaccaccgtcatctctgctgtgggcaccattgtgaagaaggccaagcagtgacctgaggggccaccctaggacttgaaaggaccgtgcagcccagtgaccactgcccagtgggaggcgccactttgtatatttcaggactgggacctactccccagatgccacctgagaggagcttctgtttggcattccagatggaaggacaggcagcacgggagccaggcgctgtggacagggtctgtccacgcaccacctggggtctgccgcctattaaaagtgccgtattcttacctcttggcatctc

SEQ ID NO: 777 - DNA, 1559 bp, Homo Sapiens
  misc_feature (1085)..(1095): n is a, c, g, or t
gcaggtgattttcaaagccaagtcaaaatattctccagaattactcaaataccggtggggtctacctggcctccctcttcatcagcctgttttcctgttggtgaatttaacctgtgctgtgctggtaaagacgggaaatgggagaggaaggttatcgtctctgtgcgagtggccattaatgacacgctcttcgtgctgtgtgccgtctctctctccatctgtctctacaaaatctctaagatgtccttagccaacatttacttggagtccaagggctcctccgtgtgtcaagtgactgccatcggtgtcaccgtgatactgctttacacctctcgggcctgctacaacctgttcatcctgtcattttctcagaacaagagcgtccattcctttgattatgactggtacacatgtatcagaccaggcagatttgaagaatcagctgggagatgctggatacgtattatttggagtggtgttatttgtttgggaactcttacctaccaccttagtcgtttatttcttccgagttagaaatcctacaaaggaccttaccaaccctggaatggtccccagccatggattcagtcccagatcttatttctttgacaaccctcgaagatatgacagtgatgatgaccttgcctggaacattgcccctcagggacttcagggaggttttgctccagattactatgattggggacaacaaactaacagcttcctggcacaagcaggaactttgcaagactcaactttggatcctgacaaaccaagccttgggtagcatcagttaacagttttatggacgattcctcagatgaaaagcttcagaaaagcatagtgacagctgaatttttagggcacttttccttaagaaatagaacttgatttttatttgttacaggtttccaatggccccataggaataagcaataatgtagactgataaacccttattttagtactaaagagggagccttgctatttcagtgggtataatttaaactttttaaagaaaatctgtacttttataaagatgtattttgtataacttaaataataatgctaaagtatactagggnnnnnnnnnnnctttgagaatgttactgcaatcatggtgtaggttgcacagacttttatgcataattcactttaaaaacatagaatatatgggcctaatagtttttttaaagcttttgggactaaagtattccacaaatcttacctctttaggtcactgatggtcactccgattctgagtgccacattggtagactcctaaaatacagttgacaacttagccaattgcaactccagtgcttgataattcaaactgaacatggtcaaagcagcagactgtaaggttctttcacagattccgcctccaaggttcaggccgtagggttccctcaaggaactctcttaagctttgtgacccaaagacgtggttacatcctttacagcaaggacgccatatggtataccccaattatggactaaggtggaataacccttcaccaactggtaccctgaacttattcgtatttataaacctc

SEQ ID NO: 778 - DNA, 1440 bp, Homo Sapiens
ggggggacggcggcagtgcgagaaagccgaagatggcggtccccgcggcgctgatcctacgggagagccccagcatgaagaaagcagtgtcactgataaatgcaatagatacaggaagatttccacggttgctcactcggattcttcaaaaacttcacctgaaggctgagagcagtttcagtgaagaagaggaagaaaaacttcaagcggcattttctctagagaaacaagatcttcacctagttcttgaaacaatatcatttattttagaacaggcagtgtatcacaatgtgaagccagcagctttgcagcagcaattagagaacattcatcttagacaagacaaagctgaagcatttgtcaatacttggtcttctatgggtcaagaaacagttgaaaagttccggcagagaattctggctccctgtaagctagagactgttggatggcagcttaaccttcagatggctcactctgctcaagcaaaactaaaatctcctcaagctgtgttacaactcggagtgaacaatgaagattcaaagagcctggagaaagttcttgtggaattcagtcacaaggagttgtttgatttctataacaagctagagactatacaagcacagctggattcccttacatgatgttttcgaagactgtttttttcatcacgctcctgccacctcattattttgcattgaagatacattgccaggttgtgttttctgaaggattcagtgacttgctttctgtaaattatatggcttatcacttcttagacaaataacaaccaatagagatcattgttaagaatactgaggttctaatatactttctttagttctgtgagccaacagtaattattaagaacactttccctttaaaggaaacaaaagtgaataccatattgtttttactgtcatagtgttgctttcttgcctgtcctgcttagtttttacttgctggatgataccataatgtatcaaggagcgtccatggatacaagataagatgtgtaccttagtagaatacagagctttggtaattacatgaataaaattaagaaaatagccatatacaatcaaatacactatggcatttttatttgaatatgatgagtatattttgcttcggaaataatataggaaggaaatgtaaaaaagtgagtagtatggtatcagttaattccagtctgagcttctctgtcaacttcagtttctctctcagtttaatgatttaataatagtccaggtttttgtgtgtttttctttatactgcaaattaataatgattcactttatagtttgggagacagaatcaggtcttgaataaaataattgtaatgagtgctaaatgggcaccattattcgaatcagataccttttatattctctttccataaatacgttgatttctgtcaataaaatttatgtgtcttaggaa

SEQ ID NO: 779 - DNA, 867 bp, Homo Sapiens
  misc_feature (64)..(107): n is a, c, g, or t
gaactctttcttctctcccgggagccaatgagcttgggagaaagggcaagggggtacaagggannnnnnnnnnnnnnnnnnnnnnnnnnnnnnnnnnnnnnnnnnnntggggagagtgttatgtggtggatggggaacaatatatttaccttccacataagtttttattgataccaagatgaggtaaatagaactctggtgtggatctgtgggtttgagtccaataagctttctcttttacattcatcttatttaaatctttgctgtcacagtgaagaaataatttagaaaacttataaaagcaattgagtttaacacagattttattgccctatagacagttatgatgtgaccagtggatatcaatgaaacttcttaattatttgagtctgaaaatgcatatttaaaacattaaaagattgactccactttgtgccaagctctgcgggtaggcatatttcatatcttaaaaaggcttgtaattcattcagggaggcaaaagcaaaatctgtaattagaggttagccataatgttatgaaagtgccatgagaatagagagagagaataaaatcataaagatataaataaacgtatttgaactacaggtgatgtattgtcttaaattacttctatatcatatgccagagggccttcaatggaaaatcctaggtagaaagacactctttctatgttcctaccacttctgagtggacctgaataaacagatattactggtatttttattttttcctctgttccatattctacagagattagcttgccttcagcctgaccagttagacgacgcaggaggtctttgacttcattttttttcccacatccccactgtgccagagggaatttgt

SEQ ID NO: 780 - DNA, 685 bp, Homo Sapiens
  misc_feature (511)..(546): n is a, c, g, or t
gtgttgctcttgtgaggcctttactgtcatgacccagtgtgcttaagaacctgcctgatggggagtgtcggctgtgaaatctgcaaaaagagctgacattccagctgctgtgatcatgaatttgggggtgtactgtcctgcctgtgcatcttctcgcactgagattttgaggcagttgcagccctcggttagtctcccagtggaaaaatcggttgtgcctcccggcttcccaccatagctgcctgaaaacatgacgctctcaagcttgtccttccttcaggaagatgtccaatcatgcccacccatgagagggcttgccgtatgccctggcctttgggcataattaaggaggagtccctttatcctaagacgtgagttcctcatgggggatgtacgagtaaaaaggttaacttctgttcttatgcgtggcgctgtgttcactttccagagtctctgttcgtttgtttggatggcggtctcggggtacggcagcgtgtgtgcgtacgtgtcnnnnnnnnnnnnnnnnnnnnnnnnnnnnnnnnnnnnaaatcgtgcaaatctacaacatgtcccagcccattctccgttgaaacagatcacagcaacgacaaacgctcatggcgctgctttgctccacccgcttcagatagatcattgttagatatttcacatttttgtatggtgg

SEQ ID NO: 781 - DNA, 513 bp, Homo Sapiens
gtagctttttataagttaatgtgtttccccaaaaagtttcactactttatattcatttgagtgtgatcctaaaacacctggatcaacagtacatctcatatgcaatctgcatcagctcctattctgtctggatgtctagaactgttggaagattttgacgtcttaagccctaggttttgctttgggaaataaggtttgaaatattgttcattgcattaagatttgtgtgtgtgtgctttgtaagcccagaaccaggttttggaaaatgcctgtactgtgaaagcaaattaggactctttctgagcctctttcattgtcagaaatagaatcactttccatcagcttccaggaaattgtgtatctggagtcgaagagatttgacatcaagaatccagatttttaaatgtaattgttttttaaatgctaatgtttgtaaagccccttcagttcttcggatgaaaggtgctatattccctcagtgtaaattaataaaaagattacaggaagtttgtc

SEQ ID NO: 782 - DNA, 679 bp, Homo Sapiens
gaccaggaagtcagacactgaacgcaggcctcaaactgctgcggagttccaactcctggatatctgcatcggcgaatggccctatcttgcattgatccacagggatggggaagggaatgtcattaatgttttgttaatactgattctttcatgcaatgatgtgtattttcccattctggaggctgtgggagatgacaagacaatgaatgggaaggtctgacacagaacaaatcagcggttctgaaagcttggggaatctcagactcctttgagaattattggaaaatggacccactataacttggcgtgtgtgtgaactgcttgatgcccatccaggaaagccaagttaagaagctttgcttcaagtagacactagaaatccattcccttggcaatttatacagttcacgtctcccaccatccgttcatctcacccaccctgccatctctccacctatccatctggctattgctccatctagctttcccgctccatctacccatcttccaatccatcatctcacgtatctgccttgcttatccaacagtctgccttattcacccacccatccctttatcattctaaccccatctggcattccatccctccatttatccatcttcccacttacccatcttctccatccagcactccgtgcatcagcctgctacaggggat

SEQ ID NO: 783 - DNA, 815 bp, Homo Sapiens
  misc_feature (81)..(81): n is a, c, g, or t
aggatgggaggggaaccaaagccctcttctccccagagcccccgggccagggctgttggatccggccccaagaactccttncttgcaagagccgaggaagcctcccctgtccctcggggcagatctgtggtgtctctctcccacctgcaagcctcagctctgtgcccctcaccctgctccctctcgccccttctctcccaccccttccttctgagccgggccctggggattggggagccctcttgttcctgatgagggtcagctgagggggctgagcatccatcactcctgtgcctgctggggtggctgtggggcgtggcaggaggggcctaggtgggttgggcctgagaaccagggcacgggtgtggtgtctgctgggctggagataagactggggagagacaccccaacctcccagggtgggagctgggccgggctgggatgtcatctcctgccgggcgggggagggctctgcccctggaagagtcccctgtggggaccaaaataagttccctaacatctccagctcctggctctggtttggagcaaggggaagggttgccagagtcctgggggccccagaggagcaggagtctgggagggcccagagttcaccctctagtggatccaggaggagcagcacccgagccctggagtggcccagtacccttccaagaggccacagtcccagccaggacaaagtatgcggcccatcctggtgcgacagcgtgggacaatgtgaacatggactcgaagacatggccctttctctgtagttgattttttaaatgtgccattattgtttttaaaaaaaa

SEQ ID NO: 784 - DNA, 855 bp, Homo Sapiens
  misc_feature (19)..(19): n is a, c, g, or t
  misc_feature (55)..(55): n is a, c, g, or t
ttaacgtgtcccgcgagcnaggcgcgtcgcaaaaggtcgcggcggaacttccctncgcttttcagaccatactctttacggtactaggcactgctgagctgggagatgtcggcggcgtgttgggaggaaccgtggggtcttcccggcggctttgcgaagcgggtcctggtgaccggcggtgctggtttcattgcatcacatatgattgtctctttagtggaagattatccaaactatatgatcataaatctagacaagctggattactgtgcaagcttgaagaatcttgaaaccatttctaacaaacagaactacaaatttatacagggtgacatatgtgattctcactttgtgaaactgctttttgaaacagagaaaatagatatagtactacattttgccgcacaaacacatgtagatctttcattcgtacgtgcctttgagtttacctatgttaatgtttatggcactcacgttttggaaagggctgctcatgaagccagactggagaagtttatttatgtcagcacagatgaagtatatggtggcagtcttgataaggaatttgatgaatcttcacccaaacaacctacaaatccttatgcatcatctaaagcagctgctgaatgttttgtacagtcttactgggaacaatataagtttccagttgtcatcacaagaagcagtaatgtttatggaccacatcaatatccagaaaaggttattccaaaatttatatctttgctacagcacaacaggaaatgttgcattcatgggtcaggccttcaaacaagaaacttcctttatgctactgatgttgtagaagcatttctcactgtctccaaaaagggaaac

SEQ ID NO: 785 - DNA, 853 bp, Homo Sapiens
tagaggatcccatggacggcagagctgagatgtgagagaaagagaggcttgcagactgaggcccaggtagagaagcagttatcagagtttgacatcgaaagggaacaactgagagcaaaactgaaccgagaagagaaccggaccaaaaccctgaaagaagaaatggaaagtttaaagaagatagtgaaggacctagaggcttcccaccagcacagtagccctaatgagcaattgaagaaaccagtaaccgtgtccaaaggcacagcaactgagcctctcatgctaatgtctgtgttttgccaaacagagagttttccagcagaaagaacccatgggagcaacatagccaagatgacaaacactgggctgcctggtcctgccactcctgcttactcatatgcaaaaaccaatggccattgtgacccagagatacaaactaccagggagctgactgcaggcaacaatgtagaaaaccaagtgcctccacgggaaaaatctgtggcattggcccaagagaaaccagtggagaatggtgggtgtcctgtggggattgagactccagtcccaatgcccagtcccctctcttccagtgggagctcactgtctcccagcagcactgcctcctcctctctaacatcctctccttgctcttcgccggtactcactaagcgtttattggggtcatcagctagcagccctggctaccagtcatcgtaccaagcagggaccaaccaacggttccatgcagctcgccacaaatttcagtcccaagcagatcaggaccaacaagccagtggcctacagagccctccatccagggatttatcccccaccctcatagacaactccgact

SEQ ID NO: 786 - DNA, 1079 bp, Homo Sapiens
  misc_feature (116)..(116): n is a, c, g, or t
ttctccagggaaaaggcagacctgtttagtaaaaaaaggatgcttttttcagtgatgtctttttttgagtgcatatgtgtgtgactcttgaagaaatccatgttcagatttatcangatgattgaagtgggtgttctgaataaagaaagctgtgaggcctgaggcagtgacgtatcaggaaacatattttattggagatttggaagctatagtaaaacataatggcaataagccaacttcccagtggtaaacccacagtggtggtttagttactaacctcttgatgaccgaggaggttaataattggatattgcagagcagcaatatgtaacctgtgtgtaatctcagggcctcaggttaacagtttcagtcagaagctaagagaaacactgacaaaatttagcttaccatgactagctgccagtttatgtggtctgtgttcgtttgttttaaagaaactaatactgtacagagatctttgacaccaacttcaaggcaccagtgtttagtgcaagcaggtagagaggacctatgaactaggtttctaattggcagtcagtgctaattcagccattagtaagtaaagtcacttttccactaaaatagtgtcccgactaaccacctccttccgtgtcttttccaaccacaaaaccacacacatagaccatctcatcttactttatttcttgcatttattgtatccaaaaaaattggtttagttttttaatgtaattgacaagactcaagcttttgaaatacttacgactgttctcttgattccaggacaccctcccctgtgtctaaacatgtgtggtatactttttaaataaattaaagcttattttacttggcattttgtggagggaattttacaacacctcgggagatatctgcagacaccctggggtgtcacaaatttaagactagaagtcattgccctaatcaaagacgactgttacactggtctagacatcttaggggaactccaaaatgtttatacttcaactctcagtaaaagctcaagcttgtcttttgccttaccaaattccatatctcaaaataaacttttctccctctga

SEQ ID NO: 787 - DNA, 611 bp, Homo Sapiens
ggaagattaataatagagcaaggaaggggtagaccaggacttcaattgtggacatgctgagttattcatttcagagaagagaggaaggtaagtggatatatgtgtctagaactcaaagggagaggtctgggctggagaaaaacatttggtagtcttcaaccatatagaaagtctttcaaactgtaagcaggatgagatcacttcagggagtgagtacagagaggcacgagtaaaggaccacaggattgagccctggaaaactcccaacattaagtgttcagagagaagaggaggagccagcacaggaaactgagaaggcacaaccagtgaggtagaggaaaatccaggagtgtgtggtgctctagaagtcaagtgaagatagtatgtatatcaaaggagacggagtgatccacctgtgtcatttgttgttcatgggtacaagtaaggtgaaaactgagaattcatggttggatttagcaacatgaagttcatcaactttgaaaagagcactttctttagagctgtgaggccaaaaacctaactgggttgttttaagagagaaaaggagggagaggaattagcaacagtgagtatagtattgacaggtctga

SEQ ID NO: 788 - DNA, 314 bp, Homo Sapiens
gacctagaggatcccgaggctttggtaagtagggtggatgtgagttggctgggaggagggggccacagattaggttggagctctggatgtacatacatagtatgagcagtgggacgtgtttctgtcttaatgcaggcatcaagggtggagtgaagtcaggtcataagtgtcatgtccgcttgggttttgttttgtttttaatgtatgtagcagatgttacagtcttagggatccgggatgggagaccccactttagaaagggtcgtcactcctttaatcctctactcaacaatgtactcttttacttttatatt

SEQ ID NO: 789 - DNA, 554 bp, Homo Sapiens
  misc_feature (344)..(369): n is a, c, g, or t
gacttgtccccaaattacaaatggacgatttcaaactttggccgatgagtctgttctttatgatttgaaataatgctgtaagtgatgagtaggtcaccaagatgggcccccaagtccagtgaacagagaccttggaaaactgcagtgtacttctagacttctctgaattccttatacattccaaatgtgcaaaatccccaaggaaatcgcgtttttcagagagctgagcaatcagatctttaggccttccaccctcacaaatgaagttaatatactactaggtcaatgacatcaggaacacaataggtttgcatggtgcttaattctagtatccttttctatcnnnnnnnnnnnnnnnnnnnnnnnnnnaaacagagtctcattatagtcagctgtccccaaattacaaatggacgatttcaaactttggccgatgagtctgttctttatgatttgaaataatgctgtaagtgatgagtaggtcaccaagatgggcccccaagtccagtgaacagagaccttggaaaactgcagtgtacttctagacaactccg

SEQ ID NO: 790 - DNA, 801 bp, Homo Sapiens
  misc_feature (603)..(603): n is a, c, g, or t
ttcaacagctgggagagagaaggaaggaggtggttgtgcaggatggcgacggcggcctacgagcagctgaagctgcatatcacacctgaaaaattttatgtggaagcttgtgatgatggagcagatgacgtacttaccattgaccgtgtgtccacagaggttacccttgcagtcaagaaagatgttcctccttcagctgtcacaagaccaatatttggtatactgggcacaatccatctggtggcaggtaattatcttatagtcattaccaaaaagataaaagtaggtgaatttttcagtcatgtagtctggaaagcaacagattctgatgtcctctctcataagaagacaatgttgcacttaactgatatgcagctacaagataataaaaccttcctagcgatgctaaaccatgtcttgaatgtggatggattttacttttcaacaacatatgatttgacccatactttgcagcggctatacaacactagtcctgaattccaagaaatgagtctcttgcaaagggcagatcagcggtttgtatggaatggtcatcttctaagagaactttctgcacagccagaggtaatgtacacgaaatanaatctgcttaattgttacagtccaagctttaattcaatgcatgctataaagtgacttcctaatcaccaagaatttcgagaaacaattctaatttaactgtttataacttacaaacttggatcaggtctaccctgtcacatcattctaggttgaagaagcctaactattttactctgatcttctatagaagccttaaat

SEQ ID NO: 791 - DNA, 503 bp, Homo Sapiens
agttgtcataatagaaaaaggtaaggagtagcgaggtagggggaaacattcaataaacagcagtccttttcactctaatagaaaaacctgttctcagttttaccagcatatttagaaaggcacaaagaagttcaatattggagttttcagaaaggaatctcaaagtgattatgagatgtaatcattcatctttcattcatcatccaaataggtacaaagcacaatgcccaagattgtgctaagaatcgaggtgcaaaagataggatttctatgctaatgaaacttctagtctaattgggaagatagacattgaacaactattacaataagcgtgacattggttgcaaaaagggaagtgccaggtgctataaggtgacagactggggaactacgggttttgggcagtagaaaagtaggatctgaaacaatctcaagaaattgatgtttcaacttaactccaaaagataaggacgatttatttggcaatggaaaagtgaggggaa

SEQ ID NO: 792 - DNA, 306 bp, Homo Sapiens
aaacgacccgaagacccactttactatggtaaaatacagccatgtaaagcagatgaagaaagtgacagccagatgtctccatcacactcgtccacagatgatcattcaaattggttcattattggatcaaagaccgatgctgagagggtagtcaatcagtaccaagaattagtcctagaatgaagccaaatgtccgatcaagatgtcacacagctccagtggctcagccagtctgagtcaggtttctccagggataagaaacagatcaaactgaaaccgtgtcagttcagtcttcgggtcttctgg

SEQ ID NO: 793 - DNA, 402 bp, Homo Sapiens
tgtcaaattcatagagacacaaagtagaatggttgtttgccaggtactaggagaaggggagaataggaagttagtgtttaatgtgtaagaagtttctgttgggaaagactaagttctacagatggatgggtggtgatggtgacacaacaatgtgaatatacttcatgccacaaaactgtacacttgcaactgttaaaatgataaattttgttatatattttttactacaataaaatttattttataaccctttcatgtcacactaagatatattaatgacaggaaataggatatgtatgcggtagaatcaactagtactcttcctcagtaagcacaaggtaatcaaaacaattcagtgggtctggaatattaaaagatagccctttcctcctgagtaacaaa

SEQ ID NO: 794 - DNA, 631 bp, Homo Sapiens
  misc_feature (393)..(429): n is a, c, g, or t
cacaatgcccagctaattttttgctgttgttgatatgtggtctcgttatgttgcccaggctgttcttgaactgctggcctcaagctatcctcctatctccacttctcaaaggattgggattacaggagtgagcccacagcctaggtcacatttatatatatgttttttgatcaaatattctaaaaataaatgtatttgatcctggacttagttcttttacttatttttaatatattgtcatattctaagattgtctagagagacactgctttgtcttgtaagtacaaattacctgaagtttctcctggggttttggtactcatattcaatgttctggtctttccaactttttcctaaaatatagacacagaaaaatagtcctgaggcagtatnnnnnnnnnnnnnnnnnnnnnnnnnnnnnnnnnnnnngtgaagagggaaagggtctttcctgtttcccttcagtcatttacaacattttacaaaacactataggtaagaaagaaggcgaatctgtaatcagggaaaggagagttccagctggctatgtgaaagctgtgtgtcatgtgactcaaccccatgattgcattgcttcaagatagagatccaccagcttaaatatttgaattac

SEQ ID NO: 795 - DNA, 441 bp, Homo Sapiens
tcagaagataaaataacagatagatattctccgaaaggatcccaggaaagaggatggcaactgccatttattatgtgaagtgaactggggacttttaactaagccatctaagttaatctcccaatagcactatgcgtaggaaagggggattggtcccttttttgcagataaggaatctgaaactcagaaaggtcaagggacgtgcccaaagtcaccctgttggaaacatgagttgagaatggaaccctggtatgcttagttctaaagctcttttctctataccatactgcattccagaatagaattatgtctttcttctcatgttttaggtatctaatgtgatttttcttgcagcaatataacttctgcaaatactatgaatcatccccaatgtatgaaattgttgaaagaaataaaaggccatgaatttgaaacaaaaaa

SEQ ID NO: 796 - DNA, 449 bp, Homo Sapiens
attataaggaattggtacatgattatggaagctgagaagtcgaaaggtctgcagtcagcaagcaagaggccaggagagcccatggtgtagttccagtccaagcccaaaggcatgagaactaggagagctgatggagtaaatttccagctgagtccaggtccgagtctgaaagcaggagaccagtgtcccagctggacacagagcaaattcccccttactcagccaatttgttttattcaatggattggatgaggtccacccacattggagagagcaatctgcttgactcagtctaccgattcacatgttaatctcatccagaaacgacccacagacacaatagaataatgtttaaccaaatgtctcagcaccctgtggcccagtcatgctgacacataaaattatcacaagtactctgctcctgattattttatgtgataaggttatta

SEQ ID NO: 797 - DNA, 1029 bp, Homo Sapiens
tctggtgaaaccttgcaacaggctgcaaaagaaaataaacgtgttgccaaatggtcacctatatcatgagaaagcatcataattagcaatataaagtagattgctccagacatccttgctagcaatgctatttaagctagactcacaagacagcatacattttcctttgcctagatcacaagactagatctctctttctcaatccagaccaaattttcactgacgatagaaaactaatagtagtaggaaaacaacaacaacaactgagttctacaaaagcagtcaacactttcctgatcactttctattttctggaaacttctttactaaacatctacctgattattctgtcatcaggaataagcacaacactatattaggaccctatgtgagaaaacttatgcatctgaacatgcaaccagcttttctccaaagcctggacgttccgaccttgcaacaacacacaggtcaacatttctagcttgttttggaacagatctatgtcctggacacatcatgttttgctatggactgaatggtgtcttcccaaagtttcctattaaagccctaacccacaatatgatggtattcagagatgaagcccttgggaggtaattaggtttagatgaggtaacgaggttgaggaagtcctcaggaatggattagtgcccttataagaaaagacgggagagcttgtgtacacactctcactccactatgcgagggcacaagaagaaggcagccatctacaaaccaagaagagagccctcaccagacagtgaagctgctagcaccttgatcttggaatttacagccttcagaactgcgagaaataaacatctgttgtgtaagctgcctagcctgtgatatttggtcatggcagcctaacccaatgttgaatgaagcttggttctgcttcctggttgtttattaaggagcagactggggaagggaattgagagggacaaatccaaaaattaacaaatctttgccacctcggccttccggttaatggggttctttaaaagt

SEQ ID NO: 798 - DNA, 642 bp, Homo Sapiens
  misc_feature (573)..(573): n is a, c, g, or t
aggtgacggtgccctgtcagcgctggatgcttactaggggtggggtcctgcttgagatcctgagttagctgcaggagatgggtccagcatgcagatgggcatcagaaagtcttggttcctccaggctcctgactgtccctatcaacccagatgtcctagcctcataggctttggcgagttaccttgcagttctaaagcttctgtttggtcatcttttaaatgatgataataactacttttcagggtgaaaagcttaaagtatgtgaaagtatctagcaaatagatggcgctttataattaggtgactaaaaacagcaatttgtaaaaaccccaaataagataaccttatccgaaagaggggctcaaaaaactgacatttgtgtgtgaatgacattgcataggacatactgtcctttaatccttaacaacctcattttacagatacagagataccaggaagttcccagggtcacaacacctggaaacaatggagttgagcttcaaggcttctgattggaaacttgtgttccttttacaatatactaccaatacaccaatatagttagtacattntatagttaaatttctgatgattctggaaagggaaataaatgatcaaaatggtaatagtacctgtgttga

SEQ ID NO: 799 - DNA, 1100 bp, Homo Sapiens
aaggtcctttaacgtactgcaaataaaaaaaatgttaagccaatcatactataggctagactcaataaatgtataattttgaaacccttaatatttttctaccactgatcagacaatatataacagaaaagagaagtagttttttaaatttcctcaattataaaacttctttagctggtcctcaaagttgtccagaaagagcccttttcaacattatctccgatcatgtcctttcagtaacacaaatcttcagtcatactgtaccacctacattcttcatataagccctgcattgcctattttgggattttgccactgatcctctcaatttggaaaacctgccattccaatctcttcgtacccaaatcacacctgttcttctagccccagccaaagcattacttctccagcaagtgattattaatgtctcttttttctgagatttcaaagcactttttctggacttctcttattatgcaaatatatgtacatgtgtttttgtgtgtctgcatatataattacctcaccacacagattatacaaaaacatattaacatataaacctggtcagtctgattacatagaaaaaatactttacaaataacaaaataaattagtactgaatgagtgttaaagagaggatactgtggaaatccaaagaaaggtaacattttttggaactttagaaggctttgccaaggagataagatttaagcaaactgaatgacaagtatggggaaagtgtcagactatgaaagaaagattttaaaaaggacatttctatttgcttgacatctgggaatcaactgtattttcctaaagaataattttggaatgcaactttctaactaaatcaaaacagtgtaactttttaatattattttttaaacaataacattataattaaagaaaatgatatgctttctagattgttggtttgactcattaaaaccactgggttattgcaagggcataagtggagataaagctgaaaaaggtaaattgtggccagaagatggagaatcttgagggccagctacagaggttttggaaaagaggagtttgaaaaacaggtctctcttctctggagtaagtagtat

SEQ ID NO: 800 - DNA, 577 bp, Homo Sapiens
  misc_feature (367)..(402): n is a, c, g, or t
gggggagtggggaggcggcaagaggacctgcggcaggccctcttcggcagtctctccggcccggtttccctcggcgtgctactgtgcgctcgatccagcaccatggggaagcgggacaatcgggtggcctatatgaacccaatagcaatggcgagatcaaggggtccaatccagtcttcagggccaacaatacaggattatctgaatcgaccaaggcctacctgggaagaagtaaaagagcaactagaaaagaaaaagaaaggctccaaggctttggctgaatttgaagaaaaaatgaatgagaactggaagaaagaactggaaaaacacagggagaaattgttaagtggaagtgagagctcatccnnnnnnnnnnnnnnnnnnnnnnnnnnnnnnnnnnnntctggtaggtattcatcttcttcttcatcaagctctgattcttccagcagttcttctgattctgaagatgaggataagaaacaaggaaaacggagaaagaaaaagaagaaccgttcacataaatcttctggaaagctccatgtcagaaactgaatcagacagtaaggatagtttc

SEQ ID NO: 801 - DNA, 1734 bp, Homo Sapiens
  misc_feature (661)..(661): n is a, c, g, or t
  misc_feature (827)..(850): n is a, c, g, or t
  misc_feature (929)..(1072): n is a, c, g, or t
  misc_feature (1130)..(1139): n is a, c, g, or t
  misc_feature (1620)..(1620): n is a, c, g, or t
  misc_feature (1685)..(1685): n is a, c, g, or t
ctcggactatggagaaaataaggtggagtcctacttgtttaaaaaatatgtatctaagaatgttctagggcactctgggaacctataaaggcaggtatttcgggccctcctcttcaggaatcttcctgaagacatggcccagtcgaaggcccaggatgccttttgctgcggccccgtggagtaggagggacagagagacagggagagtcagcctccacattcagaggcatcacaagtaatggcacaattcttcggatgactgcagaaaatagtgttttgtagttcaacaactcaagacgaagcttatttctgaggataagctctttaaaggcaaagctttattttcatctctcatcttttgtcctccttagcacaatgtaaaaaagaatagtaatatcagaacaggaaggaggaatggcttgctggggagcccatccaggacactgggagcacatagagattcacccatgtttgttgaacttagagtcattctcatgcttttctttataattcacacatatatgcagagaagatatgttcttgttaacattgtatacaacatagccccaaatatagtaagatctatactagataatcctagatgaaatgttagagatgctatatgatacaactgtggccatgactgaggaaagtgagctcnacgcccagagactgggctgctctcccggaggccaaacccaagaaggtctggcaaagtcaggctcagggagactctgccctgctgcagacctcggtgtggacacacgctgcatagagctctccttgaaaacagaggggtctcaagacattctgcctacctattagcnnnnnnnnnnnnnnnnnnnnnnnnggggggaaaagtatttttgagaagtttgtcttgcaatgtatttataaatagtaaataaagtttttaccattaaaagagnnnnnnnnnnnnnnnnnnnnnnnnnnnnnnnnnnnnnnnnnnnnnnnnnnnnnnnnnnnnnnnnnnnnnnnnnnnnnnnnnnnnnnnnnnnnnnnnnnnnnnnnnnnnnnnnnnnnnnnnnnnnnnnnnnnnnnnnnnnnnnnntagcagaaagagcggccaataaaggaccgcgaccaacaagagaaaaagggggcggggnnnnnnnnnngcgcccgcggaggaaagctcgaaaaacatgcatcactcggggggcgcgcccccccgcccgagaagcaagacgcggctagaggagcccgcacccgattctcctgcccggaaacaacacgccccgggcggaccccactctaccggggattatctacgccccccagcctaaaaaaatacacgaggcgctcgaggagcagaccgagcaccctccacccagttcgagaggagaaaaaacaagaacaacagcgggcgagatctgatccccagcgaccgccatcgccaacgggtgcacgccacgacacaaccacccgcgacacgggccctccacccacgggggctcccgagatgaaacccgacgtgaacaccacacccgcgcccgccgcaccaatgatctgataactctctagacaaaatagggggctcggtcgggagagtctgagccgccaaatcatctcaacaccgcttgctgcctcggcgcctcnctgtcgatgatgacatgcgtacacctctctcctcacgacgacaaggagccttaggtgggacgaanacacaacgcgcacgcaccaatcgcgcgagcatgcacacgtataagaccc

SEQ ID NO: 802 - DNA, 1253 bp, Homo Sapiens
  misc_feature (987)..(987): n is a, c, g, or t
  misc_feature (1100)..(1144): n is a, c, g, or t
  misc_feature (1181)..(1196): n is a, c, g, or t
ggggccattttgtgaggtgccgccgtctctcctccagcaaggtcaggacttcaggactgaaacaatgaccgataaaacagagaaggtggctgtagatcctgaaactgtgtttaaacgtcccagggaatgtgacagtccttcgtatcagaaaaggcagaggatggccctgttggcaaggaaacaaggagcaggagacagccttattgcaggctctgccatgtccaaagaaaagaagcttatgacaggacatgctattccacccagccaattggattctcagattgatgacttcactggtttcagcaaagataggatgatgcagaaacctggtagcaatgcacctgtgggaggaaacgttaccagcagtttctctggagatgacctagaatgcagagaaacagcctcctctcccaaaagccaacgagaaattaatgctgatataaaacgtaaattagtgaaggaactccgatgcgttggacaaaaatatgaaaaaatcttcgaaatgcttgaaggagtgcaaggacctactgcagtcaggaagcgattttttgaatccatcatcaaggaagcagcaagatgtatgagacgagactttgttaagcacctttaagaagaaactgaaacgtatgatttgaagaatacttggtccctggagggattatcacaccccaaatgcataatctcgttaatgattgaggagagaaaaggatcaaattgctgttttctacaatggagcaggatattgctgaaatccccctggcatatgttaacggaatcacataacccttccagagggctaacaaaatttctggttagcaaaaggatgtcccttttttcccccaaagcccagcacccgctccgccgcgctacgagcgccctcggaccagcccccagtgtgtcaacgcgaaaccgcatcgccgcgttgatcgaccccctgaaaaacggcgcctacggccacccagaaagcccggcctccgcgccgccctncgggcgcccgctgaagggcgtcgttatcgcccgtttgtccctaggtgtgtgggcgccccgccccatcaacgcctgtggagaccatcctgtaaagcactctacattggcgccannnnnnnnnnnnnnnnnnnnnnnnnnnnnnnnnnnnnnnnnnnnnttctcgttcccccttcacgcccgctttccggtcacgnnnnnnnnnnnnnnnntaatccacacttccgcgcgggctcggcgtcgggttgactcacccctctcggccggtt

SEQ ID NO: 803 - DNA, 854 bp, Homo Sapiens
  misc_feature (17)..(17): n is a, c, g, or t
  misc_feature (44)..(46): n is a, c, g, or t
  misc_feature (108)..(108): n is a, c, g, or t
  misc_feature (201)..(201): n is a, c, g, or t
accaggtcccccttttncccaaagacaaacccttttttccaggnnntttaaaggaaaggacccaaagggaccaacaccaatgcccactttgggaaggaaaaggaaaanggaaaaaataattggaatagccattttacccacccacaccagtccagtacttggccttggctttttaagaagctgtgaagactttcaggaaancttcttttggcaaaactattttatgttaaacaatagaaatactgtagaaagccatgataaaggaaaacctaaaattagttaatgtcctgagtttttaaaaaagcaaaataaaatagcatgtaataaggtgaagcctattaaacacacacaaaatcaaatcatcaaaatctcaaacttaactcattctttagtaatataatattgtattataaagtcctttggctagtcttgacattgtagaaataattttatgtagagtgcaaaacctggaagaatatgagagctgacagtgagagcagctttttattttgtataaaatggtattttaacaatactggctttccccaaattaatttacagtcagttttatcatttttagcatataaagcctcctactcctagttaagtatattctgtttagtaactactggcatacttaaccttttcatatcactgaaaacatttattcatctattgtatgtagatcgatcttttaaaaactgaatcgtgtttaaaatacactaaagaaaattacttttcccttttctttttggtgagcatttcaaaggtggggtaaattcggcctcttcactgtgtattctttccttttttttcttggctattgaaactttcctaaaaactagggggggatc

SEQ ID NO: 804 - DNA, 525 bp, Homo Sapiens
ttttttcttccacaaattgatatatttacttcattgccagcggagtacactcgcatacatagatatctctgagtcactttaagtcacataactgcaaggatacaaacaaacactagttcatccctgtggctgagtgcccttggggaatactcagatcccagtggggcttctctctgcatcttctggccactctggccgttctccctgagcccacccaccttctccccctcccttccattcttccacgatggtagcaaagcagggaagtgccagtggaaagagactgcaagtgcaccaaaggcttggacaggccagagtccatggcagctgctttggcgtctctccttggttcatgtggtgggcacttcaccacttcaaggacactgtcaactccctgaaggcaaggcccagggctttgacttccctaggcatggagagacagtagtcaggaaaagcagctccttggcagactgctgggtgtgtgacaactgtgagggctcaggggctacaagcagggacagggca

SEQ ID NO: 805 - DNA, 889 bp, Homo Sapiens
  misc_feature (637)..(637): n is a, c, g, or t
  misc_feature (691)..(691): n is a, c, g, or t
  misc_feature (701)..(701): n is a, c, g, or t
  misc_feature (795)..(795): n is a, c, g, or t
  misc_feature (835)..(835): n is a, c, g, or t
  misc_feature (840)..(842): n is a, c, g, or t
  misc_feature (845)..(845): n is a, c, g, or t
gaaatgtagaaattgtgtatatcagatactcatctaggctgtgtgaaccagcccaagatgaccaacatccccacacctctacatctctgtcccctgtatctcttcctttctaccactaaagtgttccctgctaccatcctggcttgtccacatggtgctctccatcttcctccacatcatggaccacaggtgtgcctgtctaggcctggccaccactcccaacttgacctagccacattcatctagagatggttcctgatgctgggcacagactgtgctcatggcacccattagaaatgcctctagcatctttgtatgcatcttgatttttaaaccaagtcattgtacagagcattcagttttggctgtggtaccaagagaaaaactaatcaagaatataaaccacattccaggctgctgttttctctccatctacaggccacacttttactgtatttcttcatacttgaaattcattctgctattttcatatcagggtacagacttataagggtgcatgttccttaaaggtgcataattattcttattccgtttgcttatattgctacagaatgctctgttttggtgctttgagttctgcagacccaagaagcagtgtgggaaattcactgcctgngacacagtcttataagaatgttggcaggtgactttgtatcagatgttgcttctnctttctctgnacacagattgagagttacacagtggcctgtcgggtccaccctgtgggtgcagcacagctctctgaaaagcagaacctccctactattctaacgnttttgcccctctaggaaaaatggcttcaggtatgggatanactannncanaaagggaaagggctgtctaaatctaaacaacatcccctccataa

SEQ ID NO: 806 - DNA, 813 bp, Homo Sapiens
  misc_feature (231)..(231): n is a, c, g, or t
  misc_feature (483)..(524): n is a, c, g, or t
  misc_feature (745)..(745): n is a, c, g, or t
tttaagtaaactatccgcctaaattgttaagcccttttggggcagcaaaaacagcccttattacccatcaacaaccagtttgaacggtaattcagtgttctttgggaaaatgtgtttttacaaaggagcagtaattaggcccccactgcttaacagatgaaccaaaacaaaaaaggaacgaaaatgtaacctattggtccaatgaattccctgaatttaaatgcaagacanacttatgaggccacttgaagaccaacctttacccatgacatctggtaacttttcttctttgagatggggtcacccaggctagaatacagtggggcagtcagcatcactgcagcctcgactgcctgatatcaaggcagcctcccaaatagctgggactacagatgtgtatcaacaagcccagctaacttttctatttattgttgacaggctctcactatgttgcccaggctcgtctcaaattcctggacttgnnnnnnnnnnnnnnnnnnnnnnnnnnnnnnnnnnnnnnnnnngtgagccactgtgcctggccgtgtaactattattgttcctttggaaggttttctagtatgaagatggcagctttctggtagtctgtgttgcatgcttacacaccaaaaacgttttaccaaagctggaaacacttaccaaaaaaatggttacccctgagacaacaaaaaatgaatggtacccccagagtacactgactgatatgaatactatggctattccnaaaggattttaaaactaggtgttaaacggtggaatgtgaccaaaagaggatttaatgagattttcatg

SEQ ID NO: 807 - DNA, 810 bp, Homo Sapiens
  misc_feature (797)..(797): n is a, c, g, or t
ggtcctggaacagggcaaagtatgtttagtccagcaagtatcggtcagccacgaaagacgacattatctcctgcccagttggatcctttttatactcaaggagattctttgacttcagaagatcacctcgatgactcttgggtgactgtatttgggtttcctcaagcatctgcttcctacatattactacaatttgcacagtatgggaatatcttaaaacatgtgatgtctaatacaggaaattggatgcatattcgttatcaatctaaactgcaggctcggaaagccttaagcaaagatgggaggatttttggagaatccatcatgattggtgtaaaaccatgtattgacaaaagtgttatggaaagcagtgacagatgtgctttatcatctccatctttagcctttacaccaccaatcaaaactctaggtacaccaacacaacctggaagtactcctaggatttctaccatgagacctcttgctacagcatacaaagcctctactagtgattatcaggttatttctgacagacaaacgccaaaaaaagatgaaagtcttgtatccaaagcaatggagtacatgtttggctggtagtagaacaccaagaaggaggttgctacactaaaacagagttagcagagtgctgctggttccttcggttagttatataactgttcctgcagtattggatagctatctcatacttcttttagaaagaagcctttttcattaaagatacaaccctattttgtagcctcgcacttttaaaagatgccttgagatacatttttaanagaaaactcaaac

SEQ ID NO: 808 - DNA, 526 bp, Homo Sapiens
  misc_feature (289)..(289): n is a, c, g, or t
ttaaaatttgaacaagtatttatttcttaaaatttacttaagggattagagctaatatataatagaacatttaatataacatttggagttatgtcaacataaaaatagctgtggttacaattagcacatgcaattcactgcaaaggtaaaaatacatgctatactctagacaagccttccaaatgaagttagagtagatggggtaaaacagcaagtgaacatgaaaggattgcacttagaagaaagtgggacatagctaggatataaaagaaacatacctaatgctagntcagtcactgcattgtcctactagcaaattgcacatttatttttagagtatatttcaatacacatacatattgagactagagaattttcaaatatctacctttgaaatatccctttgtttctaacacatcacattatggtattaatgtaacagcacttaaaacctgtagttatcattcaaagcttgtgttcaagagataaaagaacatcattcagacaaagcctgtgttcaagaaat

SEQ ID NO: 809 - DNA, 621 bp, Homo Sapiens
atggtaatactaactcccacctttacctacaagcatttgttgtggagtacctactctgttacaggacccttgggcttggccaactatattgcctctctagccttggagaaaaagtgtatagttgagtcttttagtgtctgttccatggtgagtagtttgaagagtatcccacagttctgggtccttgccctgcaatgcccctggccattctagagatcactttgtccttgacactgtcagtgagctcagagacctgttagaagtatggtcaccaacttccacctacaatgcaactccaggaaggattaccacaatgctcatcccaattattttgcaaatcccaatgggaggttgcaggtataatgacagagggcaggaaacctcatgtttcttgcagagtgttaggaaaagatttgaaggtgcaggtactgaaaggctgttgaggacaaatgcttattagaatgaagttcattagagatcaaagtcctgcttgatacctcaacgtatccttgatacccttgcttctcttaagccaggccctctgaatcttttcaggtacttggattgagaaattacttctttccttcttagaaaaggctgaagatcccaggcatggtggca

SEQ ID NO: 810 - DNA, 900 bp, Homo Sapiens
  misc_feature (111)..(119): n is a, c, g, or t
  misc_feature (469)..(518): n is a, c, g, or t
  misc_feature (647)..(737): n is a, c, g, or t
tctgcctccctccactttcccccacctatgttttgaaaagtttctgtcaccatataatatttaagccataatttactaatttgctttttaaaaaactttgatggcaaattnnnnnnnnntcatttttatgtttctgatactaggtattaccacatgctaagtggatctaattccagtcaaaagcaaagaaaaagggccctttagttagctgttcagccttgtcttgggcaatgtatgactttcattagtttttgttgaaacagtgaagagtgggcaggttccttcctcactgagcttcagtcaggaacccctgcctggacccagctaggccagggccagggagggatgtggcaggaggagcctccaaaaagctccagttgacctctctgtggggcatggtggcctggctacaggatggagttcaaactccttcctttctggctacctcaaatcctgtttgaagcaaggnnnnnnnnnnnnnnnnnnnnnnnnnnnnnnnnnnnnnnnnnnnnnnnnnncactttagttttgtatttaactctcaccatggtctagcctaacctactttctttgtgcccctgatgagtctgctgtctcagcttttaaaataggaaactgagaaaatatatacacacacatacgtgccnnnnnnnnnnnnnnnnnnnnnnnnnnnnnnnnnnnnnnnnnnnnnnnnnnnnnnnnnnnnnnnnnnnnnnnnnnnnnnnnnnnnnnnnnnnatggaaacagtgcagaagagattactcatagcaagtgtgcaaaggaaataaaagaattgccaaatctctgagctgcaggtacaagataaggaaccatctcacaagcattctgcaattaatctgttccgcacttaactcccactcttcctcctgtttaggctga

SEQ ID NO: 811 - DNA, 645 bp, Homo Sapiens
ctttagggcactggatttaaaattcacagtcagatctgcatttgtctcccatttacattgcgtggccttcaagcattctcaccagcttctaaggttgagggagccctctactgatggcacggctgtaatttcacagcacatagcaaggaaaactggatgacgtctaaagaactcctggatctgagaacggtaaccagtctcgaaacctagagcagacagagctctgtttctagagcctatgaaaagccaggctctagaaacatccttggtttcctcaaactatccacattatttcaggttttatactttcaggcaatagaagaaagaaaggtctgaaaggaaagtcgtgttctatgtattgaaagcctacatatttctgtgtgcacatgcacacgcatgcccctatacacatgtgcatgcacatgcacacacacacgtatgcgtgcacttctgcttttacaaatatacacacgcctacacatacacttacatactctgcaattgcagcatcatggcccgctataggaagactttgctctgtgtgtgcgtgtcctggaggaaaggcgtgggaggtacataagtatacatagaattccagaatcgtgggactggatggaacattcaccctttgtggcatgttcagag

SEQ ID NO: 812 - DNA, 259 bp, Homo Sapiens
acccataactgtgtgtagctcagaggtcaaaggtataataagaagaatatgcccagaattctcactaccatcccattttaccttccttgtggataaccatttcatgactactttcaagtttatcttgacctaacaagtaagtctgattgattaacctcatcttaatcatgggacaaaaacaagcagactcctcaaagttccatatttaaaatggtgataacgagacttaactcattggattatattgaagattaaatgg

SEQ ID NO: 813 - DNA, 647 bp, Homo Sapiens
caagaggtgaaattgccaggtggcaaacccctccaaggtgtttcctcacactttctctgttaaaaacaccataagataccctgacaaggagactttcctggtgctcatgatggagaaagagcgctgaagagagaagaaaagctacatcagtgatgaccacatgtgctgtgcggtgtacgtggtgtgtattttcattgaatcctcaagacagtcacagacccagaggagcagagcctggggaaagtttcccttagtctaaggttctacaaccatcatgggaacatgggttctgaagctgggtcttgctgcccaggcttagctctgctcttccctctcactaataccctgcctgatgccaggcctgggcatggggtgctatgcaccatcagtccacaggtgagccctgcaggtgtggagggagcacgggaaggtgtgggactgagctgtggacaacacaagggagaaagccttggaagctattggctgggaggttggcaattatggggtgataactggacaactgcaatataaagtggaataagaacccaggagaataagaacccaggaataagaacccaggagaagaagacaactaaggagagggtgctcgatgaaaacacagaagcccaggcccctctctcacaggg

SEQ ID NO: 814 - DNA, 904 bp, Homo Sapiens
agttcccaagctccttgaaagaactgaacattcagctgtcctggttctcttggtctttaagtagtaaagaaagagttctggaaactgctctacttaactgtgatgtaactcagtcgtcagtgtttcgcagaccaactgccagagttttctctgggtgtaacagcggttggactacagacaattgcttccgggcagcgttccaaaatactggctacagcagtctcatcggcacctagttcttgtaaaatattcgcaatttcttcaacataggtttcatcctctaaaagtacccatcctgtttaatcgtacgaattttcctaatgtcaactgaacatgttatagagcttttccactgttcttgtattttctttgctcgactgtttatcagttgtataggtgaagcatgctaagaaaggtctgtatttttggaggctgatcgcaatcttgtcctggaaaaagaaacaacaagccctgcaagggacctgggtatcctccaagcaagcaagctttcccacaaccatcggcttgccaactcctacctacgcctagctttgccacccgtcactggggacttaaatggactcaagttcaatccttacaagtcatcgtcccacacaagatcgtgtcctcaatccaagaatattcaagttcaatcacacatgtgggaattcatttccaacttcttcgtcaaaaaggtgatctagtcagttccctgcaataaagccgtcggcgtcaagcttccaagccaaggcacagggagtcccgggggccaggccccgtcagtccctcgctatccggccagcgctcccaacagtcacgcagtccacagaggcctggagccgggatgacggtcctcggtctcaagaagctcccgacagttctcagcaccgccaacaaggcaata

SEQ ID NO: 815 - DNA, 832 bp, Homo Sapiens
  misc_feature (209)..(270): n is a, c, g, or t
gtgtgagccaccgtgcccagcctaatttttgcatttttagtagagaggaggtttcaccatgccggccagggtggtctcaatctcctgaccttgtaatccgcctgcctcagccacccaagtagctgggactacaagcgctgccaccacatccagctaattttttgtatttttagtagagacagggcctcaccgtgccagccaggatggtnnnnnnnnnnnnnnnnnnnnnnnnnnnnnnnnnnnnnnnnnnnnnnnnnnnnnnnnnnnnnntgagccactgcacctggccaagagttttaactataaggctgctgaatgaggagataggagcaaacctcaaatacacctccctgaggagttcggggataggaattttaaggggattggaatgggccatggcatgaagatcattgattgctctaagaatgcaagacaaaatcgtgggatggggaaatgaaaaaactgcattctcatgccaatttaatgtccctgcgggattcctaaaactggtttgtgtcagctggaattcaggatctggaaaacatcttaaacaattcttaaaggaaagccttatgattctaacaacagtgatcctatctataggaaaagtgacgatgcaaatggtccgtatctagagctacatgactttcagttacaaggaagtgggccaaagtacacctgattaatgtcattcttattaaccctgtgaagatggtttcattgacagctgtgagcaccctgccccttatcatagatgtgtacttgagtgagttatttaatctctctggatatctaggatgctgtatcacctggaaggtgcatgtaatgctta

SEQ ID NO: 816 - DNA, 173 bp, Homo Sapiens
atttatagtctgatttaaaacaatcagattcaagttggttaattttagttatgtaacaacctgacatgatggaggaaaacaacctttaaagggattgtgtctatggtttgattcacttagaaattttattttcttataacttaagtgcaataaaatgtgttttttcatgttaa

SEQ ID NO: 817 - DNA, 1095 bp, Homo Sapiens
cctgaacaagaaaattgaccatgagctccacaggctgcaagctcttctcaagcatctgctcagttataacagagactcggatcagttaaccaagtggttggaatcttcccagcatactctgaattactggaaagaacagtccctcaatgtgtctcaggacttggatacaatcagaagcaacatcaacaatttttttgagttttcaaaagaagttgatgaaaaatcctccttgaagactgacgttatcagtatcgggaaccagcttcttcacctgaaagaaactgatacagctacactgagagcttctttagcacagtttgaacaaaaatggacaatgctcataactcaacttccagatattcaagaaaaacttcaccagcttcaaatggagaaattgccgtctcgtaaagcaatcacagaaatgattagctggatgaacaatgtggagcatcaaacttcagatgaagactccgtgcattcaccaagttctgcatctcaagttaaacatcttcttcagaagcacaaggagtttagaatggaaatggactataaacagtggatagttgacttcgttaaccagtcattacttcagctaagcacctgtgatgtagaaagcaagcgctatgaaagaacggagtttgcagagcacctgggggagatgaaccgccagtggcaccgtgtacatggaatgctgaatagaaagatacaacatttagaacaacttctagaaagtatcactgggagtgaaaataagatacagattttgaacaactggatggaagcacaagaagagagactgaaaactttacaaaaacctgaaagtgtgatctcagtgcagaagctgctcctggactgtcaggatatagaaaatcaacttgcaattaaatccaaagcactagatgagttgaaacaaagttatctgactttggagagtggggcagtgccattgttagaagatacagcatcccgaattgatgagttatttcaaaagagaagcagtgttctcactcaggtcaatcagctcaaaacctccatgcagtcagttttacaggagtggaagatttatgatcaactctatgatgaagtgaatatgat

SEQ ID NO: 818 - DNA, 683 bp, Homo Sapiens
ccagaggatccccatctggaagacggcgttgtcatttagtgatagagggaacgctggggaggatccattattggagtgagcattagcagcttggtctggggcacatcaagcttggaaggcatgttagtcatccaagtggagatgttgagtagacagttggacatgggagtctagagtttcaggagattggtctgggctacagaagtggatttttgaatcaacagccatgagacttgataagattaccaagggagtgtagagagataaggccttgagtgttccaatatttagagtttggaaagatgaggaataatcagcaaaggagactgcaaaagagggccaacaaaatggtagaaaatgtggaaagcctggtcacctgggagttaagtaatgaaagtgtttcaaggagaaagtaatcagctgtatctaatgctatacatgtgctaagcaagataagaacattggatctagcagcatagaggtctctggtgatctgaaaaaaggcaactttcatgtagttgtagaagagaaagttcagttataatggatcctgaagagagtgacagaagagcgatttatgactcaaggaaagaaaaaacaaatgggctggtagttaaagggaaattgagtcaagaaaaggttcaatattttttaatggtagaattgaccgtatgtgtatgtgc

SEQ ID NO: 819 - DNA, 411 bp, Homo Sapiens
gagtccgctattcatcgagcacctcgctattcatcggcacctccagcaggttgggttctagggctgaaccaggcgccaggctccagaggacgaagggactctgttgccccacactaacttgcccttgtcccaatcccagaaacccaggaccaagctgtgcctgggctccaaggacaggaacactggtccccccatcacactcacccctaagtgggctgggagccaggcagggccagggcagctgggtgggggccggggctggccctgggacccccaggaacgctaagacacaggctccagtaggggctgttgcctccaataaagcagcagtgagctttgccttggtggctgaggcttgattgggaaggaggggattaccagcttactgagtgcccatgctgatgtctaagt

SEQ ID NO: 820 - DNA, 566 bp, Homo Sapiens
  misc_feature (376)..(385): n is a, c, g, or t
  misc_feature (387)..(439): n is a, c, g, or t
ctgcctgcaggtggagcaggcacaagaaccgccgcatgcgccctccatgtccaggttgtgaccttgagcgatgtccaggatggtttcgccctcacagacttcgtacgtcttctgggagccatccttcagaataaaagttatcttcagttcttcgcctggtttcggttttttcaaatggccatggtttaagaacgaagacgtagagaagggcagaaatcttgtggttgtggtggtgcgtgtgagcagagatggagaggtgcgtaaaagatgtgctgcgatgttcgatattctagctgtgtgtccagcccgagtaacaattttcagcattgggggcgggttgagtatagatacgagaagcgcctatttcgtatgaggnnnnnnnnnncnnnnnnnnnnnnnnnnnnnnnnnnnnnnnnnnnnnnnnnnnnnnnnnnnnnnntcatttttaaaaaaatgcaactgctacacgctttgaaagattcaatcaaaagtttttccgacgaccagaattggctagcaaaaaaacgaaaatgtaatggagtcatgcaaacatgactaatagtaac

SEQ ID NO: 821 - DNA, 399 bp, Homo Sapiens
cttggccatggtaagagatacagagaagtgcagggtgccacaggagtgtctaacagaggaggtcaggggcagcatccctgagaaggtgaagcatgagcgagagtgggaagatgagtcgaaagtagccagctgaggggtagagaggagaaagaacatccaggcagggagaatagcaagtgctaaagccggggctcatgaaaaggcatgggagcaggacaaagtccgtgtggtagaggtgcggagagtggtgttaagatgaaggggagaggcaggcagagccctgggcagatgagcaaccagggcttagtggatcacagttaggactttgggcttcagccacagagcagcggtgggctactgagattttttaaagcaatagtgtgacaatcagatttgtcc

SEQ ID NO: 822 - DNA, 791 bp, Homo Sapiens
tgggccccaactgccaggcagagttagtattgctgtgcttgaaactcgtggaagcacgttctattcattgagatagaaaacacagaaggagtatgctggattgaagttggggaagtgatgttttgaacttgtcgagttaaagacatttggaacacatgtcagataagatttcaaggctggagatgcagatttacaatggaatcaatggcatataggtggtagtagaagaaaacagaagatgagctgccacagggcaaacgtgcagaatgagcagagggctgagggctgaactgtaggggaggctaaggtttgagaggaagggaggacagtaaagagaagtccaaatatagagcagctggacaagaaagaaaatgaggagaaatggataactcagaaaacaggtgggcaacattttaaggagcagagagtggtcaagaacaccaaatgttgtgcaaagttcaagaaatgaaagagaatcctagataatggacctggtggtcattaggagaggacaggagtgcagggggttgaagatgaaaggaagatggcgaggtgcgggatgtgtacgaggacctgtacttcaaggagctgcctgctaagaccaggaataagatgaaacacacccaaacctagagagaagcgaccaaaagcgttcatcgtttcctgttttcataaagaatatgaaagacttatgcatgtttatatgtcgaaagaaaaggatcattgagagcctgaagaaaagacaatgaagcaaggtccgtgaggaagcaagagggagtagcatcagcctg

SEQ ID NO: 823 - DNA, 347 bp, Homo Sapiens
  misc_feature (188)..(217): n is a, c, g, or t
gagtatacttttaaagaaaggtttatttcccattgacttctgaaggttttttatcgagagtgaggaaggcggctcaggttttttaattacttcatgattcaatattttgaatcattttgattaaataaatttgacgaatggtctgacattcaaaagcacaatcatcaatcatcatgttcctgcaggcnnnnnnnnnnnnnnnnnnnnnnnnnnnnnntctagttagagacccacatttggtagttatcagagattgggaatacttgtaatgtcagtgaattacattatccagggaaagtacatataaaaaaatatataagaagactggtcttttaagaggagaggaa

SEQ ID NO: 824 - DNA, 797 bp, Homo Sapiens
  misc_feature (389)..(398): n is a, c, g, or t
tcggtcggaccctcgcctctaccttgtctctcggctctaccttgtcttctacaaataggttaattttaagcaaaccaatctcaatgatgataaatgcatgtcattatttatttagatgtttcagctctcgcactaagtttttacaagctggtgaacactgacaaaattatttctcccacagaactataaccacacatccccagacagtataaatatatggttgaactaacattaatacacatcaccattttatcaattacataataaaacaaattgtcaagtatccaaatattaagttacacagctcaaaaggcatataaaatattagatgtctgctcaattcattagcagaaacccatttctttttttgcaagagaggttgggaaggnnnnnnnnnntcacactttcaaacaaaaataagttggtaaacacacttctgataagtatgggaaaaaaattacaagaatttcaggaagtttatgattacaataacaaagcatctctaccttttaaaaaaatattttactaaattaaagagcatattctacatgtttgcacaagacaaaggcaacattttgctaaaaataattaatagccccctcccattcttttctcaggccctccctgttaagttgcacctcagagtgcaaacattaaattaatgtaaggcttttttgtctgaagacattaaagacatgtgcttctgtacaacgtagattttcaaaatggaggtttttttaatacagcacaaagtgagatacatggaaacacgtaaaataatcactgtaagacttggt

SEQ ID NO: 825 - DNA, 485 bp, Homo Sapiens
acggccaacacttatgggatgttgcggggggcgatgctgggtgtggcaggcctccggagccggctggaggaggacaggctgctgctgctaccgaagaggatgtctgtcgctgggccttggctgtaggcagatgggcttactgccgggccctgcatacacagcgcctccagtgggagtgacagttggatacagccaggcagggtttctgccctgccgaacactttccctcccacctgcctgctcctggcgccttctccctaggggtagactcttctgcctactgaagtgggtttgctgcacattgactggtcaggggcagagtctgggtgctgtcctttggccacgtgtggggacttgtctagaccagaatgaaagggacagggtcccagacacgtttgggggtcctgattctgggctggacacggttgtggatccagagaagaggcctagtctccaataaatcttaggaattttgcaggaatatg

SEQ ID NO: 826 - DNA, 925 bp, Homo Sapiens
  misc_feature (720)..(750): n is a, c, g, or t
gggccagcggtggttccaggagcaacagctcccaaaccctgagcaaggcaaccgatcgccaggaccaggaagcatcacccaggagatttggcgcccacttccacctcttctctcagttttggacaagtgacaaaccattttgccccctcactcttcttttttaactgttaaaccaaaggaaagcacaaatgaaggaaatcctgtgtaaagcattgagaaggaaagaagcctggagcagcctctcctgtccacagccaggggttaggtctgcaggcccttctgcggtccccatcgagcatcaaggggacgctgtgtgtgctgcaagtgaccccgaaaacaaccacagccgtcacatggtcctcctgaagttggggcaccctcctctcagcaccaaaatggcccccactccttcgtgtcctcccgctatctccaaatcggacgttctttctagctgagatttttatttttccacatctgtagtgccatgaagcgattctgtctttgacttccaatggcaaacctgggtgatcgggaacaagcacgttgtacccttggctggacatggccaagacacaaggcattccacggcggcaagctgaccgcacagcagtctggcttgattttcagccgtcatcattgggttctgttttgacagctctgctgtcccatagggactgcgactgggaccaggtcaaccacgccaggggggtgtcaccagcnnnnnnnnnnnnnnnnnnnnnnnnnnnnnnncctccttaagctgctgtcaatccaaaccattggcatcatcgtttcttttgaattaaaaccaacatatcagcaatagtctgctctccccgggaatctctaacatgctctgtttacatcgataaatgcacttaaggaaaacaaacaaattaaagctcatcttaaagtccatcaaaaa

SEQ ID NO: 827 - DNA, 1579 bp, Homo Sapiens
cttaatgtagggtgaatactgaagacctccttaaggtctgcaagtaaatatagatttttccagtgctggccaaaaagcaagccagccattgtaaaggtcagggtcattctctggcagcgctgctctttaacacaatataattaagaattttgcaccacttctaattaaaacttgattacttagaaggctttccgtttgctaatgatgactaaagtttaaaaacacacatgaaaaagaaaaacagccaaaatacacctactgctctaaattttaaataaggctatcctatatgcttaatcaacaggaggctaggaaaatgtcactgagttaaatgaaggacaatctgaagactcaagaatcaatctgagtgaagttataacatatgagaaagctaaaagtaaaactatgtcaaacattttatttggtgtttcatgctatgttgatttaaacaaattaaacaagtttgttgaacagctttcttttctaatataatgactatgtgtacatggacaactgaaaacagggaaaacccccaaattaatgttttcacaaattacaagccattactaaagaccatatgcctggattaaaaaaaatagtccaatagatgaagtctctcattcaacctagcagttcaaccaatttctcttttaataaaagctgcacattacagtggtataaatttatcttttaaacactccacataaaaacatgtgcaccctctccttctacatttaatcattagtagtctctaaaatggtaaaataaaactgaatttatattagcaaatgaaagtgcaagtttgtacagctaggctcagcagcaaaagtgaagaataagaatgaaaggtgaaaagctgacagatgccacgcagagcaaggacttccatgaaggtccgtgtcctgtgtgccaaacacagtcaacattccatcattttctcattgctcttaaacgagcaaaaccaaattctttttctatttaaagaaatattaaatctttattttccccaacataattggtgatcaggtaaggcaaagataagtccaccatcactggggacagcagcaacatacagacttcagaaatagccctgaatcatcagtaacattctatcgtggtaacatcagaaggaatgcagctaacaaattaaatttataatgttgtcacattattctaatttatttgattagtttatctggaaaaactttataaatacattatgtaagagggcagtaaattattttcttgctttgaaaaaataatgttttttcacattttaaaacattttagtctgcttttgcaaaaggagttgcaagaaaaatgtgacagctgggtttgcagaatgtccatgtacaagctgtatttataagaacctggtaatctgcctataatttgcttctacaaatagagctctttgcaataatattttaaaaaaacaggcttaaactcttctcctattcattctacttgtagaacaaagaggtacttatttttcaagtattataaaaggtaaaaaattttttttgccaattttacatgttaagcttttaagaccaaaaaaatcatgcctagtcagccc

SEQ ID NO: 828 - DNA, 638 bp, Homo Sapiens
gaccttgctttggaccctacacacttcggctctctggacacttgcgacacctcaaggtgttctctgtagctcaatctgcaaacatgccaggcctcagggatcctctgctgggtgcctccttgccttgggaccatggccaccccagagccatccgatcgatggatgggatgcactctcagaccaagcagcaggaattcaaagctgcttgctgtaactgtgtgagattgtgaagtggtctgaattctggaatcacaaaccaagccatgctggtgggccattaatggttggaaaacactttcatccggggctttgccagagcgtgctttcaagtgtcctggaaagtctgctgcttctccaagctttcagacaagaatgtgcactctctgcttaggttttgcttgggaaactcaacttctttcctctggagacggggcatctccctctgatttccttctgctatgacaaaacctttaatctgcaccttacaactcgggggacaaatggggacaggaaggatcaagttgtagagagaaaaagaaaacaagagatatacattgtgatatattagggacactttcacagtcctgtcctctggatcacagacactgcacagaccttagggaatggcaggttcaagt

SEQ ID NO: 829 - DNA, 757 bp, Homo Sapiens
  misc_feature (63)..(94): n is a, c, g, or t
cgagcaatttgaagagaatcttttggattttaagcagtccgaaataatagcaattcatgggcnnnnnnnnnnnnnnnnnnnnnnnnnnnnnnnncgtatgtttaattatgttaccttttcatcccctttaggagcgttttcagattttggttgctaagacctgaatcccatattgagatctcgagtagaatccttggtgtggtttctggtgtctgctcagctgtcccctcattctactaatgtgatgctttcattatgtccctgtggattagaatagtgtcagttatttcttaagtaactcagtacccagaacagccagttttactgtggattcagagccacagtctaactgaggcacctttttaaacccctccctcttctgccccctaccacttttctgctgttgcctctctttgacacctgttttagtcagttgggaggaagggaaaaatcaagtttaattccctttatctgggttaattcatttggttcaaatagttgacggaattgggtttctgaatgtctgtgaatttcagaggtctctgctagccttggtatcattttctagcaataactgagagccagtttattttaagaatttcacacatttagccaaatctttctagatggtctctgaaagtaaagatcattttaataatcttttgatatggctttaccaagtaaggggaaatcctggaattattttccaggaccccacccacccagaagtgggaatcctttaatttttcaaaagccc

SEQ ID NO: 830 - DNA, 907 bp, Homo Sapiens
  misc_feature (738)..(803): n is a, c, g, or t
  misc_feature (833)..(833): n is a, c, g, or t
gggagtgcgccgcgtccgttcaccgcggcctcagatgaatgcggctgttaagacctgcaataatccagaatggctactctgatctatgttgataaggaaaatggagaaccaggcacccgtgtggttgctaaggatgggctgaagctggggtctggaccttcaatcaaagccttagatgggagatctcaagtttcaacaccacgttttggcaaaacgttcgatgccccaccagccttacctaaagctactagaaaggctttgggaactgtcaacagagctacagaaaagtctgtaaagaccaagggacccctcaaacaaaaacagccaagcttttctgccaaaaagatgactgagaagactgttaaagcaaaaagctctgttcctgcctcagatgatgcctatccagaaatagaaaaattctttcccttcaatcctctagactttgagagttttgacctgcctgaagagcaccagattgcgcacctccccttgagtggagtgcctctcatgatccttgacgaggagagagagcttgaaaagctgtttcagctgggccccccttcacctgtgaagatgccctctccaccatgggaatccaatctgttgcagtctccttcaagcattctgtcgaccctggatgttgaattgccacctgtttgctgtgacatagatatttaaatttcttagtgcttcagagtttgtgtgtatttgtattaataaagcattctttaacagacnnnnnnnnnnnnnnnnnnnnnnnnnnnnnnnnnnnnnnnnnnnnnnnnnnnnnnnnnnnnnnnnnntttctccctttcccaccattaccaatatanttttttgtgggcgccctccggcccctcaaaaaatttttttaaaccatttctttttgggcgccggggccaaattt

SEQ ID NO: 831 - DNA, 960 bp, Homo Sapiens
ggggtttggctgaggggagcgagcggcgctttgggggaggggtcgcgtaggcgcctcacctgaccctgcggccgtgcggttgctgctccggggcaggtctccttccaggccaggggcccggaatcatgtacataaagcaggtgattatccagggttttcgaagttacagagatcaaacaattgtagatcccttcagttcaaaacataatgtgattgtgggcagaaatggatctggaaaaagtaactttttttatgcaattcagtttgttctcagtgatgagtttagtcatcttcgtccagaacagcggttggctttattgcatgaaggtactggtcctcgtgttatttctgcttttgtggagattatttttgataattcagacaaccggttaccaatcgataaagaggaagtttcacttcgaagagttattggtgccaaaaaggatcagtatttcttagacaagaagatggtcacgaaaaatgatgtgatgaacctccttgaaagcgctggtttttctcgaagcaatccttattatattgttaaacaaggaaagatcaaccagatggcaacagcaccagattctcagagattaaagctattaagagaagtagctggtactagagtgtatgacgaacgaaaggaagaaagcatcttccttaatgaaagaaacagaaggcaaacgggaaaaaatcaacgagttgttaaaatacattgaagagagattacatactctaaaggaagaaaaggaaaaactagctcactatcagaagggagataaaatgagaccagcccctggaatataccatttacaatcaggaaacttaaccgagactcgtgcccaaacttgatgagcctttctgctagccggagaaactagtgggagaaaaaatccagaacaatttagaaaatgctcaaccaggatgccaggaaaataaaatgggaggatattcaaacgccca

SEQ ID NO: 832 - DNA, 939 bp, Homo Sapiens
  misc_feature (375)..(384): n is a, c, g, or t
  misc_feature (692)..(700): n is a, c, g, or t
ttttttttgctgcaccaaatttaagaacgccctttcaggcaagcagtggtctctagctgttaaaacatttccttagtggatcacaatagcttctaaaactgcctttctagtaaaggccatcagagaggtaatactaaactgtgcatttgccaaataagaatatgaattgtataaaagctcatattccaatcctagatcaaatggcaaaagttctacaaagttggtttccatgtttgtataaaagctccgactgattttatgtattttgctatgaaattacctttgggtcttataatcagtatacctctactcaggaatgtgcaaatgattttatacagcacgacgctagtaccgctctgtatgacagtaagggtnnnnnnnnnncttcttttctaaatggaaagaaaatatccctagtcagaaataaactgacaaatttacattctcctctcttaaaaaagtaaataaaataacattattcaaaacgtgaattagctatagacatacaatacaattacatagatacatatcaatacagcacattcaatctgccaaaaaattaatgattacaaagccagtatggatgctgcaatatcaagagagatgtatgtacaatgattagagcatttgtaattgcactatacctacaggcagtctgtttgttaaattacaggtactttctgagcaagggnnnnnnnnngtaagctgtgttgtttgaggctgggagaatcaaggatgagaacatctcattactgttgggcggctttggtactcatttaacaggccgtgatttttctccctccccctttgttgttccaaaagagtgatttatatggaagtttacactagtgccaaataccactgtagttaaaatgagaccagtatcatggcctaattctaacgtcccagcagctttgaacaatcatgatttattttccc

SEQ ID NO: 833 - DNA, 1649 bp, Homo Sapiens
  misc_feature (632)..(758): n is a, c, g, or t
  misc_feature (769)..(782): n is a, c, g, or t
  misc_feature (942)..(952): n is a, c, g, or t
  misc_feature (1008)..(1019): n is a, c, g, or t
  misc_feature (1501)..(1501): n is a, c, g, or t
attgtgcaagcatttacatgccacataattgcttgccattttatggttaaaaacggcacattaggcagttgaatatgacgttaccttgcagactaaaaggttgaaggcccgaaactaacttttagctaacaataagggctgtgccccaatggaaactgagttcattttctgagaaaggtttggatgactgaaatatttcctctacagtcaaggactttggcatgcggtggctgaaactgagcttttttgtgtgggctccagttctcactgttctgcaatgctcatggcaagttgaatggtgagctagcttataaattaaagagctctgaactgtattcagaccgactgggtatctagcttactgttttaacatcattgttgaaaccagaccctgtagtccagtggtgctgccctgttgtgcaaactgctcctttttctcgtgtttttgtaaagagcttccatctgggctggacccagttcttgcacatacaagacaccgctgcagtcagctaggacctttccgccatgtattctattctgtagtaaagcatttccatcaacaatgcctaattgtatctgttatttttggtttaacacacactgattcatactaataaatattttcagttttnnnnnnnnnnnnnnnnnnnnnnnnnnnnnnnnnnnnnnnnnnnnnnnnnnnnnnnnnnnnnnnnnnnnnnnnnnnnnnnnnnnnnnnnnnnnnnnnnnnnnnnnnnnnnnnnnnnnnnnnnnnnnnntctttggcggnnnnnnnnnnnnnnaaaaaagtttttgaaacttctctcggggcgccggcgcccaaaagaaaaacgacttggccctccccggttttcccaaaaaaaccggggcttccgcccagcggttttattcctccccaaacaaaaaaaccccccgcggtgacaaccctccgcgttttaaaannnnnnnnnnngcgcgcttttgcgaatatttttccgggaccccgccataccaggcgcatcctatggnnnnnnnnnnnnacatataaaacccccgcccccgcatgtttgcagatttctccgcagaagaaaagggggtgagccactctccattaataccgtttcttccgtcgacaacccgtgaggagtaccctccacaccacaacgaggtggtgcggagggataacatacccgggcgaaccgcggccgcagagggcggcgcaaattagcagtgttaccgcgtttggctctcacctgtgtgtgcgcgcgctacataaatataatttttcacctccccgcgcgcgcccgcaaataaaacagcggggtgttaaaatatccaaaacgccgccgctttacactattatggtggctaatgcgccggcctaacaatagttataaaaaattggggggaggacaacctccccttccccctcccggatcccccgcccgccttttttttccgcactattatccgcctctgccccgccgcctcagaatacctctatcccgccgcggagaaattnattcgcgccccgtattttctgcccgccgcgaacacgcccgccaaccagtattctcgggaaaataatataatgggactcaaaaacaccgctccccgcccaaatacgaacgtcgcggtggttattacttctcgccccgcccgccgccccg

SEQ ID NO: 834 - DNA, 539 bp, Homo Sapiens
agtgtgagccaccgcgcctggcccaagccctccacattttcaatccaggagccttgagtctgtgttgtgtcctgacacctccaagttctagggccgtcaggacacgggagggtttggggacagagtgtccttcctctgtcctctcatcccagtcctgatggccgcttggtgagtgtctggtgccctggtggcctgccccagctctcttctggctttctgagcaggaagcgagcagaggctccacaggcttacgctgctctcctgacagccacacgcgaccctcggtgcagagtgcagaggcggctctggttcctccagccacctcagtccctctttgggaggtgatgttcccattgtttttcaaaggcctcaccttcaactgtctgtcttagaattcccctctggagggctatggcctccctatgctttcacttcccacctctctacctaagttccttcccagcacatcgccagccctgggcctggggatgtccccaatgctgtacctggctgaccccggattaaaagcctcatccacg

SEQ ID NO: 835 - DNA, 1935 bp, Homo Sapiens
  misc_feature (100)..(122): n is a, c, g, or t
  misc_feature (1749)..(1789): n is a, c, g, or t
gatccggcggctcggcttctcgaaggtaaacagcgcttcctcttcctcctcgccgcgccggggccttttatagttatttctcgcctggcactcgcccggnnnnnnnnnnnnnnnnnnnnnnncgccgcggcgggggcagctcgcaaacctgtggcggtgacgtgagccccgccaacccggaaacggcggcggcggcggcaccggaggctccgaggctcctgcgctcccgcgccgcgctcccctcgcccgcccgggccgccaggagaagaaactgaggcctggaatttgattaactcattcaaggttacccagttgatagaaggacaaggacagaatcaccagcactggctgaagatgcccagcctacagagtctgagaaggaaatttataatcaggtgaatgtagtattaaaagatgcagaaggcatcttggaggacttgcagtcatacagaggagctggccacgaaatacgagaggcaatccagcatccagcagatgagaagttgcaagagaaggcatggggtgcagttgttccactagtaggcaaattaaagaaattttacgaattttctcagaggttagaagcagcattaagaggtcttctgggagccttaacaagtaccccatattctcccacccagcatctagagcgagagcaggctcttgctaaacagtttgcagaaattcttcatttcacactccggtttgatgaactcaagatgacaaatcctgccatacagaatgatttcagctattatagaagaacattgagtcgtatgaggattaacaatgtaccggcagaaggagaaaatgaagtaaataatgaattggcaaatcgaatgtctttgttttatgctgaggcaactccaatgctgaaaaccttgagtgatgccacaacaaaatttgtatcagagaataaaaatttaccaatagaaaataccacagattgtttaagcacaatggctagtgtatgcagagtcatgctggaaacaccggaatacagaagcagatttacaaatgaagagacagtgtcattctgcttgagggtaatggtgggtgtcataatactctatgaccacgtacatccagtgggagcatttgctaaaacttccaaaattgatatgaaaggttgtatcaaagttcttaaggaccaacctcctaatagtgtggaaggtcttctaaatgctctcaggtacacaacaaaacatttgaatgatgagactacctccaagcaaattaaatccatgctgcaataacaattctggaataagcacctgctgtagacagaagacagtattctgcaatgactgagaatgcagttttttagtgattgcaattactatctcatttattcttgcttttatttctttcctctgttcctcttccctcttttttaatcatgttcttaagacttcttttctgtgccaaaatcagtaaagttacactctgaagggatatcatcctttccaacgggccatctaaggcagctaattatgcattgcattggggtctctactgagaaaaaatctgtgacttgaactaaatatttttaaatgtggattttttttgaaactaatatttaatattgcttctcctgcatggcaaaactgcctattctgctatttaaaaaccctcaatgactttattttctactgccgcctttttcatgtgcaaccaaaatgaaaatgtttaaattaactgtgttgtacaaatggtacccaacacaaactttttttaaattagtaatannnnnnnnnnnnnnnnnnnnnnnnnnnnnnnnnnnnnnnnntaaggatgtatgttgtgtgtttaacctttattaactaacgttaaaagctgtgatgtgtgcgtagaatattacgtatgcatgttcatgtctaaagaatggctgttgatgataaaataaaaatcaggctttccttaaaaccacccaac

SEQ ID NO: 836 - DNA, 491 bp, Homo Sapiens
  misc_feature (217)..(217): n is a, c, g, or t
  misc_feature (219)..(219): n is a, c, g, or t
  misc_feature (221)..(221): n is a, c, g, or t
  misc_feature (223)..(223): n is a, c, g, or t
agtgatgtgatattgaagatgaccactttggaagtttgagttttaaaacattaggccttcatgctggaattaactgagacttttgaggcctttgggatgagatgaatatattttacatgtgatgacatagattttgggggccagaggtgtaatgttttggctgagtgtatgccacctcagattcatatgttgaaaccttacccccgtgccccccctntncnancacaatgtgatggtatttggaggccctgtctctggtggtttttaggattggaggacatcatgaagatggaggccttgtaattgggattagtttcctgataggaatccctagagagctagctttgcccttcaccatgagagggtgcagtgagaagatagctatctttgaaccgggaagcaggcccttaccagacatggactatgccagtgccttgatattggacttcccagcctcccaaaccatgagaaataaatgtttgttgattaaa

SEQ ID NO: 837 - DNA, 1202 bp, Homo Sapiens
  misc_feature (1074)..(1089): n is a, c, g, or t
ctcgatgaaactggccagctcctgtggaagtcacatacaagtacatgagatttcttattacacacaatccaaccaatgcgaccttaaacaaatttatagaggaacttaagaagtatggagttaccacaatagtaagagtatgtgaagcaacttatgacactactcttgtggagaaagaaggtatccatgttcttgattggccttttgatgatggtgcaccaccatccaaccagattgttgatgactggttaagtcttgtgaaaattaagtttcgtgaagaacctggttgttgtattgctgttcattgcgttgcaggccttgggagagctccagtacttgttgccctagcattaattgaaggtggaatgaaatacgaagatgcagtacaattcataagacaaaagcggcgtggagcttttaacagcaagcaacttctgtatttggagaagtatcgtcctaaaatgcggctgcgtttcaaagattccaacggtcatagaaacaactgttgcattcaataaaattggggtgcctaatgctactggaagtggaacttgagatagggcctaatttgttatacatattagccaacatgttggcttagtaagtctaatgaagcttccataggagtattgaaaggcagttttaccaggcctcaagctagacagatttggcaacctctgtatttgggttacagtcaacctatttggatacttggcaaaagattcttgctgtcagcatataaaatgtgcttgtcatttgtatcaattgacctttccccaaatcatgcagtattgagttatgacttgttaaatctattcccatgccagaatcttatcaatacataagaaatttaggaagattaggtgccaaaatacccagcacaatacttgtatatttttagtaccatacagaagtaaaatcccaggaactatgaacactagaccttatgtggtttattccttcaatcatttcaaacattgaaagtagggcctacatggttatttgcctgctcactttatgtttacatctccccacattcataccaatatacgtcaggtttgcttaaccattgannnnnnnnnnnnnnnnaccaagtcttacaggggattattttacgtggtttccctggtatctccactttgtggctggtattaaaaacacaccctcccatttttggaaaaaatcctaccgtttgaacaaag

SEQ ID NO: 838 - DNA, 538 bp, Homo Sapiens
aaatcggcacgaggcacttctcagatggggtcagatggagagacctctaggagaaagacatccccattgtgtgagtggcatttccttaagctggcaggaacagggagcagccctgtgtcgggggctggaatagttctggccagaccccgttccccttcctctatgaaggaataagttggaccaagggaagtcggggacgtaaaaaatgaagcaaaacaatgccagggtgtctcccgctttactcttcaggaatggtgtcccaagttggaggctttgtgtcagctgcaaatcctaccagttatgtccaagaatggctttccctcgggcaggtggcagcggccatctcccactgggaatatggcgtagtatctccggtccattccttggatgctaaggactgcgggaatgagggagtcagataaagaacaaacctcgaaacgaacagttaaattgaaatgctatgtgcctgacccaatggtaggcacatagtaggcactcaactcatatgtttaattgaattgaaaatatcccttaggaa

SEQ ID NO: 839 - DNA, 693 bp, Homo Sapiens
  misc_feature (569)..(577): n is a, c, g, or t
ttgcggccgctaccccgaccactcggtggacaggagagaaggttcaaggtcaatgatgggagaacgagaaggacagcattacccagaacgccatggaggaccagagcgccacggccgggactcccgcgatggctgggggggctatggctctgacaagaggatgagcgagggccgggggctgcctcctccccccagacgtgactggggggaccatggccgaagagaggatgaccggtcatggcagggcacggccgacgggggcatgatggacagggatcacaagaggtggcaaggtggcgagagaagcatgtccggtcactccgggcctggccacatgatgaaccgaggaggaatgtcagggcgcggcacctttgccccaggcggcgcttcccggggccaccccatcccacacggtggcatgcagggcgggtttggaggccagagccgggggagcaggcccagcgatgcccgcttcactcgccgctactgagtacttggaatcctgtgtcctgtctcgtggcaacaaggctatgttctgttaggagttaccttaaactgtgtaaaaatannnnnnnnnaatctgctgccatattgtagctcaatacaatgtgaatttgtttttcgtgttggggataaccccaacaaaactttccaatgtccccgaagagatccgggtgttgggcgataacatca

SEQ ID NO: 840 - DNA, 585 bp, Homo Sapiens
gcaaagaattacagcttagacactttgaaaagaaccatcttgattgagccaacagcatgagaatgtttccagcgattcccttgcgagagctagcattgatggatgggctcagaggtacacagtcttgctgtgcactgcgttgtaaggcagcttcttggaaaatttagaaaaataaaacattaaaaattggcatactcaacgtgtcatgaaaaaaccttaagaagagagattggttaggatcaaaatttaataaccatgttaagtcttctgagaggaagaacctttaaccgccctgtgcccagggcttaggagagtttgctcggagactgtgaagggagtcattgctggggtcactttttgactcaggggcccagataggaatcagtggccataggcctgtgcccggcctctttatggctggctctcagctgacattctggaatgattagctgttctacaggctctgtcctagataatgacgcttagaccccctcagacagaacctatgtcgtgtggcttacaaataccattttccatttgctgatgaggagttcaggactcaaaagtcatacctctgggctctgc

SEQ ID NO: 841 - DNA, 791 bp, Homo Sapiens
taacttcccattccacttctaaatactctcttaaaattttgacaacatttgaccgagaagggcctcggagtgagtccataagtaggatacaaggtctggttatcctgatcttctgagaagtcgacgagttcatcttcaagcattttaccagcttcaggtgattcatcgctatagtttagtctgattttgcttaagccatctgtatgatgtgtggaacttaaactttcattctgtaggccattctcacttttagtcctatcagcaactttctgggatgtagattctcctttattgaattcttcattttcactcgcagtatgatttatttttttcacactgtattttacactgcatatgtttctcttataacgagggtcactttcttcctgcccaggattggaatcaattacagctatgcaatgttttttgtttagcatcttcttaattacaggcttggcagaagagttttgtgaacaactctccatttcactggctgaagaagaaatacaactgtcctccacagttgaacatttctgtatgacagcattttcatgggtaatgaggattaggttcatactttggttcttccaaaccggggaaacaaacaacagccaaaaaccagtgtgcactgtaaaaaacaaatgaaatgactaaatatgttattagaaaagtttattatatttggcaatacatatcaattaaaatgtttttttctaaagttcttgccaattaatttattaaaaatgcctaattctggccgggcgcagtagctcacgccagtaatcccagca

SEQ ID NO: 842 - DNA, 650 bp, Homo Sapiens
agaaggtcttgacgttcagagtaattcaggatttgatgttgtaaacagtgaaaaggggaactctcgggtagggtgtactttgacgaggtaatgttttagcagcagctctgtgtatgaaatacgaggagagaaaagagcagcaggtacagttgtccaaatgggggccagggaagccttggcctgggctggtggctgatgtactaggagggcccacacggtgcaaaggtgtgggatgcacagaaggttgcccatttcttagcatttctgttagattgtagggtccagtgctacatgaccactgtagtagtatgtctggctaccaagtaaagtcctacgtgccttgtgatttttacatgtagatttaaaaagttgacgtgtaacttacccatagtaaatgaacaagtgtgaagtgtgaattctggtggacttttacatatgcatccaccgccatataaactccagccacagcaagatgcagagttgaatcagcaccccaaaaggctcccatgccccctcctcctcctagaaagttcaccagtgttgcatcttccagaaaggtgatgaccgttttgcctttgtcggcaaagatgaattttgcccgatttttaccttcatgtaagtgcccgccaatcgaagggatcctctagatt

SEQ ID NO: 843 - DNA, 684 bp, Homo Sapiens
gagcaaggcccagttgagcaagtggcaacagctctcttcccaaggctgcggcaatggaggcctggcccagcccatgtaggaccacgcgggtgctgaggggcaggtgcagggggctccgagcccctggtgactgtcaccgtgcagtgcgccttcacagtggccctgagggcacgaagaggagccgacctgtccagcctgcgggcactgctgggccaagccctccctcaccaggccaagcttgggcaactcagttacctagccccaggtgaggacgggcactgggtccccatccccgaggaggagtcgctgcagagggcctggcaggacgcagctgcctgccccagggggctgcagctgcagtgcaggggagccgggggtcggccggtcctctaccaggtggtggcccagcacagctactccgcccaggggccagaggacctgggcttccgacagggggacacggtggacgtcctgtgtgaagagcccgatgtcccccttgcagtggaccaggcatggctggagggccactgtgacggccgcatcggcatcttccccaagtgcttcgtggtccccgccggccctcggatgtcaggagcccccggccgcctgccccgatcccagcagggagatcagccctaatgatgctgtgtccatgatgcttttaataaaaacaaccccccctgc

SEQ ID NO: 844 - DNA, 130 bp, Homo Sapiens
catttaagtgtggtgtatctgtttcctactcttgcttattctataagagaagtgtaatgggctttagatccagtctaaaatagttttggtttggatattgtcttccattaaagtttcagtacgcagagaa

SEQ ID NO: 845 - DNA, 706 bp, Homo Sapiens
cagtatgacctgcagaaagcaaacagtagtgcgacggagacaataaacaaactgaaggttcaggagcaagaactgacacgcctgaggatcgactatgaaagggtttcccaggagaggactgtgaaggaccaggatatcacgcggttccagaactctctgaaagagctgcagctgcagaagcagaaggtggaagaggagctgaatcggctgaagaggaccgcgtcagaagactcctgcaagaggaagaagctggaggaagagctggaaggcatgaggaggtcgctgaaggagcaagccatcaaaatcaccaacctgacccagcagctggagcaggcatccattgttaagaagaggagtgaggatgacctccggcagcagagggacgtgctggatggccacctgagggaaaagcagaggacccaggaagagctgaggaggctctcttccgaggtcgaggccctgaggcggcagttactccaggaacaggaaagtgtcaaacaagctcacttgaggaatgagcatttccagaaggcgatagaagataaaagcagaagcttaagtgaaagcaaaatacgaaattgagaggctgcagtctctcacagagaacctgaccaaggagcacttgatgttagaagaagaactgcggaacctgaggctggagtacgatgacctgaggagagacgaaacgagccccacagcgggccgg

SEQ ID NO: 846 - DNA, 612 bp, Homo Sapiens
  misc_feature (206)..(225): n is a, c, g, or t
  misc_feature (536)..(536): n is a, c, g, or t
cacactgttcactggtttattgagattcggggagatccttccccaagagacaccacagtgtgaaagggacaccacctcccaccccataggtccatctgtctatcccaacagtcaagggtgccttcctttggtcaggattctcatcaactatccactggaagcagctctccaaacctgcccccacttatttttccttaattcccctnnnnnnnnnnnnnnnnnnnngggagcagtcttgggaagaagatgatggtgagtgtagactgagggtagtacatgaatgcaatggagatggggggaatctgagcagaaatggagattctgtgacaaggagagggtgtggatggccccaccaaacatgaattggggaaaagtgcataacaatgtgcagggtagggtacatatggctctgtcagaagaataccatgatttaagggaagaaagtacacaaggtacatggagggtacacagggaaagtacatggataaacatggacgtgtgcaaataggaaagacatgactcagcatgctagacanattgcacatgcctacccaaacacgctcaagggcagacccatgaccatgagaggggcacacgtagctgtgaatgcag

SEQ ID NO: 847 - DNA, 809 bp, Homo Sapiens
  misc_feature (722)..(740): n is a, c, g, or t
cgaataggagagctggtgttttccttgcactctcgtggacagctgtgtgttcaggatgctgtggaaggcattcctaagggttggagcagatgacttccaggcagtctctcgttttgagtccacgctggcgtggttgcagtctgtgggaaagtggggcaggcaggtggacttcagaagagcttgaggggtcagcactccgcacacccatgccctcaggtgcgatggataaacagaatggctttaggtgccgtctgtccaaattaccagcggaactttccttcccatgcagtattgttgtatgtacttgtaacctttgattaggtttctctctgtactcttagatgtccttgcttttcttccccatcctgcctttaacctttctaatcttgccaaagctcttgagtgtttccccatcagtttccttctctcttatatttcagttttttaattgagttcatgatcaaaccttcatctgatcacatcacatgtactgtgcatccactgtgattagatagcttatgggatccttgaaatcacattgacaggcactgtaaagtcacagccaagttagcaattattagttgcacctcagagaatgttggaataatgatctttgaagatgggattgttcatatatttggataattattgctgtggatttctctctagcattttagctcattccagtaaatgatttttttctttatgaaatagaactaccnnnnnnnnnnnnnnnnnnngttcaacaacaacaaactgaagggggagaaaaatacaccattaccacagcaacaaattagtttatgcta

SEQ ID NO: 848 - DNA, 482 bp, Homo Sapiens
ggcacgagagagaaagagctgaactccactctcgatgctacttacagaggacatctgtaaagtctcataaaagaccttgaatgatgcctaggaatgcagagcccctgggtcctactccatcctccagcctttgtccttgtcctggcctcctgctctccagatctgtaaactgggctcaaggactgtacaagcagagtacaactacccgcctccccggtgccagggcgcctgttgggtttggtcctgtgtagatgattcccagagtctcattcatccagctcctcttcagacagaaggtccccatggtcagacagctggtctgcattgctggtactggttgcatcatcctcatcctcagagctggcttcacaggcagtgtggaagagctgcatgagttctcgaaaatggtgggaaacctaagaaaggaggagggctgtattcactgatccttagtaacatgttaacatttatgaagcactaaa

SEQ ID NO: 849 - DNA, 572 bp, Homo Sapiens
catgtctatacgtaatcctctgtaaccattctcctcaagtcttccatcctcacgttcaggctttggttcctccagtggtggcttgtgttggagacccattttacaaaattacatctaaagcacttcttgttactcaacagcatgtcaaagtaattcgtcctgtagatcagccttcctcgtttgaagcaactccttatatcaaagatctatttacctgtaccattaagagattaaaagcagctgacattgatcaggaagtcaaggaaagggctatttcctgtatgggacaaattatttgcaaccttggagacaatttgggttctgacttgcctaatacacttcagattttcttggagagactaaagaatgaaattaccaggttaactacagtaaaggcattgacactgattgctgggtcacctttgaagatagatttgaggcctgttctgggagaaggggttcctatccttgcttcatttcttagaaaaaaccagagagctttgaaactgggtactctttctgcccatgatattctaataaaaaactatagtgacaactccgacttggggttt

SEQ ID NO: 850 - DNA, 527 bp, Homo Sapiens
ccacttccaatgagatttctccagtgcccgccagacctgactgaaaaaagtcattatcttgatgaagcagatgtagtgtaccgaaatcccttaaactggttacatagagagtttcatgatgatgcatcattgcctactcacttgatcaccttcagcattttggaagaggaaataagcgctttcctaatttcaagcaattataaaagaactgctgttttcttccacactcacttgccagagggtcgaattggaagtcacatatatgtctatgaacggaagttaaaagggaaattcaacatgaagatgaaattctgaactttcctagataaattaacattgctgggtggaaatattcagatgctgcttaaatacttcggtaaacactgggtaagattcatggaacttagaaaaaagctgtatgaactgctttaccaaatatcactactgaggaaatgtataaaataccacatagtataaaattacatgttaatacaatgccagattttaaataaagacctttagttttc

SEQ ID NO: 851 - DNA, 933 bp, Homo Sapiens
atatttccctgagtctcagggataaagcctttcagctttaaatcctacatgtgcctcataatgctcagaagccacagtcaactctggtgagacttctcatctgagaaacaaagagaaacagggccctggtttctttatttttgtgatgaagtttgtagtaacgctatgtgtctgggaattctacgtgggttaacaataaataaactgtatagcacacatggaatgcatgcacacagtaggccttcaatgagtagcagtgtgtatgagagttattagtcaaacccgggaatggtcaaggaacagaaacgctcagccttccatctccctgcattttcacacgaatccttcattccacacacagtcttgagcccctgctgggtgctaagcattgagttgggaggtacagaaatgaagaacgcatgatgcctaacttcaagacgtgaatgatctagttgcgagggagacatagataaaacccagcatagtgagctcagtgacacagaaagaggatgtactcagggtggactggactggcatgaatttccaaaagtggccaacaggaactagccaggtggaggaggagcaggagggtgacacagacggagggtgcagccagcctaaaaggtccataaaagagagggcagtgcacatgtgcaggacaacccggagctctccacggctgtagtgaacagaagaaaaagaatggccttaccaagtaagtaaacttagaacacaaacaccactccagttgacctgagaatcacatatactacagggagaatagagcactttcttaaaatggagcgagagattttcctctctcctttccataaaaccacagtgccacgtgcagatgatttttttcagacaaattagaataatacatgacttcttttttgaatctttaaaaaatgaaattgtccacattattta

SEQ ID NO: 852 - DNA, 645 bp, Homo Sapiens
ccggtggtgctgggggagcaggtccagcttccctaccaggacatgctgcagtggaacgaggcggccctggtggtgccaaagcctcgtgttaccgaggttcatttcctgctcagaagcctctccgatagtgacctcctggctatgaggcggcaaggccgctttctctgggagacttacttctccactgctgacagtatttttaataccgtgctggctatgattaggactcgcatccagatcccagccgctcccatccgggaagaggcggcagctgagatcccccaccgttcaggcaaggcggctggaactgaccccaacatggctgacaacggggacctggacctggggccagtggagacggagccgccctacgcctcacccagatacctccgcaatttcactctgactgtcactgacttttaccgcagctggaactgtgctccagggcctttccatcttttcccccacactccctttgaccctgtgttgccctcagaggccaaattcttgggctcagggactggctttcggcctattggtggtggagctgggggttctggcaaggaatttcaggcagcgcttggaggcaatgttccccgagagcagttcacggtggtgatgttgacttatgagcgggaggaaatg

SEQ ID NO: 853 - DNA, 1232 bp, Homo Sapiens
  misc_feature (852)..(854): n is a, c, g, or t
  misc_feature (856)..(856): n is a, c, g, or t
gggggagcgaggctggaggcgcgggagggcagcgagaggttcgcgggtgcagcgcacaggagaccatgtccgggggcagcagctgcagccagaccccaagccgggccatccccgccactcgccgggtggtgctcggcgacggcgtgcagctcccgcccggggactacagcacgacccccggcggcacgctcttcagcaccaccccgggaggtaccaggatcatctatgaccggaaattcctgatggagtgtcggaactcacctgtgaccaaaacacccccaagggatctgcccaccattccgggggtcaccagcccttccagtgatgagccccccatggaagccagccagagccacctgcgcaatagcccagaagataagcgggcgggcggtgaagagtcacagtttgagatggacatttaaagcaccagccatcgtgtggagcactaccaaggggcccctcagggccttcctgggaggagtcccaccagccaggccttatgaaagtgatcatactgggcaggcgttggcgtggggtcggacaccccagccctttctccctcactcagggcacctgccccctcctcttcgtgaacaccagcagatacctccttgtgcctccactgatgcaggagctgccaccccaaggggagtgacccctgccagcacaccctgcagccaagggccaggaagtggacaagaacgaacccttccttccgaatgatcagcagttccagcccctcgctgctgggggcgcaaccaccccttccttaggttgatgtgcttgggaaagctccctccccctccttccccaagagaggaaataaaagccaccttcgccctagggcccggnnngngggttggggcggggggccggggccccccgggcgccccggaaggcgaaaaacaacatggcgcgcccccctcgcccccgaaaaaactttttaaacctttcgtttggggcccgggcccataggggaagggaaccagggcattaggtggtttccaaagaaacccctggacatgacaagggggttggattcctcccataaaaaacacgccggggggggaaccgaagcggttcggaacaaatcccaaaggagattctgagggccattatctggagtcctttcacggggaggtccaagcgggcgctccaatttcaagattaccccccagccggggccattcttggggaaaagctggtggaatctccttaaggaattgcggccg

SEQ ID NO: 854 - DNA, 1206 bp, Homo Sapiens
  misc_feature (341)..(341): n is a, c, g, or t
ccccccccttttgggtttaaggtttccctctttcccccccgggaaaaaattttgggctccccggggcggccattttgctggccagggaaaccttaggaagaagccttttttggtagggctggaatttcctttaatgttcccagttgttcgttccctttggggggcaggcagggagaaaccatgttggcttcccaaggaaaaggtggctggtgaggtaaaagggaaggttcagccctttttggacttgggccactttcaagggccatgtaaagaaagcattggctgtaaacagcttcatcccatttggtcttgaaggcgtttttgctatctgtggagtcttnggttcagggcccctggtgctggtgtcttctggggcttctgagaggagacttgtcgtcacgtgcctggtgaacctccccattgctcctctgcgcccctccagggtcatgtgcctcatgtctccctgcagggtggagtccatctggacagaccccttctcttcactgagatctgctgaatccagggccagtggagcaatggaaggtggagaggacttgtttccagaccgccacaagtggtcctggtaagtgtggagcacagagaagccccttcccttcaggcctgacgtgagcatctcagctgtggacatggctgcaactccaatggctacaggggctctgttccccaccaaagaaatggcacagaggtcgcccttctgtacctgaggcagaccagcagggggcatcaccagtccaggcagcatcaaatctgctccccctaccagtttctcgagcaccagaggccatgttgtaaaggcttggcagaagatcaggataggaccacagcgtgtacactgttggatacagatttttctccagttcaaagaggatggggttaccaccactcacgtacacagtcactgcatcccctttgtgagcatacaacttcacaatgttgagctcctcctttccaggtactaactcagagacttgatcagttccaagggtggggaaagcagttgtcacatcagctcgaagctttctcctgtccgaccccttgatggccgtgttggacttgacccgaaaggccttggcaaacatgtctgctggggtggcctggggaagagagcacagaagccagggaatctcaagaaagcgagggcgcagcagctgccaggccctcagccgtgggggcagccatgctggg

SEQ ID NO: 855 - DNA, 451 bp, Homo Sapiens
gttggggggaaatgaattaaaagtttaattctgaaccattttttataaccgcattttctcttgaagcatcgtatcacagcaggttacaacaactttgggataaaaggcaactggtaaactgtccaaaacaaggttccaaataacacctcttactgatttaccctacccatacatatcccaaatagtttttgatcaaaaacatgaaatagatccacctgcttattttaagcatattaaaaaggaaactaattggaccattttctatttgtctattttatacaaaaaggctacacaattgttacactttattcagattacaattaattagagtgattatgaattaattagtgttctacaccattactcaattcttaaaaattagaaattgctgtagcagtattcactataacttaacactacgagagacttaaaaaacagttactgcgaaaaa

SEQ ID NO: 856 - DNA, 1234 bp, Homo Sapiens
  misc_feature (77)..(77): n is a, c, g, or t
cccagcactgatttcggtattgaactagggcaaatcagagtcaacacagacgcctacagaaagtttcaggaagaggnaagatgcattcaattggaaagatatttatgggcaacaaagtaaggtcaggattagacttcaggcattcataaggcaggcactatcagaaagtgtacgccaactaagggacccacaaagcaggcagaggtaatgcagaaatctgttttgttcccatgaaatcaccaatcaaggcctccgttcttctaaagatcagtccttgccatgaagtatggtggtgtctagcactgaatggggaaactgggggcagcaacacttatagccagttaaagccactctgccctctctcctactttggctgactcttcaagaatgccattcaacaagtatttatggagtacctactataatacagtagctaacatgtattgagcacagattttttttggtaaaactgtgaagagctaggatatatacttggtgaaacaaaccagtatgttccctgttctcttgagcttcgactcttctgtgcgctactgctgcgcactgctttttctacaggcattacatcaactcctaaggggtcctctgggattagttaagcagatattaaatcacccgaagacactaacttacagaagacacaactccttcaccagtgatcactgtcataaccagtgctctaccgtatcccatcactgaggactgatgttgactgacatcattttctttatcgtaataaacatgtggctctattagctgcaagctttaccaagtaattggcatgacatctgagcacagaaattaaggcaaaaaaccaaagcaaaacaaatacatggtgctgaaattaacttgatgccaagcccaaggcagctgatttctgtgtatttgaacttagggcaaatcagagtctacacagacgcctacagaaagtttcaggaagaggcaagatgcattcaatttgaaagatatttatgggcaacaaagtaaggtcaggattagacttcaggcattcataaggcaggcactatcagaaagtgtacgccaactaagggacccacaaagcaggcagaggtaatgcagaaatctgttttgttcccatgaaatcaccaatcaaggcctccgttcttctaaagattagtccatcatcattagcaactgagatcaaagcactcttccactttacgtgattaaaatcaaacctgtatcagcaagttaa

SEQ ID NO: 857 - DNA, 1628 bp, Homo Sapiens
  misc_feature (830)..(830): n is a, c, g, or t
gggaatcccggcggccggcggcccgggaggcagtcgcgcgctcgcatccccaagatggcggccgttaaggacagttgtggcaaaggagaaatggccacagggaatgggcggcggctccacctggggattcctgaggccgtgtttgtggaagatgtagattccttcatgaaacagcctgggaatgagactgcagatacagtattaaagaagctggatgaacagtaccagaagtataagtttatggaactcaaccttgctcaaaagaaaagaaggctaaaaggtcagattcctgaaattaaacagactttggaaattctaaaatacatgcagaagaaaaaagagtccaccaactcaatggagaccagattcttgctggcagataacctgtattgcaaagcttcagttcctcctaccgataaagtgtgtctgtggttgggggctaatgtaatgcttgaatatgatattgatgaagctcaggcattgttggaaaagaatttatcgactgccacaaagaatcttgattccctggaggaagaccttgactttcttcgagatcaatttactaccacagaagtcaatatggccagggtttataattgggatgtaaaaagaagaaacaaggatgactctaccaagaacaaagcataatgctggcaattaaaaatgtgggtttagttttccaaacatgttatcttaaatacccctttatccttacaggttgacataactttgaatgttttaacagcaagaattttaagaaaagataaacaccattttatttatttataaaaacaaaattagtttcaaatatttttgacattgtgattttnttttccacatttctcagcaaagctaatggtattttaatcattatttttgcctgtcataagaaaactcttagctgaaatggccgaaaactgtgagacatgctatggaagctgaatgccggacgctagcacagtttactttttccctttctaatcggctgatgttactctcacttgatgtggttaaaccattttagaggtagagaagacagacagtttgaatatttgtaaacttgtttttctttggtatatttaggacttagtggtcctctgttgctattgtcttctataagtggagtttcatgacttactgcttaacgaataactaactactatgatattctggacattttaggaaatggtaatttgccttgctacacattaagagggctattaagactacattttttctaacctcagataagtgcagtgtctttgcaatgccaacataagggagatcttggccaacgtgaaataaaattactcattcaaaactctgcctaaggtgattttgtagttcttaacagttctccagagcatcttgaacaggaatattaagataaatgtgaatctgcaatggctgaaaagagttgtgagcttttttattcatgataaaaccttataggaatagtataaaaaatccctgtggaaagctactagtacattgaccagcgctgggtgatacagattctgataaaaacataaatgtattagttcatctccatgtagtaaaaagtatacttatacaatgttttgtacttgtatttcatgaaattaaaacagtgatgctaaaactatggc

SEQ ID NO: 858 - DNA, 1492 bp, Homo Sapiens
  misc_feature (164)..(164): n is a, c, g, or t
  misc_feature (182)..(182): n is a, c, g, or t
  misc_feature (207)..(207): n is a, c, g, or t
gtctttagctcttgcctgtttagccagcaaaatggggaaatttccccaaactttggtacttccaataccccttcttcctttccaactgctcttcttgattgcccaaccccaaagcaaactttcagggtgtgtgtaaatcactgatggcacaccaattgtagtcnaatgtgcacagcacccanccaggcaattccttcaacacagatnaatgccttcatcctctgctttgtgagccagcattggaccagcaactacgatcacccaatggcatagatatttggaattttgagtttgaaatctggtagtgactggaattctacctctgggatctagttcaattcccagctcttctaggtcccaaattcttagtaaagggtcgtcggccaatgcaaaccaagagtacatcacaagtgataacttcagctttaccaccagaagcagcttcaatagaaacatcaatttttccatctgacttcttggtagcaccagtaacctttgtattcaatttaaatttaaacccctgtttttgaaggatgcgttgaaagtttttagatatctccatatcaattccaactccacctacatgacctaaaaattcaactgctgtcacatctgcaccaagtctttgccaaactgaacccaattctacacctattactcctgcaccaataacaaccatcttttctggaactttttttaaagataaagcacctgtagatgacactattgtatcttcatctatcgtgattccaggaaaaggagtaacttctgaacccgtggctataagaatgttctttgtatcaataacctgagtgccgccatcagctttcgtagcagtgacttgatttttgccagttatctgttccatatccattgacatgaacaaccttattctgtttgaataagtgggcaattccacctgttaaagcttttactgcagtactcttctgctccatcatcttgtctaaattcaagcgaacttcggacatttcaattcctctagatgcaaaatcttttccatgggccatatggtaataatgagagttgttcaataaagccttagaaggaatacaaccaacattcaagcatgttccaccaagtgtttcatttttctcaatgcagactgtcttgaagcctaactgggcagctttaatagcagcaacatatcctccaggaccagaacctataactgttacatcagcatcaatcggctgatctgcgtaagttctcagaggcactgcagaaagtccctgtaggccatgagatattcgattgaaatggcctctcttggccaaggagcagtacacacgactccagctctgcatttttccgctgtattttcctttccgccaatactttcacctccgctgggcgcctccgccgccgtacgcgtgggtcgacgatatcccgggatatccggaccggtagccagcctgcttttttgtaacgagctgttgtatagtgtagtaggtgctggggtgggtggtgggtg

SEQ ID NO: 859 - DNA, 523 bp, Homo Sapiens
ctattgatctggcagacattgaagatttaagtgaagacaccctgacagaagcaacacttcagggcaggaatgaaggggctgaggttgacatggagtcctgatgtaaggagccgaagcagtgggattggctgatttgaggagatgtctctaagtgaattctcgtattcttaagggaaaagttattttccacacttgaagttatatttccaaacctgagaaatgaagaaagattgttctgacattaaatacctacagttactactgaacctcttaataaggatttgtcaaggatagagtacagttgtaggggaagtattttatgtatgcattcttagagcaaaaagttttgtttaaattctagaattgaaggtactgatcttataaaaagaaattctagcagttttagaaataggtgggaaaaactcaaatattcctcctatctgcaccaaaaagtttatttgtggtatataaaatgaatattgttttataataacttgttaataaagtactttctaatacattc

SEQ ID NO: 860 - DNA, 418 bp, Homo Sapiens
ggaggaggaggggagaggaaggaaagacggagggaaggggaaagctgcgtgctctagaaggggagactgaggccgccagaggagcgctgcccccacttctccaagtcctgcggggaacagacaagcccccgacacggttaccaaccacatggccagtctgcccaggcctgaccccaggaggctttctggcagaccccttctccccaaggtatcatcaccttccaagggcccagatccgattttaccttggacccctgcgtcttgcccctgggaacccaaatggggactgctctgaacctttggatgacatctgtggccccggagatgttctcaacccaggggtgcccttcgtaaatgttcctccatcctcactgtaccaggagtgtgtgaataaacacagaccccctctgtgaaaaaa

SEQ ID NO: 861 - DNA, 716 bp, Homo Sapiens
ggggggaaattccaaggcccttattcagggcccaggattttcctaaggaaaccggttatgacccaggttccctttgctgcgggggcccggcgccccaaaggaattgtttctgaaagtttttttagggccccagccggccgacaaggatacggggggaggggcgtatacctgggttcgaacaacttaaaactttattaagagaatattatcagtcaaatttccagattaagaataacgttcttggtttcagtcttcattcgtctggcctgaaacctatggttgcgcatcacctgcttccagcactttagtgagatcaaaagtgggcataatcccctccctgacatcaggaccatctccaggctcatcctctatcttaagcagagccagttcctgttgaaaagcttccatgtcaggcccttgaaaagcaggcactgccagattttcaatctccccactaggtgcaataccctcattatcagttggtggttcctcttcttgacgtttttcctcagtgggctcctggacaatcacagatccaaccggctgggaagactcttggtcatttcctctttctgaggattgggatcttgctcttagaagctcactcatatttcccacggctgagtcttggtcagtgagaaagaatcaagacggcggaaagaatgaagacactctctctccttgcagacctctgtgcggacacaagacgggcaccc

SEQ ID NO: 862 - DNA, 795 bp, Homo Sapiens
gggttgcaagaagaagaagagtaaagttcttagcagaaacagtgctgatgatgaggaactgaccaatgatagcctgaccctatctcaaggcaagagtaatgaggactcgctgattcttgagaagagtcaaaactggagctctcaaaaaaatggaccatattctgatttgctgtgtttgtctgggagataatagtgaggacgctgatgaaataattcagtgtgacaattgtggcattacagtccatgaagatgggttcatattgtttgtgccctgtatgttcctggagtagcctttggagatattgacaaattacgaccagtaacactaacggaaatgaactattccaaatatggtgccaaggagtgtagcttttgtgaagaccctcgctttgctagaactggggtttgcattagctgtgatgcagggatgtgcagagcctatttccatgtgacctgtgctcaaaaggaaggtctgctttcagaggcagcggcggaagaggtaggtttatttaaacccatagttggtgaacatgttcacaagatatcttttgactctatgtcctataataagtgtaaataataaaagaaattttaacatttattcttaaagttcttgccaagatcactgttctaaaactttaagagtaaatgcctatgagttttgtcagttttaaagctagtcagacgttcagaaaacataatttttatagtgagatctgacagataaaatgaaagataatccaagttgtcttaaagcattaaaatgtcggcatttcagccccatgaattatagtt

SEQ ID NO: 863 - DNA, 663 bp, Homo Sapiens
aaggatcccccgtgatatttctggggaaaaaacagagctccatgtatttattcaaggtgcattaaagtctacaagtggaaaaaaagcagtgaagcatgagatgctggtaaaagctagaggagacacaatgagcttagtacctccaacttcctttctttcctaccatgtaaccctgctttgggaatatggatgtaaagaagtaacttgtgtctcatgaaaatcagtacaatcacacaaggaggatgaaacgccggaacaaaaatgaggtgtgtagaacagggtcccacaggtttggggacattgagatcacttgtcttgtggtggggaggctgctgaggggtagcaggtccatctccagcagctggtccaacagtcgtatcctggtgaatgtctgttcagctcttctgtgagaatatgattttttccatatgtatatagtaaaatatgttactataaattacatgtactttataagtattggtttgggtgttccttccaagaaggactatagttagtaataaatgcctataataacatatttatttttatacatttatttctaatgaaaaaaacttttaaattatatcgcttttgtggaagtgcatataaaatagagtatttatacaatatatgttactagaaataaaagaacacttttggcaa

SEQ ID NO: 864 - DNA, 416 bp, Homo Sapiens
agtctctttgaaccctgagggtggccaggatctggagctgcatctctaaggggcccaggctttggggaccattgccaaaggtggactcaggaggaaagacacttaaagacacttttacatgtctagtaattcttgatgttcatcttcagcaccagtggaaacacatgaacttcgatgcaggtccagagaccatggacactcccacgaggctcagctctcaggcaccccctacacttcagttgagggaaaagctcaagtgccttaggcccgtggaccacagtcttggctgagatcaaagggatgagcaacagggacttctgccacagtgacaatggaattgtgttgtgccttacttcagaggtggtctcttctttcttgtaataaaagcaatatttatgcggaaagcaagcaaaaaa

SEQ ID NO: 865 - DNA, 701 bp, Homo Sapiens
  misc_feature (184)..(204): n is a, c, g, or t
ttatattcatatgtattgcattgcaattataattacatatgcagattgattgatagtcatgaataataacgtctgctcctcttacatagaaagaaaaacgatattaaaagaagatcttctctttatttgagactcagaattccttctagaagaaggaagtgctttttgttataggatcccttcnnnnnnnnnnnnnnnnnnnnngtaagatgtagatgcttattctttgctttagaaaacttctcacttaaaaagatggcatgcacctaggggaataaaaggtcacctcagacaccaggtgtcattcctggtgaggcctgcctcgtcggtggcctggggtctgccggcaggttctggctgcacctgaaggctgcgtgcaccttgtcccctggacaggtctcctttcctggccctgctccagcccagcccttcttctagtggtagctctgggctttgcaggcccagctccaggccctgctcctcagagagaactcttcgagagctggagctgggcacagccataagacaggactggaccagatgctcctgtaaacatcccaggggtgtgccaaggccacccctcacaactggcttgttccaggtatccgtgatggggccactcgggtccaaaatcaagccaggcccattctttttccatcatcttcactttccaataaaccttaataaatttatattttggg

SEQ ID NO: 866 - DNA, 326 bp, Homo Sapiens
tgtcaattcctctacatttaatagagatagatgctgttggcagtaacttcctagttaaatacaggcaatacaatacgagatgtgagtccaaatcagaatacctggaattctgagtaacctagaaattaagatggattagtataaaagctgactggattttcttaaaaagtctaatgttacaatcttgtaatttgctactttataataaaatgcaactcatcctagcggttggtaatcacattgtggagggtcagggataataaactacagtgaagtagtctggaggagagaggctgtttaaatgcctctaagcgctaaaactacaa

SEQ ID NO: 867 - DNA, 735 bp, Homo Sapiens
cccgggaaagggcccaaagggggtcttttcccttactcttaattttaatccccctaatttcccccttgggggttgggaaccggtgcggggaatagccctagtcaggtaaggctggctttgaagaaattgctaagggtgttgaacttaaaattgggacttttattcactattggggctgggtagatgccttgtatatttagaagagatcactgtttaagtttgggatgctaacaggagttgccactggggatacaggtctgtggcatgtagtccctgaggaagaagataatattgtggtctgggcacaaatgggtctctgctgaagggcctagaatttccaacgcacctccctccaggagatgggggcaagtacactgcctctctctccctcctgtgactagcatggtgatcagcctgagccaagtgtagcattgtagcctagggacaaggacacatgacagaggactcagtgtttgggacttgaaagggggtggtcccagggctccagggtcccttccagtacagatggggtgggctgagctgtgcaggaagaatcaaagcgaccaggccaacactggacagcaaccccttccttcctcacctcatcttcacactggattatgaccagaccctgctgcctcctgggaagccccagtgaccagagcaggaccaagcactggacccgacgcgtggcgacgcgtggtcgacgatatcccgggaatccgaccgtacacc

SEQ ID NO: 868 - DNA, 676 bp, Homo Sapiens
gtatagatgaagaacatctcacagacattgaaatagttcgcagagttttttcttctaaaaggagtaatgtaaacttgtgacagagatatttcgtcaggcatttttattaccaaatttgtgaaagcagcaggtattgaagaaaaagttgggtaaaagtatatcaagaatgggatccaacaagaggaaaaacctttgttcatgcaagagcctgaagaaattgtgatcacttcttcagacctcccttgcattgaaaatgtcacagaccatgatatttcaaatggaagaaggagaaaaaagagaagaggaaaatgggaccaatactgctgatcatgttcgaaattccagttgggcaaaaaacggctcctaccaaggtgctcttcataacgcctctgaagaagccacagaacaaaacatacgagctggtacccaggcagttttgcaggtgtttattataaactcatcaaatatatttcttcttgaacctgcaaatgaaataaaaaatcttctggatgaacacacagatatgtgtaaacgcattcttaacatttatcggtacatggttgtacaagtatcaatggacaaaaagacttgggaacagatgctgcttgtgttgctcagagtcacggaaatctgtactgaagatgccatcacaagctttttctacagtttcaagggg

SEQ ID NO: 869 - DNA, 606 bp, Homo Sapiens
cagggtgccagcagcctgtttcctcttcccctgctggaccacggcgtttctgctcccgagttgggactgtggaatggtgtgggtgctgtggtctgctccatcgctggctcctccctgggtgggaaccttgctggccaagcactggaaactgctgcctctgttgaggtcggtgctgccttccgcctcgggggcctagcctgtcagactgccttggtcttccacctggatcaccctggggtgcagcatggacgctggcacaatcttgagagggtcagccttgctgagcctatgtctgcagcacttcttgggaggcctggtcacacacagtcaccttcaactgggatgcatgcgctgacagcctagacggcccccacggccctgcaggccacacactacagccttctggccacgctggagctgctggggaagctgctgctgggcacttcggccggaggcctggctgatgggttggggccacatccctgcttcttgctcctgctcatcctctctgcctttcccgttctgtacctggacctagcacccagcacctttctctgagctgagtggctggagtggtcaataaagccacatgtgcctgtggcccag

SEQ ID NO: 870 - DNA, 1036 bp, Homo Sapiens
gggagctgcggaaggagccacgctttcgggggttgcaagatggcggccaccagtggaactgatgagccggtttccggggagttggtgtctgtggcacatgcgctttctctcccagcagagtcgtatggcaacgatcctgacattgagatggcttgggccatgagagcaatgcagcatgctgaagtctattacaagctgatttcatcagttgacccacagttcctgaaactcaccaaagtagatgaccaaatttactctgagttccggaaaaattttgagacccttaggatagatgtgttggacccagaagaactcaagtcagaatcagccaaagagaagtggaggccattctgcttgaagtttaatgggattgttgaagacttcaactatggtactttgctgcgactagattgttctcagggctacactgaggaaaacaccatctttgcccccaggatacaattctttgccattgaaattgctcggaaccgggaaggctataacaaagctgtttatatcagtgttcaggacaaagaaggagagaaaggagtcaacaatggaggagaaaaaagagctgacagtggagaagaagagaacaccaagaatggaggagagaaaggagctgatagtggagaagaaaaagaggaaggaatcaacagagaagacaaaactgacaaaggaggagaaaaagggaaagaagctgacaaagaaatcaacaaaagtggtgaaaaagctatgtaaggtatacagggaacagcactctagaagctatgactcaattgagactacaagtaccacggtgctacttgcacagacccctttggttaaatgtaaattcttgtacaattgaaggatacgcagaaggacatctttctagtctaacagtcaggagctgctctggtcattcccttgtatgaactggtctaaagactgttagtggggtgttagttgatttttcctggtatactgtttcttggctgacactactggtcaagtaagaaatttgtaaataaatttcttttggttcttattatct

SEQ ID NO: 871 - DNA, 157 bp, Homo Sapiens
tctataactgttccatgtcattggtcattgggttatgccccttctaacctgtacatgactctacacatctctcttttaactgtctcctcctctccattcctttttaacaccgaattagttaagaaccctatcagtgttgtttttgttttaatttttt

SEQ ID NO: 872 - DNA, 485 bp, Homo Sapiens
  misc_feature (317)..(317): n is a, c, g, or t
agtgctgtgtgcgggaggactctctcctcctcagtggggccacaccgtgcactattaatggagccccactcctttgcacagcctggccatgcagtggctcatattgaggttttagccaactgaaatctcccgtgcatttttctgacaagccagctaggcctctgctatgctgtccttgtgtctttcatttgatgaccttaagggtgggactgttttatcttaagttacagctggtcaagtccagcccaaggacagcaactctgagggtcaagcctcataggctaactggatagatgttctctgctttgcccccccantggagcccgacctgccccactaatttatatttcccctggtctcattttgtactttttatttataattcacccttaaagtgtatgtgtctcttataagctgcctccgatctttcatggtatgaggtggttacctaaataaagaaggagatttggcctttgtttttatgt

SEQ ID NO: 873 - DNA, 1039 bp, Homo Sapiens
  misc_feature (827)..(853): n is a, c, g, or t
tgaattatcctgttctgcttgttgaacagagaaaatgcaaatgtgaaaaggtaaaatataaaacacaggaaaaaacctaaagcacctagtatccatcaagcaactggtatcatttggtttatggaagacaactaaaaagaaatccacatcccttttgagtccctatatgccagccatgctgataaatttcagattcagtttgacaattatcctttgaaacatgttaacacccagtatacagtatggaaaccagggctcaggagtgaaatgcccaacaagaccacacagaaaagtccatcagtatttatcaactttcagttgaaggtccccgaattaaataagaaacccattttacattcaaatctagtacacaaacatcaatacaacctaaacaggagttcaatgctttacttcatgtggtcaggtctttcactagttttgttcaccaacttggacatgatccacattttgaaagaaccactgctgtaaaccatctgagtgtggtccagacgcatcagcatcactgcggacttgttagaaaggtagattttcagggtcctctcagacctaaatcactgggggtggaacccacaagccaggtatttctgagaaatacttcgtaacaaatacttctcactgctaactaaggacacacctaactcccttccttctctatccccatttttttcagtttcctttttataatagtttcaaagaacatccaggcagtcttgataccactttagccactcttttcatgccaccacgtgtgaactcaccggagtcatgacgtgatccttggtcccgagggcctttagtgacatggnnnnnnnnnnnnnnnnnnnnnnnnnnncaaggaaagatgagccgttagtcaacaggaaaaaacggacaaggaaaaaaattaacaccaaatccaaacttgtaaaatatcaagtaagcgctcacagcctcactccaaaccctttcctgggtcgcctgcccagaggagaaaattctaggcaggccccttaagatctgtaacttgagtctccacaga

SEQ ID NO: 874 - DNA, 206 bp, Homo Sapiens
aaatcaggaaagctggttactggctctactgagagttggagccctgatgttctgattcttcaaagtcaccctaaaagaagatctgacaggaaagctgtataatgagatagaaaaacatcaggtatggaaggctttcagttttaatatggctgaaagcaaaggataacgaattcagaattagtaatgtaaaatcttgataccctaaa

SEQ ID NO: 875 - DNA, 551 bp, Homo Sapiens
tagaattgtatatagaaagcaaaactttagagacataggaacaaagagagtatttagaaattctgctatgtataagatacatatcttaaggtaataaaatgtgtcttaagggaataaaaatcctctctcaaaacttgtttcagtgatttatatacatacatagtttgtgctaagttataaaatacttcctacagtggatagctacaaaaagtatgaaagcctctgttgcagaacttaccatttttttggcatgttcttcacacagaggtgtctgatgtgtaatgtcaaaaactggcacagagcactgctgtccatctgcaaacttggctgtgcaacttgagaagagctgctgagagtggttcaagaggatatctgggtttttttaagttaggagtaaaatacactgaaactctaatttttcaatttctatataaaatttgcttgttcccttacattccataagtacaagctttattatccataatataaatattacccatatcagtactagctcaactactgatacgggaaaataatagaatttatcagat

SEQ ID NO: 876 - DNA, 646 bp, Homo Sapiens
  misc_feature (542)..(542): n is a, c, g, or t
ttttcaatttccaaaaaatttatttatactctgtattaaccagtgtttctcttttccatcctcactccctaaggagtctttttacaatcctaatcaaccacccccaaaattttaataccacagatatggtatctgtttaagtactgtgtgtatattcatgctttatacatcaagttttttgtcccccagaacaatcttgacaaggactgcgtggcgctaacaatgaaaagtttatagtattaaaacttttttatttgaataagtggggagaagagaaatatatttcagcacttagatatataaattatttccaaaacagtttaatactcaactagtcggttctatcaaaatcagttttccctgaagtaagcactgttcccagctacaagcgatcctcatttcacatggtactgtgggaccataaaaatggtcctgcaatcttaataatcaatagggaaaatgatgattgttccatgacctttaaggttctgctcaaatattaaaaactcttaagaccagttataaatgtagaaaaaaatgcnaaaatgtttaaaaatatttagtacactgtaatttaaaacattagaaatagaattaaagtgttttatttcattgtaaaaacaaagtagtttgaatagggcttgcc

SEQ ID NO: 877 - DNA, 556 bp, Homo Sapiens
atcacacttaaaagtaaagctttcaagacttgtaggaagatgggagtatgtagggctagattttagcacgtaaaaatcaagtattttgttaggttgaggggactgtgggtttttttctttctttataattctatgtaaacatcaaatctaaaaccaaaaagctaaatgcagagctttcaaagttaaacgatgactgcatttgtatttagtagcaagggaaaacatcgccagtaaattgcctgtttttataaggcagttaagatagctttggaagacagtggaatgtactttcttcacattacatgaaagacgtaagtggcaaatatttgccaatgttggagaagcaaatcactgatgtgagaagtgcctacagaaatgagtctacctgctgaatatcattctgtccagcggagagctgttcttctttgtttagcttacgctctgttatgagcctggggatgaaagtagcaaatagaacttaatagctcattctactcttagcattggctcaatatttactcacacaaagaatgcctgctttgaagccccggaaaat

SEQ ID NO: 878 - DNA, 503 bp, Homo Sapiens
agggggttatagagttaaataagacagcacattgctttctgtttttaatggcggacattgctgatggtttcatagaaagatgcaggaggaaaaatggatacccaagggaatgaagtcttgagaaagcaagaagcaatgagacccaaagtcaaatgaagagactgtcctgctaggagcagggacacgtgtattgtaataggaagaaatatgtgtgtaagtgaaggcagagttgattttctcaagagtgaggctgagaacaaggagtgtagttatgtttgaggaaacaatgtttgagaagtcatattatttgtggagatacactattttgtttcatttcctctaacaagtgtcattggcatagtcatagcccctaaatatctaaaaattaattccactttaaccacctcccctagttcagtgatagataattttaagtgaaaataaccatgcaaatagccaccttatgtgacactttattaaaatgataaatgatgcaatcaaaa

SEQ ID NO: 879 - DNA, 427 bp, Homo Sapiens
cccaataaaagtttatttatggacactgaaatctgaatttcatataaatttcatgtcataagttttcttttttcctccaaccatttaaaaatgtaaacattagtcttagcttgcaggcagcacaaaagcgggtggtaaaccaaatgtggacccagggggtagtttggccaaacccttttattagatcaccaaagttacttttcttaaaataccttctatttttcacagaaggtataaatggtaaacaacatcttaaagcatcggtagtagtggataccttggatatcactgtcactctcttaccgggtttaattttgcatggctggtgtgggcgtaattgagtgtgcatgtaaagcatctttataatattaccatcagcacatttggtacttgcacccttgtagttctaggaaaagtcctaaaaatc

SEQ ID NO: 880 - DNA, 786 bp, Homo Sapiens
ttaggatcccataccctggaagacccaattggttaagcaggcctcgctggctgcctggcgatcaaagcggccagtgtcacggcccagctctgggggcccaggcccttgtggtggggccacagctgggtggaaggcttggaaatgcatgggaaagaaggcctgccagccggagatggcatgcatgcggcagcggttcaggaagtcaggcgtgagcaccgtgtctggcccggccagcaggaacagtgtgtccagcgggtgcttcttggagagtagatccatgaggcgtagtggtgagggtgcggctgtctgcacactgagccatggcacccgggcaccggggaaacgccgctccagctctgccacatgggccttgacaggtgcgaagacatctgcatgggccacgcgctgggcctggcgcggctcatacagtagcagcagggtcagggctgccgcagcatcaccaggctccagtgctgcagtggcaaaggcctccaagaagccaggggccaggtcacgctcagccgcagctagaggcagcagcacagtgagacgtgaggcctcagtgacatagggcacaggcaagatctccacgcggctcagcggccggagcagctgcactcggcgagtgacgggccggcggccctcctggggggtcagtgcctccagctgcaagtccagcgtgtattccataccccgggccggatcaaagcgtcggtagccattcaccagctgctgcttctggagccgcaagccgggtggtagcgcggttcagctcctctagagctg

SEQ ID NO: 881 - DNA, 535 bp, Homo Sapiens
gctgttctcattgggtgactcaattctgctgcaagttgctgccagcagagccaaaggggacggctgggactcctgccctcctcctccagtgctgctgctactgcctgtgctgctacttcgagcctgtgaaaaggcaccaccaccattaccattgcccccattattgccaccaactcctttttcaattttcaccacagctgtcatttcatccatggagtgatcttggtctaaaataattaaaaaacaaacaacgtaaacttgagggaagaaaagaaatgaagtaggaaggataaaaggaggctatgatgaaatagcaatgactaacaggaaggcgaaagccaccagtataaagaaaatggattggagggcagaggggagctgcagggcatgcaggacatggactaggttcaatgtgccaaaagtgggccttaattctcccttgtacaaaattaaactaagaaaacattcaaaaagtgctttggggataggaaatgtgaaggacggtaagcatggtgagagtttctaaataagaaaa

SEQ ID NO: 882 - DNA, 523 bp, Homo Sapiens
aaacctcttctgtccttcatcagtccctccatccccatcaccttccttcggaacgtcacatgggtcattgtcaatctctgcaggaataaggatcccccaccgcctatggagacagttcaggagattttgccagctttatgtgtcctcatataccatacagatataaacattcttgtagacactgtttgggctctgtcatacttgacagatggaggtaatgaacagatacagatggttattgattcaggagttgtgccctttcttgtgccccttctgagccatcaggaagtcaaagttcaaacagcagccctcagagcagttggcaacatagcgactggcaccgacgagcagacccaggttgttctcaattgtgatgtcctgtcacacttcccaaatctcttatcacacccaaaagagaagataaataaggaagcagtgtggttcctttccaacataacagcaggcaaccagcaacaagttcaagctgtaatagatgctggattaattcctatgatgattcatc

SEQ ID NO: 883 - DNA, 761 bp, Homo Sapiens
  misc_feature (43)..(52): n is a, c, g, or t
  misc_feature (626)..(682): n is a, c, g, or t
acccttttctttctagttgtctttaaggaaaattaattttacnnnnnnnnnngttctggccgaaatttttatgaaatatctctcacttgtcttccactttgaaccggttaaagctcatagctgtcagctctgaatgaggaggggagaagcccctgggtctttctttgaaaggaatccgctgcttgagggctgcctccctcatggtgtgcgtgtcgtttctcttcctgacgcatcttgtgatatcagaggtaactatgcaaagcatccaggcggttctgaatgtgaagcactacacccagcagagtcccggtgccctctgtccccactgccggcccatgttctctctccggaggtcaccaaggaatgcacaggtttcgactaccagaaaggggagtccttgggttctttcaaaaaattcgtgaggagagctgtctacagtggaatagggggtctccctggggaatgcaggccaagtccttttattttaacatgatgtccatgaagaggtttgccgtctgggcagccctgtcggcaaggagcgtgcatactgcgtttgtgtaattgtttgctgtatctcccttccctctgagctgtattgttctttaatggctgtcttgcccttcccnnnnnnnnnnnnnnnnnnnnnnnnnnnnnnnnnnnnnnnnnnnnnnnnnnnnnnnnngttttgtttagtttactgtgaaatgaactgtatggcttatttacagtatttttaattcttaataaacacttgagcttta

SEQ ID NO: 884 - DNA, 518 bp, Homo Sapiens
ggagcccacaattgacctttgactaataggagttttaagtatgttaaaaatctatactggacagttacaagaaattaccggagaaaagcttgtgagctcaccaaacaaggatttcagtgtagattttgtctttcttgaacttaaagaaacaaatgacaaagtttgaatggaaaagcctgctgttgttccacatctcgttgctgtttacattcctttgtggagcctacatcttcctaagctttttagcaggtatatgttgaacacttctgtttcatggttgagacagaatcaaaggccatggatactgacaactgatttgtctgttttttttctctgtctttttccatgactcttatatactgcctcatcttgatttataagcaaaacctggaaaacctacaaaataagtgttgtggtttatctagaaaaatatggaaaatattgctgttatttttggtgaagaaaatcaattttgtatagtttatttcaatctaaataaaatgtgaattttgtttacc

SEQ ID NO: 885 - DNA, 552 bp, Homo Sapiens
aggatccccagaatgtgtaacaacgaccatgaagggaactcattttcctcgtaattttggactgccacacattggtacctttagttctctgaaggcccacgtttttatcattaagacctatttgttagctagtagagctttatgttcgctgtccatgaaaccttctgtaaccacagtgactacaagtagttctttctctattgaattattaggtccagaatagaagatgtcattgtacactttatttccctcacactgtgttatgctctgatgtgctatgcttagctatctgtcagagattagtaaattataaaactcatgtgtactacttaagtttatatcttatgctagtttataagaacaattaaaaggacttagaagattaactttggtttcatggtctctgaagtcactgactgctatttcagcttgtttacccttacctagcattaagactccatctacttctgtgcagtatatgaaaatttttaaactttcatttagactggtggataggactgaccattacaaattgtcgttgttacacattct

SEQ ID NO: 886 - DNA, 666 bp, Homo Sapiens
ggtgtcataaacctctgagactgtagcctgcttcttagcttctcattgagattcctagaggtgcgttcgagttttcagagtaattttccagaccaaccagcgtcagtgggaaatctgacctcttttggcaaactgcgatcattcattttcctgagtccccttggtggggttggggggaattctgcctcaggaccctgaggggtcttctgtgagcaagatgtgccttggtaatgcagccactaagaacaggacttcattcaaaggcataatgaagtaaccagggtgaccatcaagtaaaattaaagcacaagatcattgtaggaggcttccttgtcaaagacgtgaacgtgggatttccaacgcaccacggtgtgtccactcatcactgcatgttaggaactgctgtctctttgggacacgagttaaaagaacacactaatttctggagtgtgcctgcagcttcacggccttcattttgttactaagttattttctggaagaacagcaaaaatttcaggttgaaaacagaactttccaagtgctactgaaattccgcagagaattacgctgcgatggtgggtttcttaccctagaaacatcctaacctgtatccacagaagatgtccttttatttttttaaaagatcaataaaatcaagagaaacga

SEQ ID NO: 887 - DNA, 1076 bp, Homo Sapiens
  misc_feature (25)..(25): n is a, c, g, or t
  misc_feature (710)..(852): n is a, c, g, or t
  misc_feature (869)..(904): n is a, c, g, or t
  misc_feature (916)..(928): n is a, c, g, or t
attcacagcactctggttccagtcnccatctcagagggggccccccacttagatctcgccaccaagaatgccttggatcctatgtctgtgctgttagcccgctccttggaagttagacatatgaagaattggatcagagatttctatgacagtgcgggaaagcagcactgagaaacttttgattgttttcaatttcttcttttatgttcacaccaccacattcccattcactttgattttctacatgtaattaccttcttttgtttatcattagatttgatggggccaaagttgagatagaatagagggtgatgacggtaagagcaagtgtcccatgaatgtgatttcctgggttctcactgtctttgcaccacgtctaggaagaatcttcttgatagctctcccacaccatcagtggccctcataactggagtagagttcctggttgcttttcataagagggagagttactttctttgtatctctgcaagcagagatttctctttggttttgaggttgaagtgtctttggcccatttgtaagtccccatccctaccctacacaaagtaaaagcagaagatagataaaaaatgatgtaattgcagctggtaggatgtctggtgccaatccaggaagtgagagccatttcttttgtaccggatttaatgactttgaactgtgctgtaaataaataatacagctggaccttnnnnnnnnnnnnnnnnnnnnnnnnnnnnnnnnnnnnnnnnnnnnnnnnnnnnnnnnnnnnnnnnnnnnnnnnnnnnnnnnnnnnnnnnnnnnnnnnnnnnnnnnnnnnnnnnnnnnnnnnnnnnnnnnnnnnnnnnnnnnnnncacacgaaccctaaacnnnnnnnnnnnnnnnnnnnnnnnnnnnnnnnnnnnntttttgttgggnnnnnnnnnnnnnacaaaaaaaactttttaaacaaccttctcgtgggggcgggcgggggcccaataaaaggaaaaagagaaagtgggcgctcctttcgtgttccccccaagaaaaacacgtcgcaaaaagaaaaaacagggttgtgtaatctccacacaac

SEQ ID NO: 888 - DNA, 775 bp, Homo Sapiens
  misc_feature (606)..(606): n is a, c, g, or t
ggtgattacttgggcacacacgagatgacaaatggggcagtggccatgcttgaatgggctcctggtgagagattgccccctggtggtgaaacaatcgtgtgtgcccactgataccaagaccaatgaaagagacacagttaagcagcaatccatctcatttccaggcacttcaataggtcgctgattggtccttgcaccagcagtggtagtcgtacctatttcagagaggtctgaaattcaggttcttagtttgccagggacaggccctatcttatatttttttccatcttcatcatccacttctgcttacagtttgctgcttacaataacttaatgatggattgagttatctgggtggtctctagccatctgggcagtgtggttctgtctaaccaaagggcattggcctcaaaccctgcatttggtttaggggctaacagagctcctcagataatcttcacacacatgtaactgctggagatcttattctattatgaataagaaacgagaagtttttccaaagtgttagtcaggatctgaaggctgtcattcagataacccagcttttccttttggcttttagcccattcagactttgccagagtncagccaaggattgcttttttgctacagttttctgccaaatggcctagttcctgagtaccctggaaaccagagagaaagaggatccaggatgtacttggatgaggaggcctggcttatcatagaaagtcgtggtctgggggtgccttattggctgcttccctaacagctg

SEQ ID NO: 889 - DNA, 1674 bp, Homo Sapiens
  misc_feature (964)..(964): n is a, c, g, or t
  misc_feature (990)..(990): n is a, c, g, or t
  misc_feature (1095)..(1095): n is a, c, g, or t
  misc_feature (1199)..(1199): n is a, c, g, or t
  misc_feature (1277)..(1277): n is a, c, g, or t
  misc_feature (1421)..(1421): n is a, c, g, or t
  misc_feature (1426)..(1426): n is a, c, g, or t
  misc_feature (1446)..(1446): n is a, c, g, or t
  misc_feature (1473)..(1474): n is a, c, g, or t
  misc_feature (1487)..(1487): n is a, c, g, or t
ggctatgagtgtagttgatgactgtttgttagtcagtagagtaaaatgctgtgtccacggggtgtcacagcctcaccataccctgttgaggtgtgaaatgccccgtcagaaattaaatacaaacttaaatgtgcctattggtgtctaaacttcatacaatgtaaggtcagattccttttaggaatactgggtgctgtcaccaggtttgatagttagacttaaaaacttgaaattcactttttggggggagggatatactgaaatagagagttgagacttgccagttgggggaaaatagcatttaaaatggaaagctgtgtttggaaaattgtgtatgagtatttttgtattaaaaacattttaaaggcttttttcttaacttaaaccgaaccacgctgcagcccgcgcttactcccccccgtgccggtgtctctcctactccgcattaccaccctcctccttccttttacctcggtatcccccgctcctccgccgccccattgcttactctagggttcgggccgccccccggcccttctaaaaaagcttttctctaaaacaccttcttgttttgggggcccggggcgcccctcaccctgaggtccacccgaaccctgtgcccccactatcctctgtttcccctccatgaagatactcctcgcgcgcacatcagaacaaagcccgggctgtggtatttctctccacaccaaatacaacagacactgggccgccgcgggaggcgagaaactcacaacgcgcgctttcttcgcaccacacacttcctcacagaaatgggtggaggctcctcttcgaggagggtggttatctgtctgcggcgtgtgtctttctatcttacaccacgcggaggcattctctccacagcgcccggcgtcgcgcttctcacgtttatcatctcttatattgtatatgacgcgctcccctccgcgcgcgtcgtcttgtccancatatgtctcacccgcgagcacccgngatgttgctgtgtctcggccagccttcctacgtatatataagacccacatttgttccgcgcgccacacatctggtgggagacacgcgtgctacactctacacacnaacacgctgtcgttatctgccactatacacacacctcctttaaataatattctcgcgctcgcgccgcgcgctccatctcgtgtggcaaccatccccgtgtatangcgcggcgttgcttgtctgtccgcgctatactcatcaatatccacatttgtcgcgtgcgcccgcgggcgtgtcgccantgaatcacacgcgagcgttgtgtgggtgtccacgtcgaccgtagagcgcgctcgtgttacatcacttcttgttgttgcgcggctgtcttcacccgacgcgtctcgtcagatatctctactgaaatgtggtgcgtgtcgcggggncgagnagacactcttctttcgactnactctacctgtgactatatatgtgtgnnctcgttccgcctnactacgcatttagcacactatccctcgttagtctctcgtctccccataatacgagtaccacgcgctcgtctgtcatatcagataggatacatagtctggggcctctcgtatgattcatttcgctcgcccgccacgagtaacaatcttgcgttcccaccctccttcgtccctctgtcgttggaaggcc

SEQ ID NO: 890 - DNA, 1214 bp, Homo Sapiens
  misc_feature (627)..(627): n is a, c, g, or t
cttgagttctttagaactcagtagccatcttgcaaaagatcttctggttctattgaatgagattctggagcaagtaaaagataggacatgtctgagagctttggagaaaatcaagattcagttagaaaaaggaaataaagaatttggtgaccaagctgaagcagcacaggatgccaccttgactacaactactttccaaaatgaagatgaaaagaataaagaagtatatatgactccactcaggggtgtaaaagcaacccaagcatcaaagtctactcagctaaagactaacagaggacagaaaaaagtgacagtttcagctaggacgaacaggaggtgtcagactgctgaagccgactctgaaagtgatcatgaagttccagaaccagaatcagaaatgaagatgagactaccaagacgagccaaaaccgcagcactagaaaaaagtaaacttaaccttgcccaaatttctcaatgaagatctaagttaggaaagacgatggaggtggaatcctttaagattatgtccagttatttgctttaataaagaagaagttaccctagtcaaaatcagaacaaacctgatgtctttctgaagattttctgctgtgcgcttccacgttactntggcctgtattaaagcagtagagcagcatcagttattatagtccagaaaaagtctgcatcagtcagtcacacagatttatcacaatctgaggtgggcctaggaatctcatttttaaatagtctctccaagtgattcttatgaactctttatgtttaaaatcatgtcattatggaaaacttacaagtgtaactagctagtagcttgcatttgagaagcttatgacttagatgggcagaatcaacaaagatgaaaccgcctgaggacacatttaacaagtaacatttctagggaaaatgaaggaagtaccacaaactagatagaaaggagcttatcaatcaccagtgaggaagaccagtataacgttcaacaacagttattttgacaaaaacttattttgtgattcctacagtgaaaacatttttggtgatatctgcctgggaaatctctcttcctaaagtatttgtatatgggagtccttgtttgtgaatgtttcctggattagggaggtgtcaacataaatgtattattaaccatgaagctgctcgctatatttttggcataacaaaataatatttatttactgtcc

SEQ ID NO: 891 - DNA, 938 bp, Homo Sapiens
atcgaatttgccaaggagcaagatgatggagagctgtgggaagatttgattttatattccattgacaaaccaccatttattactggcttgttaaacaacattggcacacatgttgacccaattctactgattcaccgtattaaggaaggaatggagatccccaatttgagagattccttggttaaaattctgcaagactacaatttgcaaattctgcttcgtgaaggctgcaagaagattctcgtagctgactctttgtccttactgaagaaaatgcaccgaactcaaatgaaaggtgttcttgttgatgaggagaacatctgtgagtcgtgcctttcccctattcttccatcagatgcagctaagcccttcagcgtggtggtcttccattgccggcacatgttccacaaggagtgcctgcccatgcccagcatgaactctgctgcacagttctgcaacatctgcagtgctaagaaccgtggaccaggaagtgcaattttggagatgaaaaaatagctcatttctccttgtcagtctccttgtcaccactctttttgagactgtttttgcaacaacaaaagcatttgttgacactcgtgctgttaagagattcgtttatgtttatattatactcaaaaacaatttcttcatctattcctgtactaatggtttctctttgcagttcacagagaatttggggctctcttcatgccttgaaattttggggtccatagtgaatatccgtcatttatttgttcggctcattctttatataagtaatggaaacataaagtctaggagttagaaatgaatttttaagaccttagttaaacccatttaacccttaaatgggcaacctgagaaatctcccagtggctgaaagcgtcgcaaatggtggttatcctgcaagccggtacctgccattggacggtgtttcc

SEQ ID NO: 892 - DNA, 194 bp, Homo Sapiens
aatttgttgttgttgttactgttttgatacctcggaaacacctccgttgacagttgttttggataggttgggtgtaccccatggctgcctctgaaggcagtgtctattttgagaggatggcttacctcttctttgtgaaaatactatctcatttcctggaaataaaatgtaaaacctgtcagttgctcaaaaaa

SEQ ID NO: 893 - DNA, 1726 bp, Homo Sapiens
  misc_feature (460)..(526): n is a, c, g, or t
gggggctgcgcccgtcccgggttcccttagggcggtatagctttgcttccttcccgtaaaggccaggaccaaccaaaagccacccatgaactgtaggacctgagttcactccacgctttcagccttccattatgacagaaacagttcccactgctcctacttatgtatgtcatccagagctccaaacctaaggctggggcccctcctcccagccctacccacatccaccctacttcccaaaagcctgtagaagcccccacttagaaaaaaaggcagacatacacatacacagaaacacatatctatctgcagctcctccatgtgaagcccctgaaacatacacaccctggaactttcctctccttatgcacagatggacaggctgccttcccctgtctctgggctcccccaatagccagaatcccttccgactggtcccttgccctgaatatctgggaannnnnnnnnnnnnnnnnnnnnnnnnnnnnnnnnnnnnnnnnnnnnnnnnnnnnnnnnnnnnnnnnnntacctgctgcccattctcttcccttgggagacaaaaggatgtattgacccaaattccggttccaccccagcttaggggcagtggcctaaggtgctatttgggcaaggtccagtggaaatcctgaaggggctgtctcgtggggtgagggtagatagggagctccttagcctgaaagggtggatcgtgaagggggcttcttgggagtggcccttggacagtcagtggatgctcaaggccagggcagcggagtggggagatggcccctgcccactcagatctgctccttgtgcttcacatgggccagcttcacattctcttcctcgttggagggtggggcctgctccaggtggcagccgatcatcagctggtacacgaagacacccgcaatggagcccaggagtggggacacgatgggcacccaccaccaatgctggccggtcgtgaagactgcagagcccccagcccgcaagggctgtaaaaaggcgggggccaaagtcccgggcagggttgacggcatagccggagttgaagcccatggaggtgccaatgaccaggaccaccaggcccacggtgaaggcctccaggcctcgggggacggggttgttgtaggggtcaacaatggccagcacacacacgataagggaggctgtgcctatgaactggtcaaagaagccattgatcatatccaagtgtccagaggggtaggtagcaaagatgccggctgtgccattggggcccgaaacaaaagctggttgtcggcaaagtgccagattgcatcataatacagcccaaaaactattccagcacccaagaaggctcccagcgtctgtgccagggtgtagatgggcagcttgatccagggctcacgagccaggaagcacatggcaaaggtcacggcagggttcaggtgggccccagagacctggccagcgatgaggatgcccagagtgacagcaaagccaaaggccaggttgatggtgaggaaaccaccgtgggtgccccggctgagcacaacctgggccacggagccacagccaaacatcaccaggatgagggtccccaggcactcggccagcgcctgtcggagcagccggtagcggatgtggagcatctccccgcagcgggacaccagctccttctgtcgacccatggcggggcagcagcggcgctgtcggggtgcagggtggcggaggcggtggc

SEQ ID NO: 894 - DNA, 574 bp, Homo Sapiens
  misc_feature (309)..(331): n is a, c, g, or t
gagtcatgacaaataaataataaatttttattagcgtcttttcaattctacaaattttaaaagtcattatacatttttaaaggttactaaaaatcactgaaatatgtctccacttaaaatggaatcaaagtaatttatacaattttcacctttaatattcataatttatttaaaagtagaataaattttaattctaaaatgattattacatctttttagaactgaaattacatttcaatgagtgtagctccactgtagttcataaggtttatacttaagaaatacttaattaacaaattaatttatacnnnnnnnnnnnnnnnnnnnnnnntgcatacgtataatgagacagtttatgtatggtaattacagatttgaaattaagtctcctttgcaaagatcagtgcgtctggactggttaatccactaaattatcatctttgaataagaaaccaaaaacaaaaatgacttgggaagaaaaatagtaggttaaaagtgaaaatgactcttccccttattttaaaatacataaaattttctaaaccgtaaaaggaaaggtttaatccacagaaaa

SEQ ID NO: 895 - DNA, 934 bp, Homo Sapiens
gggctggcagctggcggcattgaggcggacgcgtctagaggtccgtctgaccgcggcgtcgggacctggtttccgggcatgagctgagagcaccacgccgaggccacgagtatttcatagacattgatggaagcagaaaccaaaactcttcccctggagaatgcatccatcctttcagagggctctctgcaggaaggacaccgattatggattggcaacctggaccccaaaattaccgaataccacctcctcaagctcctccagaagtttggcaaggtaaagcagtttgacttcctcttccacaagtcaggtgctttggagggacagcctcgaggctactgttttgttaactttgaaactaagcaggaagcagagcaagccatccagtgtctcaatggcaagttggccctgtccaagaagctggtggtgcgatgggcacatgctcaagtaaagagatatgatcataacaagaatgataagattcttccaatcagtctcgagccatcctcaagcactgagccctactcagtctaaacctaagtgtcactgcaaagataaaagccattgaagccaaaactgaaaatgatggcggaaaaaatcctgatgcagagtatccagcagcgcctggtttattcctactttaagccaccagataaaaaaaggactactccatattctagaacagcatggaaatctcgaagatgatggttgtgaattactgtagcagcaaaagcaaattggtctccacacctaaaatcgtctgcctgtgtactttgtagatgtgaatggtactattcaacggagcacaatcacatgttagcatttggtaacataatgtttttggatgttcttatggatgtttcttccctaaactatgtatggaattgagcatcatccagaataaatagcgttgtatcccactccaaactgaaag

SEQ ID NO: 896 - DNA, 403 bp, Homo Sapiens
agttcttacatttggggaaatgcagtgaattcccacatcatgttttaaattactcagccactaaaaatgaatgtgcatggcgtcattaacataatcattgcctgaaccgtatttttcacactatgtactctaggttcctggaggtgaaaggaatctggacttagagttcttggctacctctggctgcccccgaattagaacagcccatgggggtatgtgtattgggagtggaggagtggacgggtagattgactttttctcaggcatcaatctgttacaaggttcatggtttctatggggccagatgcatgagaggtcaaagcatgggcaataggggttaactgaacgagttgaatgctaggaagtcctcaggggagccaacgttccttgtaaagtgtgtaga

SEQ ID NO: 897 - DNA, 471 bp, Homo Sapiens
tctgcgtccatcagcagttaagaatatataaaatcctactttggccaagtttgtttcttttcattatagtttatatgaaaagatcaccttaagtgaaattattttcctttaatcttttatgtatttattcacttttggaagctaggaatgagcaacacaaattttactctgaaggcagaagagctcatatataataattctaatgtcccacctattttcacttgtccattccatgtaccagcttagttatgatacttagtcacataattatctttgataaaggtagaggcacaaagaggcaaactaagcaagtcaaattctaatgtgtgtacttcataataattttttatccattttcatctttatattctgtaacatgaaacttacctaatcttcaaatgttagcttcattttttacctttgaaatacttaatctttctgaataaatataatgtgtctataaaataaaaa

SEQ ID NO: 898 - DNA, 853 bp, Homo Sapiens
  misc_feature (186)..(197): n is a, c, g, or t
tttttagtttcagaactgcttttatttggataactgactgaaggagtctcatttgtaaccaagatggaattcacagtatgttgttacattcacacttaaaaaatatatctctatgtacaggaatttgcaaagagatgtaaacatacattaatttccaagtacatttctccccttctccctggaggnnnnnnnnnnnngccatccaatgaggcaaccccttcaaaataattttaatacaaaggatgcaaacatctataaatgaaaaatgtggttcttctgccccttctgggtgtcatgggagagaatgtcaccgaatgaaaatgacaacagcttggcttcagatggaatgggactatttaaaattgagtttccaggaaaaataggcactgatttctagaaggaaattaactccttaccgaagctatttattgagccaatatggctggttaacgtcctcactagtataaagtaacccagtgcaggactctcagacattagctgaaccaagtgtacacagtcagactgcaagggcactgatgaggctactctgaaagctggttgtccccgtcctctaggtgtgaggaccactctgattttatcccaggggcccggtccattcttcccatactgcaactgtcgtgcattatacaaggtaccctgctgcttacccacttcaactactctgcaagtcgattagaaaatcttgttaaaaaaacaaagagggaaaaaaggctcacgttatctcatccaggctgcccgccccagccccccaactggaggcatgccgggtgggggaatgggcgggggcacaggaggctgtcctccaggggggacggcaggaggtgggtagccc

SEQ ID NO: 899 - DNA, 693 bp, Homo Sapiens
  misc_feature (372)..(405): n is a, c, g, or t
ccattcgtttctaccatttaagggatcagtgcctgtaagccagcagcgagtatcccactgcttaaacttaggcgctgtgctctacagtacgctagtataattccagaaccaaggcatccacattatttggtgacctaactactactctgatagaacagactgggaaattcactgataatgagtcattacctttttaatatgtgattatctagttcagcattttgaatgtgtagtttaaggtctgatttagtaaaattttaaagctaaataatctgatgactcttgaaagtttaattggtagtatgacatttatgtttttttcccccagactcacagccaatacaaagttttgagactcctaaatgttaatannnnnnnnnnnnnnnnnnnnnnnnnnnnnnnnnncttaccacctaagctgcggatcaaaaagggaattcttccattagaaatttgtagtgttgtgtggccagcacagtatttttcagatttgaatttcagtacctctgtgtagcctcagtactctcaacaccagtcactctttattgtcttaaaatattccatactttttgttgacccaaaattgttgaaaatattttgctcagttttcacaatgaactaattgaaaagtgtagttactgtgttgtaaacatttgtgtagttctgttaatacactgatttgaattttaaaaa

SEQ ID NO: 900 - DNA, 743 bp, Homo Sapiens
  misc_feature (430)..(620): n is a, c, g, or t
gtctacctttccctagcgtctctagccagccagccccagatactcctcagagacccacttctctcttttgcatggaataaaaagcactcacagtccctgcttttgggattacttatgctgtggaactcataacccaattcacttccttcactgggtcccaccccattgttgtctctggatgaagtctagccatcagtctggtccttcagattcttcgtaaacttttctgcagttgccagagctaagtctccatttggaaactttgatctcaagaactctcttgatggtgggcacaagacagatagatgattgctgctttcctttgccaaacttggatgcatttttctctttgtttccaaagtataggcaacaggttaaactaccacgtggggtagtttatcaatcctcccgcctcatccttctgcataannnnnnnnnnnnnnnnnnnnnnnnnnnnnnnnnnnnnnnnnnnnnnnnnnnnnnnnnnnnnnnnnnnnnnnnnnnnnnnnnnnnnnnnnnnnnnnnnnnnnnnnnnnnnnnnnnnnnnnnnnnnnnnnnnnnnnnnnnnnnnnnnnnnnnnnnnnnnnnnnnnnnnnnnnnnnnnnnnnnnnnnnnnnnnnactttcgatggttaaatgcctccttattcaaatatcctgtatatatactggcgtttctgtcctgatgtcaagtctcgagagaagatgatcaaacaataataaaataattataataagaacaac

SEQ ID NO: 901 - DNA, 431 bp, Homo Sapiens
atagactgcctcctgtttagtccaacttagatcactcagatccttcctgggatcaaaatatatttttaaacctaagacaaagcgaagcaggtgtcacttgggtgatagggaaaaaagcttgtatttcctggttaatgtttagcttttgtaatgctatttaaacacacctaaggtgcctttccctcatctcaggtgctttctctgtaaagtttcactcccacctttcttttctctgcatggccgtccagtcttgcccatctacatccagagctgttaactagtagtgtcattacctgtgaaaaacatgtagaagcttccttgaaccacccagaaatccactcaaatttggggattgtcattccttttgtgaataattaatacaattaagttgttttttaaatattataataaaaaaggaaattttctggaag

SEQ ID NO: 902 - DNA, 570 bp, Homo Sapiens
aagtgtgatcagccctttctctgggaccttcaaagcaaatgtgggacagtaagaaaattggtctaagacagcacccactgccgcaagtgtgggaagcccgtctgtggcaagtgcagctccaagcgctcctcccatccccctgatgggcttcgagtttgaagtgagggtctgtgacagctgccacgaggccatcacagatgaagaacgtgcacccacagccaccttccatgacagtaaacataacattgtgcatgtgcatttcgatgcaaccagaggatggttactgacttctggaactgacaaggttattaagttgtgggatatgaccccagtcgtgtcttgatgactctcccaggaatcagaaagatagtatttactaaagaaacggttgttttaacccaaatcattaccagagtggtaaagcagacatgtgagaagtaagaaagaaactaaagaccctgaatgaattggcagattacccatgtgcacaggggggacctggccagtgagcactcgcaaggggactcttccaacttgttcatacaatataaaagaagctatttttttaac

SEQ ID NO: 903 - DNA, 555 bp, Homo Sapiens
ccctctacatttaactattaaaaaagttttttattaataaatgggctcctctgtggttcatatacaatcataagtgaactttaaattccattttatacaaacatctcaaaaaatattgggagtgaagtatggtaggaaatattgctcacattgctaattaacatgcgtatatgaaaggaggaaaatgttttgttagtgcatatacctccagagcagaaaacccacccaaaacaaaagatctaaaataaaacatacagtagctgattacaaaaaaaggtaatgtccacaaaattaagtttttcatgctattctactttccagtactatgcttcaggtaatcaatttgcatggctagatgttggatacttgaggtatataagaagggaaacctgcatgttgaggaaaatctgtcatcttaagggttgtttctttttgtttgtttatcctggtactttaacatttttaaaagatattttatttacatcaaaattcactgaactacaatgacattccaattataatagatgacaaacaacgcctctatcactaggcact

SEQ ID NO: 904 - DNA, 1362 bp, Homo Sapiens
  misc_feature (378)..(424): n is a, c, g, or t
  misc_feature (634)..(754): n is a, c, g, or t
  misc_feature (810)..(821): n is a, c, g, or t
  misc_feature (897)..(897): n is a, c, g, or t
  misc_feature (1051)..(1059): n is a, c, g, or t
  misc_feature (1123)..(1123): n is a, c, g, or t
tagggtagttggttgatggaataaagggcttagggacttccctgaggcctctggacccatctgtcttcctgagggcagcccaggacctttggccaatcccagttcccaggctgcagttgagggtccgtccttgtcaaaaggcaggtgctagacagtctagaccagggtttctcaaactcgtacttgacatttggggccagataattctttgttgtggggctgtctggtgtatggtagggtgctcagcagcatccctggcctctgcccactagacatcagaagcactcccccagttgtgacaaccaaaaatatctccagaccttggcaaatgttatctgtgggggaaaattgccctcaattgagaaccactggtctagnnnnnnnnnnnnnnnnnnnnnnnnnnnnnnnnnnnnnnnnnnnnnnnaacttaaatttaagttaattaagattaaaagctcagtttctcagtcacattagtcattcaagtgttcagacagccacatgaggggacagtgcagctacaggatatgccatcatggcagaaagttctattggttggacagtgttggtctatactgactcttatttctcagggagatcacagcaacctaaataaaccagataccttttctcnnnnnnnnnnnnnnnnnnnnnnnnnnnnnnnnnnnnnnnnnnnnnnnnnnnnnnnnnnnnnnnnnnnnnnnnnnnnnnnnnnnnnnnnnnnnnnnnnnnnnnnnnnnnnnnnnnnnnnnnncgcaccacaaaaacacttaagaacttcatctagagccgtgtcttctccccaataannnnnnnnnnnnccacaaaaagacatttactgaaacctcgcccacagagacctcggaaacgaatctcgcccataatacccacaggggncccaaacaaccttatatttacacattaccccgcccaaccgggggcatgaaagtccccgcgagctggttcgcctctacctttacagcactcccccccacaaaatggagaacactcacgcacctcgcggcgcgagtgaagaacccgaatacgcctnnnnnnnnntgtattaattaatcagggcctccctcccccccactatcccaaacactaacccccccgcggagangaggggggggagcactaaaaaaacatccttatagaattccgccccaacgctcacaaacaccagtatcccggtagtacaaacagacttcacactcgccgcaaaggggatcaacaccacaaacccccacaccccatcaggcgcaccaccctttatgacgaaacaagggggcgcagcgagatgtcttctcatcccacacccgcgccggcttatatattgcccgcaaatagctcctgcgggca

SEQ ID NO: 905 - DNA, 410 bp, Homo Sapiens
  misc_feature (281)..(343): n is a, c, g, or t
gggtgatgtaatttgtgcaaagattatagctaattagtagcagagccctgactgggacatagtttgaaggtgaaaaacttcaccaagctacctttcttgaaaggtccaaatgtttatgttttcaactactctttccactgtaccataactttcactacatattaaatgacactttataactaatataataggacaatcatcaatgcatatatagccagcccttcatatctgtgggttttgcatccatggattcaaccaaggaggaattgaaaacactgagnnnnnnnnnnnnnnnnnnnnnnnnnnnnnnnnnnnnnnnnnnnnnnnnnnnnnnnnnnnnnnntgtcatactgttgttaagcaacagtataacaactatttacatagcattaaggttggtgcaaaaatgc

SEQ ID NO: 906 - DNA, 652 bp, Homo Sapiens
tgcacagatggcattgtatttgttgtggactctgttgatgtcgaaaggatggaagaagccaaaactgaacttcacaaaataactaggatatcagaaaatcagggagtccctgtacttatagttgctaacaaacaagatttgaggaactcattgtcactttcagaaattgagaaattgttagcaatgggtgaactgagctcatcaactccttggcatttgcagcctacctgtgcaatcataggagatggcctaaaggaaggacttgagaaactacatgatatgatcattaaaagaagaaaaatgttgcggcaacagaaaaagaaaagatgaatatcaatacctattatatctgtgtggagtaggttttctctggtctgattttgacaaatagaagagtgtctacagcgtggtttgcctgtctgccctcctggatgctattaaagctttgttttgttgaacaatcagatgcccaactctgttgccttgtggaagatgagtaaatgcagtgcttcttaaagtggtctcttctccctaccccacaaatcttttggtactaccatttggggaagccaagcaaggatagtaaattgaccagaacacagttgtgggaatttggtctgaagttagtgaaataaaactttaaagagtgaaa

SEQ ID NO: 907 - DNA, 836 bp, Homo Sapiens
  misc_feature (381)..(386): n is a, c, g, or t
tcctctgggaatggttacagctttggtaaaaatttttgagggttatttttcccataattcattctgccacattttgaggcgtgtagcctgaccatggcttgctgcttcttccctgttcccaaaccccaagttcccaaaacacaccatggactggaaagggctatatatctgttgcatcacacaataaggcaaaacatttcttgtaactttgatagtgattaaagcagttcataattaaatatgagcattttgtacaaggacaattacactttacaaaaatcaacaaaatcatacaacaaaaattgctggagtctgatttacaacacgaattatggtttgaaatcacgcttacataagtctcaaatttacaaaacctctcgnnnnnntcagttctgggctagctgttgtactgctgaagttctctgatgtaatcattctcacccatgtcatatccccttccttaaagttgaggatggatgttaaaagtttcaacaaagttgagctgtactctcctttggaggtgaaggtaaactccatggctagatgagcagttttaccacatatcatctgttgatgtagagtcagtgtcgtcatttttgtaaggattcagtctattgtaaacggcttcaataacattcctcttgcttgccaattcaccccctggtgggaggctggggatgttctcactcgctaatgtgcgcatcacatggactaagtcggggacgccttccccctgcttctttatgatttcttctactctgcattccaggtacttgtccaactctgcctccttcttcactgcttctggcgatactttgggtgcatttggaaaaccc

SEQ ID NO: 908 - DNA, 808 bp, Homo Sapiens
attgcacaaaattctgctgcaacggtcaggaaaggttattattgggtgcctgtgggggaaggtgaaacaaggtcccatgactgttttgcagaaccttgtctgtggagggtagaggttgcggcaggggcctgtgggccttacttggtgagaaggtaggtctagctggctccattcagtatttgagacatttggaatttgtctgcatttaaaaccaagagatcacacacacctgtctggatttggagtttctcttgaaaactcgccagtccggccgtctgagcctgcactgacgcctggtgaagctgtgcaggggccgcccctctccctttcgccacagtcctctccactccctttcgcctctccctggcctgctgcactcactgataggaaattctgaccccagactcggagcagccttcccgtggttcggtttttgcttccgcgaaaaagccaaaggccttggccagagagccagctgttcctacctctaccccacgcttccaaggcaaccttctccacttatcttaggccgagagacagctcttcaagaacgtacatggatcctgattttctcacgaagtcccgatggaaccctgtgctgttgagacatcagtgtgtaaaactctctgtgtccctgttgggctgtccagacagtctggactcttgtaaatttgagatttaattaaagggaaaccaacccaaataggacctgcggaaccattttaaactaaaatctcccccccatcccttggggaactcacgacaccaattctactatttccccaacccccgcactaccccaataccc

SEQ ID NO: 909 - DNA, 630 bp, Homo Sapiens
agccttatgatgaatttgtttgaagggcattttctttatgaacaaaggcttggatgcatattcctttctttctgtgaatgggtattattccctgaggaaagttgcacagtgaaaaccagtctggttgtgacccactacatgttttgtttttaatcactattacctgagttgaactttgctcaccatgtttgtacttgttggtctgtttaatgaagtttggttgatgccatcctttgcactgccgaagcgtaatcttgtgtattacttagctctctgctgatctcagtatggacagtgtaacaacaaaaccaaaatggctggacagacttcttgtgttttgtaaatataaactaggacagttctgtaggtttgttcagtgtgctagtggagtatttccttaatgtaaaacttcacttaacagagagattctttgtttagcaagcttggagtgatgataaaatggtaagaaataatataaatgttgaagaaagcatcacaacagaactataggagtctaaatttaataaatctttaaaaaaaaccagtgtctagaatatataccatgttttattatttaaaatcattgtcttaaatttttgttcaaaaaataaaaatttgaatacaatcaaa

SEQ ID NO: 910 - DNA, 793 bp, Homo Sapiens
  misc_feature (634)..(634): n is a, c, g, or t
gggagccccggtccccacgcctagaagacagcggaactaagaaaagaagaggcctgtggacagaacaatcatgtctgactccctggtggtgtgcgaggtagacccagagctaacagaaaagctgaggaaattccgcttccgaaaagagacagacaatgcagccatcataatgaaggtggacaaagaccggcagatggtggtgctggaggaagaatttcagaacatttccccagaggagctcaaaatggagttgccggagagacagcccaggttcgtggtttacagctacaagtacgtgcatgacgatggccgagtgtcctaccctttgtgtttcatcttctccagccctgtgggctgcaagccggaacaacagatgatgtatgcagggagtaaaaacaggctggtgcagacagcagagctcacaaaggtgttcgaaatccgcaccactgatgacctcactgaggcctggctccaagaaaagttgtctttctttcgttgatctctgggctggggactgaattcctgatgtctgagtcctcaaggtgactggggacttggaacccctaggacctgaacaaccaagactttaaataaattttaaaatggcgccaggcccccccacgtaaaagaaaanaacttgttcggccgccctcggcccctcaaaaaacttttctaaaccctttcgtttgggcccccggggcccacttaggtaagggaaaaatggggcctaaacctgtttccctaggaaaatcccttggccatgaactaagggcttgggatttcctcccccaat

SEQ ID NO: 911 - DNA, 964 bp, Homo Sapiens
gcagagcgggctgagtcacaggcacaggtgaggaactcaactcaaactcctctctctgggaaaacgcggtgcttgctcctcccggagtggccttggcagggtgttggagccctcggtctgccccgtccggtctctggggccaaggctgggtttccctcatgtatggcaagagctctactcgtgcggtgcttcttctccttggcatacagctcacagctctttggcctatagcagctgtggaaatttatacctcccgggtgctggaggctgttaatgggacagatgctcggttaaaatgcactttctccagctttgcccctgtgggtgatgctctaacagtgacctggaattttcgtcctctagacgggggacctgagcagtttgtattctactaccacatagatcccttccaacccatgagtgggcggtttaaggaccgggtgtcttgggatgggaatcctgagcggtacgatgcctccatccttctctggaaactgcagttcgacgacaatgggacatacacctgccaggtgaagaacccacctgatgttgatggggtgataggggagatccggctcagcgtcgtgcacactgtacgcttctctgagatccacttcctggctctggccattggctctgcctgtgcactgatgatcataatagtaattgtagtggtcctcttccagcattaccggaaaaagcgatgggccgaaagagctcataaagtggtggagataaaatcaaaagaagaggaaaggctcaaccaagagaaaaaggtctctgttttatttagaagacacagactaacaattttaaatggaagctgagatgatttccaagaacagaaaccctagaatttcttggaagctaatggaaactttttcttttggctttttccagttggcgacccggtttttccaacccagttccggcaggcataataaaaattctagaaaaagccaac

SEQ ID NO: 912 - DNA, 824 bp, Homo Sapiens
atcaaagataagcacgcatttagttgcctggttatacctgtagactgtggaactattttaccttaagacctgaaaaagtttagtggattataaattcctttcatacggttgtattttctgatcattggtttcttaatatggttgtactacagtatacttggttgatttaggttgcacattcactgaattcactgaacattattcctcatcacattttcaaagtatccatttcatttgaaaaacatacattatcaacatgtttttgcatatttgataatgaaaaaaatctttgcttgtttatttctgaaaaagaactgtatttagtgattattttagatagtgatattatagcattcatctgtgtgtaaattatttcatatagggaagagttctgatctgtacctatggttcttattgaaaacaacattggatgtgcatttctgtgatgttatgaatacatttctactttattttgaaacatttgccaaactaaatactgtaacactgtataacatttaaaaatgttaaagaactgcttagtattagaagcagatcatttcccaaaattctaagagcagcagcatatgttgttgcttgtataaagcctagcgataatttttagactaacttccatggtgccctgttggcattagcactaccattgtaccctgctgtataataaacaatcttagacatttatcaactgttgatacaaatgttagtccctaaccactttttatatatgttttaaatttttgaaattcaagtgtaccttccataacataaaataaacactagactgtatcacacttcgattgaaaaaa

SEQ ID NO: 913 - DNA, 1133 bp, Homo Sapiens
gggggtgggggcgggtggttgcctgcgggaggccgccgcgggtcatgtgaccggaagggctcctcacggacgccgtccctcctcggcgcggcctgagcgcccggcccgaccccggccatggggtgctgctacagcagcgagaacgaggactcggaccaggaccgagaggagcggaagctgctgctggaccctagcagcccccctaccaaagctctcaatggagccgagcccaactaccacagcctgccttccgctcgcactgatgagcaggccctgctctcttccatccttgccaagacagccagcaacatcattgatgtgtctgctgcagactcacagggcatggagcagcatgagtacatggaccgtgccaggcagtacagcacccgcttggctgtgctgagcagcagcctgacccattggaagaagctgccaccgctgccgtctcttaccagccagccccaccaagtgctggccagtgagcccatcccgttctctgatttgcagcaggtctccaggatagctgcttatgcctacagtgcactttctcagatccgtgtggacgcaaaagaggagctggttgtacagtttgggatcccatgaagagaggggtccttggacagctcttctcctctcttcatcccatctctaccccacccccttggcccccagcctcactgcggcttatacagtaccctaacctgctactaatcacagagaaaaatgtgaagaaggaggagaagaggaaggctagaagcctgagcaagtgagggtagaaccttttgggactggcctttgaagctctggccagggatggggtgggggccaaaaggacagagcctggtatgtcttcatagtcattgagaatgtggagataccagtttgggtggggggtgatcaccaggggacctagggagatccccttcccaccctctctgttggcctcagagtcactcctgccccctctccctgacttggtgctcacatgcacctcactagggtttgtgaccagggtctggatgagcttgaatttgaatgaattgagtttgtatttctagaaccctgggtttttacatgtttggtctttttgtgttttggtttgtcaccctctgataaagggaagtatattcatc

SEQ ID NO: 914 - DNA, 440 bp, Homo Sapiens
  misc_feature (158)..(175): n is a, c, g, or t
acactgcaaaaaggtcatctatttacagaagagtgatttaaagacattatggttttctttacagatgtaagaacagcaactgttcactttttaaaaactctacatctcaaccctccactattattatagtccactgaattgcctgtatcaaaggcagnnnnnnnnnnnnnnnnnncccatttgactctccaaatgaacttccatcatttcttcatcatctgtgggctggctctcctgaaaagtctcagggaataagtcacaggagggcaggtttttgacctgctactaaaaattaaaccacaaaaactagagatccctctcctgcaccctgttcccctcactttgtgcagttcagtcatcattatccgacagggtctcgtactgtgctgagagcagtggggcaggctctcgctcccagatcctgtacggttgagcggaga

SEQ ID NO: 915 - DNA, 1295 bp, Homo Sapiens
ggggtttccgtacggaagcaaaggagccaagaccatggcgaaagccggggataagagcagcagcagcgggaagaaaagtctaaaacggaaagccgctgccgaagaacttcaggaggctgcaggcgctggggatggggcgacggaaaacggggtccaacccccgaaagcggctgcctttccgccaggctttagcatttcggagattaaaaacaaacagcggcgacacttaatgttcacgcggtggaaacagcagcagcggaaggaaaagttggcagctaagaaaaaacttaaaaaagaaagagaggctcttggcgataaggctccgccaaagcctgtacccaagaccattgacaaccagcgagtgtatgatgaaaccacagtagaccctaatgatgaagaggtcgcttatgatgaagctacagatgaatttgcttcttacttcaacaaacagacttctcccaagattctcatcacaacatcagatagacctcatgggagaacagtacgactctgtgaacagctctccacagttataccaaactcacatgtttattacagaagaggactggctctgaaaaaaattattccacagtgcatcgcaagagatttcacagacctgattgttattaatgaagatcgtaaaaccccaaatggacttattttgagtcacttgccaaatggcccaactgctcattttaaaatgagcagtgttcgtcttcgtaaagaaattaagagaagaggcaaggaccccacagaacacatacctgaaataattctgaataattttacaacacggctgggtcattcaattggacgtatgtttgcatctctctttcctcataatcctcaatttatcggaaggcaggttgccacattccacaatcaacgggattacatattcttcagatttcacagatacatattcaggagtgaaaagaaagtgggaattcaggaacttggaccacgttttaccttaaaattaaggtctcttcagaaaggaacctttgattctaaatatggagagtatgaatgggtccataagccccgggaaatggatacaagtagaagaaaattccatttataaagtactgagagaatgatattggattttgctgaacaggcctatcttgaactttggtaaattatttttgacagaatactcttttcaaaatggcatttgctgatttcataaacctttcacgtctggacgaattaccaaatgccatgaattgccactgtgtgtttatgtagaaaatacaaataaaagttattttgatggcttaggtttccttaaa

SEQ ID NO: 916 - DNA, 678 bp, Homo Sapiens
caaacttaggctaggtagcgaggctgggtgttgaatcggcacgaggccatggacttactcaccatcaattaccaaggccctgcttctccccagatcgtttcccaagtttggcgatttgctgtcggtgcctcagccacatatgaccaatggttacaactcagggctccagacctcagctaaaaagagaagacgctgccctcctgggcacgaacgtttagaatgctcaactcctctattgtgaccacaggaaggtggccctgaagatgcaccgaagacagctgggaggtgactgctgtactgtcagcctctctgtggaggcattcgtgcagtgccagctaaaagggaggtgaagggggatatcggacccagcgagggagttgctggtagaaggaaagctcttctcagtgtggctggattaagagcagcctagcagcttgggcacctccactctgtgcggtctgatggccccagcaaggtcgctgcagggacttcctgaggacttggtttggttttattctggggttggaaactctgagccaatattgtgtctgttccatttgggtatgaagaggaagtctggatcacttaaactgactagttatttccggggtcataactttaaattaaagacatatcacttttttataccaaaacaaacaagaaaaacccgagtttcta

SEQ ID NO: 917 - DNA, 1090 bp, Homo Sapiens
  misc_feature (49)..(49): n is a, c, g, or t
  misc_feature (84)..(84): n is a, c, g, or t
tgaaacttcttcgtccggccctaggaggggcccagattgaagtgtcggngccagcctagaggtttctgggtgcgtccctgaagnatggtccctgaggaagaatgtgtgccaggcttgccttttggcaggggattgtggagtgctagtctttgttgctgaggaggattctgttccatgggctcagccaggttcactgagtcagtaacagagcactctggaagcagccaccccatgtccacaccatattgtctccaggcaagagaagaggggatagagactccaggctggcatccaactcagcacatcctgaagctgctgtgcctgccggtgtaggcagtgctttctccagctgacacaagtactcaaaaagcagcttttccatggcagccagaaagggttccccatactcttgttcaagttcctgcagcttcgaggccaaatccacaggagcctctgacagctgcttcacctgctggtaaaaagtttcctgtgcctccaaaatcttcctcagatcctgctttgtagccttgggatcccgcactataggtccagattctggaaagtggtgattcagggctttcaggacttgggcccaaggccggccctgcaggatcagctccaccaccaccttggcctttaggcccatacaaaggcgttcgtggtgccggtagcgaaccaagccaggggcaacagcgcgcagagatcgcagaaactccagtactcgcggaaaatgttccacgcagcgtccgcgcacaacctgccagctagccgcggcggcgaagcgtagagctgcgggacccgccaccaggggcgtagccatggtcggcgggctccgcccggaggcggtccctccgggttcctcacccggatgggtgaggctttccgatcactcctaggggacggggcttctggcaactccctgtcgctccggtctgtcggctctgggtacctcgcgatctgactcggctcccttccatcggcccccagaattctgggggagggggtcttctggctcgggctggaggagcctgagtggagaagctgaccgtctccagtggcactgggtcgctcagctttaacgtcgccgctg

SEQ ID NO: 918 - DNA, 720 bp, Homo Sapiens
cgaaggtggtagtacagcaagaggcactggcggggcagcaggcctgcaggagctgtttttccattgctaggcctgacccctctctacctgtgagcgttcagggggtccctgagatagtttagatgcccccccatcttagacctcagctcccacagtgccttttaagggggacctcacctcctgtgcacagcccacccactttcctctgcttccctggcacagcccaggcatagacgagctggcgttggacccagttcttcccccttttcagccccacagctgctgccacaggggccaactagggccaggtggaaggggagctgagaagccaacccctagcccaggggtgctgtgggaactgggatccaatttgtagcttcctgcctggcttcagagagcccagcaaccttctaggcctgctttccagacttctgagatagcctgggatgagcaatcctgttacagtacatctggaccttccctacctgggctctggggaggctgtgggcctggagagggaaaaggagggagggggtgtctgcaccacctgggaagatagcacaaggcctaatgaggtcaccctgactccccaccccagcatttcattcataccagataatagctgcattactgccaactgaccttataaccctctgcaccttcaaaaagattcatggtttttaattgctgcttttaataacatttgttaaagttataaaa

SEQ ID NO: 919 - DNA, 1560 bp, Homo Sapiens
ccacgcgtccggggtcaggtcatgggtatgtggagaatggtttggaggttgaggacaaccacaggtgtctcattgctgccatttctcctgaggacataatcacttggtcaccttggaccctgtcacttcctaaaattactcgttctgtcatgccatagaggtcagttttcctctttcttggcttctacccacaaacattcaccaatcatttattcgttcatttagcaaatatgcagcctccgcaagatgagctctcctgcagacaagcatggtctgaaacattctttgagcaatatttattgagtgcctactatgtgttaggtactgtgccaggcactgataagccagtggtaagggaaacacagctctaacctcacctcattctccaggttacaaaggccatgtgcccctttgaatctggcagagaaagtttcctcgttgtaagtatttgcatctacttcaagccagattcttctgcctctttctcctttccagacccctactctgtgcagtgctgaccacagctagagacaccgccccattgctcaaccagtatttattatccctaaacgacccttcctcacattcccttccctccacctctccttaccaagcacccaaaagaggatttagaactagcagggtggacatcatctggttgtttctacttttctctgcctagcacaaaattgggagaaaactggagcctccatccgcagtcattttttgtacagatctggggataaggatgtaggctttttctaacttctctctcagaagcttctacagaaacccttccatctggagcctcaaagggcccacctccaagggaaggcttaggcaatgatcctgtttctaccaacactgcaccttatcccaggaacctgccctaagaactccagagaccatattttctctccctccatttctacccagaactccaggactccttctggaatcatagaaccgtacaattggaaggaattttagaggttttctagttggagttgtgtccaacagaattcattaacaccagcctgggcttgtttttcctcctccctctggacttttttcatcttttcctccacctcaaaaaatacttacacacagattcttcttgtacaggcatcaaaaccaactcctctgcccctaaggctgtgtccctgtggtctccagccacccctaccccagtcactcgccccttcctcatctctggaatttggccaggcagtcccagaagactctggagtgacctcctttgcctaaaaagcagacagataggcatgccccaggccctgagtgagcagaggaggactgtagggtgagagggaaagaaaatgaaggtgactttcatggaagtttcatttcttttccccgattgtaccaactgcatgtacttttggcctggctgcaaggagcaatattggtttactctcgtatccttaaaaagttacagaactgtgtcttaagagaattatttatagttactataactgaattgacaaatgtcaacttaactgataaattatatttggtaaaataaagaggacgtttatttag

SEQ ID NO: 920 - DNA, 384 bp, Homo Sapiens
ggaggggtttagcgggcagttcttctatcttcccatttggcagctgaggaaatcaaggctcagagacgggcagtcacttgtccagggtgtagcgaccaatctggtgcctgaaatgaggtctgagcccacagcccagtagaatcagcagttgacgagtggttaattgagagacacagacggaacatgaaagagaatgagaaacagagacagcaagagggaaagacagaggcagcgagaatgccagagagccagagagacacagtgtaaagaggatgagagaaaggacagagaacaaggttatgttggtgcccagtggagcccgggacatggggacaggggagtgctgtcccttcacatccaagccagatgctgggaaacaaagga

SEQ ID NO: 921 - DNA, 817 bp, Homo Sapiens
  misc_feature (697)..(697): n is a, c, g, or t
  misc_feature (707)..(708): n is a, c, g, or t
  misc_feature (752)..(752): n is a, c, g, or t
  misc_feature (763)..(763): n is a, c, g, or t
  misc_feature (772)..(772): n is a, c, g, or t
  misc_feature (792)..(792): n is a, c, g, or t
ggggaaggtgaccaagtcagccatcggggtgctctaactgggggttattatgacacaaggaagtctcgacttgaattgcaaaaagatgttagaaaagcagaagaagaactaggtgaacttgaagcaaagctcaatgaaaacctgcgcagaaatattgaaaggattaataatgaaattgatcagttgatgaaccaaatgcaacagatcgagacccagcaaaggaaatttaaagcatctagagatagcatattatcagaaatgaagatgctaaaagagaagaggcagcagtcagagaaaaccttcatgcctaagcaacgtagcttacagagtttggaggcaagcttgcatgctatggagtctaccagagagtcattgaaagcagaactgggaactgatttgctttctcaactgagtttggaagatcagaagagagtagatgcactgaatgatgagattcgtcaacttcagcaggaaaacagacagttgctaaatgaaagaattaaattagaaggtattattactcgagtagagacttatctcaatgagaatctgagaaaacgcttggaccaagtagaacaggaacttaatgagctgagagagacagaagggggtactgttctcacagccacaacatcagaacttggagccatcaataaaagagtaaaagacactatggcacgatcagaagatttggacnattccattgnnataaacagaagctggaatttaaggagctttcagaagagtatggnagcgctggganaaatatggnaaaaagaaacatatgggatnggctataaatccatggatacctaaa

SEQ ID NO: 922 - DNA, 366 bp, Homo Sapiens
gccacaggaggacagaaagtgaaatgtcagccaggatcgctaaaatgtccttgagtcccagcagccccaggcacgaggatcagctcgaggtcaccagggaaccggccaggcggctcttcctttttggagaggagccatcaaaactcgatcaggatgttttggccgctcttgaatgtgcagacgtcgacccccatcagttcccggccgtgcacagatggaagagtgctgtcctgtgctactcaccctcggacagacagagttggcccagtcccgcggtgaaaggaaggttcaagtctcagctgccagatctcagtgcccctcacagctacagtccggggagaaacagcgtggctggaagcaaccccg

SEQ ID NO: 923 - DNA, 473 bp, Homo Sapiens
  misc_feature (13)..(13): n is a, c, g, or t
attccccccagtncagtgtggtagtgaagctgacattgaagggcccttgcctgctaaagatattcatcttgatttaccatctaataataaccttgttagtagggatacagaagaaccattacctgtaaaagagagtgaccagacattagcagctctgctcagccctaaagaaagtagtggaggagaaaaagaagtacctccccctcctaaagagacactgcctgattcaggattttctgccaatattgaggatattaatgaagcagatttagtgagaccgttacttcctaaggacatggaacgtcttacaagccttagagctggcattgaaggacctttacttgcaagtgatgttggacgtgacagatctgctgccagcccggttgtaagtagtatgccagaaagagcttcagagtcttcttcagaggaaaaagatgattatgaaatttttgtaaaagttaaggacactcacg

SEQ ID NO: 924 - DNA, 514 bp, Homo Sapiens
  misc_feature (446)..(473): n is a, c, g, or t
aaccagatctgtggggagcctgccatcctgctgtacgatgagctggggtctgatgcatctgcaaacgcaggctgccagatctaacgatggtgctgctgtggtggtgcccatcttattcctgatactgctgagcctgggggtggggtttgccatcctgtacacgaaagcaccggaagctgcagagcagcttcaccgcccttcgccaacagccactacagctccaggctggggtccgcaatcttctcctctggggatgacctgggggaagatgatgaagatgcccctatgataactggattttcagatgacgtccccatggtgatagcctgaaagagctttcctcactagaaaccaaatggtgtaaatattttatttgataaagatagttgatggtttattttaaaagatgcactttgagttgcaatatgttatttttatatgggccnnnnnnnnnnnnnnnnnnnnnnnnnnnnggaaagaaaggaatgaataaactttgtagtaatcaactgtg

SEQ ID NO: 925 - DNA, 419 bp, Homo Sapiens
tgctagaggacccagacagcggaccccatagatattggttcttctttctctgactgaactaagtaggagaaaccaaaccataaacctattacagactacccaggcagaggcatttacttaattcatcaactagtgcaattaaaaccctgaaaacacatgatccttgttgactctgcttggttgaagcaggaaagaatggtcttgatggtcagaaagttttaaaattaatgggcagggcctttctggaccctgttttccaaacacgttagatattccgtcttgaggggattggagtaggctacagtgagggggtaatttttggatgtatctggacttttaaaaaatgtgcctatatttatagcaccatgaatattatgtaaaatttatatatgaattaaataaatattcacctctgaaaa

SEQ ID NO: 926 - DNA, 1539 bp, Homo Sapiens
  misc_feature (721)..(721): n is a, c, g, or t
  misc_feature (1145)..(1180): n is a, c, g, or t
  misc_feature (1411)..(1473): n is a, c, g, or t
aagaattgggatgccaagtacatgggtgggatcctgccgatattcccagaggggaaatcattcatagcagatgtgagcccatttttgacagacttcttgtcttctggtcagatcgtaggaaccccacacgaagtgcagccctcttacgcaacccagatatgctatgactgtctggtactttgatgctgaagaaagggcagaagccaaaaagaaattcaggaatttaactaggaaaactgaatctgccctcactgaagactgaccgtgctctgaaatctgctggccttgttcattttagtaacggttcctgaattctcttaaattctttgagatccaaagatggcctcttcagtgacaacaatctccctgctacttcttgcatccttcacatccctgtcttgtgtgtggtacttcatgttttcttgccaagactgtgttgatcttcagatactctctttgccagatgaagttatttgctaactccagaaattcctgcagacatcctactcggccagcggttatacctgatagattcggtaatactatcaagagaagagcctaggagcacagcgagggaatgaaccttacttgcactttatgtatacttcctgatttgaaaggaggaggtttgaaaagaaaaaaatggaggtggtagatgccacagagaggcatcacggaagccttaacagcaggaaacagagaaatttgtgtcatctgaacnatttccagatgttcttaatccagggctgttggggtttctggagaattatcacaacctaatgacattaatacctctagaaagggctgctgtcatagtgaacaatttataagtgtcccatggggcagacactccttttttcccagtcctgcaacctggattttctgcctcagctccattttgctgaaaataatgactttctgaataaagatggcaacacaattttttctccattttcagttcttacctgggaacctaattccccagaagctaaaaaactagacattagttgtttggttgctttgttggaatggaatttaaatttaaatgaaaggaaaaatatatccctggtagttttgtgttaaccactgataactgtggaaagagctaggtctactgatatacaataaacatgtgtgcatcttgnnnnnnnnnnnnnnnnnnnnnnnnnnnnnnnnnnnncaggggagccgccaaaacagaaacaccccgcaggcgcacacaccatgaccacgatcaaccgcagcctacatgagaaaacgaggtcgcaccacaaagcagaggcgagccacaagcacagaccaagacacgacagtcgcacggagagtaaaaaaagaggagataagaggaagacaagacaacaggaagaggaaaaccgatgggaaagaacacaacaatacagcgagagagagnnnnnnnnnnnnnnnnnnnnnnnnnnnnnnnnnnnnnnnnnnnnnnnnnnnnnnnnnnnnnnnccacaacagagaggaaaaccagcaggcggtaaaaacagaaaggagagacataacagcacacgaggg

SEQ ID NO: 927 - DNA, 769 bp, Homo Sapiens
tgaaaatggaagcctgactgacaggaacatggaatgatagaccctgacagcggagatgaagcccagcttaatggaggacattctgcagaggaatctctgggtgaacccactcaagccactgtgccggaaacctggtctcttcctttgagtcagaatagtgccagtgaactgcctgctagccagccccagcccttttcagcccaaggagacatggaagaaaacataataatagaagactacgagagtgatgggacatagaagccagcctgctaatcagatggctacttcacagcttcatttttgtttcattcagtggtacttcagcagagttaatatgcttttctgatgaattacacaacagtttgttaattcttcattcttgtagtatttcatcacaagaaacctactcttctgtcatcttgaagtaaatagaagatcaagccttcaaatctcttaattttttcggtatttattaaatctgtgagtggtttaaggagcggtcagtgtgtataaagtgtgtttgaacattatgccaaatatcaagatgtgaaggactaattcaggatgcaaaaacgttattggggggttgtaaatatcaactattcaacagtttaggatgcaattacgagtgtaaactgtgtgccttatttacactttattgtctcccgcttctcagatagttttgatgtgttgtacagtggaatatcttagatactttttggaaagtatttacataagttatatcacaattaaaatgttgaatttaaaa

SEQ ID NO: 928 - DNA, 1965 bp, Homo Sapiens
  misc_feature (205)..(205): n is a, c, g, or t
  misc_feature (309)..(309): n is a, c, g, or t
  misc_feature (1884)..(1884): n is a, c, g, or t
ggcatgtgcgccctggccgcagcgctggtggttcattgctacagcaagagtccgtccaacaaggatgcagccctgttggaagctgcccgtgccaacaatatgcaagaagtcagcaggctgttgtcagaaggtgcagatgtcaatgcaaagcacagacttggctggacagcactcatggtggcagccatcaaccgaaacaacagtntggtacaggtcctgcttgctgctggggctgatccaaaccttggagatgatttcagcagtgtttacaagactgccaaggaacagggaatccattctttggaagtntccccagtcctgatcacccgagaggatgacttcaacaacaggctgaacaaccgcgccagtttcaagggctgcacggccttgcactatgctgttcttgctgatgactaccgcactgtcaaggagctgcttgatggaggagccaaccccctgcagaggaatgaaatgggacacacacccttggattatgcccgagaaggggaagtgatgaagcttctgaggacttctgaagccaagtaccaagagaagcagcggaagcgtgaggctgaggagcggcgccgcttccccctggagcagcgactaaaggagcacatcattggccaggagagcgccatcgccacagtgggtgctgcgatccggaggaaggagaatggctggtacgatgaagaacaccctctggtcttcctcttcttgggatcatctggaataggaaaaacagagctggccaagcagacagccaaatatatgcacaaagatgctaaaaagggcttcatcaggctggacatgtccgagttccaggagcgacacgaggtggccaagtttattgggtctccaccaggctacgttggccatgaggagggtggccagctgaccaagaagttgaagcagtgccccaatgctgtggtgctctttgatgaagtagacaaggcccatccagatgtgctcaccatcatgctgcagctgttttgatgagggcccgctgacagatggaaaagggaagaccattgattgcaaggacgccatcttcatcatgacctccaatgtggccagcgacgagatcgcacagcacgcgctgcagctgaggcaggaagctttgaagatgagccgtaaccgtattgccaaaaacctgggggatgtccagataagtgaaaagatcaccatctcaaaagaacttcaagggagaatgtgattcgccctatcctgaaagctcacttccggagggatgagtttctgggacggatcaatgagatcgtctacttcctccccttctgccactcggagctcatccaactcgtcaacaaggaactaaacttctgggccaagagagccaagcaaaggcacaacatcacgctgctctgggaccgcgaggtggcagatgtgctggtcgacggctacaatgtgcactatggcgcccgctccatcaaacatgaggtagaacgccgtgtggtgaaccagctggcagcagcctatgagcaggacctgctgccagggggctgtactttgcgcatcacggtggaggactcagacaagcagctactcaaaagcccagaactgccctcaccccaggctgagaagcgcctccccaagctgcgtctggagatcatcgacaaggacagcaagactcgcagactggacatcccggggcaccactgcaccctgagaaaggggtggcaacaccatctagcaaccacctgccctgctcctatgggcccctcccccatcccaataaagggcccctttgggctgtggccatggccctccccacccaagccgacacccgatcccacctacccttgttcgggccgacccttggcccctctgaaaaagctttttcttaaaaccattcctttttgggcncccgggggccccccacctaggctaagcctgaaaactggggccccataaccggttttcccctaaggaaaaacctctggcgtt

SEQ ID NO: 929 - DNA, 621 bp, Homo Sapiens
  misc_feature (226)..(265): n is a, c, g, or t
  misc_feature (599)..(599): n is a, c, g, or t
  misc_feature (601)..(601): n is a, c, g, or t
tcttcatcactgcaacatatctctgactagcaatgtgacgatgtaacaaatgagattttctcatttaataataaaaaattgtgtaatgttttgcaaagcttctgtcttaaaatgtccaggtcttaagaaaaaaggcagcttacactgttttgcttgcagagtcatatctttttcgtacaatggaaatcctcaagtccactttgtgcggtctccctctccttccccnnnnnnnnnnnnnnnnnnnnnnnnnnnnnnnnnnnnnnnntgtagcatgttggctaaaactggagcaaagtgcactaaaacaatttcctgaactcacctgttgtactattcaccttttaaaccataaattgctctttagccatttgtagtgcagtaaatgttacaggaaaagacttggcacattttcttccaaattttaagaggtgattttcaaaagctttattggggtatgttgtcagaccagggttttcagagttgatggaaaagagtcttgtgagaaaacttattttgataaattattacacacgcagaaaaactgatcacactgactggatctgtccacgacatggaaaataaactggatttccaaaaancncaacaacaacaccacaaaaa

SEQ ID NO: 930 - DNA, 658 bp, Homo Sapiens
ggggttacttcgactaaaggggcggagacaaggaaaagtcagccccccccgaccccgcctccttgatgaaggaaggttgtgattggtccggagaggctgccgtcggatcctggctctttgcggtctgggagggtgggccttacctagactccggaggggactgatctctgtttccgcagggctctggagctggtgcaggtttaagtccgtctcagacagtcccctcaacccacagcctaagccccttgcccttgggcctccgtgacacagaacttgcttccttttcctaggtcgtccttcacctcccttcaggtgttgcttcttttgtgaaacctttttagaaccgctctagtgaacctctctttaactggcgaggaaacctctggggcctgataatcaggctgtaatgtgggacgacaggattaaaaggactaggcaccttggcggtcttgttccctcttccatgagtcttgggtctctcagctgaagagagcaaaagcgaattttggcccgcctaagattaatcaactgatctgggtgttgagcagacgcgcattgtttagtcctagagccccattgcctcctcccccaaagttgcacaaccactgggctgagggaaatcttgtgaccttggagagagaaagggagagaccccatt

SEQ ID NO: 931 - DNA, 1027 bp, Homo Sapiens
  misc_feature (82)..(221): n is a, c, g, or t
  misc_feature (464)..(476): n is a, c, g, or t
atagctcggaccgtattggtggtgtaccatggctgaataagtgccatccattattcttaaatttttatttttagaagcagtnnnnnnnnnnnnnnnnnnnnnnnnnnnnnnnnnnnnnnnnnnnnnnnnnnnnnnnnnnnnnnnnnnnnnnnnnnnnnnnnnnnnnnnnnnnnnnnnnnnnnnnnnnnnnnnnnnnnnnnnnnnnnnnnnnnnnnnnnnnncaccatctattacttttgaaatcttcaaaagacttgcttactcaatgtcagctgatggttggtaaaaataatttggcctttagtgttaagtgagacatcataagggtattgaggtatacattatggagattgatgtcaggtcagaatattggagttatacatctatttctgagttgaatactcagctcccacgagaaagaaagtagttttaaggtccagcttcttagtctacttgaagcaaannnnnnnnnnnnnatatttctgaatataaatatactcatatatgggctaaaaagaccccatgaataaatagcaggttcagtagttgaggagtggagtttagtaggtttgttttcagtataaattagataacatgtggaggtcacagcattttggaaattgagtgtccccaagtgagctttgtttataaactttcgaaatgtcggaagtggacaggtttgttaaatcttgtctgccagcacccttttcttcctttgttccttttcctctctgtgttattcgtgcggcagccagtccttcatactagatagagttcagataaagcaaacgtttggcaaaaacatactgtttgacctcctccccctctgcttatgaaggggtagcatgattctgtgttttaaagcagtgatgtttcagctgtgaaatgcactcgctgtaagctctaggctgagtgcatggaaactgttacgcttctcattttatgtgatctcctaattggtatgtagcaaaaattttctaaaactgttttgtggcttgttttgtaataaaaccatgtgaaatactcc

SEQ ID NO: 932 - DNA, 362 bp, Homo Sapiens
ggtggggggagggggctctgtggggtgggacattcacatcatttcactctggtctgagtggtggcctgagaaccatggtggcatggaccaccctcatccatgcaactccaggccccatgggaacggatgtggaaggaagaactgtcaccctcttaaggcccagggtcggagcccagggcctctcccttcctgtcgttcaatggacgtggtggtggctgttccacacccattttgttgcagttcctgtgagacaggagaggctgagccaagggaactgtgaaggggatgggcaggagggcttgtgcagggttttgtaagcagtgatctagtttcattaaaaaaagaaaacaataaccataaaa

SEQ ID NO: 933 - DNA, 1095 bp, Homo Sapiens
cgcggcgccgcatggccgacgtggaagacggagaggaaacctgcgccctggcctctcactccgggagctcaggctccaagtcgggaggcgacaagatgttctccatcaagaagtgaaacgcggtgcccatgtgaagctgggacgtggagtgcgatacgtgcgccatctgcagggtccaggtgatggatgcctgtcttagatgtcaagctgaaaacaaacaagaggactgtgttgtggtctggggagaatgtaatcattccttccacaactgctgcatgtccctgtgggtgaaacagaacaatcgctgccctctctgccagcaggactgggtggtccaaagaatcggcaaatgagagtggttagaaggcttcttagcgcagttgttcagagccctggtggatcttgtaatccagtgccctacaaaggctagaacactacaggggatgaattcttcaaataggagccgatggatctgtggtcctttgggactcatcaaagccttggtttagcattttgtcagttttatcttcagaaattctctgcgattaagaagataatttattaaaggtggtccttcctacctctgtggtgtgtgtcgcgcacacagcttagaagtgctataaaaaaggaaagagctccaaattgaatcacctttataatttacccatttctatacaacaggcagtggaagcagtttcagagaactttttgcatgcttatggttgatcagttaaaaaagaatgttacagtaacaaataaagtgcagtttaaaacccaactcttactcttaatttgttcctaatacgtatttttggcagggagagggaacggtccatgaaatctttatgtgatataaggattttaagtttgggccagtgaacagggtaaataaaatttaacttttgagcatatggaattttggatgccctttaaaggtactaattctggaaccttggattccttcaagaaaaaacctagaaatctggaactcccccttccctgggttcaaatccattggaaggggggaaaagggggcccggaaaggtatttttttcttaaaatctccgggggccccccaaggggattttaaaaaaa

SEQ ID NO: 934 - DNA, 606 bp, Homo Sapiens
cgccaacgactcccagcacgaccccggtaaaatgtttatcggtggactgagctggcagacctcaccagatagccttagagactattttagcaaatttggagaaattagagaatgtatggtcatgagagatcccactacgaaacgctccagaggcttcggtttcgtcacgttcgcagacccagcaagtgtagataaagtattaggtcagccccaccatgagttagattccaagacgattgaccccaaagttgcatttcctcgtcgagcgcaacccaagatggtcacaagaacaaagaaaatatttgtaggcgggttatctgcgaacacagtagtggaagatgtaaagcaatatttcgagtagtttggcaaggtggaagatgcaatgctgatgtttgataaaactaccaacaggcacagagggtttggctttgtcacttttgagaatgaagatgttgtggagaaagtctgtgagattcatttccatgaaatcaataataaaatggtagaatgtaagaaagctcagccgaaagaagtcatgttcccacctgggacaagaggccgggcccggggactgccttacaccatggacgcgttcatgcttggcat

SEQ ID NO: 935 - DNA, 1254 bp, Homo Sapiens
catcgttgcatttacaactgctacaaaaatgccagcactccatcgacatgaagaagagaaattcttcttaaatgccaaaggccagaaagaaactttacccagcatatgggactcacctaccaaacaactttctgtcgttgtgccttcatacaatgaagaaaaacggttgcctgtgatgatggatgaagctctgagctatctagagaagagacagaaacgagatcctgcgttcacttatgaagtgatagtagttgatgatggcagtaaagatcagacctcaaaggtagcttttaaatattgccagaaatatggaagtgacaaagtacgtgtgataaccctggtgaagaatcgtggaaaaggtggagcgattagaatgggtatattcagttctcgaggagaaaagatccttatggcagatgctgatggagccacaaagtttccagatgttgagaaattagaaaaggggctaaatgatctacagccttggcctaatcaaatggctatagcatgtggatctcgagctcatttagaaaaagaatcaattgctcagcgttcttacttccgtactcttctcatgtatgggttccactttctggtgtggttcctttgtgtcaaaggaatcagggacacacagtgtgggttcaaattatttactcgagaagcagcttcacggacgttttcatctctacacgttgaacgatgggcatttgatgtagaactactgtacatagcacagttctttaaaattccaatagcagaaattgctgtcaactggacagaaattgaaggttctaaattagttccattctggagctggctacaaatgggtaaagacctactttttatacgacttcgatatttgactggtgcctggaggcttgagcaaactcggaaaatgaattaggttgtttgcagtcttcagttgtgttcttatgcttcagtgtcacatttcatttcatttgaaactaaaattttaagtaaagctgaaataaacttcttgtcattgaaaagacaaacacgaaagaaagaccacaagaaggagcaaccgccaacacaaacacaaccggccaccgcaaagccacacaacgaaagcaacaaaaaccctttgggggccgccctcggcccttcaaaaatttttcaaaaccatttcttttgggcggggcgggccccggtaggataagggaaacgtggcccaaagtttgttttcctaaggaaaaacccggggacaagaaaaagggcttggaaattcccccc

SEQ ID NO: 936 - DNA, 1077 bp, Homo Sapiens
ctgcaggtcaagagccccaattacgtacaagacactttgggaggaaagaagactacctttggcttttccccctgccattggtatagctggtgccccaaaactttcacctccctccctggccacctctaaaatgattggtataggggcttccccaccccttagctcccctatcctgggctagaaggccacagggactgtcctctagaagttcttcctcccctcccccacaccattcattcaattcgtgaaacaaatcttcaccgagagcagtttatgtgctaggaacatcattctatccttgcaacctggaacaagaccagctaccaccttagcttcatgccctacttgcaccaaccagtcccgggttagatctcaaatgccggaagtcagggatgcccaactctgggcagccccagtcagaacctctgggatctcagtgaagctggcctggcctctgctcttgctctcaaggggctgcttttcaaccaaagagccttgtgagcctggtctgagccttgcacagcccactgagtattttttattccttagccagtgtacctcctacctcagagtctatgtgagaggaagagaatgtgtgtccctgtgggtctctgcaagtgacagatgtgttgtttttaacagtattattaggttatgattaaagcctcatgaaatcctctaaaaaaacacaaaaaccaccatacacaagggaacccctctccaccccccccacaaacacaagagggggggcccccaaaaagaaatccccaggggcccacgacgagaggcagaccccagccatgtgtagacaaggaggggcccacaaggaggtcgctataaaaacaccgaaagcgcggccccccgcaaaaaaccacgccgcccgaagcacaacacaccgcccacgagggacactctcgaggaaagaaccccaacctcctgcggcgggggacacaacagcgaaaaaccccccagagaatgaccacccccgagggaaaaaaacaggtcgcgcgcaatcaaggggccaccacacgcaaaaccgcgacgaaaaaagggcccccggagactatagaacataac

SEQ ID NO: 937 - DNA, 555 bp, Homo Sapiens
  misc_feature (322)..(322): n is a, c, g, or t
cttcggattagtgctaagcaagggcgctagaagcccctgttcttcatgccggatggtgctgctgtccccagcctctatgggcatggccatcgggtgatgtccttctaccaaaagatgctgctgctcctacctcactgcctgtccccagagcaggccagcccgcgtgggccgatggtggcggcagtggctactgctcctgcagggcatgtggtgatcctgccagggccaggtggggtggactgggcgtggtggtcctcagaggacaactcccagcctgacaaggagggctgcgtctccctccgagcctccgtattggcctccntctgtggctcacacccatggctgaatctctgcagggcacgtgaagtcacgggtaggggccaggcccctccaggccgtcactggcctgcacagtggtctgagctcttgggtggaagggaccctcctcactggatggtggtggctccttgcagggagaacggtgactttgtattgtcatgtgtgcggcttcctgttctcaataaaagtaataaattggattatttataaaaaaaa

SEQ ID NO: 938 - DNA, 325 bp, Homo Sapiens
ctgtattttctgtatgaaactgccaatatcatgaatagaaagggagaaccataaaggagaaagaacgtgatgttctgttatgttcatgtaaacctaaagaaacagtgtggaggcaggcgcgatcagccgaactctagggacttggtgttgcttggaaggcatccatacctgcattttgcattcttcgtatgtaatcatattgccaaagacaaactatttcatcatttattgtaaataacacttttccccagacctaccataaagtttctgtgatgtattgtcttccagttgcaataaaaattactgagttgcatcaattgaagaa

SEQ ID NO: 939 - DNA, 627 bp, Homo Sapiens
gctgtccatgcactgtgagcaccactgggaaatctcagccacaccttttctgtttaatccccatgcatgccaaacacttgtcacacctaccgacccattctccttctgcttctcttgccctcttcttcacaccaaaatatgatcgtgtccctgccgcagaatatgtatttcctaattgctgtggccaaacgcctgtgtgccgaatcgcttgcttctgatcccgctccgtgtaacctaagtgcgctgcaggcaaagcccaggccacggctgcgtcactactgatgttcacgatgccacacagtcacacacctaattcattctcaagtcggagcaacacataccaaccttgaccttatcctcaagctccagggcagcctggccgagcagcccctgctccctcctggagacccttgtcacctcccgagctcctcctggagacccctgtcacctcctgaccaacctttcccagggcggcaccgatcaccgagcagccgtgcgtgtatctcaaggaactaaataagatgacgctactcctcatagcaccacaacctgaatgtgtgttcatatttttttgttagttttatccaaaatgtttaagatcccaacaaactttattttctaaacctg

SEQ ID NO: 940 - DNA, 1064 bp, Homo Sapiens
ggcgtctccttgctctcagtggtccttttgtttttctttctgattttctggcttcgacttgcctgttccccctggatggccttcttttttcttcgtcggctattcgtcctgctggtggttcctgctgctctccgccccagggtctcgctgtcttgtgtcctgctcctccgatctgcgattccccgcttcttctgcctcgtatatcctgatgtattccatggtgtatctgccttgtttgctcctagtccagtgtccttctaagagttccccattctatgatcccctactctcctcttctgcctccaaattccgagcatctcaagcatatggcccgtgagctgcaagttctacaactgtagatgtgcctctagctaactatgtccacttgcgccagtcccggtcccattgattggctgcagctgctcggcctcatgggatctcaagtccatctatcgagttgtattatgaagaggctcgtacattgacatcggcgatgtaaatgaattcggaaagtcaaggctgtgtggttgcagtggaagatgtgccttcatgccacattcagcagtctccaggctgaggagcagcagaaagccccaggctggatggtgatggaccctagggtaggccgcccaggccattttcccccccatggccagggctctccagaagtacctgcgcatcacccggcagcagaactaccacagcatggagagcatcctgcagcacctggccttctgcatcaccaacggcatgacccccaaggccttcctagaacggtacctcagtgcgggccccaccctgcaatatgacaaggaccgctggctctctacacagtggaggcttgtcagtgatgaggctgtgactaatggattacgggatggaattgtgttcgtccttaagtgcttggacttcagcctcgtagtcaatgtgaagaaaattccattcatcatactctctgaagagttcatagaccccaaatctcacaaatttgtccttcgcttacagtctgagacatccgtttaaaagttctatatttgtggctttattaaaaacaatagaaaaat

SEQ ID NO: 941 - DNA, 373 bp, Homo Sapiens
tgaggtggagagacccataaagccttgacccatcacttcattatggggaggagaaggatcctgtcaaccttctcctctcttcacggggcccttttgcagccctaggcctcatctgtgggaagggagtccctggctcatactgcccccaccacagctccttgccctggccagaactgctgtcgaagaaaatcaagccggaaggccaagaaggcgctaagggggatgggagggcaggttttccaggctggagtcggttccacccacttcgcctgtccacaggcttccttgtaagcaagtcagcagcacagctactcacgctgccatctggacttattttatgtcaatctgtttataaataaaaaccaatatagat

SEQ ID NO: 942 - DNA, 932 bp, Homo Sapiens
cggcatccatatgagacgacaataatggggaggtgaaccggctcctggagcggaaccctcaaggtgaatagtcaagaacaggggccctgctacgctggagagccctaccccgcaggaatgtacaacctcttcgggagggcaccttccgccactacagagaaaggtccacgctgaacatgctgactcccggagggcgcgacatgcaagccggcttctgctgtacggcgccttccggtgccattcacccgctacatgacctgactcactgagcaggacgctgggcccggtgtcagcgtccgccacaaggacttctctgtactggagacagccccaagaccctgtttgtgtcccaatgcccaccctcccccagcgctgcagtgggcttgtgtgtgactgtgcagtcctcgacagccacaccctccctgtttccactcactggaactggacagttcatgtgcacgcgactcgtgggatctcagccctgctcctgggagctggaagagcacttggagatccataagggaccacacccttcctccttcccctgcccacagaggcagagggcacaggaaagaagccgggccaagctcggaattaatgtgccacaagtgttgtggccttcctgaactgggaagtccctggctggcccccgggggagaggggcaaatgcctccgggactgacactccaggcagctttgccttctctcccctgtcatttccagatttcattacctcctacttgccattcacccatcaatgtgaaagtcagggtcacagctggtctgtgtgtccagttccctaaaagcctgttctgttgggcagcctgaggctgttgcccgaatcctagttcagttttttgacttcctttgccctttttcccttttctccatgcttaatggtgtgaggcgtcaggagagaggccaagtacata

SEQ ID NO: 943 - DNA, 784 bp, Homo Sapiens
ttgcaaaaacaggataacaacgtcagatagcactttaatatactagaagaccaaatggaactaattttatttcatacatatattttacagtccagtagacaagatatattgtatttctctgctagtaaagtcatattctctccaaatatgtagacaagaggcttaatgtattataaaagtattatgaagagacattaagattgatgcaaactcaaaaaacacactcacacacaagacttttttttctgccatctttcaccctctaactcgcgatggctccacaaggttgacctgttacggctgttcccagacttgatcaccagctggaatacagtgcgtcacatcaggaaacgtgcaccttacatccgtcagttattgaatacagtgaaaacatatccatcatctgagaaaacttgaagctttctttcaggatctgtttgggtgtaagtaaatctcattacaaaacgaggaagtgtgtacaggtatgaaataggacacactaaaaaaggcatggttctcacatgaggtgtgtgtgaagtcactggcgacctgtgtgtgtctgacagacaccaccacccgtcccctgattttggcatctggcaaatcccaccctccctggcactggttgctcatgtcctcagttacctctccggggctacactttcccccagagcccacaagcggcaacttcagatgctaagttccagcctggggtccaatttgcaaaacaggatgtttctccgtttgaaagaagacaagcaaggaaaacagagtcatatcacgt

SEQ ID NO: 944 - DNA, 1466 bp, Homo Sapiens
  misc_feature (869)..(899): n is a, c, g, or t
  misc_feature (1245)..(1246): n is a, c, g, or t
  misc_feature (1261)..(1262): n is a, c, g, or t
  misc_feature (1283)..(1283): n is a, c, g, or t
  misc_feature (1298)..(1298): n is a, c, g, or t
  misc_feature (1349)..(1350): n is a, c, g, or t
  misc_feature (1378)..(1378): n is a, c, g, or t
gggacttccactcgtgcgtgaggcgagaggagccggagacgagaccagaggccgaactcgggttctgacaagatggccgggctgccccgcaggatcatcaaggaaacccagcgtttgctggcagaaccagttcctggcatcaaagccgaaccagatgagagcaacgcccgttattttcatgtggtcattgctggccctcaggattccccctttgagggagggacttttaaacttgaactattccttccagaagaatacccaatggcagcccctaaagtacgtttcatgaccaaaatttatcatcctaatgtagacaagttgggaagaatatgtttagatattttgaaagataagtggtccccagcactgcagatccgcacagttctgctatcgatccaggccttgttaagtgctcccaatccagatgatccattagcaaatgatgtagcggagcagtggaagaccaacgaagcccaagccatagaaacagctagagcatggactaggctatatgccatgaataatatttaaattgatacgatcatcaagtgtgcatcacttctcctgttctgccaagacttcctcctctttgtttgcatttaatggacacagtcttagaaacattacagaataaaaaagcccagacatcttcagtcctttggtgattaaatgcacattagcaaatctatgtcttgtcctgattcactgtcataaagcatgagcagaggctagaagtatcatctggattgttgtgaaacgtttaaaagcagtggcccctccctgcttttattcatttcccccatcctggtttaagtataaagcactgtgaatgaaggtagttgtcaggttagctgcaggggtgtgggtgnnnnnnnnnnnnnnnnnnnnnnnnnnnnnnnggaggggggaggtagtttaattttatgggctcctttcccccttttttggtgatctaattgcattggttaaaagcagctaaccaggtctttagaatatgctctagccaagtctaactttatttagacgctgtagatggacaagcttgattgttggaaccaaaatgggaacattaaacaaacatcacagccctcactaataacattgctgtcaagtgtagattccccccttcaaaaaaagcttgtgaccattttgtatggcttgtctggaaacttctgtaaatcttatgttttagtaaaatattttttgttattctactttgcctttgtacagtttattttactgggnnttattcattttcccnnaattgacatcgtatttttaanaattgaactgatggnacatcctttcttggtcttcccatctgacaaatgaatggcagaggtggattnntgccagttcttttactgaagcagattgnggttagatagtactggatgggagtattataaactgcccctggacatgataaagcatcaggatctggactttttttaccttctagattg

SEQ ID NO: 945 - DNA, 1050 bp, Homo Sapiens
  misc_feature (364)..(376): n is a, c, g, or t
  misc_feature (681)..(692): n is a, c, g, or t
ttgatgggcaaacagtgggtttgtgggggccgcgcctgtgggagagaggcaaaaagggctgggtggccaataattacccgtgtgaaagaggggggtgtatcgtgatgaggggaggggtatattgtcgtgtgtaacataatcgcatccacgccgcggcggggaatggtttaccagtccaaggtgtggggtgtgtggagagctattttctcataaatttgagggcgcgccgtggggggtggggcccctccgtgggtattgggcgccacgggggaaaaaaattcctcttacggccgacccccctcctaaaagtgtttctggagggaaccggttggtagtatggcgcggggtgcgattatatttaacnnnnnnnnnnnnnaccttcccacctttttttcaagaagccggtgatatttaattttggaaacagaaattttgagaagaggtttccctgtgcgagggggggaagcccgacccccccagaccaaagttggagaacaaaatttttttaataccaaaaaggggcccccaaaactttcatggtgggtttgttccggaacactgggggttacccccgggggggtttttattggtgggaattcaaggctttggtcttttgcaggattttttttggaagcagtgtatgaccattttcattttctttttggtggccgttcttctaannnnnnnnnnnnggtatattaaacagtttatttcagtaacattgtaaggcaacaattaatcctcagtaagtcagcaaaccagtgacaagaaattgacaaacactccttctacagcttcctgagacagcaggctggcttgtggccccctgggtggtaacatcttaaggaatcctatcatgtttgtttatatatgctaaactgtaaaaacaaacacttcatgcgacaatcattcttaggtcaaacacaagaacgaactattttgaaatcaattcctcacactttttccctgaatatgcagtactgtactactaacatctaattctgtagaaaataatgcatttgttagtgactttgttagagcttgaaaaga

SEQ ID NO: 946 - DNA, 1191 bp, Homo Sapiens
  misc_feature (72)..(72): n is a, c, g, or t
  misc_feature (313)..(369): n is a, c, g, or t
cggtagcgtaagtgacgtcggcaatcacgaacgagtgtcgctctgagagtatcgcacgccataaagcggtcncatgccagggctcactacatgtataaaaagcggcggaggggtgggggagggtagagaaggggtgcacatgaggttgtgacgagtgccggtccgatgtgtgggagagggcaagcattaagtgaggcgaatggcggatggcagtgaagcgaggagtagagagcggggaggggtggcgcgggacaagaatgggaggaagatggctcacaaagagggggatggggcgcgcagaacggaaagaatnnnnnnnnnnnnnnnnnnnnnnnnnnnnnnnnnnnnnnnnnnnnnnnnnnnnnnnnnaagagaggagggagaaatgaaagatagatggaaaaatcgggtaaaggggacatagctatgtaagggaggtgaggggaaaaggaaggcgagcgggatgcgcccaggggggtggacgggtggcagcgaatcacggatcagaggggcgaggatgaaggtgaacaggggatgggtgggaaggacgcaaaaactgtgggagacgtggttacttgtaaggggtgtgagatacaggtgccgacaggaagaatcgggggtcggaagggttttcatgggggtggagagagaaggggaaaggtggggaggggggacaaacggacgagtggaacagggcatggcgggagtggaaaagaggggtgaaagggtgggtaggtttgttagaggtggttacgtgattatagaaaggcaaaacggaagcgataggagtggttttgggtttttaacatgattgccttttatttattatgcaggttgttgatttacatagggagttggagatgctaaccaagcatggagttttcacatggtctatttctgctgagttcagggacttggagacagcctttaacttctggcaaaaagacaatttcacaaaggtgtttaaaaccatcctttggtttttgatcctgagtcagagacggacatgtgcttatgaaagaaggtagagtttcaacccttaggtaaccttaaaagagcaggaactatgttgtgtgtaagtcatgtgcagtatacaaacttgatattttctttcaacaattttccacttaggaatccatcacaaaagttttgcacatgctctacggaaacttctgctgtgggcagtgtatc

SEQ ID NO: 947 - DNA, 426 bp, Homo Sapiens
ggggaaatgtaattctgataacacgcaaagtaaattgtgcattaaaagtatgggaattcttggtagcttaaagcttcaggggttaacttcagtgtatgaacacctagtgtgttagaattgcagtgcatagttgtttaaatacaatattccttgtaagtgacaaccaaaatatgttgtggctggtgccagtatttttgttaatgaaatgttcagtgtctcactacagtctgatcagaactcttggtgttataagccaggcctaaagccatttaatagctattggcctaattgtgtaactttttctttcaaaatgttttattataatacttctgtcatttctttcacttaatatgtcaattgtcataataaaaatttaaatttggaaacctccgccgaactttacaatatttccttggtcggcccgcc

SEQ ID NO: 948 - DNA, 1087 bp, Homo Sapiens
  misc_feature (817)..(884): n is a, c, g, or t
gcagagagcaccgcccagcagccagtgggttcccgcgcgtgccgagactctgaggccttgcacccccacgatcccgtacgatggccgtcaagaagatcgcgatcttcggcgccactggccagaccgggctcaccaccctggcgcaggcggtgcaagcaggttacgaagtgacagtgctggtgcgggactcctccaggctgccatcagaggggccccggccggcccacgtggtagtgggagatgttctgcaggcagccgatgtggacaagaccgtggctgggcaggacgctgtcatcgtgctgctgggcacccgcaatgacctcagtcccacgacagtgatgtccgagggcgcccggaacattgtggcagccatgaaggctcatggtgtggacaaggtcgtggcctgcacctcggctttcctgctctgggaccctaccaaggtgcccccacgactgcaggctgtgactgatgaccacatccggatgcacaaggtgctgcgggaatcaggcctgaagtacgtggctgtgatgccgccacacataggagaccagccactaactggggcgtacacagtgaccctggatggacgagggccctcaagggtcatctccaaacatgacctgggccatttcatgctgcgctgcctcaccaccgatgagtacgacggacacagcacctacccctcccaccagtaccagtagcactctgtccccatctgggagggtggcattctgggacatgaggagcaaaggaagggggcaataaatgttgagccaagagcttcaaattactcttgccccagaacacctgcgatatnnnnnnnnnnnnnnnnnnnnnnnnnnnnnnnnnnnnnnnnnnnnnnnnnnnnnnnnnnnnnnnnnnnngtccaaagggggggcccctccttaaattttccccccggggggcgcccctttttacccgacccccgtttttttgtgaaaaagggggccccctaagtggggccctttatataattcaggggttcggcccccccctttttacccatccggggtccgggagaaaatccctaccctggggtattttttgggagagaaacctttctttt

SEQ ID NO: 949 - DNA, 407 bp, Homo Sapiens
  misc_feature (352)..(352): n is a, c, g, or t
gcagaagtgtgccttgctttatgcaacatacgtcttccatagagaaaatgttagggtcggatcacattaatattgtcattgcagagcatggcttcatcgattggtgaaaaatcgacgtgttcatctcaacaccaggaagtgcatctaaccagggatttgccaacacatttgttagtctgtaaacaacacctgaatacaacaggagagctgccatttataggaaccctgagagtattttgataatgcagtcatccctaatttacctactgtgtaaatgtagattttggaggttgctcaaaagggatgcagccattatagggcatgttatagtgagaaatgcagtgttaaaatnctagggtgtggatcctggagacaaaggacccacatctctctgaaagtgaggtttc

SEQ ID NO: 950 - DNA, 407 bp, Homo Sapiens
  misc_feature (17)..(17): n is a, c, g, or t
  misc_feature (36)..(36): n is a, c, g, or t
gcagccacctggccaantgtgcatttttgcacatgntggaacctccattgggggtctgggctattggctggagccaggacataagtcaggggcaccatggacctcacgtgcaagggagacttgaatgtggctgtcactcttccggacgccaaagggctgcaggaggctgcttttggcactacccaccccgtgtgacagaataggagccagcgactcaggactgctcacgggtcaggagggcaacgcctgaagtcagacctccctataggtcaacagggacaacctggggatctctggagcagggccctcctctctcaggcttggcccactcccccagacacctggacacgtggccacaaatctgggacaaggggcccccgcacagcatgaaataaaaagtgcctgag

SEQ ID NO: 951 - DNA, 600 bp, Homo Sapiens
  misc_feature (225)..(326): n is a, c, g, or t
cgtaaggtgcagagatgtgagatgacaacaggaacatacaagatactgtgaatctagatgttctgacctaaagatgtagtctacatagccccagcttggggtccaatccatctgtccctggcatgtgccttcatgtagtaggtgctttcctgatccccttgcgagatgctgtgggtgctaacacctcagagctgtcctcttctctagagtggaggttttcaaagnnnnnnnnnnnnnnnnnnnnnnnnnnnnnnnnnnnnnnnnnnnnnnnnnnnnnnnnnnnnnnnnnnnnnnnnnnnnnnnnnnnnnnnnnnnnnnnnnnnnnnatttaccaaaccctccaagtgattttgatgtattctaattttgagaccatctctagaaaagaattgctacctcttgtatggaggtacaaaagactgacctcttacatcaaggaacttcctttcccagagctcctcatggaatcaagctgaagtcagtcttcttctgagagcacattcttactcagtttttttcctctgtcctacgctgcttccctcactccccttctcctaagagcactccatcaataaaccacttgccaaccatcgtcgggta

SEQ ID NO: 952 - DNA, 690 bp, Homo Sapiens
ggacagcccgggtgtctggtatgccccagagtgcctgaggaagtatagttctactatgcgtcagatgtctggtccttcggggtgaccctgtatgagctgcagacgcactgtgactccagccagagccccccccacgaaatcccttgagctcataggcattgctcagggtcagatgacagttctgagactcactgagttgctggaacgaggggagaggctgccacggcccgacaaatgtccccgtgaggtctatcatctcatgaagaactgctgggagacagaggcgtcctttcgcccaaccttcgagaacctcatacccattctgaagacagtccatgagaagtaccaaggccaggccccttcagtgttcagcgtgtgctgaggcacaatggcagccctgcctgggaggactggaccaggcagtggctgcagagggagcctcctgctccctgctccaggatgaaaccaagagggggatgtcagcctcacccacaccgtgtgccttactcctgtctagagaccccacctctgtgaacttatttttctttcttggccgtgagcctaaccatgatcttgagggacccaacatttgtaggggcactaatccagcccttaaatcccccagcttccaaacttgaggcccaccatctccaccatctggtaataaactcatgttttctctgaaaaaaa

SEQ ID NO: 953 - DNA, 449 bp, Homo Sapiens
caccacggggtggaggggagggggaggctgccggaagcctccagatgctgcctgcctggctgcagaagcctgcagtggctgctgctcctgcctctgcagccgcccctcctcctccacccaggccccaactcagaggctccgcggcccggccagccctcagctgctcacaaccgattcagtctccctccctccctcacgtggggaaagcacagcagggatgcgcggcaagaatgtacctgtagatgtgtacataccacagtgctgtaattttgtatgtagcaatcatgtaaatacatgtatggattttataatatacatatataaaaatctataaaggcatatttttagaaaaacagcacaccactgcttcttttgaaaatagtctgaataagaataaaatgaatttctacagagaagaaaaaaaagaaccgcaagacacacacacgaac

SEQ ID NO: 954 - DNA, 482 bp, Homo Sapiens
tgaacttgctctgctgttatggcacctgaaaactagatgttcttggatgggggtcttccttcatcaaagcttcttcccatttgtacttcagttctaggacaaggcaagaagaaagcaagaagctgtaaatcccatttcctctgggtctcaatttcaccctcagttcaaggagctgagtaggcagaggcaaaggctatactcaacacacgtgcaattgaaagcaggcgaggcaaaaccagggcagaggaaaggaaaggggtgtgtgtgtaggtatggatttatgggtaggtaggtcggtaggttagttgaagaggaggttctaagcagtataacctaagcctcttttctctttcttctgcttcaaacaccttaagaactgctcagggtagactggagacaaaagcaacagctcagaagtgctaaatcttgaagagcagccaaagcatgggcaacaaagtgagaccccatctctacaaaaaaaa

SEQ ID NO: 955 - DNA, 340 bp, Homo Sapiens
ctaggttttgcaggcatgaaatagtgattatatctgtggaaaagcataggaaggcattctcctttttcatttttttcctttggctggcagctcttcccagtgatgttgagagcacctgcagcaatctggtccccagtcgcacaacttcccacatacccagaggagagcatatgcctgtgggggcagtgctgatggcatccagagtcattgctgtggctgagctggaaggaaatcaccaggtgccaccgtcaatatttatcagctttcagcactggttttgttagacagtcagggtgtattatttcaagagcttcaataaaaaaagtgtttgcaggtaaaa

SEQ ID NO: 956 - DNA, 971 bp, Homo Sapiens
tatgagctgctgcagattctctcagatgaccggaagctgaagatccctgaaaacgccaacgtcttctatgccatgaactctaccgccaactatgactttgtcctgaagaagcggaccttcaccaagggagtgaaggtcaagcacggagccagctccaccctccctcgcatgaagcagaaaggactcaagattgccaagggcatcttctgagggcatcctcccagggtctggctggctggtagccaagcacttatggaccagagtggcccaggccagctgggcgccttcctcccacctgccagcccagggtaccccagactccagtttcatcctgaacctctcccgctgctgggattgacgcctgccattggtcaggctgacctggcctcccgtggaccactcgctgccttaggtgcttctgctctctggaaccagaggactagctgacttttgccaaggagcagtgcaacgggcatggcatggtgccctgcctgcccccgggcaccacctctgtacacttccctgacaccttcccaggtgtgggtcactgccacctgtgcccatgggcaccccagagcacccactgtgaccactgcagttctctcatgcccacaggcactggcctgtgaccttcgcaggggtcccggcccctcccaccactctagcctttctcaggctgcaccaaagattccatcatcagggccaactgagagtgagggagtctcacccaccgcttaccccagccctcccctgggagcagagagagaaaccctcttcatggaccagactctgcacccggtgagtgaggacagtcccagctgagtcccatcgatgttgaatctcatgccactgcaagtgccattcaccactgcgtcctgggctttacgagaccatgcaagacgggggttagtgaggaaggaggatttggggtgggggtgggatgattgaatatttgtataaaaagcaaaaaa

SEQ ID NO: 957 - DNA, 1176 bp, Homo Sapiens
  misc_feature (177)..(177): n is a, c, g, or t
  misc_feature (183)..(183): n is a, c, g, or t
  misc_feature (191)..(192): n is a, c, g, or t
  misc_feature (194)..(194): n is a, c, g, or t
  misc_feature (196)..(389): n is a, c, g, or t
atttgggggagaaattccaaaggcccttaagtcaatgaccccaggattctcccttagggaagccagcttatggaaccatggttccacttaccctactgggggccccgcggcgccaaaacgaaatgttttaggaaagctttttcgagggcccgagggcggcccgacatgttttggtanaagaanggtagggnntngnnnnnnnnnnnnnnnnnnnnnnnnnnnnnnnnnnnnnnnnnnnnnnnnnnnnnnnnnnnnnnnnnnnnnnnnnnnnnnnnnnnnnnnnnnnnnnnnnnnnnnnnnnnnnnnnnnnnnnnnnnnnnnnnnnnnnnnnnnnnnnnnnnnnnnnnnnnnnnnnnnnnnnnnnnnnnnnnnnnnnnnnnnnnnnnnnnagttcaagaaaagttttttaaaaataataaacctctaaagtgttaccctaactgtaccttacagtgatatatgacttctctagtcactccacattatccagtgatggcacctagataataatgcaccaaagaaaagtaaagaattgcagacttctagaagcaatgatgaaatataattctcagttgcagaaaatgatgatctgggtcattatgcaaatgcattcctgcctgtttttcttccaagttcttgcatggagcccaacacatccgatagcatggaagtggaagttaaactcccgatgaataatttttataaaattataaagaaaacaactaataacatgtatgaaattcacattaaatttagaagtggatagtaaagattaggactatatttcctttggggtgctgcttgtaggaaattactgaatgacaactgctatcacctgtgatttcatatccttttagctgatattgctaaagagcttcccaaactttttcaagtcatggcatacacaagaaatgatatctgtacatacacgggtaaaaaaatgcaagagattgctctcagctggatccccaagggctaaagagataaatatcttgctcacaatcaatgggaacctgtgaactaaagagtcaaatgtatgaaagtcctcatggaaaaatgctgacaagcactaaaatcactgtaaattccttggagagggctacagaattgcagaagttcagaaaaattactttggtcttttacatgtcaatattcagcgaaagaggttctattctc

SEQ ID NO: 958 - DNA, 593 bp, Homo Sapiens
gattgtgcaaagtttttgctagttttatcttctgactttgggactagtttttgctgcagagttgtgttgctttgtgattttcctctgggatagtgtactgtacacaaccagatgtgttccacactccgtgactccgcagtttgtcctggagtgacatacacatccaccatggaaagggaagcatctctgcctgtggattctcaagtacttggaagcacctctcctgaggaacctacaggattctaaggtttcctaggtcactgaacaactaatcttggtcccctgaatatttctaggtttgtaagtgcagcagttttatttcctctagaactcatcctgtttcaagggaagtacctaagaagatatagagtgtttctagggtaagggacctgcaggtgtaagcatagatgaaataactgtcctgtcacatgtgcagcaggccatggagtgtagcgggcatcgtgccgccattcctgcagcatcaccataagcagtgcagggtgtctccatcgagctgtttggttccatgtgtgtttaacatgtgcagaagtagcttctctgttcaagtttaataaagttgagtttcaacagta

SEQ ID NO: 959 - DNA, 872 bp, Homo Sapiens
ggggaggggaagaggatgtgatcatgcgaccgccagcagaagggaaattgtgaaagcgacctgctgtagaaaaggcggcccacagccacctcagcatgcagaggaggcccagctgctgagaggagttgcctgagagtgacctttgcatctgcctgtccagccagcatggaaccaaagcggatcagagagggctaccttgtgaagaaggggagcgtgttcaatacgtggaaacccatgtgggttgtattgttagaagatggaattgaattctataagaagaaaagtgacaacagccccaaaggaatgatcccgctgaaagggagcactctgactagcccttgtcaagactttggcaaaaggatgtttgtgtttaagatcactacgaccaaacagcaggaccacttcttccaggcagccttcctggaggagagagatgcctgggttcgggatatcaagaaggccattaaatgcattgaaggaggccagaaatttgccaggaaatctaccaggaggtccattcgactgccagaaaccattgacttaggtgccttatatttgtccatgaaagacactgaaaaaggaataaaagaactgaatctagagaaggacaagaagatttttaatcactgcttcacaggtaactgcgtcattgattggctggtatccaaccagtctgttaggaatcgccaggaaggcctcatgattgcttcatcactgctcaatgaggggtatctgcagcctgctggagacatgtccaagaatgcagtggatgggaactgctgaaaaaccctttcctggacaaccctgatgccttctactactttccagacagtgggttccttctggtgaagaaatttccaggaatgatgatg

SEQ ID NO: 960 - DNA, 890 bp, Homo Sapiens
ggagcttattgtaattttttttaagaaattcaaggtcattattattgtacaaaataagcgctttgattaacacagctatatagtttttttaatttttaaaaaacctgtggagacggtgatcttgtctttaaaacatgatagtcctttcagtataatgtcttagattaaagacgttgcctttaatatctgttgggaaggaaatgtccagacttttcaaatctcttattatatgtttcctttttttgtttacatagggaacaatgtttatagtcgtgtgtacagtgggggtctacaacaagaagtgtatattttcaaacaattttttaatgatttaacaatttttgtaaatcattttcaggcttctgcagctgtagattctcactgtgaatcccttgcttgctcatgcataagtgtatttgcaataccaaatatacaggtttagtatttttgcctgttagtgattgtttcacatgtgtaacgttttggttgagatgttaaatggtggacgagtactgtggatgtgaatgtgggaagtaattttaatcatatgtaattggtcacaaggcctaatttgcagtaactattgctgttttatttaacaatgccttgttgctttgtatgcattaatgtttggatgtaaagattgtgtgtctatccaacagggagccacagtatttaaattgaccaacctaatgttacaactactttgaggtggccaaatgtaaactaaaagccttaattaaagtggtgcaattttgtataacttagcatcagtagttcaataaatttggattgccatgcaagggcttgcattataattacttgccacttgaatgtgttttgtgtaatgttttaacagtgctagtaaataaatacgggtttaccctgga

SEQ ID NO: 961 - DNA, 928 bp, Homo Sapiens
tttgtaaaaatatcagatattgtaattaagagctccaaacaagtcttgcagtttcaaaggtagaaacccacccagccagttcagctgctgggacttcaaagcccttcccgcctagccatctcagccaggctcaggttccttctccccacccatcaggcaaagcaggacttgtcaaaacatacacattccaagttcctagcaccacagtaggtgctaagtgggaattgataataaacttgaaatcctccatcaacaaatatccacctctcctgtccagcttgcctcagatcttcaggttctctcttctctgaggcagctaagcttctacatccctcatgaagtttcctttacttctcgacagaagacagttccctttaggcctatcatctctaaatgcaactggctttccattttccacttactcaacactccacaaagtacacttgctacatggtatttattcaatgactgtatatttagtcaccacctcaatcactgctaagctatcttcatgtctatctgtaccacagtttcccatcttagactggtgacgtcagctggcaaggggctggctgttggccgattcatcatgactgacatggtgtgtcacaaagagctccaagtaaatgctgtgaaggaagaggatgaggatggagatgaggatcctgagaagggcccagactggctgcccaacccatggacctgaggcctgagtaaggcctgggagctgctttcccctctgcccaggaactctgtccaggggcgattctaaggcacagtggtgaaggacatgattggtcccccaagtgtggtcctcaggtctcatggcagccactcgcctgggaacagtgcaacaagcattccatttagaagatcttccagaacacacacaagaagcattgtctaatgaaaatggagacaaggtccc

SEQ ID NO: 962 - DNA, 1553 bp, Homo Sapiens
  misc_feature (1248)..(1248): n is a, c, g, or t
  misc_feature (1421)..(1421): n is a, c, g, or t
agtggaagcaggagaagcagcaattatcgtccgagcaggtatctaggaaaaaagctaagggaaataagacggaaacccgcttcaaccagctggtcgaacaatataagcagaaattattgggaccttctaaaggagcacctcttgcaaagaggagcaaatggtttgatagttgatgatggcagcaggctgggtaaaaagctgggttgtgtactttctggtgacactcctgggctcctccccatcccccgtgtctctcactgagggaaagaaaatccccaagggcactgccactgtgctcggaggtgccctggactgtgtacatctgaactttggtccatcctttgatgtgtggttcgttagccacaaagagaaatatctgaaagtcaacatgatgcttcttgcatattatccagattattgtatgaagttgtgtctataattattaccaatttttattctttatttctcaaatggaaacacctgaaaaagcattctggagtgctgaatttttaagatgtatattttgttaagcatattctctaaatgagatattgtgtggctttttagtaacaacgtcatttctaatacaaaaaaaaccacgaattcgccccatacaaccccattaactgcccttcgctgtccctatatcgccttcatcctcctcctcatatactacacttcccgacacactaaccctttaaccgctcgtctcttcctcctcccataacccgttgcccaccttatccattttacaccgctcacacaccttgtcctttttcccctcacgctacgctctcctagccaacacaacctcctactccttactggtctgtcaccatatcccccactacttcgccctttgaacgtctactcccccttgttttgttttgttttccccccttatacccttcttcccaatacctggttcccccccatttgtcgctttccttcgcctacctcccgttcgctacgtcacctgacctctcccttccgccatttctctgttaccctcatttctttccatactatctttatttttttccctcctttattcgccattatgaccgtcactcatcttgtactttgtgtctcatgcacgaaccttgcgcactccgcacttctacaccctttctctacacaatgtatatccgctccgcccaccccccaccattttcctcatgtcttgtgctgtctcgcccacaaacatcaaccgcccctcgtgtgtgcctcccgcagtcctcccgcctntcatgattcgccgcgtcttcgctttctaccactcactttacctccgtcgccttgttctcgccattcccaatatgcccgcacacggtcttctcattctgcctgttcactcgtctctcgtgaccatccccacctccgctacacaccccatgttgttctcctatgttctatcagtntctacaccacgcacttctccactgattctctcacgcccagttacacctcgcatgtctgaccttgctagtcctcacgatccgccatagtcgattatcagaactatatttgcctatgatctcgtatatttgccc

SEQ ID NO: 963 - DNA, 1224 bp, Homo Sapiens
  misc_feature (31)..(31): n is a, c, g, or t
  misc_feature (889)..(906): n is a, c, g, or t
  misc_feature (972)..(1090): n is a, c, g, or t
tccaaagggcctgcgcagctccgggagggcnagcttctccagccagaggttgtgtgagccatcgtgtgctgggcttgtttttaagtaagaaacaaggaaatcactccagattctgtcattccaaggaaagggaaggggacagttcaggtttctcagctgttcttaggggtcactgagcgtctacctcctcctccagaggagcctggctcagaacacctagaggagggggccggggatgcaccccccaccagaggctgccttcagcgtctcacgggtgcaggacagcgctcaggcttgggctctaagctccgtgtctagtgtagaacatggggaaggagcatcttaggaactgctgaagtaacttcttactgctctcacaattctaaggaagcggtagaacggcctcctaccaacagcgcccaccccagagctgcctgggaaagggcagttttactgaaaggtgctttactgttcacctgcatctttcagcagctcccctcctgccctcacctggtcttttcccctctttatcccaagcctttatgcttgagtcccttccccaggggctgcccacccgacagttccaggcattccctacctgagcttcttgtctgcttttccttctcccactgcaagcgggctgcttgtggggcctgggatgagccctctctgtccccaccggccctccttgccaagccattcctgggtgagttcaggcctgcgggagccacacattcatctccacctggacacttgagccgcatggccagacccctcccacctgatgcggtggtgcgtgtgatttgtcaaaagaaagccttctggatgctgttaagatgtacccttcaggtgaacctggtatcagacccacagtacttgctgtttgagnnnnnnnnnnnnnnnnnnggtcacctgttctccagcccttttctcttacctggtatttccttcctttctcctcacatcaccccnnnnnnnnnnnnnnnnnnnnnnnnnnnnnnnnnnnnnnnnnnnnnnnnnnnnnnnnnnnnnnnnnnnnnnnnnnnnnnnnnnnnnnnnnnnnnnnnnnnnnnnnnnnnnnnnnnnnnnntttgtgggccgcctcggcccccaaaaaatttttaaaaccattttttgggggcgcgggcccccaaggaaagggaaaaggggcaaaatcggtttccaagaaaacccggggaaaaacaaggggtgggattccccccc

SEQ ID NO: 964 - DNA, 704 bp, Homo Sapiens
ggtattggaccctctttacactgggcctggatctttcttggtccatcagcctagccttcaagtggtgtgagcggcctgagtggatacacgtggatagccggccctttgcctccctgagccgtgactcaggggctgccctgggcctgggcattgccttgcactctccctgctatgcccaggtgcgtcgggcacggctgggaaatggccagaagatagcctgccttgtgctggccatggggctgctgggccccctggactggctgggccacccccctcagatcagcctcttctacattttcaatttcctcaagtacaccctctggccatgcctagtcctggccctcgtgccctgggcagtgcacatgttcagtgcccaggaagcaccgcccatccactcttcctgacttcttgtgtgcctccctttcctttccctcccacaaagccaacactctgtgaccaccacactccaggaggcagccccatccccttccagcccctaagtaggccctcccctccctaaatctgcttccgcaccacctggtcttagccccaaagatgggccttctctctcccagataagttggtcctccctctgcctttcctctcaagcccccaaagagcaaaggcaacagcaagaccagcgggttcttgcaacactgtgaggggcagccagggcggccccaataaagcccttgaatactttg

SEQ ID NO: 965 - DNA, 559 bp, Homo Sapiens
  misc_feature (157)..(157): n is a, c, g, or t
gtctcttctgctcctcactgcccagctccaggaagatgccatctagcctgatgtagagtgttgccatggtgaaataccagccccttttctcctccatcgggatctgctgcccgtagcctagcgccttgtcgtagagcgcgatgcctgccgccagccnccgcgcacgctcctctgggctggcgcagccgacgtcgaagccatgcgcgtagccctgctcggccaggcagcgagcggcgcggagctgggggtccccggcggcctcgggctcctctgccaggcccatgaggtcggccagccgtgcggcgcacgcctcctcctcttcttcctggcccagccgcccgtacacgtgggccagattggcccaggcattgaggttgcccggctgctcgtgggccacctcgaggaagcactcgcgggcctcgtccagctcctacagggtagaatgcgaaagcgcccaggaggtgtctgcacagacgggggcgctacggggcgcccgccaactggagctcctgccgcaatccctcacactgcagcttcagctcccgggcagcagtttgag

SEQ ID NO: 966 - DNA, 531 bp, Homo Sapiens
  misc_feature (457)..(479): n is a, c, g, or t
cagtgtctgggaaggcacccgttactgacagcccgggaaagggagtctcctttccttggaggagtcagggaacactctgctccaccagcttcttgtgggaggctggatgttacccaggcctgcctgcagtcatccggaggcctgaacccccccctgtggtgcttcaatggtcacgttccttgtccactttcatgctccttccggactcctggttcctctttgaagttcgtagtagatagcggtagaagaaatagtaaaagtcttaaagtctttgatcttataagttcataaaagaaaacgctgatgcccgccgcccttcctcttttgcttcacctccctaaaagggaagggccccctgtcctgtgatcaggtgacttgcttccccttgtcaatcccttaaaagactgaccccccttatcctgcccccttgttttgtatgcaataaaaatcagcgagnnnnnnnnnnnnnnnnnnnnnnnggtctccgggtttttgtggtagtggtccccggggcccccctgttttttcttt

SEQ ID NO: 967 - DNA, 506 bp, Homo Sapiens
agaatgtgagaagctgggagcccctttcttggcacagccaggctgccgttcccttgggttcagaggctttagtagggtagtagttatggaaggacttagaaaggagccatcagtcttggtccaaacacttgatagcagtgcctgataattgccatatccccagtaaagtgggtagaagagattttatcttaggctctatcttctgagtgtatttggcccactgaacccatccactgtctgagataataagtaagagtaagggtaaagggatcactggtgtagcagacatggcttcagtgacagaacgaactattctggtgctaatttagctgtagctgccttagtctgatactcatctactcccaacagagctctttatctctttttctctactatggtttgttcttcacactatagccagaaagctcttatattttaaatgaaatatagtagacactcaaaacatttatgaaataaagctacaactctgcttctgctaaaaaata

SEQ ID NO: 968 - DNA, 303 bp, Homo Sapiens
ccgaaacgggaagtacatattggggcatggtggcctccgtgagcaaatggtgtcttgggcaatctgaggccaggacagatgttgccccacccactggagatggtgctgagggaggtgggtggggccttctgggaaggtgagtggagaagggcacctgccccccgccctccccatcccctactcccactgctcagcgcgggccattgcaagggtgccacacaatgtcttgtccaccctgggacacttctgagtatgaagcgggatgctattaaaaactacatggggaaacaggtgcaaaccctg

SEQ ID NO: 969 - DNA, 782 bp, Homo Sapiens
  misc_feature (763)..(763): n is a, c, g, or t
ctacggaggagcacagcaagtgccactcaggagtggctagagaagcaggcccacgctggagaaggagctcagcgctacgccctgcaggacaagaaatgccttgaagagaagaacgaaatccttcaggggaaaactttcacagctggaagaacacttctcccagctgcaggataacccaccccaggagaagggcgaggtgctgggtgatgtcttgcagctggaaaccttgaagcaagaggcagccactcttgctgcaaacaacacacagcttccaagccagggtagagatgctggagactgagcgaggccagcaggaaaggccaagctgcttgctgagtcggggccacttcgaagaagaaaagcagcagctgtctagcctgatcagctgacctgcagagctccagtctccaacctcagccaggccaaggaagagctggagcaggcctcccaggctcatggggcccggttgactgcccaggtggcctctctgacctctgagctcaccacactcaatgccaccatccagcaacaggatcaagaactggctggcctgaagcagcaggccaaagagaagcaggcccagctagcacagaccctccaacagcaagaacaggcctcccagggcctccgccaccaggtggagcagctaagcagtagcctgaagcagaaggagcagcagttgaaggaggtagcggagaagcaggaggcaactaggcaggaccatgcccagcaactggccactgctgcagaggagcgagaggcntccttaagggagcgggatg

SEQ ID NO: 970 - DNA, 395 bp, Homo Sapiens
tgtcatagtcttctcactcctaatccatgaccactgtttttttcctatttatatcaccaggtagcccactgagttaatatttaagttgtcaatagataagtgtccctgttttgtggcataatataactgaatttcatgagaagatttattccaccaggggtatttcagctttgaaaccaaatctgtgtatctaatactaaccaatctgttggatgtgggttttaaaaaatgtttgctaaactacccaagtaagatttactgtattaaatggccttcgggtctgaaaagcttttttaacctcttgcttaaaatgcgttttattttgataagatacttcaaatagcctccaaaagtgtagatccaatcacttaaataaacctgtatgtatatgcaaa

SEQ ID NO: 971 - DNA, 751 bp, Homo Sapiens
ctgagatgaaatgctcaccactgccaaaacacgggctgcaactgcaacatcggaggatgagagggagagtcggctgtggtgcagaatgctcagcagccctcccagcagggacaggaagactgggcaggaagaggggagaagcattcaagttaaggcaaaaggcccaacgcagagcagcacactgaggtcacacctgtgagatgtggaagagaattcctgagcgtggagcgatggggttaggtgccaggatgattgcccattttgcttctgtcagactcttgactaaggatttctggttgcattttattacataaaagccagggaggttatatcacggtgagaaagcttccctgacgccgcctcctgtagcgcagccaagcgagcctgtggaggtaccatatgactgtaggcctctggggacagggagctgcatctgcttctcaaggccagggacacagccatttctgccagcatctggtgatcagtgagtgagtgagtgggcaggtagagcaggagccagtgaagagcaggccctggatgggtggggatgcaccatgtccccaggctgcagctgcaggcagccccccacattgtcggagaagcctctgcaccagctcagccccctcctcactccccttgtgccctggggacactctgcagaggggcactctgcagtctgtccccgccatcgctggacttctggacatggcctccagatttgcacctcttaaataaaactgcagtggatgac

SEQ ID NO: 972 - DNA, 498 bp, Homo Sapiens
gaataccacttttgaagttaatccttttgtgtgatacaggatgaacttgggatgtttgaaccctggacattccaaataaagaataggcccctgcctggctcctgggagataacctctaagccattagaatatcttgcctgataagagtgtttttgtttacctgtgggccttgggccatgcagtatcagcttgaccttgcaaggtcaagctgaggagactaagttagccatgtgggcagtgaagcatgccaatgtgatcaatccctagtaaaagccctggacacctaggcatgggtgagctactctggttggtaatactctgtgcacacatcattgtagccacacatcattgctgggagaattaagcattatcctgaagactctgccaggagaaggataattggaagttctcttggaccttaccttatgtgcctttcttcattgctgattttaatctgtatcctttcactgtaataaactgtaactatgagaaaaaaaa

SEQ ID NO: 973 - DNA, 1919 bp, Homo Sapiens
  misc_feature (199)..(249): n is a, c, g, or t
  misc_feature (1456)..(1525): n is a, c, g, or t
gggtccggaattctcgggatagcaaagcgaggacagacagctcccagagggcgaggggtgcgtgtgcgtccgcttctcacctcaggtctcccttcggccccgctgccctccctcgcggctgggtgacagctgggtccggtccgtcgcgggctgcctggggtgcgaggatcgcgcaccccgtcttcgcgcgctgtgcctnnnnnnnnnnnnnnnnnnnnnnnnnnnnnnnnnnnnnnnnnnnnnnnnnnntcgggtgctgccagccgggtgctgatgcgagtcggtggcagcgaggacattttctgactccctggcccctgacacggctgcactttccatcccgtcgcggggccggccgctactccggccccaggatgcagaatgtgattaatactgtgaagggaaaggcactggaagtggctgagtacctgaccccggtcctcaaggaatcaaagtttaaggaaacaggtgtaattaccccagaagagggctacaggggaagaattgaaagtgaaggcatacctaccaacaggcaaacaatttttggtaaccaaaaatgtgccgtgctataagcggtgcaaacagatggaatattcagatgaattggaagctatcattgaagaagatgatggtgatggcggatgggtagatacatatcacaacacaggtattacaggaataacggaagccgttaaagagatcacactggaaaataaggacaatataaggcttcaagattgctcagcactatgtgaagaggaagaagatgaagatgaaggagaagctgcagatatggaagaatatgaagagagtggattgttggaaacagatgaggctaccctagatacaaggaaaatagtagaagcttgtaaagccaaaactgatgctggcggtgaagatgctattttgcaaaccagaacttatgacctttacatcacttatgataaatattaccagactccacgattatggttgtttggctatgatgagcaacggcagcctttaacagttgagcacatgtatgaagacatcagtcaggatcatgtgaagaaaacagtgaccattgaaaatcaccctcatctgccaccacctcccatgtgttcagttcacccatgcaggcatgctgaggtgatgaagaaaatcattgagactgttgcagaaggagggggagaacttggagttcatatgtatcttcttattttcttgaaatttgtacaagctgtcattccaacaatagaatatgactacacaagacacttcacaatgtaatgaagagagcataaaatctatcctaattattggttctgatttttaaagaattaacccatagatgtgaccattgaccatattcatcaatatatacagtttctctaataagggacttatatgtttatgcattaaataaaaatatgttccactaccagccttacttgtttaataaaaatcagtgcaaagnnnnnnnnnnnnnnnnnnnnnnnnnnnnnnnnnnnnnnnnnnnnnnnnnnnnnnnnnnnnnnnnnnnnnngggggggggggacttcataaaagtcacccccggaggggggaccaaatttggatggccaacacaccatttctttgagtgaaaagggatggccccccacaaaggaaacggcacataataaacaacgacaacgaggaacagggagggcaggatataaaacaaacgctggtcgtaagtggaggaaaaatcagcacacgggaggcaaaccgtgggaagaaaaccacaccacatccgggatggggggcaccactgagggaaaccaccaccacacgagagatataacagagcgcgggacgaaaatactaaccaggcggcgagctacagttggtgaaacaaacgcggatattgcagccgcacagaaaactggccacggaaagtcaacgtgtcagaacaatag

SEQ ID NO: 974 - DNA, 436 bp, Homo Sapiens
gatccacacaacttaaagatctgctgccgagtgaatggggaagtggtccagagcggcaacaccaaccagatggtattcaagacagaggacctgatagcctgggtctcccagtttgttaccttttacccaggggatgtcatcctaactgggacccccccaggtgtcggtgtattcaggaaacctcctgtctttctcaagaagggggatgaagtccagtgtgagattgaagaactaggtgtcatcatcaacaaggtggtgtgatggctcctgcacaggccctgcacataggatgagggcatctgctcccactcagcctagcccagggaaaggcccagtgacaggtgtggacaggtgccagccctgcaagccgcctcttctcggtagaagggagaaggacagagctctcttcaataaattcgtcaaaacaaagcagcaa

SEQ ID NO: 975 - DNA, 1240 bp, Homo Sapiens
  misc_feature (12)..(12): n is a, c, g, or t
  misc_feature (34)..(35): n is a, c, g, or t
  misc_feature (56)..(56): n is a, c, g, or t
  misc_feature (78)..(81): n is a, c, g, or t
  misc_feature (84)..(86): n is a, c, g, or t
  misc_feature (90)..(90): n is a, c, g, or t
  misc_feature (111)..(111): n is a, c, g, or t
  misc_feature (113)..(113): n is a, c, g, or t
  misc_feature (117)..(117): n is a, c, g, or t
  misc_feature (121)..(121): n is a, c, g, or t
  misc_feature (123)..(123): n is a, c, g, or t
  misc_feature (126)..(126): n is a, c, g, or t
  misc_feature (128)..(128): n is a, c, g, or t
  misc_feature (180)..(180): n is a, c, g, or t
  misc_feature (185)..(185): n is a, c, g, or t
  misc_feature (214)..(216): n is a, c, g, or t
  misc_feature (283)..(283): n is a, c, g, or t
  misc_feature (285)..(285): n is a, c, g, or t
  misc_feature (302)..(304): n is a, c, g, or t
  misc_feature (663)..(672): n is a, c, g, or t
ccgccggggccngggggaagggagaaccccccannaatccctagggtggcaccggnccgcgaattcggacccgccgcnnnncgnnncccntttcaaaaaacgagccagccncnggancgangngancnaaccgcagggccccattttgcgcaccaagagccgaagccaaaccggcagcangcacngcaaagggaaagaggagggcaagaagagnnngcacggcgcagaacccaagccaacagacgagcaacacaacccccaccaggcagcgagccaccggcangncgcgggcagggacaaannnaagcaccggaagcaccagcagaaaggggcaccagaaggcaacggccctttgatctcacatatgctccctaaaaatccttaagttgtcaatctgatccccagtgtgaggttaatgagcaaaattggtctttggggccctttttgtccaagccccactgaaaggcctcttcagaaaactattatctttaaagccctactttaactccttaattccagcatacagctaaaactggatgtatattctggcaagtaaaggctgaggactcctctttaatcctcagatctagataactcatgacattttatttgaccaacatagcacatgatgagatatcaaggtaattaaaatagcatgcttgnnnnnnnnnntacgtaatctgtttcacctgtaactgtttaagccaataaacttttcaaaatttatgtaatgtggggcttttatgtagcactttacgttttcatgctgcttattgttttattctactgaaaaaaatgaatttcaagattctcaacttttttaatttcaaaaattgtttattgttttgactataggaatacaaaatttcctattttgggagaataagaactctttttgtcatttttggctatgaataaactttctggtcttttgagaccacccatttttatagatcagaatcagaaaacaggtaaacctcactcacacatttggactcatttgaacaaaaatctaggccaaaatactgaaaagcctatgtgtttttttaattggaagtatatgtaaggttaatgcatttagtgaacgtgactaacaaagactaatgtgcacattaacagatgtactttttaaggttttatgggaggctgtgcattgctcaaaagctgttgggaacgccttctgaacagttgccttcagaactagtttgagctgctcaataaaaccagtgactttactcat

SEQ ID NO: 976 - DNA, 498 bp, Homo Sapiens
ggtagaaaattgagttacaatttgattttttttccaaagatgtctgttaaatctgttgtgcttttatatgaatatttgttttttatagtttaaaattgatcctttgggaatccagttgaagttcccaaatactttataagagtttatcagacatctctaatttggccatgtccagtttatacagtttacaaaatatagcagatgcaagattatgggggaaatcctatattcagagtactctataaatttttgtgtatgtgtgtatgtgcgtgtgattaccagagaactactaaaaaaaccaactgctttttaaatcctattgtgtagttaaagtgtcatgccttgaccaatctaatgaattgattaattaactgggcctttatacttaactaaataaaaaactaagcagatatgagttaaatttaaaagtttcaatttattgctcagtgtacctgttaacattatatttaacaattgcttaaatttttgtttttgatt

SEQ ID NO: 977 - DNA, 1291 bp, Homo Sapiens
  misc_feature (662)..(749): n is a, c, g, or t
  misc_feature (893)..(902): n is a, c, g, or t
  misc_feature (1166)..(1166): n is a, c, g, or t
aagctgcacactttatctgccagcccccaccaaaaatacagctccaaaatggctcaggctacctgtaaactctgagccccttgcccacctgaagccctggggatgatgtggaaataggggcacacacagatgattcatggatggggacatggaaatgagaataggttaaatggtgcaggtacctcatagccagctctacacagaggtctctcctggcagaaagcaggcgaagggcaggaggagctgcttggcagaaggacctcctgcccagacctgaggagtgagaggctttgagggctgaagtctccctttgttacggaccctggcccaggagttgaatgcctgaggacgtgtgggaaccccgttccctacttagcatgatccttgagtctcctctctggatggaatccgcgagctggccacctggccaccctctacacggctccaccctgccatggccgtggggcccttgctctctgacttctcaggacacaggtcatggaggttcttcccaagctggcagaggccatttgtggaaagtggagagctacgtggtggccatctgccaactccagcatctctggaaaatctccacgctgaatgtgatttttgaaaacagcttatgtaattaaaggttgaatggcacatcataattccagccnnnnnnnnnnnnnnnnnnnnnnnnnnnnnnnnnnnnnnnnnnnnnnnnnnnnnnnnnnnnnnnnnnnnnnnnnnnnnnnnnnnnnnnncaacatacatacactcaaacacagcacaaactacccccacccacaccagccacattttcaaatccaccccacccacagagagagagggggcggccctcccaggcccccacagaaaaacctactataaacctccctatccatatnnnnnnnnnnctcaagacaagggtaaaaaccaaacttcacttaattagggggcggcccaaaacctttggcccgttcacacactcggaaaaaaggaacaccgaaaaccgggccacccccggaggcttccaagctggccagaccacgaaaggacaaaaacgcgggggcacgggaccaacataaaacctctgctcctcaaaataaacgcgggcgaacaagcctatgtcaactcataaactcaaaaacggaggccacaccaccgacgggctctacctnacgcgacggcgaagggacagctcacgctgtacacaaaggaactcctacggggcccgcgacttgaggccctctcctagtcatgtcgaatcgggtgtaacataacacatctcacatagcgcgacggg

SEQ ID NO: 978 - DNA, 666 bp, Homo Sapiens
ttaattaataaagagtccaccttttaatattcgtgtttaacacatctatgggtttggtagaaagcaaatacatgaccttgaaatagtagtaggtgataacatgtgacttgccagtaaattctcatatcttcactgtcacttaggagataatcgaagaatatgaacatatttaattcctaaagttcctgcaataacctacatacaccttaacattcagctttattaaacaggctttttgaaatagcatgtgaagaagttatcgctgtgcctcattttgaatggtattttctgcttcattttgattttcaacagcaaaaggatatggtgctcttcctaaaagaaactgttcccatttgggaatatattcttctactgatgcccagtaacgagtctcaagagaaaccacctcaggccgtggaagtgggtgaatcctggtctgtagtgacttttctgctgcttctatatcctttaaaagactaaggttccttttaaaagcagtctcaacagtttggagttgagatgccttttctgtgtgttgatcacccaatttattctccatttgttgaagtaacattaatctttgtgatactatttcttcatgtcttttagaaaggcgaatttcttgagcaaacaaggaagtcatctttaatcaaagcttggctaaag

SEQ ID NO: 979 - DNA, 671 bp, Homo Sapiens
gggacaggacacagctaggttctgaagcttctgagttctgcagcctcacctctgagaaaacctctttgccaccaataccatgaagctctgcgtgactgtcctgtctctcctcgtgctagtagctgccttctgctctctagcactctcagcaccaatgggctcagaccctcccaccgcctgctgcttttcttacaccgcgaggaagcttcctcgcaactttgtggtagattactatgagaccagcagcctctgctcccagccagctgtggtattccaaaccaaaagaagcaagcaagtctgcgctgaccccagtgaatcctgggtccaggagtacgtgtatgacctggaactgaactgagctgctcagagacaggaagtcttcagggaaggtcacctgagcccggatgcttctccatgagacacatctcctccatactcaggactcctctccgcagttcctgtcccttctcttaatgtaatctcttttatgtgccgtattattgtattaggtgtcatttccattatttatattagtttagccaaaggataagtgtcccctatggggatggtccactctcactctttctctgctgttgcaaatacatggataacaccgttaattccatgtgttttcataataaaactttaaaataaaatgccccccccaccaa

SEQ ID NO: 980 - DNA, 398 bp, Homo Sapiens
ggtgcctttgacctattaaagaaggaaagtgggtaatggagtcccagccactcaagagactggatatcccccgagaatggcttgggttaccagctatggacccttggaagatgaatctaatccttctcactggtttttctttgcaaattcatttgcttttatttttctaataacaataaactctattttccatgttctcagggcccctgggtagacagacacagcttgatttcagagcagacataggcgaagaaaacatggcattgagtgtgctgagtccagacaaatgttatttatatacacatctcaaatttgaagagaaaatgtatttctttaggtttcaaacactgtaatagatataaagcaaaaataaaaacctgttgcaaagttctaaaaaa

SEQ ID NO: 981 - DNA, 457 bp, Homo Sapiens
ggcccatggactctgagtggcgactgcctccacctcattcccgtgactcgtggcatgcgcaggtgctggagcttggcagccgcgcaggagcatgtaggcaggctctcagatgtaggtggcaagtggcacagctccatgtccggaggcccagcactccgtttgatgggaggagtcgtgggagcccagctccaggccctggtacccctcttcatgcactgatttggggaacatgactccccttttactcccctaccccacatcacttaatttatttccgtttttgtttctggttactgtgaatcccagaggagtctctccctgtgcccacatgaagctgctttttccggggcccccgggcgggagtggggaagggtgggcgcacggaagatgggggcctctgtacagttgttactgactctgatttttaaggagccaataaaccccgtctcagagcctc

SEQ ID NO: 982 - DNA, 362 bp, Homo Sapiens
tgcctgctctgccaactcctccatcagtgtgttctggttcccacatgagtacatactggccagcggctccgagatgatgaactccggggtctgtagagtgggcaaacagggaagaaggttgggacctggtgcctgtgccgccctggctgccttgctgggcccttctgggactgtgcgctggacttggagccccttggagtatggcttttcacacgggcttctataccgcttcgactggaagatccacctccccactgccttttctcactcagatggggacaccgaggtccagaggaaaagacacctgtcaaatgtcacagatctgggaggggacttaagacttatcatgccaagaggaaaaa

SEQ ID NO: 983 - DNA, 339 bp, Homo Sapiens
ttactccaaaataattaaatttagggctttatcaggtctgcatatagaatcttaaattctaataaagtttcatgttaatgtcataggatttttaaaagagctataggtaatttctgtataatatgtgtatattaaaatgtaattgatttcagttgaaagtattttaaagctgataaatagcattagggttctttgcaatgtggtatctagctgtattattggttttatttactttaaacattttgaaaagcttatactggcagcctaaaaaaacaaacaattaatgtatctttatgtccctggcacatgaataaactttgctgtggtttactaatctaa

SEQ ID NO: 984 - DNA, 420 bp, Homo Sapiens
  misc_feature (389)..(389): n is a, c, g, or t
caattatcaattgactttatttcctttcacatggtaacaccagcagtgtatgatatttgtaaataaaatacgtcataaaaaaatttaaccttattacctattatcagttaggttataccatcctgaataaaaaatatttgggccgggcatggtggctcgtctcttaaatgttcttatttgatatttggttaatattaattaatactgtccctgttactctagctcagactctatgtcattttccttttactccttctcctttggcatttacatcaaatcagttacccagttcaagcaattctttatttttgaaatgtattccaatctattaaatcctaggcactgagagaagaatgaactggatatgcctaatttttcttttgacatanaataagtggcctgtgttttaccttaaaagaa

SEQ ID NO: 985 - DNA, 425 bp, Homo Sapiens
  misc_feature (289)..(289): n is a, c, g, or t
  misc_feature (398)..(398): n is a, c, g, or t
ttcatgtctcctttctaatattgcacatcaatagctccctagcagggaccagctgacgagacgcccccttccctcaagttggcttgaatgtggggctctttgggcaggaagctggggagggaacggggtggccgcagagctgaaaggccacggggctcaggcaggttgcaggtccagcttactctggctggctctttggttggtctttggggctaagctgggatccattgttcccaaggacaccctatcccctcctacccccacccacttctactgggcagacaacagnctggggtctgcccaaggacccttgggcaggggagctgcctctcctggagccatctgcccctcagtaccctccccttgcctcttcctcttccctcctccgtgaggcctanagtggccacgaggtcagaggtcagagg

SEQ ID NO: 986 - DNA, 1151 bp, Homo Sapiens
gaaggctatacaatttctcagagcacaaagggctgactccactactgtggccacagtcagaccttcttcaaatccatctccactgcttgccagtgtcccacggggtgagctgtcttcaggtgctgtctctaccaggctgacaggggctgggccagaagctgctggagcctctggcctggcatcctgatggccaacggacgtgcgcatgaggccgctcaccaaaccggagacctcatccctctcctgggcatgattcctactcttcttctttctgccaaagaggctcttggtaactttggcaaacagactcctagctgggttggggggtgtcaggtctgggactgtcacgcagctgctgatagggagtcgatcgggggtgtagcccttggtaaagaagtcatggcgcaggatctggtcaatagagggcagctctcggggtgaggcccgaaggatggcggccaggagctgccgggcaggcagtgagaggctggcaggcagcgtgtagtgaacctgcttgatgcagcggtacgtctccttcaggtcagccgtctcaaagggagggctcccgcagagcagcgtgtacatgacacagcccagtgaccatacatccgcgtcagggccgtggccctgtctcagcagcacttctggagccacatagttgggggtgccacagatggtcttcttcctctgctccggaggctccaaccgggctgccagcccaaaatcccccaccttcagttccatgttctcagtgatgaaaaaatttcccaacttgaggtcccggtgcaagatgccgcgctggtgcaagtacttgaggccagaaaggatctgccgcaggtagtagcgcacttctggctccaacagggtgtgccgggccttccagatgtgggccagggactttcggctgcagagctccaagaaaatgtagatgttgtcagcgtcctcaaagtggtgcgaaaaacgcacgatgtggcggtgctgcaggtctcggtgcagctcaatctcatttaggatcttctcgcgctgatgcggcttggcgacgcggctctgcgggatgactttgacagcgtaggcgctgccagtctctgtgtcagtggcctcgtagcagcgggcgaagccccccttgcccaacaagcggcttttgaggtagg

SEQ ID NO: 987 - DNA, 479 bp, Homo Sapiens
agacgaggagaggcaatggtggtcttggcaacagaatgctcagcccctcgtggcaggacttgacaagggcaagcttgaccaggaagctgccatcagggatcttcccctgccaccgcaaagctaggcttccagctgcaggcgggctcccaccctctgctcctggccttgggcaagggcactcagcgcctcgcctgcccctgccttggccaatgcgaggtccttccttatccccaccatggggtccatggtctatttattctcgcccagctcaccctctacacagacactgtcctgggtgcacactcctcccttccctcgctgtgtacttccttgtcccctttttatttattgggcagggggagggggagggcacaggcaagaagagattcacagtgtcctggggtaagggggggttcacagtaatcatggtctactcctctttccgtggctgggggtagacttaataaagagagaaattc

SEQ ID NO: 988 - DNA, 726 bp, Homo Sapiens
tcccaacacctgctaggaattgccaacttttaaatggatggggttttttatgggttgaacctctgttaatacttttgtacactctcactacagtttatatttttataggctattttctcaaggtgtttctagattccacatatctattttatataacaagttattatgttatgtgtgtgactcccttgtgtgtatctgtgccagcctcagcctccgagttgcttttccctctggccctgactctcactgactcaccgatgtgatgtgcaggcccacttcttaccccagatagcctcgggcgctgcctgtagtcatgctgacagctgtacagtagccgccaagactgctgacagctggagacggttctggtttcaactacggtatattgatatcggaagtattctagacagatcctcggttgggttttctagctacatgtttgtattgcacagatccccacctgccatcctatagtgttgtcttcctgtgtgttccggggcttctgggcagctgggcctgcccggggaagtccttgcaggtgggaggccatacagagacccactgtgtggccactgagcgtcaccaatgctgctgggcaaatggaggactgcagggggcgccaagtgactctctccttctatatcacagcagctcctgtgctgaccttcaagttacgttttggaactgtaatactaaaggaagaaataaactactaatttgtataat

SEQ ID NO: 989 - DNA, 749 bp, Homo Sapiens
gcagcgtaattcacaaaatacaaataatgatgataacctctaacatatagctcttgtgtctcagacactattctaagtgctttgaaaatgttaactcatttagacctcaaagcaatcctaagatgttgtcactatcactactcttttatgggatgggaactgaggcacagagatattaagtagcatgccccatgctggaatcggggcccaggcagcaggagcccagagtccacacccttaactatgccatgttgcttctatgaggaagaaaaagttggtgaagaacatttaggactctcacactaaatacaaatgcagatagctctgctccctgatcacacatcaacagtaagatacataatatttcttacattgcactatttgttttcattgtggagattgtaataaatactactgtttttagctgtttaaaaacagctcaggcttttgctatatataaatgtgtccctaatgcaaaacttgactgacatttgaaaattttacaaaaacatgttaacttatttttgaaggattagttattaccactgtctatatccatttacaaacacaaaaaaggataaaaagatgccttataatttaaaaggaatattacacttacaatacaaatattaacaaccagagtcactactgagacttaatgtgcaacatcttcatacacataatagttactgaactaagattatattatttcgctatgtaccattatggatggataccacatgcacgct

SEQ ID NO: 990 - DNA, 439 bp, Homo Sapiens
atgtcagagcagcccgagggccagcctgagcccctgaccccacttccttctgggccccgggctcctcccacaagccacgttgatcttcacaacgaccctgggccgctggggtcacccaagagaagcagccctgagacccagccaggctgggcctagctccacggcacgggtgtctcccagccactgcccttgctggaggaccgctgtgagtcactggccaggagcccagggtgtcctgagtctcatagccaccctgccagctgcagcaggtcctgggcctgcttccctgcgggttctggccctgggggagggggcgttagtgcggcggagggtcttgccaaaggcttttcatcctaaatagcaacttgagtggaaacctgggcaaggcggcccagaggctgggccctgcacataaagctttcgtgtgtgtctggcaaaa

SEQ ID NO: 991 - DNA, 1111 bp, Homo Sapiens
  misc_feature (137)..(172): n is a, c, g, or t
ggcgctggacaaacattcctttgctggtcaagatcctaaagctgatcatcaacgagctctccaacgtcatggaggctaatgccgctcgccaggccactcctgcagagtggagtcaagatgactccaatgatatgtgnnnnnnnnnnnnnnnnnnnnnnnnnnnnnnnnnnnntggtttagctggccaacttttatctgacattcttgctacaagtaaatatgaggaggattactacgaggatgatgaggaagatgaccctgatgccctgaaggatcctctctatcagattgatctgcaggcatatctcacagatttcctctgccagtttgctcagcagccctgctacataatgttttcaggccaccttaatgacaatgagaggcgagttctacagaccatcggcatctaaaaaggggagcctttctacatttgctccttctgggccagccgcaaaccattttgcagccctcactggccttgagatgcactttcttctcaacctaaagtggcatcttgacccttggcccttggcctcggcagtgacactgatgacaattcagaccaggctcaccggtgccgtcacttaggaatgctggaacaaaggacatttctcaaagttcccctgaagacatgccatctctagaaccttttttctccccgactctacccccacctctgttcctagagccctctgctggcgagtccagaaacattattgcccagaaggattatgtgtttatggattattttgccccgcctcaggagcgcaggaagtcactaccatttatattctaaaacagacctatctatgttcataggacttctgatgtgttcagataggaatcctcatgagagatcattatgctttgtgccctggaccactgctgctctgggttctcaggaggaacaggcaagagcagcttcattctaagcctttccagtgacctcagccttgcttctcttctacaacactaaggctcctctgtcagaggaggtcgtcttgtttttgcttcattgcatgacataacccttcccctcaagctgttcctatatatacatgcacacacaaaataagccagacagatggcaatttgatcttccttttttaga

SEQ ID NO: 992 - DNA, 1441 bp, Homo Sapiens
gggagggccggctgaggagccggcgtgcggcgcggcgggacgggacgtgcggcccagcgagttggtcggtcccggggtcacccgctacgggaagcaggcctcgccacagactaagaaaaatggctttgtcagcccaacagatacccagatggtttaactcagttaagttgaggagcctcattaatgctgcacaactcacaaaacgttttactagaccagcaagaacactgttacatggcttttctgctcagcctcagatatcctctgacaattgctttctccagtggggatttaagacttacaggacttcctccttatggaatagttcccagtctactagctcaagtagtcaggagaataattctgcccaaagcagtctgcttccttccatgaatgaacagtcacagaagacacaaaatatatccagctttgattctgagctgtttctagaagaactggatgaattgcctccattgtctccaatgcagccaatttcagaggaagaggctattcagattattgcagaccctccattgccaccagcttcattcacacttcgagactatgtggatcattctgagactctgcagaagttggttcttctaggcgtggatttgtccaagatagaaaaacatccagaagcagcaaacctcccttctgagactggattttgaaaaagacatttaagcaaatgcttctgtttcttaaagatgtgggtatagaggataaccaactgggagcattcctgacaaaaaatcatgcaattttctctgaagaccttgaaaatctgaagaccaggtggcttatctgcattcaaaaaatttcagtaaagcagatgttgcacagatggtcagaaaagcaccatttttgctgaacttttcagtggaaagactggataacagattgggattttttcagaaagaacttgaacttagtgtgaagaagactagagatctggtagttcgtctcccaaggctgctaactggaagtctggaacccgtgaaagaaaatatgaaggtttatcgtcttgaacttggttttaaacataacgaaattcaacatatgatcaccagaatcccaaagatgttaactgcaaataaaatgaaacttaccgagacgtttgattttgtgcacaatgtgatgagcattccccaccacatcattgtcaagttcccacaggtatttaatacaaggctgtttaaggtcaaagaaagacacttgtttcttacctatttaggaagagcacagtatgatccagcaaaacctaactacatctctttggacaaactagtatctattcctgatgaaatattttgtgaagagattgccaaagcatcagtacaggactttgaaaaattcttaaaaacgctttagatttttatgtatgttaaaatgcagtattgtaaagtgaatatatatatgaataaatgaatatatttac

SEQ ID NO: 993 - DNA, 501 bp, Homo Sapiens
gcatatatatctgtctgttagcaatgattattacatcatcagatcagcatgtgctatactccctgcaagaaatatactgacatgaacaggcagttcttggagaagaaagagcatttctttaagtacctggggaatacagctctcagtgatcagcagggagtttatttgaggacatcagtcacctttggggttgccatgtacaatgagatttataatcatgatactcttcggtggtagtttcaaaagacactactaatacgcaggaagcgttccagctatttaatgctggcaactactgtttaatggtcagttaaatctgtgataatggttggaagtgggtggggttatgaaattgtagatgtttttagaaaaacttgtgaatgaaaatgaatccaagtgtttcatgtgaagatgttgagccattgctatcatgcattcctgtctcatggcagaaaattttgaagattaaaaaataaaataatcaaaatgtttcctctttct

SEQ ID NO: 994 - DNA, 508 bp, Homo Sapiens
gggattctgccttccctagtagtagggactgacagaatacacttaacacaaacctcaagctttactgacttcaattatctgtttttaaagacgtagaagatttatttaatttgatatgttcttgtactgcattttgatcagttgagcttttaaaatattatttatagacaatagaagtatttctgaacatatcaaatataaatttttttaaagatctaactgtgaaaacatacatacctgtacatatttagatataagctgctatatgttgaatggacccttttgcttttctgatttttagttctgacatgtatatattgcttcagtagagccacaatatgtatctttgctgtaaagtgcaaggaaattttaaattctgggacactgagttagatggtaaatactgacttacgaaagttgaattgggtgaggcgggcaaatcacctgaggtcagcagtttgagactagcctggcaaacatgatgaaccggtaccggctcgatctatcg

SEQ ID NO: 995 - DNA, 771 bp, Homo Sapiens
ttctttgatgagccttggagccaggatttatgccatgataagccggggaataataaagaggggctttggaaattgcattgaaaaattgttgccctgggggttctggggagaccaagaataattttaaataccggggaaggccgacctttgaaactctacacattggtcccaattcagaccaaaatgatagatgtggattctcttacagacaaagagtgcgactggctcaacaattaccacctgacctgcagggatgtgattgggaaggaattgcagaaacagggccgccaggaagctctcgagtggctcatcagagagacgcaacccatctccaaacagcattaataaatacctccccggttttgtttttgtaaaatgctctggaggaaggaagaaacgtggcagatccctgacatctttcccctttcctttccttcttccctacctcccctttttactttagactttaagaagaacagaaaatcttcttatcctctttgatattttattgcaaacactcagtcttttatgattttttaattgttgagaacaagccaagaataaaattgctgcaccagaaggagggtccctccaaagttgaacacttggtgaaaggaagatgccccgacttctttggccagtgatggggaatcagtgagtgctccatgatggtcatgttccaggtgctagtacatcattcatgatcaccttaatgctcatgagactatatttatgatcagtgaataaaaatgtcagaactgtgaaaaaaaa

SEQ ID NO: 996 - DNA, 759 bp, Homo Sapiens
gggggaagaggtagctcacgcgatagaaacgtgttcgctgcccagaagaagggaaggcgcgagtgaggaaaggaggtactgtagatgccctccaaatccttggttatggaatatttggctcatcccagtacactcggcttggctgttggagttgcttgtggcatgtgcctgggctggagccttcgagtatgctttgggacgctccccaaaagcaagacgagcaagacacacacagatactgaaagtgaagcaagcatcttgggagacagcggggagtacaagatgattcttgtggttcgaaatgacttaaagatgggaaaagggaaagtggctgcccagtgctctcatgctgctgtttcagcctacaagcagattcaaagaagaaatcctgaaatgctcaaacaatgggaatactgtggccagcccaaggtggtggtcaaagctcctgatgaagaaaccctgattgcattattggcccatgcaaaaatgctgggactgactgtaagtttaattcaagatgctggacgtactcagattgcaccaggctctcaaactgtcctagggattgggccaggaccagcagacctaattgacaaagtcactggtcacctaaaactttactaggtggactttgatatgacaacaacccctccatcacaagtgtttgaagcctgtcagattctaacaacaaaagctgaatttcttcacccaacttaaatggttcttgagatgaaaataaaacctattcccatgttctaa

SEQ ID NO: 997 - DNA, 1024 bp, Homo Sapiens
  misc_feature (60)..(216): n is a, c, g, or t
  misc_feature (226)..(320): n is a, c, g, or t
ttagcacagacacacaatcacacacaccctcttcttgccacagagacgcaccattacatnnnnnnnnnnnnnnnnnnnnnnnnnnnnnnnnnnnnnnnnnnnnnnnnnnnnnnnnnnnnnnnnnnnnnnnnnnnnnnnnnnnnnnnnnnnnnnnnnnnnnnnnnnnnnnnnnnnnnnnnnnnnnnnnnnnnnnnnnnnnnnnnnnnnnnnnnnnnntgcaaaaatnnnnnnnnnnnnnnnnnnnnnnnnnnnnnnnnnnnnnnnnnnnnnnnnnnnnnnnnnnnnnnnnnnnnnnnnnnnnnnnnnnnnnnnnnnnnnnnacaaacacagactcacgcacacagacttaggcagcccaaattcagcgcctggggcataagttcctggaggggtggccaccttcagcccccacggtaaggtcctgaggaaccttccccttagacaagggatcatggaggaggtctcttccggagcctggagggaggcctcaagtggtccttccaactcggcatcccaaagtgctaggattataagcatgagccactgcacctggccccaacatcatttattgaacagactgtcgtttccacattgtgtttcttggcatttctgtcaaaaatcagttgactgtaaatgcatggattcacttccgggctctctattctgtttcattggtctgtttgtttttatgccaataccatgctgttttgattattatagctttatagtatattttgaagttaggtagtgtattgtctccagctttgttctttttgcttaagattgctttggctatttaggggtctttgtggccattactgacagttaaaatggccctggctcatgtctcctgggcctctacagtactttaaggtggggaagtactgtggcccacatgtcccaaccagctgtgtgtggcacctgacaaggctttgtgcccctgggggaacaaggggtactcccccatacgaaattttaggaatattctcctttatttacagggaaaaaggccaatgaaaatttg

SEQ ID NO: 998 - DNA, 910 bp, Homo Sapiens
  misc_feature (13)..(13): n is a, c, g, or t
  misc_feature (70)..(70): n is a, c, g, or t
  misc_feature (99)..(99): n is a, c, g, or t
  misc_feature (105)..(105): n is a, c, g, or t
  misc_feature (126)..(184): n is a, c, g, or t
gtaaaactcctgnaggtacagtaagagccagtcttgccagtacatcagaagagcaagagcaaaacccaanctaggagcagaagtagaggtcgagctagnaataanccagcaagagtagaagtcgannnnnnnnnnnnnnnnnnnnnnnnnnnnnnnnnnnnnnnnnnnnnnnnnnnnnnnnnnntagcagctccagtacaagtggcagcagcagcagagatagtagcagtagccctagtagtagtagtgagagtagaagtcggagtaggggccggggacataatagagatagaaagcacagaaggagcgtggatcggaagagaagggatacttcaggactagaaagaagtcacaaatcttcaaaaggtggtagtagtagagatacaaaaggatcaaaggataagaattcccggtccgacagaaagaggtctatatcagagagtagtcgatcaggcaaaagatcttcaagaagtgaaagagaccgaaaatcagacaggaaagacaaaaggcgttaatggaagaagccaggctttcttagccattctttgcagcagaagatttcttgataaaaaaggattacctttccttgtaaagaggatgctgccttaagaattgcatgttgtaaaaaatctttttggaaaatacagactgtttgtttaccagacattcttgtactttttgcataattttgtaagagttatttatcaaaattatgtgaggttccaaaatatgtaaaaatgataataataaaaaaagattaacatcccttgtcatcttttttaaatatcctatactcttcagtaagaatctgtatattttaataggcaaatctttaagtctgttcccttctaattctgtatcatacatttgcttttgtagaaaataaatgtgtgtttattttcattaaaaa

SEQ ID NO: 999 - DNA, 825 bp, Homo Sapiens
gggagctgagcctagagtccggctgttggctagagtgggcgcggatctggtgtggggaaggcggcgggactcaggcctgcctgcgaagcattgtcctacataatggtagaggacgaactggcacttttcgataaaagcataaatgaattttggaataaattcaaaagtacggacacctcctgtcagatggcgggactaagagatacctacaaggattccatcaaagcatttgcagaaaagctgtctgtgaaattaaaggaagaagaacgaatggttgagatgtttctggaatatcaaaatcagatcagcaggcaaaataagctcattcaagaaaaaaaggataacttgttaaaattgattgctgaagtaaaaggcaaaaagcaggaattggaagtactgactgcaaatatccaggatcttaaggaagaatattctaggaagaaggaaactatttctactgctaataaagcgaatgcagagaggttgaaaaggctgcagaaatctgcagacttgtataaagatcgacttggactagaaattcgaaaaatttatggtggagaaattgcaagtttattttcactaatattgaccctaagaatcctgagagcccatttatgttttccttacatctcaatgaagcaagggactatgaagtgtcagatagtgcccctcatcttgagggcctagcagaatttcaagagaatgtaaggaagaccaacaatttttcagcttttcttgccaatgttcggaaagcttttactgccacggtttataattaacatacaaatagtgtatataaaaacggtttatttttcttctcacaaa

SEQ ID NO: 1000 - DNA, 864 bp, Homo Sapiens
tttcacctttaaaatgcgaatttattaaagtttaagacaattctgtattatataatagtgtacaatatgttcttattttagatgtagaaataaaggaaaactggctctcagatgaaaacagaaattgtgtctgacagttaatagaacgaatgtcccataaacaggagtaaaaattaaattttcctttaagacgattttacaattatttctcttgtccataatttcacttagttaaaaccacataaggactttatgaataccctcccctatactattcaagatatacatatgggctaactttcgtggaccgatctagaacctaaataccacttccaacattgtttgacttgtaaaaaaattaacttacaaataacacttttggagcataacctatttgaaagcttggaaccacctgtatttaaaaattaaatcttcattaacaacaccctcaagagtgccctcagtgctgcgaactgaacatgctgaaggcaatgtttttctgtgattatatggtttcaccagccattatgatgataatattatctactagagtctgtggcgctagctagcactaagttatatattgatttttccactgaaaattctttcttgggctctgactaggtggacaattctaagtaaaggtttttctaacttctatcactgttacttgggccctgaggttttctattaaaataggacatgaaatatttcaatattatgcatattcctggaataattaaaatttatactgattataaagctaggcatataatacatcccaaaagacatacatttcaaagcagaccaaacattcaaatcttcagatccccccatttaacttctggaagaaaaccaagcgcc

SEQ ID NO: 1001 - DNA, 755 bp, Homo Sapiens
  misc_feature (164)..(273): n is a, c, g, or t
ggaactaccttaatttattgccagaaggtatgagcctaacattctgatgagtccagaaaactacgttttgtcagtagcaatacactaggaagtaaaatatatttagaatttaaacattgtgtgccagtggtcctcgcgcttgactgcacatcagttacttgaannnnnnnnnnnnnnnnnnnnnnnnnnnnnnnnnnnnnnnnnnnnnnnnnnnnnnnnnnnnnnnnnnnnnnnnnnnnnnnnnnnnnnnnnnnnnnnnnnnnnnnnnnnnnntttctgtgcattggcttgcacaatttgaaaataatgcttttcctgagctggatcccagtgttgccttaacagggtgtctgtcgtgccgcagtagagcactgctgcttcctccaaccccaaaatttatgttcctaagtaagtcaggtccctaagccccgtcccaagaagtgacacaagtggccaacatccacactgtaggcttgcaggctacccgccctgagatttggtaaagaacactgccttgttccccatcagtaaacaaggttacctacctcaggaggctgcttgtgagagagcaaatgcagtatcttcagaatgatttatttttttaattaattgtaaagacttgtgccattggctgctctttctagtcccctaaatttctgttctagttttaaatttctctagaacttgcaatagttgggggttttataatgatgttttacaatgtttatttcttaaataaaaacttaaaaattcaa

SEQ ID NO: 1002 - DNA, 1591 bp, Homo Sapiens
  misc_feature (1009)..(1145): n is a, c, g, or t
  misc_feature (1153)..(1166): n is a, c, g, or t
  misc_feature (1184)..(1260): n is a, c, g, or t
  misc_feature (1271)..(1369): n is a, c, g, or t
  misc_feature (1386)..(1395): n is a, c, g, or t
caccgcaggaatttgtcccccgactcggtagcgcggccggggaatccttggagggtgttccaacgggccccgacagagctgtcgaagcaccccagttccgagaaggttcggggaaaactctggtaatgaaagccttcgggaaccgccaggtcggtcgtagcatcaccaaataggctttgcaacaaggcaccaatggacccaatcaaggggctcacaaaggccagcctagagggcagaacagagaaaagctgagaccaatgataagatcagccatatgtcatttcgaatctgcagtggaataaaaagcccacatttgaggtggctcatctagacctggcaagaattgtatatagaagcaggcaatcacagaaaagctgaagagaattttccaaaaatgtgttatgcatgaaaccagtggtagaagaaacaatgcaagacatacatttccactatggtcggtttcaggaatttcaaaagaaatctgacgtcaatgcaattatccattatttaaaagctataaaaatagaacaggcatcattaacaagggataaaagtatcaattctttgaagaaattggttttaaggaaacttcggagaaaggcattagatctggaaagcttgagcctccttgggttcgtctacaaattggaaggaaatatgaatgaagccctggagtactatgagcgggccctgagactggctgctgactttgagaactctgtgagacaaggtccttaggcacccagatatcagccactttcacatttcatttcattttatgctaacatttactaatcatcttttctgcttactgttttcagaaacattataattcactgtaatgatgtaattcttgaataataaatctgacaaaatattagttgtgttcaacaattagtgaaacagaatgtgtgtatgcatgtaagaaagagaaatcatttgtatgagtgctatgtagtagagaaaaaatgttagttaactttgtaggaaataaaacattggacttacnnnnnnnnnnnnnnnnnnnnnnnnnnnnnnnnnnnnnnnnnnnnnnnnnnnnnnnnnnnnnnnnnnnnnnnnnnnnnnnnnnnnnnnnnnnnnnnnnnnnnnnnnnnnnnnnnnnnnnnnnnnnnnnnnnnnnnnnnttgggggnnnnnnnnnnnnnnaaaaaattttttaaaacnnnnnnnnnnnnnnnnnnnnnnnnnnnnnnnnnnnnnnnnnnnnnnnnnnnnnnnnnnnnnnnnnnnnnnnnnnnnngggttggattnnnnnnnnnnnnnnnnnnnnnnnnnnnnnnnnnnnnnnnnnnnnnnnnnnnnnnnnnnnnnnnnnnnnnnnnnnnnnnnnnnnnnnnnnnnnnnnnnnntcttcttttaaaatttnnnnnnnnnngggcattttttaaaaagtggggggaattttttaaccttcccgcccccatgggaccccctccaaccgggtggtggtaaccctaattcccccgggggtatccccccttggccctggggaaaaaattttcccccgggacggaaagcttgctaaatgacccgtgaatcactgactcactatagagtaattaggcttccaa

SEQ ID NO: 1003 - DNA, 1102 bp, Homo Sapiens
  misc_feature (613)..(625): n is a, c, g, or t
  misc_feature (787)..(816): n is a, c, g, or t
ggtaacgtttgtcctcaagaggtggcccccatgctacagcagtttataagaccctggtgcacctctctgagaaacataagagacaatgaggaaaaggattcagcattccgtggaatttgtaccatgatcagtgtgaatcccagtggcgtaatccaagattttatatttttttgtgatgccgttgcatcatggattaacccaaaagatgatctcagagacatgttctgtaagatccttcatggatttaaaaatcaagttggcgatgaaaattggaggcgtttctctgaccagtttcctcttcccttaaaagagcgtcttgcagctttttatggtgtttaatctaatacacttaagctgcagtcccaaaattaggggtccttcagtcttggagactataagggagcctctgcacccagggaaaatgttaccctttacaggggggaagggtaaaccagtagggaatacagtacaatcccaaccctactgggaggggcgggagggaggtgttgccgtcactgtattaagtcgatgttgggaaacgttttaacatctggagcctttgtgggtggaaatatgtctccagttacaactccgcagtggatgtgaagaagcnnnnnnnnnnnnntctattcagtctactcacaaaacagtacattgtggaatattatggggaattgtaccaaaacaagaaccatataaatgatgcctagggacaagaaagaggaacaattctatagcgcacaataaaggaaacctaagaatgggagttacaaatagtaaagaagcnnnnnnnnnnnnnnnnnnnnnnnnnnnnnnatgtaagttttcccacatgatggggccttgttttgcatgttgatgaagaactacacaaagaaaactaatatagttaaaagtcagcttgccttcccgtagtagaagcaggttcttggaagttacaatttaaggtaccccaaaaaagttggaaataaaacaaaacaaacataaacaatgaagcaccctgtgaaatgccaaatgagtcactccttttaccttttttggggtgggcagggagggaggaataaatggggttgggcatatcaaactaaagatgacatcttaa

SEQ ID NO: 1004 - DNA, 801 bp, Homo Sapiens
  misc_feature (438)..(438): n is a, c, g, or t
  misc_feature (485)..(485): n is a, c, g, or t
  misc_feature (553)..(553): n is a, c, g, or t
  misc_feature (609)..(609): n is a, c, g, or t
  misc_feature (690)..(692): n is a, c, g, or t
acaatttgagaattctaattcaagaaatacagcttccagaggatcctttaggatctatgttcttattgcacatggctcagcccgtctagggacatctaccaagaccagatggtcggggcgtgggggcagagcaccggggccacagtgggtaggcactctggccacatcagttcttataatctctctgggctgaagtggctgcttcattgcagggttggaccttgtttaaaaaccagatttgacatttccttaccgaacttcctttcccagcaagaatcctatttgttgggggacttttaaaaaaagagccgagagaaactctgggaggggggttatcacctcctggctggcagcttggggaagtaaggctttggaagacggcgggcgcaatgacacacccaccgccacaggaaaacatggtcattccagaaggcccanggagaaactgtgggaataaataaaacctccctcctcccactggcggnaagtgctgttttaagcaaaatcctcatttcaatgtgagggtaagaaaactattctggttcaggtgtancctttgtccaaggtacgagaggaggcctggcggtcacatcaacagcgagtgaaganagaggcagccacgggcactgccttttcttcaggagtcgaggaggctgccctggggtcccggcaccactgactgactcggannnagaactttctgaagtccttggtgcatgacttaggaaaaaccagtggcaatgatggagctgtgccctgtggcacctataaggcaaagcccctctgccgaattcgcacgag

SEQ ID NO: 1005 - DNA, 1223 bp, Homo Sapiens
  misc_feature (591)..(605): n is a, c, g, or t
  misc_feature (1040)..(1040): n is a, c, g, or t
cagctttaaggtttttattgaatttatttggacaaatccgtactgtatccaattctgtactgcattcttgcttaatagtattaaccataaaggaggtcaggtttatagggtttggtttacctattaaaccatcattgactatggaaatacttactaagcaatatagagacagacaatattatctttccccttatatcttttaagacagccactcaagttttagaagagtatgatacaacattagagaaagaaagatacaaaggctttattcatgtgtgatagtaaaaatcaggatgagtcttagatatacaaaagataaatggatatttaaaatagttatatatgcttttttagcaaaatattcacgtgttaagtatttctggatcttaaaatacaaaatccacttattttattagttaaaagtagaagattgaaaagacaaagtaatattgttttgagagataagtaaagaaaaaaatagaaagcatgtctttgttgttcttcctccattctaaactgctaattatccaacagaaacccctaggtcatagtttacgtttctattctcattaaagccaatagaacactggnnnnnnnnnnnnnnngacatattaaccaaaagctgcaatcacctttcagttgctccatcataaaaaatatggtttgagtcaatatttctatgacataaaatttaaaatctggaagccaattcaatagatttctccatgtttgcacaaatctaatttctatttttggttcactaatttggtagtttataaaaatgctggaaatgaaattgtgtctagactaaattggggagtatgtcctattttaaatatttagtttgaaggtcattctcacttttttgcctgattctttcagcgtcaactggcactggcttctgtgggtataagctgctgacttatttgtcaggcagctggaggcaaacgtcactgacaagattcagttatgttctcctctgcccgaagtccctgtcagctacataaagatgggaggttttctttacactgtcaggtganttgcagaccctgttttttcaaatatcagatgtcgacaatggcagcatcagctcctaggaccaactctgaatctgtggccaatttacagagtaattgatttatacatctctttcgacagagcttcttttgtaaatcttgtaaatcttcacttgctggcatatctcgcacactggttaagtaagc

SEQ ID NO: 1006 - DNA, 873 bp, Homo Sapiens
ggggcggggcggcggcccagcgaaggagcgcgcgggcggtctggccccgccccctccccgcccgccttcccggtgaccttcaggggcccgggtggctgggcgcaggcccctgcggcggcggcgggatgttcgtgcaggaggagaagatcttcgcgggcaaggtgctgcggctgcacatctgcgcgtccgacggcgccgagtggctggaggaggccaccgaggacacctcggtggagaagctcaaggagcgctgcctcaagcactgtgctcatgggagcttagaagatcccaaaagtataacccatcataaattaatccacgctgcctcagagagggtgctgagtgatgccaggaccatcctggaagagaacatccaggaccaagatgtcctattattgataaaaaagcgtgctccatcaccacttcccaagatggctgatgtctcagcagaagaaaagaaaaaacaagaccagaaagctccagataaagaggccatactgcgggccaccgccaacctgccctcctacaacatggaccgggccgcggtccagaccaacatgagagacttccagacagaactccggaagatactggtgtctctcatcgaggtggcgcagaagctgttagcgctgaacccagatgcggtggaattgtttaacgaaggcgaatgcaatgctggacgaggacgaggatgacgcgtgtggacgaaggctgccctgcggcagctcacggagatgggctttccggagaacagagccaccaaggcccttcagctgaaccacatgtcggtgactcaggccatggagtggctaattgaacacgcaggaagacccgaccatagacacgcctcttcctgggcaagcatccccagag

SEQ ID NO: 1007 - DNA, 564 bp, Homo Sapiens
cggctttgcccgtctcctctgggtggccccaagtgcgcgggctgacactcattcagccggggaaggtgaggcgagtatgaggctggtgcggaacttgccgcccccagcagcgccggcgggctaagcccaggccgggcagacaaaagaggccgcccgcgtaggaaggcacggccggcggcggcggagcgcagcgatggccgggcgagggggcagcgcgctgctggctctgtgcggggcactggctgcctgcgggtggctcctgggcgccgaagcccaggagcccggggcgcccgcggcgggcatgaggcggcgccggcggcttgcagcaagaggacggcatctccttcgagtaccaccgttaccccgagctgcgcgaggcgctcgtgtccgtgtggctgcagtgcaccgcatcagcaggatttacacggtggggcgcagcttcgagggccgggagctcctggtcatcgagctgtccgaaaaccttggcgtccatgaacctggtgagcctgacttttacatacattggggaatatgcattgggacatgaggctgttggacggagaa

SEQ ID NO: 1008 - DNA, 1555 bp, Homo Sapiens
  misc_feature (1513)..(1513): n is a, c, g, or t
caggctgtaccggtcgcgagtcgtatggatgagggtgcaggagcagacgggaggatctcaggccaggacgatggcggctctgcaggagaagaagacgtgtggccagcgcatggaggagttccagcgttactgctggaacccggacacggggcagatgctgggccgcaccctgtcccggtgggtgtggatcagcctgtactacgtggccttctacgtggtgatgactgggctcttcgccctgtgcctctatgtgctgatgcagacagtggacccgtacacaccggactaccaagaccagctacggtcaccaggggtaaccttaaggccggatgtttacggggagaaaggcctggaaattgtctacaacgtctctgataacagaacctgggcagacctcacacagactctccacgccttcctagcaggctactctccagcagcccaggaggacagcatcaactgcacctccgagcagtacttcttccaggagagtttccgcgctcccaaccacaccaagttctcctgcaagttcacggcagatatgctgcagaactgctcaggcctggcggatcccaacttcggctttgaagaaggaaagccatgttttattattaaaatgaacaggatcgtcaagttcctccccagcaacggctcggcccccagagtggactgcgccttcctggaccagccccgcgagctcggccagccgctgcaggtcaagtactaccctcccaacggcaccttcagtctgcactacttcccttattacgggaagaaagcccagccccactacagcaaccccctggtggcagcgaagctcctcaacatccccaggaacgctgaggtcgccatcgtgtgcaaggtcatggcagagcacgtgaccttcaacaatccccacgacccgtatgaagggaaagtggagttcaaactcaagattgagaagtgaaacggtttgcgcaggggtcctgggcacgcctgcggggtcgctcaaggacaccctcctggttgggcttaccttgcccgtcagttccctgccaaatcatccccaaagtggtttggagcaacggtgttgtcagtgtgcgaactccagagaagcgcccacatctgaaggacctgctcgcgagtatcagttcttccttgttgaattcttacagtttttagatggaatttgctgctataagaatgtccagctaccatgggaacgcaaggcagcaactctctaattaaccaggtcataaaaacgattcgtcttctatgtagacatcactttcttactataatttatttttctacacttcaatatgaactgccccccccacattaatataaaaactactaatgcactgatatgaaacacggcttacactaatgacattctgaattcttgcttttaaaattgcaattcctaagttgtaaacataaaatatattaaagttactcttatcgtatgtaaaaaacagaaatcgtgtttcctgatatgggagaaattaacataaaaaccaaagcgcttccnttaacaaaacaaacacaaaaacatacacagaaccacacacgc

SEQ ID NO: 1009 - DNA, 922 bp, Homo Sapiens
ccacagggtaatgggtgtccgatgtcacgggggactctgtgatccgtgttcccctgaccctcctagtgcacaacttggccgggctcactgggctcctgcaccactgcctgtcaggtccgctgccagccccaagccccccaccagccatgagctcctccagaaaggaccacctcggcgccagcagctcagagcccctcccggtcatcattgtgggtaacggcccctctggtatctgcctgtcctacctgctctccggctacacaccctacacgaagccagatgccatccacccacaccccctgctgcagaggaagctcaccgaggccccgggggtctccatcctggaccaggacctggactacctgtccgaaggcctcgaaggccgatcccaaagccccgtggccctgctctttgatgcccttctacgcccagacacagactttgggggaaacatgaagtcggtcctcacctggaagcaccggaaggagcactgccatcccccacgtggttctgggccggaacctccccggggtgagcctggcactccatcgaaggctccatggtgatcctgagccaaggccagtggatggggctcccggacctggaggtcaaggactggatgcacgaagaagcgaagaggtcttcgcaacagccgggccactgccggggacatcgcccactactacagtggactacgtggtcaagaagggtctggggcataactttgtgttccggtgctgtagtcacaggccgtggagtgggggaaccccgatcccagcagctgtggggccctaggactccggccccctcttccaggtgagccggttcctgaccaggaaccagggccgcagcccttctcgctgtggggccgcaacgtgtctccgcgctggcacgttcgaacgcccgccggctgggctccccg

SEQ ID NO: 1010 - DNA, 959 bp, Homo Sapiens
tgttaccttggcagagcctggcgccttcgggcccggcactcacgggcaggatgaggcccaagcagggcagcaccatgagcgggcaagcaggcaggaacaggaggatgcccacgaagatgtcaatgggccctgcagcccgcgccgggggccccgcggccccaaggcacacgcgagaagttagttgtgcaggcaggtgaccaggagggacaaggacccacaagcagggcgcacaccacggccgacaggcgcttgggccgccggcgccagtaccaagcggggaagatgaccgaggcgcagcgctcggcgctgacggccggcaaggaggctcacgccggtaaggaacatgcagagccccaggacccggcacacgctgcggatgtagtcggcaaacgtgcccaggaagccccccgtgttcaggatggagaacaccgccttgctgaagaggtagcccacatcggcgctggccaggtgcaggaagtagatggagaaggggttcctcttgatggagaagccgaaaaaccagaggaccagcccgttgcccaccaggccacacaggcagaggagcaggaagatgtagttcatgacggccggaggcggcagcatcgcgatctgctcgatggtcaggaagccccggctgtagagttccggggcctcgctcaggccagggcacatcctgttcctgttgccgggatgggcctcccaggagcagtttccagccatctccaggcctggcgcgtctgggcccctgctggcagctcaccagtctgcacacccacctgcagctgtcctgatccgccgaggcctccttttgtggagggctcttcctgtgactcccgcctccggccggcggacccgccggggcagcaggccagcgccgagcgcggcccggagccttggaaaataggagctcagagtagagccctctccatcccgtaatccgagccgtacagccactttgg

SEQ ID NO: 1011 - DNA, 971 bp, Homo Sapiens
cgctgttgtgaacgcgggtggttcccgaaacttggaggcttcccgtaaacccagctccttcctcatctgggaggtgggtcccgcgcgggtcgccgcctcctccctggcccctccctctcgtgtctttcattttcctggggctccggggcgcggagaagctgcatcccagaggagcgcgtccaggagcggacccgggagtgtttcaagagccagtgacaaggaccaggggcccaagtcccaccagccatgcagacctgccccctggcattccctggccacgtttcccaggcccttgggaccctcctgtttttggctgcctccttgagtgctcagaatgaaggctgggacagccccatctgcacagagggggtagtctctgtgtcttggggcgagaacaccgtcatgtcctgcaacatctccaacgccttctcccatgtcaacatcaagctgcgtgcccacgggcaggagagcgccatcttcaatgaggtggctccaggctacttctcccgggacggctggcagctccaggttcagggaggcgtggcacagctggtgatcaaaggcgcccgggactcccatgctgggctgtacatgtggcacctcgtgggacaccagagaaataacagacaagtcacgctggaggtttcaggtgcagaaccccagtccgcccccgacactgggttctggcctgtgccagcggtggtcactgctgtcttcatcctcttggtcgctctggtcatgttcgcctggtacaggtgccgctgttcccagcaacgccgggagaagaagttcttcctcctagaaccccagatgaaggtcgcagccctcagagcgggagccccagcagggcctgagccagagcctccgcctgaacctgtggaccccagactaccgagcccaacccccaggcggtggcaccttggtgttcaaacactcaccaattggaggcgctggagctggttgtcaccaca

SEQ ID NO: 1012 - DNA, 926 bp, Homo Sapiens
gtcttcatgtcttccttcgtgtggccaggtgttctcacttccgtgtttttgttgtgtggcccaggttcttcccgcacctgccgtttttctccctggtcgctgtcgtggccctcctcggattccgcgccccgtttccccgtatgtttccgaatcccaggctttggcgaaggcggccggcaaagccgtctgcggtattgatgggattgttccccagagcaagtatccagccggaagtaaaggtaggaaggctcaagctcattgcctctgcatctcacatgaaccttgattggcagtacagaagggatttgctgtcaactgtaagcaaaaggtcaggcttccatgcataacattttcccctaagacaccactgccttttcagacatttggaaaggcccctgcgtatgggttaatttcacgagtcagacatttggaaatgccccggcatacgggttaatttcatgaggagtgtggacagctgtcatcaaggcaatagcctcatctaactattttaatgggtggatgaccaggaatatttttgcaccaacctcttttcctacacagtgttggacgcagacttagaacaccactttgaaactggaaaaggtcctacctggggcatcagccgttgccaggcagtctcagcaatgcctctgccctccctgcagcagtcccaaaatgaacagccacaccttggagggtgtggcttttctgtttcatgcggtgcaaaccctagcggctccacaccccagggactggcccccaaaaagcaaaaacactgctcatggcttggcaggtcctctagtatgtatttttatgtgatatcactattcagaactgtggtgtatactattctataaatttccactataggttggccggacatcctttaatgctgggtattaattcctcttattctttacgtttca

SEQ ID NO: 1013 - DNA, 863 bp, Homo Sapiens
catgtctcgcttttttccgtgctgtttcttttgcttttactgttctgctctgtttatggtttcgtgtgttgttccataaacacattagtttaatttgaaatgtgaacagacagcaaaaattgcacatggcccattttagtccagcttgcttgccaactcttctactcaaagacagggggacctattccgcctatctgtctcagaacctttaaaatggggtcaggaaatttgctacttgggcttagcaatgtgctggttgtctttgtcccacactctgcatctatctaggtgttttgcatataagaacatttcaatagcattaaatcatcaacaacctaacaagtcatgtctacacctgcaaagtgaaatgtggcacattgagatagtttagagaagaaacaagggatttttgaaaatagacccaaatagtccatatgaagaaaaagatttatacttttgggcaagactcatggcccactgaatttgactattttgactctaagggtgtatcacaggctgtggaatgaaaggggtataggagcccagagccactcaattggttcactggttaaccgcccagctctccactttgtcatggtgggtcctgcagaagtgagcttcatgctactgattatttacttgcaaagtgggcgttgtgcctgggtgataccctgcctccctatgcagtgcagtagaacacagcctaactgtgttcctccctccacttctaacacctgaatgagataaaagcctgctttaacacagcatgtcaaagaaagactgagttctggccactctaactccagactcctagaggtgtttgaccaaatggccatcaaccaggtgtatagggtaaaattcat

SEQ ID NO: 1014 - DNA, 1940 bp, Homo Sapiens
  misc_feature (1359)..(1436): n is a, c, g, or t
  misc_feature (1682)..(1690): n is a, c, g, or t
gcagaactcagagctgctcttcctctgtggccagttggggacagcatcatgaagtggatggtggtggtcttggtctgcctccagctcttggaggcagcagtggtcaaagtgcccctgaagaaatttaagtctatccgtgagaccatgaaggagaagggcttgctgggggagttcctgaggacccacaagtatgatcctgcttggaagtaccgcttgggtgacctcagcgtgacctacgagcccatggcctacatggatgctgcctacttgggtgagatcagcatcgggactccaccccagaacttcctggtccttttggacaccggctcctccaacttgtgggtgccctctgtctactgccagagccaggcctgcaccagtcactcccgcttcaaccccagcgagtcgtccacctactccaccaatgggcagaccttctccctgcagtatggcagtggcagcctcaccggcttctttggctatgacaccctgactgtccagagcatccaggtccccaaccaggagttcggcttgagtgagaatgagcctggtaccaacttcgtctatgcgcagtttgatggcatcatgggcctggcctaccctgctctgtccgtggatgaggccaccacagctatgcagggcatggtgcaggagggcgccctcaccagccccgtcttcagcgtctacctcagcaaccagcagggctccagcgggggagcggttgtcttcgggggtgtggatagcagcctgtacacggggcagatctactgggcgcctgtcacccaggaactctacttggcagattgggcatcgaagagttcctcatcggcggccaggcctccggctggtgtcctgagggttgccaggccatcgtggacacaggcacctctctgctcactgtgccccagcagtacatgagtgctcttctgcaggccacaggggcccaggaggatgagtatggacagtttctcgtgaactgtaacagcattcagaatctgcccagcttgaccttcatcatcaatggtgtggagttccctctgccaccttcctcctatatcctcagtaacaacggctactgcaccgtgggagtcgagcccacctacctgtcctcccagaacggccagcccctgtggatcctcggggatgtcttcactcaggtcctactattccgtctacgacttgggcaacaacagagtaggctttgccactgccgcctagacttgctgcctcgacacgtgggctcccctcttcctcttgaccctgcaccctcatagggcatgtatctgtctttccactctggattcagccttctttttctgggactctggactttctctaataataaatagttcttctttnnnnnnnnnnnnnnnnnnnnnnnnnnnnnnnnnnnnnnnnnnnnnnnnnnnnnnnnnnnnnnnnnnnnnnnnnnnnnngagggggggggcgcccaaaaaaacccccccgggggggcgcaccaccaaaaatcaaacacgcaccccccacagcttttatgggtcagacaacggggcgcccacatatgagcgagagacaggcgcaataataaacagacgaaggagagaggacgggcgcgggtataaataaagagcacgaagacgagggagaaaacaaagacgacataggagaatacttttgagaaagcagcccaccacctcgcggcnnnnnnnnncggaccacaagaggcggggacaccacacacccaccgcaagaggaaatttaaacagcgccccccagcgagaggaaaacaaaacacacaacctcacccgaggcgggccataagagcgggggggcacacaaaacccgggactacgtcgttgcgtcctccgccgaccgacgagaacatggcgcccaaccgggggcacactggatcacaaccagaataatcacaaccgcggcgcgagcgctcccgacaaaaagga

SEQ ID NO: 1015 - DNA, 584 bp, Homo Sapiens
ctgacagcttgaggaattctctccacacctaggcaataattacgcgttaatcttcagcttctatgcaccaagcgtggaaaaggagaaagtcctgcagaatcaatcccgacttccatacctgctgctggactgtaccagacgtctgtcccagtaaagtgatgtccagctgacatgcaataatttgatggaatcaaaaagaaccccggggctctcctgttctctcacatttaaaaattccattactccatttacaggagcgttcctaggaaaaggaattttaggaggagaatttgtgagcagtgaatctgacagcccaggaggtgggctcgctgataggcatgactttccttaatgtttaaagttttccgggccaagaatttttatccatgaagactttcctacttttctcggtgttcttatattacctactgttagtatttattgtttaccactatgttaatgcagggaaaagttgcacgtgtattattaaatattaggtagaaatcataccatgctactttgtacatataagtattttattcctgctttcgtgttacttttaataaataactactgtactcaag

SEQ ID NO: 1016 - DNA, 1426 bp, Homo Sapiens
  misc_feature (165)..(230): n is a, c, g, or t
  misc_feature (347)..(347): n is a, c, g, or t
ccggaaggaagggacacgccccaatcccgtcttcccgatttcccttccctccaggtggaagcaccggtggcagaatattaagctactattttctgggcaaaaggaagcgacatctagttcccttgcgcccgtgagagccaccacgccatgccgggacttggtctnnnnnnnnnnnnnnnnnnnnnnnnnnnnnnnnnnnnnnnnnnnnnnnnnnnnnnnnnnnnnnnnnntgttgtcgggaggtcacttctgaggaggcaagtcttaaacgaggctagcaaggatggtcagccgcttccagagcttgggaagagtgttcttggtggacggaacagtgtagtcttgtnggtaaccacttgcctctggctctctgtgcctggagaatagtgtttctgtgtctttttggttagtagtctgtgatcctgggagccctggggccagtttaaacagggccccatcagggtctctggaagtgaggtcactgccccaacagattcaccccactggctaactctggcttaactggctgggcctggccattcccctggaagcaactcctccccacaacagcatcagtcccacgacctctggctccttcccagggcagcatcctgcagtccggaaggaagttcttcgtcctgtctaagccacagaccccgctgaggcaaccccagccttttcctcttattctgccttgtgggcagaagggaggagatgggctgacccttcagcaacgggtcctggcctagacggagagcccagtaaagacctgacagagtggggggtgacaacaccctgcagcctcggggaagtgaacttcaaagggcagaaataatcactcatctcagaagcttctttggcatccagttatctcaggttaatcaattaacacctactttatagacagaaactcaagcaggcccagggagggaaaacagtggcagaactgggaccagaatccaggcctcgttgataaaatagtaataattaatattattgcacatatactcaactgccaggtactgtgctaaaactttgcatgcattttcttctttaagcctcatcacatccccatgaggtgggtaccctcattattcctgttgtcctcagatgagaaggcggaggctacagagctgtcaaatgacttgtccaaagacacccaggcagttcatggcaggacagaatttgagcccaggcagtctaggcgtgctcagccatgctgccctgtgccctgggattcgggaggattgtcacagatgtctactttccagggacttggggagacaggcttcaggctctatcacatgatgatcctggggccgacttgtgccaaggctgggctgggagggaagatggcctggacgcacagcgtaatcctgagtcccctctctgtggatgacgatgagaaccctggctccctcctgga

SEQ ID NO: 1017 - DNA, 2021 bp, Homo Sapiens
  misc_feature (1575)..(1583): n is a, c, g, or t
  misc_feature (1813)..(1813): n is a, c, g, or t
cttattctcctcacaggtcttgtccttatactgaatttgcagctcggaacagccagctgaaaactctcctggccattggaggctggaacttcgggactgcccctttcactgccatggtttctactcctgagaaccgccagactttcatcacctcagtcatcaaattcctgcgccagtatgagtttgacgggctggactttgactgggagtaccctggctctcgtgggagccctcctcaggacaagcatctcttcactgtcctggtgcaggaaatgcgtgaagcttttgagcaggaggccaagcagatcaacaagcccaggctgatggtcactgctgcagtagctgctggcatctccaatatccagtctggctatgagatcccccaactgtcacagtacctggactacatccatgtcatgacctacgacctccatggctcctgggagggctacactggagagaacagccccctctacaaatacccgactgacaccggcagcaacgcctacctcaatgtggattatgtcatgaactactggaaggacaatggagcaccagctgagaagctcatcgttggattccctacctatggacacaacttcatcctgagcaacccctccaacactggaattggtgcccccacctctggtgctggtcctgctgggccctatgccaaggagtctgggatctgggcttactacgagatctgtaccttcctgaaaaatggagccactcagggatgggatgcccctcaggaagtgccttatgcctatcagggcaatgtgtgggttggctatgacaacgtcaagagcttcgatattaaggctcaatggcttaagcacaacaaatctggaggcgccatggtctgggccattgatctggatgacttcactggcactttctgcaaccagggcaagtttcccctaatctccaccctgaagaaggccctcggcctgcagagtgcaagttgcacggctccagctcagcccattgagccaataactgctgctcccagtggcagcgggaacgggagcgggagtagcagctctggaggcagctcgggaggcagtggattctgtgctggcagagccaacggcctctaccccgtggcaaataacagaaatgccttctggcactgcgtgaatggagtcacgtaccagcagaactgccaggccgggcttgtcttcgacaccagctgtgattgctgcaactgggcataaacctgacctggtctatattccctagagttccagtctctttggcttaggacatgttgcccctacctaaagtcctgcaataaaatcagcagtcaaaaccgaaaaaagcatgagtcaacagcacccaacgcgcccaacagaatatcgaggcgggggcggggagggttaaggagcgatcccctcccagggggccgcccagtcttaccgcggacgcgcgcgctgtcctatgagaacaaaaccgcgttcccccccattaccacgaactttcactcatcataaaaacccccgaaggcatttctctggggcaccaaacgcgcgtgttacaccacacataactagggcggggcacgcggagagnnnnnnnnncaagggctataaagactcacggccacaactcccctccgcacgtgctaaagaaaaaaacgctctagccctttagcttggcggagagacaacgcatctcacaaatgtgcggggcacaataacaatttcctcgctgagagaaaacctgttcaacacgctctcggtggggggagaacgacacacacatgaggtgccatcagacgaggcgactaacatgcggcgttcaacaccanaccgccccgaaggggactatgccatcactcttctgaaagacacttaggcctgaatccgcgcaccgcccccctgctccgcctaacccttttatccactacaaggaaaacgttctgcatatctaacgcacgagtactggtcaacgtcaacaagtttagccgacgccagcaggcagtattattcagagagtgccccagcgaagcacacgca

SEQ ID NO: 1018 - DNA, 404 bp, Homo Sapiens
ctgaggtctcttgtggctcagagcataatttggcaataattggtggagtgtgttactcttggggctggaatgagcatggcatgtgcggagatggcactgaagccaacgtctgggccccaaagccggtgcaggctctgctgtcatcgtcaggactccttgtgggctgtggggctggccactccttggccctctgccagctgccagctcaccctgcattggtccaggaccccaaggtcacctacctttccccagatgccatcgaggacactgaatctcagaaagccatggacaaagagagaaactggaaggaaagacaatcagaaacttcaacccaaagccaatctgactggtccagaaatgggggactgtgatagagaatctttaataaagtggcttttcccacc

SEQ ID NO: 1019 - DNA, 969 bp, Homo Sapiens
ctggactgagccatcagctgggtcactgagacccatggcaaggaaacaaaataggaattccaaaggaactgggcctagtgtcccctcacagatgacaccagccacgccaggcctccagggccaggaagggcactgctggagtgtgaccacctgaggagtggggtgccaggtggaaggagaagaaaggactggtcctgctcgctcctcgtggcctccctcgcgggcgccttcggctcctccttcctctacggctacaacctgtcggtggtgaatgcccccaccccgtacatcaaggccttttacaatgagtcatgggaaagaaggcatggacgtccaatagacccagacactctgactctgctctggtctgtgactgtgtccatattcgccatcggtggacttgtggggacattaattgtgaagatgattggaaaggttcttgggaggaagcacactttgctggccaataatgggtttgcaatttctgctgcattgctgatggcctgctcgctccaggcaggagcctttgaaatgctcatcgtgggacgcttcatcatgggcatagatggaggcgtcgccctcagtgtgctccccatgtacctcagtgagatctcacccaaggagatccgtggctctctggggcaggtgactgccatctttatctgcattggcgtgttcactgggcagcttctgggcctgcccgagctgctgggaaaggagagtacctggccatacctgtttggagtgattgtggtcccgtgccgttgtccagctgctgagccttccctttctcccggacagccacgctactgctctgggagaagcacaacgaggcagaagctgggaaagccttcaacgttcttgggtaaagcagacgtttccaagaggtagagggaggccgggtgaggaccaggtgcagaggagcatccgctgggtccgggtggacgtgaaagcctaagcgggaggggc

SEQ ID NO: 1020 - DNA, 1088 bp, Homo Sapiens
  misc_feature (129)..(138): n is a, c, g, or t
ctttctgctgtcactagcataacagaaaagacgaatggcttttgttttaaactgagggcacttttacaaaagtcatctttccatttatttttctttcagaaaaaagaatttgggttttgagcttttttnnnnnnnnnngacaaacactttccttgacttggagaaataatttaagtcaaagaatctgctctatgctaaccaagagatagagcacagcaaagatctgccagccccaggcctctacctagtggcctggaaattcaagtattcttattggtggaggccatttgtttctgattagaagctgtctaaacctcctactcctcaactcaaagaaaaacacagagcataccatggccaagaaagttgcagtgattggagctggtgtgagtggcctctcctccatcaaatgctgtgtggatgaggacctggagcccacctgctttgagagaagtgatgacattgggggattatggaagtttactgaatcttccaaagatgggatgaccagggtctataagtcattagtgacaaatgtctgtaaggacaatgtcatgttacaggtgacttccctttccacgaagatgatcctaatttcatgaaccagtgaaaaatttcgggactaatctccaagaattcgctgagcactgttgacctccgtgaaaatacacttcagtgttaagaccactgtgtgcagccataacgaagcgtccagaacttcttccgaaactggtcagggggatgttgtcacagagacagagggcaagcaaaatagagctgtctttgatgctgttatggtttgcactggacatttcctgaatccccatttacctttggaaggctttcctgaacctcttaaaagctctgtacaagaagatatttctatacaagcaagtctttcccctaaacctagagagagcgacattagccatcatcggccctattggcccttaaggatccatcttatcaggcacagagctcccagcacgatgggttcccaagagaattccagggactctgaaaaaaacttccatcccaaaaaatgatgatgggaggttactggaaagggaacagctcctttaaaaggg

SEQ ID NO: 1021 - DNA, 617 bp, Homo Sapiens
cacaggtgccctggagcccttgtgtgactcagcctctgttagctgggtgggtgtcatcagcccctggcctcccaggccagaacctgagaacgggcccagggtgctgtggagatcaacttcaaaagagctaaccccttcccacactccacccacccacctacatttcctctgtgaaatctacctcagagttgtaccctcagaaggacgggtaagcaggaggccagggggtccccagggctgaggtggggagccttctacggcgaaagcctgccaccccacaatgaatccaccctgctccactgcgcgcctctcccaggtctcagctctgggtggggagcagtggccgctaccgacagcgcatgtcccgctcttatccaactcttccaggccccacctacctgcacccctcccctctatagagcaggggagtgaaggggtatgtcaggcggggaaggggccaaggacacgtcattgtaccctgagcgtccccagggagtggaaatggggaaggggaactggagaggggaggcaggggccctgtgctctctgaacaagttgaaaagtccaaataaaattacctgttccagaagaaagagagaggcacaacgaaaaaggcg

SEQ ID NO: 1022 - DNA, 858 bp, Homo Sapiens
cacaggctgttcggtcgatattcgggatcttccctcggagccgcgtgtcgtatacgcgttcctcggtgcagacaccaggccgggcgcgagctgggtcccctcgggggcccttgtgagagaggtggttggtgaccgtgtgtaaacccagtgcggtggcgtgggatcacgggtccttacgctgggcttgtctggtcagcacgtgcaggtctagggcaggtcctctgtagcctggcgcccctggccagcaggctgaggctacagtacctgctgtctttccagggggaaggggctccccatgagggaggggcgacgggggaggggggtgatggtgcctgggagcctgcgtgtgcagccggtgcttgttgaactggcaggcgggtgggtgggggctgcagctttccttaatgtggttgcacaggggtcctctgagaccacctggcgtgaggtggacaccctggggccttcctggaagcctgcagttgggggcctgccctgagtctgctggggagtgggcattctctgccagggacccatgagcaggctgcatggtctagaggttgtgggcagcatggacagtcccccaatcagaagtgcaagagttccaaagagcctcttggcccaggcccctccccaaccagggctttgcagatgtccttgaaaagacccagcctagagcccttagggagtgcttggcccctcctgttgcgctcttgccctggttggacagcggcatgcacaagtcctcctcagggaagcccaagggggaattagtgggaccgcttgcccacagatccaggtgttggaatgggcagcggataaggtaccaaagctagcccaacaccattccacttggaacca

SEQ ID NO: 1023 - DNA, 1056 bp, Homo Sapiens
  misc_feature (871)..(871): n is a, c, g, or t
gctggaccggtccggaattcccgggatgtccgcggggccgcaggagatgacggccggcggccaggccgaggccgagggcgctggcggggagcccggcgcggcgcggctgccctcgcgggtggcccggctgctgtcggcgctcttctacgggacctgctccttcctcatcgtgcttgtcaacaaggcgctgctgaccacctacggtttcccgtcaccaattttccttggaattggacagatggcagccaccataatgatactatatgtgtccaagctaaacaaaatcattcacttccctgattttgataagaaaattcctgtaaagctgtttcctctgcctctcctctacgttggaaaccacataagtggattatcaagcacaagtaaattaagcctaccgatgttcaccgtgctcaggaaattcaccattccacttaccttacttctggaaaccatcatacttgggaagcagtattcactcaacatcatcctcagtgtctttgccattattctcggggctttcatagcagctgggtctgaccttgcttttaacttagaaggctatattggtgtattcctgaatgatatcttcacagcagcaaatggagtttataccaaagcagaaaatggacccaaaggagctagggaaatacggagtacttttctacaatggcctgcttcatgatttatcccaactcttcattacttagtgtctccacgtggagaacctgcaacaggctactgaattcaaccaatggaagaatgttgtgtttatcctacagtttcttctttcctgttttttggggtttctgctgatgtactccacggttctgtgcagctattacaattcagccctgacgacagcagtggnttggagccatcaagaatgaatccgttgcctacattggggatattaatcggtgggagactacaattttctcctttgttaaacttttgaaagggttaaaataatttgcatggcaagggggccttgagaaaatcccttttttaacactggagcagccagttaaaaacctaaaaccctgtggggtggaa

SEQ ID NO: 1024 - DNA, 318 bp, Homo Sapiens
taaataaataaacttgtgagctggccccaacccctcctaggaatcacagctccccgtactggtgccgccgcagtggccaagttgcgacactgcccacggcccctccctctgatgcagattcagggcttctcttcgatcatgttgggttttgattctgtttttccttgactgcaaaaccctctttcctctcctcttttgggacaagagccctggttttctacgctgcccttggccaccacactgcctgccccacgagctgggaggcaggttttgtacggtacgttgttattgatatgatataaaacatcaaacgtcaaa

SEQ ID NO: 1025 - DNA, 498 bp, Homo Sapiens
  misc_feature (156)..(164): n is a, c, g, or t
agtatcgggtttgtacataattttccaaaaattgtagttgttttcagttgtgtgtatttaagatgaaaagtctacatggaaggttactctggcaaagtgcttagcacgtttgcttttttgcagtgctactgttgagttcacaagttcaagtccagnnnnnnnnngtggataatccactctgctgactttcaagattattatattattcaattctcaggaatgttgcagagtgattgtccaatccatgagaatttacatccttattaggtggaatatttggataagaaccagacattgctgatctattatagaaactctcctcctgccccttaatttacagaaagaataaagcaggatccatagaaataattaggaaaacgatgaacctgcaggaaagtgaatgatggtttgttgttcttctttcctaaattagtgatcccttcaaaggggctgatctggccaaagtattcaataaaacgtaagatttcttcattaaaa

SEQ ID NO: 1026 - DNA, 296 bp, Homo Sapiens
ggctacaaaggctccgctcacaaaagaaagccaataatgtaaataaatagaaaacgaagcctccacgcgtggtttttaaagggggatgatgaatgtgacaccacccacagaatgcattagaatctggtttttctgtgctttgtcattttactctgataggaatttttgttacctaactctgtgcataacttatttaatgtactgtataaatgaaccaaaactgttaaatatgtatttagtttgttctacttaaagtagtcaataaaaaggctatattccttttctgcctcaagcag

SEQ ID NO: 1027 - DNA, 438 bp, Homo Sapiens
cttcccacagcatgaagatctccgtggctgccattcccttcttcctcctcatcaccatcgccctagggaccaagactgaatcctcctcacggggaccttaccacccctcagagtgctgcttcacctacactacctacaagatcccgcgtcagcggattatggattactatgagaccaacagccagtgctccaagcccggaattgtcttcatcaccaaaaggggccattccgtctgtaccaaccccagtgacaagtgggtccaggactatatcaaggacatgaaggagaactgagtgacccagaaggggtggcgaaggcacagctcagagacataaaaagaagatgccaaggccccctcctccacccaccgctaactctcagccccagtcaccctcctggagcttccctgctttgaattaaagaccacccaagctcaaa

SEQ ID NO: 1028 - DNA, 545 bp, Homo Sapiens
tcccaggatgacgtgctccgtagctctgctgctgatactgggtctgcgatgcagcggcgtgaggcctgggctggttggagaaggtcacaacccttctctgttggtctgccttctgctgaaagactcgagaaccaaccagggaagctgtcctggaggtccctggtcggagagggacatagaatctgtgacctctgacaactgtgaagccaccctgggctacagaaaccacagtcttcccagcaattattacaattcttgaattccttggggattttttactgccctttcaaagcacttaagtgttagatctaacgtgttccagtgtctgtctgaggtgacttaaaaaatcagaacaaaacttctattatccagagtcatgggagagtacaccctttccaggaataatgttttgggaaacactgaaatgaaatcttcccagtattataaattgtgtatttaaaaaaaagaaacttttttgaatgcctacctggcggtgtataccaggcagtgtgccagtttcaaaagatgaaaaagaataaaaactt

SEQ ID NO: 1029 - DNA, 552 bp, Homo Sapiens
tttaaaggaaagccacccaaagattagggagtaagcctttagtttaaatgttcaatttaagtattgtcaagcctaggctaaatagaggactgcattttcttagagtgtggaatacaacttatttatttcatttttgtttctctttctcttgctcttctttttgtcagcaaaaaggggaaaagctattcaattaagtacaaaggaaattccctgtaaggttaaaataaaaaatgaagctaccattcaagggaacttctctgtattcaaccctaatgtcagtggtttatcactgagttggaattaagtgaatcaaagtctctatcaagcatactccacctgagcataccatctgtacctgtaattcatttagagcccagatgtgtgcagttcacactaaatgtacttgttcaagccagtcacttgaggtttgaggtgtttgacttgaaacatctgaaccatctcctctgttggctgcctcgttaccactgtcaccagcttgagatgctgcttcccccgccagaatattttcttccaaaggattttcttctatct

SEQ ID NO: 1030 - DNA, 696 bp, Homo Sapiens
ggattttagaggaaggcgctcggttaacattggagaactggagtggtctggagttccgcggtgtagtggaccagaggccacctctcctgggcttctcagtgtctcgccggcggggttcggcctgagctggattgacatagcccttggcggatttaaacaacctaaacattaagcagtacagctgcctcaaacctttgggattttcagaatgactgacactgccgaagctgttccaaagtttgaagagatgtttgctagtagattcacagaaaatgacaaggagtatcaggaatacctgaaacgccctcctgagtctcctccaattgttgaggaatggaatagcagagctggtgggaaccaaagaaacagaggcaatcggttgcaagacaacagacagttcagaggcagggacaacagatgggggtggccaagtgacaatcgatccaatcagtggcatggacgatcctggggtaacaactacccgcaacacagacaagaaccttactatccccagcaatatggacattatggttacaaccagcggcctccttacggttactactgatagaaatgttggcagcttttagtaaaagcatttactctgttaccatgagaaaagttgggtgtcttctgttggtcatagttttacatctgattttacagaatggattattgatttttggaagttgagacttt

SEQ ID NO: 1031 - DNA, 774 bp, Homo Sapiens
ctcctctgtccactgctttcgtgaagacaagatgaagttcacaattgtctttgctggacttcttggagtctttctagctcctgccctagctaactataatatcaacgtcaatgatgacaacaacaatgctggaagtgggcagcagtcagtgagtgtcaacaatgaacacaatgtggccaatgttgacaataacaacggatgggactcctggaattccatctgggattatggaaatggctttgctgcaaccagactctttcaaaagaagacatgcattgtgcacaaaatgaacaaggaagtcatgccctccattcaatcccttgatgcactggtcaaggaaaagaagcttcagggtaagggaccaggaggaccacctcccaagggcctgatgtactcagtcaacccaaacaaagtcgatgacctgagcaagttcggaaaaaacattgcaaacatgtgtcgtgggattccaacatacatggctgaggagatgcaagaggcaagcctgtttttttactcaggaacgtgctacacgaccagtgtactatggattgtggacatttccttctgtggagacacggtggagaactaaacaattttttaaagccactatggatttagtcatctgaatatgctgtgcagaaaaaatatgggctccagtggtttttaccatgtcattctgaaatttttctctactaagttatgttggatttctttaagtttcaataaaatcatttagccttgaaacaagacaccaacaaacgcaacacgagcggg

SEQ ID NO: 1032 - DNA, 871 bp, Homo Sapiens
gatcaccctcggctagaagaaccaacccccaaaaaattcacaattatgagttcaaagaccttaaccgctccatgataatcactaatcggccatatatgctttcatacgtatcgtacttctatctccacagtgatctaaagaagaatcggccggcctttactattaatcccactaagtagacattctaatcatcacctccccgaaccacctcgtaacagccgattacaatctgcctgggaataccattttcttcctattttttctctctgttgtgcttcttcttcgtctcttgttggcctctttttctgtttctagtcttcctcatgtattgtctctctttcttgttggcctctctggtagcctggctgggtagggactggtgtctgcttgacaaagaagaataaggcgtcctcaggtctcaggtggattctcttccggattaagaagtagatactggccaaccagtaaggtcagagggcactaggtacttcctcttgtccagatcaggcaccctggcttttggagccttctctacaatcacggggaccctgtccggatatttcgttccggatctgtttctccttcctttttccgatactcaaagggatggtcctccttgtactggaacttcatgatgcaccgcagggcttccgagatccccgcgcggggcctgcctccttcgccgctgaccctgtcccgctccctcagccgacgtcaaggtgtgctcagaatagctgcagaaacgtccgctccgggggcacagcgctgggccgagtgtgcagggggcgttcggggcggggatctcgggtgagcctgcctggaggtagaggagagccagatggagaaataccgcggcttttcgctagagctg

SEQ ID NO: 1033 - DNA, 1062 bp, Homo Sapiens
ggaatttctcgggatcgagccttctcgggacccgggggacgcctaaccccgcgagatgaggaaactgaggccgcgaggagcgcgcacacagcagagaagcagcagaatcgggaatcaaacccagctctgtctgaccccagagcctgtgcctttaaccactggctaggctgaactgcctttgttcttcactgtccccatcacctctttcaaacctcagcctctccttcctcatcgttacatctctaggctgcacctgctctctaaacattcacacaaaccctgcaaattttcttcctcataattgggagaagactcactggccgaatggcagcagtagatgacttgcaatttgaagaatttggcaatgcagccacttctctgacagcaaacccagatgccaccacagtaaacattgaggatcctggtgaaaccccaaaacatcagccaggatccccaagaggctcaggaacgagaagaagatgatgagttactgggaaatgatgactctgacaaaactgagttacttgctggacagaagaaaagctcccccttctggacatttgaatactaccaaacattctttgatgtggacacctaccaggtctttgacagaattaaaggatctcttttgccaatacccgggaaaaactttgtgaggttatatatccgcagcaatccagatctctatggccccttttggatatgttgccacgttggtctttgccatagcaattagtggggaatctttccaacttcttgatccatctgggagagaagacgtaccatttatgttgccccaattccgaacaagtgtccatagcagctaccatcatctatgcctattgcctggctggtttcctcttggcactctgggggttcctcatgtggcaaaaacagcaaagttaatgacaatctcctcctattcatttccgggagattgggcgtgtccaagggaaattccctctttcatatatatccccccccgcaatacttgtgggaattatccccccaaaaaaagctgtttccgttgggaatcctaagcccttgaatttgccccccgga

SEQ ID NO: 1034 - DNA, 863 bp, Homo Sapiens
ctgggctttgggagggagaaagagggacctagcgcgggccagcggcgcacggtgggcagctgcaatggcgctgtcgtgtacccttaacaggtatctgctcctcatggcgcaggagcatctggagttccgcctgccggaaataaagtctttgcttttgctttttggaggtcagtttgccagcagtcaagaaacttatggaaagtcaccattttggattcttagcattccctctgaagatattgcaagaaatttgatgaaacggacagtgtgtgccaagtctatatttgaactatggggtcatggacaatctcctgaggagctgtacagttctcttaaaaactaccctgtggagaagatggttccatttctacattcggactctacatataaaataaagattcacacttttaataagacattgacacaagaagagaaaatcaagcgaatagatgcacttgaatttctgccatttgaaggaaaagtgaatttaaagaaaccgcaacatgtattttctgttttggaggattatggtttagacccaaactgcatccctgagaatccacataatatttattttggtagatggattgcagatggacagagagagcttattgagtcatacagtgtcacaagagacactttattggaaatacaagtatggatgctggtttgtcattcattatggctaaccatggaaaagtgacagaaaatgcactattgtctttgatccatttgttggacacaggtggctgctgatagcatgtgctcatttggtgcatatgtgtatgggacagacatagactacaacacagttcattggcttggggaaaggctactaaggaaaaaccagaagtggagaggac

SEQ ID NO: 1035 - DNA, 957 bp, Homo Sapiens
tgatacccatccatagccttctgtccaatggtaccgcaccttatccagattggacaggccaaaaaaggctcactaagccaatcaccaggaaatgagaatatgcctggcttttaaatactcctgtgaaatacaacccattttggtgcagattagttcaacccgtctcacggcttccaaagagaatggttccttagtaaagttgtcactcaagtccttcaggaaaaataggtcctcaagagttgacttgcctgaaccataggccataaatggagaaataaccccaagccagctgccaacagtgaaaactgtccaataagttgtaatattgggatgccggaaaaagtgggatagaatcacggctttctgtaaagctttcaggcgttcttcattgcagttttccagatttgtaatttttatagttaccagtgttcccgtgggagtatgccgtgcaaagatggacagaagtcaagttgtcaaatcctcttcctatttctacttggagctcatagtgagaaacgttggtggaacatagtacttcactggctctagtggatggacgtgaccaggaaagggttggctcatcaaccaagtattgatggatactggtttcagactgtttttcaggtctgagtgattcaacttgtgttcttgaagtgcagaagcaatccaaaagagacattgaatcactttagttcacacagaaagtgacaaaaatccatctattccaaagaaggcttttgttttatcttcctttcaagatgcagatatatcctacctagcggcgaccacggccagcgactctcttcaggctgccagcggtgcggacaggggcgggcgccagagccctgctcgcggaggggcgaggcgagcgctctaggcccgctcccggcgcggggcgcgggagggcggcgaggccgcgaccgggccgtgggcttggaactctgcaccagccccagg

SEQ ID NO: 1036 - DNA, 861 bp, Homo Sapiens
tgccaatcttggcattacaagaaccccacacacaacaggctgcaaatggcggcatcgacgcagagccacccgtccagcagtgcatccgtcgccaatcgttcgagcactgcttggcatccggcggccacggcagacctggtgtacacatggttgtcaggttccttggagcatgagggcagccagagacagaggccgacaatgaccagcaccaggaccacggccagcaggcccagcaccactaacttcttcttcatggctcgtccagcagcagacgggggccccaagccttgcctggggtgttggccacgaaagacaggaggatttggtggaaatagctgaggaaataaccggggtctccctcacactctgctgaagcctgaagcacgcgcagcccagacctttctgggggactccgtgttacctccctctgcctctagctggtttctctgtgctccagttgaactctgctgtggggcctcaggcaaatcactgaactgtccagcctggatgacggcagcacctcacttgccttgctgtgggatccttctgcaggatgcgcccacacaagtcttgcccccttcaccccgaagtgcaactcactcccactgcacgggtacataaaccgaggcttggagaggaagaggaactcctctagagcgcagcaagcatatggcagacgctgagaatgggactcaggcctccagacactcatgggagtgccctgacctgagcttccccacctatgatgtccaccagctcagagagggtgagcggcgcctctgggtcacacagcactgggccacagccaactgctctcacttctgggctcacccgacgcccggtctggtcatccagcagcac

SEQ ID NO: 1037 - DNA, 139 bp, Homo Sapiens
gcaacacccacacctgtgtctgtatatagtcagcttatctcgtgttcaatcgtctgatctctacagagagaagtggaaaatgctgtatcaagggtgggcttagctgcgcctttccaataaagatgtgagaagcttcaaa

SEQ ID NO: 1038 - DNA, 902 bp, Homo Sapiens
acaaaggcaaaggaaggcaaaggaagctgtctcgggtgtttctgaacaacgtgactcatgaggggctttggctacctcttgcgttccccctagagatgtccaggccttacatttaatcggctttctctgcggtggggtagagaatggagctcccgccttggcaagcgctaaaggtggagctgggggattttcctgggaatgatttgagggctcttgaaagcccatgtgttccaaagcgtctttaactctgggatagcattggaagccgctgtcatgacaggacatggcactggatggctggcagagagccctggctgggagttagggagccctgggttggaatccagccccacctcttttatgccacaggtttggtcaagttctctcccgctcagggtagggctgtgaactccctcttacagctaagaacatgcagcttagtgaggacaagacccttctagagctttacccctaatccccccccaggagccccgaggccggcattattcctccccattacaggtgatgagcctcaaattcagagagcttaagcaacctgctcagggtcacgtctccaacaggcagtagagtcaaggtataaaccaggtctgtttttgtaccagagtcccagactaactgttggtaggaatcttgtaaccagtcatgttttcttccttgttttggccgctgggaagctcaaagtcaaattcgagacccttttttttccaattgtgctgagtctcctactagactcgcttcattctagctttctgcttttacctttaccctaatctttttatttttatgctattgtactttatttttgtaagttgctgagatatctgttttgcaacaagatgggctatatctaaataaagacatgatcaaaggtttgatttaaa

SEQ ID NO: 1039 - DNA, 447 bp, Homo Sapiens
gtgcactctaacgtgggcaacagagaccctgtctcaaaaagaaaatattcctgttagccctaaaggctttacatgaggaatggtagaagtggtcttttgtttaaattagttgcattcagcatatatgaattgtcttaaatattttggggatactcccccgccttttaaacagggcataagatctggtaaactctctgtatatcttcctacctttcaaaatcgttcttagggttagtcaagtctggaatataattgctgactataaagttagcaattatgcttttaaggtgttgtcacatcaacctaaagagaaccatctatggaaggtatggttgaaacatctgtaggaacacagaactgggatttcactgagtttaccaaatcaactgtgtgaactgtttctgcactgcttgctaatggtttcatctaataaatgtttacttatat

SEQ ID NO: 1040 - DNA, 464 bp, Homo Sapiens
aaggctatggaaaaggggtgggggagaagaaataaaatcagagaaaaatgcccaaaaacattttccacaatatctaaaaacagagaaccatagttcttgtcaagacaatatgaattctggatgagttattttttccagttttcaacaccaataaagatttttgcaaaagccaccacatcagaacactcatcttccagatcaaataaccttccccttttgccttcacttgtcatttttcataaaaggataaaaggatgtattctgttcttgcaaacaataagtgctaacaacaagagagctcttctgatgcttgtatggtggtaaggagttttcacaaatatccaagttttagcacagttagaaggactaaaatttgtttctctcaatataaatactactggaatccacaaactgatttttgagaaattctgcaaaaatcttttcttctttccttttcccttctg

SEQ ID NO: 1041 - DNA, 379 bp, Homo Sapiens
aagattctaagatactagaaattaaaagttgattagaaaggtaacattttcaaatttacttgaatgttaaaactaatttatacaatttttgggataaggtgtctgtctgatttatcaataggttgtccaagaagccctggacaaagccagagaaggccgcacctgcattgtgattgctcaccgcctgtccaccatccagaatgcagacttaatagtggtgtttcagaatgggagagtcaaggagcatggcacgcatcagcagctgctggcacagaaaggcatctatttttaaatggtcagtgtccaggctgggacacagaacttatgaacttttgctacagtatattttaaaaataaattcaaattattctaccatttt

SEQ ID NO: 1042 - DNA, 349 bp, Homo Sapiens
  misc_feature (70)..(98): n is a, c, g, or t
acccgagggatttaataaaaaaaaggtcccaaaacccaataaatttacaggattcccccccggacccttnnnnnnnnnnnnnnnnnnnnnnnnnnnnngaaaaacaaaatggtaaatttaatagttcagacatcttagacaagacttgacttttgggcttcagcaagatgtggaaacttttttaaaagaatttttgctttctttctctctaaattttccttccgtgctttgatgcgggctcgtttctcacgttccagtctgagaaaatggtccacataaggcaaggcaaagaatcgtttcctattgtatcttttatttaggtgccaaggtataacccactgcttgaact

SEQ ID NO: 1043 - DNA, 681 bp, Homo Sapiens
acacaacagaaaccacctgacatccacccgctgaagcgcactgctgttcagataggggacggaaggtcgtttgtttttgttctgagctccataagaactgtgctgacttggaaggtgccctgtgctatgtcgtgcctgcagggacacgtcggatcccgtgggcctcacatgccaggtcaccaggtcaccgtctccttccacccctgcagtgtgctgttgtgcacgtcagggacgctgttctctatgcccactgccctcctccctctcctggcccagcagtattgctcacgggggctccagccgccggcgtggccctcatgagctacgcctgggtcttctgcagactcatgcagccctatggccgctcagaccaaggcgcagagcaactatcagggcagctctgcctcctcctcccatgaggtggggagaggcaacagggcagcccccagaggagtgtcctggccgctgtcctcccggggcccatgatggccatagatttgccttgtggtgttggatcaggtactgtgtctgctcataagtacttgtgtcatccagaatgttttgttttttaagaaaattgaattacttgtttcctgaaatattctgaggttaatatgttagttttcatagaacattgagaggcccctgccactttcaataaagacctgacttggagaaaaa

SEQ ID NO: 1044 - DNA, 212 bp, Homo Sapiens
ggttaaaacccagatgctgtatattcatttgtaattatgtataaagtgaagcagttttaaactgtaaagatttttttcagtgtgttttctcgaattttgccacaacatactggcttcgtattttatttatctttctttctagttaccagcttcagacccttgtaaagtctccctcagccctttcaaaaaataataaatttcctgtgaagtta

SEQ ID NO: 1045 - DNA, 1125 bp, Homo Sapiens
  misc_feature (803)..(821): n is a, c, g, or t
ggaaattctccgggattatacatatatatatacacacatacatatctagaatgtgtatccgcggcgcccagaagcctcggtttggcccacctgtgagtggggcagggaggggttccggttgtgcagagaacagagtgttctggcaaagaggaaatcccacagcagcgcagaggacctgggcctggaggggcagggctggggcaacccggcttggcggcaaagcccagccccttctcagaccagctccccacattcctgaattccacttccaggcagaaaggagtgggctccccctactccctcagaggaactgactcaccggctgtcctagaatgggcaggggcagagcgaagttctgggtgggatgaccgcactgggggaggggcctcagtccagaaacctcgaccgctagctccacctgccttggccaccagggcagccccaggggatccgggctgctgggcagcaggtcggcgggaccacatgcctgggtctcaccctcagctccgagggccgagggctttccccaccccaccctcctcctggccggcagtcggccctgtctattcatctgcgtcaggcttgccaggggggccccccgtgtgtgccccttggtcacgtgtgtcgtcttcaaggatgttttgctgctgtggctcctgctgtgtcccctcctggcccatcctcatcctcatcttcatcctcatcctcatctgtgcaaccgcccgtcctccttttctagtttctgatgtttgtaaccagacccagctgtgtcattaaacagacccgttcttgctgtaaaaaannnnnnnnnnnnnnnnnnnaagggggccgctctagagtatccctcgaggggcccaagcttacgcggcccccgctttcatggtacccagcggggcctaataaggagtcgaattactaacctatgctctggaccgtgcgttctaaaagggggggcctggggaaaactgggtaacttggggcaacctttttgaaaggaaccttaacttggtgagagcgtcgactaatggggaacaacttgctaaagagcgatttttaggtccggggggaaaatattggaatttttcaaccggaaaaaaggtggtaaaacctaacggcaaaaagcaa

SEQ ID NO: 1046 - DNA, 508 bp, Homo Sapiens
  misc_feature (191)..(199): n is a, c, g, or t
tgttcggttttgttttccatcaggaatttgagttctctctaacccagcttactgtgggacataggaaaactcagtagaaatacctttggtgatcttgttgagtttaagtctgatcttgatcttaaactcagtaagccactatctgcaattttgtacattatatagtattttgaagatatggaaccttatgnnnnnnnnntagcaaattagttctttttcccccagaggggaaagttatgttctgcaaatagtgtgtgtcttattttactgttgaacagcaatcgctaatttatttttttattgcctagaacttcaacatgttgtataggaatcctgtagtgccactagttaaatgccgaattctcatctggatgttaccatcaaacatcagtacacttgtcatttcacatgtgtttaatgtgacagtttttcagtactgtatgtgttaatttctactttttttaatatttaaaattgcttttaaataaacatattctcagttgatccc

SEQ ID NO: 1047 - DNA, 1180 bp, Homo Sapiens
cgtgcggcggcatctccgtgtcctgtgactcgagaccgcggctgtcgggtctccccctctctgaccctgcgtctctgtccccgctgtgtccgccctctctccgtgactctgtgtgtctctcgctgtcttgctgtggctgtcactcccaggctgtctcccagtacttcctggactctacctcggaaacttcaattgatgccaaagacctggatcagctgggccgaaataagatcacacacatcatctctatccatgagtcaccccagcctctgctgcaggatatcacctaccttcgcatcccggtcgctgatacccctgaggtacccatcaaaaagcacttcaaagaatgtatcaacttcatccactgctgccgccttaatggggggaactgccttgtgcactgctttgcaggcatctctcgcagcaccacgattgtgacagcgtatgtgatgactgtgacggggctaggctggcgggacgtgcttgaagccatcaaggccaccaggcccatcgccaaccccaacccaggctttaggcagcagcttgaagagtttggctgggccagttcccagaagcttcgccggcagctggaggagcgcttcggcgagagccccttccgcgacgaggaggagttgcgcgcgctgctgccgctgtgcaagcgctgccggcagggctccgcgacctcggcctcctccgccgggccgcactcagcagcctccgagggaaccgtgcagcgcctggtgccgcgcacgccccgggaagcccaccggccgctgccgctgctggcgcgcgtcaagcagactttctcttgcctcccccggtgtctgtcccgcaagggcggcaagtgaggatgcagtccagccgtggctccccacttccgactggctcccttcgggggctgtctgcgccttccacgccccccaggacgggccagaggctgggggagccccgggggcggcctgaacccttgcctcccgcgcccgccctgctcgtccgcgtctgcagtcagcgtccccaacctgtgcagtctctgtgtccggggccggcctgctgcagccacctggtgccttagtccttgggcttgggggagggggcccacccttaaagggcggcgggcagggcacggagggagagtggagggtttgacgggctggagggtattaaagagacaccagaagaa

SEQ ID NO: 1048 - DNA, 1119 bp, Homo Sapiens
  misc_feature (969)..(969): n is a, c, g, or t
  misc_feature (996)..(997): n is a, c, g, or t
  misc_feature (1046)..(1047): n is a, c, g, or t
ccggaatttccgggatgccgctgcgtcctcatcggattccgacgcctgcggagctgagagcaatgaggccaattcgaagtggttggatgcgcactacgacccaatggccaatatccacaccttttctgcctgcctagcgctggcagatttacatggggatggggaatacaagctggtggtaggggaccttggccctggtgggcagcagccccgcctgaaggtgctcaaaggaccactggtgatgaccgaaagcccgctacctgctctgccagctgctgctgccaccttcctcatggagcaacatgagccccggaccccagctctggcacttgcttcaggcccttgtgtctatgtgtataagaatctcagaccctacttcaagttcagcctgccccaattgcctccaaatcctctggaacaagacctttggaaccaggccaaagaggaccgaatcgaccccttaaccctgaaggagatgctggagagcatccgggagacggcagaggagcctttgtccatccagtcactcaggtttctgcagctggagctaagtgaaatggaggcatttgtaaaccaacacaagtccaactccatcaagcggcagacagtcatcaccaccatgaccaccttgaagaagaacctggctgacgaggatgctgtgtcttgcctggtgctgggcaccgagaacaaggagctcctggtgcttgaccccgaggccttcaccattttagccaagatgagccttcccagcgtccccgtcttcctagaggtttctggccagtttgattgttgagttcccggcttgccgcggcctgccgcaatggaaacatctatattctggagaagagactccaagcaccccaagtactgcatcgagctgagcggccagcctgtgggacttatccgggacacacaggtcctagtggtgggcagcacccaagacagctgcatggctcacccccaaggganaaactggggacgtgcaaatgcccgcanncatcctgaacatggacctcctggagcaccatcccggggcctgcaggccnntcatggctgggctggccaatggaaaagtccgccatttatcgggacagggccctgctcaatgtcctcccaacc

SEQ ID NO: 1049 - DNA, 1365 bp, Homo Sapiens
cccgccgaggggctcgtcagtatggcggagcttggggccgagtcccctggtgggcgggacccaaggggagcagccagtagggaagttgggcgagttccagaatcatgggggcgttgctgtgtggctgtggcctccgtggggtgcgcggggcttacaatgccggggcaccaccccattggtctccatgtttggtgaggttaccccgctaggttctgctcctcctcgaaagccttgaacagtgagttgaagttgccggctccaaaaccctggtggttgtggcgctggatgacttccaggaagagcgtgggccggtcctgcaccggtttggtgaagatctgcaggaggtagcctttctcgtcgtagtccaccaggattttcagctcctccagggcatcaatgttctccttcaccttgatcttggccgtcttcagcttctcccgcagttgtttgtagtacgtggagggaacagataagaactccaggcctctctctctcaagtggcgaatcgctgtgatgatgtcttcggtcttgagagcgatgtgctggaccccagcgcccccgttatagtccacatattcctggatctgggacttcttcttgccaggcgctggctcattgatgggcatcttgatggactcttcatagttggccaccacaatggatcgcagagagctatattccgtgtgcacctgcgtgtcatccacggaccagaagcggtggaactgcaggtttttcaggtaccattcggaggcggacaccatctcctgatcaggctggtttcccacaatgtggtcgatcatctccagactgcatttgggcagtttaggaagtagggggtccatgaacgctggggcctcatatccaggcaagaattggccgatgtagttcatcttctccaccagggtgtgtgtggtgtccccatacgtctgcagcacagcaaacttcaccttcccaaacttgtcttgctctacccagggctcccgcatgattttggcgccccgttcccgtgctttctgcacgatgtagtcacaatcttccacctcgaacgcaatgtccttcactccgtcaccgtgtttcaccaggtgatcgcccatctctttgttccaggggttgagcgctgaggagaggacaaacacaatcttcccttgtttgattacatggctgaccacctcccgggaaccggtctccaggcccctgtaggctagaggttcaaagcccatcttgctgcagtagaatgacgcggcctgcttggcgttgccaacccagaaggtcacagagtggaagtggaggaatcggcctctcctcaggctttgcccctttgtcactgtaagtcgtcatgattgatcttagtcaaacctcctactg

SEQ ID NO: 1050 - DNA, 1065 bp, Homo Sapiens
  misc_feature (872)..(872): n is a, c, g, or t
cttggtacggtccggaagtcgttgggatcttcattgagctgctgagcagaagctgaaacacagaattctaagcgttgctgagacccactgacctgcagacctcatagtgggtgcccaggatgttgtcctacggagagaggctggggtcccctgctgtctccccactcccagtccgtggggggcatgtgatgcgagggacggcctttgcctacgtgcccagccctcaggtcctacacaggatcccggggacctctgcctatgccttccccagcctgggccctgtggcccttgctgagcacacctgcccctgtggggaggtcctggagcgccatgaaccactgcctgccaagctggccctggaggaggagcagaagccagagtccaggctggtccccaagctgcgccaggctggcgccatgctgctcaaggtgccactgatgctcaccttcctctacctcttcgtctgctccctggacatgctcagctcggccttccagctggctggagggaaggtggctggtgacatcttcaaggataacgccatcctgtccaacccggtggccgggctggtggtggggatcctggtgaccgtgctggtgcagagctccagcacctccacatccatcatcgtcagcatggtctcctctggcttgctggaggtgagctctgccatccccatcatcatgggctccaacatcggcacctctgtcaccaacaccatcgtggccctgatgcaggcgggggacaggactgacttccggcgggcctttcgcgggggccacggtgcatgactgctttaactgggtgtcaatgctggtcctgctgcccctggaagctgccactggctacctgcaccacatcactcgacttgnggggggcctccttcaacatccctggttggcccgtgatgctcctggactgcttcaagatcctcccagaacccctttcccgaagccttatcatccaactgtggacaaatctggggataaccaccatttgcccactggttggataaatccccctggaggaaccacaggtcctcctttccaaaatttggggggcccc

SEQ ID NO: 1051 - DNA, 1109 bp, Homo Sapiens
  misc_feature (1029)..(1029): n is a, c, g, or t
cagtgattaatttaatttcagaacacatctgaattccttctctgtggcatatgctttaggagaggagcagacagctcttagctagggtcagatttcaaattctcatctcttggtgccaataccaccaccagattcttctttgaagtcaacttttgagatcttcactaagtacacgttggtgtctgaagattcacacgagtgcctctggtaatcattttcttcagggaatcacagtctctcctctcagcaaagcatccactgtactgaactttgcttttggaaacatcttcttcctgagacctcgttgaaagaaactctctggtgtcatactttccaatatggaggtgaagaactttgcagtttgggattatgttgtatttgcagccctctttttcatttcctctggaattggggtgttctttgccattaaggagagaaaaaaggcaacttcccgagagttcctggttgggggaaggcaaatgagctttggccctgtcggcttgtctctgacagccagcttcatgtcagctgtcacggtcctggggaccccttctgaagtctaccgctttggggcatccttcctagtcttcttcattgcttacctatttgtcatcctcttaacatcagagctctttctccctgtgttctacagatctggtatcaccagcacttatgagtacttacaactacgattcaacaaaccagttcgctatgctgccacagtcatctacattgtacagacgattctctacacaggagtggtggtgtatgctcctgccctggcactcaatcaagtgactgggtttgatctctggggctctgtgtttgcaacaggaattgtttgcacattctactgtaccctggtatggatctagctgtggagaagtatttaacactacctcctaatatggggataagggcaaatcttccgcaatagggatctaattatagcaggatttcgttatccaaaatttaagcgaagtatgtccggcttatctggcacagttccctgaggaaggggctggtggnttaacatccttttccatacccaaccttttaggagaatttaattcttctgccctcattccaagaaaaaccttgggctaatt

SEQ ID NO: 1052 - DNA, 861 bp, Homo Sapiens
ggctgcggcgctagatgcggacacctggacgccgcgccgaggctcccggcgctcgactgctcccgcggcccgcgccatgccctcctacacggtcaccgtggccactggcagccagtggttcgccggcactgactgactacatctacctcagcctcgtgggctcggcgggctgcagcgagaagcacctgctggacaagcccttctacaacgacttcgagcgtggcgcggtggattcatacgacgtgactgtggacgaggaactgggccgagatccagctggtcagaatcgcagaagcgcaagtactggctgaatgacgactggtacctgaagtacatcactgctgaagacgccccacggggactacatcgagttcccctgctaccgctggatcaccggcgatgtcgaggttgtcctgagggatggacgcgcaaagttggcccgagatgaccaaattcacattctcaagcaacaccgacgtaaagaactggaaacacggcaaaaacaatatcgatggatggagtggaaccctggcttccccttgagcatcgatgccaaatgccacaaggatttaccccggtgatatccagtttggatagtgaaaaaggagtggcactttgtgcttgaatttactccaaagcgatggagaacctgttcatcaaccgcttcatgcacatgttccaggtcttcttggacatgacttcgccgactttgagaaactctcgtcaagatcagccaccactatttctgaccgggtcattgaatcactggcaggcaagacctgctgtccgggctaccagtcccgactggctggcaccctgtgtgatccggcgcttacaagctgcccgagaacgtccggtgac

SEQ ID NO: 1053 - DNA, 1116 bp, Homo Sapiens
  misc_feature (35)..(35): n is a, c, g, or t
gaaggaagatgagaagggccagaacctttggtgcntgagaagcctcctcaaggctatgttgggcagtagggagcagagagtggaagatcttagggaagcccctgacccagccttaggctgctgccccacagggcaggaggaaagcccaggaggggagacaagacctccctgttgcaaaccaggaggctgagcaaggcactggtgtttacagcccacagcttcacccgggaggggcgagggctcctgccctgcgagagcctttaggtgtacagttggggataagggcagttcagctcgttggcctggagccagttctccgggctcccaggtggttgccagaggcctccatgaggtggaatagtgtaggcctggcgcgagcggtcagagaggttctgcttgctcttgtgtaccacttctccatggatgaggaccagggcccctctctgcactggggtgggcacaaagaggctgttatcccgggctggctctgacccaaggaagctggtaccaggcgctgagccaacaggggcccggaccatccttcttgacacaccactggtgtgggagccagggatgaaccagagacagccgttctccagcgtggcatcctccactgcgatccacacgcccagcacccggcccaggggctccgtgtacaggaaggaggcgtcctgatgaggggagacttcaccgccaaagtgaggttgcttaaagatgtacatgctctgcaccaccacgggcatctggaggcccagacttctggccaaggtctgcaccttgaaggagtgtgtgatgctcttgaagacggggtcgtgggcgtgcagagcgtggccaattttgttgatggatttctccggagggaccaggaaatttcctttctcatcaaaaacgcctttctcaaagaagaatcgaatcttgtcaccactgctcaagaaatagtctgtgctgccctgggctcgaagctgctcctcttcctgggtggagaattctgtgcggcagtggagaggaacatccatttcagccactatctcgccatcctttgttgcatggccacacactcttccgcagacaagaatccttccagcaccaggaatccatcctgttggaacttctgga

SEQ ID NO: 1054 - DNA, 1407 bp, Homo Sapiens
cccacccggcggccacgcccccctacttccttttcaataacaggctggtaccggtccggaattcccgggattgcgacagacccgcggggcaaacggactggggccaagagcacgggatgcgctgggcgcaaaggcaccagggcccgcccagggcgccgcgcagcacggccttgggggttctgcgtggccttcgggtgcgcgtctcgcctctagccatgggtgtcctgcagcgttggagatcctgggcctggtgctgtgcctggtgggctgggggggtctgatcctggcgtgcgggctgcccatgtggcaggtgaccgccttcctggaccacaacatcgtgacggcgcagaccacctggaaagggctgtggatgtcgtgcgtggttgcacagcaccgggcacatgcagtgcaaagtgtacgactcggtgctggctctgagcacctgaggtgcaggcggcgcgggcgctcaccgtgagcgccgtgctgctggcgttcgtttgcgctcttcgtgaccctggcgggcgcgcagtgcaccacctgcgtggcccccgggcccggccaaagccgcgtgtggccccctcacgggaaggggaggctcctaccctggttttgccgggctgcctgctgccccccggcccactcctgttggatttcgcaaaaacttgcccagccgacagttttaaccaccccgtctgcgcccctttgtcacaacaagtccccagcctagggccacaacactccccacatcccttatgggcgaggtcccctgcgactgtttccatgggaaaggagggcctgccccccctagggccgccgacctccatagggttttgacaccccagcccttgaccatatccgctagcttatcccccgactatttttctatccaccccgcaccaccggaaggactatatacctgcgccccccaccgcctaaacttcccgggttgttgtccacactttctcccagtctccaccggcgttttctctcagaagcctcataagaaaaggaccgtgttatactttatcaattagcggaccccggcctatgaacgaccccgcagtaaaatagcacccttccccacgttcctcccgtgaaatagaaaggcgaccgccaatctccgatcggtatatctacgctacacagcttatgaaaccttccccgccaccaccccttataataactcttgaacatcgggcccctcaggctaggcacagcccgagcggcttataatgtcgcaacgcacgatacgcgatagtatatttaccaccaggttcccgcgcagccactcgatgacggggaatgtttatctatccctacaccacccccatcactcgctccctatacccgtcaacccgaacgtcttaccttcacgccccacaacgctcgcaatcataccggtgtctt

SEQ ID NO: 1055 - DNA, 1296 bp, Homo Sapiens
cagacggttggacaggacgtagacacacagaagaaaagaagacaaagaacgggtaggaaaattaaaaaggttaccatggggaagaaagtggccatcattggagctggtgtgagtggcttggcctccatcaggagctgtctggaagaggggctggagcccacctgcgttgagaagagcaatgacattgggggcctgtggaaattttcagaccatgcagaggagggcagggctagcatttacaaagtcagtcttttccaactcttccaaagagatgatgtgtttcccagacttcccatttcccgatgacttccccaactttatgcacaacagcaagatccaggaatatatcattgcatttgccaaagaaaagaacctcctgaagtacatacaatttaagacatttgtatccagtgtaaataaacatcctgattttgcaactactggccagtgggatgttaccactgaaagggatggtaaaaaagaatcggctgtctttgatgctgtaatggtttgttccggacatcatgtgtatcccaacctaccaaaagagtcctttccaggactaaaccactttaaaggcaaatgcttccacagcagggactataaagaaccaggtgtattcaatggaaagcgtgtcctggtggttggcctggggaattcgggctgtgatattgccacagaactcagccgcacagcagaacaggtcatgatcagttccagaagtggctcctgggtgatgagccgggtctgggaacaatggttatcctttggggacatgctgctcgtccactcgaatttggaaccttcctcaagaacaagaataccgagcagccatctctgactggttgtacatgaagcagatgaatgcaaaggattcaagcatgagaactatggcttgatgcctttaaagtggagtcctgaggaaagagcctgtatttaacgatgagctcccagcaagcattctgtgtggcattgtgtccgtaaagcctaacgtgaaggaattcacaggagacctcggccatattgagaggaattggagaccatatttgagggcatagactgtgtaatctttgcaacagggtatagtattgcctaccccattacttgatgagtctatcatcaaaagcagaaacaatgagatcattttatataaaaggagtatagcctcctctacattgagaagtcaagcataggcagtgattggaatagtacagtccctaggggatgcattcccacagatgactccagtcctgtggggcagcacaaggtataaatggaactaaactaggcgtctag

SEQ ID NO: 1056 - DNA, 319 bp, Homo Sapiens
tttagacaaagcaaaaatctagaaaggtttctttctcaaagcaaatgtgcataaagactcaaagggcaggtcaacgcagaatagcagccttgaatcactgccgaatcagcaagaacattgctgtccatggtccccatctgtaatccctgtgcccaaatgtcagcatcttggctggctggggtagctttatttttaaaaatattttttgtaataggacacttgtgtttaacataaaatgttgacttagataaatgatgaggaagttataaataattggaggagcataactttattatttggaaatcaaacaattatgtcc

SEQ ID NO: 1057 - DNA, 567 bp, Homo Sapiens
tatcaggtctactgtggtcgttacatcaagggccacatgctccaacaccatggatattctggacacccgttggtcctcagctacatcgacctgtcagcctggtgttactactgtcaggcctatgtccaccaccgaggctcgccatagatgtagaagaacatcgcccaacagaacaagttaggtggaggatatgccccacccacactaagccccagaatacggtccctcttcaccttctgaggcccacgatagaccagctgtagctcattccagcctgtaaccttggatgaggggtagcctcccactgcatcccatcctgaatatcctttgcaactccccaagagtgcttatttaagtgttaatacttttaagagaactgcgacgattaattgtggatctccccctgcccattgcctgcttgaggggcaccactactccagcccagaaggaaaggggggcagctcagtggccccaagagggagctgatatcatgaggataacattggcgggaggggagttaactggcaggcatggcaaggttgcatatgtaataaagtacaagatgtt

SEQ ID NO: 1058 - DNA, 159 bp, Homo Sapiens
cattgttttaattgagaggggcagggctggagaaggagcaagttgtaggggagccaggcttccctcacgcagcctgtggtggatgtgggaaggagatcaacctctcctcactctgggacagacgatgtatggaaactaaaaatgaacatgcggcccctt

SEQ ID NO: 1059 - DNA, 604 bp, Homo Sapiens
ccttgctgttcaaagggtggtgcaaggtcctgcagcatcttacatctgtagcttgttagaaatgtaaactctcaggccccacaacttacttcctgcattttaacaagatccccaagggatatgtatgctcataaaaatttgagacactggtttaaatgaaaatggatataaggtatgtataactgggggtggggtgagggtaggaggcatttacaactcagattttatttattttgaaattatcaattgtataaatctaatttattaccaaatagggtcttttaaaaaatatttttatcgttgaaaccttgacaggtacttcatattcttctaataatttaaacagtccaataatgtggtatacactttgacatccaagaactcaccaagatgtttttcagagatttattctcgatttaactatcatagcatttaatgaatctgatttgtagtccaataaattgtgggttgaactacttatccctgtgtgaacattgaattactttctgtcactgaaactgaggtatttgggtgtggtaagtacttcgaaaattgtaatactgtttgggcattgtctaaattattaaaggttaaaatagaaaat

SEQ ID NO: 1060 - DNA, 1166 bp, Homo Sapiens
cgtaccggcgtctccatggcgatccgcgttggctgggtggcctccattgtcgggctgctgctctcagcggcggggctcgccagcgcttcagtgggcggggacgcggcaggtgactccagaccaaggaggatgagctgctgtccctggaagagaacggatggagggaagcagctcctacgaagttccctctgtggctgctgctgatctggaggagggtgctggtcagactaggagcttgcctgccaccccctccaaagatgttcacaagggtgttggaggcatcatcttttcctcctcaccgattttagacttgagtgaaagtggtctgtgccgtttggaggaggtctttagaatccccagccttcaacaattgcatctgcaaaggaatgccctgtgtgtgattcctcaagatttctttcagttgcttccgaacctgacttggctggacctccggtacaatagaattaaagcgcttccttctgggattggagctcaccagcatttgaaaactttgcttttagaaagaaatcctatcaaaatgttacctgtggagctggggagcgtaaccacgctgaaagcactgaacctaagacactgccctctggaattccctcctcagctcgttgtgcagaagggattggtggctatccagcgcttcctgcggatgtgggcagtagaacactctctccccagaaatccaacttctcaagaggctccaccggttagagagatgaccctccgtgacctcccgagcccaggactggagttgtctggagaccacgcgtctaaccaaaggagctgtgaacgctcaggacccagagggggcttgtgatgaaagagaaggccagcttttctccccgcctgtgggaaaagccaaacctggagtgaactcaggaagtctggccgactcctccagaaaactgggccctcccaaggaaggaaatccgggcgcttttttggaaacttaaggcaggaaaattttttgagcacttgaaaggccaaggcttttctggggaaaatcaccccttggccaaggggaattacccctcaaaatctccagggggggcccttggaaccttggggaaaaaaactctccccaagccaagacaccgttttttcaggcacaaggggctccctaaagaaaaacagggttcttgccaaaaaca

SEQ ID NO: 1061 - DNA, 1000 bp, Homo Sapiens
gggtaacactcctttctggttaagggctatcaatggtaagcccctacccccgtcatcccgtcagtctcccaccgccactggacccatttgggctccactagtccgatttaaggccaagcctttccctagacggattcatttcgatattccgcttctctggagcgtcataataccttccctcgggggagttggcactcccctctgcggtgaccaattatttccaacatcgagtaaggagaaagggcaattcccaatagtctaatcttccgcaatcctgaaggcccaacttagctccgcaccctccgttaaaataatattctcctccccaagattagacatatatacccagccttttctatgtcgcaacttcaaaactacttgttccccgggagcccatgccccataggttccttagttttagcgctctaagagtattcagcgaaatttagagttaagcttttgcagccatgaggccatcatagcaaacttctgtagggctaactcactgactacgcctaggacgtacttcgctcctgaccacacactacgccccatacaggttaattgctctgaagctcaagatccatgatacacgctgatcttcttgatctctaccccgggagctggggacggtggcattggtggcagcagaaagcccagcaggcaggcagtgggtacaaaggtccggtaggtggccaggaaggcgggcatgaagctggggtcctgctcacggtctccaaacaccaactctcccaccagccgctccaggcgcgctgccctcagcaccctcaccttgctcggttcgatagtggaggaaggtattggcatatggcgagcagggagcctggctgcccccggggccctccgccgggctcctgcgctgactgcgctgccgccgcagggagacactgtacaccgcgccgtcctcggtctcttcaccccagtcctgcagcggtgccagggccagctctttgcctgctgtgcgctccatggccggcgc

SEQ ID NO: 1062 - DNA, 1283 bp, Homo Sapiens
ataatataaaaaacagaaaccgagaaagatggcaccggtccggatacccgggatgccgccatgagcgccgcgctcttcagcctggacggcccggcgcgcggcgcgccctggcctgcggagcctgcgcccttctacgaaccgggccgggcgggcaagccgggccgcggggccgagccaggggccctaggcgagccaggcgccgccgcccccgccatgtacgacgacgagagcgccatcgacttcagcgcctacatcgactccatggccgccgtgcccaccctggagctgtgccacgacgagctcttcgccgacctcttcaacagcaatcacaaggcgggcggcgcggggcccctggagcttcttcccggcggccccgcgcgccccttgggcccgggccctgccgctccccgcctgctcaagcgcgagcccgactggggcgacggcgacgcgcccggctcgctgttgcccgcgcaggtggccgcgtgcgcacagaccgtggtgagcttggagggcgctctggagcatccctcgagggggcctagcttactcgtacccgggctttcttgtaaaaagggagccgtataatgagtcctagtataagctacgcatctggccgccgatataccacggcagatctgggaaaacggccagcgtgagatcttattgggggggacctgacttggggaggggacgcatgcaggaggtggggccatgcgacagacagctgaaagccgcttacgggaaggtatcaaggttcctaggaggatggattgtgattgaatgtaccccggcctcccccataagcgggccacgaggcgtgggctcctggacaggcggcaggggcaatccgcgccccctatccttatggccccggtggcgggggccccacccgcaacaggttccgggagagcgcgggaggggcgcgtccatgccggcgtggcggcttgttgcgtgggatttgtttgccccccgacaaggcctctcggcttagagcacgagggcgacattcacgcagcgccagcgcgggaagacgtgcttgcgaacggcgtgtgccagcactcaagaacgcgtagagattgccccgctggacatcgcgcctgcatagagggccgcgcgcctgggtcggcgcgctcggctctctcaacgtcgccgtcagccattacggcgcgccaggcgccgcccccgcggcggcaccagtaagaggagcaacgacggcggaaaatcaaggccgggtggcgagacggcggtcagtgtggtggggccccctccccgcgagcggaggt

SEQ ID NO: 1063 - DNA, 1677 bp, Homo Sapiens
  misc_feature (67)..(67): n is a, c, g, or t
  misc_feature (75)..(75): n is a, c, g, or t
  misc_feature (160)..(189): n is a, c, g, or t
  misc_feature (212)..(212): n is a, c, g, or t
  misc_feature (222)..(222): n is a, c, g, or t
  misc_feature (287)..(288): n is a, c, g, or t
  misc_feature (322)..(322): n is a, c, g, or t
  misc_feature (390)..(390): n is a, c, g, or t
  misc_feature (463)..(463): n is a, c, g, or t
  misc_feature (505)..(505): n is a, c, g, or t
  misc_feature (596)..(598): n is a, c, g, or t
  misc_feature (650)..(650): n is a, c, g, or t
  misc_feature (666)..(666): n is a, c, g, or t
  misc_feature (682)..(682): n is a, c, g, or t
ttcctgtgatgataccccgtccttctctactcgccacctatctcgcgagggtgtcatacaagggganagacgtanagatttatagaaatcgtgctttttaataccaacttttttctgtgcgccagccttggtagaagtttgtcctccgggagatcttggnnnnnnnnnnnnnnnnnnnnnnnnnnnnnntccaaacgcgccatacgtggtcncttaggaaanggagatttaggcccgcgtgtttgggtattccttgtggtgacgccgaaccgaggtcccagaagaanncggcgctgaaccggtcgcccacagcgtcgcggantgttataatgagggaaccaccacctctacggtggcgaaagtttttgttataagttgccccccaatagntaatttttctctttgggggtgcgttcccgtgagacgatagtttcaattgtaaggaacaggggccaggtggcgnggccccccgggggcgaattgaatcggcggacccgttattcantggcctttgtggttcggctgtatttaaacgcgcgttcgtacgggtgttttggtgttgggtggtggtgcgggcgcggagggcgtgaggcgannnttttgtttgccggtcggaaaaaggcaacgaaacccaacccccgacaacctcnacgtccgtcgtcgttncctcggtaaagcaganagcggagaccaggaggttgttcgtggttgtagacggggggcggcgctcgcgcggacatttatgtccgtcgatgcagattgcgtccactgtcacatttattgggccgccatcttgtcataactcataggcggttgatccccggcgcccactggctgttgataccggcagcgtcccctggttatttgcgggtgcggcggcgggagaggcgtagtgccagcgttttagtgatggtgaaatgaatgccggtcccgatcgccgatcgcgctatctcgcgaacagatgccccgtcctggggcggttcggtttttttcccgtcgggtgtccgtgcggcgcgaggggcggcagtgtttgccacgcgggtaggggtcgtgtcagggagccaacgcagcccactttctcattaggaacctggcttcgttcaacttttgaacctgggtaaggagacgtccgagccttattgtgagaattttctttggaaccattagaaccagacatgacgttggtattaagatgaaaccaagaagatgaaaacgagtttctgaacgcctggatgccgcggcagcgcgaggacctgatagtcacagaggccaaggccagagagagagacaccgcggctaaagcctttcccaggaggcgtcccgccatgagcgccccgagggcggctttgcgatgctaggtcgctcttagttggtgcctccgcctccccacaccccacagctccgagtcccggccgcgggtatctgatgggcactaggacctgtctgccgttgggttcccgaacgggagtagctgtgcctatctataaatcacagatcaagagccctcccacgataagagtccaccgctttccccagtgcatcgagaaaaatccagaccagcacgtgacgccgaagcctccagcgccagctgcctggggaatcacgcggccagcgaacctcgtaacatcccgaaaattccggtccgggtccatgtgtatggagcgggtttgtgggcgc

SEQ ID NO: 1064 - DNA, 1066 bp, Homo Sapiens
acggcccccggagcgcccccctgtgtgcgcccgctctttttctacgccgcataggttccaaggggactctggcattcacaaagttggcctggccaattacccgaggggcgtctggtccgtgccgggtccccgcgacccttttgggggctggtttattccccccctgcccccgcatcataaggtttctgcttgttgccctgcttggctctgagttacactttcttagccttttggggtataagccaggacatcaggtagtctgaaaacttctggaatgctcccagtaagggaacttaactaaagagacgatttgctggtagaagagcttaagaaaactgttagcttgcacgttcacgggcaacgcctgccggctcatctaggacagaaatgcttagggtgcaaggaaagtccaacattggactccgaaaatggagcacactgtcacagggaaaagtgcatatggaaggcccagttcagctcgtgctcctccacggactggcacaggctcaaatctgggggataaagccttccccggactgattcggagaatggttaggagtgcagcatggatttcggtgaccagatgctggaaaattggagcccccaatgcgttaatcccagaattgtaataaaaagggacgctgcaatagttcgatggacagcaagacagttgcaagaactgagattacttcttccgtaagctagatatctctgtcatgaggtaccgtagatctcgacgatgggagatagctggagagcgtcagcgtaggtgctaacgaagtgtcactgctgcaataaaatccatattttatggggaattaaactgcaggtctctgtcagtgcaaagggctggccacctgagttaactatgagctcagaacatgtcaagaaccaagaaatttaatcatctggaatagccacacatttctgtcgtcctactcaccattagaggagaaaagaatttaaatgatgatagtcatactatagaggtgtatcagaccgtgtctctgcgaatcttcactttcacttcgtaaagcacacagtgggaaagaaggaagaggttttc

SEQ ID NO: 1065 - DNA, 1075 bp, Homo Sapiens
  misc_feature (930)..(930): n is a, c, g, or t
aattcccgggatgactgagccggctcaggcagagacgcggcaccatggctagcaagaaagtctgcattgtaggctccgggaactggggctcagccatcgccaagatcgtgggtggcaatgcagcccagctggcacagtttgacccacgggtgaccatgtgggtatttgaggaagacattggaggcaaaaagctgactgagatcatcaacacgcagcatgagaatgtcaaatacctgccagggcacaagttgcccccaaatgtggtggctgtcccagatgtggtccaggctgcagaggatgctgacatcctgatctttgtggtgccccatcagttcatcggcaagatctgtgaccagctcaagggccatctgaaggcaaacgccactggcatatctcttattaagggggtagacgagggccccaatgggctgaagctcatctcggaagtgattggggagcgcctcggcatccccatgagtgtgctgatgggggccaacattgccagcgaggtggctgatgagaagttctgtgagacaaccattggctgcaaggacccggcccagggacaactcctgaaagagctgatgcagacaccaaacttccgtatcacagtggtgcaagaggtggacacagtagagatctgtggagccttaaagaatgtagtggccgtgggggctggcttctgtgatggcctgggctttggcgacaacaccaaggcggcagtgatccggctgggactcatggagatgatagccttcgccaagctcttctgcagtggccctgtgtcctctgccaccttcttggagagctgtggtgttgctgacctgatcactacctgctatggagcggcggaaccggaaagtggctgaagcccttgcgcgtacaagaaagtccattgagcagctggagaaagagttgctgaatgggcanaaactggcggggcccgagacaggcccgggagctatacagcatccttcagcacaagggccctgtaaaacaagtttcccctggttatggccgtgggaaaaggggggcctacagggccccccccgggggggaatttctcccccgggcg

SEQ ID NO: 1066 - DNA, 855 bp, Homo Sapiens
aggctattggtgatggcctatcaagcgtgcccttcagcctgccatatgcctgtgggccggcacagctggtgggccatcaggcgctggtatcctccgagccctacatcttcgtctgctgccctcatgcaactaagtgcgccagttttccgcatggacctgggcaaattgctccaagtttccttgcaccgagagaaggcttcgtacagcctccaggtctgtcaccatgtacagatctttataggccataacatcttgaaagagttaacacctttatcttgcacaaggattgttcagttcttctgtaacctggtcactccaccacgtcactgccacatgaaggctgtagtcgcagcaaactttgggatcagcccagcttcgccaggtctcgaaggcctcaatgagggagccacctttctgaggaatggcgaaatcaataatcatggtggtgcctcctgagagagcagccttggtgccctggtggaagtcgtcgatggaccgcgagcccatgaaggggaactgcatgtgcgtgtgtgtgtcgatgcctccgggcaggacgagcttgccggcggcgtcgaggacccgcagccccgcaggagcgcccccgggaggcagcaggtcgtgcccgagtgcccgcaccacgccgtcctccaccagcacgtcggccacctccgagaagtcatcgttgaccacagcgaccacccgcggatcaggaaccgcgagggcgccgccatggcgaggggcgcgcggaggtcatactcggcccggactgcgcgcaggggctgggttggccggccgggcgggcttggggtgccctcctgcaaggtccccaccgacagcccccgagctctgcctcag

SEQ ID NO: 1067 - DNA, 1644 bp, Homo Sapiens
ttaggcaagagagcaacatataatagtcagtgatacaaagaagggcatggaacatttggggaacacaggggtttggagggcctgaagcacaggggtgtggtattagaaatgtgggaaatatgggccatgagcctccggacagaatggggtccaggaaggacagcatcacacactgtgctgtgagtttgtgatcctcctgtgggcaacctcagcagtctggttattggcccttttttcttacagcctggaaaactggaccaagtttcgattgatctcagcgaccgaccggcagcctgtaagggccatggaagtgtggaactcatttgttaaaatgttcaaaacttccttaacaccatgttcacccttgcaggcaaggccccataggattggtctcccaagaaaaatgcacttagctccaagggccagagccttcagcacatcattgccagttcggaccccgccatccaggtagacttcaattttcccctttacagcagccaccacttctgtcaaagcatcaattgaagcaagaacctcatcaagctgcctcccaccatggttggaaacaatgatagccctggacacttgtgcttcaccagctaactctgcatcctcttttgtcaaaatccctttcaggatgatgggcaatcgagttatgctctgaaaccaggagagatcattccagcagagagaagtgctgataggagtcatctggaaataaggtattgcatttccctttttaggtgattgaagatctgttagtgttaagttcctcctcaactggtttcgaatgtcatgtcgcctgttgccacatacaggtgtatccaaagttattaccagagctttgaaacctagggattctaccctctggatcaactgtttgttcagctgcaggtctggatgcacatagagttggaaccatcggaggccttcgggagctgcaatgacaatgtcttcaaggctacagctggcaaatgtgctggtgatgtagcagataccagccgcttgggcagctcttgctgtgctcatttccccatcaggccagacaaggcagtggaaccctgtgggtgcgatacaaataggggcactgatctcctccccttggattgtggttctggtgtccacctcagacacatctctcaggtaccgcggacggaggcgaattcttttaaatgctgcaatgttgtcatcccgcgtgatgctgtcatctgctccaccttcaataaaatcccgagttgacttagacagctgctctcgcgcatgggcctgaaagtctgtcagacacaccaaggacatttctggaccttcacattcactccacatcttgtcttccatcagcttcctgggatcttcctaaagttcaaggctgatcatgcctgcctcttgtctttcaatgtgcccacgtcatggcattcccagctttctaggccctggattttcactgcctcaccagcttcatttcttggtgaactgatgctactatctggtagttcccaggaatctcaatgtttgaattgtctggagcttattctaatgtcttccagtcctcagggaaagaagtgtttagacgcagccactcaaagcctggctcactgccggaggtgttaggaaacacaccacatcactacccacatccatacacct

SEQ ID NO: 1068 - DNA, 493 bp, Homo Sapiens
  misc_feature (445)..(453): n is a, c, g, or t
ccgactccctcactgtgaaattaaaccaagtactggaaacgtaactaaacagcgaaccatgtagcttcacctgactcagtgctgggggcctctaccatctactgtgcttgtgtcatgatgctttttctctgaagtggtgtgggaagtaccaggggactggcagaagcccaggccctctctacttttaccagcaactgatcatgtctttcagaatccatgtacatataggctgttctagccacagtggtagatttatgattcacatccgaaagtgtgccttagttatcaatttaacatttctctagtattcatatcccttttcttaccatatacctcagtgtatccttcctgtgtcaagccttataaatcatgtaatttagtgccactcatgtaaatcagtaaaatcacaaaggtctatttaatgaaaacgagttaccaatgttgnnnnnnnnnaacaagaaaaaaaataaaagcacattgtcatttttttaaa

SEQ ID NO: 1069 - DNA, 461 bp, Homo Sapiens
tttcgtgtttgtgtttattaactcttactccccacgggcagggttgggttttggtgagggaaagaaaagaccctcattgaggacattgctgggtaaaaagccttcagagagctacctactctttgtgggtgtggtaatgggcagccttcagcgcaatggctaccagggatatgaattcttgaaagtcgacctgttcatcttgattagcatccagaccttggaatatttcatcaatgacagctttatctttgatattcttgatggtgtttgcaagctcctttgtaagcagctgcttcagctcacccttagagagggtgtcaaaatgccccttccgaactgagtattggtggaagatattgacaattccctccagatgctcttcaagttttgtatcttcccagcctaatgtaacccctcaatgcacaggaatgtggagcacagcaaaaagccagcaaggcatc

SEQ ID NO: 1070 - DNA, 293 bp, Homo Sapiens
caggctgcctgggccacagcaattcccaggttggaaaaacttcagctaatgctagctcgagagactctgcaactcatgagagcgaaagagttgtgtttaaatcacaaaagagctgaaattcagggaaagatggaagatcttccagaacaagaaaaaaatacaaatgttgtagatgaattagaaatacaattttactgcaaattcaattagaactacatgacagttaaatttgagacactacaatcacaagactccccccttcttacacagttggaatctcatgtaggtcttaa

SEQ ID NO: 1071 - DNA, 377 bp, Homo Sapiens
aggatgagactctgggggccctagccggggtccacgggagggctgtccttggggactctaggatggcttcgttctggcccggctcacttctggagctgttgagaccccaagacaaaagggcctgagggatttctcattgacaagagttcgtgcgggaaaaccacctgacccctagggatttgtcatcttaagactcaaaggcttaataccaggaaccaccttggcaagatatttacccaccggccatctctgtttactcatgaatgttaaatgttaaaacgcagcgctctaaccctgcatattatttacttgcaaatgtctgtaatctgtaattgtaatgcctcccatggaataaattctctttttcagtataatct

SEQ ID NO: 1072 - DNA, 527 bp, Homo Sapiens
  misc_feature (129)..(167): n is a, c, g, or t
atgagaaagaaaatatatctgtattgaaagaattataagccaaagtgcgtctttcttgttttgtccatatacacacattgcaccatacataaataattacattgtaaaaatgactccataattacaagnnnnnnnnnnnnnnnnnnnnnnnnnnnnnnnnnnnnnnntaaatctaggtagatgatatctggggggttttgtccgtgggggctgtgtctctgggcatcggcccctctcgaggccggcaggtggcggtggccgcggcctcccacaccgcccctcccgccggggccgccactatctggggttgttgaggaggatctccagccagcaggggcaggaggtgatgaactgccgggagtagcagggcccccagcccttggcgaagctgatgcggacgctgttggggtcgtaggggccgtcggcggcgtcgggctcgggcgcgtgctgcaggcccgagcgctcgaagtcgaacaccttgatggagtagccggggggcacaatgcgcacgaccagggcgcggccgc

SEQ ID NO: 1073 - DNA, 645 bp, Homo Sapiens
tatgcaggctttatctttggctaccaagatagctccagcttctacgtggtcatgtggaagcagacggagcagacatattggcaagccaccccattccgagcagttgcagaacctggcattcagctcaaggctgtgaagtctaagacaggtccaggggagcatctccggaactccctgtggcacacgggggacaccagtgaccaggtcaggctgctgtggaaggactccaggaatgtgggctggaaggacaaggtgtcctaccgctggttcctacagcacaggccccaggtgggctacatcagggtacgattttatgaaggctctgagttggtggctgactctggcgtcaccatagacaccacaatgcgtggaggccgacttggcgttttctgcttctctcaagaaaacatcatctggtccaacctcaagtatcgctgcaatgacaccatccctgaggacttccaagagtttcaaacccagaatttcgaccgcttcgataattaaaccaaggaagcaatctgtaactgcttttcggaacactaaaaccatatatattttaacttcaattttctttagcttttaccaacccaaatatatcaaaacgttttatgtgaatgtggcaataaaggagaagagatcattttt

SEQ ID NO: 1074 - DNA, 361 bp, Homo Sapiens
agtttgccttttattttaccaaaaataacaacaataaagtcttccctctgtttcataaaaataaattttccaaccctccccctatcccagaaatcagcccttgccacagcctagaatccatcatgcaagtcacagcactctgggaaaagctcctactaccctcgctccacagcctctggcaaagctgccaggccactctggaggcggcagaggcagaagtcccaggcccagctggctgggcccaagagctccatctgtttccccaaagtacaggcagcttctaggccattgagtggggcatgatattggatgcttggctcaggaaacaaccccagccatgccatgggcctatcgggacggg

SEQ ID NO: 1075 - DNA, 325 bp, Homo Sapiens
gcgccgggttaaggcaaggcttctgcctacaagagagactaggatatgaggggtaatattagtcctgatgggccaaaccaactggagggatatagggaggtgccaagttgcagaggtatcatgttgcccagcacttgatctagaatcctagattctaggtctgggtagtagcagatttactaggtggtagatctgaggctacctatagaacttcctttgcagtcataattagctcagaaactacaaaagggcttgctcttgaaaatggagcctttgtctatttcatgctgttataacagaatgccacagactgcataatataaca

SEQ ID NO: 1076 - DNA, 627 bp, Homo Sapiens
ccacgcgtccgcccacgcgtccgaaaaaaggaacatgcttttcatacctagagtcctaatttcttcatcatgaaggttgctattcaaattgatcaatcattttaattttacaaatggctcaaaaattctgttcagtaaatgtctttgtgactggcaaatggcataaattatgtttaagattatgaacttttctgacagttgcagccaatgttttccctacgataccagatttccatcttggggcatattggattgttgtatttaagacagtcagaataatgatagtgtgtggtctccagaggtagtcagaatcctgctattgagttcttcttatatcttccttttcaattttttattaccattttgtttgtttagactacactttgtagggattgaggggcaaaatatctcttggagtggaattcctgtgttttgagccttacaaccaggaaatatgagctatactagatagcctcatgatagcatttacgataagaactttatctcgtgtgttcatgtaattttttgagtaggaactgttttatcttgaatattgtagctaactatatatagcagaactgcctcagtctttttaagaaggaaataaataatatatgtagtatgaaa

SEQ ID NO: 1077 - DNA, 509 bp, Homo Sapiens
ggtaggagatgaagttttttgtcttttattatgtttttcttggtacacaactgttttcacattctgccactaacagcccatctgatctcaattccttctgtattttacaaggatgaagtggccccaagccttcccactccatttctttccttcctctccactagtctaaggaacagagttcacactgttattaccaagagttctgcggtttagatattatctgttctctaggcctactcccactttcatccacagttggcatttctactgctgcctggaaggacatcatagttgctatcaaggctggttttacaaatccacagagcagggtattcaaaaaatgcccatgacatttagggtgaataaactattatcacagctcccaggagaagaaaattatcatgaagctccttacccctctcatacacaggctcagtctctttatgagtattcctgctgagctgttcttgcagaccctcgtatgtattccaaaattcttcatcttggga

SEQ ID NO: 1078 - DNA, 737 bp, Homo Sapiens
gtccttgttgatgtccaccgcaatgattctggctgctccagctgctttacagcccataacagcagataggccgacccctcccaggccaaacacagcacaggtagagcctggggtgaccttggcaacgttaactgcagacccataaccagtcgagaatccacagccaatgaggcagactttctccaggggcgaggctgcatcaattttggccactgcattctcatccaccaccgtgtactgggagaaggtgctggtgccaaggaagtggtgaatgggcttccccctgcaggtgaacctcctggtgccatcctgcagggtcccccgaggattgcctagatcatttttcaagcagtagttgctctccgggtttttacaaactctgcattttccacactgaggagtaaagagcgggatgactttatcacctggtttgactgtagtcaccccttctccaacactctccacgatgccggctgcctcatggcctaaaatcacaggaaggggggtcaccaggttgccactaaccacgtggtcatctgtgcgacagattcctacagccaccatcttaatgcgaacttcataagccttaggaggtgcaacctccacatcctcaatggaaaagggtttctttacctcccatagcacagctgctttgcatttgattacttttcctgcctgtgctcatgtcgtttctgtcttctctgcccaccagcagactgtgagtctttgtggatttc

SEQ ID NO: 1079 - DNA, 1062 bp, Homo Sapiens
  misc_feature (918)..(918): n is a, c, g, or t
  misc_feature (935)..(935): n is a, c, g, or t
  misc_feature (950)..(953): n is a, c, g, or t
ggaacgctcgcatttagttcccccgcaccggtccggaatatcccagatggaagagcctgctacggtggactgtgagactcagtgcactgtcctcctcccagcgaccccacgctggaccccctgccggaccctccacccttcggcccccaagcttcccaggggcttcctttggactggactgtccctgctcatccattctcctgccacccccagacctcctcagctccaggttgccacctcctctcgccagagtgatgaggtcccggcttctgctctccgtggcccatctgcccacaattcgggagaccacggaggagatgctgcttgggggtcctggacaggagcccccaccctctcctagcctggatgactacgtgaggtctatatctcgactggcacagcccacctctgtgctggacaaggccacggcccagggccaacccaggccaccccacaggccagcccaggcctgccggaagggccgccctgctgtgtccctgcgagacatcaccgcacgtttcagtggccagcagcccacactgcccatggctgatactgtggaccccctggactggctttttggggagtcccaggaaaagcagccaagccagagggacctgccaaggaggactggcccctctgctggcctctggggtccacatagacagatggacagcagcaagcccatgggggcccccagagggaggctctgtgaagccaggatgcctgggcattccctggcaagaccaccgcaggatgggcagcagagctctgacctaagaagctggacttttgggcagtctgcccaagccatggcctcccgccaccgcccccgcccaagaagtgtcctcagaacactctactcgaacctcccggtgatccatgaactctgacccctccccagtaaaggcttctgtnaagaagcatggctgggnctgcatctcctccgnnnnccctccatggggggcacttggcccctgcaaggttctcttgaaagggaaattgctttttctgcagaagccccctgtcttgggccagtttcacaggggagacggacccccc

SEQ ID NO: 1080 - DNA, 615 bp, Homo Sapiens
gtggatcaagccatgtcatgggccggggtccagctcgggttttcatggcttaatcccgtatggcagcccgttgactgggccgctggggccagggctgggaccgcggcccggaccgccgcctccaccaccaccgccaccgcccgcaccgcccgggaagccgggcagcggctccatccaggagcgcacgtagcggccgggctcggaggcagaggcggccaggggcggcgggggaacgtacgggtggtagagcccgctcatcgccgccgctgccgggggctgggagggcaccgcggaccacgaggcagagaacacggccgatctgggggcaaaactacacgaggcgaactcggcggcggtggcggccgggccatcagccacacctgcaggccggccctgcgcgcctggccccggcggcccgaagcgcgccgcgaacacctcgtcgccctcatggcctataagcgagtccacgtagtagttgctgagggtgccactggaagacattttgaggcgtcccgcactcccacccaacattacactgtccgccgccgagcagctccccgccggcgcccgagccaccgactagttcgcaggctgcagcctccaccattggtcgcg

SEQ ID NO: 1081 - DNA, 607 bp, Homo Sapiens
tcccagaactcgatgacaggagaggtggcattctcagaggtaccattcagggagccgttggtcttctggaactccatacagtgttctgtgttccactcatggtagcagccgccccagggcaggtcgatggtgaagctgctgaagaggtagaacagggcccaggccaacacaatgatgtagtagacgttgaggaggatgacgatcatctgggaggcatagccaatgcctgcggggaaacctcaaagatggggcagatcttcctccaggctgtgacgcctccctggctagtgtactggcctagtgctgtctccagaaggaagacaggaatgccacaggtaaagaggaagacgaggtaggggatgaagaaggcacctcccccatttttgtagcagagatagggaaacctccagacgttgcctaagccaatgatctccccagccactgacagcacaaactccatcttgttgttccagtgcccccgctccagggtgccatcttcctccttcttttccatgactggatacactggttttgtctctccattactgcttgtgcctgagaccctgctatccatcccaccttagtgaagctgctgccagaggtccag

SEQ ID NO: 1082 - DNA, 651 bp, Homo Sapiens
gtttcggcggcttcaggtgctcggggaggaggcagtgacggccggtgagattggaagtggcggcggcggcaggcggcagaggggagtccgaggttatgcgtctcaatgatcccgcggaaacgctacgggtctaagaacacggatcagggtgtctacctgggtctctcaaagacacaggtcctgtccccttgcaactgctggcagtagcagcagcgacatcgcccctctgcccgccacgcagtggccgtcgtattctccttattgaccatgttgctgctgtgcgagtaccccgaggtaggtttcctggtgcatggtgcctgacacgtgatggtcctgctacaaaggcgatcagaaactgcggcttcaccgtaatcaacatgagtgccacagcataggcaggtggcacgaccacgtacgaacagcgacagtgacaaaacccgacacaaacaactgagacgcagaatgccagcaacaagcgcgccacaacgcaaccacacaaccacacacaacgcatacctgggacacacgaaccgggaagaacagacatgacccaacgacctggagcacacacacccgccaaccgaccaccacacaaaaggacctggaataaacaagaaaaacaggacaaaaaccagcaaaccccaccgccaa

SEQ ID NO: 1083 - DNA, 483 bp, Homo Sapiens
gcaggctggtacggtcggagtgtatggatcgcgcgctgccggtcctgcgctgctcagcgggaggggctggaccccgcgttcctcctccctgccggtccccatccttaaagcgagagtctggacgccccgcctgtgggagagagcgccgggatccggacggggagcaaccggggcaggccgtgccggctgaggaggtcctgaggctacagagctgccgcggctggcacacgagcgcctcggcactaaccgagtgttcgcgggggctgtgaggggagggccccgggcgccattgctggcggtgggagcgccgcccggtctcagcccgccctcggctgctctcctcctccggctgggaggggccgtagctcggggccgtcgccagccccggcccgggctcgagaatcaagggcctcggccgccgtcccgcagctcagtccatcgcccttgccgggcagcccgggcagagaccatgtttgacaagac

SEQ ID NO: 1084 - DNA, 802 bp, Homo Sapiens
ggcatgtggtctgcagaagaggaggacgtggctgggtggcagggctggtctccaaggacgagtaagatcctgcagctgcaggcgtcaggaagtctcctggggctatcagatggctccttcttgtagcagcagctgtggggtccactggccctgagccctcagaggggcggccgtgggggacctcctgtcttttgccttgcaagggcctcagttgtgctttttccctctaggcagccatgggtgccaggcagtgctgagagcagtggggcatggctgcagccctgcaggtcctgccccgcttggcccgagcccccttgcatccactcctctggcggggctcagtggcccgtctggccagcagcatggccttggcagagcaggccaggcagctgtttgagagtgctgtaggtgcagtgctgccgggccccatgctgcaccgggcactatccttggaccctggtggcagacagctgaaggtgcgggaccggaactttcagctgaggcaaaacctctacctggtgggctttggcaaggctgtgctgggtatggcagctgcagctgaggaactactgggccagcatcttgtgcagggcgtgatcagcgttcccaaggggatccgtgctgccatggagcgtgccggcaagcaggagatgctgctgaagccacatagccgtgtccaggtattcgagggtgcggaggacaacctcccggaccgcgatgcgctgcgggctgcaactggccatccagcaactggctgagggactcacagtgatgacctgctgctcgtgctgatctcaggtgg

SEQ ID NO: 1085 - DNA, 903 bp, Homo Sapiens
ggagatcttaaatcccacggtgccttgtccggtgctcctggcaggcgcaggtgaccgggggtggaagtctttgtgccccgtgcaaagcggcctccttcctcaggcacctggggcagctccgccaggacgcgatccctccgcacgggtgccagaatgttcatcctgcctgcggccttgcagggcgccctgagaaggcgccgaggccggatccgcgtcagcgacccgggcgcgtggagacccgacgatcacccgcggccggggtgtcccgactacaactcggggccacggggaccctacgggagtccgcggtctcggagacgctacgaccaccgcgggccacggagatgaaacaatcacccggggccgcggcgagcccaaaatcacccgggccctgggcgtcccgaagatgactctggggcgaggagactcttcggccgccaattgggggcggggagtcccgtctggtgggggccgggcccgcgcagaccctacgattacgcggggccggatagttcctacgattacgcggggccggatggttcctacaataacccggggccgcggagacccgacgtcatctcggggctgaggctgccctaccattacagagcggcccgggggcgcggagcggccccgccacacggggtcagtgtgggcaggggcggcgctgccaaggcccgcaggccgctggaggagggggcgaggggcccagtccggctacagggcctcgagtcccactccgctcgggctccgccaacgctgtaacacgatccccggaaattcctggagaagggccgccccccgcccctctcctggcggctccaggcctcgctgcccgccctcgccaccccctcctctccacccttctgcgttgccccgctcaatcccgggaattccggaccc

SEQ ID NO: 1086 - DNA, 913 bp, Homo Sapiens
cgcgatggagggaggaggaggtatacccctagaaacacttaaagaagaaagtcagtcaagacatgttctacctgcaagttttgaagtcaacagtttgcagaaaagcaactgggggttcttacttactgggcttgtgggtggcaccctggtggctgtgtacgctgtagccacgccgtttgtaacgccagcccttcgaaaagtctgtttgccatttgtacctgcaactatgaagcagattgaaaatgttgtgaaaatgttgcgatgccgaagaggatcccttgtggacatcggtagtggggacggacgcattgtcatagcggctgcgaagaaagggttcacagcagttggttatgaattaaacccatggctagtttggtattccagataccgcgcttggcgagaaggtgtgcatggatctgccaaattttatatttcagatttgtggaaggttactttttcgcagtactcgaacgttgttattttcggtgtgcctcagatgatgctgcagttggagaagaaacttgaacgtgaacttgaggatgatgcacgagttattgcttgccggttccctttcccacattggactccagaccacgtcacgggggagggggatagacacagtgtgggcatatgatgcaagcacttttagaggccgtgaaaagaggccctgtacatcgatgcattgccagctgcccattcaagcataaactttactgggagtgtatttctgaaatatcgtagtcttcctgatcttgtagacgacttacagtatgtggtcattagcacaggcagcataattgtcattggacaggaatgaccacactactattacgttccttacactgttggacgaaaacaagaagcaaacacaggtacaattaacaatccgcatatgatgctaatgtcctcaaca

SEQ ID NO: 1087 - DNA, 643 bp, Homo Sapiens
tcaggtttctggcaaagaagagtccttttagcacatcgctgaaaagatggcactgtccagggcccatgtagctggcaagctgcaaaaggcctgtgatcaggaaagatgtcccacagggaccacatccaccccaagccccactgccctccagggccaggattcaggcctctgaggagcccacggggcaaagctgctgggccagtggcactctgtgtgggaaaatggcagaaagatggagaggcatgggggcccaaaggggagcgtggggaggggctgaggataccccaaagtccaggctaattagaggatgtgccaggcgcagtggcctggatgcacagtgcctgatgggagtaggctccagacaggaggagtgggacagacagcagctggacttgaaggtttgatgccaaagcagacattttcctaacacccacctgctgctgtatgaatagctgtgtatctgtttttccataagattttgataatatatacaaacctttagctgtgaattgctgtgccccacctgttgtcctgaactgtgagtcctgatcctaaccctgggctccctggaggactctagaagctcaggttccctgccacactatttgagttggccaagaaataaattcacatcctcagaaag

SEQ ID NO: 1088 - DNA, 354 bp, Homo Sapiens
gcggccgcgctgctcctgctgctgctggcgctgtacaccgcgcgtgtggacgggtccaaatgcaagtgctcccggaaggacccaagatccgctacagcgacgtgaagaagctggaaatgaagccaaagtacccgcactgcgaggagaagatggttatcatcaccaccaagagcgtgtccaggtaccgaggtcaggagcactgcctgcaccccaagctgcagagcaccaagcgcttcatcaagtggtacaacgcctggaacgagaagcgcagggtctacgaagaatagggtgaaaaacctcagaagggaaaactccaaaccagttgggagacttgtgcaaaggactttgcagatt

SEQ ID NO: 1089 - DNA, 493 bp, Homo Sapiens
gcacaccagacagtgacactgccccacaaagggcctgggcccgtgggtgctgctgcctggcatgacatctctccagacttctggcttaaaaccaactttccatccgagaagcctcctcagtagttactctgctcatgagacagatctgggctccaagccaggaaaggtgaacagaaaccacaagtgtccagccctcggtgctggagtggacgttaattgtcagccaccagactgtcccggcacctacagagaatgtttcacagttctggcatttaaatcctttgatagtggattgggctgctgttagccttagtttcagtgctttacaagtctcgcttattatctcattggtatttaggtatacaaaacagttgattattcaccacgccaatatctgggtctctgtatctcatgtagaacataagaaaatgggaactaatagggaaatttatttatagcatgaaaacaaacctggtggctggagtctgcttgt

SEQ ID NO: 1090 - DNA, 484 bp, Homo Sapiens
gtgccttcctgaccttctctctccttccctcccctctcttttcttgccaagtttgctttggtttctgagcagcccagagaggaggagggttcgtccccagggagagcccagggctggagtccccaatccctgtgctatgggcacaaagagacttcagctcttcctgttgccttggctttttcctgagcaaaaacacaacaaacaaaaaggccagagaagagcacagactctgtccctctcacaactctccagaagagaccccctgattcttcacaccaccggatgccactccagccagcaggattgctacacacaccctctgttctcagaagtcatctgcctgggcagccgcctctcagattcctgtcttcgtttcagacacttttctttgaagcatgcccatgtccaccagccaacgtgcccccgtgttcccccccatcagccaagtgattggggctgaaccagactttaaaagagaggaaaa

SEQ ID NO: 1091 - DNA, 398 bp, Homo Sapiens
aaattgattcttgttgctatgcagaagtctcatttgtgaatgaccttggtaacagaacagttggcttttggaagtctgaaggtgagcattcagttaggtgggtggagcaagatcatcctagaatgaggctgctcttggcaagagtggatcttataggcacagcagctgatgcctttcttcatctggggcaactctggtgaaggttgtcctgcctgtcacaggtgctgagtagagagaagtggtggcagtgggatttcctcagtaatagtcctgtaaaggtacgtgtttgtcctggctacttgtgctcttcctggcaggaaggcatccaaacccttatctgtgggctcctggaaattgtgtatgccatataataccctctaataaatacctctctgctt

SEQ ID NO: 1092 - DNA, 530 bp, Homo Sapiens
  misc_feature (239)..(239): n is a, c, g, or t
  misc_feature (245)..(246): n is a, c, g, or t
  misc_feature (266)..(266): n is a, c, g, or t
cacaaccaaaagaactgacgagaggaagacaaagcctcgggatcagccagagaccgagcggcacgggatgaggcacaggtcaggcctagctggatctgtggagcaaggtggtgggaagtcccgaggcctttgggcatgtggggtctgtggaaggagagggagtcacttaaaaaaatacatatactgtacacatctatatgaagcgtcctgtgttgggggagtggggtgaggtcatgggnagctgnnccactttctccttggaccancctccccgaaggctcactggtttggccagcacagggacccctgaagctggctgtcttcttctgtggagcgagggaaggtaacagtttagttccaacccatggtgggcagaggtcggtggaggtcaaaggcatggggatgcccactgctcggctacgaaatccctgtgcctggtgctggtgctcgtcatacagtctgctctgctgtcgtcttctttttcttctgtttcttctgggccggtgactcagcatctttggtctcgaggc

SEQ ID NO: 1093 - DNA, 449 bp, Homo Sapiens
cacagcagggactctcaactctcacgctcagtcgttctagtacacagcagggactctcaactctcacgctcagtcgttctagtacacagcagggactctcaactctcacgctcagtcgttctagtacacagcagggactctcaactctcacgctcagtcgttctagtacacagcagggactctcaactctcacgctcacctcgttctagtacacagcagggactctcaactctcacgctcagtcgttctagtacacagcagggactctcaactctcacgctcagacgttctagtacacagcagggattctcaactctcacgctcagacgttctagtacacagcagcggcgctgtccttgaacaaggacaaaggtcaacaaacgccccttggatgaatggctgatgggcaggcattccacactgcaggctctgtccccgcccgcgggccg

SEQ ID NO: 1094 - DNA, 411 bp, Homo Sapiens
tgatattattccttcagcgttggacttccgctgatggtacaccgtgatacaactaaaagtgcgccttcaagagatccagaaagattgcagaaaataaaagagagcctccttttagaggactcagaagaagaagaaggtgacttatgtagaatttgtcaaatggcagctgcatcatcatctaatttgctgatagagccatgcaagtgcacaggaagtttgcagtatgtccaccaagactgtatgaaaaagtggttacaggccaaaattaactctggttcttcattagaagctgtaaccacctgtgaactatgtaaagagaagttggagcttaacctggaggattttgatattcatgaactacatagagctcatgcaaatgaacaagctgagtatgagtttatcagctctggt

SEQ ID NO: 1095 - DNA, 813 bp, Homo Sapiens
tttaaatacaattaagacaaaaggactttatatcagcaggactttagggctgtggttccactgtttttatagtaaaatacactaatggtggggtagaggttggagaaggaggtggaaacatccgttacaaggcaacatgacagacagcaggaccctaactagactttaaggaattaattctattcagacggggggagccctacataattaagtttcacacttataaaattatcactctgaattcagggataagaggcatttggttgtagatacaattccatctgtagatactaactttaaatttaaagaagaaaaacattcattgcatttatattatgtgttgagtttcttacatattcctaaatccatctactaattttttgttttgatacaatttacagctatggtaagatattactagtgaattcactagtaatattactagtgaattcattggcaataggactaaagtacttactcatggttgtactaaagaagtgatgaactgcgaggcgctatccgtttaaagaggttttctacacgaatataaaggcaatctctccggtgcttaaaatgtaatccctccattcttatgctgagttactccatttattaggtggatcctggcgcttactggtggataacttacttaatctgttaatgactgtccatttcgggggaaccgtttgcctatgacttattactgtaccacgggaaagaggttgtcattgctcagttgcatttctttactctaatgggtatgcgtcatgattagggtaagctaataaagttgaacacgttccccattctgat

SEQ ID NO: 1096 - DNA, 483 bp, Homo Sapiens
ggactccacacagcactaggcgagtgggcttgaagctcctttgtgagctcgagctgctgactgccactatgggagccttgccacctccagcccctccatcccaaagacgctcctgccactggggccccaggtcctgctgtatcagttctctttggtggggggctaaggtttggggcgaggcaacctgagacaagaaaacgcagtaaacattctgattccctgtacacagatgcagcaccaggggaagggccagtggtgcaagtatttctttttaacaggtgaagtttttggaaaaagtcactctccctacccctcagtatccttaccatcaaccttggttttatccttccagtctttattatatgcttgcttttacatagttgtaataatatacacataaagtattttgtatcctgcttttatcattcaacattgtacatgttataagcattttactatattgttatatatcttcacaaagtt

SEQ ID NO: 1097 - DNA, 254 bp, Homo Sapiens
atatcgtcgacccacgcgtccgagaaaacaatggggtgagaaaaggttgtggtagaaggatgtgtttatattctgaatttctgaattcttggctattgcattcttgacaatttttcttaaaaccagagagtgaaaggcatattataaaacaatcaaatatcttttagagtatggacaactattatatatcaataaaaaattaattagaaaaaatatatcttttagagaacacaccaccttatcccacccatgat

SEQ ID NO: 1098 - DNA, 263 bp, Homo Sapiens
aaggatccccctccacacagtactaggcctcctgggcctcctgattcatcagctggaaatcattctgttttcttcctatcctgctgtcacgacagaaattcagaccacttatctttgctcctcaagacaggtttcactgtccctggtctcttactccaacatatgtgacctccacagaactacagacttccttctgaggcaaaaatctaatcatgtcactctaccaaaaaatttccatatcatcctagtgctgttgtggaggc

SEQ ID NO: 1099 - DNA, 643 bp, Homo Sapiens
  misc_feature (252)..(252): n is a, c, g, or t
tttcccagcacttaaaacaggagcctagagccccctgcccaaacaaaacaggacatctgtgaccgccctacccccacgccagccccaaactaagatatccctcacacccagcccccattacctagggacaagagtcttccccagccttgaacctaggaccaagagccacctacatccagccccaaaactggggctttcaggccagaagcatccatggccaatttcaaattgtgaacccagagacactcccantccacccttctccatgctcatccccaaactggggccttggagcaaggcactctcaaatcttgaaccctggaccaaagcttttccagaccccaccctaccttccaacccaggtcaagacattgccaaatcttgaactcagaacccaagtgttccatgcccctgtgtggatggagtcgggtatcctgactgttggacccctggtccaggtgatcccgaccctcaccagtcccatttgcctccctccagctctgcttaggcattttgcccctcaccccaatgttccacaccatcgacaaccaaggggtgaggtggggacaggcctcagcagggaatggggcgtatatgttagtgctgctgcaacaataaagcctgttgcatatctcatgccaaa

SEQ ID NO: 1100 - DNA, 1170 bp, Homo Sapiens
  misc_feature (733)..(806): n is a, c, g, or t
  misc_feature (1069)..(1069): n is a, c, g, or t
atgaactacaagcgagtctccaacacgcccctgaggacggttgacggctcccccatgatgaaggcagccatgtactcggttgagatcactgtggagaaggacaaggtgacaggggagaccaggtgctgtccggcaccacgctgctccctcggcagccgctccctctgggcatcaaagtctacgaggacgagaccaaagtggtccatgctgtggacggcaccgccgagaacgggatccaccccctgagctcctccgaggtggacgaactcatccacaaagcggacgaggtcacgctgagcgaggcagggtccacggccggggcggcagagacccggggggctgtggagggggcagcccggaccacgccctcccggcgggagatcaccggtgtgcaggcacagccaggcgaggccacgtccggcccgccggggatccagcccggccaggagcccccggtcacaatgatcttcatgggttaccagaacgtggaggatgaggccgagaccaagaaggtgctgggccttcaagataccatcacggcggagctggtggtcatcgaagacgcggctgagcccaaggagcctgcaccacccaacggcagtgctgccgagcctcccacggaggccgcctccagggaagagaatcaggcggggcccgaggccaccaccagcgacccccaggacctcgacatgaagaagcaccgttgtaaatgctgctccatcatgtgagccgnnnnnnnnnnnnnnnnnnnnnnnnnnnnnnnnnnnnnnnnnnnnnnnnnnnnnnnnnnnnnnnnnnnnnnnnnntccacccacagcctcacgggtccaggacttggcgtgttgttacatgttccttccgagttttctttcgctggaaagagggacaggggcccccacccgtcaccacgccccaacactcccccctaaccagagccgtgcacttgtgcctggtaggagagagacaggacagaccccgcttttcccgagacaaggaccccccatgtcacggcagcttcacagacgcggctcgcgcccaccgggggtcctgggcgggtgggacccgcggncctccacgcggcccaggccagcctggcaccctctgggcctcctacctgtgccttttctctgaggggacaccccgccagagaggggccccggggagcgcggg

SEQ ID NO: 1101 - DNA, 317 bp, Homo Sapiens
gctctggaaggggacaaaggttggacaagcaccctgacaaagtagccactacccaggctcagggatcacatattccccagtgtaagccactcccagccctgagctgtaggagcagagatgcacaaaggcccctccccactgctgctctgtcccaggccaaggccaggtggtggctatgcagtggggtgcccagctagtagcatagaaggctaaagccaaccccatctctgaataccccagtgggcccaaggataaaggagccttcctcaaaagcagttacaggccaagcatggtggctcacacctgtagtctcagca

SEQ ID NO: 1102 - DNA, 1078 bp, Homo Sapiens
  misc_feature (751)..(751): n is a, c, g, or t
tgccctttcccccggccagagaatgttgttttagtattttaagaaacggtttccttatttgcgcccacccgaaagtttgtgttatcccactcttccgcgatcccttggtatctcttgtgcgccccgggtttgtcaatctcgttctcgggcttgccgcgtccccctcaaaactttgggcggctgtggatcctggggttagaggggcatcttctctgtgcccccacagccaaccgttggcggttcattggggcctcagggcgttcctgtagagctgcgacagggtgttttttgggtccttagagaagtcatggtttttttcattccacgcgtattccttttgacccctttagggcgtgtgattgccgccgtggcgagccccccgctcggggggggcttcccatccaggctctgtgcaggtcccggggatttggtattgggctccgtcggccccttgtggtagcccccgtcacgggttcggagccccttgccggggacgggcgcggggacaagctgggctgcgagggcgccagggtcaagccgggcgcggagcagagcccgagcgagctgcgctgcaggcgcgtcggggtcgtcgtccaggcccagagccgcatcagagttgcggggggcgccccagacgcgcagcagctgcgccaggacgcgcgcatgctgatcctcagcctcctgcgcctcggcccgcgcccgctcctgacgttcggcctccagcagatgcgccagcgcccgcgccagctcntgcaccgcccccgccgcctcacctcggggcactgaccgccggaagcggcgaggagcgccagtctcagccaagggcggagacgctgcgcttaggccgcggggctcctttaccggccgcgcgcagagcgcggggggcggccgaaacaggccgagcagcagcagcaccaaaaggccgacgcccccggcccgcggcccccagagcagcggcgaccccgccatgctgccccagcgagccgggctccggacgggcggactggctggcaagtgcgcagtgccggggcgagctggcgagactgcggcgctctgcggctgatcccgggaattccgg

SEQ ID NO: 1103 - DNA, 655 bp, Homo Sapiens
ggcctccatcagcaactagggatcgtctgcttcctaaagttcccctgcatgccagggggtctgtacggcttttacacccctgaaggacaggcagacccccactttaccccatcatcttttttcctaagcatctgaggtcagaattgggggaggacagttgagtgagcatggcaaaagcgactggcccacaccgttaagcaaggcgcgtttcattttgagtggctagtggctactcatggctcaaccaaatttgtaatgacatcagtttaggcattggtctacagcctcattcctgacgctgtttattcagctttgggactccttgaaatagcagctgtacccacaggaccttttacctggtgttgcatggctcacagttcacaccatcatgatgacattccttcatgcttccgctcagaggagagggagtgacaacctagccagcagtgggctcagcctcactgcttacctcagcctgcagactgtcaccagcagctaggactgcttggggtccctgctcctcctgcttgcccaccacttgggtgagcacactcactgctattaatagatcccaggagtcttctcatatcccttaagccaatctgcatgggcccctcctctttcttttccagaaagccatctattagtcccctat

SEQ ID NO: 1104 - DNA, 1042 bp, Homo Sapiens
tgggctcagtgctcctcgtctgtaaaatggggacgtgataatccctgcctcccaggttgcaagtcctcaaaagatgcttgtttaatccaggcaggtatagttgacagtccacagtgtggccacataagaaggtgattcccaggacggtgtcagggtcccgggagactcaagtgtctgatcactcaactgccgctgctgctgctttccccatctggtaggccttggacttgcctcctctccctggtgcatagcttccctggagactgtttcgggctggttcaggtccagcatggtgaaagttggcgtcaatgggaacaggttggaagggagcacggggagactctgtggcccgtctttgggcaggaagagccaggacgcacttcacactttgcaagaccaagcacatccactgctgtgtgagtcacactccttcggggcgctgtcccagaaaggggatgaaagtgagagcttgggtcccaccccaccagcttactctccaagccgaggaaatgagaccctcccctgcagaaagcgtttaaggaaagcatttcctggtagagtgaggaagagaaaccagctggacaagtgtcacctgcagccgtagagaaaggcccaaggccgccctccccagaggtgaacctgggtgaggatgacttcaagtgaggacgtggagcctgctggttgagatctcccggaagctgcagtaggtggccggcagggagctcaggggcagtgaggaacagagctgtcttccatggcctcctttttgcgaagatcaaagtgtgtgatttctctcccttccagattttcctgtaaggagtctgggtgccaccagatctggatgagactgtggttctcaggactcatcaccagtgcaatgctggttatcacagactcgtccagctgtatgatgagcttcgtgaaggctctgtgatgatcttgaccagtcagacatcacgccacccgtatgtgaaaggagcaaccacaagtcgagtaatgtgtccagtagccatgcagcatcccgtatagcgagcgtacactt

SEQ ID NO: 1105 - DNA, 565 bp, Homo Sapiens
tccgtacagtaactaggatctcacaatcgtggtgctgctgaccacggggccggggtgaattctttgtggggtggtacaggtgggcaccgtgctgcatgtcaccaggatgtcaggcagcatcccggcctccactgtcccgcatcctgacaaccaagtgtctccagacactgccaaatgcccccagggtggtgccaaatcagacaaagcactgagctttggttccagccaactccgatgagagaaatgactactccggggagagaaaaggagcctggagaagctcctcttcagcacacatctctacacccttgccaaaatttactgtgtagtctgtctttgaccttgtaaaaattcctgcacgtttacacaaagtgctgatggaagtaaagccatctagtcagcactgtcaagttgatacctccatccacagacagcgtgcgccagcagccgggctgtgcacacaggcagcactgttggtaaaataaaaatctgggaaactaagcaacgcccagctgctggctgtgaggagtgtccgtatccacaggaaggggtagtgcgcactatg

SEQ ID NO: 1106 - DNA, 841 bp, Homo Sapiens
tctgccattacctgaccagcgccacagccggtctctctgcaggcgccgggagaagtgagccagagcaatttctgcttttcacagggcgggtttctcaacggtgacttgtgggcagtgccttctgctgagcgagtcatggcccgaaggcagaactaactgtgcctgctagtcttcactctcaggatgcagccgaggtgggcccaaggggccgacgatgtggcttggagtccgtgctgacccttcgtgctctgttcaagccttgagggtcaagaaaactctttcacaatcaacagtgttgacatgaagagcctgccggactggacggtgcaaaatgggaatgaacctgaccctgcagtgcttcgcggatgtcagcaccacctctcacgtcaagcctcagcaccagatgctgttctataatggatgacgtgctgttttacaacatctcctccatgaagagcacagagagttattttattcctgaagtccggatctagtgactcagggacagtataaatgtactgtgattgtgaacaacaaagagaaaaccactgcagagtaccaggtgttggtggaaggagtgcccagtcccagggtgacactggacaacgaaagaggccatccaaggtgggatcgtgagggtcaactgttctgtcccagaggaaaaggccccaatacacttcacaatttgaacacaagttgaactacttgaaagcctggtcaagctgaacagagagaagaattctcgagaccagagttacgtgatactggaattccccgttgaggaacagggaccgcgttttatccttccggatgtcaggctaggatcctttctgggaatcca

SEQ ID NO: 1107 - DNA, 450 bp, Homo Sapiens
gagccaacacccttctgatggaaggtgggagccaacacccttctgatggaaggcgggattcccgcttctgaaactccccctggagtctcactcccacacatgcccatagctagcattcaacagagaactctgtcttaagcttcaactgtgaaaatgatgacgggcttgtagcacctcagcttctttcctcgcccccttttatctgaatcctatcaattattctgatgctgggacaggtgagaagaaactgtgaagtatatgagcctttgaaagttccctgaagtttctcagttcaggaacattctcattatatgtggtctccgctgtttgaacagccttctagctaaaaaattccaaagcctttatttgggagtcttagcttgcaagcttgtggaaggatttagcttaacaactgtcactcctgaaaagcaatctctgttccatcaaggt

SEQ ID NO: 1108 - DNA, 445 bp, Homo Sapiens
agcagagccctccagccgctcaccccgcgtgccaccccagcgaccctcagccgctctctgcccttctctcggccccgcgcccgccctcgcggcccctctgcccaatgaaactggccgcgatgatcaagaagatgtgcccgagcgactcggagctgagtatcccggccaagaactgctatcgcatggtcatcctcggctcgtccaaggtgggcaagacggccatcgtgtcgcgcttcctcaccggccgcttcgaggacgcctacacgcctaccatcgaggacttccaccgcaagttctactccatccgcggcgaggtctaccagctcgacatcctcgacacgtccggcaaccacccgttccccgccatgcggcgcctctccatcctcacaggagacgttttcatcctggtgttcagtctggacaaccgcgactccttcgaggaggt

SEQ ID NO: 1109 - DNA, 347 bp, Homo Sapiens
aacagcactagggacacacgtcctggatggcggatgagcctcttcgagctagagaaaaatagataagcccagcagccccagaagatggtctgaagcagaggcatctcctcaccacatgacaagttgcttctctcacagcagtggctcttagagctcagattgtgtttatgacccaaaaacacgacaagaatctcctgactggtatttagagggtgatttggcaaaaaataagaaaagtctttaatatagtgcctgtctccaactttccttggttctacttctgtgccctgtctctagttgtttcgggtttgatagtctgacatgacctgggtttccttccgcctgcc

SEQ ID NO: 1110 - DNA, 1146 bp, Homo Sapiens
ggtacggcctggaagttaagggatcgcgcggctcgatctcgtggactcgtcaccatgcccctccccctcccgccgccgtcacccaggaaaccggacgcaatcgccggccgacctgaagctggtttcatggcagcctcaaagaaggcagatttggggccattggtgggggcggtggaccaggcaccagttcgacgcgctttttggtttgtcaattcaaaaacagctgaactacttagtcatcatcaagtagaaataacaacaacgagttcccaagagaaggatgggtggaacaggaccctaaggacaattctacattctgtctatgagtgtatagagaaacacatgtgagaaacttggacagctcaatattgatatttccaacataaacagctatcggctgtcagcaaccagagggaaaccactgtagctctgggacaagataactggagagcctctctacaatgctgtggtgtggcttgatctaagaacccagtcgtaccgcttgagagtcttacgtaacaagaattccaggaaataataacctttgtcaagtccaagacaggcctttccacttagcacttacttcagcttgcagttgaaacttcgttggcctccttgcacaatgtgagaacacgttcaacaaggccgctcgacgacacaacgaggctcttttttgggactattgattcatggcttactctgcgcagtttgaccacggaggacgctccaatgcgagcgtgtccacttgtacacgattgtacacctatatgcatcgctaatgactatgccttctcaaaccattcactgctttggcactgctcgattacaccccacttctggcggaacttttctcgggcaattcctaatgggcaaatttctgtcccacagactggttccctgaggttctttctggacgcactcctaactgggccctagattgaacagcctgtggggacccttcgaaacagcgtgactgccacctactcctgcccgcgctacaaggccgcacccaggtcttgcttcgcacttgcggctgcgcccaaacatgttgccttctcaggcactttggcccccaccccacacctccaccccactgtgcacccaccgaatcgctacctctccgtgtgccagaccagcgtgcactcc

SEQ ID NO: 1111 - DNA, 376 bp, Homo Sapiens
gcgtcagcctccaactccagctggaagagtcggaatccactctgtgagttcctggggttgaccaggacgcagtcccaggtgcggttgggagtgttctggaacagaatcagctgcccttcctcccgaactcggtcactcgaggtgtagtccgccacagccacctccttcacccggaatgggttagagaacaagttggtgacgccactgaaggtattgaccaggcggccaaagaactgcatcttctgcggggcaggtggggaggccccaccgtcttcccccctctgtcttacacatcaggacaatcacacaggctctggtgtcagattccagcttcaacctcatcggtgtgacctcaagcaactcatcctagttactg

SEQ ID NO: 1112 - DNA, 1133 bp, Homo Sapiens
gaaggagctctcttcttgcttggcagctggaccaagggagccagtcttgggcgctggagggcctgtcctgaccatggtccctgcctggctgtggctgctttgtgtctccgtcccccaggctctccccaaggcccagcctgcagagctgtctgtggaagttccagaaaactatggtggaaatttccctttatacctgaccaagttgccgctgccccgtgagggggctgaaggccagatcgtgctgtcaggggactcaggcaaggcaactgagggcccatttgctatggatccagattctggcttcctgctggtgaccagggccctggaccgagaggagcaggcagagtaccagctacaggtcaccctggagatgcaggatggacatgtcttgtggggtccacagcctgtgcttgtgcacgtgaaggatgagaatgaccaggtgccccatttctctcaagccatctacagagctcggctgagccggggtaccaggcctggcatccccttcctcttccttgaggcttcagaccgggatgagccaggcacagccaactcggatcttcgattccacatcctgagccaggctccagcccagccttccccagacatgttccagctggagcctcggctgggggctctggccctcagccccaaggggagcaccaggccttgaaccaacgccctggagaggactaccaagctgtgggcacagggtccagggaccatgggtgaacaaggactcagggcaacaaggccagtggccacacaggaggaaaaggcatccatccataggagaggcacctgagttggttccctaaggagcaatccagcacctgggcagaagaatctcaaaagtcgtataccccgcagccaaaatgggccccaggaaccacaggaagcgggggagatgagccaataaaacacgtgagacacccaacccaccggggacccttggaaagtaaacgcacaaaggaaaaccaatgggagaaccaagaaaggcgggcacataagacaacgaagtgataccggcccacggaaggggaatacaacttaacctgggagaagaaagcggaccgatcgggacagcaaagcagtaatagaggtacaagcctgagggcaatagagcaccagag

SEQ ID NO: 1113 - DNA, 855 bp, Homo Sapiens
cctgtacttgacccttcctcagttggatcacttgtctgtgtgctgatggcccagctgcaggcgcggtgtgtccagggccagcagaggtcaggctgtagatggtgtcattctggtgaaaaggcattcctcacacgggaaaaaccagttgttcaggtcactaatggcctgtatgtaggactgagaattcctggtccacctggatgctgccctgatggctgaaggcacacttcatgatggtgtccagggtcatcaaggagacgtgctgaaagacctccagaggggaatcctggccaaggagctcttcccatttgtccagcatcactcgtacagagtctgccatgagccccacatagggcttcaggatgtcatagtggaaggctggggtcagcatccgtcgatgctggaaccatgtctgcccattcaacaggagcaagccgtacccaatccatggagccaggaatctgtaggaaccatgggatttcgggtctgatctccccagaatcaccttcatatagtcagggtcatagagctggacacgaactttgcctccccatagccaatgaggacaggcacttgggaatgtctccacccatttctgaatccgttgtagctcctggtcctgttggagctcctggatgtgcccgaagagccagtgggagggagggcacgggaactgctggagggctttgagcagccactgcctgtgcaggtagagctgaactgccttgatcagcagcagaagcagaatgagcagggaggccgcttggaggattccagagacatcacccaggagtctgctggggctcagcacagagacactcatggtgcagcacctgctggatctctgagtgcccc

SEQ ID NO: 1114 - DNA, 1075 bp, Homo Sapiens
atgacagagagcgatagagtgcgagagcgagtgcccggagcatcctggccctgagacagctgggccagccccgcagggctctgcagcatgtgggagctccgctccatagccttctccagggctgtgttcgcagagttcctggccacactcctcttcgtcttctttggcctcggctctgccctcaactggccacaggccctgccctctgtgctacagattgccatggcgtttggcttgggtattggcaccctggtacaggctctgggccacataagcggggcccacatcaaccctgccgtgactgtggcctgcctggtgggctgccacgtctccgttctccgagccgccttctacgtggctgcccagctgctgggggctgtggccggagccgctctgctccatgagatcacgccagcagacatccgcggggacctggctgtcaatgctctcagcaacagcacgacggctggccaggcggtgactgtggagctcttcctgacactgcagctggtgctctgcatcttcgcctccaccgatgagcgccgcggagagaacccgggcacccctgctctctccataggcttctctgtggccctgggccacctccttgggatccattacaccggctgctctatgaatcctgcccgctccctggctccagctgtcgtcactggcaaatttgatgaccactgggtcttctggatcggacccctggttgggcgccatcctgggctccccttcctctaaaacatacgttgctggttccggccagccaaagagcctggtccgaaccgcctggcaatggctgaaagggccctggaagccggaacacccaattgggaaaggaaccccaaaggggccacaggcgggaaatcggggggaacttgcaattcccccgcaaaaaccctggccaccggggtaccaaaggcctttgaaaggccccccaaacgggccttctaaaggcccccaacggaaacctttgggaagggccccaagaggcaaaaaggggcccacacccgggtcccttccttattttccggaaaggatttttgaaaaatagcccccacccaacgac

SEQ ID NO: 1115 - DNA, 490 bp, Homo Sapiens
cacctgcctgaagcacttgcctggtctagtctgtctcatccccagagccacacagctgtccactaccttacacagcttctcctgcatcccctacccacacaccgcagcctctctccttgttttactttacttgatgcatgttagaataataagtgtctttggtacagcccatatctatccaaaagtgagcttcaggaagggtttgtaggatatccgaagaatgtcagtccctcccgggcagcagagttctcatcttcattgtatatgagcccctgggaagtgtgtgaaggatgcccttgtccaggctccacctagagacggacgcagtggatctagggacttttgagagctccaccggcagctttagggtcatgtgaattcctgcctggccgcatgttccatcttctctcctggcccagcctgccagtcatggaagattgagaggctagtcactcatctttcttcattataaaatcttttgcttagcaaa

SEQ ID NO: 1116 - DNA, 419 bp, Homo Sapiens
ctctccagcaccagggcctcgctctcctccacttccagcccatccttgtaccagcgcacaggggcatcctcccgagacagttcacacatcagcaccacacactccaaggtcacggcgatcaaggtcacctcatcgcgagggtatatgatccgcactgggggctctgtgacggtgacagtgaaggaggccgactcatcgtcaatttcacacaagtactcgccggagtcctcgagctggacagcgggcagcaccaggcggcggacagtgtcttccttctacaggagcagcgcggggctctccaccacctcctctccatccttggtccagcgcacctctgcccagggccggcatagctcacaggtcagcaccacacgctccaggcgcactgctgccacatacaccttgccgaagcttgatca

SEQ ID NO: 1117 - DNA, 505 bp, Homo Sapiens
gtcagctctactgacacaggcaccatctctcctcccgcgcttccacaagtgtattctgggacagggcttgatgacctattagcatgagcggacgaaggtctatgtgcccactggcttctctgccttcccttttgagctattgcacacgcctgaaaagtgggtgaggttcaagtacccaaagctcatctcctattcctacatggttcgtggggccactttgcggcctttgaggagccggagctgctcgcccaggacatccgcaagtccctgtcggtgctggagcggcaatgacccacccctctccccccgcctgccacctccccccacaagtgccctccaggcttttcttggggaagataccccttttctgaggaatgagtttgcctccgtcccctgcccatgctgggagcccacgctcaccccctcaccacttccaagctcactccccaacccccaactccgtgtggtaagcaacatggctttgatgataaacgactttactcta

SEQ ID NO: 1118 - DNA, 449 bp, Homo Sapiens
tttcactctgaaagacttcttcatgggggatttgcccttgcccggcaattttacttcctttcttgcactggttgcaggcttctttgaggagccaccactaggtttcttgatgactgtggatgagggtctggtcttcttggcaggcgttttggccttaggaggtgctttcttaggcaagggcctagctttcccccgctgggcagctgagactttaggtgcaggtttggaccctctctgcttcacagatgcggccttccctggggacttggctggggttttcttctgcaaccttctcttaggtgccggcatcttcatcactcagagtcttcttctgatgactcatcttcatcttcacgtatcgcgatgggcgacagcgtgggtcgacgatatgcccggaattccgaccgtaacagcctgctgcgtaacccctgtcacatttacgcccagag

SEQ ID NO: 1119 - DNA, 402 bp, Homo Sapiens
tatactgtatattttaagaagttccagcatgttgcatctctgcatttatcctatatcattaaaagaacataagttatcatggtgttgggtaaattagcgaaatcaacccttcctaagtttaagggaaaagttatttttaaaaacaacttaataaaaacttacactcttttatacaagagtgtatttccccttaattaggatgcatgttgattaaactcgagatacagctttttgcagtatggtgggttggttttggtgtaacatcttcaacatgtcacactggctatcaaagaataagaaaattattgagtatgagtgtgttttataaactttctgagtttttcagatgtcttaatattttttaatagaacttaataaaatgtctagattgactaaaaaaaa

SEQ ID NO: 1120 - DNA, 396 bp, Homo Sapiens
  misc_feature (257)..(298): n is a, c, g, or t
aaataacatcttcagggctaggagttgggtttaaaaatacatgaaatggtgtggagctgccctcgggagccctggctttcctgagagcgcgtccggcatgtgcaagacagtggccacaacgcctgtcaccttgacgaaggggcgaaagcaatcgacagagtccacgacgatggccgagggaacaacactgtcccgtcccagagctctgaaggaacgcatctgcattctgaaaataggtttctttacgacggaagtcnnnnnnnnnnnnnnnnnnnnnnnnnnnnnnnnnnnnnnnnnnaaagtctgaaggagaaaaaaaggtctgtaaacaggtgggagcccaaaccccaggctcccccaaaagcagtcacaacccacgcccaagtgcttgtttct

SEQ ID NO: 1121 - DNA, 354 bp, Homo Sapiens
tagaatttagtcattcagctactatcatcgagccccttctctgtgctgggcactgggctaagtgctgcggatccactggggagtaattcctgcgttgaaggtgttttccagtctatcagggcagatggattacagtgcaggaggcagggtgtgaggtggtggtggctggataggccgtacggagaaaggccttctggaggtgggagctctaagccagtagctgaaacagaatggaagggagtgaggtggaaggttcagctcgcgaggaacggggacgtgcaggagctgagaggtgagtgagcagagtcttcagggaaacgccactgggggcctcctgcaatgggccttccctag

SEQ ID NO: 1122 - DNA, 487 bp, Homo Sapiens
ccatggatagtgaattggggtcataacaacgtccttatcatacttaacaattttttaaattgtaatacaaaatgtgatgatataaagagctgttctatatatttaaatgactatttaaatatatgtatttcttttccaatttgtgattaagatcaatagaggtagtagtgatatatttccctctcataagtttcacactgcttatctctgaaaacttcaaagttgtcaggtgaggagtgcctatttatctaatttctattccagtatgttttcactttagatttgtcacataaaatggagactgcgcaatgacatgcaaagtaatctgtttatgtgtctaaataaaatatgtgaagtatttacatggtttgtgtgaaagtccaagtaggaaatatgcagaaggatttttagcttagctgtatatttttgtcaggaaattatcatcatgtgaatgtttatgttggagctaacaagcatcactctcatt

SEQ ID NO: 1123 - DNA, 238 bp, Homo Sapiens
acggacggacctcacacagcactaggcacattccaccctcagcaccacatctttggttaatgcgatcctctgcttgcagccttggtgtttgctggtccctctgtgtggaatgcacttttaccacatacctatgtggctcactccctctgttttctcaggccgtatctaaattatcgccttgtcagaggggcttccctcgcttcccttttgaaaaatcaccccttgttgctgtgtggag

SEQ ID NO: 1124 - DNA, 465 bp, Homo Sapiens
tttctcactttcagatttaagattgtgttctggaacattatagttgcgcctcaattacagaaaagtaagaacctctgctgaaaatacctggtcttagtccctaaaaaagtaaaattattagacagctttttgggatttgaggtttcaaaagacaggaacctggctaagaaggctcagtcagactcaattagcccaaaagctgagcccagtaggcattgtcatatgcttttctttcataattgggggtgggaagcgaggggagggaggatttatagtttaatgccacaactttttaaaacagtgatttttgccatactatttgactaggaaaatgatcgttgctcactctataaatacttgaaatcttttctaggacttagaagtttgtagttaattgcaaaggagcaaaacaaacggaatattacacaagaatttaaaaggagaactctgcagaacatgtcttat

SEQ ID NO: 1125 - DNA, 296 bp, Homo Sapiens
tagggtggtgtggacgggcagacccctggccagtggagtccagcccctcggatgacacagggaaaagagaaaggcaaagagaggcaagatgtgatgctgaagctccagccagataaatcctagagaggggccatgcatcccagccacctccccattctttcccacctgagcccacccctgagctacggctctgaggcacagggtaaagtctgtagtgtgtgcgacagccgcactggcaggagggcaggatggtagtgagggcaggatggtgaggcagtcccagagctccctcccag

SEQ ID NO: 1126 - DNA, 412 bp, Homo Sapiens
atcaaaggaaagaatcaaatttcttgcccggtcactggcactccagaagacagcagtccggaaccggcagctctcacctttctgtgacttgttcggaattaactcctctggatggaaacttccatcttacttggttacatcacggctctggttcagatacaacttcatgattttgctactatcatttttcacttttcaaagaatttaacctattttacagcagttcagttctgctagtgagtagttttcctctcctaccttccttctaaaaacctgattcatgcacagcgtttgacacacatggagtctgccagtgtgccttctctgcttcagacaagagatctgccatttcatgcccttgtgactacctatcattggccctgcaataaaatcatttatttttcaaaaaaaa

SEQ ID NO: 1127 - DNA, 346 bp, Homo Sapiens
tccacacagcactaggtagagatgttcagtcaccagcagacaaagcaatgctcacatccacagggaaagcagactcgatccgtcggaggagcaaaggttttcaatgtgtataaatgccggttctgaggaagaggggagggcatcaggtttgcctcaccagtgagaacactaattgaaaaaatccctccctgctgggcagtttagcaatatgaacctgaagtcttaagagtttaacagtcatttccttctcgaaatgtatgtattcagcattcccaaagagataacaacagacgtgaaaaagtctgagctacaaggaaagtcatcgcaagtattattttctaagagg

SEQ ID NO: 1128 - DNA, 634 bp, Homo Sapiens
ctccaaaagtgagaaagtctcccatcggagtgacagtatgcttattgaaagcatgtgcatatctgaggggtatgacacaagcaaaccaagtgcacctgctttgcacactctgcgaaagtcgtgaacattcactccacatgacccctccctagcctggcagtgacgtcagggtccttcacagacaaacacgcttgggctgcgcaggagctgccgtgcacacccccgctgcccagtgtctgccctctagaagtaggctgtgtttccaggtgttcacccgtggtgcccacagtgccgacccgtggctgggtcggagctccatgttcctaagctaggtctaggtctacactcctaggacgcacgcatatcagcccgtgtaccctgtgacagtgactgtccccacctcctgtgttagtggtgcccttactgccgtcgctcatccactcgtgtgggacgtaggattgcacagggctgtgccagtggcgtgtagggaacactgccctggctcagcgtgcgagctaaggtggcgatgtatgcgatgggactctgcatgggatagtacagttgtgtagacgtcttccaaataaattatgtgttggtgcatcgcacatgctcaataaatatttttaaatgagtg

SEQ ID NO: 1129 - DNA, 946 bp, Homo Sapiens
caaggcagcatgagcctgatcacccctcaatcccagccaactccgatcagtgggctcccaggatgccctggcccccttgcctccacctgctccccagaatccctccacccactcttgggaccctttgtgtggatctctgccttggggcctcagctgtcttctggctctgcagcatgtcttggtcatggcttctctgctctgtgtctcccacctgctcctgctttgcagtctctccccaggaggactctcttactccccttctcagctcctggcctccagcttcttttcatgtggtatgtctaccatcctgcaaacttggatgggcagcaggctgcctcttgtccaggctccatccttagagttccttatccctgctctggtgctgaccagccagaagctaccccgggccatccagacacctggaaactcctccctcatgctgcacctttgtaggggacctagctgccatggcctggggcactggaacacttctctccaggaggtgtccggggcagtggtagtatctgggctgctgcagggcatgatggggctgctggggagtcccggccacgtgttcccccactgtgggcccctggtgctggctcccagcctggttagtggcagggctctctgcccacagggaggtagcccaagttctgcttcacacactgggggttggacttgctcacctgggctcctgccagtttcatgtgtgcccctggaggcgagcttccacgtcatcaactcacactcctctccctgtcttccggctccttttcggcaactgtctgccccaaccaaggccaccatggattcgggctgcttcaccccatgctggaccccagcagtggctcccttagtggggtactctgagttgggcttggaatctccccaggtgctcgatcttcaccacatccattccgttgagagggtgccgggttaccag

SEQ ID NO: 1130 - DNA, 418 bp, Homo Sapiens
agttgggagctggccttgtcaacagatacagtccattgggccatcctaggtagttgttgatgagcaccacgcggtctgagccatccattccggaccgctctaacttggcattctccccccagtctgtccagtacataaaccccatctcatggtacagtacgatggcccggggactgtcaaggttctgccacaccaacactttccgcatggacccgtccaggttgcccacttcaatccggtttgttcccgtgtctgtccagtatactttccggccaatggcatcaaccgcgagcccatctgtggtctgtagccctgtggtgatgatgtcctcatgctgtgagccatccagattggcacgactgatcctgtgcagtgtgctgtcagaccagtacacctttccttcctgggggtctactcc

SEQ ID NO: 1131 - DNA, 336 bp, Homo Sapiens
tgctgcttctcctcctccagacgctcaatgttggccttcagacagggcgtgtcaggaccgggagttcactgttctcctcgtccagtttgctgtagcctggtctgcaggttctcgatctcaatgctcttctccctctccatcttgcacaggagctccttctgacgcccggtctcttccacggaccatctcgcaggctctcagctcctgctccttcagctgctcctccagggacgtctgctcttgaaaggcaaagggaggagctgagctgtctccaggcagggtgtgcagtggttccacccatgcccagaagctgcctcaggacctccagagaacctt

SEQ ID NO: 1132 - DNA, 941 bp, Homo Sapiens
agcggatcctcacacgactgtgatccgattctttccagcggcttctgcaaccaagcgggtcttacccccggtcctccgcgtctccagtcctcgcacctggaaccccaacgtccccgagagtccccgaatccccgctcccaggctacctaagaggatgagcggtgctccgacggccggggcagccctgatgctctgcgccgccaccgccgtgctactgagcgctcagggcggacccgtgcagtccaagtcgccgcgctttgcgtcctgggacgagatgaatgtcctggcgcacggactcctgcagctcggccagggctgcgcgaacacgcggagcgcacccgcagtcagctgagcgcgctggagcggcgcctgagcgcgtgcgggtccgcctgtcagggaaccgaggggtccaccgacctcccgttagcccctgagagccgggtggaccctgaggtccttcacagcctgcagacacaactcaaggctcagaacagcaggatccagcaactcttccacaagatggcccagcagcagcggcaccctggagaagcagcacctgcgaattcagcatctgcaaagccagtttggcctcctggaccacaagcacctagaccatgaggtggccaagcctgcccgaacgaaagaggctgcccgagatgggcccagccaagttgacccggctcacaatgtcagcccgctgcaccggctgcccagggatagccacgagctgtaccaggtagggggagaggccagagtgcgaactagtgtgaaaatccagccctcagggggtcaccgccaaaaaagggtgaaactgccagaatgaccctcagatgggaggctggaccaggtacattcagagggagccaacgatggcctcacgggaattcaaccagggacctggggaaggactaacaaggacggggatcgagagaatacacaac

SEQ ID NO: 1133 - DNA, 218 bp, Homo Sapiens
cagaagaaattgctttcagagcttggcaagatttaaagcgttaccattaaagtttgagttggatgttactccatgaagagaatatatccttaaacactgctgccctgtgcatcagaacatactcactccgatatgtggacctgttgctggtaagaaatgtcttgacaaagtgggatctaattaaagtaaagagcttctgcacagcaaaagtactccgg

SEQ ID NO: 1134 - DNA, 663 bp, Homo Sapiens
gcacaggcctcctcttccagctgtgtctcttctagctggtcaacatcaggattgggcctgtgatttccaccgtccgtgaaagaaaggcagccctcatcaaccacaaatgcagagttatcttgagggtagatggtgtagtattgaggaggacttgacatggcggctgctgcccctccagaggttatgaggccgcaggggctcaccacagactgcaggtagctggtatttatccccataggctctggagaaccataaggaggagggatgtactgcaccacagtggccccatggaaggtgatgggttggttgatgccagtgaaaacaaatgatggtcctcctggtgtctgttccgagtccgggaccctttcctcactttctttgcacaactggcaggagagcattttgaacttgcacacagcaatcaggatgaatgtcaccccaactgacagcaggacgggcccaaggagctgggtccattcaaagtgggagacaccttggtatttgatccagcccatgacagtgaatgtgatccccaccagtcccagaaagatgcctgagaagagcaaggtggcccccgccttgtcatcatcggacacctggatgtcagcggtgctgggtgtgtaaaggagtgacggagaacacattgacagggaagtcctccaa

SEQ ID NO: 1135 - DNA, 667 bp, Homo Sapiens
tcaatcttctctttgtctgatctttgtccttatctttgctgccattcttagtctttgttgttggaggtactaagtagtaatgaacagggattacatcctacgaatgtggagagagattcttagattaatatgcttaattttacatacatcaaaatcatcttcaacagctacatgtcatgtaacatgggctgcacctaagttgtactacactgtattctagattctaagggtcacaatacaccaaaaattccaatctcctggtcacagcaattttctcacaaactgatgctgagtactgatacttcaaatatctcctttaaaataaaagagataagaacatacttttctccatttgagtatatttggtattcttggctttacttggcagacagatgactaaagtacactgacctttcacattttaaatctgagaaggggatgaaataagttcaaactaagaaaagattctctaagtaaatttaaggggacgcttatgccttcattcaacctacaggacttactgagtcccaccaacaggacttactgagtccccgcgatgtgccaggtaatgttagaataggtaaagaacagaccagatgctgacatctgataggaagaaaacaaacagaaaaggatagaatgactgtcaggtaagatcgagaacata

SEQ ID NO: 1136 - DNA, 239 bp, Homo Sapiens
acatgctaaaaagggtcatcctagatacagtcaagatctgttgtgacaacccaggagaagagctatgtaagacgaacgacataagtgaagaaggtcatgaaagggcatagtaattccggtctaagtccagaataacataagacgaggctagagaatgaagtgagccccactgttacgcaacacaagatagatattgtccgatgaaccgtgaggcaaacacgcaggttccaagacgactg

SEQ ID NO: 1137 - DNA, 864 bp, Homo Sapiens
ctgggactgagtcatggcaggaagctgaggagggcgggagatcacaccagacaattataaaagaagagctggtcctgaagctcacaaccgtaacagccaccagacaagcttcagtggccggcccttcacatccagacttgcctgagaggacccacctctgagtgtccagtggtcagttgccccaggatggggaccacagccagagcagccttggtcttgacctatttggctgttgcttctgctgcctctgagggaggcttcacggctacaggacagaggcagctgaggccagagcactttcaagaagttggctacgcagctcccccctccccacccctatcccgaagcctccccatggatcaccctgactcctctcagcatggccctccctttgagggacagagtcaagtgcagacccctccctctcaggaggccacccacgtctccaacaggaaaagctagactacctgtaccaactccctgctgaaaaggaagtgggtcccaactctccctcaggaagctgtcccacctccaaaacagagctgccctctctccagcaccccaatgaacagaaggaaggaacgccagctccataatgagggaccagagccatccagaacctgagtcctggaatgcacgcccaggcaatgccaacaggaccggtcccaagggggcctggggccaccggctgcatggcttcacaccctggggcggacattctcaagacaatctgacaccaaatctgccttccttaccgtcaagcatgtggtatatggtcgctggaacctaccacaggtccggctaactcgcaactcaactcgcagcattgagaccttctattttcctggagatttggatattccc

SEQ ID NO: 1138 - DNA, 445 bp, Homo Sapiens
aggaaggaaagaagggaagacaggaggagccagcggggaggggaaaaaaggacaggctgatggaagagaatggagttaattgatggaaactgagtaaggtgggaacagtcacggtagctcataggctcagagactggcctcgtggcctatgtcctggcaacggaagggagctactgcatgtaaagagctattgaatctgacatgatgccacgtctctttgtggtttacctggatagaatgggctgtttctgccttgaaatgcctcctgctgcaacagagataagctatgaccctggttctggaccacagtggagagtaggggtatggagcagagacggagaacaaagaaggttccagattgtgagctcgggtcactaaagaagcagtcatggcatctgacacatgacagggtctgcagtaaagtcacccgcactcaagccagaac

SEQ ID NO: 1139 - DNA, 848 bp, Homo Sapiens
ggctctttccagctcctggcagccgggcacccgaaggaacgggtcgtgcaacgacgcagctggacctggcccagccatggaccgaaaagtggcccgagaattccggcataaggtggattttctgattgaaaatgatgcagagaaggactatctctatgatgtgctgcgaatgtaccaccagaccatggacgtggccgtgctcgtgggagacctgaagctggtcatcaatgaacccagccgtctgcctctgtttgatgccattcggccgctgatcccactgaagcaccaggtggaatatgatcagctgaccccccggcgctccaggaagctgaaggaggtgcgtctggaccgtctgcaccccgaaggcctcggcctgagtgtgcgtggtggcctggagtttggctgtgggctcttcatctcccacctcatcaaaggcggtcaggcagacagcgtcgggctccaggtaggggacgagatcgtccggatcaatggatattccatctcctcctgtacccatgaggaggtcatcaacctcattcgaaccaagaaaactgtgtccatcaaagtgagacacatcggcctgatccccgtgaaaagctctcctgatgagcccctcacttggcagtatgtggatcagttcgtgtcggaatctgggggcgtgcgaggcagcctgggctcccctggaacatcgggaaaccaaggagaagaaggtcttcatcagcctggtaggctcccgaggccttgggctgcaggcatttccagcggcccatccagaagcctggctctttattcagccatgtgaaacctggtccctgtctgctgaggtggggccttgccgactcggggac

SEQ ID NO: 1140 - DNA, 1111 bp, Homo Sapiens
  misc_feature (622)..(622): n is a, c, g, or t
  misc_feature (763)..(763): n is a, c, g, or t
  misc_feature (850)..(850): n is a, c, g, or t
  misc_feature (869)..(869): n is a, c, g, or t
  misc_feature (952)..(952): n is a, c, g, or t
  misc_feature (974)..(974): n is a, c, g, or t
  misc_feature (1004)..(1004): n is a, c, g, or t
  misc_feature (1017)..(1017): n is a, c, g, or t
  misc_feature (1032)..(1032): n is a, c, g, or t
  misc_feature (1039)..(1039): n is a, c, g, or t
  misc_feature (1041)..(1041): n is a, c, g, or t
  misc_feature (1094)..(1094): n is a, c, g, or t
cacccagcctctccttggcgtggcctcttcggttgtccagcccttctcccagccctggtccctcagaaggagggtaactcccttccagatgttacggtccgcctgcgtctctcagcacgccggtggcatttgggttgaccgcggaggcccccagtgccagagggtgttcacgttctgccgtgggctcagcccaaactttggacgctcagagacccaacgggagcgctggataaggtgttgacccccttcccctcccccttcccggccagttacccactcctggactttgatctctctccaccaggccaggacagctgatggttgtggcagaaacatctcaaggtagctggtccgcccccacttccccatctacctcttgtcctcccccgcaacaacaccaccaccctggctcccctccctcatgaccgcctggatcctcctgcctgtcagcctgtcagcgttctccatcactggcatatggactgtgtatgccatggctgtgatgaaccaccatgtatgccctgtggagaactggtcctacaacgagtcctgccctcctgaccctgctgagcaagggggtcccaagacctgctgcaccctggacgatgtccccctcatcagnaagtgtggctcctatcccccagagaggtggctcttcagcctcattgggaacatgggtgcatttcatggtgggccctgatctgccctctgcgctacgggcagctcctggagcagagtcgggactcttgggttaacccccggnactcatcacaaggtggcacagcgctgcgggcctcttggggggttggcaactttcaggggggattatggcaggttttcctgccctacnttgggagctgggcggtggncttcccctggcgggggtggcctcttttgttttggcctgcccggggtggctcctcccccacccaagggggcgacccggcccccnttgggacccggggtttgggggnaccttattgtcgaaagagggggctcggggntgggtacttccgnctattaaaacacccnctggggncnccccagagggggaaggctttcttctttgttcccccgtagaagagattctttcncgttggacaaaacaggg

SEQ ID NO: 1141 - DNA, 1137 bp, Homo Sapiens
gggtccggaattcccgggatagcgtgcggtgccgcagcaatggcggcgctcacaattgccacgggtactggcaattggttttcggctttggcgctcggggtgactcttctcaaatgccttctcatccccacatatagccattccacagattttgaagtacaccgaaactggcttgctatcactcacagtttgccaatatcacagtggtattatgaggcaacttcagagtggacgttggattacccccctttctttgcatggtttgagtatatcctgtcacatgttgccaaatattttgatcaagaaatgctgaatgtccataatttgaattactccagctcaaggaccttacttttccagagattttccgtcatctttatggatgtactctttgtgtatgctgtccgtgagtgctgtaaatgcattgatggaaaaaaagtgggtaaagaacttacagaaaagccaaaatttattctgtcggtattacttctgtggaacttcgggttattaattgtggaccatattcattttcagtacaatggctttttatttggattaatgctactctccattgcacgattatttcagaaaaggcatatggaaggagcatttctctttgctgttctcctacatttcaagcatatctacctctatgtagcaccagcttatggtgtataatctgctgcgatccctactgtttcactgccaaataaaccagatgggtctattccatggaagagtttcagctttggtcgcgtgatttccctgggacttggtggttttcttaagtttctgctctttcattgggccctttcctggccttgaatcagctgcctcaagtcttttcccgactcttttcctttcaagagggggcctctgtcatgcatatgggggctccaaaacttctgggctttggtacaaggctttgggaccaaagggctggcctgtcatccggttttgaaatttgaaatttcctggaaccccaacaatattccccaagaggcctcaatgaacaaagggggtttggtgttcaaaaaattttcacaacaccagggtccttttctcctccggggaattccccttggggaaaaccttaatttttggccaccctgaaatgtgcccaaaattggccccccc

SEQ ID NO: 1142 - DNA, 801 bp, Homo Sapiens
tttggtcccagccccagagggattctcagctgtcgctcggggcccgacctatctcggtccatctaagggtccgaggcacagccccgccaagaggccacaagtgtcagctgcttccgcgggaagggtgagggctaccggggcacagccaataccaccaccgcggcgtaccttgccagcgttgggacgcgcaaatcccgcatcagcaccgatttacgccagaaaaatacgcgtgcaagtgaggtgggcgggggggcgggcgttgggacgtgctgctgcgggtgagacgggaggagggtagtcacgggcttagggctggaggctggcgggctagggctgagtggagcgcctgcttagagaccttcgggagaacttctgctggaacctcgacggctcagaggcgccctggtgcttcaccctgcggcccggcacgcgcgtgggcttttgctaccagatccggcgttgtacagacgacgtgcggccccagggtgaggcccaagcttgggggctacagagccggggctggaagcctggaaccggagggccggggcgaggtctcggcctgatggctgcccgcaccggccgcagactgctaccacggcgcgggggagcagtaccgcggcacggtcagcaagacccgcaagggtgtccagtgccagcgctggtccgctgagacgccgcacaagctgcagtgagtccctggtgctcccggccccgccagggccctaaccctggggcggcatgctttgatgtctgggaccagagcctgaaatggttgagactaccctgcacgattttgctccc

SEQ ID NO: 1143 - DNA, 618 bp, Homo Sapiens
  misc_feature (420)..(570): n is a, c, g, or t
tcaaaatgcaaataccgacacatttcctcaggcctaaatcagaatttctaggtgcgggtaaaaagctgcccaggcaattctgatgaacattcctggttaaaaatcaccacagcaacagtaatttgctgtagtgattcaatcgtagttacatattatgaatcatttggagagcctttagaaaccctcaggccaggtagcagaccaactaggttggaatctgtgggttgggacccaggcaccagtactttttaaggtttcccttgtgaggtcattgtcatactgctagaatagatgttctctagtacttttaacattaaaaaaagatttgtcaccaaaattgagtttgctttcatgtgtttatttaccagcctcacacaattccattttagccactgctccaagtgtggctaaaaaccaatnnnnnnnnnnnnnnnnnnnnnnnnnnnnnnnnnnnnnnnnnnnnnnnnnnnnnnnnnnnnnnnnnnnnnnnnnnnnnnnnnnnnnnnnnnnnnnnnnnnnnnnnnnnnnnnnnnnnnnnnnnnnnnnnnnnnnnnnnnnnnnnnnnnnnnngtggtcttaaaaggcttctgaagaggttatgtttgaaatgtcgccgat

SEQ ID NO: 1144 - DNA, 573 bp, Homo Sapiens
  misc_feature (87)..(99): n is a, c, g, or t
tggccagtagtggccatgaccagcgcctcaagttttgggacatggcccagctgcgagctgtggtggtggatgactaccgtcggcgcnnnnnnnnnnnnngggaagaaaaggaggagactggggatgacagtgactgaaggaatgaattgaatcttgagacgggtcctcaccaggcaagagtcttgcttattgggctgcatccccagagaggatatgaatttataataccctacagtgcaacacaagaagatgcactcaaagcactgatgtgaggaagtacttgccccgtagcagctattcactctaccagtgtaaacaaactctaagctagggcaagacagcacagacacaagtatatactaaccaggggtttaatataaatacaaccagcatagaaagacccaaaactatacagaaaccaaaaccagaatgccatgtggtggaggcaaagggcagaatttctgacccctttggctcagctgcccttccccacaaataaaaaccaacaaagaggacaaatcaggacaataaagaagattcatgctaagctgtgggtgcagaattaaggtcctc

SEQ ID NO: 1145 - DNA, 738 bp, Homo Sapiens
gcggccgctgtctgggaggggcccttctgagcgagcggagttcggcgtccagttgtactgcggccagcccagcttctccccatgcagctcgttctccgtgcggagccagtccagcagcggcttgaagtagctcaacatggccgaggcgctcatgttgggctggcccgtgatcagctgcatggcttccggccacggcctactgaagcccagcttcatggcggtcgccaggcgctgcccggcctccttggactggtagatgtcacacttgtgcagggggcccgtgtggccagctgcctggcacagtgcctcgtggaactggaactggatgatgaagctgacgaagtacctgatgtaaggcacgctagaaggaatgtggaacttggcccctgggtcaaagtcaccttgagtcctgggcactggggggcagaggccctggtacttcagcctgaggctccaccactcctggttatagttctccttggtgatgcttccatcaaataccctccagcgccactgatcgacgaggtagctgaaggggataaaggcgatcttgtcaagggccatcttcatcagaaagttgatgtcatgctcgtcgctgccaccctcactgctcagcaagttgagactgtgcaggtgctttggcgtagacactgagaaggcctagacgtgcccaatggcctcatggaagtcgggttgcaccctccctcaaagccaccaggtagtcttgtactgcatgaa

SEQ ID NO: 1146 - DNA, 503 bp, Homo Sapiens
agtgacagagcagctaaggggccgggccatgcacagaaagagttgtggcggccacaggccataagctggctggccctcatggcatttattcagcacagacttaatgacaaaggctttgagtcaacacacctgtgggtaattaactccccctgcccccaggtagagagcaatcatgcacctgcggataatcaaaggttggtcttaggaccacatgagtaaacaagctattcagataaactcccccacattcccatgttatttgctctattgctatcaactcaaggtaaaggggattagaggtaaaaaggatttcagccaaatcctttactgaagctatgcaaaccttctggccttccaagaaggtttgtgtctatatcctgtaacttcatcttacaattttccaaccacactgactgatcccctaaatctccccattttctgttttttttgcattcagtcttgttcattggagagtacaggtgtgcgcagcaacaggtctgtca

SEQ ID NO: 1147 - DNA, 398 bp, Homo Sapiens
gagaattaggacagtttattgtttgaccaacatgctgagtcttttccacattttacacagtttaatgtgaaatcaacatggcggctatgtcttctgagcccataacagatggaattgccaccctctgtgctcctcacagccaatcactttaaagggatgggtgaggggaaagtgaggggagaagtggacacacaccgcgagatgcaggctggccttcaatgctatggaggcttcccacctcctgaaggaaccatctaaacccctgctgcaaggatttcctgatgaaaccacacactgctgggagtgccaaccagacaggggtctggagtccaaggagtttgcacattgagatcccaaggttttggaacacctaaatagttcatgtcaaacaataaata

SEQ ID NO: 1148 - DNA, 474 bp, Homo Sapiens
cagcccactctgcattcgaccacttggggcccagaagcttcaggaaaggtgcacaaggtcactgggtcccagtactcccaacaggaaggtctggtccagggacagggctcttcccgactccccttagccacacgcaccagaagttctgcagtgcccagtgggcatagcagtccccaagaatgacccagcactgaagctgagccaaagaacttggggagcgagccacaccccctcactccctcttcgcctgctccagacttgccaggcggttgcttttcgtgggaaccgggatgtcctcaccaccctgtccagggcccagccccatgtccctggcctgctacagctggaaagaaaaaagagagatgtttgtttttatttgtttataaaaagaaaagtgttatatatataacatattatacctcatgaatacatacaattatttgtcaattaacaataaagaaaaatacagcaagc

SEQ ID NO: 1149 - DNA, 469 bp, Homo Sapiens
ataaatgtatatgttttataattctggagagacataaggagtcctacccgttgaggttggagagggaaaataaagaagctgccacctaacaggagtcacccaggaaagcaccgcacaggctggcgcgggacagactcctaacctggggcctctgcagtggcaggcgaggctgcaggaggcccacagataagctggcaagaggaaggatcccaagcacatggttcatcacgagcatgagggaacagcaaggggcacggtatcacagcctggagacacccacacagatggctggatccggtgctacgggaaacattttcctaagatgcccatgagaacagaccaagatgtgtacagcactatgagcattaaaaaaccttccagaatcaataatccgtggcaacatatctctgtaaaaacaaacactgtaacttctaaataaatgtttagtcttccctgtaaccttcaaaaa

SEQ ID NO: 1150 - DNA, 715 bp, Homo Sapiens
  misc_feature (47)..(47): n is a, c, g, or t
  misc_feature (416)..(439): n is a, c, g, or t
ctggaagctgataatcatgtggtaaactgcctgcagccacatccgtntgaccaatcttcagcctcatctggcatagattatgacataaagatctggtcaccattagcagagtcaaggatttttaaccgaaacgttgctgatgaagttataactcgaaacgaactcatgctggaagaaactagaaacaccattacagttccagcctctttcatgttgaggatgttggcttcacttaatcatatccgagctgaccggttggagggtgacagatcagaaggctctggtcaagagaatgaaaatgaggatgaggaataataaactctttttggcaagcacttaaatgttctgaaatttgtataagacatttattatatttttttctttacagagctttagtgcaattttaaggttatggnnnnnnnnnnnnnnnnnnnnnnnngggataacctaacattggtttggaatgattgtgtgcatgaatttgggagattgtataaaacaaaactagcagaatgtttttaaaactttttgccgtgtatgaggagtgctagaaaatgcaaagtgcaatattttccctaaccttcaaatgtgggagcttggatcaatgttgaagaataattttcatcatagtgaaaatgttggttcaaataaatttctacacttgccatttgcatgtttgttgctttctaattaaagaaactggttgttttaagat

SEQ ID NO: 1151 - DNA, 623 bp, Homo Sapiens
cttcaagctcattctctatattacaagtatttgaattatttctcaattccagtttcgctttcagaggcattttgctgtttttcatttttcttccaccgaaaactctcctgggtttccggtctcattatgatctacacttgtgtcttgagtttcctctgtatcactctcaattttgtgatctatggcattctggctatcatcctttgcctgtgaaatcttccttcgcttttttatggtgcctaagtaccagtttgactttttgcgaattttcctcttcaactgagcaggagtgctgcaagccacaggagtactcggtgtctttagcttttcattctgctctgggtctgatcttttatcaccaacaagagtggaattttgctttggcatcacatggtagtaagacggggcatatttggaggagctacaacctcttttctttctagattcctgaatttcttcacagagctgctcaaagtcttcatcaagttcttctttaattatggcataggcagtatctcttaaagcacaggctctatgcctaataagacgatctccaggatctctatctggattgtattctaaggcattactacagattagatcaatatctctcaaatagtctt

SEQ ID NO: 1152 - DNA, 413 bp, Homo Sapiens
ccagtaagtataaatgaaaatattcatatgtaaaatatgttttgcttaatgtggacaatttacacacccaacacatactgtttccaaaattatttctatatgacacaaagtatgatacctttaaaaaggtgagcttatatattgtttattaacctggaaatagacaatttggctctcataccataagcatttaaaaacatatgaaatattttgatttctttatatggtggtgtgtttttatttctgaattttccatgtgctttaatatttgtttaagaatattttttatatctgttcaatttttatcattccccttatcattagaaagtttgacaaaaatacttgaatcttggacctctaaatatacttttagttgtgtttaacttgtttaataaataactttttaagttgat

SEQ ID NO: 1153 - DNA, 721 bp, Homo Sapiens
  misc_feature (117)..(213): n is a, c, g, or t
  misc_feature (217)..(229): n is a, c, g, or t
ccgccgacatccagggttaacactgagaaagattttactgaattgacattctgaaaagtaactatggttctttaagatagaaaataattttcctggccggacatggtggcacacacnnnnnnnnnnnnnnnnnnnnnnnnnnnnnnnnnnnnnnnnnnnnnnnnnnnnnnnnnnnnnnnnnnnnnnnnnnnnnnnnnnnnnnnnnnnnnnnnnccgnnnnnnnnnnnnnggagggggagtagggggaagaaaagaattttcctttattaaaatgtactgtcacaatataaaagaaattttgttcttttttaaaaaataggtagaatcacctgcatcatgtaatggccgtaattgtgtccagcagatatttttaaaaaagaaaagacagtgaacagaaactgctacctaaggattctagaggcaatgagacacagagtcctgtttttcaggacagaccgtagtgcccaagcctctagcatttacggagcataaattaagaatcttgttttgccttgagtctcaccatgaaataatgacacggtagccacatttgctgagggcctaatatgtaccaggcattgtgctaagtagtttcatatccatgtctcatttattccgaacttttttcctcagggagagaaaaatcaattacagtcttgttcataggaaaaaccaaacttacaattttgggaaagcaagaacatgtacagtagaggaggag

SEQ ID NO: 1154 - DNA, 301 bp, Homo Sapiens
  misc_feature (282)..(282): n is a, c, g, or t
atctcaaaatgggtattaaagggccattccatcaaaagaaagcagaatcccatttcaaaactattatatgtatatatatttttaaggggcattttcaagttttatttgggtttcatttcttcttggcttgcctgaggggttcttgcaggtacaattaacacaaaatgttctgagggtagtagcttttcatgcactgaagaatgagatcctaacaacattgcacatcttggatacattagaaattttaaaagccatgtgtaatttcagaaaacttaataccgncatgaaagacattttcaac

SEQ ID NO: 1155 - DNA, 713 bp, Homo Sapiens
ggctacccgaaccctgtggtcaagatacactcgacgatgtccccgcattcacaaaggaaggcacggcttcatgcttctggcttggaaagtattttgcacagaagatgatctgtgttccgacatctacctaaagttctatgaacctcaagatagagatgatctctatttttacattgccacatacctagagcaccatgtggcggagcacactgctgagagctacatgctgcagtggcagcgtggacacctttccaactatcagtacctccttcacctcaacaacctggccgaccgcagctgcaacgacctctcccagtaccctgtgtttccatggataatacatgattattccagctcagaactagatttgtcaaatccaggaaccttccgggatctcagtaagccagtaggggccctaaataaggaacggctggagagactactgacacgctaccaggaaatgcctgaaccaaagttcatgtatgggagtcactactcttccccgggttatgtacttttttatcttgttaggattgcaccagagtatatgctgtgcctgcagaatggaagatttgataatgcagatagaatgttcaacaggtttgatacaaatgccttgcttatcatttttaacactttctgattgtatatatacaacatacttgtttcaaagcactggatataataaaaaagtaaagaaatgtaaaaaatca

SEQ ID NO: 1156 - DNA, 125 bp, Homo Sapiens
gcaacctgataccttgaaaagcttctatgtgtctctccttttgttgcctggcagctgtctaggatgatcactgattactatttactaagtagccacatgcaaataaaagttgtttggtaaaatgg

SEQ ID NO: 1157 - DNA, 664 bp, Homo Sapiens
gtatcatcttagaagtgaaagaagcccctttatcctgcagtgcccctctaccaccacctactgacaaagaacatggtgctatctggcatgggagaaatgttcagtttgctatggcttgtatgtgtcccctcaaattcaagtgttgccaatgtgacagcatcaagaggtggggtctttaagagatcactaggccatgagggattctcttaggactgggatgaaggcccataataaaagaggtttcagggagcatcctgctagcttgccttctgtatgtgagaacacagcaagaaagccctagtcaacaagtgccagctccttgatcttagacttcccatcctccagaactgtgagaaatacatttctgttccttacaaattacccagtctcctgtattctgttatagcagcacaaaatgaagataccatacctgaacacctgaacattcttcacaaggtagtaaatgcactgctttattctggtctcagtattgtgtgcttaataaggaaatgagaaagggtggatcagggcataggatgaacaagttactgctagacctctcacaatgccactaatggataagattgtattttcatcattcttgtctcttcggaagctaacaccatgctataataggcactaaatagatgtctaaaaacacctt

SEQ ID NO: 1158 - DNA, 380 bp, Homo Sapiens
ccgggccgggctgggaagctgtatggtaaggaggtgggaagctgttgctggtctcactgcgatagtcactatctcggtcatcgacggcactatcagggtcttcaaaagaacactgggcggcagcagtgggcaatggcttcctctggctttcttcttgactagaatactcattgtcagctcccaaggcattgatttgctcccatttgtaggtccaatatctggcttcctcctctgggatatcaaaaggcaactcaaatcttgtatcaagcaaaattttatgaggagttgggtttctagttccacagatctcatcgtctttcattaacgtctctgcctctaatgtggaccaaccccagcccggcccgggatcctctagatcg

SEQ ID NO: 1159 - DNA, 1415 bp, Homo Sapiens
ggactgggtccttccctctgaagttgaagtattggagtccatctatctagatgaactacaggtgattaaaggaaatggcagaacttcaccatgggagatctacatcactttgcatcctgccactgcagaggaccaggattcacagtatgtctgcttcactctggtgcttcaggtcccagcagagtatccccatgaggtgccacagatctctatccgaaatccccgaggactttcagatgaacagatccacacgatcttacaggtgctgggccacgtggccaaggctgggctgggcactgccatgctgtatgaactcattgagaaagggaaggaaattctcacagataacaacatccctcatggccagtgtgtcatctgcctctatggtttccaggagaaggaggcctttaccaaaacaccctgttaccactacttccactgccactgccttgctccggtacatccagcacatggagcaagagctgaaggcacaaggacaggagcaggaacaggaacggcagcatgctacaaccaaacagaaggcagtcggtgtgcagtgtccagtgtgcagagagcccctcgtgtatgatcttgcctcactgaaagcagcccctgaaccccaacagcccatggagctgtaccagcccagtgcagagagcttgcgccagcaagaagaacgcaagcggctctaccagaggcagcaggagcgggggggaatcattgaccttgaggctgagcgaaaccgatacttcatcagccttcagcagcctcctgcccctgcggaacctgagtcagctgtagatgtctccaaaggatcccaaccacccagcacccttgcagcagaactatccacctcaccagccgtccaatccactttgccacctcctctgcctgtggcgacccagcacatatgtgagaagattccagggaccaggtcaaatcagcaaaggttgggcgaaacccagaaagctatgctagatccccccaagcccagtcgaggtccctggcgacagcccgaacggaggcacccaaagggaggggagtgccacgccccctaaaggtacccgtgacacccaggaactgccacctcctgaggggcccctcaaggagcccatggacctaaagccagaaccccatagccaaggagttgaaggtcctccacaagagaaggggccttggcagctggcaggggcccccaaccccgcaggactcgggactgtgttcgctgggagcgctctaaaggccggacaacccggttcttcctaccctcgcctgcctcggggccagggagcataccggcctggtactcggagggagtccctgggcctggaatctaaggatggttcctagcaggacttggtggggggaacagggaattggggatgggagggaggcaataaagatatttggccttc

SEQ ID NO: 1160 - DNA, 485 bp, Homo Sapiens
gccgagtgaccttggggaagtctgagcctgtgcttgcccgtcccagctctgcctgcctataggataagcagggatggccgtgccttccggcccagcctgccctggggaccttgtccccaccaggctgggcactgactggctaggacattgcattcagtgtataccaggtgccctctgggtagttgggaccagtcgctttagtggtggtcccaggtagaaggaggccagaaatgttccaggctgaggccttgccctaccccttgtggatactgacttgttaatgaggcggtagtgtccccagacattgaggtcagcccctagatagaaaccctcgagtcccctactcaacacttgccgctgacctcatctgaggcagccatctgagatccagacttggcctccaacctgcaaacaatgtatctttttgcacttggaactccgatgagcgttcgcagccaagcccagcccgcccgaacggatcgtca

SEQ ID NO: 1161 - DNA, 414 bp, Homo Sapiens
ctgtgtgtttagtgtgtttcggtgaagctctccaagtgtgttgaatcagcgtgcctagcctcaagggtgcatcgtgaaaactgaaaccaaaggaatgatacaggcctgctttgtgtgtgtcttcccactttaagcttgttttcagtacaaatactcttgctttaaacctgattggactgtggcgagcggacatctgttcaaaggaggggccgagaccacagtacttctgaagggggcttgataatgtggaaacattttaagttttctctccggactgttttgctctctcaattcaggcaagttactgaagtacgttttttatctagaaaaaggtttgatgtagtctgtaaatggtccttgtaaagtacattgccatctcagaattaaaagatccactctcatttaatatgcaaa

SEQ ID NO: 1162 - DNA, 350 bp, Homo Sapiens
gctcggcaccctcatccctgcctctgtgtatgcatctgtccatccatccatccccacctctgtgcatgcatctgtccatccatccccgcctctgtgcatgcatctgtccgtccatccatccctgcctctgtgcatgcacctgtccgaccattcatccctgcctctgtgcatgcatctgtccattcatccatccctgactctgtgcatgcatctgtccatccatccatccttgcctctatgcatgcatttgtccgtccatccatccctgcctctgtgcatgcatccatacctgcctctgtgcatgcatctgtcagtctatcaatccccgatcccttctttgtaatggtgat

SEQ ID NO: 1163 - DNA, 310 bp, Homo Sapiens
gtcgacattcagctcggtaccccccctggagaaaagagccaggatcagccaggccctttcccttgcaattgttcgcccctctgggccaaaccaaagggacgctgctctgtacaggtagagtccaaggaggtgtcagctcatcatgtcattgctattcacgccataagtggaattcttcattgagtcgttgacttctcgacggaatgctgacaggttctgggtgaacctgtctctgtttttcgtaagaagatttcgctcgatgccttccatcaggttctcaaaacacaggtgcatggcctgctgcttctcc

SEQ ID NO: 1164 - DNA, 381 bp, Homo Sapiens
tttccacaaagaacttgggattctttggccttactggagttttgttatagctaacaccagtcagtattaattaagaaggcactattaatgagggacggaaaaatctacctgtacacaaaattctgtactttaacagcatcttcaaataaacctttaaaggataatggtttacgatcattttaagaattttaagaactgagttatttggacaagaaccatacaaacctttttcactctgccatgaatgatcgaagaatcctgctctaggactggatcttttcagagaaaataacttatcacctgttttactgcagttgctactagcaattattatatagcatgtgctcttcaaaacagaaataaaaattgatgtgtgaaatc

SEQ ID NO: 1165 - DNA, 1086 bp, Homo Sapiens
tctggagctccccacagacactgatctcagtttcccccgagagtgtgagtgtaggcctctacaggcagctgcctctggggagttggggagcctaggggttaactctagacccccctcaaccctctggaccaaagtctgtccaggaaaacaggatgccggagcccaggagtcgtcagcctagcagttgcctggcctccagatgcctcccagggtcaccttccagccctgtggatggcagtggaatcaggacactcccttgaacagtgaatacgattttgccctggtcaacattggacgattagaggctgtgagcggcttgtcccgagtccagctcctccgtccagggtccctgcataaatttatccctgaggagattctgattcatggccgagacttccggctgctcagagttggttttgaggctggaggcctagagcctcaggcttttcaggtgaccatggccattgtccaagccagagctcagagcaatcaagcccaacagtattcggggataaccctgagcaaggctggccagggttctggctccagaaaaccaccaattcctctcatggagacagcggaagactgggagactgagcggaagaagcaggcagccaagaggctggagggtcagcacggtcaacgagaggttcgacgtagccaccagcctcccccgttacttcttgggtccctaaccgaattctggacagtgaaggtccaggagaagcatttgggccaactttcaatcaggggccgtggaccgcgctggtcctggcattcacccgggggggcagcgatcttctcccgctgtgggaggcttcctatacagccagtgaccctaacaaggaggatatcaaagcagtggagctgatgctccaggctgggcattcacaatgttgtcctggtacaccctatggatgagctgcccagccttgcagatgtccaacttgcccacctgaggctgaaggccctctgcctgccctgattcatctgtaccttaggataaatgctttcccccccggcaaggacacaatggctggactatttccggggttggctttccaagggccggggacaattcagtat

SEQ ID NO: 1166 - DNA, 592 bp, Homo Sapiens
gagcagagggtgttgtgagcataaacactggaggcggcactgccccggacccggctccgcgcaggcaggtgcactgtggagggccatgcagtgcctggggatccggagccggagccgctccagggagctctacctgcaggagcggagccttaaggtggcggcgctcaatggacggaggctgggcctacaggatgatgaggatctacaggcgctgctgaagggcagccagctcctgaaggtgaagtccagctcatggaggagagagcgcttctacaagttgcaggaggactgcaagaccatctggcaggagtcccgcaaggtcacgcggaccccggagtcccagctgttctccatcgaggacattcaggaggtgcgaatggggcaccgcacggagggtctggagaagttcgcccgtgatgtgcccgaggaccgctgcttctccattgtcttcaaggaccagcgcaaatacactagacctcatcgccccatcgccagctgatgcccagcactgggtgctggggctgcacaagatcatccaccactcaggctccatggaccagcgtcagaagctacagcactggattcactcctg

SEQ ID NO: 1167 - DNA, 760 bp, Homo Sapiens
gcaggatggagatccctgtgcctgtgcagccgtcttggctgcgccgcgcctcggccccgttgcccggactttcggcgcccggacgcctctttgaccagcgcttcggcgaggggctgctggaggccgagctggctgcgctctgccccaccacgctcgccccctactacctgcgcgcacccagcgtggcgctgcccgtcgcccaggtgccgacggaccccggccacttttcggtgctgctagacgtgaagcacttctcgccggaggaaattgctgtcaaggtggtgggcgaacacgtggaggtgcacgcgcgccacgaggagcgcccggatgagcacggattcgtcgcgcgcgagttccaccgtcgctaccgcctgccgcctggcgtggatccggctgccgtgacgtccgcgctgtcccccgagggcgtcctgtccatccaggccgcgcccgcaccccgggagcctcctcaggctccctctattaaagccgatctgactccgcccagccagatgtcccgagtgcgccaaggactgtcctctcacccactcctggattctgccctgacctccatcctggacactgccttgataacatagacccttccactgacaccctcgctctcacaccccctccagctttccgaccccacaccgacaactccccggcttccagaccctaccagcactaccctaaaccctcagccgacagtctcagccccaccgacccactttcttggcatatagccccactttaagacccc

SEQ ID NO: 1168 - DNA, 527 bp, Homo Sapiens
ggcacccgggtgctatagccacttattgagtattcttgctttgatcgtctacgtaagcatgtaagactacaacattacgacccacctcttcaagaggaaggcaaggcattatggaaaaacattatgtcatgcatatgtgtttctcatacagcatgcccatcacgcaccaatcagctggcaaggtatggggtgctactcaatccagtgaagtcttgagggtcccttccctctgtgaagcatataatctagtggggtagactgctagctactaactatgaaaacaacatagtctgacttgagagtggggaaagtggaacaagggagtaattcttatatttatgttcacatttaaaaatatttcctaaacaatccaatataatcttttctataatttccaatacaatcaacatgtattacttgtaaaataatagcatacatatatcgacagactgaagaaggtatactattagagaacatttgcagaaaagaattgcacatcttttttttgagacagagttccgctgtca

SEQ ID NO: 1169 - DNA, 712 bp, Homo Sapiens
caaagcccagaagcgcgatcaggatctgcaggcaactgtgtagggcctccacatagctgggctccagggcacagccagcacctgacaccaggtcctggccatggggggccccgaggcccactgctggcacctcctcatgcagacagcctggccagcgctcacgccaccaggagcgatgccgggagaggctgaaggtcagtagctcgctgtcctttaagaggccaccgacttccaggtagaagcagatgatgaagacgttccaggtgacccagacggctgcccacagcgtgtactagggagaggagaggatggggcggcggctgaacacagctcccgggcacacctgcttgcatccagcccccgggggaaggggtcccatgatcgcataggaggggcggcctctgctcctgagtctggcggcccccagatgcacagcatggagaaaggggtcccccaagcccacctgggacacgtctcagagctttcccacgtgggtgccccgggaatgaggcggtgggacagccagctcaagggagccccagcgcaggtcggcgtacggacacagcatcctggctgagctgccgtgacctgtcctcgcctcaccgggctgacattacacgtggacagcacaggcctccactgcagagcaccccagaagccacccccaagagagcaccccaaagagctgccagctgcttttgtaaataaagtt

SEQ ID NO: 1170 - DNA, 410 bp, Homo Sapiens
tttacgaaatagacatataaaatttaattcctttggtttaaaatacatcttcaatgatacaattaaaaataacacacaagacaaaatcaacttcataaaaaatataaaagttatatgacccatatcccatatcttatcttagaaaaccagcaatttagttcccatacttcattagaatactttaacctaagactgtaactaccagtccatttacacgaatgacctagtctagttccctgaacctaaagatacccgtgactttgttataaaattacatattttagtatttttatatacttaaatgtgtacaaaatgttcccctgccatagtaacgtatttttgtgaattcatgaatgttttctagaattgttaacatacaagataatcaaagcacgaaggctctgatgcgt

SEQ ID NO: 1171 - DNA, 862 bp, Homo Sapiens
gagcgatcgggtaggcggctctttgtcgaagctagaggaccggcaggcggcagcagcaactacggcggcggcggcagaacccagcagtgatgtggaggtggagaccctacaggagccccggacttcacctgagctacctcagtggtcaccaagagtggcaagataaagaaaaccctgagttgggcgggaccaggatgcctgaccgggacagctatgccaacggtaccgggagcagcggtggaggccctggaggtggtggcagcgaggaggccagtggggcaggggtaggcagtggcggggccagctcagatgccatctgtagagacttcttgaggaatgtgtgcaagcgaggcaagcgttgccgatatcgccacccagacatgagcgaggtgtccaacttggcgggtgagcaaaaacgagttcatcttctgccatgacttccagaacaaggagtgtagccgcccaaattgccgtttcatccatggctccaaggaggatgagcgaatggctataacgaagacaggagagcttcccccacggctgaggcagaaagtagcagctggccttggcctttcaccggctgacctaccaacatggcaaggcacgcgaggtccctatctgccgtgactttctcaacgggtgactgtcagagcaggagccaacgtgcaagttccgtcacctgcaacgggatcccgacgtccgatgctccggagctggagcgacgcactggtgcgcggctcaacaggctcagtcctcccaggcacgacgtcatgatctcctatgatatctatgaccttcctgacaacgcgcttcgaggaccatgagccaggccaaaagccggcgaggtggaatgtgccccctc

SEQ ID NO: 1172 - DNA, 195 bp, Homo Sapiens
cacattgtgctggcacctttctgaagtagtgtgtcccggtatcagccttgcaatatgttagagatgtactgtctgccgcatttggcactggttttctcttttcatttatgattaataatgtgtatacgttattcctttttattatctactgtgtaagacaagaatatttcattccaaataaagaattcagtcttt

SEQ ID NO: 1173 - DNA, 1241 bp, Homo Sapiens
  misc_feature (97)..(160): n is a, c, g, or t
  misc_feature (1151)..(1151): n is a, c, g, or t
aaatacagggatgcgcctagctgcgcaccatgtccgggttgctggcgttgctgggtccggcaggcagggtgggcgcccgggtccggcctcgcgccannnnnnnnnnnnnnnnnnnnnnnnnnnnnnnnnnnnnnnnnnnnnnnnnnnnnnnnnnnnnnnncaggctagacgcccggctgctccgcacggcgcgcggggactgccgcggccaccaggaccccagccaggccacggggacaacaggcagcagcgtcagctgcgacagtaggagaaaaagcaaagcaagtcacagcaactgaaaaagatttttcaagagtatggcactgttggcgtgtcattgcacattggaatctcattaatttccttgggcatattttacatggttgtgtcaagtggtgtggacatgcctgcaatcctgctgaaactcggatttaaagagtccctggtacagtcaaaaatggcagcaggcacaagtaccttcgtggtggcctatgcaatccacaagctgtttgcgccagtgagaatcagcattacgctagtctctgtgcccttgattgtcagatattttcgaaaagtgggattttttaaaacctccagctgcaaaaccttaatgaactcttcagtcgatacacactgaaaacctatttcttctaaattacatgatttggattggttttagggttttagggttggagggtttcttctggagaagaaggcggccaattggcttggtcccatggataaactttgcccgcaaaaaatcagggctttttggacaaactctaactcttttcggcctccaaaaagtcttggggcaaggcttatttccagtaaaagggcgcttggtgctctattaactctcaacagtggtctggtcaggcgctccggggagaagggggggtaccctctgcgcgaacccacgataccccccaccagaatggcagcctgtgggggaggccactctttccgccagcgggcggggaggcgcaaacaagcacggaagaccgtgagcaccctccgctccccgctcccccacgcaccaccgtgacgcggcgaagctgacgcccgggtggctgactaactattgccgccactagcggtgaacgtgccctcccaaacgcccagatgcgagacacacggtgatccccccngcggagcggctcacgcccccgtagggccgggaccaacccccccgcgaccacgacatcacagttcgcgcctcctcctcgtaccgacgctag

SEQ ID NO: 1174 - DNA, 363 bp, Homo Sapiens
tagtggagagaggccatttagtagtgggggcttcgctcacccccgatagggggcgccaggaagccaagaaggatgtgcagcggcggactggttccaagccccttcagaggcgcggggtcttagggggagggactggcttccgggcccaagtaggaggcagtccggctctcaggagtgctataaatggttaaagccccaggcaggcccagggctgggcctcccaaggccgcctggacatccagcaggagtggggccccgagcgtggggtccttccctgggcttggagaatttaaccccttgaccgccagctcaggctcaccccgctctggaaccaagggctgcatcaaggaaagctcacatgtc

SEQ ID NO: 1175 - DNA, 931 bp, Homo Sapiens
ggactccaagcgccatggccgctgccgcccgagcccgggtcgcgtacttgctgaggcaactgcaacgcgcagcgtgccagtgcccaactcattctcatacttactcccaagcccctggactttcaccttctgggaaaacaacagattatgcctttgagatggctgtttcaaatattagatatggagcagcagttacaaaggaagtaggaatggacctaaaaaacatgggtgctaaaaatgtgtgcttgatgacagacaagaacctctccaagctccctcctgtgcaagtagctatggattccctagtgaagaatggcatcccctttacggtttatgataatgtgagagtggaaccaacggattcaagcttcatggaagctattgagtttgcccaaaagggagcttttgatgcctatgttgctgtcggtggtggctctaccatggacacctgtaaggctgctaatctgtatgcatccagccctcattctgatttcctagattatgtcagtgcccccattggcaagggaaagcctgtgtctgtgcctcttaagcctctgattgcagtgccaactacctcaggaaccgggagtgaaactactggggttgccatttttgactatgaacacttgaaagtaaaaaattggcatcacttcgagagccatcaaacccacactgggactgattgatcctctgcacaccctccacatgcctgcccgagtgggtcgccaacagtggctttgatgtgctttgccatgccctgggagtcataaaccaacctgacctaacaacctgcggagcccctgcccttcaaatcccatcacacggctgggtaccagggcagcaacccaatcaggtgacattggggtaatcacgcgctgggatcgagggtaagtattctgaaagggcggcaaaggacggacaatgaagacga

SEQ ID NO: 1176 - DNA, 393 bp, Homo Sapiens
aagggaagacgatgcctgttggagccgcacggaagcatccagaactctgaggcctgggggccggctgcggtcagtgcaaggctgctgacatggtgtgacctcttgcaacggggtgggggcagagcgtgcggtgacaagggtcagactggcggctcccactgcagccagaagtgagggagccagcacacgggggtgggcagtggaacaggacaggatgcggcaggccccagtaccccccactcaggaatttgcttcaggccaaaaagcccacggcagcagggtaaggggccatcgtgcatgggactgcacggcaggggcatgcccctccagtccctgtgacccgagaccgtctctctcctggacgatggacatcaaaattgcatccggaggtgc

SEQ ID NO: 1177 - DNA, 233 bp, Homo Sapiens
tgcagagcttgtggaggccatggggcgcgtcgtcgcggagctcgtctcctcgctgctggggttgtggctgttgctgtgcagctgcggatgccccgagggcgccgagctgcgtgctccgccagataaaatcgcgattattggagccggaattggtggcacttcagcagcctattacctgcggcagaaatttgggaaagatgtgaagatagacctgtttgaaagagaagaggtcg

SEQ ID NO: 1178 - DNA, 844 bp, Homo Sapiens
gtgagctgtagggaaacgcagggcggcttctaggtgctgccgccgccaccgccaacaccacctccaccgacgcctcggaacccaggcctggggggcggtggggccgcgtatggagcccccgccccccggagctgccaacattgccaacgccgaccgccaacgcgtacagcacagcgctcaactttcaggagaccctgtccgtggcctatatttattccaccctatccgtgtacatcgtagcgaatcaagtcccgtggcgccgcactcctcacgacatccctctttaacagtacccctgggatggcgtgagcactcccccagcgatggacccatctgtgacgctgtggcagtttctgctgcagctgctgagagagcaaggcaatggccacatcatctcctggacttcacgggatggtggtgaattcaagctggtggatgcagaggaggtggcccggctgtgggggctacgcaagaacaagaccaacatgaattacgacaagctcagccgggccttgcggtactactatgacaagaacatcatccgcaaggtgagcggccagaagttcgtctacaagttcgtgtcctaccctgaggtcgcagggtgctccactgaggactgcccgccccagccagaggtgtctgttacctccaccatgcccaaatgtggcccctgctgctatacatgccgccccagggacactgtctctggacagccaggacacacccaagggtgcaggactggcaggcccaggcggtttggccacgcagcaggccggaacgagtacatgcgctcgggcctctattccaccttcaaccatcagtctctgccaacgcaaacaccccc

SEQ ID NO: 1179 - DNA, 1449 bp, Homo Sapiens
gctccttccggggctgcatgttctctcttccatccctcccctcctggctccccggctcccctccctcgagtggggctctagcctccttgactccctcctgcaaggcctgatcggggcccttgggagtcttggtcctgaacagcctcctgaaagtttacttcttcgtgggctgtgccaatgacccgcagcggcgacccgaaaaggagcggcttcgggcccagtgggcctccctggaaacggtgcacctggcagggctggccctgtttctgacggtcgtggggtcccgggtggctgccctcgtggtgctcgagttctccctccgggccgtgtccacgctgctgtccctgggcaaagggctcccagggtgccgccgagaggctgcagctctacctgctgtgccagtactcgctgggctgcgggctgaccgtgtggcctgagcttcctgtccaggagggctgccccttcaccgcacgctgaacctgtctgctgagcctcgggctggccacgctgctgggcctgggtgcccggcgcctccacctgccacgtctgccgcctctacgagctgcacagcagccagcgctactgtggggtgtgcctgggcctgctggccccatgcaacatggcctccccccagctgctgggccgtgccctggccatagcctttgccgtgggtgacctgtcagctgtggccctcatcaaccaggacttcctgaccacctcggaggccatgcggttctggacaccgctcaccatctgctacaccgctgctggtcatctaccatgcaggaggagcagctggcagaaccccggcctgcagagccagggtgcatcacggtgctaggtgcgcatgggcggcctcttcgagctgcttgctgacctgtgggtcgcctggctgtcaccttgctgggccatcctatgtcttccctactgggccgacctctggtgtctcgttgggctttcgccaccctgcttgaccttctgccagatacaggattaccatcccagaggcctccagtgtcaacaacaagccagccctgccctcggcacccaagtcccacagtacggacccctcatgaactgctcaggagcgatctggagcaatagacatcaagagccaaataagccagattcgcacgagggcagattgaccctacaggtcgtcatgccttggacagattaaattgtgtaaaagcatgactacatagtcccacaaaccatctataaaaaaaggccccgtgtgcaacaccaccgtcacaaaaggtgacaagctatcgcattcgtgacactatatatcaacctaccaagacatagggggcaacaccactctagggaaaaacataaacctaaaagcaactaattaatatacttatctcactaagaccacttaaagagtcaagtgtaagaacagtcagctaccacgctgcaggagacagtttaataatataattc

SEQ ID NO: 1180 - DNA, 202 bp, Homo Sapiens
gcggccgcacaagtacctgggccgcgactacctggagacgctgatggccagccagaaggcagccgactggatccgcatcagcgagatgctccttgggccagtgccccccagcttcgccttcttgccgaagcacaaggccaacgcgtacaagtagcctcaggctttcccaggggcaccctggggcgaggagagtacaataaat

SEQ ID NO: 1181 - DNA, 850 bp, Homo Sapiens
acaaataaatggggttattagacccaagagcagggtcagaaggagaaacagcaaaaacggggagtaagtgcccaggctcctgccccaaaccccttgaggaaaagagaaacaggtgttgggcaggaagaacagcaccaacagggaggagagagaggggattgggtcccggctctaccacggaccagtcactttccccaggactcagttttgtcacctgtataatgggggaagcacaatccttgcctgactccttccaagagcctcaattaggcttcggtgagagagtgggtatggaagagctttgcaaactgtaaagtgcagtacacacatgcaggctagctgtggccctggggcccaggcccagcggggctctgcggagtgggtacagtaagtgttggcaatgaaaacactgcttgaggctgagcctgggcctttgagcaccctcaggtcctccacacctgttcctcctctcaggtgcccacaacttccctggcaccttttaccctgggtggctgaggcctgggaagatgaggcgctcctggcctgggctggccctgcctcccactctgaaccctctggtcacctctgctcctgatgatgatgcacaaatgcagacctggtggtggggagcagccgtgccctgcaccctcttttccctagtcatcaccctttccgtgaggtcttgtgcgagtcacccccattcctgagctgagggtaagaatgaccggtggtgatttcttcgcccgcagcactcacagtggatgaagagcagctcactgcccgctgctggcggcctcaggcccaggggcctccaccccgcagaggcctgagccaagctctattcccagca

SEQ ID NO: 1182 - DNA, 536 bp, Homo Sapiens
ataaatgtgtaaaagtccccaacaagccagatgtctttcaatgggtttatgaataaagaaattatgatgcatccacagcacgggctactcttggcaataaagaggaacacactactgttacacaagaatgtggatgaccctcggaagaagtcaatctccgaaggacacatactgcattatcaaatttatgtaaatttgtgaaataacaattatagcacagaacagattggtggctgccagggattggggcagaaacaaggtgtgagtataaaggggtagcatgaaggagctttgtcactgtgacggcagttacatgaatctgcatatgagctaaaactgcacagagatataaacataggcacactcacatattaaaacaaacttcataagtagacccagtgcattatgagttgttacccttccctcctttttacaaaagaaagatctaaaaaatccttttacctgtattgcagttggataggccttcttttgtcaaatcaattatagaatcaagtttcttctgtacagcctaagaa

SEQ ID NO: 1183 - DNA, 529 bp, Homo Sapiens
atcagctctgtcacttacgaaacgtgtaatcctgaataactgaagaaaactttttgaagttcaattttgagataatgatggatgatttcagactttgtgagaatttcagaggtatcggcagtaggttgaatggtgaaccctccaaaagatatatctatgttccaaactcagaatctgtgaatgtgacattatttgggaaaagggggttttgcagatataattaagttaagcatcctgagatgagatcatcctggattttctagatagggcctaaagccaataatgagtgtctaagacagaagaagacacaaagaagaagagacgggaatgtggtcacagaggcagagactggagcaatgcagccacaagccaaggaacacctggacccaccagaagctggaagaggaaagaagggatttctttttcttctagagccttgggagggagcatggccctgctgacaacttattttcagacttctagattctagaactatcagataataaatttatattgttttaagccaaaa

SEQ ID NO: 1184 - DNA, 287 bp, Homo Sapiens
gcggccgcccggcccaccagctgcgccaggagcagcagcaacagcgagggcggcgcggatgggtcaggccgagccatcgccccctccctcccctcgcctccagcagcccgcgagggacgcacacaggcagaggaatccgggccggggcttctccctccggcgtctcgtgtgtggcgccggggctggcaacctgtcggttcctttttcctttaaagaaaaccgtccaaagataaactgcttcgggaaggcgctgcctccgctggcacatccgctcctcgccggatagg

SEQ ID NO: 1185 - DNA, 399 bp, Homo Sapiens
tagtattggataaagtttggtgtttttacagaggagaagcaatgggtcttagctctttctctattatgttatcatcctcccttttttgtacaatatgttgtttacctgaaaggaaggtttctattcgttggttgtggacctggacaaagtccaagtctgtggaacttaaaaccttgaaggtctgtcataggactctggacaatctcacaccttagctattcccagggaaccccagggggcaactgacattgctccaagatgttctcctgatgtagcttgagatataaaggaaaggccctgcacaggtggctgtttcttgtctgttatgtcagaggaacagtcctgttcagaaaggggctcttctgagcagaaatggctaataaactttgtgctgatctg

SEQ ID NO: 1186 - DNA, 459 bp, Homo Sapiens
cacctggcagttgagtcagattgtaggaaaattaacccagatgggtctacatttttcttcaagttcaaaccacatggtttcctagtcagaaagtctcatggactttcttcctaaggtgttctatgatcagaccacctcctaaatgtggcttttacccattacaggctacagttgaatcaggcaggagcagctgctggagagcacccagccgacagacctgcattccagaagcagcttggagaaactgggaagacatttttgacccattcttgggtttttactgtaaggttagcagttacatgatgccaccagtccaagacttagatcatgagagaaggcctttttaaaagtttaccagggaacatcgaggctcataaagaactcttttgtcttcacccatctctcctcctcccactcccatccactttctcatagctcaaaaaccactcattggtaagc

SEQ ID NO: 1187 - DNA, 574 bp, Homo Sapiens
  misc_feature (44)..(44): n is a, c, g, or t
  misc_feature (60)..(60): n is a, c, g, or t
  misc_feature (91)..(91): n is a, c, g, or t
tggtgagagtgcaaagagccagatctttctgccagccactatcnccctcccagatgttgnacacccccttcccttgccaccaggcactgcntggagggcagggagtgggagccaatgaacaggcatgcaagtgagagcttcctgagctttctcctgtcggtttggtctgttttgccttcacccataagcccctcgcactctggtggcaggtgccttgtcctcagggctacagcagtagggaggtcagtgcttcgtgcctcgattgaaggtgacctctgccccagataggtggtgccagtggcttattaattccgatactagtttgctttgctgaccaaatgcctggtaccagaggatggtgaggcaaaggccaggttgggggcagtgttgtggccctggggcccagccccaaactgggggctctgtatatagctatgaagaaaacacaaagtgtataaatctgagtatatatttacatgtctttttaaaagggtcgttaccagagatttacccatcgggtaagatgctcctggtggctgggaggcatcagttgctatatattaaaaacaaaaaa

SEQ ID NO: 1188 - DNA, 588 bp, Homo Sapiens
agagatttgggagctgtctggggccttgtcctgagctgcctgtgccctgcctcttgagtccaggccgaagtagatggaattaggcatcatctccacagtatttagggctgaagactgctcagaggaggaagtggggagaggagggggccttgggctgggctctgggctcctggacactcctggtccccccgagggctgggctcagcccaggtctctgagtggtggcagggccactgagtccaccaaacacggtcctgggcttcggcacgggcttaaggggcctgggcttgcggggctgggctgggggatggttccatggcactatctgatttgggatccagggagccctctttcggtgcctgtctgcagcaggcgtagaatgcgtttcccgtgcactgtggcgctgatgcccaactgcttcaactcctcgtggcacaggcaccgggctgcacctgctgtagccaggccatgccgtcggaacgtgtctgcatactgctccaggtgcaccgtggccagccacacagcgatgtccaggtcctcactacgcgccgccgtccgctcacggtgcccccgctcgtctgcctggtc

SEQ ID NO: 1189 - DNA, 426 bp, Homo Sapiens
tcctgaaaaagaaaccagaaaaaaatgtactcttactgagataccctctcaccccaaatgtgtaatggaaaatttttaattaagaaaaacttcagttttgccaagtgcaatggtgttgccttctttaaaaaatgccgttttcttacactaccagtggatgtccagacatgctcttagtctactagagaggtgctgccttttctaagtcataatgaggaacagtcccttaatttcttgtgtgcaactctgttttatcctagaactaaaagagcattggtttgttaaagagctttcaatgtatattaaaaccttcaatactcagaaatgatggattcctccaaggagtcctttactagcctaaacattctcaaatgtttgagattcaagtgaatggaaggaaaaccacatgcctttaaaactaaactg

SEQ ID NO: 1190 - DNA, 486 bp, Homo Sapiens
ccagggtcttgtgctgtggggctgggggatgccctcttttctatatttatttcatagaaagtctcctgcgggagcggaaatgcagtccggcctagggctcccagcccttgactgtcctcctgtgagggcctgaagctcggccagggcccgtcgcagcggagccccctctcagcagcccaccgggtccctccaggctgctgcccgtgcgtggtctttctcctccttttcaaagcaatagccgccgggtctgcaaagccctgtcagacagactgggcccttccaaggtcaagccatgtgtctgatgacattcctggtgaagcaaaggagaggaggatgggtcagccctcactgggtgtcacacactgagagaagtcctattgtaaagaaacggaaaaagtcacaaaaaagtttgtataaagacatatttttgtactacatggggactcttcctgcatgtcagcaataaaacttcctgatcaggaaaaa

SEQ ID NO: 1191 - DNA, 560 bp, Homo Sapiens
gcgaccgccccaacaggccggggagtctacactcgtgtccctgcctacgtgaactggatccgccgccacatcacagcatcagggggctcagagtctgggtaccccaggctccccctcctggctggcttcttcctccccggcctcttccttctgctagtctcctgtgtcctgctggccaagtgcctgctgcacccatctgcggatggtactcccttccccgcccctgactgatggcaggaatccaagtgcatttcttaaataagttactatttattccgctccgccccctccctctcccttgagaagctgagtcttctgcatcagattattgcaacatttaacctgaatttaaaagcacacgaaacaaaggtgtcaatgggaatctcgcggccaacgcccccagatgtaggggaggcctgattcgcatcggggccgggcgcgttactccatggggtcggccccttagtgaggtgtcacctctcccagagtcacaggacgcttctgggaaggcccgagcggaacggaaagggtggtggctggaaggggagggtggtgagggc

SEQ ID NO: 1192 - DNA, 117 bp, Homo Sapiens
ggcaccatgtgctggcaagggaggatcagaggactgaaaaatgattctgcaactctcttaaagttagaaatgtttctgttcatattactttttccttaataaaatgtcattagaaac

SEQ ID NO: 1193 - DNA, 446 bp, Homo Sapiens
gcttccaagactgtctgcagaattcctttcctagggtctgtctctggtacccaaaagggcagagaaggaaccctaagattagcatagagccactcatctctcctcccctccccaccccttcttcccctgcttccattccccatggctctctcctctgactgtgaaacacttcctctccagcagtgttgggaaagttctggacctctactggatctagccataaatggtggtcttcagaaaaatggagaattgtggctgccagcacccacaagacagcagcctcatgccatgcaggcagcaagccatcctgaacagcgttcctcccagagtctgtttcctcacctgctgttcactggtgagaggaaaagggacttgttctcccttgaccagttttctagttttcctgttcccaccctggtctttgcctgatgacagagaaactttct

SEQ ID NO: 1194 - DNA, 431 bp, Homo Sapiens
ctccctccttcccatccctactcattagctccctgctcctgggatgcttcccaagcagcccaggcctctagcctccatggctgatgacctcagctttcacactggtgaagtctgtgtacccatactgcagccccatcccatggggcccctgaagacccactgaggaattccgtagggtcttgttcccacgaccggagtgctggctctcacagtgaattttgatgcatttaaaataagattctgatgccagactgttaaaataggcgctggttctgaagcaccgatggaaacagattgatgcagatggaaggaggaagggagactgggcccactgatttccagccccaccatgtgtgctgttttcagatgtgattgaggggtgttctgccctgcctccactgtcacagcctttaataaagatgtgaatcttg

SEQ ID NO: 1195 - DNA, 522 bp, Homo Sapiens
aaactgaatttttgaaagactattgcaggtgtttaaaaagaaagaaaagttgttttatctaatactgtaagtagttgtcatattctggaaaatttaatagttttagagttaagatatctcctctctttggttagggaagaagaaagcccttcaccattgtggaatgatgccctggctttaaggtttagctccacatcatgcttctcttgagaattctatttggtagttacaattacagaaactgattagtttgtcagtttgcaaatagattttagcacagtactcatcactcggatagattcagatgttctttcacatcagatgatctgtaacactgtaaaatactgatctttacaactgtttaatcagttttatttttgtacagtattagtgacctaagttattttgctgtcccgtttttgtaaatcaaatgaaattataaaagaggattctgacagtaggtattttgtacatatgtatacatgctgtccaaataaaaataataaatagataagactgaaa

SEQ ID NO: 1196 - DNA, 971 bp, Homo Sapiens
  misc_feature (103)..(103): n is a, c, g, or t
tgaggcgacctagaggatcccctatgtctcgatcgttagcatgagcaccagtgggtactcgccagaaatacagaatcttaaagccatgccccttatcttcagnaatcagcatttcagtaagctcctcagataatctatatagctaggaggtaccattcagaaataaggaatatagcaggggcaattattgggggaaaaagtcattattttaggtaaggtcagttcgaagtgaggatattctaaaaagttgatcgcatagcagttgggtgtctgggtgtggaggctaggatgaagtctggtttggagacagtttagcatttatcaacctgtatttgaagtcacggtctgacgcaagtttcctgggatttgctcaggaaaagtatatccagttagtgaggcagagggccctggagggagccctaggaaacaccattatctacaagtcccagacagcaaaaggtactccacaagaaacagaaggaacttccagtggtagcaaaagcaatgtgaggagtgggaagagagttccaagtggcaggatggtcaacattcgcattttccagcagaagtcacgtaagaatagacaagagtccattggatttggcaatcctgatgtcagggtaaagctaatggctggagattaattcccattaagttctttcttgaccttagtatgtggggtggcaatttaaagattctgcattcaaagttcagatgagtagagtatgtggaaggagcttggtatggagccaacttgcaaatgttctcttccattagatggtaaattctttgaagcataaggaaggcacataaagatgagtaagacccagtcctaaccctcaaagtttataaacaatacgaataagacaactgtagtacaagatggggcattacaatttataaaatattatggggactcaaagaggaatacaccatatgcagtcagaaaaggttgcttacttctcagctgt

SEQ ID NO: 1197 - DNA, 586 bp, Homo Sapiens
  misc_feature (17)..(17): n is a, c, g, or t
  misc_feature (77)..(77): n is a, c, g, or t
agcttcaccagacaacncagcctgccaagtggctggtgggccatggctctgccgcctctttgtggtaacccctggcnaccaccaggcgtgccgtggagaagtgcagcttccccttcaagaatgaaacacttttatttccccatctgaccctggaggatccaccagccctgtcctccttgctgagtggggcttggagggaccacctcagtcttcacattgtggagctgggggaagaaacctgacaatatgacagagcaccccctgcccaagactcagccatagaagatgccgcccccccttctacttgggtagctgggctgggacgctgggacaggaccccgtcctccttcatgactcccactgctgcctctcctgggcatggctgttagctgttctgccttctgggtgagctggcactcttctccctgagaccaaagatttgacctgtcggtcttgatgtcaaggtccccaaagaccaggttaagtgacgacccctgtctgttcctgccctgttgcttccagcccctgtgatgtttgaaatatgtgatagtacctggttgtgaaaaaagccaatgaactgctaaaa

SEQ ID NO: 1198 - DNA, 653 bp, Homo Sapiens
ctatgttctcgttcttattataatgcaacctaaccaagaaatcaacatgctcctgctatttcaatgatgcttcatgagggcaaggcctgggctctgctagggcaggatggtgctcctagagctacctgagctggacaaacccatggcagacagaacagaaagtctggcacctgctgactccggccctccctgtcacttcatcacacagcaaatcgttaaaactttggtttttgcaaagaacatttaagtccatgttcattttcctgcttcagggaagatggtagcaaagtagaaagccgaatcccttcctattttagcacttccaagtatcctggatgaatataggggcgaggggctacactgacaattgagcaggatgcactctaggtcatggtggacaggcacggagctcttgagagcactgatcaaaggaaagagggaatctctatctggatggttggactggaaactaaataatgactaatgccaggccagacccgttaccctggggtgggtatggatggacctgggatcacctccgaatcctgggatcgtgacgaaaggcatgagaaacagctctggtttacagactcgatgcaggagctggaggtggcagcacattaccagctgtcaggatgacagacaccttgggc

SEQ ID NO: 1199 - DNA, 820 bp, Homo Sapiens
ccgcattggcccggctgctgcgggatgccgaggggctgcaggagctggcactggcgccgtgtcacgaatggctgtcagacgaggacctggtgccggtgctggcgcggaatccgcagctgcggagtgtggcgttgggcggctgcgggcaactgagtcgccgggcgcttggggctttggccgagggctgcccacgcctgcagcgcctgtcgctcgcgcactgtgactgggtggacgggctggcgctgcgggcctcgctgatcgctgcccggccctggaggagctggatctcaccgcctgccgccagctcaaggacgaggccatcgtgtacctggcgcagaggcgcggcgctggtctccgcagcctctctctggccgtcaacgccaacgtgggggacgccgcggttcaagagttggctcggaactgcccagaactccaccaccttgacctcaccggctgcctccgcgtcggaagcgacggtgtcaggacattggccgagtactgccccgtgctgcgttcgctgcgggtgcggcactgccaccatgtggcggagtccagcctgagccgcttgcggaagcgcggcgtggacatcgacgtggagccgccgctgcaccaggccctggtgctgctgcaggatatggcgggcttcgcaccttttgtcaacctgcaggtctgacccgcctgccaatcggagcacagctggactgtgtggctggggcctgacactgagctgtagggaaactgaactgtgaggacctctggtgagaggccagtgccctgccccaccctggagcttcaaataaagagctttttaccccctcta

SEQ ID NO: 1200 - DNA, 490 bp, Homo Sapiens
actgtgaatttcctgccatggggtgatcagaaatgggacctgcatggtatgaggaccagttatccccatcattgtatgttcactcacaaagacagaacaatcccctccggtgtcacagcaactgttctgtaagatcactttgccattttattgaatactttctggtgaggttctctttccctgcacacaggcttttcttccctaaaggcctctaacctgctggaagatagggaccaagttgagtattttatttcttctgtctacagcatccagcatagttctaattaaatacaattaggcaagtactcaaataagtcttgcctaattatatttaaagtaagtatcctgcttaagtgagagaaattcttggcagatcttacctctagtactattgtttagtgccaggatggaaggtgagtctctgaattagactttttgctgaaagaacgctcccagctgggcatgctggctcacgcctgtaatcctagca

SEQ ID NO: 1201 - DNA, 870 bp, Homo Sapiens
  misc_feature (428)..(428): n is a, c, g, or t
  misc_feature (476)..(476): n is a, c, g, or t
cacgctggaactgagatggaatacaatgtgccctctcgcagggttggctttggaatacaactaggaaactgtctgttgcacagcagcacaaggaattgaccgggcacagctatatgggtcgtcatgccgattgcgcgatcgcacaagggatctgaccgatggtttccatgcgaagcgtgactaggagtggcacacaggtaggactatcggctagcagcactctctgtatagggcacgattggaacaatctcctgagcaggcacagtcagacgatccaatcaccgccgcgactcgcattgcatccagcacagccttcttcatcaaggctcacattgaggggaatcttcgatagatacgataggcatgacaatgttcagctgccacagtcccaagcttccactgccccacaagttcccagccccttcgtngcacttacagggcgtcttagcagctcgtcaaggcaaccgttgttgccnagctcacagggagctaacatggctcctgcctgtctcctgccttactgtgtagcaatgcaacaggtcacatccttctcgtttcttggtctcagatgccatgcatactcgcggtgagcagtccaatggatgctaggcatggctaccctcgggctcatgtctgggtgtaggctgccacaccctccatcatggcacagggcaccatcctcgcccagtccactgcacggggacaccgctgcctgctgccatgttgaggtgaatgccctcggccgtgagagcgtcgtaaccagggcccgcaatgatgatcacctgtgagccgggcaccatgcctggcatggggcagctggccaccacctcacccagggcctcctggggcacgttctcaaagagggcgctg

SEQ ID NO: 1202 - DNA, 634 bp, Homo Sapiens
aggcgagccatctaccaacgcatcgggtgacgactgagtggatcaaaaattatgcaatcataccaatgaagatttgacatatagaactctgtagaagaagggtaggaaggggctttttaggagaatgaaccaaagagagagtcttgagggcagctaggttagaaaacacagatcctgaaaccgaggagggcaaggctgaagaacagggaggaaaccacagcactttcagctgtattcatacggaatactttcctaattgtgggaagacaccacaaggttgaaaacataaaatattacaaattcagccataggaaagtattgtccaatgctattttcagttaatatgaaattatttcaggaactgcaatataatacacgatctttaaaattcaaagtagaggaaatattgcgtctagtatctactggctctctagttacctcttaaaggaataaaaacaaagatagagaaggtaatacagcaaagaattacacaaaataatttactgttagtttattgcataaccacgtcacaccaatctgccattctttgggtgggaggagttatttcttttgctaatgtggataacaacataaagtacctacgataagacgtaagtaacgatcgagacagtag

SEQ ID NO: 1203 - DNA, 1103 bp, Homo Sapiens
  misc_feature (966)..(966): n is a, c, g, or t
gggccgcgtagggcccactggccaggagggcgccgcgcggaggcgcggggcgtgtctcctgtcaaaagccatgctcggcaggtctgggtaccgggcgctgcccctgggtgattttgaccgcttccagcagtcgagcttcggctttctgggctcgcagaagggctgcttgtccccggagcggggcggcgtggggacaggggccgatgtaccccagagctggccctcctgcctctgtcatggcctcatcagtttcctggggttcttgctgctgttggtcaccttccccatttctggctggtttgccctgaagattgtgcccacctacgagcggatgattgtgttccgcctgggccggatccgcaccccccagggacctggcatggttctgctcttgcccttcattgactcctttcagagggtggatctgaggacacgagccttcaacgtccctccctgcaagctggcctctaaggacggggctgtgctgtccgtgggagccgatgtccagtttcgcatctgggacccggtgctgtcggtgatgactgtgaaagacctgaacacagccacacgcatgacagcccagaacgccatgaccaaggccctgctcaagaggccgctgcgggagatccagatggagaagctcaagatcagcgaccagcttctgctggagatcaacgatgtgaccagggcctgggggctggaggtagaccgcgtggagctggcggtggaggccgtgctccagccgccccaggacagcccagctgggcccaacctggacagcaccctccagcagctggccctgcacttcctgggaggaagcatgaactcaatgggcaggagtgcccccgtccccggggccagacaccgtggagatggtgagtgaagttgagccacctgccccctcagttggtgccaggtccagtccgaaacagcctctggcgaaggggctactgactggtctacagncccttctgtctgaaggccctggccagcccaagtcgggcctgctaccagttcaatgtcgttcctggccagcgggacccaaagggcctactttctggacctccctaccggaccaaggaaaaagtgggacaccggggggc

SEQ ID NO: 1204 - DNA, 573 bp, Homo Sapiens
tgagccaccgcgcccggcctgaaatgcaattttaagagtgccttcaaatgccatctcagagagatgatctgcagggccacagggcatcaacaatcaagaagagttctaaaggaggccaacaccattttaagagactggttggtctggtggataacggaagactggaagagttaaatacgtatagtttagctgggcagacccagtagggagcaatagaaggtggtaaatgtggatgtggtagcaatctaaaaatatccataagatgtaaaggattagaaggaagtattatttagcatgcaaatcagaaagaatcactagatattttaaagaatgatatgaggaattaggttctgagatcaaaaaattggaaaactgatattataaataaagtgaaaaagaaagcattctcaaatactttttacttgagaagatgggaaaaaaaattctttggataagaatcgaaaatggggttaactttagggagacatctaagaagcacctgaaataaatctgacctctcgcattcacacacagatttatatttgctagctaaattctaacgatcgagacata

SEQ ID NO: 1205 - DNA, 758 bp, Homo Sapiens
aggataatgattactttaaaaagaaagcccttaaaatcatggaagaagtcacttgagaagaaatccatccctcaatgggtcgtcatctttctactataaagcttgctgtacccgtgtaatgggcttgtcctgatacttccactataacagctttaaaatcaccacatttcgcttccctcacagctttccctgtgaatactgagccagttgcactgcttttgaaggctctcatctggttcagttccagaagccctttgtgatactgtaaggcaattcgggctgtcactcctgagccagtgggacttctgtcaacctgttcatctgcaaaaacacaaatgttggtgcttggttccttggtataagcatcttttccatctgttaatatagttccatataaaaaggcaaggtcttcactatcaggatgattaattttaaactgagctttcactgcctctgtcactgcactcgtctgcatccagcaacggtcccgctggtatcttgcagaagcaaactgtctacgtcgctaactgtttcaggcacgtacacaggaatgcataataagtgcacccgccatagtgacaatgtccaccatcacctttccatgtccaggaacatccaccatgagatctgtgcccagcacgaaggccgggacgctgtggaagcgcaccggtccgtggctgcggccgtcctcgcacgccacgaagcctggtcaccagcccgacaggggcagtggatattgacgcgggcctcgctgggtg

SEQ ID NO: 1206 - DNA, 846 bp, Homo Sapiens
  misc_feature (824)..(824): n is a, c, g, or t
ctgcgatcgttagaaatagtcgatttcagtaacataacataatgggactgggaacacattttattagttaggaggagattatagtagtagtattaacatcttacatctgtaagcaccctggagtccacaaaccaccgtcacatagtttctaatttaatccagccttagccacatggcaccctggaggactacaaaagaaactaaagaccctctgaagcttttaagctacagactaaaaagggtggggggacagaagtaacaagacataagaacaaatacaacatatcaaaataactagaaacattaagatctgctcaaattttataccatttcaccaaacccaaaatacataaatgtctatgatactaaaaaatgatagttagacctggccctatttttgacataaaatttcagtataaaaaaaacagctaagtgtttctaaaagtgaaatttgacgtagcatactaacacagcattttgagtttggggtattgttaatgtgggaaaccattcctaaagaaatgggttattgaacagggtctacacattgacaaatatgaatttaagaacagcattttaactgaggaaaaaaaataagaaaagaggtatccaaaactgtactgaaatgatcttgcttgtgagtccagctcttacgaaagaagggtgaatttattttctttgtatctccagcactgactagaaattcagaaaaaatttttaaaacggaaataaaacagttatgtgaaaatacagaaggataccttaaagaacaggtttttttaacacacttactatgcagctttgtattctgcgaagaaaaaaanctgggggtcctctagagtcacc

SEQ ID NO: 1207 - DNA, 1065 bp, Homo Sapiens
  misc_feature (22)..(22): n is a, c, g, or t
  misc_feature (643)..(716): n is a, c, g, or t
  misc_feature (904)..(912): n is a, c, g, or t
gaattcatgcagaaaagggggnagggaacgacactagccccgagagtttccttttgcacaacgcgctggcccgaaagcccaagcggatccgaaccgccttctccccgtcccagcttctaaggctggaacacgcctttgagaagaagcactacgtggtgggcgccgaaaggaagcagctggcacacagcctcagcctcacggaaactcaggtaaaagtatggtttcagaaccgaagaacaaagttcaaaaggcagaagctggaggaagaaggctcagattcgcaacaaaagaaaaaagggacgcaccatattaaccggtggagaatcgccaccaagcaggcgagtccggaggaaatagacgtgacctcagatgattaaaaacataaacctaaccccacagaaacggacaacatggagcaaaagagacagggagaggtggagaaggaaaaaaccctacaaaacaaaaacaaaccgcatacacgttcaccgagaaagggacgagggaatcggagggagcagcggaatgcggcgaagactctggacagcgagggcacagggtcccaaaccgaggccgcgccaagatggcagaggatggaggctccttcatcaacaagcgaccctcgtctaaagaggcagctgagtgnnnnnnnnnnnnnnnnnnnnnnnnnnnnnnnnnnnnnnnnnnnnnnnnnnnnnnnnnnnnnnnnnnnnnnnnnnaagctgaacgtgcactctgacaaggggagctgccaatcaaacaccaaaccgggggagacaagatgatttggcagggtattcccgtttatcacagtcccctttaaaaaatgattgatgatgataaaaaacccccaacccaaccagggaccagggacttttttggttttttgcaccttcgcctgggtttnnnnnnnnnatctttttaaaaataagtttggttagtaagaaaactcaactttcccttatcttagccccccattcccaaaacccgggtttctcaaatcctcttgaaaatggctggttaaccaatttgttttgggccaaaagtgggggggttttaaggaaccca

SEQ ID NO: 1208 - DNA, 514 bp, Homo Sapiens
cccaaatttcaacatctgtatttgcttacatacattctaatctattcctgctaatgaagaccttcctatgtgttcctagtcagtggctcaagtaaaatgcaaagtgtgccctagggatcaattcagccaacaacagttctcacagtattttaccagtcaaatactaacgccattgaaacacatgtcttcccaaaatctggttccttattagaccagatgagtttacggttttaacaaaagcccaccaaaaacatctttttaccaagaaagccacactctcaacaactgattaagattgtggtaaatgaaaactacgaaaaggactaaggaaaatgtcaatattggtgaggagcagagtgcacctgccagggaacctcacgaataaggtcattcttgggattctttgtttctcctctctccaggccaaaacatgttaaaaaagggaccacttatgatctttaggctgacatgtgtatgtaaatatataaacccacacggggagtcttctgttgca

SEQ ID NO: 1209 - DNA, 175 bp, Homo Sapiens
  misc_feature (160)..(160): n is a, c, g, or t
gtaaaaaactgaaaacccaaaggcttatctacaataaataataaaggatatactgatacattcacacaatggagtattatacgacgatgaaaaaaacaactacacccaaacatgagtaaataatacagacagaatcttcactgaaagaaaacagatacanaaaagtatacgtata

SEQ ID NO: 1210 - DNA, 604 bp, Homo Sapiens
gctgtccccagaggtgcccagccttgactccacttctgtgtctgggatcccaggtgggcgggactcctgggttcctgtgctctcagcggccccctcaggttcctctccttgctgctgttgccccaggtgatgttcaaccatcatctggagctctttcattgtgggtgtgatccttgtcatcttcttccgttgccgtggagacattgccaaagtggacttgagatgtgggttggggatccggtcttcatctatctctggggatgactggtcaactggtcagcaacgagggtggcaggcggtgggcaggcgctctccgaatctgctccgccgcctcggggatcaaggtgcaggctccagcagcgggaccgtgaactggatctttcagggggctgttgtcttgctccatggctggggcggcggccggtgggcccgcagctgcggcagggagggaaggcggcgggactcggggctgggccagggcgcgctccactctccagcatccgctccggccccgaccccagcaccggcgcgctcaggcatcccaggcatcacaggcacagcgctcaccagctcgatccattaaacccatgaccaggaccagcct

SEQ ID NO: 1211 - DNA, 1319 bp, Homo Sapiens
caggctgtacaggtcagaatcgtagggatcttgatatcaaaacttctttccttgcatgcttctctgatcctgtggagatgaaaattgacatccatagtcatattctaccaaaagaatggccagatctaaaaaagcagaccctgagacaaggattcagatgcaagtagtttgctttggaggtgatcccaggaaacaccagtagagtgaggaagtgagacagggaaaacagggcagccagtgaaagaggtttggctacggaggctgggtgcagctccaacaccacagcaagggagaagcaaagttgttgaaagatgggaaagtcttcagagtggtgcgagagaattgctgggatccagaagttcgtattagagaaatggaccaaaaaggccaaacctgaggacactttaaacctgtgccagcttttaaacaacgaccttgccagcactgttgtgagctaccccaggaggttcgtgggtctggggacgttgcccatgcaggcccctgagctggcggtcaaggagatggagcgctgtgtgaaagagctgggctttcccggggtccaaattggcacccacgtcaacgagtgggacctgaacgcgcaggagctctttcctgtctatgcggcagccgaaaggctgaagtgttccctgttcgtgcatccctgggacatgcagatggatggacgaatggccaaatactggctcccttggcttgtaggaatgccagcagagaccaccatagccatttgctccatgatcatgggtggagtatttgagaagtttcccaaactgaaagtgtgtttcgcacatggtggtggtgccttccccttcacagtgggaagaatctcccatggattcagcatgcgcccagatctgtgtgcccaggacaaccccatgaacccgaagaaataccttggttccttttacacagatgctttggttcatgatcctctgtccctcaagctgttaacagatgtcataggaaaggataaagtcattttgggaaccgattacccctttccactaggtgagctggaacctgggaaactaatagagtccatggaagaatttgatgaagaaacaaagaataaactcaaagccggcaatgccctggcatttttgggtcttgagagaaaacaatttgaatgactgaatttactacaaaggcaaactttcaaaaggatatctcatttttgtttctaaatatgtatcaacaggtatcaacaaaatcctattttgaactattttactcagaaatgaatgtcccaaatatcctaaattattcataataacaaatgatctgtaagtgttttcattctg

SEQ ID NO: 1212 - DNA, 892 bp, Homo Sapiens
cggagagaaagccgggacttgagtgtggtctcctagcaggaggagcgagagagcccagcagcgatacggtggttttcgacccagctaggggccaggcctgtacgattgggagccctgtgggcagccccccgcgcagtcaccacgactgcggcaccctgtggacgggcgttggctctgcgtggtggtgcggctgggacgggtctcgccgcttggccacagtgacctgcactggacacagagcgctggtgtgtgggaggcgtggacatgggacccctgtgtgactgcccccccgccggcctcagtagtcacacctgcacccgaatctctgaccgagagctgcaggtggctggccgggagggcggtatccacactcagcgacgctatggaagcatctacacattaatggctggacccccgcgcccgcacctattgctacaagcaagaaggctgccacacagcctcacgctcaggtcactgtgcggccctgctccaaactcctggaccccatccaggtcatcagctattgctctttggaggttgcaacttagctgaaccagaagtagctgggcattggagtcatgggaaacattaaggaggaaccacctgttgctcctcatttgatggaacagcttgcaaggccttgtgagcagtgggcaagggtcccagaaggggccccattgggacttacggcatcactcatgtactgtggtcgggccctttgctgtgctgtaggttggagaaactctgaccagagctagagacaccatcttgaattgatctctacatctatgaaacgtcgcacattctcctcctttggtggttccaccatcccctgtgcatgatccgtgggataagcggtgggccatcgcactgcttggaatgtcagttatcc

SEQ ID NO: 1213 - DNA, 647 bp, Homo Sapiens
ctcagttcggaatcgctgcatcccaggctggggatagacatggaaagggtgcacctgccggttctcagcgccttcatggagcacaggaatgggaatgtagcctggtcggagctgggggtacacagggtggccttccctagcaggcggcagcctagagccctcccgggaagggccattggcagaggatggagtctccttggggccctcagagggcacgcgcgggtcgttccacgtagtggtgcggctgttgtggtccacgaagaagggccagccggtctgcgggtcgatcttgatctcccatccggggggcaaagggtcgcggtcaccgttgccggacgccacctgcatcatgggcgagtgggtggcggcgctcatgctgggttggggtctgcccgctggggcgcgggtgcggggcgctggctccgggcgccgagtctctggccgggccgccgccgtgggcccctctccgccgccgacgtgtccgggaagccggcgccgggcacctttatgaattaaaggcgggggtgacgtggccagagaggggtggaagtgtctggaaatagcctcctcgctgccagaccggaaggaggagataaagggaggtagcactggccggctagaaacttctggtccagtccagatcccta

SEQ ID NO: 1214 - DNA, 1117 bp, Homo Sapiens
aacgtttaactataagcggccctaaggtagcgaggctgggtggcgaattcggcacgaggctgcgggtagggggcggcgcccgcggttcaggattccagaattggaaataacgggagggaggacctggtccagcttcccttcctcaaataaggaaattgacacctggcgtgagtacctgtggagaagaaacaatggattccttagaccatatgctgacagatcctctggaacttggtccgtgtggagatggccatggcacgcgcatcatggaggattgcctcctgggaggcaccagagttagtctgcccgaggaccttctggaggatcctgagatcttctttgatgttgtcagcctctcaacatggcaggaagtgttaagtgattctcaacgtgaacacctccagcagtttctgccccagtttcctgaagacagtgctgagcagcagaatgaactcatcttagccttgttcagtgggaagaacttccgctttggaaaccctctgcacattgcccagaagcttttccgagacggacactttaaccccgaggtggtcaagtaccggcagttatgcttcaagtcacagtacaagcgctacctcaactcccagcagcagtatttccatcggctgctgaagcaaattcttgcttcccggagtgatctgctggagatggcccggcggagtggccccgcccttcccttccggcagaaaacgcccttcaccatcccgcacacctgaggagcgggagtggcggacccagcaggcgctacttgaaggtcttaagggaagtgaaagaggagtgtggtgacacagccctgtcatctgatgaagaggatctcagctcatggcttccgagctctccagcacgttctcctagtcctgcggtgcccctgcgggtggtgcccacactttcaaccacggatatgaaaaccgcagataaagtagaactgggggacagtgacctgaagataatgttaaagaagcaccacgagaagcggaaacatcagccagatcacccggaccttttgacaggggacctgactctcaatgacatcatgactcgagtaaatgctggcaggaagggctctctggcagccttatatgacttggctgtcctt

SEQ ID NO: 1215 - DNA, 830 bp, Homo Sapiens
cttttgtattcacttctggtctctttaagactgttttaaaagaaatcaatttagggaaccccagttatataatataaactttgtaatctgagagaaaaaatgtatagtaaatctaagtcttgatttttaactttctattgtaaaaaataataatatacagagtttaatagaaggtgatgttttggttttgttttcccagaggctgccatatggtctttgagtacggggatgtcccaaactggcccaccaatgagcatggcggctccggccaggaatgccagagttagcctcccaggcttgcgggtggacatgcctgctccctgccagcctccagtggcctggccaggccctcccgagcctgtctgccctccccaggggtggaggagtctctgggccccaggaggattccctcccggagactcgcacggtgctccctgctcacgcgttgtcacagttagtccggaaatgactgaaaccaggcattctcccggacctcagcgtgggggagcctccaggcagacgctgggtatggagctgtggtgtggtctgtcctgtatggtggccagtgctttctgccagcatttctggatggatatagggactatcattagtatcctaatacacggtgattttaaaacaaccataaaattgattcagagtccactgacccttacagatgtaggtatacccttactggagagggaactctgatgaggagatgctggtaaattatcattttttaaattgctggtgagtctgacacttggtgagttttcagccagtttgttaaacttttaattaagttttgtttataataaaaatataaatgg

SEQ ID NO: 1216 - DNA, 453 bp, Homo Sapiens
cgttctcgccttggttttctaggttgtgttgcggcaggagctgactgcccctaggcctagatctctgcacaacttcgctcagggacacctgcctctgtgcatgtctcatggtgtgaatgtgtttcctgctcacaggtaccgttttgtgtcatgcagttactggaatgtacaaaagcagctgtgatctttgtgagagctgcacagagcaggagtctgagagctgcacagagcaggagtctttatttggttcacttctggtctgcagcaaccacttgctactaaaagatggaaaagatgtacaaaaatgtcacagccctttagaaagcgacattatcagaaatgtatgaccttcagtcctccctccctctcctatgcccccaccagaccaggcggcgagaaggaacagggagtgaacatgtaacggaaaacaataaaactgaatttaactggaaa

SEQ ID NO: 1217 - DNA, 724 bp, Homo Sapiens
  misc_feature (164)..(164): n is a, c, g, or t
caggataccacaatgttcagggacaagagagataccgtgaactctgactgccagtgagctggcagtacagagccatatttctcttctttcaaaagcaaatgggagaaacatcactgaattctttttctcagcaaggaacatccctgagaaagagaatgcatccntgagggtaggcctctgaaatggctgctttgggggcggctgtcttttacggtcaaagctgtgggatgaaataagccccagtctcccatagagctcccaggcttattaggaagaggaaattcccacctaataaattttggtcagaccggttgtctgctctcaaaccctgtctcctgataagatgttatcaatgacaatgcgtgcccgaaacttcattagcaattttaatttcgccccagtcctgtggtcctgtgatctcgccctgcctccatttgccttgtgatatcttattaccttgtgaagcatgtgatctctgtgacccacaccctatttgtacactccctccccttttgaaaatcactaataaaaacttgctggttttacggctcagggggcatcacagaacctgccgacatgtgatgtctcccccggacacccagctttaaaatttctctcttttgtactctttccctttacttctcagaccagccgacacttagggaaaatagaaaagaacctacatgaaatatcgggggtgaatttcacctgatatctggctgaa

SEQ ID NO: 1218 - DNA, 490 bp, Homo Sapiens
ctttgtgcaccctacgggcgggccgtcatcatgtttggcgtcccctacgtctacacacaaaaccgcattttcaaggggcggctggaaaaccttcggggccagttccaaatttgttaaaaagactttttttcctttgattccatgcgccccccggcccaatgtgtgggtcgggccatcaagggcaaaacggactacggcctcatggtttttgccgacaaacggtttgcccgtggggacaaacgggggaaactgccccgctggatccaggagcacctcacagatgccaacctcaacctgaccgtggatgagggtgtccaggtggccaagtacttcctgcggcagatggcacagcccttccaccgggaggatcagctgggcctgtccctgctcagcctggagcagctaaaatcaaaggagacgctgaaaaggataaagcagattgctcagcagctctgagtggggcgggtggggccataaacggttcctggtg

SEQ ID NO: 1219 - DNA, 475 bp, Homo Sapiens
acggagctgcacatctagctgtggcccaggctgggccccgacctgggatgcgcacagtgtccccaacgcaggccccactctgagcctgccctgggcagcctcggactatgactggctacggggaggccaccaccaggccccagctctccaccctgaactccccagccccctcagagtactaggaccacagaagccctgttgctcacttgacctgtgaccaggtccaatgtggggagaaatatgaaggaggtagcagccctgggttctcctcagtgagggatccctgccctgcaccagcaccctgagatggagctgagactttatttattgggggtagggggatggaggaggtccctccaacatgtttggacccagctcctttgggttccactgacacccctgcccctgcccctgcccagaaccaagtgccatttctcactctggagccttaataaactgcaatttgtatccaaaa

SEQ ID NO: 1220 - DNA, 538 bp, Homo Sapiens
aagctcaaagcatttcccaagccattcttgcacccctaaaagttcatggtcactatttggtggtcggctgccactctgatccactacagctttcggaatcccggtgaaaccattacatctgagaagtatgctcaggaaatcgatgagatgaaccaaaaactgcaacgcctgcagctggcattggtcaacagaaagggcccaattcttctccacgacaatgcccgaccgcatgttgcacaacccacacttcaaaagttgaatgaattgggctatgaagttttgcctcatccaccgtattcacctgacctcttgccaaccaactaccacgtctttaagcatctcaacaactttttgcagggaaaacgcttccacaaccagcaggatgcagaaaatgctttccaagagttcgtcgaatcccaaagcacggatttttacgctacaggaataaaccaacttatttctcgttggcaaaaatgtgttgattgtaatggttcctattttgattaataaaaatgcgttgagcctagttataaaaaaa

SEQ ID NO: 1221 - DNA, 451 bp, Homo Sapiens
ttgatagggggttcctcagcactaaagtgaaggggtggaggggctggaggagcaggaatctctcttgttgataggtatgaggccttgaagtccttttctttgtcccaggattcatggacgcttcggggctgatctttgagttttcaagcatggggtgcagagacgtttaggtaaactcttaccgtcctctctcttcgtcagggcttcccaggaatcaacaatgcccaagaaggaagggattgtagaaatagcttaaccctttcatttaccaacgtggaaattgaagcccagggaagggaagggaccggtcgtggaagggagagccatcagcagaaagagaccctgagatcttcgcctgggattcccaggaagtccagcccgagctgattcacagaacaaatgcatgcaaaccttgctatcaataaattacacatgcacttacgtaaaacac

SEQ ID NO: 1222 - DNA, 461 bp, Homo Sapiens
aaaaggagccagtgtggattttcgcaccctttgtgaactaagttcaatgcgctctatccaaatttgcctaattgaactataagaaagtaataattccattttctatcccctcagggactgaacaaatggaaataactcccaggcagtatcaggtggtcactacagagacttccacaaaaacttttgaatgatgtgaaacacgatgtcatgaataagggttgagccaactatagctctgtgttcctactgggctttccctaatgtggttgggagttatgccctagactaactgtattgtcctagtcacagctccttgctttgatttcatccttgataaaatgaagatgaaacttacactacttctccaagccttttgctgtcttaagaataagacctgagattaacactaaccctagaatagaaatgccatagggagatggtaataaaggagttattatggc

SEQ ID NO: 1223 - DNA, 617 bp, Homo Sapiens
gcggccgccgagggggaggcccccgctgagatgggggcgctgctgctggagaaggaaaccagaggagccaccgagagagttcatggctctttgggggacacccctcgtagtgaagaaaccctgcccaaggccaaccccgactccctggagcctgctggcccctcatctccagcctctgtcactgtcactgttggtgatgagggggctgacacccctgtaggggctacaccactcattggggatgaatctgagaatcttgagggagatggggacctccgtgggggccggatcctgctgggccatgccacaaagtcattcccctcttcccccagcaaggggggttcctgtcctagccgggccaagatgtcaatgacaggggcgggaaaatcacctccatctgtccagagtttggctatgaggctactgagtatgccaggagcccagggagctgcagcagcagggtctgaaccccctccagccaccacgagcccagagggacagcccaaggtccaccgagcccgcaaaaccatgtccaaaccaggaaatggacagcccccggtccctgagaagcggccccctgaaatacagcatttccgcatgagtgatgacgtccactc

SEQ ID NO: 1224 - DNA, 407 bp, Homo Sapiens
aggaagtttttatttttataaacaaaatctgatgttcagaggccccgtttcttacaataaatgttgagtcttagttaagcaggaatttatgaacacccatttcctgactttttgctttaatttagatttttctccatcctgtttctagcacaaaaatttgcctgctgtgttacaaaaataaatttatgttgtcctgtgccataaagtgatatatttaatatttttattctttggttttgaacattgtaagttcctaaaaacattttattaaacaagtagacattttgttattaaaaaaatgtgatctgtaatttctttgtgcagaatgatttgaagtattgtattcagtttacatgcattattggtttataatcactatctaatgaaaatacatgttgttatatagt

SEQ ID NO: 1225 - DNA, 1143 bp, Homo Sapiens
actatacgctaggtgcgaggctgggttgtgaattcggcacgagggggaacggggctgtgggcctctcggggagcgagctgcgggtagcggcgcactgggtacaggcgcgcgcttggctgtcgcctctgccgctgtgtttgggaggactcgaactggcgccaggaaatattaggaagctgcgattttcaaagctaattatgaaaacatttatcattggaatcagtggtgtgacaaacagtggcaaaacaacactggctaagaatttgcagaaacacctcccaaattgcagtgtcatatctcaggatgatttcttcaagccagagtctgagatagagacagataaaaatggatttttgcagtacgatgtgcttgaagcacttaacatggaaaaaatgatgtcagccatttcctgctggatggaaagcgcaagacactctgtggtatcaacagaccaggaaagtgctgaggaaattcccattttaatcatcgaaggtttcttctttttaattataagccccttgacactatatggaatagaagctatttcctgactattccatatgaagaatgtaaaaggaggaggagtacaagggtctatcagcctccagactctccgggatacttttgatggccatgtgtggcccatgtatctaaagtacagacaagaaatgcaggacatcacatgggaagttgtgtacctggatggaacaaaatctgaagaggacctctttttgcaagtatatgaagatctaatacaagaactagcaaagcaaaagtgtttgcaagtgacagcataaagacggaacacaacaaatccttcctgaagtgaattaggaaactccaaggagtaatttaagaaccttcaccaagatacaatgtatactgtggtacaatgacagccattgtttcatatgtttgatttttattgcacatggttttcccaacatgtggaacaataaatatccatgccaatggacaggactgtaccttagcaagttgctccctctccagggagcgcatagatacagcagagctcacagtgagtcagaaagtctccactttctgaacatagctctataacaatgattgtcaaacttttctaactggagctcagagtaagaaataaagattacatcacaatcc

SEQ ID NO: 1226 - DNA, 416 bp, Homo Sapiens
aaagacaaaaagcagatgtaaccattataatgtgcataaatagtcataaaattgtctttaacagtctaccatacaagtgtactctgcaaataaaatgaattttactttaaaaactaaaggctgtttattatttggcctttggttccaatgcttgaaaaccccaaaataacaaaactcatctcccttcctcccacctcccaaaaagaacccctgcagctccccaaagttggtagactttggcaaccactgagcacatgacactatgtatcagcttcttctgatactaggagcttccacttctcatgagtaaataaaagtggtctccaagaaaccttccttcacaagacatgtcttagcatttcatcagttttagtatattttatattgacacaaaaagtgcttatcagttcaaatga

SEQ ID NO: 1227 - DNA, 874 bp, Homo Sapiens
  misc_feature (645)..(645): n is a, c, g, or t
gggaattctttaaaaaagaattgttaagagagtgattcttattcacttgttactttcagtaccaaaaagccatcattctacccctgtacaaagtccaatgtgattttaagaaaaacaagcacctccacaggcatatgatgtatcatttagatgggaatagtcactttcgccatcttaatgtcccaaggcccatatgcttgtaaagaatgtgaacggacatttcaagatcgcaattcacttctaaaacatatgattattcaccaggaaagaagacagaagttcatgcaggaaattcgtgaattgaaagaacttcaggatgaaggaagaagtgcacgattacagtgtcctcagtgtgtgtttggtaccaattgccctaaaacatttgtgcaacatgctaaaacccatgaaaaagataaaaggtactactgctgtgaagagtgtaacttcatggcagtgacagaaaatgaattggaatgccatcgaggcattgcacatggggcagtggtaaaatgccctatggtcacttctgatattgcccagagaaaaacacaaaaaaagactttcatgaaagactctgtagtaggatcatccaaaaaatcagctacctacatatgtaagatgtgtccttttactacttcagccaanagtgttttaaaaaagcacacggagtacttgcattcatcatcatgtgttgattcatttggtagtcctcttggacttgataaaagaaaaaatgacatccttgaagaacctgtagatagtgatagcactaaaacattaactaaacaacagtcaaccacatttccaaagaactctgctttaaaacaagatgtgaagcgaacatttggatcaacctcacaatcaagtagttttt

SEQ ID NO: 1228 - DNA, 277 bp, Homo Sapiens
  misc_feature (163)..(184): n is a, c, g, or t
gaggttggcaaaaactgctaaaaatctatatgcttgaatagtctgtaatttagaagctacttacatctttatggctcctcccgcttttcatgaaaaattagacaaaaaaagatactaacatagccttcaccagattgttaatgttttaccaaatttgctttcnnnnnnnnnnnnnnnnnnnnnntcatattgtagagttgggcaaactccattctagtcttcttagggtcctggctgggtctgagaattaaatcaatgtaacgatcgagaaacatag

SEQ ID NO: 1229 - DNA, 405 bp, Homo Sapiens
cttttccccatggagtgaactctgccaagttgtctttggacattttctgcagatgcaggctcagttctgctcttttgttcccacccacttctagatcttcctccatttaatcccttattcttataaggagtctaatttttgtgtattgtccttgattagggcagctgacagctttacaccaaagctgaagtctctcacttaatcctaagcaaggggctagggagaactaagatatccttcccatatcaagggatataggttactagaagggtggaggtctcttaacaggctcactcacctttcagagtttaaattatggtcaggcttaagaagctctctcttgtgactgagtgtattgcatagacatgtctgtcaaaataaaagcacccattttgctaaaaaaaa

SEQ ID NO: 1230 - DNA, 278 bp, Homo Sapiens
atcgctgatttgggacggcggacagcaagcaccggttactactatgggatgggatggggtttccctcttctgatctgcatcatttcactgtcatttgccatggacagttacgggacaagcaacaattgctggctgtcgttggcgagtggcgccatctgggcctttgtagcccctgccctgtttgtcatcgtggtcaacattggcatcctcatcgctgtgaccagagtcatctcacagatcagcgccgacccaaagcacagcgccgtcccaaagcacag

SEQ ID NO: 1231 - DNA, 447 bp, Homo Sapiens
attaaaatatttcatcacttgttaaaacatatttttgatctgagtttggtaaagtattattttacctgctgttgtactaccacagactgttgacttttagtttcttaaagagaaaaattgcctttttactagaaagcctttgtatattgcaatttttctgtttgggaaaatctaaggatttactgtggttagtcttacagaagaaatgtggatttgataaactagtgcctatgattttaacttatgtttgatatatagtagtaagggttttatgaatgttgattattttgtgccaacagcccaagaaattgtcacttatatgtaagcagaaaacaatgagctatgcttccaaagttatttaattttctcagtgttagaatgttattttttgtaagtgagataataaaagtgtaaagaataggaaaaatatagaatattcataaaaca

SEQ ID NO: 1232 - DNA, 759 bp, Homo Sapiens
aaggatcctcttgctttgggacggcggctcccacatcaccaccttcgatgggaagacgtacaccttccacggggactgctactatgtcctggccaagggtgaccacaacgattcctacgctctcctgggcgagctggccccctgtggctccacagacaagcagacctgcctgaagacggtggtgctgctggctgacaagaagaagaatgtggtggtcttcaagtccgatggcagtgtactgctcaacgagctgcaggtgaacctgccccacgtgaccgcgagcttctctgtcttccgcccgtcttcctaccacatcatggtgagcatggccattggcgtccggctgcaggtgcagctggccccagtcatgcaactctttgtgacactggaccaggcctcccaggggcaggtgcagggcctctgcgggaacttcaacggcctggaaggtgacgacttcaagacggccagcgggctggtggaggccacgggggccggctttgccaacacctggaaggcacagtcaagctgccatgacaagctggactggttggacgatccctgctccctgaacatcgagagcgccaactacgccgagcactggtgctccctcctgaagaagacagagaccccctttggcaggtgccactcggctgtggaccctgctgagtatttacaagaggtgcaaatatgacacgtgtaactgtcagaacaatagaggactgcctgtgcgccgtcccaaagcaaaaggatcctctagag

SEQ ID NO: 1233 - DNA, 955 bp, Homo Sapiens
  misc_feature (404)..(463): n is a, c, g, or t
  misc_feature (699)..(765): n is a, c, g, or t
caataacagctcattgcagctttgaactcttgtactcaagggatccaatgacaggcgagagccaccatgcccagccacatttttgctaaattctttacactggtgaatctcaaagaattctctgatcatcacaccatatcctgctaagtgtgcaattaacctgtggacttcagttggacactttcagattagcattagctatgtggggccaccaaatgccaactgttaaattatcactcaaagataaatgacacttgagtgtgctgtttgagtttatacctctaaaaaatgcttatagtaccatgagactagtgtgccaacgtgtctggctgccaacgtgtctatagctgagccaataagaattagtctctagagcctctgtttccaaggaagtcaatctctannnnnnnnnnnnnnnnnnnnnnnnnnnnnnnnnnnnnnnnnnnnnnnnnnnnnnnnnnnnttgaagcttggaggagctggggttggggtgtagggcagtgatgatcacatatgaatagaactgggagtctttagtgttactggtggcaatgttgaaatgcatgagggttgtttattgtataatgaagtatttttcacatgaagtcatatgaagtattccattccactgtatttgttcttattttaacgatacaactaggtaataaaggaaatgaagtattgttttatattttatannnnnnnnnnnnnnnnnnnnnnnnnnnnnnnnnnnnnnnnnnnnnnnnnnnnnnnnnnnnnnnnnnngcatcaggactttttcaggctccaagtgattctatatgtgctacaaggttgagaactattgctttagggccttcgtgttctttgagaatacaaagaaaatttagagagataggttaaaaacacacttgccattcctccattgctctgacatctatcagcaaataagctataacaggaaatacaggcgttg

SEQ ID NO: 1234 - DNA, 359 bp, Homo Sapiens
atctgaggatccctcatggcagacccgtaaaggtagcatttgttgccacagagaagctgtgcccgagtcgaggacacggagggggcccgtttttgggcgtctttgctttgagtctcttccactcccaccggctcgcctggagttcgtagaggtcattgctgtatttcccatactccaccatcccaccaaacaccaggaggcgagtcccgtcacacacgaagccataggctgcacacccagggggaatgtccccactcacggctgggatgaaccactggttggttgccgtgtcgtacacgtgcagttcgtaaactattccctcgttgccgccgtcccaaagcacaggggtaccgagctcg

SEQ ID NO: 1235 - DNA, 915 bp, Homo Sapiens
  misc_feature (28)..(28): n is a, c, g, or t
atccctctgtcccagagccacccagaancctgactcttgagaatcaagaatacacccagaaagcccttaatgacctcataggcactcttccaaaaagaccacagaactggaatgagaggcctgggtctgtctcctgccttagcaggcctatccatttcttgtcaatctctttttttccttgctcacattaaaaggaagcatggagttctaatgctcccataaactatgtatcttggcaagacacttcactactccaggtctcactttccccatctgtaaaacagggtttggactaggtgttccctggtattctgtgatctgcctcttgctgccattctttctctcctctgcttctctgtatttttcttctgttatccctgggggtgctcaggttcacttgattgtctgtatttctgtgtggttgtagcaaggactcagcctcatgtagcacgaataggggtgtggttcatggcgtgttgacccagcagaacactccctcccactaacttgttctgcatgtgtagagtctccccattttttttaacgcaaccctttcccctttttcctaccccacagctctgttccatgtaagttgccaacagtttcactgaacagtggggtatgtgatggttttggcatgacatcttcagtatgagggggacagtttgacttcactttgagggtgtgatgtctgtagctatgtggaaggtaaaaatagtggtgtgatcatgaaccaaaggaatttatgttttgtaacttgggtactttattttgcattttgttatactattaaataattttttcctgtttgggggtcttactgtctttttttacaagtgtattcaggcctttctctgtgatagttgtttcagtctcctcaaaattgatcccccttcttcctactatactaaatgt

SEQ ID NO: 1236 - DNA, 583 bp, Homo Sapiens
tcttgcttgggacggcggctgggcaagaagctgatcgagcccctcaccaatctcatccacagcacgtctgccatgtctctcctctatgaatgtgtgaacaccgtgattgcagtgctcatctcgctgtcctccggcatgcccaaccacagcgccagcatccagctttgtgttcagaaattaaggatattgatcgaggactccgatcagaacttgaagtacctggggctgctggcaatgtccaagatcctgaagacccaccccaagtccgtgcagtcccacaaggacctcatcctgcagtgcctggacgacaaggacgagtccatccggctgcgggccctggacctgctctatgggatggtgtccaagaagaacctgatggagatcgtgaagaagctgatgacccacgtagacaaggcagagggtaccacctaccgtgacgagctgctcaccaagatcattgacatctgcagccagtccaactaccagtacatcaccaacttcgagtggtacatcagcatcctggtggagctgacccggctggaggcacacggcacggccacctcatcgccgtcccaaagcacag

SEQ ID NO: 1237 - DNA, 456 bp, Homo Sapiens
aagatctttgtgctttgggacggcggggtactttggactacagagccgctccactggctcttccggcgttcccggacgccgctgacgcacctgattctcgcgacctgcaggagaagcctcggccggggcgagggccgaggtcgtgacgggcatgaccgtctctctgcttggttagggttagtgtcccgccgggcacatcaccctatgaatggagccactgagatagactgggctgaggagaaccggttggaataatgagccatggcagcaactgcctgagagagaggaccggcgggttgctgtagggctccctaaccggactgcctgtcagaaacctgcacagcttggtttctgttctttgtgtcccaaatctgactcgggtcaccagttaagacccgtgtcagacttctgacctacagacttgcgccgtcccaagccagcgccgtcccaaagcaa

SEQ ID NO: 1238 - DNA, 632 bp, Homo Sapiens
  misc_feature (123)..(123): n is a, c, g, or t
ctgtgctttgggacggcgcactagcctcacggagaaggatctgaaagaaaaacaaggcgcggagccagcagattgcagcccagctgaccacccctcccagctccaattccacgtggcgtccangctcttctacaggcgccggcagacgggtgaacgagttcaccgtggagagccacggccagaggggacagaagcccagccaggagtccctcagagtgctcccttcaagcctcccaggccatgcaccggggctcagcctgagttccacctcgctgccggatccaggccctccacggcaccccagtccccagagccccgacagaggggtccctggccacagcatggaggggtactcagaggagtctagcttactgcggcacctggagaatggtggccagtgaggaggatagaggtaacactggtggtttatgctaaaggagaatgcagcactgctgacagccaatgcggctgcacctgtcccaaaaccgagagccccagcagtcctcaccggccccacctccagctgaggtccacagcccagctgcagatgtcaaccaaaaccttgcctcgcccagtgccacgctcaccacaccaacttctaacaaagccacagtccgccgtcccaaagcaat

SEQ ID NO: 1239 - DNA, 625 bp, Homo Sapiens
  misc_feature (594)..(594): n is a, c, g, or t
ggccactctagagatcccctgtgctttgggacggcggggtcagaagccagagctgcagatgctcactgtgtcggaggagctgccgtttgacaacgtggatggtggtgtgtggaggcaaggcttcgacatctcctacgacccgcacgactgggatgctgaagacctgcaggtgtttgtggtgccccactctcacaatgacccaggctggatcaagacctttgacaagtactacacagagcagacccaacacatcctcaatagcatggtgtctaagctgcaggaggacccccggcggcgcttcctctgggcagaggtctccttcttcgccaagtggtgggacaacatcaatgtccaaaagagagcggcagtccgaaggctggtgggaaacgggcagctggagattgcgacaggaggctgggtgatgccagatgaggccaattcccactactttgcattgattgaccagctcatcgaaggacaccagtggctggagagaaatcttggtgcaaccccccgctctggctgggcagtggacccctttggatacagctccaccatgccttacctgctgcgccgtgccaacctcaccgcatntgattcagagagtgcactatccatcagaaca

SEQ ID NO: 1240 - DNA, 425 bp, Homo Sapiens
gtatcgggagtatgaaggtagagctggttctctgagagtgttgtcctcacacagagttggggtgggtgacagggtgactggccatccagtggggacaccacaggcctcatgaggggcttgtggagtcctggggtgggtgaagaatctgccccatctcaggtcagttgagtggggctctgggagaagccctggggagtggcttggtgggacccaaaggccttctggcaccccgctggctctgggctcccagggccaacgctccctcccttactcatagtagcctggcctttccagagccccctccagcagggctccccacagcaggtcccctcgggctgcttgggctggtgggtctgccctgagctggcccctgactctcttacatgttccacaggatgatggaccgccgtccccaaagcacaggg

SEQ ID NO: 1241 - DNA, 549 bp, Homo Sapiens
cggcacttctctctcggcacacaggctgatgggcctgcctggagagtctcgcatcgagataactcgtgttgggctgtacacaacaataccagtttccacgatgtgaggtggagacgtcctccctagctcaaacgcccccctccacggcacgctgagtctgccagcctggagcctacagagacccctcgtgcctgagcccggcaagcagcctgtcctccccggagctgcaactcagagccctcctcctacgagtccaactactcgtacccgtacgcgtccccccaagacgtcaccatgggcagtctccctgcgtgtctccaaagaccacggaccccgaggagggctttccccgcggcctgggggcctgcacactgctgggttcccgcgccaactcccctccactcccccggcgcaagcgtcactgagagagctggtgggcccgctcctctagaccgcgtccccggcaacaagagaagtacagctcacgcgcagccgcctactaccatactacgcaacgccgtccaagaaaagatcctctaggtactagaa

SEQ ID NO: 1242 - DNA, 864 bp, Homo Sapiens
tggtcctagccaggcccaggaagggagccaggctggacaggcagtgggacccatggctcccagtgcttgaggaccaaaggcaacaggcagacagccttgacaagaagtatcctgaaagacggtcaggccagggtaccccaaggccacacagctcttccctcaacccaacccccaatcaataagcacaaaacctggccactgtagtctcagcccccaggaattcccagacaggccacagggagctcccagaaccctggcgacagctacactggccccatattctctttccttattgacctgggagctgcctgtaaggagggcagactcacgtcacaggattgcagagaaggtcccaaagtgacactcgcttccttgactgacaggtcccagccctagatcctcagtctgaagctgtggggccctccttcccagtgtggacatggtggggccctcatccttcctcccacccactgggcttgctgtcctgtctatcctgctgtcccatcctgtcctgtcctgggagcccaggctgaggaccggggtgcaggcaggaagggtccatccccatgtgcagagtccagctgggcagctaatcatcggagtagcggttccccaggacgttgaatttgcacagtgggcaggtctgctggagcatcagccaggggccacacagtctcggtgaaacttcgtgcttacagggcagcacccggagccactgttttgttgcagaagtagtccaggcacaccgaacaggtctcagtacccggatctgggaaggcctgcgatgccctgttaagccggcagcgccatgtcttgagggatgccagtctccgcaccacccggcgcttaaacaggtccacctgg

SEQ ID NO: 1243 - DNA, 643 bp, Homo Sapiens
cccattaagaatacatgccaatcaggttttcgaaggccgttacactctgacagtcctccttctgcatctcagccaagaggagaaacttatgtgttataaggccaagacattccagatggtcgattacagtctctgtgggttgataagtcacaaggaccagcacagtccaggctttggagagaatcaccttgtgcagctgatttaccaccaaaatgcaaatggttcctgggatctgaatgaagatctagccaagatcctaggtatgagtttggaagaaataatggctgcacagcctgccgagcttgtggattcctcaggctgggccaccatcctggccgtgatctggctgcacagcaatggtaaggacttgaagtgtgaatgggagcttctggaaaggaaggccgtggcctggatgcgtgcccatgcaggctccaccatgccttcggttgtgaaagctgctattactttcctgaagtcatctgtggatcctgctatctttgccttttgaagataccatccagaaaaagaagtgcctttaatttgctactgtcatttcctctagtatcacttttgctgtgacgatgtgttcttgtgtattataactctttattttttgccataaaagtaaaggatgcttactcca

SEQ ID NO: 1244 - DNA, 521 bp, Homo Sapiens
ctgatttactataatatttctagtaagccattggcttagaaaccagattcactaattaattcatttaccctttcatgatacaaaattttttaactgagtgaggcctttcctgagaattgagcacatgagctttggtgcatggacctggaaatctctgcttcttgaactcctaggggcttcctttacttcattcactcctggtgctcagcaaatttctgaatgggggaggttggccagcctgggagaggtcacccacgccaggaagtctcagtacctctctatttatcctatcacttgggaatcctctaggatctgtttcagggagtctctggttagccctgagacataagtggtgcgggtgagactcctggggcctatctcagaggtcctcacacccctgagattaaatcagtcaggaggcagggtggagagagagtgtcctatcaggtctgaggagttgtcaacttcctggacttcttgctaaggactcctcttcccacccttcatgggtagctgaggtc

SEQ ID NO: 1245 - DNA, 675 bp, Homo Sapiens
  misc_feature (178)..(178): n is a, c, g, or t
cgattgaacaagcctggtgcctctacaccccggtgattcatctggcccagttccttacatcagctgtgctaataggattaggctatccagtctgcaatcttatgtcctatactctatattcaaaaattctaggaccaaaacctcagggtgtatacatgggctggttaacagcatctgnaagtggagcccggattcttgggcctatgttcatcagccaagtgtatgctcactggggaccacgatgggcattcagcctggtgtggggaataatagtgctcaccatcaccctccggggagtggtttacaaaagactcattgctctttctgtaagatatgggaggattcaggaataaactagctaagactgtgatggaaactacttgctgtgtggcacttcctggtctaaagctctgctagacaattgcggtgagccagtctccaagaatcagactacagatattgcagattttgaagaacaagaacatatgttgaataacagagagaattctacatgtcattgtgaatagtaggttatataaaaacatactagatgataatttccttacctcagaaatgaaatattattcttataatacctttttgtggttgcatgaactaatgagtgaatggacaatgatgaataaatgtgaagctgtattcttaatacccactgca

SEQ ID NO: 1246 - DNA, 962 bp, Homo Sapiens
attggaccacccccgggcgtccttaaaattccttttttacagtagtcagcgcttgagaatatcctacagcagcagttaacgcaggcagcccaggatcttgccgctgcgctagagagaatatcggtattacggcacagctatgagaaaagtcaggaaactttcgcccagcttcaatctgatgtctatgggcgggactctgaacttcgagcctccaggcaagatcttaagtctgtagacgagaagctttctctagcacaggcggacttgatttcaaacagaggtcatattggaaatcataatagactgattcaagaactgaagactgccaaggctacataggagcaggattcagcaaagaaagaacagcaattgcaggagcgatgtaaagcactacaagacattcagaaagaaaagtcactgaaagaaaaagaacgggtaaatagagaagtctaaatgggcagagatagaagaaattaaatgtagacaagaaaaagaaatcactaaactaaacgaagaactcaagtcccacaaactagaaagcataaaggagataacaaatcttaaagatgctaaacagcttctaattcagcagaaattagaacttcaaggaaaagcggactccctgaaggcagctgttgaacaggagaagagaaatcagcagatactaaaagaccaggtgaaaaaggaagaagaggagctgaagaaagaatttattgagaaagaagctaagttgcattccgaaataaaagaaaaggaagtaggaatgaagaagcatgaagaaaatgaggctaaacttaccatgcagattacagcattaaatgaaaacttaggcactgtgaagaagagagacaatccccagtcgtggagaagtaaggaagtaggaggaagcgaagaccatgagtgtaccagtctttgtgtggacatatgttttcattagaagtataaagcgttgaggggtaccg

SEQ ID NO: 1247 - DNA, 435 bp, Homo Sapiens
cacagcgctaccggcaacttgcttaacctagaggtggggggtgacgtccctgtcggccccgtcacctggggccccagcacctctccttggctttgcagacgatgttccacaggagcccgtgcccacgctgtggaacgagccggccgagctgccgtcgggagaaggccccgtggagagcaccagccccggccgggagcccgtggacaccggtcccccagcccccaccgtcgcgccaggacccgaggacagcaccgcgcaggagcggctggaccagggcggcgggtcgctggggcccggcgctatcgcggccatcgtgatcgccgccctgctggccacctgcgtggtgctggcgctcgtggtcgtcgcgctgagaaagttttctgcctcctgaagcgaataaaggggccgcgcccggccgcggcgcgactcggctgc

SEQ ID NO: 1248 - DNA, 495 bp, Homo Sapiens
ggtggctctgggacttcgccccctccagtggctcacctgctcctcagacttgcagggtggcaaatgttcctgttgccaggttaccacggtgtgcacagtggcagacctgccgccaggcctcctcatggtgatgccagtgagtcggaccaggaaaggctcaccctggggagcccttcagcctgatccgcagtcctaacagggtgagaaagcacaagaggggccagctcggctgaggcctgaggagaaatgatgagaagttttgtttcgttcttgggctggggcatctcaggaacagtgagggcaacaagtctgtccctcagggaccctcacctgccctcccatgtgaccaggcccttcccaggtggggactggggcttgctttattaagtgagctcttgggcttttgaagtaggacagagggccctggtttggcagagaggaggcaagggagggctttagaacatctgagaaatgttaataaataattcagaaaat

SEQ ID NO: 1249 - DNA, 712 bp, Homo Sapiens
cgattcagaggatcctcggatggagacatttcaagatttagtcaagttcagttagatagactctagaaacaaatatttatttctttcttttacggggatgtgaataaggcttttccttaaggccttcattctttaaacaaacaggttgaaatggtatgttgtaaaagagaagacgggagagaggtatttagatgataagtgtacttcacaaaaatgccaaagtttgaaaaataggtatgtttgttctaaatgtttaagtgcttctctgttaggttctggggcttgcaatcatttgaattgttctgtttcacaataaaggagattcactgggttctgcattttcaggattcaatagaactgctccattaaaaaaataatccttagcaagcattcgaatcctaactgctttgatgcacttgccctcgggcacctgtcatttccaatatggtaggtgtcaaagtcaaaagtatttactgggagaaaaaagagaggagtggttgtagaagtctccctaaatcagacatgtcaagcaatcagccaacgtggtgtatttctcattcaatattttagtgtgaattgagacactgagataaagacatcgtgcagagataaatggggatacagttaaatgtagcaactcttgagttcattttttcccactgtagcaaaattaatgctttctctttattgaaataaattgctcattcctcaa

SEQ ID NO: 1250 - DNA, 490 bp, Homo Sapiens
ggggactgtacctgctgggacctgcacccagagaccttgccacactgaatcgcacctgctggggacctcaacctggagggcactgggccctggggaactggcttacttggggccccacccgggagtgatggttctggctgatttgcttgtgatgttgttagccgcctgtgaggggtgcagagagatcatcacggcacggtttccagatgtaatactgcaaggaaaaatgatgacgtgtctcctcactctagaggggttggtcccatgggttaagagctcaccccaggttctcacctcaggggttaagagctcagagttcagacaggtccaagttcaagcccaggaccaccacttatagggtacaggtgggatcgactgtaaatgaggacttctggaacattccaaatattctggggttgagggaaattgctgctgtctacaaaatgccaagggtggacaggcgctgtggctcacgcctgtaatcccagca

SEQ ID NO: 1251 - DNA, 460 bp, Homo Sapiens
cgaaccttctggtacaagctgttcccgtgcagaggatctgggggccctgcaaaagctgcagcttcctggatgaaggcagagttgcgtttgaggatgagcaggaagaaggaggagccgtggctgcacagatagagcaggatcttcagcaccttgagcttcccgtggccggagctgctgtgcaggcggctcaggaggtactccagcaggcactggctgctgcccggagactcgtgggagatttctgcggctagcaatctcttcaaacaggtagcccggacacgggacatcatcatcggacgtccccttcaggagaatcgggagctgaaagggaacaagagcccctaccatgatgaggtgccatttcccacaggggtgaatccgcagccccccaaaggggatggaaacgacccacctctcactgttgacatggccggagagaggactgggaagggatgagaac

SEQ ID NO: 1252 - DNA, 497 bp, Homo Sapiens
cttataaatgggtttaattacaactgcttcaaaagaatcccagcttttcaaaagtttattttaagtttggagactagacaaggtcatactggttttacatcctacgtgatataagtatatatacaaagaaaaaaacaacattggaatattacacagcttgaaggtttgcaaaggttatttgtgtcttagttatttctgcacttaatgacacatcagacgcattgagtatatttcataagttgttgactagcaaaaatacaatcattagtaacccaagtcttcaaaattcacaccaaactttatgaagtcattcagaaagagaaagtcaatcctaaaattaaaattggcaactatgataaataccttcaaaaggatgtagatataatggagatgtttaaaagtttagtttcattaattgtaaaattagcatgttatatttactcaatatagtgaagactaggtgattcttacatgtattctacttatggtactgtact

SEQ ID NO: 1253 - DNA, 666 bp, Homo Sapiens
gtggtggctacttccgcctgtaggattgcccgattggcttcaagtatccggacccctgtgcattgctttgacttggcttctctggaccctagggtcactgtgtgtgacatggcccaggttcctctggaggatgagtctgtggatgtggctgtgttttgcctttcactgatgggaaccaacatcagggacttcctagaggaggcaaatagagtactgaagccagggggtctcctgaaagtggctgaggtcagcagccgctttgaggatgttcgaacctttctgcgggctgtgaccaagctaggcttcaagattgtctccaaggacctgaccaacagccatttcttcttgtttgatttccaaaagactgggccccctctggtagggcccaaggctcagctttcaggcctgcagcttcagccatgtctctacaagcgcaggtgacctctggatcttccttgaaaggggaggcagatctcaaactccaggctcagaactgtgaagactgtttccagcctggctgtgagccaagacctggttcctggtggaccctgaggacaaagtgtgataaaacctctggctcagacttgctctactgaaggcttcttggttataagatgcataaagtcactggggctagctaaacaataaagagtttattgtgagaac

SEQ ID NO: 1254 - DNA, 1259 bp, Homo Sapiens
  misc_feature (69)..(69): n is a, c, g, or t
  misc_feature (1246)..(1246): n is a, c, g, or t
gacgtgatcctccacgtgctcccgctgcaccacgtccatggtgtggtcacagcgatgctctgtcctctntgggtgggagccacctgtgtgatgatgcctgagttcagccctcagcaggtttgggaaaagttcttaagttctgaaacgccgcggatcaatgtctttatggcagtgcctacaatatacaccaagctgatggagtactacgacaggcattttacccagccgcacgcccaggatttcttgcgtgcagtttgtgaagaaaaaattaggctgatggtctcaggctcagctgccctgcccctcccagtgctggagaagtggaagaacatcacgggccacaccctgctggagcggtatggcatgaccgagatcggcatggctctgtccgggcccctgaccactgccatgcgcctgccaggttccgtggggaccccactgcctggagtacaggtgcgcattgtctcagaaaacccacagagggaagcctgctcctacaccatccacgcagagggagacgagagggggaccaaggtgaccccagggtttgaagaaaaggagggggagctgctggtgaggggaccctccgtgtttcgagaatactggaataaaccagaagaaactaagagtgcattcaccctggatggctggtttaagacaggggacaccgtggtgtttaaggatggccagtactggatccgaggccggacctcagtggacatcatcaagactggaggctacaaggtcagcgccctggaggtggagtggcacctgctggcccaccccagcatcacagatgtggctgtgattggagttccggatatgacatggggccagcgggtcactgctgtggtgaccctccgagaaggacactcactgtcccacagggagctcaaagagtgggccagaaatgtcctggccccgtacgcggtgccctcggagctggtgctggtggaggagatcccgcggaaccagatgggcaagattgacaagaaagcgctcatcaggcacttccacccctcatgacccggcagactgggactgcgggtctggtgggggagcagcagacgtcccccttccaccgaggaccacgggggccccgtcaagacctggcctcccttaacctgaacccccccaatcaggtcacgtagaatcaaggaactgtttggggatgaaatcaccatgtggggttccccagacctcggggcccagttggtggcagcctcaaggagcaccggtccctggntggccccctctgt

SEQ ID NO: 1255 - DNA, 490 bp, Homo Sapiens
  misc_feature (30)..(30): n is a, c, g, or t
cactactcggaggagcaggctcatcttgcncaggggccccgcagcgccccacatagttgactaagcccatgttgccttctgtggagcagtagacttcccagatccgaataggaccgaagcgctgctggaaggtctcccacacatcagcccgtagtccattgcccattgccaggcggactgtatgtgtccggtcctctggttgctacaggaatgtccccagaagggtgaggaggaggtgctcttggggcatgccttggaacctttacctagagggggtgttatcctgggtccttaccttgggagttacctggaaggtgatgggggacctctacctaagggatctacctgggttacttacatgagagtagttactggagtcttaaatagagggttacctgcaggggcgacctcagagctttgcctgggggacgttaccagaggtgactggaggcctcatctggggtctcacctaagagtagttacctagaac

SEQ ID NO: 1256 - DNA, 370 bp, Homo Sapiens
ctgtgctccccaggactgcctggttgggggaattggaggcttctaggaggtggcacggtgcacgccaagatggctgtgtccacagaggagctggaggccacggttcaggaagtcctggggagactgaagagccaccagtttttccagtccacatgggacactgttgccttcattgttttcctcaccttcatgggcaccgtgctgctcctgctgctgctggtcgtcgcccactgctgctgctgcagctcccccgggccccgcagggaaagccccaggaaggaaagacccaagggagtggataacttggccctggaaccctgaccctgtgtctcctgcccggtggcagtaacaaagccttctgtctgcccag

SEQ ID NO: 1257 - DNA, 478 bp, Homo Sapiens
  misc_feature (341)..(400): n is a, c, g, or t
ctgggtgcatgcttgtggggtcaggagagtcaggcgcatgagaagagcagcaacccaagcaaggaagaggaaaaggcctggatgtgtcttcagatagagacagactgaagcgccggcccacactcaccagcagcgtggctctgggcttggtccttaggtgtcccaggtgtctgtctccgcacatcttcccaggccttctccagcgtaccggcatcacctggggactggccctctgcagtcacgctggctccaggctcaccgggagtcacgttctctggctgtgactttccttttgctgtggattaacccagacatgggcctgatgctttttctttaatgtnnnnnnnnnnnnnnnnnnnnnnnnnnnnnnnnnnnnnnnnnnnnnnnnnnnnnnnnnnnngtactcaagcatacacacatgcactcacacacatgcgctcaggcacacatgcactcacaggcacacatgtaaacaggc

SEQ ID NO: 1258 - DNA, 582 bp, Homo Sapiens
cagtcaccttctgggcaagggctcctatctttcctccctatccatggcactaaaccacttctctgctgcctctgtggaagagattcctattactgcagtacatacgtctgccaggggtaacctggccactgtccctgtccttctacagaacctgagggcaaagatggtggctgtgtctctccccggtaatgtcactgtttttattccttccatctagcagctggcctaatcactctgagtcacaggtgtgggatggagagtggggagaggcacttaatctgtaacccccaaggaggaaataactaagagattcttctaggggtagctggtggttgtgccttttgtaggctgttccctttgccttaaacctgaagatgtctcctcaagcctgtgggcagcatgcccagattcccagaccttaagacactgtgagagttgtctctgttggtccactgtgtttagttgcaaggatttttccatgtgtggtggtgttttttgttactgttttaaagggtgcccatttgtgatcagcattgtgacttggagataataaaatttagactataaacttgaaaccctaaa

SEQ ID NO: 1259 - DNA, 485 bp, Homo Sapiens
gcccctgggtgcatgcatgtgcagccatcgctgccaggaatttgcatccatggacagcactggcttccagtaggcagcaaactgggcatgggatgagtcagaaccactgggctggagggagagcaccggggtggtggagcctggagggatgtagaagagtggcactccgctcttggtgctgtcaggaagcgtgaaatgctcaggcactgaggagaaggactgaaggtgggcaagcatctggtctgtctggttgatgctctgcagcgtgttccagaaacgccggataacatgggtacgatacaatgaacgaatgggctgccttagtgcacaggacacatcatgcaaaatgtcgtagccgccttccatcgtcacttccacccgtgttactcgagggccctcaggctccaggggccaggatgccatagccacatactcaatgcgcatgttgtgtttccacatgcatgcacccagaaggatccgctaga

SEQ ID NO: 1260 - DNA, 564 bp, Homo Sapiens
cataatgcaaattaataaaatgacacttttactgcactatagaaatattcatgtatgttaaacttttctgattgaggctaactggaaaaagctggggtcgtattctaagtgctaaagaaggctgcttctactgtatagaacccagggctctgaaacagctctagccgcctaatgcacttcacaggtaactccccaaggtaaaactagactctcttgttggttcgcaaagaaaagttaggacttaacacttttttctaaaattttataattcaatttccaaaagtctactctattttatactgtttctacaaaatattccttataaaaacaaagaacaaaaattgaatatttaatgaattgacattttataaccaacctgtttttatctacggtgggaatctttgatgccagaaatttataaagaggttctgtatcttcacaccttgaataagcataataccataaaaaatgacacttgacatgtcaatgtatttgtcatttcattttaaactcgtatttgtggtttttttcccagataaaaatgaaattaaaccatttcttttt

SEQ ID NO: 1261 - DNA, 222 bp, Homo Sapiens
tgctgcatgtgtgagcatgcatgtgttgcgggatggcttcgctcgccgctgtgtgttgggtctgtgaggagaggccgtggttgctgcctggtgtatgtcctggcgtctgtgcacggccttgtgtgttgcatggcaggggaggtagacaagcgagagggcttgggtgctggagcctgagagggggcagggcctctttcctgccacatgcatgcacccaggggt

SEQ ID NO: 1262 - DNA, 429 bp, Homo Sapiens
aaatgagccagaaggcagatactgtttttattttgtgtggggggagggggaagcggcacagtactagcaggagatgaaataaaatgattaggaaacaatgaggttataagatcactgttcttatttgggttaagcaggtcatgttgagaagatggttatttctttcagataaggatgctacattaaaggaatcgtgtgcagcatgaaaagattagaatcgagctgcacctaagaaaaaaatcccaaagttactttcaaaagtatgtgttatctgccagtcacagaggggaaaagcacctagggtgaactccaattttttaatgaggaccttgatcaggaccacaaagcctgaaacatttattttaatgcagaaacacagcccctagttacactgattgcatttgggaaaattggagggtttttttcgtc

SEQ ID NO: 1263 - DNA, 317 bp, Homo Sapiens
tatctggtatcccacccgtgcagaatagaaccaatcccaggagggagcagactttaggaattcaaccagtcctgttttcggccccgggagctctggggctgaggcttctccctgtctttctccgggcttatagtttgctttgctttcagtcttcatgaaaaaattgtgattctatttttttatactacttaacaaagaaaaaaacgtgtattttacacgtttacatatgctgatacatacgcaggtgctatttgagcaatttcattgcactatccccactgatttaacaactttccttgggggcaagttgcgggaaa

SEQ ID NO: 1264 - DNA, 477 bp, Homo Sapiens
  misc_feature (299)..(300): n is a, c, g, or t
atcccaccctccagagggcctctgtgttacagtttgctgtgtttcctgctacacctcgccttattcacttccatttgtatctgaaaaacgtgttgcatggtttctttatctatagaagtggtaaaatgctattgtgtcctgtacattattgattactttttttcatttaacagtagggagatgcctgggagtacacagagaactgccctcattgttttcaaccttctgcactgtatgtctgtgagtttagccattctgctgttaatggaaatttacagtattctaatcttttgatattnnacaaacagttctgtgcgatcatcgtcatacacaaacccttgtgcacaatgcatgagtgttcctcagggtaggtaacaagaagtgaaattcctgggtcatagggcgtagagtaccgacatttctctccattctgccctgtaagcctcaagggtggcggcatacccagcggaggggtac

SEQ ID NO: 1265 - DNA, 490 bp, Homo Sapiens
tatcccaccccaagggaacgagagtactatcccatttataccaaagattccaacctcggcttcaagtgcacttaaacagaaacactacaggtgtctctccagaactctgcatgaattctcaccctctactaggtctacctgatcaatcagactctcccccagtatagtcctgctggctgctgaaagtggatgtagcagctgacaaagatacatcgttcccaactaaggtctcagactagattctccagggaccatgtggactcctcgaaaggtggacacagccttttaaagtggagtcttatcaatggatcacaccaaacagtgagattgtaacgatgcaacatgtattgaggacaccctctatggtgtacccaccttcctgtcacaaggatgaccaccactcttgcaagtcttagaaaacagaagtaacagataggtcctcggttcaaagcaacgggtggggataccagggggggccccgcgctcgact

SEQ ID NO: 1266 - DNA, 156 bp, Homo Sapiens
  misc_feature (131)..(131): n is a, c, g, or t
atccacctcacaagtgatctatactcaccaacaagaatgggacaaatccccaacatcacctccctgaaacaattcctgagaagagcacagcatgtcttttcctgggttcctgccaatgatgcatacatcantttggaaactgtcagacaacatgta

SEQ ID NO: 1267 - DNA, 857 bp, Homo Sapiens
tgctagtaaacggagtcccccacagccagccagaggccacctgaggagggagcacagcctctgccagcgctcttccctgtcaggagccagttagtggtcaaccccaggcctcaggccatcaccactgcgggtagttcatcgtcctttctgggcccagggtcccagggccacacggcactcgcatgtgcgcacacactcatatccacacacgcactcacacacaggcagttcctcgcaaacactccgactcaagaaagcgagtattaaagtaggagttaacttcagcagagaggtgaagatgatgtcccgacattagaaggttatactgtggatggatcgggcaccgtcttcctcatattccttttaggagacccacatcttcttaaaggtgtccagggaggcaaggatggagcccccaatccacgtggaatacagtctctcctgaggtgcagatatcctgatcttcacatcttttggagctagtttcttcacttcactcaggagcctgtcaccaaaacctttgaacagggtagagcctcctgagaggacaatgttagagaaaagcgtgcgccgcaggtccatgtctgacttctgaatggcgaacaccaggacctcgtggatgccttcactctcctctccaatcaaatctggcctgaagagcaactcaggggcccggaatcgggaaggaccaatctcaatggtgctgccatcaggcaggtagtactgagctttctctgtctctagcgtctcatccttttgggggtttatggataggtaacaggctctttcttttatggccttgacaatctcaaactcagaggatgatccataccactcgcgaccggtaccagcctgct

SEQ ID NO: 1268 - DNA, 499 bp, Homo Sapiens
aaaagaatttcaagtgtgtgctgataaggttctgggaatagaaagtcaccatgattttttggtgaaagtaaaagttggaaaattcatggccaaacttgctgaacatatgttcccaaagagccaggaataacaccttgattttgtaatttagaagcaacacacattgtaaactattcattttctccaccttgtttatatggtaaaggaatcctttcagctgccagttttgaataatgaatatcatattgtatcatcaatgctgatatttaactgagttggtctttaggtttaagatggataaatgaatatcactacttgttctgaaaacatgtttgttgctttttatctcgctgcctagattgaaatattttgctatttcttctgcataagtgacagtgaaccaattcatcatgagtaagctcccttctgtcattttcattgatttaatttgtgtatcatcaataaaattgtatgttaatgctggaaagaaaaaaagaag

SEQ ID NO: 1269 - DNA, 594 bp, Homo Sapiens
gcgctttttcaccaagaccatctccaacagccggaagctgatgaacatcgccttcaatgacatgaaccccttccgcatgaaatagctgcggccatgcgcatggtccaccgggagcggctggaggctgagctgcgggagctggagcagcttaaggcagagtacctggagaggcgggcatcccggcgcagagctgtgtccgaggctgtgccagcgaggacgaggtggagggggaagcctgacttggccacctcccctccccacagccttcctcacccttggctggcagacccactggaggtcaggcacggaccagtggcccagccctgggtgtcccatcaccatgtgaccttggacatgtcccttcccctctctggccctcagtttccccactgggacattgtgtgctgcaaagccattggttgggctacttcttcataggcacttacttacccagggatgccaccctttcgtcacctcttccacagagcactttggcatgtaaacaagcaagagcactgcctctatagggtaacctggaacattctctaggttatatcaatataaaacaatgtaaatggtggaaatcaaaaaaaa

SEQ ID NO: 1270 - DNA, 296 bp, Homo Sapiens
ccagggccaaaccttgggagtcctgcctgacttctcacacccacatttgatccatcagcaagtcctacaggctctaactgtcaagagcatccagaatctgcttttgctactcccactgcctcacccccgaatcctggccacctcctggaccagcccgcctcacctctctcctgccttttgcagctacctccccttcctgcttctatgcttgtctccctgtgttgtcttttctcaatccaccttctaaggatatccagttggaatgtaatctttctttaccaatggtttatggatag

SEQ ID NO: 1271 - DNA, 459 bp, Homo Sapiens
  misc_feature (397)..(397): n is a, c, g, or t
ggggtgtaagaaacaggcctgttaaggagaggccaccgggacttcagtgtctcctccatcccaggagcgcagtggccactatggggtctgggctgccccttgtcctcctcttgaccctccttggcagctcacatggaacaggaccgggtatgactttgcaactgaagctgaaggagtcttttctgacaaattcctcctatgagtccagcttcctggaattgcttgaaaaagctctgcctcctcctccatctcccttcagggaccagcgtcaccctccaccatgcaagatctcaacaccatgttgtctgcaacacatgacagccattgaagcctgtgtccttcttggcccaggcttttgggccggggatgcaggaggcaggccccgaccctgtctttncagcaggcccccaaccctcctgagtggcaataaataaaattcggtatgctgaattcaaaaaa

SEQ ID NO: 1272 - DNA, 536 bp, Homo Sapiens
gcggccgctacccagccggccgcacgcagcaccccccggacatcacacgatctcctctgggccttgcggacacaggaaattttcaccaaaagcccggggattcaaacactcccagaacacggtcgcgccctcgggtcagctgcgctctccctccagacgtgcgtggttcctggctctcgtaaaaatggaaccagacctggtaccacactctgccacagccacaggaaaacacaccaaagtcacaggaaaaacaaaccaaaaagtaagccacagcccacgcaaaggtgaactcgggggccctggcgcttcctcccgctgccgcgtgcgttcgggaagcacaggagacctggacttttcctctcctaaaagcaacatccgaaagcatcgggcacagccgagctctctctgctttcacgcccgcagagatgatttctacgttacctcctcctccgacatctaaatctccccttgccgctcgcgcagcccctcccgggaacggataatcaccttacctccggaaataaagggaaaggtgg

SEQ ID NO: 1273 - DNA, 671 bp, Homo Sapiens
ctggaaggtaatactcaatgagtggtctagagcctatatttggtcttacctcaaactacaacggactgacaagagaagaaagggagcagagagatctaggaacagatgcctacaacgacgtaagaatgaacagcactggtggtcagacacccagaagagacctggaaaaggtgctgacaggagaggagaaggctcttagacctggagatcctggattctgtgcccgtgcaagggtcccaatgccttcaaacaaggactatgttgtcaggcccaaatggaatgtggaaatggagtcatccaggtttcaggcgacctccaagaagggtatcagtcgactggataaacagatgagaaagttcacagatataaggaaaaaaagcagatctgcacacgcagtgaaaatcagcattgagggcaacaaaatgccattgtgaccttgcctggaatgtgtccccatctctactctaagaaatgcgcaatggactctttggagaaagaagatattttaaaacatttttagtgtgtctgtaaatggttcagcgtgtatcagatgttgtcataggactcacatttctctcagttatatttaaaaccgttgtgtactttgtacaaaggaatactagtcatacttctataaactttacacaataaaatttcattctggaaaaaaa

SEQ ID NO: 1274 - DNA, 947 bp, Homo Sapiens
  misc_feature (452)..(464): n is a, c, g, or t
  misc_feature (700)..(700): n is a, c, g, or t
  misc_feature (759)..(819): n is a, c, g, or t
tttgcggaaaaaagatgtcccgttaataaaacgttatcaacatatatcgtacacaaactacaatgtatcataattacttgtttttcctctcttaattcagaaccagactacaaggtaagaaaaaacacagaaacagctacaatgttcccaataatccgcacaaagtcttttttcaggcagatgatatctcacataatatgatatacatggatcagaaagggagggagtaaaacaaagaccagctacaggggagggaggaaggagaagggcatgtcaatgtacaaagaattcgggtgtcttccagggcaagacacaaaggtttccgtggggtgatgaggtgagtggggccatgagcaccctcccgggaggggacaggctccactgtcgggcttgttggtttttgaaagtaaaaacaggactggagccagcacgtctgtttggttgtcggtgtnnnnnnnnnnnnnacagctgctccaaagtctttccatccagtcccaagcatatacagagcaattctgatcagtatcccatctttgagaaaggacgaataaagagaaaaaacaaagaaaaccggaactccagccccccaagccggtgcacacgatgacgctgatgcgaggatctcgggaccagaacgcggaggtcactgtttccatgtcccaggtcatagccatcctgtcagtggcagcctctcccactntgcgccaggccaccacccagctggcaggattctcactgggaagactggggtgggggcannnnnnnnnnnnnnnnnnnnnnnnnnnnnnnnnnnnnnnnnnnnnnnnnnnnnnnnnnnnntgtcctgggaacagtgcatgccaccgggtcacggtgacggtctgggctgtggtggaatcctgaaaggggtcccccgtccggcccctctggccacaggatgagggtgctgggttctggggtccaagcgt

SEQ ID NO: 1275 - DNA, 501 bp, Homo Sapiens
cagagaaataagcttttaatggcgcaatgttgcatatacgggtaacttgttctttgagaaatataaactcaaactcacaagttgtcatgataacatatgcagtaatatgaccattctacaacagagtcacccacaggtaaaacacatgactgggctttgagctcacaccaatttacacagcatacagttgtgctacaaggagaatttcttcatcatttattctttaagttaatggaaacatagtcaggaaaaaatggtgccaattccccccaaacaacacatggatgtttttgcttcttgacccacttagagtcccaaaaggacaaaaaatacatggaccaatattagttcacgaaacatgttttaaagaacagagaatgaggtcttcatcccacctcagtaaggcttgggctgatgaagagagggtgtattcagggtcctctcttgtcatatgtacaagctgacgcttgtttcccaagcatgatagtagtgggtagactg

SEQ ID NO: 1276 - DNA, 611 bp, Homo Sapiens
  misc_feature (311)..(323): n is a, c, g, or t
  misc_feature (402)..(410): n is a, c, g, or t
taattaatacctagataagacttcatttgaaataagaaataactcttttactagtgattcatttatacagatatagtatctctgtgcggggatatgatataatattgtatttccttactgttttatctattgtaaataaaaagcattttaaaaagtattgacacaaagcccatcagtgggcattaaaaatattaaaagtgcagacttttactgtccttaagtgccatcaactctcagctcccttgtagcttttgtgggatttaacaagtaacaaattctgttgtgtttccctggtatacatctttctaggnnnnnnnnnnnnngagagagagctgtataatgatttttcgtttacatgctgaaaagtaattatcagttttggcacagcagcagatgcagggnnnnnnnnnaaagatgtagtttgatttatcaaattaatgtgctgatgataatactggctttgactttgttactccatgttcagctaatttaggtttgtgagattaactttaggattttttgttgtgtaagacaatgataactattatttgtgcaacattactctttgaaataaaaattggcatgtagccaatgtttcctgccaaaaaaaa

SEQ ID NO: 1277 - DNA, 310 bp, Homo Sapiens
ccggagtgcaatggctgagtgccaggtataagggcggattctaacaaaccttgtcagcagtggagcgtggagcttgttcagaaccacctcagttgcatcgttgtaggcttgaaataccttgtggtttttgccatgccggtacaccatccagtcctctccattagagctgacttccagcttgtaggatttgacatagtagccattctgtgtttccctggaaatcgctaactgtgttgcgatgtccgtgagcatggttaaaaagcgcagtccaccaggagatactgccttgttgaatccaagttggtgacgg

SEQ ID NO: 1278 - DNA, 524 bp, Homo Sapiens
catctagaggatccggcgatgtgtcgcagctccaactcctggactgaagtgatcttcacttcagcctccccagtagctggaagtacaggtgcacactagcatgtctggctaatttggaaaaattttttctagatatagggtctcactatattgcccaggattgaactcctggtctcaaggactcctcccaccttgcccttccaaagcactaggattatgggcatgagccgttgtgcctggctgggggtgaatatttgtgaaatacattgctatgtaatgatacagcttcgccctctatatgaaactcgcaaatatgaactgattatgttttgagagagctgccaaaaatcatggctgttgttttagaagtgttgtcaagccattctctgggataatcttgagcagggctcttgtctgctttgatttagagtgaggctgtgttatctgcctcttgaaggttctctgtcctttgcaggggaggcctaggggatgagatatgccattttcttttcttttcttgtctg

SEQ ID NO: 1279 - DNA, 116 bp, Homo Sapiens
ggaaatcgcaccactgcactccagctgcctgagcaacggagcaagacactgtctcacaaacaaataaaacaccagctaactatatcaataaatttctctcagccattgcactccgg

SEQ ID NO: 1280 - DNA, 306 bp, Homo Sapiens
agtgcaatggctcgatctgcataccgcagagttgagagggtttcatcatagttatcggctgcaggactcacagtagccaccatggcggtcttgctgttacccccgaaggctgtcctacaggagaaaacagaaagttgagtagcatattaaagttggaagaagacgtcatatgagaaacctgaaatcaaaaatggtgaacaaatttccccaggtcaaacacaaacaatgacagagccagggctaaaatgcaggtgtatggactcgagtcctgtgctgtttcttctctgccaagccattgcactccgg

SEQ ID NO: 1281 - DNA, 164 bp, Homo Sapiens
ttgagccattgcactccggccagaatattttttaacagtgtcactacccagctgaaaccctcaaggcttatggggcccagcctgacctgtcgcctgctctcactctgattccgtctcctaccattctttccatatgctcaatcctccagccagtgcactaccga

SEQ ID NO: 1282 - DNA, 403 bp, Homo Sapiens
atgcatggtaccaaataattgtggacatcaaaaggcaaattgaaaccataaggatgtttcgttccctgtcttaataaaaggtcttaaacagttacatgagaaccaaaaaaacaacccaacgcttttggagaataaatcaggatctggagttccaaacagtaataccaattccagtgtgcagcatgttcagataagagttgcccgcttggaagataatacagccatctcttctagccccatggcagcattgcagattccagtccagatcacccatgtttcttcagcagactctcctgctaccgttgactcagaaacaataacactaaacagtggaacactacagacatttgagattcttccctctttccatctacagccattgcactccggccgggtaccgagc

SEQ ID NO: 1283 - DNA, 479 bp, Homo Sapiens
aaatcgtctgagcgcagcctgagcaacattgtgagaccccatctctacaaaaaatacaaaaatgaactgtgagtggtctcgcagtactgtggtcccagccactcaggaggctgggagaatcacttgtgcctgggagattgaggctgcagtgagccattgatatgggtaggctttgtcttcccacccaaatctcatcatgaattgtaaaccccataatgcctatcatccccacgtgtcaaggtagagaccaggtggaggtaattgaattatggggccagtttaccccatgctgttctcatgatactgagttctcacaagatctgatgtttttataaggcgctcttcccccttcactcagcccttctccttcctgccaccttataaagaagacaccttgcttctccttcacctcccaccattatggtaagtttcatagagcctccccagccatgcactcgccgcgatcctctagagcaccc

SEQ ID NO: 1284 - DNA, 340 bp, Homo Sapiens
ctgggtgtttgcctgttgcattagatgatcgctgggtgtttggctgttgcattagatgatcgctggcctgtttgcctgttgcattagatgatcgttgggtgcttccctgttgcattacatgtgttgcttcctgtgtctcaagtaggatcaatttctctctgtggatcatggtcccaaaggactgagaaccccgtccctggaggcccctggagctctgatcttggcaagtgcccatgtgggcttggaggcttgggaaggggacatgaagaatgggccaggtccagggcttgtactgatttcctgttgctactgtgacaaataccccagccattgcacttcg

SEQ ID NO: 1285 - DNA, 1467 bp, Homo Sapiens
  misc_feature (162)..(195): n is a, c, g, or t
gagaaagggtctgttgtttttctctcctgtttctcgctccctctctgctgatcacaaagctgctgaccgggtcagaaagtcctgatggaaatccaccagcgctgggcaggcccctcctcctccagggagcttgtccttgcctaatttttcttcgtcctgatnnnnnnnnnnnnnnnnnnnnnnnnnnnnnnnnnnccacaaacttcctttgaaaaccagcttgtagtcagggcccggagcgcatgccatagactcggcgactcaggaatcctgaagactctctgagcgacctggagcaccttggctgtgtccctgcctgccttcaccctcctccagtgcccccagtactgggcgtgagtccggaagtggccacaacccagcctggaccgtcgcttataaagctgtgtaaacctgtataagctcaggcgttgacagctggaaggcagctggcactggcagcccccttcattgcacctatctcccccatctcattgccacggctgaaccctccttctcaatcttggaacagcacccccttctttaaggtcactcttttgcatcccaagcctggcttaggcaagtccctgaggttagtaaacaccttcagtgcccctcagccgagtcccttttgaccatggaataccatcagcctgaggatccagcccctggtaaggccgggactgcagaagcagtcatccctgaaaaccatgaggttctggcaggcccagatgagcaccctcaggacacagatgcaagagatgctgatggggaggctagagaacgggagccagcagaccaagctttgctgcctagccagtgtggggacaaccttgagtcccctctgcctgaagctagctcagctccaccggggccaacccttgggacactgcctgaagtagagacaataagggcatgctccatgccccaggagcttcctcagtcccccaggacccgacagcctgagccagatttctactgtgtcaagtggatcccttggaaaggagaacagacacccatcatcacccagagcactaacggcccttgccctctccttgccatcatgaacatcctctttcttcagtggaaggtgaagctccccccgcagaaggaagtgatcacatcggatgagctcatggcccatcttggaaactgcctcctgtccatcaagccccaggagaagtcagagggacttcagcttaattttcagcagaatgtggatgatgcaatgacagtgctgcctaaactggccacaggtccttgcatgtcaatgtgcgattcacagggcgtctctgaatttgagtatacccccccagtgcaggggtcttttgacctgctaggcataccctctggaacatgggctggcctgtttgaaccacacaaatccctgaaggctttgccgttgcagattggggaaactgagttaccacccacccttggggggggaaggaatcattcccctggcaaaaa

SEQ ID NO: 1286 - DNA, 670 bp, Homo Sapiens
gcggccgccggcctcggaggagtggcggaggggccagggctagccttcagcgaggatgtgctgagcgtgttcggcgcgaatctgagcctgtcggcggcgcagctccagcacttgctgaagcagatgggagccgcctcccgcgtgggcgtcccggagcctggccagctgcacttcaaccagtgtttaactgctgaagagatcttttcccttcatggcttttcaaatgctacccaaataaccagctccaaattctctgtcatctgtccagcagtcttacagcaattgaactttcacccatgtgaggatcggcccaagcacaaaacaagaccaagtcattcagaagtttggggatatggattcctgtcagtgacgattattaatctggcatctctcctcggattgattttgactccactgataaagaaatcttatttcccaaagattttgaccttttttgtggggctggctattgggactcttttttcaaatgcaattgtccaacttattccagaggcatttggatttgatcccaaagtcgacagttatgttgagaaggcagttgctgtgtttggtggatggtacctacttttcttctttgaaagaatgctaaagatgttattaaagacatatggtcacgattggtcatacccactttcgaaatgatacgtta

SEQ ID NO: 1287 - DNA, 744 bp, Homo Sapiens
gctatggggcatatgggttacttatgaatatggcagttacagagggcgacagttcctatgtcacctgcagaagtacctagttggtatgaattcagtggctgtcgccaaataggttctctacgaccttttgttcagaagcgaatttatttcagacttcgaaacaaagcaacagggttattcatgtcaaccaatggaaacttagaggatctgaagcttctgaggatacaggtcatggaggatgtcggggccgatgatcagatttggatctatcaagaaggatgtatcaaatgcaggatagcagaagactgctgcctgacgattgtgggcagcctggtaacatctggctccaagctaggcctggccctggaccagaatgctgacagccagttctggagcttgaagtccgatggcaggatttacagcaagttgaagccaaatttagttttagacattaaagggggcacacagtatgatcaaaatcacatgatcctcaacactgtcagcaaagagaagtttacacaagtgtgggaagccatggtcctatatacctgaacaaagaaggaagaagaatcttctggaggtccttccagccaccttatttcttaaaaaggacaatgctgatggaagaccagactggaaagtggatcgactcctccttcattgattctaaattcaaccttaaatcatgctgccatgactcagagaacttactcatcgtttcaaaagactatcatagctttaaac

SEQ ID NO: 1288 - DNA, 907 bp, Homo Sapiens
ccatggcaggtgtcccagctgcatctctggtgacccctgctgatgtcatcaagacaagactgcaggtggctgcccgcgctggccagacgacatacagtggtgtcatcgactgtttcaggaagattctccgggaagaagggccctcagcattttggaaagggactgcagctcgagtgtttcgatcctctcaccagtttggtgtgtacctcgggtcactaatgaacttctccaccggtggttctacattgattttggaggcctcaaaccagctggttcagaaccaacaccctaagtcacgcatgcagacccttcctcctgccaaccctgatcacatcggtggatacagactcgccacagccacgtttgcaggccatcgaaaacaaatttggcctttatctcccgaaatttaagtctcctagtgttgctgtggttcagccaaaggcagcagtggcagccactcagtgatgagacaactgtggagtgtggcaaaatggcgccttgaagaaagagccctaggagagcagccctgtaatgtatccagtcagctgcatggtactgactgagctgaggagtcaaactcttctttctgtatgacatatacatatacttgtttataaaataatcatttgcccagggaaaaaaccacaacgctgtttcaagctttagtcttatgtgttgaaatgtttttgtaagccttggcatgaattagtgttctagactctgctttgcacagcttgcacttacagtgattgtacatattgtacatctttgtacagagacatcttggcacctcatcccaacaaatcacatttgtagaaatgtaatgcggttctgagtggcttgaaatgtacagaatgttttgaaagtgttttattaagaatcacacaaaaataaatgtattaaaatt

SEQ ID NO: 1289 - DNA, 554 bp, Homo Sapiens
  misc_feature (22)..(22): n is a, c, g, or t
  misc_feature (42)..(42): n is a, c, g, or t
  misc_feature (86)..(86): n is a, c, g, or t
ttcactagaaacctcaggggcntgcaccagcccacaaggtcnctggtcgccctcctactgccgccatcaacccaaacgtcccgtcntgcgcctccactacaggaggttcaccgtggccaccacctgcttgcagccggtgacggcaaactcgcggccagccacgcggtagaagctgagctgcgcggccaggttctccgcgcgggcctggtcaggaaagaagccctcacccgccatctcgtcccggaagcagctgaccacatcccgcttgtccagcagcagaaacggcacgatggccgcggcctgccacagcggatgctcccgggacagcacagccagcaggctggcgcgcaggtcttcttccgcctgcgccgctgcggcctcggcactgcggaagccgtcggggcgcaggggcagcgcgcgggacgcgttctgcagcacgaagcgcgtgacctcggcgccacccgcgccactgaggagcacgtagatggcgttgtggaagtggtgggagcgctgcggctgcaggaagccgtgcagctcgtccagcagcggccgct

SEQ ID NO: 1290 - DNA, 530 bp, Homo Sapiens
agttatttaaatatttaaattattaataaactttttaaagagctggccaatgacttttgaatagggtttgtagaagatgcctttcttcctgtttggttcattgtattgtattaggttaagctctactagggtaatgaaggctctacttttcactttttaaaagtggacaaaagagtgtgattttctttttccaaaaattcctgagtatcaagacgtgcaggtcatgctttggagcctatgcactgtacacaaaggcaaaaccctatgactttggcatcatctgccattgatgtccagcctctgacatgctctttgatttgttaaatgttaaatgagactttaaggctactagaaactagtaattaagtttcttaatggactgagtagccacctacttgtccggctagaatgtttgttgatgtatgagtttagattaacactcaaaagcactaggacagatgtacatagaaggtgcctactcattgtattttgatgatttcattaacaggtaaataaaagttaatacaaaa

SEQ ID NO: 1291 - DNA, 991 bp, Homo Sapiens
  misc_feature (811)..(892): n is a, c, g, or t
ccctggtgttccaggcttctcggacctaagggagagccaggaatccagaggatcagggtttacaggtccccccaggtatcccaggatgggggccctagtggccccatggaccacctgggattccaggccccaaaggggagccgggcctcccagggccccctgggttccctggtatagggaaacccggagtggcaggacttcatggccccccaggaagcctggtgcccttggtcctcaaggccagcctggccttccaggacccccaggccctccaggacctccaggacccccagctgtgatgccccctacaccacaccccaggagagtatctgccagatatggggctgggaattgatggcgtgaaacccccccatgcctacggggctaagaaaggcaagaatggagggccagcctatgagatgcctgcatttaccgccgagctaaccgcacctttcccaccggtgggggccccagtgaagtttaacaaactgctgtataacggcagacagaactacaacccgcagacaggcatcttcacctgtgaggtccctggtgtctactactttgcataccacgttcactgcaaggggggcaacgtgtgggttgctctattcaagaacaacgagcccgtgatgtacacgtacgacgagtacaaaaagggcttcctggaccaggcatctgggagtccagtgctgctgctcaggcccggagaccgggtgttcctccagatgccctcagaacaggctgcaggactgtatgccgggcagtatgtccactcctccttttcaggatatttattgtatcccatgtnnnnnnnnnnnnnnnnnnnnnnnnnnnnnnnnnnnnnnnnnnnnnnnnnnnnnnnnnnnnnnnnnnnnnnnnnnnnnnnnnntaattgcttcaaaacacttacacagttggaaagttatatgtaagtgaaaatttggaccattgtgtacaaataaaaactaagatgcatgtttaatactcc

SEQ ID NO: 1292 - DNA, 909 bp, Homo Sapiens
aaaagcaagcaactagggaaacctaaaagaaaccccgctgggtttaaaaaaatagcagagactggtacgcctcggattcccgggatatcgtcgaccacgcgtcgaccgagagggagaggcggcatgtggacaggccgggcctcatttgcctaatgcaatgcggctgaactctcgctgaactcgcctggcggcgcctcacctccgagtgacccaaccaccgatgcccgtgacatcacccgcatcgccagcacgcccgaggggctcgcccaccagccccatgacccggccgaaccgggccaccacccccggagaacgcggacagcggcggcaggaggcgtagggccgggtcgcgcggggccaagtgtttggcacccgggtgtgacattgtgcagctcggacgctgtgtcggaatgagacaccggcttgtgtcattgtctgtgacatcatgtgtgactccggccgccggaacccgacgcggcagcgcgggtgctgttggcacaaacacaggcagagggggccctcctccccacgctctgcgtgcttccggcgagcaaagccccgcccaaggtgtctcctagctggggaaccagtaccggcccctggtgcactgtccagctctggagagataaaaggaagagctggtgccttccagtggactacttcatcctagaagccctcgggatgcacgtttcactggaagaaaggcctagcttgggtaggtccctagaaagaggggatacccctgcagaagggggtatcctattacccccactctataaaaggaaggatggaaatgtacatgctacccaaggacattcttctagaagaagcctggctctttatatatgttgtcattttatcctcacagcaactccaagagatgttttacaaataaaacaggtcgcagca

SEQ ID NO: 1293 - DNA, 739 bp, Homo Sapiens
agggggaaacccccacaaccgcactccaggggagcagaaagagtgagaccggtccggaatttaccggatgtcggccgtgctaggcctcagcgaggagagtctccagcgccggtgccggcagcgcggtgacgcggggtcccctcggggctgcccgctgtgccccgaccactgccccgcgcagatgcagacacggacgcaggctgaggggcaggggcaggggcgcgggctgggcctggtatccgccgtccgcgccggggcgtcctggggatccccgcctgcctgccccggagcccgagatgcacccgagccgcgcgacccgcatgcgctgttcgccgaggcggcgtgcccggaagggcaggcgatggagccaagcccaccgtccccgctccttccgggcgacgtgctggctctgttggagacctggatgcccctctcgcctctggagtggctgcctgaggagcccaagtgacaagggacaactgacgccgtctctgtgagcaccgaggctttttggcctcagcaccttcgaagtggttccttggcagactgcctttcctggaagagggcacgggcgatcccgacgggggcattcctgcgggtgagagccgtccccaccgcggcggcccttttcagcccctccctccatggagggacccatagggctagacactttgaggcaagcaggaggctctgcctaatgtgaatttatttatttgtgaataaactgtactggtgtcaa

SEQ ID NO: 1294 - DNA, 209 bp, Homo Sapiens
ccggaagattggacctctcatcgtacctcttcatagcagcctcccaggcttccgtgccctctttggaaacatccagtccatccacttccttgacgttctcataagcaaggtttacttcctcaatggcatttgcatctgcagcatcataagagaacctcagccactttcatatcttggggttcagggacctctccttgattctgttgtgc

SEQ ID NO: 1295 - DNA, 127 bp, Homo Sapiens
tcactgcactacgaccgcttcacttcctacgacggctcactgcctgctgtagacggtggtagattcctcacgaccaggctcaacgaacacaatagcgttcactgacagtaccacaatacagggcagg

SEQ ID NO: 1296 - DNA, 346 bp, Homo Sapiens
cgcgccctcttacaagacattcccctgctttatcagaattcaccttctgagcagggagcactcttcactcttcgtccgccaacctaaaccaagcaagctgagaacaaggctcaaatcaatccccagcccctcccttctctggcttgcaagctgccagctcccaaagcctccaacaaggatgacacctcatttccaaaataacaaattaaatgactactctgtacctacaactcagagtttttctcagttgagtgagacggtcacgtgggtcggccctccctataagaagatggagtacaaatattcttgagagcttgtaaacctctgcaacttcatagcactaggc

SEQ ID NO: 1297 - DNA, 649 bp, Homo Sapiens
  misc_feature (440)..(500): n is a, c, g, or t
tgatctagaggatcctaaagctcgcactcttcccagagattgggtttcaggaagagaatatggcaaggacacgtggtcactgtataagggaggcaatctaagatgtgtcctagaaactggagaatgggctacaaagaaagcagcactaaggaacaatgctgcagaggggaaactgttgcagagtattgagggtgtcagtgagtttgtatgtaactgcaaggcagagagtcactggaggttgggtagtaacaaaataggaggtggctcagacatttccacatgcaaatagattcagtagttcttttttagttcaaatgaaccttctattgcccttattagtgattctataaagtaaaatctacacagtgcagagggtggccttagaggctaacgagcctggtttcctgcctcagctgccctcactgagtgtaggggtgctnnnnnnnnnnnnnnnnnnnnnnnnnnnnnnnnnnnnnnnnnnnnnnnnnnnnnnnnnnnnntgatgtgatgtcatgaagagaaattaagagaggcagtgtaagtaaagtccccacatagagcctgggacatacaagccacttcataagtgtcaattctaattgaacctttttattaagaaactaacaatattctatcattctggacctac

SEQ ID NO: 1298 - DNA, 562 bp, Homo Sapiens
tctgacacacacttcattccatctctgctagtcactgtcccattcacgtgtcagaatctgttcccatggcccttcctctatagcattcttcccggatcttatgattcccttctctgaaattctacagctcattccttgaatctaatcattttcatactaaataataattacattttagaaataaactttatgctgggatattttttaaaataaagactatgaatactgtgactagcacaatatctgccatataacaggtgctcattaaatatatgttgaatggtaatttttaaacatcatctatactgtgtatagtcatcaaccaaaactattttctctcattaagtaatacctctattctgtttttatcctccttgaaggtgtcctttttcatgccattgttgttctcatttttgttattgtcttttatctttgttaacttgttgctatagatagtgagttatttgaggatatgcagtaaaagaactcataagtagagtgtaaaaggcaaatcccagcccctcctttcgagtgtcactctgcgctatgggggtcccgagtt

SEQ ID NO: 1299 - DNA, 296 bp, Homo Sapiens
atctacgaggatcttgagctcagtaggtcatcaggggtgtcactgggaaggcatgtgtgtgtgtgagttctgtgacctgacttttgatctctgctttctgatcagagtgaaagcagaatgtggcccttgtgacatgcacttctgaaatgtttccacagaggggcaagcactctcccactgagaaatctgcctctacctggctgtgccaggatccccttcaaccaggttctgcggaccagaggtgaccagccctcagcacacccacatgcctggccagtgacacccctgatggggta

SEQ ID NO: 1300 - DNA, 125 bp, Homo Sapiens
aggatctcgaatcagagcatacccctaggatcaagttgtaatttcgaaatgtgtaagatgtttaacttgtagatacttaaaaagtatgaactactataaaatctgatatatctaatttaaatata

SEQ ID NO: 1301 - DNA, 722 bp, Homo Sapiens
  misc_feature (67)..(114): n is a, c, g, or t
  misc_feature (445)..(445): n is a, c, g, or t
acttatagcatgctccctgctaagtgctattaagttttcatgataatgtgcctgactagccctacannnnnnnnnnnnnnnnnnnnnnnnnnnnnnnnnnnnnnnnnnnnnnnncttgcctaaggctatgtaattaagtaagtagcagaacttaggtctgtaaggctcacatctattctatggtatctactatgctaaaataatgagttaccaattccaggactgtgtgatgttttttgaacctgttctgccaaggttctctatcctgctcaagttaacagcaactactgttgccagcaccccttgaaacctatgatgtggtaaaaactgctgacttaccaaattgaagtgaatgatggtctactatgtttcctgtggctgataatagcagagctttctccacctctgaaatgaaagtacactgcttgacccttgaacaacgtgnggattaggggtattgacaccctgtgaggttgaaaatccagatataacttttgactccaccagaagttaactaataataccctgttattgactggaagccctactgataacataaacagttgattaacgcatgttttgtatgttatatgtgttacacatatacatactattttgtatgttttattgtattcttacaataaggaagctaaaggaaagaaaatgctattaagaaaaatcataagggagggaaaatatttttactcttcattaagtggaag

SEQ ID NO: 1302 - DNA, 531 bp, Homo Sapiens
agagcatacctctctgaagacatcctctctgaagacgctgcactatgctcagtgactgcccagtacattcaccttgcaagtctatgacatctcactggggtaggttgagttgtctattggatactatcatttctttcacaaatcttagagaatccagtgcgccgaaaatatttctgtgtactaccctcaataccagcatataattgattgaccagcaatatgtctcgcggaaatggacactgggttggtttgaagacaatcttaacttctcaaagggtttgcttttcaaaggaagagtacaccaggagactcctctcagccccagggcatccacctgctcccgttgagaggctacactccaacctcaggctgtcctctgtctcccattcccagataaccagagttcattccaggccaggagctgaaatttaccagagattctagcatacacagccacagtggatattttgatttatcctcagaaagtactgaaacccaggaccaaggaaaaaactgaagagtgactaagga

SEQ ID NO: 1303 - DNA, 571 bp, Homo Sapiens
tgaggacccgtttaagacgacagaaggggatcagggtctttgactaggcttcggacagaattgagagaggaattttctaaactccagaacaagaccaagctgacagtgctggaaggagacattctggatgagccattcctgaagagagcctgccaggacgtctcggtcatcatccacaccgcctgtatcattgatgtcttcggtgtcactcacagagagtctatcatgaatgtcaatgtgaaaggtacccagctcctgttagaggcctgtgtccaagctagtgtgccagtcttcatctacaccagtagcatagaggtagccgggcccaactcctacaaggaaatcatccagaatggccatgaagaagagcctctggaaaacacatggcccgctccatacccacacagcaaaaagcttgctgagaaggctgtactggcggctaacgggtggaatctgaaaaacggcggcaccctgtacacttgtgccttacgacccatgtatatctatggggaaggaagccgattactttctgctagtataaacgaggccctgaacaacaatgggatcctgt

SEQ ID NO: 1304 - DNA, 129 bp, Homo Sapiens
tctagtcattctggttttattaagatttattagacctgaggcatgaaaaatagcatactggatgggacttcagcatcgatgagttgccttagtaatactgttaataaaaagcactaaatatgcaaaaaa

SEQ ID NO: 1305 - DNA, 553 bp, Homo Sapiens
tcttcggaactgggtggactttgaattgcctgctttccacccctatgctagacctcatcatgcaaatttccctgtgaaagctaacaggtaactggaaatgaagacagaaggacttgagaaagcatgaggatattcccaatgactatgtttggtaataatcagctcttctggcccacaagtaggaatgatcaatgagaacttaacttagtcctttatttggggattttttcatcaaacaaaaatttcttgagttcttatggctagaagacctcagatgcccacagctgtcacgtttgtgaaatccctccagactacatgcatgcttacctaacagtttgaaatagtattgatctactgctggtaaccctgcttgatggcagcattttgatctaaattacataatggtttttcccaatctgaatcagtggaaaaaaatttaagtgaggaagaagaggccttcaaatgcttatttaattctaggtatgaacactatttcagttcattttgtgcttttaaaactacagttttaaagatttatgataccaataaaaaa

SEQ ID NO: 1306 - DNA, 631 bp, Homo Sapiens
tgtgatgctcacataaatgagatccatggcctcctctctgggcagtgttgctgcaaagtgtgtgtatggggtcagcactgtgactcctactggcctggtcactatggcctgagctccacccaacctcagagctgccagtgtgagtgacactcagggtgggcccccgcctccatgtcctcctggctctgcccccagttactgccctgataacacacgcacctacccacctcactgcagttccattagcaagctaagagccctaagccttcgcctgcaggtgtgaccccagggttcaggtccctggtactcatgtctgttatccctccagtggtacctgtcactgcaaatgctttgtctctgggcaggacggtagccattgtctggtgaggcttggcccaccttctgatttaaccttgacctttggcactgagcttcttggagctatagccttataatgagtataaggctatagttatcatgactgtggactgagccttgtacttgggtgggtgccgctcactgacttggtcaccagggtcagcatcactttggctagctgaacctgtatatgccctcaggtgggagtttcggaaacaaaagggaaattgattaaacttgtattatacactgg

SEQ ID NO: 1307 - DNA, 425 bp, Homo Sapiens
tcttgtgtgactggggtaatgtgcagcttccataatggatgggacagagagctgggatctaatgtacaagtgaagggcttggtcttccctgagacattccagccattggaataggagaggagcatatatggcagaggtgatggctggtgggtaaatgtgatagtaaattgtagaaacctcttctgattgattggatttccttaataaaatcggaagcaaggttaggctgagtgagggtgagtaaagaggtagaggaggtttgaggagagagaactgctcggaagacattggtagatggaccataaaaacagagttagttctcttctatgacattaaatagttttacaacatatttttaatggttcacaatttcattttagggcttgaaaataaattatggttctatgatttttttaaaccagttt

SEQ ID NO: 1308 - DNA, 400 bp, Homo Sapiens
gatcactcctggaggaactgcttgtatctcagggggagtattcaaaagcatcatggcactggcagcatcaatgtcaggaacttggagaagggctccatttctcttgaagaaggtactgcccggccagatgggtggacctgatgtgctttgatatgcctgaggacaggtgggaggtgtattgaacacgtgtgggtgtgggtgataaggtgtctttttcaaagcctgaattagattttgtctatactctgggtctatgcaccacaacgaccctttcccaatactctgactcctctctttgtccactttcttaaaacacttattcaatgataaattgtgtctcactgagtttttccacccagtaggtgcatttgcaaaatacggaaaatgttccaagatccag

SEQ ID NO: 1309 - DNA, 645 bp, Homo Sapiens
  misc_feature (461)..(517): n is a, c, g, or t
agacgagcccaagctgagaggtgctgcaggtcccgtctgctccagcccttgtcagattcacccagggtgaagccttcaaagctttttgctaccaaagcccactcaccctttgagctacagaacacttagctaggagatactcttctgcctcctagacctgatctatccatctttagaaacatcagtttttgtatggaagccaccgggagatttctggatggtggtgcatccgtgaatgcgctgatcgtttcttccagttagagtcttcatctgtccgacaagttcactcgcctcggttgcggacctaggaccatttctctgcaggccacttaccttcccctgagtcaggcttactaatgctgccctcactgcctctttgcagtaggggagagagcagagaagtacaggtcatctgctgggatctagttttccaagtaacattttgtggtgacagaagcctnnnnnnnnnnnnnnnnnnnnnnnnnnnnnnnnnnnnnnnnnnnnnnnnnnnnnnnnngttagtaaaatagatcagtgttaaactagattgtattcattactagataaaatgtataaagctctctgtactaaggagaaatgacttttataacatcttgagaaaataataaagcatttatctaaaaa

SEQ ID NO: 1310 - DNA, 349 bp, Homo Sapiens
cttgttttgatagaaatggaattaagcaaaagtagttttggtcttttctgttgtcttcaaattttatgccttttatttttaatttaatcccgttcaattatttaattgttatacattgacattaactgctgtattttgactttgttcaataattttgttctttcagggctagaaataaactttttaaaaaaagtgtgcatttttccctttcctaaacttttattctttcttttgatcagcgtaaaagaatattttaatgtcttttgatagcataaaagaatatttaaatgtcttaataggttttcaaagaacatttagtatttttagtgataaatgttttaaacctttt

SEQ ID NO: 1311 - DNA, 706 bp, Homo Sapiens
gctccagattactaggggagcggcaagcagctgggaatggacacctggccataagtcagagaaggggaaggagagttactttattctcttctggtgccagtaagaactttatcaaggtactagtgccatcagctcctgcccaagggcacccagggccccaggtcagcatgacggatttaagacacattacgttctgggaagacggctaggaaggtaggtcagccccacaggggagaggacactgcatgtccagatgggggcacgcaaaatgatacctccaccctctaagccctggaatctgtgaatgtgacctcacttgataaaagggcctttgcacatgtaattaaactaaggatatcaaaatgagattatcctaggtttcaggcgggtcctaccttcaacgacaatccaacctcttacaacataaaaacagggagattggagacagacatggggagaaggccatgtgaagacggaggcaggaactcctgtgatgcggccacaagccacagagggcctggagccaccaggagctggaagaggcaggagggatcctcccctagcacctgtgaagggaacagggtcctgcccacacctttatttttgacttttggcctccagaattgtaacgaatacatttctgttgtttgaagccatgcagtgtgtataaatttgctactgcggtcaggccgggcgcggtggctca

SEQ ID NO: 1312 - DNA, 531 bp, Homo Sapiens
ccaaaagccaaaccattcatatgtatggatttcataaacatttattgatccttttttgaggtaagtataaatacctttacatggctaaccttctaacgcttgaaaaatcaatttcaagggactctttaatcagttaaataatctgctttagaaggcacaaatgatcatacttcagattaaaatacaggtaagtattcagggataaaatggtacaaaaaaggctgtaactcttttacttcacattgatcacagacagaacttacatcctttcagaaagatgatgtatcagcactgaacatttcttaaaacaaatttccataattacgaagtttaaaaagtacctgagcaaagggtttcaaccaattatttcaggttgatatataaatttctttcagagtatatgacaactacagtcaaggtatgattactcaaaatctgagtctactcagtaagtatcatagtatcagatgtgatagagtagaatcattccctaggtcagcagccaaaaatatctatcagattcaaagaaaa

SEQ ID NO: 1313 - DNA, 560 bp, Homo Sapiens
cgggtgatctagaggatccgagaagacgacagaaggagaacaaagaccacatgatggtcacagcagaggtaggcttaaaagtaacaatcctgttcaccctctcaaaagccacttaaatagaagatcccctggggggagaagatatcctgccccaggtccttacagagtgtagtattagggagagtgaagaactgatttctatgccctgcctcccaggccctgagagtgtcttggaccagatcctagaaggccagacataaaaggagtaaaaagcaggcactcagctggttttggagccaagcctacagcatcacatacctggcagcaaggaaaagagtcgggaaaaagaaacagaatctgttgcagaagtccccctcttctgcagggaggagttatgtaacagcagaagtggcctcctagcaagagaggctgcctggtttagaccagcagcttatgagcgatgatgaggacagccttcaggataggcatgaagctggacacctcgctgaagctgatacaccccgccacctgggcatgcactgcaaggcccttctgtcgtc

SEQ ID NO: 1314 - DNA, 232 bp, Homo Sapiens
attaactagtcacgctcctcctccgcaagagactcagaaagaaattcatgactcccgcatacctttccactgcaccaaaacattgctttgtgaatcagcctagagaaagacagctcgttacaaggacaactgtggtcacaccctctcagcaaaccgcagccacacaccagggcctcctgcctgacccctggccagccggcttccctgatgagctcagaggcaggacaagcag

SEQ ID NO: 1315 - DNA, 386 bp, Homo Sapiens
tctttgttggtcgttctagacggatccccctatgatgggcttgctgcgaagaaagaggaacattgagaggaacggcaaaaacgaacacatgcgccatctttaaggagctttcctgcgaattccaccaaatagcttcagcttctcctccttgcccccattagttgcaagggaggctgagacatcatttagctgaacaccattgctaccctgaggtaaaattgggattctgtcaccaagaaagaaggggacaatggagggttgggttaaccattcagcagggtctggcggccttcattccagatttaatttggcacccttaacaaactaataagttattaaggaaccaagtcaggtggccctatttccaaaaaggcagggacatgcag

SEQ ID NO: 1316 - DNA, 229 bp, Homo Sapiens
cgcttgctgactggtctggcaatatggtgacattcaactctgcacgtccaacttgtgtggtcaacattacaaccatagaggagccttgttccccaagtcatctgccaaaaatctgtacaagtgtgtggtaatggcccttgacaagcaatgtactgatttataatgctggaagaaggaatttccatatttatatagttcgacattgaaccagtcacgcattaaccacggt

SEQ ID NO: 1317 - DNA, 116 bp, Homo Sapiens
ctccccacaggtaaccttctcactaagtgggggtgtctgaggccagggagagctctactcattcccctgtgtgatcccagcagtgagcatagagcaggtgccctgcaatgttaagc

SEQ ID NO: 1318 - DNA, 232 bp, Homo Sapiens
ttagagatcccgctattacctcccaggtttgctgtgctcagtgaactcactctgctggggagtctggggcctgtcacgatcccattatcaaggcaggtaacctgacgcaaggccccagcccccagcacgagtgagtccctgagcccagcacaccagcagccagttcaacctccctacggagataccaagcatagtgccaccagctgtttcattagcacctggaaggccctca

SEQ ID NO: 1319 - DNA, 138 bp, Homo Sapiens
tcccacctgggaggtgctagaacgcaagctgcaggctctgagcgccgctgtggagaagaaggaggtgcagttcaacgaggtcctggctgcctctaacctggaccctgcagccctgacgctggtgtcccgcaagctgga

SEQ ID NO: 1320 - DNA, 582 bp, Homo Sapiens
agctttacatattctgggctttcaacttccatttgaagatattaggtttggtcctttcacggggaatacaacacttatgaggtggtttagacaaattaatgaccacttccatgtaaaaggatgctcttatgttctatataagcctcatgggaagaataaaacagcaggagaaactgcttcaggggccctgtcaaagttaacccgtggattgaaagatgaatcgctggcttatatctatcattgccaaaatcattatttttgtccaattggcttcgaagcaacccctgttaaagctaataaagcattcagcaggggacctctctcaccacaggaagttgaatattggatcttaattggagaatcaagtagaaaacatcctgccattcactgtaaaaaatgggcagatattgttactgatctaaacactcaaaatccagaatacctggatatccggcacttagagaggggactgcagtatagaaaaacaaagaaggttgggggaaatttgcattgcatcatagcattcctgagacttaactggcaaagatttggcctttggatactttccatttggaaccatta

SEQ ID NO: 1321 - DNA, 475 bp, Homo Sapiens
ttctagcaggtgttctgaccccttgtccagattggtagctaagtcttagaaaggccaagtgagttgttcacggtccccgagagggagcacggtgggaattccgcatccccgtttaacaaaagcccctgtgggtctctccacaccatcacgtgtgtacaacgtccccggcttacccattcagtgtgggaggctcgctcctggcccaggtgaatctggcattcctcacggtgaagctgttcgagcccccgcctacaaagcacagagacatgtcagggacaggctgagctgttgcgactccacatgcacagaacactctctttctctgcttgaatagtgttcaaacccagacgcttagcacgaatggcgctaggcattattatctggtgacatcagacacgggttctgaaatccgacacacctaggtccctattcttgttctactattttatacttttgacccctgggcaacagggga

SEQ ID NO: 1322 - DNA, 537 bp, Homo Sapiens
aaagatcccccttaaccggaaggtcgaagtggcttgtgcccctgagggttgcaagccacaagtagaagtgtgccctgcctcattactgggaagcaccatccacactcatgggtctacccaacctgggccctgtgtgccagcacctactcatttgtaaggctcctgtgaaaatgaaggacagattcttcacttcgatgattatggtggtgatgggacctgatcccagcagtcacaaatcacaggggaaggtccctgctgatgacagacctcaggagggcagttggtccaggacccacatctgctttcttcatatttcttgatcctgccctggatctacagttacactcttctggaaacttctctgggatcaaagactaggggtttgctctaggaccttatggccctgcctcctttctggactatcacaggacattctcttcccatagatacaaacagagggagctactgtctaagctgcaagcaagatgaaggaagctgatacctgagactgtcggcatattgtggacaggagcctat

SEQ ID NO: 1323 - DNA, 642 bp, Homo Sapiens
  misc_feature (24)..(24): n is a, c, g, or t
caacttcataaagaaaaatacttntacctctcaaatgtaaaagtctcccacccaccacaattaaaatctttctgcacaagtgtaacaggtacaacagctgctggctcaatagatggacaggtttcttcatggatgcactttaaagagtctcacccaactaagatgattccaggtactccaaagctacatcatagcagaaacggtattgctccggggcttccaccatgtttggcttgctgttccctcagtgtctttactgcatggaaaacatcgacaacattttgccgtttcaccatttcaacaacgatgcctatagcacagaacatgccacttcgcccgccaccatttaggcagtggataatcgtccggccttccccttcctcgcattcctcctgccacttttccacctgaagtatcagtttcaagaatgaccttttggaaccaggcacttctcgatgagaagcccatcctaggtactgaaactgttgcaccatcagataaccttcctgtggtcttgttagattgcatatcctaaaaatccggttgatcacatcacagtccattgaacaagacatacattccacttggatggggccatatcgtagcatcccttcctctggccagtactgagggcagccctgg

SEQ ID NO: 1324 - DNA, 442 bp, Homo Sapiens
aaggttctagcaccccaaggaaacaacctcggaagagccctttggtgccccgaagtttggaacctccagtgctggagttgtcacctggagctaaggcacaactggaagaacttatgatggttggagatctcctggaagtatctctggacgagactcaacacatatggcggattttgcaggccacacacccaccctctgaagacagattcttgcatatcatggaggatgacagcatggaagagaaaccactaaaagtgaaaggaaaggactcttcagagaagaaacggaaacggaagctagaaaaggtagagcaactttgtggagaaggaaaacagaagtccaaggagttaaagaaaatggacaaacctagaaagaagaaattaaaattaggtgcagacaaatcaaaggagctgaataaactggccaagaaactagcaaaaaa

SEQ ID NO: 1325 - DNA, 700 bp, Homo Sapiens
gacaccacttaaaatagaaaccatctcccatgaagaccttcaaagacaacttgccgtcttggacaaagcaatgaaagcaaaagtggccacatacctgggtggccttccagatgttccattcagtgccacaccagtgaatgccttttataatggctgcatggaagtgaatattaatggtgtacagttggatctggatgaagccatttctaaacataatgatattagagctcactcatgtccatcagtttggaaaaagacaaagaattcttaaggcatcttttctctgcttataataccttttccttgtgtgtaattatacttatgtttcaataacagctgaagggttttatttacaatgtgcagtctttgattattttgtggtcctttcctgggatttttaaaaggtcctttgtcaaggaaaaaaattctgttgtgatataaatcacagtaaagaaattcttacttctcttgctatctaagaatagtgaaaaataacaattttaaatttgaatttttttcctacaaatgacagtttcaatttttgtttgtaaaactaaattttaattttatcatcatgaactagtgtctaaatacctatgtttttttcagaaagcaaggaagtaaactcaaacaaaagtgcgtggaattaaatactattaatcataggcaatactatttcggtaatggttgggctttttcc

SEQ ID NO: 1326 - DNA, 677 bp, Homo Sapiens
gataatttgaagagacctgagagtatgcttcaacaagcagataaattaggttgcggacagtttgttacccctgctgatgttgtcagtggaaccccaaactcaacttagctttcgtggctaacctgtttaataaatacccagcactaactaagccagagatccaggatattgactggactctattagaaggagaaactcgtgaagaaagaaccttccgtaactggatgaactctcttggtgtcaatcctcacgtaaaccatctctatgctgacctgcaagatgccctggtaatcttacagttatatgaacgaattaaagttcctgttgactggagtaaggttaataaacctccatacccgaaactgggagccaacatgaaaaagctagaaacctgcaactatgctgttgaattagggaagcatcctgctaaattctccctggttggcattggagggcaagacctgaatgatgggaaccaaaccctgactttagctttagtctggcagctgatgagaagatataccctcaatgtcctggaagatcttggagatggtcagaaagccaatgacgacatcattgtgaactgggtgaacagaacgttgagtgaagctggaaaatcaacttccattcagagttttaaggccaattccgccttccggttatggggatcctattgg

SEQ ID NO: 1327 - DNA, 648 bp, Homo Sapiens
tgtgaccacgatgatgacaacgatggcattcctgatgacaaggacaactgcagactcgtgcccaatcccgaccagaaggactctgacggcgatggtcgaggtgatgcctgcaaagatgattttgaccatgacagtgtgccagacatcgatgacatctgtcctgagaatgttgacatcagtgagaccgacttccgccgattccagatgattcctctggaccccaaagggacatcccaaaatgaccctaactgggttgtacgccatcagggtaaagaactcgtccagactgtcaactgtgatcctggactcgctgtaggttatgatgagtttaatgctgtggacttcagtggcaccttcttcatcaacaccgaaagggacgatgactatgctggatttgtctttggctaccagtccagcagccgcttttatgttgtgatgtggaagcaagtcacccagtcctactgggacaccaaccccacgagggctcagggatactcgggcctttctgtgaaagttgtaaactccaccacacggcctggcgagcacctgcggaacgccctgtggcacacaggaaacacccctggccaggtgcgcaccctgtggcatgaccctcgtcacataagctggaaagaattcaccgcctacaga

SEQ ID NO: 1328 - DNA, 271 bp, Homo Sapiens
ctatatcaccacaatcaattgtagaacatttttatcatcctaaagaaacccagcaccatggagtggccactccccattcccttctcccacccaggccctgacaaccacaaatccacttcctgtctctatggatttgcctgttctggacatttcagataaatggactcacacactatgtagtctttagtgaccactttttcacttagcatcatgttttcaaggctcatgcatgttgtggcatgtactggaactccattcctttatatgacca

SEQ ID NO: 1329 - DNA, 232 bp, Homo Sapiens
cgcgctggtggcggcggcgcgtcgttgcagttgcgccatctgtcaggagcggagccggcgaggagggggctgccgcgggcgagcagcaggggtcgccgcgagccgaaggccttcgagacccgcccgccggccggcggcgagagtagaggcgaggttgttgtgcgagcggcgcgtcctctcccgcccgggcgcgccgcgcttctcccagcgcaccgaggaccgcccgggcgca

SEQ ID NO: 1330 - DNA, 703 bp, Homo Sapiens
tgcaccagtgctcggaatgttcttgatgaatctgccagcttctgaaaacaacggtggcgtcgtgatggtgtctttgtcatgggagtaatacagtgcaaccatcaagccaatgtgtcacctgtggcagatcactgcgaccacatcaaggctgtcattggatccaagttcatcgggattggtggagattatgatggggccggcaaattccctcaggggctggaatacgtgtccacatacccggtcctgatagaggagttgctgagtcgtggctggagtgaggaagagcttcagggtgtccttcgtggaaacctgctgcgggtcttcagacaagtggaaaaggtacaggaagaaaacaaatggcaaagccccttggaggacaagttcccggatgagcagctgagcagttcctgccactccgacctctcacgtctgcgtcagagacagagtctgacttcaggccaggaactcactgagattcccatacactggacagccaagttaccagccaagtggtcagtctcagagtcctccccccacatggccccagtccttgcagttgtggccaccttcccagtccttattctgtggctctgatgacccagttagtcctgccagatgtcactgtagcaagccacagacaccccacaaagttcccctgttgtgcaggcacaaatatttcctgaaataaatgttttggacatag

SEQ ID NO: 1331 - DNA, 517 bp, Homo Sapiens
cgcctcctcccgcttgcggggcgggctcctccgctttttgcgggcgccggcgcaagccgcggcccagccgtagcccagcagaaacagcagcagcagcccgagcgcgccagtgcccaccaggatcacccagccggggtaccgtttcggctccagccacaggtcgaggcccagctcggtgcgcagaaagcctaggccgaccgagagcatttcccgcagccgggccgagccctcctcggcctgctgggccagctcgtcctgccagctccgtgcagccatcttccctcccgtcagagggactcgcaggatgacgccggggcgcggagacgcagtggaatagtcgagggaagcgaggaagggccgggccgggtaacctcaggccgagcgcatcgcggccgtccctcgcgccggagccggggatcggccgctgccaccgcggggagggcggaggggtctcccaggttccccgctgtcagcctcactccgccgccgccaggagacccgggaggcgggagggagt

SEQ ID NO: 1332 - DNA, 527 bp, Homo Sapiens
cagcgagcgccagctccggccagcctgggacagctcatcccagccgactacacctgcttctggtcctgtccacattttgatacgcagatcacttgagcttgtcaattagggttctgccattctgaaataaatgaagtttctaaagcagagtcggcctcagaagccaaaaactgaccagaagatggtgctcaaacctttaagacttcatctccatgtgaagggctcactgtttctaccaaggctgtgcctgtattaaggcttttccgtcctgggaactgtcagtctgggagagctcttgatctgcaggtggcaaaatggcactgaatatccccttggcagcagagaaaacccactgaaagatcgtagagtggcacatgcttacagggcattggtgccaagtccagtggatgagaatccagcccctcacaagctgtgggatggggcttgggagttgcagtgaatgtcattaaaatttcttccaaaacaaaactagaaataattgctgagggcttatagggaagtgattt

SEQ ID NO: 1333 - DNA, 403 bp, Homo Sapiens
  misc_feature (322)..(322): n is a, c, g, or t
taatgattgagcgtagctgtgttccaataaaacggtatttatggatactgaaatttgagctgcacataatttccatgtgttatgaaacattatactcctttcaattttttaaaacattgaaaaacgtacaaatcattcttagctcatgggccatacaaaaacaggcggcaggctattgacctgagggctagaagtttgctgacccctgctgcagaccttcaaggtagagtcagatctatttcatctatttccctcactggctagtggcagggcctggagaaaataatacaggttttggaggagtgtaagtttgaattcaagntcaagttctatattacattgtactcagcaataacagatactaaataacggttgctttcatgcccttttaaagtcatatttt

SEQ ID NO: 1334 - DNA, 758 bp, Homo Sapiens
gctcggtaccccttatgttctgacccaccaagggactgtgtgttgccacaggacacagtcagatttccagtctccaccaggaacctcttcagaaagtgtgctttatgctgaaacagaatactgttaaaggaaaaaaaagaggggggaagatcaggtcatactatctactctcctcatctctaacagctcaggatctcttagcattttaattagatgtaattgtttgtctttaactgtcaaaaagtttggttctgtgtctgtgttttaataagacgagaggacgagcgattgaggtgtatggagagaaaacagacctaatgctccttgttcctagagtagagtggagggagggtggcctaagagttgagctctcggaactgcatgctgctggacagtatcactgtctttcctagatggcagtcactgaattccattttttcaaggtaatttcttgtgcctctaatagcccaagaatgggaggttgatcagatctgacacgattccttcctgttctgaactgtggggtgtgcacatctctgcttgagtcaggtttgagtagaggcttagagacagttgggtgagaacaaccaaaatcttatcatggtctcagtcataatcattagggggaactctagccaaatggtttaacttctgcctgtggaactggggattgggtgggcaggaaaaggtgatatccattctttctgataactagatggtgctgagaagcttttgaataaaaactttgctaaatgaga

SEQ ID NO: 1335 - DNA, 461 bp, Homo Sapiens
  misc_feature (396)..(406): n is a, c, g, or t
cagtcaccttacatgagggtgaggaaggagaagcccagccagcctctacccatccctccctcccaattaggctgcactggggccgaacgcttccctgggctcccactgccttctaaggagccaaggagaattccctgcccactttctgttcctccatgcccaaactggcagatgcttctctgggagcaaggccacatgggctgatgcagctttgagtgctcaggttctgttttctggaagttgctggagaagggctgtcagggtgcttctatgaatatgggcttcagctgtagcacttggcagaaacgtgatgtgtcccacaaactgctggtggaggaagaagatgttcgtcagccaattcaacctccagccagcttcttgagcctatttggtttnnnnnnnnnnngtcttctaatcagaagcccctgattttataataaataacccttgttatgaaaaaa

SEQ ID NO: 1336 - DNA, 747 bp, Homo Sapiens
acagttcactgggatgcccagactaaccagagctctctgggagttcacatcatccccccggcaccagtcttccaacagtgtcatcgccatgttctcaactatcaagacgccaaattctacaaccagactgtggctcaccgtgctcctggccttagaacaataccagacactcccaccaagtaggcccgagggaggcgaccttcatgcagtcacgattaacaaagacagagtcctgatctcgccattctctgcccccacagtcagtccgtaggtgcactcggagccgagctcggggacgctgaggcagtcacgcggccgtcgccatcttgcgtctgggtctgggtccggtcgggtccgccgcctgcagcaggggcgtcgcgtcgtcgtgcagcgggcgaggagcgacggcgggcggcgaaggcaggcgcgctgggccgagagccgccggggtgtggtcgcggggcgtggccgccgggcgctcgctgcggctcctggagaggatcgggcgttcgcggtcgcagcctggtcttcccgcgggcgaggagcggccgtttgggagactagccagagggagaaactgtgccgaagtcgcggcggctgcgggccagcggaaagcggcttcttggcgggcgcggggactcctctgggcgggcggcgaggacggccgaggaccagaaacgaaggcagcagaggagcaggaaagtcggagaagcgaggctggagacagcagaggcgagggtgggaagg

SEQ ID NO: 1337 - DNA, 791 bp, Homo Sapiens
  misc_feature (67)..(79): n is a, c, g, or t
ccgtataagaatatattatttaaaagacagtttaaaaataaaattctgtacagcatcatgaattccnnnnnnnnnnnnngtatcagtgaacaaaatggttcttagaaaacatggtcttgtggtgccaggtgcccagggcagctcttccctgcacaaggatcccgcgcactcggccagcccgtccagaactgcagccacgccccccgctttcctcaggcacagtctccttcactgtttttcacatctctgcttctctctctggacttctcggtggccccagacgtcaagctgtcagtcttcttctgtaactctttcatggcgtcatctatccgcttcagctcctcgtagcgatctcgggattcccaaagtggctgcagcatgatctcctcaaccatggggaagagcttggtcactgtttcaaacattgggatcaggacaaacttgatgaacccaatctgggctgtggccttggtcactttgtctcggtccatgaacggtgccacaggaaggccttctgacttctcacggtcgctctgcataaaatattcctctaataaacagtccacccaaggctctgcgacttccattggacggacctcgttagagatatcacagcattttatcaaaatcatcttacagcagggtcatgtgctcctcgttgctgtagtcaaaattctccattttctctttgaaagaatccataatttctgcatgtcttgccatgtcagtggcacaagattaatgtgatcattccctgtcggatctgcttgaacccatcaggtgggatgttg

SEQ ID NO: 1338 - DNA, 497 bp, Homo Sapiens
  misc_feature (115)..(138): n is a, c, g, or t
tttttaagtgttagaaacatttatttgtcaaaaaatttttttaaaaaagggaggagtggagtaaaacaagggtaaatttcagctaatgctgtaccacgatcacaggtcggacatnnnnnnnnnnnnnnnnnnnnnnnnccccaatggtcctagcaatttcagaagagtaacttaagtgttaagagtccagagctaacagaagagtaaaaggctgcttgccactacatggtcattttaaagggaaaggagatgctgcaggtaggcagggagaaggattcaactcctagggaaagcaagataagaggggttccactgcacaggaaaaaggggatgccagcataatccttacctagggctgctcagaggctgagaatataaggaacagagtgaaaggctacagagactagtttcaggaggaaagaaaagtcaacttagaagaattaagaaagaaaacatagttggtcacaaactccttttgtttactgaaacatgaagca

SEQ ID NO: 1339 - DNA, 164 bp, Homo Sapiens
ctcttcaaggaatgattggagagctccggtaaccaacatactaggccctagataatagctcttccaaattgtgttgtaagctagttgcccccaaacattcatgagggagatttctaagcagctgcacgctggaaataaaggaatgcatcattttctattcaaat

SEQ ID NO: 1340 - DNA, 547 bp, Homo Sapiens
gtgatggctcccaggtgacaaacttctgtaccgggccatgccccctgctttctctatgtccaggcgagggtaagtttttggccaggctcccgctgtccagtgcccagggctctctgcgcccgtcccgcgctagcctcccctgtcggcctcccttgaagaagaggttcatcagcgtcttggagcgctgcagggcacccttctccccaggggaccccgacttctccttcttccgctgctgctttctcctccccaaaaggtcagatagctctgggagcgcgtgatgggggggccggggtcgactgagggccagcagcaaagccgtcttgggagactcagagagcgcagagtcaaggcgacggccgggatgggggccgtccgagcggatggcggtgtccctgaggatgactggtgggccgcacgctgcaccaggtctccacccggcctcccgcatcgggctccgtcgcatggctgtgtccgcccgcccccagcctggaccacggctgccgggctccatcgctgccgcgaggcagatgtccatgcggtccga

SEQ ID NO: 1341 - DNA, 245 bp, Homo Sapiens
tcatggcctcccagagtgtgcagtgcatagtgggttgctctgtggaaagttatcataaatgacaatggacccactggcctccttgtcacggcagagagcaagcaacacatcctctcccttcctactccccgggaagcagttccctttcattctaccaccaggccgtgctgctcctcttcaggtgggtccctgaagacataggtgcacagatacacacacacctgcatggtgccacaactgtagga

SEQ ID NO: 1342 - DNA, 250 bp, Homo Sapiens
tgatggctcccaggtgtgagttgggagcatccacatgtactccactgatgctccccaaacttccaagataaaaatttccacaaggggaagatagcagtcaaatgtgagaagaataattggcaaatagataaatacgcaaataaagaaaactgttcatggagttgtctactggaaaacgatgtgccaagggcacaatgagcgaaagtgaagctggacaatgagttaggtcgccagatgtggcgcggtgatt

SEQ ID NO: 1343 - DNA, 148 bp, Homo Sapiens
tgatgcctcccaggtgccaatgttgctaaatggaaaggtaatcatctggagttctcacgtcctcaagaatgatgttatacacacaggaaagtaagctcagaagacacagctgctggaaaaacagcatgaggatgacatcacgggatac

SEQ ID NO: 1344 - DNA, 250 bp, Homo Sapiens
tggtcggtcctgctcgccctctctggactgacttgggggactagccccagaaagcctcccttcttctccaggtcccctccgccctagtccctgcctgtctcatctaacgccccaaaccttcatttgggccttcctttctcatgtctgccctgagcgcggggtggaaatgctcccttctgtgggctccagcagatcccttgttttcctgtcagttggacccctcacctggcctccagggaagaatgcagag

SEQ ID NO: 1345 - DNA, 561 bp, Homo Sapiens
ctccacagctgcacctccacctccgtcttctcctctgccaagcaaatccacatcggctccacagatgtcgcctggatcttcagacaaccagtcctctagccctcagccggctcagcagaaactgaaacagcagaagaaaaaagcctccttgacttctaagattcctgctctggctgtggagatgcctggctcagcagatatctcagggctaaacctgcagtttggggcattgcagtttgggtcagagcctgtcctttctgattatgagtccacccccaccacgagcgcctcttcaagccaggctccaagtagcctgtataccagcacggccagtgaatcatcctctacaatttcatctaaccagagtcaggagtctggttatcagagcggcccaattcagtcgacaacctatacctcccaaaataatgctcagggccctctttatgaacagagatccacacagactcgccggtaccccagctccatctcttcatcaccccaaaaggacctgactcaggcaaagaatggcgttcaattccgcgcaggacacgcaacagctgt

SEQ ID NO: 1346 - DNA, 776 bp, Homo Sapiens
tgtaagccattcagcatgtgaactcgtaaaaacgacttatgtttaaataattagttcagagcgctgatcttgagagataggaacgtttcctgtttttgataaatgataagttacccttgtttatggttaggggtgggtttttgtcatggtccaaccaggtgatagttatatatgtgaacatattaaaattgtttttaatgtttaaattctaatccttaaaatgtgacagaactgatttatgttcctcctctcccagttctcttcaaatcatgagagtgaccctcttaaaaactgctttctttcaggggagcggttgttgagaagaatcatgtaactatgtaaaaagcatgtctgtttggtacactatttgctaatgtcagaagtgttaaatagaaataaaatttccaccatagtagctaactattgtttagtgtgtgtcaaaactgtgtgctaattactttttataaaccgtctcctttaaagtcttataacttttctatgaagtaggacgtttgtgtccctacctcctctgttttaccattgggaaaaccagggcccagaacgagtaaccacacaagttccacagctaccaaggtcaaggttatttctaccctaaatacacatctttaaattttatattcatccaaaaagtcacgagcagcatctgtatttcgttaggaaaagtagcactaaacatcatgatgtgatgaatgcccttcagtggcatagtatcttgttcaagtataagatgtatcggaggtccaatcccatagtac

SEQ ID NO: 1347 - DNA, 666 bp, Homo Sapiens
tggaagtcggagccgtcttgccattatacagatcttctaaagatactttgagtggatgcatcatgtcctctcctcttcttctggttcagaaagcttgtctgggttgatccagttgttttcaggaaactgcacatcaaactttatgtaaagatcacctttttcaaagggattacgatactgcggcatcccttcacctcgaactacacgaacacaccctggttcaattactttgccaggggggtatttcaccacaatctgacgtccatcaaggtgcttaaatgtgaactgaaatccacatagagcttcaacaagtcctattttatatgtcatgtgcaaatcattcccatctctctgaaatacctcatgttctttctcctgtagcaaaagaacaatgtctccgggttccactcctggggcctggtctgcttccccagtgaatgtaattctctgtccatgtttcatgcctttgtctacgtggacttcaagaatcttgacttctttaatcaccttcttcccttcacaatttttacagaggtctttttcattaattacctctccttctccattacaatcagagcacacagactgcatctgttgtaccatccctggagccagctgtctgatcatgatgcgcacacctcgacctcgacaagcactacacttttg

SEQ ID NO: 1348 - DNA, 434 bp, Homo Sapiens
cagtagatttcccaactcctctggatgatttcaacatgtagccaaggtgagcacacctgcggtggctcatctcaaggggctggcaatgtcagaagcacctgagaagctcagctgacagccaagtgtcacctgcttacatcactccttggccagagtccagctggtgttccccgcctccctcttcccaggtgtcgatgttctgattccttctcctcaaagaccccacaagacagagatgctggagggggtgtggcttcctgtgctgtggttcgtgcttaaacgtggagaaccacatgaaccacgtgtacgctaccacaaaagaaattcactttctgattgcaaaacagcattcgcctttttttatttgttaagtggaaatttgtggcaaaataagaaaatatgtgttggataatatagtccctatataacctctc

SEQ ID NO: 1349 - DNA, 383 bp, Homo Sapiens
gccttgccatctgtttgccagtcttccttgccccttcctttgaaatgcctgcctcttttttgcccagattgtttcctgaccatccgaactcagatggggtcctctaagttcttcctggatattcacaaatcccttcacaaggcccacgtgcgaagtgaatgatctggaggtgcctgggcatctgtgttggaagggagtcaagactcaccagccagtcagtttgtgggctagagttgtcccacaaaaatcaggcatgttcacctcccctctgggcccctacagctgggactgatcatagcctcagattagaagaaatactgacttctaactctataagccagcactcctgggtaaggagtgaagctctgttggccatgccccac

SEQ ID NO: 1350 - DNA, 592 bp, Homo Sapiens
gaaacccaataacaaggctgagaggtgggagctaaggcagagtccagggccccagcaggagcaacttgcctttcttgctgctgagccacatgccttgaggaagacaccccgagctcaacagctgcctgttctgacagatctcttcctatggatacacatatctctacctcctcaaaccaaagctccaggcttctggccaaggcaggacagggcgatgccattgcagaccctcccactcctgctggggtctttgtagaagagaagggtctggcggcacccagggtcactagagtgcaggtgcaggcaccaggagagagcctctgtcacccatagcttggttgtttgtccctcccctgctgcactgccaccaccaaccctaatctttggacagtatgcatgtgtgtctacaaacacatgggacaaggacaagccgagctgtttataattcgagtggataaaggcagatctagatcaatgtgtgaggatgtgggtgcagacacacacccacacgacaatatagtggaggcacagcaaagagacctgaggtgccttgggtctgagatactttcaagcaaacaagttcttccacttg

SEQ ID NO: 1351 - DNA, 708 bp, Homo Sapiens
cacttgttgctaatcagagcaagaaggagtggtttcatattaggtcaacatacctagaatgtgtgaaaacattgcttcacgagtccaagatgttaacacttttctgtaaacagtgatgcagggctgaaaagtgacccaatgaataggaggaagagttcttttagattttctaaatacttcttgctaaaaagggatattccccttttgatttctttatgggtgccaccaaaaagtatgcattgaacagagaaatgctgagaagcactgatctaatttctgaccccaactacctctaacaatgggaaatatacttgttgctagccagatcccaagtatcctccatagtcatcttcttgttcattcattcatccaataattatgtttgggaacctgcacatagagaataaataagataaaatgttggctccacagctgcagcttcacagtgaagtaggggaggggcagcactgagttaggccctaaagggcatttgggattagcctaaacaaacacctcagctgggtactcactcatgaaggtttacttttccctctgcctttcaagctaatgactaaggctgccaagtatttactcaacaagaaagacccaacaaggatcaccggtgaggtgattaaatacctcattccgccagagccacccaggattgctgtttggattaaaagacaatgtcagcttcctcttctgtac

SEQ ID NO: 1352 - DNA, 750 bp, Homo Sapiens
agcagctcaaggccatgcggaccctcagttggaagcacaccctgggcctggtgaccatggacgtggagctggccgaccgcacgctgtctgtggcggtcaccccagtacaggcggtgatcttgctgtattttcaggaccaagccagctggaccctggaggaactgagcaaggcggtgaagatgcccgtggcgctgctgcggcggcggatgtccgtgtggctgcagcagggtgtgctgcgtgaggagccccccggcaccttctctgtcattgaggaggagcggcctcaggaccgggacaacatggtgctcattgacagtgacgacgagagcgactccggcatggcctcccaggccgaccagaaggaggaggagctgctgctcttctggacgtacatccaggccatgctgaccaacctggagagcctctcactggatcgtatctacaacatgctccgcatgtttgtggtgactgggcctgcactggccgagattgacctgcaggagctgcagggctacctgcagaagaaggtgcgggaccagcagctcgtctactcggccggcgtctaccgcctgcccaagaactgcagctgacacatcgcccgcccgcccgcccgcccgccaggcgctgccctgcaggtgctctcgtcctcccgtgccagcccccgcccgcccgtgtcccagaatgcactgctgaggagcatgcccacccccacccccgcagtgtgcagattaaagcaagtcagatcatcaa

SEQ ID NO: 1353 - DNA, 559 bp, Homo Sapiens
ctgttttagatactaagatatcattagatatatggttcggaaaatattttttcccaacctgtagttttgctgattttttttcttggctgtactgacacttcttaacttttaaagtggctaaagtaactgccactggataaaattaaagttttttattttcattatgtggagaagacagacttatctatcccaggaatcagtataaacatagaacccactaaaacaagagggagtttgccagaaaaccccatgtgactcttcgggccacagtttcctcatctaaaatcgggagaggtacgctgtgaacctgacggcagccactaccgactaatgagggccatgctttctcaccccctgaggcaggtgctactgtcctcaccctttacaggtgaggaaccatggctgggaaaggccatcaccctcacatggttatatcaaggcctgtgtctgaactgctattctacaatgcctctattttccttaaaataaagagactctaaatgaaatttattcatttttacaaaggaaataaagtagaaattagattcctaccctgtgg

SEQ ID NO: 1354 - DNA, 620 bp, Homo Sapiens
caacttgaaggcggttgttataccagtaaaagaataagattgcctcttcttgccgcgtgaggcagcaaatgcaattaatcctacaaaaaagaacgccattcagcagttgtgaaaggaatgaaactaaattcttcaaatacatcacaggatgtttgatgaagtagccctgaacaaaatacagcttcacataatagcatcttagaagaaggggaaactaaaatttctcagtcagaactatttgataataaaagtctcactactgaatgccaccttcttgattcaccaggtctaaactgcagtaatccatttactcagctggagaggagacatcaagaacatgccagacacatttcttttggtggtaacctgattactttttcacctctacaaccaggagaattttgaatttaaaaataaatccaaacattttccttcatattatcaatgcttatatattccttagactattgaaattttggagaaaatgtatttgtgttcacttctatagcatataatgttttaatattctgtgttcatcaaagtgtattttagatatactctttctcaagggaagtggggatattttgcaccttttcaacacagaataaaaaaagaaatgt

SEQ ID NO: 1355 - DNA, 542 bp, Homo Sapiens
ccttgcctgaatggcggcacatgccatatgctcagccgggatacctatgagtgcacctgtcaagtcgggtttacaggtaaggagtgccaatggaccgatgcctgcctgtctcatccctgtgcaaatggaagtacctgtaccactgtggccaaccagttctcctgcaaatgcctcacaggcttcacagggcagaagtgtgagactgatgtcaatgagtgtgacattccaggacactgccagcatggtggcacctgcctcaacctgcctggttcctaccagtgccagtgccttcagggcttcacaggccagtactgtgacagcctgtatgtgccctgtgcaccctcgccttgtgtcaatggaggcacctgtcggcagactggtgacttcacttttgagtgcaactgccttccagaaacagtgagaagaggaacagagctctgggaaagagacagggaagtctggaatggaaaagaacacgatgagaattagacactggaaaatatgtatgtgtggttaataaagtgctttaaactagatttttt

SEQ ID NO: 1356 - DNA, 847 bp, Homo Sapiens
gcggtccacaatgaggattaggtcacctggagatcccaattccatggaacagagggctgagactgaatggccaacatttagacaagaagtctgccaaggctcaatccaggtgacctaatcctcattggtggcttgatgtttgctggtatcttccaaactcagttcccagactagattgatacctggagcccagctgcctactcagcatttccacttgggtgcttcataggcatttcaaacctgatgtgtttaaaacacttgattaggctccggttttcctttggcttctgcttttcagtgaatggcatgactgcctatgtgggtggcaagccacccaggtgccgaggcaagagaccgagagcacgagctgttccagtgtaataaaatatataaaataacaagagttatactgatatagctcatagatatgattatatataaataccattaatcattagtttatagcaattactctttattcaaatattataataatcctcactctacaatcataacctagaaaaaaccaggccatacagagataggagccgaggggacatagtgagaagtgacaagaagacaagagtgtgagccttctcttatgcccagacagggccaccagagggctccttggtctagcagaattactgaaagtattaaaagtctctgaaatgcagaaataatggtgtaagctgtctctcctctctctccgcctcggctgccaaacagggaagggctccctttccagtggatgcatgacccacgtgaccttacctatcattggagatggctaacactccttaccctgcccccttgtcttgtatccaataaataacagcgcagcctg

SEQ ID NO: 1357 - DNA, 548 bp, Homo Sapiens
atccttagtctaactgcaagggatagaacctgccccaggtcacaatcattctgtccaatccagccaaggttccctccacatatgaagatggaccatggcaggatacaactgattgtgtggcaccatgtattagcagtgggaatatgtatcacatatgatgcagcctttcatatttcagcagtttgccactgtgactgtctggcaagcccccagatggcgttatattaattggattagattattttgctcaccttatgtaatactgtaacttcctataacctaatattatcggtatcattaaccaaaatttcacactcatagttgctaaagagaatgttattcaatcattaaactctgaactgatttcttctatacatttaaattatccaccctcaataatacgggtgctcaaccctatgcattttttaagtgttgctatttcttaattaaattgatttcctgtcattttgaatcatttatcacctgcgatgcatgattctattaattttgttacgttactagtatactaagcttcttgcggaccgcca

SEQ ID NO: 1358 - DNA, 932 bp, Homo Sapiens
  misc_feature (732)..(732): n is a, c, g, or t
ggtcatctcgatgactttaaagctgcagaacatgcctggcagaaacacaagcagctcaatgagtctattattgttgcactttttcagggtcaattcaaatctacagtacagtgcctcacatgtcacaaaaagtctaggacatttgaggccttcatgtatttgtctctaccactagcatccacaagtaaatgtacattacaggattgccttagattattttccaaagaagaaaaactcacagataacaacagattttactgcagtcattgcagagctcgacgggattctctaaaaaagatagaaatctggaagttaccacctgtgcttttagtgcatctgaaacgtttttcctacgatggcaggtggaaacaaaaattacagacatctgtggacttcccgttagaaaatcttgacttgtcacagtatgttattggtccaaagaacaatttgaagaaatataatttgttttctgtttcaaatcactacggtgggctggatggaggccactacacagcctattgtaaaaatgcagcaagacaacggtggtttaagtttgatgatcatgaagtttctgatatctccgtttcttctgtgaaatcttcagcagcttatatcctcttttatacttcattgggaccacgagtaactgatgtagccacataaggagacataggttataaactagttatcttttaaaaggctcagcaacacaactcttgaaatgcttatcanggataatggtagctatagctggccatttagaggaattctaggacagtgggaagctgtgttactagcactatataattccggtcagtgctgacaaataacatttaacaagtattgcagtaatcatcacttacaggtaccatttatttcaaaacaacttttttagtctgctccaaagttaaaataattaactagctaagcat

SEQ ID NO: 1359 - DNA, 720 bp, Homo Sapiens
cagaccaaggattttaataagacgcaggaggttagaccacattttacatatgcttcttaaataaggcaggcaattctcgaattcccagaaaagcagctaacactaaatgagatctatcaactggttcacacgaatgtttgcttacttcgaacgcaacgcggccacgtggaagaatgcagtgcgtcataatcttagtcttcacaagtgttttgtgcgagtagaaaacgttaaaggggcagtatggacagtggatgaagtagaattccaaaaacgaaggccacaaaagatcagtggtaacccttcccttattaaaaacatgcagagcagccacgcctactgcacacctctcaatgcagctttacaggcttcaatggctgagaatagtatacctctatacactaccgcttccatgggaaatcccactctgggcaacttagccagcgcaatacgggaagagctgaacggggcaatggagcataccaacagcaacgagagtgacagcagtccaggcagatctcctatgcaagccgtgcatcctgtacacgtcaaagaagagcccctcgatccagaggaagctgaagggcccctgtccttagtgacaacagccaaccacagtccagattttgaccatgacagagattacgaagatgaaccagtaaacgaggacatggagtgactatcggggcgggccaaccccgagaatgaagattggaaaaagga

SEQ ID NO: 1360 - DNA, 809 bp, Homo Sapiens
ttatccctcgcgaacgtgttatccctcgcgaacgtgttatcctactcttgtcatttttaatattactgtctttattcttattactattattgttcccctaagtggattggctttgtgcttggggctatttgtgtgtatgctgatgatcaaaacctgtgccaggctgaattacagtgaaattttggtgaatgtgggtagtcattcttaaaattgcactgctgttcctgctccatgactggctgtctgcctgtattttcgggattctttgacatttggtggtactttattcttgctgggcatactttctctctaggagggagccttgtgagatccttcacaggcagtgcatgtgaagcatgctttgctgctatgaaaatgagcatcagagagtgtacatcatgttattttattattattatttgcttttcatgtagaactcagcagttgacatccaaatctagccagagcccttcactgccatgatagctggggcttcaccagtctgtctactgtggtgatctgtagacttctggttgtatttctatatttattttcaatatactgtgtgggatacttagtggtatgtctctttaagttttgattaatgtttcttaaatggaattattttgaatgtcacaaattgatcaagatattaaaatgtcggatttatctttccccatatccaagtaccaatgctgttgtaaacaacgtgtatagtgcctaaaattgtatgaaaatccttttaaccattttaacctagatgtttaacaaatctaatctcttattctaataaatatactatgaaataa

SEQ ID NO: 1361 - DNA, 576 bp, Homo Sapiens
  misc_feature (276)..(276): n is a, c, g, or t
tcagagaaggtgagaatgagagctatgtacagaatgatggagggaagcagtaatgaagacgaagggggaccctgggtgcagatgagcggtgagttgattggatgtgacgatgaagtgatgacatgttgttttctctgtttataaggtaacaaatttaaaatttgtttaaattatacagatgagaatgagagttgccaaactcctgtgtctaagtgtggtgacttttataatgatggtgtcagaggcagcttccctctgcaacccctcttcagccanaggacagtgacttatcagttgtggccccagtgagcctccctgtaacttggagatgaggggctacaccagaaaagctcaacccgagtgaccctggcccctgaaatgattggcaaaatagagtgcgtgtctgggcgtggcttttcttctgggagaaaggagtgcccagttgtaactagaattttaaataggatgcagtaccccaaaaatgaagaaaagcagaagaatggaagaaacagagcggtagactcagacacagagaccatcttcggggcctttctctgtatgagatatcccagcgca

SEQ ID NO: 1362 - DNA, 790 bp, Homo Sapiens
gggacggtggggggagcgcggccatggcgctcctgctttcggtgctgcgtgtactgctgggcggcttcttcgcgctcgtggggttggccaagctctcggaggagatctcggctccagtttcggagcggatgaatgccctgttcgtgcagtttgctgaggtgttcccgctgaaggtatttggctaccagccagatcccctgaactaccaaatagctgtgggctttctggaactgctggctgggttgctgctggtcatgggcccaccgatgctgcaagagatcagtaacttgttcttgattctgctcatgatgggggctatcttcaccttggcagctctgaaagagtcactaagcacctgtatcccagccattgtctgcctggggttcctgctgctgctgaatgtcggccagctcttagcccagactaagaaggtggtcagacccactaggaagaagactctaagtacattcaaggaactcctggaagtagagcatctctgtctctttatgccatgcagctgtcacagcaggaacatggtagaacacagagtctatcatcttgttaccagtataatatccaggggtcagccagtgttgaaagagacattttgtctacctggcactgctttctctttttagctgtactactcttttgggaggagtacaggttatgcatattaacattcctcatggcatatgaaaataccaaataagccgaaaagaaatttaaaccaaccaaaattctgatgccccaaaataaccactttttaatggccttggtggaaagaata

SEQ ID NO: 1363 - DNA, 1386 bp, Homo Sapiens
  misc_feature (1239)..(1251): n is a, c, g, or t
cgctcgtctcccttgggtctgctgctcgtgtgttgtactgtcacaaacgtctcgtgtatggtgtaggttgttcacccggtcccacaccccccgcatccaccccccgggtctgcacactctcaggcgctcacaccggtgtatattcccaccaccatgtgtgtgtttctcccctttagttaattttatacaggagcaagcacaacaccatgacaccctgactacctatcccacgtgtcgtctgctcttgtccccgccctccccgcccattgaatgcctgttcctttctgttttgtttaaccccatttgatcgcgccggagcgcccccggctcttcgagcagctggggtggcggcgggtgtgggtagggggcgcgcgcgggtgggccgccccccccatgtattttgttgtgtcccccgtgtttaggtggtcacacccctgttcccgcctgtggtcccccgcgcccgggggtgcgaggggcagaacgaaggagaggccgacccctccacgcaggacacgggaccatcgtgatcgtgtatgtcgtgttgtgcgggcgaggcctctgtcggctgtcgcctattagatgcgagccgtgacgacccttccagaccccgagcttgagatgccatctccatcctgtcaaatcaggaaaagctctgaacatgccctccagcctaacgaagcagaagatgaaactgtcaaagtcgatgttcatgtgttcgtctgcgtaccgcatggtaatgatgtcatagagctggttgttgaggtggaatcctgcgtcgttgactgcatttcgcatctcgtagctgttgatggtgccggactggtctgtgtcatagtgtttgaaaattttctgccaggccttaatcttgttccagaggtggtggaactcctgcaggttgagctttccagagccatctgtatccatgagcgcaatcatgctacggcaggactccagtgtgaacccgtgtgtcttcaggtccttgtgtttgttcacgactgtgttaaggaccttcttgagctcatctgcacagatctccatgtcatctcctgctatctgcttgaaaatgttccggaattgttgctgttcctcactttcctgatcagaactgccaggctgtggctgtggggactgcttttgcttatcagggcttgttttgcctttgccctcctctgactcctggtccacacccagctccttgttgctgtttgctctgtccgaaacgaagatgatgggcttggnnnnnnnnnnnnngtgacgtgccagctcccataagcttttgggtttgcaggtcctgatcaatactgcacaccgatgaccagcatccagatgaccagaacagatccccacacacctaccactaaaaccaatcgcctgtggtcattcccc

SEQ ID NO: 1364 - DNA, 672 bp, Homo Sapiens
  misc_feature (395)..(414): n is a, c, g, or t
ggcttaagacatctagccccgtctctaatagacaacacatttatattgcagatattacttttttttcagtttatgaccaggtatttatgaaggactattggcagggaaaatatgaatatgttaactttagcttatggcatcaatttactaaggaacaacaggctcaccaactgatgtcaaacataaaaacccccacatcagtctgatacgatatggtactactttgaatctgttactagtaccatcttgacagaggatacatgctcccaaaacgtttgttaccacacttaaaaatcactgccatcattaagcatcagtttcaaaattatagccattcatgatttactttttccagatgactatcattattctagtcctttgaatttgtaaggggnnnnnnnnnnnnnnnnnnnncttacgatgcacttttctccagcacatcagatttcaaattgaaaattaaagacatgctatggtaatgcacttgctagtactacacactttgtacaacaaaaaacagaggcaagaaacaacggaaagagaaaagccttcctttgttggcccttaaactgagtcaagatctgaaatgtagagatgatctctgacgatacctgtatgttcttattgtgtaaataaaattgctggtatgacaacagttcagggatcctctag

SEQ ID NO: 1365 - DNA, 1333 bp, Homo Sapiens
agcggccgcggtcggcaggaaggagaaccaccagtggtatgtgtgcaacagagagaaattatgcgaatcactccaggctgtctttgttcagagttaccttgatcaaggaacacagatcttcttaaacaacagcattgagaaatcgggctggctatttatccaattatatcattcttttgtgtcatctgtttttagcctgtttatgtctagaacatctatcaatgggttgctaggaagaggctcaatgtttgtgttttcaccagatcagtttcagagactgcttaaaattaatccagactggaaaacccacagacttcttgatttaggtgctggagatggagaagtcacaaaaatcatgagccctcattttgaagaaatctatgccactgagctttctgaaactatgatatggcagcttcagaaaaagaaatacagagtccttggtataaatgaatggcagaatacggggttccagtatgatgtcatcagctgcctgaacttgctggaccgctgtgatcagcccctgactttgttaaaagatatcagaagtgtcttggagccaactagaggcagggtcatccttgcccttgtcctcccctttcatccctatgtggaaaacgtaggtggcaagtgggagaaaccatcagaaattttggaaatcaaaggacagaactgggaagaacaagtgaatagtctgcctgaagttttcagaaaagctggttttgttatcgaagctttcaccagactaccatacctgtgtgaaggcgacatgtataatgactactacgttcttggatgacgctgtctttgttctcaaaccagtataaacacgtggaggtcgaagtcttcagagtccgcaccctccgggatgtgcccttggaagaggggtctgtgttcacaattacgtgaagggaggacccttggggaccgccattctaaatatcatgtaggaatttaaaaagccaaaatactaattatttctttgtagtgtgtaaaggaatgtttttaaaagacaaaaacccaactctttgtggatttttatcaactctttactcagagccactctccaatgcaggtcacactccaattatgatggaagatattttttatacttaattgcagtagggactcattcccagacaaagcaatagtcacgacttcatggaaccaatcaatggattgttttttgaagactggcaataaagctgtccattcaattccaaatactggttttaaggtatagccactgatattctttcatgtttagaaattctttctgttattattcaagaaaatgtttttaatcatgctaataaacttttttggagatgaa

SEQ ID NO: 1366 - DNA, 814 bp, Homo Sapiens
  misc_feature (703)..(720): n is a, c, g, or t
gggagggcagtttctgtctggactttgaggtggacttagttatccctacagttctttaactctcagcttttaataaaagatgaaatcagatattgatgcagttgggtcacaattctttagaatgcttctaccccagggccgcttcctgttcctagtcatggttttccagtttagtagtggagtttcttgaggctaacttacagaaatttctaactgaaaactttaagagttattgatacttgttttttcagtcagtcacttacatcacctagcctactctctggaatttaaatttatttctctaggctggtcctggaagttgataaccttttggcaaagcttagatttaggagaaggcttgagtccctgttcagcgggtctgtggattctctttgcttatggctctctgcctgcagccctggcagaccatactgtatgtcatggatacccagtggaaatattactgagatgaaacacatttccaagggtatttaaactctcactctgccacctttctaagggtgggaggctggcagagatgctgcaatgcttgataatcatttggccacactgaaatttcccaaggggagctcttgccggtgcttaaaaccaaaacttcctggacacttaaaaaattccatgaatctagcacaaaatatccattcttgcccaagtgtatcccctttctctccagccttaatcnnnnnnnnnnnnnnnnnnaaagcccaggcccaggggtactttttaaccgggaaacctgcgggaaggaggggaaagaacacctagcaggggaagctaaaaaaggaaggtttgc

SEQ ID NO: 1367 - DNA, 1389 bp, Homo Sapiens
  misc_feature (1301)..(1301): n is a, c, g, or t
  misc_feature (1312)..(1312): n is a, c, g, or t
actataggaaaggtcacaaatgtttcccactgccgcccttaaacgctggagccctttttagggcacacccaaaagtgatttgtgccgaaaaccaaattttcggggtgtggccccagcccccctcttgtgaaggtcacagggccccaccacaagcgccttggagggtcagggattttggaggcccccagcctcggccgccccaggggaggcacccccccatcttcctcttgaagacttccaaaaaacaaatgtacccccgcccagggggggctgggtgccctgtaaatccccagcctactggggggaggcggacccagggagaaatccccttgaccccaggaaagtggtggttccacgtaaggggagataatgccccttccactccaggcttgggcaaccggagcaatattgcatctcaaagccaaagccaaagcccctaggaatggaattcctttatgactccagaaaaacagatctcttttctatggagaattactgatggcagtcagcttttcaccaaggaaatgggcttctgcttcagcttcccctctctccctgaggtaagcaaaccaggtgctgtcgtctcctccatgtgacctttattccatacttgtcctcgggggtgtctttaaccagaacaggtccaggctctgggctattaggagtgccagtgtgaagagtgcagcttagaaggctgttttccttctgatcttggggaatgagttcttccttcacagacgatgactctggggtctggatatcaggtggaatgaacacataaggtaagctctgaagtgcctgcactgacatgttcccacagctttggggactgagcactggaactaagggtcttctggaaacatccttttctgattcactggggcactctcggattaaggggatccccaatgtctctgaactggaagattgcggactctcaaaagttagatgtggaaacttggaggtggtaggttttcgacttgagtgtctcgcccggttttggtgtttctggtaggctgggaacaagcttcctgctgctgtatcaaaatcaggtgatacccaggaagtgatggtgctgtggtcaatgggcttgctgggcacctgtcgagtgtgagtgatgggaagctgtgtagatgcacagctgtgtttggggccctccagtggttgttggtggaacagcagcggggctttctgggaaggctggcggcgtttttttctgggaggcatcaaccggtgaatgaggaacagttagtaaccacatgatgctgttagccttcgggttgggggataggctccaattnccaacccatgnccagcccggggccggacggggccgcagctcctggcagaccgcacagccttcgagcccggaatgccgagacaaggccg

SEQ ID NO: 1368 - DNA, 1085 bp, Homo Sapiens
ctgtccccgaggcgggaggagcccgagggggcgcgagccccgcatgaatcattgtagtcaatcattttccagttctcagccgctcagtgtgatcaagggacacgtggtttccgaactgccagctcagaataggaaaataacttgggattttatatggaagacatggatcttgctgccaacgagatcagcatttatgacaaactttcagagactgttgattggtgagacagaccggccatcagtggggcatgtcagagaaggcaattgaaaaatttatcagacagctgctggaaaagaatgaacctcagagaccccccccgcagtatcctctccttatagttgtgtataaggttctcgcaaccttgggattaatcttgctcactgcctactttgtgattcaacctttcagcccattagcacctgagccagtgctttctggagctcacacctggcgctcactcatccatcacattaggctgatgtccttgcccattgccaagaagtacatgtcagaaaataagggagttcctctgcatgggggtgatgaagacagaccctttccagactttgacccctggtggacaaacgactgtgagcagaatgagtcagagcccattcctgccaactgcactggctgtgcccagaaacacctgaaggtgatgctcctggaagacgccccaaggaaatttgagaggctccatccactggtgatcaagacgggaaagcccctgttggaggaggagattcagcattttttgtgccagtaccctgaggcgacagaaggcttctctgaagggtttttcgccaagtggtggcgctgctttcctgagcggtggttcccatttccttatccatggaggagacctctgaacagatcacaaatgttacgtgagctttttcctgttttcactcacctgccatttccaaaagatgcctctttaaacaagtgctcctttcttcacccagaacctgttgtggggagtaagatgcataagatgcctgacctatttatcattggcagcggtgaggccatgttgcagctcatccctcccttccagtgctgaagacattgtcagtctgtggcc

SEQ ID NO: 1369 - DNA, 622 bp, Homo Sapiens
tcagctgaggccaccacacattacatacattcacgcacttcataaaaaacacctgagggagagaccctggctttgattagcaaataaggtatgaacctgggccagtgcccacattcacacagaccctggcccagggacatcctcctcatatgaagcattaaggcacatgctgtactgtgagccagcactccctgacctcagggtgtgtgaggagttggcactgtagagagaaaccaagactcttcctcaatgcctgccttattctgagcacccacccttagctctgataaggatatcctgagaccacattcaagatccaaaacctttcctcatagatgagggccgtcacccctgcaaacatgaccctgttctgtttgcagggtctccaagattttcacttctgagacaaaaattgaggagacttctgtctgcaccactcctgctgcaggcctggagcagcttctcagggcagccctggcccactaaggcccagtaatgagggcagaggggtgcagagccatacctggctacacccacaggtggacacagggagcaaactacttcgctgttctctgggctcattcccccagcacaggagggcctccatgcacactcattccac

SEQ ID NO: 1370 - DNA, 379 bp, Homo Sapiens
ctgctcaagactcctgactcctgcccaccccaaacaaagctgtgctgtgtggcctcctgtttccgacacgttgagggagtacaaagaacttttcatcagctcaacggagcacttgggaggccagatgaggagagaaataagaatgaagttctgggatgagaaagtggtgccacaaattgtgagtcaataaaagggatccagatatcctgaaatacacgctggacaaacagtcttctttgtaataagcacagcagcaaagagccctttccttcctgtcactttccctggtctcttgagtttcaaaggaatcaaatcctgtgataatgaacgaagtcactggccggtgatatgcccctgtggtggcatcaaaaagggtgct

SEQ ID NO: 1371 - DNA, 347 bp, Homo Sapiens
tagtgccgatggagcggggccgatggagtggggtgttagtgacaatggagtgggacaccagtgccgatggagcagggcgttagtgctgatggagtggggcaccaatgtcaaaggagcgggtcattagtgccgctggagttggggcgttagtgccaatggagtggagcattattgctgatggagtggtgcgccgagtggggcattactgatgctgaagttgctgctctggaaccaaacacccctggtccttattgatgaacggaacccccaccaccccatggtccttgatctctttggagacaaccacaatggcttaacaagcagctcagcatcagaaaagatctgta

SEQ ID NO: 1372 - DNA, 485 bp, Homo Sapiens
aggagggaggtagggataggcaagggaaaggtggggaccagtagtcatactggtcagccaaggaaaggggcattgtggagtcagggaagactctgactgctcaacagaggtctgtctagacccagtagtaggcactgacggtgttatcaaaggacaggatcaaagagagattttaggaagacacgtggattattttagggacaggggaggaaagaggaggggtgggtaaactacttggaaagaaagggagaaggactgagaagatggcaatgggagtggggaggaaggggctgattgcctttgtgacctcactaccaaacatactttgctcacctccagataagtctttgtggggcaaatgcaggataaagaaacagctcataagaggcacttgccaacatccaacaaattcagttcaaaaccacagaaaatctaggagtctccaaagaaaatcacagtcctgctgtgttgccgaggctggaata

SEQ ID NO: 1373 - DNA, 228 bp, Homo Sapiens
tctaagaggagggacattgttccagattggggttgacttgcccatcatgagtcttgccctcaggccttggagaacaatcatttatgttttttatttcgtcggtaagacaccttaaggtttcttgttgcagtgaggcaccatctttgtgcagttggccgaggttttttatgaccttacaatgggtctttaagggcgatctattgatgaaaaggtcttctgggtgggatg

SEQ ID NO: 1374 - DNA, 390 bp, Homo Sapiens
atctagaggatccctggtcgcgtatcggggggacgaacttctcttcctcacatgaggttactgtttctttcctctgtggggcattggatcctcccacagttgccctggtgatgacttagggcttcccatctgtgtacatcccactttgaatcttgatcgtgacaagaaataccttaggccttcagtcaattccgaagctccttcagttgtttttataatgggcgttttcacatgcacatatgtgtatgcatgtatacgcccatacagacatgcacacacagactcctactccattagctaacataccctccctctccacaacccctgtcacatacctttcaggaggtgacagttgtcttagttgtcatctacccagacaaacgttctggg

SEQ ID NO: 1375 - DNA, 142 bp, Homo Sapiens
gtcggatggctgctaaggcactctgcaatactttgatatccactaaaaagacaagcatgatatgccaggatgaaacattttcattaaacaagctactcattaccactgctacagtcttaaaaacttggaaggagggcaggat

SEQ ID NO: 1376 - DNA, 258 bp, Homo Sapiens
ttctggggcatttcagatcaacacactttattaaacaccaacagcgggccaggctctgcactaagaacacagagatgaataagacactgtccctgtccctagagggctggacagtctagtaggaaaaaccaggcaagtttcggctaattactgtactgttggattaaggtaaaatgttgagggggagttggtatcctaaaccacctaacccaccctggggctttagacagtgcctgaactgagagctagttgtaggtt

SEQ ID NO: 1377 - DNA, 1041 bp, Homo Sapiens
tagaattgtacaaatcagtggcaattccatgccaagaggaagtggctccggatttaagccatttaagggtggacctccgcgacgattctgaaaatgagctctctgccaaggttttaagataatttattgaaatctcctgtaaactttacttgactacttatgaagaggacctctgacttgcttgagagttctgtcagacttttctttttaaaaatttaacatgattgcttttctcaattttggagaagatgtttaaatagttctgttgtaacttttaatagttttgtgtatcattcaactttttttcttgcagcaccgaggcacatttgaaaagatggaattgaagtcgttttgtttaacgctgtgtgaatataaagagtagtttgcagctgtgtggtagtggtttaatttgcagccttagctctgtggtgtctggctctagagttacttctttttaccaagcattttcagcctccattttgaaggctgtctacacttaagaagtcttagctgtctaatttttagagaataagattgttcattgcatttctgagtattatgtaacctatttttgcagaaggtactgttacattaagtgcatctgtgtatcctggtttaaaaaaatgtaatcttttttgaaataaaccttcatattctgtatagttgctaaagtgttgagaacctttttaattgtaaaatgagaaccgattttcagtttagtgtagcagcacacttgttcaggtttgcatggtatgaaaccaaatagattcatgaaaccttggccatgaggtttgtttcacaaggttcttagaccgagttgtgcaggtaagtgcacttttaggtaatctgcactgtttgtttgatggataaattccatctctgggaattgtgtgggtattaatgtttccatgttcccaactatgttgagaagtggaaaaaaacccaggttctagatgggtgaatcagttgggttttgtaaatacttgtatgtggggaagacattgttgtctttttgtgaaaataaaaatccacacctagaaa

SEQ ID NO: 1378 - DNA, 778 bp, Homo Sapiens
  misc_feature (508)..(586): n is a, c, g, or t
aaataatgcccctccagttccctcctcaagagatacagctttaaccatagcagcagataaagggcattacaaattctgtgagcttcttattggcaggggagctcatattgatgtacgtaacaagaaggggaacactccattgtggctagcagcaaatggtggacacctcgatgtggttcagttactggtgcaagcaggtgcagatgtggatgcagcagataaccgcaagataactcctcttatggcagcatttagaaagggtcatgtgaaggtggtgcgctacttagtcaaagaagtcaatcagtttccatcagattctgaatgtatgagatacatagcaaccatcactgataaggagatgctgaagaagtgtcatctttgtatggagtcaatagtacaagccaaagatagacaggctgctgaagcaaacaaaaacgccagcattttgttagaggagttagacttggaaaagttaagggaagaaagtcggaggctggctttggctgcnnnnnnnnnnnnnnnnnnnnnnnnnnnnnnnnnnnnnnnnnnnnnnnnnnnnnnnnnnnnnnnnnnnnnnnnnnnnnnnaataaagagaactttgaactccaagctgctcaagaaaaagaaaagcttaaagttgaagatgagcctgaagtcttgacagaacctccaagtgccacaaccactactaccataggtatatctgcaacctggacaactttggcaggttctcatggtaaaagaaataataccataactacaaccagttcaaagagg

SEQ ID NO: 1379 - DNA, 938 bp, Homo Sapiens
ttggttgatgccttttttttctgacataataaagtattttctttaaaaattgttgtaattcagagtatttctgttgagggaggtgcttcttaaaaataagtaggaatatagcaccccagtgagcaggaagctgggggggtagggtgcagtgttagggggtgtcaccagctctttgaaaacctgtggacaacaagccagtttgcataaacaggatgtgtgatatttactcttgataggaggcatagcaggcccttagagctttacttaaactgcatggcaaattgaaatgaatcattttagtgtttagctagccactaaatcccttgctgatctgtcctgcgtagtttaaaacgtggccatgttataaagaaaagtcttgaagcatccggttattgctgagttttcagaagaaaacaacgcaagcaatctcttgccctttttccacgttaccctttaaaataacctttgttcagtggtacatttagttaaggcatttgtattcaaatgtagcatagtatttgcagagaaattaccttttaaaacatctcaaaagtgttttctaaaatgatgaaataaacggtggggttctgtctatggtgggattgtcagtttattaggtgagtattttccaaggtcacagtttgtgaaaaaatggtgctatgtacaagtggagtttgttgggatagacaatcacttacaaagcccagatggccagaagggaattggtgttgctcctttcacttgtatggttgagcagatttgtcacatgccacaaaaccattctttgtagtcatgcttagtatgagcttgctttgttgttacggtcatgttctttccagccctgccccagctatgaattgtctaagtgtgagggagcatcagagcttcagtattgtttaaagaatgtagaaaaatacaaatttgtctaattttgaaac

SEQ ID NO: 1380 - DNA, 462 bp, Homo Sapiens
  misc_feature (263)..(298): n is a, c, g, or t
cctctccttgagtttctgtgaattaaaatatttgcaaatccaaagagatgccttccaggatgaacaaaggcagaccagctccgaggggcggggtagggtggggcgggagctccctggctgacatctctttgttctccagctgtctcaaattcacacctctgtacagggcaaagttttcccacaggagcccccctactgatgctgggagccaaatgctggtgctttgagagtcccggaggccccggggttcccgcccccgctgnnnnnnnnnnnnnnnnnnnnnnnnnnnnnnnnnnnngtacagatgtgagaaggtggtcacacacagatgggtaagcccactgatctacttgtagtcactcagtgtaatcattaggctatcttcaaggaatcattgtgcagtcaaaaagaggattcaattatttatgaatagggtgtgtaaataaaatagtcatttaatat

SEQ ID NO: 1381 - DNA, 868 bp, Homo Sapiens
  misc_feature (743)..(743): n is a, c, g, or t
  misc_feature (747)..(747): n is a, c, g, or t
  misc_feature (750)..(751): n is a, c, g, or t
  misc_feature (754)..(754): n is a, c, g, or t
  misc_feature (767)..(769): n is a, c, g, or t
  misc_feature (772)..(774): n is a, c, g, or t
  misc_feature (853)..(853): n is a, c, g, or t
cggacaagggtgcgaggaaagtcagtgagcaaatcgcggaccaccggggctgccagctcgcctgactcccggcctcttgcgctcctaggggcggagaagggtgcgggctcttcgccctttgtgtcctccttctttcactaacttctggactttccagctcttccgaagttcgttcttgcgcaaagcccaaaggctggaaaaccgtccacgatgaccagcatgactcagtctctgcgggaggtgataaaggccatgaccaaggctcgcaattttgagagagttttgggaaagattactcttgtctctgctgctcctgggaaagtgatttgtgaaatgaaagtagaagaagagcataccaatgcaataggcactctccacggcggtttgacagccacgttagtagataacatatcaacaatggctctgctatgcacggaaaggggagcacccggagtcagtgtcgatatgaacataacgtacatgtcacctgcaaaattaggagaagatatagtgattacagcacatgttctgaagcaaggaaaaacacttgcatttacctctgtggatctgaccaacaaggccacaggaaaattaatagcacaagggaggacacacaaaacaccctggggaaactggagagaacagcagaaatgaccctaaaagaaaaccaaacaatggaatatcccaagtattagaatttgactccaaacaatttggtaattttttgaaataaacctagcccncggnggnnggncgcgggaaaaaannnaannnacaatgtgggggccgccttcgggcccctccgaaaagccttttctaagacccatttccgtttggcggcggggggcccccnagaaggttaaggtgt

SEQ ID NO: 1382 - DNA, 632 bp, Homo Sapiens
  misc_feature (378)..(378): n is a, c, g, or t
gagctatcccagcatccttcccatgaacgctttttccttgcttaagttggtccaagttcatttctgttggtcaaaactcaagaatcctaacaagtagtctctcctgagatggcctcatacatctttgcctccaaacagctgccagcccagggtctggcataaagtagcactcagtatatgtctgctgaatgagtgggtgaatgaataaatgaatgaacagtactccagctctcagttcaccaaagtaatctgggtatacaggctgggagaggtggggacacactggggcagaagatgtggagtcacctgagcacagaggaggtagagaagtcagagatgttaccatagaggggaaatgttaggcaacgggaggttccngggtcggggtgggaatgaaaagcttctctgcagcttgagaagcaggaaatggtcagcaagtagctgagaggcaggtgctggtgcttccttcctgggtggcttcctttgtgttcctcttctgaatgaagagcaattccaaaggcgtaagtccccagacaccctgctaacgggtacacaccagcagctcagttgtgcaagcagcacaagctgtctttctgtggccacagaaggctgcgactgaacttcggtccagg

SEQ ID NO: 1383 - DNA, 796 bp, Homo Sapiens
  misc_feature (608)..(608): n is a, c, g, or t
  misc_feature (698)..(698): n is a, c, g, or t
gggggcggactgcggcgcacttccgtagaggtggacatggcgtgcggctttcgccgcgctattgcttgccagctttccagagtgttgaatcttccaccagaaaacttgatcacatcaatatctgcagttccaatttcccaaaaagaagaagtagctgattttcagctttctgtggattctttattggaaaaagacaatgaccattcaagaccagatattcaagttcaagccaagagactagcagagaagctaagatgtgatacagtggtgagtgaaatcagtactggtcaaaggactgtaaatttcaaaataaacagagagctcttaacaaagacagtgctacaacaagtaattgaagatggctcaaaatatggattaaaaagtgaacttttctctggacttccccagaagaagattgtggttgaattcagttcacctaatgttgccaaaaaatttcatgttggacatttgcgttctaccatcataggaaattttatagcaaatctcaaagaagctttaggacatcaagtaataagaataaattaccttggcgattggggcatgcagtttggtcttctgggaactgggcttccagctgtttggctatngaggaaaaactgcagtccaatcctctacagcattctctttgaaagttttatgtaccaagttaaataaaagaagccgccagaatggattanaaagggttaagccaaaaggcccgccacccgggagaggttccctttccccacacgaaattttggaaaactgtgggcggccaataaatggtggccccaac

SEQ ID NO: 1384 - DNA, 856 bp, Homo Sapiens
attttcgcaatggataaggaaaagtattcaggagtatttgtccccttcacacagaattggatatataaaaaagagcatcccagaaggccacccccgaccttccaatggcagcctgcggagatatatttgagagtgttagagatccgagagctaagacaagtcttgaaggacagaatcgtattcatcctgaaatcaagcagctgacccgccagttagatatgatcttgactgaacagagagatatgtctcttcctcaacagagaaatctctaaaagagcagcaggaatgcctggcatgcatggcagattactcaacaagaactggatactgttgtgaaaactcagcatgagattctgagacaagtaaatgaaatgaaaaattccatgagtgaaaccgtcagactggtcagtgcaatgcagcaccctggctctgctggaggcgtctatgagacaacacagcacttcattgacatcaaagagcacctgcacatagtaaagagggacatagataacttagtgcagcgaaatatgccatcaaatgaaaagccgaaatgcccagaactaccaccatttccatcatgtttgtctacggtccacttcattatatttgttgtggtgcaaactgtattattcattggttatatcatgtataggtctcagcaagaagcagctgccaaaaaattcttttgactaccattttcctgtgtacttcatctatttgtgtacaaaatgatgtcgttttgagggaatttaagtatttaaattgcttcatagtctaaattattaattttcttaataaaataactgtttaaacattgatttgcagttaagaataaaccttaaagcaaagacaacca

SEQ ID NO: 1385 - DNA, 944 bp, Homo Sapiens
  misc_feature (182)..(182): n is a, c, g, or t
  misc_feature (185)..(185): n is a, c, g, or t
  misc_feature (202)..(202): n is a, c, g, or t
  misc_feature (616)..(616): n is a, c, g, or t
tgtccaagtgcatgatgtttctccagagcaacctcgaacagtcatcaaagcaccccgcgtcagcactgcacaggatgtcattcagcagaccttatgcaaagccaaatattcctacagcatcctgagcaaccccaatccaagcgactatgtgcttttggaagaggtggtgaaagacactaccnacnagaagactaccacaccnaagtcctctcagcgggtccttctggatcaggagtgtgtgtttcaagccccaagcaagtggaaaggtgcaggaaaattcatccttaagctaaaggagcaggtgcaggcatctcgagaagataaaaagaaaggcatttctttcgcaagtgaactcaagaagctcaccaagtcaactaaacagccccgaggacttacatcaccttctcagctcttgacctcagaaagtatccaaaccaaggaggagaaacctgtgggtggcttgtcctccagtgacacaatggattaccgacagtgactaagggcagcatgtttaacccaggtgaagatctttaagcaagaagttaaagagtgaacatggtggaaaaaatataattattttcatcagacttaaactggaaattgatgatttttgaantgaagccttcacacatgtgagatccatgctgaggagaagcaaaatggcacagggctagttgccaccaaccaatttactgatgaatgaagcccaggggactgccattttataaatgtcagcagttggaaaaatcgtcacgaattgacttagagcaagggtcagcaagcttgtctgtaaagggccaaacaggtaaatattttagggctgggggccataaaatatgttgcaaccacccaattctgccattgtagtgcaaaagcagccatagacaacacatacatgaacgaacgtggctgtattccaataaaactttatttatggacactga

SEQ ID NO: 1386 - DNA, 997 bp, Homo Sapiens
gtggaccggtccggaattcccgggatgctgcagcgcctcctgctggtgaacgctgagctgcggcacaagctggcggccatgcagacccagctgcgcgccgcgcaggaccgcgagagggagcgccagcagcctggcgaagccgcgactccgcaggctaaagagcgagcgcgggggcaggccgggcggcccgggcaccagcacggacaggagcccgaatgggcgaccgccggcgcaggcgccccagggaaccctgaggacccggcggaggccgcgcagcagctcgggcgcccctcggaggcagggcagtgccgcttcagtcgggaggagtttgagcagatccttcaggagcggaatgaactcaaagccaaagtgttcctgctcaaggaggaactggcctacttccagcgagctgctcacagaccaccgggtccccggccttctgctcgaggccatgaaggtggctgtccggaagcagcggaagaagatcaaggccaagatgttagggacaccagaggaagcagagagcagctttggcctatggtatcggggtaaagctgaatcctctgaggatgagaccagcagccctgcacccagcaagctagggggagaagaggaggcccaaccacagtctccagctcctgatccgccctgttctgccctccacgaacacctttgtctgggggcctcagccgccccagaggcctgacttaggggtctggctgtggaaggatgtgtggcctcaaatgaggacagggctcccgccttcacagccctcgccaggggtctgccccaatcctggcctgcatcagggcaggacggggtctcagcccgcctccctctctacgtctctgtaccgagcctctggggccagatataagagtgcctctctgagtctcagtttccccatccatgaaatgagagctgactgcctagctcccagggcctttgtgcaaacggcctgagctcatgtaataaagaactgcccgtaatacacaaa

SEQ ID NO: 1387 - DNA, 792 bp, Homo Sapiens
  misc_feature (745)..(745): n is a, c, g, or t
ggggacaattcagatactagttctagtgtggatggaaggagaaaacataagcaaccagctctcactgcagattttgtgaattattattttgagagaaatatgcgcatgattcaaattcaggaaaatatggctgaacaaaagaatataaaagataaattagagaatgaacaagaaaagcttcatgtagaatataataagctatgtgaatctttagaagaactacaaaacctgaatggaaaacttcgaagtgaaggacaaggaatatgggctttactaggcagaatcacagggcagaagttgaatataccggcaattttgcgagcacccaaggagagaaaaccaaggaaaaaagaaggaggcacacaaaagacatctactcttcctgcagtactttatagttgtgggatttgtaagaagaaccatgatcagcatcttcttttattgtgtgatacctgtaaactacattaccatcttggatgtctggatcctcctcttacaaggatgccaagaaagaccaaaaacagttattggcagtgctcggaatgtgacccagcagggagcagtgacatggaagcagatatggccatggaaaccctaccagatggaaccaaacgatcaagggagcagattaagggacccagtgaatttgttccacaggatgtgccaccagaaccaaagaagatcccgattaagaaacacgaggacccagagggacgaaaaacgaagctttcgttcctgaggaagnaaaaaacttggaggaaagaagtttccctagagagaggaagaccaagg

SEQ ID NO: 1388 - DNA, 493 bp, Homo Sapiens
  misc_feature (426)..(439): n is a, c, g, or t
acatgtatatcatggaatactgtgcagccgtagaatcaaatcatgacctttgtagcaacatggatacagctgaaggcgattatcataaatgaattaacatgggaatagaaaaccaaataccacattttctcacttataagttggagctaaatattgggtactcatggatataaagatgacagcaatagaaactggggactactgaaagtgggaaaagggctgaaaaattaactattgggtactatgctcagtacctgggtgatgggatcattcatacctcaaacctgagcatcgtgcagtatacccaggtaacaaacctgcgcatgtaccccctgaatctaaaataaaagttgaaaaaggaaaacggaacaacaataagcccattttccatagtggtaaagatacaggtgtcatacatctattttnnnnnnnnnnnnnnttgaaattaatgagctaagcagtcatttgaagaatggtgaaaataataaatcca

SEQ ID NO: 1389 - DNA, 841 bp, Homo Sapiens
  misc_feature (689)..(689): n is a, c, g, or t
ggggagggggttccgggaagatggtgctgatcaaggaattgtgagtgggtctgtgggcgcgagcgaggccgtgggacggcagtgatgggagatttgttgatggagaagtgccgtgtggttttgccatgttctgttcaggagtatcaggttgggcagctttactctgttgcagaagctagtaagaatgagactggtggtggagaaggaattgaagtcttaaagaatgaaccttatgagaaggatggagaaaagggacagtatacgcacaaaatttatcacctaaagagcaaagtgcctgcattcgtgaggatgattgctcccgagggctccttggtgtttcatgagaaagcctggaatgcgtacccctactgtagaacaattgtaacgaatgaatatatgaaagatgatttcttcattaaaatcgaaacatggcacaaaccagacttgggaacattagaaaatgtacatggtttagatcccaaacacatggaaaactgttgaaattgtccatatagatattgcagatagaagtcaagttgaaccagcagactacaaagctgatgaagacccagcattattccagtcagtcaagaccaagagaggcccctttgggaccccacctgggaagaagggagctggcaaacaagcccttgactggtcccccagatgtggtgccctattaagctggntggaccctcaaaattcccagtgggtgggggacctgccaaagccaaagctagaaaaactttctttcccaaagccaggaaaaaccggatattttaccaaactttccatcggccagcttttttttgtttggattggaccaggggggttccaatct

SEQ ID NO: 1390 - DNA, 865 bp, Homo Sapiens
  misc_feature (401)..(410): n is a, c, g, or t
  misc_feature (591)..(591): n is a, c, g, or t
cctcctccagaagattacgaagaggaggagctgcctgtggttgagtatagtgatcctttgctgaagaggacccacgtgggctccacgttcttacttgggaaaaggttggggcaatttatgactatacaaaagacaaggaagatgagctgtcctttcaggaaggagccattatttatgtcatcaagaagaatgacgatggttggtatgagggagttatgaatggagtgactgggctttttcctgggaattacgttgagtctatcatgcattattctgagtaaagctcagcagggctgtgcttgcctcacaggaatagtcaggtcttcccagattatctgaaggccctggggattccactccagtaaagtagaatgaaggatacaaatgataaaaattacacnnnnnnnnnnggtttattccccagtattaaaaacaaagcaagctgagtctgaacaaatggatctttctgccatcatttgtacaatgctgagctgtctggattgaaataaaatgaccatttttatgtatgtcaaaggtataacagcataactgtgtagccaaaacaaaatcagattaagactgattcagaanaatctgggatctttctcaagaatactgtatacccttgggatttctcctcctgcagaatctgtggcattggatgttcttcattgcctgtgctaaagggttaacctcatggcccagtgggtaccctagccccctccttttcttccacttgttatgaagaggaagggacccacattttaaataccaccactttaaccatttttacaatttatttcaggatgggcttttttttcctctggggacactggaaaaattctgcatttctcctccagcactt

SEQ ID NO: 1391 - DNA, 838 bp, Homo Sapiens
  misc_feature (581)..(588): n is a, c, g, or t
  misc_feature (591)..(591): n is a, c, g, or t
  misc_feature (593)..(593): n is a, c, g, or t
  misc_feature (595)..(652): n is a, c, g, or t
  misc_feature (654)..(654): n is a, c, g, or t
  misc_feature (656)..(659): n is a, c, g, or t
  misc_feature (667)..(668): n is a, c, g, or t
  misc_feature (671)..(672): n is a, c, g, or t
  misc_feature (675)..(675): n is a, c, g, or t
  misc_feature (682)..(697): n is a, c, g, or t
  misc_feature (699)..(712): n is a, c, g, or t
ggtgccaatcaatagcacccctactcacatacacacacacctagccagctgtcaagggcagaatgaatctatgctggataagaaatggtggaactgcgttatgaagagctaatttactggacaaagaattccaaagcaaaaccagaacagtatgaatttgagcaggtctcataggttgagcaatttccccctaaaccaactgaaggctaaaaagcaacaggccattgtgaaccaatgcaagacgccctctatcatggtgaaaagctccatcaatgaggtatcttctttagtgggtggtatgtaatggaacttagccatttttcaaagcaattgaaatgcattgctctggatctgttccttggcagtggactcagaaagccaacatgtggctcctcccagcccataaccagtatttttgctgcttctgaatacaaattggttggttttgacttcagattgaacttactgtagcctcagatgatttcccccctccgcctccaggaagaaagaatgttactgccttaataaaaaatgaaaagagaatgatgctcaaaatctttccaaataaaatgttccttatnnnnnnnnaananannnnnnnnnnnnnnnnnnnnnnnnnnnnnnnnnnnnnnnnnnnnnnnnnnnnnnnnnnanannnnaaaaaaannaannaanaaaaaannnnnnnnnnnnnnnnannnnnnnnnnnnnnaaaaatttttcaaaaacattccttttgggccccccggcccccaaaagagaacgggaaactggggccatacctgtttctcaaaggaaaaacccgggcccaagaaaaaggggcgtgggacctcccccc

SEQ ID NO: 1392 - DNA, 454 bp, Homo Sapiens
  misc_feature (301)..(323): n is a, c, g, or t
ttccatacagactccacactcgcagcgcatccatggtactgatggtaggaacagaagcctctgatgctttcccctggcaggtccatctttctgatctaatcctgggggtgcatccattgtcagaggtctgaagcagcccaacatcctttctctggggagaagagcaaatgcatgcaatgcaatgtattttcttttcaaaaagaggaaggcttctttgggccaaatgccctaccaatatagttaattttcagttatttgcatttgaattaccttgatatttctgaaaacagagcactgtacnnnnnnnnnnnnnnnnnnnnnnnaagagacagggtattgctctgttgctgggtgcaatggcaggataatagctcactgcagcctctgcttcctgggtccaagtgatccttccatctcacctttcagagtagctgaaactaaagccatgccccac

SEQ ID NO: 1393 - DNA, 697 bp, Homo Sapiens
ccacaactccatcggcgactatcgctggcagctggacaaaatcaaagccgacctgcgcgagaaatctgcgatctaccagttggaggaggagtatgaaaacctgctgaaagcgtcctttgagaggatggatcacctgcgacagctgcagaacatcattcaggccacgtccagggagatcatgtggatcaatgactgcgaggaggaggagctgctgtacgactggagcgacaagaacaccaacatcgctcagaaacaggaggccttctccatacgcatgagtcaactggaagttaaagaaaaagagctcaataagctgaaacaagaaagtgaccaacttgtcctcaatcagcatccagcttcagacaaaattgaggcctatatggacactctgcagacgcagtggagttggattcttcagatcaccaagtgcattgatgttcatctgaaagaaaatgctgcctactttcagttttttgaagaggcgcagtctactgaagcatacctgaaggggctccaggactccatcaggaagaagtacccctgcgacaagaacatgcccctgcagcacctgctggaacagatcaaggagctggagaaagaacgagagaaaatccttgtatacagcgtcagctgcagaacttggtagacactctaagaagagttgtacagcatcagcctgtccacggttatcctctga

SEQ ID NO: 1394 - DNA, 386 bp, Homo Sapiens
gaatgcagacccgttggaggtgatgctgctcaacatgggctaccggatcacgggcctgagcagtgggggtgccggggcctctgatgatgaggacagctctgagggccaggtgcagtgccggcccagctagaccctccagccctggtccccagcccctgctactggctggaccctctgccctgggcaggaggtcaggggattctgttttggtttgtcttccccaccacccttttttttcatttcccctgttttgtttgttagtttggcgttaggggtggaggttgctacaacttgctggctttcggactctgccctgattgtcccctgactatccccagccctgaaaaaaagagcaggaggggacacccctccatatgccccactgg

SEQ ID NO: 1395 - DNA, 226 bp, Homo Sapiens
cgactctagtaggatcccccatcacagagctcaggtgtctgaatatcacataagtgacacactaatagtgatttccgtctttatagcttttagaacacatctgtaaaataatagcaagacaggtgcaagagtggaagccttttcatatctgatatttagaggacatgtcggtgagtttgaaatattctgtggctgggattatcagggactctgtatccagctcctg

SEQ ID NO: 1396 - DNA, 413 bp, Homo Sapiens
ccagatattcctggaagacagcgacgtacgaggtgatggcggtggctgtagcaggaactgcaaaatcccagaggtttttccagagcttctcgggtgcctaatcgacgaggacccccaggcggcgttagaggagctgactaaggctttggaacagaaaccaaatgatgcacaatattagtgtcaaagagcttactgtcacattcttcttgggaattactgtgttgctgttgctgatgcaaagaagtctctagaactcaatccaaataattccaccactatgttgagaaaaggaacatgtgaatactatgaaaaaaactatgctgctgccctagaaatttttacagaaggacaaaaattagatagtgcagatgctaatttcagtgtctggattaaaagatgtcaagaagctcaga

SEQ ID NO: 1397 - DNA, 543 bp, Homo Sapiens
  misc_feature (466)..(474): n is a, c, g, or t
tgcacttcaccctccaggtgtgtgagatcaacctttttccgagcataaagctgcaagatctttaagcagatttcctgaatttcttcttcagttgctccaaacaaaagaaaccaatggggacgattgggcaaagggatctccagcgtccgggcagcaagataaatgcaggcacaggcgatgctctctggctggaaccgcacgaagacgtcggtgcgaaggctgccgttcatgtaattcctagaagccaaacacaggaagaactgccatgccccacccgggaaccccggtcttccgcctgcattatctagagaaaatctagataaacgtactactcctctaaggagtctattgctaggactcagagctagaccgtcctgtgaatctccagagttaatggagaaatattctagctgctttttctaaataccagtaaataccggacagaaaggcaccagcaattattagnnnnnnnnngctggctgaatgtcagactatacgtgttgctatgaaagagaaccgactttaacttacttttcccctcgt

SEQ ID NO: 1398 - DNA, 358 bp, Homo Sapiens
gggagtggagacaagggaaactcaggaaaggaaccaaaaacatggaaaggggagaaaagacaagtgagagtggaagacaagaaaagaggccctggacggccaggtacggcgggtcctaacggcggcagtattcaagcgggccgcggcggtgtcctgggtaaaccagtggccccaactccacctctcttgggcaaatcacagaaatctttgagactaattagctgtaaattgcagacaaaaccttcggcccttataagtttctttcttttctagtgcagctggattttcatttggtctttagtttacaaaacgagtaaccgtttctcgaagctctttaactgctttttatgcatcactg

SEQ ID NO: 1399 - DNA, 212 bp, Homo Sapiens
ggggcggattccgccttcctcgtggctgactggatgcatccgctggtactgatttacgaagagaatgatcatgaagggcaaatggcagtgaagcaagaagagctggcttcaggctcagaagagaatgctgtgcctcttcctcatggtttgcggtgccctgcatgttcagagaaacttctctagtaatgaatgaactatagaaatgatccctg

SEQ ID NO: 1400 - DNA, 1235 bp, Homo Sapiens
ggaattctcgggatctggggtgcatgggctccaacgtggtgtactgtggagctgttgggactgggcaggcggcaaagatctgcaacaacatgctgttagctattagtatgattggaactgctgaagctatgaatcttggaatcaggttagggcttgacccaaaactactggctaaaatcctaaatatgagctcaggacggtgttggtcaagtgacacttacaatcctgtacctggagtgatggatggcgttccctcggctaataactatcagggtggatttggaacaacactcatggctaaggatctgggattggcacaagactctgctaccagcacaaagagcccaatccttcttggcagtctggcccatcagatctacaggatgatgtgtgcaaagggctactcaaagaaagacttctcatccgtgttccagttcctacgagaggaggagaccttctgagtgtgccctttggccacggacactgttgggaaccaaactctgtcttggagcctccttttagctcactccacaagtaaatggatttaatcaaaggtcacctatctgcttttgattgtctaggtcacagtaatccctaggatttttcaccgcttattctttttgtctttttaacaaacatattatccgaattttttttctgcaagccactgatagtctctgctaactagcttaattgacctttttacaaagtttgatccccaagcatcctcaactaaatcattgaatacttcaatcaggatattatctgctttactttacaaataaaaccaaatcttttgtcaacaggatgaaacccatcttaaaggaaagaaaaggaattggtgtgaagagagaagttagagaagggaaatgcagtgaattactatctgtgtccatcaggaagtttgtcctgttaaccaaatggttactgcactaccagggttactggtttattttccagggagctgataaagcaggagaactgttgctgcatgttttctatttggactccgtcacaatatggtaggatatccctcaccaactcccgacactcagcagacttgtttttatatttttttctttcttgtacattcttactacgtattttttgacttaagaatgacatctttagacgcatttcagagccaatgatgatatttgctttagataattattatattattataaatatagccatattattttgaattcaaataaatttctatactggtaaaa

SEQ ID NO: 1401 - DNA, 1338 bp, Homo Sapiens
gggtccggcgagcgggcaagcgggaaccaggtggccacccggtgtcggtttcattttcctttggaatttctgctttacagacagaacaatggcagcccgagtacttataattggcagtggaggaagggaacatacgctggcctggaaacttgcacagtctcatcatgtcaaacaagtgttggttgccccaggaaacgcaggcactgcctgctctgaaaagatttcaaataccgccatctcaatcagtgaccacactgcccttgctcaattctgcaaagagaagaaaattgaatttgtagttgttggaccagaagcacctctggctgctgggattgttgggaacctgaggtctgcaggagtgcaatgctttggcccaacagcagaagcggctcagttagagtccagcaaaaggtttgccaaagagtttatggacagacatggaatcccaaccgcacaatggaaggctttcaccaaacctgaagaagcctgcagcttcattttgagtgcagacttcccctgctttggttgtgaacgccagtgggcttgcagctggaaaagggggtgattgttgcaaagagcaaagaagaggcctgcaaagctgtacaagagatcatgcaggagaaagcctttggggcagctggagaaacaattgtcattgaagaacttcttgacggaaaaaagggggccggcctgtgttttcactgatggcaagactgtggcccccatgcccccagcacaggaccataagcgattactggagggagatggtggccctaacacagggggaatgggagcctattgtccagcccctcaggtttctaatgatctattactaaaaattaaagatactgttcttcagaggacagtggatggcatgcagcaagagggtactccatatacaggtattctctatgctggaataatgctgaccaagaatggcccaaaagttctagagtttaattgccgttttggtgatccagagtgccaagtaatcctcccacttcttaaaagtgatctctatgaagtgattcagtccaccttagatggactgctctgcacatctctgcctgtttggctagaaaaccacaccgccctaactgttgtcatggcaagtaaaggttatcctggagactacaccaagggtgtagagataacagggttttcctgaggctcaagctctaggactgggagtgttccatgcaggcactgcccctcaaaaatggcaaagtagtaactcatggggggtagagtttcttgcagtcacagccatccggggaaatctcatatcagccccttgagaagccaaagaaaggactaactgctattaagtttgaggga

SEQ ID NO: 1402 - DNA, 788 bp, Homo Sapiens
gggtactccctttcggtttggcccttattttctgggggggctgtttcccttttttggaggatggcatcccacataaaatgaatttgaagtttccccactttaattgttcaacatttcctgtccacatcccccattggtgttttgcaaataatgtctatgatgtctcctttctggattttgagggagtcagtgtcatagggacttggcgtgaaatccgtatgcactctggcacggccacagaatggtcctgaataggggccatcgtcatccagtcgaaagctgtcccggttacttgtaccatctgaacagcttgttatgccacttgatgagctctgtccactgtagagactatccatggagtcactggctttgagggacaccttctctgtgtgggtcccaatcacagggtcactgtttctatatgggtgggcattctctccatcttcctcatccttttcctcagaaagggctttgatgtactttttacccacttttttcttcattgtccatgaaatagctctcatttttttacccaaaccgcctccattatttgaagttttactttgttctccacttccatttgtgggatctccttcatgtgcctcagttgaatcatctggttttgataaagaattattccgaaaacgatcgaaattcccaaaactgctgcttcgctttggtttttgatgtttctccttctctgaaacattggatggctttctcttgagcattttgaattctgactactcctagtgagtgcactttctgctgttacagaaacaactccc

SEQ ID NO: 1403 - DNA, 726 bp, Homo Sapiens
agggtctccttgtaggtttggctggtattccccaaaattgttggcattggctgccatggccacaatgttggtcccctgaaataggatttttgcggaaactgtcaacagtagtaattcaccatatgcaagtcccatccttatcatgcgagaataatcacaggttctgtagaaatgtacaatgtgcttaagataatgaaaattgtagcgctgcatctgagatttatttctctacttagctagtaaaacttgtcatttttgctcacttaagtatgatcatttgtgattcctttaaatagcaaaaatgcacagtcctctttaggcctctactcaataatagtttacattactcttaacaaaatcattctacataaacagatagctccttaaaaatagtactctctcattaaatctaacttgacagaaagaagtttaagggaaaaaggagtgctttgtaagtgaaaaagtacaaatctttggcctttctcttgacattttcgtatgtcaaaaagcaaaaaacctccatgtatttcaatctagtgattactttttgcaccataatttgttttttacaccacaaaaggaggcactttcagtatctgtaaaaggtatttaatcctaaaacatacttacctagagaataattaaaacagaattcaatacaatctagtatctattaggaaattaagagttatcacttctaaaagtcatttgaaagtcaatgatgcc

SEQ ID NO: 1404 - DNA, 3071 bp, Homo Sapiens
  misc_feature (97)..(98): n is a, c, g, or t
  misc_feature (123)..(123): n is a, c, g, or t
  misc_feature (177)..(179): n is a, c, g, or t
  misc_feature (184)..(202): n is a, c, g, or t
  misc_feature (215)..(215): n is a, c, g, or t
  misc_feature (221)..(221): n is a, c, g, or t
  misc_feature (233)..(233): n is a, c, g, or t
  misc_feature (305)..(305): n is a, c, g, or t
  misc_feature (343)..(343): n is a, c, g, or t
  misc_feature (351)..(351): n is a, c, g, or t
  misc_feature (437)..(437): n is a, c, g, or t
  misc_feature (459)..(460): n is a, c, g, or t
  misc_feature (479)..(479): n is a, c, g, or t
  misc_feature (537)..(537): n is a, c, g, or t
  misc_feature (566)..(566): n is a, c, g, or t
  misc_feature (595)..(595): n is a, c, g, or t
  misc_feature (631)..(631): n is a, c, g, or t
  misc_feature (890)..(898): n is a, c, g, or t
  misc_feature (949)..(972): n is a, c, g, or t
tgtcgtgccgctctggcgggggccgaagaaaagtgatgtgtcgcgcggtcccaccgccggcagggtcgacatcactcaaacaatctaccatcaacannaacaccacccgcccgcgcggcgggnctgaccgctaccgtaggatgtacgatccgcgtcgactgcctccctcctcatgannnggttnnnnnnnnnnnnnnnnnnntctggcttccatncatcanatctaggggcgnccggcgcgcgcggttgagttctgcgctctatctatcacgtagttactgtttattcctcccccccgactggancagcccgtgttctcgtcgcgctgcatatgcatccacancacgcgcnccacaccaaaacagcctcggcgtgcgcgcgcgggacgccctcagcaattagtctccggcgtttggaatttgagagtagagggcggnggcgcgtagaaagggagggggnnagtggaggggggaccggcncgcgtcgacgctgtgtggtggtgggtgagggggggaggcaggggcccgctgccgcgcngtgggttggagttacgacggcgcgcggtntccgcatagccagggagaaggacgaatancccctccctgacgcctctagggtggtcggtgggatngtgttttgtgtggttttctcatagataaaaaaagactcacagcgacggggtgggtgtgtgtgtgtcgtctcgggcgccccgcgggcgggggcgcgggaggtttatgtttgtgagtggggtgggtggggggtgtcccgcggtcgaggcggcgcgccgtgttggtgggtgtgggggcggcgaagaggagtttcctctgttgtgcgaggaagaggagagacggagagaggcgccgcttcttgtgcgggtctcacacaatatnnnnnnnnncgagggtgcggcgacaaggaaaaagggtttttatggtgaagttttttgttnnnnnnnnnnnnnnnnnnnnnnnnaccaagatggttattttgtggtttgcgcgtttgtgtggtggtgttggccctaattgtattgttcgtttgtgttctggcgggttcgcggtgggaatggatggtgctcgtttttcttttcttgcgtgctctttcggggttgtggtggtgctttgtgttttggtggtttttttgcaataaacatgtagatttattttaagtcagtttggtacatgatacagattggttttgcagtttttaatgaactgaaatagaaatgtctaaatacagcagtatctgcctgtgcaacaaatatctgtaaggtaaaataaggtatttgatagaagaacatctgcaagaacaaatcagatgaaaaatctgaaaaggtttctatataccttctggattttaaaaaaacccaaaaattaatggctcaagatactacattgctaaagttaggggaaaaaagtaaaaaggctgtgagttctgttgcaagagctcatttgtagacttgcaaaatctaactaattttatattatgcttgttgttagagcagtgctcaaaattacagaagcttcaaattgttatgttttcacaaaatttgctacatatgttgacatgaatgtgtgtcagggaattcatacccaggtaaatgacaattacatcagtatagctaatttttgccaccttgggaggaatggaattctgcctattttcgaattaatcctacagcactcactaaaaactaacagccatggcaccataatacattttgtgaggaacctagaatattactaatgggaacaaaaaaatgtgaggtaaaccgacctttccccaagaaactttgaagccagagattttaaacaattaaggcacttgaaaacattaagtatatgtacaaatgtgcaagtaaaacaaacagctgtaccaacgagtaacaaagaaacagtaaatcttcatcttaacaacctttaatagttatctaaatgcagagtttgtttatgaaatgaaacaaagcagtttgtcatttcttactataaaatattgaaaatcaagtgcgaaactcagccactattggctaaagaaactaaataaaaaacgttaatgacctagaaaagcaaaagcccattttaaactacttaaagcctctgcactagtccaatgagtcaaaggcaagggagaagtaaacctctaaaactgaagacgaccctctaaaggagaaaactatagaagttaaagtatgcatgcttattatactatgggaaaccaagaaggaagggagagaaaaagaaaaagcacagtctattcatccaggacaatcagtaaaaatctacagtaacctgatcaaccaaaaaatccttaggtgttgtgaaattacattggtcacttctgttatcttaaaacttaaaatgattgtctcatttaaaataaatgattctaaaataatatgattgtctcattaaatagtaaatgattctaaaataatgtatatccttcttgcctcaccaaagaagtcactactcaagacagtctggtggaaatcctttcaaggtacaatagtgctagcatacttttttttaaagtacaaaggaaagtgtaattaaatcaatttagctctatacttttcaacagccataagaaaaatgttgggaggttcaagatacgaaggctttcaattctgtataacagactttagcttaagtttctccgctctgaaataaattttcaataaaatattaacagtatgatatctaaaacaggtttactactgctcacatcaagttacatcctctgaccaatccttaccttccttaatgtcaaagaacaaatcatagacattaagctagagcttacctttcactgtcttctaaggcactgttctttatattctcaatgacataagatgctttacaagtatgaacaataatctgttatacacactaatggtatcctttcatttctttaaatctggaatgtagttccttgtgtggcatcttatttctaatgtagaaaaaacagctgttatcaagcacaaaattttaatctaaggataccatttagtactactaaattaataaatttattccacttttgaaatgacagccaaaaatccacctaattcc

SEQ ID NO: 1405 - DNA, 1372 bp, Homo Sapiens
agaaatgcctgaagaatcaattcggatgagcacagcattgggagaaacagtgggattttctgggcacttctgcagtctagcttgttctttggaaatctctacatatattttgcctggcaagggaaaactcagatatcagagagtgaccgaagaacagtgtttattgccctaacggtgattagccttgtggggacagttctattctttctcattcggaaaccagattctgaaaatgtcctaggagaagatgagtcttctgatgaccaggacatggaagtcaacgagtctgcccagaacaatctgacaaaggcagtagatgcttttaaaaagtcttttaagttatgtgtcaccaaggagatgctccttcttagtattacaactgcttatacaggtctggaattaactttcttctctggtgtatatggaacctgtattggtgctacaaataaatttggagcagaagagaaaagccttattggactttctggcagtttcatcggcattggagaaattttaggtggaagcctcttcggcctgctgagcaagaacaatcgttttggtagaaatccagttgtgctgttgggcatcctggtgcacttcatagctttttatctaatatttctcaacatgcctggagatgccccgattgctcctgttaaaggaactgacagcagtgcttacatcaaatccagcaaagaagttgccattctctgcagttttctgttgggccttggagacagctgctttaatacccagctgcttagtatcttgggctttctgtattctgaagacagcgccccagcatttgccatcttcaagtttgttcagtctatttgcgcagccgtggcatttttctacagcaactaccttctccttcactggcaactcctggtcatggtgatatttgggttttttggaacaatttctttcttcactgtggaatgggaagctgccgcctttgtagcccgcggctctgactaccgaagtatctgatctggtgtccgtgaggggacacgtatgacctcagaaacacagctggacacagagcttggtggaagaagtcgcctttgatcttcactatatattgggtgatgttcagtatggaaaatcaagggattaagactgttaaatcagccagagttggtgttcaagtttacagatatgagttatttaaagcaagtagaataagggaaagctgttctgtcaactgtaattgttcaaagatgttgtttttcatttcatctatctcaattcttataatcatgttatagaatgtaaatgttttcttctctctcctgctcttgttggaagatcctgccttgatttagaatactaggccatatgtcatataaatattttttctggaaaaaaa

SEQ ID NO: 1406 - DNA, 525 bp, Homo Sapiens
tgccagcattccttccatgtatgtcacaccaacacagaaattcacagctcatactgttctcacctgggaaacttgggaagggctgatgagtttggggcagatcctgaattgcagccacacttggccttctagaagctgaagttgtgcactcaagtggtcctaagtagaagtccacttgaggtatttgctggcacacaccctcaagggtggttcagaaggtcctgaaacctaaggcaaaaggctgctggggcatgaacagaacagaccgtctcaggggcagccatgtaagtggcaagcagggctggtctccctcaaggtggttcttcattaagtaaagatggcttcgtgactagtgtttagctcccagatttatatttgggttaaaaactaacttttcaatgtggcagtttcaaaggattacttgatgcaaagtatgtttcctttcaaagggatcttgacgtggtaccaggactgagtcatgatttgggcagaggcagttaacactgggaagccctgcccctccct

SEQ ID NO: 1407 - DNA, 478 bp, Homo Sapiens
ctataggatccccttctccgataccaccacaggggcatgacattgtcaaggaaagacttcatggctggctgatggagtggctgctgctgagatggtggagtctgctgcttcaccaacaggtttggatcaagttgacgagattgttgcatcatttgctgctgcacactaagaggtcgaccctgctggtcttgctgcggccggttcccagaaggcacgcttctctgactctgcgccctttgctgctgcgctaacaatcgctgtaactgggagatctgagaaagctggtttagctgggatagctggttcagcatggctacctgttgagggccaaagagtggattcaggccaccgttgtttggtgcatacttcagcaatgaaactggaacctgaggggagagtaatggaggaggcacttgagcacggagattaggctgagatgaactaagaggttgtgctggaggctgctgcatgccgcact

SEQ ID NO: 1408 - DNA, 495 bp, Homo Sapiens
ggtcgtagtccaggccaagaactccaaggagccaacagcctgaggtaggattgagccagaggcttaggagggaggaggcatcacaggtgacacccatctatgtaaattacccagatccccacattctgcatctgagctatcaagaaagctgtttctctaggtcccatgggttgttagcaggcttcagttatgtgtaaattgtgaaagctgattgtacggttggcaaaatggtcagagacctagaagctttgttgatgaccacatcatgggagtgcctaatggattggatcattcataaacactctgacaacaaacacgaagtgaaaatgcacttctaggtaaacagctgcttgcatctgagtaatgcacaaagctaaaatccggctctcagggatgcatcccgtctgtaaacactggggtcactgctcccccccaaagacaacactgctttacagacccactcatggtatcccccgcgggtcctcttctatagtc

SEQ ID NO: 1409 - DNA, 538 bp, Homo Sapiens
gtatttaaattacactgaccaagtaacaatgtattccatttcaggaactgaatatttgactgttaacctttttcccatacgtccagtgtggcatggagcatatggacttgacagacatctctcacccagacgcccacgtgtgaacacacccacatccacatctctgggtggaaaccagcctagagtggggacgacgctaatggtgttgctttagaaccgtcttttcttacccttttagactcgtgttttgtatgagacaccattgcaagaaaattttatccctccagaagtattttattactaaagaacaaaagcaaaaaaagcttaaattgcactggttaaagtacagtttccaacagctgtccttcctcagtactctaatggccactccaccgcgagtggaagtcactgttgtgtgtacacaggtggtcccaatcaaaactccatcttttgagcccaattatgtccattttgttatagactaaatcaggggtttgttctacaagaacaatacatgttttaccctttcctttaacta

SEQ ID NO: 1410 - DNA, 467 bp, Homo Sapiens
ctggaattgtggcatgaaaagctttctcaaacctgactaagtgctgttttctttctctcaccaacagcattattccagttggagatataaagcagagaaccatcattctcaaaactgttctgagagtcagcatgtcacctctttcactcctcaagccttcagaattccaatgctaaacatttctctggcatctaaggaacaaaacgttcaggatagaaaggctgtgatactaccctgctagtatcaatccacatgcaccaggtcctgctgaagtgttaaataggttgatacagggatggaataaaacaataaagtgtctgagagaacttctgaggaaataatactgtgcaccgcttctagggaaggtggcccctagctctgcatgactaacagcagccatcacagacaccatggcacaagcagcccaaatactcagggagaccccacattgagtgagttgtatttta

SEQ ID NO: 1411 - DNA, 369 bp, Homo Sapiens
catcctgtcacgaggcacggcggccagcgtctccttcatgttctcttatatcttgctcaccatgtgccgcaacctcataaccttcctgcgagagactttcctcaaccgctatgtgccttttgatgccgcagtggacttccaccgctggatcgccatggctgctgttgtcctggccattttgcacagtgctggccacgcagtcaatgtctacatcttctcagtcagcccactcagcctgctggcctgcatattccccaacgtctttgtgaatgatgggtccaagcttccccagaagttctattggtggttcttccagacagtcccaggtatgacaggtgtgcttctgctcctgctccttgccattatgta

SEQ ID NO: 1412 - DNA, 338 bp, Homo Sapiens
ttcttgagatttggcaatgttgaggggctgaagggtacttgttggtaatttagagtctgagggtcttgctatttgggggttggtggcaatttaacgatatttgggggcagcttgtgaatcttggcgatttgtggggcatgtctgaggacttggaggaatttggcagagctaaaggcccaggcatttggggttcatttctggagcctgaagggtatttgacaatatttaagaaatgtgaggggctttgggatctgggagtcatttccgggatcttgcgaccccctcgaggtggggccgggcagggcctgactgggacacactccccaccgagtgccgcg

SEQ ID NO: 1413 - DNA, 579 bp, Homo Sapiens
agtggggcatatcaataacatgattatgactaactaaattaaggtgaaaaacttagctattgcctaccggcttgcaagtaacttgccagttacttagctgtgattaatacaatatctgtaagatattgcaatatatttagaaagccaataataataaaaattaaaaaacaagtccttaagagaaacatttacacacactttaaagaatgtgaaacatccctttgggaaaaaaagaggatttacaatcctttgaagaagcgatgagaatataagtgcagaaatgagaactatagtcaaaaaggcccattttgaggaaggatttatctgttcagcatctacaaatctctttctagaagatgtgcttttatcactctacctcctgcttggagccaaggcttcattttgacaatgcaagttctctagaataagagactgaacagcagcaaatcaggaaaaatagaagaaacaacagcagtgttttttttccaacccagttttaaaactctggcccaagccttaggtttgaacttgagagtgtttcctttgtcctttctgacattactggcgaaagaaggcccc

SEQ ID NO: 1414 - DNA, 567 bp, Homo Sapiens
ccagcgcggcatcatacactgcagaaatacgagtaagttagtttctttgagagaaggcctaacgttgtactcctgggaactatttagcaatcatcagattgttgctattatcctactgagcgtaaaattctgggagccaactggctgactaccactcactctcacccttcactacaatagatgatgggtccattctgggccaatgcccacaggccttgagttgaggctggggcactgcctttgcccagaagagctcccaggggactgggggccagtgcccttccagaggcctcccagagagtaacttggaggttccatttgctattgactggattgtgtttgcttgaggagcctgtgaccacccgcagggacaggcagcctaggataaactggaccacccctgagtaaagcactccactcagtcccttggtccccacccctcagttagaactgctaggctttgggggatgggagggtggcaattattcttaacctcccgaaattcctgatgacccgataacaaggaggtatttagacatagaatgaggagctaatctttttcctata

SEQ ID NO: 1415 - DNA, 416 bp, Homo Sapiens
gaaagaaagaaattggcagcagtcttactcgactgtgcttactcgactgtgcagtgaggacatgctgccctcactgcctagatggtttcatctcggatgtgcatgtggtgttctgtcttcatccttcgcctctctgctaacatgctgccctcactgcctagatggtttcatctcggatgtccatgtggtgctctctcttcatccttcacctctctgctaacatgctgccctcactgcctagatggttacatctcggatgtccatgtggtgctctctcttcatccttcacctctctgctaacatgctgccctcactgcctagatggttacatctcggatgtgcatgtggtgctctctcttcatccttcacctctctgctaacgcgctgccctcactgcctagatggtttcatctcgg

SEQ ID NO: 1416 - DNA, 797 bp, Homo Sapiens
gggtgaagcaaggaagatatacatgaaaattttaaaaatacatatccgctgacttcatggaatggacatcctgtataagcactgaaaaacaacaacacaataacactaaaattttaggcactcttaaatgatctgcctctaaaagcgttggatgtagcattatgcaattaggtttttccttatttgcttcattgtactacctgtgtatatagtttttaccttttatgtagcacataaactttggggaagggagggcagggtggggctgaggaactgacgtggagcggggtatcaagagcttgctttgatttacagcaagtagataaatatttgacttgcatgaagagaagcaattttggggaagggtttgaattgttttctttaaagatgtaatgtccctttcagagacagctgatacttcatttaaaaaaatcacaaaaatttgaacactggctaaagataattgctatttatttttacaagaagtttattctcatttgggagatctggtgatctcccaagctatctaaagtttgttagatagctgcatgtggcttttttaaaaaagcaacagaaacctatcctcactgccctccccagtctctcttaaaagttggatttacccggttaattacctcaccaaaatgggtgatccctccaaggaagtttggggggcaaaaaatcccaagggggcctggggagttttttgaatggtaaagaaatggacccatcgggctttttattaaaatttggtggacccaaaaatttgcccaaattttccttttcaccttcggggg

SEQ ID NO: 1417 - DNA, 1041 bp, Homo Sapiens
  misc_feature (507)..(598): n is a, c, g, or t
  misc_feature (852)..(860): n is a, c, g, or t
acagctggatagagggatcagaaatgactgtgtcatggtgctcattcactgcaaactcccagttgcaagctccttggctcccccggagggagcaagaatctcatagttcagagacacagagggccttttagccctaatgaccttttggatgggactgcaactcatgactatcctgatattggaagaaaggactttgttaatcttctcccccatagctctgctgcgtaggtctacatcttactcagaatcactacacattcctttagtcttcctccaagctccagagccattggtacaaatgctttattgaaactaaatacataatacacacaatgagatgaagacaatatagaagtccgcatagtcatcataatcccgttccttggccggttgaggcagctcagtggctgagcccagtcaagccaacccgcagcttcactcacgacttcaagatttgatgctaattcttttggatttctacagttattaaataagtgtctgagtggnnnnnnnnnnnnnnnnnnnnnnnnnnnnnnnnnnnnnnnnnnnnnnnnnnnnnnnnnnnnnnnnnnnnnnnnnnnnnnnnnnnnnnnnnnnntttgtggaaccccctggccccccaaaaaggttttcaaaaaatttctttaaaaactgggtcccggcgggaagggaaccaggaaattttttgtcccctgggggggccggccggggcccagggttgggatcccccccataaaaaaccccccggaggaacccgggggttataaaaagtgccgaaatggacccccaaagaaaataccgggggggcaacaaagggggttcccaaaacaaaccccaattgcaaatttgggnnnnnnnnnttgggtctttttccaaaagaggtggggaaaaccctttaaaaattttttggccgcccggggaaggccttccatataaggggtttgggggaaaccttaaattcccaaactggttcctccaaaacttgggacccccccctcccaaaataaatttttgccccacgtggggttaaccccggggggg

SEQ ID NO: 1418 - DNA, 925 bp, Homo Sapiens
gggccggtagcagctagtcacgctcggtaccaggcgcagatcatggcaggcagccggctggaaaccgtagggagcatcttctctcggactcgggacctggttcgggccggggtgctgaaggagaagcccctgtggtttgacgtatatgacgcctttcccccgctgagggagcccgtcttccaaaggcctcgagtgcgatatggcaaagccaaagctcccatccaagacatctggtaccacgaggatcggattagagcgaagttttattcagtgtatgggtctggtcaaagagcttttgatctattcaatccaaacttcaagtctacctgtcaacggtttgtggagaagtacactgagctacagaaacttggagaaacagatgaagagaagttatttgtggaaacagggaaggctttattggcagaaggtgtcattttaagacgagtaggcgaagcaaggactcaacacggaggtagtcacgtttcccggaaatccgaacacttgagtgtcagaccacagactgcgttggaagaaaacgagactcagaaagaagttccacaggaccagcatttggaggcacctgcagaccagtcgaaaggtctcttgcctccctgaaggacctgtatactgtgtatgctggcattcacactctactcactggctgaatgttgagctatttttaaacagttgaactgtgtaaatgtttcttgatctctaaggtattatgtttgccttctcttagttatttctgggttgtcacaaagctcagtatcatggtttgacagaagcagttatgtgaacttttatgttaggacattactaaataaagaattccctagctgcttataaagtaaatttactttgaattgtaaataacatgaagaaacctttataaagattgttcaaatgggaacaacaaaaacac

SEQ ID NO: 1419 - DNA, 1307 bp, Homo Sapiens
gcttcagaatacagtgatgaaaattcattttgaaactcaaatattttcattttggatattctcctgtttttattaaaccagtgattacacctggccatccctctaaatgttctaggaaggcatgtctattgtgattttgatgaagacagaattatttttctctgtagaaacacagataccactttatcagggaagttagtcaaatgaaatggaaattggtaaatggacaaaagctagctagtaaaaaggacgacccagcaacatgctttaaccccattgtatgtttgtggaaagagcatagtttaacatcttgagaaatttgggacataaagttttcatggtagacagttcatgcagtatatgaattgacataatggaaataatctgattttatttttacaactaacatccattccccttcatttaaacaccttttgtgttttacttcagtgaggagattgggagtctgaatggatctgttttccaagagattctgagaaatttttgtattcaccagttggaaagctctctattctagttgataaaaccttccctttttttgatgtagatgcagatattctatacagctctgttgtcttttactaggactgtaaacttttgtgataaaattcaaataagattttatttcttggtaattttggctttcacaatttatctttaaatccttgagcaatctgtatacaattaagagatttctgacatttattcttacactaaatggatcaactctaggatttaggcatgttaacttctgttgtgtttctgaatctctccagagcttgcatgtagatagcatttatttctgtgcccttaaacccatttagaaaataactacaaagtaaaaatgtagaggaaatagaaatgtattttttcatgaacattttgatacaaatttcatcatttaatgattcaccaatttcttgcattaatttgaatttaagcatttaattcaaagagaggggagcatccattattgatacatgtgggcttttaaaaactccatcctttataaatagtcaaggtttgggccacacaaagtatatttttatcatggaaaaatttcaactcctcaagccgtaatgttgaacagaattggagtattttctttataatttcttgaacaggcaaatgaaagcttattatagaatgcatgtattttcttttatctttggaacatcagcaccagtatattgctggcagctattgtattaaaaaataaagtatattttcactatcataaaggattcttttttcccccctcatgaaaataaacaacaacttggggt

SEQ ID NO: 1420 - DNA, 964 bp, Homo Sapiens
  misc_feature (64)..(72): n is a, c, g, or t
  misc_feature (707)..(795): n is a, c, g, or t
  misc_feature (813)..(845): n is a, c, g, or t
tagggcccccgagggggaccccctgggcccccaaggtggggttgggaaaaaggccccaaccgcnnnnnnnnnatttttaaacccaaaaacggtcattttttcccccccaattttcccacaaaatcctttaattcggtccaaaaccagccccggaaatgttcttcctccccatggagggggaagtcaattaaggacctttgttaaaaattgccgttcatttcccaaaactcttaagttgaagttccggaactagaaacccgccactgggatttcaattttcagttggcccgaagaagggaagtaaaaaaattatatatatatatcagaggtttttggaatttggggattttaataatgatgcaggggtagctattatatatatttgagaataactcctaaaagatgacttccaactacaaacaagactatatatacactgctatcatgaggtgttttactaatatggccaattatgtatgaagttagatttgttagcaaaaagaaactactttcagttttaaaagcaaactttctttccattaaaactaggctttccagctaatcagcagtcaaaatttaaattttcaaactggagtaccaagtttgagtaaaatctggaaagctatatgccaggccagttctgtgtgtcaagagcagataagtgacactattcttcgtgtgacaattgtctgacaaaacccttaatnnnnnnnnnnnnnnnnnnnnnnnnnnnnnnnnnnnnnnnnnnnnnnnnnnnnnnnnnnnnnnnnnnnnnnnnnnnnnnnnnnnnnnnnnagagcgaaactctgtctnnnnnnnnnnnnnnnnnnnnnnnnnnnnnnnnncctcaatgtattagcatgactcatcattttgacatttaaaaaattttccaagattatttcaggaaaggcatttttactattaattaagctttcttaaaatttctttctagagacattgt

SEQ ID NO: 1421 - DNA, 585 bp, Homo Sapiens
  misc_feature (140)..(140): n is a, c, g, or t
  misc_feature (156)..(156): n is a, c, g, or t
  misc_feature (226)..(226): n is a, c, g, or t
gggtcctttggcggattttctgttttcggaagttgctgggttcgttttattcagcggcagtggtgctttcccgaatctcagaatgcctgttaaaagatcactgaagttggatggtctgttagaagaaaattcatttgatnccttcaaaaatcacanaggaagaaaagtgttataacttattctccaacaactggaacttgtcaaatgagtctatttgcttctcccnacaagttctgaagagcaaaagcacagaaatggactattcaatggaaaagagaaaaaaattgaatcaccccagtttaactgaaaggcgaagaatctaccacccaaaggacaatggatgaattccctggaggtgccttatccaaatttgaaaaattggtcaaaaaaaatcctgggaaataatgccaaaattttagtagatttcccgggctttttggagggcaaataaaaaacctttgaaaaatcctctttggaaatcccccggggccactccactttttcttaaaaaagagaaaatgtccgaaaacccccagaaaacctttgttgcccaaatgggggttaaaacaccaaaacttttgtttt

SEQ ID NO: 1422 - DNA, 486 bp, Homo Sapiens
cacctgccgagtctgccaatctctcatcaacgtggaaggcaagatgcatcagcatgtagtcaaatgtggtgtctgcaatgaagccaccgtgagttacacatatctatgaaatgggccctgtttcctggatcctctttctgatgtcttggttctagaccctgaccttccggctattagccaagtgcttttgatgatacccaggtttcagttccaggtgtctcacacagccatttccccagaagccactcaccaaagctaatgttcactttctctcacttttacacctagcctagttcctatttgcaaatctcatgatatagtctttcttttatttctccttcctggttagcaccttatttttctgatctcataaagtgtttttggagggaagtggaggggattgggattagaggtttgcttgctgatgaccctattattctctagccaatcaagaatgcacccccagggaaaaaatatgttcgatgc

SEQ ID NO: 1423 - DNA, 497 bp, Homo Sapiens
tttaggactaagacaatctactggccagatgagatgagatgagacaaacccttccaccattttgcctttgaaaaaaattcaatgactatctcaatgttttgccattggtttaaattccagaattcttatgaaaaataaagcaagaggcttctcagaaatttctctactctgagaggtctttcttctgtgcatttcttgggttgacactgaatctgtgccagaatttcatcaccacctagcactgcaatgtactctaccttctgaagcagtttcagggtcgtgacggggtcaaaggcaatgaccccatgagtaccagactctgggagtttgactggctaaaaccagtcacagggacctgggccatcctcttactgtaggggaagcttacctaagttaagcctcagtccttgaaactgtcagacctggctctgagatagcaacatttacacaaagaaaggaaagtttgaaggctgagcatgagcactcctctcctggta

SEQ ID NO: 1424 - DNA, 455 bp, Homo Sapiens
gatgtcaagtgtcccgttgtcagctgtgctgttttctctaaatagtactgggatgtatctagctgctacttcttcatgtcagcctcagtgcaacaggttcaggttgggacacttatctttcagtagttaattgattgggtgattagtcactcagtgtccacaggaggacaagggcttagattctcatgtctacactggatctccatgccttgcccagtgcctagcagtagccactcatagatatccatggaaggagccagaaggtagcaggtggatggacggatagacagatggacagatagctttgttttcttcttctggcgaccatgtacatcacttgtttttgttgggtttttaagtgagagactaacccacacctgattatattcttaaagtaaatgaaatgaaatactggattgagttgttataagatgatacttctgactgttcatatc

SEQ ID NO: 1425 - DNA, 414 bp, Homo Sapiens
ctcttcctaaactctgtgctttacttcactcagagaacacaaaagcattgtagccatttgcctaagcagcctaaaaaaggctgcctgcttctagcatgctctgcaattcacattgtacgactttttaatctatccttacagcaaccctctgaggcagggactgctgctctccccatttacaggtagggaaatgtaacctctttggttcaataacttccccaagcccgtattggagccacattcagatcatgctgactacaaggcctacgctcttcattcctaagctctgctgcccgcttgcatatataatgtgctataatgtcaaacagaaatagtgtttttagttaattgatgtttggagtcacttgtgtttcattagtggagaaaacagagtttgtacttttgttaacattc

SEQ ID NO: 1426 - DNA, 825 bp, Homo Sapiens
tcataaactgcaaaagcagaggctgttcagaggctgtaaagtctgcacccgaatgatgagcagccgactttgctgttgttccacagaaagggagtgaaaaaaaaggactgaattcagttagaagcacaggctgtctcttcagcggtggcaaaacggtctagataaagaggccccaagcaccatttactctcttccaacaggagctgggtctaatgataattgagtcaacacctctacctaagataatactgcaagagccagtgtcgggggaaagcccaactagaaaccagaacatgcacctccccacacccttcttggtttaagaaaacattcagcaccacaaaacgcatagtctcagaccaagggagtgaacgaccacagcctgattacctgtgacactgcctctccatgcccttaacaaaagaaacatctggtaccagctactcagcatccctgaaaactgtcagagttccaacttcttaaaaaattaatgagccgcatttacacctgccagtgctgaaggcccatcagggctagcataggaaccacaatgcctcacttaatagaaaacactcgggtttgaagcaagcaagcaagccagccagcatcagatgggagaatttccttatgtaacatttcctaacccttttagctgtattttccccaaaaatcccagtggctcaaatgtattcatttgtctcaagacaagtttccaacacaaatgtaaaagtgacctgtttctaacgcagttttgaaagctttattagggctttgtatttgcatcgcctgggaagcttccaatgccccagccactggttcatgccc

SEQ ID NO: 1427 - DNA, 299 bp, Homo Sapiens
gtcgtggaactcacagcctccaggccatggggaactgcaccctggcttctgcccacactggcctcctttccaccacagccacacaacctaattcctgacccccaacttccgctcctctggagagctctttcaccaaagcctttctaccagcagattccaggcacttcctcccgctgtaattcaacaactactaaaaaggaagtccctgccaaagaaactaagttccagtcagtaactatgtgaatggcacatctggggtaacccagggggttagtatgcagggaaggcaaaagctaaac

SEQ ID NO: 1428 - DNA, 332 bp, Homo Sapiens
tttgtggaagacttccataatgacattcagcggtgtgcaacatacctagattattcctgtcgtaaataatagcaactgccatttattgagtggtcactatgtgccaggcactgtatggtcttaatgttaagctgtctcattttgtctttacaacaacaaccctagaaggtaaatggtgtcatttcatttttgcagatgaagaaactgaggcccggagacacagctaagtgtaggagctaagacctcaacccaggtctctctgactcttaactacttattagcaatcaaggttaataaaagctacctcctgacaaaccagagatggccttaca

SEQ ID NO: 1429 - DNA, 113 bp, Homo Sapiens
gggcatggcaacctgctctcctgggtggggctcggggaggagacctctctctgcggcctcctccctctgatagtgggacttttaaaacttgatcaaaaaaataataataaatt

SEQ ID NO: 1430 - DNA, 468 bp, Homo Sapiens
taaaaaggtatttaagaataaactagcacaatattttattttacaaatcaggaaaccgaggcacagagaacttaagtgacttgatcaggatcacacagctaactagtgacatagccaagactaagcaataggtcttaggtctcctaagccagggggaagtttcttctagttattatccacaaattgcttggggttcacttcaacctgttacttccccagagagcaactctcaaccacttttatccagtatctcaaccaattaaattgctttgacccagcaactgtgtttcagccaaatgcaaatcagtaagggtctagaatgtttactcccagaatagatgagggtggtagggaaaggggtggtcacgcagggactggaggacccaatttgaaaatgaagccactactgcaataagattatcaaccaaattcaactttactcccactgaatttttgatgccccactgg

SEQ ID NO: 1431 - DNA, 481 bp, Homo Sapiens
  misc_feature (21)..(21): n is a, c, g, or t
  misc_feature (104)..(104): n is a, c, g, or t
  misc_feature (119)..(119): n is a, c, g, or t
agagtcttgtttttgttgccnaggcttgtctcagattcctggcctcaagtgatcctcctgtctttggccttccccaaaagtgctccgattataggtgtgagccngtggtgcccaagccngacaaaccagaactttccgcagacctttgtgcttttggaccttgggtatcttctgaaggtcaagccatcctgaccactctgagaacttacccagggtgactcagctgtcactccaggtcactcataagcccaacgggtagctccacccgtggacagctggatacacttgtgtctgttctctaaagtcatggatgacctgacaagagggaaaggaaagagggaacctccacttccctgggcaagttggaaaagggtgaggtgagggcaggattccttctcattggagatggcacacagagggcttggcctagtccttcagctgggagacctcatacaggtacgcggccagcatcttggttccc

SEQ ID NO: 1432 - DNA, 1063 bp, Homo Sapiens
  misc_feature (772)..(781): n is a, c, g, or t
  misc_feature (795)..(795): n is a, c, g, or t
ggcagggctggtacgcgtccggatttccgggatatcgtcgacccacgcgtcggacagatccatttcatgtgcccactggcacggcagggagacttctatgtgcctgagatgaaggagacagagtggaaatggcgggggcttgctggaggccattgacacccaggtggatggcacaggagctgacacaatgagtgacacgagttctgtaagcttggaagtgagccctggcagccgggagacttcagctgccacactgtcacctggggcgagcagccgtggctgggatgacggtgacacccgcagcgagcacagctacagcgagtcaggtgccagcggctcctcttttgaggagctggacttggagggcgaggggcccttaggggagtcacggctggaccctgggactgagcccctggggactaccaagtggctctgggagcccactgcccctgagaagggcaaggagtaacccatggcctgcaccctcctgcagtgcagttgctgaggaactgagcagactctccagcagactctccagccctcttcctccttcctctgggggaggaggggttcctgagggacctgacttcccctgctccaggcctcttgctaagccttctcctcactgccctttaggctcccagggccagaggagccagggactattttctgcaccagcccccagggctgccgcccctgttgtgtctttttttcagactcacagtggagcttccaggacccagaataaagccaatgatttacttgtttcacnnnnnnnnnnacccacctaaaaanaaccctgttcggccgccctccggccctcgaaaaaactttcctaaaccatttcggtttggccgcccgggccccactaggttaagtggaacatgggttcttaacctgtttcccaaggaagattccgggccatgaactaagtggcttggaattcctcccccaataaaaaaaccgcccgggcgggaaacccgaagggttcttgaaacaaattccagaaggggaagtcttgaaggccccttcaccggggaactcttcaacccgggagttccca

SEQ ID NO: 1433 - DNA, 450 bp, Homo Sapiens
cacaaaagtttctcttttcaaaacattttactttaaaaggagccaatttaaagaaaactgttaatagttcaggtaacaggcagatacaggaaaagctgctgacagtgtgtgtatgaggtttgaggattttgatccaagctggtcccactcagtccatagcagagaatgaaagggcccagagagggtggtgacctctgcctgaagtcacacagtgagtcgagcacagggaggagaccccaggtttctatgtgtagggcgggaggatgttctgggacacagttcaattctcatttgtcacacactttggctattagagatcaaccccttcgctcctgtgtcttgcaatggcagccttggcaaacgctaaatgaaaatcgtgacaacacttgtgttatgaagcatttactttgtgttcaccttgtactactcgaactcatgtcttaactcact

SEQ ID NO: 1434 - DNA, 348 bp, Homo Sapiens
gtaagggaccgttattctcctgtccctttcacagaggacaggaggaaagtgaggacaggtggggtacatgagtttagcctcttttctgcagcaggcccagatcagctttgcacacggttggtgctgacctcaaatgcagccctagaggggcctatctctgccctgagtattgaggtgcaggcttcttcccctttgttctgtccatttccaaaaatgtgaacacacacctcctacatgtttatattattgtgtgcatagatactaccattgtaacattttttgcggattaaaaatgcactattgtattgaaaatttcaaaggaaatgtgtaataaaacatttaaaatta

SEQ ID NO: 1435 - DNA, 391 bp, Homo Sapiens
aaaaataaaatgcacatagaaaaagagaaaaagggcacaaagggattggcccaatattgattcttttttataaaacctcctttggcttagaaggaatgactctagctacaataatacacagtatgtttaagcaggttcccttggttgttgcattaaatgtaatccacctttaggtattttagagcacagaacaacactgtgttgatctagtaggtttctatttttcctttctctttacaatgcacataatactttcctgtatttatatcataacgtgtatagtgtaaaatgtgaatgactttttttgtgaatgaaaatctaaaatctttgtaactttttatatctgcttttgtttcaccaaagaaacctaaaatccttcttttactacaaa

SEQ ID NO: 1436 - DNA, 572 bp, Homo Sapiens
  misc_feature (223)..(231): n is a, c, g, or t
ccccatacagcagtagcagcggcgcggaaatggcgtgaccaccccatccttctccaccaaagacagttgcgcgcctgctccacgttctcttctgtctgttgcagcggaggcgtgcgttcgcttttacagatatctgaatggaagagtgtttcttccacaacagaagtatttctgtgggtggcatcaaacagggcaaagtgttttttattgaatgcttataggnnnnnnnnnaaataagtgggtcaagtacaccagccacctccagacaccagtgcgtgctcccgatgctgctatggaaggtgctacttgacctaagggactcccacaacaacaaaagcttgaagctgtggagggccacggtggcgtggctctcctcgcaggtgttctgggctccgttgtaccaagtggagcaggtggttgcgggcaagcgttgtgcagagcccatagccagcatggcagggggctgccctctccacattatcagttgacagtgtacaatgcctttgatgaactgttttgtaagtgctgctatatctatccattttttaataaagataatactgtttttgaat

SEQ ID NO: 1437 - DNA, 511 bp, Homo Sapiens
gccatcaaggacccaccaagttccctgctttggcttgggtggacctgggcaacaacgtggatgtggcttccctgccccagcccctgctggtcggcctgcgccggcggctgagccagcgcacctcactccccaccatctacgagggcctggaccttgagcctgagggcagtgcggccggggccaccacccctgcctccacctgggactccacagctgctgggctgggacccgagccccaggcctgctgtgccaggtgacccaccacccacctggctcattgctactgacttgtgatgctctcaagcacatgatagtgggcgatgaaggtcaaggaggactcacaggcccccagaaatccagtgtaaatgctcagcctgagattaaggggacagaagaatggactcataggtggccaggtggccagccctggctagaggctcagccttccctcagtgggaggggccccagcacccacagtgtggaccccgcaataaagagtgacacccgcaaa

SEQ ID NO: 1438 - DNA, 523 bp, Homo Sapiens
aactgaagacttgagtcccctataccgggaatgcagctattaatagattcccatattttaaaaggagggaaaggacaatttaatataaatttctgtttgtgcatttctgacaggccattattatctgctttgacaaagcctttctgaaacgcagtgtacaatgaatcttaatgatgttatgaaacgagctttgctcggggctcttgattggagcttccggtatgtgatgacggtatgtcatgtatgcatggatgtactcaactgtgtttaatactctgaattttaattagaaaaaaatacaatagcagcaaggccctggtttctaagctgtatccttttattcatgtgggacatgagcaaatggcagaattaggggcgagtgctttcaatgctcgaaactaagcacagtataaatttttcctctcatttgcatgaaaggacaagacactgttatgccctgtcctaaatgtgaagacagaggttgaattttttaaaaaatatctttaaaagactgatctacgaa

SEQ ID NO: 1439 - DNA, 642 bp, Homo Sapiens
  misc_feature (20)..(20): n is a, c, g, or t
  misc_feature (46)..(46): n is a, c, g, or t
  misc_feature (71)..(71): n is a, c, g, or t
  misc_feature (101)..(101): n is a, c, g, or t
aagtcaacttattggttttntgcggggaaagtcgctacatggatcnatgggttccagtgatttaatctccntgaacggtgatggcatctgaatgaaaatanctgaccaaaattgcactgaagtttttgaaatacctttgtagttactcaagcagttactccctacactgatgcaaggattacagaaactgatgccaaggggctgagtgagttcaactacatgttctgggggcccggagatagatgactttgcagatggaaagaggtgaaaatgaagaaggaagctgtgttgaaacagaaaaataagtcaaaaggaacaaaaattacaaagaaccatgcaggaaggaaaactatgtattaatttagaatggttgagttacattaaaataaaccaaatatgttaaagtttaagtgtgcagccatagtttgggtatttttggtttatatgccctcaagtaaaagaaaagccgaaagggttaatcatatttgaaaaccatattttattgtattttgatgagatattaaattctcaaagttttattataaattctactaagttattttatgacatgaaaagttatttatgctataaattttttgaaacacaatacctacaataaactggtatgaataattgcatcaa

SEQ ID NO: 1440 - DNA, 502 bp, Homo Sapiens
  misc_feature (41)..(120): n is a, c, g, or t
  misc_feature (161)..(213): n is a, c, g, or t
aacgaatggcctcagctcactcacaacttttcttcccttcnnnnnnnnnnnnnnnnnnnnnnnnnnnnnnnnnnnnnnnnnnnnnnnnnnnnnnnnnnnnnnnnnnnnnnnnnnnnnnnnatatttgaatgtcctgtgcatgagtttttttgtgactgaannnnnnnnnnnnnnnnnnnnnnnnnnnnnnnnnnnnnnnnnnnnnnnnnnnnnatgaggaatgtacatctgtgtctgtggtatatagaaaacgtgtgtgtggtgtatgcacttgctgtgtctgcatatgcatgaattgagtatgtgacttgagtatggtgtgtgtaggaggaggggggaagtaaaaaggcaaggtgacagtaaagactggacaaatgaacatagccgggcactattcctttaactcctagaacagacataacttgaagtgatctagacttgaactttggagtatgaagttcccaccagctggacatttggaaaaataaaactttttttaatc

SEQ ID NO: 1441 - DNA, 1073 bp, Homo Sapiens
aggattccccaaagatctttgagcatcacctggagatatttggatataactgacaaaccaatacaggtgactgtaaaactaaagtgcaaagaatcagattcacctcatgctgttactgtatatatgctagagcctcactccttgtcaatatattctgaggggttgaatctccagttgatctgtaaaatcttagatacagcagatgaaaatggacttctttctctccccaactaaaggatattaaagttaggggaaagaaaagatcattgaaagtcatgataatttctgtcccactgtgtctcattatagagttctcagccattggacctcttctaaaggatggtataaaatgactctcaaccactttgtgaatacatatgtgtatataagaggttattgataaacttctgaggcagacatttgtctcgctttttttcatttttgttgtgtcttataaactgactgtttttctttgcttggatactgtgattccaaaataaatctcatccaagcaagttagagtccagcctaatcaaatgtcataattgttgtacctattgaaagtttttaaataatagatttattatgtaaattatagtatatgtaagtagctaatgaagtaaagatcatgaagaaagaaattgataggtgtaaatgagagaccatgtaaaatatgtaaattctagtacctgaaatcctttcaacagatttttatatagcaactgctctctgcaagtagttaaactagaaactgggcacatggtagaggctcacatgggagttgtcctcacccttgttaatctcaagaaactcttatttataataggttgcttctctctcagaacttttatctattacttttttcttcttatgagtatgtttactctcagagtatctatctgatgtagacagttggtgatgcttctgagactcagaatggtttactctaacaaaacactgtgctgtctatcccttgtacttgcctactgtaatatggatttcacttctgaacagtttacagcacaatatttattttaaagtgaataaaatgtccacaagcagtgttgtcatgt

SEQ ID NO: 1442 - DNA, 697 bp, Homo Sapiens
tgaagcctctagctgttactgcggtggagtctggctctctctttaactctaataatattaggtttatatatctggatactacaatggtgggggcatatatatttaaaggtgttatatcctcttgctgagttgacccctttatcattatatgatgacctttgtctcttagtataaatttcgtcttgaaatctggtttgtattaagtgtagctattcctgctctttcttgctttccattagtatggaatatattttttcgcatccctttattttcagcctacgtgtgcctttatagtgacgtgtatttcttgtaggcaacagattgctgggtcctgtttttctttacccattcagccgctctgtcttttgaatggagagtttagtctggttacgttcaatgctgttattgataagtaaggacttactcctgccgttttggtgttttctggttgtttggtggtgtgctcttccttccgtcttgccttcttgttttcctttttatgaagatgattttctctggcggtatgttttacattcttttctgtgagggtgcgtatctgttggggcgtttttttatttgaagtttccatgaggcttgcaaataacataacccactattttaggctgatagctgaaccctgattccaaaaacaagcaagccaagaaaaaaatgaataaaaactctacaccttaatttt

SEQ ID NO: 1443 - DNA, 835 bp, Homo Sapiens
tcccgggatgctgcaggtgcttagtctcttgccgccgtacagacagtcaatctctgttctggccgggtccaccgtggaagatgtcctgaagaaggcccatgagttaggaggattcacatatgaaacacaggcctccttgtcaggcccctacttaacctccgtgatggggaaagcggccggagaaagggagttctggcagcttctccgagaccccaacaccccactgttgcaaggtattgctgactacagacccaaggatggagaaaccattgagctgaggctggttagctggtagcccctgagctccctcatcccagcagcctcgcacactccctaggcttctaccctccctcctgatgtccctggaacaggaactcgcctgaccctgctgccacctcctgtgcactttgagcaatgccccctgggatcaccccagccacaagcccttcgagggccctataccatggcccaccttggagcagagagccaagcatcttccctgggaagtctttctggccaagtctggccagcctggccctgcaggtctcccatgaaggccaccccatggtctgatgggcatgaagcatctcagactccttggcaaaaaacggagtccgcaggccgcaggtgttgtgaaaaccactccttctgtggttggggtcctgcaagaaggcctccctcagcccgggggctatggccctgaccccagctctccactctgctgttagagtggcagctctgagctggttgtggcacagtagctggggagacctcagcagggctgctcagtgcctgcctctgacaaaattaaagcattgatggcctgtggacctgc

SEQ ID NO: 1444 - DNA, 275 bp, Homo Sapiens
tggctgggtcaggacagatggcaacaaatccccggatccctgctgacagctggtcagggaaccagacaaagtggacctgggaaaaccaaaatcctgtgcactaacaagaagctgggtagaaaggccaagccggatccgtatctggtgctgctgtgtcctaagaatgaaaggccatagattccatcattattaggtaaattggaaaatctcactttacccatatgtaacacaggtgttagatgaggggacctgtgcaggtcccatcgggccctgaa

SEQ ID NO: 1445 - DNA, 525 bp, Homo Sapiens
tatttacagcttttcttttcctggactctacctgcttggttcagtgtcctgaagagttatttaaatgaaccactacttagtaattagttcttttttaaagtatctacttctaaaattacctagttgaaaatatgaaggatatgcttagttttagaaatatcatgaagcaaggatctagtcagtgttacagggtaaaggtggagttttttaaagtctgtatttaaatggtgcactgatggattcattttttaatttgcataacaaaaatggttgctcaaggtaaatcagtattttcttccacgtatgtgcatattgcactgttagatcatagaaatatctgaatgctttaatttttatgtatgcaaaatctataaatcttttgtataatgtattttatacaaatgtaactgtagaacattgttagcatgtgtatctgtaaaaccagtttttaaaattttttgccccttatttttcatattttgaaagatctccaacatgtaataaagtttctcttattcaatctaa

SEQ ID NO: 1446 - DNA, 303 bp, Homo Sapiens
tgaggcagatcccgacaccacattcttcatctgggtatctcttactggaaagggccccttgtcgtgcaaataatcaaaaatagcttctccaaaatttatatcatcatacattcagccagtgttcatatttcaccgactcttgtggatgatgcttgtttagttggttcaaacgtttagtttgaatcaggttgcaaccacgctgtcccaatccattgcagctggtcaccctgtccattcagtctccgcttctaggagccagcctcggtttccttcctgagaaagatactctgcacagcccatccc

SEQ ID NO: 1447 - DNA, 478 bp, Homo Sapiens
cttgaggcgccagagcagttccccagaacagcaaaagaaactatgggtaggacagctgctacagctcgttgacaagaaaaacagcctggtggctgaggaggccgagctcatgatcacggtgcaggaattgaatctggaggagaaacagtggcagctggaccaggagctacgaggctacatgaaccgggaagaaaacctaaagacagctgctgatcggcaggctgaggaccaggtcctgaggaagctggtggatttggtcaaccagagagatgccctcatccgcttccaggaggagcgcaggctcagcgagctggccttggggacaggggcccagggctagacgagggtgggccgtctgctttcgttcccacaaagaaagcacctcaccccagcacagtgccacccctgttcatctgggctgcctggcagagagccttgctgtttacaattaaaatgtttctgccacaaaaagaaaaaa

SEQ ID NO: 1448 - DNA, 275 bp, Homo Sapiens
tgtgacggagtgttaatgtgcttctaacacaatacagtcaacatagacgttagtagtggtgacgttaagggcagttcaaccacaggttggtttgtctctgcttcccgaggtgttcagatgaaacactacattcaccaaagaaaagccacctggtctggcaccgtgtgttaacagttaaaatttggagttcggagtcacaaagtaaaagatgttttattgcaagcatgcaaaagcgtggtaaaaaagtgtaacaaaggtttatttagactttcttc

SEQ ID NO: 1449 - DNA, 425 bp, Homo Sapiens
gtcttccagactgcgagacaatctctctttagtgccaagattagcataaaatcatagcattatataacccaattattctttgattcctgcatccccaatctgactcagcattctaaatttacttaagatctggggacaagggtttttggcaaatccttgaaggcaattgatgtaccagtcaatcagtatatgccttgagccagacagacatgggtacgggcctcagttctgctgcttgctagctatgtgactttgcacaagtgatttaacttctctgggccttggattccttactggtaacacgagcataatcgattcctcacagaattaagtgagaaaactatgtatgtaggacttcttatggagtgggtacttagaaataaatggtagccgttatcatttatgtgcctttgttctgaaaataa

SEQ ID NO: 1450 - DNA, 469 bp, Homo Sapiens
accagtggggcatgcaaatttaagaggttaagattaagccagaagtcgggaagctagatatgcaagtcagttatcagccataaggacacagatgaaacttggtattgcagagggcatcaaaccatgagtttggtaggctcgtctgttcagctgatttatcagggaatagtagatctagtatcatggaatgaagaatggttacaggtgactgagaaatgaagcaactaatggcagcctcacgcccagtctctgcagcgatcctctttgcagttgctgccactttaaacacatccacagaatctgggcatccctaactcctaagagaaattctgacttgatttttagagctctagatcctcagcctcaatccaatccttaatggtctaattactggacgccaagctgaataccactgtgtgctctaattccaaaattcttgttctgatagcatatttagtttctgcttgcc

SEQ ID NO: 1451 - DNA, 526 bp, Homo Sapiens
ctagggaagccccacctgctcaatttccgtgctgctgacttagagcacggctttgctgatgatatcctttgctccttctctgcgtcaatccgcaggtgttctctgccttctgtgattctgctcccctccctaggtggtgtcatgaagtgcatggtatttctgctggctcctaggcttttcccctgaccttgcacatacagttgcctgctccacttccccacctgcccagtcagggcatcacacccccttatccatccagtcttccctgaattttaaccacctcaagtgagggcagctcttcccagtcactcaggccaagaacctgtgtctttcttaacttcctttacacccctcttctggtcaataaggaacttcttggtgctcctttcttgaatatataccaaatctggccatttatttcctccattatgcccaccataatgcaagccattgtcatctttagactgaactatagtaggcctcccctgccctcccctcccctgccacttagtgtcagtgttccacg

SEQ ID NO: 1452 - DNA, 303 bp, Homo Sapiens
actctcagtgctctgtttttaatcattaagatgttaatgatgatataaggactattgatatcttggtttccctaggattaagcaggaaatatacttccaaagttaagagagttggtacgttggtccaaagaatggcaggacctcaggttttgttatggaatcaagtataagacattgagagtcagctacaactacattctatttagtatgaatattaaatttgtcatgtccggcttcttgagcaatctcatcagcccggaatcacatgacaaggcaggatcatcaaacagcaaaccctagaat

SEQ ID NO: 1453 - DNA, 984 bp, Homo Sapiens
cggtgagggtggtgaggacacactggggcgcaggttccatggcaaagcggttgagggaaagggctgctatacggttgacaacgaggtgcagccatcagggccggaggacaatgtggtcatcatctacctcagccgtgctgggaaccctgaggctgcagtcgcagaaggggtccctgggcagctgcccccaggcctgctcctgctgggccaaagcctcctcctcttcttcttcctcacctccttctagccccacccaggcttccctaactcctccccttgccccctaccaatgcccctttaagtgctgcaggggtctggggttggcaactcctgaggcctgcatgggtgacttcacattttcctacctctccttctaatctcttctagagcacctgctatccccaacttctagacctgctccaaactagtgactaggatagaatttgatcccctaactcactgtctgcggtgctcattgctgctaacagcattgcctgtgctctcctctcaggggcagcatgctaacggggcgacgtcctaatccaagctggtgagaagcctcaagttggtgggaattccatggcactgtgactgtcaagctggcaagggccaggattgggggaatggagctggggcttagctgggaggtggtctgaagcagacagggaatgggagaggaggatgggaagtagacagtggctggtatggctctgaggctccctggggcctgctcaagctcctcctgctccttgctgttttctgatgatttgggggcttgggagtccctttgtcctcatctgagactgaaatgtggggatccaggatggccttccttcctcttacccttcctccctcagcctgcaacctctatcctggaacctgtcctccctttctccccaactatgcatctgttgtctgctcctctgcaaaggccagccagcttgggagcagcagagaaataaacagcatttctgatgcaaaaaa

SEQ ID NO: 1454 - DNA, 235 bp, Homo Sapiens
gtgggaaaaaactggatgacactgaaaaccttcatcagcaccagaagcagcacattggagagaaactcgagtagaaggggtgccagagaagtgtcatttgtaaacagctgtaaagtccatgtgtcacaggagccatttatctcttatgaggttgggaagaacttcttgcccagcttgggattacaccagcaagaggctactcacaatgtagagaagacaaacactgaaactaagc

SEQ ID NO: 1455 - DNA, 301 bp, Homo Sapiens
ggcaagaaagaatacctgacactgaggcagaagtacggaaaattgttgcatctccctccctgaactcccagtaagcatattctgaattaagtcgctgagactgagcatctccattcaaggacctgtgtgcttatcaccgtgcaaagtatggcaagaggaaataaggttgctctgtgtccatgagtcctcatctacctgaagtgtaagaagtcacatccctgcccagccaagctgacctgagtgcatcaagtgagaagagagacctcccaggagagctggtgggtcaccctacaatgcccca

SEQ ID NO: 1456 - DNA, 301 bp, Homo Sapiens
catactctgagaagtgatggctcttctctagtgctccctagaaatcgtctgccacttcttctagctaaatcatgctatcaatttgttaagctccatggtatgttttaaggatttctgattggcgtttaccatcttgagtttctctcctaaaattttctgccttcctattgctttccatctcagtaaataatcccattctacacatttgtttgaacctcaaactatggattcatccctgatcatctgtctcacatcctttatccaggccagcagcacattctgttggagcacctgttacaat

SEQ ID NO: 1457 - DNA, 248 bp, Homo Sapiens
acagagtacagttgacacagctgtttcattatggtgcagtccatatagcattgtgattctggggcaaaaacttgggctctggggtttgggaacctggatatgagttctacatctgccacctaatagttgtgagactttgaacacttatttaatctttgtaagcctcagtctccacatctgcaaaatagcagaaagataattagtacctcataggattgtcgtgaggattaaatgaaatagcatatgtg

SEQ ID NO: 1458 - DNA, 1489 bp, Homo Sapiens
  misc_feature (1284)..(1322): n is a, c, g, or t
cccgattgtaccttgaattccacccaaggagcgggcgcctgggatcagagcgtcctgtttcgcaataacggctggagcacgtcctacaagttacgggagagtcgagctgtgaaggagacgttcgcttatcccctgtgtccccgctcctggccccatccagacccccgacttgaccttcgcgctgggaggggagatccagaatgaaaggcaagaaaggtattgttgcagcatctggcagtgagactgaggatgaggacagcatggacattcccttggacctttcttcatccgctggctcaggcaagagaaggagaaggggcaacctacccaaggagtctgtgcagattcttcgggattggctgtatgagcaccgttacaatgcctatccttcagagcaagaaaaagcgttgctgtcccagcaaacacacctgtctacgctacaggtctgtaactggttcatcaacgcccgccgcaggctcctccctgacatgctgagaaaggatggcaaagatccaaatcagttcacaatttcccgccgtggggccaagatttctgaaacgagctctgtggagtccgtgatgggcatcaaaaacttcatgccagctctagaggagaccccatttcattcctgtacagctgggccaaacccaaccctagggaggccactgtctcctaagccgtcatccccgggatcagttttggctcgtccatcagtgatctgccataccactgtgactgcattgaaagatgtccctttctctctctgccagtcggtcggtgtgggacaaaacacagatatacagcagatagcggccaaaaacttcacagacacctctctcatgtacccagaggacacttgtaaatctggaccaagtacgaatacacagagtggtcttttcaacactcctccccctactccaccggacctcaaccaggacttcagtggatttcagcttctagtggatgttgcactcaaacgggctgcagagatggagcttcaggcaaaacttacagcttaacccattttcaagcaaaacagttctcagaaatgtcatgattgccggggtgaaggcaagagatgaattgcattattttatatattttttattaatatttgcacatgggaatgctaaaacagcttcctgttactgagatgtcttcaatggaatacagtcattccaagaactataaacttaaagctactgtagaaacaaagggttttcttttttaaatgtttcttggtagattattcataatgtgagatggttcccaatatcatgtgannnnnnnnnnnnnnnnnnnnnnnnnnnnnnnnnnnnnnnagactgtgcaatacttagagaacctatagcatcttctcattcccatgtggaacaggatgcccacatactgtctaattaataaattttccattttttttcaaacaagtatgaatctagttggttgatgccttttttttcatgacataataaagtattttctttaaaaa

SEQ ID NO: 1459 - DNA, 1697 bp, Homo Sapiens
gaagaggcgggccctgcgcgccctgcgactcgccatggcggtttgggcggcgacgtgagcggctccgcggaccccgagcggggccccggccgcgacctgagccgccgccgagcgcccggggccatgcgaccgacgctgctgtggtcgctgctgctgctgctcggagtcttcgccgccgccgccgcggccccgccagaccctctttcccagctgcccgctcctcagcacccgaagattcgcctgtacaacgcagagcaggtcctgagttgggagccagtggccctgagcaatagcacgaggcctgttgtctaccaagtgcagtttaaatacaccgacagtaaatggttcacggccgacatcatgtccataggggtgaattgtacacagatcacagcaacagagtgtgacttcactgccgccagtccctcagcaggcttcccaatggatttcaatgtcactctacgccttcgagctgagctgggagcactccattctgcctgggtgacaatgccttggtttcaacactatcggaatgtgactgtcgggcctccagaaaacattgaggtgaccccaggagaaggctccctcatcatcaggttctcctctccctttgacatcgctgatacctccacggcctttttttgttattatgtccattactgggaaaaaggaggaatccaacaggtcaaaggccctttcagaagcaactccatttcattggataacttaaaaccctccagagtgtactgtttacaagtccaggcacaactgctttggaacaaaagtaacatctttagagtcgggcatttaagcaacatatcttgctacgaaacaatggcagatgcctccactgagcttcagcaagtcatcctgatctccgtgggaacattttcgttgctgtcggtgctggcaggagcctgtttcttcctggtcctgaaatatagaggcctgattaaatactggtttcacactccaccaagcatcccattacagatagaagagtatttaaaagacccaactcagcccatcttagaggccttggacaaggacagctcaccaaaggatgacgtctgggactctgtgtccattatctcgtttccggaaaaggagcaagaagatgttctccaaacgctttgaaccaaagcatgggcctagcccactggctccctggaagagatcaagccatcggagctgctagagttctgtctggactttccagagaccagtattcccttttgctgcctctaaaaggcctgtccctgcagacatgagagacagcaggtctcatgggggtgacaagctttgttcccattccttaaagaattttcaaaatcaaattccagaatgattttacggagatatcccaggaaaattaaggcttctcttaaacactaaaaaggcatgtaattgcttgttagcaaaatggatatgacacatctctgatacttttttcattattggttgggctgagcagtcagaagacctggtcgtcgtcttgactttggcaaatgagccggagccccttgggcaggtcacacaacctgtcccagcgagggacaccgagtggcccttcatgtacatccatggtgtgctggcttaaaatgtaattaatcttgtaaatatactcctagtaatttaagattttgtttttaaactggaaataaaagattgtatagtgcatgttttttaaagtcaaa

SEQ ID NO: 1460 - DNA, 1020 bp, Homo Sapiens
cttagatgatcccggcctcctctggttgctggtgatcgattggtgcgtgtttatggtgttcctgagcggggagctggagcctagagcggctaccccgaaagctgcgggctcgagcttgaggccgcgctggggaagaagcacaagggcggtgatagctccagtggcccccaacgcttggtttctttccgtctcatccgggatctgcaccagcatctgagagaaagggattccgaagactatacctccatgagctcctagaaggcagtgaaatctatctcccagaggttgtgaagcctccacggaacccagaactagttgcccggctggagaagattaagatacagctggccaatgaggaatataaacggatcacccgcaacgtcacttgtcaggatacaagacatggtgggactctcagcgacctgggaaagcaagtgagatcattgaaggctctggtcatcaccatcttcaatttcattgtcacggtggttgctgccttcgtctgcacttaccttggaagccaatatatcttcacagaaatggcctcgcgggtgctagctgcattgatcgtcgcctctgtggtgggtctggccgagctgtatgtcatggtgcgggcaatggaaggcgagctgggagaactgtaactggtgcttcatcatcaagtctagagaagactttgggggcttcaggctccaattggcagtcaccgactcagtcaacccatcagactttttgtattcagctccagttagtcagaagaccagcccaggccagctgctgtttctgtggggagccctaatcttctgtgaatttccaaagggagcattggaggagattgagataacacatctttaaaacagaaagaactggtcttggtctatcagtacctcttcctgaatctggtacccatctgccttctccagttcattctaaacactgctgggactagggtttttccatcaggagcaaatggaatccaggccttcccagaagtagatcacactgccttcagacatgggt

SEQ ID NO: 1461 - DNA, 1086 bp, Homo Sapiens
  misc_feature (1042)..(1042): n is a, c, g, or t
atggactctgtgggattcattatattgacgctggttaccttggtttcaaggcctacttcactgctcctcgaaaaggcaccgtttggagtctttcaggatccgactggcttgggacaatagctgcaggagatatatccggggagctcattgctgctatattaccagatatggcactgaatccaataaatgtcaagcgacctgtagagcgaagatttcctatatataaagcagatctgataccgtatcaggacagtcctgaaggtccagaccattcttctgcttcatctggggtccccaaccctcccaaggctcgaacttacactgaaactgtcaaccatcactacttgctctttcaagacacagatttgggttcattccatgatctgctccgtagagaaccaatgctgcgcatgcaggagggagaggggcattctcaactctgcctggacaggctgcagctggaggctattcataaggtacgtttcagcccaaacctggactcctatggatggctggtatctggggggcagtcagggctggttcgaatccattttgtccgtggactcgcctccccactgggccaccgtatgcagcttgaaagccgagcccacttcaatgctatgttccaaccatcctcccccactagacggcctggcttctctccaaccagccatcgccttctgcccactccctagccttggcccacaccagatccttggagtgaagtcggtcaagaacaaatggcccctatgcacagagccataggaactgggggccttccctggacagtgatcatgccaggcctggacctttaggcctgcctccccaggactccttagatcccactctttctacagacttctgtgatcacagccccctgcgggcaggggggctctccctccaccaactctcaaggctcctcagcctaagactatggctcatgagaaacactcaggcctgacctaggcttgggagtcaaactgctcatattgagcatattgttaagtggggtaaagccaagtaaaggtactgggtgtttttntgaccacttgtgaatgggtgtatggagaactgaaaagggtatct

SEQ ID NO: 1462 - DNA, 349 bp, Homo Sapiens
ttgctgtcgttttgagcatgtcgagcagtttactgtggcttccttgtatatggataagctgctgtccttccccttcacaactgaccccgcagttacaaactagtatagcatttgtgctgattgatgatagactcatggacttcaggagcccttacttggttttgatcagtgtagcaaattagggatgaagagttcaaaccttttggccctttctttcttttctaggcttctcccgcgcagggtgttccgtagtttcttctcgagccaatgcatgtattatagcagcaggtgtctttgtgctttctcatcatagtaacgtactactagtaaatacatttttctatttttc

SEQ ID NO: 1463 - DNA, 462 bp, Homo Sapiens
ggggtcctccctcctggtgtactgggtgggaggtggaactagtcggacaaagccctcgcgtcggacccttgccagaactcaattaatggatgcctcgaagttgacgtacatatatattcagaaatgttttgccacctgagacctatgaggaggttatgtctagagaagatatttccacactggtttcccttttcaagagctttatcgggagctgaagcagtcaatgccttgaggcctttctattttgcagtacatccagatttctttggacagcaccccgtagaaagggatgatacatggaagagttttcaatgccctagtgatttttccttatgatgcatgctgctggaccactcccctacaacatcagttaatgtgtgctccaggaatacaaactgatatgaaaaatgacttatggtagatgtagttaagacagtcaatatattttaacattagaaaata

SEQ ID NO: 1464 - DNA, 460 bp, Homo Sapiens
gccgcatgtagccactcactcgactttttttcagctgtgaccattcccgggagctctttgagcctttctgtctcatttggaaccagggggaaccaggaaggggctcctggcctctctgtgtcctctgcagtgggggttgtggggggcgcagcatccacgccttgctgcccttctttcatgaagtctgttttttaagtgctggttcccccgaatattttatgcagaggagggaaaatttatagtggcaattattttctcacagtctggtgagcaggcaattaattaggagtaagggggcctagtagagcgtggcgtgtggcagaatcgcaccgccccggctccccagcccaccgccatgcagggctcgcgtgcgggaaaactaatatgccggcgtttaagcctgtgcccctctgctgggtgtaactgcgctgaaataaatgatctgacaatgtgaagcgta

SEQ ID NO: 1465 - DNA, 1146 bp, Homo Sapiens
  misc_feature (38)..(38): n is a, c, g, or t
gacactgatgatgacctacctatatccaaaaagaagangagaagaaagggtagtggcagtgaacaagaaggtgaagatgaggagggtggtgagagaaagaagaaaaagaggagaagacatccaaagggagaagaaggatctgatgatgatgaaacagaaaatggccccaaaccaaaaaaacgacgtccaccatagcagagaagaaaaaggctcccaagccagaaccgtctgcctccatcaatgaagggaaaaataaaatccaaagccataatttcatcaagttgatgactcttcggatggaggataaacttaaaattgctgatgaaggacatccccaggaaccagcaacagcaacagttgactcagacgaggacgaacaacgaaagaaatgtgcctcatcagagagtgattccgatgagaaccagaacaagtctggcagcgaggccggcagtccccggaggccacgaagacagcggtcagatcaggactcagacagtgaccagccatccagaaagagaaggccctccggttctgagcagtctgacaatgaatctgtgcagtcagggagaagccactcaggagtttctgagaacgactctcgcccagcttctccaagtgccgaatcagatcacgaatcggagagaggatctgataatgagggttctggccaaggctctggaaatgaatcggaaccagagggatccaacaatgaggcctcagatagaggctcagaacatgggtcagatgatagtgactaggttttatttcatcaataagcttcatctctggaggaaacttttttaatatatgaaagctgtgaaaaaaatggttccgatgtttagtcaattgcgaaaatttttcttaaggcaattttccttttcaacaactttggatattactaaggcccccagagaaattttccctgggcttaaaactccattatttttgaggcctcccccgggcaaaatggagacttaattctttggggggaaacaatttccccccccattacaaatgggaaaaaactggccgtcacaaaattaaacccccggaaggcgttaaattcattcccccacacaaaagggctttgtacctggcaaactcggggggcaagaaagggcctcccttccgtctcctccgcaatgg

SEQ ID NO: 1466 - DNA, 536 bp, Homo Sapiens
tagtaatataagcgctacgtacccagtacttaggaccctgggacctctccccaggagctgagcttgtatctcacagtcccaggtgctccaggcccactgcccacccagggtctttttaaggcggcttcttccatctgtgatgccctgtccttcctcagctcttcccagacctccttatacagcttctctctgaactgtcctagtcaatcattcattcagcacactactgcattcaccacctaggaagtgcgctgtttggtagacaagttacacaactgcttctgaaagcgtttgagtcagcacattcactattggtcatacacagccctgcacaatctttagtgttctatgcctagacatctagtttgtgtcttacaattttgtaccttctccctagtgcttaaaagagtgtaaactcctgtgtagatatgcaatacattcccatatatatgtgttccataaagataagtgacattaaaaactgtatcaccatgccatgcatgaaactcacatcttcctttcagcatccttcgcta

SEQ ID NO: 1467 - DNA, 444 bp, Homo Sapiens
gctccttgtagcaaatgaaggtgccatcattctagaggaggaagtagagtggacgccagatacttgatgtactcccctcgtttgtgcagccaaccctcattcacaatagccacgtcgctcatggtgcacgaggatcacgcgaagctcacgcgctcctctaaggcatggcgcacaacgagcacagatggcctggccacagcctctgatgcaccagctgacaggctgcctcctccaggcagcccctttgacttcttgacccaggctggctcggccttccctaagcccctggtgacagatggccccgtttgctctccctgtccatggtgttcctacccatggatcctgggacagggcacagggctcctccctgctccccagactaggaaagcaaagaaattcaaacatgaggaagacaggaccaggatgcaggccactggcgcaaac

SEQ ID NO: 1468 - DNA, 1148 bp, Homo Sapiens
  misc_feature (192)..(192): n is a, c, g, or t
  misc_feature (347)..(347): n is a, c, g, or t
  misc_feature (518)..(518): n is a, c, g, or t
  misc_feature (541)..(541): n is a, c, g, or t
attaaaggtgttttttacttaaagggctccttagggttccgggtgttctccccccccacggtgcttccaattctgtttttttagggctttagccttccaggtttctttaaggggttttccggagtgtattccaaaaggaccttaccttcctcaaggataatgtacacaggatttttttaaatcaaagtttcngtcttcgggcgcaagatattctgcacctgggtgctttcaggccttgaccaaatagcatgaatagtaggaaatgagactttcccctctgtcagatcttcacaaaaaacttttgttttcactatattctttggagtgtagattagcataatcatccntaatttggaaaaagagcccaagtgtattaagtagcggttttaaatcttctttgtaatcagagaacaactgcatgagacctactgctaatccaaaccagtccaccttgttttcgtgcagcacccatagctttatatttcttcttcagtggggacaagtgtaattatcccctnccagtaaatatctaggccctgtnccctgatggagttccaaaagctggcgggtaaaaaagcttcactgcatctgggtgatcaagggttaagactttctccaagccaaggaaatacacgtaattggcagaattgatgacagatgggattccatagatgctgtgggccactggaaagccacgtcggagttttgagttgtcttcaatatcatcgatgagtaaactggcattatgcaacatttctgtcacttcaataataatctgtagcttgtcctctggaactttcagccaatgattaaatgcctgtgaaagtttggttctcacttgtttacctggtaactgaagtaagtatttatagggttctagaagaattctttggactgtttcttgagtcttctccattggatttaaacttcaaagctaatagttcaacgatgatatcacgactttcacgccgccggtccgggagtaactgtaccccgcatcaacttcctattttataatgtggacttaggctcttcccgatgcctacatgaatccttcccactatttcaccacagaactctccgccctcctcagccgccagcgacaccgcattagttggtgcaagaaaatgcgccatcccggtcacccc

SEQ ID NO: 1469 - DNA, 596 bp, Homo Sapiens
  misc_feature (402)..(425): n is a, c, g, or t
  misc_feature (428)..(428): n is a, c, g, or t
atatcatgtcttctttggccttttcactgagggcctgtgccattctcgatgcaaataatcttttctgaatatgggagaattactaacaaatttatacctgctcaccaggacgctatacatacttgcacacgtaattttgcttatagcctcagaagattcgtgggcccttccttcgccaaccatttcatgaacccatgagccccagattaagaactctttctcttggttgttgttaaaatataactacgtagcaggaagaggaccattgtgatccactaccaatagaacatttatagttgaaaatgcaatttgagttgtttgttcaccagtgatgctatgttatgcatttgtttacatctcataacatgtggtaaatatttatgcaagatggctagccagacnnnnnnnnnnnnnnnnnnnnnnnncanccgtgaaatagagaatgcagggtgacccatgtaaacaggctagagatacatttgaaaaagatgagggttaaagagtgtgtacatgttggcaggtaaagagatagcatcctctagggaggatattatcaggagtcagagtaatcttggtaaatgggagaatatgtaaga

SEQ ID NO: 1470 - DNA, 1271 bp, Homo Sapiens
  misc_feature (1016)..(1025): n is a, c, g, or t
  misc_feature (1043)..(1058): n is a, c, g, or t
gggactagtgatactactgggacccatgaatctgatagaaacaaggaatccagtgaccaaacaggcattaatattagtggatttgagaacaaaatttcatacgtagtgcaaagcttaaaggagtatgaggggaagtggttgctttttgatgattctgaagtcaaagttactgaagagaaggactttctgaattctctttccccttctacatctcctacttctactccttacttgctattttataagaaattatagagtgagtgtattttccttgtgtatatattaaacacacccatacaaacattggtaaagttgattacatcaaagaatctttagcttatcttttgaagctactggatattattggtctctctaggtttttatataaatagtgaaatttgaattactgaaaaccatgttaatttttagaactcattttcctcagtagagactagtgatgcattagcttctgggaacaaacttgtatcggttcttaattaaattatccaaaacggaggcatttaaacacttggatttacaccagtcttttgtgtttgctttttaaaataaagtgctcgtatttgtattctccatattttggagtaattatctacatgatgtttatagttcctggggtttgtcacccaagaagcaaaatctcattcagtacatttagttttataagagtcatgaagctaaatcctggggctatgtcagaggcacaaagtctagaatgtgtgtattcacaatggtgtatgtacattttgtgccttgattcacttagaagtgtctcagaaaacctggacagttcgcttctacacaagaattttatatgtatttatgaagatgattctgtaccctagtatatctttttgggcatggactaatttgtatctgtttaactcatattctgcacgatctgtatatagtacatcaaacttagaggtgggaccttaaatttaactttttttaaaaactgggaaggtcaataaaatttaaactgcttaactatggtnnnnnnnnnncccccgcaagaaggagcnnnnnnnnnnnnnnnngaaccttgtcgggccgcccttcgggccctccgaagaaagcttttttttaaaacccagtttcggttttggggcggcggccggggcccccacagttagaggtaaaagtggcaaacactgtggggccaataaaccttggttttccctgaagggaagacatccgctggggccaatggaaccatacggggcttttgggtatttcctccccccacaatt

SEQ ID NO: 1471 - DNA, 349 bp, Homo Sapiens
aatgttaaacctttgtaaagcatccaatcaatccagttgattagcaaaaggtacattagagcttctggatcagtaataaaaacttccatcattttgtgtcacctcaaacaattttccatgtcttcagaacttaggatgagtcccaatcaattcctacaagattgatttctagaaaaaaagttccaaaattatgaaagagcagagcaatatttttttcctggcccaagtctgatagtagtaattttaaatacagtagacaaaagtgaaaaagataactccaagttcctccctggtatcaagccctatgtgagtctgagctcagatgatccgctggcctctgcctcccaaa

SEQ ID NO: 1472 - DNA, 633 bp, Homo Sapiens
ctgttgttaagaaagataaattcaatttatttggcatggtccaagttatcaaactaggagcactccatcgaagtttcagaacaaacactgtgctgaatataaggataaccccatctgtaatgcctaaccttgtttttattaactttgttcttagactttccttttcctttaatcacttagccttgtttccaccatgaatggactctcccttagctaagagagccagacagactccatcttggctctttcactggcagccccttcctcaaggacttaacttgtgcaagctgactcccagcacatccaagaatgcaattaactgataagatactgtggcgagcaatatccgcagttcccaggaattcatccgattgataatgccaaaagccccacgtctatcaccttgtaatagtcttaaagcctctagacctagaactgtttactttactgtaacaatacatccttttaacttttttgtctacttctgtaaaattgttttaactagacccccctcacctttctaaaccgaagtataaaagaaaatctagccccttcgaggccgagagaactttaaacgttagccatttcttaggcgccggctaaataaacagactcttaattcgtcaaaaaaaa

SEQ ID NO: 1473 - DNA, 325 bp, Homo Sapiens
ctggagccctgtgcagtgaagtagcaggcagtcaaggatattgaaaggtgtgcaggctgtcccagaccccacgcccagaaggccattcagagaccaaagaacatgactaactccaaaatgaagataaaaactacagttcagctatgaatgttttccgtctaaacactcaacaccatactactactttgtgctgtttacaatttcctagcctgctattaaataaaaggttccataaaagggggcaacagcccagaaaacaaaccatattgttgaagttgaacctctgcccatcccagaaaaccagcttgctggagaaacctgtgcc

SEQ ID NO: 1474 - DNA, 349 bp, Homo Sapiens
cggccggggccccatccctgacactcctgtcgcccggctgtacctgggtgctgtgtccccggggcgtctggagacgtcgatgtggtcatagcagggcctggaacggggaggtctggcctgaactagagaaatgaggggggtatccgcttctccaccctggcctcagatgaagaggctctgggggcaggagggagtcagacacgtgcagggcaggcggcctgtgcagggcccaaccctccggcaccagaacctgacctcctcagaggcccccaccatggagggatgtctgggggatgctgtgcgtgccgctacgatgtttggttagagattaaagccatttcagaagtgg

SEQ ID NO: 1475 - DNA, 171 bp, Homo Sapiens
gtgggtcaattacaagtagcacaggacaaaccctctgatgtcgtcagaattctagtgagctcaactgcaatgtttacctccaggggagcgttttaatgctctccttttgtacagcccagtgtgttcaggtgcaggaaaaaaaatcaattgtttcaactgaaagagaaggac

SEQ ID NO: 1476 - DNA, 776 bp, Homo Sapiens
  misc_feature (501)..(501): n is a, c, g, or t
ctccaaccaaaaatgaacaacagctgttttatatctcacaacctggaagctcagtggttacttctctttccccaggagaagctgtaaagaaacatgttggtttgctgcgtattaaagggaggaagatgaatatgcataaaattcctcttcacacagtgcggcagtttttcatggaggatattgttctagctaatcatccagacatttttaacccagataatcctaaagtaacccaagccatacaaagcttctgtttggagaagattgaagaaatgcttgaaaatgctgaacgggaacgtctgggtaattctcaccagccagagaagcctcttgtacgactgcgagtggactatagtggaggttttgaacctttcagtgttcttcgctttagccagaaatttgtggatcgggtagctaatccaaaagacattatccattttttcaggcatagagaacaaaaggaaaaaacaggagaagagatcaactttgggaaacttatcncaaagctttcaaaagaaccaactttaagggtagaagatcttgtaaaacagtactttcaaaccgcagagaagaatgtgcagctctcactgctaacagaaagagggatgggtgaagcagtacaagaatttgtggacaaggaggagaaagatgccattgaggaattagtgaaataccagttggaaaaaacacagcgatttcttaaagaacgtcatattgatgccctcgaagacaaaatcgatgaggaggtacgtcgtttcagagaaaccagacaaaaa

SEQ ID NO: 1477 - DNA, 214 bp, Homo Sapiens
tgggaggctgttagtgcaaaggtatcttctcagtatctgcctgacacactactgtatccagctgcctgacccagtcctgcccacctgccttcctttcttcctgcctcccctctgttttatcaactttgtctcaaaaaaacatagcttcctatctctatatgttcgtctcctatttatggtccctcagtatgttatagtgcttgctaaggtttga

SEQ ID NO: 1478 - DNA, 255 bp, Homo Sapiens
ccagtggggcataaaaatcccaagataacttcggatcataaatgaacacagactatctgaatatgggacaagtacctacctcagagcaaagcaaacagtctgagaagaggcgagcacaggccacaggaagcccagcgtaagtctcaatcttttggagatttcccttctattgggattctcagccactgtggtctggaaacaggaggctgagagaggcctttgctccaaaacctggtgacacctttcagtccacca

SEQ ID NO: 1479 - DNA, 673 bp, Homo Sapiens
  misc_feature (532)..(532): n is a, c, g, or t
  misc_feature (543)..(543): n is a, c, g, or t
  misc_feature (551)..(551): n is a, c, g, or t
  misc_feature (561)..(561): n is a, c, g, or t
gcccgagtcggcggcgctgggcggcctgggccccgggctgtgctgctgggtgtcagtgttctccttcctcagcctcgcctgctcctacgtgggcagcctctacgtctggaagagcgaactgcccagggaccatcccgcggtcatcaagcgacgcttcaccagcgtcctggtggtgtccagtctctcacccctgtgcgtgctgctctggagggaactcacaggcatccagccaggcacatccctgctcaccctgatgggcttcaggctggagggcattttcccagcggcgctgctgcccctgttgctgaccatgattcttttcctgggcccactgatgcagctctctatggattgcccttgtgacctggcagatgggctgaaggttgtcctggccccccgctcctgggcccgctgcctcacagacatgcgttggctgcggaaccaagtgatcgccccgctgacagaggagctggtgttccgggcctgtatgctgcccatgttagcaccgtgcatgggcctgggccctgctgtngtcacctgccngctctttnttggagttgncccatttcaccatattattgagcagctgcgtttccgccagagcagcgtggggacatcttcttgctgctgcgtccagttctcctacacagctggtctcggtgcctacactgct

SEQ ID NO: 1480 - DNA, 384 bp, Homo Sapiens
gggggtgaagatttctcaagttgtctaaaaggtaaaggtcatatgctgataactacagatttgacataaaacctcagtctaaaacaaaataataaatattataaaaaagcactagcaagaaacataaaggcaaaacggcaaatcatgccaagcttacctgattttcttgagtgaagaatctgtggttggtttggttggatgggtgaatagatagatatacattataccttaaattcagcaaggaatttaacacaatttattaaaaatccttgggaatcatgtagtaaactgagtttgtacttttgggtaggttcctagctttaacatactaatgacacttaactgtgaagtgtccatctgtgagaaaaggctctcatgggatgc

SEQ ID NO: 1481 - DNA, 375 bp, Homo Sapiens
gctgggtcaggctcctcggtccaggtttacttcatcccgcctggacgtgatttggctttgactgtctctcctgcagcccaaagcacttcctccctgtggttgctgtagctgtctcatgggagcagtgcctctccaagtttgaggatttgaacaaaaaactgggactggtgacttgttaatgaacagttcaaagggcagagggccatcatctcagcttgtggagacctttctttccctggatgctgcttctcagctaaccccctctctcttcgtgtgtgtactcggccttcagggtttccaccgatttttacaccttcttcccaccacgatagcttggctttaatgtggaattaaattatatatttttaaaacctg

SEQ ID NO: 1482 - DNA, 426 bp, Homo Sapiens
  misc_feature (126)..(134): n is a, c, g, or t
ggcagcggattaatatggaaggcatgggaaagctgggtaaggaagagtgcagagtgtaggatgttctcataaataccagaacgttgtgggaatttgttaggaagtcagtcaagtagggtatgagannnnnnnnnaaatttgcgggcttttcattcactgtcagccgtgagccaccaagatccttgggtgactttctagcaagtgtaattttgaactgaagcgtggtcctgttcccattctgagtagagccacttcccatcacacgatgattgtggtgactgcagcttgactgcggcttcttgcattgttctggcccttcccttctgcagaacttagaaccattttcttgtgggtttgtgatcacaagcctgacctgagactgacagttctttcaaagaagtcagtcttgagctgtttttggaatct

SEQ ID NO: 1483 - DNA, 290 bp, Homo Sapiens
cagactgattctgtttgggcaaaaacaaggaaaaagaacaagagtctctgcccagtaatccagataattctttcgggtattatccaagaccaccaaagcagtacctctatgtgtatgaaagaactacaatattactgcatttaggggcccactaatgcagatatggctgcagtgaccaaaaacttacatcacaacatccaagcccatttgaatacctggaatgccttcccaagaaggatgactacaaacaagccctactgtgaagactacaataaatacctaactcttca

SEQ ID NO: 1484 - DNA, 141 bp, Homo Sapiens
ggtaagaagaaagaagtatccgcgaactttgggcaaaaacttccctaaaataattttaacaaaacgagcagctcagaatcaagtatactaaaaagcatcaacattattattattactatgagatggagtctcgctctggca

SEQ ID NO: 1485 - DNA, 619 bp, Homo Sapiens
  misc_feature (74)..(83): n is a, c, g, or t
  misc_feature (416)..(454): n is a, c, g, or t
gcgtgagggtaccatcataggtacatagaataattacagtataagtctgaaagtgaaaacgccagaagatggannnnnnnnnnaatgcaatggcgattcagaggaaggaaagattctttcttgctgagggaaatcaaggaagtcttcctgtaggaggtagtttctaaaccttatattgaaagatgtagatcctggagagacggaaaaaggcattccaggcagatcactgtgagctggaaagccagtgatgctgtggcaaaatgtattttttacagaaaatagatgggtatctcccatgccccatgatcttttacgatataacctggctgttcctcccattggcggatctgtggaccctcccccttgaatctgtgggcatgtgactgctctgatagaaatgaagctacatgatatcnnnnnnnnnnnnnnnnnnnnnnnnnnnnnnnnnnnnnnntccataccacttcctcctagttctcttgggatgcttgccgggagggaagctagtttccatgtacagaggctactaatctgagaccacttgtgtaagcgaggccaacagagatgctctggtccacagccaggctcaaccgcggatcacatgtgtgagccgtcttgc

SEQ ID NO: 1486 - DNA, 842 bp, Homo Sapiens
  misc_feature (681)..(689): n is a, c, g, or t
gcagcaggaactcaggtagtgagctacaagtgtattatgcttcacccagaagttatcaagacttttttgaagccatccgcagaaggggagacacattttatgttgtgtcacttcgaagggatcacctgctgttaccagctaccacccataacaagaccacaagaccaaaaatgtcaattgtgttaccagcaataaacataaatgagaatgtgatcaatgggcaggactacgaagtgatgatgcagattgactgtcaggtgatggacaccaggatcctccatatcaaaagttcgtcagttcctccttacctccgagatcagcagaggaatcaaaccaacaccttctttggctcccctcccgcagccacagaggcaacccacgttgtcagcaccatccctgagtcattacaatagcaccctgcagctatgctggaaaactgagcgtgggaccctgccagactgaagagcaggtgagcaaaatgctgctttctgccttggtggcaggcagagaactgtctcgtactagaattcaagggagaaaagaagaagaaataaaagaagctgctccatttttcatcatctacccatctatttggaaagcactggaattcagatgcaagagaacaatgtttcttcagtggcaaatgtagccctgcatcctccagtgttacctggtgtagannnnnnnnnctgtacctttctaaacctctcttccctctgagatggttttgtgtttaaacagtcatcttcttttaaataatatccacctctcctttttgcccatttcccttattgattcctaaagtggaattttatttaaagctatgccacacatgcatgtaa

SEQ ID NO: 1487 - DNA, 1404 bp, Homo Sapiens
  misc_feature (521)..(521): n is a, c, g, or t
  misc_feature (618)..(618): n is a, c, g, or t
  misc_feature (1171)..(1200): n is a, c, g, or t
  misc_feature (1358)..(1358): n is a, c, g, or t
ggcaatctccaaaatgaatgacttcatgaggatgcagatactgaaggaagggagtcattttccaggaccgttcatgaccagcataggcccagctgagagccatccccacactcctcagatgccaccaacaacaccaaccagcagtttcttaaccaagaaaagtgaagacacaatctccaaaatgaatgacttcatgaggatgcagatactgaaggaagggagtcattttccaggaccgttcatgaccagcataggcccagctgagagccatccccacactcctcagatgcctccatcaacaccaagcagcagtttcttaaccacgttgaaaccaagactgaagactgaacctgaagaagtttccatagaagacagtgcccagagtgacctcaaagaagtgatggtgctgaacgcaacagaatcatttgtatatgagcccaaagagcagaagaaaatgtttcatgccacagtggcaactgagaatgaagtcttccgagtgaaggtttttaatattgacctanaagagaagttcaccccaagaagatcattgccatagcaaattatggttgccgcaatgggttcctggaagtatatccttttcacacttgtggctgatgntgaatgctgaccgaaacatggagatcccaaaaggattgattagaagtgccagcgtaactcctaaaatcaatcagctttgctcacaaactaaaggaagttttgtgaatggggtgtttgaggtacataagaaaaatgtaaggggtgaattcacttattatgaaatacaagataatacagggaagatggaagtggtggtgcatggacgactgaccacaatcaactgtgaggaaggagataaactgaaactcacctgctttgaattggcaccgaaaagtgggaataccggggagttgagatctgtaattcatagtcacatcaaggtcatcaagaccaggaaaaacaagaaagacatactcaatcctgattcaagtatggaaacttcaccagactttttcttctaaaatctggatgtcattgacgataatgtttatggagataaggtctaagtgcctaaaaaaatgtacatatacctggttgaaatacaacactatacatacacaccaccatatatactagctgttaatcctatggaatgggggtattggggagtgcnnnnnnnnnnnnnnnnnnnnnnnnnnnnnnaataaaaatggcatatttttgcatctacaaccttctataatttttgaaagaataattaaagcttattccttttttgtggaaaggaaaacctccaataatcaaattacccccccgcccctgcaccattgtgttcaaaaaaggatgaaaattcataaaanaatttccttgttggggccgcctcggccctctaaaaaaattttttaa

SEQ ID NO: 1488 - DNA, 375 bp, Homo Sapiens
tctgggaaatgactaggataaaaatatcagtatgtatctgttttagatattttgagttttgctttttttatgccttgaatattttatttcaaaaagtatctgaagcaaattctcagactgaactacttcttagacctcactgtaagaatattttattcaatgtctcatttatgatagatttgcaagctgctcatttttgaacagctttttgcatgggataggagcatgtctattctaacacatcagcttattcaaaagcaagaattttaaaaataagataaatgtaaagttgttttataaacgatcctgttaattaaaccacagacaccatatatccttctgcatcctttggccaataaaagttgctggagaacc

SEQ ID NO: 1489 - DNA, 2149 bp, Homo Sapiens
  misc_feature (115)..(156): n is a, c, g, or t
  misc_feature (1488)..(1488): n is a, c, g, or t
  misc_feature (1525)..(1525): n is a, c, g, or t
  misc_feature (1535)..(1535): n is a, c, g, or t
  misc_feature (1624)..(1624): n is a, c, g, or t
  misc_feature (1646)..(1646): n is a, c, g, or t
  misc_feature (1659)..(1659): n is a, c, g, or t
  misc_feature (1694)..(1694): n is a, c, g, or t
  misc_feature (1720)..(1720): n is a, c, g, or t
  misc_feature (1740)..(1740): n is a, c, g, or t
  misc_feature (1833)..(1833): n is a, c, g, or t
  misc_feature (1977)..(1977): n is a, c, g, or t
  misc_feature (1996)..(1996): n is a, c, g, or t
  misc_feature (2029)..(2029): n is a, c, g, or t
ggcagggagaagagaagccatgagaggcagcgcccgccaccctgtgtccacagcccccaccttcccgcttcccttagaaccctgccgtgtcctatctcatgacgctcatggaacnnnnnnnnnnnnnnnnnnnnnnnnnnnnnnnnnnnnnnnnnngttctaaagaaaagtcattttgatgcaaggtcctgccgtgccatcagatccgaggtgcctcctgcagtgaccccttttcctggcatttctcttccacgcgacgaggtctgcctagtgagatctgcatgacctcacgttgctttccagagcccgggcctattttgccatctcagttttcctgggccctgcttcctgtgtaccactgaggggcagctgggccaggagctgtgcccggtgcctgcagccttcataagcacacacgtccattccctactaaggcccagacctcctggtatctgccccgggctccctcatcccacctccatccggagttgcccaagatgcatgtccagcataggcaggattgctcggtggtgagaaggttaggtccggctcagactgaataagaagagataaaatttgccttaaaacttacctggcagtggctttgctgcacggtctgaaaccacctgttcccaccctcttgaccgaaatttccttgtgacacagagaagggcaaaggtctgagcccagagttgacggagggagtatttcagggttcacttcaggggctcccaaagcgacaagatcgttagggagagaggcccagggtggggactgggaatttaaggagagctgggaacggatcccttaggttcaggaagcttctgtgcaagctgcgaggatggcttgggccgaagggttgctctgcccgccgcgctagctgtgagctgagcaaagccctgggctcacagcaccccaaaagcctgtggcttcagtcctgcgtctgcaccacacaatcaaaaggatcgttttgttttgtttttaaagaaaggtgagattggcttggttcttcatgagcacatttgatatagctctttttctgtttttccttgctcatttcgttttggggaagaaatctgtactgtattgggattgtaaagaacatctctgcactcagacagtttacagaaataaatgcttgtttttgtttttcgaaaaaacacgacacacacaacttaccccacgaattcccaccccccaacgaaccttgtcgagccggcctcggccccacaagagagttttcctaagacccattgcgtttgggcgccgcacggcccccctaaaggcaaagtgaaaccatgggcacactaacgtggtttctccataaagaaacaacccgtgggccttatggacgataacgggccttgtggatttccccccacccaaaataaatacaaaacgcgcctcgggggcgggacccaaaacgcacaacgcggatttcctctgaaacaccacacattcctcaacaatatgggagagggattctcncttgaaagagggcgcacaactgtacctctctcgcgancatcactttnacgtctacaaagcgcaggaggtagagactctacactacacgcgcgggagacgcaccccgcgtaataatatctcacaaaattcttatacncggtctcacaccccgagacccnccacttggtgtcngcctcgtctttccattccgtgcgccaaagagacanagtgcggtctgtgacgcacaaccttncagcatctgcttagggaggngcgatatcatccctaccacccgaggagatccttgaggctaacacctcacccattcacaccctgaaaagagtcgccgccatatagcacatggcnacccacgcagtcaaaatccccgcgcccgcgcgcgcaggacaaatcctagggccacccccccttgtgggtaccccgccgccttggcgccgcactaaaccatgctatatatagcagcgcctcgtctgcagcagaaacataaaaacntgacgggtgcgccaaacanaaaacaactatccattccgcgcaaatagcgcgnacaccgcgccgttacgctaccacccaacacactcggcatgtcgaccgacaccccatcccctccacaggcgttatagaggggtggacgaagtctcgcatgaagctgaaacttgtctcctga

SEQ ID NO: 1490 - DNA, 2028 bp, Homo Sapiens
  misc_feature (1176)..(1184): n is a, c, g, or t
  misc_feature (1253)..(1270): n is a, c, g, or t
  misc_feature (1331)..(1343): n is a, c, g, or t
  misc_feature (1865)..(1865): n is a, c, g, or t
  misc_feature (1932)..(1932): n is a, c, g, or t
  misc_feature (1973)..(1973): n is a, c, g, or t
  misc_feature (1992)..(1992): n is a, c, g, or t
  misc_feature (2003)..(2003): n is a, c, g, or t
  misc_feature (2018)..(2018): n is a, c, g, or t
gggagcggactcctttggctatggcctccaactttaagaaggcaaacatggcatcaagttctcagcgaaaaagaatgagccctaagcctgagcttactgaagagcaaaagcaggagatccgggaagcttttgatcttttcgatgcggatggaactggcaccatagatgttaaagaactgaaggtggcaatgagggccctgggctttgaacccaagaaagaagaaattaagaaaatgataagtgaaattgataaggaagggacaggaaaaatgaactttggtgactttttaactgtgatgacccagaaaatgtctgagaaagatactaaagaagaaatcctgaaagctttcaagctctttgatgatgatgaaactgggaagatttcgttcaaaaatctgaaacgcgtggccaaggagttgggtgagaacctgactgatgaggagctgcaggaaatgattgatgaagctgatcgagaatggagatggagaggtcagtgagcaagagttcctgcgcatcatgaaaaagaccagcctctattaagatcagtgtcttctttttctactgcaagcacatgtaactagattaagtgcctgccatggtgtgaaatctggcttttgagaacacaaacttttcccccacgggacctcccctttatcacctttaatagtgacctttgagcctattttagccgtttggaagtgttctttgatattacagttctttgtaaaatgacctgcgaattaccctaattctcaaaagcaaaacaagagcacacaagcgtgaagaaaaggatcttaaagctttgagcacctgccattttgccttgcatcgtttccctcgtcatgcatttccacatatccacaaacacagaacgactttagacaagcacatgttacacctgtgttgccacaagcagtcattcttgacggctccagtttttatttgacacttgagtttagttttctcttttataaacccagtgaactcctgcactggcatttggatgtgtgttaatgctatttgttttgtcttaaaagtaaaacctttctcagtttgaccaccccaacgaagatgcaagcccccggcaactaaaacaaaccaccctaaaaagccgatgacaaaaccctatgaacatataagccaacagcctgacggcttattcctccccacgcggtnnnnnnnnnactttttttgctccccatacccgcattatcgggcggcgtgttccatttcttcccccttctattattccnnnnnnnnnnnnnnnnnnaaatcgcatattattcgttcctcccgcccgcccgtatcccccgcagtatcatttacaccannnnnnnnnnnnnattgtttcaccccccttatacccaaatgttcttctgatccaccgcccccgaaaaaacacgagaaccaacgcctcgcagacaacataaccaccagagcattcccctttcgccgtaggatccgctacaatcggcggacgccccgcataatgcaagcacccacacacgtcaactacagccggcctggcgaataatattcgccacagcagcttaacgtttaatacgcgccgccgcatactcgcgagaaatacacacacacccccgccgcgccagattaaacacagagaatattcctgagcgtcctccgccgcccgtaacacggcgcagatcaggtgaataacgccgccccgcccacctgtcatataatattaaaacacaccctcgggaccgcagttccgccgcgcggtagccccgcccggcctattaataaaccgccgcttatttacgccacagcgcgccgtcacactgtatctatattttgtattccccccgtcgcgactcgtatcttatcatacccaaaattancgcgcccgccccagcagctagacacaaccacgacatcgtatatatggggcgctatattagtgacatnctaacagctcgcgagttcggtgcgtcgccgccgggaagtcntgaacagcacgattatgtntttacttactntcgcccacgccctgngcacgcccgc

SEQ ID NO: 1491 - DNA, 668 bp, Homo Sapiens
  misc_feature (500)..(519): n is a, c, g, or t
  misc_feature (521)..(525): n is a, c, g, or t
  misc_feature (527)..(527): n is a, c, g, or t
ggtgtggagagagtatgttctgtgttgttttagatatttctgtatctgcacaaggttggagatgggttcggtaattagtccaggttccagtaactttggtccgaaatgatggaatcatttattccaccagccttacctttacctacacaccagaaccagggccgcggccacattgcagtgcagcaggagcaatccttcgagccaattcaagccaggtgccccctaacgaatcaaacacaaacagcgagggaagttacacaaacgccagcacaaattcaaccagtgtcacatcatctacagccacagtggtatcctaactaccgtctttttgctaggacttaaactgacttgagtgtggcaaaaagttaacaaaaaaggagaaaaaatgaacaatcgtttgtggtttcttgggaaaacttttcataccaggtgatactattcaaaaaccccgttgtctccctgcaagtgctgatttgaaatgcagaagccacagtgaaaannnnnnnnnnnnnnnnnnnnannnnncntgttggccgcctcgtccctccacaagatacttactagattcttcttgttgcgccgcggccccaggaaggaagagcatggtggtcatatgttgtcttacgaggaacatgcctgatcgagaacagctgggtagtattcccaac

SEQ ID NO: 1492 - DNA, 455 bp, Homo Sapiens
ggatctttttgcatttattatgtaaaactgttttacagtatcaaaatttttcacttaaagaaaaaaatgccatgaaacatttgaactgatgagccacagaacttcagttgaaatttttttcactttttagcatgctaaatatacatctgagtttaaatgttctgtttaatggccattcataaattcaagcactaccactggtcagttttgtgtgatagaataaaaatatgttacctgcagtgtaagtacagcacactgtcaaattcttttccttaaggtgcacagtaaatgtacagaaagttataggccactgttttgtaatgtagtacatttctaatctattattcctaacctattataactgtttgcagaaagaaaagaatttttctaataatctgtaaaattatgctaacttctacaagtaggcttctaaataaaatttttaaaaagacaaa

SEQ ID NO: 1493 - DNA, 357 bp, Homo Sapiens
aagggatggttgaatgaacttcagcatccaagtttatgaatgacagcagtcacacatagtgctgtgtatatagtttaagggtaagagtcctgtgttttattcagattgggaaatccattccattttgtgaattggcacataataacagcagtggaataagtacttagaaatgtgaaaaatgagcagtaaaatagatgagataaagaactaaagaaattaagagatagtcaattcttgccttatacctcagtctattctgtaaaatttttaaagatatatgcatacctggatttccttggcttctttgagaatgtaagagaaattaaatctgaataaagaattcttcctgttcataaa

SEQ ID NO: 1494 - DNA, 636 bp, Homo Sapiens
ggtcaccttcatcttgtataatttcatagattggctgacttagggtctttcaatagtttgggaattgaaagattcttgttatatatagctagtttgggtttgtttttgttttaactattttgaaggttaggtgagatgggcaaataggcttaactattttgaaggttggatgaaaagagatgggtcagtattcctacagaattcttattaactcaaataactaaatttcagaaaattaagaagctgactttatatttggtggtttgaagtatcttgttgttagcatttgtaataatgctaaaaaaggcctaataaaatgcccaagaaaatattcagtgcatttatagagaaggatattttgtagtagtatagtaatgtgttatgtagtacagttttaaagctataaatggaattttgtgtaaattcacaaaaatgtgatataaacaggatctaagactggattccctgtcactaaactgcaccactatacctgtctctctgtgtgggggacactgctgatgattcccaagattgagatgatgacggtgatgacgactgggtgaacagccatcacttccacattgtgataatccttcacagcaagaaaccgaataaaatactaacatttctaagtaa

SEQ ID NO: 1495 - DNA, 586 bp, Homo Sapiens
  misc_feature (183)..(232): n is a, c, g, or t
ggttggtctcgaaccctggcctcaaggaatcctctcacctcagcctcctgagtcactgtgattacagtgtgagctactgcatctggagactttatcacttcttaaattagtttattatatttaatgcttttttcctattataatacttttgggacatcatttttcagagaacagtatttgacnnnnnnnnnnnnnnnnnnnnnnnnnnnnnnnnnnnnnnnnnnnnnnnnnnctgtctgtctgtgcgtgcacgcatatcttcactgagatggctttaatctgcaataaacccaggaggccctaacttggtgaagtccttttacatagtttgaagctggtaaacttttgggccttttttcaagaggtaaccctggtcatttagtgatccaataaaattttcaaaatcagcaacctgaatgtttagttctttggcaatctgccgaagttgatgaaattgaaatatattattataagttctttcagcaacgttgttgagagcagaaataaatcttttcgctgttgacctgttgctcattccagaaccatgctgggatcgctcaaaatctaggttcccaaattcatcacc

SEQ ID NO: 1496 - DNA, 2075 bp, Homo Sapiens
  misc_feature (1677)..(1686): n is a, c, g, or t
cgccatcttcgccgcttcctctcaggcgccgccgcctcctgagccgcccagccccggggccgccgcgctgctgccgaccgccaccgccgccgccgccatgaacattttccggctgactggggacctgtcccacctggcggccatcgtcatcctgctgctgaagatctggaagacgcgctcctgcgccggtatttctgggaaaagccagcttctgtttgcactggtcttcacaactcgttacctggatctttttacttcatttatttcattgtataacacatctatgaaggttatctaccttgcctgctcctatgccacagtgtacctgatctacctgaaatttaaggcaacctacgatggaaatcatgataccttccgagtggagtttctggtggtccctgtgggaggcctctcatttttagttaatcacgatttctctcctcttgagatcctctggaccttctccatctacctggagtccgtggctatccttccgcagctgtttatgatcagcaagactggggaggccgagaccatcaccacccactacctgttcttcctgggcctctatcgtgctttgtatcttgtcaactggatctggcgcttctactttgagggcttctttgacctcattgctgtggtggccggcgtagtccagaccatcctatactgtgacttcttctacttgtacattacaaaagtactcaagggaaagaagctcagtttgccagcataagtgccaaagaccatcaccagcatctgtccttcagggtgctcggacagaattcttaccacagcaaaggcataagatgcttgatacggaaaatcagaaacttaactcttttgttgcagatagtcatcagtggctctgtaaaaacgcagaggaaaagagccagaaggtttctgtttaatgcatcttgccttatctttttttattactgtgtacaaagatttttttacacaaagaaacttaatgctgtattaataaattcagtgtgtagcttcaattgggatagttccaaaagtgaagattttgtgaggaataagtgcaaattttgttctgattataaaaaattctttgaaactcttaagtctttgtgtctgcaatgaaattgtactccttgacagttgatagattatatattcttccatccctcaaacttgcattccactatatttattttttggcaaaagatgagctgtatttgtttgaaatctgagacactatgttcaattggatgtatctgttcaaatttattcccacgtgacgtggaagtccttcgttggatgtcacaacactacatttaaggttggtaaggatgacttggaggtccatggttttcattaccaacattttaagattctgaatgtcgatggagtctcactgaagagtcaccaaaggtgcctgccctcctcccctgctgggaagtgtcagttggagactgtcccaagggtgctgaagaatccagtggcaggggttctggctgctttccatctgagtgtgggatgggaggggtgttcatgatcatttggatatagcaatctactctgagaaatggaacacaaggagttacctatcactttcacttataattccaaaagatgactacaaccatgtccatgctcagattcaaacagttttccatatcacttttgggtggtaagatgatttacagnnnnnnnnnnaattgggagacataaccattccttacattctgttttgtatgtgtggtttctttttatttaaacccgagcgaatcgtagttctgttggtttggttacagagctgtgctgactatgttacatcctaaaaaaactatataaagcaatggataatgtcgtttatgaattaaggtgggaaaatcgggttggaattgtgtcaatggacaaaggccggaggggcgaaattaagtcactactctgacacctcggatttgggagaaaatatgccgctgcaatagatggtattggaggaaaagatgtttgtgaacaataagggatacggaaagatagcgccaacatcaggagcaacgtggaagaagaaggcactatatagaatatttgagggatggtgg

SEQ ID NO: 1497 - DNA, 760 bp, Homo Sapiens
cgccgagaagatacatctgcggaggcctggaggagcagggggcgcctggaggagcagggggcacctggggcaagggacagtgaacagcagtggctgctcatgtgggtaatggttaaaaccagagtagatggcggggaccatggacgttgagtgttgggacattcagctgccagtgggtctctaggatggccatatctgcctccaaccctaagtcagcatcaaaggtgaacatttcagccgagtgatatctttaagcacgagagcaagggactgaggtggacatttataaaacacagaaggaagccaatacaacttggggtttcaaagtgactttaacagaagaaggaaaagaaggctcactcccaaatctaccctcagtccataacggaacagggcagtaggcctcagttcacgtaggctgcaggaatcaagtatgtcccaaactgcaagagggtgtctgctctagaggcaaggagtgaagctggcaaggagcacatttacctgggttgatatcacacttgattctctgagcaggtgctggcttgtgacctgggcagaggagatctgccctggaagttgggggcccgccccgagctggggctgagtcactgcagctgacctttgctgtagctgctgctgagcctcaggtcgctgggtgctgctgaagctcagggatacagctggctgctgcaggaacatctgggagcagaatagaaatgcctgtgaagttgggtcatgggtacctcatccagtcgcccgc

SEQ ID NO: 1498 - DNA, 604 bp, Homo Sapiens
  misc_feature (41)..(41): n is a, c, g, or t
  misc_feature (90)..(90): n is a, c, g, or t
aaagcattgtcagatgtagagtgctcagatgtggctcttanagactatatacatctgaatttttcatcctatagttagtaagatgcatanaatcaatccactactgaaatagtttcaagtcagacatttctgagttcagacatttctcaacattcttttaacaacatttttctgaatcctcaatagaaaatcacattaatcttattttaaaatttggcctttttcaacactaacgttgagtaccggtagcttgtgatcaaaggcatatactttccttatgagatttctttactaaagcaagatttcattaaatctctatttcctaaatatcattctatacaaaagatattttttaaacggtaaggattaagacaatcactgatagctttgttgtgagcaattttgattcccatgtatcacatgaattacacttccttaaataaattacagtttatggctgtatgatttattctctaattctaacatagtctagttgtcaaaaggaaatatgtaatctttttatgattgttgaatcaataaataccaatttgtgaaacatgaatgtgtttaaactgcagtgaataaatgagatgtgctttaattt

SEQ ID NO: 1499 - DNA, 431 bp, Homo Sapiens
  misc_feature (240)..(240): n is a, c, g, or t
ccacttttattgcggtttgactgcattgagctctaggatattaaatgatatcactaatattttgcatgtaatttgctcatttgagtgagggcactttttttgtacatatgatggggccaatgcacaatacttttatcacaatcaactttttctgtgtatccctatttcaatgagcagtcagtctcaagaggttactgcacttcagttctaactagacatttgtactaaggtatttccagntttatgtaaactccagcctgggcactttctgataactgtaaaatgttttataagatcatgattattgaagatacattttggaaaattttaaatgttcgtgagcagcttaactacttttgtatctagccttttttaagtatcttgttacatttacttttttaaataaagaaattacagaagaaatgtcaagt

SEQ ID NO: 1500 - DNA, 876 bp, Homo Sapiens
ggggtggaggaagagggggaagttggcgcatgcgcctaaagctgacgggtttgaaatggcttcgatgttagccgggacccgactcaggtgaagatcgatgctatagaagacaaacaagggaaggttttttttccttttgcatcatggctcaatttggaggacagaagaatccgccatgggctactcagtttacagccactgcagtatcacagccagctgcactgggtgttcaacagccatcactccttggagcatctcctaccatttatacacagcaaactgcattggcagcagcaggccttaccacacaaactccagcaaactatcagttaacacaaactgctgcattgcagaaacaaagccgcagctgcagcaagctgcatttacaacagcaatattcacaacctcagcaggccctgtatagtgtgcaacaacagttacagcaaccccagcaaaccctcttaacacagccagctgttgcactgcctacaagccttagcctgtctactcctcagccaacagcacaaataactgtatcatatccaacaccaaggtccagtcaacagcaaacccagcctcagaagcagcgtgttttcacaggggtggttacaaaactacatgatacatttggatttgtggatgaagatgtattctttcagcttagtgctgtcaaagggaaaaccccccaagtaggtgacagaagtattggttgaagctacttataatcctaatatgccttttaaatggaatgcacagagaattcaaacactaccaaatcagaatcagtcgcaaacccagccattactgaagactcctcctgctgtacttcagccaattgcaccacagacaacatttggtgttcagactcagccccag

SEQ ID NO: 1501 - DNA, 700 bp, Homo Sapiens
  misc_feature (248)..(248): n is a, c, g, or t
  misc_feature (380)..(380): n is a, c, g, or t
  misc_feature (551)..(551): n is a, c, g, or t
  misc_feature (570)..(570): n is a, c, g, or t
  misc_feature (604)..(604): n is a, c, g, or t
  misc_feature (631)..(631): n is a, c, g, or t
gcggtgtccctggaagaggccctactgcgcctcgccgagttcctctccgtccagctgggggcggaagagagctgcgggggcccggcggacactgggccagtctggcgaggtcccctcactgttgacagtgaccagtcagctcttggcccttctggcatggcttcgaagccccagggggaggcaggccctgctccaggggactcagccagcccctcgggtccggcccccctctccagatggatccacantcccagaagaaagcccttcccacttcaccgcagtcccaggcgagccactgggggatgagacccagggacagcagcccctccagttggaggaggatcagagggcgtggcagcggctggagcagctcatcctgngacagctggaggagctgaagcagcagctggaacagcaggaggaggagttgggtcgactgcgcctgcgcgtgggggcgacggactcagagaaaagggttcagcatctgactctggagaacgaggccctgaagcagagcctgagtctcatgcgggacctgctgctgcactgangccccgggcccaccatcanggctccgcaagaggatgcggaggcattgctagangctacaggccagctacatgatgcccangacaccacagaagcccttcgagctcagcctgtggtgcatgaggtgcagctgcaggatcttcaaggtgcc

SEQ ID NO: 1502 - DNA, 958 bp, Homo Sapiens
  misc_feature (160)..(198): n is a, c, g, or t
ttttccctttggggaacaccgcttttggcccaggttccactttacccttatggggcccccgcgccgcccaaaagggaaaggttcttagaaaagctttttggagggcccgagggccgccccaaaaggtttttttatgtttttgggaataatctgctggaannnnnnnnnnnnnnnnnnnnnnnnnnnnnnnnnnnnnnnctatccaggaattttaattcggttaggtgtgggaactagtttcttgagtcaacccctttaattgtttctctggcatggtcaataataaaaattttgaagtcccactcggtaaaattagtgtaaacattcacatatttaatagtacctttaaaataagcattactacatttaaaatggttccaaaatgaatctataaatggtaatataaattaaaaaatacgaacttaaagtgaataaatttttaaccttagctatggtataaataatggtaaatgtatagtgtacctttgagtcattaaaatgtcttaaaagataacagcttgttaccagaacattagaaaccatagccatgattctcaagcgttaacaatctacatttgatattttcttggccactgcattcttcaatgaataataatttccagaattccattccatgttgttttccaatagatcttttcacactcgatgttgaatacatggctctttgcagatgaataaaacaagtgcattcagtttagagatccattttgcgaaggctcattcgactgaaggaatctctgtggcaggtgacaggcaatactgccttgtataactgaaggatctttctgttgatcagtggctgtaggggcctcttaaagcgatgattagttctcttcagttccctttgatacttcttttgaatccggcccaattagctcttattatttcttaaagcatctttacaccttttagtaaaatcctttaagcagaggtgcag

SEQ ID NO: 1503 - DNA, 316 bp, Homo Sapiens
ggtaccaccaggggggcatcctgctgcaacaagccaagccttcctgcgcctgaactcacagcacactcaggacaccaccttgcctcatgggctgtgggtgcatgcccatctacaccttcacagacaggctcacgggtagggtcaggctgcacatctctctagccctgccgtgcagtgggtgtggcagccccagcagggtccagagcaggaatgcagctggatagtcgggaggggggagctggggtatcttcaggcaagtcggaatcacagaatcacatgttaaagtccaccaagcccttagagagacctaccatca

SEQ ID NO: 1504 - DNA, 460 bp, Homo Sapiens
ttccctcgaagctccctcccggtgctggggggcagctgaggggctgcaggggcagtctccctcctccaagcccctgtacataacctggagcgtgtgaccttcagagcttttcactttatgcaaaatggctcctgtgagggctgcaagctggagggtggtgcaggccttgggccacagggaggcgcctgtgaatagggggagttcatgccaccccttttttccccaaaaggggctggactcaggttagtttgggggtgggggctcctgcactttgccacaggcacggggagggttttctcctcaccccctctgccctcccaacttgggttgtactttctaagaaggtgattccccctgcccttgcccccttccccagaacaaaacatgttgatcatgtgcaatatttcttactgtgccgagaagccgcaatgagcgagattaaagctgtttaacacaaaaa

SEQ ID NO: 1505 - DNA, 511 bp, Homo Sapiens
ccagtggggcatgtactgcagatagacaactcttacaaatctagatacctggattgttactgcccaagtacttgtgaagttcaatttgcctgtcagaagtgatttattatttatatttccaaatatatatgtgtttctgaaaggtctgtttactgttctgtcagggaaacatactgtaaaatgaatgaattgttgatttaagccactgacccacagggttccctgcgatgttctggccattacctggccagcatctactgatttagtcaaacattttattcctccacaaaaagctaggatactatattcatcttctacccttaaaaatttctgcatggaataggacaacttaaagcttttccctgggacaacagttatctgttacattgagacactcaaggaactcaagcctttgtggtctactttattccatgttaaatctaaactgttatgtaaagcttgtttttatcctgctttgattaactgatgatactaatgatttctgctacaa

SEQ ID NO: 1506 - DNA, 347 bp, Homo Sapiens
caagtttgatcctcttaaaataccaagcagtttgtgtggaatattgaagtatattttatcatcagcgaagttaataactctgcttagtttgatattttctgtgtatatatacatttttatagcttacccaaaacaagagcttacactagaccgtggtttctttttcctccttccaattactatgtgttcttaaatgtgacaaaaatacctttgctttttgagttcagtaattaagaggtttaactacttcaagctgacctccctgcaacgagtgcaaattagtgagattaaaatgagattgcttctctgtgttctctcggtttacatgcaagttttccctccccccc

SEQ ID NO: 1507 - DNA, 227 bp, Homo Sapiens
ctttatttctatatttcaaaattctccctattttctgttttctcattctattaacatacattacataacttccaaattattctttttttctctgtgactattcctctttcctttgaaaagctctccagtttctaaccttaaaattcgtgcttaaagactttatttccagaatcatttttgtgtgtgtgctaccatcagttatccatgaaaaggggatcctttaaatc

SEQ ID NO: 1508 - DNA, 453 bp, Homo Sapiens
  misc_feature (215)..(215): n is a, c, g, or t
cactttctattgtgacttctgttgtgtggtacctaggtccaaagcctgggcatcatgtttgatcctctcccgtcagcttctcacatttagtcatttgccatgtgctgtagattcttcctctgagggtttgtttttaatccaactcttcctttctcttttcattgctaccatttttatttaggttcttatgacttccgagtggcctcactccaatntgtttcttcatatctcagcgagctaattcttcctaaggcacagttcctataatgtcaactgtagtggccctgattacctcattctagaatttatggtctacttcactagagccccaaacctccatctacttaatttcctattaccgcctaatgtgtatactatgtttcagcttacctggtctagctgctgttacctaagcatgctttttcctacctctactcatacttagttaaaaaa

SEQ ID NO: 1509 - DNA, 461 bp, Homo Sapiens
  misc_feature (382)..(415): n is a, c, g, or t
ctagaagcagagttatagacagtttttcatttattccacttcaccacagcttgccttctctgtgatataggcatatcacagcccatagtgtgctgcgatattaacactattcatcataagaatcttggataaataaaaccgagaaactgcttctgtaaatgttgggggcagaatgaccaacaatttggctttcctagaaagagaagagaatatctgaattccctgtaaactggtaaatcctctaccatcagtcctgaattctgagggggcctgatatttaagcaacaaaacttagaaggttccacctgttattcctagctctgtcactaaaaatcgtgtccaaacagaggtaatacgaatgtgttacccgttcccgaaattnnnnnnnnnnnnnnnnnnnnnnnnnnnnnnnnnncccagagcacagaatggatccagtgtagtagtgcaggtgaccaaaa

SEQ ID NO: 1510 - DNA, 474 bp, Homo Sapiens
  misc_feature (136)..(136): n is a, c, g, or t
ctaagaagtgctgtgggggtagagaaccaggaaggacatgctgttgggaatgtacacctgggcagaggtggccctgttaagatgtgactgtagccacagccagggatgggatccctggggtctctggaatcctganaacctcaaccaaattaccagtcttgacccctagcagcagagataagaataaaggggttggtttgctattaagtcagatgggggctctctccttgtcatgctgtccctgtgggtaacagacagggattgaccatcttactgttgtacaggtagctggtggtgttggattatcccattgaagctgggacagctgttcctttctcatagtgataacttgggtctgttgtcctctaaggaacgtgaaacatacacttcttaagctgaaccacgtaaacttgaaattctgcgccctgggagaaatgtgtcctgtgtttcaaaggataaaactgttctaaaggc

SEQ ID NO: 1511 - DNA, 276 bp, Homo Sapiens
tcagggggggtggtgttggcatgcctgtagtgacagctatacttgggaggctgaggcgagaggatcgcgtgagcgcaggagttggaggctgcagtgaaccatgattgggtcgctgtactccactgggcggcaataagaagacaaaaacataaaacaggacatgtgtgaggcaaaagctgcaggaatttctatcaggcagatctgacctcatcccacccaccccctgctcagatacccttcatagctccttattgctttcagctcataaccccacat

SEQ ID NO: 1512 - DNA, 502 bp, Homo Sapiens
cacactccccaccgcgaccggggctctgggctcgcttcctgcttcagtttccccaagctcccgatgagactccgctactaccaccacgtcgataacgcaaacctagagggactcagggtaaactgaggcactcaaactgccgaggagctccgcctcccgagagacatttaatccggggggatttgcaggaaacttctaaattaagggtagcggctgctgcagctgagggggggcacaccggtccctgcgcccgggcagctgccgtgagctcacgccccgaaatacccccaggggccccagccgcagctgccactgggtccggctgtcactcagaggaagcacggagcccccagcccaagggtcccctccccttcgcatcgccggggtttttccagccgaccgtcggccactttttcctccgacggctggcagggaagagggggatgggggcgggaccccaagggaggcggtccccagtgggtgggcgaagggggcggctcgc

SEQ ID NO: 1513 - DNA, 517 bp, Homo Sapiens
cttgtataaccagaaagtaaggaaattgctcaaaaaacaaaactatgggagtgtctcagtccagtttgtgttgctagaacagaatacctgagactgggtaatttataaagaaaagtttgtttcgctcacaattctggtggctggaaaatccaggattgggcagctgcatctaatgagggcatcatactgcttcaacttatggtgggaagtggaaggggaggggccatgtgcaaagagatcacatggcaaaagaggaagcaagagagaaaccaggctctttaacaacccgttctcacaagaaataatctattcctatgagagtgagaactcaaccctttgggagggcattaatctgttcatgagggatctactcccatgacccaaacatctcccactaagccccacctcccaacactgctacattggggatcaaacttcaccttgagtttttgcagggatgaaccacccccataccataccattctgcccctagctccccaaacctcatgtccttctc

SEQ ID NO: 1514 - DNA, 464 bp, Homo Sapiens
attcacctgactgtttccagagacccagctaaagtcacctgcctgttctaaaggcccagatacagccaatcagccgatttcctgagcagtgatgccacctccaagcttgtcctaggtgtctgctgtgaacctccagtgaccccagagactttgctgtaattatctgccctgctgaccctaaagaccttcctagaagtcaagagctagccttgagactgtgctatacacacacagctgagagccaagcccagttctctgggttgtgctttactccacgcatcaataaataattttgaaggcctcacatctggcagccccaggcctggtcctgggtgcataggtatctcggacccactctctgccttcacagttgttcaaagctgagtgagggaaacaggacctacgaaaacgtgtcagcgttttctttttaaaatttaattgatcaggattgtacgtattcaaaa

SEQ ID NO: 1515 - DNA, 431 bp, Homo Sapiens
gtcaagtaggcaattggtggatagatcaactagagtccagtggggagatctgggcaggagatagaagtttggaaattattacatcatcagcatacaggtagtaattaaagccatgagacttgaataagtaactagagggaacgagtagagatggaaaagaaccagagactgaggtggggacaccccagcgtgttagaggtcggggggattgggaagaagaatgagcaaagaaaccaccagtgtgatcagaggaggaaagcaaagcagagtcctgtcctgaaaaccaaatgaagaaacggcctcagaaaggcaggaataagcacctgtgtcacacgctgctggagtgggtctcagaaaatgaggactgaggattgacctttggaattcgcagtatagagactattgatgactttggcaggcactttggtaga

SEQ ID NO: 1516 - DNA, 406 bp, Homo Sapiens
  misc_feature (237)..(345): n is a, c, g, or t
gctgtgatagttgagatgtaaaccaaaaataaaattctaagccacccaatccgactgaatggacccttcctgttgagcaaggacattccaaagtaaactgaaaagaccagcttaggccatgatgggaaggggaggtgtcaacatgcctcattctaccttcctccctctggaatccagacacaactgaccagcattaacattaaaacagagatcttaagctgggcacagtggctcatnnnnnnnnnnnnnnnnnnnnnnnnnnnnnnnnnnnnnnnnnnnnnnnnnnnnnnnnnnnnnnnnnnnnnnnnnnnnnnnnnnnnnnnnnnnnnnnnnnnnnnnnnnnnnttggccggacattgtggtgcacgtctgtcatcccagcaaggcagcgaatcgcttgaaccca

SEQ ID NO: 1517 - DNA, 495 bp, Homo Sapiens
ctggctgctcaggtctggactgggcctatgatattgagggtagggcctgtagtagtaagggtagagattatgggcttgtgggtggagcctgtagtagtgtgagtgagggggcttggagcactgtgggtagtggtaatggcactataggtagagcctgtagtggtgtgagtggggcctggcagttctgaagggccagagtctgtggacttatgaactgagtctaggtgtgcagatggggcagggtctgtagatgtggggacagagcctgttgtaccgagggtagagcttgtggcagagtggccagggtccagggcaggaggaacaggactggggtgctctccatgggtgggagctgcgtgcgtaggtgggctaggtccccaggctaggctttctgggccaacggactccactgaagcctcagccaaggcagcatctacactagcctcactgatgaggctcacagtccgactgtagggtgcatgcccatttgccagg

SEQ ID NO: 1518 - DNA, 545 bp, Homo Sapiens
ggggtacgcagggctggactgtaagtctaggcagacagtatctgaagtccgagatgcccaagggttagcccaaatagcagaattgatctttgcccctaagagagtctttttggtctctactcagtggtatattttgctctgggagacagccctgagcccacaggaatagaacaaaaagagagaggaagaaaagaggctgaccagtgaatgttattcatgagggctggcaagcaacattgcttaacttaatgtcagatgtttttgacattgctctaagttgtgcatgaaagaaattacaaggcctcagaattatttgcccaagtgtatcctttaaatatttttttctgcctctctgtttttttatactaggaattgagctggatgaagatgggtctctggatggaaacagtgatttaacaattagagggcgtctgctatccctggtagaaaaggtgacatatctgaagaagaagcaagcagaaaaaccagttgagagtgactccaaaaagtcctgtaagcagtatgagagtacactggcagaatgc

SEQ ID NO: 1519 - DNA, 885 bp, Homo Sapiens
ggggcagtgtagccgggtcagctggacagggtcatcctgagggtgcgactccgccgcgatggtgacccggttcctgggcccacgctaccgggagctggtcaagaactgggtcccgacggcctacacatggggcgctgtgggcgccgtggggctggtgtgggccaccgattggcggctgatcctggactgggtaccttacatcaatggcaagtttaagaaggataattaattacacaaacccttcacagactgctctggtgcctggtggtgctagctcctcccacctcagcacctgctgcatctggagcagcccaagcctcaggatggacaagaggaaacccacagctcagcttcaggcttcttatgtttctgaaaacagcttggatattttaatgcacgttgcattaaacctcactgaaacctgctccgtgcccggatgttgatcatgctggtggcttggttactgtgactgtagctggagtggcacaggtgacccaggcgtcctttcagctccagaatgttgcaagtctaggagagtgttccaatggctgacagaaactgcctatttgaaatggctcataagtagtatctgcagtgtgttcatccgttgctgccttaacaagtcacccacacgtagtggcttaaaagcaacgaacattcactctccacacagcctgtgtcaaccggggattttgggagtgatgtatctgggtgggtgtgggcccaaagtctctcctgagggtggcagttaagaacatcagcccaagcccccttccttctggagggaaggccttcaactgggggcctggaagcccacttttccaaggccaaggggcccttccaccgtgggttgtgccgggtggaacacgccacccagttttccta

SEQ ID NO: 1520 - DNA, 595 bp, Homo Sapiens
cagtactcactccagctcaagtgtccttagcacgagtgaccacagtttaatagaccacgctcagccctgagttagtttctagtattttttctgactttcactctaaggatagcgttgaaaaaagaatgcacgtgtgagttactaaaaagtcagaataatgtgcatgggaacagtgcagcaacatgctagaaaatcctcactgcactccagcagaggctagaggaatgccagtgttaccttacgcttctagaagcagagccactccagccagaacccattttgcagtcttctcttcgctcttcagcctgaaggtccagatgtagctggggcctctcagtttggttctatacacagggcactcgtaggtctgtttggtttcttgtctgtccacgggggtggcttttgcaaagatgaccggcatagggcatgccagctccttgagacgggcttcaacaatggttcctgcttgggtgtcccagcgggcgcctatggcaaaaacacagcggttgcaattgtgtggcagcttgctactaatgataatgatcaagttgtttgatgcaataaacattcaacattctggttttgtcataaaaaa

SEQ ID NO: 1521 - DNA, 550 bp, Homo Sapiens
aggtactttgacctctttctaaagccgcagaccctggtgcaatgctctggtggctagggatgtactcatgctcatatgtgtgcacgcttggacacccacctccatggacacctagccaccctgttgtgtgtccttatgccagttgagctgaatcttttccccagtatagtggaaagactgaggcttctgcctactgagcaaggttgggtgcttcatttgtgttcagtctgaattatgggaaagttagctcttcccagacctaagctgccttctctccctactttcagaagatcctagttccttccttcccgagtgatacccatgaactgccagtagaggctgctatcgttccatgtgtaaggaatgaactggttcaaggcgcgtcctacccagtcattttctttaccttatactaattcttcctgaataatgtcttcagtttcttgaggagactcctagttttggttttcaaattacttggagggctgcctaggaatctatctccctctgaaataaagtttcctcatcttccaccttgcaaaaaacaaaa

SEQ ID NO: 1522 - DNA, 2078 bp, Homo Sapiens
  misc_feature (1571)..(1612): n is a, c, g, or t
cgtccgccgcgtgggcgttaggtaccctttgtctctgccgggtatcaaaccagcagcgcctgaggtagcggtccggaattcccgggatatcgtcgacccacgcgtcggtcagcagccgggcgggcgctcgggcgggacatggcagcctgtacagcccggcgggccctggccgtgggcagccgctggtggtcccggtcgctgactggggcccggtggccaaggccgctctgtgcggcggccggagctggagccttctcgccagcgtcgaccacgacgacgcggaggcacctctcgtcccgaaaccgaccagagggcaaagtgttggagacagttggtgtgtttgaggtgccaaaacagaatggaaaatatgagaccgggcagcttttccttcatagcatttttggctaccgaggtgtcgtcctgtttccctggcaggccagactgtatgaccgggatgtggcttctgcagctccagaaaaagcagagaaccctgctggccatggctccaaggaggtgaaaggcaaaactcacacttactatcaggtgctgattgatgctcgtgactgcccacatatatctcagagatctcagacagaagctgtgaccttcttggctaaccatgatgacagtcgggccctctatgccatcccaggcttggactatgtcagccatgaagacatcctcccctacacctccactgatcaggttcccatccaacatgaactctttgaaagatttcttctgtatgaccagacaaaagcacctccttttgtggctcgggagacgctaagggcctggcaagagaagaatcacccctggctggagctctccgatgttcatcgggaaacaactgagaacatacgtgtcactgtcatccccttctacatgggcatgagggaagcccagaattcccacgtgtactggtggcgctactgtatccgtttggagaaccttgacagtgatgtggtacagctccgggagcggcactggaggatattcagtctctctggcaccttggagacagtgcgaggccgaggggtagtgggcagggaaccagtgttatccaaggagcagcctgcgttccagtatagcagccacgtctcgctgcaggcttccagtgggcacatgtggggcacgttccgctttgaaagacctgatggctcccactttgatgttcggattcctcccttctccctggaaagcaataaagatgagaagacaccaccctcaggccttcactggtaggccagctgaggccccaagtgcccaggcttggtcaccgggaagaacaactctcatcccacaattgctgcagaactcttctctccccatcatgggccacagtgggtctcttaatttgattgtggggttctttttgtggggaggggtggtataacttttcttcagaagacccatgtgggacacctccaaggctggcctcctcataagccctgcctacaccatgttccagtaaacctctccaccaaggaactgtgttcagctcccacaggcctggaggagtttcctggcctgtcacgtgaggtttgatcagtaaaccagtgcacgcttgnnnnnnnnnnnnnnnnnnnnnnnnnnnnnnnnnnnnnnnnnnggggggggcgcggactaaaaagaatactccccgagagggcgcccaaggtaaagccgggctacccagaggtttcttgtggacaaaggggggcccaataaaggagggcggcgacaataaaagagcacacaagcaggggcgcggcgggttaaacacagggtgcgcgaagccgggggaggaacaccctgtgcaacacgctggggagacccccttgcgggagaagggcagacccccttaatcctccggagggggggctgcaggcactttggggcgacgacaaattatctcataaaaagagagatttaatacggccacaaagggggaggaaattatataaaatttttaaaggggtggcatacagcggcgggggtaaacacaaaggcggagaaattatgcttggaggtgggtaaaaaaagttttgggataaccagggaatataagatttttggagaaattttttaaccaggag

SEQ ID NO: 1523 - DNA, 809 bp, Homo Sapiens
ggggggctttgggctggctgcagtctgtctgagggcggccgaagtggctggctcatttaagatgaggcttctgctgcttctcctagtggcggcgtctgcgatggtccggagcgaggcctcggccaatctgggcggcgtgcccagcaagagattaaagatgcagtacgccacggggccgctgctcaagttccagatttgtgtttcctgaggttataggcgggtgtttgaggagtacatgcgggttattagccagcggtacccagacatccgcattgaaggagagaattacctccctcaaccaatatatagacacatagcatctttcctgtcagtcttcaaactagtattaataggcttaataattgttggcaaggatccttttgctttctttggcatgcaagctcctagcatctggcagtggggccaagaaaataaggtttatgcatgtatgatggttttcttcttgagcaacatgattgagaaccagtgtatgtcaacaaggtgcatttgagataactttaaatgatggacctgtggtggtctaagctggaatctggtcacctttccatccatgcaacaacttggttcaaatccttgaaaatgaaatggaaactcaaatgggcatatggattccaatcccacaccattcgatcatagcacccccctatcaccacttgaaaactccttttggctttaaggggatcattgtgcaaaagcaaccgggaatgtgacattatgaaaggcccggtactggaaaaaccgcaacctgtttaactcacgaccccgaatggcttttctggggagaggcc

SEQ ID NO: 1524 - DNA, 619 bp, Homo Sapiens
gggaggtgggcgggatgcgaagagctatggggaaggattcgaattccggtggatttaaatcgcgggaggagaagctaccgcggcctaaagacctctgttgaacacagactgcagttccagccaccacagctaatctggatcatgaatgggagccaccgtggtcttggcaagtccgaaaacatagctgagtagctcgtctagaaaagagatttgtgttcagctgagttaaaagaagtatttacctcaaacctctcctcttgcacaaccaacccccgttataaaaggaagtgcaaaatggaataaactgattttaagtgaatacaagctgtctttatatacaaaagtaactcaaggatggtgatgtacccagtcatgctttcaactgatttgggaagcctacaccattcaccttaggttacatatgaggataacttaaaacattaagctatgcaaaaaaactccaagagaaacaatgatttaagagtttctcacacagaagcgaactctgtggatgctgagaaggaaaaaaatgagagtcaaaacaacttttttgaactgctgcctgcagaatcacttttaaaattttcagtcagcgacaagatgggccgagctcgatgat

SEQ ID NO: 1525 - DNA, 686 bp, Homo Sapiens
gcgacctagaggatccctttgctatatcaatactagtcaatgtggtcttttattatgtaaagtgcctgaataatttttgcaggctgaagcagaggacctggatggaggaacattatcacggcaacataattgtggcacaccactgcctgtttcatctgagaaagatatgatccgccaaatgatgattaaaatatttcgctgcattgagccagagctgaacaacctaattgcattaggagacaaaattgatagctttaactctctttatatgttagtcaaaatgagtcatcatgtgtggactgcacaaaatgtggaccctgcttctttcctaagtactacattgggaaatgttttggtgactgtcaaaaggaactttgacaaatgcattagtaaccaaataaggcaaatggaagaagtaaagatctcaaaaaagagtaaagttggaattcttccatttgttgctgaatttgaagaatttgctggacttgcagaatcaatcttcaaaaatgctgagcgtcgtggagacctggataaagcatacaccaaacttatcagaggagtatttgttaatgtggagaaagtagcaaatgaaagccagaagacccccagggatgtggttatgatggaaaactttcaccatatttttgcaactctttctcgattgaaaatctcatgtctagaagcaa

SEQ ID NO: 1526 - DNA, 462 bp, Homo Sapiens
actttgaacattagcattaagttggttaccgtacacatccaaaggcccagcatctcagaaaaatcattaggcggcacacctgtaccagagtctcacaagaataaaatatacaatgctacattgagtggttaaaaatacacaaaaaagtagttttaacaatctataaattttttatacttaaaatcatgattgagttgaaataaaaaagtgcatttcaattgctaaaaaaataatatcggtatagttaacacaagggggaaatcagtacattgagggatctgacaggatgctggaaaaaatgactcagggaagccgggcagcatgggctcctttggagattcaggagcggagctcagttccacctcactgcagttccctggggccaagcagccctcctctccccagtatctttcccatcttaagagatcctgtcctacctacctgtcacctccccaacccaaa

SEQ ID NO: 1527 - DNA, 1078 bp, Homo Sapiens
gggggaccaagatggcggcgccctgtgagggacaagcgtttgccgtaggggttgaaaagaattggggtgcagtagttcgctccccagaagggaccccccagaaaatccggcagctgatagatgaggggattgccccggaagagggaggcgtggacgcgaaggacacgtctgccacatcccagtcagttaatggatcaccccaagcggaacaaccttcattggaatctacaagcaaagaagccttctttagcagagtggaaacattttcttctttgaaatgggcaggtaagccctttgagctgtctccactcgtctgtgcaaaatatggctgggtcacagtggaatgtgatatgctcaagtgctctagctgtcaagcttttctctgtgccagtttacaaccagcttttgactttgacagatataagcaacgatgtgctgagctgaagaaagccttgtgtactgcccatgagaagttctgtttctggccagacagcccatccccagaccgatttgggatgttgcccctggatgagcctgctattcttgttagtgaattcctagatcgttttcaaagcctttgtcacttggacctccagcttccttccctaaggccggaggacttgaaaactatgtgcttgacagaagacaagatcagtcttctcctacacttgccttgaagatgaacttgatcaccgaactgatgagagaaaaactacaatcaaattaggctcagacatccaagtccacgtcacggcctgtattctctctgtgggtggctgggcgtgtagttcctctttggaatccatgcagctctccctgataacatgttcgcaatgtatgaggaaggtggggctctggggcttccagcagattgaatcgtccatgactgacctggatgcatcctttggcctgaccagctccccaatcccaggccttgaggggcgaccagagcgcttacctctggtgcctgaatctcctcggaggatgatgacccggagccaggatgccactttctccccaggctcagagcaggctgaaaagagccctggtcccattgtctctcgaactcggagctggg

SEQ ID NO: 1528 - DNA, 850 bp, Homo Sapiens
  misc_feature (799)..(807): n is a, c, g, or t
ggggtacgcgggcaagatggaggcgactacggctggtgtgggccggctagaggaagaggcgttgcggcgaaaggaacggctgaaggccctacgggagaaaaccgggcgcaaggacaaggaagatggggagccaaagaccaagcatctcagagaagaggaggaagaaggcgagaagcacagggaacttaggctgcggaactatgtcccggaggatgaggacctgaagaagaggagggtgccccaggccaaaccggttgcagtggaggagaaggtgaaggagcagctggaggccgccaagcccgagcccgtcatcgaggaggtggacctggccaacctcgctcctcggaagcctgactgggacctcaagagagatgtggccaagaagctggagaaactaaaaaagcggactcagagggccattgccgagctgatccgtgaaaggctgaaaggccaggaagacagcctagcctctgcagtggatgctgccaccgaacaaaagacctgtgactccgactgaggcatgccctgccccaccactcgcccatcaggcctgtcctgcaggggatggtcttgggcagggatgggggctaggcttgccatcacctccagtttggcttctgagcagagactccctgcccatcaagtctgaaacccccatggatgaggtcagctccttgtctgctgggtggcccctgccattctgaatggaggcagaaccagcaacaactctgggcgtgcctgtgtctgcacatgtggatgtacatatgtctgtatatatgtatatattttgaactttctnnnnnnnnntctggaaatagaaacaagtaaacccctgtgtgtggcaaaaaag

SEQ ID NO: 1529 - DNA, 1054 bp, Homo Sapiens
  misc_feature (521)..(616): n is a, c, g, or t
  misc_feature (743)..(764): n is a, c, g, or t
gctgggcacaagttcatatgcctatgagtcagtaaagactgaagtaatgtcctatgttgagctggttattttgatatatgataataattatctttgaagtagaacaattctgttaactggaaaatcacaggatatatccatcatatttttcaggacagatagtttttactgtggggcaaataggttaaaattacactatgttagttgcatttaggttttaaagcaaagaatctgtagagaaatctatgcaatatatagtttgtccagattagctttcatttggggaatgaagttctgaaatatctaaagcagtttactcatcaattgaaaagtcctccaaaaagagaactattgggaaaccatggtgtggtggtggaaaagaaaagctccctcagttttttggagggaataacttaaaaaaatacttaaatggctaagtttacttggtgcagttaagaattaaacttgtcaattttaacattgctgttacatctgaaataaacttatgtgatgttctggtnnnnnnnnnnnnnnnnnnnnnnnnnnnnnnnnnnnnnnnnnnnnnnnnnnnnnnnnnnnnnnnnnnnnnnnnnnnnnnnnnnnnnnnnnnnnnnnnttgggggccgccccgccccctaaaaactttttaaaacctttttttgggcccgggtgcccaaagggaaaggaaacggggccaatactggttcccaaggaaaccggggtacggaacaagggttggaatnnnnnnnnnnnnnnnnnnnnnngggggaaaccggaaggtttggaaaaaatcccaaaaggggtgttcgggggcctttccggggatcctttcaacgggggtccccagggggaccctcaaaaccaaattacgccccccgccccgtggcctttcttcggaaaaaacgggggggaaatccattttaagcttttccgcccgaagggggaaacccttcccaaaagggggtgtgataaacctgagaccccccggggggattcaagacccttgggcgccttgggaaaaaaatatttgcccccggggggaaaacgggggggc

SEQ ID NO: 1530 - DNA, 485 bp, Homo Sapiens
gggggcgcctcttcagcttcctgtaccagagcagccctgaccaggttatagatgtggctcccgagcttctgcgtatctgcagcctcattctggctgacaacaagatcccaccagacaccaaggccgcactgttgctgctcctgacgttcctggccaaacagcacaccgacagctttcaagcagctctgggctcactgcctgttgacaaggctcaggagctccaggctgtactgggcctctcctagactgcaggctgcagccagtccagagagaatagagcctgcccaggccttaagaccacctctcagcccagttcagttctgccttaccaaagattctgagactcatacccatttggagccagccccacttgctgccttacagggctgtccctgaggctggatctgttacaaatgagtcatgacatcatactgtaataaaagcagcttgttttctgcttgaacaatagctctgagagcaaaaaa

SEQ ID NO: 1531 - DNA, 1023 bp, Homo Sapiens
  misc_feature (453)..(453): n is a, c, g, or t
gcgcgggctgcaggactgaccccgggctgcgcggccccaccccgggcggtccgctccgttcccgccggtccccgcagccgccgtcttaggccagctggagcaggccgcgctcggccagcaggctctgggtgcggttgtagacatcctccaaggtgccggcggcccggagcagcgcggcccgcgcctccgcctcggtggctccggaacacgccagctccagcaggcggcggcgacccgggaaggcgagggaaggcgaggcggcggtctgtcggaccagccaggggtgatgcggacccagggccgcacggtaggcgtcgctgcactgcacgcccgcttccgggcctcccagcgcgccggtcgccacccggtggaggcagagctgggaccagcgcagcgcgcggtgcagcaggagcagcgtgcgagagcccgagctccgggtcgggtcccgggggnccgcccccggctgctccagcagtcccgccctccgctcccacgccgccatggccgccagcgaccagtagtgctccgcgtccgggccgtgcacccgagcctccaggtctgtcaccttggtgaaggcctccctagtggcgaaggcgaagacggagccgaggggagtcaggaattcgacgagtgccctccatcccgccaggtacggcgacagccccacatccccttcgggtttcagactggcgtggaaccgcctcatcatgcggcccagcatcccccgagggcccagacacggaggctgtttcctctccggggcctccagggttcccgactcctgccggacctggaagggcgccgtttcccctggaacgcagggctgcgccctgggtccgcagcccgagcgggcgcctaggctccgaacactgagataaagcagcagcagcgcgaagatagcgagaggaattgagtggctgaaccagtgccgcagggctgggggccgcgccgccactcccatgcctgctgctgggaccgccgccccctcaccagcgcctagccagtccgtgtcccatcccggga

SEQ ID NO: 1532 - DNA, 1442 bp, Homo Sapiens
gacaagtgatccaggccactacatactttctacagaagccagtcccaggtttgaggagcttaaggatgagacatcggcagagcctgcaaccgactagaggacctgggtcccggcagctctttgctcacccatctccccagtcagacaaggtttatacgtttcaatacatactgcattctgtgctacacaagccttagcctcagtggagctgtggttctcttggtactttcttgtcaaacaaaaccaatggctctgggtttggagaacacagtggctggttttaaaaattctttccacacctgtcaaaccaaaaatctatcagcccacgtggtgtggttggtgaacagtgcatgccaggaggaagcagtccctcctcaccagctctccagccaggacgatcacacagagatgaatggcatctgagtattacggcatccagagccactgctgactcccacttgcacgccaccattcagtcaccagactgggtgccctccgatgggtggaataagtctgcttcatgccaaggctgggctttgggtcccaccaagatgagttctctgtaagactgtggtggagttgcaccaggaggtgcctctgcctctcgacttgcaccctggtcatttgtaagggaaaagagctggaggtggggagagaaagatctccttcagttgggagtccttccacttcaacactggagaactgagccttgcatctctccaggttccaaggccacgcttggtgcacaggcaagacttgcttcagccccaggtgtggtgacttagacctaggaaaccaattatgagtggaaagtgaccctctagttcaactgtgccagaggaaacagccctccagtgcccacctgcctcactcctccctatcatgtaccgtgaaaaccccctctgatggcctcaaggcagtgcctgcaggccgaggcccttctgggggtttctatctttcttccaccagactccaagcccactctcctccaagactgtgttgtcttttctcaccaagagtattaacactactaagtctttcaccttaacttatgactcaggatttattcacgtcctgcccactctaggctcacaggaataaaatcaagtgctagacacactggctgctactaaggcactagcctctgtagctggtggtggcagcgtggggtgccgcccagcgtgctgggtcctggcagtgcctctgctgtgctgcacattgagccctttctcagtcagtggagtatcaagttgggccatctgtctactgacctggccttcatgtaagcagctgtgggctgcgggcagacaggagctcagagatgcagcatgaggcgcttagaaaaacctggccatttgctgcctctaattcccttttgctttgccatattgggctatgtattacctccttgaaataataaaagaataacattttctaaaaaa

SEQ ID NO: 1533 - DNA, 617 bp, Homo Sapiens
agaccaaaaccaagcccactcagacagctggacccagctcaccccagaagcccccaacccctgaagagaccaaagcagcctcaccagtgctccagaaagaaattagacattgagggggtacagtcaaaaggacaggacaatgggccggaagattctggggacacagaggatgagctgaggagggtgccagagcagaaggaacacagactgccccctggccaggaggagaatggggaagacccgtatgcaggctccacggatgagaacacggacagtgaggaacaccaggagcctcctgatctgccagtccctgagctcccagatttcttccagggcaagcacttctttctttacggggagttccctggggacgagcggcggaaactcatccgatacgtcacagccttcaatggggagctcgaggactatatgagtgaccgggttcagtttgtgatcacagcacaggaatgggatcccagctttgaggaggccctgatggacaacccctccctggcattcgttcgtccccgatggatctacagttgcaatgagaagcagaagttacttcctcaccagctctatggggtggtgccgcaagcctgaagtatgtgctatat

SEQ ID NO: 1534 - DNA, 543 bp, Homo Sapiens
gggccggcggcgtgacctgaccgcaagaggccaatggagtgtgggagctgaaagggtcttcgctggcggccggacagtactgcttttaaagagacagtgttagggatcttggaagcacagccaacatgtgtgacattgaagaagccactaaccaactcctagatgtgaaccttcatgagaaccagaagtctgtacaagtgacagaaagtgacctcggaagtgaatctgagcttctagtcactattggagccactgtacctactggctttgagcaaacagctgcagatgaagtcagagagaaacttgggtcatcatgcaaaatcagcagagaccgtggcaagatatattttgtcatttcagtggaaagtctggcacaggttcattgtctgagatcagttgataacttatttgtggtggttcaggagtttcaagattaccagttcaaacaaacaaaggaagaagttctaaaggattttgaagacttggctggaaaactcccatggtcaaaccccttaaaagtgtggaaaattaatgccagtttta

SEQ ID NO: 1535 - DNA, 266 bp, Homo Sapiens
gtggagatccagggttgccagaagacgagacaaccgtgattgcatgtgcggaggttcctcgatggaagcgcagcccgcgcgccccctcagctggcctggccaggccctatgaaggtcacgcgaaaaccctgctgcgggcttcttagcgaccgcattacgtggactagcgggcaagaaaagcctggtcggcgctgccctcacaggtaggcggtcttcaatcacgttttaaaatcttgttgagtgattaagcaatcttcgatagtccc

SEQ ID NO: 1536 - DNA, 1608 bp, Homo Sapiens
  misc_feature (1153)..(1284): n is a, c, g, or t
  misc_feature (1294)..(1307): n is a, c, g, or t
  misc_feature (1393)..(1512): n is a, c, g, or t
  misc_feature (1527)..(1537): n is a, c, g, or t
tcaagattcttttaaaggagtactgaagaatactttcctaagtttgtctctaaaatcttagcggtggacctgggagatttgagaagcttccagaaacagtttaaacaagccagcgctactggagaagaggagcaacacctgtgccgcggccggaggagttttgttgttggttttagcttccagtggcttctttctgcggggcatcaggctgctggggtagccgcccgccgagcctggaagctgctcgttctccgctggactcagaagccaagctgcttcccgcctagactcggcgcagggccccgcaccggtgaggaaggtgcttttggccccattgcgaggggccttggccaggactggccctgtggccaggaggcgagaaggtggctgttcccggattgacggctatttcccgggggcctttggaagatttggtggaaggacaagagggcctgtccctgtccccgtccccaggaggtaccgacagtccctgtgctggttagacacggagcagctgcacaccgaaagcccaaattgggagctctgcctgccggcaactttgctgatggggtgattgctgcttctggggggtaaggaaacaagttacagaaattaccgcgttctgtgtgaagggactgagggtgtggtgtcattggcagagggtcattttaggagagctgccccagcccctcgaacgcctggcttggggtgtcattctgcctggcggccaggcctccagcttcccctgccccgggcctggggctgtcactggccctgatccgaacacctccagattccggcttctacatgggacagacggggacgcacaggccaccttccttctggcagggactcttatttattcccattgctctagggctttcggtttccccttcttccggtaggccgcgtagaggcatgcaccgggtaggtttccgcggtgaccccgcggcggcctgagggacgctccctgccccatcccggctgttgggctgggccgctttgcctctgcttcgccctgtgctgtgttctccagctttgtagcagcagccttgacaaacccaggcgcactgtaccaaggcaatgtaacttttgattttcggtcaatttaagttcttttgtcaccaaatattaataaacagttttgacttcnnnnnnnnnnnnnnnnnnnnnnnnnnnnnnnnnnnnnnnnnnnnnnnnnnnnnnnnnnnnnnnnnnnnnnnnnnnnnnnnnnnnnnnnnnnnnnnnnnnnnnnnnnnnnnnnnnnnnnnnnnnnnnnnnnnntgttgggcgnnnnnnnnnnnnnnaaaaaattttttaaaacttttttttgggggcgcggccccaaaaggaaaggaaaaggggccaaatttgttccaaagaaaacccgggnnnnnnnnnnnnnnnnnnnnnnnnnnnnnnnnnnnnnnnnnnnnnnnnnnnnnnnnnnnnnnnnnnnnnnnnnnnnnnnnnnnnnnnnnnnnnnnnnnnnnnnnnnnnnnnnnnnnnnnnttctatttaaatttnnnnnnnnnnntgcccttcttggaagaatgggtgaaattcataaaccttccggcggattgggaaccccccccaaacgggttg

SEQ ID NO: 1537 - DNA, 194 bp, Homo Sapiens
ggagaagcgggcacaggcaaatgcccgccagactttgaaggagcatgtgcaggactttgccatgcagctgagcagcagcatggcctgaggggctgctggactgaccgaggggctgcccagcaagactgcagcctcttcctccctcagatcccaccagacccaccaggggccataataaagcggattctagacgg

SEQ ID NO: 1538 - DNA, 1649 bp, Homo Sapiens
gggagaccaggtttttaaagtgtgtgcaaaccacgttattactaaaacaatggaattaaagccctgaaatgtttcaaataatgctttagtttggactgcctcagattatgctgatggagaagcaaaagtagaacagcttgcagtgagatttaaaatctaaagatatgtagctgatttgtgttcaagaaaacatttgaagaatgtcagcagaatgtaagtgaaatctccagaataggacaagtatcactggcagcagaatgatcaataggagaccaatcctgtggtgttttttgatgtttgtgcggacggtgaacctctagggcggataactatggaattattttcaaacattgttcctcggactgctgagaactacagagcactatgcactggagagaaaggctttggtttcaagaattccatttttcacagagtaattccagattttgtttgccaaggaggagatatcaccaaacatgatggaacaggcggacagtccatttatggagacaaatttgaagatgaaaattttgatgtgaaacatactggtcctggtttactatccatggccaatcaaggccagaataccaataattctcaatttgttataacactgaagaaagcagaacatttggactttaagcatgtagtatttgggtttgttaaggatggcatggatactgtgaaaaagattgaatcatttggttctcccaaagggtctgtttgtcgaagaataactatcacagaatgtggacagatataaaatcattgttgttcatagaaaatttcatctgtataagcagttggattgaagcttagctattacaatttgatagttatgttcagcttttgaaaatggacgtttccgatttacaaatgtaaaattgcagcttatagctgttgtcactttttaatgtgttataattgaccttgcatggtgtgaaataaaagtttaaacactggtgtatttcaggtgtacttgtgtttatgtactcctgacgtattaaaatggaataatactaatcttgttaaaagcaatagacctcaaactattgaaggaatatgatatatgcaatttaattttaattccttttaagatatttggacttcctgcatggatatacttaccatttgaataaagggaccacaacttggataatttaattttaggtttgaaatatatttggtaatcttaactattggtgtactcatttatgcatagagactcgtttatgaatgggtagagccacagaacgtatagagttaaccaaagtgctcttctctagaatctttacacctcctgtgtggttacaagttaactttgtaagtagcgtaccttccttccttaaaatatctagcttcctgtgccctttcatagatattcgattaatttttacattttaaacaagttgactatttcctttaggggttttgtttcaaacttttctgtcatctgtctctactacctcagaaactgcagcttggttctgatgatagaaattgaatttttccttgtagttattgtgataaagtatgaatatttttagaaagtctataccatgttctttcgttcaagatttgctttatacaagattgttgcagtacctttttctggtaaattttgtagcagaaattaaatgacaattcct

SEQ ID NO: 1539 - DNA, 309 bp, Homo Sapiens
agggaagaaaaaaagtaaacataagatacagtttgtgccatcagggaacacacacactgtttggcaatataaactgtatacacctgcagaagagggatgaaagcaccttttccgtatgtatatgattgcctttaccatgtcgtaatgaggtttgtgatttaattttctatttctcccaacatcgagaactcctccatggcgaggattatttctcacatcctctagccctagcacactgactggaaaataactgatgctcagggagtgtttgtgaatgtaatgggaggcaacaggcagaggcagcttaac

SEQ ID NO: 1540 - DNA, 684 bp, Homo Sapiens
  misc_feature (43)..(43): n is a, c, g, or t
  misc_feature (48)..(48): n is a, c, g, or t
taccctatagcagttctgttgaaaaccagaatcaggagctgcntgagnatgtaaccctgccaaaaagagaaatacctctctgaacaggactttgtgtctgtgtttggcatcacaagagggcaatttgcagctctgcctggctggaaacagctccaaatgaagaaagaaaaggggcttttctaaagcaagaaggcctatacctattgcaaggccacagaaaagagcagatagtgccaatatcaggaaataatttatccaccaatttctgcctgacattcagctacttaatttagatataatagagtctgcaaatcacggcatgttctccattttttctcatccttgcattccttgcttgttatatacctaaaatgttaaccatatagttttttgggttttgtggccctctagctaaagcctcagcagaaagcactaaaactgcataaatctggagaaatcaaaagaaagagaaccaaaaaacaatgcttaaaatgtttaataactttatgtttaatattataccaggacctacctttgttttcaattttaagatgattatttctaaaatctatttagcctgtaaatcattgaaatcatatatgcactccataggcaaaatccaaatacccagatctgtaatgtgtcaaagcatttttcacttttcaaataaagatacctataatg

SEQ ID NO: 1541 - DNA, 701 bp, Homo Sapiens
  misc_feature (520)..(544): n is a, c, g, or t
  misc_feature (648)..(656): n is a, c, g, or t
cctgtctcctgtaaaagaagtgacgcctggtttcatctggccgccagatcggggctgtggccgccagccaaggatgaacggtcatcacgcagccacagtgtattccagctacagatttctggggagcactccagcccgaggcctgcagtgtggggccccctcagtcttgtggacctggccgggagtgagcgacttgaccccggcttagccctcggccccggggagcgggaacgccttcgggaaacacaggccattaacagcagcctgtccacgctggggctggttatcatggccctgagcaacaaggagtcccacgtgccttaccggaacagcaaactgacctacctgctgcagaactctctgggtggtagtgctaagatgctcatgtttgtgaacatttctccactggaaagagaacgtctccgagtccctcaactctttacgctttgcctccaaggtgaaccagtgtgttattggtactgctcaggccaacaggaagtgaagacggatccagatctcnnnnnnnnnnnnnnnnnnnnnnnnnccctatgtctatgtatcgggtgaggggtgggagggttgctggagggtgctttattgggtggagggcaccatgtcccagggctatcaaataaagaatagtttggnnnnnnnnnaaataaaggttttattagcatttgcccaagaaggcagatactttc

SEQ ID NO: 1542 - DNA, 229 bp, Homo Sapiens
caggtggagggcatgggagaggaaggtggctgctgcacggaggaagtgaaactccatacttgcacatctgcgcatgtccaacagaaatacaatgtggctactcatgccattttaaaatttctaggagccacattaacagagaaagcaggtatgcttacccaaaataccatttcgacatataaacgtgtaacatttttttccttactaaatctgtgaaatctaagtgtgc

SEQ ID NO: 1543 - DNA, 531 bp, Homo Sapiens
gggaactcggtgaggcttttcacaggccaccgtggccccgtgctttctctcgccttttctcccaacggtaagtacttggcgtctgctggcgaggaccagcggttgaagctgtgggacttggcctctgggaccctttataaagagttgagaggccacacagacaatatcaccagcctcaccttcagtccagacagcggcttgattgcctttgcctccagggcaactcggtgcgcgtttgggacatcaggaacacttactgcagtgcacctgccgacggctcctccagcgagctcgtgggcgtgtacaccgggcagatgagcaacgtcctgagcgtgcagttcatggcctgcaaccttcttctggtgactggaattacacaagaaaatcaggaacattaattttttaactttgttggaacgaactggggtaacagtggaaagcctccagttgcaatccttcaatgagctgagattgaatcattgactgtgaaagtcgacgcggcagcgaatttagtagtagtagtagtaggcg

SEQ ID NO: 1544 - DNA, 298 bp, Homo Sapiens
gaaacgcgcgtctgaaggagggtgccagcatcctcaggacactgactcaggccctggagcatcagggcgtcacagcttcagcacaaagtgccaaagggctgaatgttcttctggaagaaagccttccaaatatgccaacaacttgttcttaaggggccttcctgattttggagggaggtggtctttcagctcccaggtcactcgtgacttctttctggtcacaccaggccctataaccagaaccgtccacacagctccacgctgaccccagtagccagccctccatgccccaatggtg

SEQ ID NO: 1545 - DNA, 473 bp, Homo Sapiens
taaaatggggcaggctgcagatggagcaggtttgcagagaaagatcagaaattttgttctggccatatttaggctgaagcgtctttcacatattcacgttaagaagtcaaaaaagtagttggagatgtctgaggtggaaatatacatttaggagtcttaagtagctacacagtattttattaaagccctgtgactatttgtgacaacaggcgggtgagaactgagccttggcacattctaaattcataggctggtgagaagagaaaaccaacacaaatttaaaaacaactgaaatagaaaccagaaggccagcggtatagaagggaaggcaacagtgtgtggtgtcctcaagaatcaaatgaaggaagaatattaaaaaaggaggaataacaaattacatcaaatactgccaacaggttaagatgtgacttgagtgtcagctatgacttggaatatttgcttgtgaaaaatcc

SEQ ID NO: 1546 - DNA, 241 bp, Homo Sapiens
ttgagtggtgtgtattcagtgtggactattacaaataatgctgctatgttcaatcttgtacaggtcttttgtggacatatggtctcactcctcttaggtatataccgagtagtgaaactgccaggtcatgggagtatacacgtgtccaatttttgtgcattactaccagaaccatgaccacccctagtttccctgcctttatttcctttcatctatttactttgggctttctttgttccct

SEQ ID NO: 1547 - DNA, 354 bp, Homo Sapiens
gtgccatgctgctgggtgacaagtaaaggagcaggtgctaggcaagacctcagcctcaaacatgtgtacactctgcttggagatctgagattcccagagagcagcatagtataataatccaggctccagagctggacattctgggttaaaccctactctccgctgccaactctgatcttgggcaagtcatttaacctctctgcttcctaatgcttatttataaagtggagataattgtttctactgatataagatataagtgagttaatatatctaaagtgtttagaatggtatgtaacatattctgaacactattgtattattatcatcaacactgggatcacttctttttac

SEQ ID NO: 1548 - DNA, 516 bp, Homo Sapiens
gtgattccttaccacttaggaagatacattactccttgcccgaattaatatcccgttgagtcgaatggatgttcgacactcttctggattggggcccccaacgccagaccctcttcagaccccacgcgcaaggagaacctccaccccagatctcccccggtggctaattcgggttccacggggttctctcgccgagggagtgggcgtggaggaggtcccaacccctgggggcccgcgtgggatgccgggatcgcccctccggtcctgccacaaaacgagggggcatggcctctgcgagtcactctgctacaatccagcttctaatccgcccaaaagcggcagccaatcggagcgcgaggacgtggtctggaggtaccgccggagatctgggaccactcagggcatcagggggcgtggtctggtccccattgcgggcccgggaggggaatggtttctatggccaaagtttggttttctcaacactgtctaaatttggattaaaactttgaactctta

SEQ ID NO: 1549 - DNA, 362 bp, Homo Sapiens
ggagaacgctcttgatccaggagccatgtgctctccaaggctgacttcatgctctggcagacagcggtcctgggcatgatgctgcgaggctgggagccccagcatccgttctcaggactgaacatcaaacggcggcggtggagaaaatagctgggcaggaagtgaccgagcatcgtgaagaagggggcagccacctgattcattgcctgctgagccggcctgcattcttgagacacaatacatatattttccagcccatcaagggataaatgcagctctgccctggctgtggggattatccctggctgtgtgatggctgaaagaataagggctccttctgttcccaaaagccagctaataat

SEQ ID NO: 1550 - DNA, 343 bp, Homo Sapiens
gacacaggaaagaagactggccaaggcggactgcagggtgcaggcacagggaccaccacgcctctctacctgtgtgtccacagcctggaggggcagaagcccaggtcaggtcacatgtaaggcaggagcaaggatggactccaggaagaccccgttacagctggctgagatgaattcactaactgcttttgcagaagtctaatgctagaagtgacctttgttttgaaagaataaatgctctggacagacagacacgccacccagacagatgaagctgcagacctgagaaagtggatgtccaaggtcctgccttgatctaacagtggtgatattaataattgtc

SEQ ID NO: 1551 - DNA, 395 bp, Homo Sapiens
  misc_feature (293)..(307): n is a, c, g, or t
ggaagtacttccttggtgggtgagacatcctggaggttaaaagtgtgtgattgagacacacaactgagtgtgaagtgaaagtaggggagtgcaagaaatttccactcgtgggggttgaggctccagggaaaatggtgcaagaaatctctagtaggagaggttgagccccacagagtctccagggaaaaagttgcaagaaatctatagtaagagaggttgggtcccatagactcagaaaactctgggaaacacctaaaacttacaggaatgggaaataccccaagcaaagcagnnnnnnnnnnnnnnngacaataaaattccctccaatagcccactgaggaaatacgagagatctaagggaaatgataagtaaagaaattacaggcttgatgcag

SEQ ID NO: 1552 - DNA, 276 bp, Homo Sapiens
accagtggggcatcaagaatagactagggcctcagtcttacacttcttgaccacacctgaatcttaaaggcatttgaagtctacatcctacgttaaaaggttctacttgccagcattttagggcgttaaacaattttctgtttgggggagaaacaatgggatttggcagcttaaagggttttaaatggtacaaaagttaccaaagcaaaaaactttaccttctacctgcctctttttcacagagcctcagcagcttggcagtctcatgccccactg

SEQ ID NO: 1553 - DNA, 1813 bp, Homo Sapiens
  misc_feature (70)..(159): n is a, c, g, or t
  misc_feature (1101)..(1103): n is a, c, g, or t
  misc_feature (1105)..(1111): n is a, c, g, or t
  misc_feature (1113)..(1114): n is a, c, g, or t
  misc_feature (1116)..(1118): n is a, c, g, or t
  misc_feature (1120)..(1120): n is a, c, g, or t
  misc_feature (1122)..(1122): n is a, c, g, or t
  misc_feature (1125)..(1125): n is a, c, g, or t
  misc_feature (1138)..(1138): n is a, c, g, or t
  misc_feature (1308)..(1318): n is a, c, g, or t
  misc_feature (1506)..(1506): n is a, c, g, or t
  misc_feature (1694)..(1694): n is a, c, g, or t
  misc_feature (1699)..(1699): n is a, c, g, or t
  misc_feature (1703)..(1703): n is a, c, g, or t
gggggcttccccagtgcctatcttctctgatagtcatggagaggttacactaattcattggagatgtaannnnnnnnnnnnnnnnnnnnnnnnnnnnnnnnnnnnnnnnnnnnnnnnnnnnnnnnnnnnnnnnnnnnnnnnnnnnnnnnnnnnnnnnnngaggcttttttagaggaagaccaaaaaattcaatgtcttaaaaatatatttaatggcaatgcaaaagtcttcctgcttccgtgctgaactttagaacagaggattgtattgcaagacaaagttgaatgtaaagtgatctccctgaacatttttaaggttttacttttctgaaattatacatcacagcagtgcataggccatataatgttagctggaaggtcaatttcagtgtatgatatactttattaagatgtataaaacatcctgaagtttttatttagttttgggaataggcatcaatgggtggtatttgctttgtaactccccccaggtacgatagggactgaatatggaccctgctgaaagcagtgtattgacgcatatttaactcgccctctatccgtagagtagtcatgacactatacagatggttcgtgttcatactgcagcttaaaacaagcaaaatacacagatgataatatgctaaattttcctctatcctgtacatttcacaaaaaggcatatgcaatatttacatttttaatttagtttacagaatggaaccaaaatgtataaatgttatgtttgctaaaacttcacaatgtatattgggtctttgtacattttgcctgacttaccttaaatttaaaatattttttgctatataaactttaacagttattaaacagtgttttctttttgggtacgtattgtttctggatatcaagatgttaaatatatttcttgctattgtgatatgacaagagacttaacttatcttgctctgtcttccactgtacacgctgtatataggggtcaatgtgatgctgctggagacgagaataaactggactagaatagtgcattgtatttagtctgtattgatcatggatgccctccttaatagccatatgcaataaaataaagtacattatttatgannnannnnnnnannannnananaanaaaccatgtcggnccgcctcgggccctccaagaaacctttcttagaccatttcgttttgggcgccgcggggccccagttaagggaaaggtgaaacactggggccataagctgggtttcccctaaggaagaatccctgggtcaatggaactaagtggctttggggaatttccccccccccaatnnnnnnnnnnncggcccccggggggggcaaaacccgaagacgggtttctttgaaaccaaaatccccaaaaaagggaaagttttcctggagagggtccattttaccgcgggaaatcttatttctcaaccagggggaagttctcccaaaggccaagacgcctccgaaataattccgacaaatttctccccggcccccccgncccgcctgtgtgccaatatttttataatagcgaagaaagaaaaataggggcgtgtggtaaatattttcccactcttacagaccatatattttttggggccgcccacacaatgtgggtggaaaaacaccccatctttctctcactaaataagcgggggcgccacttggtggaagtgaagaaaaaacccncgcantaanaaactttgcctgcccactagtggtgaggccgagatatatttctagaagacagcaaccaccctcgttagtttgaacttcgccccaccttcgttgtggtatgtaggtacaac

SEQ ID NO: 1554 - DNA, 539 bp, Homo Sapiens
cgggtgggcgcaaggaagaggaatcggaggcactcggaagttgaaacagattctaagaaaaaaaagatgaagctcccagagcatcctgagggcggagaaccaaaagacgatgaggctcctgcaaaaggtaaattcaactggaagggaactattaaagcaattctgaaacaggccccagacaatgaaataaccatcaaaaagctaaggaaaaaggttttagctcagtactacacagtgacagatgagcatcacagatccgaagaggaactcctggtcatctttaacaagaaaatcagcaagaaccctacctttaagttattaaaggacaaagtcaagcttgtgaaatgaacatttgtgtatttaaaaattgaatccattctgctgacttcttcctttcactgctgtttataaaatgtgtaatgaattctaacaactcaaattttgctttttgaagctgtatttttaagttaagaaaaaatatatttttggtataacttttatgagaaaaataaaatatattctggtccaaacttcaaaaa

SEQ ID NO: 1555 - DNA, 392 bp, Homo Sapiens
gggtccactcggactacctctgttttccatttcaaattgtagggggaggggatggaacacttccagtgatggtaagagatctgttatgaaacgaaacaccccccgtgttaataacttggtctgaaatctgtttttatgagccgggccccctgtgcctctagtatacttgtattgactctcatagttacccttttagttttactgtgttctgtgaaaatttgtaattggttgagaatcactgtgggcgtccattcttattcaactaaatctccacaggttttttgagctggtgtggattagtttaactcttgtattcaaccattagtgctaccaccttctcacattacaatacaattactggaagcaagtactgcatttcctatgcaacaaga

SEQ ID NO: 1556 - DNA, 793 bp, Homo Sapiens
ggtaattaagcaagaggttcttttctaaaagtggtatctgttatccacaatgtattttagttattcccacaagtcaggggtccagataaaatgagggttatcagctaactgatatgctatcattgaggttcatcaatgaatttgtacatttctagttccctttggtgaagggaaaaatgatgattttgcaagacctagattttggcttggtttcttgcctccttttttggcagccttcatcttctcatctcccaaaccccctgagcccgtagggttttcatagtggacaaagaacttgtggtcttttaaaactgggactgatacttttttgagagagtatcgtgtcgaaagtgtgatgttctaccactttaccaataactaattttaaatacacattgtcctctcgatttttggaccaaacagacgctcacagtggaggcttatcaagggttgcattggggaagaagcctctccctctctgtcagcaccagctggtaaaggtgactgtacagatgtgcattttccttttggtataaatggtccacagcactaactggtaaggcttattgtacagtatattgtcagtattcttctggttcagcataccttatagttcatatataacctgtattaattgtatagattgtgcattaaaagctgttaccaagttgtcagaacataagagcgaaaacaaggtcatatgtaatattttgtttgtaagtatcctttgtatcatagcaaaggaaatgttttaaaaaatcaactgtaataaagtaattttagtacacaaaaa

SEQ ID NO: 1557 - DNA, 942 bp, Homo Sapiens
  misc_feature (866)..(866): n is a, c, g, or t
gggagaatagccagatctcagaggagcctggctaagcaaaaccctgcagaacggctgcctaatttacagcaaccatgagtacaaatggtgatgatcatcaggtcaaggatagtctggagcaattgagatgtcactttacatgggagttatccattgatgacgatgaaatgcctgatttagaaaacagagtcttggatcagattgaattcctagacaccaaatacagtgtgggaatacacaacctactagcctatgtgaaacacctgaaaggccagaatgaggaagccctgaagagcttaaaagaagctgaaaacttaatgcaggaagaacatgacaaccaagcaaatgtgaggagtctggtgacctggggcaactttgcctggatgtattaccacatgggcagactggcagaagcccagacttacctggacaaggtggagaacatttgcaagaagctttcaaatcccttccgctatagaatggagtgtccagaaatagactgtgaggaaggatgggccttgctgaagtgtggaggaaagaattatgaacgggccaaggcatgcatttgaacaaggtgcttgaagtggaccctgaaaaaccctgaatccagcgctgggtatgcgatctctgcctatcgcctggatggctttaaattagccacaaaaaatcacaagccattttctttgcttccccctaaggcaggcctgtccgcttaaatccagacaatggatatattaagcgttctccattgccctgaaggcttcacaggatgacaggacaggaagctgaaaggagaaaaggtacatttgagagaagctctagccaacaatgtcctcacagacctatgtctttcggatatgcagccnaaggttttacccgaaggaaaaagggctcctgttggaataaaggctccttgaggttattaaaaaaagggccttgcag

SEQ ID NO: 1558 - DNA, 865 bp, Homo Sapiens
  misc_feature (40)..(40): n is a, c, g, or t
catctgggcaaaaaaaaggggaaaccagggtaaggagagnagtgacattttaaacacattactaaaaatgtttaagcttttatttacacatccccttctctcagtttcccaggttatatgaacattacagcaatagaaaggggttatcatcacagcatccccttgcaaattccagtttacaggtaacttggtcaggggaaaaatatgggtcaacgaagtaagatctcagctctcccataagctattgctctcttcttctctttcccccttctcttaatgttagctgcctgttacagagagggatcatcaagactgtgtggacatgctagctgaattgacagggtgggttccagtgtcctgtgaagaaccagcaaggatgctttttataattccaaccattggcttcacatcactgaggtaacaagacttaatgttaagggtaaagacaccacgccaccctagtcagtgacatgtactccactttccaggaagacctgggccaaatgaccaagctttgcaaaagaaacctgggaagagcgttggaaaaagcagactctgagttggcttgagtctcctcgtgcatagaagcattcactcatccatgcagatggcaacaaggcaggacactcagaaagcataagatcaaggtactgctcttatctgcacctttcattcaagctcccctcaagtgctccaaaagaacagagctttgggtattgcttcattaagaacacagtaactgcagtttaaaagccattgcattctttagggtcagtttattataacttatcctaccagaaagaatcacagtttaaggccatttatcatgtgcactatgtagtaaacaaaaccttgtcctaagctc

SEQ ID NO: 1559 - DNA, 1069 bp, Homo Sapiens
ggacagcactgtgtctttcacatgctccactctggaaggtttatgctctgagctcaggatagttggggaacacatttttaaatcttggttttaaacaaaaagagaaatttattaaaatggagatataattgtgcatggtacatatatttctgaaaagttatgtataaatcaattatgttaaaagcgccagaagttactttttataagtgaactattacgaataatttcataaagcaaataaccacctctagcttatctgtcaggtatatcagaattctcatatatcatagtctcataagacttggttaaagcagatctatcttaggtaggaaaaaatagtaatcgattatacttagctgcttttatctgtagtgtgggtgactttttataactattatgttttataatgtcttcctgagagaatttcctaattttgtagttcatataagagaaatacaattttctagcattttctgaccttacaataaatcaattatgaatgcattttaacaaatattaaggtaggataaaccaacagaataaaaagttggtatttacttacattgaatatcatgcaaataaactcagaaaatgtcaccaaatactgtgggctatatttctcaatgatagggggaagaattcaaccttggagaaaatgaccagatcactttactgcttatatcttcagtattagaaaaactgcatgtatgattttaatagaaatgctttttataaagctaacattcagaaatgggataaaatgcagtaacatctttcctttgtgcattaaattcccttctaattctaaaattgacatttgtatcttgcttaggatttaacattgttaattataatacttttaatgactagttttaatctcattattaagaagtagaaaacttactaaaaaggaaactaaaaataaatgttgttttgcagattattgtttgtcttttgaggattattgttttttaagtagtgtgcatcaattcccatcttttgggcactcagcatgtatattgaaatatatatacatgtaaaatatataataacaacctcagtctgaaaa

SEQ ID NO: 1560 - DNA, 383 bp, Homo Sapiens
tgcctggcccaaaaggttcttatgtggtagaatcaagccctcatttgttgcttttgtgaacttttggtagggaacgagaaaagatccattaaattctgagaaaacttcttttaaacctccaccttttggggtttttggagaaggttatcaaaaatttcatggaaggaccacattttatatttattgtgcttcgagtgactgaccccagtggtatcctgtgacatgtaacagccaggagtgttaagcgttcagtgatgtggggtgaaaagttactacctgtcaaggtttgtgttaccctcctgtaaatggtgtacataatgtattgttggtaattattttggtacttttatgatgtatatttattaaacagatttttacaaatg

SEQ ID NO: 1561 - DNA, 828 bp, Homo Sapiens
ggggactgattacgtagcgggcggggccggaagtgccgctccttggtgggggctgttcatggcggttccggggtctccaacatttttcccggctgtggtcctaaatctgtccaaagcagaggcagtggagcttgaggttcttgctggtgtgaaatgactgagtacaaactggtggtggttggagcaggtggtgttgggaaaagcgcactgacaatccagctaatccagaaccactttgtagatgaatatgatcccaccatagaggattcttacagaaaacaagtggttatagatggtgaaacctgtttgttggacatactggatacagctggacaagaagagtacagtgccatgagagaccaatacatgaggacaggcgaaggcttcctctgtgtatttgccatcaataatagcaagtcatttgcggatattaacctctacagggagcagattaagcgagtaaaagactcggatgatgtacctatggtgctagtgggaaacaagtgtgatttgccaacaaggacagttgatacaaaacaagcccacgaactggccaagagttacgggattccattcattgaaacctcagccaagaccagacaggggtgttgaagatgcttttttacacactgggtaagaagaaatacgccagtaccgaaatgaaaaaactcaacagcagtgatgatgggaactcaaggttttgtatggggaatgccaatggtgtggctgaatggaacaagaaaactttttaaaagtttttgtccagaaaaagaccaactttttcaaagcttgcacctggaccacccctgggtccctgaactttcccct

SEQ ID NO: 1562 - DNA, 2087 bp, Homo Sapiens
  misc_feature (1296)..(1407): n is a, c, g, or t
  misc_feature (1411)..(1439): n is a, c, g, or t
  misc_feature (1444)..(1444): n is a, c, g, or t
  misc_feature (1450)..(1463): n is a, c, g, or t
  misc_feature (1482)..(1490): n is a, c, g, or t
  misc_feature (1543)..(1603): n is a, c, g, or t
  misc_feature (1628)..(1636): n is a, c, g, or t
  misc_feature (1715)..(1759): n is a, c, g, or t
  misc_feature (1774)..(1774): n is a, c, g, or t
  misc_feature (1786)..(1795): n is a, c, g, or t
  misc_feature (1989)..(1997): n is a, c, g, or t
ccacgcgtccgcggacgcgtgggggcagcacgactcgcgtagccgtgcgccgattgcctctcggcctgggcaatggtcccggctgccggtcgacgaccgccccgcgtcatgcggctcctcggctggtggcaagtattgctgtgggtgctgggacttcccgtccgcggcgtggaggttgcagaggaaagtggtcgcttatggtcagaggagcagcctgctcaccctctccaggtgggggctgtgtacctgggtgaggaggagctcctgcatgacccgatgggccaggacagggcagcagaagaggccaatgcggtgctggggctggacacccaaggcgatcacatggtgatgctgtctgtgattcctggggaagctgaggacaaggtgagttcagagcctagcggcgtcacctgtggtgctggaggagcggaggactcaaggtgcaacgtccgagagagccttttctctctggatggcgctggagcacacttccctgacagagaagaggagtattacacagagccagaagtggcggaatctgacgcagccccgacagaggactccaataacactgaaagtctgaaatccccaaaggtgaactgtgaggagagaaacattacaggattagaaaatttcactctgaaaattttaaatatgtcacaggaccttatggattttctgaacccaaacggtagtgactgtactctagtcctgttttacaccccgtggtgccgcttttctgccagtttggcccctcactttaactctctgccccgggcatttccagctcttcactttttggcactggatgcatctcagcacagcagcctttctaccaggtttggcaccgtagctgttcctaatattttattatttcaaggagctaaaccaatggccagatttaatcatacagatcgaacactggaaacactgaaaatcttcatttttaatcagacaggtatagaagccaagaagaatgtggtggtaactcaagccgaccaaataggccctcttcccagcactttgataaaaagtgtggactggttgcttgtattttccttattctttttaattagttttattatgtatgctaccattcgaactgagagtattcggtggctaattccaggacaagagcaggaacatgtggagtagtgatggtctgaaagaagttggaaagaggaacttcaatccttcgtttcagaaattagtgctacagtttcatacattttctccagtgacgtgttgacttgaaacttcaggcagattaaaagaatcatttgttgaacaactgannnnnnnnnnnnnnnnnnnnnnnnnnnnnnnnnnnnnnnnnnnnnnnnnnnnnnnnnnnnnnnnnnnnnnnnnnnnnnnnnnnnnnnnnnnnnnnnnnnnnnnnnnnnnnnntttnnnnnnnnnnnnnnnnnnnnnnnnnnnnnttggngggcgnnnnnnnnnnnnnnaaaaaattttttaaaaaannnnnnnnngggggcggggccccccaaaggaaaaggaaaaaggggccatttctttttttccnnnnnnnnnnnnnnnnnnnnnnnnnnnnnnnnnnnnnnnnnnnnnnnnnnnnnnnnnnnnncccccgggggggaacaacacaaagnnnnnnnnnaaaaaatctcccaaaagggggatttcttggggggggctcttctccgggggatcttcacccacccggaggggtcctccannnnnnnnnnnnnnnnnnnnnnnnnnnnnnnnnnnnnnnnnnnnngccgccgtgggggantttttttatttnnnnnnnnnngaggggtgggggagaatttattttttttaaaaactctttcttccgcgcccccgccccgcgggaagaaaaccccccctccaccacacaacggggcgggtggggagagaaaccctgttatatccccccgcgcgggggcggattcaaacacaccccactttgggcccaccctttggcggttataaaaatatatattnnnnnnnnnggcggcgaaaaaaagggggggcgcacaacaaaaaaatagcccccctcttttgcgggccccccttttttataaaacaaaagtggggggaaa

SEQ ID NO: 1563 - DNA, 620 bp, Homo Sapiens
atgaagcgcagttcagtttccacggtggtgcttggccgcctctccatcaggaagtaagatcccagggatgtaaataaccaaggcctctatacccctcaaaccaaagagaaaccaacctttggaaagttgagtataaacaaaccgacatctgaaagaaaagtctcgctatttggcaaaagaactagtggacatggatcccggaatagtcaacttggtatattttccagttctgagaaaatcaaggacccgagaccacttaatgacaaagcattcattcagcagtgaagctatgaatgaattagatgctgttcagcgggaataccaactagttgtgcaaaccacgactgaagaaagacgaaaagtgggaaataacttgcaacgtctgttagagatggttgctacacatgttgggtctgtagagaaacatcttgaggagcagattgctaaagttgatagagaatatgaagaatgcatgtcagaagatctctcggaaaatattaaagagattagagataagtatgagaagaaagctactctaattaagtcttctgaagaatgaagataaaatgttgatcatgtatatatatccatagtgaataaaattgtctcagtaaagtgta

SEQ ID NO: 1564 - DNA, 688 bp, Homo Sapiens
aaaggactccatagtttatttttatggcaaaagtcttattccacacagttttaagtgtgacattagaaatcaaagtttgaggttatagcacaaacgaagtgtggacttttatatttagggaaaaaaaccaacaaaacagttctgctcatttacaaatgagtcaattagacaaacaaagcagcaacttctgaagcaggactgtctatacagcaaggacccttaagaagcaataaaggtacatacaatgaatctgtatacagaaattttattcaattttaaaagaaaatgaggactttagacaaagctttaccctataacaaagcaaatctgtccagctttaaaccaaattctgagagtagccaacttctattttcagcagctggcaagagcaccctcaatgagttctactgacatttctattttcttcatcccatatggtataaaacaaaaccaatctagactccttgataagctttatgtggtcatttgagttttacaaatggtttctctaatggtatgccaaaatcatttatgtgttctctccagatagctttactgtaacatacagcaatgtttatcctggtgagtgagtcttcctgtaatacagtcaaccaatgctctatgttatggaaaccaagctatatgctattgatacatccacaggttctaacctggatatactagattc

SEQ ID NO: 1565 - DNA, 676 bp, Homo Sapiens
ctactcatgctgctgttgctcccatgggcccccattgagagcagcctcttgtccttacagaccttggaaactggaagaaggggcatagaggttccccatgagtttacgttatctgttaggatgaacactggcactggaagcgtgatgccatgtggtttaacagaaatgccatctctctaatggtgaatttagttacaggtggtcctctagttgcagagtattaactgtgttcctacagttttttaaaaaaaatcttgaacagatccaaattggcacttttgctctttttagcgattttaactgtggagaaaatgggttaattttgtgattctgttgcagagcttcagccacaagtgtgctccatggaggatgatgaatatttcattttctgtatatacccaagtccccactgtatgcttagggatccccccagttattacttaacatcttttattttcttcattcaaacatagcttctaaccaaaccatcataaattcattttcgtttcttgatccctgcgtgtgtttttttcaagagttcccaaaagtcctcactagcaggttgttaaggatctttctctgtgtcagtgttatgttaactgatgactgtaggaataaatgtgtgcgccgggattttattagctgctatttgcagcatcttttttatatcagctct

SEQ ID NO: 1566 - DNA, 455 bp, Homo Sapiens
gaatttaaatttttatattactattttcctttttgttgttcacatagtcttaaggcacctatacttttaaattgactttttcatttgatattatctatatgtatgtagttgtgataatgattattttaattatattactttatactcttaatttatttagagtatttctctattgctgaatacttaagtagttttaaattttattatgataaattcctgggagggggattatttagtgaaataatatgaagaactttatgacttatgtttgccttattgcattcccaaagagttgtaacattttacagtgttaccatttgagtaggggttttatatgttgttgctaatttagtaaacataggagagaaatcaaagtttttctgatttgcttttatgtgatttatctgtatactttgttcatttatataaataaatgtcttaatggtttctataca

SEQ ID NO: 1567 - DNA, 409 bp, Homo Sapiens
  misc_feature (306)..(306): n is a, c, g, or t
gctgctcggggccgcgctggttgcccattgacagcggcgtctgcagctcgcttcaagatggccgcttggctcgcattcattttctgctgaacgacttttaactttcattgtcttttccgcccgcttcgatcgcctcgcgccggctgctctttccgggattttttatcaagcagaaatgcatcgaacaacgagaatcaagatcactgagctaaatccccacctgatgtgtgtgctttgtggagggtacttcattgatgccacaaccataatagaatgtctacattccttctgtaaaacgtgtattgnttcgttacctggagaccagcaagtattgtcctatttgtggatgcccaagttcacaagaccagaccactactgaatataagggtcagataaaactctccaagat

SEQ ID NO: 1568 - DNA, 703 bp, Homo Sapiens
  misc_feature (54)..(109): n is a, c, g, or t
ttgaggtcaggcttccttcttacagaattatttttttctctgtagttcgcctcnnnnnnnnnnnnnnnnnnnnnnnnnnnnnnnnnnnnnnnnnnnnnnnnnnnnnnnnccccttttaaaatcaacaggaaatgtttcaaaggagggatgaaatgcttcttggcttcctcagcacttggcaaggtagacctcatagcaaccttgaatatgactttctttagtctctagctatgcactattaagtgcctcttgggtagaggtagagttaagtattgagtgccagtcttgacgtccgtatgcctcagtttttctcatatataaaaagcagtatacatacctacccttttctacctcatcatttgttgtagggattaaatccgggagagcaattctgaagcctataaatttccttgaagagatctaagaacctattatgctcttggtgtaccaagctctggggtatatattcagaatacctcatgttctggaagctgagcactagctcccctttattgcctgcctggcagagcctgtttgattactgcaggcccttttacccatgcttctagtttaggtattctttctttgatatgaggctcttgaccagaaaagagttctttctctaggtgttctgagagaagtttgtaaatttggatagtacattctatcctgataaaaccaccttgctgtggtcttgatgtac

SEQ ID NO: 1569 - DNA, 533 bp, Homo Sapiens
ccggaggcccgcgaccccggagcgcggcgcggccggccgctgagcgcagcctggaggcgggaggcccggcccggcctcggagcgagcgcccgcgcggcctggccccctcccttgcgctgctccccgcgctccgtgcgcctagccgccgccgcggcccggcccagccagagcatggagacggcggagaaggagtgcggcgcccatgggcgggctcttccaggccatagtcaacgacatgaagagctcctaccctatctgggaggacttcaactccaaggccacgaagctgcattcccagctgaggaccaacgtgctggctgctgtggccttcctggatgccttccagaaagtggctgacatggataccaacacccgaggggccacgagggacatcggctcggcgctcacacgcatgtgcatgcgccaccgcagcatcgagaccaagctgcggcagttcaccaacgcactgctggagagcctcatcaacccgctgcaggagcgcatcgaggactggaagaaggcggccaaccagc

SEQ ID NO: 1570 - DNA, 877 bp, Homo Sapiens
  misc_feature (488)..(488): n is a, c, g, or t
gtgttgaggtgttttatccgcgatgaattaaaatatttattattataaaatgatctacagaaccatgtcacattgcaagtatatataacatatacttgtaaagtccacatttcccatctatatttcagtggtttccttaaaactaggacttcccacacctcatgatgttatcttttgaagactgagatggtgatcaactaaatcaagtggagttgtaattttctggatggaatttccacactgccaccgacatgaataaaaagaccaggtttcttcatactctccattgcagcagttgtctgcatgtgttgcggtgaattcatgcacattaaaaaaaatggtcaatgtattcttccacgaaattatattatgttcagatatttcagtttaaaaatatttgtgaatataaacatatgtaacataagcaatgctactgcatctgaataataaaagaaaaataaatataatgctggtcagcaatgctggtntaagaagcagtacagtctattaaaatgccttatttggagatttaaatttcccttgttttccagcagttaggttatttggtgttggaagcctatataaaggaaaagaacttctcaaaaacaatgtcccgtgcagttggaataatgaaatctttactcagtctctgttggtgttatttgctgcaaaggcatgtaagtatcccatctggctcaggccactctgaatatgtgcaacatggatttctacattattctgaaagcaactgatattagaagcgtctattgtactcttgatatcatttaatgagtctgtaagtgatttgaattcaaaggaattcaggtctcctccttctgctagacacttaatttgtaacaaaatagctgtaagcccc

SEQ ID NO: 1571 - DNA, 624 bp, Homo Sapiens
ctagaggatcccctgccatatggcaaggccaagtgtaagactgggtggggagccagaaggaaatggagtcgtcaggatgctcaccgagtcagacttttcaaccggaagagactagctcatccaaacgaacctcctacgttttcttttttaaaattaaattttattattttgctctaacaaagtaacctcctactttttcaaggctcagaggtggtcaacaatttgcccaactcacatggcagatagtggcggagtcaaacagggcactcaggtagggctattccagcccagagccgtttgcttggcctgcagtaccgcctttggccataagagccactcatggctggtcctggaggaggcaggacatccccaaagatgcttattgacgccagctggacgtggctggcgggaagactggcccatgatctcagggggaccgttgcttcccaggaccgtctttggctttcaagaaaaagatcccgctccaggggcatccgccgcgacagcctgcttgccttgctccttcttctgcgggggcggaggaaagctgccaccctttaagaggggagctttagattagggaaagaaactgggacattgttgaaaaacatcctaaaagttgtt

SEQ ID NO: 1572 - DNA, 360 bp, Homo Sapiens
ccacgcaatcacaccatttattgctgtgctgtccggggaagacaccgtgcaaatgccaaagtgcactgaggagaggggagggtctgtgactcccaaaccctcgaatattttatgaatctaagagtccagacgcagttcatccacggagatctgcgccccgtccacaccaacacccacgtttgtgcacccacatgtgcacggtgctcttcaaagcggcgaggtcctcccccgcggggaggaatgtgggagaggcagaggtcactgagtttcctcctgtttcgtgtcacctcttggcaacctgtgcctggcttctagaagcggcatgggcaagaaaaggaagcaaaagaggctctggcctgc

SEQ ID NO: 1573 - DNA, 393 bp, Homo Sapiens
  misc_feature (311)..(320): n is a, c, g, or t
ttttgttttctgagaagaggtttgaagacattttattaacagcttaatttttctcttttactccataggaacttattttaatggtaacattaacaacaagaatactaagactgtttgggaattttaaaaagctactagtgagaaaccaaatgataggttgtagagcctgatgactccaaacaaagccatcacccgcattcttcctccttcttctggtgctacagctccaagggcccttcaccttcatgtctgaaatggaactttggctttttcagtggaagaatatgttgaaggtttcattttgttctagnnnnnnnnnntccctcccaaagtggggcaaaaagctttatatttatttgattatccaaaatacagatcaaagtttagatctac

SEQ ID NO: 1574 - DNA, 528 bp, Homo Sapiens
  misc_feature (86)..(136): n is a, c, g, or t
ttacacacataagccttgctttcccaagcccactgtaaatactttaggaggagaagttgagccttatgcatcttgtcatccccacnnnnnnnnnnnnnnnnnnnnnnnnnnnnnnnnnnnnnnnnnnnnnnnnnnncccagggtaaataagtcaccgccccaagcaggtcacgtcctcaagtataggtacctggacgggccactcccaagaggctgcagtttttctgcagagccagctgtgatcttcagttacctgcataacctcaccatgggcctatgttttcaaaggatgttagacctattctaatctctactccactgaactgggcagacaagatgatttgtaaagcatctcaggtctggcaaagcaaagtacatacgtcgtccaggcaaacccagagattcagagcttccaatctccggaaatactggagggcacaagaggaaaaaaccatggtgtaagttttaagtgactgacagctagaaaaccaacatgaggctcaggtgcacacggttgagcaccagcta

SEQ ID NO: 1575 - DNA, 312 bp, Homo Sapiens
gagggtctgggtgcaaacggaggtggcaacacacagagcgagccttgagcacccaggttacccccaggacctccagtctggctggggggctcctgctgtcctgtggagcagccccctgggatcagggacggggctgagctggagagtgtgcaggattgattaatgatgtctgccacggtcaggccaactgctgtgtttctggggcccacaagctaaaaatggttggaaaaaaatcaaaacattaatatttgtgacatatgagaatgctatgaaagtcaactttgctatccataaataaagttttattgacat

SEQ ID NO: 1576 - DNA, 432 bp, Homo Sapiens
ctccttttaaagaaaagctaaaggccgctgtgagtcctggtggcaggctctccatggatgtagcatatcgaagataatttttatactgcatttttatggattattttgtaatgtgtgattccgtctgctgaggaggtgggaggggctccagggaaagccacccaccttcagtgaggttgctccccagctgagcgcaccgggcatgggatgtggaggctggcgacacaccctgtgcctctccaaggctgggcgcgtggggcgtccagagtctctctgggtctcagatgtccatctgccacctcttgttaaggctctagccagaagggagggtgagggtagaagaaagttattcccgaagaaaaaaagaatgaaaagtcattgtactgaactgtttttatatttttaaaagttactatttaaaggttaaaaaaa

SEQ ID NO: 1577 - DNA, 501 bp, Homo Sapiens
gtatgtctgaaatatctctcatgtctttaaatatctttctaacttaacattcagtaatcatttactattttactttgatattctgtgtgtaattatgctgtcagcttttctggactcaaaagtgctctcagatgtcacctctggtatacaaaaaaaacagttctgtatattacctgagcagtttcttgtccacctgccatgttgtgagtaacatcacccaatctagaggccagaagaggcccaagtttggataatacagcccctgttcaccctggaagcttgtctggaggggccagggtaggctcagaatgagactgaatactctgagcacccactgtctgatcctagatcacaatccccccatccagagttagctaatctatgaggctcatgggtatggtctgcatagaagaccaccctcacttctgacaccactgcaagcttggtggggattcctcaaaccgccctcaggttcaacagttcactagagccaggcatggt

SEQ ID NO: 1578 - DNA, 1236 bp, Homo Sapiens
gggacttttcagcggcaggcgaagggggctgaggaaaggaggtgggtctaggccaagggaaattggggtgccaccaaacggagacagctttggactaccaggcttttaagagactgtgctattgttgacttcttcacagaatcaagcactcttttggaagagggtaatctctctccaaaaactgaggacacttaccttccccatatattgagtccagctgtgtttggtggcccaggtactaatttcaagatgccaggacgttccagttcaaattcaggttcaactggtttcatctccttcagtggtgtagagtctgctctctcctccttgaaaaacttccaagcctgtatcaactctggtatggacacagcttctagtgttgctttggatcttgtggaaagtcagactgaagtgagtagtgaatatagtatggacaaggcaatggttgaatttgctacattggatcggcaactaaaccattatgtaaaggctgttcaatctacaataaatcatgtgaaagaagaacgtccagaaaaaataccagatttaaaattattggtagagaagaaattttttggctttacagagcaagaattctgatgcagactttcaaaataatggaaaaatttgtacagtttaaacaacagctgaaagaactaaagaagcaaggtggtcttcaagctgacagagaagccgacggaacagaaggagtggatgaagatataattgtgacccaaagtcagaccaacttcacctgccccattacaaagggaggaaatgaagaagccagtgaaaaataaagtgtgtggccacacctatgaagaggacgccattgttcgcatgattgagtccaggcaaaagcggaagaaaaaggcctattgccctcaaattggctgtagccacacggatataagaaagtcagatcttatccaggatgaagcacttagaagggcaattgagaaccataacaagaaaagacatcgtcattccgagtaggaaaagccacctgcctgcagggacaccagcagcctacctcctaccccagctgtctgttgagagcagtgctgaccccagcagttagggactggctgcatagcatacttgttgggggtaaaacttgttgcttttatgtgtgcttgaaaacatttttcaaagttacacaacagaaatgcaatcatattgtttatttttaagtgttctataatgttaaataaaactttgatcatctgaaaaaaa

SEQ ID NO: 1579 - DNA, 1414 bp, Homo Sapiens
  misc_feature (172)..(172): n is a, c, g, or t
ggcacgagcgggaaaatacccagtgttggagacagggggaacattcagcaacagcactcagcccttcagcacacgtcagatggcatctgggacaaatgacttcagagagtttgttctggaaatgcagaagaccatcacagacctcagaacacagataaagaaacttgaatcncggctcagtaccacagagtgcgtggatgccgggggcgaatctcacgccaacaacaccaagtggaaaaaagatgcatgcaccatttgtgaatgcaaagacgggcaggtcacctgcttcgtggaagcttgcccccctgccacctgtgctgtccccgtgaacatcccaggggcctgctgtccagtctgcttacagaagagggcggagaaaaagccctaggttccctgggggggctcctcagagtttgtctgctgtgccatcgtgagatcgggtggccgatggcagggagctgcggactgcagaccaggaaacacccagaactcgtgacatttcatgacaacgtccagctggtgctgttacagaaggcagtgcaggaggcttccaaccagagcatctgcggagaaggaggcacagcaggtgcctgaagggaagcaggcaggagtcctagcttcacgttagacttctcaggtttttatttaattcttttaaaatgaaaaattggtgctactattaaattgcacagttgaatcatttaggcgcctaaattggttttgcctcccaacaccatttctttttaaataaagcaggatacctctatatgtcagccttgccttgttcagatgccaggagccggcagacctgtcacccgcaggtggggtgagtctcggagctgccagaggggctcaccgaaatcggggttccatcacaagctatgtttaaaaagaaaattggtgtttggcaaacggaacagaacctttgatgagagcgttcacagggacactgtctgggggtgcagtgcaagcccccggcctcttccctgggaacctctgaactcctccttcctctgggctctctgtaacatttcaccacacgtcagcatctaatcccaagacaaacattcccgctgctcgaagcagctgtatagcctgtgactctccgtgtgtcagctccttccacacctgattagaacattcataagccacatttagaaacagatttgctttcagctgtcacttgcacacacactgcctagttgtgaaccaaatgtgaaaaaacctccttcatcccattgtgtatctgatacctgccgagggccaagggtgtgtgttgacaacgccgctcccagccggccctggttgcgtccacgtcctgaacaagagccgcttccggatggctcttcccaagggaggaggagctcaagtgtcgggaactgtctaacttcaggttgtgtgagtgcgttaaaaa

SEQ ID NO: 1580 - DNA, 1509 bp, Homo Sapiens
ccggggaaggaaaaaagccattttattttatatgggaaaaaggttccagtaaagatcggttaaaaggggtcaattataatattgccttttacaggaaaaaaattcaaaatgtgaatagcaacaaaataaaagttaccacatcttcctacttaggcagtgcaattaaattcacatgccaataaagttaaagtcaagtataacaaaatcaaaacaagtgtttctccataatcagtatgctgagaattacagtgtaaagatcatttcagatttaagaaatctgcaatcaatctacagaatatcctaagacaagggagacacagttaattcacttaattatcagccgttggggtttttcaatactgttcacaggaaaaaagtaatgagttgacatacatgtaaatagaatatatttagtctatacagtaaaaaaatacaaattataaagtgagctaacaaagaatgaaatctgaatacagatttataaaactgacatcttagacaacacatacagtatttctcatgtaaaaacatctagtttcagcaaaaaataatttggttgcttttcagctgcattgtagatcttgtaagctgaagatgcagatgtccaagtatcttaaaaaccataataaatgtctttctcaatgcatacaaaatgataaatgctctcatcacagtcttaagggtatttttggaagtttgttttgtcttgcttcagaaacacatttaaaatgggtaaaaatcaaatggtttcatggtacaatgaaacagtaaacagtgctccaatttactgctaatggttgaaaaaaacctagatttgacagtactctggtatatatgaaaatgtttttgatttggacattgcatatttctgagtccattctcttgcatgtctgttgtagttttctttgtctgatttatagatttgtgcaatatctggtactaaggggtcatctggattaggatcacaaagtagagaacatatggacaataaaactgtttgatacagtcagagctggtgaccattgtgacctcagaatatcgagacaaatacttccattactgtttatgtttggatggtaaatttttgttgtgaaagcaatctttggtggtttaaaaggataatctgtcggaaaatgtacagtgagaaagaagactccaccttgatatgcgctatcaggaggccccataatagtggcttgccagtggaacaagtcatctcccacaggtccagctgaacagtgagcaggtggatcgcgctgtagatcactcaattctttctgaatcctcttcagcgccatgggtcagggatgcgcgtggggacaccggccggcaggggtcggctgcggggctcaggggcgtgggtcgtcgcgggttgggctcgctggcagctaggctggctccgcgcggtgggtccccggttagccgctcactggctcgctccgggcgccggtcctcgctccgtgtgcgcccgagcgcgagtgtgcgcgagtgtgcgggcgggacgccgcg

SEQ ID NO: 1581 - DNA, 796 bp, Homo Sapiens
  misc_feature (132)..(132): n is a, c, g, or t
gcaaataatcagtacatccccaaaccaaagcctgccagaataaagaaaggacggactcgccacagctgaactcctcacttttaggacacaagactaccattgtacacttgatgggatgtatttttggctttnttttgtagtcgtttaaagaaagactttaacaggtgtcatgaagaacaaactggaatttcattctgaagcttgctttaatgaaatggatgtgcctaaaagctcccctcaaaaaactgcagattttgccttgcactttttgaatctctctttttatgtaaaatagcgtagatgcatctctgcgtatttacaagtttttttatcttgctgtgagagcatatgtttgtgactgtcgttgacagttttatttactggtttctttgtgaagctgaaaaggaacattaagcgggacaaaaaatgccgattttatttataaaagtgggtacttaataaatgagtcgttatactatgcataaagaaaaatcctagcagtattgtcaggtggtggtgcgccggcattgattttagggcagataaaagaattctgtgtgagagctttatgtttctcttttaattcagagtttttccaaggtctacttttgagttgcaaacttgactttgaaatattcctgttggtcatgatcaaggatatttgaaatcactactgtgttttgctgcgtatctggggcgggggcaggttggggggcacaaagttaacatattcttggttaaccatggttaaatatgctattttaataaaatattgaaactcaccagtcatggacaa

SEQ ID NO: 1582 - DNA, 803 bp, Homo Sapiens
ggcaaagatggaatacgtctgaatcttattttgatacgatacactggagacaattcaccctattccccaactataatttattttcatgggaatgcaggcaacataggtcacaggttgccaaatgcattacttatgttggttaacctcaaagttaaccttttgctggttgattatcgaggatatggaaaaagtgaaggagaagcaagtgaagaaggactctacttagattctgaagctgtgttagactacgtgatgactagacctgaccttgataaaacaaaaatttttctttttggccgttccttgggtggagcagtggctattcatttggcttctgaaaattcacataggatttcagccattatggtggagaacacatttttaagcataccacatatggccagcactttattttcattctttccgatgcgttaccttcctttatggtgctacaaaaataaatttttgtcctacagaaaaatctctcagtgtagaatgccttcacttttcatctctggactctcagatcaattaattccaccagtaatgatgaaacaactttatgaactctccccatctcggactaagagattagccatttttccagatgggactcacaatgacacatggcagtgccaaggctatttcactgcacttgaacagttcatcaaagaagtcgtaaagagccattctcctgaagaaatggcaaaaacttcatctaatgtaaccaattatataatgtttccctttctgattatggcatgtatcttaatttgtgcagaatgataaagaatgttcctttt

SEQ ID NO: 1583 - DNA, 652 bp, Homo Sapiens
ggtcttcacagggccgctgagtcactacttctacttcttcatgaaacaatggatccatcatgaggtccccctggcagggctcaggaggcttctcctggaccgcctcgtctttgcacaggccttcctcatgttgttcttcctcatcatgaactttctggaggggaaagacgcctcagccttcgccgccaagatgagggggggcttctggccggcgctgaggatgaactggcgggtgtggacgccactacagttcatcaacatcaactacgtccctctgaagttccgggtgctcttcgccaacctggcagctctgttctggtatgcctacctggcctccttggggaagtgacgaccgctgggagaacatcaggtgcactgtggacgtgggtctgggggtctcacccgcccagcgagagcagaaccaatccagtcaggatgtcactgactctaaatcaggtgattcaagatgcccaaaaatgatggatagagaaacagaaatctctgaatgtcagaaccctgtcttttaaaaaggcagtcactgccttcaggtggtgctgccccagaaacttaaaatttagtcgaggcagtttcaattgttactgtggaccgaattaggatcacaataaacgataatgcaggttcttcaatggtg

SEQ ID NO: 1584 - DNA, 1176 bp, Homo Sapiens
  misc_feature (679)..(739): n is a, c, g, or t
ggttttggggggtaattggacccgaatggctttccgggcaggtttcggacagctttattctccccaataattggcggagggtttgggcgtgaaaatcggtggacaaatttgggccgtaataggcgttaaaagggtgataatggggtttcgtgtttcaggcctattcacaccgaatgaatttgggcgcagtttcgcacattttatggtgggccaaatttggccaaatattgttcaacccccgtttgtccccccatggtgcaccatgtggcaaaatcaattttcgcacagggtgctcaatggtccctgagcgagtcagggcgttttcagggtcattcatgcacggttttccatgtcttgccagaatggctaaatagattacaacaatttctcaccatgacttggcaggagtgggcacggaagttgagtataaatgctcgcgagggtctccttggtgatagatccagtaaattccctcaaagaccccatatgtctcatttgaaaacggttcggttgcctccgggcctttttggctggtttgaatgcgagcaattctaccagtactggatgtctggagagccctaggaaacccctgtttcccttttttaattggcctagcgggcccaacgaatagtttaaaaagtttttaaagcgtctcggggggccagcaagcctgacatannnnnnnnnnnnnnnnnnnnnnnnnnnnnnnnnnnnnnnnnnnnnnnnnnnnnnnnnnnnntgatacaactagcaaatgttcattggtttacaacaaacccaaaatactcatcaaatatgggctgttggatttagaaaaataagattcttgagcgattccagctgcatttgtttatacagaacacatttactcaggaccctgcagtgtcagcttcgttctttgggtatgcagccttctatctggatctctgcaggccagccagaatatctgttgttcttagcatcagagtggttgatcttttctctctgaatttcggaagggagttccaagccttttgctgcaataaatacccagctagacctgaatttcatgttcctgatttctttacttccaagtgcttctatggcattcttggcatcgttattcagtcttgtgcttccgtcgtcataggtcaccatgaagagcagggattttggagcagcactctgaataaactt

SEQ ID NO: 1585 - DNA, 477 bp, Homo Sapiens
cttataaaatatgattttccaaccattcctagacagtgttctaacatgactaactttaattgccagaagtaaaagcttttattttacatgattacacttcattgtactagaatatatcacaatctctatttccttgagacaaacagtttccctaatatggtattataaaactgtttaaacatataaaatgttgtgggaagtgcatatttatagtccaaccacttagattgtacaattatcattttgttatatttgctttactacatatctctcactctatccaccattctatccaattatcaactcaccgtttcttatttatgtcaaagtatatatttttcttacatacttaacataaatagcattattgttcagtatttgtgtacagctcattttttttaagttactaaggttttttattaacacctcagagtagaggttatgaaaggaccctgaattgttctaggaattttcttc

SEQ ID NO: 1586 - DNA, 1124 bp, Homo Sapiens
gtaccggcccggatataccgggatatcgtcgacccacgcgtccgccacgcgtcggtcgcggtgcagcggtgggcggcatgtctgtggccggtggggagattcgtggggacacggggggagaggacactgctgctcccggccggttcagcttcagcccggagcccacgctcgaggacatccgccgcctccatgctgagtttgctgcggaacgagactgggaacagttccatcagcctcggaatctcctcctggccttggttggggaagtgggggagctggcagaactctttcagtggaaaaccgatggggaacctggcccccaaggctggtcccccagggaacgggcagcccttcaagaggagcttagtgacgtcctcatctacctggtggcattagcagcccgctgccgtgtggatctgccgctagcagtgctctccaaaatggacatcaaccggcgacgctacccagcccatctggcccgcagctcttcccgcaagtatacagaattgccccatggggccatctctgaagaccaggctgtggggcctgcggacattccctgtgactccacaggccagacctcaacctagaaagatggccacaggacttgcaactcagggtggtgtctgaagagcagagagtggcctggccctggagcctttttctagtcttttcagaatagatcatgggcctgaggcctccacttcttgaggtctgaggcccagcagcctctagaaggtagcctcctggtgtttgttctcccagtaaaatggttttgggcgataacttctagattattcctggatggccagggaggctctctgtctcagcaggtgatgacgggggtaccaggggtgcctctgagacccattctcgtgtttccctgttgtaccttttgcctgcagggcagagagatctggtttctagcaaattcccagtaggatgtcatgtaagttccttccccctcttagagattgaaggctgtaagagtccagatggtggagccaggctgtctgggttcaaatgccatctttgacacttgcaagctaaatgacattactcaaattaatcgttctgcacttcagcttccttgtctatcaaataaaaagaatagtacctgccca

SEQ ID NO: 1587 - DNA, 400 bp, Homo Sapiens
ctttataagtagagataattcactcgcagcgtctctgtacactctaacttattagacagcaagcaatatataatactgaaaaagtattcagaaatggaaaatttacatcatataggttatttaacttgtgttcagcctttttgtaacttttttgaaagtgcaaacaattctttggattattaaataaggtatacagtatgcatggtttctcaaatttagttttaaaatctaaaagtctataaagaatcagatgcataggcaatatgttaagttcacttggaggctaaaaatctccagtgaaaacaaaacgaaaacctttaagagaatgtagagtttatataaacacaaagtatgcattgaagatctgtttctaccaataaacataggtggggtaccgagc

SEQ ID NO: 1588 - DNA, 2332 bp, Homo Sapiens
  misc_feature (2274)..(2274): n is a, c, g, or t
gggaaagaatcctgttgactatatccagggcttattggatctgaagagtaggttcgatcgcttcctcctggaatcattcaacaatgaccgtctctttaaacaaactattgcgggtgactttgagtattttctcaacctcaactccaggtctcctgaatacctctcattatttattgatgataagctgaaaaagggagtcaaagggctaacagaacaagaagtagaaacaatattggataaagcaatggtcctttttaggtttatgcaagaaaaagatgtatttgaacgttattataaacaacacttggcaaggagacttctcacaaataaaagtgtttctgatgactctgaaaaaaacatgatatctaagttaaagactgaatgtggatgtcagttcacgtcaaaactggaaggaatgtttagggatatgagcatctcaaacacaacgatggatgaattcaggcaacatctacaggcaactggtgtatctttaggtggtgttgatcttacagtccgggtgctcacgacaggatattggcccactcagtcagccacaccaaagtgcaacatcccaccagcaccaagacatgcttttgagatattcagaaggttctacttagccaaacacagtggtcgacagctcacactccagcatcatatgggttctgcagatctcaatgccacattttatggaccagttaaaaaggaagatggatctgaagttggtgttggaggtgcacaagtaactggctctaatacacggaagcacatattgcaagtttccactttccagatgaccatattaatgctctttaataatagagaaaaatacacatttgaggaaattcagcaagagacagatatccctgaaagagagcttgttagagccctacagtccctcgcctgtggtaaaccaacacagcgggttcttacaaaagaacccaaatcaaaggaaatagaaaatggtcatatatttacagttaatgatcaattcacatccaaactacacagagtcaagattcaaacagttgctgccaaacaaggtgaatccgacccagagaggaaagaaacaaggcagaaagtagacgacgacagaaaacatgagatagaagctgctatagtgcggataatgaaatctagaaagaagatgcagcacaatgttctagtagcggaggtaactcagcagttgaaggcgcgattcttaccaagtccagttgttattaagaaacgtattgaaggacttattgagagagaatatttggcacgaacacctgaggatcgcaaagtatacacatatgtagcataaaatgcgttcagaaatttgatttattcttggactgtactcttcgcatggactgggaagttcttttaaatcattaaatattaagacgaccatctcttctattaaattacagtacatgttctagaccattgagatcaagcctttactccctttgagagtttccaacatcagttgattgagcttcaggctttacaacgtttatccctgtagagatcatctttacagttcctcgggaaaatgtgaatgtgctgcgttttgttttctttactgtatgaaaacaggaaaataaaagagaaatttagaaaatacagctcattacaataaaattgttggatttcatttccccaggtcttcagtgttgatgtaaatgtgttttgtagtgttgcttagcactttgcgcattgtgtaagttgggtaacaaaaatggcaaaagaaatgcagatttcccagttatcttgctctgaagacatttctttagctagtcttatttaattttaaaggtttgataaatatacaaagacccaagcatacaatttgagcatgctgtattctaccacttgcacttactcatcttctagccttatgaccaggaacctttgttttgggctcaagtacacatcctgatttggtttctccctgttgtaatttgagatttcccaaattaagtcttataatgattaggttttgttctgagttatttctagagaaagaaagtattttagtatgtgtaaattgtacaataatttttttgctgttgtactcactgctaatagtggattgtatagggtggtgtttttatttcatttattgtagacaaaaataatgaatcttagtatacacatacccactaattcaagtatgtcagagcacaaagttggcagctggttatatttaattcagcccctctgaaaagcacatacactctatactttttgtttataataaccctagggtcctcccctgcccctaantatatattttttggtgaacctgtgggtgcactatttaatttttctgggtttcaaaatg

SEQ ID NO: 1589 - DNA, 475 bp, Homo Sapiens
  misc_feature (13)..(13): n is a, c, g, or t
  misc_feature (40)..(40): n is a, c, g, or t
taatggctccctncttccttccctggttattcacctcccngatgcctgctttcagttgagggttgggggcaatgatgagcatatgaattttttctcactctagcaattcccttttctaaatgacacagcatttaaactcaaatctggattcagataacagcacctgcacatcctgcacctcctccctctcccttcacctcacccctgcccggcccaagctctacttgtgtacagtgtatattgtataatagacaattgtgtctactacatgtttaaaaacacattgcttgttatttttgaggcttttaaattaaacaaaaatccaactttatttttagttgtaactgcttgaggtatgttttatgaattaagtgacagatttgttatcctttattaacgtactttgttggtcagcactgggctgacaaaaattttttcttgctaataaatttagttgcctgaggcaaaatcttca

SEQ ID NO: 1590 - DNA, 451 bp, Homo Sapiens
ttacatggtattttattttcaattacagcttgccacagctaccttggatggtaaactccagctctttctagctgagtaaccactgacctgtgagctgggtccaggaatgctgtgaggaacaacttaaaagtaagaagtagtggttcatccatcagggggccagaagcagcaactgtttttaatattttaagacttgcctcagatttcccccgtttgcaagctcctcccctctgtgtgtgccatgtcagagttttatgtctttctgctcctcaaaagggatccccttcattgggaaaatggaaatggcgtccagtacttctgcacagaatttggtaaagttaaaacaaaatatctttcaataaaacataatatagtatttgtttgataattagagttggaagaaaaaagagagaatttcttttgggcagtgaaaataaagcagttaacagtc

SEQ ID NO: 1591 - DNA, 930 bp, Homo Sapiens
  misc_feature (317)..(326): n is a, c, g, or t
gggagcgtcatcagcatatgacttgcgctggtcatccggtaaatggatgtgctgtagtcccagtgctaatcatttctctccttcacagtgggtggaagtttagggttaaatgtcctttgaatgtcacctggtgagtccttgacaccttaggctcttcagaaacaatggttttgttgaggatggggaacagggaatgccgattttatatacatggtacacagagaggggtgtcacttcagaaaatcttccagcatgttcttcagaatattaatttatatgcgaggtgaggttgggaatgaaaagaacaggtcagcacnnnnnnnnnncctagaacatacaaaagaacatggtggactttcagggagtgcaatggaaggtggatatttccttaagggtccccgagaaatgggagtgaggggaggggacacaatggctttttgagcttacttttaccttctgatactagtcaaggtccagaaccagccaccagccaaatttctatctgggtgcgggccactgaaaatccttgttaaaaaccagatcacaaatctggggctcttggtcccattggagaaggaaggaagagcctcaaaataagtgtgcacccatgcacatattcaggaacagcttgtttagtctttacactttgcctgaaagttgcttctcctcgtccctttgggttgcctgggtggcctcggccctgtgcattggcaacgcagggatcaaatggtgctgcagctttttgcagaaaaaaactcagaaaacacaaaaccccccaacagctcaattattattttttcaatgttttcctacaagagccaagtagcaccatgtacagaagacgccttttttttggaatattgaaatcgttctgcatgtaaaatatgggataatgacctgtttatattaaaattaaaattagataatctg

SEQ ID NO: 1592 - DNA, 462 bp, Homo Sapiens
acacacccacacgatgccacaggtcagggggctgtgcctgactagggagccctcccattgccttcctggcccgggatagaagaggggaggtaagtctgggggctacgaagccgggcccccacaccctggctgaagtcagcttgacctaggtcttgaccctcatccagcaagggactcgacagacccaagggtccctggaacgtagggaggggctgggggtcactccagcccgggcctcccagaacaccaggcccgtgtgggtggcaccctgaggtcaggggatcctaagggtgtccttccagagacggtgtttccagggggaggaccgcccccgcttccagatccccggccccggctgtgactgccctgtttcacccctgctgtgtcccatcccccgtctgtccactaactgtaccgcaccggccattaaaagatgaaggcagaccgctgcaccgccgccaa

SEQ ID NO: 1593 - DNA, 849 bp, Homo Sapiens
  misc_feature (789)..(789): n is a, c, g, or t
gggagactacacccagggaatgaagagcaagcgccatgttgaagccatcattaccattcacatccctcttattcctgcagctgcccctgctgggagtggggctgaacacgacaattctgacgcccaatgggaatgaagacaccacagctgatttcttcctgaccactatgcccactgactccctcagtgtttccactctgcccctcccagaggttcagtgttttgtgttcaatgtcgagtacatgaattgcacttggaacagcagctctgagccccagcctaccaacctcactctgcattattggtacaagaactcggataatgataaagtccagaagtgcagccactatctattctctgaagaaatcacttctggctgtcagttgcaaaaaaaggagatccacctctaccaaacatttgttgttcagctccaggacccacgggaacccaggagacaggccacacagatgctaaaactgcagaatctggtgatcccctgggctccagagaacctaacacttcacaaactgagtgaatcccagctagaactgaactggaacaacagattcttgaaccactgtttggagcacttggtgcagtaccggactgactgggaccacagctggactgaacaatcagtggattatagacataagttctccttgcctagtgtggatgggcagaaacgctacacgtttcgtgttcggagccgctttaacccactctgtggaaatgctcaccattggaagtgaatggagccacccaatcaactggggggagcaatacttncaaaagagaatccttttcctggttgcattggaaaccccgggttatcccgctgggtcccgg

SEQ ID NO: 1594 - DNA, 711 bp, Homo Sapiens
  misc_feature (59)..(59): n is a, c, g, or t
  misc_feature (104)..(104): n is a, c, g, or t
  misc_feature (266)..(266): n is a, c, g, or t
ttggggggagggctcttgaagtcttccataggcagcttcagctgctgtatgactcgccngccatacacacttcgttcttgcaggatgttcagcaatctttctanagggttttttccagctttcatctgcttctctggcaacatgagaaaaagcatccacaaggacagattcaaattctctagtgaatcaaggtcctttccttttactgttttggatgacatcattcgctaaatacagaaaagtaagctttctatttgatttggctntgcggagctcgcggtgccacacggagacgatgggtcccgcgtgcttgcggtggtggatgagccaaagggacagggtctgcacgctctgctgagagttgctcagctccgagagcttcttctccagcgccgactcagagaaggaggacatggtggcggcagtgaggcccggcagggagcggcctgggccgcccagtgcggcgggaagagcgacggcacgaggccggggcctcacctgacaggctgcgggactttttaccgactgacagactgccaggggtgcgagaagggggaggggatgggtctccgcagtaacagccgcccgcgccgccgccacaagatggccacccgacctctcaccctgccgcgagagcgaggtcaaagggcaagggccggagcagaggggcaccgagaggcgtcggagctctagaaaaccgtccctttggag

SEQ ID NO: 1595 - DNA, 365 bp, Homo Sapiens
gctgctcctgggataccaggtcagtgatgtagtcttgcagtttggcaacttcctagcctgagaatccctagtggggctgtgggaaacacatttccacgttgcaagcatgcaactccaaagaatctgtgatgccactgaaatgagatgggaatgatccagctctttcagcatcttggttgaacttgctttcattgtccctgggatattgtggaaggaaaggtgactgtgtgatctgattccgtggtcaaggacttgcatcttgtgtttctatccccaagccttcctggtgtctccaactcctaccccattgcatgggttgttgcggacatccaataaagatttttttagtgcttctggaaaaaaaa

SEQ ID NO: 1596 - DNA, 544 bp, Homo Sapiens
gcagctggcacgtgacttccgcatccctgacaagaggctctggtggctgaagctgactgccctggcagatttggaagattgggaagagctagagaagttttccaagagcaagaaatcacccattggctacctgccttttgtggagatctgcatgaaacaacataacaaatacgaagccaagaagtatgcttcccgcgtgggtcccgagcagaaggtcaaggctttgcttcttgttggcgatgtggctcaggctgcagatgtggccatcgaacaccggaatgaggctgagctgagcctcgtattgtcccactgcacgggagccacagatggggccacagctgacaagattcaacgggccaggcacaagcccagaagaagtgaggagtccatcctgtacatctcaagcaaggggttcctcccctagcacctgggcttggcagaagggccatagttcatccagctcctcccctagagcaatgctgaggagcgggggcatggtagcagggctgtctggttttaaataaagttggaacacttcacaaaa

SEQ ID NO: 1597 - DNA, 488 bp, Homo Sapiens
  misc_feature (100)..(100): n is a, c, g, or t
gttctgtgtccctgaaactaaaggaaagactctggaacaaatcacagcccattttgaggggcgatgacagccactcactaggggatggagcaagcctgtnactccaagctgggcccaagcccagagcccctgcctgccccaggggagccagaatccagccccttggagccttggtctgcagggtccctccttcctgtcatgctccctccagcccatgacccggggctaggaggctcactgcctcctgttccagctcctgctgctgctctgaggactcaggaacaccttcgagctttgcagacctgcggtcagccctccatgcgcaagactaaagcagcggaagaggaggtgggcctctaggatctttgtcttctggctggaggtgcttttggaggttgggtgctgggcattcagtcgctcctctcacgcggctgccttatcgggaaggaaatttgtttgccaaataaagactgacacagaaaatcaaa

SEQ ID NO: 1598 - DNA, 415 bp, Homo Sapiens
ttctccctaccctgtggaaataaagccagagaccctgtggccccccctttatatttgcagccactgtcaatgggcatcacagcaaggcaggctttttgatctgaagctgtttggggtgaccccatagtgagtctggccttgactcacttttctggcttgtctcacagtagcaggggatctgctgttctccaccctttaaaaatggagcctttcatcttccaagaccaaagaaggaaggaaggtggacggtgagagggtcttaaatccccagcctgtgagtctcagcctcttttccagggaagcctcattctactgcttggggcttgctgaggttgagatatgagttatttctgagtaagtgaaggctgaaggcagtgctgagtcctttctgctagctgggtggtatcttttactg

SEQ ID NO: 1599 - DNA, 484 bp, Homo Sapiens
attcttgaatgtggaattcatagtcaaggaaagttaggtaattctgaggaaaaaagtttaccatcattttggatgaactgcatgagttctgggttaagtactacaatgtaatctgtttcccagggaaataagctattggtagttgtaggaaatcttagtatattttaaaagctgacatcccacctaattttaatctttggtctctaaaaagtaaatttcaaatttatgagtttaatcacttcaaatatgaatagcaaaaaatgagagcttgcttacttctaaaaattgaggttaagatatagctagtgtctgaacgacactccttaaagtaagttccaaatgtaaaacactccttaagttccaaatgttttccgctaatagtctgtcctaaagcctttgccattcctaatactcgttttgtaataattgctgtatttctgtgtaataaaatataaaaataaaatattcagtggtattcaacatc

SEQ ID NO: 1600 - DNA, 885 bp, Homo Sapiens
gggctctctgcgcatgtgcaaagcgctgtcgggggccgccctagctgccgtcgccgccgccggggctctatggtctctccctagagctttgccgttggaggcggctgctgcggtcttgtgagtttgaccagcgtcgagcggcagcaacatggaggaattcgactccgaagacttctctacgtcggaggaggacgaggactacgtgccgtcgggtggagagtatagtgaagatgatgtaaatgaattagtgaaggaagatgaagtggatggtgaagagcagacacagaaaacccaagggaaaaaaagaaaggcccagagcattccagccaggaagagaagacaaggtggcctctcattagaagaagaggaagaggaggatgccaattcagaatctgagggaagcagtagtgaggaggaagatgacgctgcagagcaggaaaaaggcattggatcagaggatgccaggaaaaagaaggaggacgaactctgggccagcttcctcaatgatgtgggaccaaaatcaaaagtgcccccaagtacacaagttaagaaaggagaggagactgaagagacaagttcaagtaaattgttggtaaaagcaggaagagctagagaaaccctaaagaaacagaaaaagttaaaatcaccaaggtggtttgattttgctggcgaagaagtaagggtaactaaggaagtgggatgctacatctaaagaggccaaatccctttttcagccagaatggaaaaagaaaacccccagggctaagggtcccttccagctcgggccaatcactcccctggccgggggtaaggggttaaaaaaagaatcccagtggggccattgaagccagccccttttttgggggggaaaaaatttgggggcgt

SEQ ID NO: 1601 - DNA, 1267 bp, Homo Sapiens
  misc_feature (945)..(945): n is a, c, g, or t
cggctggtaccggtcggatttccgggatatcgtcgacccacgcgttcgcagtgacggcgaggcaggaagctgtgagtgcgcggttgcggggtcgcattgtggctacggctttgcgtccccggcgggcagccccaggctggtccccgcctccgctctccccaccggcggggaaagcagctggtgtgggaggaaaggctccatcccccgccccctctctcccgctgttggctggcaggatcttttggcagtcctgtggcctcgctccccgcccggatcctcctgaccctgagattcgcgggtctcacgtcccgtgcacgccttgcttcggcctcagttaagcctttgtggactccaggtccctggtgagattagaaacgtttgcaaacatgtcccggatcgaaaagatgagcattctgggcgtgcggagtttcggaatagaggacaaagataagcaaattatcactttcttcagcccccttacaattttggttggacccaatggggcgggaaagacgaccatcattgaatgtctaaaatatatttgtactggagatttccctcctggaaccaaaggaaatacatttgtacacgatcccaaggttgctcaagaaacagatgtgagagcccagattcgtctgcaatttcgtgatgtcaatggagaacttatagctgtgcaaagatctatggtgtgtactcagaaaagcaaaaagacagaatttaaaactctggaaggagtcattactagaacaaagcatggtgaaaaggtcagtctgagctctaagtgtgcagaaattgacgagaaatgatcagttctcttggggtttccaaggctgtgctaaataatgtcattttctgtcatcaagaagattctaattggcctttaagtgaaggaaaggctttgaagcaaaagtttgatgagattttttcagcaacaagatacattanagccttagaaacacttcggcaggtacgtcagacacaaggtcagaaagtaaaagatatcaaatggaactaaaatatctgaagcaatataagggaaaagcttgtgaggatcgtgatcagatttacagtaagggaagcccagttaacatcttcaaaggaaattggtccaatcctatgagaatggaacttgatccattggagaaatcgtctaaaagaaatttgaacataaatcctctctaaaaataatgaaaacttgacaatggaaattaaaagcctctggaatagcccaaaagaaagccaaatgggagaaaaggataaatagtgc

SEQ ID NO: 1602 - DNA, 434 bp, Homo Sapiens
catattagcttgaggcattgtctgtcttattgtccagcttggttagtgagcaagtggattgtattctgttatgtttttatgtatgtcactcttttagtctgccagtttctttggttattttacaaaattgaatatgatttctggatcatcactttgtattatctgtaatttggtctctcccattaacaccattaaatagatgataactgattttatttccttctctttcaaaggaaaaccagtgttctctggacatgaaaagcaaactgaatacaagtaaacaagcagaaaatggacaaccagaaccacaaagcaaggttccggctgaggaccttacattgacattcaggtaaagaaaaggagattgtcgtagccatattaaattacacacaaaagagaaactaatatatgatccagaatattgagggaccgcc

SEQ ID NO: 1603 - DNA, 888 bp, Homo Sapiens
gggtccggaattcccgggatccagcctggggagcagggccagtggtggcggcgccagtgggtggaggagttcttcccatccgtgtccctgggggaccccacgctggagacgctgctcaggcagtttggactacaggagaaaagcccacctcgcacccgcagcgccaacagcaccctggcccaggccctccactggactcgctctcagctgtctcccctggaggcccccgccctgctctgggggctcctcatggccgtgggggctgtcagatttgtgcaggccctgctagcaccctgttctctccggtcctccccgctggcaccagtcagcggggagaagcgcaggccagcctcccagaaagactccggagctgcctccgaacaggccaccgcagcccccaacccctgctccagtagttcgaggaccacccggcgaaagaagtagctgtgttctcccagctgcacgtcctgagagggccaggtcgccgggagtgctctggcctccggcaggacaggacccagccactgtgccttagctgaccctgcagggccaggcacaggttggggggctgcccctggggtttgcagggtgctgcattgagggctccaggccccacccccacgccagccatgcccctccccaggactcccactattgcctctgtgattggcccaggaggaaaacacgaccaagctcaagacccttcccctgccctgggctgtgggggtctgagtctagagcccccaaccctaggccccgtgccagaggggaagaggctgactcccaggggaagaggggaagcactgtcatcttccacgtcatcttcacaccagcccatcctgccctttagatctgggcaccaataaaggcgtcttttgtgcttggcaa

SEQ ID NO: 1604 - DNA, 1158 bp, Homo Sapiens
  misc_feature (19)..(19): n is a, c, g, or t
  misc_feature (710)..(796): n is a, c, g, or t
  misc_feature (801)..(828): n is a, c, g, or t
  misc_feature (837)..(853): n is a, c, g, or t
  misc_feature (980)..(988): n is a, c, g, or t
aattttttatacaattacncatttggtgatatgatcttaagcttttgtgtcagattatttaatatgatgacttcatgctttattatgccttattatggctgacgtattactgtggtgaaacaaaatatctttaaaagttaaaacatccagatatataagctattttttcctaaggataaagtacctttgagcatgagtgtatcacagctttcattaggaaaacttttcattacatacttgtttaaactctgtcttccagggtaaaaataataaggttgaatcattttattaaaaatactttttaagaaaataactatgaacatctgaatattaaagatataaaaatgcacataattcatatttcaggtggtatttgcattcagtgccttactggtattctcagaacattttaatgatttctaacatttcttaacagtcatagatatatacattttcattttttgtacttgaatattctaaataaaactgacatttactcttgacaaataaaacatatatttactaaaatgtgtttaattttcctttctgaaaactctcattttaaaaacgttcatttaattatgtatttgaattattttggagatgaggtattttatgagtattttcagacaatgaaacttattagtctgtgtcagattctgagcaatcatagagtcatctaagttgtaaataaaaccttgcatagcacnnnnnnnnnnnnnnnnnnnnnnnnnnnnnnnnnnnnnnnnnnnnnnnnnnnnnnnnnnnnnnnnnnnnnnnnnnnnnnnnnnnnnnnccccnnnnnnnnnnnnnnnnnnnnnnnnnnnnctttggcgnnnnnnnnnnnnnnnnnaaaaaatttttaaaaccattccttgtggggcgggggcccccaaaaggaaagaaaaacgggcccaaagtggtttccccaagaaaaaccggggcccaagaaatagggcgttgggaattccccaccaatnnnnnnnnncccgcggggggggaaccccaaagggtttttaaaaacaatttcccgggtgggggttttcctggaggggtttttattggggaatcttcatctcaagagggaggccccaaggggagccctccatatatacaaaatttaccccccccgcccggggccttttttattggaagaaa

SEQ ID NO: 1605 - DNA, 1411 bp, Homo Sapiens
  misc_feature (783)..(794): n is a, c, g, or t
  misc_feature (1327)..(1327): n is a, c, g, or t
tgaaaaaactaaaacttccaaggtgtgcccccaggttaaaaaatcaccctgtgccttgtcttaagaaccctctttgttgcttcgggccttttaggccacatccgttaggtgttaacggccttgacctccgactctccaaagtgagccccacttggggttctgaggaccccctggcagagtccacgctgcctcaggtatcatgggcgtaatgatcacccaggctccgggagatctcatggatgattactgtatgagacagaggggacttcagtctttccagggccttggtggaatttttggctctggtgttttcgccagacaataaacttacactggaagctttgattcaccctccacagtactccagaaaggactgtcctataagttgtacactttaaaaggtcatgtagaggttgtagtagaatggcttttcaccctggtgactttggaagaaactcttgaatactgcctgcatccgggcaccatggccaggttgcctaggagtggggtccactgatgaaaagaggtgttttgtacttacataagaaaaataaatttctgattgattttaccgcacgagaagaacccccacaccagaaccaaccatcactcaaaacgacctcccatctgtgcgcggcgccctccgccacccgaagagcttcttagaacatttcttttcggcccgcccggtcccacaaatgtacctggatatagctgtcagagcctggtttcggaagacaaacccatgaaacataccaatgaggccatggaaattcttccccnnnnnnnnnnnncaccaccccgccacgacaaacagaattcggggcgcttggcgcccactatcccaaacataaggacaactctccgtctggtctacaccgcgactctcggagatcctggacaacacaaacactccaagctcacttggaagacataaacgcctccagaacacgacctctacaatctccatacagtcgcatctcggcagccacagcaggcactatcgctacctctgcccattccgcccgaccacctccgccacacattatcccatcccacacaccgccacattcttatatcacctcacctcgccccaacaccgagcatcgccagaataactccggcgtggactatagactacaccgtgctcccaattagcgcgactatagatcgcctctctaccactcgacgtaggttcgcgtgcatgaagaagacgtgcaaacaggtctctctgccccactgtcgttagaaactactcgcgtttctccgtgccactaaccaactgaccagaccacgagtctcgtgagcccgggacagatatgtgtancttggtcgctctggacaccgaccaccaccgtaattagtaccctacttacacacacgcaccgaagactctaataacatctagtcc

SEQ ID NO: 1606 - DNA, 782 bp, Homo Sapiens
gggagcacacaggaaacccctaactttcctataccccacccgcctcttcccctttctgtcccgggatacctggcggcaagagacttcttggctattgtccatgctcccagaatcaagcataaatgccagacacggcgattgagaagccaatcagtgaaccctttggcaaagcccccatccacacctggcactcccctctaccaatccctggcacagggttcctggagagcaggtgctgtacattttacagctttacaatggggctgttgacagccataattagggaggcatgaattatgcggctataatgcagagccctacaattaaggcgggaatgaggggctggaggcagcaaacggaatctgccctatgagcgtggctgttgagtcctgtctcctgggtctgactttccgtaatatgattggggtacagtagaggtgattaatggggctggcatctctctttggcctgaggttctgtattctgggaaaggtacacagggtggagtagggagaagctgccccaggaggcgatgtagtggtggaaagaagaggcagagaggtcgtcgtcgtcgcccagcagcaagggctgcaaaatagtagaactcgtggttgctttggacaggtgtgatttgtgcaagccaggttcaacccttgcctcaagaaatcagatgggaccaatttagtgtccttccacctgtgagccaagcccccatttgaggacatctatcgtattcttgtgtgctgggtctcaaatagaatttttaaagattcttagatgta

SEQ ID NO: 1607 - DNA, 471 bp, Homo Sapiens
  misc_feature (51)..(67): n is a, c, g, or t
atatcgtcgacccacgcgtccgcccacgcgtccggtgagactctgtctccnnnnnnnnnnnnnnnnngagtaattagaaacttttatagcaatttgacattgccataacattgttattctgttttacaaaaatactgtggattgaggtccttcatgaaaaagtgtgaatagtacttgtttaagcaaagtattaaatttaattagtaaatttagtaattcattttgtctataataaaggaaattaattaaaaaatggatttgattatctcattgtacttcatattggacacttaatagcagtgcactttatcttcagtgttgagggcctgatatttgcaataaatatttggccaatattacagaacaggatgatgttgagagtcaatgtttacctggcctacttgactacagatatatacagttttatgaggcttggcttgcctgacatagacgatagcctacactagtgga

SEQ ID NO: 1608 - DNA, 624 bp, Homo Sapiens
  misc_feature (59)..(59): n is a, c, g, or t
  misc_feature (65)..(65): n is a, c, g, or t
ccagaccaaccaaggccctgacagccctgccttctgccctctgccctgcatgggcaggncatttnttccctacctgggtggcctgctcccctgcctgggccctgacttcagctccctgtagtgaagtccaggagggtgggacaggcctgtaaggctctgggaatctcccaaatcccagaactcaccactcaccatgggcctttaaatgcagtaaactccacctaaccagattcaggggcactatgcccactgcctcctcttcagactctttgcatttcagtgaagagcctggaagaaacccaggggcctcctatgcacagatcttgcagcccagaaccaagtcagcctccctgcgactgcccaggcacactgcccaccaccccacccccgaaacaatgccagcccgctgctttttctatcctcccagtcacctttgcagacaaagaccaggggcagctcccgagggcactgtgaaggctcccatgccacacagtgagaactgtagcctctgcgtccaaggcacacagggtactttctggacccactgctggacagacttgaaggtgtcatgcccggtgtgtgcaggaggaaactaacagttcagtaaactctgccttgaccagc

SEQ ID NO: 1609 - DNA, 1516 bp, Homo Sapiens
  misc_feature (1378)..(1378): n is a, c, g, or t
gagagtcgcctgagccagatcccaggtttcactgaagaaacttcttagagattcatgcacttctgagatttaatgtttacaacttggagtgtcgaccttcttataagatacattttggaagtcaaaatgaaagttttctgtgaagttttagaagagttatacaagaaggtacttcttggagccacacttgaaaatgacagccatgattacgtcttttatctcaacccagcagtttcagatcaagattgttctacagccacctccttagaatgggcaaacacctgtggtatccagggcaggcatcagcccatctctgttggtgtggctcccattgctgtagcacctgtgtgtttgaagaccaactctcagatgagcggttccagagaagtaatgctccttcagttaacagtgatcaaagtgatgacaacccggatattgtctgtcaaaaccgagttccatgcaaaggagcagtacagagatgtaattaaaattctcttagaatcagccaaagtcgattctaaattaatctgcatgttccaaaattcagataaattgttatctcacatggctgcacagtgccttgcattgcttctatatttccaattgagaaaaaagataaccttaagtaattcctggattgctttttgccagaaaaatctttctgaatactctgagagtaataaagcaatatactgactctggactcttacagacaataataaaagaacatctagaaagattcatgttcacagaaaacagaaattctaaagcagtccctgactcatttcgacaccatttttgaagtgttttaccaattccttattctctcagcatattgaaaactgccgggataattctaaaatagtaaacatcctgatgtgtttcctggatttgcttgagcttctcatcgcctccagaatccacctgaagttacatttcacttgccagaggattttatttttgaaaccatcttgcatgctagaagttattacctggcctattcaggcttttgttaaaaggaaggtcatcatattcctcaaaaagtgccttctctgtaaagtgggtgaagacctctgtcgtggatctgtgcctgccttaatgccgccagaccatcatgtagcggtggacatgctggctttagctaatgctgttttgcaagctgtgaattcggggttgttgaagacactgtctgtttatgaaaaacattccttttttggaggtgatgaagttcaacctgaatgtgaacttatcactagtccagatcatgtgatccttagagcagcaagcttagttataatgaaatccttagaaatcaagtttcaaaattattcttcagcaagtgaaatgaaaggtgcgtgaccatggcccactgcagccntgaccccccttcggcccatgctattcctcctgtcccaacctgggaggtcctagcctgggagatcaaggctacagtgagccgcgacccatcgcacacctgcactccagtcctggtgcaacagatggagatcctttcagg

SEQ ID NO: 1610 - DNA, 521 bp, Homo Sapiens
aactgtcagagctgatgttacagcttttacagtttaaagcattcccctcgtctctagttccttttttcttgtttacatgttttgggcactttccctcattcaccaccttccagggtttcatagaaaataacttgttacaaaatcagttcaattctaatgtggacatagtggcatgttcataattagacccatataggggacactgagctttaaatcgttgattctaaactctatacattaaaaaaattcagcccaggcccctcaaagcctgagaaaatttaatttgctcttaatttaatgttccaaaactcactcttggaaaaatgcctgttggaaaactacaggtgggtcacatgtgggggctgtctccgtgacactcaggattccagtcagaacctgatcctcatatctattgcctacaaaaatagaccaagaatgttgctgctcttttataatcctttaaatatttaacattcaagttttctttgtcttaaattcagcctcttcctaaaagcaaaaaa

SEQ ID NO: 1611 - DNA, 918 bp, Homo Sapiens
gcagagatggcccggtcaccatgaacgccgagtacctgattatcaatccgcggttccgcctcgggccctggccccctttccaccattacgcgtcagaccaggacccatcggaactgagcccccaaacaagcaggctgccccggaatggaacacaaaaatcgggcgagagtcagccgcatgacctctccccaagcagaagaaagacccaggacggacgtctcacaaatgggatctcatcgtgctgcgcagtgcctgctagtcctctcatgtgcagtcagcgccagcactgtatcgcggtcattgcgaccatttctcagcatcgtgctgtttgccttggcaggagaccgtggggtttgtaacacatgacgtgctccctcagctccgcaagcatcatccctggatgtaggatctcacaccccagttctcgaaataacaaagagtatcatcaacgggaagtgagagatgttgcccatttaatgtggttcgaaagactctatgtttggcttcagtcgtgtttgaaaaatacatcttgtacccagcgctaattttgaatgccctcactattgatgcatttttgaataagcaatcaccggagacttggtacccactgggacatttttctgatgatcattgctggcatgaagctgttgcggacatcattctgcaacccggtttaccagtttattaacttgagcttcactgtcatctcttttccactttgactacaaagatatttcagagagcttcttactggatttcttacatggtgtccattttatttagcaaggtgtttctgggctacgtgaggcaaaaataaaaacagagaaacttcaccacagtgtttttccgttggatcccatgatgcccagatgctctactttttccttttacctttcagaaggtgtttttataacatgc

SEQ ID NO: 1612 - DNA, 574 bp, Homo Sapiens
  misc_feature (420)..(478): n is a, c, g, or t
tcgagctcggcaccggattcgggtgggaatgcatgacctgcagacgtgactacccgaaggcagctgaggcgcgccgtctctaaagtgctgagagaaaaatacgggaattctatatccagtgaaattatccttgaaatatgaaagccagttaaggatgtcttcagccaagcaaaggatgagagagttgattgttggcagaactgctccatttcagcaagtatccaaggcaagcctgcaaagcctgcagcctagggaaggaagggcagggaggctggaatgcatgactctgtggtgaaatgacaccagcaccagctgcttaaaacaccaatactaacgtcctgtgggttttaaaacctgtttggtagtaacatatctgacagcaggagcaccagcgcgtgcgcacacacagacagcaggagnnnnnnnnnnnnnnnnnnnnnnnnnnnnnnnnnnnnnnnnnnnnnnnnnnnnnnnnnnnccgaggaggggattaaccgagtgaatgtgtttcaggagctccatcaccaggaagcagagaatgtaccaatccctagggcagattaaagatgcaatc

SEQ ID NO: 1613 - DNA, 416 bp, Homo Sapiens
agccacaggccaggccatgtcagatgagtcttttggatacacctccaatccctcaccactcactcaaccagtggcacagtgtccttgtgcccacactgagccagcaagtcctgctgtccacacccacaagctacctggagggacaggacccacactccaaccttcggaaggccttcctggaatcccacctgggcctccgccctcggttccgccccgcccctctccccccgaccttggggcttgtgtcgagcccttgggtggggccaggaggaggtgatggcgtcagaggaggtgtggtcagaggtgacttgttcccaaatccagggaggacgcttcgtcttcggccagcgcagacctggtgtttgtttgtttgttgtgctcacgcttgcacaatgaaggcttgttcacacaaccac

SEQ ID NO: 1614 - DNA, 975 bp, Homo Sapiens
tggcagtccatcgaatgtgatcttcccgcccaggtactggttagttagatcggatgggtcatcctccaggaagcggtagtagccaaattctgagacttttcagaccagcttctttgttgacaaggattgttgcgagcagccatggtctcggtgcacataggttcatctcggacacggtacttcatgccggcagcaatgccccgcaacatgcccaccagctggatgaccgtgaactgcccatcgttgagccggaggaaggagtccagggcgcagttttccatgaactcagtgaggatcataactggccgacttttggtgaccacgccctcgagccggattatattggggtgatcaaactgacccatgatggaggcctcgcttaggaagtcccgccgctgcctctcggtgtagcccaccttcagcgtcttgatggccacaaacacctctcggcggccaggcagtttcagtcgaccacggcacacttccccaaattccccagctccgatcacctcctcgatcttgacgcaggacacgtcagatctccttgagcaaactcccgaacagcctcattagggtcctcgtaggtaaaagggtcaatataaaccttcattccaggagcaatgtactgctgcagcttctccgtgtactccgaatcagagccgtgtcgctgcttcctgaggcagacgatagcgatgaccacgacagccaccacgaagacaagcccagctgtagcggagcccacgatgaggggaagctgctcctggagctgctgggccccagagcctctctcacttgtggtctcaaactcggcagggcggctgtactgcccatagccagctactgtgcgggcacggacctggaccacataacgtgcgtcagtccgaagcccgtccagctgcacggagttcatctgctggtcactgtggagcgatgccctcgctcttctcaaagtacttcatctcgtatcacaggatg

SEQ ID NO: 1615 - DNA, 925 bp, Homo Sapiens
ggtagctgcgaatccatctcccttggcctctccaccttcatgatcgacctcaaccaggtggcgaaagcagtgaacaatgccactgcacagtcgctggtccttattgatgaatttggaaagggaaccaacacggtggatgggctcgcgcttctggccgctgtgctccgacactggctggcacgtggacccacatgcccccacatctttgtggccaccaactttctgagccttgttcagctacagctgctgccacaagggcccctggtgcagtatttgaccatggagacctgtgaggatggcaacgatcttgtcttcttctatcaggtttgcgaaggtgttgcgaaggccagccatgcctcccacacagctgcccaggctgggcttcctgacaagcttgtggctcgtggcaaggaggtctcagacttgatccgcagtggaaaacccatcaagcctgtcaaggatttgctaaagaagaaccaaatggaaaattgccagacattagtggataagtttatgaaactggatttggaagatcctaacctggacttgaacgttttcatgagccaggaagtgctgcctgctgccaccagcatcctctgagagtccttccagtgtcctccccagcctcctgagactccggtgggctgccatgccctctttgtttccttatctccctcagacgcagagtttttagtttctctagaaattttgtttcatattaggaataaagtttattttgaagaaagatattgtttctttagtctcaaaacaagagactaggaaagatccaaaacacagagcaggagtccacaggggaacctgccctgcctcagtaaaaatacagtgttgttgctgtaggaagactcccggattctaccccaggatacttcatgagaacgaaccccttcagagaggccctacaaaa

SEQ ID NO: 1616 - DNA, 571 bp, Homo Sapiens
gtattttgggtccggcctgctcgccgtccgctccgtccgcccttagacctgttgcccagcatccctgcagttcgcgcctgccgaccatgcccgcgggcgtgcccatgtccacctacctgaaaatgttcgcagccagtctcctggccatgtgcgcaggggcagaagtggtgcacaggtactaccgaccggacctgacaatacctgaaattccaccaaagcgtggagaactcaaaacggagcttttgggactgaaagaaagaaaacacaaacctcaagtttctcaacaggaggaacttaaataactatgccaagaattctgtgaataatataagtcttaaatatgtatttcttaatttattgcatcaaactacttgtccttaagcacttagtctaatgctaactgcaagaggaggtgctcagtggatgtttagccgatacgttgaaatttaattacggtttgattgatatttcttgaaaactgccaaagcacatatcatcaaaccatttcatgaatatggtttggaagatgtttagtcttgaatataatgcgaaatagaatatttgtaagtct

SEQ ID NO: 1617 - DNA, 1206 bp, Homo Sapiens
  misc_feature (49)..(278): n is a, c, g, or t
cagtcgacggtaccggacatatgcccgggaattcggccattacggccgnnnnnnnnnnnnnnnnnnnnnnnnnnnnnnnnnnnnnnnnnnnnnnnnnnnnnnnnnnnnnnnnnnnnnnnnnnnnnnnnnnnnnnnnnnnnnnnnnnnnnnnnnnnnnnnnnnnnnnnnnnnnnnnnnnnnnnnnnnnnnnnnnnnnnnnnnnnnnnnnnnnnnnnnnnnnnnnnnnnnnnnnnnnnnnnnnnnnnnnnnnnnnnnnnnnnnnnnnnnnnnnnnnnnnngcagaatcaatatgtgcacagttctctttatcaggcaaaaacacgtttattgagacatgaaatgagaatcaggctgaaggaatcatgcagctgaaagatgattatattcatagaaatgaagagatgaaatattcaaagaagatggctactttattgtgagacttaccactttaacctcatatgttaacagcacctaccaaaaaatgatatgagatagagctaaaatactgaaattgcaaatggacaaaataaatcatgaaaatttgtttattatttcttcaataaatatttctaggtgctttgtgattctttcatttagtcattaaagccattgctttactatatttgcgttgccactttaaaaacaagttacttgacattggttttgacagatttcactaaattcttatgtaattaattgattatttctaaaatgtttgaataaactttgtactccctctaaggagtattttattcattcttttaattcccaaatgaactttgaacttacagtgctgttgaatgccttggtaaggacttcttgaaattgcataaactattcttgtaaatggtaaacttgagaattttctttgtttcttttttctctatgtcttaaagaatgcctttagaatctaattcatgttgtatcagttaagaatgtttctgtggtttctcgtatcagatgtgtaaagaaattattactgggatgccattggctatgtctctttccccttcatgtaaaattccaagtgtcagtaaaacttctctataatattttcttaaaaccatttataaatttgtgttataatactccagaaaatcaatgtaataagtggtcatatatatcaccaactatggatatcaaaaagttggggtcacatcagtgctatttatttaattaaaatacattgcatatttctattagcac

SEQ ID NO: 1618 - DNA, 1002 bp, Homo Sapiens
  misc_feature (453)..(453): n is a, c, g, or t
  misc_feature (576)..(576): n is a, c, g, or t
gggaggcgctgaaagattttgagaagagggggaaaaaggaagtttgtcctgtcctggatcagtttctttgtcatgtagccaagactggagaaacaatgattcagtggtcccaatttaaaggctattttattttcaaactggagaaagtgatggatgatttcagaacttcagctcctgagccaagaggtcctcccaaccctaatgtcgaatatattccctttgatgaaatgaaggaaagaatactgaaaattgtcactggatttaatggtatcccttttactattcagcgactatgtgaattgttaacagatccaaggagaaactatacaggaacagacaaatttctcagaggagtagaaaagaatgtgatggttgttagctgtgtttatccttcttcagagaaaaacaattccaatagtttaaatcgaatgaatggtgttatgtttcctgganattcaccaagctatactgagaggtctaatataaatgggcctgggacacccaggccacttaatcgaccaaggtttctttgtcagcccccatgacaacaaatgggttgcctgagagcacagacangcaagagggcaattttgcagcaaaatgaggagaaaaatcacagtgactcttcgacctctgaatcagaagtttcctcagtgagccctttgaaaaataaacatccagatgaagatgctgtggaaactgaggggcatgaggtaaaaagactcaaggtttgacaaagaaagtgaagtcagagaaacagccagtcaaacgacttccagcgaaatttcttcagttatggtaggagaaacagaagcatcatcttcatctcaggataaagacaaagatagccgttgtacccggcagcactgtacagaagaggatgaagaagaggatgaagaggaagaagaagagtcttttatgacatcaagagaaatgatcccagaaagaaaaaatcaagaaaaagaatctgatgatgccttaactgtgaatgaagagacttct

SEQ ID NO: 1619 - DNA, 1079 bp, Homo Sapiens
ggggctgctatggaggcgctggccatgggttcccgggcgctgcggctctggctggtcgcacccggtggcgggatcaaatggagatttatagcaacatcgccagcttctcagctgtcaccgacagaattgacagaaatgcggaatgatctctttaataaagagaaagccaggcagttatcattaactccccgaactgagaagatagaagttaagcatgttgggaaaactgaccccggtactgtcttcgtgatgaataaaaacatttcaactccctacagttgtgccatgcatttaagcgagtggtattgcaggaagtccattctggctctggtggatggacagccttgggacatgtataagcctttaacaaagtcctgtgaaattaaatttcttactttcaaagattgtgatccaggagaagtgaataaggcatattggcgttcctgtgctatgatgatgggctgtgtgatagagagggcattcaaagatgaatatatggtcaatttggtcagagctccagaagttcctgtaatttctggtgccttctgttatgacgtagttttggatagcaaacttgatgagtggatgccaacaaaagagaacttacgttccttcacaaaggatgctcatgctttaatttataaagatcttccatttgaaaactctggaaagttgaagcaaaagtggcattggaaatattttcaacacagcaagtacaaagtagatttcatagaagagaaggcatctcagaaccctgagagaatagtcaagctacacagaataggtgacttcattgatgtgagtgagggccctcttattccaagaacaagtatttgtttccagtatgaagtatcagcagttcacaatcttcaacccacccagccaagtctcatacgaagattccagggcgtgtctttacctgttcacttaagagcacattttacaatatgggataagctattggaaagatctcggaaaatggtaactgaagatcaaagtaaagcaacagaggaatgtacatctacctaataactttctaaaatttaaatatgtataataaaataaatgttttaaatata

SEQ ID NO: 1620 - DNA, 1084 bp, Homo Sapiens
ggggaagtcctgcgagcgacgcgcggcggggcggcgagaggaaacgcggcgccgggccgggccctggagatggtccccggcgccgcgggctggtgttgtctcgtgctctggctccccgcgtgcgtcgcggcccacggcttccgtatccatgattatttgtactttcaagtgctgagtcctggggacattcgatacatcttcacagccacacctgccaaggactttggtggtatctttcacacaaggtatgagcagattcaccttgtccccgctgaacctccagaggcctgcggggaactcagcaacggtttcttcatccaggaccagattgctctggtggagagggggggctgctccttcctctccaagactcgggtggtccaggagcacggcgggcgggcggtgatcatctctgacaacgcagttgacaatgacagcttctacgtggagatgatccaggacagtacccagcgcacagctgacatccccgccctcttcctgctcggccgagacggctacatgatccgccgctctctggaacagcatgggctgccatgggccatcatttccatcccagtcaatgtcaccagcatccccacctttgagctgctgcaaccgccctggaccttctggtagaagagtttgtcccacattccagccataagtgactctgagctgggaaggggaaacccaggaattttgctacttggaatttggagatagcatctggggacaagtggagccaggtagaggaaaagggtttgggcgttgctaggctgaaagggaagccacaccactggccttcccttccccagggcccccaagggtgtctcatgctacaagaagaggcaagagacaggccccagggcttctggctagaacccgaaacaaaaggagctgaaggcaggtggcctgagagccatctgtgacctgtcacactcacctggctccagcctcccctacccagggtctctgcacagtgaccttcacagcagttgttggagtggtttaaaagagctggtgtttggggactcaataaaccctcactgactttttagcaataaagcttctcatcagggttaaa

SEQ ID NO: 1621 - DNA, 418 bp, Homo Sapiens
cgccgggggaatgacagcgagaacggacaactcgtcggcgggaggaaggttccacgcataaaacaaacaaaaaaataataatgtgggctattcagaagaaaaagtcagtgacagagagaccagaacccattggatcaagagacctgcagggattataactctttactctgtgagcagcggtgtttcgtgccctgtctctgcctgtgtgtttttactaagaattccagaaatcctgtaatttgtaaatgggaaacagaggaaccagattgttttatagctgataagaaacagtctgttttagaaacatctgtttggaaagtattactcatgtattcacaaagtcatatttataacactagtcttctttgactgtattcaacaaaaggcagtttcatcgccttactcgaattcctgccgc

SEQ ID NO: 1622 - DNA, 695 bp, Homo Sapiens
tcgtaatagtgttgtgagttgtggaaggggggagacggcgggtgggagggccggagtccggccatttccctaggacaacgatatctaaggcgcctttgaataaggtccccgggaagaatgggtaccaacggcggtccttgtttgcccatacttccttttaaattcctcctaaaactaccgtgtccaattaccaaggttaagcctttatccattgggtttggggtcaagtgggccgccgttgtgttttgtttttggactatgttccgatgttactagatactgctagtaagtgctagagattacactggtgaataaagtatagttccttggcccagagaattttacagtttagtagggagacaataggtagttagcaggcacttaggaagtaggatatataaatgctctagaagcagacaacttaaagtgctgtgggagcaaatgtgtagccagtgcagccttaggtcagtgagcggcttcttggaggactcacttgcctaaggcggaaaccttgaaaggatagtagtacatactggctagaaaggaattgagggaagaagggattcctaataaagggaactgtgatcctaggttggtagggagagcaggagtgcttgagacagagagggaagatatagatacccgtagcatggttgtagttaaaatggaattaatcgtaagagacggacagggcc

SEQ ID NO: 1623 - DNA, 560 bp, Homo Sapiens
ctagtaccccctcacaaattaggtaactaaggcttgaagagacaatgcaatgcaaattgggcttgtgacctggctctgggcatcggtttcaggtactaaatctaatgaagggagacttgacagaccacaggaagaagcacagagtaaaagggcagaagcacggacataacaagagctttcttgggaactaaacctccaatgacatagagaaatacttcaaaatgttgctttcttttgctggcagtaaaattgagagctctcattcagcttaaatgaaaaatgtgactaccaaacacatctttaacaggaaaacagttttcttgattgctgaatttcctccctaacagagttgaaatcagaaaaagtgcaatgtgtctgaacttaatggtgtcagtagtttcctcaagaaagggactgatgctacagcaagacaaacagccctaaattacttctgacccaataaatacgcgcttcttgactcttcacgtgttgctcatgacataatactattctagttcttccacttctctgattgtcctcacttgttgcctcttcctctt

SEQ ID NO: 1624 - DNA, 507 bp, Homo Sapiens
  misc_feature (331)..(331): n is a, c, g, or t
ctggttaagatccctgaagaggtggcgtctcccgtccatttcgttccctcatttctctacccattttctgtgcctgtgcaaggtcccctgtcttctgctatcggaagtcattcacctgggacgtgctgcccatctccactgccctttcccaggccctctactcagctgaaatgggaagaaaggagacccgggacagagagtacgtattgcgctgtgtgcctggtccatgagggaatcctccacgtcctcatcctcctgcccacctttgctaagaggtgctggtgagcagtcgggaccagctggctggtgagggaggtgtgcgtgaccacantgtgcacacatatcgtttgaacctggggcttggcaggcagggtgcaaagcagtggatcagaggatttgtaagaagatctcagcagggaggcctttaatctttaagccaactgcttgtacggagaccatgttgtcagagatgaccttggaggcaaaagcagtcagaactatatgggg

SEQ ID NO: 1625 - DNA, 510 bp, Homo Sapiens
atgccattcgtaaagatgttcgtgccatcctgaaccggatgtgccttgtctacccagctagcaagatgtttcccctttatcatggaaggaaccaaatccaaaaactctaagcagagagcagagtgcctggaagagctgggatggctggctgagtcctaatggcatgaatgtttgccaaccaaccccaggaaaagccttaaaggaaatagctgttcacataggagaccgtgacaatgctgtaccgcaatgctgcactcaacaccattgtaacggtgtacaatgtacatggggatcaggtgttcaaactgattggaaatctttctgaaaaggatatgagcatgctcgaggagaggattaagcggtcagcaaagagaccctctgctgcaccaataaaacagatggaagagaaacctcagcgtgcacagaacataagctccaatgccaacatgttacgcaagggaccagctgaggacatggcttccaaactcaaccaagcccgaagcatgagtg

SEQ ID NO: 1626 - DNA, 471 bp, Homo Sapiens
tctccgacagttggaactgctggcacaggtcctcccgctcagctgatgaggtggagccatcgatgcggatgtgctgcacgtgctttctctcaagctcttgcgtaattgcgtccaggaccaccttatggtgtgcaaatactaaaaacttctctcttccactttccagtaggtccaagatatattcaatgacagatgggattttagcttcagctgttctgttgaagaagagaatgagggcatctttctgctgctgtttagttttgtccttggtggtcatttccttggctgcagcatccagggcagctctggtcctggcattgatccgtcctggggcaatcaccactatcttgcgctgcttggaaggcagctgggaaaggacgtcggacttgaggcgccgcagcatgactgcttcctccagcaggagcttcagctctcccaggttggaggaacctgagtagtcccaccccccaa

SEQ ID NO: 1627 - DNA, 308 bp, Homo Sapiens
ctgccacaaaagggaatgctaatactaaatgaattaaaaatgtctcctaaatttcagctaccagtttgagctcaacctagaatagaatactacatatcaataagcagagttcagtcttaaacgattacatgacaaaggaaactgaatatgcaagccccagaggaagctcttttggctgtaagtactttaatcctgccagaaattttaagaattcacaagccatagagaatatttaaatcacagatggacggggttcaataaagctccagaactggcctttacagatatttaaacatcattctgaactt

SEQ ID NO: 1628 - DNA, 541 bp, Homo Sapiens
cccgagtgggtgtctgaaatgtgaccttgtatatccctctcttacctgctcactctgccttcactttccttcctgtcttagaagtggatcagagcctcagcgattcccattccggcttacactgtgtgtaggggaaacaacagtcacccttcccaaaggatttgaagccacagggttccagagcttttgtccatctgtaaaaagtgtatgcctctgagtgcctaagtcagagttttcttcatggttaactccaggactcttgtgtatggggtgtagttcctagaaggcatcacaatttcacgagtcctgcctgtttggctgggtagaagatcacagcccactcctatctctctggtttccacttcggtcttggcctgggtttctgttaaatagtccaacctgctttgtagttcattattctctccttctaagaaagatatcttttctaaaagctgcagtattaagagctgtttctgttgcaactttttctttaatgattcaatctcctcgaacatctgcttggcatcctttgtgcagacac

SEQ ID NO: 1629 - DNA, 344 bp, Homo Sapiens
tcgcacagcccgggcctggaaacccctgcccctgctttcctcgcaacagtctgtcattctagaaggctctctccaaaacactcttccaaagagggtcatgccagggaacagcagcgaggtcattttccagtcatcccacaggaagccagtgagccccactcccactgccgtggacctccaggcctggcttccttctcttccctgggttacctgctcaggggcttctcagccaggccagcatgtctatcaggcggcatccagcatccaatcacagtgacaagaaccttccggaacaccctgcaaactgtggatgcccacgggtggccccattatgccttgagcag

SEQ ID NO: 1630 - DNA, 666 bp, Homo Sapiens
tccaggatcaggatggttaatatggggtccttccagcatcttgtccaggagtacccccatcatctgagatgtacacatctggaaccatcactgagatggcatcccccacgctaccatgagcaatgaccaaacgtacggcattcggctctgagagtggggccattggaacattcagtttctgggagatgctgtaggaagcatgaatatgaaggctgcactcattcttgttttttgctgtagcatcacattcactgttttcaggcttcctcaggtgcgtccaccttcctccttggtcaaaagtgatcatggtctggatagaattatcttcggagagcacgcttgttatgtagacgccgcggagggaggtcacgttggtaaagtccgtctctccgcctgtggtagtgtagagatgtcggtccaaagacttggaatagacaatgcctcgatcatctgaggtaaagattgtgccaaacccagtgtctccaggttcatctacatgcatgaataccatgtcatcatttgctgccagaatagaatagaactgtacctgtcccacgaaggggagctgggccatgctccatgtgtccccttgatctgttgaaacgtggatccttcttgtggtatccttatcagccatcacagaggctaaaaggaaacgtcccccaa

SEQ ID NO: 1631 - DNA, 1114 bp, Homo Sapiens
  misc_feature (987)..(1055): n is a, c, g, or t
gacttcggggatgcggtggtcctccctcctgtcaggaggcagaagggcatctctgcctggtgggagctgccttccccagcccgagtgtggtctgcaatggagctgtcgctgagccccaggccagcccagttctgccccgtctcaagtgctcctcttccttccaagcccctcctcagatgggcctgcatcccgcctgtggagtgcttcacaggggaaacccatccgcatcttagggggtttgtggcaagcgctttaaaacaaaagctctgatatcctcaacaaccacaacgggcaggtgggattgttgccccagatgactgctgaagacaccagctgtgggatgtcaagtaattccagggacccccagctgggagtccccgtctgtgtcacttgccacacactgcctcaacctccccgccccattttcagcagggtttgggcttagctacagagcccaagagggtcagccctgcttatcatcataggcccagcaggctgatctcgagcagcgataggacagctccctgcaaagccatcttagcaactttctcactgagaagcaggattcagagctgctctccccagttgcaccccctgactcatcttccagctggctcttctctcccatcctactcccttctgtctccctgccctctgccatcctgaaccatgccttgcttctaacctgcctggtcaagttttgtgaaacttatcctgctgtctcgggctggcacccatatgtgctcaccatgtgtaaggtgacatttccaaatgcctttgtgtgataatgatgatgaatttggttcctagtctcttcttcattgcccttcctcaccagcaatctgcactttcccatcaggcatcttagtctcatttgtaagtgcataagataatcacagtgatttttcaaagcccaggatcataagtgattgctttttcactggttcttactaactcttcatgtatccactcagaattccaaggacnnnnnnnnnnnnnnnnnnnnnnnnnnnnnnnnnnnnnnnnnnnnnnnnnnnnnnnnnnnnnnnnnnnnncgtggagaaccctatctctgctgaaggtacaaactagccgtcgttgtacacattctggt

SEQ ID NO: 1632 - DNA, 978 bp, Homo Sapiens
ggggttgtcaactatgatatggccaaaaatattgaagattacatccaccgcattggccgcacgggacgagcaggcaagagtgaggtggccatcaccttcctcacaaaagaggactctgctgtgttctacgagctgaagcaagctatcctggaaagcccagtgtcttcctgtccccccgaactagccaaccacccagatgcccagcataagccaggcaccatcctcaccaagaagcgccgggaagagaccatctttgcctgacacagcactcttcctgtgggctgagggcatctccaaagctgcctgatgcctgtttttcagaaccctcacatccctctttccaggtcctcactcttgggatatgggggcttaggaaaacaatccaactccctagcccagaccctcaggtcaggaggcctgcgtgtggggctgcaaaaggagaggacgacgctgtcggaggcagggagagcaaattaccacagcttcttggcccagttctgcccttctttgctttgggattgcactgggccatcagctcatgccaggctatgggggcagccagttggcattgctccccagactgaacagaaacctggccgccggatgggacctcctttggcacagacttgactgtgtaactgcataaactgcagtagcatcattgccctagatgccccaggagacctggcaccatgaggattacagacagtggaatcttactgtcatctggacagctgttttcctgtttggatggtaaaggaagttgagagtctttagacctgtgcacagccccacaccaaggggtgctgtatgctctaggcatcccctcccccaggggattttctaagtagatggggggacacggtgaactggctgtgtccatctttgtcactgagtgaaatctctgttttctattctctgagaagataagtttgtatgttctgagaataaatacatgaatattaagactgctaaaaa

SEQ ID NO: 1633 - DNA, 1130 bp, Homo Sapiens
  misc_feature (91)..(104): n is a, c, g, or t
ctgagaacacttttcataaatttgaggaactgcctaaatattataggcttgaacatctgaacttgtcctcagcatgaaagcaggtgagacnnnnnnnnnnnnnnaaacaaatgagcaggtaacacccagagaggttaagtggtttagccactggaaagataaggaagttgggtgtgatgtttacttctctatgatgatgcttctcaaactttcatgtgcatacaactcctttggatctcatcaaaatgtcctgggtccagagtggggcttcagattctgcatttctaataaggctctaggaaatgttgaggctcttggtctgtgggccacacttttaatagcatggactacaacacaaagagggatccaccccggccttcctgggtcatgagaggcctgcttcagcgttatctgcctctccaagcacatccccaagcaaaaggtttcgatgcactgcataaggtggcagctgcctacaagactgcgttaatatattttctgagagcaccgtgactacatgaacagccaaacaagtaacataatttgagtaacataatctaaatttgacaggtctatttgctgagaataaaactcatctcctacttatgaagtctttcttaaagtgaacatgatatataaaggtattaaaaaacccagcatattaaatttcatagtaaaatgccgcatgtgcacatgtatacagatagtatgagttctaagaaattcaatgcactgtaatcagaataaagtgctaccactgctcccagctaaaatcatctcctcttccaaatataaggaaaaacccttgaattgtaaggaaaatgactgcattgcctgccaacacaaggccgcagtccccatttgatcacagccacacgagcaagaataacaggaaatccaaaggcagaaacaacaattccagtagtgaagaaatatgccagttcccgacaggcactactggttgcatctgagtcataggtgactcttttggcaatgaaatgggggatgggggagatggcgtggaaaatcaggacgaataagggccagtaaacgccataatcctctaaggcacatcccagcataagaaaagtcagtccaatagccccactgaaggataatggcccgagagc

SEQ ID NO: 1634 - DNA, 830 bp, Homo Sapiens
  misc_feature (408)..(427): n is a, c, g, or t
ggggatataaagcagaaagtacaagacaagtacagatactgtgagagtcgacgaagggttttgttacagcatgtgcatgaaggctatgaaaaagatctgtgggagtacattgaggactgagaatggccctgcataaaatgaactctgaaaactttaccatctagagtgctcatgcaattaaaacaaaacaaacacaaacaaggaggcactaagcctattctgacaccactggtctgtagtaccagaattgttttgttaatggagagtttaagtaaattatattgtaataaaaaggtagataaaccattgtacaacagtattctaggccgccaacaaaagtgtgacagacacactaaaagccctccaactttaacttgtaacgtagcttcattctcaaagctgactccnnnnnnnnnnnnnnnnnnnncctgagtgtagtacagttaaaatttcaaacagctccttgacactgcttttcatgttcaaaccagccattttgttgtactttggtaaaggacctcttccccttcctcccctacacatacagatacacccacacacagactgactctctttctctcataccccaaggtcatgagtgaatgatgcttagttccttgtaaagaaaatcttgggatggggaaaggggtaggcagcaagaggattcaacaaacgaaaaacataaaaactttgtatatgacttttaaaacaagaggacaacacagtatttttcaaaattgtatatagcgcatatgcatggacaaagcaagcgtggcacgtgtttgcataatgtttaattacaaaaaaatatttattctttaaaaatcttc

SEQ ID NO: 1635 - DNA, 1924 bp, Homo Sapiens
  misc_feature (1592)..(1608): n is a, c, g, or t
  misc_feature (1610)..(1618): n is a, c, g, or t
  misc_feature (1620)..(1620): n is a, c, g, or t
  misc_feature (1622)..(1623): n is a, c, g, or t
  misc_feature (1625)..(1630): n is a, c, g, or t
  misc_feature (1632)..(1660): n is a, c, g, or t
  misc_feature (1662)..(1662): n is a, c, g, or t
  misc_feature (1664)..(1664): n is a, c, g, or t
  misc_feature (1666)..(1667): n is a, c, g, or t
  misc_feature (1669)..(1857): n is a, c, g, or t
  misc_feature (1859)..(1859): n is a, c, g, or t
taccccgcattcagacacataccaactgcaaatagtaactatagacccgcggttaaagaaagcaggctggtacggctcggatttcccgggatatgtcgacccacgctgtcgcagctgaactcggcgcctggaaagatggaggcagcggagacagaggcggaagctgcagccctagaggtcctggctgaggtggcaggcatcttggaacctgtaggcctgcaggaggaggcagaactgccagccaagatcctggttgagtttgtggtggactctcagaagaaagacaagctgctctgcagccagcttcaggtagcggatttcctgcagaacatcctggctcaggaggacactgctaagggtctcgaccccttggcttctgaagacacgagccgacagaaggcaattgcagctaaggaacaatggaaagagctgaaggccacctacagggagcacgtagaggccatcaaaattggcctcaccaaggccctgactcagatggaggaagcccagaggaaacggacacaactccgggaagcctttgagcagctccaggccaagaaacaaatggccatggagaaacgcagagcagtccagaaccagtggcagctacaacaggagaagcatctgcagcatctggcggaggtttctgcagaggtgagggagcggaagacagggactcagcaggagcttgacggggtgtttcagaaacttggaaacctgaagcagcaggcagaacaggagcgggacaagctgcagaggtatcagaccttcctccagcttctgtataccctgcagggtaagctgttgttcccctgaggctgaagctgaggcaaagaaatcttccagatgataaaccccagcagccgactcgaccccaggagcagagtacaggagacaccatggggagagaccctggtgtgtccttcaaggctgttggtctacaacctgctggagatgtaaatttgccatgacttcctggaggacagcagcatggagaaagatcctagaaaaggcctctgacttccctcacctcccaaccatcattacaggaaagactgtgaactcctgagttcagcttgatttctgactacatcccagcaagctctggcatctgtggattaaaatccctggatctctctcagtagaaaaaacttctggcaacaacgaaaacaattgtgaaagtaaagaaggccctaatcaacccctgactaaagcttgaaatggccttgttcgcccgcctcgacccctcaaggaacttttctacaccattctttttgggggccgcgggcccccttggggaaaggggaacatgggcccttaccttgtttccccaaggaaatccctggcaaagaaactaagggttgggatttcccccccaaataaaaaaaaccccggggggggaacgagttacatcgagattagctctgcttacggcccagtcattatcccccgctctcgctggttctaatctccagacccaacgtggaccaccggccccctgccgtatatgccggaaggggaagccctgccgttacccggaccccgtgggacaagatcaaccaggaggggctcccgcccttgataaatccccnnnnnnnnnnnnnnnnncnnnnnnnnncncnncnnnnnncnnnnnnnnnnnnnnnnnnnnnnnnnnnnncncncnntnnnnnnnnnnnnnnnnnnnnnnnnnnnnnnnnnnnnnnnnnnnnnnnnnnnnnnnnnnnnnnnnnnnnnnnnnnnnnnnnnnnnnnnnnnnnnnnnnnnnnnnnnnnnnnnnnnnnnnnnnnnnnnnnnnnnnnnnnnnnnnnnnnnnnnnnnnnnnnnnnnnnnnnnnnnnnnnnnnnnnnnnnnnnntntgcctcttcgcctgtgtgtggtcgcgccggtgcgtcttcccccgcccctgtctcttgtgccgccg

SEQ ID NO: 1636 - DNA, 864 bp, Homo Sapiens
gggttttggcgggcggttggcgttgcgcagaaggcggcggcggtggtggcttgtggtgcggcctcaccatacaggaacagggcagacgttagcgtgagtgatcactctcaatcccggggacctggtggccttagtctttcaggtggaacggtgtgcgacatgggaaagaaaaccaagcggacagctgacagttcttcttcagaggatgaggaggagtatgttgtggagaaggtgctagacaggcgcgtggttaagggacaagtggaatatctactgaagtggaaaggcttttctgaggagcacaatacttgggaacctgagaaaaacttggattgccctgagctaatttctgaatttatgaaaaagtataagaagatgaaggagggtgaaaataataaacccagggagaagtcagaaagtaacaagaggaaatccaatttctcaaacagtgccgatgacatcaaatctaaaaaaaagagagagcagagcaatgatatcgctcggggctttgagagaggactggaacccgaaaagatcattggggccacagattcctgtggtgatttaatgttcctaatgaaatggaaagacaccgatgaagctgacctggttcttgccaaagaagctaatgtgaaatgtccaccaattgtgatagcattttatgaagagagactgacatggcatgcatatcctgaggatgcggaaaaccaagagaaagaaacagccaagagctaaaggaggggatggtctctgtcatttctctttgtacataatacattcacctccctgcctcctctcctttctacccacccctttctatcctaaacctccataaaaaaacgggcgccgctggatcctctagag

SEQ ID NO: 1637 - DNA, 736 bp, Homo Sapiens
  misc_feature (45)..(84): n is a, c, g, or t
ggcaatgtaattataatgtgggaagtgtgcatgaatgagagagannnnnnnnnnnnnnnnnnnnnnnnnnnnnnnnnnnnnnnncttttaatagtttatgccagcaatctttgcttgaatgtttaacgatgccttcagtgtgatgctggccaatagatgattgcagtttaaaatgtcattattgtgcaggcttggataactaacattccatgatgtagcttgtttctgatgagatgattgtaggtacatttttctcattatccaatcatctgtgggatacttagttttctaatgtgccattatctatttttattctgcagttatgttcaaaatacagtacatattttaaaatagaataaattgttaaacataaaattttaaaagtagtagatgtgcgtaagaaaactttgtaaaatagttatgagtcctacccagtagcaacttctggcattcaagcaggattccactatgtaaatatctgtaatgcatttataataagttgtgtagtttgtcctgcatccatactacactatttgctaaagtctcagtgccatctcctaatgagactgacattttaaaagtctgtatggaatatcccttgataattcaaggaaattatcccctcctgcctaagttccaaactgggaaacatttcaaattatataaatgacatttcaaggacttttaagtatgaaagataatgggaaattttattggtttttgcctttttaaaatg

SEQ ID NO: 1638 - DNA, 637 bp, Homo Sapiens
  misc_feature (624)..(624): n is a, c, g, or t
agaggtacccggtcatgccacaaggatgcctatacacatgtgcattttacatcctgagttaactgtggactccatgatcccggcttatgcaactacaaggattcgtagccaaagtggaaacacagagtcggagctgaagaaacttgctgaagaaaacccagatttacaagaagcatacattgcaaaacagaaacgacttaaatcaaagctgcttgatcatgacaatgtcaaagtatttgaagaaaattcttgatgagttggagaaagtcttggatcaggttgaaactgaattgcaaagaagaaatgaagaaaccccagaagagggccagcaacctttggctctgcggtgaatcccttcaccctggcagacgtctcactcgctgtcacattgcatcgactgaagttcctggggtttgcaaggagaaactggggaaacggaaagcgaccaaacttggaaacctattacgagcgtgtcttgaagagaaaaacatttaacaaggttttaggacatgtcaacaatatattaatctctgcagtgctgccaacagcattccgggtggcaagaaaagggcccaaaagtctttggacgaccttgggttggttgcttgcaggagtggatatttngtcttatgctttc

SEQ ID NO: 1639 - DNA, 265 bp, Homo Sapiens
gctggaaaaagatggacaatgcaaagttataaataaaaatgagattagtagacaatatgaattttggcatattctcagggcttcggagatttgggtggtttgccaagggatagaaatcaatcaattctacaacactgggttctcagaagcctacaaaagtcaggaggaaaatgtgcctttcaacactttgcctggggtaggtctcatacctatgaaagagatctacctacagagcctatgtcattttctaccttcattactctct

SEQ ID NO: 1640 - DNA, 264 bp, Homo Sapiens
aatgacacaaagaataaagacactgtcacttgaatagcagattcatcaccagaaagaggagagaggaaaaatcactgagtgaaagacttccaagtagagcccagacaacacagttgaaaggggaagaaggaatctaaactgtgctgtcgctgctgcaaaccatttactagacaatggaaagatggatggggtgaggggtggggggagtggaaagagtaaacgagaattaaaatacaatacagattacaatctagcaactttcca

SEQ ID NO: 1641 - DNA, 407 bp, Homo Sapiens
cagggagcagaggaccagggaatccaaggagaggaaggaggtgcctatgaaagagacaaccagcaccaagatgaagcagaaggagatccaggtaatagacatgagcctcgtgaacaaggaccccgagaagccgacccagaatctgaggcagatagggcagctgtagaagatataaacccagcagatgaccctaataatcaaggtgaggatgaatttgaagaagccgagcaagtgagagaagaaaatttgccagatgaaaatgaagagcaaaaacaaagtaatcaaaagcaagagaatacagaagtggaggaacatttggtgatggcaggaaatccagaccagcaggaggacaatgttgatgaacagtaccaggaagaggcagaagaggagcttcagaagctgtcacc

SEQ ID NO: 1642 - DNA, 577 bp, Homo Sapiens
cagggtttgaaatgttatcaactttgcaaagagtctcttctttgaaattgtgctattatttcagaacttgtttcctcaatcaagaaatccagtgatgtttaaaaaaaccttcaattttctctgaaaatactaaatagaattttcatgggatggtgatctccaacgtgactgtagattttttattacagagtttgccatacaacttagtttctcgtgcatttcaaatagttggcttcctgaataattatgaagatcttctgaatccagctgaagagcaagagcactaatctgtgccacaaggtttttggataatggaatttctaaagcaacaggatcaattatatctgagacaagtctttcttcatcaggtgacaaagatttattttctattccatttactgttttttcagaaatatcaaaaactggaatctcttctagtacacgagtcttcacctgctgctcatgatatattctgagagccttttttacattgcacacttttggagaacggataggaagagattttatttcagatgctgtaagagtactcaaatcaccaatagtttgtatattctta

SEQ ID NO: 1643 - DNA, 716 bp, Homo Sapiens
cgaactcgaggatcccaccctcctctttctcccagattccgtaacctgagccaccgcagcctctccataggccgggcaagcggcacccaggggagcctcgacacaggtagagacctgggagactttatggactatgacccaaatctcttggatgacccccagtggccttgtggcaaacacaaacgcgtactgatcttcccttcctacatgacaacagtgattgactacgtgaagccctcggatctcaagaaggacatgaacgagaccttcaaggagaagtttcctcacattaagctgacactcagcaaaattaggagtctgaaacgagagatgcggaagcttgcgcaggaggactgtggccttgaggagcccacggtggccatggccttcgtctactttgaaaagctcgccctcaaggggaaactcaacaaacagaaccggaagctgtttgctggggcatgtgtgctgttagcagccaaaattggaagtgacctcaaaaaacacgaagtcaagcatttaattgacaaaccggaacagaagttccggctgaacaggcgagaactgattgcctttgaatacccggagtaagtggccttggaatacgccttccaatggcccgggcagaagtacttcccattaaagaaggttggccaaagacctaacattgccccgaagacaccagggccaatcctcccagtggtgaacaccctactata

SEQ ID NO: 1644 - DNA, 592 bp, Homo Sapiens
atccagaggatcactttgcgaatggaattgaccacgaggtcagtcgagtggtttttacctagttaatggaatacctagttaatatagttctaaaactactgtattgcaatctttgccaagaacctgatgacggaaaccacgaggtaactggaaattcccaaattgcgcttaagaaaaatactacgagacttgagaattttttaacgtaacttcctaagtgtaagatgacaaaatttgactttcgggatattctggcgttaattttcccgtccgcctaaatgtgggcaaaaattcacagctacgttatattaagcaaatattaacagtgcctattatttgctgggtgctgaaatttgataaaaaacttaaaagttaaaaaaaattgtttagatctttagtgtcacattgacttatctgggacatcgctttttttaatcctcacatgagatttggctaagtttatttttcacaatctgttaatctcacaaaaactaaagctgttaagcacagtttaaacccattctgcagggtaagaaattcatctgtaaggcaatctatttgataggaagtaaataagggtcaattccatcgc

SEQ ID NO: 1645 - DNA, 245 bp, Homo Sapiens
cagaagtaagaaaaagtgaaaggaactctaaagagtgtcatatgcaggcacatctatataaaagctgggaaagaaattcatagccctgccattttcctttgtgtagttacccaatttaattcaactacttccacagaaatgtatgttagagaagagtatgctcagaaaggtattattgtgggtagctaacttcttgctttcaacaatggctgttctaaagtctggataacaaaaggggtagtggg

SEQ ID NO: 1646 - DNA, 534 bp, Homo Sapiens
tagaggatcttaccctggtatcccacccattttctccagtatctgattctgacactcttctccttgtcgtctaggtgtgcctggaaacccaggtagcatttagtccctaaatttgtgaatgtcattgaacagcctgtagaaggagaacgctgcttcattggcatgcgggcagttgtagttgcatttgcaggactggatcatcatgacgttcttggaaaatgtctccccatcttcgcagcggaaccgcatcttcacagtcctggtcagctggggcgtgcagcatcggccgtccacgcaggaaccgcagtacttgggccggtatttcttcacactcaaacatccagcgtaagtaaacctgactgggttcgggggatatcttggtacttgctgcatttcttgcccttctgtaagagaaaggcgagaaggcaagttaggggtgatatttctctttcttcaaaaagatgttcacatcccaaccacctgccaggcaacagtctacacgtcccttaaggaacttactttcaggctgctgta

SEQ ID NO: 1647 - DNA, 1052 bp, Homo Sapiens
  misc_feature (97)..(160): n is a, c, g, or t
  misc_feature (504)..(516): n is a, c, g, or t
  misc_feature (724)..(724): n is a, c, g, or t
ggggcacattggggctcggtggtctggtggtcccttcggtcttggccctatctgtcctttgtttttgtgatttactatcaatcatcacgaaccagtnnnnnnnnnnnnnnnnnnnnnnnnnnnnnnnnnnnnnnnnnnnnnnnnnnnnnnnnnnnnnnnntctcactgcttttcagtcttctctgtacttcatttttgtgaaaaagtgaaaatcacatataatctttatttaaaaatgctcaccaagcactgcagactttggagttagggattcagcagcttgttccagtgaaaaggaggagtgaagctggggaagttagtatctaagaggggcaagctgattgcatgtgcatttatacctatgcctttaaaacattcccataaaaagtattaataaagaaatttccattccacactagtactgatgaaaaggtggttgattttgccttgtgataattatcaaaggatagtttttcatccttagattttattcacatgagagannnnnnnnnnnnnctctgttgacttaggaacacatcataaattcacaccaactgacacgttgctgacgtctgtacttgacataaccatttttattcatacaggaagcattaaatataaaagatggtcagttttgaagagcaaaggggtgctgaaatgacttgtacggttggctggtgctttctcaaatggattgccatagttcattacctagtaaagaaanggaaaatgtgatttacgttgtcatttttcctattaaaaaaaacccttaagaatggggcacttgagctgtccctgcaatgttttcatatctagtagtcattttagggaaagtgataatctgtagaatgaatagttatgttttgatatgactgatactttctttgttaaaaggttgtattaagtcttcaatttcaagtgtagcttaaaagtgtaaacattatgtgattcatttgaatacaagaatgcctatgaaatacccactataacagcattccttttgtgtttagaactatagaagaaaatgtcttcaaataaagtagttttcagtc

SEQ ID NO: 1648 - DNA, 947 bp, Homo Sapiens
ttttctaggtccaatggtagtttttattccccaggaacaaagataatgtggagaagaaactccaaaaggaaacagagcacggatgacagaaatgacaccacggcagcctggctcaggagtcaggtagatagatggctgctccacagtggacctggtcatggccctggtttcttggatccacatttgccccgtctcttaagtgtccatctcagaggtggaggatggagacagtgaggtggaaaacgtgcttgctctacacaaagacaaatggatcttctattcccagaggaccagggacaccaaaacctccctcttcagaatggaggtagacagataaaaatgagaggggcttgagtgtcacagacaatctgaaagtaataataggggctcactgtggctggcagaactggtactgaaatggggactacaggggaagcagcttccagttttatggtggagagtcagtcctgaatcaggccctggggcaattataaccagagtgctgtttctagccacttacttcaaaggactatggctatgttgaatcagaagccattatctttttcccagaggatgcacttccatccctatttctggcatgatcctgctccctacgagcgtgatcctttaaaaaacagattggcaagcgacgagaaaaacggtgcctcacatgcttgagatgtgacagcttctcctgcaggcaagaacctctcagaacaaggtcctttggtatgagctagatcatccaggcctgtccctgcagaacgcaccaagactcatccctgtactacagggtggcctctggctatggcctggcacagtgaggacagaggcggggtcctgagtcaacatcacagggaggtctcctggaggatgcaggtggagctgctcccctgataggctgtgccatccagggccatggcctccttgtctctgctgtccccccc

SEQ ID NO: 1649 - DNA, 802 bp, Homo Sapiens
ggggcgcgccgggcgggaatgtaagatggcggagtagcaacgcaaagcgcttggtattgagtctgtggccgacttcggttccggtctctgcagcagccgtgatcgcttagtggagtgcttagggtagttggccaggatgccgaatatcaaaatcttcagcggcagctcccaccaggacttatctcagaaaattgctgaccgcctgggcctggagctaggcaaggtggtgactaagaaattcagcaaccaggagacctgtgtggaaattggtgaaagtgtacgtggagaggatgtctacattgttcagagtggttgtggcgaaatcaatgacaatttaatggagcttttgatcatgattaatgcctgcaagattgcttcagccagccgggttactgcagtcatcccatgcttcccttatgcccggcaggataagaaagataagagccgggcgccaatctcagccaagcttgttgcaaatatgctatctgtagcaggtgcagatcatattatcaccatggacctacatgcttctcaaattcagggcttttttgatatcccagtagacaatttgtatgcagagccggctgtcctaaagtggataagggagaatatctctgagtggaggaactgcactattgtctcacctgatgctggtggagctaagagagtgacctccattgcagacaggctgaatgtggactttgccttgattcacaaaagaacggaagaaagccaatgaagtggaccgcatggtgccttgtgggaaatgtggtaaaggaatcggttggcccaatcctttgtg

SEQ ID NO: 1650 - DNA, 966 bp, Homo Sapiens
taaacccggccaactaggatgtttcagttgaaaataaagccccatttttctcccaaggaaatttcctgaaatgtttgcagtatgaaaatccaggaaccattatgcaggctttctaaagtaaaaaaatatcccaatgcctgaaaataaacatctttacagttatatttctatttcttaaaccttttgggttgtggggtggaaggctgtcatgaaggagaggttatagtttatagataagttattaaaacaactctctctggtacatttataaagattttctttttgcagtaaataatttaggtcaaagtgatgacctcccatgctctaattctgattgattaaaccaacctgaagggtaaactggagactctttggcctgttagtcaataacaaaatggtttgtaaagaaaagaaaaaataaataccatatacaaataagtataactagcattcaagtctgttgcacctgtgtgttttagtgaaagggagaatgaaacttgtatgcatttgacgtgagcaggtattcacacagctaggaaacaggaaaagacggtaggatggcaacatcaccttctattgcacatttagtttaagacagcactttccgttgaaacacaactaccccaatggcatagtcttgtgatgtgggacacctaacgagacggacgtctgcgcaccaggccccaggttaggacggccactctgtcaatgcagggcgaggggaggggccccccccaactacactatctggaggatgtcacctgaaggcaactgggcaggcccttccccaacacattgatgtaagtcagccacgccaaaaacaaaggcaacccctaaagtcaaatcacggcagttcatgaaaaattcatcccatcagttctaaatctgcctcgccaaaacaggagccttaggctacgtcacagttgccacagttcaaactgtcgcctcgctctgtgcgtagtcact

SEQ ID NO: 1651 - DNA, 573 bp, Homo Sapiens
gacctagaggaccccccctggtatccccacccattattatccttacatagcttacagttaatgacctgcttaaagatgcaaggagcataaatcttgggaaggatggtcttatttacttggtcgtcttttctgcagatgggatgctcacattagagccggggctggcttcacatgtctgctccaggatattttagctgaactgtatgagtccattaaacaaatgtaagagtcatggggaaagaagagcagtgtctcaaaccaaatgtgttacatgggagaacatctggggaatatgggtatctgagtgtacagtacatcagaaagcagcttggcggggttccgcagggatgtaactggcctgtggtagctggatttgacagcttagttgtaagggaatggggcttataaagtcattgccatcaaagcaacgcttgatccaggaaggagtgtccttgcttagccgcacattcaaattgttctgattagctccccgaccagagcttccacgacatttgagcaatctgctatctgagctagtttccccccagggtttacattccagagaaagggagc

SEQ ID NO: 1652 - DNA, 588 bp, Homo Sapiens
  misc_feature (196)..(196): n is a, c, g, or t
  misc_feature (290)..(290): n is a, c, g, or t
tacttggaatttagaagcacagggcttattgcatgctgtaggtaagtaggagagtccatatctagcacagtaccacctttctagtaaaatatgggaatatgagaaagtaagagctacatggaaaagcgcataaccaagatgatgtaatgtgcagtgtaggaacatatctgagtttaagctgattactgagatagcntggaatatggtgtggatagacaatcttggaagtgtgtttcatgttgtgggtaacgatgtaggaattattatgtgtgtgcggaattgattaaagngcagttgtagtatggagttgttcactgaatacaaaatatggaaagagaaaagggtcaagtagagattcatcatgtcacacacattaaggagtaggaagaggaagaggaagagcccatggaagagaggcaaggaagaactactggtgcgaagtggtctttaaggaagccaacctgtgaagaggaagggccggagggctcaaaaggaactatgattaggtagagtcattttatagttggcttgcttttagaaggaaaatgaaacatttgtatacagtaaaaagaacttgccgagacagaa

SEQ ID NO: 1653 - DNA, 617 bp, Homo Sapiens
ggacttctaccacatggtgcagctgtggtcgtggtcttcatagtcttccagctgccctacaatggggtggtcctggcccagacggtggccaacttaaacatcaaccagtagcacctgcgagctcagtaagcaactcaacatcgcctacgacgtcacctacagcctggcctgcgtccgctgctgcgtcaaccctttcttgtacgccttcatcggcgtcaagttccgcaacgatctcttcaagctcttcaaggacctgggctgcctcagccaggagcagctccggcagtggtcttcctgtcggcacatccggcgctcctccatgagtgtggaggccgagaccaccaccaccttctccccataggcgactcttctgcctggactagagggacctctcccagggtccctggggtggggatagggagcagatgcaatgactcaggacatccccccgccaaaagctgctcagggaaaagcagctctcccctcagagtgcaagcccctgctccagaagatagcttcaccccaatcccagctacctcaaccaatgccaaaaaaagacagggctgataagctaacaccagacagacaacactgggaacagaggtattgtcccctaa

SEQ ID NO: 1654 - DNA, 540 bp, Homo Sapiens
cattagacttaccccacaaacatatactagccaccaatatcacatatactatcttcaaactctaccttacgaagggcattccttttctcataagcatcactcatgtctcattaacaaaagcaaggtcagttaagtacattaagcaccattctctggcctctacctacctatttgactttctctctcacagttatcattcttcaaagactcttctttccaaccaaattgctaagagcactgatcctcatacctagagcagaagttcccaaagggaacttcgaggagtctcagagattgaagctatttacataacactcagatgttatttacaaccctattcactgtgttgacatttaagtgatagggcacaaaaaataaatgataacattgctggcatttgatcattgccaacaaatagtgtcagttgttttccttgaagtgacaggtccacctcatttatttttgtgaaaatgtctacccatacccaaatttgaataaccatagtttgtctgtcagtgttctttgcacgtaaatgaggca

SEQ ID NO: 1655 - DNA, 212 bp, Homo Sapiens
tagcaggaccccggataggcgacattcaaaggattttagactgtgtttggatcgagtaatcagtttcagattaggagagtgttaagaaagatagttaagttacagtttgtattgtgcacagtttcttggaaatttagcgccagttatttccctagagagattaaaatggagagaaaagataattcagtctgacaccagtgttgcaaagaaca

SEQ ID NO: 1656 - DNA, 1176 bp, Homo Sapiens
cgggaatgggagaatcagatgaccatctgaaatcacattactgaaaatacaacagacatgacccaaaaatctgatcttactagtatccttcaggatcaaatccaggatattttattgtacaaaaatttcaaatgatttcagatgatgcatatgtgacagcaaacctgaatggcacaatggaacacagacttaaaagatgcttcagtggtcaacactcattctggagttctcatgaatgaagggtagacagattcagtaaaattgtttgcttttcagtttcattatctggtcttcaaatttcagcacagagcaattcatttccatatagtaatatgtaaagagagactacaaaagtgtgaggaaagcaaatgtcctcgagaagggtcagaaaaggaaaggaagactcagtatctacaacccattacctaagaacaccattttgttccattttccctggaagccctcacagctcagctgagaatcagagtaagaatcttcattatcagagattagcaacaaatttaaaagaaaaagaatgacaacaggtaagagttatatacattttactactttgtttcagacttgtcctgatatttaaaaaggtgtcaaatgagccatggatgctggtggcaggaggcaaccagagaggagaggctcgagtatgaggaatggggaagacttatttacaaattcagagcaaactcctctcttctgggtctaaaataaaaacatcttttgtcttcagtaaaacaaaagtctttctgctcaatgcagatggtaggtacagtgtgctcaaaagaagcattttctcttggggaagataagtacacagtcagcacagtaagcaccactctgggatcaggcccaccctgcagagccgggcgccatcactgctgcatgttgttgaaaatcgccaggatgctcatcttctcctgggcagagtccaaatcctcattctgcttctgggccactccggtgcctaaaccatagagccgcccacagtacttggcatcatcaatgctgtccccaaaaaacaactctttcatcctaaagaaagccattcctgtcagcagtgagtctgagcctgcctggtgctgccttccaatcctctgcaaatccaactgatcagcaacttcctgaagacctcccttaagatttttgcagctcttcatcacc

SEQ ID NO: 1657 - DNA, 1047 bp, Homo Sapiens
gggagaagtcctggtaatctggtccttgttcccgtctggataccagcttccttcagcagcgcaggcggtggtccctgaggcccgtggaaggagtcaaacttgcgggaattttgcagtttatctgcagggctgttgtttccagcaagacccaaagctagaaaaggaggaggaagaaactgacccgatcagtgccagaagtcattgtattcaaagaagaataagcaagaaagaaaagaaggaaggaagagaggtagacagatacaagatgaaatcctgtcaaaaaatggaaggaaaaccagaaaatgagagtgaaccaaagcatgaggaagagccaaagcctgaggaaaagccagaagaggaggagaagctagaggaggaggccaaagcaaaaggaacttttagagaaaggctgattcaatctctccaggagtttaaagaagatatacacaacaggcatttaagcaatgaagatatgtttagagaagtggatgaaatagatgagataaggagagtcagaaacaaacttatagtgatgcgttggaaggttaatcgaaaccatccttacccctatttaatgtagtttaccttgatttttatctgatattaacaataccatatagcttgctttttattagcatttcctgatattcctttgtccatatttctacttataacctgttgctattaatggttttagatgtatctcttgttatctgcatctcattgtttattgtattttgaaccaatctacaagtctctgtcttttaataaaagaactttacacatttgtaaaaaagaggttcttggtaagatataaaatggaaaaaggctaagtaatatgtgaatatcatatttttgaaaggtaaaaagtacatttgtatattacatatatggacataacttgtgaaggatgaaagaaagtacagcctctcggtggtgggattatgaatgatttttctccttttgcttgtttgtattttctatattcctaaaattaacacacattattattgctagaataataaaagttttataaaaaagaagcaa

SEQ ID NO: 1658 - DNA, 1439 bp, Homo Sapiens
  misc_feature (1391)..(1391): n is a, c, g, or t
ggggcggcattttcggaaaatagcgccctgtgcagctgaagcgctttgtgtgtagcggggccgcgtcagcccggccgggtacgaggcgcctcgggtccccgcaccacctcctgctgccttcccgtcgccgctcccgaagcttttccagatgtccctggtagatttgggaaagaagcttttagaagcggcacgagcaggtcaagatgatgaagttcgtattttgatggcaaatggagctccctttactacagactggctgggaacttctccacttcatctagcagcacagtatggtcattattccaccacagaggtactgctgcgagctggtgtgagcagagatgccagaaccaaagtggaccgaacaccattacatatggcagcttctgagggccatgccagcatagtagaggttttacttaagcatggtgctgatgtcaatgcaaaggacatgttaaagatgacagctctccattgggccacagaacacaatcatcaagaggtggtggaacttttaatcaaatatggtgctgatgtacacacgcaaagtaaattttgtaaaactgcatttgatatttcaatagacaatggaaatgaagatttagcagagatattacagattgctatgcagaaccaaatcaacacaaacccagagagtcctgacactgtgacaatacatgctgcaacaccacagtttatcattggacctggaggggtggtgaacctaacagatgaaacgggtgtatctgctgttcagtttggaaactcttctacatcagtattagctacattagctgccttagctgaagcatctgctccattgtccaattcttcagaaactccagtagtggccacagaagaagtagttactgcagaatctgtggatggtgccattcagcaagtagttagttcagggggtcagcaagtcatcacaatagttacagatggaattcagcttggaaatttgcactctattccaaccagtggaattggtcagcccatcattgtgaccatgccagatggacaacaagtattaacagtaccagcaacagacattgctgaagaaactgttataagtgaagaaccaccagctaagagacaatgtatcgaaataattgaaaaccgggtggaatctgcagaaatagaagagagagaaggctcttcagaaacagctggatgaagcaaatcgagaagcacaaaaatatcgacagcagctcctaaagaaagaacaggaagcagaggcctacagacagaagttggaagctatgactcgtcttcagactaataaagaagctgtttaattgaaatgaacatgtagtttgattttacttttggtcaagaaagaatacaatcttgaactgtacacaacaaaggtacagccatgggaatancgaatgatagaagagactaccgatggataattggacttaagccatgac

SEQ ID NO: 1659 - DNA, 784 bp, Homo Sapiens
gggctgttttgcaacatacgaagttgatggggaggaaggacccttaaatcctgagtgggtatcgagtattccaagcaactggagagaggctttgtgcctcaacaggtcttcaacgccaaggagatgacccatcttttgcagtgcatgccttcctacttttggggcaaaagacaaaaatctggaaagcttagaggaagctaaggacaggatttccctcatttttttgtggcagtgcctcaggtgacaaaatgataaaaccactgctgctttacaaagactctaacaccccacttgtcttttagagagaaacgccttcctgttttcttgtaatcacacccagaatcaccactgccactttttggattagttttacaatttttttatccatcaaatccgaagtcatttaacaaaaaaaatctggaaatcagaatgttgctaactgtggacagaggtcccaatcacccagattcattattctttgttcattctaatgttgatactgtgtttctccctcaggaaggccctagctttcttcagcccttgggtcagggtataactgaagcatttgaacataatcaagcatatgtttgaccactttgctgactgtattgaaaaaaccctcaccttactctgaaagaagcatggcaacagtacaatattgccgatgctttggtagtgataaaagaggtgatgggtgatataaaatcagccactcttaagcttgctggaaactgtgggaggatgtgtgaatgatgcatatttccctagagctaatgaaagaagt

SEQ ID NO: 1660 - DNA, 768 bp, Homo Sapiens
ttactgggaaggctagttgtaaacataaacattctcactgaactactggccccccaaaacctaacctatctgacaatcaataatcatcttttgactataaaatcataaaaacttgtactctgtggctcttttgtctcgatgatttttcagagaaaaaaattagctgtgttaagtagtttcactgatttatccatcttgaatagctgccagttctggaacttcatacatcctcagaacgtcttcatagagcaaataattatgtaggcttctgggaagtggcagctgactaatataactgtcagaccgtagacgttctgattttagactggaccgaatttccaaacgacaaagatgggtcagggatggaacagtggcaatatgttgctgtagaatccaagcgtttgaggcacgagcagagagcatcctttcaacagctggtgcaagtgtcttccaattagtaaactccaaagtgaagataagggtgtcaatgctgactgagtcaatccaagaattgcacagtagaatcagtgggtcaaatccagcaaccagaagatgtggcaaccactccttatattttgcttgtgctttaattgcatgatttacaaattcatatatatggttccatggtcccaatgagcaacctttcctcaaaaagtagcgaaatatcgaaaacttctcgtacttcaggcagtatcccaaatgaagtccatttatctgggctccatatttcaaaagaatgttcacaattccaaagaactcacagtcccc

SEQ ID NO: 1661 - DNA, 1431 bp, Homo Sapiens
  misc_feature (620)..(620): n is a, c, g, or t
  misc_feature (627)..(627): n is a, c, g, or t
acttgttatctaggtccaagaatcattaaaaacctttgtttcttttatatatacacatacatatctcaaaacatagttatttttactttttaagttatataaataatatacattttcaatataggaaaatgggaagatacagataagcagtggtcttatatatatccttgcagctttttcccttcggacatacatattttgttacagtaattcctgcatctcaaaaataatacaaaaagtgaaaataagtttagaccagccttaaccttagctcaggtgctaatttatatataaatctatgtgcattcatttcaattttgacttacaaaatctaaagtgatgctgttataatactaaaagattccactttaaacagcagcagtttcagaataattaaaaatttgattcaggcatgaggctgataaagaacgaagtttactttttttcattaaaataagtagctttctactattgcatcctttgaagagaagaatgttctgctggtttggccacaagctctttagatggttacttttagtaaactcttcattcatcctggcattcttgaaaatattcgtcaaacatagaggaagactcatcttcacgttcctttggttctntaaattntaggtcttctccatattgaatggcaaaatcaatatgctgcaatacaatgttcatgctttcttcatctgactgatcgtaaggtaaaaatcgaagccaggcggtagtcatcaatcagtcccacatatagcttcagtcagtttcctgaatttttggcttcttaagtcactggtagaatcttctaataaagaatacatgtctggatctaaaaatttctcaatttccttttttgcttttttactcagcagatccatttttgtcatgatgttgacttgcggaatttctagagagatcatggcactcagggctgccaagatgccagaaataaacttgaatgactccaccatgaactgagaatcaacaagaaaaactccacagactcggaactcccactgctcgagctgctggaccagctgtttcatcacaggcaggtgagtgtacaactcaatctgacctggacaatcaaaaaggatatagtcgtcctctacatggccaagacagttctccagccagtcaaaattattggcaaagtactccatgcaaaataccaatcctccgttgggaccgaatcgcagagaatcatcctccattacatcatccacctcgatcagttcccggatgtcagccatcacggagtagttgaagtgttctgctgctggatccaggtttacaacttggacagaccggttgagggcttcacagtgctggaccatggtggcacagtaggtgctcttcccgctgcccgcggggcccatgaccagctgcgcataccgaggcatgttggctcccggagccgcccgccacccc

SEQ ID NO: 1662 - DNA, 798 bp, Homo Sapiens
  misc_feature (129)..(148): n is a, c, g, or t
  misc_feature (723)..(724): n is a, c, g, or t
  misc_feature (731)..(731): n is a, c, g, or t
  misc_feature (734)..(735): n is a, c, g, or t
  misc_feature (739)..(741): n is a, c, g, or t
  misc_feature (743)..(749): n is a, c, g, or t
gggagtctggcctgggcgccgcgggaacgctgtcctggctgccgccacccgaacagcctgtcctggtgccccggctccctgccccgcgcccagtcatgaccctgcgcccctcactcctcccgctccatnnnnnnnnnnnnnnnnnnnncagtgcggcggtgtgccgggctgaggctgggctcgaaaccgaaagtcccgtccggaccctccaagtggagaccctggtggagcccccagaaccatgtgccgagcccgctgcttttggagacacgcttcacatacactacacgggaagcttggtagatggacgtattattgacacctccctgaccagagaccctctggttatagaacttggccaaaagcaggtgattccaggtctggagcagagtcttctcgacatgtgtgtgggagagaagcgaagggcaatcattccttctcacttggcctatggaaaacggggatttccaccatctgtcccagcggatgcagtggtgcagtatgacgtggagctgattgcactaatccgagccaactactggctaaagctggtgaagggcattttgcctctggtagggatggccatggtgccagccctcctgggcctcattgggtatcacctatacagaaaggccaatagacccaaagtctccaaaaagaagctcaaggaagagaaacgaaacaagagccaaaaagaaataataaatattaaattttccaaannaaaaaanaannaaannnannnnnnncccttggtcggcccggcctcgggcccttcaagaagccttttctaaaacc

SEQ ID NO: 1663 - DNA, 1827 bp, Homo Sapiens
  misc_feature (1599)..(1611): n is a, c, g, or t
cgattaagacgacagaagggcagaatgcatgctgagcaggcggaaggctgggctgccggcagtttgtcacagccacagatgttgtccgagggaaccccaagttgaacttggcttttattgccaacctctttaacagataccctgccctgcacaaaccagataaccaggacattgactggggggctcttgaaggtgagacgagagaagagcggacatttaggaactggatgaactccctgggtgttaaccctcgagtcaatcatttgtacagtgacttatcagatgccctggtcatcttccagctctatgaaacgatcaaagttcctgttgactggaacagagtaaacaaaccgccataccccaaactgggaggcaatatgaagaagcttgagaattgtaactacgcggtagaattggggaagaatcaagcgaagttctccctggttggcatcggtggacaagatctcaatgaaggaaaccgcactctcacactggccttgatttggcagctaatgagaaggtatacactgaatatcctcgaagaaattggtggtggccagaaggtcaatgatgacattattgtcaactgggtgaatgaaacattgagggaagcagagaaaagttcatccatctctagtttcaaggacccgaagattagtacaagtctgcctgttctggacctcatcgatgccatccaaccaggttccattaactatgaccttctgaagacagaaaatctgaatgatgatgagaaactcaacaatgcaaaatatgccatctctatggcccgaaaaattggagcaagagtgtatgccctgccagaagacctggttgaagtgaaccccaaaatggtcatgaccgtgtttgcctgcctcatggggaaaggaatgaagagggtgtgaggcccaatggggctgggtgggaggcggtgcactcactcctgactgcccggcacagatgctccagggatgattcaagccattccaaagttcaacttggtgacactctataagattccaaaaagcacatattagtgcagccaagtagcctctcctgtatttaacaaaaagtgcttcattctttgcaggaggcccaacctccctatatataggggttctattcttgatttatttgccttcttcgaaaatctagaagaaaaggaaagaagtaattttccaggtaccctttctcgcctttgccaatagccaagggatagaagctgcagtggtattaattttgatataatctttcaaaccagcttcatgtggcttcccttttctttgttcaagatgagggccaggaggggaaacatcacacctgccctaaaccctgttcctggaggtcagcatttgatctgttgcaagcccctctttctgtcccctcttcctaccctgcctcccatgactttgctcctcacacttttggaaccatgcctcccgggggggcccatctcttctggccgtccttgtctctgggccacttggagtgtgtgataaatcagtcaagctgttgaagtctcaggagtctctggtagcctgcagaagtaagcctcatcatcagagcctttcctcaaaactggagtcccaaatgtcatcaggnnnnnnnnnnnnncagccactaagaacccctctgcttttaactctagaatttgggcttggaccagatctaacatcttgaatactctgccctctagagccttcagccttaatggaaggttggatccaagggagggtgtaatgggagcatccagccactcggcgggcagcatggagctataaactagccatcccttttaggggttctgccctccttcagggcattttagcc

SEQ ID NO: 1664 - DNA, 945 bp, Homo Sapiens
  misc_feature (716)..(777): n is a, c, g, or t
  misc_feature (782)..(783): n is a, c, g, or t
  misc_feature (788)..(812): n is a, c, g, or t
ggggtgcctggaggggactcgccgccatctcaggtctcttggctttgccagggcccaccggagaaaactgacgacccgtttctgtaatccttatgggagaccaaccttgtgcctccgggagatccactctcccacctggaaacgcacgggaagccaagcctccaaaaaagcgctgcctcctcgctccgcgttgggattatccggaaggaactcccaacggaggtagtaccactctaccctccgcacctcctcctgcatcagccggcctgaagtcgcaccctcctcctccggagaagtagagaaataaatttctcccaccctaaaccagtctttgagtgattgcagtatgactccatttccctggtgcattcatataatagttcacctggtgaaaacaatgaagattatttacaatgctaccctgctttttctggtgtcctgaacctggaagttgtgctttttaagtcttatgatgtaatcagcacgatttcacttcctgaatttcgatgaattctaagacatgggcaagatcgggttgtaagacctctgagatttaaggccatgccctggatcatggtgaacttaccaaagcaaacaatgcctgtgagatggtcctgcagcagccaaccagtgaactcttttggtgacatcctgttcttgttgtataactttatattcctataaatccattaaggccccaataaagtttgtctctnnnnnnnnnnnnnnnnnnnnnnnnnnnnnnnnnnnnnnnnnnnnnnnnnnnnnnnnnnnnnnccccnnaaaannnnnnnnnnnnnnnnnnnnnnnnnttgtgggcccgccctcggccccccaaaaaatcttttctaaacacttctctttggggcgcggcggccccccaaaggaaaagagaaaccggtggcataagttgttttcccaagggaaaccccggggcctagtaat

SEQ ID NO: 1665 - DNA, 941 bp, Homo Sapiens
  misc_feature (785)..(785): n is a, c, g, or t
ggggtgttgcaggggtttccaagcccagcaccagcacccttgcccttttccatcaggggttcagcctagggtccccgctggtgggcggctcccgagtcttggagaagagcacgagaacctagaccgcccccgaagtgcggagaccccctgggcaggctgaaagatggcggcggcgtctgtctctgcggcttctggttctcacttgtcgaacagctttgctgagccatcaaggtctaatggaagcatggttcggcattcttcatctccatatgtagtatatccttcggataagcctttccttaatagtgatctacgacgctccccaagtaagcctacacttgcctatccagaaagcaacagcagagccatattttctgctcttaagaatcttcaagataagattcgacgcttggaacttgagaggattcaggcagaagaaagtgtgaaaaccttgtctagagaaacaattgaatataagaaagtactggatgaacagatacaagaaagggagaattcaaagaatgaggaatcaaagcacaatcaagaactgacatctcagttgttagctgcagaaaataaatgcaatctattagaaaaacaattggaatacatgcgaaatatgataaagcatgccgaaatggagaggacatctgtcttagagaaacaagtttccctagaaagagaacgacaacatgatcaaacacatgttcagagccaacttgaaaaattggatcttcttgaacaggagtataacaaacttaccacaatgcaggcccttgcagaanaaaaaatgcaagagttggaagcaaaactccatgaagaaaaacaggaaaggaaacgcatgcaagctaaggcagctgagttgcagactggtctagaaacaaatagacttatctttgaagataaggcaactcccgtgtgttcccaatgcaagaagaatt

SEQ ID NO: 1666 - DNA, 1128 bp, Homo Sapiens
ggggcctccgagcagctcagggcgcccttgaaagttcttggatctgcgggttatggccggtcccttgcagggcggtggggcccgggccctggacctactccggggcctgccgcgtgtgagcctggccaacttaaagccgaatcccggctccaagaaaccggagagaagaccaagaggtcggagaagaggtagaaaatgtggcagaggccataaaggagaaaggcaaagaggaacccggccccgcttgggctttgagggaggccagactccattttacatccgaatcccaaaatacgggtttaacgaaggacatagtttcagacgccagtataagcctttgagtctcaatagactgcagtatcttattgatttgggtcgtgttgatcctagtcaacctattgacttaacccagcttgtcaatgggagaggtgtgaccatccagccacttaaaagggattatggtgtccagctggttgaggagggtgctgacacctttacggcaaaagttaatattgaagtacagttggcttcagaactagctattgctgccattgaaaaaaatggtggtgttgttactacagccttctatgatccaagaagtctggacattgtatgcaaacctgttccattctttcttcgtggacaacccattccaaaaagaatgcttccaccagaagaactggtaccatattacactgatgcaaagaaccgtgggtacctggcggatcctgccaaatttcctgaagcacgacttgaactcgccaggaagtatggttatatcttacctgatatcactaaagatgaactcttcaaaatgctctgtactaggaaggatccaaggcagattttctttggtcttgctccaggatgggtggtgaatatggccgataagaaaatcctaaaacctacagatgaaaatctccttaagtattatacctcatgaattcccgtccaaggaagcagagttgttaaagagtactggaataggggctgaaggatctatattcccttattgcattttccttatgtataattttccagatggtgatgttacttttcagtgtactcatatgtctcattttcatctaaaattaaatggcaggaaacaaggactgcatagagaaactg

SEQ ID NO: 1667 - DNA, 1145 bp, Homo Sapiens
ggtgtctaggatacagtgtgaaaattaaaaagtttagagggcagatgcaattgtggcaagtgacctgccaataaaccaggtgcagctatagaagctggcataggtatatccttaatggtgctttctccctgggcttgtctttttgttgtttttttccccctatattcagagctccttgagaagtgataaacacctccagctttctaacatcctccccacaccatctcaccatatccatctcccagcatccatctgcattcagctaagggcgggaaactgacctagtgcctgtgttgcagaccatttctgaggtctccaccatccaaggaggcacagccgtcattactgtcctccaggccttcagcagcccccctcacagataaggtacataccaccccttctgccgcgcctccacccctggcaccaaggtcttctgctgcttatgtctaaagggatcacctatatttaactgcctcagtgacctaacctctgtcttctcatgtgccagatgttaagatgaaggaggaatacaacacatactcaagcctcagcctgtttagttgttttcactggggctcgcttttctgggacggtatttattatcagactggcaagcctaactccataggtttacaggaagtagggatatttttataaaacaattgtgtcctccccacattttgctatgttaatatttgcttctaacaatttgcagctgtttcactttttcctcatttgtctctaagttgaaggctttgttggaggggacagagcacaggaacagccttgacagtctgtaattattgtacagatattttaatagcatataaataagtatattccttttattttgaaacaaaaatgatcagacactgccttttgtgtgtttgctgcctgtggcatccttttttaaaaagactgttacatattaaaatagtgtacatatataaatattacctcttttgctgtacagttgtgatagagactgaagattttattttttgtgtgctttttataagaaaaaaattaatacactaaagaatcttgctgatgtgattgtaatgtacctatgtaacttatttacttttgaatgttcttctgtatctttaaaccttttattaaataaggttttaaaaattcaaaaa

SEQ ID NO: 1668 - DNA, 820 bp, Homo Sapiens
  misc_feature (567)..(567): n is a, c, g, or t
  misc_feature (680)..(680): n is a, c, g, or t
  misc_feature (800)..(800): n is a, c, g, or t
tagcaggacctttagacagcggacccccaagccaagccctcctaaccccagtaaccctcgagtcttctttgacgtggacatcggaggggagcgagttggtcgaattgtcttagaattgtttgcagatatcgtacccaaaactgcggaaaattttcgtgcactgtgtacaggagaaaaaggcattggacacacgactgggaaacctctccatttcaaaggatgcccttttcatcgaattattaagaaatttatgattcagggtggagacttctcaaatcagaatgggacaggtggagaaagtatttatggtgaaaaatttgaagatgaaaatttccattacaagcatgatcggagagggtttactgagcatggcaaatgcaggccgcaacacaaacggttctcagttttttatcacaacagttccaactcctcatttggatgggaaacatgtggtgtttgacacaagtaattaaaggaataggagtggcaaggatattggaaaatgtggaagtgaaaggctgaaaaacctgctaaattgtgcgttattgcagaatgtgggagattganaggaagagatgacggggggaatatttcccaaaagatggggctctggcgaccagtcatcccagatttcccctggagggatgcggatatagaatttaaaaagatgtaggattaanatttttatttaattaacaggaagacctttaaaaaacctttggaaattacctttttttcaaaatcccagaaaactgggaagatgggctatttaaaaaaatattgccagaaagttttttaangataacctgggaccagtttc

SEQ ID NO: 1669 - DNA, 850 bp, Homo Sapiens
cgatattgcccaggtgaagtctgctggtgttatccctccagatggcacaccactcggaatatctcctccatcatgacgtcctgtgtggccgagagttctccgttcgttgcgtccactgtgtaccaggttccgcaggtcgtatacagaattctctcatcttgtgattcagaatatcagtcatccgttctggttgcctctgttgtataagagtcagggaagcatttctgtagggataacaccatagttttcaacaatattaacaagcatatcccattggccaccatcatttgcagggttcataagcaaaaaactgcaccagcctcccatcctcaggctcctttctctgggctgtgtccacaaaagcactcaagaagaaataacagcgttcaaccttgtcccaaaaaaacaggtaagattggctaaacctcaaattcttcaatactttaactttttcatgaatggaagcctcataacattcagacaagaaaagatccagcatcgccctgagctcttctggttggtgattggcttgccctcctggggcacggcgtgctggaacacatgctgcgcgcgctgcaccgtggcccgcttcagacagatgtccagcagctcgtgggtggtcccgacattctgggcaagtacgaactgggggtcggaattcagtttctgtatcagagcagctaccttctccgaattcagtcccgagctgctcatggcgcccacgctgcccggcggggtaacggtagcttccagggtccttgggcgagcgccgggattgcgctgcggctcgctgcctagggggcccgacctgtctctcgcacccggagcgccggccccacggaaaccggct

SEQ ID NO: 1670 - DNA, 782 bp, Homo Sapiens
gtcgcggcagtggtggcttcccatccccaaaaggcgccctccgactccttgcgccgcactgctcgccgggccagtccggaaacgggtcgtggagctccgcaccactcccgctggttcccgaaggcagatcccttctcccgagagttgcgagaaactttcccttgtccccgacgctgcagcggctcgggtaccgtggcagccgcaggtttctgaaccccgggccacgctccccgcgcctcggcttcgcgctcgtgtagatcgttccctctctggttgcacgctggggatcccggacctcgattctgcgggcgagatgcccctgggacacatcatgaggctggacctggagaaaattgccctggagtacatcgtgccctgtctgcacgaggtgggcttctgctacctggacaacttcctgggcgaggtggtgggcgactgcgtcctggagcgcgtcaagcagctgcactgcaccggggccctgcgggacggccagctggcggggccgcgacgccggcgtctccaagcgacacctgcggggcgaccagatcacgtggatcgggggcaacgaggagggctgcgaggccatcagcttcctcctgtccctcatcgacaggctggtcctctactgcgggagccggctgggcaaatactacgtcaaggcagaggtctaaggcaatggtggcttgctatccggggaaatggaacaggttatgttcgccacgtggacaacccaaacggtgatggtcgctgcattcactgcatctactatctgaacagaattg

SEQ ID NO: 1671 - DNA, 532 bp, Homo Sapiens
ctgctctggcacatgcctcctgaatggcatcaaaagtgatggactgcccattgctggagaagaccttctctcctactgtcattatggagccctgcagactgagggctccccttgtctgcaggatttgatgtctaaagtcgtggagtgtggcttggagctcctcatctagatgagctggaagacctggagggcccctctcgccagcctcccccttctctccacactctccagggacaccaggggctccaggcagcccatcattcccaggaggacatggcatttctccaggcggacccatggggcctggagggccagggtctcctttgacaccatctctcccgtccctgcctggcaggccgtgggatccaggagtgccggggataccagggcttccaacacaaacgtccttcacttcgcacacagcaccagaggctgccatcaagatgaggttgagggccagagggcacagccacatggctctgggtccagtcgctgctcccacacacagagcctccaacaaatcagcgacctg

SEQ ID NO: 1672 - DNA, 1041 bp, Homo Sapiens
tttctttcagttacttatcccagttgccatttcactggcatttgaaacgccaggtggatcatgtccaagctctctgaggcatcatgggagactgtaagaaggatcctgtgagtcttcgcctgggctgtttccgactcgggaatgtcctcgcatggatcctcccaatcacagccagcttgaaaccagcctcccttcgtgacgtattcagtaactttagctgattgccatctctccttcatctcaacaacctgtaccacactcactggagcacttcgctgtgcatctttagctcgaccagtatcagatatatacaatcctataaggatagggacggaggcttctacctgtcatgtacccccctttggagggcccacgaatacagagtctgagcacaaaagatgtttaaaggacattgggtcaaaaatgtcgcttacaggtatggtcgtcattatgcaaggtagcagcagcagtgtacggccgagtctacgcttgggaattcatttgctgactcttatcatttactgactaaagcacaagttactgaggcctcagtttcctcatctacaacccggggagatgaccagtagcccatcacaatcgatcgctatgaagattcaagtgataatgcagagtaaggcacttaatacagtgtcccctcaccgtccacaccacacgggcacgcccgcgttattcctgaggaccgggctgggcatgtcgcctcctttgtgtagccttcctaccctgacttcgcagactgctcccaacgcctggatccatgcccgtccacccgccgagctcagggctgaacggctgaggcgggcgcgcggtggcagaaaagagctgcagactgaggaaggtcaggaacggcgaaagggacacaccagacgcggcgtctggaattcacgcgtcacacccagatgtcgccgttcgttgacatgcgtcgaccgcacctcttatgctgggcgccgacggaaccccggggaacttgagacgctcagaaccttactgaccaatatccgaaacaacagcaccatcgacctc

SEQ ID NO: 1673 - DNA, 710 bp, Homo Sapiens
cccggggcttcccaagggggtacgggtgggggccaaggtccttcgaacggggggccacccacagggcgctccccaccttggggacaccggccaaacggacagcgattgtgggatcgcccccaggggggttccctaaaggggaattaccggtccgataacccctgcagacaagagccttagggacaaaagcaacgaaggcgatcccgcctcctgggggaccttaggcgggcaattaccgaaggcgccccaggaaacgccaaggattggacggcaatgcgaatgcgaatatcgcccgtttccattgagcgacctttctactacgcattgcgaccaccgtactcgctcgctaacaccgtggccaactcaacgagtcgcgctggcgagagtacacttcacataggctcggtgttcacgggtgcaagcataccaatttagtccaagcaatccagactagcgtatacctgcggcaatagctcacatgcccaactaggactccagacagggggccctcatacatcatgtaccacctggcgtccatctcgcactagcatcgtcccccagcagcgctctgagaggacttctcagggaagcaggtgaggtcctccgtgaagggggtgacaggggctccaccacaggcagccatcattctggtacagcaacagctggaagttacccttgtgggtggtgaagaggccatcaaactcgctctc

SEQ ID NO: 1674 - DNA, 866 bp, Homo Sapiens
agacaactgagaggaaggaggtaccacgggcactctctcgcgagagggccgcagagccgcctttgacgggggcgtgtacctggagagcaacggtaaggacggagccgacggctccggcgtcgggtcggttccggcatcgacgtatcgtttggtcgccccagagaggagacaggtttcttcagcttgccgctgaggatgtggcatcggctgcgctcaacgccgccgcctctgtgaactgcgggagttgggacagcggccagggctagatgggtgggacgcgagtcctcgccgaaagcttgccctgtgcggggcgcacttggaggcgagctctgggccgtggcgagttttgcagcctaaggtcttggcaggcgcattgctgtgggctgccggagagcaggctggagttcgagaccgcccaccggagagcaggcgagagttcgaggcctaggtacagcgcatttcgctaggcatccccaagaatatccgcgtgatccttgtggccagagtttgttgagctaatatccccagcccaaacagtagagcacatcacatgtcggccaccttgggagcgttgaacctggtagttactaggcgcccctgggtggaaataaaactcattatgccctagttatgtcttagtgcctgggtgacgatgatgtagcggttaaagattaactgagcgcacttagaggttgtctttgtctacctaaggaaaatatcaatagattaaacccccaaccttaaagaatctccgtgaatttttctgaggaaacgtgcaatattgtcatacaaaaggcccaaatatgcaaacattgctttttgttaaaagtttgtctgttttgcagtgacatctgtttgagcagata

SEQ ID NO: 1675 - DNA, 1058 bp, Homo Sapiens
gctggggccgccggatcgccgcgccgcgcgcacgtacgtggcatgcctggatgtccctgccctggcttgtggcatggcgggcccaaggctcctcttcctcactgcccttgccctggagctcttgggaagggctgggggttcccagccggccctccggagccgggggactgcgacggcctgtcgcctggacaacaaggaaagcgagtcctggggggctctgctgagcggagagcggctggacacctggatctgctccctcctgggttccctcatggtggggctcagtggggtcttcccgttgcttgtcattcccctagagatggggaccatgctgcgctcagaagctggggcctggcgcctgaagcagctgctcagcttcgccctggggggactcttgggcaatgtgtttctgcatctgctgcccgaagcctgggcctacacgtgcagcgccagccctggtggtgaggggcagagcctgcagcagcagcaacagctggggctgtgggtcattgctggcatcctgaccttcctggcgttggagaagatgttcctggacagcaaggaggaggggaccagccaggcccccaacaaagaccccactgctgctgccgccgcgctcaatggaggccactgtctggcccagccggctgcaaagcccggcctcgggtgccgtggtccggagcatcaaagtcagcggctacctcaacctgctggccaaaaccatcgaataacttcacccacgggctggctgtggctgccagcttccttgtgagcaagaagatcgggctcctgacaaccatggccatcctcctgcatgagatcccccatgaggtgggcgactttgccatcctgctccgggccgggtttgaccgatggagcgcagccaagctgccactctcaacagcgctgggggggccctaactgggcgcctggctttcgccatctgtaccccgtcccccaagggaattaaaggaaacggcagcctggggtcctgcccttcacctctggcgggttttccctacatccgccttggtggaagggcttccttgacctcctgg

SEQ ID NO: 1676 - DNA, 1115 bp, Homo Sapiens
ccgcggcgaggtcgaggtaacgagcgcggcgttggtggtttgcattttccgcagcgctcgggaccgcccgctcggccccggcctcgcctcggagccccgcgagggctgcgcgctcgggccgattcctcgtacagcgcccgcggcggcgagaaccaccgcagtccatcctggtcctgggagcgaccgccgcggcacccccaaccccgccagagcgggcaccaggaagcggggggaggggagcgaggagcctcccgggcggagatgcggcagctcccgtcacctccgcaccccgggcgatcagtgggtgaccgcggctgcgtagggactttgtcatccgtcctccaggatctggggagaaagagccccatcccttctctctcgtgccaccatttcggacaccccgcagggactcgttttgggattcgcactgacttcaaggaaggacgcgaacccttctctgaccccagctcgggcggccacctgtctttgccgcggtgacccttctctcatgaccctgcggtgccttgagccctccgggaatggcggggacagggacgcggagccacgtggtgggaccgcggggtcggcggaggagccatccccgcaggcggcgcgtctggcgaaggccctgcgggagctcggtcagacaggatggtactggggaagtatgactgttaatgaagccaaagagaaattaaaagaggcaccagaaggaactttcttgattagagatagctcgcattcagactacctactaacaatatctgttaaaacatcagctggaccaactaatcttcgaatcgaataccaagacggaaaattcagatgtggactctatcatatgtgtcaaatccaagcttaaacaatttgacagtgtggttcatctgatcgactactatgttcagatgtgcaaggataagcggacaggtccagaagccccccggaacggcacgtgttcacctttatctgaccaaaccgtctacacgtcagcaccatctctgcagcatctctgtaggctcaccattaacaaaatgtaccggtgccatctggggactgcctttaccaacaaagactaaaaagattacttggaagaatataaattccaggtattaatg

SEQ ID NO: 1677 - DNA, 1776 bp, Homo Sapiens
  misc_feature (620)..(620): n is a, c, g, or t
  misc_feature (1552)..(1553): n is a, c, g, or t
  misc_feature (1577)..(1577): n is a, c, g, or t
  misc_feature (1582)..(1582): n is a, c, g, or t
cagatcttctagctggctctctgctgccacagctccgccgaagggagggggtggaagaggaggactaaactcagagctgagaaggagaggcaggtgtgtgcaggtgcatcacctggatcagtgaggtcacccctctgctggctcctcccacttctcatcttggcctcagtggcccaaggccagccaacaagacgaccaagacccgggactgggcccgggcgcagacccaggcccaggcccaggcccacacccagctttcctcagcctgatgaaccagcagagccaacagacctgcctcctcccctccctccaggccctccatctatcttccctgactgtccccgcgaatgctactgcccccctgatttcccatctgccctctactgtgatagccgcaacctgcgaaaggtccctgtcatcccgccccgcatccattacctctatctccagaacaacttcatcactgagctcccggtggagtccttccagaatgccacaggcctgcgatggattaacctggacaacaaccgaatccgcaagatagaccagagggtgctggagaaactgcccggcctggtgttcctctacatggagaagaaccagttggaagaggtcccctncggcctgccccggaacctggagcagctgaggctgagccagaaccacatctccagaatcccgcctggtgtcttcagcaagcttggagaacctgctgctcctggatctccagcacaacaggctgagcgacggcgtcttcaagcccgacaccttccatggcctcaagaacctcatgcagctcaaacctggcccacaacatcctgagaaagatgccgccagggtccccaccgccatttcaccagctctacctggacagtaacaagattgagaacatccctaacggaatacttcaaagagccttcccaatccttgccttcattcggcttaactacaaacaagctgacagacaggggactccccaagaaatcctttaatatctccaacctgcttgtgctccacctgtcccacaacaggatcagcagtgtgcccgccatcaacaacaggctggaacacctgtacctcaacaacaatagcatcgagaaaatcaacggaacccagatttgccccaacgacctagtggcgttccatgacttctcctcggacctggagaacgtgccacacctgcgctacctgcggctggatggaaactacttgaagccgcccatcccgctggacctcatgatgtgcttccgcctcctgcagtccgtggtcatctaggccctactccgccaccggatctgctctgaccgcacttgaaggctggggcccaggcacctgtgccggccattcgatttctctctctccctttctttctcccagctttgcctcccttatcccaccctcgaggcagggaaaagccatctattcttctgcagcctcaggagcgagacttcaaggactcagtttggttccacccagttgaaagacaccagtgcacacccaaactcctggccttctgtgggttccctttgctccagaacacagatgtgtctanngaaaaacaaacgaaaaccgagccnaaacnaccaaaccccaggggggggccgctctaaagaatccctcgaggggcccaagcttacgcgtacccagcttttcttgtacaaaggggcccctaaaggggagtcggaataaaaaactaaaggcccttggcccgtcctttttacaacgccccggaactggggaaaacatgccaaccttgggggatcttttggtgaaggg

SEQ ID NO: 1678 - DNA, 1490 bp, Homo Sapiens
  misc_feature (14)..(14): n is a, c, g, or t
  misc_feature (994)..(1056): n is a, c, g, or t
  misc_feature (1077)..(1090): n is a, c, g, or t
  misc_feature (1132)..(1181): n is a, c, g, or t
  misc_feature (1198)..(1198): n is a, c, g, or t
  misc_feature (1237)..(1246): n is a, c, g, or t
  misc_feature (1272)..(1272): n is a, c, g, or t
  misc_feature (1275)..(1275): n is a, c, g, or t
  misc_feature (1450)..(1450): n is a, c, g, or t
ccacccccccaaancaaacccttcccttctccctcgcttcttctggtggtaccggtccggaattcccgggattccagacctcccggctactcagaagccctcggactgcccggaccgcgcgatggagtcgaccggcagcgtcggggaggccccgggcggaccccgggtgctggtggtgggcggcggcatcgcggggctgggcgcggcgcagaggctctgcggccactccgccttcccgcacctgcgggtcctggaggccacggcccgcgccgggggccgcatccgctcggagcgctgcttcggtggcgtggtggaggtgggcgcgcactggatccatgggccctcccggggtaaccccgtcttccagctggctgctgagtacgggctgctgggggagaaggagctgtcccaggagaaccagctggtggagaccgggggtcacgtgggcctgccctccgtgagctacgccagctccggggccagcgtgagcctccagctggtggcggagatggcgactctgttctacggcctgatagaccagacccgggagttcctgcacgctgcagagaccccggtgcccagcgtcggggagtacctcaagaaggagactggccagcacgtggccggctggacagaggatgaggagaccaggaagctgaagctggacgtcctgaactccttcttcaacctggaatgctgtgtgagcggcacccacagcatgggacctggtggccctggcaccccttgggggagtataccgtgcctgcccggggctggaactgcaccttttttctaaggggcttatccaagggacttccccaaaactggcacttgaatgggcccgcccccttggcccgggaagggaaccccttgggtaagttttctttttgaacaaaacacccctttttggaaaaagaacccacttccccccaccttggggcaaaaccggaggggttccccctctttttctcaagagggaaaaaggggcccaaannnnnnnnnnnnnnnnnnnnnnnnnnnnnnnnnnnnnnnnnnnnnnnnnnnnnnnnnnnnnnnccttggtggtcccccgcggcnnnnnnnnnnnnnntgggttgtgtccaaaggcggaatattgggggcaaaaaaacannnnnnnnnnnnnnnnnnnnnnnnnnnnnnnnnnnnnnnnnnnnnnnnnnaatatgggttgtacccntttttcccaggatctccccaccaccgcgtgggggggtgnnnnnnnnnntctttgtaagaagaggggatgctcanttntcctccctattatagtaagggggtgggaacacaacaccacatctctttcttttggtggggggcacccccacaactccacccctttctcctcctctctattggtggaagccacccactcctcttacctcccctccccatggtgtcccacccggggcttcctcttgtttgacgacantaaaagggcggcccgcgcaaaaataacacccccacttttt

SEQ ID NO: 1679 - DNA, 155 bp, Homo Sapiens
tgcgcgcaggccgggaacacgaggccaagagccgcagccccagccgccttggtgcagcgtacaccggcactagcccgcttgcagccccaggattagacagaagacgcgtcctcggcgcggtcgccgcccagccgtagtcacctggattacctaca

SEQ ID NO: 1680 - DNA, 691 bp, Homo Sapiens
gatgctcaccatggggcgcctgcaactggttgtgttgggcctcacctggctgctgggcagtggcgagtgccgcgaagtctgggcgccgtgtacacagaaggtgggttcgtggaaggcgtcaataagaagctcggctcctgggtgactctgtggacatcttcaagggcatccccttcgcagctcccaccaaggccctggaaaagcctcagccacatcctggctggcaagggaccctgaaggccaagaacttcaagaagagatgcctgcaggccaccatcacccaggacagcacctacggggatgaagactgcctgtacctcaacatttgggtgccccagggcaggaagcaagtctcccgggacctgcccgttatgatctggatctatggaggcgccttcctcatggggtccggccatggggccaacttcctcaacaactacctgtatgacggcgaggagatcgccacacgcggaaacgtcatcgtggtcaccttcaactaccgtgtcggcccccttgggttcctcagcactggggacgccaatctgccaggtaactatggccttcgggatcagcacatggccattgcttgggtgaagaggaatatcgcggccttcgggggggaccccaaacaacatcacgctcttcggggagtctgctggaggtgccagcgtctctctgcagacctctcccc

SEQ ID NO: 1681 - DNA, 839 bp, Homo Sapiens
  misc_feature (181)..(318): n is a, c, g, or t
  misc_feature (321)..(472): n is a, c, g, or t
  misc_feature (699)..(699): n is a, c, g, or t
gcatatggcaaaatccaaggctactccccaccccacaattctccctgagatcagccaaggcagactgcaaagggccatgtagccctattaggggtggcatcttcatgagggaggcccccctgccacaaaaaaggggcaaaaatgcaattactttttcaacaacctgatagttagctgcagnnnnnnnnnnnnnnnnnnnnnnnnnnnnnnnnnnnnnnnnnnnnnnnnnnnnnnnnnnnnnnnnnnnnnnnnnnnnnnnnnnnnnnnnnnnnnnnnnnnnnnnnnnnnnnnnnnnnnnnnnnnnnnnnnnnnnnnnnnttnnnnnnnnnnnnnnnnnnnnnnnnnnnnnnnnnnnnnnnnnnnnnnnnnnnnnnnnnnnnnnnnnnnnnnnnnnnnnnnnnnnnnnnnnnnnnnnnnnnnnnnnnnnnnnnnnnnnnnnnnnnnnnnnnnnnnnnnnnnnnnnnnnnnnnnncacaagaaaagacgcaccacacgccagcactatgttcgttgtaacacagaggaggggccccccaatgaggagaggggccagctaataataacagacgggacacagagggcggccgcgacatacaaaacacaccaaccagcccagagcaagcggggggaaaaacacaacggcgcacacaacgcaggaggacaacacatcgtcggcagaagagagggaactcccaacantactgcgcgccacgggggggccgaaacacacatactgtgggggagcaacaaccaccacccaaaccagcgaggatctaataacacacgcccccttcgagggagacgatcaataaaaaaccactccacaaaggcggcagata

SEQ ID NO: 1682 - DNA, 430 bp, Homo Sapiens
cagcttctcccccagcatccccacgcgcaggctcagcggctgcagcaggggctcctgggcccacttctcccggacactttttagctgctcttccagcactcggacccccaccatgccatccaggttgatttcaggcagcctctgttctaggaagacggtggctctctccagcgcagacaggatcaggtctgcaatggtggctttactttcagcagtgtccagcccacggcagtgaggaggaccacagcggtggcagtgctgtcagtaagagcaggagcagcagccccaggctggccatggccggcctctgctcactgctggtcacacgctcagcaccctgagctctggccaagcccagactgcctctgcacgccctcctcccacctccttcccacctccctctggcagacatgaagacaagtggcccggc

SEQ ID NO: 1683 - DNA, 785 bp, Homo Sapiens
gggagagctgggtgtggggaacatggccgggcctccgaggctcctgctgctgcccctgcttctggcgctggctcgcggcctgcctgtgggccctggctgcccaagaggtgcagcagtctccccactgcacgactgtccccgtgggagcctccgtcaacatcacctgctccaccagcgggggcctgcgtgggatctacctgaggcagctcgggccacagccccaagacatcatttactacgaggacggggtggtgcccactacggacagacggttccggggccgcatcgacttctcagggtcccaggacaacctgactatcaccatgcaccgcctgcagctgtcggacactggcacctacacctgccaggccatcacggaggtcaatgtctacggctccggcaccctggtcctggtgacagaggaacagtcccaaggatggcacagatgctcggacgccccaccaagggcctctgccctccctgccccaccgacatggctccgccctccctgacccgcagacaagcctctgccctccctgaccctgccagcagcctctgccctccctgcggccctggcggtgattctcctttcctccatcaggctgggcctagggggatgacgatgatgatgactggcaaagggacaccaagataatcgaaacctgttgactcctggacgggatcaccaaattccggcgggcacttgagtggtgtaccgaagacacatgtcgcccacaccgctgccaacaacgctgtcctcacccaaaccaagtacatgtaaccca

SEQ ID NO: 1684 - DNA, 885 bp, Homo Sapiens
gccgatcactggagctgacttccgcaatcccgatggaataaatctagcacccctgatggtgtgcccacactttgctgccgaaacgaagccagacaacagatttccatcagcaggatgtgggggctcaaggttctgctgctacctgtggtgagctttgctctgtaccctgaggagatactggacacccactgggagctatggaagaagacccacaggaagcaatataacaacaaggtggatgaaatctctcggcgtttaatttgggaaaaaaacctgaagtatatttccatccataaccttgaggcttctcttggtgtccatacatatgaactggctatgaaccacctgggggacatgaccagtgaagaggtggttcagaagatgactggactcaaagtacccctgtctcattcccgcagtaatgacaccctttatatcccagaatgggaaggtagagccccagactctgtcgactatcgaaagaacaggatatgttactcctgtcaaaaatcagggtcagtgtggttcctgttgggcttttagctctgtgggtgccctggagggccaactcaagaagaaaactggcaaactcttaaatctgagtccccagaacctagtggattgtgtgtctgagaatgatggctgtggagggggctacatgaccaatgccttccaatatgtgcagaagaaccggggtattgactctgaagatgcctacccatatgtgggacaggaagagagttgtatgtacaagccaacaggcaaggcagctaaatgcagaagggtacagagagatccccgaggggaatgagaaagcctgaagagggcagtggcccgagtgggacctgtctctggtggcattgatgccaagctgaactccttcca

SEQ ID NO: 1685 - DNA, 905 bp, Homo Sapiens
  misc_feature (623)..(753): n is a, c, g, or t
ggacaagttcaagtaaacttgctgactgaagaacagtaactggccatcaagatgagagaactggaggagttccttgatccttgtatatacaataacataatttgtacatatgtaaaataaaattatgccatagcaagattgcttaaaatagcaacactctatatttagattgttaaaataactagtgttgcttggactattataatttaatgcatgttaggaaaatttcacattaatatttgctgacagctgacctttgtcatctttcttctattttattccctttcacaaaatattattcctatatagtttattgacaataatttcaggttttgtaaagatgccgggttttatatttttatagacaaataataagcaaagggagcactgggttgactttcaggtactaaatacctcaacctatggtataatggttgactgggtttctctgtatagtactggcatggtacggagatgtttcacgaagtttgttcatcagactcctgtgcaactttcccaatgtggcctaaaaatgcaacttctttttatttttctttcgtaaatgtcttacggtagaaattgtgtaatacgtcaaaagtcgattaactttcctcgcgaatttnnnnnnnnnnnnnnnnnnnnnnnnnnnnnnnnnnnnnnnnnnnnnnnnnnnnnnnnnnnnnnnnnnnnnnnnnnnnnnnnnnnnnnnnnnnnnnnnnnnnnnnnnnnnnnnnnnnnnnnnnnnnnnnnnnngacacagaagcggggcgccgccgagtgcagaagcaaataaggatatccgcacgagaccagcagcgacaaaacaaaacaggcaacgagcgaaagaaacaaagtaataaagtagatgctcgaagaaaggagcatccgcaacacaaagaagggaa

SEQ ID NO: 1686 - DNA, 590 bp, Homo Sapiens
ggtatccgtctgctgggcctcccaaggtgttgggatacagacatgaaccaccacgcctggctggaatacttactcttgtcgggagattgaaccactaaaatgttagagcagaattcattatgctgtggtcacagggttttcttgtctgagaacaaatacaattcagtcttctctttggggttttagtatgtgtcaaacataggactggaagtttgcccctgttcttttttcttttgaaagaacatcagttcatgcctgaggcatgagtgactgtgcatttgagaatagttttccctattctgtggatacagtcccagagttttcagggagtacacaggtagattagtttgaagcattgaccttttatttattccttatttctctttcatcaaaacaaaacagcagctgtgggaggagaaatgagagggcttaaatgaaatttaaaataagctatattatacaaatactatctctgtattgttctgaccctggtgaatatatttcaaaacttcagatgacaaggattagaacactcattcaaagatgctattcttcagataaaagagaaaaaaacaaatgaacaagaaacg

SEQ ID NO: 1687 - DNA, 182 bp, Homo Sapiens
aagtcaggcactgggagctagaggagtctcaagctccccttaggaagaactggtgccccctccagtcctaatttttcttgcctgccccgccttggggaatgcctcacccacccaggtcctgacctgtgcaataaggattgttccctgccaacttttgttggatgtaaatatagtaaaagctg

SEQ ID NO: 1688 - DNA, 492 bp, Homo Sapiens
  misc_feature (478)..(478): n is a, c, g, or t
ttgaaacaacaacagggtaatctttaacagggatgttaaaggtaagaagtcaggaagataaaccaaaatgattgagtatgataaagaattttgcatggcgattaaaatagaaaacctataaatgtagaaaaagcaggtctggacttagcaaagaaacaatatagtttggagaaggcatgaaataagttcttttcatgttcactgctggtcacagccataacagagagtgatgtggagagctttgggaaggtttcacgttgagttacatcagtggtcaacaatggagcaacaagactccgtagaggatgccaccctgggagaattgcaagggaaaggaggctgaagcacaactggtaatagccttcagatatttaatggatatgcaaataaagctctgattaattgtattttcacttattatatatcatctttggacctttctaaagtgggacactagaaaagatatactgaaactcanaaagaatacttcag

SEQ ID NO: 1689 - DNA, 413 bp, Homo Sapiens
  misc_feature (95)..(95): n is a, c, g, or t
ctgcactccagcctgggtgacagagcgagactctgtctcaaataattatttcacagaggatagcaagctccagaaggttctattacctttaaaanagagtagttttgcccctcccagcaacctggtatgggtgccctaagaccagtctgaactcacactgtctgaaaggccacccaggatccaaatcgggccatcttcattgccatgagtgttcggacaagctctgcgtgccaggcaacagtgggcagacaaagggctccctggctactgggaagatacagaaccatcctgtgaaaatcatttcagcactggagaccttctttgctattacttctttcattaacaatgacctctaatttaaattgggccctgctggtttgttgatgaattgagcaactgagaacgtggcgggc

SEQ ID NO: 1690 - DNA, 837 bp, Homo Sapiens
  misc_feature (261)..(261): n is a, c, g, or t
  misc_feature (332)..(332): n is a, c, g, or t
  misc_feature (654)..(669): n is a, c, g, or t
aaatatagcattggctcggcgcaggatccgcagggctgaccaaggattgagtgagtctccctggcatccttctggggaccgcccctggccaaaacaacccaacgccaaacaaacacctaccctgatccggttttttcccccctttagtcaacccacaacccccatacctcggcagccttctaggggtcgcaggatccattatggaacaatctttcatgagccccatctatataaggagaacttggttctacaataattctnttcctattaaggatggactttataggacacccggacaatctataataggtgaagaccactcgcaattcaanaagatcttcaagccaggcccttcctggcaggaagtaatcctggctaaaaatgggtcataggtggctgaaaaagccggcttctggaacctctccaccaccggtttcaacaatggcttcttcccgttcattttatgcctgcgagaagtcagtggtaactgctgcagggctttatacattagtggtaacttgcttaacaaaccaaggactgtaagccctgtgtgtgccactgtttgcttcaacagtatatcctactaataagcctcacctatttaatccaatgagttttaaatctaaatctcattcccttcttctttccctaccnnnnnnnnnnnnnnnncttaaaaaaatattttgtgttattaacagaaattcatatttggtgtggcttaacggtatttcagaaggtcatcagattgtgagactgcttccttgaaacatttttgtgctattgttttaaaaaaataattccaaaacagttggcgttaataaaaatgtcattgtgaaa

SEQ ID NO: 1691 - DNA, 360 bp, Homo Sapiens
cccggcactgagtgacgatcagcaaatactcagtggacgaaatatttgcagtgcagtgaggtgaggggcataaccgcggagcgtattcgaagagatgagagagactggggattaggccaggcttgaagggaagaatggtttgagcaccgaggacaagaattaattccccaggcctgggttccagccttgtgcggctatcacgtgcttgaaacctggctagtccggagtgagatgcgctttacgtgtaaaatacaggattccaaagacgtcgtataaaataatttgtatattgtttgcatgttaggtaacatttttaatgtattggattaaataaaatgcattaaaattatttatacattc

SEQ ID NO: 1692 - DNA, 464 bp, Homo Sapiens
gggtacatacattcgttaactcttgggcagtggtgagcacgagatgactttctgcagcgtttatcactgttgggtggagtcacgtcccttccctccaccgaagtcatcaaccagatagggaagggaaagatgaggcccagaaaacgagttcaaactctaggtcttgtacacgtatgtaagtaaatgtcaataacccaagcctttgtcatagcagtcacttggttgacttaggatctgggtctgttgaattttgtgcttgggaatggagctggagggagtggggcctgtgtacagcagctacctctcccaggtcctctcacttgcctgccccgcgtcctggttgcatggccgcacctgtgtgtgtgcagaggtctgtgtcccatcctctgcacctcctttccgggggcctggggagccccacgtgttgccaagatcttggtgcaataaaatactccggttttgtg

SEQ ID NO: 1693 - DNA, 952 bp, Homo Sapiens
tgattccagaaggtaccttgtgtgtctgagatgctgccaccgcagaagaagccctgggagtccatggctaaggggctggtgctgggcgcgctcttcactagtttcctgctgctgatgtactcctatgccgtgcccccgctgcatgccggcctggcctccacgaccccggaggccgcagcgtcctgctctccacctgcactcgagccagaggcagtgatccgggccaacggctcggcgggggagtgccagccgcggcgcaacatcgtgttcttgaagacgcacaagacggccagcagcaccctgctcaacatcctgttccgcttcggccagaagcaccggctcaagttcgccttccctaacggccgcaatgacttcgactacccgaccttcttcgcccgcagcctggtgcaggactatcggcccggggcctgcttcaacatcatctgcaaccacatgcgcttccactacgacgaggtgcgcggcctggtgccgaccaacgccatcttcatcacggtgctccgcgaccccgcccgcttgttcgagtcctccttccactacttcgggcccggtggtgcccctcacgtggaagctctcggccggcgacaagctgaccgagttcctgcaagacccggatcgctactacgaccccaacggcttcaatgcccactacctccgaaacctgctcttcttcgacctgggctatgacaacagcctggaccccagcagcccgcaggtgcaggagcacatccttggagggtggagcgtcgcttcccacctggtgctccttcaagaagtcttcgacgagtcgctggtgctgctgaaggacctgcttgtgctgggagctggaggacgtgctctacttcaagctcaaggcccgcgcgactcggccgtgccggggctctccgggggagctgttggggcgcgccaccggctggaacatggtggactcccc

SEQ ID NO: 1694 - DNA, 904 bp, Homo Sapiens
gatgacgtcccagccccgtgtccatggagaacccacaggtccaaggagactgaggaccccagcaggagtctcagtgattggtcatgtgtcatcacctggaacttcactgcaagttcgcacagtctccctggggcctcaagtggcaagttcagcggtcgggtgccagagcgcctcattcttggcgaccctgggagtcgttcatcacacaaggagaagctaggtccccctccagagacctgcacgttggccagtgaaccaacgctgctgtctgaacacgtggtctcagtcatctggagaaagtagcgggagatctcacaggtcacctccttcccactgcagtcagcatggagcaagccctcggcctggggaatctggaccaggtccactgaggcctcaaaagataataggtgggtcatcattgggccagtgtgcccccttggaaatcgggtgaagtcctccagggagccatcgtccagcactggcacctgcttcagcacaagggaggccctgtgccctgtcctcactgctggcgagagctccacggtgcgcaccgtccttcgccaggaagcagtctaggaccacgtccactgcccgccactgcccctctgctgggtggggcttggtttctgctgctccagatagagccaggcagagcagcaggcaccagccctcctgtgtgcccatggaggctgctctcgagttccctccttgcccaccgcccgttctccacagtcctacgctgcttgcgaggcccggcggaagaagggggctctccaagcacacactggcagcctgcagcctttaggtttcttcccctgttccctgctgcatcctcgggatttcgcgcaccccattaatctattctcggagtcgggtgggtggagtagggagggtagtgggtagg

SEQ ID NO: 1695 - DNA, 1064 bp, Homo Sapiens
ctggaccggtccggattcccgggatgcaacacccactgagcacgctgggagctgagtatggcgtcctggtctcgctggagctggggctgcttctggctgtgctggtggtgacggcgacggcgtcccgcctgctggtctgctgagcctgctcacctctggccaggccgctctggatcaagaggctctgggcggcctgttaaatacgctggcggaccgtgtgcactgcaccaacgggccgtgtggaaagtgcctgtctgtggaggacgccctgggcctgggcgagcctgaggggtcagggctgcccccgggcccggtcctggaggccaggtacgtcgcccgcctcagtgccgccgccgtcctgtacctcagcaaccccgagggcacctgtgaggacactcgggctggcctctgggcctctcatgcagaccacctcctggccctgctcgagagccccaaggccctgaccccgggcctgagctggctgctgcagaggatgcaggcccgggctgccggccagacccccaagacggcctgcgtagatatccctcagctgctggaggaggcggtgggggcgggggctccgggcagtgctggcggcgtcctggctgccctgctggaccatgtcaggagcgggtcttgcttccacgccttgccgagccctcagtacttcgtggactttgtgttccagcagcacagcagcgaggtccctatgacgctggccgagctgtcagccttgatgcgcgccctgggggtggggcatggaggcccaccagtgacccctctcgtcgaaacgagaagagccagctacccgggaccctgtgccccctcatcatctccggccacagctttcggggggtggggacaacgggatgccctgaatgccaagcgaaccggatgggccgaatatcgaactggacggaaccacgcctgggggggtaacccattaaggctttgggcggcctactaaaagggctttcctaattggaaacctcaaaattcttgggggcacatgcttccaactcggaaaacggggttccaccccctaaagcaaggttaatactctt

SEQ ID NO: 1696 - DNA, 972 bp, Homo Sapiens
ctctggctccaggacgggtctgcaccaacctcagtttcggggctgcggctcacagaagtctaacctgcccgggacgcccgcaccaactcctgcgcgcggtccttccaaccctcctgctaccatgaagattgcagtgattggacagagcctgtttggccaggaagtttactgccacctgaggaaggagggccacgaagtggtgggtgtgttcactgttccagacaaggatggaaaggccgaccccctgggtctggaagctgagaaggatggagtgccggtattcaagtactcccggtggcgtgcaaaaggacaggctttgcctgatgtggtggcaaaataccaggctttgggggccgagctcaacgtcctgcccttctgcagccaattcatccccatggagataatcagtgccccccggcatggctccatcatctatcacccgtcactgctccctaggcaccgaggggcctcggccatcaactggaccctcattcacggagataagaaaggggggttttccatcttctgggcggatgatggtctggacaccggagacctgctgctgcagaaggagtgtgaggtgctcccggacgacaccgtgagcacgctgtacaaccgcttcctcttccctgaaggcatcaaagggatggtgcaggccgtgaggctgatcgctgagggcaaagcccccagaatccctcagcctgaggaaggagccacctatgagggggattcagaagaaggagacagccaagattcagctgggaaccagccggcagaggccattcacaaactgggatccgcgggaacgacaaaggtgccgggaagcctggacaagaggcctgtggaacagaaactgaccattttcaagctcaaggctgaacacttcagggctggtgccagagcgagaagctatgcccatcccaggagcccatggccaagggtgggaccaagcaggatcaacacaagggaatg

SEQ ID NO: 1697 - DNA, 1085 bp, Homo Sapiens
  misc_feature (887)..(895): n is a, c, g, or t
attccggatccgggctgccaggcgcccatttgtgcccagatggatgggacagagacccggcagcggaggctggacagctgtggcaagccaggggagctggggcttcctcaccccctcagcacaggaggactccctgtagcctcagaagatggagctctcagggcccctgagagccaaagcgtgacccccaagccactggagactgagcctagcagggagaccgcctggtccataggccttcaggtgaccatgcccttcatgtttgcaggcctgggactgtcctgggccggcatgcttctggactatttccagcactggcctgtgttcgtggaggtgaaagaccttttgacattggtgccgcccctggtgggcctgaaggggaacctggagatgacactggcatccagactctccacagctgccaacactggacaaattgatgacccccaggagcagcacagagtcatcagcagcaacctggccctcatccaggtgcaggccactgtcgtggggctcttggctgctgtggctgcgctgctgttgggcgtggtgtctcgagaggaagtggatgtcgccaaggtggagttgctgtgtgccagcagtgtcctcactgccttccttgcagcctttgcccttgggggtgctgatggtctgtatagtgattggtgctccaaagctcggggtcaacccagacaacattgccaaggcccattgcaaccagccctgggagaccccatcacactgtccatttctgggctttggttagcagccttcttctaccgacaccaagaatagtccgggatcctgacgcccgcctgggtcttgccctcagcctttggcgggctctgaacccccagtgtggggtccctcattgcccaagcagaagnnnnnnnnnttcgtgaagaatcctgaaaggattgggttggggtccccaaacaatccctggggccaggggtcaatcaggcagagtttccgggaggacttcctttcttgggaggcaaaaacccgtttttcttaaaacagcgccggtacaaaaaggggccatggggcggaataattttaacccccccgcgcacaataaatga

SEQ ID NO: 1698 - DNA, 783 bp, Homo Sapiens
  misc_feature (755)..(755): n is a, c, g, or t
ccaggtaggcacccagcagcagcagcatgacgtagatgagtgccatgacaaagtccatgttggcgatggcacagggggaggccacaggcccagcctgcgctgctgttgccctgagggccgccctcgccactgccccgaaccagggtgatgatcagcgcactctgtattgatgatgacctctaccagggtcagcagcagagccacagtgaagatcacccagccccggggcccgtggttcttccgggccaggaagttgagggcaaagacgtgagccgccagacaagagaagcagatggcgaacagaaccccaaagaggaagcgccgagaggcacaggtggagaagtcgggcttcaccacacaggcaaacacgaggcagaagaggcccacgggtcacccagaaggaagaatacctgggtccccagcaggctccgtttcttggtgtcctgcacaaaggggaggctggccaccaggatgatggtgagcacaaacgtggtgacaatgcccgccccagccacggcctccaggacgatgccccacgccccagagcggtcacacaggttgtagtacagggggttgaggccttggctgcagccgggtgggacatggccctgggcccaggcccctgggaacaggaagagaggcagtcccaggcacatcaccaaggctttgtggatggccatcctggctcccaggccaggctctggttgggtccctccaggctgagccgacatcgtactttccggctggtgagatcntacacctcagaccgtaccagcctgcttt

SEQ ID NO: 1699 - DNA, 1268 bp, Homo Sapiens
aaagcacgatggaaccggtccggaatttccgggatcgggtctcggccaccgtcgagtttccgtcgagttccgtcccggccctgctcacagcagcgccctcggagcgcccagcacctgcggccggccaggcagcgcgatcctgcggcgtctggccatcccgaatgctatggccgccgtcgccgtcttgcgggccttcggggcaagtgggcccatgtgtctccggcgcggcccctgggcccagctccccgcccgcttctgcagccgggacccggccggggcggggcggcgggagtcggagccgcggcccaccagcgcgcggcagctggacggcataaggaacatcgtcttgagcaatcccaagaagaggaacacgttgtcacttgcaatgctgaaatctctccaaagtgacattcttcatgacgctgacagcaacgatctgaaagtcattatcatctcggctgaggggcctgtgttttcttctgggcatgacttaaaggagctgacagaggagcaaggccgtgattaccatgccgaagtatttcagacctgttccaaggtcatgatgcacatccggaaccaccccgtccccgtcattgccatggtcaatggcctggccacggctgccggctgtcaactggttgccagctgcgacattgccgtggcgagcgacaagtcctcttttgccactcctggggtgaacgtcgggctcttctgttctacccctggggcttgccttgggaagaacactgcctagcaaaggtggcccttggtacaatgctctttactgggcgaaccccacttttctgccccaggaaggcgccttggctccaccggcgctggcttaaaccaaggggggacgcccaacacggccggcaacttgttagggcagggaagaaccaatggccgggatttggcctaggggaagaaatccccgttccacttgaaaaccccctactcggggtgcgcggttcctcctgggggcccaaaagccaacccttttctcaaaaaaacacatacctggacccccaaggaaacactgggggcgaacgggcctttaatataaacctatcaccccttcccctagaggggcccctgggggtgggggacccaaaacctttgtgccccccccttgcccgggggaaaaagagcgcgcgcaggggcaaaggggggccctccttcacgcggggtgcccccgcttcctatcccccgggaaaaagcccgcgccaaaaccccccccgcgcccgtctaggggggcaggcattaaacac

SEQ ID NO: 1700 - DNA, 816 bp, Homo Sapiens
ccagaggaacgttgtgtgtggcagcaaggagcccgcagaggaacatggtgctgctctgggggctcctggtgctcagctggtcctgcctgcaaggcccctgctccgtgttctcccctgtgagcgccatggagcccttgggccggcagctaactagcgggccgaaccaggagcaggtgtccccacgttaccctcctcaagttgggcaaccaggagcctggtggccagactgccctgaagagtcccccaggagtctgcagcagagaccccaccccagagcagacccacaggctggcccgggccatgatggccttcactgccgacctgttcttccctggtggctcaaacgtccacctgccccaacctcatcctgtcacccctgagtgtggccctggcgctgtctcacctggcactaggtgctcagaaccacacgttgcagaggctgcaacaggtgctgcacgcaggctcagggccctgcctcccccatctgctgagccgcctctgccaggacctgggccccggcgcgttccgactggctgccaggatgtacctgcagaaaggatttcccatcaaagaagatttcctggaacaatccgaacagctatttggggcaaagcccgtgagcctgacgggaaagcaggaagatgacctggcaaacatcaaccaatgggtgaaggaggccacggaggggaagattcaggaattcctctctgggctgccggaagacaccgtgtttgcttctcctcaaacgccatccacttccagggtttctggaggaacaagtttgacccgagccttacccagagagactccttcact

SEQ ID NO: 1701 - DNA, 212 bp, Homo Sapiens
cacatggtgagctttgaatggggcaaagacagggttcccagcccaatagtcgggattggggtataggttctacatgggaaagtatccagtctcttgctttactcagtgtcctgtgaccaccaaaggcatgaaagggacaacacactcttttcgctctaccacaaggggtgactaaaagatgagcaagtctaataaaaagatacggccttaaa

SEQ ID NO: 1702 - DNA, 456 bp, Homo Sapiens
  misc_feature (158)..(215): n is a, c, g, or t
cccttttggatcttgattgataactgccatgatattttgctttgatgtgtttctacatgtagttgcacacggttcagtaaaaataatgctgctatcgagtatgcaaatattgaagtatgatggtttgactgtatggcagtgttgtagcagcctcttgnnnnnnnnnnnnnnnnnnnnnnnnnnnnnnnnnnnnnnnnnnnnnnnnnnnnnnnnnntcagtcttcaatgacgagagcaatattaagaagacattgctatctaatttttaatctttttaaatgaaaaattcctatgttcagtagcgtggttgatgctattgtttagccttcccctccaaattgtatacattggcttggaatgttcacaacttgcgtgcgtggcagcggaagacgattcccatattctacattgctactgttttgtataaaataaattggtaaagattgacggtaaaaa

SEQ ID NO: 1703 - DNA, 1392 bp, Homo Sapiens
  misc_feature (47)..(47): n is a, c, g, or t
  misc_feature (726)..(791): n is a, c, g, or t
  misc_feature (1042)..(1054): n is a, c, g, or t
aaagcctcaagcagggttgtggattgctggtcaataggttcatcgcnacatctggcttgcggttacctcccttctatgacaagaataatgccaaactctttgaacagattttaaagcccaagtaagagtttgactctccttactggggacgacatctctgactctgcaaaagatttcatccggcacttgatggagaaggacccagagaaaagattcacctgtgagcaggccttgcagcacccatggattgcaggagatacagctctagataagaatatccaccagtcggtgagtgagcagatcaagaagaactttgccaagagcaagtggaagcaagccttcaatgccacggctgtggtgcggcacatgaggaaactgcagctgggcaccagccaggaggggcaggggcagacggcgagccatggggagctgctgacaccagtggctggggggccggcagctggctgttgctgtcgagactgctgcgtggagccgggcacagaactgtcccccacactgccccaccagctctagggccctggacctcgggtcatgatcctctgcgtgggagggcttgggggcagcctgctccccttccctccctgaaccgggagtttctctgccctgtcccctcctcacctgcttccctaccactcctcactgcattttccatacaaatgtttctattttattgttccttcttgtaataaagggaagataaaaccnnnnnnnnnnnnnnnnnnnnnnnnnnnnnnnnnnnnnnnnnnnnnnnnnnnnnnnnnnnnnnnnnnggaggcggcgcggcgcgagtaataagagagaaccccccgggagggggccaacagttgcagcggcacgaccgcacaggttttggtggtgaccaaagggggcgcccccaatagggagggaggcgcgattattataaggacgagacgacacgggcgcgcgcgggtttaacaacagcggcggaggagccggggagaaccagcggcgacaccccgggggagaccctctggggagagggacgcccctaactacagcnnnnnnnnnnnnncagcaaatatggggggacaaaacctcccctcacaagagattaaagacgcctacaagggggagcaacttacaaacagtccacgagcggagcgcaacagcggcggggagaacaccaccacgccggcgaattcagccgcccggggcgcgggaagacaaatgcgtccgccgcgcccaccacggagagatatcgacgtatgtagacaggaaaattatattcccccagagaggcgcggataagacaataaacacggccacagacaagcacgcagcacgagaccagcccgcaggcgccagagagaaaagaggagagacaggggcgagacaaagaagaaagcaggc

SEQ ID NO: 1704 - DNA, 436 bp, Homo Sapiens
gcgggagcgtcagaggggcgcccaggaggcagtgacagtcgtcgcggaatcctgcgtgtgacaccccgcccctgcccagcggattagggagttgtcctctggtaaaaggatttctgggctgcttccagcttggggccctcatccctgccctggcaggcctttctacaccgatctgcatctagtggggggtcagcgtgagcagcagcgccgtgagttctgaggccaagaaccttctccacttgagaagccttcctgggggaggctgagtgggccaggcctggagccacgtaccaacactttatacccaggggaatggatcccaagggcccagataacgcccccaacttcttggggttcacacgcgtcctgagacatctgggaactgcctctgcctgggccaaagctattccattaaaactttattgctgtgcaaaaa

SEQ ID NO: 1705 - DNA, 1069 bp, Homo Sapiens
cgctaacggcatataggcagcagcgtgtacgaggaatcaagatctagcatgtccttcttcatgaaggttagatcatctacgtctgagtgagtctggcaaggtcggacacgctttagaactacttcgctgaccacaaagcaaaagtgtagagatgaaatagagtttatgtgcgcgagtttgctacgctgctctatggagacatgtatgaactatctacaaacgagcacaagaaagaagaaacattatgctaatattggaaaaactttaacgtgaaagagctattaatagagcacccatgaatggacattgtcatctgtggtatgcagttttgtgtggctatgtagtctgagtttgagggtttacaaaacaaaatcaagctatgggcacctctatcaaggaacatctagatatagcaatcaaacttggtaccagaggaaccctttctatagttacctcaaagggagatactgctatactgtctcaaaactgagctggagttgagaacaacaacatggctgctactctgtttggaaagaataccatcttcaactgtacaaggaagctttacacaatttccttaaggctgaagaactatgccctggttattctaatcccaattacatgtacttagcaaagtgttatactgatcttgaggaaaaccagaatgctttgaagttctgtaatttggctttattgcttcctactgttaccaaagaggataaagaggcacagaaagagatgcaaaaaataatgacttcctttgaagaggttaaataaacgaatttacctcttcaacaaatcagatgtggtctaccaaaatttaaatgaatcaaagttgtgcttttattatccttcatttttgatgtaagggtattgtgcttagatttgaaggtaaagccatgtttctgcagaatgcattccactagtagcactacaaaattaattatgttatttggagaatctatatactataatgtcaatacataatctataaacatgtatgctttatatttttcttatcaataaactgcagccttaagaatatttctttaaataaaatatttaaatc

SEQ ID NO: 1706 - DNA, 371 bp, Homo Sapiens
atcactgctcacactgctgatgatttagagtgctgtccggtggagatcccacccgaacgtcttatctaatcatgaaactccctagttccttcatgtaacttccctgaaaaatctaagtgtttcataaatttgagagtctgtgacccacttaccttgcatctcacaggtagacagtatataactaacaaccaaagactacatattgtcactgacacacacgttataatcatttatcatatatatacatacatgcatacactctcaaagcaaataatttttcacttcaaaacagtattgacttgtataccttgtaatttgaaatattttctttgttaaaatagaatggtatcaataaatagaccattaataag

SEQ ID NO: 1707 - DNA, 353 bp, Homo Sapiens
ggcgactctacaagcctcacagcatgcactgttactaaaaagacgatgcgtcctcctggacctgagatctgtgtgatcgtgggaaagcgacgaaaaacgaacaaaggaacagtaaatggagtaacttggctagaatatggcagtaactacaaggcatgttctgctctggcacgaagacaacccacctgaggcaccagacacatgagtgaagccatcttggacatcccagtcacagccaaactcactcctgagtgcatctgcatgatgaacccagcaatccccaccatggagcaaaggatccatccagtcaacccaaagaatcgtgaaaaataataaattgttgttttaaagtt

SEQ ID NO: 1708 - DNA, 505 bp, Homo Sapiens
tacccctctggatgccaagtgtcctggtgtgtccctgcccagggacccctgaaaaggagtgagaatgtctgcagagaggagtcgtttcctttgaagtctgaacagagttccataaccgcagacattaagatctgttttggggtcagtggttgagtccagctgccgcgttacccacaactcgtattcccaaactgctggttaagtttgtcaaggactttcagtatttagtgacttgtaaaaacattgatggaggcactgatacttgaactagtccatgcccatagagcctgtgaaacccaacgcgggtaattttgtttaatgagatacagaacttgtaggaatatcaacttcccaaatgttactgcaagtgtctagagttagaaatcttcgcattcgaatcaggatatgttgatcacagcctgtgtccaggtacgttcagatgtcactgcggtggggcctgccttgacacttgaaatcactttaggccaggcacagtggctcacac

SEQ ID NO: 1709 - DNA, 960 bp, Homo Sapiens
  misc_feature (892)..(901): n is a, c, g, or t
cgcatctcggccgggaacctgggaactcggacgcagaaggacgcgcccgagccaggacccgccgcggggtccctctggtgggccgtggccggggagaggacgcgggccctggcggtcgaagacggacgcagcgcccggaaaggcgagccaggtctccggctcctggcgcttcctggggggccctcagcctcttggccttgaacgggctgttcatcttgattcacaaacacaacctggagtaccctgacttctaccggaagctctacgggcctcttggacccctctgtctttcacgtcaagtaccgcgcccgcttcttccacctggctgacctcttcctgtcctcctcccacctccccgcctacctggtggccgccttcgccaaacggctggcccgcctggccctgacggctccccctgaggccctgctcatggtcctgcctttcatctgtaacctgctgcgccggcaccctgcctgccgggtcctcgtgcaccgtccacacggccctgagttggacgccgacccctacgaccctggagaggaggacccagcccagagccgggccttggagagctccctgtgggagcttcaggccctcaagcgccactaccaccctgaggtgtccaaagccgccagcgtcatcaaccaggccctgtccatgcctgaggtcagcatcgcgccactgctggagctcacggcctacgagatctttgagcgggacctgaagaagaaggggcccgagccggtgccactggagtttatcccagcccagggcctgctgggacggccgggtgaactctgtgcccagcacttcacgctcagctgaccctggcccacctgtgaataaatctcagctgaccccagcccacactgtgaataaatgtttttgcagnnnnnnnnnnttacctcgtgccgaattcgccacccagtcctcgctacaaataggaccgttatagttact

SEQ ID NO: 1710 - DNA, 852 bp, Homo Sapiens
cggtgcggggccgcgctcaggcggccttgcactcgctctcgcgccgccgcttcttgcgctctgagtgctcccgcgcctggcgctcccagagcccgggcccgcacacgcccaccacgcagcagccaaccccccggcccgcgttcccgttctccacgctggcctggttgccgcccgcggcccaaggtcgtcctcgccagcgtggacgaccacggcccggcccacgatggagtgcgggcccgcgagcgaggcggccaggccgggcgcggtacctccagaggctgccgtcgcggaccgcgaagttgccgaagtcgcccgggtgctgcgggtgcggcacggccagcgggttgtagtggggcccggtggactcgcagccctggctcaggtccccgaactggtgcacgtggatggcgcaggctggagctgttcggctcggtcgggaagccctccagggcgaagaaggcgtcgagcttggcgcggggcgcaagctgccggaagaggacgacgccggtcacccggggctgcgcggcgtccaacgtggccgacggctgcacctggcaggcggcgtggagcgcgccgtcgtcgtcccgccagctgcatgacctcctgccagatctccgtgaccttggcgtacatgtctcggatccactccgccgagtcagagttgggctccgccgagtcctcgcccgtccaggcgtccgaggcaccggctgccaggagcaggcaggaacacagtagcgccagcatggctggagtcgggcacctttccagctcctccaaaagagctttctctcctgaaaagagagctgcacccagccagcccaggaacgcaggctgtcctggagcctgggctgt

SEQ ID NO: 1711 - DNA, 746 bp, Homo Sapiens
cggagcaggtccaacaggaactggtacaggcggatcttcgttcttgctgcctgtctccccaggcaggagcccaggcccgggcctccaggccatccgcctcgccgtcagacacctccagtggggggctctgccgctcgccctcctcctcatctgagctgggctgggctggggacagggatgggtactggaggcacatccggggcaggtaggagacctggtggccaagactgggatggggtggcaccatgggggtatcgaggacgtgcatctgctccagctccatgtggcggtagagctgctgcagcttgcgggggctgcacgctctggagctccgtgaagttgttctcggcgaagctctcgaactcgctgtgcacgtggtgggggtggaagtcccagtaatggtcgctatggctctccccatcactgctgagataggggtaatactcgtgcgtttggcgttggtatagatccgtgtcatagggcaccaggtcttctgatggctgaggggggacgaggggaaacccttccattttgcacgcctgtaacatccagccgggctccgagtcggtcagatcccctgcctcggtgggggccaatgcagagcccctcaggatggggtgccccgtcaggggctggacggtcgtggggcgggtgcagggctcaggcctgccacctgagctacaggagacctgggtgagccccctcccttgacattgcagatcctaacactccggaccgtaccagcc

SEQ ID NO: 1712 - DNA, 874 bp, Homo Sapiens
aggagagaaaccatataaatgtaatgaatgtggcaaggtctttaatcaaatttcacaccttgcacaacatcaaagaattcataccggagagaaaccttataaatgtaatgaatgtggaaaggtcttccatcaaatttcacaccttgcacaagcatcggacaattcatactggagaaaaaccttacgaatgtaacaaatgtggcaaggtgttcagtcgcaattcctaccttgtacaacatctgatcattcatactggagagaaaccttacagatgtaatgtatgtggaaaggtcttccatcatatttcacaccttgcacaacatcagagaatccacactggagagaaaccttacaaatgtaatgagtgtggcaaggtcttcagtcacaagtcatccctagtaaatcactggagaattcatactggagagaaaccttacaaatgtaatgagtgtggcaaggtcttcagtcacaagtcatccctagtaaatcactggagaatccacactggagagaaaccttacaaatgtaatgaatgtggcaaggtcttcagtcgcaattcataccttgcccaacatctgataattcatgccggtgagaaaccttataagtgtgatgaatgtgacaaagcattcagtcaaaattcacatcttgtacaacatcgcagaatccatactggagagaaaccttacaaatgtgatgaatgtggcaaagtcttcagtcaaaattcataccttgcatatcattggagaattcattattggagaaaaagcttataaatgtaatgaatgtgggaaggtcttcggtctaaatcatccctaacacatcatcggaaaattcacactggagagaaacctttcaaatggtatgaatgtgg

SEQ ID NO: 1713 - DNA, 794 bp, Homo Sapiens
ccagaaaccacctgccacgatgtgaacctgatgcagaaacgcggttcgctccctcgggatgcaaaggccaacttcagcctggcacggcggcgccgcggactccaccatcccggggaaggagccggacccctgtgggtgacgtgggactgtggggcgggggtgtccccggctgggctgagctgagcagcgaggaggctctgggttgccggaccggggtcagggagcctggcgttagctgcgtgctgtgtggtcatctcggcgaggagggagcggctccctcctgccccggactctggatctgtcctgcggtgggcggtgtcggagcagccgtgtggcagtgtggcggcagcatggaggtgctgccctgctcccgcgtggcccacatcgagcgcaccaggaagccctacaacaacgacattgactactacgccaagcgcaacgccctgcgcgccgccgaggtgtggatggatgacttcaagtcccacgtgtacatggcctggaacatccccatgtcgaacccaggggtggacttcggggacgtgtctgagaggctggccctgcgtcagaggctgaagtgtcgcagcttcaagtggtacctggagaacgtgtacccggagatgagggtctacaacaacaccctcacgtacggagaggtgagaaacagcaaagccagtgcctactgtctggaccagggagcggaggacggcgaccgggcgatcctctacccctgccacgggatgtcctcccagctggtgcggtacagcgctgacggctgctgcagctggggcctctgg

SEQ ID NO: 1714 - DNA, 465 bp, Homo Sapiens
cgtaggcgctcccgggcgctggcggcggcggaggagagggagcagcatcacgggcgcccggcccgttaaaacgctgctggctggagccacctccctccctgcagcccgcaacgggaatggagtaaagggagacccgtcgacctggccacggggatcagcgatggaattaaagcaatctttgtccacccatctggaatgccgagaagcctctgaggcgctatggggcggtggaggagacggcttggaaaacggagagactggggagaaatcagctggacatcatctccatggcggagacaaccatgatgccagaggagattgagctggagatggcaaaaattcagcgtctccgggaagtcttggtccgccgggagtctgagctcaggttcatgatggatgacatccagctctgcaaggacatcatggacttgaagcaggagctgcagaacttggtcgccatcccag

SEQ ID NO: 1715 - DNA, 1097 bp, Homo Sapiens
ggattcccgggatcgccaacctctatggatatataaagggaagcttgaggaggaatttcacagttacagtgcagaagcagaggcaaaagaattaaccagctcttcagtcaagcaaatcctctactcaccatgcttcctcctgccattcatttctatctccttccccttgcatgcatcctaatgaaaagctgtttggcttttaaaaatgatgccacagaaatcctttattcacatgtggttaaacctgttccagcacaccccagcagcaacagcacgttgaatcaagccagaaatggaggcaggcatttcagtaacactggactggatcggaacactcgggttcaagtgggttgccgggaactgcgttccaccaaatacatctctgatggccagtgcaccagcatcagccctctgaaggagctggtgtgtgctggcgagtgcttgcccctgccagtgctccctaactggattggaggaggctatggaacaaagtactggagcaggaggagctcccaggagtggcggtgtgtcaatgacaaaacccgtacccagagaatccagctgcagtgccaagatggcagcacacgcacctacaaaatcacagtagtcactgcctgcaagtgcaagaggtacacccggcagcacaacgagtccagtcacaactttgagagcatgtcacctgccaagccagtccagcatcacagagagcggaaaagagccagcaaatccagcaagcacagcatgagttagaactcagactcccataactagacttactagtaaccatctgctttacagattttgattgcttggaagactcaagcctgccactgctgttttctcccttgaaagtatatgctttctgctttgatcaaaccagcaagctggcttaagtatcagggactttcctttgggaataggttttccctttttcaagtttttcaagatgtagggtatatccatgaaatgcattttgcattttaaattccccgcaaccctggaaggttttaatttccccattggtcctataaaagaactggtgaatacctataaacctcccgtggaaatctttaaatttttaaaacccaaaaagggcc

SEQ ID NO: 1716 - DNA, 1039 bp, Homo Sapiens
  misc_feature (75)..(75): n is a, c, g, or t
gggcatccagggcctggaaaccggacaagcagagcggacgccatttcgagtagtctggatgacgtaatcatggcncgtgaggttaaaccagacccccccaagaaggaaggagactgcggggagctttgggatttccgagcacaggatgatgtactccccagccagcaaggggattcccccaatggctgcatgcagggcccggatctcctcagtgggtcctgtgatgagggacgtgcccgtatccaggatggcagcacagcccttggcacagagagtcagccctgggcccaccttcacacgctccatgtggatctgccagtaggcagggaccgtgactggcacgaaggtgaggggtgggatgtagtgtgccgggtccgagccccccaggaccagctctcctccatcaggctcttcagggtccctgttgaggtaaaaggagaagacaggcttatccaatagcccctgctccaccagtacatccatcgggggccgaactccttccacagacagaatgggaaaaccgaggcccaatatcccatcaaaatgggcaaaagcgaagaccaggctgggctcccagagagcctccccgaaaatcactgatgcacccttgattccaccaatagtcagcttgtcctcgctcaggattccatctacccgcccagttccatattgaatggcaaacttggtcccattggcctggaaggagctagaggctttgggatcaaatcggtggtgtaaccagcagggcacactgaagaagtggcatctcctggacgggacccagagattggaggagccagtgtcaaaggcaacagtgaagttttgtggaggcgttcccagcccaatttccccaaaatactgcacatccaggaagttcgagagaggtaccaagacaggcttgtccccaggggatggggcccccaacttggggagctctgctggttctccccatcccctcagtaggttcaggatcctgcgtccagggtggactcgacgaagagggatccggatcagtgtggccccagaaggctccacactt

SEQ ID NO: 1717 - DNA, 947 bp, Homo Sapiens
caactaagccctttagaaagtactccagactacatgaggaggaagtgcaggagaactgactttcctattgtgccttgcataaaacattttgcaaaaattaaaagcagctccaagtgcaaaaagtaaatatttgtgcaaaaaggcacactgccaggtgcaatcttaaaacatcgtcaacttactcattttatagtgtttgactcttgtaaataccagtcttttaaattatgaaacctagcaagtaaggggaaggaagttcacatcagaaaatacactctaggaaaggtacaagacatgttgctggcaatttgctacttatttcataacatagatcaagtaagtgtttgttaaatattcacagtaatttcagagagaaacatatctccaaaacttcaacctattgcatttttaactatttttctgtacaatttataaaacatctgtcagtgtttttctgaataattccttcttgtcagtccttccctctctggatccagttataccttcaaggtgggtggtaggattcctttctcaatgagatgagtctgcagggttttatatatatttaactgctgttcaggttgaagcaccaacaagtgctgtagcactttgctgggattggggccccttataaaacttgtgatgtacacatgtacaaaagttgccatcaaatactgacaatcaaatctgtccattatcccaccatgtccaggaatggtatgtgcaaaatccttgatttggaaggctcttttgaatccactagcaaagaagcctccagatgggccaattaaagatgcaaaggttgacagtgcaatgctgtggatctggaaggggtacaagctcactctttcctgtctcaagactgcctttagaaagggtggaagtgagtaagtctgaagctggaaaagttctgagggctcacattctgtcacgagggagttacatca

SEQ ID NO: 1718 - DNA, 453 bp, Homo Sapiens
  misc_feature (334)..(388): n is a, c, g, or t
gctccccatcccacctggctccagagcctgccctccacagcttgctgccaagctactccctccctccctggacttctcatcttcacaagatggggatcatgggggtttcttaccccacctatgtccccctcttccccaccctgtccctgtagaaaaccagtgaagcaggtacggagctgaggactgggccccaggaggtggggacaggggtctgaatgccgagtccctgaattcacccaggaccatccaaggggccaccgcagcattggccccatcacccacgtcctcacccaactctccctgatgaatagaatatacacactgtgctaggtgnnnnnnnnnnnnnnnnnnnnnnnnnnnnnnnnnnnnnnnnnnnnnnnnnnnnnnnggaaatgactgttctgctgttaagataatgtatactcttttattttcttcctttcatggttaaga

SEQ ID NO: 1719 - DNA, 482 bp, Homo Sapiens
cggtggaggtctggacagttcaagtgtgatgcagctgtggcaaggagaaatccttccgcctctgggcctcaggctgcctgtccataaaatggggacatggccagctgacggacaactgagtctccggcccacctaccaccgccagccaggatcccccaaagtgtgcagagggctcagcagagaacagtatgggaccccctcaccaggcctggaacacctccagccacaaagaagccaaaggtcagtccctctgctccccagcaaacggtgcctcccaggcattctcagtgccagggcttcatccctgtgaaggcacagggcctgctagtgggcacaggggtggctagttggggcctggggcagaggagggctgcaccaggcgtcctggggaatgtgctcagtgaagacgacactgggctttgcacagcctggtgtcgctgtacagaaactgtcaagggaataaagtgttctttgttttttaa

SEQ ID NO: 1720 - DNA, 454 bp, Homo Sapiens
  misc_feature (38)..(38): n is a, c, g, or t
  misc_feature (236)..(248): n is a, c, g, or t
aagaaatatctttgattatgattaatgtattatgtcanaatgtaggctagttaaacttttgtaaagttgcctggaatgtcatttgttaggttataaacacaagatctaaatgaagggttttatgtgttgtgtacaaatcttattttgaaatggacaaacttgtcattacatttgtaaccttgtacagaggatttttcactatgtgcctagcttggtgtccattcagctaaaattgnnnnnnnnnnnnnggtgcatgaagagttaaaaatcaaattaaagtatatgtagagatgactattttatattacatgacccaatcctgtatttatttctaccccctttttgaaaggatttataaaactagttgaggacagctgtatttttttgttgaactatttagtaaaactgggcctttttgtctggatgggaataaatgcgggcccttttgcaatcc

SEQ ID NO: 1721 - DNA, 1069 bp, Homo Sapiens
gaatcactgcgaagctgagaacctagctccggcccgaccggaagccccaccgcaccgcggggacgcggactcgggagtgcgcacattcgcagcccgggcagccctgctgcgcaccgggcctcgcgccccgcgccccgcgccccgcaccgatctgatcgaccgagccttcagcagattccgtcacagagaagtggtccatctgtccaggttgaggaatgggctgaacgtgttggagctgtggcatggcgtcacatatgcatttaaggacctgtccctgtcctgcacaacacagttcctgcagtacttcctggagaagagggagaagcacgtcactgtggttgtaggaacattctggggacacaggaagtgctgccattgagagtgttcaaggggcaaagaacatggacattatcgttctgctgcccaaaggtcactgcacaaagattcaggagctccagatgacaacggtgctgaagcagaacgtacatgtgtttggagtggagggaaacagcgatgagctcgatgagccgatcaagactgtgtttgccgatgtggcttttgtcaagaagcacaatctgatgagcctgaattcgatcaactggtcccgggtcctggtgcagatggcccatcacttctttgcttacttccagtgtacgccatccttggacacacatcccctacccctggtggaggtggttgtgccaacaggggctgccggtaaccttgcagctgggtacattgctcaaaagataggcctgcccatccgtctggtcgtggcagtgaaccgcaatgacatcatccacaggactgtccagcagggagacttctctctctctgaggctgttaaatcaaccttggcatcagctatggacattcaggtgccctacaacatggaaagggtgttctggctgctctctggctctgacagccaggtgacaagagccctcatggagcagtttgaaaggacccaaagtgtgaatctgcccaaggaactgcacagcaaggaatctaattgggaaggattgtttttattttaatgcaacctggtgatggtacttattctgtgttt

SEQ ID NO: 1722 - DNA, 428 bp, Homo Sapiens
gatgaagtagttggtcagagtccctgtttgacacatggagaccaccttgacagcaaaggccctaagggggagcggtgcaaagcaaggtgggctggtgagtgagaggagagggatggcatagagctgggtgggggcacaggagcccgtggggaaggtgttcgcctctgaatgaagtggggttgtatcagataccacgggtgaagcatcgggaagaggatcctgcctgtaaaccctgctcaaggactgcaccatcatcatgcccagtgtgtgcgtgtattaggtttgtatgaatataatgttgccaattgtatctgtttttatgaaatgtttgctatgtgccaatgattattcgatccatggggagaccatagaagaatgatccaagcagttgggaggggaatcaaataataaatcaacgattctgcaaa

SEQ ID NO: 1723 - DNA, 611 bp, Homo Sapiens
caaagccatgttcacactgacctaatgcagagtatggaagcattgggctggttatacatttctgtttcttagatttatcctccgcctctgtaggcatggacaacctttaatcagagcatctagagtggcctcttgtttatcctgaagatactgatgggtcttgttttctgttagtctgttttgtaatattcttttcccttccttcatggggaggcttagtttgtccagtccttccatgcccttctatcccagattacctaaatgttcccttctcaggaattctgtctcatcagttcttcacagtgagaaaagaggctagatgatggtgtggggggttggagttttcttctaataccgagggttcctggctgtgaggaaacagccacatgttcgtcatgattgagctgtgaagtcttcttggacctgttgtctgaaaataaagttaatttgtttgaggcatctctcttaagtaggtggaaactattgaagttcagctaacaatcacagcataggttctgatgcatggaaaggtggttggtgaatgaaaaagttgcgtagagccactactttctttttccctgagaataaatttggataaaacagttgtattc

SEQ ID NO: 1724 - DNA, 596 bp, Homo Sapiens
ttcactgttaagtcatgtcccttgaaacatgatagttacatacacagttttctctccacacataaataacaccactaaagttgttttgtaaggttccaaactaatatggcatatatcaactctacagtttcaaataaatgactttttaattgtaaaagattagttgaaaaactgtatgaatgtgaagatcacatgcttagtcatttttatgttcattccactttgtatatcttttctatttattgacttctcatgttctagagagtaggacttttattccgtgtacctgatatatatacaattaaaatatctgtataattatgttttaatgaagtttatttcaacagatattttatgaaatgcagtttaaccacagtgaatgaattttagctttgcttttgaaatacattgtaagatttgacttgaggtttttgacacttaagtacatgcttaatgatatattttcaaaagtcatcagtctacttacataaactttacctaatttttttcactttaacaaaaacataactatgcccttgttttttcatactttgacccaaaatatgccattttgaaataaaatttaagctttgaaa

SEQ ID NO: 1725 - DNA, 404 bp, Homo Sapiens
agactctaaagacttcccttttctgccagactacattttgtggggagcctgaggactctggattctttgaggggatcctggatgtgtgtgttcttgttaaagaggctgttatcaggcttaaccataaccctcaagatctgcttgacagtgattaaatccttagctcacatccattcccatctttcgggctccttaggcccaaggatggcatgtgactggtccctgcaagggtcctttctttgtcaccagccaaggcattgataaccaagtagccattttcctcttaaggtttcctctacaaccccaaggactttcatgattatcctcagggacaggattggaggcattgagcgtgtttattaacaaattgtttttggtaataaaataaatgcttggactcttaa

SEQ ID NO: 1726 - DNA, 1094 bp, Homo Sapiens
  misc_feature (887)..(887): n is a, c, g, or t
gctggaccggtccggattcccgggatggcggggacagcggcgggcggctgggacggcgggtgcggcggggccgagcccgcacgatgcctcacttcaccgtggtgccagtggacgggccgaggcgcggcgactatgacaacctcgaggggctcagttgggtggactacggggagcgcgccgagctggatgactcggacggacatggcaaccacagagagagcagcccttttctttcccccttggaggcttccagaggaattgactactatgacaggaacctggcactgtttgaggaagagctggacatccgcccaaaggtatcgtctcttctgggaaagctcgtcagctacaccaacctcacccagggcgccaaagagcatgaggaggccgagagtggggagggcacccgccggagggcagccgaggcacccagcatgggcaccctcatgggggtgtacctgccctgcctgcagaatatctttggggttatcctcttcctgcggctgacctggatggtgggcacagcaggtgtgctacaggccctcctcatcgtgcttatctgctgctgttgtaccctgctgacggccatctccatgagtgccatcgccaccaacggtgtggttccagctgggggctcctatttcatgatctctcgttcactgtgggccagaatttggaggtgctgtgggcctgtgcttctacctgggaacaacattcgcagcagccatgtacatcctggggggccatcgagatcttgctgacctacattgccccaccagctgccattttttacccatcgggtgctcatgacacgtcgaatgccactttgaacaatatggcgtggtgtatggggaccatttttcctgacctcatgaccccgggtgggngggtttggtggggggtcaaggtatggggaaccaatttggcctcgcttctttctggggcctgggtggatcaatctcccatcctcttccatcttatggctgggggggcattaaaagcctatattttgaacccctccccggggtttcccgggaattacatggcctgggggcaaccaggacccctggcccccgggaaccccgttttggcca

SEQ ID NO: 1727 - DNA, 1306 bp, Homo Sapiens
gccagcccggcaggcacccctgcagcatggcctggaacaccaacctccgctggcggctgccgctcacctgcctgctcctgcaggtgattatggtgattctcttcggggtgttcgtgcgctacgacttcgaggccgacgcccactggtggtcagagaggacgcacaagaacttgagcgacatggagaacgaattctactatcgctacccaagcttccaggacgtgcacgtgatggtcttcgtgggcttcggcttcctcatgactttcctgcagcgctacggcttcagcgccgtgggcttcaacttcctgttggcagccttcggcatccagtgggcgctgctcatgcagggctggttccacttcttacaagaccgctacatcgtcgtgggcgtggagaacctcatcaacgctgacttctgcgtggcctctgtctgcgtggcctttggggcagttctgggtaaagtcagccccattcagctgctcatcatgactttcttccaagtgaccctcttcgctgtgaatgagttcattctccttaacctgctaaaggtgaaggatgcaggaggctccatgaccatccacacatttggcgcctactttgggctcacagtgacccggatcctctaccgacgcaacctagagcagagcaaggagagacagaattctgtgtaccagtcggacctctttgccatgattggcaccctcttcctgtggatgtactggcccagcttcaactcagccatatcctaccatggggaacagccagcaccgagccgccatcaacacctactgctccttgggcagcctgcgtgcttacctcggtggcaatatccagtgccctgcacaagaagggcaagctggacatggtgcacatccagaatgccacgctcgcaggaggggtggccgtgggtaccgctgctgagatgatgctcatgccttacggtgccctcatcatcggcttcgtctgcggcatcatctccaccctgggtttgtatacctgaccccattcctggagtcccggctgcacatccaggacacatgtggcattaacaatctgcatggcattcctggcatcataggcggcatcgtgggtgctgtgacagcggcctccgccagccttgaagtctatggaaaagaagggctgtccattcctttgactttcaaggtttcaacggggactggaccgcaagaacacagggaaaagttccagatttatggtctcttggtgacctggcatgcccctgatgggtggcatcattgtggggctcatttgagattaccattctggggacaacttcagatgagac

SEQ ID NO: 1728 - DNA, 780 bp, Homo Sapiens
accggctcccgcgcgcctcccctcgcgcccgagcttcgagccaagcagcgtcctggggagcgcgtcatggccttaccagtgaccgccttgctcctgccgctggccttgctgctccacgccgccaggccgagccagttccgggtgtcgccgctggatcggacctggaacctgggcgagacagtggagctgaagtgccaggtgctgctgtccaacccgacgtcgggctgctcgtggctcttccagccgcgcggcgccgccgccagtcccaccttcctcctatacctctcccaaaacaagcccaaggcggccgaggggctggacacccagcggttctcgggcaagaggttgggggacaccttcgtcctcaccctgagcgacttccgccgagagaacgagggctactatttctgctcggccctgagcaactccatcatgtacttcagccacttcgtgccggtcttcctgccagcgaagcccaccacgacgccagcgccgcgaccaccaacaccggcgcccaccatcgcgtcgcagcccctgtccctgcgcccagaggcgtgccggccagcggcggggggcgcagtgcacacgagggggctggacttcgcctgtgatatctacatctgggcgcccttggccgggacttgtggggtccttctcctgtcacttggttatcacccctttactgcaaccacaggaaccgaagacgtgtttgcaatgtccccggcctgtggtcaaatcgggagacaagcccagccttttcggcgagatacggtctaaacc

SEQ ID NO: 1729 - DNA, 742 bp, Homo Sapiens
  misc_feature (653)..(653): n is a, c, g, or t
ggcggctgaggtggccgctggagctcaggcggcgggcgcggctgggatggcgaagagcaacggagagaaggggccgcgcgcgcccgcggccggggaaagcctgtcgggaacccgggagagcctggcccaggcccccgacgccgcaaccaccgacgaactcagctctctcgggtctgactcggaggccaacggcttcgccgagcgccgcatcgacaagttcggcttcatcgtgggctcgcagggcgccgagggcgcgctggaggaagtacccctggaggtgctgaggcagagggagtccaagtggctggacatgctcaacaactgggacaaatggatggccaagaagcacaaaaagattcgtctgcggtgccaaaagggcatcccgccttctctgcggggccgtgcttggcagtacctgtcaggaggcaaggtgaagttacagcagaaccctggaaagtttgacgagctggacatgtcccctggggaccccaagtggctggacgtgattgagcgtgacctgcaccggcagttcccattccatgagatgtttgtgtcccgggggggccacggccagcaggacctattccgtgtgctgaaggcctacacgcttgtaccggcccgaggagggctactgccaggcccaggcgcccatntgccgctgtcttgctcatgcatatgcctgcttgagcaagccttctggtgcctggtacagatctgtgagaagtacctggcccggtactac

SEQ ID NO: 1730 - DNA, 1190 bp, Homo Sapiens
  misc_feature (1006)..(1006): n is a, c, g, or t
tggaccggtccggaattcccgggatctggccgtgcaggcgctcaggcgtgcacggtagccagtgccccggccaggaatggacagcctccaggacacagtggccctggaccatgggggctgctgccctgccctcagcaggctggttcccagaggctttgggactgagatgtggactctctttgccctttctggacccctgttcctgttccaggtgctgacttttatgatctacatcgtgagcactgtgttctgcgggcacctgggcaaggtggagctggcatcggtgaccctcgcggtggcctttgtcaatgtctgcggagtttctgtaggagttggtttgtcttcggcatgtgacaccttgatgtctcagagcttcggcagccccaacaagaagcacgtgggcgtgatcctgcagcggggagcgctggtcctgctcctctgctgcctcccttgctgggcgctcttcctcaacacccagcacatcctgctgctcttccggcaggacccggacgtgtccaggttgacccaggactatgtaatgattttcattccaggacttccggtgatttttctttacaatctgctggcaaaatatttgcaaaatcagaagatcacctggccccaagtcctcagtggtgtggtgggcaactgtgtcaacggtgtggccaactatgccctggtttctgtgctgaacctgggggtcaggggctccgcctatgccaacatcatctcccagtttgcacagaccgtcttcctccttctctacattgtgctgaagaagctgcacctggagacgtgggcaggtttggtccagccagtgcctgcaggactggggccccttcttctccctggctgtccccagcatgctcatgatctgtgttgagtggtgggcctatgaagatcgggaagcctccctcatggggctgctcagtgtggtggatctctctgcccaggctgtcatctacgaggtggccactgtgacctacatgattccctttgggctcancatcggggtctgtgtcccaatgggggaatggctctcgggggcctgcggatactggggcagggccaagcgctcgggccgtctcgggcgggggctcaacaataaattgggatttttccctgggcccctgggcaacccttgaataaacttcctgaaaaaaatcaccttgggggctatatttttttat

SEQ ID NO: 1731 - DNA, 1014 bp, Homo Sapiens
ctgaaagaatgtgtggctgctcttttttctggtgactgccattcatgctgaactctgtcaaccaggtgcagaaaatgcttttaaagtgagacttagtatcagaacagctctgggagataaagcatatgcctgggataccaatgaagaatacctcttcaaagcgatggtagctttctccatgagaaaagttcccaacagagaagcaacagaaatttcccagtgtcctactttgcaatgtaacccagagggtatcattctggtgtgtggttacagacccttcaaaaaatcacacccttcctgctgttgaggtgcaatcagccataagaatgaacaagaaccggatcaacaatgccttctttctaaatgaccaaactctggaatttttaaaaatcccttccacacttgcaccacccatggacccatctgtgcccatctggattattatatttggtgtgatatttggcatcatcatagttgcaatggcactactgattttatcagggatctggcaacgtagaagaaagaacaaagaaccatctgaagtggatgacgctgaagataagtgtgaaaacatgatcacaattgaaaatggcatcccctctgatcccctggacatgaagggagggcatattaatgatgccttcatgacagaggatgagaggctcacccctctctgaagggctgttgttctgcttcctcaagaaattaaacatttgtttctgtgtgactgctgagcatcctgaaataccaagagcagatcatatattttgtttcaccattcttctttggtaataaatttgtgaatgtgctgaaagtgaaaagcatcaattataccaacaaacactgaaatcataagctattcaggaatcaaatatctaagatatttttctgaaagataggtataaatggtggcagtggaatggaagtattggattaaagattttagagattaaatcggctatgttttattttccacttaaggaactaggaaatatttcccgggggaaaattttt

SEQ ID NO: 1732 - DNA, 927 bp, Homo Sapiens
gtggttggctttgaatgacagcaagaactctgtctttaatggcttcagtggtagcgtatgatgattcggactcggaggctgagacagagcatgcaggaagttttaagtgctaccggccagcagaaagacacttctggtgtggccagaccacctgggcaggattttgcactctggtacactggatgtgcccaaagcagggtgcacagcccacaaagcatggctcctgtgaagacccagggggctagtcgccttccattggctcagcttgggagaagcgatcggggatcttgccccagccagaggctacagtggcccgggaaggagcctcaagtcaccttccccatcaaagagccttcttgttcttctctgtggacgagccatgttccagccagccacatgcccctggcagctgcccgctttaagcaagtaaaactctccaggaactttcccaagtcatctttccatgctcaaagtgagtctgaaaccgtaggtaaaaatggcagctcttttcagaagaaacaaagtgtgaggactgtgtggtaccctatagctcccagaagactaagacagcggcaggcattaagcacggagacaggcaagggtaaagacgtggagccacaggggccccctgcagggcgtgccccagcccctctctacgtgggcccgggagtgtctgagtttattcagccatatttgaatagccattataaagaaaccacagttccccggaacagtgctttaccacctgagaggccacaggggccctgttaaacaccattcagtggttgtccagtcctatctaagagccacatgcttctctccacttctatgcgataaaactttcaaggtatggacagccgggggactccggggactgctgaaaacgtatccccgcacacagaggcgtgcgggcgccggtgggatccg

SEQ ID NO: 1733 - DNA, 355 bp, Homo Sapiens
agggctggctagggagctgccgccgccgccaccgagggctcggactccaggcagctgcaggctccgctcgcgacgctcggaaagttgggtcggacctgaacccctaaaagcggaaccgcctcccgccctcgccatcccggagctgagtcgccggcggcggtggctgctgccagacccggagtttcctctttcactggatggagctgaactttgggcggccagaacagcacagctgtccggggatcgctgcacgctgagctccctcggcaagacccagcggcggctcgggatttttttgggggggcggggaccagccccgcgccggcaccatgttcctggcgaccctgtacttcgc

SEQ ID NO: 1734 - DNA, 478 bp, Homo Sapiens
  misc_feature (17)..(17): n is a, c, g, or t
  misc_feature (25)..(25): n is a, c, g, or t
  misc_feature (36)..(36): n is a, c, g, or t
  misc_feature (50)..(50): n is a, c, g, or t
aacgtttcccctttagnctctgaantaggtgatctnagttctctttcaantccagtactctgtaagtttctgtgacctgtagtgtaccattctcaggtgggggatatggtttggatgttttgtcccctccaaatctcatgttcaaaggtgtgacattcagtgttagaggtgggcctagtaggaggtatttcgggtcatgggggcggatcccttatgtatgactttgtgccatccccatagtaatgagtgagttctcactctggttgtttatgcaagagctggttgtttaaaagagcctggaacttcctcctctctcgcttgctctctctcaccatgtgacacactggctccccttcaccttctgccatgattgtaagcttcatgaggccctcaccagaagcagatgccagcgccatgcttcctatacagttcaaagaagaacagtgagccaaataaacctcttttctttctaaaaaaa

SEQ ID NO: 1735 - DNA, 563 bp, Homo Sapiens
cgcgcgctgcgggacgcggcagaaaatctatttcaggaacttcaggaacattttcaagctctgacggcaacattaaacctcagaatggaagaaatgggaaatcgcattgaggacttacagaagaatgtcaatgacttaatggtgcaagctggcattgaaaattctattaaagaacaaatgctgaagacctaactgcagcatgtctgtatttggagatggggcctctacagaagtcattaaggttacatcggtcctgagggtggggccctcatccaacaggattcgtctttctgagaagagacgcaaggggctcgcctgctctcccccccgtgcctgcaccagagaaggaggccatcggcaagccaaggagagccctccccagaaatcacacggaccagcaccttgatctgggacttccagaaaacagaactgtgaaaagacaagtttctgttgtttaaaccacccaatctgaagtattttgttatggcagtcctgggcagactaatacaatatgcaacacatttacaataaatatacaataaacttacaaatgtggaatgtaa

SEQ ID NO: 1736 - DNA, 241 bp, Homo Sapiens
agaggcagaaatgttagtgccgtgctctaaccaagtaagcttagtgttccccacagtgatctgtatctggcctgagtctcctcaagcagcaacccccactgtccagcatgtggaaggtagatccttatgacaacaccagacccatagttaccaggaaagaaaaaggaagctgagtgttgtgaaggggaagaaatcctttttataagaagtaatcatttttaggccgggtgcagtggctcat

SEQ ID NO: 1737 - DNA, 670 bp, Homo Sapiens
  misc_feature (61)..(61): n is a, c, g, or t
cgcttgtcccccatgatagaagtctgtaaataccttggtgaccaatgcccacttcccctcntgggtcacctctgatggctgctgtccactgagaacgtgggcagtgtccaaattcctgtactgtaaagactaaaaggcgtttgctctgagactgacaaggcggaaacttccatgtgtctcctgccaggctctgtccccctacgccatccccacacgtccccgttcccccgaaacctggctcagtgcaatactcccattgccatggggtccttcaccatggtactgtctccacagccctcagtccccaccccaggagaggcgcctgccacctcctcctcatctccggtggttcaatcgctccgcctgtccccaacccagtcccatttttatggccaaactgattctgaaacaaaatgaaactgcaaacctcgtgtgtcttaactccccccagggatgccactccattcctccgccccgtggtctggtgcgtgacaatccaaagcgccgagacgagggtgctgtgtccctcaaacccagagtggtgggcgcctatgaaaccatacagccactcctggccccaaacactggtttgcatcccaggttcctcgcccacctacccccgccacaccccgtctatttagagatctctctaataaaaaggataataagc

SEQ ID NO: 1738 - DNA, 533 bp, Homo Sapiens
ctgcgggcgtccaggtcagcaccttcctgtagggcactggggctagggtcacagcccctaactcataaagcaatcaaagaaccattagaaagggctcattaagccttttggacacaggaccccagagaggaaaaagtgacttgcccaaggtcgtaagcaagctactggcatggcaagagcccagcttcctgacggagcgcaacatttctccactgcactgtgctagcagctcagcagggcctctaacctgtgatgtcacactcaagaggccttggcagctcctagccatagagcttcctttccagaacccttccactgcccaatgtggagacaggggttagtggggctttctatggagccatctgctttggggacctagacctcaggtggtctcttggtgttagtgatgctggagaagagaatattactggtttctacttttctataaaggcatttctctatatacatgttttatatacctcattctgacacctgcatatagtgtgggaaattgctctgcatttgacttaatt

SEQ ID NO: 1739 - DNA, 476 bp, Homo Sapiens
caaaaaagtatagaaaagatttaagtaattttgccatcctaggcttaaatgcaatattcctggtattatttacaatgcagaattttttgagtaattctagctttcaaaaattagtgaagttcttttactgtaattggtgacaatgtcacataatgaatgctattgaaaaggttaacagatacagctcggagttgtgagcactctactgcaagacttaaatagttcagtataaattgtcgtttttttcttgtgctgactaactataagcatgatcttgttaatgcatttttgatgggaagaaaaggtacatgtttacaaagaggttttatgaaaagaataaaaattgacttcttgcttgtacatataggagcaatactattatattatgtagtccgttaacactacttaaaagtttagggttttctcttggttgtagagtggcccagaattgcattctgaatgaataaaggttaaaa

SEQ ID NO: 1740 - DNA, 507 bp, Homo Sapiens
ctgggggtcaccccagggcttttgctgactctgggaaagagtctggagaccacatttggttctcgaaccatctacctgcttttcctctctctcccaaggcctgacaatggtacctattagggatgagatacagacaaggatagctatctgggacattattggcagtgggccctggaggccagtccctagccccccttgccccttatttcttccctgcttccctcgaacccagagatttttgagggatgaacgggtagacaaggactgagattgcctctgacttcctcctcccctgggttctgacttcttcctccccttgcttccagggaagatgaagagagagagatttggaaggggctctggctccctaacacctgaatcccagatgatgggaagtatgttttcaagtgtggggaggatatgaaaatgttctgttctcacttttggctttatgtccattttaccactgtttttatccaataaactaagtcggtattttttgtaaaa

SEQ ID NO: 1741 - DNA, 679 bp, Homo Sapiens
ggctaggcttgttcagacacagcatggatgccgtccgaaagatactgtggatgctcttttctgaggtgaaagctgagccttccaggtagatttctgcacccagctgctttgctattgcacaaccctgctcataggagatgggcgcctgcttctggtgggacagctccatcagagtactcaggtctgttcgcaggtctgtcttgcagccaatgagcaaaacgcgggtgctgggacaataatctaggatttctgtcctccacttcttcagtgcgctgtccactgtctctggacggctgatgtcaaaacatagtaatactgcatccgagtcgctgtagcagagtggacggacattatcgtagtagggagatcctgaggtatcccagagactaagctccaccctctgttcctctgtctccaaacaggctgtgtaattttcgaacacggtgggcacataggtctctggatagcaatccttcgctaacacttgcaacatcgcggtcttcccacactgcacgtccccgaccagaacgagcttacatctggccacgactggctggggggcccgtctctccttcatggttgcagtgtccgcgggacttgaacttcgattcagaagggagggttgcgccaggtgcgtctcagcacgccaatcaagccagattcccatcccggaaattcc

SEQ ID NO: 1742 - DNA, 760 bp, Homo Sapiens
gtggcggatggagcccgcgatggagccggagactctggaggcgcgaatcaatagagccacgaaccccctgaacaaggagctcgactgggccagcatcaacggcttctgcgagcagctcaacgaggactttgaggggcctccactcgccacccggctgctggcccacaagatccagtccccacaggagtgggaggcgatccaggccttgacggtgctggaaacatgcatgaagagctgcggcaagcggttccacgacgaagtgggcaagttccgctttctcaacgagctcatcaaggtcgtgtctcccaagtatctgggctctcggacatcggagaaggtgaagaacaagatcttggagctcctctacagctggacagtgggcctgcccgaggaggtgaaaatcgcagaggcctaccagatgctaaagaagcaggggattgtaaagtccgaccccaagcttccagatgacactacctttccccttcctcctccacggccgaagaatgtgatctttgaagatgaggagaaatccaagatgctggcccgcctgctgaagagctcccatcccgaagacctccgcgcagccaataagctcatcaaagagatggtgcaggaggaccagaagcggatggagaagatctcgaagagggtgaatgccatcgaggaggtgaacaacaatgtgaaactgctcacggagatggtgatgagccacagccagggcggcgcagcagctggcagcagcgaggacctcatgaaggaa

SEQ ID NO: 1743 - DNA, 781 bp, Homo Sapiens
  misc_feature (364)..(496): n is a, c, g, or t
cagaggtgtgctctcaaatgcacacacacatacattcactcagcaaataggtgcagactccccaaaacaaacccagtctctgagccccctccaccaccctcccctctcccgacgctcactcccaagggccttgcctcagtggaacactgtgatttggacagggaatgcatcctgacttctgcacaccggtatatcacctttcctgcatccgttaagttaaacaacatcctgagcatttacaattcaaccagtatgcattcagcacctactgtgagccaggcccagttctaggagctgggagagaagggcggtgacaaaagagacctaaaaatctctcacagagatgataatgtgtcccacatcnnnnnnnnnnnnnnnnnnnnnnnnnnnnnnnnnnnnnnnnnnnnnnnnnnnnnnnnnnnnnnnnnnnnnnnnnnnnnnnnnnnnnnnnnnnnnnnnnnnnnnnnnnnnnnnnnnnnnnnnnnnnnnnnnnnnngaagaaccaaagacgaaacaacaaaattctgggaaacaagagtggccaacacgtgtgaacaccccattttttgagaaaaacagataccaaaaattttacatgagggacaagaggtagacgaagagaagaaatgaccagaagataaccaaagagacggcatacgaacgagaagaaaaaacgagtcaagacacccaaggagacaaaggggatacaacaaagaacaccaaaaaaacagtccgcgggccaccaccacaggggaaacaccaaaagaaacacacaagacaa

SEQ ID NO: 1744 - DNA, 1007 bp, Homo Sapiens
cgatgtgcttaatgattctcatggcttcagcattcttattctgggagatcagccacctgggagactcaggtatgcaccagtaatagagcaagaagaagaagttgggcagagcaactgtgaactgcaaccacctccagtgaggaagtgcgtaagccacccaagctagcaccaggaggcccaaccggtataggcaacttgggttaaaaaatccccactgttctccgatatctccgcccaacaaattctgtaatcaggatgtagcctattaaccagcctgctttgctgaccagtccttggattaagcgaaaaatttaacatccacgtataggtttggggaaatggccatgagaactccagctgcagcatttatgaggactgtagttaggaggcagagcttacggccaaacctgtctgctatgtagccgatactcatagagccaataaagaatcctacattcactgatgactggaataggtccaacatccaggagttggcacataccaggttaaactcggtgacgatggacgagccaggcgtctcgtacacccagccgtcccggcaggggcccagtggcaggcggctcctgttggtgtccaggctggccagggggtccacgcagtcgaaggtgctctggttccagtccacctcgtagcgcctacactgtcttggggaggcttcgcccgcaggtcctgggcccggcaccgtgtagttcagttcctctgcaggactccagccgcagcgcagactcagctcggccactccggggctccggcagcggtggtcaggggtgaagcccaggaagacgatgcccacgtagatgggcgcgaaggtagccgagagcagagccaagaggaaaaacatttgcttctggaaaaagtgaaactcccctccatgctccaggacatcgtccacggtggtgcgcatgatcctgcaggcaggagggcccgaggctgcccgacgtgcccggagcgaggctgagatcccgtactccgaggcgtaccagcct

SEQ ID NO: 1745 - DNA, 1545 bp, Homo Sapiens
cttatctataaccagccacctgaccatagccaaacaaccagccggcccaccagtagcattcagcccctcagctggccctgagggtttggagacaggtcgagggtcatgcctgtctgtccaggagacagtcacaggcccccgaaagctctgccccacttggtgtgtgggagaagaggccggcaggtgaccgaagcatctctgttctgataaccgggacccgccctgtctctgccaaccccagcagggacggcaccctctgggcagctccacatggcacgtttggatttcaggttcgatccgaccgggacaagttcgtcatcttcctcgatgtgaagcacttctccccggaggacctcaccgtgaaggtgcaggacgactttgtggagatccacggaaagcacaacgagcgccaggacgaccacggctacatttcccgtgagttccaccgccgctaccgcctgccgtccaacgtggaccagtcggccctctcttgctccctgtctgccgatggcatgctgaccttctgtggccccaagatccagactggcctggatgccacccacgccgagcgagccatccccgtgtcgcgggaggagaagcccacctcggctccctcgtcctaagcaggcattgcctcggctggctcccctgcagccctggcccatcatggggggagcaccctgagggcggggtgtctgtcttcctttgcttcccttttttcctttccaccttctcacattggaatgagggtttgagagagcagccaggagagcttagggtctcagggtgtcccagaccccgacaccggccagtggcggaagtgaccgcacctcacactcctttagatagcagcctggctcccctggggtgcaggcgcctcaactctgctgagggtccagaaggagggggtgacctccggccaggtgcctcctgacacacctgcagcctccctccgcggcgggccctgcccacacctcctggggcgcgtgaggcccgtggggccggggcttctgtgcacctgggctctcgcggcctcttctctcagaccgtcttcctccaacccctctatgtagtgccgctcttggggacatgggtcgcccatgagagcgcagcccgcggcaatcaataaacagcaggttgactacaaggcaaaggcaccacgagacacaaagaagacagacaacaaacagaagaagaaggagcaaccacgcagcagagagccgggcagaggcggggcccccagacagcaccgccccccgggggacacaagtaagaacgatggcacgagaagcacgcggcagacaccgcgaggaacaaaatggggagcagggagcgagaagccatagacacagaccagagacgccgcagagcgagccgccccgggcgacgcccgcgcccgcacggcggcaagacaggggcacagacgagaagacgagacgagagacgggaacacacgggcgaccgcgcccccggatccgaacaccgaccaacgaaggcgcgcagcagcgacgaagacgaaaacaaaagccccagcgccagacacca

SEQ ID NO: 1746 - DNA, 1090 bp, Homo Sapiens
  misc_feature (980)..(980): n is a, c, g, or t
ggtgacctgcagatatcagaagaaaagaactgcaatacctggcttttctcaacaaaggtggaaatgagctgcatctgtaccattaatcatgtcgcagtgactttcccaataggacagattccttgtacctttatatgtgtcgattatggcaactttacttatgttatcttttccattgaaaactttataaactccatctgcagtattgttgtaaggataaaacagaccaactgtggtagtaacagggtacggaaccaaactcaaaaatggatccctatagccccataacagttctctcaaagttctgacttggaacatagaagattttgacttgttaataagtgaattgaggatcatgtgaacaaattgattgtgatagatatgggatgcagctgccacagccagattgagagactgtgaagttgtcagcctctgttccaactgatagtgaaggttcgaagatggcaccattgggctgcaggaaagagactgtgttgtcctcagcgtcctgggttacattttccttggctagaaaacgaactctgtacgtataaggacctctttgcttaacttgaatgttgctgctgttcatcatcacttcctgtggattttgcacatcaaagatccaaactgtctgtaaacttctgtgcctgttttaacccaatttttaaaagcaattgtaccttcttcgaggacaacttgctttttaattgtcttctggataagcaggtctccaactggcattagaatacctccaaacacagccaggacagcaccaatgacagccccagcgatgagcccacagttccggtcacagcccatttttcttgttcaggaggtgaattagtgttaagcacctgtttcttgcaactcctggatatgattaaagtggtttctacaagctctggttcttattcacaaatcaacagcaagacatgaattttacaggaaatgaactgatgagtcactaaaagaatcanttcgtctaatcattggaaagctatctttaaaatggctaagaaggatttttccatcaatgctccacactttggacattcttaataggatccaatggtattctgcaggaaag

SEQ ID NO: 1747 - DNA, 933 bp, Homo Sapiens
agagaccaagcattatcagacccgtggggacacctccaaacccagcagccttcattcttgaatgctgcttttattttcacaaatggttccagtttctgtagacatgggtgctagttttccataaaaacttctgtgacacaaatcaatttttttctccgtggaatagaagtggaacctggagcaaggaggaattactagtaaggggcacgttattgtagagtaaggggatgccaccgagtaggtactgtcactgacaataaattctgttgtttgtgtcgcagtctgagtgttgaatatgggatctttggtggtgcataatttctggaatgcacgagttagtccaagtatcagatgagttgtaacaataggctgcaaactgtcggctcactggaaccttccaaatcaggacaacccaccccattgtttcccacacttggggtttgggctaatcctagagatgaccacgaatccatctccaacccagccatagctgcaagtttcaaagctagctttcaaggctgtttcaacttggtccttgccggccaaacttagtcccagcagcctacaggcctccttagcttctgtgaaattcagctgctggttcgcctttttgctcacaagggtgatccccataattctgcatgacacctggatggaaagctcttctgcacgcaaagagccttggaccaggagcctcgtggtccagatggaagtgagaagcaacaccaggctgaagcacctggccatcgtgcctaccccttcagagccagggaaacacctcagatggccactggtgatatgagaggcagatgctcaataactagtccggatggagagttctggaactatgttgaggctcacactcactgctccacctcataaccgagacatccggatttccctgctttcaagcttctgacttgtcaggtcact

SEQ ID NO: 1748 - DNA, 1058 bp, Homo Sapiens
  misc_feature (364)..(393): n is a, c, g, or t
  misc_feature (445)..(476): n is a, c, g, or t
cactggtgctgagaggaaacagtggaggcagcggggcaggtcgcctggggcgtcggcggtgatattgcggccgagccggggcgcgccgggaaaggccgggagggcggcggctgcgcgggggctgggcgaggccccgcgaccgcgagggaggcggcgcgaagccgaggcggcgggcgcaagagcctgggcatgagcgcccaggagcgtgagcgcccgcggctgcctggcctcagaagcagacgcgcgagcgcgggcgggcggcagcagcgacgtagcccggcggtcccggcggcgagagcaggcgccccacaggtcccccgccggcagtgcggccgagtcgaggctcgctctctggctgcttagnnnnnnnnnnnnnnnnnnnnnnnnnnnnnntgacgccccaatgagttcgtacttcgtgaacccgctgtactccaagtacaannnnnnnnnnnnnnnnnnnnnnnnnnnnnnnnaggccatcaatcccacttactacgactgtcacttcgcgcccgaggtcggcggccgtcacgccgccgccgcagcagccctgcagctctatggcaacagcgccgccggcttcccgcacgcgcccccgcaggcgcacgcgcacccgcacccgtccccggcgcctccgggactgggtgcggcggtagggaagggccggggccaggcaggtaccttccaaccccacggcaggaggagcatagacccgggaccgcttgctctttccccaagggcccgacacaccaccatccctctagatcacgaaatccatcggatacatacgactgccaacatccacacatcattgccgtcgggcaaatgcactagagacaaccgcgtgtccatagtcaccaagccacaagtttagttcaaggggcattaggagacttacacactatcccacgcaacgcaaaccatgcccaaaacagatatacctcgatgccccaatccccctgagactcgcccggacatgcaatacaaaatattccagagaagaatgttacaaatcagaccccactcgcataacaaactgagcataagagaccaca

SEQ ID NO: 1749 - DNA, 893 bp, Homo Sapiens
agcaggctggtacggtccggaggttatggatggcagcaggacccaggatgctccggacctgttacgtgctctgttcccaagctgggaccccctccagggctggcagtccctgagctttgatggcggggccttccaccttaagggcacaggagagctgacacgggccttgctggttctccggctgtgtgcctggcccccactcgtcactcacgggctgttgctccaggcctggtctcggcgactcctgggctcccggctctcaggcgcatttctccgagcatccgtctatgggcagtttgtggctggtgagacagcagaggaggtgaagggctgcgtgcagcagctgcggaccctcagcctccgaccactgctggcagtgcccactgaggaggagccggactctgctgccaagagtggtgaggcgtggtatgaggggaacctcggtgctatgctgcggtgtgtggacctgtcacggggcctcctggagccccccagacctggctgaggccagcctcatgcagctgaaggtgacggcgctgaccagtactcggctctgtaaggagctagcctcgtgggtcagaaggacaaggagcctccttggagcttggagccccgagagagctggactgaagctatggactctgggcagaacctcacaggtcatcctgcctcaatgcatgagcagtaaccaagcacatccggggacctccctcaagacagcatggaatccgggtggcacagtatggcccgggcccagaacgtgacggatcacatggtggattgcagaataaaacactaatgaaacccatgagacactcggatgctgaatggatgaacaggatgtacgcagggaacagaccggatgaaaggccgggcctgagatgatgcaaacc

SEQ ID NO: 1750 - DNA, 415 bp, Homo Sapiens
  misc_feature (204)..(247): n is a, c, g, or t
cacatgtcgcgcattggtcgatgacgtggggaggaggaagcgtactcaacttcattgccccctccaagcgggagttctacctgtggacagatgggctcagtgccttgctgggcagtcccatgggcagcgagcagacacggctggacctggagcagctgctgaccatggagaccaagctgcgtctgctggagctggagaacgtgnnnnnnnnnnnnnnnnnnnnnnnnnnnnnnnnnnnnnnnnnnnncttcaacttctgctatgactgcagcatcgctgaaccttgacagtgtgaactgccatgggccacagctgcggccactgcagcagccatgaagggcagtgggtagaggagtgcaggcaccctgaccagcagagattgctgcagaaataaagtctgcttggctcttgggat

SEQ ID NO: 1751 - DNA, 468 bp, Homo Sapiens
ttgaatttccctgaagaagcagaacctgagggcagagagcgactttgtgaagtttaacacccccttcttaccaaagcccctgttcttcagaagacccaagagcagctactgccacccaccctacaggccctgccgtccagctaaacaagacaccatccagctccaagaaagtcacctttgggctgaacagaaacatgactgccgaattcaagaagacagacaagagtatcttggtcagtcccacgggcccttctcgagtggccttcgaccctgaacagaagcccctccacggggtgctgaagacccccaccagctcacctgccagctcacccctggtggccaagaagcccctgaccaccacaccaaggagaaggcccagggctatggatttcttctgaggagcagcagagtcccttgtaaaacactgcttttgtacagaatgcgctataaattatacctttaagaaaa

SEQ ID NO: 1752 - DNA, 553 bp, Homo Sapiens
tttagtcctaaagcagcatgttacttccctgctatttcattacctgcaaaagctaattattaataaacaacaaactgctcaccttttattgtaatcacccaattacaatgtcaatgttggttgacatttattagatctggatttctcaaagtgtatttatctaggtcaagaaaaacgggcagaaggaaacttcacccaaattatgtagcagtgttaagcaaattcagtttttgagccaaaattaaatcatttgtgtcttcaaactttcccttggaaactttcctatagcaatgtaattttgcattttggccaaagagagctattttcttttggcagacaaaatcatgcttctggagaaacattgacttagatctatggaatctgtttcctttttaatagagctctaacaaatagagcattatatatttattttatccaagttgatcctttcaaaaagactgatataatgaaaaatttgaaatttgctctgtagtacatttttatccaatatacataaatatgctcaatttaaagcaattttccaaaacaactg

SEQ ID NO: 1753 - DNA, 367 bp, Homo Sapiens
atcaagtaagtcaaagatcatcgtttctgttttgaattgtgggtgataatgggtgggagagtgctacagtctgtatgtctgtgtctccctagaattcatacgatgaaatcttcactctcaagttgatagaaggtggggcccttgggaagtgtgaggtcatgagagtggagccctcatgaatgggatcagtgccttatgaaaggccgtagagagatacctcatcctctccacagtgtgagacttcaaggggaagtatgagacttctctgaggaagcagacccttcacaagcaaaatcagccagcactttgatcacggacttcccagcctctaggactgtgagcaataaatgtttgatgtttataagcc

SEQ ID NO: 1754 - DNA, 299 bp, Homo Sapiens
  misc_feature (57)..(90): n is a, c, g, or t
gggcaggagcaagcccctcacaatgcagctgcatgggtttttagtgcatactgactnnnnnnnnnnnnnnnnnnnnnnnnnnnnnnnnnnaaccaaaagtagttggaaagattatttgaaatgactaatttgtgctatctttatgaaatatgttaaatgtagcttttttgaaacagaagccttgaattgaaatttaactaatacttgaacattttgtatatatttctttgtatataattttgtgcagtaccaatgacaaaaatatggtgtcataataaaaccaggtttgttgatctttt

SEQ ID NO: 1755 - DNA, 237 bp, Homo Sapiens
acagcgtatatttctaatcatattttttaaagccaagagaactggttgaatgaatgtttattttcctgaaggtatttttaagataaagcttcctaatggcgtgtaaactttgcatatgtatgtagtttgatacatattgtcacatttgaaaatcttgtgggttgtaactggttttatacaaaatatcgaatagtgcaaattgtataattacaatcatgtaattaaaagtattaaccc

SEQ ID NO: 1756 - DNA, 610 bp, Homo Sapiens
aaaattcagataatggtaatttagtgtatatgtgattttcaaatatgtaaactttaacttccactttgtataaatttttaagtgtcagactatccattttacacttgctttatttttcattacctgtagctttgggcagatttgcaacagcaaattaatgtgtaaaattggattattactacaaaaccgtttagtcatatctatctaatcagatcttcttttgggaggatttgatgtaagttactgacaagcctcagcaaacccaaagatgttaacagtattttaagaagttgctgcagattcctttggccactgtatttgttaatttcttgcaatttgaaggtacgagtagaggtttaaagaaaaatcagtttttgttcttaaaaatgcatttaagttgtaaacgtctttttaagcctttgaagtgcctctgattctatgtaacttgttgcagactggtgttaatgagtatatgtaacagtttttaaaaaaagttggtattttataagcacagacaattctaatggtaacttttgtagtcttatgaatagacataaattgtaatttgggaacataaaaactactgaataaatcatgtggcctaatattg

SEQ ID NO: 1757 - DNA, 300 bp, Homo Sapiens
aacgtggagtgctaggggcagcctggaaaagatggggaacctgctagtgaactaggagggagacttccatagcctcagacttggatagggtaggctgagggggccctaagggagggactaaggctccaaggcaggtcacttttccttaggctgttctacttctggcttgttgcaaaaggagtagatgccccctcacccacacaaaccccactcagtctccacccaactcctggcactgctcccaggggatcgggtctccaccccagctttctcaattaaagacgataaataaaactgaaa

SEQ ID NO: 1758 - DNA, 536 bp, Homo Sapiens
aaagtagattgtaacttcctcatatagttccggctccacaaagcctttctccttcagagactttaccactagccttggaagcaacataaagttaagtctgtcagccctgtccctctctgccttgtacagctgtgtcctttcatctaccagacgttccaggtttcgagaatatagctgtagacgtcggatcaaggtatccatatagctttcatttttttggtcatgaaaaagtccaaatatcttggcaagtgtagtctcaatttttttgaaatctggtctcttttctggatcttcctcccaacagttttttacaagtaggtacacaacaagctctttttcctctcgctgtttccaagaataaatctgggcggaagggtttcattccattggaattttccactctgaaaatcttctcattacggtcccgacagttcaaagtgtagaaggtttctttccgcagaatgatctcctgtgcgatgatcccatagctgtacacatctcctttctgagagatgttggcttggcggaggtgctct

SEQ ID NO: 1759 - DNA, 1035 bp, Homo Sapiens
  misc_feature (207)..(238): n is a, c, g, or t
ggggggcgcagcgtgccccacagattctcccccttgttgagttctatacagatacgcgctggtggcctgaggaaccccaatccccccgacccgtgggttttgagggcgccaacatggggtcccacgtttctttttgggcgcatttgcggagattccccaaagctttttttgcccgttcccattgttccagcacaggatccccgtttnnnnnnnnnnnnnnnnnnnnnnnnnnnnnnnnttcgggcttgctaggcaggacccattcccgggcctacaaaacccagaatgttaatggtttcctgagctggccaaaaactccgtaggaatggtgccctttaaaaggtctgccagccctagttgttcccctccccatggaggagggcgtaaaactgggttggtattgagagggctaaacttccagcccagtgatgctccctccagctccaatccctttgatgaaggttgggtttgtccttgatgccaaaattccagagcaggatatctccccctttggaacccacagccacggtgctggggtgagttgggtgccacgccaaggatgtagccctcctgtcaaagggggcagccttttgtaatatccggtaagaatccagagtgtgcaaaaaggactgctggagcccctgctggacagatggccaggaagctctgcccagcttatgctggtggagggtcctgacgatgctgcggcatggtggcaggatctgtgggccagccagccccacccagaggcagtctgagtcacatcttctgctaggaccggagcccttcgcacagagcttcttggcctcgggctccagctccaggggactcctgctcctcttgttcctggggcgtaatacaatctcggaggtcttctgggtttctgggcgtttcttgggagccatcgcgtcctccgtgtgaaggggtactgtgctctatgcgaagatcatggagggaggattgagaggcctctggggagaaacaaggcggggactacaaaactgcggggccacaggtagccgagcaaagccaact

SEQ ID NO: 1760 - DNA, 482 bp, Homo Sapiens
  misc_feature (327)..(339): n is a, c, g, or t
aaagtcgtggaccgtttatttatttatatcaaaatatatttgttgaattttgccatatgtctaatatattgcttggtgctgatgattcagtggtgtgtgggcacttgaattgatgaattttaacatagtatattacaatagtatttggatgtttaatcaataaatgagtaaattctctggttgaactattctgtagtctaatcatttggcaatatatcagcaaagctagaatagtggtgaaataatatggagatcccttatgttgttagtgaggtagaaagtcaccacgagctccagtatcaatttagcatttgcctttgacatttnnnnnnnnnnnnncagctcttgtctttaactctcaccagtggctggtatacgaagttgttatttcctttttctgttttaatataatcagagtaatggtaggcattgacatactagtttgaatttaaaagaataatcttcctcaaaattatcaaata

SEQ ID NO: 1761 - DNA, 1117 bp, Homo Sapiens
ggtccggaattcccgggatggtgcagctggggtggaatctggccaggccctgcttaggcccccatcctggggtcaggaaatttggaggataaggcccttcagccccaaggttgtcctcgaccagtcccgtgccatggcagcccacctgcttcccatctgcgccctcttcctgaccttactcgatatggcccaaggctttaggggccccttgctacccaaccggcccttcaccaccgtctggaatgcaaacacccagtggtgcctggagaggcacggtgtggacgtggatgtcagtgtcttcgatgtggtagccaacccagggcagaccttccgcggccctgacatgacaattttctatagctcccagctgggcacctacccctactacacgcccactggggagcctgtgtttggtggtctgccccagaatgccagcctgattgcccacctggcccgcacattccaggacatcctggctgccatacctgctcctgacttctcagggctggcagtcatcgactgggaggcatggcgcccacgctgggccttcaactgggacaccaaggacatttaccggcagcgctcacgggcactggtacaggcacagcaccctgattggccagctcctcaggtggaggcagtagcccaggaccagttccagggagctgcacgggcctggatggcaggcaccctccagctggggcgggcactgcgtcctcgcggcctctggggcttctatggcttccctgactgctacaactatgactttctaagccccaaatacaccggccagtgcccatcaggcatccgtgcccaaaatgaccagctagggtggcctgtggggccagagccgtgccctctatcccagcatctacatgcccgccaatgcttggaggccacagggaaatcacagatgtatggggcaccccgtggtggccgaggcatttcccggtggctgtggttgctggtgaccccaattctgcgggggctggccctatggtccgaactttcattgaccgaccaaaccctttttggcccctggaatgaactgggaaaacaccctttggggaaaaaagccggcccacgggggaaccctgaagagggggccctggggggg

SEQ ID NO: 1762 - DNA, 850 bp, Homo Sapiens
ctccggcaggagcagcctgggcagtcaccagctcccgcgggggtacatctccattccggtgatacacgagcagaacgttacccggccagcagcccagccctccttccaccaagcccagaagacgcactacccagcgcagcagggggagtaccagacccaccagcctgtgtaccacaagatccaggggatgactgggagccccggcccctgcgggcggcatccccgttcaggtcatctgtccagggtgcatcgagccgggagggctcaccagccaggagcagcacgccactccactccccctcgcccatccgtgtgcacaccgtggtcgacaggcctcagcccatgacccatcgagaaactgcacctgtttcccagcctgaaaacaaaccagaaagtaagccaggcccagttggaccagaactccctccgggacacatcccaattcaagtgatccgcaaagaggtggattctaaacctgtttcccagaagcccccacctccctctgagaaggtagaggtgaaagttccccctgctccagttccttgtcctcctcccagccctggcccttctgctgtcccctcttcccccaagagtgtggctacagaagagagggcagaccccagcactgcccctgcagaagctacacctccaaaaccaggagaagccgaggctcccccaaaacatccaggagtgctgaaagtggaagccatcctggaagaaggtacaggggctggagcaggctggtagacaactttgaagggcaagaaagactggacaaaaaagtacctggatgatcgaaggagtaatggaccaaagagcctgctggccctggattcagtggaccccgagg

SEQ ID NO: 1763 - DNA, 860 bp, Homo Sapiens
ggttcaacagatggggctcagggggttcagggcaacggggcccgatggtgatgcctgctgtttggtgaccctcgggccgttaccagccggcccaagtaatgagtgtccacgcctgccgtgctgaaaccagatgtagcggacgccgggcgggtagttggagaattgtgtgggagacctccctccacttggcatcgctcttctgctggatggtcgccgggtctggctggaaggtccccagaggcgcgtgcgcggacgacaggagctgaacgcacagctggtacttggacccgcaatctggcctggctgcgaaccagtccttgacctcgatgtccggccgtgtggtatccatcagctcctcccaatacccttcggccttgaggtccaccacctgggacttgaggcagtgtgtaatatgaagtaacgaagtatttcttgacctggtcattggggaattccttcctctggtctcgagagagatcctccaccttccactcatcgcctccattcacatccaggctccagaactcgaacccctcttcagcgcacgggttgtgcaggaggttcctgtgcaggctccgtaagaagtagaagatcttccagtcggccacgggctggtcccagtcctcagtgatgaagccctctcgcaggcacttgcgtttccagagggtcacgaggtcgatgaggtcccgccagaggctgcagaccaggcggcagttcagcagcagctggcgggcgggcacgtgcgtgaacagctccagcaggatgttctcgggcagctcgttgatgttccccacagccatggcttgtggcttctggacaccctcctgtagctgcgctcggccgccgcggcacgatccgct

SEQ ID NO: 1764 - DNA, 1105 bp, Homo Sapiens
  misc_feature (888)..(888): n is a, c, g, or t
  misc_feature (916)..(916): n is a, c, g, or t
  misc_feature (919)..(919): n is a, c, g, or t
  misc_feature (990)..(990): n is a, c, g, or t
gggtccggaattcccgggatgagcccctctgcctagcactgctcccccaaggctcccagaaatctcaggtcagaggcacggacagcctctggagctctcgtctggtgggaccatgaactgccagcagctgtggctgggcttcctactccccatgacagtctcaggccgggtcctggggcttgcagaggtggcgcccgtggactacctgtcacaatatgggtacctacagaagcctctagaaggatctaataacttcaagccagaagatatcaccgaggctctgagagcttttcaggaagcatctgaacttccagtctcaggtcagctggatgatgccacaagggcccgcatgaggcagcctcgttgtggcctagaggatcccttcaaccagaagacccttaaatacctgttgctgggccgctggagaaagaagcacctgactttccgcatcttgaacctgccctccacccttccaccccacacagcccgggcagccctgcgtcaagccttccaggactggagcaatgtggctcccttgaccttccaagaggtgcaggctggtgcggctgacatccgcctctccttccatggccgccaaagctcgtactgttccaatacttttgatgggcctgggagagtcctggcccatgccgacatcccagagctgggcagtgtgcacttcgacgaagacgagttctggactgaggggacctaccgtggggtgaacctgcgcatcattgcagccccatgaagtggggccatgctctggggcttgggcactcccgatattcccaggccctcatggccccagtctaccagggctaccggccccactttaagctgcacccagatgatgtggcagggatccaggctctctatggcaagaangagtcagggaatagggatgagggagaanaanagaccgagctgccccctgtgcccccagggccccacagaacccagtcccctgcccaaaccccttgcagtaanggaactgggatgccctgaatgcttgggggccccccggggaaaaaacctaatcctttccagggggggacttattgtgtgggcattggaatcccaattttcgggaccggggcccccc

SEQ ID NO: 1765 - DNA, 857 bp, Homo Sapiens
gtgtcatcccctagccccagcacagtgtccagtgagctcagcatggtctctgcattgccctcaaaggtccgcccacagccagagaggaagagcaggtcccctgagaagaggcaggagggacccttgtagggctccccatccagtaggtagaccagatggccttgtgtgtggccaggtgtagccagggcccggatctgaagccgtcccacgctgaccacatcttgatgacacaggggatgggtgaggtaggggatgccgtcctgagggctcccgtacacccgacagtcccggtgccgccggctgaggtcacggttccctccactgtggtcccagtgcttgtgagtacacagaatggcgaccaaggtgaccccttcctgtgtcaatggaagcctgcacagcccgagggtctgaagggtccacagccacagccagctgggcctgggtgtcgatgatgaggtagctgtagttgtccgagaggacagggatgggaagcaccttcactccattgaagaggcggggctgggttttcgagtggcctttagggtagcgattccgagccctgcgcagctgctgtcggtagaagaggtacccgagccaggtgcgggtgtacaggctgtacccgattcggaagagcagccgctggctgtgcgccatgagcagaccgcggaggccccgaccgcgctcggcagccgcgggggctcacaagtaggacgaggacaaggacgaggaggagccagcagccggcgacccactgccacgccgcgggccagccctgccaagccatgctgggggcaggcacgcgccggccgggcggggctcggcgttgctaggcaacggcccggccccggccccccgcg

SEQ ID NO: 1766 - DNA, 1216 bp, Homo Sapiens
accggctcaggtgctggcgttccgcgcggcgccgcctctgctgcgggccgggggagccagaggaggtgctgccgggtaggaaaaaatccaggctcattcataccccaggtcacgattccggggtcgcccccagcacttctccgccgggtgcatcaacctgaaaaagccccttcttcctggaaaccctccttctccagcgtctcaacggggaaactgatcagctgacaccagccccagtcctgcgaggggccggcgacctttgacctttctccaaaggggaccacctggcttcatgtgtggatttccatggctcttgcccagaggcgggtacactgtgttccaatgtgccacggaactcacgcagtggcactttgtggcttcatgaaggaagaggcaggccacgcaacacttcctccccaagccaaggagaagtatcacttttagaggcagaggagcggaaggcagtgggtgtgaccaaaagtgccatttgttaaagactgttggagcagaactactgagaaaaaccaggcattgtatcttcagttgtcatcaagttcgcaatcagattggaaaagctcaacttgaagctttcttgcctgcagtgaagcagagagatagatattattcacgtaataaaaaacatgggcttcaacctgactttccacctttcctacaaattccgattactgttgctgttgactttgtgcctgacagtggttgggtgggccaccagtaactacttcgtgggtgccattcaagagattcctaaagcaaaggagttcatggctaatttccataagaccctcattttggggaagggaaaaactctgactaatgaagcatccacgaagaaggtagaacttgacaactgcccttctgtgtctccttacctcagaggccagagcaagctcattttcaaaccagatctcactttggaagaggtacaggcagaaaatccccaaagtgtccagaggcccggtatcgccctcaggaatggtaaagcttttacagagggtcgccatcctcgttcccccaccggaacagagagaaacacctgaatgtacctgctgggacatctgcattcccttcctgcagagggaacagctgggattaagggcatctacgttcatccacccaggcctggaaggtaaaaagttttaattccagaccaaacctctttgaaatgtggggcctattcttaaaagccccttcaggg

SEQ ID NO: 1767 - DNA, 498 bp, Homo Sapiens
gaatttcttttccttcattcatagggaaaggttttgtattttttaaaacactaaaagcagcgtcactctacctaatgtctcactgttctgcaaaggtggcaatgcttaaactaaataatgaataaactgaatattttggaaactgctaaattctatgttaaatactgtgcagaataatggaaacattacagttcataataggtagtttggatatttttggtacttgatttgatgtgactttttttggtataatgtttaaatcatgtatgttatgatattgtttaaaattcagtttttgtatcttggggcaagactgcaaacctttttatatcttttggttattctaagccctttgccatcaatgatcatatcaattggcagtgactttgtatagagaatttaagtagaaaagttgcagatgtattgactgtaccacagacacaatatgtatgctttttacctagctggtagcataaataaaactgaatctcaacatac

SEQ ID NO: 1768 - DNA, 541 bp, Homo Sapiens
cagggttctggtcacagggggggaaaggtacagtctatgtccgagggatcgaccagagatatccccattactcagacatgtgtgtcattcgaaatagaactgaaaggactatttcatgtcttgactgtgagaaccctctcgcgtcatatgcattccctgtgccattctgtacataggatgaaccagaaccaaggccatacaaatgaccacaatatttggcatcatcaatatgatcttcaaagaacatttctctcattttgaaaaaggccattcctgtgagcaatgaatcagatcctgcctgatgttgtggtcctatccgttccagctctaactgttctgccacctcctgtaatccacctttgagatttttgcagctcttcatgaggtacttcacatcataaatgacaggaaaaaacaatcgaaggatctcaaagaagtcaagttcttcttcaggcaagttagagattggttaggattttgattaagtagccaaagtcgtaaccgctatggaatgacaaccattgacccctttcagagcctt

SEQ ID NO: 1769 - DNA, 732 bp, Homo Sapiens
gggacagaaagaacccatgttcatggctgctgaggtcactctgagcgagccagcgcacacctccaagcaggcagagtgcctgtgaggctggagcggagtttctgacgccaacatcagctctgcaaggcacctgtgggcctgttggggctcagacggctaactagggctgaacgtggacatgccggtgatgagagtggcctcggtggccccggccaggcagagcaggatgaacgtggggttcttcagcaggagccagatggagctgggcagagtgtcgctgacttgaacccctgcgtctgcagcttagtgacatcctgtaaacctacactttccagcctctcaccagagcagactgtcggcctcacatcacccccacctgcaggagggcggctctttcctctcggccacacctagagcctggttccgatgaacgcaactctgaatgcctggaacattcaaatgctcttgtttgaggaggtggccaaatgtaaatggattctgaagaatcaggaacagacggtgcagccctagttagcctctgagccccaacaggcccacaggtgccttgcagagctgatgttggcgtcagaaactccgctccagcctcacaggcactctgcctgcttggaggtgttcgctggctcgctcagactgacctcagcagccatgaacatgggttctttctgtccccttccccgattaaaatgggagagcccagttctttcaaaattt

SEQ ID NO: 1770 - DNA, 541 bp, Homo Sapiens
ttgggcctaggcagtttgacgataatggagaaaaagcagggatgctataatgagtcctccccaagggtgagttcagcaccccagccctgttctgcttgtatcccagtgatacttgggaggtaggaagaaaatgggagtaagagaacaatttggggctgaagggagtgtcagaggcacgttgatccttgttttgttgtcatggaaacttcggggctggtgggacttaggccaaaagctcagaggcacaagccaaaatttagaagcttgctactcctacgactcggcctataaggaagagagaagctgtctgtactttggggactacattgctgaaggaaaaaaatcactccctggctaattaagattgcttccaaattgggggaatgtgtgtcatttcctttaccaaggccagtcatccctgcttccacccatggtcaggacagtcagccactacgtgatgctgtataaattggattacaaaccatattcttgttcagcttgcactaatctatataaataaaatatgtactttgaaaaaaaa

SEQ ID NO: 1771 - DNA, 676 bp, Homo Sapiens
agccagggcctcagcctggcccacatggatcactattgactaaagggtgtctcagaagcctttcgggggacttgaaccggttaccctgtgggatggaggtgcactctggccagagagaactggagagcgtggttgctgtcggcgaagccatggcttttgaaatttccaatgggagccatgagttactgtctcagggacaagaagcagatttttattcagacttccgaagggcttatcttgtcccctccaggtacaatagtgtctcagcaggaggacattgtcacagtgactgatgcaaaggggcgtgcctgcggatgggcccgatagaaggagttcctctagaagctgtggagtcggtcgtcaccgcgagagccctcacagtgaagtggagtcagatcctagattcgtctgattttatccagagaaggtctatggcaagcaatgtatatttttctaatgtgaaaaaagcacagatgaaccttttatttataaagaataatgtctttctgccctgctgtctacatttttctatggagcttgtcataataatagcagatattacctgatcaggaatccctgtggcgcgtctgacgctcatgagtttttcatgatggtgatgagtagcactgcactgtcacctgatgattggccctgctccgtttccccggacgcgtgg

SEQ ID NO: 1772 - DNA, 878 bp, Homo Sapiens
atcactgtgtctcctaggagtctgaaggcctcgctgctttctgtgacgccttcgcagtaagtgccgcctggcctgcatgcattggctaacagtctgcagaatggcaggaaggactcgctagagattgtcatggccagagatcataggtcacttcaggtagcaagacccctggcaaactgggcacttggcctatgtactgatttgtgggatggtgtcagggctctggggtccttcaccctgcctgaattctctttggcttctgtgctctgtatgctgctgtccccaagggctctttcttattatggcagggagtggggattggtcctactttctttctctggaaaggaaagcctccaagactccatgtgcttgggcagcttgagaaggcgttcagcaccacgcctagcaggcagaccttgaagcctcacctttagtctatctgcagaggtattcagttcctggcacaggggactaggggcatgtagagtatatgaggaggcagtatggctgtgcaggagccttcatttcagcttcaattaatagggaagaatttatgatagctctatagatgctgaaaaggtatttcgtaagatttaaaatccatcccttattaaaactcttagtaaattaagtctggaaagaaacaccctaatctagataaaggtctgtttcagaaaccaacagtgatggcattctaaagagtcagcacccacaggcattcccattaaagtcagaaactagccaagggcaagctattattcagcagtgtcccggcactactaacccctgcaacaagccagatgaggaacataaggaagaattataattgtcattatttgtagacaataaaactgcctacctgtaaaacctaagaatca

SEQ ID NO: 1773 - DNA, 474 bp, Homo Sapiens
  misc_feature (349)..(384): n is a, c, g, or t
agtgccaagcactgggagccccccaaccccagagaacaagccaagctagcagaatgacacctaccgggcataggaacgttaatgccatgagacaagggaaggaattggccttgcctaaacctcagcccttctgcagagggcatgggtctatcccttcttcagcaaggggccaaggtcacctaaaaatgaaacatccaataagccacacccacccgaagaaaagtgtggcactgcttagttgtagtgggttgaactgtggtcccctgaaaagagatgtctacttggaccctgtgaatgtgaccttatgtgggaaaagaagtctttgtagctgggtatggtggctcacacnnnnnnnnnnnnnnnnnnnnnnnnnnnnnnnnnnnnagatcgcttgagcccacaagttcaagaccagtctgggcaacatggtgaaaccgtttctacagaaaattagctgggtgtggtggcacacac

SEQ ID NO: 1774 - DNA, 305 bp, Homo Sapiens
gaggatgtgcttttgactgagggtggaaagtcagcagctgcagcccaagaagttagagccaggggcagtgcctttgatgggaagcttgggggtctaaagaaatcagaaaggggagaaaataatcctgcgtgtgctcagccctcactcagatcaacagcccctcgggtcccagctagatgtactttgtagaaggctttttttctccccctcaccctcaaaactccaggattaatgtgctattcccttttttctactgttctctgtctccccccaacccatcagcagtttgagaaatgctatggtgg

SEQ ID NO: 1775 - DNA, 389 bp, Homo Sapiens
tgcaatggctgtggcaagaagttcagcctcaagcatcagctggagacgcactatagggtgcacacaggtgagaagccctttgagtgtaagctctgccaccagcgctcccgggactactcggccatgatcaagcacctgagaacgcacaacggcgcctcgccctaccagtgcaccatctgcacagagtactgccccagcctctcctccatgcagaagcacatgaagggccacaagcccgaggagatcccgcccgactggaggatagagaagacgtacctctacctgtgctatgtgtgaagggagccccgcggcggtggagccgagcggggagccaggaaagaagagttggagtgagatgaaggaaggactatgacaaataaaaaaggaaa

SEQ ID NO: 1776 - DNA, 1016 bp, Homo Sapiens
  misc_feature (857)..(857): n is a, c, g, or t
aatggtcccaggctggtacgcgtccgaagtcttagatcaggaagcagaggagcagcagggtcaggctgctgggttcctaaggtgcaaggatgcagaacagaactggcctcattctctgtgctcttgccctcctgatgggtttcctgatggtctgcctgggggccttcttcatttcctggggctccatattcgactgtcaggggagcctgattgcggcctatttgcttctgcctctggggtttgtgatccttctgagtggaattttctggagcaactatcgccaggtgactgaaagcaaaggagtgttgaggcacatgctccgacaacaccttgctcatggggccctgcccgtggccacagtagacaggccagacttttaccctccagcttatgaagagagccttgaggtggaaaagcagagctgtcctgcagagagagaggcctctggcattcctccacctctatatacagagacgggcctggaattccaggatggaaatgactcccacccagaggccccaccatcttatagagagtccatagccggcctggtggtgacagcaatctcagaggacgcccagaggcgaggccaagagtgctgaggcagagaaagctctccagcactcatgatgccaccactgtggggagcagctactgataataaaggcaaacgagggactgtgggaggaaaagccacaccagggaaccccacaagagagcttggggagggggatgacagcccttgaattccaagacataactcggcatgccaggccagggcagtgccaaggggccctgggaagggtgtggccaacaccaagcagacatttcagagggattcccactaatcttaaccncggctggccttggggtccccaaggtgtcactcttgaagaagctctgctttacagaagattcttctgctgtcactccaatttcctcccataactcaatccagccagggggaataactgctggtggtccagaacaagcacatgtcgttccgtttatatacg

SEQ ID NO: 1777 - DNA, 947 bp, Homo Sapiens
gcctccacagttctggttggtttgtcaaggacgtttttaatctccacggtgcactggagctgggagcaaaggaggctctgtgagaggagggccagctcagccacagcaggaggactgacaggggcctgatggaggagttggtggggctgcgtgagggcttctcaggggaccctgtgactctgcaggagctgtggggcccctgtccccacatccgccgagccatccaaggtggcctggagtggctaaagcagaaggtgttccgcctgggagaagactggtacttcctgatgaccctcggggtgctcatggccctggtcagctatgccatgaactttgccatcgggtgtgtggtccgagcacaccagtggctgtacagggagattggggacagccacctgctccggtatctttcctggactgtgtaccctgtggccctcgtctctttctcctcaggcttctcccagagcatcacgccctcctctggaggttctggaatcccggagctgaagaccatgttggcgggtgtgatcttggaggactacctggatatcaagaactttggggccaaggtggtgggcctctcctgcaccctggccaccggcagcaccctgttcctgggcaaagtgggccctttcgtgcacctgtctgtaatgatcgctgcctacctgggccgtgtgcgcaccacgaacatcggggagcctgagaacaagagcaagcaaaaacgaaatgctggtggcagcggcggcagtgggcgtgagcacagtctttggcgctcccttcagcggcgtcctgttccagcatcgaggtcatgtcttcccacttctctgtccgggattactggaaggggcgtctttgcggacacctgcggggccttcatattccggctcctggcagtcttcaacagcgagcaggagaccatcacctaccctctacaagaccagttccgg

SEQ ID NO: 1778 - DNA, 843 bp, Homo Sapiens
ggctgggctgcctccttcccatctggggggtgctacctgctggggccaggatggacgggagccaccagcagctccctcaagtgagaatggggttctggatgggtccatcccacctgagaactgggtctagtgtgcgcgggtcttggccttccctcccgaccttggaggggctctgctgggctcaaggtaggcggtccccggcccgccctctatcgtcccccaccggggccgcccctctccgcggcaggcgagaagtcgctgcagctggtcatggagtacgtgcccctgggcagcctccgagactacctgccccggcacagcatcgggctggcccagctgctgctcttcgcccagcagatctgcgaggttggtcggccccgcccctgcttctggagcttgccccttcctcttcagcttgggctggcctgagcgatccggtgcagtctgctctcacgctccgcccctgctcgtttgcccaggctgtcttgtccttgcactgacctccgaactgtttggcttgcttggccacaccccctcctcccaagggaccacgcacagccggctcggcccctcccaactcgccctcctgcccagctttgctcgtctagccccgtccctgctttctggctcagcctccttttgcttggtgccacgtgccatccggccctctccagcggccgggtagccaccggcctgacctgaactgtcccccagccctcctggctgctcaggtcctggcggacgccaccggcgaaccccggcccaatgaaatcacgaagcctgccggtcccaggggatggcaatatgaagacgagaataaatacacgaagaatagcggggaaa

SEQ ID NO: 1779 - DNA, 922 bp, Homo Sapiens
tatgtaacacttaaggaaaatccacccagaccaatgcccgaagaggacccggaaggcgcaagtaaatgggaaattgggtcccgaaggctgcgcaaggtccccgaacacaactgttctcaaggtaagttcaagatgagaaccttccggcggcctagcccgtctgcaaggtagccgaacaccatggctccgagcagcaccccccaccatgtacaaggactgggccagctggcgtagggccctgtgagagcacacaaggtcccactcagtcacgatggtagatgggaaggtgctgttgtcatagatccagccatcggtgcagagctctgtggcccctgtgccattggcttctgtgccattgagaaagggcagtccccactgcggggaggtgaagcggaggcaggactcaggctgcccctgcctgtcccggggcagccagacctccagccccccgttcttgctgaggttggcatcggcaggcgggcggcagtggtgggtagggatggcagcagtgaagttctgcagggtgttgtgagaagccatcaggagcagggggaggaccaccagggtgacctggatctgctggaagcggccgacaccccccacctgctgcaggaggtcattaaaggccattgggccaggcccagcccagcggctgggggctgaggccttccagtcccaggacctctgtctgtctgcctgcctgctgtccttcgctggaggagcagcactgccgttgcctccgcagctgggttgctccgggagctgagtccgagctgctctgtggggggacagcagcctccttggctgctcctccttcttccccggtctacctgatctgtccctcccttttcccttgcagcttctcctcactttgggggtcagggcagctcagctttcagggtctgctggagacctgaccttg

SEQ ID NO: 1780 - DNA, 969 bp, Homo Sapiens
  misc_feature (684)..(684): n is a, c, g, or t
ttcaccgtggtcattgggtgactttaataaagcaccagggctttttcgtcggcatctgggttttctgcagaaattggtgtttccccaatcccatgggttttcaagcatccctccataaacatgttgtaatttctccctccaagaggagcttgggagttcccagtaaaggcacgcatgctgctttgactggtcctattcattttccctcggtaagagtagccatcgccaacatagcagtcatcagaacctatttcacagaatttccccttgaactggtcgggacaggcacaggtgaacttggatctccgcttatgccgggagcaggtagccccattctggcaggggtttggccttgcatacaggaaccacttgggagcagctgggacctgtgtaaggcgtgtttacagacacagcggtagtagggaggactctgggtaatgagacaattggccccggccacatgggttgtccttgcacgtatcttgcactttctgacacttattcccagagaaacggaagccagcccacgctgcaatcgtgaagctgactccacataggacagacggccatgtctccctacctgctcgttcaccaggcgtgctatgcggtcagtgcatgcgactccatgcttctgtgtcacatcacatgtgctatgatagccagctccagcgaattactgcacgncactgcggctacagtttgttcggctaccgtcgcgctgtgtctgctctacgctgatggtactaatcctgcgtacgctgtaatcactagctggtccatgggatccagctctgggctccagcgctttcccgaataaagacatcagcggagaacccacaggtctgtctttcccaccagacccattaacagcagaacatggagatcacgacatcctggcacccactctttgcagtttaaggactatgtgttcttcctctcacaatcaaatttctatttgcttgtctatgc

SEQ ID NO: 1781 - DNA, 1098 bp, Homo Sapiens
ctggctgccctgcaggagctggatgtgagcaacctaagcctgcaggccctgcctggcgacctctcgggcctcttcccccgcctgcggctgctggcagctgcccgcaaccccttcaactgcgtgtgccccctgagctggtttggcccctgggtgcgcgagagccacgtcacactggccagccctgaggagacgctgctgccacttcccgcccaagaacgctggccggctgctcctggagcttgactacgccgactttggctgcccagccaccaccaccacagccacagtgcccaccacgaggcccgtggtgctgggagcccacagccttgtcttctagcttggctcctacctggcttagccccacagcgccggccactgaggcccccagcccgccctccactgccccacctgactgtagggcctgtcccccagccccaggactgcccaccgtccacctgcctcaatgggggcacatgccacctggggacacggcaacacctggacgtgcttgtgccccgaaggcttcacggagcctgtactgtgagagccagatggggcaggggacacggcccagacctacaccagtcacgccgaggccaccacggtccctgaccctgggcatcgagccggtgagcccaacctccctgcgcgtggggctgcagcgctacctccaggggagctccgtgcagctcaggagcctccgtctcacctatcgcaacctatcgggccctgataagcggctggtgacgctgcgactgcctgcctcgctcgctgaatacacggtcccccagcttgcggccaacgccacttaatccggtcgggggcatggcctttggggccccgggcgggtgccggggaggctagtgaggccctctgggggggccccaaacagcccccagccgatacctccaaactacgaccctggtcgacgcgtgcccgcgggggggaaacatgcccccctcctctattgggcccgcccccggatgcgggccgactcctcggactggccctgacccgcgaccgggggcagaactacatgatgagaagagtcacgcaccacatcaacggcgtcgaacactattcgtggcaaaagaggcg

SEQ ID NO: 1782 - DNA, 691 bp, Homo Sapiens
gaactggggagaaggttggggttcatgccttctgacagagcacttgtctttgtggataaccatgacaatcaacgaggacatggggctggaggagcctctattcttaccttctgggatgctaggctgtataaaatggcagttggatttatgcttgctcatccttatggttttacacgagtaatgtcaagctaccgttggccaagacagtttcaaaatggaaacgatgttaatgattgggttgggccaccaaataataatggagtaattaaagaagttactattaatccagacactacttgtggcatgactgggtctgtgaacatcgatggcgccaaataaggaacatggttaatttccgcaatgtagtggatggccagccttttacaaactggtatgataatgggagcaaccaagtggcttttgggagaggaaacagaggattcattgttttcaacaatgatgactggacattttctttaactttgccaaactggtccttcctgctggcacatactgtgatgtcatttctggagataaaattaatggcaattgcacaggcattaaaatctacgtttctgacgatggcaaagctcatttttctattagtaactctgctgaggatccatttattgcaattcatgctgaaatctaaaatttatcaacatttaaccatttaaatgcatatttcctc

SEQ ID NO: 1783 - DNA, 880 bp, Homo Sapiens
gtgtgtggagctggctggaatctctcagcctcacctgccagacaacaccccctccttcctcaccctgtctcctgcattctcctgaaaccttcatccacacaatgcctcccaacctcactggctactaccgctttgtctcgcagaagaacatggagaactacctgcaagccctaaacatcagcttggctgtgcggaagatcgcgctgctgctgaagccggacaaggagatcgaacaccaggcaaccacatgacggtgaggacgctcagcaccttccgaaactacactgtgcagtttgatgtgggagtggagtttgaggaggacctcaggagcgtggacggacgaaaatgccagaccatagtaacctgggaggaggagcacctggtgtgtgtgcagaaaggggaggtccccaaccggggctggagacactggctggagggagagatgctgtatctggaactgactgcaagggatgcagtgtgcgagcaggtcttcaggaaggtcagatagccggagaggagccaagatccctccagacagcaccagctcacagacgctcttgttgtgcccccttcaagcccagattgtgccaggtcagctgtcccttcctctggccacctttcctccctctgggtccctcctcacccctccccgtgttaaatctgtaacttgcagcccccaggccaaagtcctttctcacactccactgcccaatagtgacctcacttccaggtcaaggtctggcgtcccaaatgaaagaagcaggcaaagggaaggagcccctgagaacaaccaatctccgtctctcctgtcttttgacctcttcttttccttctaagaaagaactaagctttgggcattggcgattagtgaaattctatc

SEQ ID NO: 1784 - DNA, 167 bp, Homo Sapiens
ggaagatctcgtgcagcttctcgaaatgctccgaggaggcggcggaggaggccatggcgcaggccgcgctggagcagcggccaccgagattcggggcctgggccctctcctagcccggcggtcagccgcccagcccagtggccataacggcgaccgccgcaccaccg

SEQ ID NO: 1785 - DNA, 504 bp, Homo Sapiens
  misc_feature (81)..(81): n is a, c, g, or t
ttccagccatcctatgtcctccaaacataacatgtcaggaggagagtttcagggcaagcgtgagaaaagtgataaagacanatcaaaggtttccacctccgggagttcagtggattcttctaagaagacctcagagtcaaaaaatgtggggagcacaggtgtggcaaaaattatcatcagtaagcatgatggaggctcccctagcattaaagacaaagtgactttgcagaaacctggggaaagtagtggagaagggcttaggcctcaaatggcttcttctaaaaactatggctctccactcatcagtggttccactccaaagcatgagcgtggctctcccagccatagtaagtcaccagcatataccccccagaatctggacagtgaaagtgagtcaggctcctccatagcagagaaatcttatcagaatagtcccagatcagacgatggtatccgaccacttccagaatacagcacagagaaacataagaaaacacaaaaaaa

SEQ ID NO: 1786 - DNA, 361 bp, Homo Sapiens
  misc_feature (54)..(194): n is a, c, g, or t
agtggacatcatcctctctcacgtagactgggactacaggtgcatgccacacgnnnnnnnnnnnnnnnnnnnnnnnnnnnnnnnnnnnnnnnnnnnnnnnnnnnnnnnnnnnnnnnnnnnnnnnnnnnnnnnnnnnnnnnnnnnnnnnnnnnnnnnnnnnnnnnnnnnnnnnnnnnnnnnnnnnnnnnnnnnnnctatatcactttttagcaggagagtaacacaaataactttttagtgttcaaaagacctataaagccaaaagacatgagttccatggtgaacgtcagagaaaggaagaagaaatgaaacaaatgtttgtgcaacgagtaaaggaaaaagaagccatattgaaagccgc

SEQ ID NO: 1787 - DNA, 380 bp, Homo Sapiens
agccacatatccagcccattatcagtgtttttgaagcaggaaaacacttgatgatagcaagatgctgtaatactaaatgccagaggagatgacatgggtcatacacagttttagatttcagaacagtaagtgtaatggcctgggcagattaagaaaaacttggaggatgtgtgttttggactggacattagaagaagatgaatagagcttcgatgtgcagagtaaagatcttatagaatggataaaagagtgatttgggctgggtgtagtggctcacacctgtagtcctaacactttggaaggctgaaatgggaagtctgcagtgagccatgattatgccactgtactacagtctgggtgacagagtgagacctcatctc

SEQ ID NO: 1788 - DNA, 556 bp, Homo Sapiens
  misc_feature (75)..(75): n is a, c, g, or t
ttctttgcctcctcccatgccttttccctacccacttctcagccctcgccacctcccctcttcccacccctgccncaggataccccttttttcccaggccagcccttcccaccccatgaattcttcaactataatccagtggaggacttctcgatgccaccccacttaggatgtggccctggagtgaactttgtgcctggccctctgccacctccaatccctggccctaatccccatggtcagcactggggcccagtggtccaccgggggatgccacgctatgttcctaacagcccctaccatgtgcggagaatgggggggccctgcaggcagcggctcagacactcagagagactgatccacacatacaaactggacagacggcctcctgcccattcggggacatggcctgggtagactggatcttgggctgggactggatgtgccaagggcccttcagggcctgcctggcacctcaggtactgggctagggtgtctgctatgcctggtatccctcctgtccattgctgtcaccaataaaggcatggaagaacag

SEQ ID NO: 1789 - DNA, 577 bp, Homo Sapiens
agaactaatactttcagggttctgacaaccacattctagcttaggggtagggcccacacctgcccccactgaggactgctccttggaccactgtggaggaagcctgggctgtctgaattgtgaattatgactgccagcccaccagagataacagatcccagcaggcagagccagaacccagttttgggtctgcatgccaggaaatgtgaacttcctccaaatgtggccactgtgcctcccaatccaggcctcagcaaggtcattcttgggctttccccacacgagtccttccagtagtccacacataatgctctacatattaaaaacaaaccatttttgtactgtggataagaacagttgtaacaaagtcatagctacatatttttctctacattttgtttattgagacaaactaattaaaaggcacaaacatagggcatgttttacatggacattataacaaacatatacattaaaagtgtaggaatgtgttgccttccctgctaacagaaagttcctaagcttttatatatacacaagttgtacaatttaatgtcctaaagtacaaagattcttt

SEQ ID NO: 1790 - DNA, 697 bp, Homo Sapiens
tagttttatcatattgttaaaagactttcaagaaataatacaaactggagatagtagatacacaggctccattctaagaacaaagtctgttagaagcaggaacacttggacaaatatgggatgggagggatgtcaggccgaggttagagtggtgatctctccccaccctttagggcctttggaggtggagaagggatcctgcctgctagcaccacattggaagggatcatctggtccagaacccccatttctatcaactaggagctggggggagtagctagcccagagacttcgggtcagggttcaacaatcaggaagacccagttcctgaggaaacgacagttcaagaagggttgggaagaaggctgtcctctaaagaagacgtcctctgcattcaatggccccacagcaacagagtagctccttgccttccacactgcccacctcgtagttgtagtcccaagtaagttctgtcccagcccggattcttttgctggcaaagaaggccacccaggggaagcgaagatcatgggtatccacgaagacattctggacaaacaggttggggctgcaactgtggttgaggtagcggcccaggttgccttcaagcttggcatcaatgatgtagcaagactcctcgccatcatagaattggcgtgtgttcttacgaacaggtgcgctctcccccttgtccaca

SEQ ID NO: 1791 - DNA, 627 bp, Homo Sapiens
aagggaactgtttcactttcatcttcctgggccatttccagatatgaattgcagagacatatttcaatatatcctcacccaaatatgctttagaagtacatttcttttaatgtaataagatttatgtcctctgtgtttgtttagagggtaaatctggatttgtatttttagaagttactttcaccaaagaaattcgaaagaaatagtgtttcagaaaaatcaaaacaagccatagaaatctaatatgtttcagatactatattgggctgcatgaagactaaatccataatatgtatgaataatgtattctaaagtaaatatcatattttgtcaaattatttgtctggcaaaattaagttcttttttctttaaaatgaactttttttcttatttcgaagtgatgtgtatgtaaagaggcagtgtagactggtggttaggagcactctggagtcagaagcctgcttcagaatcttggctacctcacttaccaaggatagagctgtggggagtttacttgttctcactctctcttcttttttccatctgtaaaatggcaaaaataaaccacctaagtaaaatggcctctgcgagagacccataaattaatatatgttgctaagatttaaa

SEQ ID NO: 1792 - DNA, 313 bp, Homo Sapiens
gtccaaagcccagagactgacaaccagctgcagtgtctaagtgttcctcactgacagggtggggcctcaccacccctggagggagcagcgttggcagggagacagccctgcccagtgaccctgggcccaagcccacccctccagggctttcagggaagcgccatccattttcaaagatgtcaaacgtcacttcttcctgtagggcccgagtcctgcctcctatcagggccagatcatagaaggctattttctattctggggaacgattataacttaaatgattgttttaataaaaattctaagctggaaaata

SEQ ID NO: 1793 - DNA, 450 bp, Homo Sapiens
aagactataaatgataagccctgtccctagcaccacctctcctgtgtgtggaatagaggcccctcgtgctaccaacacttaccctgtgtttaaaaagatcttgtaccaagccaacggcgttcctggctctcctgcccacaggatgaacattttcggcttccttaggagttttgccctaccgtattccaaagcgtgtgctggtttctcatattgtctgtaggctcactcagcccgcagtttatgtgtgtgcttttttctatgaaaaatgatgtattttgctacttcctgtgtacaaagttttattgtaaatgttttttgtgctttgcatgaacaggggccacgttgttgcaattgtttcagtagaactggtttgatttctaaaatgttcctgtaacatatcttttatgaacaaatctgaacaatttgtgaaataaaacattaaaaaccatc

SEQ ID NO: 1794 - DNA, 497 bp, Homo Sapiens
cggcacgaggcttccttagctttcaggatggaggatgtgggcagtttgacttcagcactgaaaacctctccacctggccaagggttgcctcagagcccaagtttccagaagcctcttacctgccgtaaaatgctcaaccctgtgtcctgtgcctgggcctgctgtgactgacctacagtggactttctctctggaatggaaccttcttaggcctcctggtgcaactcaattttcttttttaatgctatcttcaaaacgttagagaaagttcttcaaaagtgcagcccagagctgctggcccactggccgtcctgcatttctggtttccagaccccaatgcctcccattcggatggatctctgcgtttttatactgagtgtgcctaggttgccccttattttttattttccctgttgcgttgctatagatgaagggtgaggacaatcgtgtatatgtactagaacttttttattaaagaaacttttcccaaaaaaaac

SEQ ID NO: 1795 - DNA, 380 bp, Homo Sapiens
tatctgggcccaaggccagagggcccagagagaagcctgagcaccgtgttacctccctggccctctggctggccccaggagcctttggttcagtaaacgacccagggtggttcccagcaaagctgcttcctctctgctcctacgcatcctgtcctggcgggaagagagcgtctgggtccattcaagactctgatgacacccctccccgaggcctcccactgccggggtcccaggacccttcccccttcacctggtgacaggaacactcctttcctggtatggaacgtgagctcccgtgacatgatgataggtcttctccttggggcctcccccaataaatctgtaataaacctgaaacccacctcccggaggtgaaagaa

SEQ ID NO: 1796 - DNA, 426 bp, Homo Sapiens
caggacgcggcctaagacctcaaggcgaagctggagaagtcactggagcatctccggaagcagatgcaggatgcgttgctgttccaagcccaggcgcagtgagacctgcgtcttgtggcagaagatggtggagagccagcggcagagacgtgctgggtgagttcgagcgtcttcgccgtttgctggcagaggaggagcagcagctgctccagaggctggaggaggaggagctggaggtgctgccccggctgcgggagggcgcagcccaccgtaggccagcagagcgcccacctagctgagctcatcgccgagctcgagggccgctgccaactgcctgctctggggctgctgcaggacatcaaggacgccctgcgcatggtccaggatgtgaagctgtagcctccagaagtggtgcctatggaactt

SEQ ID NO: 1797 - DNA, 513 bp, Homo Sapiens
  misc_feature (130)..(205): n is a, c, g, or t
agcagggaggtggtgtcagtcaagcctgttttgaaacattttttgcagaaggtcagctttaaaatattgaaaaatttccagttgacatgctaagttggattaaatgctgatcatttataaaactatatannnnnnnnnnnnnnnnnnnnnnnnnnnnnnnnnnnnnnnnnnnnnnnnnnnnnnnnnnnnnnnnnnnnnnnnnnnntactacagttgcagacttttattagtgacgctgatcttcattagtcaaggtttaggtattttggttggcttttccatgtagaattccaagtgacattaacatactttgattaaagaaaatttggagactgtttaagatatatgtctagatatcaatgtaaactataagctttaggaacttacatctagaagaaagcctggaatctagaataattatctcaaaaaaaagtatatataccattgtacttgatataagaaaatgtaaacatgaacccttgccattttaataaacagtatttgtgctcctct

SEQ ID NO: 1798 - DNA, 491 bp, Homo Sapiens
gcccggcccggccgcgggcagcagggcccgggtctacgccgaggtgaacagtctgaggagccgcgagtactgggactacgaggctcacgtcccgagctggggtaatcaagatgattaccaactggttcgaaaacttggtcggggaaaatatagtgaagaatttgaggccattaatatcaccaacaatgagagagtggttgtaaaaatcctgaagccagtgaagaaaaagaagataaaacgagaggttaagattctggagaaccttcgtggtggaacaaatatcattaagctgattgacactgtaaaggaccccgtgtcaaagacaccagctttggtatttgaatatatcaataatacagattttaagcaactctaccagatcctgacagactttgatatccggttttatatgtatgaactacttaaagctctggattaccgccacagcaagggaatcatgcacagggatgtgaaacctcacaatgtcatga

SEQ ID NO: 1799 - DNA, 226 bp, Homo Sapiens
aatcgcgatcagatgccgggatcggaccagaagcgccggtcctcgtgtggcgattacggccttgcgaaacatcgctggaatttcgtcgtaactcagcggatgcacgcgcttctcgcgcatgcgcagggccgccgcctgcctcacgcgcgcggcgacgggattcagcgtgtggaagtacacgtcctgtcccatccacaatgcgatcttccgtatcctggtcgtagct

SEQ ID NO: 1800 - DNA, 207 bp, Homo Sapiens
acagacatttgtacatattatttgggggtagggcaaagtgaagagaaaagaaggttcaagttccagactggggatgagacaaggtgcttcaccccttcctcggttttattcttactcaatgcaggatagaaaatgtttcaaagactcacaggaatatctgtgggaatgctgatagtgtttctggtgagaacccaaaaaagagacact

SEQ ID NO: 1801 - DNA, 650 bp, Homo Sapiens
atgccgtcctcgttgatggggcttcctggtgcggagcggaatgaacccaactcatatgccatctctttccgggctgagggcaagatcaagcattgccgtgtccagcaagaggcccagacagtgatgctagggaactcggagttcgacagccttgttgacctcatcagctactatgagaaacacccgctataccgcaaaatgaagcggcgctatcccatcaacgaggaggcactggagaagattggcacagctgagcctgactacggggccctgtatgagggacgcaaccctggcttctatgtagaggcaaaccctatgccaactttcaagtgtgcagtcaaagccctctttgactacaaggcccagagggaggacgagctgaccttcaccaagagcgccatcatccagaatgtggagaagcaagagggaggctggtggcgaggggactacggagggaagaagcagctgtggtccccatcaaactacgtggaagagatggtccaggcccgtgggcgcaaaggtgcctcatagcatagccagcattcagcacacacaaacctactgcccacatttgggctcagggttggccatttgctagttctgctgccctcttaagatctgactgccaaataaatcatcctcatgtcctt

SEQ ID NO: 1802 - DNA, 204 bp, Homo Sapiens
ctccagagcactttggtctagactaggctttgggtggttccaattggtggagagaagctctgaggcacgtcatgcaggtcaagaaagctttctttgcagtagcaccagttaaggtgaatatgtattgtatcacaaaacaaacccaatatccagatgaatatccgagatgttgaataaacttagccatttcgtacacatggaaaa

SEQ ID NO: 1803 - DNA, 488 bp, Homo Sapiens
caaaattcggacgaggcgcccaaacagcaatgagcagcagaagtccctcaatggtgggatgaggctcctgccccggcttccacccctcaggaagataaactggatccagcaccagaaaattagcctctcttagccccttgttcttcccaatgtcatatccaccaggacctggccacagctggcctgtgggtgatcccagctcttactaggagagggagctgaggtcctggtgccaggggcccaggccctccaaccataaacagtccaggatggaacctggttcacccttcataccagctccaagccccagaccatgggagctgtctgggatgttgatccttgagaacttggccctgtgctttagacccaaggacccgattcctgggctaggaaagagagaacaagcaagccggggctacctgcccccaggtggccaccaagttgtggaagcacatttctaaataaaaactgctcttagaatgaaaaaa

SEQ ID NO: 1804 - DNA, 1149 bp, Homo Sapiens
gagagttgggccacaatgcccttcgctggcggcgcaggcccgaaggccagctggtgggagaggtccaggcgcgcccagctgggggctcaccggcctgcagtgacgggcctggccaccatccgagggcaggctccctcatcctccgtccaacgtggtctgcttcgcaacacagaaagggcccgtgctgccaccttgttccgggggcggaattgagggcagcgccgttgtccgaccgtgaagaagacgaaggtgttgtcccgcgacgtgcaggtcttggaggagctccaagtatcttcccaaagccgtcatcaatctcccggaccggcggtctccataccgcccctcgctgactggtgcccaagaaggggtttggaggcatagacgggtgcatgcgtggcgtcgacagcccagtagaggaaaaaaggggtggttgccgtgcctgtctcttaatgaagtccagggcttcctgcaggtagatctgggtgaggttggcttcccccgtcttcagattaataggaaattcttcataatatctgccaaccatctcccagtccctgtacacagggatgttgggcctggccttgttgtcataaggtccaaagtggcagttgggggatccaaaccactcatcaaatccgtgcttcagggggtggaactggggcctgtgacccagatgccacttgccgacaatcttgctgacgtagccggccttcttcagaagctccggcaggagctgctccgagtctgggatgccgcccacaatctcctgcggtgtgtaggcgtttctggcatgggcgttggtggtgtagaagccattgcggatgggtagccgtcctgtgagcagtgccgccctcgatggcgagcacagagggttggcagaatagaagtttgggaaaagcagcccttctgcagccatccggtccaaattcggggtctctctggagggctctccatacaccccgaggtcaccccatcccatgtcgtccatgagcaggagcaggatgttggggggctgcggggcgcccgaggcccccatccccgcggcgctgagcaccagcaacagctgccaccacctcgtcgccgcgcacaaccgccgccatggcaaccacgggagccgcggagccccggccagcgagccgacctagcgag

SEQ ID NO: 1805 - DNA, 1709 bp, Homo Sapiens
  misc_feature (1033)..(1033): n is a, c, g, or t
  misc_feature (1053)..(1053): n is a, c, g, or t
  misc_feature (1198)..(1198): n is a, c, g, or t
  misc_feature (1259)..(1259): n is a, c, g, or t
  misc_feature (1321)..(1321): n is a, c, g, or t
  misc_feature (1435)..(1435): n is a, c, g, or t
gggtccggaattcccgggatgtttgcattgaaacgtgagcgcgacccgaccttaaagagtggggagcaaagggaggacagagccctttaaaacgaggcgggtggtgcctgcccctttaagggcggggcgtccggacgactgtatctgagccccagactgccccgagtttctgtcgcaggctgcgaggaaaggcccctaggctgggtctgggtgcttggcggcggcggcttcctccccgctcgtcctccccgggcccagaggcacctcggcttcagtcatgctgagcagagtatggaagcacctgactacgaagtgctatccgtgcgagaacagctattccacgagaggatccgcgagtgtattatatcaacacttctggttgcaacactgtgaatcctcgtggcacatcgttcgctgaccggcttccagaagcgctgctgagttaaccgccaggcgacgatgccgactgccgccggcgagcaacgatcgccaccgggcgcgcgggcgccctgtaccggtggagaaagggcgtgaggaggacggcactgggcctggccctgctcgggtattacgcccacgagtctcctccttctgacgtcgtctcgggtcacccacaactctctcccgtcctccccgccccgcggcaccggctggacgcggcgcttgcgccggaggcgtgacccgcgccgcgcacgcgtgccgtggattaagtgcgttaatagcacacccacgttgggcgattcggctacacgcgtactcgggattcgagtgcgtactcgtcagtcgttgcccgcgcgggatgagaccgagaaggaagagacgatgacgcacgaagaagggcgcacatgtgcgtcgtacgctcattcactctctgacgagagctagttgtatctactgtttgtcctgtcctgtgtggactcattgatctcgcgagactgtgtgctgcacagtgctagaaccatatgtataacggctacggtctcgcatgtcctgatcactgattgcggcacagatggctgttacgggttgcgcntagaggtccatgacatgctnattctaccgctccgccactcccgtctgcgacgatcgactgatctatttcctacgcacgctcaccttattatctgtcataacaatgcgcctccatacctttcctaaaccccctcccccgtccccgccgcttccccatctatttatncaactctcctagctatgctggcgcttgcggggcctcacaccggggcgccgcacctccccancgcccgcgtcgctgctggttatctggggggcgaccggaagaggagtcaaagggccagtacgntcacgggcatatctcacatgccacaagggtgtaggtgacaagtgtgcggagagggaggataagaacaagcgtggatacgaaggagccgtattctcaaccatcatcccgatacangaatctaatcatacaaagtacgaggactagatgggagcgagtcgcgcacggtgggaaggcggagcaaggatagcggtagggatacccgcgcgtaccgataggacggagctgctcggcctgagatatgcgtccgcttcgaagggttcctcccgcggcctaggttaatgcgcggatccgcgtatacagatgaggccgcacgggagggacgatgcggcaggttcagatgcccgcttcagcgggcggggcccacacccgtgatgccaacggaggtacg

SEQ ID NO: 1806 - DNA, 1187 bp, Homo Sapiens
ttggtacggtccggagttgttgggatctggtggggggaagaaggctcctgctacctcccttcccggcaccctccagagggaccctcagtcgtggtcttgcaagcatggactcttctgaggagcacgctgggtgccccgcccgagggacatgtcccgtgttcctggccatgagtgcagggactgtccgctacgccccatcaggcctgtgccctgtacttgaggggaacttgagagaagagccctggggcacagacagcccaccaccagccagaccaggggcctcccgccaccccttgcagctgtcccggtcccctggaagagcacggacccctgccaaggccacatgggagtccccaggagccctggtggatgacctctgcaggggaggaggcccaaggccaggagggccccgcagccgcccagctggacgtgttgcgcctgcgcagctcttccatggagatccgagagaagggctccgagttcctgaaggaggagctgcacagagcgcagaaggagctgaagctaaaggacgaggaatgtgagcggctgtccaaggtgcgggagcagctagaacaggagctggaagagctgacggccagcctgtttgaggaagctcacaagatggttcgagaagccaacatgaagcaggcggcatcagaaaagcagctgaaggaggctcggggcaagatcgacatgctgcaggcagaggtgacagccttgaagacgctggtcatcacgtccacaccagcgctcttcccaaccgcgaggcttcacccccaagcttgctgagccccaacgaaggccgggccccgaaagggccaactctcgccacaagagcaccagcagcaccctctgccccgccgtgtgtcccgctgcgggacacaccctcaccccagacagagagggcaaggaggtggacacaatcctgtttgcagagttccaggcctggagggaatcccccaccctggacaagacctgccccttcctggaaagggtgtaccgagaggacgtgggcccctgcctggacttcacaatgcaggagctctcggtgctggtacgggccgccgtggaggacaacacgctcaccattgagccggtggcttcgcagacgctgcccacagtgaaggtggccgaggttgactgtagcagcaccaacacatgtgccctgagcgggctgacccgcacct

SEQ ID NO: 1807 - DNA, 252 bp, Homo Sapiens
ggggttgaggagagaaggtgttgagcggtaggtaacacaccttctgcagctcaaagtctctgcagaagttctccagccgccgggagcccttgattccattctccagggcctccaaggcctcgctgtgcttccacaggtgagccgccaggtgcttcatgccctgaatgttcttcagcatgacatcgccgattctttggtaatctctgatttgggcatttgagcggccttcccacagggcaagtcgttggggtc

SEQ ID NO: 1808 - DNA, 766 bp, Homo Sapiens
ggcaacacggtggagcacaggtgccagtgctgccaggagctgcggacctcgctgaggaatgtgaccctgcactgcaccgacggctccagccgggccttcagctacaccgaggtggaagagtgcggctgcatgggccggcggtgccctgcgccgggcgacacccagcactcggaggaggcggaacccgagcccagccaggaggcagagagtgggagctgggagagaggcgtcccagtgtcccccatgcactgaccagcactgccgccctcctgacctccaaggagaacctcccatatgtcctctgagctcggcttccaaggccagtggaacttgtgcccctgtccaggcggctgcagctttgaacacactgtccacgcccgctttcttgtggagggtgtgggctatgggtcacctgctgcctggaggaggggcccttacccaccccgcctgcagccacctctcaggaccagccccggggctggccgagctcctctggccatgcatccagcctgctgttctggggacgtgagcatcacctgagggtctcaggaatgacgcttggacatggtgatcagctgcctggtggctgcaggaggaagaacctcactcctacctcagccctcagcctgcgctcccctcctcagtacacggccaatctgttgcataaatacacttgagcattttgcaaaagaaaaaacagatgagcgtgaacgagatagtgcaggggatcagggaggaacgcgagtgcaaacgtaagagaaacaaa

SEQ ID NO: 1809 - DNA, 256 bp, Homo Sapiens
aagcggacgagggcacagtcccccacccgccagtgtagccagtgtgctcggcgtctgaacgtctcaaagtggccacagctgacaatgacagctgacaagggagaagaaaaggagtagctcggagaggaggaaggagaagtcccgggatgctgcgcggtgccggcggagcaaggagacggaggtgttctatgagctggcccatgagctgcctctgccccacagtgtgagctcccatctggacatagtgcctccatca

SEQ ID NO: 1810 - DNA, 381 bp, Homo Sapiens
  misc_feature (56)..(170): n is a, c, g, or t
cctgcctcagcctcgcgaagcagctgggactacaggtgcccgccaccacgcccggnnnnnnnnnnnnnnnnnnnnnnnnnnnnnnnnnnnnnnnnnnnnnnnnnnnnnnnnnnnnnnnnnnnnnnnnnnnnnnnnnnnnnnnnnnnnnnnnnnnnnnnnnnnnnnnnnnnccgagccgccgcacccggcctgcaggtgttgttctgaccccagctccactgtgccagcccgacttgagatgccaagtatcttgggcctgaggattgaggcctagagagaggcaggcgttcctcagagtcacagggaatggcggcgcctggactgggactcagcccagctgcttggcctgaccctctcacagcataatttcccgggcacctg

SEQ ID NO: 1811 - DNA, 615 bp, Homo Sapiens
ccttgtatatgggaactagacccaatgccgagatatgacctggactgccacagatcatcgcacgtgccatgcacgggcctgccatcatgcagctttatgaatgtatgcatgattgctgaacatccatgatgatgaaaaagtgggcaatgtgatggattactgaacttgcgaactgcccataggacccagactggattgatggagaacagcctcaccatgaagatgttcttattccagtttgtcaaatactactcgtcatgcttcgacatagcattcttgatagggcaatatttgtaggctatccaggagacccagtttattggttgggaaaatacagaaatgaagagtgcgacccaggtggctgtcttcttgaactgacaactcagctgacaataatcatgggaggaaaagcaatctggaataacatacaagaagtattattgccctggatcatgaatctaattgggcgatttcacagagtttctggatcagaaaagataacctcacgatgggaacaggactacatctgcagcctatgggcaaactgggattattttatgaatatcttgaaatgatcttcagtttggttcgtcgcctatatatgcctcttcatga

SEQ ID NO: 1812 - DNA, 1211 bp, Homo Sapiens
  misc_feature (1118)..(1131): n is a, c, g, or t
tcgctcctctcgctcccctacccgtccagcccgctcatctctctattggtaccggtccggaattcccgggatcctcgagcctgcgaggagcgcgccgcccgccagctccctacgtcccgtcccgcgtccccgcgttcccgcgtcctgcgatccgccgccatggccagtgaggagctggcgtgcaagctggagcgccggctgcggcgcgaggaggccgaggagagtggcccccagctggctcccctcggcgccccagccccggagcccaagcccgagcccgagcctcccgcccgtgcgcccacggccagcgccgacgcggagctgagcgcccagctgagccggcggctggacatcaacgagggcgctgcgcggccccggcgctgcagggtcttcaacccctacacggagttccctgagttcagccgccgcctcatcaaggacctggagagcatgttcaaactgtatgacgctgggcgggatggcttcatcgacctgatggagctgaagctgatgatggagaagctgggggccccccagacccacctgggcctgaagagcatgatcaaggaggtggatgaggacttccatggcaagctcagcttccgggagttcctgctcattttccacaaggccgcggcaggcgagctgcaggaggacagtgggctgatggcgctggcaaagctttctgaagatcgatgtgggccctgcaaggtggcaaaggtgccaagaacttctttgaagcccacgccccaagccttgtctccggcagtaagcttcaatcacatttgaaagctgagcaacatgatcggaaaccggtaggaaggaggaaaagccggctcccccccagacaccctttcctgaaactcaaggcccaattcccataaataacccctgctgacccttgccccctcggctcccagttgggggtctccaagaagggtccccagtgagacattgattagggcatccttcactgtaatggctggcccggcccccctccccttgagcccccaatttcccatttcgaccatcccccggtggccagattcctcggggccaatcccttcattttcttccccgcgggtttaaagacccccctttcacgaatggggcctatnnnnnnnnnnnnnnctccaataggccggggccccaaacccgcggtgaatattggggtcccccgttgctctcccgggggagcatttcgtatttaa

SEQ ID NO: 1813 - DNA, 272 bp, Homo Sapiens
atctttcctagaggatgctaggagggtgtgtccagagggattccaggaagggccacactcctcttgcgcaaggctggaacctccttttcttcaacgttcaagaatcgttgattaagtttcagcaaactgatttccagtacaggtgacttgagttattccatgcccgacggggcgaccgccaaccgccgccgccaccactagccgggaactacgtggcacgtggccaccgccgcttgcgctccaccgcctcgcctctcctctcggcgcccgcg

SEQ ID NO: 1814 - DNA, 860 bp, Homo Sapiens
cactgggaatctacgatgggggcttggccagagccctgcgtccatactgctggcatggcggcttacggccaccccagaggctctgggtgccaaccccggcttggtcgcgcaggatcaccgacaaggtgactgcagtatgcgacccaggaggggctattagctctgcagagtgagctgctcaggatcacgcgtgcgctgacttcaccggggacttgaggatcgccccacgtcggaccgtgggcgctatgagttccacacgccgtgaacgatccacgagctgtgagctgcttcactctgcgctgaggccgtgtcccgtggccaggcctgagtcgtcagcatctccgactcctccatccgggtccagggcaggtggaaggtgcgcaagtcattcttcaaactacagggctcctttgatgtcagtgtcaagggcatcagcatttcggtcaacctcctgttgggcagcgagtcctccgggaggcccacagttacttgcctccagctgcagcagtgacatcgctgacgtggaggtggacatgtcgggagacttggggtggctgttgaacctcttccacaaccagattgagtccaagttccagaaagtactggagagcaggatttgcgaaatgatccagaaatcggtgtcctccgatctacagccttatctccaaactctgccagttacaacagagattgagcagtttcgccgacattgattatagcttagtggaagcccctcgggcaaacagccaagatgctggaggtgatgtttaagggtgaaatctttcatcgtaaccaccgttcccagttaccctccttgctgcagtcatgagccttctgaggaacacaacaaaatggtctac

SEQ ID NO: 1815 - DNA, 628 bp, Homo Sapiens
tgtttattgtttatttaatggaaaagagattggcctattctggttttgatgcctgctttgccccgggatgagaaggcttccaacatgtcacttagaagaaaagacaagggttttccctggtttctgacaccagaggggcttaggcttcttgatccacagcagagttttctgggatttctttttttagagaaagaggacttgtttgaggggttactgagttgacagaggaatggtttccatagatgggaacaaagcggttgtcaaaagctagaggagtttgttccgggagctggatgacagggctggaggacagcatcatcctgttttcagcttccatctgaagacccaagttacccatcctggggtgagtgcccacctcagaagtcaaattctcccctcttaaaggcatagtctgcccttcaggggtgactgatatgtttctggaggggacagtgtgctttccaagggatacagtttcctttgttagggtcacagttgtacctataggggttatagtcatattttcacactgtccgtggatctcagtgatcccagcctcttctactgggggcaaaatcttactttcagtggttcatgccggggtcacaggcgacctttaaggtccagt

SEQ ID NO: 1816 - DNA, 515 bp, Homo Sapiens
aatattgctatatttttgaaatttaaggataaaatatggcccaatctatcaagaaaggaaagtgaaagacaaatgtaagacataattacaacattctgtgggagcacaaagtaggggactcagttcttagagaagtcttttggtcttagagttcatcaagcagagaaggggaaggacatggtccaggaaaataaatcagcacacaaagagatggggtcttgagggtgcatagtacattctggacagccagttacctgggatgagttgggagggaggagaataaggacaaaagaccatctgggcaaaaatcacgaaggggtatgtgtgtcatgtaaaggtgtgccatgatagttattcatattgctattgtaatattaatatatagtaattaactacacatgacacagctttacatgaccttaagtagttatcaacattaccataatagtaatattaataactacaataagagccattattattcacttgaggcacttgttcaaaatagattttac

SEQ ID NO: 1817 - DNA, 571 bp, Homo Sapiens
tgctccgtgtaggcctcgatggcattcagcacctgctcttcgtttttgtcaccacttactttgtaggctggaatgtgcgtgaggcggcacagagagttctcaaagagcccgaggaactgcagcggcctcttcagagcccggaaaggtatgatgctgctcttggaaggctcaatgctggtctgccccgcttcctcttccatcttggagatgctgcagttctctaggatcatgtggccagagatgtccagggacattaggttccccagcttctgcacaaagaggctcagcacctcccgagtcagcttgaacttgtagtagctggagaggcggtctcgggagatgtccaggtgtcgcagcttgtgcagctgcacgatgacccggatgtggtcgtcggacaggtccatgttgtagaggacgagggacaccaggctgtctttccactgggtgaggaaggcggcgtcgctcgtctgaatgcctgagaggtccaacggcacccagggagttaagcggccgcagcagggactccacagggacccaatcaatcatgcgcccaagtcgaggaatcggcggc

SEQ ID NO: 1818 - DNA, 610 bp, Homo Sapiens
gtcttagcaaatgcactaatgtattccgggggactgtcacctggcaccactggggcactctgctggctacaactcatacgtcctgtggtggcattgggagagttcccccatgatgagggccaagatagaatctgtaccactcagtgctaccatccccacccctacaccacttccacacaggggcctcatggcatggtcagggtcccagctgtgggtgagagcagggcactgtccagctgtccactggggaagtcaagatgtcctaaggcccaggtcagggcatctggagtctgaaggaccctagttcctagaggcatctggcagcaagaaggtgaggcatcagggaacgggaatcaggctgggactgatcagaggtgaagggacagagagaggagaggaggaagattgagctgggggcaacagccaagctcacctgggcaggtctctgccacctccttgctctgtgagctgtcagtctaggttattctctttttttgtggctatttttaattgctttggatttgttaaatgttttctgtcttctgttaagtgtgttttctctggagatagaatgtaaaccatattaaaaggaaaaagtttcagacaagca

SEQ ID NO: 1819 - DNA, 731 bp, Homo Sapiens
  misc_feature (458)..(546): n is a, c, g, or t
gtgtgatgataacttcaacatagatcatgcatctgtcatttgtagacaacttgaatgtggaagtgctgtcagtttctctggttcatctaattttggagaaggctctggaccaatctggtctgatgatcttatatgcaacgaaaatgagtcagctctctggaactgcaaacatcaaggatggggaaagcataactgtgatcatgctgagcatgctgcagtgatttgctcaagtaaggactgatcttggctcattctattctccaggagaggacaaaagaaaggggtaataaatcttaagagcctgaactcttaagaacataatgaagtctgcttcttttgtcaccgcattttaacctaacttcaggttccagttctgatacctgtggactttttaccttaactgaaattaggagaaataggttagggaagtgcatagtgaaactgagatccaggtcatnnnnnnnnnnnnnnnnnnnnnnnnnnnnnnnnnnnnnnnnnnnnnnnnnnnnnnnnnnnnnnnnnnnnnnnnnnnnnnnnnnnnnnnnntttactaggaaattttgcactatgaagttttatgaccaaaccactccagttatcatctaatccacaaaagcctcctcattagcctcattaacccactccttcccaaatcatttttcaagttcacagaatcgaatcacttgttaaaaatcaatattggtttctcattaaaactttaaaaatactag

SEQ ID NO: 1820 - DNA, 766 bp, Homo Sapiens
tcattgtttactgtcttttttcctagtaatcttaaaataatttgcctcacagaaatagagacagtaagtgtctgcagccagttcactgtttttggtaattcattggtcttcaggagttaagattttacattgtcacatcttaatttttaagcctatttttcatctctgaaactttccttttctccttggttctggctatacttggactcaaactgatcagtgtgatcatgtccaaaacagcttggcctggaagaggtaggccttattttttcagcctagtagtgtcccatgcacatgctctttgtagcattcaagtgtttaacattggataaattaagaaggtcaagaatgttgttgaaacttcaaggtctcaaaaggaaatgatggggacatagaacaactgttggtgtaccaaaaaaaggtacagaggggcaccatttgtattgtcacacaacaatgatcagaatgatcagtttagaatgatcagaacaaaaacaccactctttaatgggtctttttcttggctagaagtctttcctcagtttttgttgactatcatacgctgatttgtgggtgacggaagggggctagagataacgtttctctgtactttggtaaaggatgaaggagtcagagagggaacagaaaaagtgagagagtggcctgctgaaataatagcctgcctctaaaagttgtgaccagaaagtatgattcatttgggcccagagggaataaaatatgttttttcatatccctcccatattac

SEQ ID NO: 1821 - DNA, 588 bp, Homo Sapiens
atactgtaacgagggagctttattggttacatagtgtactgcagagccaacagagagcattcgcgccagaggatacatgcagacaggcagctccaatgatacacatgcacccaaggagccctgagccactgctttgccctggtttccagcgacaggttctggcctccttggtcccatgcttggagctgctgcacctagactctaaggggcaggggtgagagagaccagagcacctgcctgagcaagtaggtgtggaccaacaggctgcccccaacaaaggggcctataatgcaataacagtttatttgagggctactttcttagccctctcaatctttaaaatacaaaaaaatagactttattctcttaaaaatacattccattcagtatatgttctgagctgggaagcagcaggaaaatagggcccctttcctatgatcctatggttgtgaggctttgaggagaaccctgctccccactcggggtattcaaaaaataatccctaaaagcagctctttccaaagcaatcttgtcagagaaataacaaaacctgataacaaggtagccagggacccagcctctgggtcc

SEQ ID NO: 1822 - DNA, 262 bp, Homo Sapiens
tgggaaaaaaaacattccccagggcctaaggctaacaaacgtgggcgctgaactgtgtttggtctgctgagtgtattttccccaaagcaatcctcattttctcagggggtggggatttggacaaaactcttcctgaacacccagcgtggtggggaagggtggccatggaggttttttgttccttctgttgtccctggtgaaaaacgacttggggcccaatttttaataaacccaatgctattagggtccctcccaaaaaaaa

SEQ ID NO: 1823 - DNA, 292 bp, Homo Sapiens
  misc_feature (88)..(97): n is a, c, g, or t
aaaaagaagaagttttaaatttgaaataataataggtactggatttatgcaaatgttttttctgcgtcttttgagatgagtatcaggnnnnnnnnnncccttttatcatctgatgatgaacttaatgtttccatttgtattaatggaatactaagtccctctgtgatttctgaaccaagctattcctaggcctgagttttattttgttgacacagaaataaattagaaggccaagcgtggtggcatgtgcctgtagtcctagttgctgaggtaagaggattgcttgagccca

SEQ ID NO: 1824 - DNA, 570 bp, Homo Sapiens
cttaaagaagaggaaggaggagtctacctgtttacaatcagagagggcatttggggacagcaccaatttcttgaaggcgccgagggcattgaaaacactcgatttggttcagcaattgcagctctatcagacatcaacatggatggctttaatgatgtgattgttggttcaccactagaaaatcagaattctggagctgtatacattacagatggtcatcagggcactatccgcacaaagtattcccagaaaatattgggatccgatggagcctttaggagccatctccagtactttgggaggtccttggatggctatggagatttaaatggggattccatcaccgatgtgtctattggtgcctttgaacaagtggttcaactctggagttgaagattcagagagaacagtgtgaaggtcatgtgattcaaggtcaaaaataagtatattgggccggcaagggaatagaatcagaaagaagttgtttattcaatcaagaatctccattcatttgtctctgtcaaaaaatgtgcttcccatgtacaaatatttgaaggacaaaaaaataat

SEQ ID NO: 1825 - DNA, 501 bp, Homo Sapiens
atccgtggaaggtgcagcagtgcctcaggggtcctcagggtcagggagcccccctcaccctcttggcccgttaccctttgtgactttccaccatggtgtcgtgtgaccctcagtcaggttggtgggggctgagtcctcactgagcagccactttccacatctgctagaggaacagtgacatggacacctgtgacagagagaggacagttagtgaggagggacagacagctcttcctttcggagcctggctagtctaggacatcaccttgctgtgtcttctcaagcttttaaaattgaccctgaacgtgtgacagggtcctatggtgttactcaaagctgtgcagggtaaatgatgacatatttattctttttccatttgttctagaaacagtgcctttttcatcagttgcattttccaggctgagagctgtataaaacattttggactgtgaccatgtaccttcctttttaagaaaaataaactgctttatggtagttggt

SEQ ID NO: 1826 - DNA, 546 bp, Homo Sapiens
cagattcttctgaaagaagaaattgacaggcactgctagattcagctattgaatggctgaagagattgagtatttgaccttctctcaaaatcataaagtgagaattcataaggcacccaatgttaagatttatccagatttttacattttgatttcttctctctgtggggtggcaagttgagggagcattcttcattttagcttttacctgacaaccaaacttgcctttaccccatccctagaattggtgctcttggaatattgctgttaccatcatttttggggggccatcttcctaatgctacacacagcctgacaggggagcagcagatgaaagggtatgctattctgtttccagatgtttctttatgtaaatatgacgccaatgtaaatcctgtgtcaagatcatagagaatggtgctttttactacagttagcacatgcatttttagaaactactacatgttttagagaatctttgctgtgtatatgtaaactgtattgttcaactgttaacaaataataaattatttcattattaaagaa

SEQ ID NO: 1827 - DNA, 554 bp, Homo Sapiens
  misc_feature (414)..(432): n is a, c, g, or t
gaaaatcccttttctctcttacgtctaactgactagggaacaattgttgatatgcatagcattggaatacttgtcattatatactcttacaaataacacatgaagcaagaatgaccaatattctgataattggcactggatcacaaaatgtgataaaactttaaatgtataaaactttatcaaataaagttttattttcccctttaaaatgtatttctttagaggcattacttttttaaaaatattggtcaattcctgacataagatgtgaggttcacagttgtattccagtattcaagatagattcctgatttttcaattaggaaaagtaaaatccaaaatgttagcaaaacaaagtgcaatattaaatgtttgctttatagattatattctatggctgtttgtaatttctcnnnnnnnnnnnnnnnnnnnggtgctgaatatgtccttgtaggctctgttttaagaaaacaatatgtgggaaatgatttaatttttcctattgctcttccttgtggaaaataaagtgttttgtttttttctgttttgtaaaa

SEQ ID NO: 1828 - DNA, 1070 bp, Homo Sapiens
  misc_feature (440)..(476): n is a, c, g, or t
tcgcgtgggggggttccccccaaaggcttccctgtggttttgtgtattctccccaggttgtttaaagaagaccccttcaggatttgggatccagggggggataaagggaagcccaggttttttgttaaaaggaggtgaaaaggagtcccatggaagaatgaatggcataagtgttgcaaaccctccccagggtcccaaagaagactggaagacccctggcccgtgctctttaccctacgcatcccctaaatcaaggggagggggctgttctcgggcaacaagcagcctcctaggagcagaaggtgatggagggccacaggggcaggggaggagcagatggccatgtggctcagcccctgcctgggaaagcgagtccacagttcactaacaaacacaatcccatccacaaacaagtagccacaaagaccacagttagcaannnnnnnnnnnnnnnnnnnnnnnnnnnnnnnnnnnnntcacgggaggtgggcaggaccgcaggctgcagtggggaggcaagtgttagttgcatcatcaggtggaggaatggtgttagaggggatagggtgggggacacacaagttcttggcttctcctggggaaagggctgttgctgaagtggccggttttcttaagcatcgacatttgcatccaaaggttcaagcagccgcctcaggttccagaggcttccacctgatggctgcacttcagttctctgctttctggggctctgttgcattggcggtgatgaggttctccacctgggcttcctcatctcctggggcccggggcttctgattgaaactgcacttgcacctgcgacttaggataaggaggatcccaaccgagaagaggaccacagcgaacaccagtcccccaatcctcagggtctggtaatcataatgaaaagggtccatttccttctccttttcagctgcactggccaggaccatgggggccagcaggctgcagaggaagaccagcaccaactccatggcgtctgcacagccggtcccctccgagactcccaggaggacccgccgagtcccgaggagcctgggagtgcgatt

SEQ ID NO: 1829 - DNA, 587 bp, Homo Sapiens
  misc_feature (21)..(21): n is a, c, g, or t
  misc_feature (60)..(60): n is a, c, g, or t
ggacttctcttgcctggaggntgcagtgatagctccttcctcactgccccactgtgttcntgggccctgtgacccccagggctcaggcaccttgcaactagaggcttctgaactcctgggacttttggagctttaccagagatgcagtccctcccaggaacctgttggagaggcaggacctgctgctttagagtgcggctgaacctccggccttgcgtccctgtttggccagagcaaggatctggcctggagaggcccatcctataccccttattagagccatgacagcctacagagtgaggtgaggtgctcccaccttcccagatggttcctttctgccccttcctggaaggaaaggtgaggctgccaatagcctgccggcaccagccagacctcacccttgaccaacctctcggggctgggggttcattcctggggcactgtggcctggttttgctttgaaaccaagaaagagcaaagggaacccagcagttctgagtgagttctgaccagccctacctcaggctggctgttgagacatgctacaattttcatttttgtaaaaataaagcttgattgttcacaaa

SEQ ID NO: 1830 - DNA, 481 bp, Homo Sapiens
  misc_feature (145)..(177): n is a, c, g, or t
cctagtttgtaagaagtgttcaatagcacatgtgtgacatacacaataatagagtttattgtatttatgtggaaacagtgttttagggaaactactcagaattcacagtgaactgcctgtctctctcgagttgatttggaggaannnnnnnnnnnnnnnnnnnnnnnnnnnnnnnnnatctccttccacgggccaggcgagcgccgcccgccctcactgggccttgtgacggtttattctgattgagaactgggcggactcgaaagagtccccttttccgcacagctgtgttgactttttaattacttttaggtgatgtatggctaagatttcactttaagcagtcgtgaactgtgcgagcactgtggtttacaattatactttgcatcgaaaggaaaccatttcttcattgtaacgaagctgagcgtgttcttagctcggcctcactttgtctctggcattgattaaaagtctgctattg

SEQ ID NO: 1831 - DNA, 153 bp, Homo Sapiens
tgtgggatgtggtctcagtggtggcaatcgaagaagtgaagctgggagtactgtgtgaggtgctctctgtggtggtgatcacagaagtgaaggctcagaggactgtgtgaggtgactccgtggtggtgatcaaagaagtgaagttagagcact

SEQ ID NO: 1832 - DNA, 468 bp, Homo Sapiens
  misc_feature (159)..(159): n is a, c, g, or t
ccacatagcagacccccgccatcctcgcagagtgggagaggctgcagcaaggctttgcctctgcagaccccatcttagtggcacggtgcttgggcctgtgtccccgggtggtggaaccctgtaccggtctgtggccctagggtccctgctctgtctgcnccggcccgtgctgtccgctgggtgaggcaggctcccccgtgccctgccctccctctgtcagggaacctgggaccccctccccactgcctgcacagaggaccctgaccctcggccagcagggtggccccaggtccatgttgggcactagggcaggttccgtgccagagtcgggggccacacgagggcctggtgccggtgaggggggcgtgcgctagagggggaaaggggcccccggccacctgtccaccgtgtgggccgtgctgtgtccttatgtcattgtaatataaatacagatttttatatctcaaa

SEQ ID NO: 1833 - DNA, 1118 bp, Homo Sapiens
ccggaattcccgggatcgcggagggagcgcaggctcgaagagctcctggacgcagaggccctgcccttgccagacggcgcagacatgtcagaacaaagtaaggatctgagcgaccctaactttgcagccgaggcccccaactccgaggtgcacagcagccctggggtttcggagggggttcctccgtccgcgaccctggcagagccgcagagccctcctctaggcccgacggccgctccgcagtgccgcgccgcctccccaggccccgaacgacgagggcgacccgaaggccctgcagcaggctgcggaggagggccgcgcccaccaggccccgagcgcggcccagccgggcccggcaccgccagccccggcgcagctggtgcagaaggcgcacgagctcatgtggtacgtgctggtcaaggaccagaagaagatgatcatctggtttccagacatggtgaaagatgtcatcggcagctacaagaagtggtgcaggagcatcctccggcgcaccagcctcatcctcgcccgggtgtaccgggctgcacctgaggctaaccagccctgcacaccatggagtttgcgctggtcaaagcgctggagcccgaggagctggacagcggtgagccgctgagcaaccgcatgcccatgacaggcctcctgctcatgatcctgagcctcatctacgtgaagggccgcggccccagagagagcgccgttctggaacgtgctgcgcatccttggggctgcagccctggaagaagcactccaccttcggggacgtgcggaagctcattactgaggagttcggccaaatgaaatacctggaagtacacccgcgtcccatacggggagccggccgaaatacaagttcttttgggggctcccgggggcaaccccggaaatcccccagaatgggaaatcctgggggtttccctgggccagggtctttttagaaaagaacccccaggcctggggccctcccccatacggaagaaagctcttgggggagaggccacaagcttttggggggaggggtgatgccgccttgggccacctaccgcttccgaggaggtgatgcttcgtgggcgaacaccggaggtctgtggggagaccgc

SEQ ID NO: 1834 - DNA, 310 bp, Homo Sapiens
gccggaatacccggatacgagccagtgctggtgattatagacaatgagcctactagtgccctgtccaggggtggatttaccaggctttgtaggagcctagtaaatctttaactgaaaccactggtcctcagctcataggtttaagttcatttccccaagaatttagcctaactttccactcgctgatgctttaaagcaaaaacctgtggttctgtttactcttcagaagaaaaacctccactcatagctgctaataacagcaaatgctcctgaagcatgcatgctatgccagccacgtttctcagcactg

SEQ ID NO: 1835 - DNA, 1369 bp, Homo Sapiens
ttattagagaacaccagcactctatctagtatagttggcagcgcgcgtctattggagagtaagacgtgaaggaagtcgtcaatcaccgtgtagtagcaagatagaggtgtctccctccttgcgagatatatcaatgtcaattatgacgggccaccgcgccgctgcgtttctttgtgggttagggtttgtgttgacattcgtatgtgtttcagcattaaattcgtacttggccgctacgctgttgctggattttgtttggattatgcgttgtggtgctgggtgccttttcttcttgcacggggggaggcagcggtgatctttactgagtcagaagggagaccctggggaagtggggcagggcaggggtgggatggtggtggtaagaaggccaggcagatgatcttgtctcgggagggaggaggcttctcagcagagatggatcccccgccctggaggggagctggcagcagcccaggaggctccgcccagaaggcccgtgacggtggcggagccggtgaccgcgcctggctcggcagggttctctctgcgggtgtgcacagcaaagcttcggcccgtggggccccggggtccgctcagctctacatccaccacgtgcatgtccgtgaggctggtatcagccacgagcaccccaatcaccccatcgaagcccaggctgggggcagccagggcagccgccgccatggtgttggaatttcgcggggcaaaggggcagagcccacggacagggccttcgtagagcacagtgcaaggcccagggctgtgggctgcagccaggggtccctcaagccggaagccatcggggtgtgtggccatggtgacacgaaggctccggaggcccccagctgcatccaatctcctgatgtcctcagcgccccacagggcccctcgggccacaaacacggcgtggtcccagtgctgtgaggcctccaagagctgccgctctgtggtctggtcacttagagctgagggggaccccaccaggagattggcatggcgcaggatttgtgccccagattcatggattattttgggatgggccacttccacaaccagatcagggcgcctttccccaagggcagcaaggttctggagctgcagggaagggggcacgctccctgccattcgtcctgggtcacgattccagacaaaaacaagttctaggccaagttctggtccctgagccaagaggcgggagacgagggactgtccgaggcggccatagcccaccacgcccaccctccacgggcccctgtcggccatggccctgagtgcggtgtctggggcctggctccctgggctgctcgctgcccgctgcacaaggccatcccgggaattccggaccggtcca

SEQ ID NO: 1836 - DNA, 336 bp, Homo Sapiens
ttacatcttgctatgggcattcatgtgaggaatcgtgctaaatgtggaagtgttaagtccacagccctgtagccaccgccctcgcaagacatcctgctctgtacttactataaacataatattcaaatagggggctccaggctcaggcaacgactggtaaccatctctgaacagaaaggactacagataccgtctatattcatgcactgtaatatgcataacatttacatgattaaatatgctgtctgaagtaattcatattcagtgttgaccatcagaaacatggtcatgtctctaaccatgtattcatggcttaatctctttttaaaaattgtc

SEQ ID NO: 1837 - DNA, 860 bp, Homo Sapiens
ggcagcacagaagtgtaccgtacgccagacaggctgtggccccgtcccaacactggcaaccagtaacaggccggcggtgattgacgcagcgcatggggacagcacgcccctcctagcacggcagtcagccacatctgactggcaagtgtcaccccgccatcctgcagggcagcggcagcggccaggctggacacagctccctcccgttcccggcatggcggctggcatattgctgctccacaggccccaggaagcccgctggtcctcttccagccggggcagcacgcgtagcgaggcctggcaggggccagcccagggctgcggcggtaggcggtcctatagatggttcggtaggtgctgcaggcccggtgcccgtcgcaggtggtgaggaagggcatggtacacacgctgcacgaacgactcggagacagggtccccgtgagcccggacagcacacaccctacggccgggccaggtaggcgtgctctgtgccgcccactgccaacaccagaagccacatcagcagcacctcactgagagcccctcatggcctgtgccatccaggcaggggtggccttctcctctgggtggcctggcggaggagaatcagtcatcccccggacaggggcaggagctgctcctccgggtggtgggggccacctgtgcctccccaggtcctgggggctgctgatgctgctggagcccaggcgtggccatggtggccgctgcatgtgtcctgggactggagatggaccctagcccttgctggggcctcaggcccactggccgcctggaggcacctcctgaggcccacctgcctggcctgtccacaggagcctcccttgcagccgtgcaggcca

SEQ ID NO: 1838 - DNA, 264 bp, Homo Sapiens
tcatggaatatatggatgatacacctctctaaaaagtttctatacctgagcgtataaactatattggataatttacactaatagtaaagcaaaatatttaaagaacaaggcaggatacaaacttactctttccccaaggaagtttccccaagatgttgtaagcaagaattcttgacaaaaatagccaaaccatgtactttgaggtttcgttcttcacaaagaattgctttagtgaatccacaggctttattaacaggtagtttt

SEQ ID NO: 1839 - DNA, 1048 bp, Homo Sapiens
gtgggccgggagtgccggaggtggtggtgggcacaggcgggcgtgctgcgtgcccgggggacgttgcgtgtggaggttgttcgcaggggctggcaaggggaatgcaggtgttggagaggcagcgaggatgctgcggaatctgtgtggtcgcagagggacggctggcttgggttacagtcaggatgccctttggagggctgaaagtgggggatacgccaggcacgctgggtgcccgcggtgcgaggctgctggtgggggtcctgcgccttcgcaggggagttggtttgcctggcgggcgtgtgggggcgcacggcggtgccaggtgatctgagggaggtacgtgagttcagtgccgtgcgggcgtggcatggcgctgggatcgcctgcgtggaagcagagcagcaaggcgggggatggcccgtgaggcggggacaagaagcgcgcgcgtcagctgttggccccagaagccgtgttgcagcaggcggtggcccaggaaggtgaggaccacacaggtgaggacaaacagagccagggccctctggaaatgccaggaggcaggccaccagcaggaaggcagagatgcccagtgcagagcaggcctgtgccgagccagtcgaaacagctgcatgtgctcccgtgcagaagcttctggctctcagggctggctgcaggttcctccatctggagaagggcttcggcgccgcctcgctccagctgctcctgatctctgcggggctcaagtcactcctagggagctggccttcctccaggctttccaagaaatcagcccccatgttctccagacccttggccacaggtgtgagagagatggactctcttcgtctcgaggggtcgttctccatgtcccagaccttccaggtattctcgcggttaacaggtcgctctcagagagagagggaagcacacgtctctgtggggacaagctgggtccaacctgctttggctctggcttgccttgtcacttcagcagaaattcccttgtttctgtcagcatccagagggaagccaggaacacaacacatccagc

SEQ ID NO: 1840 - DNA, 239 bp, Homo Sapiens
atacgagcgcagtgctcagcctgtaagtcccagcacttagggagaaacaagaagagccagattacgtacaacatgcaggcacaggaaagaatgcagggcctgtaccataccacaccagctgactgcgcagaacgtcgggtggagactaggagacccgggagccttttgccctatctagcgcctgccacaacagacattttataactagaaaaccaacatatgcttttaaattatattta

SEQ ID NO: 1841 - DNA, 775 bp, Homo Sapiens
ggacatctacgagtggactaagatcaatgggatgatataggcccgagtccccgggcatgtttggggaggtgttcactgaagacgccgtctccatggcatcttcgtcttcactcttaggcactttgggggtttgagggtggggtaagggatttcttaggggatggtagacctttattgggtatcaagacatagcatccaagtggcataattcaggggctgacacttcaaggtgacagaaggaccagcccttgagggagaacttatggccacagcccatccatagtaactgacatgattagcagaagaaaggaacatttcaggggcaagcaggcgctgtgctatcatgatggaatttcatatctacagatagagagttgttgtgtacagacttgtgtgactttgacgcttgcgaactagagatgtgcaattgatttcttttcttcctggctttttaactcccctgtttcaatcactgtcctccacacaagggaaggacagaaaggagagtggccattctttttttcttggcccccttcccaaggccttaagctttggacccaaggaaaactgcatggagacgcatatcggttgagaatggaaaccacaacttttaaccaaacaattatttaaagcaatgctgatgaatcactgtttttagacaccttcattttgaggggaggagtcccacagattgtctctatacaaatataaatcttaaaaagttgttcaactattttattatcctagattatatcaaagtatttgtcgtgtgtag

SEQ ID NO: 1842 - DNA, 174 bp, Homo Sapiens
cggcagagcacagtgctgaattggcaagagctgctattatcctcatcactgctagtagtatgaggggacagatttaagaaagatgatggggagagaatagaggggactgcgagactgactggactgggggagggaagagctctctctggtcagcctgacactgatttgtgtcac

SEQ ID NO: 1843 - DNA, 993 bp, Homo Sapiens
taggaacccagtggccggtggcaagggcctcacgacagtctcaacgggtatgggtcagagcagccaacaggcatgggtgtggccaagagccggcaggcagggacccgaagccatgttcccacggcaagctcagaaaggtccaagaataacccaggggagtcaaagatggagaccggcaggctgccgtgatggcgctgcgttgcagccacagcctctctagcaagaagatttgggagaacacttgaggggccagcttccgagatggttgttgctgtccagggaagagctcctgcagctgcccagtttgccatacacacctggggggagaccagagagcgcgttgttgctcagcttcagggtctgcaggctggtgagtgggtggaacagctcctccgggagctgggccaggaggttctgggccaggttgagtgtcttcagatgggtcagaggctggaagagcctcctgggcagggcctggagccggttcccctgcaggtggagggactccagggcagccaggtgctggaaaagaccctcgggcagagcctccagcatgttgaagttgagggtgagcttgcccagcgaggtcaggttggagaagatgttggtgctgaggttcaagaagctactgcctgtgacctccaggtcctccagcctgggcagccccccaaaggcatccggcctaaactggcagagctgagtgttgaggaagaccaccttggtcaagttggggttactgccaaaagctctggtttccaatgtggtgaacgaggtctccacaaagatgatgtttttcgtatatggcgggatgtccagcgggacggtggcaagctcactcatctgagcagaacacctcctggacgaagcagtcacaacccatgggacagggctgggcaggcctggccaggagacaggagggaggtccagagcacccaggctccagggagcatcttcgtgaggccgagcgggtggcgccggctgcctgtcttcctc

SEQ ID NO: 1844 - DNA, 258 bp, Homo Sapiens
gtttcttagtctagtttgcatttccagtgaaacctggggcaagaaaatcacctgagcctttattttgcagtatgtaaaatgaggaggtaatgtgagataatatctaatattctgtgacttcgtctcttaaggaacaacaccatagtccaaagcaaagatagaaaatgtttttcatctcctctgccaactctagtttaattggtagaggctaccatcacatctttaacagaatgatgaaccaaatccacagtcagtagg

SEQ ID NO: 1845 - DNA, 843 bp, Homo Sapiens
  misc_feature (277)..(567): n is a, c, g, or t
ctggtcttcaactcctagggttcaagcagtccttccatcagggcctccaagcgtgctgggattatgggtatgaccactgcccctgggttattatgaacttttaaagacgtatggtcacaatatgccataatcagtttccaacgtctttcaaagttttttcttaaatttcagctcaaaatattagaatgaaatgcacactccaagactaaagaagctatattctatgttcgagaaaatgtacaaatattgattctggtttttttcgtttcttttctannnnnnnnnnnnnnnnnnnnnnnnnnnnnnnnnnnnnnnnnnnnnnnnnnnnnnnnnnnnnnnnnnnnnnnnnnnnnnnnnnnnnnnnnnnnnnnnnnnnnnnnnnnnnnnnnnnnnnnnnnnnnnnnnnnnnnnnnnnnnnnnnnnnnnnnnnnnnnnnnnnnnnnnnnnnnnnnnnnnnnnnnnnnnnnnnnnnnnnnnnnnnnnnnnnnnnnnnnnnnnnnnnnnnnnnnnnnnnnnnnnnnnnnnnnnnnnnnnnnnnnnnnnnnnnnnnnnnnnnnnnnnnnnnnntacaaatattgattctatccatggtttggtgaaaaaccatacaagttcagcttattctctgtggcatcagcaggggtcatgtatcaggatggcagagtgctgtccagcgtgctgcagagggaaagtgctgagtgaacacgagttgttacccacttagctgtcccaagttaatcggaatgcggatggacgccgtgcataatcagcatgaaattttacccagacctgatttgaggaagccacgaagggagctatgctggtgtcgcctccgcagtatgg

SEQ ID NO: 1846 - DNA, 165 bp, Homo Sapiens
tgccggctccgcggtacccactgccggcctccgcgctacccggccgcagcgcgcgagtcacatggaagctcctgaggagcccgcgccagtgcgcggaggcccggaggccacccttgaggtccgtgggtcgcgctgcttgcggctgtccgccttccgagaagagct

SEQ ID NO: 1847 - DNA, 763 bp, Homo Sapiens
tcagcgagctactgcccatgctttgaaagctctttctccaaatttttggagactggcacactgagtctctgtttggcagacgaagccttcccttcatcccgaagttcatcgagctttggcaacaggcaggcagctttatcagcagcttggcaacattctgtaaaagcagctttataccttttagcaaagaaaaggagttccggggcataaaagtaaggatgtcttctggcaatttcatataagtattttttcaaaaatgtctcttcattgtcatgaaaagcagtgcacatcacatcaacctctggtctcaccaatcgggggaggtttgggttgtcatctttgtgttgcaagaagcattcatttctctcaggttcttgttttgcacagcagtcagccatttcaccataggtttcacgaagagttgcaactgtgcataatttgtctccaaaaagggtatgaagtgatttgtcacaattttcagctgactcatcagcaacacatgtttttgcaaattcagttacttcattcactaattttacatgatcttcaaatggacactgctgaagatactgagcaaaggcaatcaacaccaaggctttgaaattttcttctcccaaatctttaaaccgatgagcaacctcactcttgtgtgcatctcgacgaaacacacccctggaataagccgagctaaagagaaaaagaagggaaataaaggttacccacttcattgtgccaaaggcgtgtggggttgacatgccctaac

SEQ ID NO: 1848 - DNA, 897 bp, Homo Sapiens
tggcagaccaacaatcccataggacccgagcgtggctcggtcgagagaggactaggcagttaatttagcaaggactgtttcaaaaggggggaatggaagacacggaaagaagagaggtgaaggtaaagacaaaagcccttgtccagtgaaaccgaccggcctgggaggcgtggacttattcagtcgctctaataattaaagagatcaattaagctttcctctccccacccaccccggaggtgccgggctttgaatcctcgggaggaaaaaatggcagggctgcaagcttcctccccaagtttccaaggagcacctgccaccagccttgaacacctcccccaccgaggctccgaaatccacaatcctggccgtagactttgcaaaacgaggggagggacacacgcagcgtgtcccccagttcccgccgggataagcacgcacaggcttctgagcgcctgctgatccacacaatcatgagagagaaagttccagggggaaacgatccggcttctccgcagtcccgggtctccagccgcgcgacccagacgtgacatgcatcatggactcccgggctcgtcttcggaaagtccatagaccggctccccgagcccggtcgccatggagccggcgccccgcgcggggtctgaggcgctcccagcggctgtgctgcggcgcggacaggccggttctcccctctgcctccaggtccccccggtcccgcaccctaccctgcgcacgccctgccgggtaagcggccgggcgccggcaggtgagggtgcccgagagcgcgccctggacgctgccggcaccgcttcctcccggaaggctccgggaccagcgggcgggcggctcccgagagcgcgccgagcaccgggcggcagccccggcgcctctccc

SEQ ID NO: 1849 - DNA, 608 bp, Homo Sapiens
gtaatgaattgtctgtggtatcatgtcagcagagtctccaagccccacgaaccctgaggagtggagtcatacgcgaaagccatatgacaatcgtgtcaccagagagagtctctgtacacagccccgtgaaaccctgaggagtggagtcatacacaaagggcgtgtggccatcgtgtcagcagagagagtctctgtacacagccccgtgaaccctgaggagtggagtcatacgcgaagggtgtgtggccaggctgcagagctgcgtgccgtttgtgtccgagcatcacgtgtggctccagcccttgtttctgccagtgtagacacctctgtctgccccactgtcctggggtcgctcttgggaggcacaggcatgggtgtgtctggcctcattctgtatcagtccagtgtgttcctgtcatagtttgtgtctcccaggcaggccatggtaggggcctcgcaggggccattggggagcacagggccaggctggggtgaggagagctcccctgttttctgtttaattgatgagcctgggaaaggagtgtgttctgcctgcccgttacagtggagcgttccgtgtccataaaacgttttctaactgggaaaaa

SEQ ID NO: 1850 - DNA, 904 bp, Homo Sapiens
  misc_feature (494)..(518): n is a, c, g, or t
aacactaaatagtgtaatatttcttttgcttttaaaaaaattcctggtagcaaatcaagataaataattgcttcattttcttgagcaatactgaagcaggatgaagtaagaggaatgcattcatttaaacatgctttgctttatgaattttgtctcttttttggtctctttttcttatattcaagttacaaatgtacaagtatccttactaagagtgctccttttgtattttacatatatacagtatgaaaatacattggaacactaggaaagtttttaaataacagttctaatttatcagaaaattgtgttttgggattgagttctttgtctcagcccagaatcccaggtcctgggcctggttttctaatgctgtcatctcagttcgatattttactttagaacctggaatctcctacttaatatatgaccatgactttgaaaggcaaaagaggaatcaagaataaataaaacaaacttaatcttcatctttnnnnnnnnnnnnnnnnnnnnnnnnntgagaatcaacacttcataggctcactgggttttcttttcttttctgttaatttaaactcagttatttttaatgcttaatacatacatggtgcaaaatttaaaaagcgcaaataggtatctagtggaaaacctaagcctccctctctcctccggcacccattacctctccctggaggcaactgttttgatccatttcttacacacactgccagagatactctaggcatgtaaagcacaaacatacatataaaatctgcgggcttcaaaaaatataagtaggatgtcatctatactgtcatacactttgttttttatcacttacttaatgttatatcttggatattgtattaccctgggtattaaaaagaactcctatcacatttta

SEQ ID NO: 1851 - DNA, 494 bp, Homo Sapiens
atggctgaaaaggtgatcatcttggtgctaaacaagtaagaggcaactgccctgtttttgtttgttttgaggcacaatgaaactttagccaaactctgcaagagggtcccatctcctgccatggccaggtgtgagagaccaaaccgagaaaacagcatactctatcacttaagccttgggtagaatgggaattctttaccctgggtaaacgttttaacaaaaaaatggaacttaacttcggtttggactgtggtcgtgctgaggcaggagtggggttgccctcttggggctgaatctccaggcctcacgaggtcccctgtggggatgctgctatttctaagatgcaaattgcacatttcctagattttgtatctgtggatttggataagggaggggaacacggacaaattgcttgtacaatttgaaatgggcctcaatggtacttcaaaccttttgattattcctaaataaaaacataaatatatttcacaaaa

SEQ ID NO: 1852 - DNA, 767 bp, Homo Sapiens
  misc_feature (32)..(32): n is a, c, g, or t
  misc_feature (174)..(174): n is a, c, g, or t
  misc_feature (254)..(254): n is a, c, g, or t
  misc_feature (447)..(488): n is a, c, g, or t
aattaagtttatttgaggggtgtgagcacctnctccatttaaataaactggtgactttccttttattttttaaaagtggaaacccgattgtgtgcctctcgatttaagggtttctgatgacattattcttaagaccagcattgatcctttttatacaaatatatgttttccttnttttttattgctatttcagaagaaaatgaaccttttattttgctctacccagtaactgcgctggtacatagacgcactgngcaaacaaactttggtaaccacctctgactactttggtatatccaaagtggattactttggaaatattggggatctagtttctaagttattttagtgttttatatgttccccaaaattactttgaatctgtcaccagcataatgagttcttggtgatacaatggtgagacttgtaatgagcaaaaagctaccnnnnnnnnnnnnnnnnnnnnnnnnnnnnnnnnnnnnnnnnnnttgattaccgtaagacatcacagattacctgaaaccccttccagtataactaggccctccttccttccacatttaattgcttaatagtttgaagaaactattggaaatgggcattttatatgacatgtatggctttacaatattaaatatgagcaaaaagaaaaaatatgagaaggtttatgtgggtctgtaaggtatggctgtggaaaaatattgtagtagttttgacactattgttattacctttaaaatcatttaaacaacccaatgttaaaaccg

SEQ ID NO: 1853 - DNA, 258 bp, Homo Sapiens
gcctaaatgctttttataaacatttttataagtgtcaagataatggcacattgactttattttttcattggaagaaaatgcctgccaagtataaatgactctcatcttaaaacaaggttcttcaggtttctgcttgattaacttggtacaaacttgaagcaagttgccttctaatttttaccccaagattgtttcatatctattccttaagtgtaaagaaatatataatgcatggtttgtaataaaatcttaatgttt

SEQ ID NO: 1854 - DNA, 769 bp, Homo Sapiens
aatcataggagctcagctgtgtgtcatcaacacacaaattcgtaaaaaacacacatggcctcgccatcgtgagtaaaatcggccccacagcactgtctgcaccagcgggccgttactcccatgccgttcttctgtgtaatattaagaactgaatgtgaagtttatagctagcctggatgtaccttataagaattaggtaaaccgtttgtctgtctttggttactgttttatggtgccaagtatcctacgttacaacaataatatcatgggagaaatagaaatagcctcgttggcttccaatagaaactgcttttaacatgggctgtatatacaacatattaaagagaaacaacaactgtacatttcctcattgctccgctacagacaacccatgtcataaccttgttgcaaatatttttctcctatagcagtaagtacagcattagaaggtgattagagagtctgttgatgaaacacaaatgtatgttttattgattttactttagaacactacagagttcctggaccgggtgaaggcattagctgggtgtttgtgtgggataaatactaccactgcaagtgactgctgtccgctgcggaatctgttcttggtggaagcacaggtccgtgtcgctgctgtggttgccctgtccgcggttcaacacggagttcgccccgcgggtttcagctgttggtcgttctgaggggcctttggaagtgaccggtctggttcctaagcaataaaattgaccgtggtgaaaataaaaaa

SEQ ID NO: 1855 - DNA, 441 bp, Homo Sapiens
gatgtaaataactctgaaacaagagaaaaggtttttaacttagagtagccctaaaatatggatgtgcttatataatcgcttagttttggaactgtatctgagtaacagaggacagctgttttttaaccctcttctgcaagtttgttgacctacatgggctaatatggatactaaaaatactacattgatctaagaagaaactagccttgtggagtatatagatgcttttcattatacacacaaaaatccctgagggacattttgaggcatgaatataaaacatttttatttcagtaacttttccccctgtgtaagttactatggtttgtggtacaacttcattctatagaatattaagtggaagtgggtgaattctactttttatgttggagtggaccaatgtctatcaagagtgacaaataaagttaatgatgattccaa

SEQ ID NO: 1856 - DNA, 540 bp, Homo Sapiens
gtaacggcatggaagcacgaagcggaaggcggagcagaaggacagcttgagccgatacgacagtgatggagacaagagtgatgatctggtggtggatgtctccaatgaggaccccgcaacgccccgggtcagcccggcacactcccctcctgaaaatgggctggacaaggcccgtagcctgaaaaaaagatgcccccaccagccctgcctcggtggcctcttccagtagcacaccttcctccaagaccaaagaccttggtcataacgacaaatcctccacccctgggctcaagtccaacacaccaaccccaaggaacgacgccccaactccaggcaccagcacgaccccagggctcaggtcgatgccgggtaaacctccgggcatggacccgatagcctcggctctgcgcacgcccatctccatcaccaggtgctatgcggcgcccttcgccatagatgacccaccatgagatgaacggctccctcaccagtaaaggcgcctacgccggcctccacaacatcccaccccgtcgggtggag

SEQ ID NO: 1857 - DNA, 526 bp, Homo Sapiens
aacaacaatcagccttggatctcagaagtcaaacaaaactcttttagcaaaaggcttactgctgactgcatatagcaaaggcagagaaagacgctgcccacaacataatgaaagatcatctacattttgcccagcatcaatcttagtcatgcatatctagcaccgagagccactgcggggtcacactggggcagttacagaacacatctttctcggagtgcagatgctccttcttggttggacaccgtgggccaattcaatttagaagtgcacaggtgagctctgagaaggtgtggccaggagctgccagggcagaaactggggcgcactcgtccacaggcggcaaacgacgcagctggaggacttcttgcttcagccggagctctggcatgaaccccggggaactgtgctcactgagcgagggagccccagaggctcacacagagcgggctgggtcttaagacgaggggacgatcaccgatgtgagttcccgacacttggtcattcccattgggcatcagagggg

SEQ ID NO: 1858 - DNA, 312 bp, Homo Sapiens
tcaattaacaaatatttattgagcacctactatattttaggcactgtgctaaaatcaattccaatggtcaacaaatatgtgaacaaatggtaatcattattgaaggaatgcaaatgtacaaaaagtgacttttccatttttcacctattcaatggtctgtattcaaaataaatgattctccaggattggatgagcgtggctttgggatctcttctactgtaggtagatgcacagctgcataatcttcctgaaggcacttgagcaatgtctatagaatggcttaaaatgcatacatatcttaaaaatggccaa

SEQ ID NO: 1859 - DNA, 502 bp, Homo Sapiens
tttatgatgaaccggtcatgagctcatttaaggtagaaggccagaactttataccagtagcacatgatccagcataaaggcagtcttgaaatactgcattatccagggacagggcttcagcagctgatctgtcacacaccaggtgtcccacgtaggaatttcttaaaccacaggtaggatgtagctgcagagagtccataccaggtcacgatgtactgcagatgctcgttcctcagagtaactctggtttgccctccaatgggtcctccagggactgtgctctggaagttggcatcaatgaagatgggctctgcgcctgtgattctgggccatagcttccaggtctcgcaaaagccaatgggtcccttccggaattgtctcaggagtcacattcttccccgggaacgaacccccaattttcccggatggggactccccagtcggttcaattggaaggggtgaccccaaaggccccactccgggttttgagggaaataggccc

SEQ ID NO: 1860 - DNA, 679 bp, Homo Sapiens
gaacagggaacctgccccccaacacttagaaggacctgggtttcagtgatgagacatggggtatgatgtaacccgtttccagggggatgttgacgaagatcttatctgccctatttgcagtggagtcttggaggagccagtacaggcacctcattgtgaacatgctttctgcaacgcctgcatcacccagtggttctctcagcaacagacatgtccagtggaccgtagtgttgtgacggtcgcccatctgcgcccagtacctcggatcatgcggaacatgttgtcaaagctgcagattgcctgtgacaacgctgtgttcggctgtagtgccgttgtccggcttgacaacctcatgtctcacctcagcgactgtgagcacaacccgaagcggcctgtgacctgtgaacagggctgtgggtgagatttgttcccttctgccccacatggataagggccatctcatttatgcccctgtctctggctgccctcctcactagctgaggaggtctctttggcatgttggcaaggagtattcttagcctccttggcttcctgctctaagatcttactttcttgctgcttttccaactataatcattttgctcttgctttaacaaaagaaggggcacagcaatttagtaaatttgtgtaataacattaaaggttgattgactctaaa

SEQ ID NO: 1861 - DNA, 382 bp, Homo Sapiens
  misc_feature (301)..(310): n is a, c, g, or t
ctatttgctttcatagtttggtgggccattgttatggactgaatgtttgtgtcccatcctcacccctaaattcccatgttgaagccccaaccttcactgtggagctggggctgctaaggaagtaattaaggttacacgaagtcacagtggagaatctgatctgctaagactggtgtccttatagggagagaccccagagagcttgttcccttcctccctgtgcacacaaacaagagggcatgggagcacacagagagatggcagccacctacaagccaagaggagaagcctcacaatgaannnnnnnnnnaccctgctggcaccttatgtcttcgacttccagcccccagactgtgagaaataaatttctgttggttcagcc

SEQ ID NO: 1862 - DNA, 247 bp, Homo Sapiens
gtgaaccaccgcgcccagccgctataacttttaactattcccatatgtcctttattccactaagatgagtgcagtatatatttccatctgtccaaggcttcctaaatgtagccaaggccaagccaacaccagtcacatgatcaaaatcaaagggcatttggggaatccaggctgtgattcagggaagttccaagtgtctgatgaagtgtttgttctacatctttgtgtccctgcagtatagcacggc

SEQ ID NO: 1863 - DNA, 483 bp, Homo Sapiens
ctttgtttctttccttttcttgtcaagaacagcttaatttaaaaggaggacatttagtgagtacaattaacaggtttttaatatattcacaaagttgtgcaaacaatggcacaatatattttaggttatttcaccatccaaaaaagaagctccttatccttagacaacccctagtcctgggcagaccagtttctatctctatagatctgtctatatattttctggatatttcaatacatggaattatttaatatgttgacctaccttttgatgccatgccccacctttatgcttggcgcattccagcctaacagcatcattcatggtacttaacattttatatcatcgagcaatcaattgtctccaacctatctttcttctgccactcctcctctcttcccagccatcttcccataatgatttttcaagatgcaaatatgctcatatcttactcaagtttaatatcccaaaagggctccccat

SEQ ID NO: 1864 - DNA, 248 bp, Homo Sapiens
tactaggagaattgatctcctaatggtctcttagtatgatgtgtaaatacctcacatccatcctttaagctgctacgtagagtgacggctagtaagattgataattagatactgttaactgcatgaaagatggatcctcattacctgtagaataaaacttaatctcccctaagaaatcctccacaagctggctcttgcctgcttatgccagatacctctttccccacagaagggtcccctccttccct

SEQ ID NO: 1865 - DNA, 260 bp, Homo Sapiens
acagagaaaaataaaacatggaaggaggactgggagtattggtgggtacaattttaaataggagagtcagaggatgtcttactgaaaaaagtgagggaaaagccaaaggcttttatcccactgcatggggatacatgcaaggccctggagggcagtaaggtagcatgccctggaatttcaaggaacactgaggacagtgtggccagagctgagtgacagaaaaggaatagttatataaaatgaggtcacagacgctcccc

SEQ ID NO: 1866 - DNA, 548 bp, Homo Sapiens
acagatacaagtaccctagatagtgtgattctgtcagatagcatttatgcaaacaatctatgaagttaaaagatcgtagaagccaaatgaaatgtacatatctactgactgatgacaagggaattccattaggaagaaggtaaagaaacatcgttgagtagcctaccttgatttctgtcaagttcataaccagcttcatattttaaaggcttcaggtttgaaattaagtcaactgcatgcagctttgctgataaatgaataattctctttgatgccatttatgagaaaagacttcaatatctgttgcctgtcatatttaagaaaaattactgtttctactctctgtatctgattttaaaagaaaaaactattcatacctggcttccaggtaattgactttgaattcttacaagcaaaggtcattgtgtttttcttgaatagacatctaataaattttgcttggaagtatacttcagtttttcttcttgacatttatctttataaaaattgtgtattttattccaacttgttaaactaagagaaaatgc

SEQ ID NO: 1867 - DNA, 233 bp, Homo Sapiens
gatgaagaggctggagcaagacatccattagacatagcaaagatcattgaggaagatggctacactaaacaacagatttgcagtgtaggtaaaacagccttctagctagaagaagatgcatctaggaactgtgtatagcgtggagggcagatagtcaatgcctaggcttgcatagccttgaaagaactggctcgctgttgtgttacggggctaatgttatatgtgtttcgtgt

SEQ ID NO: 1868 - DNA, 611 bp, Homo Sapiens
  misc_feature (259)..(315): n is a, c, g, or t
  misc_feature (339)..(347): n is a, c, g, or t
gactggaatggtcagcctcacgagcatggggataggagaaggcatgaaattgtctagcagagcagggcacggtgataaattgttgataaattccactggacttgagcttggcagctgaactattggagggtgggagagcccagccattaccatggagacaagaagggttttccaccctggaatcaagatgtcagactggctggctgcagtgacgtgcacctgtactcaggaggctgaggggaggatcactggagcccannnnnnnnnnnnnnnnnnnnnnnnnnnnnnnnnnnnnnnnnnnnnnnnnnnnnnnnngagtgagaccctgtctcttaaagnnnnnnnnngtcagactgctgggactggccaggtttctgcccacattggacccacatgaggacatgatggagcgcacctgccccctggtggacagtcctgggagaacctcaggcttccttggcatcacagggcagagccgggaagcgatgaatttggagactctgtggggccttggttcccttgtgtgtgtgtgttgatcccaagacaatgaaagtttgcactgtatgctggacggcattcctgcttatcaataaacctgtttgttttaaaaa

SEQ ID NO: 1869 - DNA, 172 bp, Homo Sapiens
tgaaaatttttcttttagtcatattttccatgcactgtgtagaagtactggacgggatatacaaagtgcccaccaggcttcacttgagagaaaaacctttcttctcaggattccagccacaacccacaattgtatgacaaagtgcagcactgtgctctatccggttcggcgt

SEQ ID NO: 1870 - DNA, 274 bp, Homo Sapiens
tcctcggcttgagcatcagtgctcggcacctcaaagcacaaagactggccttatgcactaagacctagaattgctgtctcgtattctcaaagaaaaggggtctagggttggcaggcaatacaatacaactcgtgatgcctctcattcctctgtacaggctccacaaggacactttaaggactaatgtgatttaaagcaatgcattaaaaaaatatctatagcataaagctagaagaaccacaaggagtgattattttgcaatagggctgagttg

SEQ ID NO: 1871 - DNA, 262 bp, Homo Sapiens
acaaagtagagagtcatattgtggctcgtttctgggttaacctgagacgggaccattacccaggacacacaccatcagtgtctctggcctgaacagggccatttccaaagcaagccaatgcccagaatccagggaggagaggccatgagcccctagaagcatcctgcgaatgtcaggccactatggccacacagtagcactgaggcccacccatagctcatccagctcgagcagtggacagtgtctgccacagaactcctaa

SEQ ID NO: 1872 - DNA, 332 bp, Homo Sapiens
gggcacaaagtccagcagcagagccccagcacagaagtttcccagatgtttggtggtactggactcacgacctgacaggctgaccgacattcttcctctccgacatttggggctgaggagtcagtacctatgaattacgactagactacaatgcacaaagcacgtagtcctgtgaattttagctcagtcaagctaagagttgaactgctttttaccaactccttaaaggggtgggttttagtttagtaataaacctatttaccttcagattctgcatttattagaaaggcaatcaaagaaagaaggcatcacctaggtgcccaggtagaatt

SEQ ID NO: 1873 - DNA, 453 bp, Homo Sapiens
  misc_feature (104)..(104): n is a, c, g, or t
tacctgctcagaagaggcataccctggacgtcttctattctcatacaccaccttgagtagccccaagggctgggcactctgatttcaagactcaccatcagggntttgataagaaggtaacattatggtttggttttagcatacttcctgatcatgccccaatagctttattagccctggtagttgttagacttcagaaaaccaatgtacacatgactggccctctccttgggctgtcaataattatcctttcagaacagtgaagagcatgaatggcatatgtatgatacacattctttagtcttgcacctatgcagatatcataatcaaccacagcatgttctctctgagccccatctaagaacattatagtggcataatatttcaagagcacaaggccatggcagatgttctgcacctcctgtgacatccagtaaaatggaaacctctgcc

SEQ ID NO: 1874 - DNA, 398 bp, Homo Sapiens
ggggcctgatcagaagaggcagtttgacctttgcattcttacccaagcccagaatctagcatcagtgagtcaagagataaagagcttctagaatacaaagagcctgacattccctccaacacttagatcactcttttccccagcactccagtctccctgccaaaggagtcccttgtccatgacttgcccttcccttctccagaaggggggccttggaaaaagaaaccatgcttgatataatgcagccattatagctccttggcccttctggccctctccccggggagactgatgcaagaggagaaaacgtggagactgccagttttctgcaaggagtaaaggggggaagtgagacacatggaccatggaaaaggctggtatagacacaagtgcctctt

SEQ ID NO: 1875 - DNA, 112 bp, Homo Sapiens
acagagcctaattaataacttaatgactgtgtacatagcaatgtgtgtgtatgtatatgtctgtgagctattaatgttattaattttcataaaagctggaaagcagaaaaaa

SEQ ID NO: 1876 - DNA, 676 bp, Homo Sapiens
tggcccgcggtcgcggtgggatcctagccctgtctcctctcctgggaaggagtgagggtgggacgtgacttagacacctacaaatctatttaccaaagaggagcccgggactgagggaaaaggccaaagagtgtgagtgcatgcggactgggggttcaggggaagaggacgaggaggaggaagatgaggtcgatttcctgatttaaaaaatcgtccaagccccgtggtccagcttaaggtcctcggttacatgcgccgctcagagcaggtcactttctgccttccacgtcctccttcaaggaagccccatgtgggtagctttcaatatcgcaggttcttactcctctgcctctataagctcaaacccaccaacgatcgggcaagtaaaccccctccctcgccgacttcggaactggcgagagttcagcgcagatgggcctgtggggagggggcaagataaatgagggggagcggcatggtgcggggtgaccccttggagagaggaaaaaggccacaagaggggctgccaccgccactaacggagatggccctggtagagacctttgggggtctggaacctctggactccccatgctctaactcccacactctgctatcagaaacttaaacttgaggattttctctgtttttcactcgcaataaattcagagcaaac

SEQ ID NO: 1877 - DNA, 576 bp, Homo Sapiens
caccattttggacattttatttatagaaatttccagcagagccattgttaagtacctctgtcaggagatacctgtgagaacctagacgggaaaacagccacaggttgatctgcatctgttcctccccaacactccacacacaccagaacaggaatagccaggcaagcctctgggtgcccggtgatgcactgtctgaggcacagcccagcacgtgcttcctcagcacatgctacacacacagatctggacgaatgacagaaacttcacagatgtaacttccaagtgcgacctcaaatgacaactttctcaggtggtgcctggataggaaaggcaccggaacagaatctgtagaaaaccaaacctatcatgatcagcattcctacccgacgttaacctcctagactagctgaccttatttattttgaaagcaaatcaagtgtatacagtctctttttaaaaaactgtgtaaacgttgtaaagtttttaggggctgtttataatctgaagatttataaaaaattactggacttgttaggactataaatactaaccccgcctcccccatgaaaaaagcaa

SEQ ID NO: 1878 - DNA, 637 bp, Homo Sapiens
  misc_feature (466)..(477): n is a, c, g, or t
aaatgtgatagaagtctgggggggagttgggggatggcggcagatgttagccaggtctgccctccccattcaagccccttctccactgtagcaaaataagcacccccaccccatctgccttcaggtcttcttcacagcctgcactcgccagtgggccactaggggcagtctctggaagggctggttcaaggctgtttgggtataggggtcaggtaccaatgaagaatcacgacttgtctcactcctttggaaattgttttctttcctgtgtaattacttcatacctctgtttttgagaaactgttccgtttgtcatctgtcatggtctccttccaccaaatcttcatctgggaatagcagcggtatccctccacccaagtatggccacctgtttgtcttcatatagaacaggggcttctggtctggtcatgtccctagagacttactagagactggctgaccatgnnnnnnnnnnnntaatctgagttattcagccagtcagctcccctttaaaaatctaaggtatctccaagcaacacatctccattctagttgtcttgaaccacgtgggcaactgtttcaggggttttctcttgcccaatccccacctaataaagttctgagagcatgaaaaaaa

SEQ ID NO: 1879 - DNA, 376 bp, Homo Sapiens
tttaagatggctgtttcataaattagttccctattcctaactttggagaacctggttttttcttacctttcaaggtccaaatataaaactataaactttcagtgttggacattcttgctttttgaaagcaaattcctcctcaattcatgacctgtgggccagctatcatgaataatacacccatagcacttgggttttatgaatgtgacttctaaatcctcctgcataatagctttaggtgacttgaagagttaaaagctgtcattgtcatcaatatttactgtacatcaaactcatttaaaatgctgttagaaattgctgactggcaagactgtcactgacaaaaacaccagtttaggacagattccatgggaac

SEQ ID NO: 1880 - DNA, 645 bp, Homo Sapiens
taagcaagtaaaggaaaagtgtaaggaggaatttgtagaagaaatcaagaagctggcaacacagcacaagcaactgatttctcagaccaagaagaaacagtggtgctacaactgtgaggaggaggccatgtaccactgctgctggaacacatcctactgctccatcaagtgccagcaggagcactggcacgcggagcacaagcgcacctgccgccggaaaagatgaagctggcccttcccggagtcaccccgatgattactcttttcagacacagcggtttttgtttccaagaagccaaaattgtttagaatttgcttcccattttgcaccagcctttaaacacttttcgtgaagaaattttgcacagtagtttaaatcttttgttaatgctcctccgaagtttttcagggggtaaaacgtaacatcagtggagggtattattttaaataaattttaattgagaatttgttgcattttcagcaaattttaaaacatttttaggttttacagagattttaacctttaaacaacagatctttaaaaaacaggtgaatacaagtgagtttaacaaagaaacatttagaatagatctgaatgtaagaactacagaactgtttcagaaataaaacatactaccttgatgt

SEQ ID NO: 1881 - DNA, 437 bp, Homo Sapiens
tggaggtgggagcttcccacacctgcctgcgttctccccatgaacttacatactaggtgccttttgtttttggctttcctggttctgtctagactggcctaggggccagggctttggaatgggaggccgggagaggatgtcttttttaaggctctgtgccttggtctctccttcctcttggctgagatagcagaggggctccccgggtctttcactgttgcagtggcctggccgttcagcctgtctcccccaacaccccgcctgcctcctggctcaggcccagcttattgtgtgcgctgcctggccaggccctgggtcttgccatgtgctgggtggtagatttcctcctcccagtgccttttgggaagggagagggcctctgcctgggacactgcgggacagagggtggctggagtgaattaaagcctttgtttttt

SEQ ID NO: 1882 - DNA, 521 bp, Homo Sapiens
  misc_feature (452)..(468): n is a, c, g, or t
ccaaaaagggagagaaaaaaatattgatgaaaatattgaattgcagatttttttaaaaaaagctcaaccaacactgaattttaaaaaacacaaagagaaccacacaggaaggacaaagccagaagcatcacacttcctgtgttcaaattatattataaagctatagcaatcaaaacaatagagtactggcataaaaacacacatagagcaatggaacagaattgaaagcacagaaataaacccactcatataaggtttaactaatcttctacaaaggtgtcaagaacaagaatgaggaaagaatagtatcttcaataaatggtgctggaaaaaaggacttcttcaatctaattaaaggcaccctgaaagaaaccaacagcttatggtcagaagaaggacacagaaacttgatgttatatccatagaaattacaaaatctagagaacagaagnnnnnnnnnnnnnnnnnttaatagcctcagtgatctttagaaaaatatcaaaaggtacaaaatgtgtgca

SEQ ID NO: 1883 - DNA, 556 bp, Homo Sapiens
  misc_feature (250)..(336): n is a, c, g, or t
tgttcataagaagccaatagagagcaggagccactttatcaggtggcaggtgtcctgggcctccctgctggctagtcccaagcggtggtgttgccaggatgtcttggaggtgataatgggacacacagaggcactgagtctccataggttaaaatgccaccaaaactggcctttgcctaatatccctcattgactatttagcatttaatttatttattttcctgacatttctgcaagctttgtatttatnnnnnnnnnnnnnnnnnnnnnnnnnnnnnnnnnnnnnnnnnnnnnnnnnnnnnnnnnnnnnnnnnnnnnnnnnnnnnnnnnnnnnnntttaaataagaaaaaattaataaaatataatatgagagtaacttaaaatattaataaaccacaattttaaattaattaaccgtgataaccaacattaataaaagttaagataccaaaacactggtgtctaattctttcaactaacaacttgaattattttccattttaaattaattaaccgtgataaccaacattaataaaagttaagataccaaaaaaa

SEQ ID NO: 1884 - DNA, 463 bp, Homo Sapiens
tttcaataaaattttgtactcatttacaataaaataaccaagtgaagttacaaaaggcatatattactggtgaaaagaacatacactccacatttggccggattaataatgggcaatcataatttaacataataaaagaatatatatctatggcttttcatcatacttgataaatacagtatgaacaaaattttcatggtatacttttcacaagataataaataagttaaatagttttcatattgagttgtggtgcagtggtgcgaatcaactcaaaacagctaaaaattcagcagttattctccaacaattacaaagtaagctctgcgcaaggcttccagagggagcagacaaaatggttctaaactgaacatccactaagtggtggcaatgaaaccaagtaaccagtatggacctttggaatgcaagggttttttcacccccagacatatataattctgtt

SEQ ID NO: 1885 - DNA, 818 bp, Homo Sapiens
  misc_feature (107)..(107): n is a, c, g, or t
cgcgaccccgacgtcctcggcgtccaacctggacctgggcgagcagcgggaggctggtgagacgttccagaagcggcagaagcttacctccgagggtgccgccaagntcctgctagacacctttgaataccagggcctggtgaagcacacaggaggctgccactgtggagcagttcgttttgaagtttgggcctcagcagacttgcatatatttgactgcaattgcagcatttgcaagaagaagcagaatagacacttcattgttccagcttctcgcttcaagctcctgaagggactgagcacataacgacttacacgttcaatactcacaaagcccagcataccttctgtaagaggatgtggcgttcagagcttctatactccacgatcaaaccccggaggcttcggaattgccccccactgcctggatgagggcactgtgcggagtatggtcactgaggaattcaatggcagcgattgggagaaggccatgaaagagcacaagaccatcaagaacatgtctaaagagtgagcttctgcctctcctgccctgaaaaggaggaatgattggggccagcaactttgctctccctgccgtgcctcggtggtgctcctgaatgtggctgacctgggctgctggttccgtggactagggtcatcttgatctctgcagtttgctccagctaccagtttctttaggcagctctttgtcctccctctgcccagattttgatgtagtctaattgacatccttctcttcccaacttttgtgtgatcttttaggaaaaaaaataaatatttttaacattaaaacagtc

SEQ ID NO: 1886 - DNA, 563 bp, Homo Sapiens
ccatttaattattatttaattttgtgtatgatgggtttcagatctggcttttgttaacattttggggcttttttaatcttttcaatctggcgtattgctgtttgaccttttgcaaggtacttaattgctcttttgttatagggtatggatcattgtcagaacttgattggaggggtttaaagagattgtgtctgtttaaaatcagtatgattcagagaaggaccaaattatatgaatgtcttacaatggaatttacttgttactgatttttttgttctattgtaccactattttttgaggattttgcacagtgtaaaatgacataatcatagattgctatggtttaggctgtatatacagtgaaaactatgggttttaaatgtttggggaaattcctatggaaaaaagagagacatgtagaagaacctctaacaaggttaatgtgcatgcccaaggtcttttgaaatttcagtgtgtaaatttccttttagcttatacaaaaataaaataattcaaaagcatacctgctctaattcacaaagacaaacaaagaaaatccaggt

SEQ ID NO: 1887 - DNA, 634 bp, Homo Sapiens
ttgagggcaggaagaggatttatgacttaggttgtagtgggcggggcgtgggggtgaggggcatgggcctcatcatctactctgactggagaatggagccccctccaggacggcctgccttcaagccacgatgcagtccttgtctcgggcctgacgaggcatccctgcgcgagagtccctggggagcgataaagatggggagttgaaggtctccattgcagtgtcctgagcaggcatgggcctgccacaaatgcgggggcagagggatgcgctctcctaggaagaagccatcatcctctgatgattcggaactggaactggagggcgagctggagcaagattccgagtctgaccctgatcccgcgtcacattgatagtggcgacgtctgcttgggtggcggttgtgactggtgatggtgattatgactgatggtggcggcagacggctgggggccctgggtgggggactgcgtggcctgcggcgctgggccgggggtgcactcagggtccggcgcgggcctccttcagacaccagagggtcgcggaagctgacgcgtggggtgctctgacgaccgaaggccctatcatctgggccgcaggttaggctggccgggggacctctgggggcggctcg

SEQ ID NO: 1888 - DNA, 474 bp, Homo Sapiens
actgttcagaagaggcaaaaactgttcttggtgtgattcagtaaggtaagtaagtggttcatcctctttgcctttcaaagcaagagtaaaaaggtcagcactgagttacatgctttaaagcctgtcacccttttgtacttgttagaattaaacgtgggcattttgcaatacataagcgcttcttgaatggcataaactctcaaaggatgttcgatgccaacctgctttgtttaggagtaattatgttactcagaaaatcctaatggaacaaatggatgtggagttgggtagcaaaatattttccccagatcctttgctttgcttcagtaccttgtgaataaagaaaatcaaaggcatttcctaattatttataaatggtagtaattgacattttgaatattactcatacaaacataaatgacagcaaattaaattcaaacaaatttttatagtttttatataacattggctgaa

SEQ ID NO: 1889 - DNA, 434 bp, Homo Sapiens
ttcaggatcagaatggtttcagaagctcccaggtgattccggagtgagttggagctgcaagcccctgagctagattataagatgcttctgggaaagaaccacattttaggaatttgcttcccacccagtgccctgcatttaatcagcacctgatgacttggcaggacttgccccaccagggtctggctttgaagggtagtggacaccaggatcctttggattaatcctctgccacctctctcttttcctcaaccgagagtgaatttatgtaattgagtgaaagtctacgaatcataattgtaataaattaaggctgggcatttgtttgaaattagataggataaagccaaaggtttgaacaagttgtggatggtttgtaaaaattaatcttacaaaataaatgctgtgtgtgaacacgttgattaaattcaaaa

SEQ ID NO: 1890 - DNA, 235 bp, Homo Sapiens
tcttatattaatataatagtcccctggcttgtaaagtcagtacttcgacgaggcaaattaaatctgtccataattcgagatagctgctggcgatacattgtctgcggacatcagggacctgctagttaatgaagttgtcataacaccactgaaccgatacatgatttagtataaaagcatggtagacgttcagcagtgtcagatgatctccatctatgtgggcaaatctcatcta

SEQ ID NO: 1891 - DNA, 472 bp, Homo Sapiens
ctcagtagtcagaagtcgcacagcccggcagtcttcgtcgcgggaggtgcgggtctagctcaccaactcccagttcggtgtcttgagctgccagaagcttgggcagccctggaggatgctgagactccgcatgcttgttccttcagccacttacatcttcttgttgtgatgtgtgttccgtattttaagcaatctcaccaggattattattttatggccactttctctgccctccactctcttgtgtccgatcttctgtctgggattatgttgcaaacatatcctcgttcatttcctgcagtaaaggtctcctggtgaccacttcttcacttctggcgtgtctgaaaatacctttatttcatcctcattcttgaaggctcttttccacaggcgcatggcttcaggctgttgtttgttttctttatcccggtagatacgctgacccgctgtcctcagcctcttctatgtaagg

SEQ ID NO: 1892 - DNA, 515 bp, Homo Sapiens
  misc_feature (213)..(225): n is a, c, g, or t
ggaacctgctgttttatctatttattgtgccgtgtttacagttttttgtacactgtaccttcattggttcctgtgctgtagtaaatgtgttaggtagctgtggactccttggtattttgtaaatggtataacataacttggttcccctctgggtccttgagttttctgtgtatcatgtgaaaaaaaatggtgacatacatacagaattttacnnnnnnnnnnnnnggcatcagtttttttaaaaatggggaatgtactattaaatggggatcttcctggtctactatcattaggacaagtaacaagctaaaaatgaagtctcttgaatctttccatccccaacttgcccacaaagctgtgggtggtttctggtacttaaagcactaatattatgttgctgctctgcgaacagcccagtagtcccatttccttccacaccaaaaagtgttaaatcaagtatgcaaatggagtccttacaactggagtttatgttgtcttgccctttttttagcaca

SEQ ID NO: 1893 - DNA, 850 bp, Homo Sapiens
  misc_feature (642)..(667): n is a, c, g, or t
tgttgttgtgttgttgttcagagtgctgcatcgtacggtttctagagctgctcatagtcgtcccttcctcttttgtcgttgtagtatttgacagttgtcttttccatctacgacatactggccctaggcttggttagagcaaggggttatgcctcgttaggcagcatcttacgcccagtgttctcccagatattctgcctaacaggtttaagtacggagacttaaatagctcagtttatctaaaccctctattgtttccagcacgtagcttagagagctcttttcatctattgtttactccatgggcctctgatactgctgagatgtggcatcggttatgattatggtatcaccgttacagaggcaaagggactaaaggtctaccagggccaacgtaaccagaatgtgaggagagtgaagagtctggtctccgctttgcacagtaccagaatgtgaggttgccactggagagtggagagtcggtctccactttgcacagttggagctgttctcctctaactcctttgctgggttttctgtttgaaattggcccctactcctctccagccctttactgggttttctgtattgaaagtggcccctactcctctccagtgtctgctttttgaatccttctgttcnnnnnnnnnnnnnnnnnnnnnnnnnntccctatgatactggcagtggcaataattttccacccagagagaagcttgtggtccacaatgctcgaagaatgaatttccaagtatttgccagtggaaacggagcagaggctatgacaagagtgatttagtgttgcactttcagagcaattatctactgcagtaataaattgaaaataacagc

SEQ ID NO: 1894 - DNA, 393 bp, Homo Sapiens
tgtcattatacaaaagtttttactatgactatgcagtgaggtccaaacggtactaaatttgaagttccctgccaaagagaaatgtaagcttccctggtggtataagtcagaatttcatgacatcagccagataaccacaaaagaatatatcttttagtgctagatgcttctaagcctttctccacccaactaaccaacattcacttactgatatacttatttctttaacaaacacactccatttcatagccacattctttcaaagctgacaggttgagatacatctaaaacacaaaatctccaacatacattttcttcttcaatgttgtgagatgtatttttctaaaacactgttctgcacatactaccattccaatattaaaaacaagttag

SEQ ID NO: 1895 - DNA, 533 bp, Homo Sapiens
  misc_feature (43)..(51): n is a, c, g, or t
aggagaacggcagcctttcaataacaagatgtcaagagactgnnnnnnnnntggtacattgggtttgaagtcaggagcagaatggaattccaaagttgtgctggtgatatgtgaaaggagagaaaaattaagtgtgaggtcaaaaaagaatcgatgacaatgaggtagaatagaacaaaatttgggaatcgatagggaaatacaagatcaccatgtggttgaaggaaagggggttttgtaggaatttgatggatatgagacgctgttggaggacaggtgagattgctgggccatcctggaagcctcaactcagaccttcactctgatctcaacccaggtgaagagctgccaggatgaggtacacaggcaaaatgccaagtgatcacagctgaattattccaggagggagagatttcagttactatttttttaatacctaaaacatggtcttaaaacaggactcctggtaaataaagcagataaaggatgcttcattagctgactttagcagagtgcctcttctgatgatggta

SEQ ID NO: 1896 - DNA, 864 bp, Homo Sapiens
tgcggaccgcggaccgggaggcgcgcccggggcttccgtccctgctgctgctgctgctggccggggccgggcttcagccgcctcgcccccagcagcgccgcgcttcaacgtgagcctggactcggtccccgagctgcgctggctgcccgtgctgcggcactacgacttggacttggtgcgcgccgcgatggcgcaagtcatcggggacagagtccccaagtgggtgcacgtgttaatcggaaaagtggtcctggagctggagcgcttcctgccccagcccttcaccggcgagatccgcggcatgtgtgacttcatgaacctcagcctggcggactgccttctggtcaacctggcctacgagtcctccgtgttctgcaccagtattggctcaagactccagaggccacatttaccatggtcggaatttggattatccttttgggaatgtcttacgcaagctgacagtggatgtgcaattcttaaagaatgggcagattgcattcacaggaactacttttattggctatgtaggattatggactggccagagcccacacaagtttacagtttctggtgatgaacgagataaaggctggtggtgggagaatgctatcgctgccctgtttcggagacacattcccgtcagctggctgatccgcgctaccctgagtgagtcggaaaacttcgaagcagctgttggcaagttggccaagactccccttattgctgatgtatattacattgttggtggcacgtccccccgggagggggtggtcatcacgaggaacagaaatggcccagcagacatgtggcctctagatcctttgaatggagcgttggtccgagtagagacaaattacgaac

SEQ ID NO: 1897 - DNA, 861 bp, Homo Sapiens
cgcgttccgccttctcgcagcccgcaggcccgggcctgtcattcccagcgctgcctgtcttgcgttccagtgttccagcttctgcgagatgaccctcaaggcgagcgagggcgagagtgggggcagcatgcacacggcgctctccgacctctacctggagcattgctgcagaagcgtagtcgggcagaggctgtatcgcatccattgaatactgtgaccgaggacatgtacaccaacgggtctcctgccccaggtagccctgcccaggtcaagggacaggaggtgcggaaagtgcgactcatacagtttgagaaggtcacagaagagcccatgggaatcactctgaagctgaatgaaaaacagtcctgtacggtggccagaattcttcatggtggcatgatccatagacaaggctcccttcacgtgggggatgagatcctagaaatcaatggcacaaatgtgacaaatcattcagtggatcagctgcagaaggcgatgaaagaaaccaaaggaatgatctcattaaaagtaattcccaaccagcaaagccgtcttcctgcactacagatgttcatgagagcgcagttttgactatgatcccaaaaaggacaatctgatcccttgcaaggaggcgggactgaagtttgctactggggacattatccagattatcaacaaggatgacagcaattggtggcagggacgggtggaaggctcctccaaggaagtcagcaggattgatcccttcccctgagctgcaggaatggcgagtggcaagtatggctcagtcaagctcctaaccgaagccccgagctgcagtccctttgggaagaagaagaagtacaaagacaaatatctgcg

SEQ ID NO: 1898 - DNA, 456 bp, Homo Sapiens
ttgagcagtctctgagtaatcatccttcccctcttctttctccccagcaaaaagagtgctagtttgaaagataaaagtacggatactttagactttaataagtggataggaataaggaatgtatttcaatgaagccaaaccttgcacgtaatttctgaaaagggacacagatacacatggtatattcaaatgcaatgaagagattaatttgtttgggtgtagaggctacatgtcagggagtaataacagcaatttactggagacataggttgagaccaattagtgggttttattggttgccagacagagaagatggggcttattttttatagtcggtaggaagacactgaaaattttagaggaggatagtgacagtattacaggaagtgatttagaaagataaatgtaggacaaattaaattcttaaaaaagtatgggttaaaggagcaagtgccc

SEQ ID NO: 1899 - DNA, 440 bp, Homo Sapiens
aagctgggcaatgaaacagaagacaggaaagtttggagaggaggagatggaggtgatagctacagaaatagcaggggcccactatgagaaagggaagggtattcttaggcggaggagaaattatttttcagtgttttagatacaaatttttcctgtgcaaattggaaattttgatcccaacacaggatgttggcattttgcactttcaaattcctcatcagaaatgggattcagtaagttgtttttaactaaacaaaaaacgtaggaggtcttatttcgcttttgattttagaataaacttcgcataatcactttctatccagagttgttttgactccaggacatagggggtcataagatttgcaatctttgaaccagtaagagagaaagagagtaatatatgtgttaacaaaccagatatggaaatcaagaactgcttg

SEQ ID NO: 1900 - DNA, 516 bp, Homo Sapiens
cggctaggagatcaaagaggcagaattagaccgttttagaccaataaatttttcctggggtgacacacagcaagacgcaaagagaaaagaccaaggcccccgccgccgccgtctgtctagactcaagcgactgaaggggccaacagagctggtgtttaaagtagaacctgcccagtccaacagcccgagcagggagcgatttcggggatcgcgggaaggaacgcacttcgccaagggagggccgggtgccctcgccaccggctcattcctgctccggttttgcccgatgcgcgtccaggaggttctggcaggacgcactgcccctctgccccggccaaggaggatgcggatactgcccgcaaggcttcggcctttatggacccaagtcagccaactgggccgagtcctgcggacaccgaaacctccctttcgtttccaggcttccttctcccctcttgccctctgtggtctgatttaaaacgaaaaggtcggataaaatcaggctttcaataaaaa

SEQ ID NO: 1901 - DNA, 628 bp, Homo Sapiens
ttgatttgtaaaactgttatacagagaagtaaagataaaggttgtcagatttattttttaaagtacttaaccagagttcgtggattttgtggactttaattggactcaattcactctgtgagcatcctggattgcatcgatgaacactgaattactgtaagaacatagacaggctctcactatgacctggacagtttaagttgctacactggtaacattctagtatcaaggagaattccattcatcatgacattcacattttacttttctcaatggaatgcttgcttcaggcttaccaatcacacctagaactgaagtctgagtgagtggtattaataatttttctgaaaggaataaaattggaatgtttctaaatgtggagaaattcttcagtatcctaataatatacccaaatgctttttctgggagagagcattcttttacaaaagaactttccctataaaagcatcacagtataatgtgaattggcattaaaatctttggatgcttttgcattattaagttcatggagaaatatatcttttttactatgtatgtattaataaaaagtgggcaaagtacagtttgcgaaatttagtttctctaaattttgcacagtgactgcagc

SEQ ID NO: 1902 - DNA, 688 bp, Homo Sapiens
ccaacatattcctcggcttgggatgggcataatttctgtgctgtggatgacatggccttactccagaatcccaggccctccactgtgactctcctactggtgcttggttcagctccaccccaaatcttaccccaccactggcactttcagcaccagggggtctgaaggatggtgactgcgccatggcctggatctgctgcagtgtcctttcctgtggaggctccactcaaagctggcatcctcctatgtcacctagagtgtgggtcaaagcaatacacctacatgtagaatgtgatgtcagaactcaaacaggctcaccaggcagtgtgcttccttccttgcatgaggatgcaagatgcaacagtttgtctttcacattggaagggacacccctggatgcccctaaccactagacctgtaaaacttcactgcagtggccacttctgaatctctgtaaggtttatttatcttcaccctctggagagaagatgttttaccaaagcctctagtgtaccttcctcctcttactcatccatcccagtcaacatgatgttgtcaatgaaataaaggaatttaatattctatagtatatccaggttctccagatctcttaagactgtactatagaggcctggggaattataatagccctgaggcaaactatgaattaaagtgttgtggatcccac

SEQ ID NO: 1903 - DNA, 537 bp, Homo Sapiens
  misc_feature (54)..(341): n is a, c, g, or t
atttgtttacatcagtatggactcatgtatattttgtattttgggtaacacagnnnnnnnnnnnnnnnnnnnnnnnnnnnnnnnnnnnnnnnnnnnnnnnnnnnnnnnnnnnnnnnnnnnnnnnnnnnnnnnnnnnnnnnnnnnnnnnnnnnnnnnnnnnnnnnnnnnnnnnnnnnnnnnnnnnnnnnnnnnnnnnnnnnnnnnnnnnnnnnnnnnnnnnnnnnnnnnnnnnnnnnnnnnnnnnnnnnnnnnnnnnnnnnnnnnnnnnnnnnnnnnnnnnnnnnnnnnnnnnnnnnnnnnnnnnnnnnnnnnnnnnnnnnnnnnnnnnnnnnnnnnnnnnncagagttgagaaatatgtatgtatattaatccacgcatatgtacacatctataattattaatgtgtgtacaaagctaaacatgagtttgtactgccgtcttcaactcaaaattagtcccaaaattttgtggcatatgtttagattttaaagttgatatttcccctattgacagaataaactcattaaaagagcaaa

SEQ ID NO: 1904 - DNA, 591 bp, Homo Sapiens
  misc_feature (562)..(562): n is a, c, g, or t
gcggccgctgcacagcagcccattgctggacatgcaggtgtcagtacgcgtggtacagttgcagtagtagccggtccagtcggagtcacacaggcagtccccacagatgcactggccatggcctgagcacatctcccccttgtagcggacacaggagaagtcgtcacactcgcagtacttgcccgtgatcttgccaaagtcactgctgtggcagacacattgaccacagaggcactcgccccgctggctgcagacgggctgaccctcccgggggctgcattcgtcctgctgggaagggcgatagtcctcctctgagcactcacactgggatcccagccagccaggcccacaacggcataccccacactcaaaggtcccattgccattgttgcagcgatggctattaggttcagcttgggcctggcaggcacagtcacaatcaaaggtgacctggacgatcaggctgtccttgaagcccacgggctttatggtaaaggaattctccttctcctggggacagactcgcaccttggccccaatgctgaagctcaccgtgtctccnatcttgagtcccatacaagacttgaggcc

SEQ ID NO: 1905 - DNA, 949 bp, Homo Sapiens
ggcatcagcagcatttcaatcaatggtttttgagagtcttcttacacaatgtaggcggttctgtgttttggaagaagtgtcacattagactccagccaacagggagggaggacaggaggaaaggtatggagccagagtgtgatggaacaacactgaaagcttcaggcaccggcaggaacagggacagccacctctccagtttccccactgaccctgcagaaaatgagtcatgatttatctcctcaaacttcctggaaaagccagccaagagcttaaagtagataagaagctccttatggcctacctttgttattcatttactttaaaggaagatgcatctttaagacaacagcttcttttgtcaggtgtggtgttgagtcttttatatcccgtattaggaacagtgtacctatcattttagtcacggcttcctgtgcaccaccagggccttaaaatgctgagacagagttatgcacaggtatgtcaatgtcataaactatgaaaataaatgtggccaagttttaaaggcaagttaagtgtccacagccaaagaaggaaggcggcactgcattgagctaaatggggcagagtcaaaatcctgggttctggaactggcttggcctccaagcaacccagcctccgagccttagtcccacttctgcaaagtaatgctggttagtgagataatctccaaagctttgaagtaagctccacttgagcttccactttcacaacttcaaggtcaactctgtacttaggaaagacgatccacggcttctgagagggcaacaggcttgcaagatgaggaggtccggtttctgtccagggaaagcatgcgggccccaaagacgtctttttgtgtacatagagtgagtgagtctactacaactttttattggttctttgctcattttgatgtccacagagcccaggttttgcctggtctaga

SEQ ID NO: 1906 - DNA, 881 bp, Homo Sapiens
  misc_feature (509)..(509): n is a, c, g, or t
atgggctgcctgggcgtggcgaaagaggacggcaaagcggacaccaagaaacgccacacccccagaggtcatgctgaaagtacgtctaatagacagccaaggaaacaaggataaatggctcataccccgaaggcagttcctagacacatgggaaatttccctcaccaaagagcaattaagaaaacaaaaacagaaacacatagtatttgcactttgtactttaaatgtaaattcacttggtagaaatgagctatttaaacagactgttttaatctgtgaaaatggagagctggcttcagaaaattaatcacatacaatgtatgtgtcctcttttgaccttggaaatctgtatgtggtggagaagtatttgaatgcatttaggcttaatttcttcgccttccacatgttaacagtagagctctatgcactccggctgcaatcgtatggctttctctaacccctgcagtcacttccagatgcctgtgcttacagcattgtggaatcatgtnggaagctccacatgtccatggacagttgtgatgtacggccgaccctacaggcagttaacatgcatgggctggtttgtttcttgggattttctgttagtttgtcttgttttgctttccagagatcttgctcatacaatgaatcacgcaaccactaaagctatccagttaagtgcaggtagttcccctggaggaaataatattttcaaactgtcgttggtgtgatactttggctcaaaggatctttgctttttccattttaaagcttctggtatgagttttgccctggggcttgaatggagtcccagagagtcgttcggatggtgggaggcttgcctagaaggcagtaaatccagttacagtgcctgggaaggc

SEQ ID NO: 1907 - DNA, 496 bp, Homo Sapiens
aaagacaactacttttgaaggaagttaaaaggtggctttgaaggaggaagacaccttgagccaaggaatgaagggggcctgtaaaaaaagattgaaaaggcaaggaaacagattctccattagagtccccagaaaggaatgcagccttgctggcacctttttagcccagtgagatcaatgtcaaacttctgacccacagaaccataagatggtaaatttgtgttgttttaaaccactgagtcagtgataatttgctgaagaagcaaatagattaacatagcaactaagtagatgattagttgcattataggtgaagtcaaaaatacagtcctttagtaaagtctctatttcttccttttataagagtaattatatttaaaaaatctacctacccttctggaattgctaatgttagtgtttataaagtcttaaatgtgtgcataaaaaactaaatgtgaatataaaatctaaataaaggaatatgtttgcctaaaaa

SEQ ID NO: 1908 - DNA, 647 bp, Homo Sapiens
ttagcttaacctgttgtaaatgcgccaaagacaggccaaagatgacagtgtcacttgaacaatgctcaatcttgagagatgagcaccagtacagtaaatacttctttatccatgcgctggattgcatgagaagagaagagtgccgcatagagaatgtactgaagaatatcaaatgcagaaagtatgctttcaacatgctacagcagatggctttccccaagtaagacagacctccagaggggacttatggaaaagctgacacctaagtttaccaacatgttaataaacaggaacacaaatacatttcagttggataatcttcaccttggtcttttgggttggtttttattgtcatgaatttgtggtgggggagatgatcacagatgtttcccaaaatctaggaactacttcaattcatcatcagcatatggctctgaaagaaatccattttaaaaaatcttacatgattcagtactgtcatttctagttctaagcttctatgtgttgagcctagctgattgagatgggttcacaaagggtaaatttcattcatgagtatttaaatgtttctgaggaaacatggatcatttcaataggactaggggtgattcacagagcaccactctccaaccaaatggaagagagga

SEQ ID NO: 1909 - DNA, 448 bp, Homo Sapiens
ttaatgttatctcttaaggaggtatggggttatttttattaaagagtggaatcaggaaaagcatatgaatattcacccggagacacttatctctttggcccctaactgtctgggcttttgagcaagtagctggcactgtgcctctgaggactactaaatgccaccttcagcccaaaagaagccttgtcagtctctaatcttcctttccatgcagattgccactgccttgtctcacgttcttctttcctgggtgacactggctttctatttgtcccccttatctcactctgtctttccttgagtccatcatctggtcaacatttactgagctgaagctccctggagcttactcactgagcctagtagagtgcggtctacattcccatggaggagataaacctgcgctagggactgtggtagctcagaggggcatgtacaatcagactgg

SEQ ID NO: 1910 - DNA, 740 bp, Homo Sapiens
ccccgttaccctgtcccacacccttcgctgcgccagcccggtgtcggcgtgagtcagggccggcagcggtggcggcggctccggctcgcacctgggcggggaggagatggggaggaggagaagaggctaggacgccgcccggcccgccctgccctctggccccggggagggagcggcgggaacaagacattccctgcccaggcccgtggggagggagggctagggaggggagtggaacggagcggctcccctagctgggcggggcccctctactgcccccaggggcaggcgagccaatcaggccaccccgcccccttctccacgaccccatgactcagcgccgggagcagggcggagggggactgggatggctccttccttacaggcccagtcccccagtctttcaagcttccaccttggctttcccccacctacccttcctttgccggccccctttgcataattcactgccaggaaaaaaggaacagaaaccaggaaggaggggtctcggaagggaggggcagtccttcacccccttacacagccaaaacccccaaggggcataggggcggggcaaggctttggtcccaagcccccaccccctagaaacccgcatagccgaagtgggacccacaaattagaaatacattattgcttctactccccaggagcagctggggacagggaccccacttttacaatacagctgtaaatatatacacaatatatgtatcactcct

SEQ ID NO: 1911 - DNA, 1238 bp, Homo Sapiens
  misc_feature (1076)..(1085): n is a, c, g, or t
ttaccacccccccctccttccctttccctcgcgccttgatggtaccggtccggaattcccgggatggcagccgtgtgcggcagtgcggcctggtgggaaatggggcgcgacatcagcctagcggccctgcagcgccacgacccctatatcaaccgcatcgtggacgtggccagccaggtggctctgtacaccttcggccatcgggccaacgagtgggagaaaactgatgtggaaggaaccttatttgtttatacaaggtctgcttctccaaagcatggattcaccattatgaataggctgagcatggaaaataggacagaacctattactaaagacttggatttccaactccaggaccctttccttctctacagaaatgccagataagacccactgtagaataaatgctaaaagaaattcttcaggctggaaggaataatatcaaagggaaagctggaattgcaggatgaagtaggaacaacagaaatagtaaatatacggtgtccatctatggaatttggttttatgataaggaagaatgccaaagaattgcagagcttatgaaaaacctaactcagtatgaacagttgaaagcccatcatggaactggagcaggaatttccccagtgatcctcaattcaggagagggcaaagaagtaaacattttaccgaatgctcatccaggccaaagaccaattacacaaagcgtaaaacctgttctgagcccaaaaagataaccagttccctcctgcatctatgacaatcccaaatctcatcaaaccaattccagggaaaccccagggaaaaccagccacagcgcatacctcagccccaacccgaccttagaccctgaaaccccaaaacttatcccttgaacagctccggtttgggaaacccggaaaaaagccacatggccagggaaacgggtggagccctcctacagaatcttccaaccgacagtaggtatccaactagcctgcaaccatccaacaaagaaaaagctttcccatttaagccaaggggggttttaaggcttcccgggggcctaaggaaggaaacccccaaacaaaaatttnnnnnnnnnnatttgaaaaacgagggtttgggccccggtcattttcagaaaaaacctccggggcccccggaacccccgactctctcccacccccctttggtatatagagatgtggccacaagaaaaaccggggccccttagtcgaaacacggggatatacccc

SEQ ID NO: 1912 - DNA, 1158 bp, Homo Sapiens
  misc_feature (758)..(758): n is a, c, g, or t
  misc_feature (832)..(832): n is a, c, g, or t
  misc_feature (839)..(839): n is a, c, g, or t
  misc_feature (848)..(848): n is a, c, g, or t
  misc_feature (855)..(856): n is a, c, g, or t
  misc_feature (859)..(859): n is a, c, g, or t
  misc_feature (872)..(872): n is a, c, g, or t
  misc_feature (960)..(960): n is a, c, g, or t
  misc_feature (973)..(973): n is a, c, g, or t
  misc_feature (1069)..(1069): n is a, c, g, or t
  misc_feature (1122)..(1122): n is a, c, g, or t
ccggaatttccgggatcgagggcggctgcgacgcgccgagaggccgcggctctcccacctgtcaccctggcccttctctgcttggatggtgtcttcctctcctcagccgagaatgacttcgtccaccggatccaggaggaactggaccgctttctgctgcagaagcagctgtcaaaggttcttcttttccccccactctccagtcgcctccggtacctgatccatagaacagcagagaattttgatctcttgagcagcttctccgttggggagggctggaagaggaggacggtcatctgtcaccaggacatcagggtacccagttcggatggcctctctggcccctgccgcgctcctgcctcctgccccagcaggtaccacggtcctcggcccatctccaaccaaggagcagctgcggttccccgaggtgcccgggctggccggtggtatcgtggacgcaagcctgaccagcctttgtatgtgccccgggtgctgcgcaagcaggaagaatgggggctgacctctacctcggtgctcaagagagaggccccagctggcagggacccagaagagcctggagatgttggtgctggagaccccaactctgatcagggactccctgtgctgatgactcagggaacagaggacctaaagggcccaggacaaaggtgtgagaatgagccactgctggaccctgttggccctgagcctctggggcctgagagtcagtcagggaagggagacatggtgggagatgnccacacgggtttgggtccaccctgcagctaggactgggaaaggggaaggagagtctgttggaaaaaaaggctgngtggcanaggaggaanaaggacnnaanagggaggtggaangaggatggcccccaacaggctggcttcggaggaacgattacaggtgaagcttgctgcagggagatcccagaaccaacctggacgaagnaaagaggatttcngaatagaaggaggattcctttttgggaacccgttccttcctttcattgggaggaagactgtccctggaaagaaaaaagaaactttgctccccacgngtgggtaaaaagattcttattggaacttttgtgaaacccagcggccctccaanaacgggagagggacctctggcttgtgggcaaacctt

SEQ ID NO: 1913 - DNA, 654 bp, Homo Sapiens
gggttgttgagggttgtagatgtgccctacctggtcctggagcctacacacaacaaacaggactttgctgatgccaaggagtaccggcacctgctccgagcaatgggggagcacctggcgcagtattggaaggatattgccatcgcccagaggggaatcatcaagttctgggatgagtttggctacctctctgccaactggaaccagcccccgtccagtgagctgcgttacaaacgccggagagctatggaaatccccaccaccatccagtgcgatttgtgcctgaaatggagaaccctccccttccagctgagttctgtggaaaaagattaccctgacacctgggtttgctccatgaaccctgatcctgaacaggaccggtgtgaggcttctgaacaaaagcagaaggttcccctgggaacattcagaaaggacatgaagacgcaggaagagaagcagaaacaactgacagagaaaattcgccagcagcaggagaagctggaggcccttcagaaaaccacacccatccgctcccaagcagacctgaagaaattgcccttggaagtgaccaccagaccttccactgaggaacctgtgcgtagacctcagcgtcctcggtcgccccctttacctgctgtgatcagacgccctaat

SEQ ID NO: 1914 - DNA, 196 bp, Homo Sapiens
caggaaccacagcttgctaagcagtatgttcatgtccctgctgtcaggctaatgaccttgtctgccagggatgcctgcaggatcatgtctggagagcagcccgcaggcagcttcaggatccaatccatttttcgtcatttcatatggcaaggccagagggaggatactgaatagaaacatcatgtcgcgtaagaaa

SEQ ID NO: 1915 - DNA, 364 bp, Homo Sapiens
tgacacacggtaggggcagatgatgtggaaccatgcatgttctacaaagactgtggctcttatgctaagaggtgagttgaagatgttgctggagagttttgagcagaggcgggacatgcagctgtgtggaagacagatcctcaggggtctacaacggcaatggctgcaggagctcagaagtcacagcggaaggtcagatgggagactggtagtttgaaataaggtggtagcaccagaggttatgagcagggttgatgaaattgattccactgtggctttggcttcgcagctaacttattacatctgcagaagcgtaaaatatcacagtcgttattcattctaaagacaatacagctgtccagtg

SEQ ID NO: 1916 - DNA, 421 bp, Homo Sapiens
gcctgcctgagcatccttgcatgggactgaggcacagtgtgaaacgcagaatttgatgcatgggtataaatatgagctttagaaagtaaaatttaactgcagagtccttttggctgttgggagtgtgcgtaacaggcagtactgtaggggttaagataaggttgagaaacagctgtagaatgtggttttggaagaaagaaaggcagacattgcctctcatttgtgctccttgcattgttgtgaatatagtggtctaagattatagcccataaatgatttcagttttttcttcactaagtgaaaaggatgttcactttgggcctttgcttcccttccagtgtccacgagtactaccaagaaaagaagaccagaggtcaacacagactcattttctaatccgtgtgaattttagtacaggccg

SEQ ID NO: 1917 - DNA, 379 bp, Homo Sapiens
ggtaccctgatattagaagaggcatacaggggactgggtcttgaagagtgtcccgttccatgactgggaacgtgttaagtttactcaaaggtcatgtgagcaaatcatccctctatcacaaggtcccaaatccagggccgggggcccattggtgcctagctccctgatcacctcgccgtaggggtcgatggaatagccaagctggagatgaaacacaatacaccacttcttaccacccgtaggctccccatccacagatctgctttactgaggcgactgatcactgggtgatggggctgctaatgggtgagatgctgaaaaggctggtttctaatggacagaaatggaaggagcgagggtcacagttgatttgtcatga

SEQ ID NO: 1918 - DNA, 385 bp, Homo Sapiens
ccgtattctttactcttagctcctcacagtatattacaattgcttccccaaggcaggaactgcaccttttattgccataatattataccaaatgtcatctctgtgcataacacgttatgtcatgcaaccatgtttgttgaacatagccgaatagtttcactagttatcatgatagtttaactcactcaggccaatggtcaagtcactcttgtatggaccctagcaaatctctgcatgatgcatataggaccttgaagtcctttcaagatgaactacacagactgttgacatattcaacaatggtgtgtctttgatttcattctattttttaatcttattgagcacatggtctgtggtcgtccaggctgaagtagacagtggttac

SEQ ID NO: 1919 - DNA, 710 bp, Homo Sapiens
aaccagagttagaaattgatgtgaaagttcaaaaacaggaggaagatgtcaatgttagaaaaaggccaaggatggatatagaaacaaatgacactttcagtgatgaagcagtaccagaaagtagcaaaatatctcaagaaaatgaaattgggaagaaacgtgaactcaaggaaaactcactatggtcagctaaagaaatatctaacaatgacaaacttcaggatgatagtgagatgcttccaaaaaagatgttattgactgaatttagattcactggtgattaaaaactctacttccagaaatccatctggcataaatgatgattatggtcaactaaaaaatttcaagaaattcaaaaaggtcacatatcctggagcaggaaaacttccacacatcattggaggatcagatctaatagctcatcatgctcgaaagaatacagaactagaagagtggctaaggcagaaaatggaggtacaaaatcaacatgcaaaagaagagtctcatgctgatgatctttttagatacaatccttatttaaaaaggagaagataactaaggattttaaaaagaagccatggaaaaacttcctagtaagcatatacttcaggccaacaaggttatatgaatatatagtgtatagaagcgatttaagttacaatgttttatggcctaaatttattaaataaaatgcagtcaaaactttgaaa

SEQ ID NO: 1920 - DNA, 377 bp, Homo Sapiens
cagtgagcctcattgagcccctctggtcagccagatctgacattgagcccagcattgaagatcaaagcaggtggggctttgggatgtgaagtgggttctgacgcggggccccacagacctgtctccgcgtgagctgcctgcaggcccctgcgtcattcctcagctgcgtgcgaagcctctggcttggagagcctccccgctgtgcacagttctctctttgccagggcagggcttggggcagcaccaggctggggcagaggaggaaagcaagaggacagacctccagaagagcagcggagggcgggtgaggatttccccatataccagtgtgtgttcatctacccatgaggaataaaaccatgcagcagcatgcaaaa

SEQ ID NO: 1921 - DNA, 251 bp, Homo Sapiens
  misc_feature (46)..(46): n is a, c, g, or t
  misc_feature (62)..(62): n is a, c, g, or t
  misc_feature (72)..(72): n is a, c, g, or t
  misc_feature (76)..(76): n is a, c, g, or t
  misc_feature (81)..(81): n is a, c, g, or t
  misc_feature (83)..(86): n is a, c, g, or t
  misc_feature (88)..(88): n is a, c, g, or t
  misc_feature (93)..(93): n is a, c, g, or t
ctttgtaaaaatgcttctttatattttacttttgttccttttcccnaaccattcccctttcnccccactccnccanaaggnannnncnttctntccacaccccctacccccacccccgtcctaggctcccatcctttccatcaagaccttcattagcttatgatatttgctgccgagatgttataacaaggactcgttcatgtatataagctatttcttgatccatttaaaaggaattgtacattgtgtag

SEQ ID NO: 1922 - DNA, 469 bp, Homo Sapiens
gtagaccatactgccttgaacttgtccatatgtacaaactaatcaccagctttctccatacatttttaatgcagacctgtaattgagttcagaagcctccaagaaaacagaaaggatcccctttctccagtttgtgctggaagaggagctgatcagagacatcaaataagagaaagatgggttgctagaggatggtagaactggaagcaaggcagctacctttttgcaaaaggaaatggtgttaggccccttttccagaagataagacagactcatagagattaaatgatcactatggtccttcttctgttaaatggagccaaagacgcctatgttgttctgaagtcttgtaatgtttaacttctgagaacttagattagtggtgtgatgatagagtctgtataacgcattgaaaagggtatcaggcttagttatttatccaataaatatttattgtatgcagggtaaa

SEQ ID NO: 1923 - DNA, 453 bp, Homo Sapiens
cccaagatcttgtatcatgtatttattccaaaaaaatcggtcatcaacctagaaaaggtgcaggaacaatagttcagaaacacattatttcagttttcctacaaaagccaaaacaggccatcacttcttcccaagtgcaaaccctgctctacgagctgtgagtggtaccttctgccagaggggccgaccgtccctctccccagtgctctgcctctgcacggaattgggcaggtcataggtcaagctataataaaaggatgctgagtccatgaacatcttcagcaactcttcaagtaatctcctctccaacttctccttctctttactttccttaactttctttttattaggagcagacacattggatttaatatgcgtaaaggtcttcagtagaaactttgagtcatcaggagatggtatgatcttctctggtttgttaataccaaaatgatg

SEQ ID NO: 1924 - DNA, 1744 bp, Homo Sapiens
  misc_feature (1018)..(1018): n is a, c, g, or t
ggctctccccttgcatagatatgtccttggcaagcacctgcccacagagccatctaggagccaggcagcagacatagatcacagagctcaaatccacacctagtctgcaccaaagcccagtgcagggcaaggtgtaggactacaaggcaaaaggggctcttgagggcctgtgcccaccccacccctggcattacccaccagccaaagaagtgcaaccaaagcctcctcaatctccaaataaattatggaaataaattatagtcttcacagtccagtggatttagccacccatgggtctagggctcagggtggcagaagccacctgatttcagccctgtctcaccgtctttgggctaaggaacatcacgcaaagaccgaaaagtggtctgccaagctccagaggagccacattttctcctcttccaggctcacgttgtggagatagaagagcaagctgtgggtgtggggggccgggcagctgaaaggggaagccccctccccctagtcctctcttcagcacagaaaagttaaaacaaataaataaatccagagaattgtttgaaaaccaggagttgtgcacatggcacctgtgggtgagccagccagtgggagactgttacgcagactctggggagccccataattacaagaaagcagcaacaggtctcttggggctgggaaaagacatcctggtcctcacaccggcacaggctccattagagatgctgggacagtgtcctcaaactggctgtcaataaagggatctagggcttcggcggctggctcggagaagcccatgagggactccaggaagcaactgctggcatccccaggtggagacaggccaaggcagggggaagtgaggtgcctcgatgttgtccaggctgtcagacaccttctgtgatgtgtagtgaggccccagacttattaatctgcagagcctggagtaactcaaaggagtcacaagaagacaagctgagatccactgagctactccggccagcgtccatgctgggtnactgaggtgccaggaaggctgccttcccttgacccttcaaggccaccatttaggaagcagctggcatccaggttggcattctcatccaggacgcctgatgtgaagctacagccagaatagctgtgggtccagctggccaggccaccagggtcactagtaccaaagatgtcagctggatggaagcagctgaggttgtccaggttccccacgctcccttcctcctcttcctcctcctccccaccgaagtcagagtcactgaaactcaagatgcgtgccaggctgtcatcatcaacgccaggctggaagccagggccaggcaggcctgggtgggtggggcagtcaggagcctcactagtgcccgatgctgatgaagatgctgtggaagaatcagtcatgtcgctgctgcagctgttgtctcccagctcattgttcatggggggcttggccagtgggaaagtagggaccagggcctcctcaccagggctgggtgggctgccctgggcaggggcctccagctccctaaagctctcagcctcctgttccaactgcaggcgggtgagtgtgtggatgaaatgggtctgaactcttgcctgattaaattccacacggcccatggggttctcacagccctcctgcagcagccacaggggaatgctgtgtggtccatctggcacttgatgcctgccaggctgcagctgcaggtctcagggtcgcaagatcctatcg

SEQ ID NO: 1925 - DNA, 367 bp, Homo Sapiens
agagcagttcagatagtgatgatgaagaaaagaagcatgaaaaattgaaaaaggcactgaacgcagaggaggcccgcctttttcatgtcaaggagaccatgcagattgatgagaggaagcggccttacaatagcatgtatgaaactcgagaacctactgaagaggaaatggaggcatatagaatgaaacgtcagaggccagatgaccccatggcctctttccttggacagcaccaaccagtcagaagaccatccaaaaaaaatgcagctgatacattcttttcagcttcttattgatgattgtagatagaaaaatccttgtttattcttccttgcggcctggctttaataaatatttcagatgcctc

SEQ ID NO: 1926 - DNA, 793 bp, Homo Sapiens
  misc_feature (230)..(230): n is a, c, g, or t
cttggcttacgtggcggagtatctatttctacatagtcagctacttctgaaactgcagcagtggcttagaaagtccaattccaaagccagaccagaagattctatcccccgcagcgctctcctttgagcaagccgagctctccttgttaccgtgttctgtctgtgtcttcaggagtctcatggcctgaacgaccacctcgacctgatgcagagccttctgaggagaggcnacaggaggcattctgtggccagccaaaaggtaccccgatggccaagcaattcctctgaacaaaatgtaaagccagccatgcattgttaatcatccatcacttcccattttatggaattgcttttaaaatacatttggcctctgcccttcagaagactcgtttttaaggtggaaactcctgtgtctgtgtatattacaagcctacatgacacagttggatttattctgccaaacctgtgtaggcattttataagctacatgttctaatttttaccgatgttaattattttgacaaatatttcatatattttcattgaaatgcacagatctgcttgatcaattcccttgaatagggaagtaacatttgccttaaattttttcgacctcgtctttctccatattgtcctgctcccctgtttgacgacagtgcatttgccttgtcacctgtgagctggagagaacccagatgttgtttattgaatctacaactctgaaagagaaatcaatgaagcaagtacaatgttaaccctaaattaataaaagagttaacatcccatggcaaaa

SEQ ID NO: 1927 - DNA, 896 bp, Homo Sapiens
  misc_feature (67)..(79): n is a, c, g, or t
  misc_feature (272)..(272): n is a, c, g, or t
gttgaatggccgtattcaggctccacgtaccgtttgatcctgagtatgcttggtgtttgccttcagnnnnnnnnnnnnntacattgtaaataacctcagctgggatgaggagtgacagaatatcaaaataatttgtggctgtggatttttttaactgctagtagtggaatactggaaaagcttcatttctgaagatgaattttatttttaaaaaatacatgcacactcaaaacttttagctttgatcacaagtggacaaatttctgaaaccnaaggcaactaagttgctgtgttagctcttgctggattttgagcctaggtcctactgtctgccagtactcatgtgagttgtatgtgcccccagtgctacatacgcaggtatgcgtaagtgtgtatgcttgttttaaacaaacactcaacgtacatatgtacataatctacacatatttatatcacatatctagttttattactatagactatacgaattggtggttaacatgaaatgttaccttttaacagactgtttttaaaaattaaaaatgtatgtataggttttgaaatttttttaaaaggggagaaagactgttaagaggaggctatttgatgacataacacttgaatattttatgcctcattctgtttatcagttctcgcaatctgtataaatgcattttagaactgatagacagtaaacttgaatttatctttgataagaatacatgccactgtacattcagatattatttaaatttgcaaacacattgttctatatgtaagggtactgtatgtaaaactctgtattaaaactattccacatatcctaaaatttcagcttgcctttttgcggccttatattttgatgtaaagattaaaagaatgtgcaaaacagtcaa

SEQ ID NO: 1928 - DNA, 242 bp, Homo Sapiens
gagacagggtctgactccgttgcccaggctggagtgcagtccaccaagaagggtttcatgagtgctgcaggttttgaccatctgttgattataccccagtgtgcttgtgaacttgcccttgaattctggacgcgagtcctcagagttagctctgtcttgttctctctataagcctgtataacttctcaaagcaaaggttttgatttcatattcccgtgtcccaggcctaaaggctaaataca

SEQ ID NO: 1929 - DNA, 385 bp, Homo Sapiens
  misc_feature (59)..(59): n is a, c, g, or t
ggggcgggtgacctagaggatcccgatcagagcataccgtatcatcctccatccctggncagcaccaaatctatgttcctgtcactatggatttgcctattctggacatttcatataaatgagataatcaactctatagttctttctggctggctgctttgatttagcttcatgttttcaaggttattccccagttagaagtgtatcatttctctttattgctgaatgatacaccattgtatgcatagaacacattttatttgtccatttaccagttgatggacatttgggttgctttcactttttggttatgaataattctgtgatgtacatttgtgtacaagttttcgtgtggacacatttcatttctctgggatatatacct

SEQ ID NO: 1930 - DNA, 188 bp, Homo Sapiens
  misc_feature (84)..(84): n is a, c, g, or t
atacaataatatgaatccttgacttaggctatgggtgaagtctaaatgccagtcctctccgggctagtgacctattctttgttncccttagaggggacttatgatggaccaagggattattcctttggcacacctcacagactttgactacctgtcagatggtccggaggagatttggccctgtaaat

SEQ ID NO: 1931 - DNA, 256 bp, Homo Sapiens
catattccgccgggtagggctcgttctcttccatctctgagagcagctccagcgcctgctccgcttcctctgtggggtagtggcgcaggaggttggcctgccgtggccaggtattgaggcgccaccagctcctgccaccaggtagatagcctaacggcgtaaggtgacatagacctgggagccatggtacgtcttatgctgctgctgctggccatagatgagtgcagaagcccgataagccaaggaataggggtat

SEQ ID NO: 1932 - DNA, 277 bp, Homo Sapiens
cgaagttggagataaggaatatatgaaaatgtgctcttgttgtgaatgcaagtgcggcccatcgacctcctgttcgtgctggacagctcagagagcattggctgcagaacttcgagattgccaaggacttcgtcgtcaaggtcatcgaccggctgagccggcgacgaagctggctcaagctcgagccaggccaagtcgtacgcgggctgtagctgcagtacagccacagccaagatgcaggagcatgtgagcctgcggcagccccagccctggccgg

SEQ ID NO: 1933 - DNA, 237 bp, Homo Sapiens
  misc_feature (161)..(161): n is a, c, g, or t
  misc_feature (179)..(179): n is a, c, g, or t
  misc_feature (214)..(214): n is a, c, g, or t
cgttcggcgggtggaagcaggctctgcctggagctccttgtgatagcaccacccaagtgggggctgggtgggagaggtcctgggatgtgagcagccacatcccagagagggccgaaccagacctggagacgaggggcttagacgaggtggtgggaatcctncctactcctgtccctggngagactgtgttagccccacatgtcggggctcagcntgggggactaatgtcagcattct

SEQ ID NO: 1934 - DNA, 269 bp, Homo Sapiens
aaaaaagaaggggagggtcagattgtatctcatgagcaataggattctatgtgccctcgtgtggatgcaggcgaaactgctaggtgcaccctaacactgtcacccttaaaagcgtaaaccatgttaacagctaggccaaaccacaatgcagtaggaagtcataacatacactgtgctatatgcataagaaacatatgcagagctagatgtatccagaagaggacccaagatacagaacccagcccccgcacccagcccgcacgtaagga

SEQ ID NO: 1935 - DNA, 561 bp, Homo Sapiens
  misc_feature (359)..(376): n is a, c, g, or t
accagcaagtggctctgcttttgtttacttctttcatagttgctccattgtgttttgtttgtcagacacagggattgtggttgccttcccagcaatctcactgttgttccgctggttcaagataatcacctcctatcaaaggattcattctagacttgccttttcagcttttctatttgatctcaaaagcggctctgtgttatttgtgctaatgctttctccattggagctgataatcaactgtaatcatatttttgacccaaactttgatgatcaccatcaaatgatttattgaatatccttatgtttaagacacagtgctaggcactatgcgaaaatcagctaaagtgtgtgtgtannnnnnnnnnnnnnnnnntcctgcccttgagaaacaacaggattaggacggaaaaaaaaccagatgtgaccatagtaagttctatttcataacaaaacacatattttaaaaattggagaacatgtagtgtatatttcaaatagtacaagtgaggacttgaaacgttcccatcacatagaaataataaataccagcccgcccgt

SEQ ID NO: 1936 - DNA, 133 bp, Homo Sapiens
cggcggcgggcgtagaacaagcagtcttagaaaagcagtgagcaatagaaactgtccctcaatcccacagagaaagaggagggggcccaagagccaggacagggagagacaggcagacacccagcccggccgg

SEQ ID NO: 1937 - DNA, 289 bp, Homo Sapiens
accaagtcatgtctggtaactaattagattaggaaagagatggaggaggagtgaggaaagtgttcagaatgactcgggtttctagcttttgcacaagatgaaggaggtggagccaactgagacagaatgcaggctgcacaggaagtttggggaagaagatgaggtggtccccacctcacagaggatcacccagtgtcactgagttgttagcaaaggtctgaaccagaaatgaaaaacagcattcctgactccacgttcttttacactactccatgctcgcagccgcacc

SEQ ID NO: 1938 - DNA, 375 bp, Homo Sapiens
tgtgcctgggtgaggaggtagagggcaaagtgaggggcgtgggcaggagaggagcagggtgaaaggcaggttgcagggggctggtggctgatggctgagctgggcagaggggccccacccctgtcccatgccaggctctggactcaggggagaccagtaggacttgaatggcagaaggccatgcatgaaggggactggcagggaggggaacctgccagccgttgggtaaggggctgggctggtgggctggctgggaggactgcggccagtggcaaggcaacaaagacgtgaaaagaaacaacggcatctgaatggaggaatcggcttctgctgacccctgggtgccccagccctgagcatcccagcccggtccgg

SEQ ID NO: 1939 - DNA, 495 bp, Homo Sapiens
  misc_feature (371)..(426): n is a, c, g, or t
tgctcatttttgcatttttgacttatgggccgaggctgttctgagcctgggaagatgtacctatgtcaagagaagggatgaggccaaggctgccttcaattagaagcagccgcccacagagacaggcactgtgtgcctggcagcaggacttcctacccagaggaggttcgagctaggatcccactgcccccacctctcagcacagggcaggggctgcaggtccccagtggacatcagagtcaaaagcactggcaaagggtacccctgcaaacaactgtggaggggggctggcagcagaccccccacctggcagggcttctaatgctcagggttctggagggctctgtccttccggcaaggagagcacacannnnnnnnnnnnnnnnnnnnnnnnnnnnnnnnnnnnnnnnnnnnnnnnnnnnnnnngcacgcacaggaagcctttccgcatatcacctcatttctaagaaataaactacaaggtgccaaaaaaaa

SEQ ID NO: 1940 - DNA, 626 bp, Homo Sapiens
tggctcgcagcttagaaggtgaggcttgtgccaggccagccgagccgcctgtatgagcagagttccggtgtcctcggattcagggcagacttgggcagtgcctgtcctgcagttgggggcaggaactccctcccctgcccccaggcgtgcccctgaggcctggccccagcttgtcgctgaaataagtggagaacaccagccttgagcctcacagttttattttctcctcgttatccatccttcctttcagcaccagtaaggaaaaagaacacctctcttcgcaaaatattttatcaggtgtaaagacttgtttttcttctagggaagaaccgtctggatatatatttgataatgtttttaccaaaaccataggtgtgcttaccatagaaaacccctaatgtcccatgaagatacaatacagaaaaaaatacagaaattaaaaaagtttttataacagtatttctaaatctcagcaagttaaaaagcaatatttaaaaagcatcaagattaatatacttaaaacttaaggtggttttggacaaatgaaaatgaacatttccttcctcagtggcccccgcgccttgtggcttcctttgagactgggcctaaggcatgaacagagtctt

SEQ ID NO: 1941 - DNA, 296 bp, Homo Sapiens
gcggccgcgccagcgcgcgcctcggggtcctgctccgccgccatcctgctcccgacgtccggactccgccccgccccggccccgtgacgcgccccggcctatggcgcactccctgtggggcttatcgtgcggtttgggagcggcacgggactcgatggagtgacgggtggggctaatagtatcggcgcgccgagaggggctgaaacagctggacccgggatggggtgggggatgtcacccaactcctctcggacccccccaaccccactccaggcccaacggcctctattggagcg

SEQ ID NO: 1942 - DNA, 545 bp, Homo Sapiens
  misc_feature (294)..(307): n is a, c, g, or t
tgggtgtcctgtatttcatctggcaaccctacttcagacccaggtgtaaggtacatgcatgtgctttggtcaaggaataggccaaggcagagatccatgcctgcatgactcagtgggtttggtgcacaggcacacacctccacttgttatataacctgtttgtgtaagttcatacttggtctgagccactgttgtctgtaaaaggtaattgtcctgctaatgctgtacaggggctcttggggttcggctcagctcaacatggcttgacatggggggcacactggcgcccagtannnnnnnnnnnnnnccaaagctgtccgttttgcagatggacaggaaggagccaggacacagctcagcttgctcacgcccagagagagaaaaagttaagctgctgaccctgaaggcaagggagagcaggctgcacagctgtgtgtggaagccacgggctcaagcagccaaggcagggcggacagtgtgagagagctagtgtaagctgttgatgagagctgttgctgaataaaaccatattcccctgccaaaaa

SEQ ID NO: 1943 - DNA, 453 bp, Homo Sapiens
attaacagtcaaggggaagagtgattcctcacactgctttcaagctggactgagccagtctcattctgggaaagaaacgctgtgtccagaactcagcagctccatctattttttccagtcgaaagaaactgatctttaggcagtttttacttggccagaaagcagtgctgaatacttgaaactgtgtgctctgttctacttaatgttctgtcagaatgttcttttgtaggcagtatgtcatgatgtaatcatctatctccttgtctgtttccaagttacactgtgaagtctgcgacccttttgaggtggtcatcaaagacacagattccttgtttaaccaagtgtcccaaagcatgtacctgaagttatatcattttttattctaaaaagctatgcagcttatattctgaaaactattaaaacatataccactgttgttgatgtaaaaaaaac

SEQ ID NO: 1944 - DNA, 680 bp, Homo Sapiens
tttggactggatatcggtggaactctggtcaagctggtatattttgaacccaaagacatcactgctgaagaagaagaggaagaagtggaaagtcttaaaagcattcggaagtacctgacctccaatgtggcttatgggtctacaggcattcgggacgtgcacctcgagctgaaggacctgactctgtgtggacgcaaaggcaatctgcactttatacgctttcccactcatgacatgcctgcttttattcaaatgggcagagataaaaacttctcgagtctccacactgtcttttgtgccactggaggtggagcgtacaaatttgagcaggattttctcacagtatgcattttttagcttatatacaatttatggtaatttgattgttaaaaataatgccagtagcaagtggtgaaataatttccatctctaatggaacttgaattttcttgagtcaaatgaagattaaaggtacgctagtgataggagttggccatctagaggtggttgtctagttcagatgtatggcccccaatcagagccactaaaagggtagcaatttattgctcctttagtatgaaaaattagggcatctgctatacgttgaggaagaaactacctaaaaggaacatcattagatcatgaacaatgagattgaaatataattaaaatcatttcat

SEQ ID NO: 1945 - DNA, 974 bp, Homo Sapiens
gggcggactggaagagcaggaaacaagggttatgcttatacttttatcacagaggatcaagctcgctatgctggtgacataattaaagctcttgaattgtcagggactgcagtacctcctgatttagagaaactgtggagtgatttcaaagatcagcagaaagctgaggggaaaataattaaaaagagtagtgggttctctggtaagggattcaagtttgatgaaacagaacaagctttggctaatgagaggaagaagttacaaaaagcagctcttggtctacaagattcagatgatgaggatgctgcagttgactattgatgagcaaattgaaagcatgtttaattcaaagaagagagtaaaggatatggctgctcctggaacatcaagtgttcctgctccaactgcaggaaatgctgagaaattagaaattgctaagagattggctcttagaatcaatgcccagaagaatttgggcatcgagtctcaggtagatgtgatgcagcaggccaccaatgcaattcttaggggtggcaccattctggctcccactgtttctgcaaaaaccattgcagaacaacttgctgaaaagatcaatgccaagttcaattatgtgccgttagagaaccaagaagaagagagacaggatggtggacagaatgaatcttttaagagatatgaagaagaattagagatcaatgtcttcccacagactgctaggtggaaagttacctctaaggaagctctgcagagaatcagtgaatactctgaagccgcaattacaatcagaggaacctacttccctcctggcaaagaacccaaggaaggcgagcggaagatttacttggcaattgaaagtgccaatgaactggctgtgcagaaagcaaaggcagaaatcgccaggctcataaaagaagagctgatccggctgcaaaattcataccaaccaacaaataaaggaagatacaaagtct

SEQ ID NO: 1946 - DNA, 765 bp, Homo Sapiens
tatggagtatcaatgatgctcaaagacctgacatgctgtgtcagaatgaaaatctgtctagtttcttcactttaaaaatgataaaagtgcaggttcacaaagttactggtttacttgaggtcacacagggatgcattttgagcactgccaataaaaggaatcacaataatgattcagtaattatttatagaatccatgtaattcaataaataaacataattatttatggaccaattcatactaggcattgtgttcaaaactgtacacatacttggatatcatattttcatcataatccttaaggcaatgttattatccataagaaacaggtaagaaacctgaagaagagggatagcaaatcacgtatttggccatatttccattttttggtttctgtgatgctggaagaatgaccagaatgagtcacgggaagagcattcattcctgtatcattttccaggacagaggtgtgcccttctagagtactgggaccaaaattcagaagtgtctgaaaacttgctttaacagtatgggaaaaaacctctatcacctggaatttccctggaactttggaaaatacaagagaaatatgagacgtgggtcttcccttgccagtgtttaatacactcttctaaggaaaaacaatgattctcactaagacttttgcctttttataaccacaatgtatgccttatggagaagattttactctttgctcaacttaataagaataaatatgaccaatgctttaggttttaaaaaaaa

SEQ ID NO: 1947 - DNA, 920 bp, Homo Sapiens
ggccccacagctggatgcgccaggcatgagcttgcggcgagccatggcagccgcgcggtggctctcgtactccacgaaggcgaagccgcggttcttcatctggccggccgcgctggcgtagacgatcacgtccagcacgccctcggggagcctgggcaatctcctccaggatttcctcgcgcttcttcatcttggggatcccgccgatgaagaggcggcagttgtccacgctgcagcacacgccgagcaggcggcccgggcggatctcgtagttgttgagctcacgcactgcgcgcttggcctagtgcttgtggcagtacatgacgaaggcgtagccgcggttcttgccgtcaaagtccatcatgaggcgcagctcgtagatgcggcccacggcctcgaacacgggcaccagctcgtcctcgtacacgtcgcgcgggatcttgcccacgaagacctcgcagccacgctgcgggtgcgggccctcccagccgggcggtgggccgccgtacttgcgctgcccgttctcttgcaccatgctgtagcccgtgcgctccatcagcgccagcagtgctgcctcgttgggcgcgcccgccacgccctcgggcaccttggccgaggacccggcggccgagtcactgctcatggctgcggtggaatcctctgcggtcataatgtcaaaggcatccacagctggcggaaaccaaaaccactaatttgatttgtctggtcctttataagtcgcagaacgagagtatacaggcaaattcaggcagcttccttgggattcctctgttcaatttttgcagtgccctttgaggcaaatccttatgtggatgggttccatcttattttcaatgtcctcctgttgcagaagcttccggttagtcctgggactaaagggcaattgacctcactcctcc

SEQ ID NO: 1948 - DNA, 197 bp, Homo Sapiens
  misc_feature (167)..(167): n is a, c, g, or t
tctagaggatcgttatgatctgtgctcgaaacagtccttcctaaagctgaagtggaggtgccacaaaaatcatctggtaaattgtttaaagtaatcccaaatgcaactcaaatctacagaatcccaggtgaagctcagtaatctgtatttttatcctatctccccanaataattctggatagtgcagtcgggtaccg

SEQ ID NO: 1949 - DNA, 505 bp, Homo Sapiens
gtggtgatctagaggatcctgatgatctgtgctcctcacttaagtgaacaagcaatcatttagtggcatagatgcagcacttgtattttaaatagaagtggctgtcatacgtgaaataaggtgaaagtgacagccttcagtctaataaccttgaagtggtttttgaactgtcaaactttgacctgtagatgccgtagcattctctcactgattgctacatacacttctctgaggatcacctgctgtcaaattgccatctacagtattacagctttgcatttgggggttttactgccttaaactttcaatgcttgttatgggaaccagttcttagccacttggacactgataacaagtcctgaactcctttttggtctggtttttggtgactgactttctagctgggcctttataatatatatgatgtgcttttcctttttcgtttcctctttctttctaatagagactacccagtaaagaactaccagattcatcatctccagta

SEQ ID NO: 1950 - DNA, 266 bp, Homo Sapiens
actgaatatattgatggatataagctgtagagagttgaatggtggcctccatacaatatgtccacatcctaatcactggaacctgtgactgttaacttacatatgattgagttaaggattttcagaggggagactctgaaggagagtttaaagagttaaggagggaaggggacagaatcctgattgcctggatggtgcctaatccagtcacagggtccttgtaggtaagagcagaaagaaatttgaaactgaagagccagatcgtc

SEQ ID NO: 1951 - DNA, 212 bp, Homo Sapiens
gagagcatgaaggacacatgagatctggagtctggatgaacttgctgacaagcaagcttttttggactgctaatgcgtaaatccactatagaaattttcatttgtcatttttgtacttattggcaaaaattagagcttataggcatcagagttaatttgagatagttgaaatagggtttgtgtttgagcacagatgcgtcgggatcctctag

SEQ ID NO: 1952 - DNA, 424 bp, Homo Sapiens
gcagcggcggctgaagcggtccccgatgcactggtcccgcgtggggtctgcgggtgggtgaatcagggagccgggagccccgcccaggccaccacctgggccctgccccagctggctccattgctgaggcctggcctgcttcctggccctgcccattcttaggaaacccatccaggaccccagccctgggaagcgtgcctggggcggggcagaccccagtgcttcctgcacagccccccgccccgcaccagcaggaggagacccgagggaggaggggaggccccgccatggagctccacaagcccagcagctcagactaacccagggtgaccaccatgaccgggatgctcaggcgctggcgggtggcctgcgacaggcgaaggtatccatactgtagtgagtacatccacgatgtactcgtact

SEQ ID NO: 1953 - DNA, 416 bp, Homo Sapiens
gagagaagacacaaaggcagcaacttccctattccttcctgcccttgcaagctggggtcctctgacaagcctccaggaggctgggatggtcagcagggttggcctcttccagtctatctctggcccatcagaatgggtggcctgtctgggcagggctctggtgtgcctcatgctgggtgttgcctggggaaccctagcctgcagctctgtgtcgacgtagacagacccatttccctgctccatgagctatagacaaatccacaatttgagctgccactctgccagcagaagtctagatagaaggacaaaggttgccccgagtctgtgcatcgcaggatggcatgatgaagggtatgtagtgtagtgcacagagagggctgctggcagaatccatgccccctggtggttccaggaga

SEQ ID NO: 1954 - DNA, 455 bp, Homo Sapiens
catacatttgaagtgcctgtcgcactcgagctcgcagactggagattgggagcagtcacagcgcccgcagccacaaggagcccccaagcccggctgacgtgcccgagaagacgcggtccctgggaggcaggcagccgagcgacagtgtctctgacacggtggccctcggtgtgccaggcccgagggagcaccctggacagcctgaggacagccccgaggctgaggcctccaccctggatgtgttcacggagaggctgccgcccagcgggaggatcaccaagacagagtcccttgtcatcccctcaaccaggtccgaggggaagcaggctggccgacggggccggagcacatccttgaaggagtggcaggcagcacggccccagaatgagcgggccaacagcctggactacgagcgctgcccgacgcccggagccagctacagatcccccggagga

SEQ ID NO: 1955 - DNA, 243 bp, Homo Sapiens
caccctttcctggtcaatgagaccccaggcccaagaggcttagaggccagtgagcccaggcccctacaagccctgaagctcccactctcctgctgctccctacacgggggctcttgaggaacgggaggagagtgatggtagtggctggggacgagaatcctccctgcaggagtgcaggatttaggaatcctactgtggtgtgtgccccaaccccggggctgcagctccttccccccgagagca

SEQ ID NO: 1956 - DNA, 513 bp, Homo Sapiens
  misc_feature (143)..(161): n is a, c, g, or t
ctaagttctagtgatgctcatcttgtccgacttcctcatgttgcacatgaaaatactgaagcttggggcatctaaataacacgttcagaatgacagtagcagagcttgactttgaaacaagaaagagctctttccactgtacnnnnnnnnnnnnnnnnnnngtaaccttcattaacctccaggcttctaaatcccatgctgcattgctgttttggatgataaagcatgcgacatgaccaagcctagctgctacatcagttcccctctaaagccactcaacattactatcaacataaaaacagtgcatttgctatgcatttgcagttttgtcactatcccagccagaatgctacctaaaacctttcctgtaaagaaatctcaaattgcctcagaccacaatttggtctgtgacaatttgctgcgaggttatgtgtgtgttcgtgtgtcatgccccagtgatggatgatgtagcgtgcatgggacggtgtgcggttgtgtgtatgttcgtgtgtc

SEQ ID NO: 1957 - DNA, 131 bp, Homo Sapiens
aataagcccctgggtgaatgcagacacatattatctccagggatcgctattgtttacctcctgaaggccgtcagtcctttggtgaacttctagtttgggaacaagtagtaccagctcctgacaaacctgat

SEQ ID NO: 1958 - DNA, 553 bp, Homo Sapiens
gaaggagggggagactcaaggctctcctggtcccatctcttccccgcagctattggaggctgggcaatgaagtgactgactgagcaattgattgatccattcagtcctcccttaatcaagtaatatttatgaggtgcccacttagtgccagccattggctaagcaatcagtgagcaaaaccggcacagcgctgcttcttaagataggctaccccaagcaaagaaggagtaatcacaaactgggagatatgttagtgtggagagaaattgagggctgtgagagagagaacgggggagggctgcttctgtggatagaaagtggttagggaaggcctctttgagaagtatttgtgaagggtttattatagcgcctcacacaaaataattcctgtgtaactggtggcggttcgaatagcagttgctattgtgttgtggttattactggaatccaacaaactgggttcttgttctctctctgccatttattaactgtgtgacttgggcagtaataatcataataataaccagcattaattgcacacttgccctttgtc

SEQ ID NO: 1959 - DNA, 178 bp, Homo Sapiens
ttactgaggtgagccatccagtttctcctctgggagcccctgcgggctcttggccccagactgacagggataccaaagaagtgggctgtagcttttcacatctccttcacgcagtgcgtgggtgctggactctggggtcagctttcaagacaattactgttttggtccatcatgcatc

SEQ ID NO: 1960 - DNA, 448 bp, Homo Sapiens
agcactccgagccgtatcacctcccaaagttcctacctcctaataccgccacaatggcaaccaaatttcaacatgagctttggaggggactaacattcaaactgtagcagtccttatataggagccacaacccaaaccttagaaaattttgagctccctggagcaaatggaagagcagaggagaatgtccttgaggactacagggaacaagtagatgagtagggtcaagtagaaactttcacaaggttaaggacacctgtgtatgtttgaaggtagagttggagaaaccaagggaggtaatccaaaatgtgattatacccacaggcccttttccacagaaaggtactgagagtcccctgttgccatcagtgaaactttacactattatgtagtattaaagttatttagtgcagtagtagtcaagaatttggcagctgaaatgagctaa

SEQ ID NO: 1961 - DNA, 201 bp, Homo Sapiens
gggtaacttcacagagagtccctgtggcctggcacaggtgcatgtgatataatataagtggtatatgagctctcctctgggatatgtaagcctatctgcataaagcagttctgtaatgtaagaactttggaatgatgggtaggggaggaggggggagagagtaattttttcttatggaggctgtattgctcaggatttagg

SEQ ID NO: 1962 - DNA, 326 bp, Homo Sapiens
  misc_feature (198)..(286): n is a, c, g, or t
cagggaggtaccacccattccagtcacttgttgaaaactgttcccactctgggggaggggagggtaagtcatggtctctctctgtaagaaatcacaggtgcatgtgtgtgcacatgcatgcaccagctatctcctccttctccccaacaaaatgacagttggcgttcgtagagcctgtactctgagacggggattttnnnnnnnnnnnnnnnnnnnnnnnnnnnnnnnnnnnnnnnnnnnnnnnnnnnnnnnnnnnnnnnnnnnnnnnnnnnnnnnnnnnnnnnnntggagtgtaatgtgtcatctctagtactctagagtttcta

SEQ ID NO: 1963 - DNA, 109 bp, Homo Sapiens
gggaaaaagaagatacagacagatataagaatgatattaagtaaaaaccttgtagtcctgaacttgaattgccaagtatcaggatgaattactatgtaatttatgtttt

SEQ ID NO: 1964 - DNA, 397 bp, Homo Sapiens
taagaggaaagcaggacacagcgcactttctgggaactgcaaggtgtttgctacagtgaacactgaagggagaatgttgcagagatgaagttggaaagataggcacaggtcagcacatgaagagagcctcatggtcgaccttgacaagttctagccagtatctaacaacagcatctccactagcaattccaaaagtgtcagcttgagctgcgggaagaaaaaagtattctctaaaacaaagcaacagctgtcttctctgcgtgtgcatatttgactttaggactgagcccccagcgcacatacgtgtgtgtgcattagatacagcaacttataacaagtggaaacagctgtgaccgcaccagaaatattaattttagcaagactgagcttcaccaca

SEQ ID NO: 1965 - DNA, 267 bp, Homo Sapiens
ggcatggtaccaatgtacacgaaagatctggaataaaagcccctgacatcgggaagctggcttggcattcacggctataccacgttattctccttttagacataatcgcaaaagacacaacctcaaacaaggttactctgaggccatgatgaagtgagacaaaacaaggtcactacctaatttttgttgaagtaacccataaagacaaggtcactgtgccacccacaaaataccaatcatcaccctctcttggctgaaagcagtgac

SEQ ID NO: 1966 - DNA, 669 bp, Homo Sapiens
  misc_feature (27)..(27): n is a, c, g, or t
gaggaaggaaggagctttccagtcttngtatcttcccagggttatattataaaactgaacattcaaataagccacccccaccccttatacttatgatttattatttcttaaagagcgtataatacattgtgggagaagggtagaagattcatttttcctgctcactcaactacacactcaaaagtgaaagccctcttccttgaaaagtgactgtcttagaaaagtttaacaatacatttcttaaaccaggaaaaaattacaccatctattcttttaacagcaggtagtttagagttcttaaaataactttataaatatataatatagtaacatagataaccaaagtggaaaaatttcaagccagggtaccagtgtataaaatgaaacttttcaagccatcttaacaacagttaagtgagcaaaccaccaacgctgaactctcaagctgtgttttaaaatacaaagcagcccgcagcaagttctctcttgtccaggcattctgtatgtaatggccaggaggcttctgcttctttcctgggttttgcttgctatggcacagctggaatgggcagagggccacagctgagctgaactcgctgtcaaatttgaacttcctagaaaaatcactgcagaggaaaccacatcaacctactgaagatttcagatctt

SEQ ID NO: 1967 - DNA, 839 bp, Homo Sapiens
  misc_feature (683)..(692): n is a, c, g, or t
  misc_feature (696)..(738): n is a, c, g, or t
agcttctaaacgagattcttccggtatatgatgagccacccaatccaaccaaggtagaagagaggtttgaagagaactaaagaaaacgatgctcatctggtggaagttaatttgaatgatataaagaatatcccaattccaaccctaaaagattttgcaaaggctttggaaaccaacacacatgtgaaatgtttcagtcttgcagccacccggagcaatgaccctgttgctactgcttttgcagaaatgctgaaagtgaacaaaactttgaagagcttaaatgtggagtccaactttatcacgggagttgggattctggcactgattgatgcgttaagagataatgaaaccctggcagagctcaagattgacaatcagaggcagcagttggggacagctgtagaattggaaatggccaagatgcttgaggaaaatacaaatatccttaaatttggatatcagtttacacagcagggaccacgaatccagagcagctaatgctataacaaaaaacaatgacttagtgcgtaagagacgagttgaaggagatcaccagtaagtctgcaaaggtgtaatctttggaagacttcagaagatcaccaagggctcatgttggtgacatcatgtaaaattttcctgggtagaagggaaaagactggaaaaatttttttagtgacatgcannnnnnnnnnagtnnnnnnnnnnnnnnnnnnnnnnnnnnnnnnnnnnnnnnnnnnngaaacatttctactttctgctaaaatcaattttaatttagtttaattgaatgatttatgatgaatcttgggcaaaaaaatacaactgtaaaaaatttcaaa

SEQ ID NO: 1968 - DNA, 457 bp, Homo Sapiens
aatcccttggggtctagtggagtgaagatgctgtttgaaaccttgacatgttccagtggcaccctccggacactcaggttgaaaatcgatgactttaatgatgaactcaataagctgctggaagaaatagaagaaaaaaacccacaactgattattgatactgagaaacatcatccctgggaagaaaggccttcttctcatgacttcatgatctgaatccccccgagtcattcattctccatgaagtcatcgattttccaggtgtgggtgaactgcctgtgactcctctcctcccccgcccctacccctcagggataatgagttcattgctgggctagatgttttagccatgattctgcctctgttttatacctgcacacgtccttatctttgttacatatgaaatatctgtatcacgggtatattgagagaaataaaggtgagagcattcacaaaa

SEQ ID NO: 1969 - DNA, 733 bp, Homo Sapiens
cttgaacagctgatgcaggaagctgttggcaaaaaaagaatccgagtctgtttccaaggaggagacggagcagagctatgacttaactgaagtctcagagagcatgaaagctttcatatcctaattctcaacccacaagggagcagagctgcctcgagaaccttctgaggctccaatcacttttgatgcagattcttttcttaattattttgataagattttagggccaaggcctaatgagtcagattctgatgatctggatgatgaagactttgaatgtttagatagtgatgatgacttggactttgaaacacacgaacctggcgaagaggcttccctgaaaggaacacttgataatctcaagtcatacatggcccagatggaccaggaactagcacacacctgcatcagcaaaagtttcaccactaggaaccaagtggaacctgtatcccagactaccgataacaattcagatgaggaagattctggtacgggagaatctgttatggcaccagtagatgtagacctgaacctggtttcaaatatattggaatcctatagctcccaagctggactggcaggacctgcttccaatcttttacaaagcatgggagtgcagctgcctgacaacaccgatcacagaccaacaagtaagccaacaaaaaattaaccagcacatttagcttctcttttttctttttaaataaatattgaatatgattctgttcaaaaa

SEQ ID NO: 1970 - DNA, 495 bp, Homo Sapiens
ctgaggttattactggccgtaaggcagagttaatccatacagaaaccagtgtgtccatgtgctctgcacaaaaacagacctgttgtccatccagtccactgacaagagggtttccccgagagccgaagtggactgaagctacagtttttagctggtgcgggccacaggcagggtcagattgagaagaagcaaagctggggaagcagaagttgggagtcttgtgttgctccctcttcctgtgtggtgctctgggtttctgtggatcgtgaaggcgatctcaagagtgtttccctccaaacctgatagctgcctattcctgtctggttggggctgtggaggatgtagttgtatttattgcattgtaatatttttaacatcctgtgacttcatgctagaaattttctattgtttatagaaactttttgtagaaacattaactctaaagcacatctgcatgtcagtaaaaatctcagtttcgtacagaaagggaaataa

SEQ ID NO: 1971 - DNA, 593 bp, Homo Sapiens
gaaggagcttcagaaggaaatcaactccctatctgggaagctggaccggacgtttccggtgactgatgagcttgtgttcaaggatgccaagaaggacggatgctgttcggaaggcctataagtatctagctgctctgcacgagaactgcagccagctcatccagaccatcgaggacacaggcaccatcatgcgggaggttcgagacctcgaggagcagatcgagacagagctgggcaagaagaccctcagcaacctggagaagatccgggaggactaccgagccctccgccaggagaacgctggcctcctaggccgggtccgggaggcctgaggagccgccggcagaaggtctctccccagcctcaggcagggatttggggtgctggaggcagtgggccaagcacatgccctagctacttcctccgctgtccagttcctcctgctgcggccttggacccagacccctgcccactgaccgcaacccttatatggggtgatagtccagcatgtggggagctcggctgcagtttattggggacggtactgtgggttgggggccttggatcccaaataaatgagtagttcctctgcc

SEQ ID NO: 1972 - DNA, 607 bp, Homo Sapiens
ctctagagcgatcccttaggaacgtcactacgaaggttgtggcagagtttctccagcaagcggaggacgtaggtgatgctgttgactgctgggaggttgagggtatgctgttcccggtcaaacacggctgagataacctcaccaccatggccttgcttgaggaagctgaagacggttttctggtgataagcacagtcgatacaggcctggacagcctgctgcaacaccacagaggcacgggctggtccaaaatggtcagggagttgctggaccttcttcttatctaagtgggggcctgtgctgccattcttgttcaaatagatacaaactgttggggccctgcatggctgagctggggatggtggcagcatcctggggtacagtgctggtatccggttcaggagtgctggttgttggtgaggcaggtggtgggttcagcaaagtccgaggtttcctcttgctgccaggtttgggacctctcttctttgggaatctcaaaggttcagctgtcttgggtggggcagagatgggatgggacattagggtcttgggtgtccggccccgcttctttcctggtttacgccccctctgccctggttgatgttcc

SEQ ID NO: 1973 - DNA, 937 bp, Homo Sapiens
  misc_feature (663)..(745): n is a, c, g, or t
atatcgtcgacccacgcgtccgattctcacttatttgtgggatctaaaaatcaaaacaatggaactcctagacacagatagcagaaggattgttaccagaggctgggaagggtatggaggggttgcagagagttcttcttgataaaggagcagatgttaatgctccccctgtgccttcctcaagagatactgctttaacaatagcagcacacaaaggtcactacaaattttgtgaactcctgatccataggggagcccacattgatgttcgtaacaaaaagggaaatacgccactttggctggcatccaatggaggtcattttgatgttgtgcagttgctagtgcaagcaggtgctgatgtggatgcagcagataaccggaaaatcacacctcttatgtcagcatttcgcaagggtcatgtaaaagttgttcaatatttggtaaaggaagtaaatcagttcccttctgatatagaatgcatgagatacatagccacaattacagataaggaactgttgaaaaaatgtcatcaatgtgtcgaaaccattgtgaaggctaaagaccagcaagctgcagaagcaaataagaatgcgagtattcttttaaaggaacttgatctggaaaagtcaagagaagagagcagaaagcaggctcttgctgctnnnnnnnnnnnnnnnnnnnnnnnnnnnnnnnnnnnnnnnnnnnnnnnnnnnnnnnnnnnnnnnnnnnnnnnnnnnnnnnnnnntaaggagaattcggaactaccagaggatgaagatgaagaggagaatgatgaagatgtggagcaagaagttcccatagaacctcctagtgcaaccaccaccactacgattggaatctctgcaacatctgcaacattcacaaatgtgtttgggaaaaaaagggccaatgtggtgacaactcccagcaccaatcg

SEQ ID NO: 1974 - DNA, 151 bp, Homo Sapiens
gctagaaggaaaaggcccaagtcaaagcctcagaggcggagtcgtgagcgaacctggcaggagacgaggttcctgtggcagagaaactcgtgaccggggagctgggttcccgctgggtaccccacccggcctcaggcaccgcctctaccag

SEQ ID NO: 1975 - DNA, 412 bp, Homo Sapiens
gatagatgcagtcacacactagacctctgtgtaagaaagggccaacttgtcttgccacatgtggagaatgaaagatagaaaattccttttggatttagatctggggctcatgtgcgattcagtcagagccatgtcaaataactcgacaagggtcatcccaaggacacaatttctaccaggtacagcaagctatgcaattgatggaatcataatagacttctatagatgaatcagaagtccaggcctcaaaaagaagctactcttaacggtttgcaaatgcgttctagacagcactcttattggcttatcagcttcgccggtttaccagttactaaaagatatataagcaatgaagttgaaacacagctttattcaatattgtcctcttgcctttctagaatttacaaaagca

SEQ ID NO: 1976 - DNA, 691 bp, Homo Sapiens
gagggtggtagctgagcaacaatggtgatggctgtgccagcagtaatgacaatggggagcaggtggaccacactgctagcctacctttaccaacaccagctacagtttataatgccacttctgaagaaactagcaataactgccctgttaaggatgctactgctagtgagaagaatgaaccagaagtttaatggactgcctcaacttcagtggaacaagtcagagaaaggagttatcagagagctttacttctcagtgatcaccgaaaagataaagatagtgggggagaatcaccatgtgtctcatgttcaccgagtcatgttcagtcttcaccttcatctcattcaaatcacataccccagttgcaagctaagggcccagtcccttctttcagtgaacttatggaagaccctgatcctgaaaatccagaacccacaactacgaatgaatgtccatccccagatacttctcaaaatacttgtaaaagtcctccaaaaatgagcaagcctggttcacctggatctgtaattcctgctcaagcacacgggaaaatattcacaaaaccagatccccaatggggctccacagttagtgcatccgaagctgaaaatggtgttcacctaaaaacagagctcctaactaaaaacagctatcaaataacaactcaagcactttcaaagatcatcctcct

SEQ ID NO: 1977 - DNA, 1117 bp, Homo Sapiens
cggcgctgggctgaggggaggggttgtcttaaaagtctctccttccccctgtaggggcggccggcgagtcccagtgagagcggagggtgccagaggtagggggccgagaaacaaagttcccggggctccctccggggccgcggtcggggctgcgcgtttgaccgcccccctcctcgcgaaggcaatggcttccaaactcctgcgcgcggtcatcctcgggccgcccggctcgggcaagggcaccgtgagccagaggatcgcccagaactgtggtctccagcatctctccagcggccacttcttgcgggagaacatcaaggccagcaccgaagttggtgagatggcaaagcagtatatagagaaaagtctttgggttccagaccatgtgatcacacgcctaatgatgtccgaggtggagaacaggcgtggccagcactggctccttgatggttttcctaggacattaggacaagccgaagccctggacaaaatctgtgaagtggatctagtgatcagtttgaatattccatttgaaacacttaaagatcgtctcagccgccgttggattcaccctcctagcggaagggtatataacctggacttcaatccacctcatgtacatggtattgatgacgtcactggtgaaccgattagtccagcaggaggatgataaacccgaagcagttgctgccaggctaagacagtacaaagacgtggcaaagccagtcattgaattatacaagagccgaggagtgctccaccaattttccggaacggagacgaacaaaatctggccctacgtttacacacttttctcaaacaagatcacacctattcagtccaaagaagcatattgaccctgcccaatggaagaaccaggaacgatgtggtcattcattcaatagtgtgtgtagtattggtgctgtgtccaaattagaagctagctgaggtagcttgcagcatcttttctagttgaaatggtgaactgataggacaacaaatgagtagaaagagttcatgaagaggcctcctctgcctttcaaaggctggtcacctacacatgtctaaggtgtctctgcacatgtctcaagccattcacaagaaagcagtacagtgt

SEQ ID NO: 1978 - DNA, 291 bp, Homo Sapiens
ggggaagatgatgctcaaatgttgagttgaaactgttggaacgaaagctgccgacactctcctgaaattgaggtgcccgttccttgtatggtgctgttttaaagccagtgaggcctccgctgcccccacccccaagggatgccaactcagaggcacttgaagggccattgtcaaaagagctacctgatgtgctcagatcaaaccaacccacccttgaagcctcacgcccatgtcctctatttcccttcccaggaactcggatggactctacggtctggatcggctcgccta

SEQ ID NO: 1979 - DNA, 304 bp, Homo Sapiens
gacccgcactttgagtgcacacgcatttacagtgcacacgagtggtgaaggcagaaggcagcagtcgggatttgaagagacttgaaatacagaaagaacagacaaacatgaaaacatggaaaaaatccaggtgtgtgggggctgaaaatcagggcttcagcctcaccacttactataactcctctaggcaatgaatcactttaccaagccacagctttctcatcctgtaaaacaggaatgacaatctgcccttaatgatgctgtcaggggatcaaaggtgcaggccgtgtcactctcatacggt

SEQ ID NO: 1980 - DNA, 340 bp, Homo Sapiens
ctttgtagtgtgcacacgcaaatatactaagtaacttatataaaggcattaagtattgatagagagaagtagcacttgtctctcttttccttctgaatttcctcaacaattatctgttaagacttacagcttttgtattatatgtgtactactcaggcttttatcaaacatttttatgactatttatttcctcattatagtccttattgtgctttatttatatatctgtgaggcacgggaggatttccaattctcctttcccctgcaagcctgctcagactcctaatgcccatgacaggcccccagggctcccgtgacaacactactccccacttcccta

SEQ ID NO: 1981 - DNA, 454 bp, Homo Sapiens
atgcatactggggagaaagctcaaattctaaaagcctcagacagtccaagccttgttgcacatcagagaattcacgctgtagagaaaccatttaagtgtgatgagtgtgggaaagcttttaggtggatctctcgcctgagtcagcatcagctgattcacactggagagaagccttataaatgcaacaagtgtacaaaagcctttggttgtagttcacggcttattcgccatcagagaactcacactggagaaaaaccatttaaatgtgatgagtgtggcaaaggctttgttcagggctcacaccttattcagcatcagcgaatccacactggagagaaaccctatgtgtgtaatgactgtggaaaagccttcagtcagagttccagccttatttaccatcagagaatccataaaggagagaagcccaaacgtgtgcactctcgattaggtccca

SEQ ID NO: 1982 - DNA, 343 bp, Homo Sapiens
gtgtgacaaaggagaatttagtgatgatgaagagttgatggtgttttcaggatttccatactggtaaggcagaatctatgacatcctcacggagcacacagttcctcttctgttgaggtgggccacagtcctgctggactctcgtgtacaagcgttaaagagtgttttcagagcagggttcatacatccagctgtatctccaattttccttctgtcttcacttattcaccaatctcacttcttgacgtgaagttcatgctgtcagtcgatggaccagggcctcagactcctccattctcagtattatggcatatcttgacactaatgtaattaccctaatgta

SEQ ID NO: 1983 - DNA, 401 bp, Homo Sapiens
  misc_feature (97)..(221): n is a, c, g, or t
gcagctttcacacagaacacacatgcactctgtccacgatacatatgctctcacttgctcatagtaccacacacatgcttacataccaacgcatcannnnnnnnnnnnnnnnnnnnnnnnnnnnnnnnnnnnnnnnnnnnnnnnnnnnnnnnnnnnnnnnnnnnnnnnnnnnnnnnnnnnnnnnnnnnnnnnnnnnnnnnnnnnnnnnnnnnnnnnnnnnngtgtattcatagaaatcctgaatccaaccttggattcctcaggggcatccagttaagacccagagagggccatgcactgtaggtaacagcacagcctctgaagtccttctgcccagggttcaattccagcttgcccactttttagccgtgtgacattgactgtgttcgtttacttctcta

SEQ ID NO: 1984 - DNA, 287 bp, Homo Sapiens
tggcatgcggcaggccaccgtccagcaacttgtggacctcctgtgccgcctggagctctaccgggctgcccagatcatcctgaactggaaaccggctcctgaaatcaggtgtcccattccagccttccctgactctgtgaagccagaaaagcctttggcagcttctgtaagaaaggctgaggatgaacaggaagaggggcagcctgtgaggatggccacctttccaggcccagggtcctctccagccagagcccaccagccggcctttctccagcctcctgaagaag

SEQ ID NO: 1985 - DNA, 388 bp, Homo Sapiens
atctctgggatcatatcctaacattgtctggacagagttcatctcttcttattctatatactcatcgcgccttgttcataactcctgttatagcactttgcacattgattaaattatttgtttagatgtctatctctccagctaaactgtatgagctggagaacagggattctgtgccattctgggcagtcacttggtattttcagtgactatgattacaatgcctgttacatagtaaatagtgattgttgaatgatttaaacaaatgttttgtacaacggtaagattttaatgatactgtgaaatcagtacctcaaaagttatcactttttaaaagaaaccttaatgtcttatcagcttcggcagtataaccggtgcactctatgac

SEQ ID NO: 1986 - DNA, 706 bp, Homo Sapiens
tttcaaagacattctctatggtgtattcaatggcactgcctaaggccctggttccctgcaactgtgtcattcccctgctgaggaagtccaccagcttctccttggagccatagtcagtcagggagaattccaccttcacaggtggcatgctggcattgtccacggactcagagggcgcgtgctgcacaactgccactctggcgaagtgctgggaggccttgggatctgggctcatgtccagttgtctgaccaggtacgctatgtacttcttcatctcattgaactggaacagggtggtggtctcagcgctgtctaagatgaaagccatgtcgatgtccacatcgctccctgccgctctcctgtccctgaaggaaggcctccaactgccaaatccacaggatgggtcgatgttgcagatgtccaagcaaacatgacacgtgaggacattctccaggaagtctgtgaggtctctccctgcaggcaggacaagcgcatgccccactgctgtgttattgatctgcaaagcgttgatgagctgccggtcttcctgccttgtaaggaacaagggggtgatccccgcatctgagagtttgagcacagcctctctgagctgtggggatgctcttgtgggtgtgttgcagaagaaaacagccactttcctcattaggaatccgttcctcacacgcttaaatgtgttcctggccac

SEQ ID NO: 1987 - DNA, 451 bp, Homo Sapiens
atacttgatgtgacaaatgctcgaggtattggtagcaagcacagattttgccctttagttttcgaagacacctttctttcattatgcactcgggacaagaaaattaatagagcgttattccacagaaggcctctagccagagatcttgagtgtagtgcaagggactcatgctttgcgaacttgtccctgtgactagtagattcccccttttcctgtgtttaggatttagtagtgcataaagcattaatatccataaacatacctagaagtttgttttgcttttaatttaaaggaagcagtaaccacaaagcttccgctcagggttttttctttcttcaagtctccaagggctcttcagcgtcacaagccagcaactctctttgcattaaaatttcaaagtttaattaatataattaaaaagcacaagcagcaggaacctgtgaagatttag

SEQ ID NO: 1988 - DNA, 370 bp, Homo Sapiens
  misc_feature (105)..(234): n is a, c, g, or t
ctggaatcccatactctactgactggaatgcaaatggcaaagacattttgaaaaacaccatgggactgtaggaagtcaagcattcgcttcccatacaacaacacnnnnnnnnnnnnnnnnnnnnnnnnnnnnnnnnnnnnnnnnnnnnnnnnnnnnnnnnnnnnnnnnnnnnnnnnnnnnnnnnnnnnnnnnnnnnnnnnnnnnnnnnnnnnnnnnnnnnnnnnnnnnnnnnnngtaataagtactcacaaagtgatctcagttctaaaggtatttttaaaaatcacttctgaacaagattaatgaagacttcatagataaaaataacacctgaggctaggtgccgtagctcataactgtaatcccagca

SEQ ID NO: 1989 - DNA, 523 bp, Homo Sapiens
tcctcaggcaacagtcccagtcagagtttcattcttagggagaaacagcactggaagcagtcttcctaggttgaaagctaccaatctgggagttttgagggggtgggaagaagaggtagaaaagtgacctttggtcactttagtcacctctagccagcacttgagggtacatttccatatggaggaatggcacaggaaatggggataaaaacaagactatgtagtcatgccatctttattttctgacgtatgaatcaaagaacctataaggggaaaagggaagagtaggagaaaaaggaagaacaactacccttgcagtgattatcagaagtatgaagagaggaaaataaacaccaaatcatcaaaccaagtcatattgagaggcacagtgtactccttcctgggtgatctgttcacccaaaagaaaaggacaccaacagaaaggagagaaataattcggggtcacagaacagagacgtcttcatcagaaaacatcctgagacaagaaaagtgaatcttccag

SEQ ID NO: 1990 - DNA, 217 bp, Homo Sapiens
acagagcgaggctccatctcataccaatctggcaaacgaacgaacaaaaaaccccacctgaactaaggttgaaagaatgagcaagccagactggcaaactgaaggaaggatacaaactaagatataagaaaatagtaaacagtccagtttgtattgtgatcaggatatacggtaagaagtaagagtagtttggttcagtctgtgttgggggtcttaa

SEQ ID NO: 1991 - DNA, 599 bp, Homo Sapiens
  misc_feature (42)..(42): n is a, c, g, or t
aagtagtaaaggtctagaccctggtctctaccttatctccanaatttaatccatcaccaagtcatgttgtctccatctcctttgtcccaactcatgtctgtttctgttgccaccactttagctgaagccttcatcatttcactgcagagattattgcaatagctttcatgtagtctacctgctctttattctccactccactgtctatactgcagccaagatgatatctctcaaatacacctttgggcatgtcaatccactgttaaggggctttcaatgtaggataaagtaacagaccttctgtggttagattgcctttatattgggtgggagctgaggcaggggcaaaacaatgtgaggactgaagagccaagagcttagagtactggtggaccagtagtagggaccaacccatgcagatggagctgcctacagttattgtctcctccatccatctagccagttgctggttagctagctgcgcaggcatccaacatgccaaaagtattggctcttggaccagacaagctttttcatgtcatttacgctaaaaccccaataacttgatgtctattctttcagagtctctggcagataag

SEQ ID NO: 1992 - DNA, 680 bp, Homo Sapiens
  misc_feature (579)..(589): n is a, c, g, or t
agcatgtgcagaggcccagggacaagatggagcatgaggagttggagaaattgaaagaaaaccagcatggttggcctgcatgtgtaaaaggtgaaagggagtggttcaggaggtgggcaggggccagacggtgcaaggctttgggagcacagtctgggaacctagaggcaggcatgacaagataaaatttacacttggaaagatgtccctggctgatacatggagggcagactacaaagaggtagggaggccagtgaggaggccacaaagacgctgaatactgctcggcctcaatgagggtcttgcagtcatgttagtgagctccagaagagcctcctccactgttggcagaccatagctcagctcttcctcaacttaggaagagagggaaggggtgagattcaaacatctgccatgtggatttctgtgtagatttctcaaaggggacagaagagtggttgtaacaacaacaatacatggatctcaaaagcactgagagctgtgagcacattcttcccaagtattccttgccaggagattaaacagggctcatcttgatggttgcaaatcagcaaaacnnnnnnnnnnntgcaggaagaatgtgaatcccaatcctatcccactccaagtgatggtccagccatgtgctcccatgggaaagccccaccagcatagaaaag

SEQ ID NO: 1993 - DNA, 788 bp, Homo Sapiens
  misc_feature (74)..(203): n is a, c, g, or t
gccgtcgtatacatctcctgccttggctccacgagtagctgggtgacaggcccctaccaccatgcccgagtaannnnnnnnnnnnnnnnnnnnnnnnnnnnnnnnnnnnnnnnnnnnnnnnnnnnnnnnnnnnnnnnnnnnnnnnnnnnnnnnnnnnnnnnnnnnnnnnnnnnnnnnnnnnnnnnnnnnnnnnnnnnnnnnnngacatcaatttttatgtcaactctaaattataacatttagcaatttagtgactttttatggtcatcattaatgttgttaatgtaaaagttgtagtcctgtcattactcactcgggtatggtaatgtggtctatgtcaaaatgaagttaaggtctatttgctcttctctgaatcattaataagaactgccaacagccatttcagcaataactatttactgagattttaaaatatttcaaggtaattggtcctagcagactggaaaataccaaattcttttccagaactgaatcccccatcaaagttcaattttactcataattcccttttcatttgaagcatctcattgtaagccagtcttaacccttctctcacactttgcttggctgtttctcaggtagaactcagtaagtctggtagcctccaggactgccgcttagattattaaacaacatgtcagtggttggaagagtcaatgttatttttgatttttctggtatggtttcggttttaaactgcatgttggcggataacttgccgctttctattcatctcccatacatgacattcaaagtggcatgcaaac

SEQ ID NO: 1994 - DNA, 499 bp, Homo Sapiens
  misc_feature (156)..(217): n is a, c, g, or t
acaaactttatctcatcagttctgaaactctaagatgcagtagcatcacctaaagtgcttttaaaatgcagattctcaggcctcaaccgtacaccacccctttacacacgtactaaatcaagaatatgtgcagaaggtactgggaatctacttgtnnnnnnnnnnnnnnnnnnnnnnnnnnnnnnnnnnnnnnnnnnnnnnnnnnnnnnnnnnnnnnccttatctattctttacaaaaatgtacattgccaggtctttctttcctgtggatgctaactataggatatttaggttcctctgttctttgtctcccatagtgacccccgtggcaaactccaaatacattatatttatttattcttgtggcttttttcccccactagactgtgagctccttgagggccaggacttatctctgttcgcagtgccaaggacatggcctggaccatagaagatactcagttttttgttgaataaataggtaatatggatttcaacc

SEQ ID NO: 1995 - DNA, 544 bp, Homo Sapiens
  misc_feature (395)..(395): n is a, c, g, or t
ggccgcattagtcgcactggtagggcttctcgccgctgtgcaccagctggtggcgcttgaggttgcccgaggtggtaaagagcttgccgcagtcctcgcagcggtagcgcgcctcgcccgagtgccgcttcttgtgcaggttcagcaggctgatgaggcggtagctcttcccgcactcctcgcagccgtagggcttcagagggctgtgcgtcttctcatgggccttgcacgcggccgggtcggaaaaggccttgctgcactcccggcacgagaagggcttctcccccgtgtggatgcggatgtgccgcttgaagttccccgtgtgcgtgaactccttcccacagtcctcgcacttgtggatgacggagccgtaggccttggactccctgcggtcngccgaggtgcctgagcgcaggccccgggcctcggagccgagctcctgccccgagctgtgcccggctgactctcattctcgttcttctcgggggcctcttcgttctcagctgggaaccctcttcttgacctcagctgcccctgcgccttc

SEQ ID NO: 1996 - DNA, 839 bp, Homo Sapiens
gcagcttgatatgtgcacccttttgtattaaacactgcaagggtgatgcagggagcaggaaagccatcctaaactcactactgagtacgattcagtatgttcctgtggatgtctgctgtgactaatataaatttcttgcagaatcagctacacttaattatgttgctgatagacaagcatccacgcttcagctggcactaagtgttttcattgtaggatcagcagcaggttaaagactgaacggttagtgaagacaaatgtcttaaggggctgcgatgtctaggttgggcttgtgacttcttagtggcctagccttcttgatggcaccttgaaagtgaacttctagaaatctacatttaaaaggcaaagctttaaaagcagagctagtctattctagttactgacgcaactaaaattctgtatttcttaagatggagccactgacgagatgtcacagtatagagcctgcagtctcaactcattgtgatcctaatggtctgggtgatcggatggttcgagtcgttagggattttgagtttttcattttattgcatatctgggttggatgttagactaaaggaaacccaggaatatttacctggtgttacatttaatatttaatgtaactggtctagcaacattaagggggatttctgaagccaactccggaggctgtgggctgcacttcttcaataaaaattaaagacttgtattcaaaaacaaataatcacctcagactcagacacaaggccttttacatggaaattttacaaattacttccatttatgtaaaataacgtcctgtgaccaagttgtttaaatggaaaataaagtgcttc

SEQ ID NO: 1997 - DNA, 508 bp, Homo Sapiens
agttcctcttgaccctcatcagggctcatctttaagccttcccgaagcattctaatgccaaaaatggcaaataatacagttgaaacatagtatgtatagaccctggggatgactgtggtggcatagccaaacaaaactgacaagcatgtcattagtcccaaggcaagcattgcaccagccagcacggtcaggcggttatagcgcattgccatgatggctgctataaaaaatgtcttatcacccaattcagatacaataataactgatatggcagcgacaaatgcatggataaatcccaaattagtttgggtagcaggatcttctttattggtatgaactggagctgctggtgtaaatattttctcgacccgggccggctcggggccctgcacagccacaggctgcggctgcagctgctgggccggcgccggcggttctttgttccggtggctaaggtcttcatctgggccggcccggaccgcagccggggcccacagcagcggaacca

SEQ ID NO: 1998 - DNA, 1282 bp, Homo Sapiens
  misc_feature (1010)..(1105): n is a, c, g, or t
gggggcccaggagcactgccatgaggcatgcagaggtgaggtgacctgggactgcatgaagacacagctcagtgaggctgtccactggacctggctttgcctacaggacattacagtggctttcttggactgggcacttgccctgatatcccagcagtaggccctgccttcctggccactgagttctgcatgggtagaccatccaagactgcagcgggtagaaggtggcagttcttcatgggagtctttttaacttggtgcctgagttctctcctaggcaagtggccagctgcctccacctcagttcttccatctttggtggggacagggcccagcagcatctcagcctcctacccacaattccactgaacacttttctggccctactgcacatggcccccagcctccaaaaattgtgcaggtagcctctcacaactccgcccttgccctctgccctccacttccttccatctcatttctaaaccccaaacagctcatctctaaaaagatagaactcccagcaggtggcttctgtgttcttctgacaaatgattcctgcttctccagactttagcagcctcctgttcccattcttggtcacagctctagccacagcagaaggaaaggggcttccagaagaatatagcaccgcattgggaaacagcagcctcacctccacctgaagcctgggtgtggctgtcagtggacatggggagctggatggaaatgcctctcacttcaaaatgcccagcctgccccaaatgcctctaagcccctccctgtcccctcccttgtagtcctacttcttccaactttccattccccatcatgctgggggtcttggtcacaaggctcagcttctctccactgtccatccctcctatcatctgtagagcagagcacaggcagttgtgtgccttgggcccagggaaccctccatcaacctgagacaggactcagtatatggttcttgggtatgccctaccaggtggaataaaggacacagattnnnnnnnnnnnnnnnnnnnnnnnnnnnnnnnnnnnnnnnnnnnnnnnnnnnnnnnnnnnnnnnnnnnnnnnnnnnnnnnnnnnnnnnnnnnnnnnngccttggtcgggccgccttgggccccttcaaaaaaactttttctaaaacccttttcgtttgtggccccgggcggcccccctgaagggaaaacgggaaacagtgggtccaataccctgtggttctccaaaagaaagaatccccgtggaccaatgaaatatatgggctctggggatatt

SEQ ID NO: 1999 - DNA, 1038 bp, Homo Sapiens
  misc_feature (563)..(575): n is a, c, g, or t
aaaaacaaatcctgaagatacatggaaatgtaacctagtttagggtgggtatttttctgaagatacatcaatacctgaccttttttaaaaaaataattttaaaacagcatactgtgaggaagaacagtattgacatacccacatcccagcatgtgtaccctgccagttcttttagggatttttcctccaaagagatttggatttggttttggtaaaaggggttaaattgtgcttccaggcaagaactttgccttatcataaacaggaaatgaaaaagggaagggctgtcaggatgggataatttgggaggcttctcattctggcttctatttctatgtgagtaccagcatatagagtgttttaaaaacagatacatgtcatataatttatctgcacagacttagaccttcaggaaacataggttaagcccccttttacaaagaaaaagtaaacatacttcagcatcttggagggtagttttcaaaactcaagtttcatgtttcaatgccaagttcttattttaaaaaataaaatctacttataagagaaaggtgcattacttnnnnnnnnnnnnnctttaaagaaatgaaagaagaaccctcttcagatacttacttgaagactgttttcccctgttaatgagatatagctagatatcggtgtgtgtatttctttattattctctggtttttgatctggccttgcctccagggccaaacactgatttagaaagagagccttctagctattttggcattgatggctttttataccagtgtgtccagttagatttactaggcttactgacatgctattggtaaatcgcattaaagttcatctgaaccttctgtctgttgacttcttagtcctcagacatgggcctttgtgttttagaatatttgaatttgagttattgggccccactccctgttttttattaaagaacgtgagcctgggatactttcagaagtatctgttcaatgaaaaaaagttggtttcccatcaaatatgaataaaattctctatatatttcattgt

SEQ ID NO: 2000 - DNA, 1063 bp, Homo Sapiens
  misc_feature (13)..(13): n is a, c, g, or t
gaggtggagagangctgcaggcaccgacctgccttcagcttccggcttggcaaactccgaaaactttcacttttcttttctcggaagcccggccccttactgcgtttgtcaaagcacagacttcctgttttgcctgctagcatctccctgtaactctcccaatcttgaggagtgatccctgtcccagcccctggaaaggggcaggaacgacaaactcaaagtccaggatgttcaccatgacaagagccatggaagaggctctttttcagcacttcatgcaccagaagctggggatcgcctatgccatacacaagccatttcccttctttgaaggcctcctagacaactccatcatcactaagagaatgtacatggaatctctggaagcctgtagaaatttgatccctgtatccagagtggtggcacaacattctcacccaactggagaggacttttaacctgtctcttctggtgacattgttcagtcaaattaacctgcgtgaatatcccaatctggtgacgatttacagaagcttcaaacgtgttggtgcttcctatgaacggcagagcagagacacaccaatcctacttgaagccccaactggcctagcagaaggaagctccctccataccccactggcgctgcccccaccacaaccccctcaaccaagctgttcaccctgtgcgccaagagtcagtgagcctggaacatcctcccagcaaagcgatgagatcctgagtgagtcgcccagcccatctgaccctgtcctgcctctccctgcactcatccaggaaggaagaagcacttcagtgaccaatgacaagttaacatccaaaatgaatgcggaagaagactcagaagagatgcccagcctcctcactagcactgtgcaagtggccagtgacaacctgatcccccaaataagagataaagaagaccctcaagagatgccccactctcccttgggctctatgccagagataagagataattctccagaaccaaatgacccagaagagccccaggaggtgtccagcacaccttcagacaagaaagaaaaaa

SEQ ID NO: 2001 - DNA, 669 bp, Homo Sapiens
  misc_feature (56)..(56): n is a, c, g, or t
  misc_feature (59)..(222): n is a, c, g, or t
gtggttattaagaggggtaagggggaacacttaaaaaatcatagcgagggacagantgnnnnnnnnnnnnnnnnnnnnnnnnnnnnnnnnnnnnnnnnnnnnnnnnnnnnnnnnnnnnnnnnnnnnnnnnnnnnnnnnnnnnnnnnnnnnnnnnnnnnnnnnnnnnnnnnnnnnnnnnnnnnnnnnnnnnnnnnnnnnnnnnnnnnnnnnnnnnnnnnnnnnccctagatggagatgcagaagaccagacctgggcatggaatgttcttatgctttatggtttacataaaatgtgctgtgggctatatcgatttaggctgtaattgcattaaccttccaggtatacctagacacaccagtgattacccttggagggaagcacggttagattggcaaaagaccccaacatttccttctccattctattttgcaacagaaaaagctcagagaaaacagttggagaggcccaaagtaaacaaattgcagtaaacttgaaagcaattatttatgtgtctaattttagcactttatataggagaataaacttagatatatcttgttattagaacaaaataatttagaagattgcatgacagttactaggataatttgctgatttgaatgggacgattaagaagcacattaacgacggagcgcggtggctcgcac

SEQ ID NO: 2002 - DNA, 877 bp, Homo Sapiens
  misc_feature (548)..(548): n is a, c, g, or t
  misc_feature (592)..(592): n is a, c, g, or t
  misc_feature (596)..(596): n is a, c, g, or t
  misc_feature (622)..(622): n is a, c, g, or t
  misc_feature (639)..(639): n is a, c, g, or t
  misc_feature (651)..(651): n is a, c, g, or t
  misc_feature (839)..(839): n is a, c, g, or t
ggggtggcggtgggcggaactcctagcggacacctcgtggagtccggccggaagagcaaccgagatgaaggtgaagatgctgagccggaatccggacaattatgtccgcgaaaccaagttggacttacagagagttccaagaaactatgatcctgctttacatccttttgaggtcccacgagaatatataagagctttaaatgctaccaaactggaacgagtatttgcaaaaccattccttgcttcgctggatggtcaccgtgatggagtcaattgcttggcaaagcatccagagaagctggctactgtcctttctggggcgtgtgatggagaggttagaatttggaatctaactcagcggaattgtatccgtacaatacaagcacatgaaggctttgtacgaggaatatgtactcgcttttgtgggacttcttttttcactgttggtgatgacaaaactgtgaagcagtggaaaaatggatgggccaggctatggagacgaggaagagccattacatacaatattaggaaagacagtgtatactggngattgatcatcactggaaagaagctgtttttgccacatgtggancagncagtagacattttgggatgaacaaanaactaatcctatatgtntcatgacctggngggattgacagtataagtagtgttaaatttaacccaattgagacatttctccttgggaagtgtgcatctgacagggatatagtactgtacgatatgagggcagctactcctttgaaaaaggttatctttaaaatgagaacaaatacaatctgttgggaaccttatgggagcttttccttttttccgcngcaaatggaggatataacttaaataccttttgaaaagg

SEQ ID NO: 2003 - DNA, 519 bp, Homo Sapiens
  misc_feature (68)..(68): n is a, c, g, or t
gcaaataagcagtgaaaaggaagaagccgataatgaaaagagacaagatccaggtgataactgggaanaaggtggaggtggtggtggaggtatggaaaaatcttcaggtccctggaataaaacagctccagtacaagcacctcctgctccagtaattgttacagaaaccccagaaccagcgatgactagtggtgtgtataggcctcctggggccaggttaaccacaacaaggaaaacaccacaaggaccaccagaaatctacagtgatacacagttcccatccctgcagtcaactgccaagcatgtagaaagccggaacaggtacttaaaatgaatgctacctggaattaaatgactacatatggcacatctacatcttactttagggacatgaattttttaaaataaataaaatgggaagaaatgtaaatgacatcagatggaaatgtgttttttggggtggcttttagaataaatcccagccttttcaccaccttgagagcacagctggcttgaatt

SEQ ID NO: 2004 - DNA, 798 bp, Homo Sapiens
tcatatgattagtcagtggctttgtatgactgccgaagtccagatgaaagccatcgaatgtggcgattcagtgtgcagatagagagagtgacttggaatcactttccaccttgtcatttcttggccagtacagatgacggctttgtatataatttggatgcacgttcagataagccaatttttacacttaatgcacacaatgatgaaatctctggtcttgatcttagcagtcaaatcaagggctgtctcgtgactgcttcagctgacaaatacgtgaagatctgggacatcttaggagataggccaagtctagttcattctagggacatgaaaatgggagttctcttctgttcttcatgttgccctgatttgccatttatttatgcctttggaggtcaaaaagaagggcttcgggtctgggatataagcacagtctcttcagtaaatgaagcatttggaagacgagagaggcttgttcttgggagtgcaagaaattcatctattagtggcccttttggcagcaggagctcagatacacccatggagtcttaatgaagatcatctaatttcctgcttaccttaactgggaattttaaaaagttggcctaaaaatgttccatgcgtggcagcaaccatgcagagtgactgaaacacaattcatttctgactgacattcctttctgcaactgcggtggcaccacaaatatccggtctttgtgcttgctcttcagatggatggtttgtaaggctcttgttgcatttcttaaaaaagagtaataaaaaggatttttaaaaagt

SEQ ID NO: 2005 - DNA, 431 bp, Homo Sapiens
  misc_feature (335)..(370): n is a, c, g, or t
atgttcttgagctgatgtagtggaacttgcctagcacattcaggtcccagccagttggcagagcatgctctcatctccttattccataccctgggcgtcccctttctgttgactcaggaactttctgagaatgaggacagcactaggagatgagctttggcaggtatccaccttaacgctacaataattgtgcttcctgaaacaaaacttgagattgtatcatagaaggaaacaggaagtcagaaatcaaatctatgcttttaattgaaaccgtgcctgaaacagtttgaatgattgttttaatgttgtttctgaaattccttgtacctttgtgnnnnnnnnnnnnnnnnnnnnnnnnnnnnnnnnnnnngatgtggaatatgcaatggaaataatgtaacaaaataataaacatctggccattttactac

SEQ ID NO: 2006 - DNA, 632 bp, Homo Sapiens
  misc_feature (486)..(486): n is a, c, g, or t
tgagccaccatgcccagcctcaaatatgtttttaaaaaatatcattgtcctcctcctcttaagatttttttaagttattttgctcaagtacttaagtagtctggctcaagtactttgtttacaattaaaatggatattatagcatttaatagaagaaatggttatggcttatccaaaaagaatgtcagcatgacctggtgtagacttaaaaaactacatgtttgtgaatattttataatgtggaatgatcattgaaatatcaaggattctagtaattgtatttcctgaataaatgtatgtttatgaattttctaacttacattttgttgggtcctctgccaacaatctggttttataattgttgtctaaagtttgctagtagtgtttctttcaaaggttattccaggtatggttaagtagtgagaaaaatcacttattaatttttcagaactttgagactaatttgtattgactcggttttttaanataactggcaaatgctatgcttctacttttaaaatttgtggtaatacccagaatggatgtaaaataacattttttcaatagattacttcatttatcaatttaaattctgatttttaagcttatttaaaataaatttgtatgagttt

SEQ ID NO: 2007 - DNA, 822 bp, Homo Sapiens
  misc_feature (159)..(159): n is a, c, g, or t
caagattggtaactgctacttctaagacttgagaaatgaattgacatatggaaaaaagaagtgttataagcacagcaaactttaggggcaaaaataaattgtggcggagagacagactgtcatactggagtccggggggcagagaaagaattgggaggnggaggtcagcgaggccaacagaggccagaccacaagggttttgaaggtcacgacgatgagtttggataatatctgaagggaaatgcacaggccgtagaagcgtttaaagagaagagtgacatgatctgatctgttttaagatgaagatgctgggagctggatggggtgtggcctacaggtggcaaagtgaatgtaaggggaccttttcagagaacatggccaagctccctctctagctcagagcaacacagcaagccctgcctgtctgctgcagaggcttggaggttgtgcaaaccacacagttagatcagcaagagtttcccagccaagaagtcacatctccttacttgcacaaatacaggaagactcttcttctgcagcaagagagggagacagaaagtcccactttcagggtccaaccctcagtcatagcaggccctggctgctgctggagtgaaataggaagttctggcccaaaacgccctgtgcagggcagaccactggctctgatcacacctgtgtggctgcgcgaacagtctttgagcctccgcctacagagacaactgaactggggtctgtggcttggtaggccctagttgagctgtggtcctccagagggactttgaggtccagaggccatgcctagttgctgtgtgaggtccc

SEQ ID NO: 2008 - DNA, 1000 bp, Homo Sapiens
ggggcgcagaccccgagcgcggccgcggacgaagatggcgaccgccatgtacttggagcactatctggacagtatcgagaaccttccctgcgaacttcagaggaacttccagctgatgcgagagctggaccagaggacggaagataagaaagcagagattgacatcctggctgcagagtacatctccacggtgaagacgctgtctccagaccagcgcgtggagcgcctgcagaagatccagaacgcctacagcaagtgcaaggaatacagtgacgacaaagtgcagctggccatgcagacctacgagatggtggataaacacattcgaaggcttgatgcagacctggcgcgctttgaagcagatctgaaggacaagatggagggcagtgattttgaaagctccggagggcgagggttaaaaaaaggccggggtcagaaagaaaaaagagggtcccggggccgaggcaggaggacatcagaggaagacacaccaaagaaaaagaagcacaaaggagggtaagaggctttcccctctttttcccaaaagaacgaatacccatagcctgtatcccggatgtaggaacactgatgggaagctgacccgagtgaagtgcaccccgtgtgccgggtggtattctgattcttacgctgcgcgcctgtcgtcagcctgtcctcaccgcagcctttgagggggtgccgttgtcaggggcattttcagtgtcgcagggacctgcccaggctttagggctgctgtggtgcggctgggctgcacctggagtctgactccagtgcctgtcctcttagccacagtgtgtgctgccccactagggacaggaggatggtgagcaacgtgttgttgacagaggccaatgtagaccactctttaagtagctagatttctgtatatctgtcagttattttatgtgtcaacatatagtgtgcatatattcattgttaattatgtggccacatttattaaatagacatgtcatttaaaaaa

SEQ ID NO: 2009 - DNA, 905 bp, Homo Sapiens
  misc_feature (723)..(766): n is a, c, g, or t
  misc_feature (784)..(823): n is a, c, g, or t
acccggcatcgtctaaataggtccagttaaagcactacagagtagccatcttttacaaaaatttttggccacatttttaagttcactggtgagggggaacgtctcatactctagccctcctgagcctagaccctctgtgagatgtgtcaccatttcttggacaccatgtgagacattccccctcagattagagatgctcagcttgcatcaacttacctaaagcctacatctggctactctgggacaagtcctgtttacagtgcccattcctggagcttgcctctgtcttttgttcgattacatgatgtattacttttcccaacaggccagtgctagcatattggaagagtgatttaataaagctggcaaccttgacgctatgccaccagtccaaccttacttgcctcatttaccatttccattattgtggcagccctccattccagccacagcagcccctcaccaaaccccagtcacaccacccacatttctgcttttgtctgtgtgtctgtccatctaaaatgcccttatttcactctgcctgtgggagtcctatgcatctctcaaaagccaactcaagttcatctttcttcttgacaccttccctgaatattccagccctgctgagcctagtccctttgtgagatttgtcaccatttcttggacaccatatgagagacttcagaggctgaagtgggaggatcccttaagcccaggagcttnnnnnnnnnnnnnnnnnnnnnnnnnnnnnnnnnnnnnnnnnnnntgacaacaaggccctgannnnnnnnnnnnnnnnnnnnnnnnnnnnnnnnnnnnnnnntataagtattgaaaaggaagagacaaaactgattatttgcatatgaaatgataaatgtgagacagccaaggaagcctaacag

SEQ ID NO: 2010 - DNA, 594 bp, Homo Sapiens
agggaatttcctctatcttggttgtggcagtagttccgttagtgtatccatttgtaaacgtgcaatgaattacacattttaaagtggtgcagtctgttgtaccgaaattatgcctttataaagttgatttcatcatcttaatttctccatactagcaattagcagctagaaaatgaaattcaataaaacataatagagattaacagccagaatcattacatgcttaacaatacatgcaatgaagcaggtacaaggcccctaaaagcaattggtgagaaaaattaaagaaggctaaataaatatatatcatgttcattgcttggaagactcaattttgttagcatattacatcaacacaatactgcttaatatttctagtaggagattttagagaaatttgaaagctagtttcaaaatgtatttgaaaatcaaagaacctagaataagcaagtcggtattgaagaagcaataagttggaggacttactctgctagatttcaaacctgattttaaagctacagtaattttaaaacagtagtaatggtgtcagtattcataaatacatcaaagtgaaagaatacagactcaaacaat

SEQ ID NO: 2011 - DNA, 482 bp, Homo Sapiens
aggatccccttcgctgatacccaccatggggcattattagttacaaatgatgaatcaacattgacacatcactctcaattgaagttcataggggacattaaggttcatgctttgtgttgtgcattctatgggttttgataaatgtgtaatgacatgtacccaccattatagtatcatacaaaatggctaagctgccctaaaaatcttatagatccacctagtcatccttccctctccccaaatccctgaaagtcactgatctgatcttttcactgtctccatagttctatctttttcagaatgtcatataattgggggtcatacagtatgtagcctcttcagattgatttcttccaattaacaatatgcatttaaggttcctccattcttttgatagctacacagctcatttcttcttattgctaaataatattccattgtctggatgtatcacaacttatttttgtttattaatttgcttt

SEQ ID NO: 2012 - DNA, 724 bp, Homo Sapiens
gaaagggagaaggcaagcagtgaaagaggatgaattcaaaacagcaaaggtctatttccaaccaatacagaataaaagcactggcaaagccccccatcccaaattattggaggtcaccctcaaagttctgggaaacctgcaacatccttcctgtgtggatgggcaaactacacatggtgcctgtagctaagacatgcaatataaacttgtcaaaacagctctctgacatgatactctaccactctttaccacacagagcagaacaaaagtagaacagaaggaggggactcaggaacattgcttaaccctaactcagacaaaattggaggcaaaagctttactaatcaccccacagattaatcactggcttaagggtattttagctttctgttaaaacacagaatacaccccaacaacttttgttaaatctaaacaaggtgagatagactcgtggaacatgaataaaagccctttcagccttagagactggtgtacttatccaaatatttaccaagtgagccaagcactttgggaactataaggaaactaggacacagtgcttgccctcaagcagcatataatccagcagaaggctgaagacagaaatcctaggctcacacggatacaggagcaggtcccaagagcagagaaaagagtgcaagccagccaagggctcaaggaagctttcagctgggccttgactaactcctgggaagataggtac

SEQ ID NO: 2013 - DNA, 484 bp, Homo Sapiens
gtgaaattatgaaaaataatgaatacaagataaatgtgtccccagtgtcagtcggatgtgtaccttctctgttattttccagtttctaaactgttagcaaattaggaaacatttccatctccgtcagtggaggattcactctgcttccaaagtaaacacattcgtgaagaagtgcgtctatagcgagaggctctttaacatagaacagaggcatttaaatcgctttcaatttggctaatatcctgaggaatcttaaagctatatctttactaaagagcatcaaatacttccaaagcaattgggattttccctctcatttctggaggcagataaatacccttgaacgaagcagcgctcggttacttcattacttctcatatgtttgctgtgcgatattagtaaaccacagccatgaaaacagacattccttccacttctgcccaagaaggaaagttcataattaagagatttctgcacatcttga

SEQ ID NO: 2014 - DNA, 468 bp, Homo Sapiens
  misc_feature (441)..(441): n is a, c, g, or t
taaaagaaagaatggtaaaggcaattcacaagaccgctgaaaaaaggaaacattcagtggaaatattgtaaaatcccataaaattaaaagatccacctttcagagcacttgaacagcaaacttttcagaaggaacaaacctggagttcaagggtagaaagaacaagatggtccaatgaacagctctaattagcatttttcctagatgtattgcaaaggaaaaatgaaggtgtaagtttgggtgaaataaaagccagtgcggtttaaccctcacatacgtttgctcacctttaatactactactatctcattaaataggccacaactcttctgtcgctggtcgttagggttcagagtttatgtcacaattgtaatgggttattgactgcctcttaaagaacttcatagctccccaggctttgaatcccattaatgaatgttngagttgataaagttgagtttaattaca

SEQ ID NO: 2015 - DNA, 206 bp, Homo Sapiens
cgctctcctaagccgactaagaattcctaaaccttacctggaaaggggacccacatccaccttaaaacacagggctggcaacttagctcacaaccaaccaatcaggtagtaaagaaagctcactgacatcctaattaggcaaaaacaggaggtacataaatagctaatcatctatcgcctgagagcacagagggagggacaatgat

SEQ ID NO: 2016 - DNA, 424 bp, Homo Sapiens
ctaacctgatttacctcttacctgtaacctaccttatcatgtggcttttaattggcagtcactcgccatttctaagcagatatagtactacctttcagaactcacattggcaagtgtaaaaagatgacttaaggtgaagtgaggacaaaatcacattctgcatactaacctatttttttctccctttaaggtgctaaacttgcacctcatgtccactcaataacaagtattgggacgtagagcacagcctcactcagctctgaaaggtaatacagcctgtgaggaagtgagccagcagtggcctttgcaattgtggatcttaagctctgcactcagcagatttcaggtgtaaccatttgttaactgtactgaaggtgtgtcctcaagaagaaagtgttcaaattaaaaaagctgctgccaagta

SEQ ID NO: 2017 - DNA, 240 bp, Homo Sapiens
cgtgcttgttcccgggctcagacagttggcaagaaaaccccgaggagccctgttccaaagcctcctggaccgtccaagaaggagctacatcagaggttttggtagatgctgctgtagacctcatatccgatgaatgggaagctgctaatgccatacccagcagagagaaggaagcaggatgcagccccgcttgaggccgccagcgtgccttctgcagactgtgagcagagcaaaaagaag

SEQ ID NO: 2018 - DNA, 515 bp, Homo Sapiens
cggccgcggggacagcctggcgtgggaggcggctgcgggccccacctggcgcagcctccgctgaccacgcgggggaacccggactcgggcccgacgcgctcccaaagagtccccgccggcgctgacgcggaagcgccacagctcaccacgtccctccgcgggccgagacgactgcggcggcggctcacggcgtcctccgcgctgtgtggctaggcgggaggcgcgcgggcggaggcagttgacaggaggaaccgcccggcagcagctgccgccgccaccaccgaaggagccggaaccggagcgggcaggacctgaggcttccctcgccggggcaacggctgccgccgcaacccgggtcccaccagcgccgctccacctgcaacggtccctcaggctttaggagaggggcggaggaaaatgggggtctccccccaccttgggccttttcggtggtagttgttgtttcaggaaactttattaagtcagcctctctttttctctgtcgccccctcctc

SEQ ID NO: 2019 - DNA, 548 bp, Homo Sapiens
aggggaaattatatttattgttgtttactgaatcctggtgtgaaagcatatcagatatgtatgaactgctactgctgtacttccgatttacggacatcattttattgctatttgtagacgtgataacatgaacatgagtacctatttatgtgggccttcagtggatgggcagtgccactcaggtctctggggtttccctctctaattttaagtaaattgacatataactactatgcttataaaaatgaagtaaggaaaacaagtagtcctgtttgccactaaaaacattttcaaaggaaaaataaaatgaaagtactttttactttttatgatactcagaaattaggatgaagaacttttaaaattgctgaagatcaaagaggttatctctgccagtcacaagtgtggctggtgtcattctgggtctgactggagccctcctggactgtttctttaatttcaaaagccctgcagacatagtacctggtcagaactatgcctcggtttatttatcattttgaaataaaatcaaaatttcaacctgtaaa

SEQ ID NO: 2020 - DNA, 206 bp, Homo Sapiens
cggctctccggggcgctgggcggcgcggcgctagctgctgggctggtgtccccctgcgctccctgcgcgcgtcgctggctgcacttcacccaagccggagtgcgggaagctccccgggaatgggagggcgccagcggcctccgcggctgctcccgtatattattgtgattcgggctatttcctgtttagaggtttgagagaagggg

SEQ ID NO: 2021 - DNA, 559 bp, Homo Sapiens
ggcacagcaggaggggaggtaaaagaaggtgcacctccacccccaaccctgcctccagatctgcctccccctgagtctcccccaaagatgcagccagaacccgaacccgaacccgggctacttttggaagtggaggagccagggacggaggaggagcgtggggctgacacagctcccaccctggcccctgaagcgctcccctcccagggagaggtggagagggaaggggaaagccctgcggcagggccccctccccaggagcttgttgaagaagagccctctgctcccccaaccctgttggaagaggagactgaggatgggagtgacaaggtgcagcccccaccagagacacctgcagaagaagagatggagacagagacagaggccgaagctctccaggaaaaggagcaggatgacacagctgccatgctggccgacttcatcgattgtccccctgatgatgagaagccaccacctcccacagagcctgactcctagccatcttctgcaccccactctttgtttccaataaagttatgtccttagatagcgaaaaaaa

SEQ ID NO: 2022 - DNA, 846 bp, Homo Sapiens
  misc_feature (594)..(594): n is a, c, g, or t
  misc_feature (802)..(802): n is a, c, g, or t
  misc_feature (833)..(833): n is a, c, g, or t
ggggagtttgaagcaaacaggcagcgcgcgacaatggcggtcgctcgtgcagctttggggccattggtgacgggtctgtacgacgtgcaggctttcaagtttggggacttcgtgctgaagagcgggctttcctcccccatctacatcgatctgcggggcatcgtgtctcgaccgcgtcttctgagtcaggttgcagatattttattccaaactgcccaaaatgcaggcatcagttttgacaccgtgtgtggagtgccttatacagctttgccattggctacagttatctgttcaaccaatcaaattccaatgcttattacaaggaaagaaacaaaggattatggaactaagcgtcttgtagaaggaactattaatccaggagaaacctgtttaatcattgaagatgttgtcaccagtggatctagtgttttggaaactgttgaggttcttcagaaggagggcttgaaggtcactgatgccatagtgctgttggacagagagcagggaggcaaggacaagttgcaggcgcacgggatccgcctccactcagtgtgtacattgtccaaaatgctggagattctcgagcagcagaanaaaagtgatgctgagacagttgggagagtgaagaagtttattcaggagaatgtcttttgtggcagcgaatcataatgcttctcccctttctataaaagagcaccccaagaaactcagctttcggtgcacgtggcagagctgccccaggatccacccagttgcatcggaaccttctcaagcttatgccaaagaagggaaccaaatctgnggcctatccgctgatggtttccctgggccanaaaagctggttgc

SEQ ID NO: 2023 - DNA, 392 bp, Homo Sapiens
gcggccgcttgccggcgttctggctcctgtggcctcaccaggaagcgtcagagtcccgacactggggaagctcggagcgccgcctccgctgccgccgcctcctgcctggatctgggtccccgagccccctcccctggcccagcccgactccctcctccttcccgaaccatccggctcgggctccttccctggcgatggctggccgctgagccatggctcagtacggccaccccagtccgctcggcatggctgcgagagaggagctgtacagcaaagtcaccccccggaggaaccgccaacagcgccccggcaccatcaagcatggatcggcgctggacgtgctcctctccatggggttccccagagcccgcgcacaaaaagccttggcatcc

SEQ ID NO: 2024 - DNA, 965 bp, Homo Sapiens
gtctccattacctatgtaaatgaacactttcattaacttgggatatactgatattacatggccgtgtgcatacctatggaatgtgcatacctacaccacagaacaaaccttgacaatgtttcctagtgccaacacatactttctagccccaactgctggaaaggaaataaaaacttaatatgaaaactacttttcctttttataaataaagtttttaagtggaaaaacaaagccaacactcctcgttgcaacatggactaagctctaaaaggttgagtcaagaatctcttcagttgttccccaatgtaacaaagcacataagctttctctattcaggaagtctgatcatctccagtgttttgtcttaaaaactgctttccaaaatatgaagtagccatgctggttaaatgctttctgctgcgcaccttacacctgatgtaaccatacaggttggcaccttgtagcaccacacccatgataaccaccgccaaccactttactctgaaggagaagagtgcactaaaggcaaatatcacccacagtactggacaggcaataagtcccaaccaaaagattcttgattcagcctctgacacagttttattctcttgagaggactcctttctagattcaaacacccaatggctctttccatcttcatcaatgtgattccaccaacgtaggccaaccattagtctacctgtgacattcttcactgcccaaaagtcacacgacaacacaagataattgtcaccatacaggtaataaagctgctgctgagcaactcacagagaagatagacgatgattgcactgactcgaaagaataagtggaaaaacgatgctactggatgtctgattttggcttttcttggtctattagtcgtctcctcttccgcatcaaacagtgaaacatcttcagtgtcatcattactatcctgctgcaacatggcggccctacgccag

SEQ ID NO: 2025 - DNA, 421 bp, Homo Sapiens
  misc_feature (367)..(367): n is a, c, g, or t
acttccaagtgtgcccagcggaaagcctctctggggaggaactgtgcccatcctcagcgcctggagcccccaaggctcagcctgccacccctgggctaggcagcaggatccgggccatccaggagtctgttgggaagaagcactgcctgctggagctgggtgctcggggtgtgcgggagctggtgcagaacgagatctaccccatcgtcatccacgtggaggtgactgagaagaatgtccgggaagtcaggggtctgctgggccggccgggctggcgggactcagagctgctgcgcacgtgccgtggctcagagcaggtgctctgggggctgccctgcttcctgggtgcaggtgcccgcccatgagntggggacacgccagaggagctggccaagtgtggtgctgcggccgcattcctgca

SEQ ID NO: 2026 - DNA, 790 bp, Homo Sapiens
  misc_feature (726)..(726): n is a, c, g, or t
aatacacccgtttgcttctcatttgaatctttcgtatatttttgtttcacagttaatcttccctccccaagtttgctattcaaatcaactgcctgaatgacatttctagtagtctgatgtatttttctgaggaatagtttgtgattccaatgcaggtgtcttcattaccattacctctacactgcagaagaagcaaaactcctttattagaattactgcacatgtgtatggggaaaatagttctgaaaggctagaatgatacaagtgagcaaaagttggtcagcttggctatggagtggtggcaataatctctaaacattccaaaagaccatgagctgaacctaaactcccttggaatctgaacaaaggaatataaaattgccatttgaaaactgaccagctaatctggacctcagagatagatcagccagtggcccaaagccatttcaagtacagaaattatagagactacagctaaataaatttgaacattaaatataattttaccactttttgtctttataagcatatttgtaaactcagaactgagcagaagtgactttactttctcaagtttgatactgagttgactgttcccttatccctcacccttccccttccctttcctaaggcaatagtgcacaacttaggttatttttgcttccgaatttgaatgaaaaacttaatgccatggatttttttcttttgcaagacacctggtttatncatcttgtttaaaggtaaatgtcccccttagggcttttgaaataaatttccttttgtaattttg

SEQ ID NO: 2027 - DNA, 925 bp, Homo Sapiens
  misc_feature (248)..(273): n is a, c, g, or t
  misc_feature (701)..(710): n is a, c, g, or t
ggggggtcacggcggagctggctctcacgtggaggcggggaaatttcgcccaccggaatgatcaccaagacacacaaagtagaccttgggctcccagagaagaaaaagaagaagaaagtggtcaaagaaccagagactcgatactcagttttaaacaatgatgattactttgctgatgtttctcctttaagagctacatccccctctaagagtgtggcccatgggcaggcacctgagatgcctctagnnnnnnnnnnnnnnnnnnnnnnnnnnggtgtcagcaccctttgcgaggagcatgtagaacctgagaccacgctgcctgctagacggacagagaagtcacccagcctcaggaagcaggtgtttggccacttggagttcctcagtggggaaaagaaaaataagaagtcacctctagccatgtcccatgcctctggggtgaaaacctccccagaccctagacagggtgaggaggaaaccagagttggcaagaagctcaaaaaacacaagaaggaaacaaaagggggcccaggaccccacagccttctcggtccaggacccttggttctgtgaggccagggaggccagggatgttggggacacttgctcagtggggaagaaggatgaggaacaggcagccttggggcagaaacggaagcggaagagccccagagaacacaatgggaaggtgaagaagnnnnnnnnnntccaccaggagggagatgccctcccaggccactccaagccctccaggtccatggagagcagccctaggaaaggaagtaaaaagaagccagtcaaagttgaggctccggaatacatccccataagtgatgaccctaaggcctccgcaaagaaaaagatgaagtccaaaaagaaggtagagcagccagtcatcgaggagccagctctgaaaaggaag

SEQ ID NO: 2028 - DNA, 541 bp, Homo Sapiens
cctgcctcactatgagatttcaggatgtttggggacacaggtctttgggctcatttctttttctgaaggattcatataattgcctagtttttggcttagaggttggtccttccctggtttaatgatgcttttgttcagactgtcctctaggacttgaatttgaagcagaaacagaacagcacttgatcctcagttatactgcaaagcagggcctcagaaagggtaactccaattactgactttcacctaaggtgaaaaagcatccggcttctttccccttggcatctttggatcttctgagaatggtggctgaaggcagagggcctggggacaagccagcctggacatgcctcctctgctgcttattaattccttacctgaactactcttgggacctagattccttcatgggcaaaatggtcacataatagcaccatcacaagacttgacaggaatctagagcaagaggataaagtccaaagcatctagctcaggtcctcacatctgaaaggaatcaaatacaggatagctcattccatag

SEQ ID NO: 2029 - DNA, 629 bp, Homo Sapiens
gcatgaggcaaaaatggctgctcaggagaggcaggtccaagctcagatttgcaccttgtgaggccttgggcaaggtcagctacccctcaaaacttggggtccccatttatggaaggtgggtgaatatgggctcctagcaggtgattattaaacacaatcgttcatgtagtgcgttcagcatagcctgtcacatagcagatgcaaaataaatgataacacatattacttgtgatatccgaaaacttagcagccaggtaaaaacgaaagaggaagggagtcctggaaacagccaacttatattggttatgagaaaaggttggttgtggtatttggcttttaataacaaccatcggagggggtgtggagaccataagttttgcatagacaaaagcaaacatgagaaggatgctgtcctagcaaagcttctagggaccatgaggccatgaggctaccaggccagaaataccgaaatctaactgccgctgcttgaccatggggaatatctcaccccagtgcagcactggcgccttcccgcagtatgttcctggtcatcgaaccactcaatggattacagtcatctgttcacctctgtgaataactgaaaagggtaaaaaccggaactgtttcct

SEQ ID NO: 2030 - DNA, 789 bp, Homo Sapiens
atcttgaaccttctggatgagctgagattggctaatgataccctcatctacttcacatcggaccagggagcacatgtagaagaagtgtcttccaaaggagaaattcatggcggaagtaatgggatctataaaggaggaaaagcaaacaactgggaaggaggtatccgggttccaggcatccttcgttggcccagggtgatacaggctggccagaagattgatgagcccactagcaacatggacatatttcctacagtagccaagctggctggagctcccttgcctgaggacaggatcattgatggacgttgatctgatgcccctgcttgaaggaaaaagccaacgctccgatcatgagtttctcttccattactgcaacgcctacttaaatgctgtgcgctggcaccctcagaacagcacatcccatctggaaggcctttttcttcacccccaacttcaaccccgtggggttccaacggggtgctttgccacacacgtggtgcttctgtttcgggagttatgtcacccatcacgacccacctttactctttgataattccaaagatcccagagagagaaaacccactaactccagcatccgaggccccggttttatgaaatcctcaaagtcatgcagggaagctgcggacaagaccacacccaggacctgccagaggtgcccgatcagttttcatggaacaactttctatggaagcctggcttcgctgtgctgtccttcaccggccttctgccgtgtgatagagaaacaggtagagatgagcgtagcgg

SEQ ID NO: 2031 - DNA, 423 bp, Homo Sapiens
ggaggaacttctgggtgatgggaatgttctgtcttgtggcaggggtttcacaggtatatacatctgtgaaaacctaaattgtatactttaataaggatatcgtttattgtatacaaaccaggccttagtaaagttgatttttcaaaactttcctactgatttgttttgagaagtaaatgagagaaaatgtagctggcatatggtaagtgtttggtagtaaatgatgatgatggtgatgttggtggacactggggcatgacagcagagtgtcctggaagtcagaggaccagagtttctctctttgagtcctgttattttatataataatctctgaacttcactttcttaacatgacaaaggacaggtctggacgagatgtcctagagaagcttaaaggtgcaacaatttgatcctaaagtgatg

SEQ ID NO: 2032 - DNA, 496 bp, Homo Sapiens
tcggacgtgttatccgcccacaaggatgactgtgagcggatgaacatcacagtgaaaaatgaccctggccatcacattattgaggacatgtggcttggagtgactgtggccagccagggccctgcaggcagagttctggtctgtgcccaccgctacacccaggtgctgtggtcagggtcagaagaccagcggcgcatggtgggcaagtgctacgtgcgaggcaatgacctagagctggactccagtgatgactggcagacctaccacaacgagatgtgcaatagcaacacagactacctggagacgggcatgtgccagctgggcaccagcggtggcttcacccagaacactgtgtacttcggcgcccccggtgcctacaactgaaaaggtggggaccatggggccatgggggaagaaaggaagagcagagaccacccacccctagttagccacggggacagctggcctagaccatccacactagaagcaggacctc

SEQ ID NO: 2033 - DNA, 324 bp, Homo Sapiens
agacatatttctgtaagcgtacacatccttactttgtgcagacttttctttcatgctcctgtttcttttccttttgcttgtagccagactttttggactcagtgtctatttctcactagtgatgtggattctgcagttcgttttctaccctagctttatactaaagttgttcttttcatggttgtcactgatttcctacctgttttcattggttgtttgcttagttttcattttcctggagctttctacagtgatttaagaccattgatttcccttttctttgtaataacctctcattagctccatgccccaatggggatcctt

SEQ ID NO: 2034 - DNA, 333 bp, Homo Sapiens
gcagcaatacacaaagcataaataacaaaaatagaaaaacacacaaacaaagggttgcaatgggcaggtgtcaaattagggggaaaagcgtttacttaccaggcttgcctgtttgttttgcaagcaaagggcaagacgcaacagaaaatggaagcaaaacagataatcagggcagttgttagaaaagcagaaaaaaatcaattgcaacaacctggaatgcagaaagcacagaagtctctctctcttctgaattctaaatagtcactatgccagcttaacaaaacatatctctccagtaacatttgatgcaaatgaataacaacggcaggactg

SEQ ID NO: 2035 - DNA, 410 bp, Homo Sapiens
accgccccagggttactgtgtgtcttcaggaactctaagttgtacacagccaggtaataaacggctgcacagcaggctatggccactcctgtagagacaacccaggctaccatgtaggcagagaagcgggtcagcagctgtttgaacgtcaacttggaattctcctgacggagctctgacaggttctcccttatctcaatgctaagattcttctgttttagcttcacagctctttcatgagtgacagtgaagtcccagcaaaagatcagcttggtgatccctccggagtagatgtggggattaatgaagttgttccggaaatacttggccatgctgaacagcaaactgaagaagcaggtgctcaagcatgctccgattgtgaagatgtagccagctgcatttgtaggatg

SEQ ID NO: 2036 - DNA, 287 bp, Homo Sapiens
aggatccccgatcatataagcgtgcagaaaagagcctggaagggtgaacacacaagtcaatgcggtggttctcccagcagacaggagagactgggtggacagggagttgagtgaaagggcacgttggctttgtaacatttatacttttatgttactgaaaatgtttatcacaaggatgtattcatgtgtttcatgtgctaaagacaactcaaataagaaaaattaaaagaataaggtagatcaccatgctagaacatggaaaaacactttcaaggttctggcaagtg

SEQ ID NO: 2037 - DNA, 1310 bp, Homo Sapiens
gggccacattcgcttcctgctttcggtgtgtctgttgtgtcttgttgcgggcaccgcagtcgccgtgaagatggcgtctaccagccgtttggatgctcttccaagagtcacatgtccaaaccatccagatgcgattttagtggaggactacagagccggtgatatgatctgtcctgaatgtggcttggttgtaggtgaccgggttattgatgtgggatctgaatggcgaactttcagcaatgacaaagcaacaaaagatccatctcgagttggagattctcagaatcctcttctgagtgatggagatttgtctaccatgattggcaagggcacaggagctgcaagttttgacgaatttggcaattctaagtaccagaatcggagaacaatgagcagttctgatcgggcaatgatgaatgcattcaaagaaatcactaccatggcagacagaatcaatctacctcgaaatatagttgatcgaacaaataatttattcaagcaagtatatgaacagaagagcctgaagggaagagctaatgatgctatagcttctgcttgtctctatattgcctgtagacaagaaggggttcctaggacatttaaagaaatatgtgccgtatcacgaatttctaagaacagaaattggtcggtgttttaaacttattttgaaagcgctagaaaccagtgtggatttgattacaactggggacttcatgtccaggttctgttccaacctttgtcttcctaaacaagtacagatggcagctacacatatagccccgtaaagctggggaaattggacttggttcctgggagaagccccatctctgtggcagcggcagctatttacatggcctcacaggcatcagctgaaaagaggacccaaaaagaaattggagatattgctggtgttgctgatgttacaatcagacagtcctatagactgatctatcctcgagccccagatctgtttcctacagacttcaaatttgacaccccagtggacaaactaccacagctataaattgaggcagctaacgtcaaattcttgaatacaaaactttgcctgttgtacatagcctatacaaaatgctgggttgagcctttcatgaggaaaaacaaaagacatggtacgcattccagggctgaatactattgcttggcattctgtatgtatatactagtgaaacatatttaatgatttaaatttcttatcaaatttcttttgtagcaatctaggaaactgtattttggaagatatttgaaattatgtaattcttgaataaaacatttttcaaaactcaaaaaaa

SEQ ID NO: 2038 - DNA, 806 bp, Homo Sapiens
  misc_feature (660)..(660): n is a, c, g, or t
  misc_feature (758)..(758): n is a, c, g, or t
ggggagcactggaggccacccagtcatgggggacaccttcatccgtcacatcgccctgctgggctttgagaagcgcttcgtacccagccagcactatgtgtacatgttcctggtgaaatggcaggacctgtcggagaaggtggtctaccggcgcttcaccgagatctacgagttccataaaaccttaaaagaaatgttccctattgaggcaggggcgatcaatccagagaacaggatcatcccccacctcccagctcccaagtggtttgacgggcagcgggccgccgagaaccgccagggcacacttaccgagtactgcagcacgctcatgagcctgcccaccaagatctcccgctgtccccacctcctcgacttcttcaaggtgcgccctgatgacctcaagctccccacggacaaccagacaaaaaagccagagacatacttgatgcccaaagatggcaagagtaccgcgacagacatcaccggccccatcatcctgcagacgtaccgcgccattgccaactacgagaagacctcgggctccgagatggctctgtccacgggggacgtggtggaggtcgtagagaaaagcgagagcggttggggggttctgtcagatgaaagcaaagcgaagctggatcccagcgtccttcctcgagnccctggacagtcctgacgagacggaagaccctgagcccaactatgcaagtgagccctacgtccccatcaagggcctacactgctgtgggaaggggacnaagggctccctgctccagggtgaaacctcgttgaagtccattcccaag

SEQ ID NO: 2039 - DNA, 833 bp, Homo Sapiens
ggtatgtacagtcttctcaggatgagcagtaaaacctttgaacaaaggtctgtgtggttgtcttcacgggcaatcaggaagggagagagctggggaccatattctgcaatgcagccaaatccgaggaagagaaactgaagggagaagtagatggcaatggttatgataaaaagggataaaactaaatcttcgggacttctttaatgctacgttaatgtttcactgctcgtctagaaactcctaaatccagctttctatcatctgccccacatgggtcccattgagtacattctgtgatttctaattccagcctctccattcttttctcattatggcctcccccgccccccaacttggtgtaatttacttctgtattcagcagcctggatagcatatcattccatcaccccattttctggccaccatgggccatctttttgtatcattccacttatgctgtcttttcaattccttcattcaaactgctagagaaaaacagttgtgtaatgaatgccactaaatattcaaggcctccaacctcagccaagtcctcacaccaacacgcagtcacaccaacacacacctttatggggttctgggtccatttccttctctaattaccatggcagttattttacacctctacggctgtccttaatcccataccccaccctcatcaggtgaccctgtttccttttttaagaaaaattaagcctcttaaacattggtttccccagtaaatacttttaaaacttcctaccactacctacaaaggagatggttctatcctaatctaccgaggaggaaaatttgaaattcccacgtagcagaac

SEQ ID NO: 2040 - DNA, 905 bp, Homo Sapiens
  misc_feature (126)..(166): n is a, c, g, or t
aaagaaggatgttaatttttgactatatattttaaaaaaaatctaagcagggggacatgcaaaaacaatcatcatccacttggatgtcattttatagattaacactgtgtgcttttgtatggaaannnnnnnnnnnnnnnnnnnnnnnnnnnnnnnnnnnnnnnnntcatttgcacttacgtgaaacacaaactttgctctacaaaatttcgtgtttcttagtgattttaaaatgcatgtattgcatgtaaaggaaaaccattacaattaatgtttatcacacctttatcttggtctttgttgatttgggttttgttggggtttttgttactgtttttaaattacagtaggcttctatatatcctggatttctgaactggtcttgttgacaaggattcccaagaaatggatcttttcactggctgactctcccatatctgcaagagattctgcaggaactgggtgtgcacacggtgttgtagccagttcaggtactgaatatttaggatttggtgaagttcactgtattgctatatttttgtagataaataaaactcaataaattgttaatcattctctttttgctgtatagaattgcttatatcactctttctttcatgacattggttaacatttaaatgttcctcctgaacttgtgttgtctgtgaccgcttatagagttttattgttattggtgtttacctgaatacctatgcgtacacacacacatatttccttaatacttctgaactcattatcttttagaataataatactactacactttaccagcaattaacttctccctacccaaaatgtttttcttcctgtctgaaaatggaactaatttgtcttattcgtgcttatatctgtattaaatgcaataaagttagtttttgaaatgt

SEQ ID NO: 2041 - DNA, 1546 bp, Homo Sapiens
  misc_feature (53)..(53): n is a, c, g, or t
tggcttccttctacctgtgcggccctcaacgtctccttggtgcgggacccgtntcactttcggctcccggagtctccctccactgctcagacctctggacctgacaggagacgcctacttggctctgacgcggcgccccagcccggctgtgtccccggcgccccggaccaccctccctgccggctttgggtgcgttgtggggtcccgaggattcgcgagatttgttgaaagacattcaagattacgaagtttagatgaccaaaatggatatccgaggtgctgtggatgctgctgtccccaccaatattattgctgccaaggctgcagaagttcgtgcaaacaaagtcaactggcaatcctatcttcagggacagatgatttctgctgaagattgtgagtttattcagaggtttgaaatgaaacggaagccctgaagagaagcaagagatgcttcaaactgaaggcagccagtgtgctaaaacatttataaatctgatgactcatatctgcaaagaacagaccgttcagtatatactaactatggtggatgatatgctgcaggaaaatcatcagcgtgttagcattttctttgactatgcaagatgtagcaagaacactgcgtggccctactttctgccaatgttgaatcgccaggatcccttcactgttcatatggcagcaagaattattgccaagttagcagcttggggaaaagaactgatggaaggcagtgacttaaattactatttcaattggataaaaactcagctgagttcacagaaactgcgtggtagcggtgttgctgttgaaacaggaacagtctcttcaagtgatagttcgcagtatgtgcagtgcgtggccgggtgtttgcacctgatgctccgggtcaatgagtaccgctttgcttgggtggaagcagatggggtaaattgcataatgggagtgttgagtaacaaaggggggcttttcagctccagtatcaaatgattttttcaatatggctcctggcattcagacctcaaatgtgtgaaaacctgcggcgctataatatcattccagttctgtctgatatccttcaggagtctgtcaaagagaaagtaacaagaatcattcttgcagcatttcgtaactttttagaaaaatcaactgaaagagaaactcgccaagaatatgccctggctatgattcagtgcaaagttctgaaacagttggagaacttggaacagcagaagtacgatgatgaagaatatcagcgaagatatcaaatttcttttggaaaaaacttggagagagggtccaggaccttagttcatttgatgaatacagttcagaacttaaatctggaagggttggaatggaagtcctgtgcacaaatctgaggaaattttggaaaaaagaatgcctgtgaggttaaatgaaaaaaattatgaaactcctgaaaatctttgacaaactttttggaagggtcagatgaatccccaagccttaacctgttgcctgctcacccaggtttgaaaaatatggtgcgggcatttatcaccgaggg

SEQ ID NO: 2042 - DNA, 1301 bp, Homo Sapiens
  misc_feature (1120)..(1120): n is a, c, g, or t
cggggagtggcgttggctgctagagcgatgccgggccggagttgcgtcgccttagtcctcctggctgccgccgtcagctgtgccgtcgcgcagcacgcgccgccgtggacagaggactgcagaaaatcaacctatcctccttcaggaccaacgtacagaggtgcagttccatggtacaccataaatcttgacttaccaccctacaaaagatggcatgaattgatgcttgacaaggcaccagtgctaaaggttatagtgaattctctgaagaatatgataaatacattcgtgccaagtggaaaaattatgcaggtggtggatgaaaaattgcctggcctacttggcaactttcctggcccttttgaagaggaaatgaagggtattgccgctgttactgaaatacctttaggagagattatttcattcaatattttttatgaattatttaccatttgtacttcaatagtagcagaagacaaaaaaggtcatctaatacatgggagaaacatggattttggagtatttcttgggtggaacataaataatgatacctgggtcataactgagcaactaaaacctttaacagtgaattcggatttccaaagaaacaacaaaactgtcttcaaggcttcaagctttgctggctatgtgggcatgttaacaggattcaaaccaggactgttcagtcttacactgaatgaacgtttcagtataaatggtggttatctgggtattctagaatggattctgggaaagaaagatgccatgtggatagggttcctcactagaacagttctggaaaatagcacaagttatgaagaagccaagaatttattgaccaagaccaagatattggccccagcctactttatcctgggaggcaaccagtctggggaaggttgtgtgattacacgagacagaaaggaatcattggatgtatatgaactcgatgctaagcagggtagatggtatgtggtacaaacaaattatgaccgttggaaacatcccttcttccttgatgatcgcagaacgcctgcaaagatgtgtctgaaccgcaccagccaagagaatatctcatttgaaaccatgtatgatgtccctgtcacaaaacctgtccttncacagctgaccgtatacccaaccttgatagatggtaccaaaaggtcaattcgaaactttactgcggggactgccctgaccccttgtaataggttggggagcacacgtctggccctacagaatgcggcctctgaacacatgaaaaccccctcttcaggtgaccgaaccactgcaactgtctg

SEQ ID NO: 2043 - DNA, 1144 bp, Homo Sapiens
tgatatcgggacgggacagtaacatccccgggtccgactacatcaatgccaactacatcaagaaccagctgctaggccctgatgagaacgctaatgacctacatcgccagccagggctgtctggaggccacggtcaatgacttctggcggatggcgtggcaggagaacagccgtgtcatcgtcatgaccacccgagaggtggagaaaggccggaacaaatgcgtcccatactggcccgaggtgggcatgcagcgtgcttatgggccctactctgtgaccaactgcggggagcatgacacaaccgaatacaaactccgtaccttacaggtctccccgctggacaatggagacctgattcgggagatctggcattaccagtacctgagctggcccgaccatggggtccccagtgagcctgggggtgtcctcagcttcctggaccagatcaaccagcggcaggaaagtctgcctcacgcagggcccatcatcgtgcactgcagcgccggcatcggccgcacaggcaccatcattgtcatcgacatgctcatggagaacatctccaccaagggcctggactgtgacattgacatccagaagaccatccagatggtgcgggcgcagcgctcgggcatggtgcagacggaggcgcagtacaagttcatctacgtggccatcgcccagttcattgaaaccactaagaagaagctggaggtcctgcagtcgcagaagggccaggagtcggagtacgggaacatcacctatcccccagccatgaagaatgcccatgccaaggcctcccgcacctcgtccaaacacaaggaggatgtgtatgagaacctgcacactaagaacaagagggaggagaaagtgaagaagcagcggtcagcagacaaggagaagagcaagggttccctcaagaggaagtgagcggtgctgtcctcaggtggccatgcctcagccctgaccctgtggaagcatttcgcgatggacagactcacaacctgaacctaggagtgccccattcttttgtaatttaaatggctgcatcccccccacctctccctgaccctgtatatagcccagccaggccccaggcagggccaacccttctcctcttgtaaataaagccctgggatcactgtga

SEQ ID NO: 2044 - DNA, 115 bp, Homo Sapiens
ggtagtgtagagaaggaaaaagtaataattttctctgtccttcataactcttatctgaggctccctgtaacaaaagacaaattaacagaagaaaaacagaagtgtattaatatgt

SEQ ID NO: 2045 - DNA, 1035 bp, Homo Sapiens
  misc_feature (961)..(961): n is a, c, g, or t
cttctcacacttcagatttcaacccgaattctggttcagaccaaagagtagttaatggagggcctccaaggatgtccccaaaggcccagcgacatcctcgaaatcacagagtttctgctgggaggggttccatatccagtggcctagaatttgtatcccacaacccacccagtgaagcagctactcctccagtagcaaggaccagtccctcggggggaacgtggtcatcagtggtcagtggggttccaagattatcccctaaaactcatagacccaggtctcccagacagaacagtattggaaatacccccagtgggccagttcttgcttctccccaagctggtattattccaactgaagctgttgccatgcctattccagctgcatctcctacgcctgctagtcctgcatcgaacagagctgttaccccttctagtgaggctaaagattccaggcttcaagatcagaggcagaactctcctgcagggaataaagaaaatattaaacccaatgaaacatcacctagcttctcaaaagctgaaaacaaaggtatatcaccagttgtttctgaacatagaaaacagattgatgatttaaagaaatttaagaatgattttaggttacagccaagttctacttctgaatctatggatcaactactaaacaaaaattagagagggagaaaaatcaagagatttgatcaaagacaaaattgaaccaagtgctaaggattctttcattgaaaatagcagcagcaactgtaccagtggcagcagcaagccgaatagccccagcatttccccttcaatacttagtaacacggagcacaagaggggatctgaggtcacttcccaaggggttcagacttccagcccagcatgtaaacaagagaaagacgataaggaagagaagaaagacgcagctgagcaagttaggatatcaacattgaatcccaatgcanaggagttcaacccacgttccttctctcagccaaagccttctactaccccaacttcacctcggcctacactagtg

SEQ ID NO: 2046 - DNA, 545 bp, Homo Sapiens
ttagaaaacagatgaacagaatgtcaatgtgcattcatgcaaaaaaacatttaatctgcatctgttttagaaaagggggaaatgaagcaacttgtctaaaaatactgctttacaaagcatttcagcctttccccctcagttttgcattgattatttgacaagtctgtagagcctaatagtttccatcaaaggcctagatctcttatttagcatttttttcagctcttctctcagaagttcagctgttgaaacgaaaactgtactttgtaccctcacatacaaagggatcaaatttgacctggtgttattttagccccaaatttatgacattacacaatattaaaatgtaaatgtttctttacccaaactacttctagatattctagtatttgcttctggtggaattaaatgacggtaaaattggctaattatttgaatgaatgaatggatggatgttttgcatgctcactttctaggtcctttgtctagaaaggaaatttgcctcgttgaattagtgaatatttcctgtcgttgtacccttctgg

SEQ ID NO: 2047 - DNA, 951 bp, Homo Sapiens
acttcatcttgacaattgtcacatctggtagactatcaagaaatgctttgaggtcgatgccattcagaactatccgattgtcataaatgtgcccattggacgttaaaaatcgatgactgctgggggccgcaggggagggaacatattagcatgagcagccaatggaaaaaagtgtggggcatattaagccaatttctcggaatactgctcagcaacttcagctggcgaagtttcctgatcagtgataatataatccatgaaaagcgcaccactcgtcccagggtatcccagccacattgcctgaataggagctggcctgagagcaaaaagctcatttcgagcgcccttagtatagccattcatatttacaaggatatgaattccatcctgatggatgcgatcagctgctttttccattgcatggaatctgagaaagatcaatgaaatgattggcttctgccatcaccttcactcggaagtttgtgccatcgtctgggctcaggccataacagaacacctcaaatttatcaggattgtgcatgccttgaaatagacctgaataaggtgagaagtaaggatgattccccaaagtcggaactcacaatattcctacacgcaagccgaccatcacctgagcttcaagtcttttggatgtttcatatgttgttttatgaagaacatgaatctgatctaagcacaggttgccgtgcctctcagcaatagccttcctgaagccatgagaaagaggatatagcatactatgatgagggatgcacagaaggcaacctattcttctctaactggtcagccacaatactgaccaacttcttcattcgctcatcatagtctgtccaatcacagacaatctgcaggcaatgagccaagttacaataagcatcaggaaaatcaggcttaagtttcagaccgtgcggtaagaagctatcgcttctg

SEQ ID NO: 2048 - DNA, 534 bp, Homo Sapiens
gactcctagctcggtactgagagatcccctataatttccccaaagcgtaaccatgtgtgaataaattttgagctagtagggttgcagccacgagtaagtcttcccttgttattgtgtagccagaatgccgcaaaacttccatgcctaagcgaactgttgagagtacgtttcgatttctgactgtgttagcctggaagtgcttgtcccaaccttgtttctgagcatgaacgcccgcaagccaacatgttagttgaagcatcagggcgattagcagcatgatatcaaaacgctctgagctgctcgttcggctatggcgtaggcctagtccgtaggcaggacttttcaagtctcggaaggtttcttcaatctgcattcgcttcgaatagatattaacaagttgtttgggtgttcgaatttcaacaggtaagttagttgctagaacccatggctcctttgccgacgctgagtagattttaggtgacgggtggtgacaatgagtccgtgtcgagcgctgattttttcggcctttagagc

SEQ ID NO: 2049 - DNA, 917 bp, Homo Sapiens
  misc_feature (239)..(259): n is a, c, g, or t
cgacatgtcgtggctcaaagatctaattcccatttggcaaatccaaactcagctacatggttttcgagtaccctctgtacacagtcaatgcaatttatcacttctccctaacctctactttcctctctaagcatgtgagtctctcagtgcatacctggctcattcctatctttgtctttgcttgaatcatgtcttctaaccctagtgccctgcctgctttcctctctatccagtgtacnnnnnnnnnnnnnnnnnnnnnacaaggaccaactcaagtccttgaggtggtataaataaaacaacttgatgagaataagaaaactacactaaagaacactgtccatatagccctaaatcgaacacaagcaatagggagaaacaaagccattataaggtgaagtggaactaaaaccagcagccactagcatcaatatctatactctcagtggagatttagcttaaaaagataaaaaataaacacaaaacacctcattaggctgaaataaatattcttttcaaagaaaggtcacagaattttaaagaaggcagacagcatgagtccaatcttcccattactctggcaaggaagcagaaatccagaaaagtttccatccagtgctctgcccactgtagtaaaatgttgacaggaggtactcgctctagttcctgaagaatgctactgatacaggctaatgcgtcagtggctatgattcttttaactatctctcagataagagggaaccaatggattgccactactttgtccttggggaacttccaggtacatcacctacgtcaggagttcccaaaaaatggttcccagaccagtagcatcagactcccccgagcgagaactgttcctgcgccacaccccctcctccctagttcaggtaagacatcccttgagaaaattccac

SEQ ID NO: 2050 - DNA, 941 bp, Homo Sapiens
gggggggtgatatcatggaagctgttatgcttaggaatttgtttaaaaagacgtcctgccctgtgccccagtacatttcaacaccacccagccacacagccgccttctggcccaacactcttaaagacacagtgcttgggaaatgtcctcatgcccctttcctgaggcaggtttgccactgtttccccaggcctggcagtcacagatggcagtcactgacctgctgtgatttgagagatggagagaaaaccttccactcttcttattctccctaatagcctcagtctctgccttcagttccacatttccctttggcgtaagctatgattgtcgtccaaggcccctcctagataggcaaggactcatgataccaagagtgtgatcaggggatagagatgagatgtctgggttggatgcgggagtggggtattttctaactaatggggtgcaaggggtacctgagcatgctctcaaaatgtgttataccctaaaaaatgtttttaaggtagtgtgttgatataacagttgttaagaccatgatgctagaggcaagatcgtgagatccatagagaaggtagttgaagggtagggccttttattcacatatatgctgccttctccaccaactgatgtgatatccttttatattcgtgactccagtgaacccacgcctctgaggatttacacccttgtatttgtactcctcttgagtctgggctggcctgtgactttaatcagtgcaatgcagaagtggttcagtgccagttctaagactacaaagagaaagaaaagttcaaccttccaatatcccagcagacatcaggccccagctgtgtcaccagcttcacgcccacgagtgaccacaacaaacccagcagaaccaaccagcgcatcccagccctggttgcagaatcatgagtaaataaaatggttgctgatct

SEQ ID NO: 2051 - DNA, 833 bp, Homo Sapiens
  misc_feature (815)..(815): n is a, c, g, or t
gggacacaggccttgatgatgatattgaaaatgaagctgacatctccatgtatggcaaagaggagctcctacaagttgtggaagccatgaagacactgcttttgaaggaacgacaggaaaagctacagctggagatgcatctccgagatgaaatttgcaatgagatggtagaacagatgcaacagcgggaacagtggtgcagtgaacatttggacacccaaaaggaactattggaggaaatgtatgaagaaaaactaaatatcctcaaggagtcactgacaagtttttaccaagaagagattcaggagcgggatgaaaagattgaagagctagaagctctcttgcaggaagccagacaacagtcagtggcccatcagcaatcagggtctgaattggccctacggcggtcacaaaggttggcagcttctgcctccacccagcagcttcaggaggttaaagctaaattacagcagtgcaaagcagagctaaactctaccactgaagagttgcataagtatcagaaaatgttagaaccaccaccctcagccaagcccttcaccattgatgtggacaagaagttagaagagggccagaagaatataaggctgttgcggacagagcttcagaaacttggtgagtctctccaatcagcagagagagcttggttgcacagcactgggggcaggaaaaacttcgtcaagcccttgaccaccttgtgatgacatcctaaatcaaacaaggacccgactctgggctgaaactgccaaaccaccatgggtgctagtgaaaactgggacctttcggaagaaggcagncatgttattgctgtagca

SEQ ID NO: 2052 - DNA, 1665 bp, Homo Sapiens
ggtaccggtccggaattcccgggatcgggcgggcggcggcgcgtgaggcgcgcgatccccggtgtcttgggagcagtgccccggcccccgccgctcccgccgccgccatgtcgggccggtcggtccgggcggagacccgcagccgggccaaggacgacatcaagaaggtgatggcggccatcgagaaagtgcggaaatgggagaagaagtgggtgactgtgggtgacacgtccctgaggatatttaagtgggttcctgtgacagacagcaaggagaaagaaaagtcaaaatcgaacagttcagcagcccgagaacctaatggctttccttctgatgcctcagccaattcctctctccttcttgaattccaggacgaaaacagcaaccagagttccgtgtctgacgtctatcagcttaaggtggacagcagcaccaactcaagccccagcccccagcagagtgagtccctgagcccagcacacacctccgacttccgcacggatgactcccagcccccaacgctgggccaggagatcctggaggagccctccctgccctcctcggaagttgctgatgaacctcctaccctcaccaaggaagaaccagttccactagagacacaggtcgttgaggaagaggaagactcaggtgccccgcccctgaagcgcttctgtgtggaccaacccacagtgccgcagacggcgtcagaaagctagcaccatcccggccctccgcctcctggccctgcctctatttattgcattctggttctggccgcgccgcgttgctggggtaagggcaagcactggggtcaagagcctgcacacatgagccttccgggctggaaggctggcgtaggacttggggctgtagcatcatcttcctgaccctggcacctgtgtctacttgctcccgagaagaggagcgctcatgtcttttttgcaccccaagttggctggagcatcggccaccccaagattcatctgtgacctccaggcagcagtctctgctccagaatctctggacggagctgctggcagcttctgcgagaagagagagatgtggaaggcaccttctagaagagagcgtgcctcaggttacttgaacttgaacggagactgtagactcccggactttcccctaggactgggggccctgtaggctgctgttggaggactgggtagagacattggagggaagggaagggcttttctccacacaagggcagagagtccgtctagatttcttgctgtcctgccagctctgcccatgcctgaggtggtcctacctctcacgggcaccctagctgctgacagccctttgtggccgccgtccccatcccctgccctcagcacacacatctgcacacacgcagctttgttctcacctctacctgtcattccagcatccctgcctcttgtcacaaactgccccagcaagaatttgaggttctgacaacagtacccatcccccacagtaccccttcagctcagtttctagaaagctcccttttctttgaaatctgcatgttgaattgaactttgtgattttattttttgtttcaaaaaagtttaagaaaatggaaatgggcaacagtgagtgaagacatattttagcactgaatagaatatttttaaaattaaactatttgaaatatgaaaaaaa

SEQ ID NO: 2053 - DNA, 961 bp, Homo Sapiens
  misc_feature (644)..(653): n is a, c, g, or t
  misc_feature (698)..(698): n is a, c, g, or t
ggtactatcaacagaacctcatgaggaagtacctaatattcttcagcaaccattggcccttggttactttgtatcaactgccaaagcaggtccattacctgactggttctggtcagcatgtcctcaagcacaatatcagtgtcccctttttcttaaggcctctttgcacctccacgtgccttcagtgcaatctgacgagctgcttcacagtaaacactcccacccacttgactcaaatcagacttcagatgtcctcaggtttgttttggaacagtacaatgcactctcctggctaacctgtgaccctgcaacccaggacagacgctcatgtctcccaattcattttgtggtgctgaatcagttatataactttattatgaatatgctgtgatcttcatttgatggaactgtgcaagaaaagaacaaggaaaaatggatgtttcgctgcaggattaagttacaattatcttctcagtgaaggtcatttgtgatggggtctaattcttattacttcaacaaatattgttttgacttgggggggaggggctataaccctgctatttttcattgactctattgaactctttaggatgatgactgatcatacaaaacgtattataacattttcgtagcaaaattaaccnnnnnnnnnncccggccccagtatttgtgaaaagtaatgaaccatagtacccagntcatgttaaatgaatattaaaagcatggaaaagaaacatgaggaacaatgaatttcaacatatggctccagaacatgaaaaagttcctggtatggattatagtatctagtgttcaaaaaagcccgcatctcttctcttatttattgtaagtttttaaatgtataaattgtcttatatttcttaacctcttttataaaaattttcctagaaggtttatactgccttcttgctttaaagcaattggtctaaaatatatatattgc

SEQ ID NO: 2054 - DNA, 942 bp, Homo Sapiens
ggctgtacggtcccgagtcgttggatctgcggcagcaggtagcaaagtgacgccgagggcctgagtgctccagtagccaccgcatctggagaaccagcggttaccatggaggggatcagtatatacacttcagataactacaccgaggaaatgggctcaggggactatgactccatgaaggaaccctgtttccgtgaagaaaatgctaatttcaataaaatcttcctgcccaccatctactccatcatcttcttaactggcattgtgggcaatggattggtcatcctggtcatgggttaccagaagaaactgagaagcatgacggacaagtacaggctgcacctgtcagtggccgacctcctctttgtcatcacgcttcccttctgggcagttgatgccgtggcaaactggtactttgggaacttcctatgcaaggcagtccatgtcatctacacagtcaacctctacagcagtgtcctcatcctggccttcatcagtctggaccgctacctggccatcgtccacgccaccaacagtcagaggccaaggaagctgttggctgaaaaggtggtctatgttggcgtctggatccctgccctcctgctgactattcccgacttcatctttgccaacgtcagtgaggcagatgacagatatatctgtgaccgcttctaccccaatgacttgtgggtggttgtgttccagtttcagcacatcatggttggccttatcctgcctggtattgtcatcctgtcctgctattgcattatcatctccaagctgtcacactccaagggccaccagaagcgccaggccctcaagaccacagtcatcctcatcctggctttcttcgccctgttggctgccttactactttgggatcagcatcgaattcctttcacctcctggaaatccatcaagccaggtgtacatttgaaaacc

SEQ ID NO: 2055 - DNA, 840 bp, Homo Sapiens
  misc_feature (667)..(667): n is a, c, g, or t
  misc_feature (758)..(758): n is a, c, g, or t
taactataacggtccttaaggtagcgaggcctgggtggcgaatcggcacgaggtggatctttaaatatggaaataaatggtgaggaagaaatcctaatgaaaaataagaattccttatatttgaaatctgcagagatagactgcagcatatcaagtgaggaaaatacagatgataatataacagtccaaggtgaaataaggaaggaagatagaactggaaaacctgaaaaatcatgacaataacttgactcagtctggatcagactcaagttgctctccagaatgcctctgggaggaaggcaaagaagttatcccaactttctttagtaccatgaacacaagctttagtgacattgaacttctggaagacagtggcattcccacagaagcattcttggcatcatgttatgctgtggttccagtattagacaaacttggccctacagtgtttgctcctgttaagatggatcttgtcgaaaatattaagaaagtaaatcagaagtatataaccaacaacagaagagtttaccactctccaggaagatacgtgctgcacgaagtgcaagcggatgtagccccagttaggaactcagcgactgaagccctctttgtgctgaagagaggtctcaaatttttgaagggatttttgacagaagtgaaaaatggngaaaaggatatcccagacagccctgaaataccacatattggtaaaaacattgtgcgcaaccaccatggcttgggttatttccgagggggtnttttgcccgttagccttttaaggggcaactccccttcctaatgaaagatttttgggggccgcccgtttaaccgcgtaaaaag

SEQ ID NO: 2056 - DNA, 2132 bp, Homo Sapiens
  misc_feature (913)..(925): n is a, c, g, or t
  misc_feature (1366)..(1366): n is a, c, g, or t
  misc_feature (2113)..(2113): n is a, c, g, or t
gggatgagctttgtctgtattggggctatcttggtctttgtagccttctttgaaattggaccaggccccattccctggtttattgtggccgaactcttcagccagggcccccgcccagctgcgatggcagtggccggctgctccaactggacctccaacttcctagtcggattgctcttcccctccgctgctcactatttaggagcctacgtttttattatcttcaccggcttcctcattaccttcttggcttttaccttcttcaaagtccctgagacccgtggcaggacttttgaggatatcacacgggcctttgaagggcaggcacacggtgcagatagatctggaaaggacggcgtcatggagatgaacagcatcgagcctgctaaggagaccaccaccaatgtctaagtcgtgcctccttccacctccctcccggcatgggaaagccacctctccctcaacaagggagagacctcatcaggatgaacccaggacgcttctgaatgctgctacttaattcctttctcatcccacgcactccataagcaccccaaggctgcggtttgttggatcttcaatggctttttaaattttatttcctggacatcctcttctgcttaggagagaccgagtgaacctaccttcatttcaggagggattggccgcttggcacatgacaactttgccagcttttcctcccttgggttctgatattgccgcactaggggatataggagaggaaaagtaaggtgcagttcccccaacctcagacttaccagggaagcagatacatatgagtgtggaagccggagggtgtttatgtaagagcaccttcctcacttccatacagctctacgtggcaaattaacttgagttttatttattttatcctctggtttaattacataannnnnnnnnnnnnactttaagtttcaggatacatgtgccgaatgtgcaggtttgttacataggtatatatatgccatgatggaaatatttatttttttaagcgtaattttgccaaataataaaaacagaaggaaattgagattagagggaggtgtttaaagagaggttatagagtagaagatttgatgctggagaggttaaggtgcaataagaatttagggagaaatgttgttcattattggagggtaaatgatgtggtgcctgaggtctgtacgttacctcttaacaatttctgtccttcagatggaaactctttaacttctcgtaaaagtcatatacctatataataaagctactgatttcctttggagctttttttctttaagataatagtttacatgtagtagtacttgaaatctaggattattaactaatatgggcattgtagttaatnatggttgatgggttctaattttggatggagtccagggaagagaaagtgatttctagaaagcctgttcccctcactggatgaaataactccttcttgtagtagtctcattacttttgaagtaatcccgccacctatctcgtgggagagccatccaaataagaaacctaaaataattggttcttggtagagattcattatttttccactttgttctttaggagattttaggtgttgattttctgttgtattttaactcatacctttaaaggaattccccaaagaatgtttatagcaaacttggaatttgtaacctcagctctgggagaggatttttttctgagcgattattatctaaagtgtgttgttgctttaggctcacggcacgcttgcgtatgtctgttaccatgtcactgtggtcctatgccgaatgccctcaggggacttgaatctttccaataaaccaggtttagacagtatgagtcaatgtgcagtgtagcccacacttgagaggatgaatgtatgtgcactgtcactttgctctgggtggaagtacgttattgttgacttattttctctgtgtttgttcctacagcccctttttcatatgttgctcagtctccctttcccttcttggtgcttacacatctcagaccctttagccaaacccttgtcagtgacagtattttgggtcttagttctcactgtttccctctgctcccgaagccctttgaataaaaatgcacgtancctgagggccgggatgcgc

SEQ ID NO: 2057 - DNA, 929 bp, Homo Sapiens
  misc_feature (754)..(781): n is a, c, g, or t
atggttaccaaaggtggctgccggaaacctctccaacctctcctgaggactcacaacttctttatagatgagaattacggaaagagtctctaaagctgtctcaaaaacaggctggtgttgaaacatacatatcggaaaggtctcgagaaattcaattatattttgctgccctgaggattttcactccacttgtggaaacaaatgataatgttgcttcagacccacctctccacctcttgttccaaacagtactccattttcaaatgagctgccatcaagccaaagtaacaactttctcccaaaatgtttaaagtggtggaaaatcccctcaaagctggatcaaactgtgtgtttaagaacagctccaaaagggactcttctgttgacaggggatatttttctttagatgtaagaaatattctgagcctcgagcctaggaaggaggccaacagcagctctccagccggggatcccgcccctttcgaaagccatcaccaataccaggaaccctggggaaagtagtagccttctttttttctctctctagtttttgaaactgtaatgacagaagacatttcagggttgttgtggggattttttccccccagttctaaaatggtcattgatagtgccgatcttacctaactctcctcctatttaaaatttctgtggatctaccagataacctaaagtgggcatggattatttattatggctcctttaatgcccaaatagcaatcagtctaaaaccttnnnnnnnnnnnnnnnnnnnnnnnnnnnntcaaggagagaccagccacctcctgaaaaataggaataatagtatcagccactgacccatggataatgttgttgaaagcctgattaaagtatttttttctaaaaagaaaactcttcctgaattaagaaaataaaaatgggactttaaa

SEQ ID NO: 2058 - DNA, 689 bp, Homo Sapiens
gagggatttagaaggagttgggatgaatccatagtctcaatgaatggagaaaaagtaactcaggaaagtaaatgctaggtgacttatcagcgggtggctggtgatgtttggtttggattgtgaaagctgcttagaccaagatgggctgagggaaggggaggagagtgagcatgtagaggttgaggcacttggaggaagaagcaggcagaaaagggtggactgaatgcagacaggacctcccacatgggaaatattttctctagattaggtgtacggtgctgaaggcagccacactctcagcactatgttcctcatattctttgaaaactcttccttcctcatagggctctgccttgacatatacctctacctctcttatccatttcaccccagctatttttgttctaggtctcacctgggcagattctaggtctgctaactaagccaaattagcattgaaataagctccacatacagtgggcatataagttctgttgactgagataaatacattcatgttacagtactgctttgaagaaagactatttaatttgattctcagtctccagagggatataatagggaaacacagtttacgttgacggccacctagaatagattctgaatacataaattaggtaacttaaaactcaatctgagcagaggagccacgacgtgttcgggggatc

SEQ ID NO: 2059 - DNA, 1097 bp, Homo Sapiens
gtactataacggccttggttagcgaggcctgggtggcgaattcggcacgaggccgggggcacacctatgctgtgcctgcactgcccccaggggcagtcggggatgggccccccagagtggatttccctcgatctcgactccgcttcaaggagaagcttggcgagggccagtttggggaggtgcacctgtgtgaggtcgacagccctcaagatctggttagtcttgatttcccccttaatgtgcgtaagggacaccctttgctggtagctgtcaagatcttacggccagatgccaccaagaatgccaggaatgatttcctgaaagaggtgaagatcatgtcgaggctcaaggacccaaacatcattcggctgctgggcgtgtgtgtgcaggacgaccccctctgcatgattactgactacatggagaacggcgacctcaaccagttcctcagtgcccaccagctggaggacaaggcagccgagggggcccctggggacgggcaggctgcgcaggggcccaccatcagctacccaatgctgctgcatgtggcagcccagatcgcctccggcatgcgctatctggccacactcaactttgtacatcgggacctggccacgcggaactgcctagttggggaaaatttcaccatcaaaatcgcagactttggcatgagccggaacctctatgctggggactattaccgtgtgcagggccgggcagtgctgcccatccgctggatggcctggagtgcatcctcatggggaagttcacgactgcgagtgacgtgtgggccttggtgtgaccctgtgggaggtgctgattgctctgtagggcccagccctttgggcagctcaccgacgagcaggtcatcgagaacgcgggggagttcttccgggacagggccggcaggtgtacctgtcccggccgcctgcctgcccgcagggcctatatgagctgatgcttcggtgctggagccgggagtctgagcagcgaccacccttttcccagctgcatcggttcctggcagaggatgcactcaacacggtgtgaatcacacatccagctgcccctccctcagggagcagcagggaaagaca

SEQ ID NO: 2060 - DNA, 831 bp, Homo Sapiens
atattcattccaaattccagaggaaaaacagcaacaaggaaaaacagggccattccataaaaaattactagccaggtacacctcaaaaagtacaaaaggaatttgacaaccaaatgaactacaaaaacggtttccagggattctaatgccctatgttgttgtcccatcactggtaaatgcttactggttaaaagataaaacacatcaacgcaaagtcatacttgactaacggtaaattaggattatgacttttaaagtcaaacaataatactttaaggccactagactatcagtctactagtggcaagaatggttgactcctctgcctctgggaaaatcctatttttaagaaaatcagaatcagtatttaaaatgtactaatcactgacaagtacctagtgacatttaaagaataattttctggaaactcctagcctacatttctaagacccagtagaagggctctataataattatacagagtccttgggaacttatgttcttacgtggattgttttaggctacttattttccttcctttttttccccaacttttaatttatcaaagagtttcctttaaaccttctctcttaagactttcattgctcaagttttacaaaagacataaggtcagcagttttgaataatataaatactccaaaatcaatgtctactgctaaatgcagaaaattctccttggttaaagttttacaaacatttcaagtcttaaaaattaggatctatgttttaaatattactttgagttaatacagatgtccaaattaatcataagaaatatgctggtcctcggccgggcgcggtggctcacac

SEQ ID NO: 2061 - DNA, 944 bp, Homo Sapiens
  misc_feature (524)..(548): n is a, c, g, or t
ccccgacttgtcgtggctctctcaccgcaggggcatcctgcctgacgcaccttggtcctatgttcactaacccgatccaaaatgagcctaaggttgctctggcaattactgaaaccccttcccttttgttctagaaccaccattttaacattaccatctgctttcgataatgtcaagaataaattcttacggttctttgggggtcgttttgcgtctcttctcctccttttcatcctcgtctttttcatcagaaatctgtggatttactttttcaggttctttttcttcgggcctccgtttggcagctctgcagggtgaacagatacacagcaagtagcagcttagaaacactaaccacatcgccaactcgcacggaaagtgacaaactaatgcctccccatgggaaagcaagatacccatgggagctctataggcacactgccagcttgtcatcccgagacgaggccttcagaggccccagggtccccacacatctacatcaccacaggtttctagaacaggcnnnnnnnnnnnnnnnnnnnnnnnnnggttctttcagctgacaacttacagacatttgggtaattcagcagtttaatataataaacattttataccctacatattttttcctgcttttggagaatggaatgtacattgatccattttaagatattacaaaggcattttaataaatagcattgttttcttttaagaaaattgagttttgtatgagatttaaaatgaagactctttacaaagtaaatcagctgagttttgagcattttaggtggattagtcatgtattcctcgacctctgcttgtgtgttcttcattttttatacaacacacaaaagaggaggccagcaaggtttcgatcctttaggaagttggatctaattaggaggtaggactaacatacacgaatgactagggaacccagt

SEQ ID NO: 2062 - DNA, 823 bp, Homo Sapiens
gaggatcccccgaacacgtcgcggctctaagataataaatcaaatgttgtgttatctttggttgaaagatacacagatcaaaatatttgttggaatatattttaaaaattgagaaaacgacttcttaacagaaagtggcatcttgcaaagccatccctgaagcctgtttctgccctgagaagccccccatttctatttacgcattggaggaccagtccctcaaataaaagtcactttcacgaggtggtcaaggaaggccagtgtgcttttgtagggaccaacttcattcaagtctagctgtctgctacagttacagaggagccaccacggggctgctggctcagtttgcctcttccctcccccagcagtccaagctctaacagaccccaaagccagcatcagtcctgaagtcagaccacaatggagggcgccacacagccctcaatcctgcctcaggtggaggacaccggctggggctgggccccggagttaccttccagaaccactgaatgacggggtggtttgggcagtagccgttcttgtaaatagaatgctgtctccagtcattcacatccacatcaccgaggccgcacatgagcaactaggaagaaaatttaccagatgtaaaagcaggatgtgaaaggtgcgagatcacacactgagaaatgaccaccctcagtgccagcatgtggtcactgtgccgcgaaggtaagctagcaaatcataacaacagaggaaggcagacacctgttccaggctccacctgccatagcagatcacagaggcagcagtcacgagggcagctcaattcgaaccttgcgca

SEQ ID NO: 2063 - DNA, 600 bp, Homo Sapiens
actcactgttggtcagtaatacaacttccatattttaaataaatcataaaagatttatgcctatctatcaaagtacgaaacttcatattgatatcatgatacagaaatcgaactatttctatcgttcacaatatagcatataacaggattttaaagtgattgaattgccatcctaacttggatttgtattaggttatgaatgaatactgttgtaagtccaagctatttgaatgtaaagttaaaattctccagcaatccagaatgacttgtaacccttcagtggaatgggaaatttctggtatgcaaatagggtggtgttccagacatttgttttattggtggtgtttgggccttgaaacacatttctaatagaatgacatatggcaaagggtatttagatggtcctatgggatcacagaagcccatatgatttaaaatatagataaaataacacaaaattgggtacataagggtttaaccaggctttcctgggttagactaagcctctaacctctgttcctatcctgttcttatgggaggaaaaaaaatgttccatgggatgaaaagaaaatgcattgactttgtagtctttattctcct

SEQ ID NO: 2064 - DNA, 534 bp, Homo Sapiens
  misc_feature (101)..(111): n is a, c, g, or t
  misc_feature (184)..(225): n is a, c, g, or t
attgaccatacgtgtgagaaatatacatgttgtataacattgttcattttcattctgtatacaaaacatatttatactcatttaaacaaatggatgactcnnnnnnnnnnngatgattcatttttatccattctgctgttgatggaccttcgggttacttaacttttaaaaagtatgtatcttnnnnnnnnnnnnnnnnnnnnnnnnnnnnnnnnnnnnnnnnnnccatatactatactattttatatttaccttagtattaatatttagcataatcctaagcacataatgggtgtcctcaatcacattaaataattgattaaatgaatctattgatagtttgagagataagaaaaaaataagtacagttgggaatcaatttaatatttttagagatagttatgtaactggccttttgtaactactactatttaaataaaatcacaaagtttgacctcttctaattcatttacacctaaggatttattgacttttattcttcctgaaccaaatgaaagctaaatatttgataac

SEQ ID NO: 2065 - DNA, 877 bp, Homo Sapiens
  misc_feature (44)..(44): n is a, c, g, or t
  misc_feature (594)..(594): n is a, c, g, or t
  misc_feature (601)..(601): n is a, c, g, or t
  misc_feature (621)..(621): n is a, c, g, or t
  misc_feature (660)..(660): n is a, c, g, or t
  misc_feature (782)..(782): n is a, c, g, or t
  misc_feature (784)..(784): n is a, c, g, or t
  misc_feature (863)..(863): n is a, c, g, or t
atccgaggccctcactaaaccatccactcggtagtagcgacggncggtgagcttaaactgaagcaagttcggtggacgcccgcggcgccctgatctaaagaaacgactcagggactgcggcgcttgcacgtcaacgggaggtgtgagcccaaagaaatgggacgtcggtcatcagatactgaagaagaaagcagaagcaagagaaaaaagaaacaccgtagacggtcctcctcgagcagttcttcagatagtagaacatacagccgaaagaaaggaggaaggaaatcaagatcaaagtcaagatcttggtccagagatcttcagcctcgttcacattcttatgatagaagacgcaggcatcgatcaagcagtagctcttcttatggctccagaaggaaacgaagtcgaagtcgttcaaggggtcgagggaaatcctatagagttcagaggtctaggtcaaaaagcagaacaagaaggtccaggtcaagacctcgtctccgttctcatagtcgtagcagtgaaaggtccagtcacagaagaacgcgtagtcggtctcgggatagagaacgacgtaagggcagagataaagagaanaagaganaggagaaggataaagggaanggacaggaattacataacatcaaacgtggggaatctggnaacatcaaagctggattagaacatctgccaccagctgaacaggccaaaggcagactacagctggttcttgaagctgctgcaaaagctgatgaagcattgaaagcccaaagaagaaatgaggnanggaagcaagaggaggaaaggaggaagacccaggccaccctgggaagaacaaggtaaaaaaggagtaaaaagaaatttgnaagcttattggaaa

SEQ ID NO: 2066 - DNA, 484 bp, Homo Sapiens
  misc_feature (422)..(444): n is a, c, g, or t
tgagccactgcgcccggcctcccctctcatttatgatgccctctgtgcaggcagacggctcttgggctcttttccccaactgtctctaacacaggccccacggttgatggccacaggcagtagaaggagaaatgaggatgggttggggagcggggagtcgcggcttggctcttcctggtttctgagagggacatcttcatccctactccccttggtccccaaccacagtcctggtgaagatgtggatgataatggtgccttgatttccaaatgaagacagctttattgcttaactctattgtacataggatacacgttcagtgtaaaataaagtgtaaaggggaattcaggcttaatgctgcacctagatataaatgctaatgatacttgggtttatagccttctgatcctttatttctgcnnnnnnnnnnnnnnnnnnnnnnncatttttggtataacaataaaccgtctcaatccttaaaaa

SEQ ID NO: 2067 - DNA, 192 bp, Homo Sapiens
tttaggggtgtatggttttatttttttaaaaatgtatatgctcaataacagtttacttggaaattttcactagaagaaataacatgaaagaacaccagcataaatacataatacatactttaattgtggctatattaaatgtatcttaatgtaataccgctgtaacatggtatcatctcattgttaaaaatt

SEQ ID NO: 2068 - DNA, 847 bp, Homo Sapiens
gggagctcttgtcgcggccgcggggagttaacatcgtttttccaatctgtccgcggctgccgccacccaagacagagccagaatgttcaggatgctgaacagcagttttgaggatgaccccttcttctcgtgagttacgggagccaggagtccggggtcgcgcgggaattaagtgagtccattcttgcacaccgagaaaatatgcgacagatgataagaagtttttctgaaccctttggaagagacttgctcagtatctctggatggtagagggagagctcataatcgtagaggacataatgatggtgaagattctttgactcatacagatgtcagctctttccagacaatggaccaaatggtgtcaaatatgagaaactatatgcagaaattagaaagaaacttcggtcaactttcagtggatccaaatggacattcattttgttcttcctcagttatgacttattccaaaataggagatgaaccgccaaaggtttttcaggcctcaactcaaactcgtcgagctccaggaggaataaaggaaaccaggaaagcaatgagagattctgacagtggactagaaaaaatgggtattggtcatcatattcatggaccgagctcctgtcattaaaaagtccaagaaaccacaggactgggagatggaagagggccaaccaggaagttccttcaatatgaaagggaaagcggaggctcctgcgtttttgaatgaggaacgcgccaaagggaaggttttttggagatatcacaaaccacgggaccgaacccaattccttaggaaaaaaccctcccaattgggaaaagaggggtgtggcccattggagacaaa

SEQ ID NO: 2069 - DNA, 535 bp, Homo Sapiens
cgacaataaccagccgcgggcggtacacggccatgacctgcatcagcagggtgaccagggtggccgacttgcctgcgccggtcgggccgaacaacagcagatgaccgttcatagcccggtccaggcgtgacaacggatcaaagctcaacggcgaaccgccacgattgaacagggtgatacccggatgtcctgttcctgtgcttcggccccagaccggaacgaggttcgctaggtgttgaacaaacatcaggcgggtgtaccagttgcgcgtgtcgcgggccgggttgtaagccatcggtaaccaacgcaggtagctgttgcaggcggcgatctcatcgccttcgcgtaccggttgcaagcccgcacccagcagcgcattggctaggctgaccgagcgctggtgcagttgctgttcatcgtcaccgcgcacgtaaaacgccagcgtgccgcggtacagcttgtgctgacggccgatgatcgcgcgggcttcttcgacatcctgacgggtctgggtcgagccaataatgctgtgggc

SEQ ID NO: 2070 - DNA, 302 bp, Homo Sapiens
aagtgcggcttgctggcagagaggtacctttgggtcgtgggcgcctccgttgttggcctatacccttcataacatgacgaccaatctccgttcgaatggcttatcggtggcggatgtctccctggatgagatatattcacgaacttgagatcctcggagaacgaaggtagtccatccgtcgactgtcgattcaacgcttgtggtcctatccgggcgacgggcatgggtgacttgtctcgatcgctcggcatccctgctctctcgattcacttggctcattgttcactccggtgatagtacgt

SEQ ID NO: 2071 - DNA, 843 bp, Homo Sapiens
  misc_feature (78)..(78): n is a, c, g, or t
  misc_feature (167)..(213): n is a, c, g, or t
  misc_feature (710)..(719): n is a, c, g, or t
gggtgttgcattgtattccaaacgtgtttacaggttctcttaagcaatgttgtatttgcaggcttttctgaataccanatctgctttttgtaaagcgtaaaaacatcacaaagtaggtcattccatcaccacccttgtctctctacacattttgcctttggggatcnnnnnnnnnnnnnnnnnnnnnnnnnnnnnnnnnnnnnnnnnnnnnnnaaagggtaaattgcacttttaaaaaaataattggttgacttaatatatttgctttttttctcacctgcacttagaggaaaatttgaaccaagttggaaaaaaaaccaatttttgtttcaaattctaaaaaacaccttgcagctctagtattcacttgagtcttcctgtctttcctggaccgggtcatggaaatttttggttgttttggttgttttcttaaaaaacaagttaaaacctgacgatttctgcaggctgtgtaagcatgtttaccggttggcctgctttgtgtgtctgtaaaatgaatgtcatatgtaaatgctaaaataaatcgacagtgtctcaaaactgaataactgccagggactggatgctctaaaacagtgtaggaattaaaaattagatgatttttaatcctgggaaattgtggattgtgacccatgaagtgggaggaactttcagttcctaaagctgataaagtgtgtagccaaaaaagtacnnnnnnnnnngtaaccactgtcttgatggcaaaataattatggtaaaaaacaagtctcgtgtttattattccttaagaactctgtgttatattaccatggaacgcctaataaagcaaaatgtggttgtttcaaa

SEQ ID NO: 2072 - DNA, 437 bp, Homo Sapiens
accaacattggccctcgacccaccgggactcagtgtcgacgagagtaccgtcgaaatcccacaagacagcggcgaaaaaacggtcggcggtcgctgtgtgcgtctcacgtggcattgaaatagtttgcctccgggtgatggacgacgaaggcgtcggtggactggccaggatgaagctggaactcctctgacagttgtacaccgaatcctcgtcggatcgagtagtttcaccaccttgacgcgatcttcgaggttcggacaggtggcgtaaccgaaactgtaccggcagccacgagaggtttggtgatcgatggcgccaatgccaagggattcaccgtcaaggcggcaccggtttccgaccccatgagcatggtcccagtaagcgtcgtggactccggaaatgcgtcgagcacagtgttgctgtgtactactctagg

SEQ ID NO: 2073 - DNA, 448 bp, Homo Sapiens
  misc_feature (380)..(388): n is a, c, g, or t
aaacattaactaggctgtataaagaacatttattccttcaaaagaaaaaaatttacttctggttgaaattacaatttacaatatacaacactatatgctacgaccataaaaggtgagaatatacactgaatgcacagggctggctaattctcttttcttaccaaaaaacgtgtttatgttgattcaaacttctccacatttacattacaggtatacaaatgtacaattgtacaatcaaaagtatgttcgactactagggtacattatagatacagattagacatcaaaacaagaaaatactacaaatttgtatatatgcaaagtctacaccaagtatacactatatatttatagaagcaagaccaaaagcagagttggannnnnnnnnctcatgctaaataatcagattttacctttcaatgttaatagaaaaaaatccagtaggccc

SEQ ID NO: 2074 - DNA, 373 bp, Homo Sapiens
gcaaccacgctaattccttacgtgccaggttctgacgcttggcctcattagtggcggcgacgcgggctcgttctaacccgggctaaggtgtaaggccgagtatccgccctgataagcctcgaacggtggcgttgtggacctcccagatgtcagtgcagatctcgtcaagaaaccaacggtcgtgtgagacgacgagcattgccacgccgcgctcctgtaggtggcccagatggccggccaaccaggccaccgcctcgacgtcgaggtggttggtgggctcgtcaagaaacaagtaagtcgtggtctccggagcatgattgaaaccagtgcagcccgccggtcgttccccaccggaaagaacggccatagcgcg

SEQ ID NO: 2075 - DNA, 333 bp, Homo Sapiens
taattagctgtatgttacttaggcaagttgtttaacctttctgagtttttgtgagataattcaatctcatctgtaaaacaagggtaagagtccctactaccacttcctggctgtgtgaccttaagtaagtgacataacctctctggacctcaatgtcctcatctgcaaaatgaagataataaaagtgcctatctcccttcccgcagggttgtggtgataaggaaatgggttaatatacgtaagtatttcaaatagggtttggtatacaaaaagcactgggtgatctttctaaaggactggcaggtcgagccaatgttggtggggacctctaga

SEQ ID NO: 2076 - DNA, 492 bp, Homo Sapiens
ctccaggaactcttgagccttccccatgatgatgagtgggtcagggttaccgcagagctgaacggcctctgtagcgttcagcctgcagcctgcccaatgaggacgtttgcgctctggaaaggtaaactcaggatgctgttggctcctaagcagaaagcaggcgccacccagccttcaagtgcttcaacagtgaagagttaggacggaggcccagcctggaacattcacgccaccttctgcccccagtaaaattccttaaagctatgaggttctgactcaccacggggagtccctggccgccgctgggagggccttggccatgcaaatctcagtgacatagcatgtcttatttgcttcagaagtggcagaggagaaagtgacttgcctcacgctgcccggttccacccagggaccttgtgaagagacgcgggaaggctggcagaaaggagaaccgtccttcccgtggaatactcccgagatcgcaccactcca

SEQ ID NO: 2077 - DNA, 513 bp, Homo Sapiens
catatgcagctgttcttacacaaaacattatccccaaactactagtgtcacataaaagtaagtggtcttgactttgtatgtggggcagcatgttctataaatgctgaaaggtgggagaagcacaaacacacccatctctttaaaaaaaactaaataattcaaagtagaattttctatccccccccatttctccagtaataaaaagtagtgctgggatctggcacccagatttggtttttatcctgaccatttacaaagtgttcccccatatgacgtgcatcattagggttatgggtaacagttcattcactttggagagacctgtgcctattccttccccctcttcgtgccttcatgctcgtgttccttggggcggctgctatctgagggtcttttagagccaccatgctgtttggcttcttccaaaaacttgtccaaaccaaaaggatcttcctcaaactgaactggtccctctcggcctctctgtctacggtctgaaccagaaaactcctt

SEQ ID NO: 2078 - DNA, 815 bp, Homo Sapiens
atcccccgatcatgtcgtggctccagatctactccctgtaggagttcaaggatcacacaaacggtagtaaccagggttgtgaatctgagtacaccctggcaaggcttctcttcagactgaagcagcaattctgccactaccagcagcaaccaggacgtctgttctttgtgggggccagatcagaagagagaggcccctgtgacgcccgggctgcttggtcacaactctgtccaattcaaggatgtttatcggcctctcttagatcctgagtgagacaaatacagaaatgacccattccctgcccaccagaaactcagaggtgattggggagactgacacaggaaaatgaacttaatcaagagagactgtgatatgtgctaagaagggtgtgagggagggagagatgaattttccctggagggatcctagaaagcattgtcatattgccatctccattagctcacttttaaacaactagggtgctggaagaacctttgtctgagggtagttcatagctggaaatacttggaatattttccagagtctctaaactctcatcttcccccacagatacacatccaagctcacaaataggagtagcaattctaggtggtagggttgtgtacggaacccctggctgtctgcatatatctcagaattaccccaggaccattgtcccaaagtctagagtctttacaggtaggcaaaatttgttttcaatgcctgtgcctcagctgctgtcacaaatacccatcttaggatcccatcagcttcccatcccccaccagacagccacgacgtgttcgggggatcca

SEQ ID NO: 2079 - DNA, 636 bp, Homo Sapiens
acccggttccccgtccttcatcatacctacctgtgtatcaaaaaaaccagcagggcacgagccctccacactgtagaaaatagttgctagttgctattctcagcacctgggcctgtgagcccacaccacaggattcacctatatacatatcccgctgcagtgaaaagaatcctgctgtgttttcgtgtgaactgaaaacctgagaaacgttccttctctcgcactgtaagaggacagacactctaacagggatgatttcagagacctcccacctctctcaaccttggaagacagagactagagactggcaaatcacaatctttaggctgagggctgcaatcccattctccccaagattttacaggaattaatcaatgggtctatagaaggggcaggctattctgctctgccatcaaggacagtccccaggctttcttggcctgggaatcctgtaaaatagaaccacccactggcagtctccatgcctcagccaaacagcacaaaggcacaggaaaatggagagttgggacactgtaagcctcccagcccaccagaccacatatcccaaaagggaaaggtcggtaaagaaaatacaaacggttagttggtgcaagtgattgataagagccaatcgtt

SEQ ID NO: 2080 - DNA, 717 bp, Homo Sapiens
tctggtcaagggacaagtgaagagaacactttttacagttggctagaaggtctctgtgtagaaaaaagagcattctacagacttatatctggcctacatgcaagcattaatgtgcatttgagtgcaagatatcttttacaagagacctggttagaaaagaaatggggacacaacattacagaatttcaacagcgatttgatggaattttgactgaaggagaaggtccaagaaggcttaagaacttgtattttctctacttaatagaactaagggctttatccaaagtgttaccattcttcgagcgcccagattttcaactctttactggaaataaaattcaggatgaggaaaacaaaatgttacttctggaaatacttcatgaaatcaagtcatttcctttgcattttgatgagaattcattttttgctggggataaaaaagaagcacacaaactaaaggaggactttcgactgcattttaaaaatatttcaagaattatggattgtgttggttgttttaaatgtcgtctgtggggaaagcttcagactcagggtttgggcactgctctgaagatcttattttctgagaaattgatagcaaatatgccagaaagtggacctagttatgaattccatctaaccagacaagaaatagtatcattattcaacgcatttggaagaatttctacaagtgtgaaagaattagattacttcagc

SEQ ID NO: 2081 - DNA, 1120 bp, Homo Sapiens
  misc_feature (912)..(1013): n is a, c, g, or t
atcccccgaacatgtccgtggcttggccttgaggagactcttggctttgtcgtcccagtgctctgacactgtgagcagttcctgcagccgggccatagctttctccactgctgaatacggggccagccctacccctaggtctatgagacgtctcatatcatctaaagtaagggagctggggtctaggcaagcttgctgcacctcttctagccaacgggcttgttccaaacggatacgcatctcagcaagctgtggaagttcaacatcaaattcaaagctgacatctagcaagtcctgcagctccgcagcactaggcgtttcctcagagagtagtttctgactatgctgttgaaaatcttctacacgattcaagagatcctttagtaatggtgtctgactgaggacacatggaagagcatacagctgtgttacaaactgccggagctcattcactgtcaactgattttgggatttccctccaccagatcgatatctagtttgccttttgccattaagcaactgctgcgcaacagaggcacacttctctgcatcctgtgtgactaggcgaaggtgtcgcaaaagatcattgtctgggaatttcttcatttcagattcttcaattaaagccttgaagctgacaaggcctaggaatgaagaaaaaagtcatattttctgtaatcattatgtttattactactggtatgaaattcagaggagactggttttgtcagttcttgtctagaaatgtaacttacaaatgtttgcaatgctttaaattattaacaaatttgttgatttgatttttgcagggtggtggctgaacacggagttttttaaacaagtgcctagagttgaacttaaatataaaaatgctaagacctgacatgttttagggcgggtacagtggctcannnnnnnnnnnnnnnnnnnnnnnnnnnnnnnnnnnnnnnnnnnnnnnnnnnnnnnnnnnnnnnnnnnnnnnnnnnnnnnnnnnnnnnnnnnnnnnnnnnnnnaaaattaaagaacttagccagccatggtggcacacaactgtagtcccaactatttgacaaactaaagcaggaggattacttaaacccaggatttcaaggctgcggtg

SEQ ID NO: 2082 - DNA, 439 bp, Homo Sapiens
ctgttctataggatccctatgcgatggaattgacctacatatggttgcttaggacaaataaaattaaaaattgtaattaaggggtaaagaaaagcaatgagaagtagtcagaatatagtttgttaaaaaatgtattaaataaaatacatatggaacttaaggagcctttaaagcttcacattttgataacttcgtctttggtacgttttctcccatatacatcatgccttacttttcataccatgaatttctacaatatagaacttaactaattctgtccaatattataaaaacatcccacagtttccacctaagaaagagacaaagagtgagcaaaaagtaaaagaaataagaaaaccaatacctctcagggtagattttgtatttcattgtatgggtcttatttccattttctaggaatcctttggttcttcctctc

SEQ ID NO: 2083 - DNA, 290 bp, Homo Sapiens
taagagcctgcacgtcgcctatgccggatatgcaaataggtcgattataaaaaagagtttgtatatggataatctgcaaacaaatattgctgtaagtgactcagcaaagagccaagcataccaaaaactcgcgactacattctatgcgatgatttttttggtcacggcatttaattacggtgatcgtccaactctctcaatggcagcaacgccaatgtctcatgaactgggaattgactcaacaactatggaatatatttactcggactttgcatggacctatgtaatta

SEQ ID NO: 2084 - DNA, 737 bp, Homo Sapiens
gaaagaatatatacacactagttgaacagctaagaaacactgtggctgtcgatgctgacattgctgcccataaactattctgggccgatctaagccaaaaggctatcttcaatgcctcaattgatgacaaggttggtaaacatgttaaaatgatcgacaatgtctataatcctgcaagccattgctgttgattgggtgtacaagaccatctactggactgatgcggcttctaaaactatttcagtagctaccctaaatggaaccaagaggaagttcctgtttaactctgacttgcgagagcctgcctccatagctgtggacccactgtctggctttgtttactggtcagactggggtgaaccagctaaaatagaaaaagcaggaatgaatggattcgatagacgtccactggtgacagcggatatccagtggcctaacggaattacacttgaccttataaaaagtcgcctctattggcttgattctaagttgcacatgttatccagcgtggacttgaatggccaagatcgtaggatagtactaaagtctctggagttcctagctcatcctcttgcactaacaatatttgaggatcgtgtctactggatagatggggaaaatgaagcagtctatggtgccaataaattcactggatcagagctagccactctagacaacaacctgaatgatgcccaagacatcattgtctatcatgaacttgtacagccacgacatgt

SEQ ID NO: 2085 - DNA, 1143 bp, Homo Sapiens
cacgtgggactagaaagagacattgaacagttcacagagttttttgagaaccctgcttttcgtcccgatgggctgaaactctatcctaccctggtgattcgtgggaccgggctttatgagctttggaaatcaggaagatataagagttactctcctagtgacctggttgaattggtggctcggatcctagccctcgtgcctccatggactcgagtgtaccgagtacagagggatattccaatgcctttagttagctcaggagtagagcatggtaacctgagagagctggcacttgcaagaatgaaagacctcggaatacagtgtcgagatgtgagaaccagagaagttggaatccaagaaattcatcacaaagtacggccataccaggttgaattggtaaggagagattatgttgcaaatggtggctgggaaacattcttgtcatacgaagacccagatcaagacattttgattggcctcctgcgattacgcaagtgttcagaagaaactttccgtttcgaattgggtggaggtgtctccatagtacgagagctgcatgtgtatgggagtgtggtccctgtgagcagccgggatcctactaaatttcagcatcagggatttggcatgctgctgatggaggaagcagaaagaatagctagagaagaacatgggtctgggaaaatcgctgtgatatcaggggtcggcaccaggaattattatagaaagatcggctacagattacaaggcccgtacatggtgaagatgctgaaataatggccacaccagtccactcttctgcagtatcctccctggcagaacacggagaatcaggatttcttaaatactcaacagagaggctgagcagagcaaatggggggcttcaccctcatcccgcagctgcagagactggaaactgccttcaatgccacggctggtcatctgctgaccacaccccagatccgccctctcctgcgtgcaccccaaaaaatcacttgcgtttttgaggcttaaatcatctatccagtttctacattttgcatgaggcctgcaggtggcctattttgactcagacggtgaaaaaagcaaattaactcatttggacaccataactcatgcaataaaactgattgtcattcgaggagc

SEQ ID NO: 2086 - DNA, 719 bp, Homo Sapiens
ggctttacaggacataagaacataggtgacctttccagtcttgggccattttgtctctccctcaacctcttcccccacctctgaatgctggattctgttcccagggagttctatggttgggatctaatgctgcaggtaccctgaggtcataagcacatgcaggcggcaggcagacactcacgtgcgcacgctctgctgaatgacccggatccaggtgctccggtcatcccgggatgctgtgtgcacctcgtacatctcaggtggggctgcgctgatcagaaacatccctttctcctggttggcaatgtctcgtacgattagattctgcagcgataccactgaaggcttgtcctgccagtcaggggaaaggaaggattaagcctgggaatcctgtcccttggcatatttaggccttcaatccttctggacaaggactgaaaggactgaagagtcatcttacaataccagttaagagccaggcactggtgccagccagaagggacttagaaatgtgtgcaacccttgacaaattatttaactgacttgaagctttactttcatcatctataaaatgaggacgaaaataatcttttcccacaggtgtaaaagtgcctgtgcacagtaacagtacctgtgagctgctcttattttttattattacggtaatagtaacaattatagctgtttgactctgggggagccacgacaagatcggggta

SEQ ID NO: 2087 - DNA, 817 bp, Homo Sapiens
aggttggggctggccaggggtgggtggactagaagcatttgggagtagtggccaggggccctggacgctagccacggagctgctgcacagagcctggtgtccacaagcttccaggttggggttggagcctgggatgagccccggcagcgccttggcccttctgtggtccctgccagcctctgacctgggccggtcagtcattgctggactctggccacacactggcgttctcatccacttggaaacaagccagtcttttctgcaaggtcagttgaccaagagcatatttcccctctgttgtacatcgttgttttgtgtttgtgttgtaacagtgggtggagggagggtggggtctacatttgttgcatgagtcgatgggtcagaactttagtatacgcatgcgtcctctgagtgacagggcattttgtcgaaaataagcaccttggtaactaaacccctctaatagctataaaggctttagttctgtattgattaagttactgtaaaagcttgggtttatttttgtaggacttaatggctaagaattagaacatagcaagggggctcctctgttggagtaatgtaaattgtaattataaataaacatgcaaacctttaaaccaaaggtcgtgatgatccgaaatacacataacattgtcggcccgcctcgggcccctcaaaaaaacctttcctagaacctttccgttttgggggcgcggggcccccaggtagggtaagcggaacccgtggctaccacagctggcttcccccaaagggagaaacctcgggccccaggaacctaaccggccttgggcat

SEQ ID NO: 2088 - DNA, 812 bp, Homo Sapiens
  misc_feature (721)..(721): n is a, c, g, or t
  misc_feature (725)..(725): n is a, c, g, or t
  misc_feature (732)..(732): n is a, c, g, or t
  misc_feature (752)..(752): n is a, c, g, or t
  misc_feature (754)..(754): n is a, c, g, or t
  misc_feature (766)..(766): n is a, c, g, or t
  misc_feature (784)..(784): n is a, c, g, or t
gggaaattgggaatatatctttacaatgattgataccatggtatattgactcttagatgctattgatctgtagcaccattttttacaaacgactaaggaaaaaacctgccaattaaatcatgatatgccatcaattatgagacatcccaatttgagagatgttagattatagaaaagtatgcatttatgactgaaatggtagtggaattatttgaattctacaccaagcacttaccatgtgccaggccctttgcagagtgctctactgaccaagaaagttgttgctgccacattatagatgtggagcctaagggtcacagaaattgtgtgctatgccaaaaaacattgaactggtagatagaaaatgacagagctaggattcaaacctagatctggctgactccagagcctagttttacctgggattataggcataagccaccatgccctgcgctaagtaactgttacttgagttaatgtactagttaattgacccttagaaaattatatttttctgcttgcaagtcttcattaaagaaggaaattttaaaatattttatagtataatgctatccaaactcatttttaaaaacattttattatggaaattttcacaaatgcacaaaaagaatagcagaatgaagctctgtgtacccatccctccacagctgtcctggtggtcagtcttgtttacctgcatccccaccctatccctgccccnaccnacaaggnatcagttttgagtcccattnancagggcataggnattttccatgggctgggnggatcaagagacatttcaaaatataact

SEQ ID NO: 2089 - DNA, 1287 bp, Homo Sapiens
ggccttcaggccactggctaccgaaccccggggctcttcaccagtccagctcgtttccagcaccatgtcggtgcggacgctaccgctgctcttcttgaacttgggcggggagatgctttacatcctcgaccaacggctgcgggcccagaacatcccgggagacaaggcccgcaaagttctgaatgacatcatctccaccatgttcaatagaaagtttatggaggaattattcaagcctcaagagctctactccaagaaggccctgaggactgtctatgagcgcctggctcatgcctccattatgaaactgaaccaggccagcatggataagctctatgacctgatgaccatggctttcaaatatcaagtattgctgtgtccccgacccaaggatgtgctgctggtcactttcaatcacgtggataccatcaagggattcatccgagactccccagccatcctgcagcaagtggacgagactttgcggcagctgacagaaatatatggtggtctctctgcaggggagttccagctgatccggcagacactcctcatcttcttccaagacctgcacatccgagtatccatgtttctaaaggacaaagttcagaataataacggtcgctttgtgttgccggtgtccgggcctgttccttggggaactgaagttccaggactcatcagaatgttcaacaacaaaggtgaagaagtgaagaggatagaattcaagcatggtggaaactatgtccctgcacccaaagaaggttcttttgaactttatggagaccgagtcctgaaactgggaactaacatgtacagcgtgaatcagcctgtggaaactcatgtgtctggatcatcaaagaacttagcctcatggacccaggaaagcattgctccaaaccctcttgccaaagaagagctgaattgtcttggccaggctgatgggagggatgcgagattaagaaacccagtggccctgagcccggattccggttgaatctctttaccaccgatgaagaaagaggaacaagcagcgctaaccaggccagaagagtaatcctatgaagttatcaacatacaagccacccaggaccagcaacggagcgaaggagctgggatcgcaatccaggggggagaacgagatcacgggagcagacaaaggctgaagccccagcaaaggggaccgaaacggatcaaccatgatggaaggagttaccacccgtactgacccaggagcactcgtgaccccaagggcagagcagcggagtgtgccactggagcatgccc

SEQ ID NO: 2090 - DNA, 1287 bp, Homo Sapiens
ggggctggagccgcggctgacgggcccgcggtctgggcgtgagtgcagggaagtggagtatttgctgggccgggtaccatggacgtgggcgaacttctgagctaccagcccaataggggcacaaaacgtccccgggatgatgaagaggaggagcagaagatgcgtcggaaacaaactggtactcgagaacgcggccgctatcgggaagaagaaatgactgtggtggaggaagcggatgatgacaaaaaaaggctgctgcagattattgacagagatggggaagaggaagaggaagaggaggagccattggatgaaagctcagtgaagaaaatgatcctcacatttgaaaagagatcatataaaaaccaagaattgcggattaagtttccagacaatccagagaagttcatggaatccgagctggacctaaatgacatcattcaggagatgcacgtggtggccaccatgccagacctgtaccaccttctggtggagctgaatgctgtacagtcgcttctcggcttgctcggacacgataatacagatgtgtccatagctgtggtcgatttgcttcaggaattaacagatatagacaccctccatgagagtgaagagggagcagaagtgctcatcgatgctctggtggatgggcaggtggtagcactgctggtacagaatctggagcgcctggatgagtctgtgaaagaaggaggcagatggcgtccacaacactctggctattgtggaaaacatggctgagttccggcctgagatgtgtacagagggtgcccagcagggtcttctacagtggctggtgaagaggctgaaaggcaaagatgccttttgatgccaacaaactgtattgcagtgaagtgctggccatattgctccaggacaatgatgaaaacagggaattgcttggggagctggatggaatcgatgtgcttcttcagcagttatccgtgtttaaaagacacaatcccagcacggctgaggagcaggagatgatggagaatctgtttgattccctctgctcctgtctaatgctaagttccaatcgtgagcgcttcctgaagggcgagggtcttcagctgatgaatctcatgctcagggaaaagaaagatctcccggagcagtgcccttgaaagtgctggacccatgccatgattggccccgaaagcaccagacaactgcccataagtttgttgacatttcttgggcttacggaaccatcttttcccccctctttatgaaaaatctcccaggaaagaatcaaggaaaagtggg

SEQ ID NO: 2091 - DNA, 830 bp, Homo Sapiens
gccaagtaaggcttattaaatggcaagttttaacccaggtgccccccaaaatcaggaccatggaaacaccccccttgtttactttcacgggaaataattccatgggagtgctactaaagattatatgagacttgcaactcttgaccacatcactttttcttccaaaactttaggaactggtttgcaaaaacttaaatggtataaaacacattttaaaatgtcacccaattctcaaatgtcacgaaaagaaaatgcaggaaaagtatgtattgtgtgattaatcagcttaggcttaactcaaaatactttcaatgttcacaaaattgtttctagagttctaatctaaaacaactaaggaggtgtgccttgatattccgaaacactgtcttaatactttattagaagaaatatgcttgaaatttctttaccataatctaaacgcaaactttaaaaatatataccagtagaataccatattacaaatgcccagaaatgtagaataaaggtcaaaaactgcttggaaatatttttatgattacactcataacaacaaagcttatgaactagcacaatcattatgggaccaacatttcaaaatattttgcctatcaaagctagcaccaggaaaagtattatgcacataaaattgagaaacagataatctttactttagaaaagcacagttctacagagtattgctctggctaaatagtttagctagtaaaaaggtcagtttatctcactgaggcatgtatctccttggatctattaacttatctgaagaactttccaggtacttggtatgtactgaaaattcttactggaatccc

SEQ ID NO: 2092 - DNA, 822 bp, Homo Sapiens
  misc_feature (733)..(733): n is a, c, g, or t
ggtaacaaaataactagcaaccatgaagtgggtggaatcaatttttttaattttcctactaaattttactgaatccagaacactgcatagaaatgaatatggaatagcttccatattggattcttaccaatgtactgcagagataagtttagctgacctggctaccatattttttgcccagtttgttcaagaagccacttacaaggaagtaagcaaaatggtgaaagatgcattgactgcaattgagaaacccactggagatgaacagtcttcagggtgtttagaaaaccagctacctgcctttctggaagaactttgccatgagaaagaaattttggagaagtacggacattcagactgctgcagccaaagtgaagagggaagacataactgttttcttgcacacaaaaagcccactccagcatcgatcccacttttccaagttccagaacctgtcacaagctgtgaagcatatgaagaagacagggagacattcatgaacaaattcatttatgagatagcaagaaggcatcccttcctgtatgcacctacaattcttctttgggctgctcgctatgacaaaataattccatcttgctgcaaagctgaaaatgcagttgaatgctttcaaacaaaggcagcaacagttacaaaagaattaagagaaagcagcttgttaaatcaacatgcatgtgcagtaatggaaaaattttgggacccgaaactttcaagnccataactggttactaaactggagtcagaaattttaccaaagtttaatttttactggaaatccagaaaacttaggtcctgggatggtgg

SEQ ID NO: 2093 - DNA, 1459 bp, Homo Sapiens
tccaaggacactcctatgttgctttacctcaacactcacacagccttggaacagatgcggaggcaagcggaaaaggaagaagagcgaggtccccgagtgatggtagtgggccccactgatgtgggcaagtctacagtgtgtcgccttctgctcaactacgcagtgcgtttgggccgccgtcccacttatgtggagctggatgtgggccagggttctgtgtccatccctggtaccatgggggccctctacatcgagcggcctgcagatgtcgaagagggtttctctatccaggcccctctggtgtatcattttggttccaccactcctggcactaacatcaagctttataataagattacatctcgtttagcagatgtgttcaaccaaaggtgtgaggtgaaccgaagggcatctgtgagtggctgtgtcattaacacctgtggctgggtcaagggctctggttaccaggctctggtgcatgcagcctcagcttttgaggtggatgtcgttgttgttctggatcaagaacgactgtacaatgaactgaaacgggacctcccccactttgtacgcactgtgctgctccctaaatctgggggtgtggtggagcgctccaaggacttccggcgggaatgtagggatgagcgtatccgtgagtatttttatggattccgaggctgtttctatcccatgccttcaatgtcaaattttcagatgtaaaaatctacaaagttgggggcacccacaatcccagaactcctgtttaccctttgggcatgtcctcaagaggataatcagctcaagctagtacctgtcactcctgggcgagatatggtgcaccacctactgagtgttagcactgccggagggtacagaacagaaccctgtccgagacaagtgtagctggcttcattgtggtgaccagtgtggacctggagcatcaggtgtttactgttctgtctccagcccctcgcccactgcctaagaacttccttctcatcatggatatccggttcatggatctgaagtagagatcagcaggaagccttgctgcctgggacatagagatcatctggccacccctagaggcagatgggctgagataaaagactgttggggccacctgaccagtaaactgtggactagtagaaagttcatattctacctctaaaaacaggtagtggtaacctgactcttctaatcttgaaccaaaaggaaaaccatgagactgtaattggtttcttagaccacctaagatgccactttgaattctctaagaccctggagaattgcatttctttcactgtgctactatgtggtttttaaaaaatcaatgctttatattccatatgtggttcttacccatttatctaggatgaaagtgtgaattagagggactccttccaataaagttcaaacttaaaaaaaatcattttaataaatatttttgccatatcat

SEQ ID NO: 2094 - DNA, 505 bp, Homo Sapiens
tatacccatgtgggggactctgttatacttcctttgaagtagggaggagagaagattggggaatgttggagtactttctgttctccccaattttttttgttagtaatccacatttatttgagtaatacatactgtagggtgtccagtttttagacacttctatatttatatgtatcatttgatcctcacattagccttgggttttagaaacaattatccacattttacaaataaaaagactgttgcttccaggaggtattgtaggtaggtcaaggagctaggaagtggcagtgctgagatttgtgctcatgttctctgaccgcaaggctcagagctcttacagagcaccatgccagcttcattccccctgtcgtccttgggacagctttgccaatgggggccatagtctggtttaactccctgctttgtctaactatttatttggatttcgggggacgtggaaattttctttgacaatcttgatttatttagtggtgtatggtga

SEQ ID NO: 2095 - DNA, 125 bp, Homo Sapiens
gacccaaaagttctaagtaaagcaagtattaacaaaacaagaaaatggatgtaaagcaaacaggaaacattaaaaactccctttcaacccagtcttttttgttatagatcttggagtttgggccg

SEQ ID NO: 2096 - DNA, 901 bp, Homo Sapiens
  misc_feature (37)..(37): n is a, c, g, or t
  misc_feature (67)..(67): n is a, c, g, or t
  misc_feature (238)..(238): n is a, c, g, or t
gaggctcaaatgggggcccatggggtaaccggcctcntattttcatagcagtgtcaatgtctttctntggatgcgtcactcgtttcatacagcctgattgcttccatgaggtatgaaaccaggaggcgggttcacaataaacccaggagtgtccttgcaagaaacaggatgctttcctagggctttgctaaagtctaccaaagatttcaaatgtcttctggctggtcattggtgtttnaatgacctccacaagtttcatgacaggcactgggttgaagaaatggaggccagcgaatcggtcttgtctggtggtggcattagctatgcttgtaatctgcaaggaggaagtgttgctggcaaagattgtatgttcagcagcaaacttgtccagccttttgaagagctcgtttttcaccttcagattctccacggatggcttccaccaccaagtctgtgctgtggacaacggaggctgcatccgtgctggtcgctatggtgctcagggtcttctccacaaattcatcgccggccttagggttttctgcaaacttcttctttgccactttcctaaggctttcctcaattccctttttggattttgccaggatgtcctctgtctggtctaccaacactactgtgtgaccagttgctgcagcaacctgggcaatgccggcgcccatcagcccgccgccgatgaccgtcacgtgcttgacgattatcttcttggccgaggccgaggcggtggacgaggaggacacggaacgcatgaactgcctggtgacgaaggccatggtgtggcagcggcggcgacagcgaggagacccgggcagggaagacgcgcgaggcgggcagccgtggaaagccagactctgggggcggggacctacgcggccctgccccc

SEQ ID NO: 2097 - DNA, 602 bp, Homo Sapiens
tataatctggtctagtatacataaagacttctagtgatccacattgggtagtagggagacataagtagcagtaggaagtcaagcatttattaagttaccagaataatcctagataatagaaattagttgactttaaacctaagcaatatgatgttttttataatagcacgtttaagaaaaataaaatgcctccctacaagactgtctccttctcatgctgctgctttcttcttcaaattcagtcttcttggaaggatagcacatactcactttcatttatgctgtagtcaccacagcccagcatggccccctccacgcttgaattattctcccattcattggtgactacctcagtccagctggcattgcgcagttagtacttcccttactaatagttgatgttgactgtccctccttgaaacattcttcatccctgcttacttgaacattttttcaccagttcttcttctgccccctgtcagacttcgtttcattgtctggctttacctttccacatacttgaaaacattgtgtccacccaaaccgttcttttctttcgtctttacgaagatcgatagatgcttgcgccattcttatcagtt

SEQ ID NO: 2098 - DNA, 697 bp, Homo Sapiens
  misc_feature (471)..(515): n is a, c, g, or t
  misc_feature (519)..(526): n is a, c, g, or t
  misc_feature (528)..(543): n is a, c, g, or t
gggtaagacttgtgcttgttagcaggtttttctgttagtttttcccccataacatttaattattactaaaattgtatttacaatagtggtgccaaatcaaatggtaatttaaataaaatctattctgtgtttatgtagggtggtataaaaaagaggtcttcatttagacatgtgatttctaaaattccagaaagcaaaattgataagatgttagaaatttggaccgttatttataatcagggtagcattaaaatggagaaaagaaagttttctgaaaaaatgcagtaaatataagccacatttctaaagtttatttttatgaaagcttcttttaagattttgaaatctattctgcattcccaagagtttatgtttattgtattttatatgatctacaacatataaaattgtgtatttttctttggttgtccctattaacaaaaaagtattttaataaaaaattgaaatgannnnnnnnnnnnnnnnnnnnnnnnnnnnnnnnnnnnnnnnnnnnncccnnnnnnnnannnnnnnnnnnnnnnngaaaattgggggccccctccgcccctcaaaaacttttttaaccttttctttggccgccgggcccccaaagggaaagggaaacgggggccatacttgttttcccaaggaaaaccccgggcccagagaataagggctttgggattccccaccccat

SEQ ID NO: 2099 - DNA, 614 bp, Homo Sapiens
catgtcgtggctgaaggaaggaatgtggcatgtggggagaggagaaggctgtgagcactcatagggagaatcaggcctgtctgggaaaagtgctcacatggggcacaatggggctcataaggattgctgggggaatgctgcaaaggtaagttgtatcaatttcacatacagatgacacagtcttatttcttcattaacaacccccaagactatgacacacaaaaaaattacataatgtctgtaactttcatcttagaatttttaggagctcagttaggatgcaaagctcatcaaagcaccaggaaccttcttaatatcacaatgcttgaataacctaaatgtgccatcatgcacttcacctcatgtaccaagatgctgaaaagtgaacctaaaagacagctcattctgttttttacaagcaaaaggaagcttacagaaactggatgactttttcagtttccaaattactgtgtagtggtgcctctatttgaaaccagggctttgatcttaaattcactatgcttgtaagtacttaaacatataaaagtgtgtgtactacctacataaaatgaactatttcccccttttgcaacaattggaaagaacaattttgc

SEQ ID NO: 2100 - DNA, 836 bp, Homo Sapiens
tatcacaggacttatgcgatgggaatcgaactccgaaggaaagaagaggaacggtagaggcgttgaagggcaagattaagaaggaaagctccaagagggagctgctttccgacactgcccatctgaacgagacccactgcgcccgctgcctgcagccctaccagctgcttgtgaatagcaaaaggcagtgcctggaatgtggcctcttcacctgcaaaagctgtggccgcgtccacccggaggagcagggctggatctgtgacccctgccatctggccagagtcgtgaagatcggctcactggagtggtactatgagcatgtgaaagcccgcttcaagaggttcggaagtgccaaggtcatccggtccctccacgggcggctgcagggtggagctgggcctgaaccgatatctgaagagagaagtggagacagcgaccagacagatgaggatggagaacctgactcagaggcccaggcccaggcccagccctttggcaagcttaaaaaagcgcctcctctccgtccacgacttcgacttcgagggagtactttaagatgactccactcagcctcaaggtcactccctgcacatgtcctcagttccctgaggctagggacagcccactagtccctcacagatgagtcctgctcagagtaggcagcccctcacaaggctgagggcctggaggaggctgaatactggggcctctgggtgccactccaatccggaagagcagccgaccagcatctcaccttccagacacggcgtcctggctgagctctgcccgcctggaggctcccacaggatggccatggatttttagctgccatctcg

SEQ ID NO: 2101 - DNA, 557 bp, Homo Sapiens
  misc_feature (116)..(216): n is a, c, g, or t
accccgatcatgtcgtggctcactgcagtctcgacctcctgggctcgggtggtcctcccgcctcatcctcctgagtggtgggaccacgggtgtgcaccaccgtgtccagctaattnnnnnnnnnnnnnnnnnnnnnnnnnnnnnnnnnnnnnnnnnnnnnnnnnnnnnnnnnnnnnnnnnnnnnnnnnnnnnnnnnnnnnnnnnnnnnnnnnnnnnctgagccaccacaccaggctgccccacacattgtaaagtttcgcttccctctaatgtcagattccaaagacagcagccttcatgagtcagaaagaaacatcggtcattttgaaatcaacatccaactgaagtgtagaaaggcctctggatttttgaaacggcaacaacagatgatgtaatacgaagacgcccccaccccactgctttcccactgcatgctttacatgacatggcgcagcttccacgccagcagcttcaattcatgtaaagcgaatgcagtcccatcaagaccacagcattggctgagcagctactccatgctgggcaccgtcctgggcact

SEQ ID NO: 2102 - DNA, 317 bp, Homo Sapiens
agcgggtcgatctacaggatctctttgcgatggaattgaccgaatgaacgagcacaagattcgcccggtaatcgaccacgtgtatccatttgatcaagcacgcgaagcgtacgaacatttggccagaggcgcctttggtaaggtagtaatcaaaattgcgtaggacccagccgcttcaatcccactcgcccgctgcgacggcaggcgcgtgagcacgtccttcaaataagcatgcggatcatgcccgttgatggcgtcatgctaagcgtctgaattgctggtcaattccatcgcaaagagatcctggagagtcactc

SEQ ID NO: 2103 - DNA, 722 bp, Homo Sapiens
  misc_feature (675)..(675): n is a, c, g, or t
aggctgctggaacagttgtgacaattggagtagtcgtgacctgggggggcacattctccaatgatacggtgattttcatgtcattgaaccacccacggtgctcaacacggcaacaatatacgccactgtcagacacagctgtattttctatggtcaaagagacatcccttcttgaaaggtcccccaatagcttatagcgtgtgtccttccgataggtgacgtgggttccattggtccagacaatgccattttggcatgtgaatagagaacatgagcctctattccagcacattgatgtgacagccccactgtagtggcagggtagtgtgacagatggacctgcctctccaccaacctttacaaaaccaactacagaatctgccagatgtaggatgaggcttaagatgaccacttgaggatgcattatgggatcagcctgaaggaaaatgagcagacaggctggttggtaccctccaccagatggtatctgatcaagtcttaaatctcagattgcaacttatcttttcacccagttggttgattcatatgagcctgctctgctggaaatgagagaagaccacatataacggcttcagagctctgttagttccctgcagctgagagctctgtgccttccaaaggacagggaaagctgtccacagaaacagcccctgnacttccagcttcttccccacacataaccgccaaactgaactctggtc

SEQ ID NO: 2104 - DNA, 611 bp, Homo Sapiens
  misc_feature (386)..(386): n is a, c, g, or t
  misc_feature (510)..(510): n is a, c, g, or t
atactaatcagaagataagtgtataaacaaacttatgaggggaagtggggtttggtggaagagaatcagaagggcatgaaggtcccttgcttttgctttcttcttacccagataccatcggacatactctgtttggcacttgaaggctctggtattttggcaaagcaattatgggaggcccaatcctagacggcaactggggacgaaggagtctattgtgactagatggaagtctttcccctctgcagtctgaaatcaccttgtgtcttctcaagaggtagcagtccccagccgattccttgagcacaagtatctcttcaggtgggaaattaggtcatgcccaacttcacttttctcttcaattttccacatcataaccatccatntcctatggtacctaaacatgagaagccccacgatgaccagcagacagacagatgacagcaccacagccaccacggccaggatggttgtgtggtcataggtatataagcgattttccactgggangctcagcccatgacacctctctccatggtaacccgggtggcagatgcaggagggagcccggagctccttcacatatttgcattctccatggatgcagaagt

SEQ ID NO: 2105 - DNA, 829 bp, Homo Sapiens
tgtcgaggctgtaccttctccacataaatgggatggataattatcgtatattaagatgtgattctcttttttatccttaatgttaatctacttaacctggccccctctaacatggagtcgataaatgttgtcctactccaccggtggtttcaatggctaattagaatgtgttaatttggatttctgctgcagaaggcagtgtgattgtaacaaaaacaatgcggcttccccctttcgtacttcatttgtgttctcttaaaatagagtttgaacaaatattttaaaggtgcaaaataccattagaaaatactatttgaaatggacattatcgcattatcttggcataatggccagaaaatattgtattgcttggcagaaaagaaaataaggtctaaaggaaagtagcacattagcattgatggctgttcatttcacccagtataagcaagtgcagtgtacaaagaagtatattctgaatacattatttccattcatttagcacaaataaatcatttggtttcactttgcaggtggaacactgagtcactcttttcttaacacgtgcaacatcttaatttttgtttttcagcagttgctgttttgtactttggtagtgaagtgatttttaccacctgtgtttgcatatttatatatgctgtggatgaaaataacttactagagaatgtatattttatgacaagaatgtgtatctgttggatataatcagagaactgaaaagtaatttatcagtaatttttaagagtccatgttttgtgacaaccatctctaatagccaactctttattaaacacactcctaaaaataagga

SEQ ID NO: 2106 - DNA, 357 bp, Homo Sapiens
gtcgatccagaggatccctttgcgaaggaattgaccttatgcctcccacatctcaactcacatttgatggaatgaacaacaacaaaaaattattgagagaggcaaaagaaaccagatgttaaaaatcatggtgtgatttaggtataaatccgcgagaaggagatatactgctgggtttagatataaacctattagaagcactttttatttcaagcaggtgtgcaaagaaaaagtgctgacctgaattctgtgctctctaactaatggaataatctgcaggatgtaattagtaatggattaattaactaaggttgtttagttcatatacaacttaagagaacaatttaatctctttgt

SEQ ID NO: 2107 - DNA, 457 bp, Homo Sapiens
tgtcgaggctccatcaagtaaatgttaaaaatgttacacatcaattttgtacctctactgtgttccatattggacaacagcaaagccccttaaaagctatttttatggagggagttgaaattaggaatgggctcatgcacaaatatttgtaataatatttaaacgaaatcctttggagtaaaaaaagcataatataaaaaggacacctctcttcccatgtcattccataactgctcacatgactacatacctgattctggatttaccaagaaactcccgtacaccctctttaataactataaaataaaaacgaaacaaaaccaaattcgttaatccaaaggccatgataattacattattattaaagtactgcacttgccaagctcttactaagttggcattcttcctaactttcatttggtggatgggaaagtaaagacagaggggaagtggattt

SEQ ID NO: 2108 - DNA, 714 bp, Homo Sapiens
cccttggcgatggaatatgccctcttatctgactggctgctgctcctcggttctctttggtggctctcctcctcatctccacctctagatatcggggtaccccagagattagctccaggcctcctctgctctatacacattctctctctgggtgattctagctacacctctggcaaaatttagctaatctccagtcctgacctctcccctgctccagattcaaatatccaagtagctgcttgacagattcatttggagaccaggtaggcacctcaaaacttaacgtgtccaaaacatgaatttattttctctcctccctcacccccatcctgaccctttccctgtcttccctcatgtctacaaatggccaccccatgcaaccagttgctctggcaaaacttagtcatcaacctcaatttatctcttctttttatcacaccatgcccaactcacctacaaatcctgcaatatccctacacagccccttctcgccagctccactgccaccaccctaatcccagctgccatcacctctcaaggggattactgtaatagtcagctacctggtctctttgttcctactcttgcccctctacattctatttttcacacagccaccacagtgatcttttaaaattgtgattcatggtcaatccatcgcaaggtacgagctcattctatctggctaggttcccaaataaaaaaagaaatgtt

SEQ ID NO: 2109 - DNA, 379 bp, Homo Sapiens
gcaccccgaactgtcgtggcttttaaatcaagagacagggaccctccaggaggtgttttctacaccaatccttgtataaccgaaagcaagctttgctcacagttgtaaatgcatccaaacccgcacttacccggttcaccccgaagcaactacgcccattgtgaagccacaacaaaaacagtggctttcccaagaagaggacagggacagacaatgctgtgacaaccagcagcactctctggacatactcctgttagtgcagaaggtgagaaacccgattaaaacgtgaaggcctgcctgcagggtcagcagcacacgatgaaatcaggaaagatcgaacaatgtctccacgcgaggaacattcaataaatgccagcca

SEQ ID NO: 2110 - DNA, 198 bp, Homo Sapiens
atggtcatctggtccagagccagcactcttaaccacacttcctatgaggaaaaattaaagtggatggtgatggctacaagatggatttcagttgcatagaaataagaacctcctacctctgttgaaatcagaatacatatacaccccttcattcactctatgaatattcattcattccatgaacctacaaggttttta

SEQ ID NO: 2111 - DNA, 686 bp, Homo Sapiens
aggtaaacttgaagagcaagtgtgataaaagaggaactaacatccggtttcattcttatgccttagtttaaaatctcatacagtgtgacaattcctcatactgttttccattatcaagctcccctactaaaaaagaacataaagctatgtgttgataacatatgcggcagtgagtaaccatgaaagattccctgagtatacctaaaagacttaaaatttaagtgttctaaattttcctttaatttttaaaaagaaaactcactagttattattgctgaaataaaacccttaaatacacatttgggaagcacattttcaaactataatcttacaaggtattttatttgttacataaatgtaattaaatacagagaagcaaaaagaaaatacaaaactcacccatatcatatcatttagaggctttgtcacattcttcacatttctaggatttctcagcagcatgattttcttgatgtttagaaaagtttgacttgtcaaaagcgttggcacatctttcaggtttgtagagtttctctccagtatgaataatattatgtctgttaagaattcacgactttttatagactttaccacattattcacacttgtaagatttctctccaatatgagttatcttatctgtagtaaggtgtgaaaactggttaaaggctttgccaaatttttcc

SEQ ID NO: 2112 - DNA, 587 bp, Homo Sapiens
atccatcatcgccagaatgcttacgctgttgggcatcctgtgccttaaatctacttctctccatttgatggatgagaaaaacaaggttccgagaggttgaggggctccccaaagctacacagcaagtgggggcacagcccaaactcaagggcacgtcctaactctcagttcctgggtagcccgctgggggaggggctggctgggaaaaccttcaaatgtgcttggcaaggactctcatatgcccccatcccagaaatgtagtgtccacaactcacagtgggacctgtggctggcaggctcatcctttagtgcttataaagatggagacaataacctcgacctcctcgaggggttgtggagattacaggagaggctgtgagtcacacacatggcacagcaacgggtctgtctgtggacagcactcactgtctggaagccaaggttgtgaccatcgtgactgctgtttggggacactcctatgcactctcagtccgtggctggagtagagacatcagggccgcagctcatggcctggaggacctgggagtgctccagaggacaaactaggatatggacaggagccaccg

SEQ ID NO: 2113 - DNA, 411 bp, Homo Sapiens
  misc_feature (362)..(362): n is a, c, g, or t
gaggagccccagtcatgctcagcacgctacagatgtgttgtttgtcacactgagattgctgaatgtcgtggctgttggctgccgagcctcagctgctggcatttccttctgctgtttgctgcttttgtgcctcccccactttccatcacctctggagtcccgtctggacgtcccttcctgctacaggaataatgaggcgtgggctgcctcccgctagggcctcctgctccctgtaggtagtttctggctgaggcttgctaattggggatgcttcttagagcatcttccacatcaactcccctggctgctggctaccgattaaattcattagtgtgaaagaggtgggagtgaggttttctggnctgaagcagtctgcactgaaaggtacccaagtggcctgaaacagtgtag

SEQ ID NO: 2114 - DNA, 492 bp, Homo Sapiens
caaagaagtcaaatcagaaatgagatggagtatcatgattagcatctcagagctaatttaaggaaaattgggagagggtgtttgatcatgtcagatctaatctctttcagtaaagcctctttcctcccccataccttcattgtctagagccaagagttggttggatataatgttggctctttttaatccaagttgccatcgctaaaagtagcatcatgacacctgtctggtgctttcaagtctcaagtaaatttctggcagtttgaaaatgatgttaaaaagcacttgggttttaaaaaaaggcacttgaaggagatggtttattctcctcctgtacacacatatgtacataccttgtcaaatgttactactcttccttattctccctgtgctagaaacgttctccaggtaattgctttttgaaaccgaggttgagcattgcccagcctaaatatgaatatctctaccagtagggaatgaatacttcttgat

SEQ ID NO: 2115 - DNA, 542 bp, Homo Sapiens
tcatctgcccatcagtataagtgccatgttattctcggcaatctcaggaaaaataaagcaggagtggtcattcactgtaaccacaggatcccatttggagactggtttgaatatgtttcttcccctaactacttagcagagctgatgatctacgtttccatggccgtcacctttgggttccacaacttaacttggtggctagtggtgacaaatgtcttctttaatcaggccctgtctgcctttctcagccaccaattctacaaaagcaaatttgtctcttacccgaagcataggaaagctttcctaccatttttgttttaagttaacctcagtcatgaagaatgcaaaccaggtgatggtttcaatgcctaaggacagtgaagtctggagcccaaagtacagtttcagcaaagctgtttgaaactctccattccatttctataccccacaagttttcactgaatgagcatggcagtgccactcaagaaaatgaatctccaaagtatcttcaaagaataaatactaatggcagatctgcgaaa

SEQ ID NO: 2116 - DNA, 803 bp, Homo Sapiens
ggggcgtcagggcggcgctgagttgaggacgctggcggctccgcgacgagctttgttttttcggttgggcatgctgcttaccgcaggatgatggaagcgacggcccgtacaaagacagaagcgttggtttcactgagtcagtgctgattctctcaaatagagcttgaaggataaatcttcatttttgtttcaacaaaacttcgaaacaaaatggaagaaaataatctacagtgcagtagtgtggttgacggtaattttgaagaagttcccagggagacggcaattcagtttaaacctccactatacagactgcggtaccagttcgttaaaaatttagtggatcaacatgagcctaagaaggttgcagacctgggatgtggtgatacttcactcttaaggctgctaaaagtcaatccatgcattgaattgcttgttggagtagatattaatgaggataaattacgatggagaggggattcgttagctcctttcctgggggattttctgaaacctcgggatctgaatttgaccatcacattgtatcatggctccgttgtggagagagactctcgtttgcttggatttgacttgataacgtgtattgaattaatagaacatttggattcaggtgatctggccagatttcctgaagtggtatttgggtacctgtctccatccatggatgtcatcagcacaccaaactctgaaattcatccccctgtttccatcagtggactttaagagattcagatcataaaatttgagtgggaccagattgggagtttcaggacctggggctttat

SEQ ID NO: 2117 - DNA, 687 bp, Homo Sapiens
aaaaccaatgcacgggtccccatagaagccaaattggacaaaggcaggcaaggtttgaacagctttgacccagtaaaagaaccaggagaccttttgcccaggttaaaggaaaatcaagatcaagccagccccgtaccccatgggaagcagccatgcttccgccagtagcatcagctttaaccccagccctgaggagccggcctatgatggcccaagcaccagcagtgcccacttggcaccagtggtcagcagcactgtttcctatgatcctaggaaacccactgtgaagaaaattgccccaatgatggccaagacaattaaagctttcaagaacagattctcccgacgataaactgaggacttgccttggaaatggaatctggggaggcaggaatacaaggacagtgggggttggggaatggaattctacaggagactggagtcttgctttgtggatccttttggtctccgagtcctgcagtctgcaggtgctgcccctgggaacctgcgtgccacagccccgcctccctgcctggagcacactttagaattctgaagatgtgaagcctctgtctcactgaggattttaaaggtcaattatacttttgttgttcattagcatctttgtaaactataagacgtagttttaattaataaatattgcccccagattgtatttatattaaa

SEQ ID NO: 2118 - DNA, 831 bp, Homo Sapiens
  misc_feature (541)..(541): n is a, c, g, or t
  misc_feature (711)..(711): n is a, c, g, or t
  misc_feature (722)..(722): n is a, c, g, or t
  misc_feature (757)..(757): n is a, c, g, or t
  misc_feature (764)..(764): n is a, c, g, or t
  misc_feature (770)..(770): n is a, c, g, or t
ggggggaccgtctctgccaagcgcctgttggtaggaacctgcttggtcgcgtctgagggggcttgtaggtggctctggctgaaacaggcgcctgcgagagtctgtaggagggaaaccgccatggacgatcagggttgccctcggtgtaagaccaccaaatatcggaacccctccttgaagctgatggtgaatgtgtgcggacacactctctgtgaaagttgtgtagatttactgtttgtgagaggagctggaaactgccctgagtgtggtactccactcagaaagagcaacttcagggtacaactctttgaagatcccactgttgacaaggaggttgagatcaggaaaaaagtgctaaagatatacaataaaagggaagaagattttcctagtctaagagaatacaatgatttttcttggaaaaagggaaagaaattgttttcaactttgaccaacaatgtgggatttggacaacaccaaaaaggaaaatgaagatatacccaaaaggaaaacaaagatgttattcagaaaaataaattanagctgactcgagaacaggaagaactggaagaagctttagaagtggaacgacaggaaaatgaacaaagaagattatttatacaaaaagaagaacaactgcagcagattctaaaaaggaagaataagcaggctttttttagatgagctggaagagttctggatctccctggntgctctgcttnttggctcagcataaagatagatctacccaattaanaaatgcnaacttngagaaaccccaacccggtaaaaacccagtggaacgtttttccacagggccatcaaaaatgg

SEQ ID NO: 2119 - DNA, 822 bp, Homo Sapiens
  misc_feature (533)..(533): n is a, c, g, or t
  misc_feature (586)..(586): n is a, c, g, or t
  misc_feature (648)..(648): n is a, c, g, or t
  misc_feature (671)..(671): n is a, c, g, or t
  misc_feature (771)..(771): n is a, c, g, or t
  misc_feature (775)..(775): n is a, c, g, or t
  misc_feature (777)..(777): n is a, c, g, or t
  misc_feature (782)..(782): n is a, c, g, or t
  misc_feature (784)..(785): n is a, c, g, or t
ggggcggcagtagggacagcaggagcagtggtgctgtcagcgcggccgtcggagacatgggagacccggggtcggagataatagaatctgtccctccagctggccctgaggcatctgagtcaacaacggatgaaaatgaagacgacattcagtttgtcagtgaaggaccatcgagacctgttcttgaatacatcgatctggtctgtggtgatgatgaaaaccctagcgcctattatagggatattctgtttcctaaaatgccaaaacgacaggggtgatttgtttgcatttttttaaatatgaaggaaggtgaaaacagacacagaaaataatgaagtgagcaaaaatcactgcagattgtctaaggcaaaggaaccacatttcgagtatattgaacaaccaatcattgaagaaaagccatcactttcatcaaagaaagaaatagataatcttgtgcttccagattgttggaatgaaaaacaagcatttatgtttacagaacaatacaaatggcttgaaataaaagaaggtanattaggatgtaaggattgttcagcagttcggcatttgggaatcgaagcagaanagcatgtccatgtgtccaaggaatggattgcatatttagtaacccctaatgggcagtataanactactaggcaagcttctctacngaaaaaaattaggggacatgatggtttctaaagcccatggtaaaatttcaggatttggtaaaggaattcactaatggattcatttttgtattttagtgcntaancnaaatnanntaaaatattgatgcctacctgtaaaaggtttttcatt

SEQ ID NO: 2120 - DNA, 885 bp, Homo Sapiens
gcgtttcctggagaaatttaagctcaggaaagtggatgattcagtataacaaccttaacctcaagacacctgttccaagtgacattgatatatcacgatcttgtaaaccgaagcccattggtaagctggctcgagaaattggtctgctgtctgaagaggtagaattatatggtgaaacaaaggccaaagttctagctgtcagcactaggacgcctgaagcaccggcctgatgggaaatacgtggtggtgactggaataactccaacacccctgggagaagggaaaagcacaactacaatcgggctagtgcaagcccttggtgcccatctctaccagaatgtctttgcgtgtgtgcgacagccttctcagggccccacctttggaataaaaggtggcgctgcaggaggcggctactcccaggtcattcctatggaagagtttaatctccacctcacaggtgacatccatgccatcactgcagctaataacctcgttgctgcggccattgatgctcggatatttcatgaactgacccagacagacaaggctctctttaatcgtttggtgccatcagtaaatggagtgagaaggttctctgacatccaaatccgaaggttaaagagactaggcattgaaaagactgaccctaccacactgacagatgaagagataaacagatttgcaagattggacattgatccagaaaccataacttggcaaagagtgttggataccaatgatagattcctgaggaagatcacgattgggacaggctccaacggagaagggtcacacacggaccggcccagttttgatatctctgtgggccagtggaaattaatggctgtccctgggctctcccccactttctcttaaaaaaacctg

SEQ ID NO: 2121 - DNA, 815 bp, Homo Sapiens
  misc_feature (552)..(552): n is a, c, g, or t
gggtcacggagctcaaagggctagcaactcacatcctggtaggtagcgtgacctgtgagaccaaagagctgtttgcagcccgacctcaggtagtggctgtcgacatcaatgaccttggtaccatcaaactgaacctggaaatcacctggtatccatttgacgtggaggacatgaccgcatcctcaggcgctgggaacaaggcagcagcccttcagaggagaatgtccatgtacagccagggtaccccggaaacgcccaccttcaaagaccactccttcttttcaaatctacctgatgacatctttgaaaatggaaaggcagccgaggagaaaatgccactgtcgctcagcttcagtgacctgcccaacggggactgcgccctcacctcccactcaacaggctccccttccaactcaacaaatccagaaattaccatcacccctgcggagtttaacctcagcagcttggcctcccagaatgaaggtatggatgacaccagctcagcatctcccaagaactccctgggagaaggccaagagccaaagtcacacnctgaaggaggaagacccagaagagcccagaaaacctgcctcggcccccatctgaggctttgccgccgacagtcctcaggtgctggggcctgaacaactgtttcctgaaaaatgatgttgcagaaacacttctgcaaaagtctgaagaagccctctgagctcaaccctgtggaaatggaaacttcggaaggaaacatcacaaaccagcttggtcaaaaagctcacatctgcagaggggcccaatgggccacaaacaggctggct

SEQ ID NO: 2122 - DNA, 989 bp, Homo Sapiens
ggggcaggcgcggggaacaccaatggcggggtacttgaagctggtgtgtgtttcctttcagcgtcaagggttccacactgttgggagtcgctgcaagaatcggacaggcgctgagcacctgtggctgacccgacatctcagggacccatttgtgaaggctgcgaaggtggagagttaccggtgtcgaagcgccttcaagctcctggaggtgaacgagaggcaccagattctgcggcccggccttcgggtgttagactgtggggcagctcctggggcctggagtcaggtggcggtgcagaaggtcaacgccgcaggcacagatcccagctctcctgttggcttcgtgcttggggtagatcttcttcacatattccccctggaaggagcaacttttctgtgccctgctgacgtgactgacccgagaacctcacagagaatcctcgaggtgcttcctggcaggagagcagatgtgattctgagcgacatggcgcccaatgccacagggttccgggacctcgatcatgacaggctcatcagcctgtgcctgacccttctcagcgtgaccccagacatcctgcaacctggggggacattcctttgtaaaacctgggctggaagtcaaagccgtcggttacagaggagactgacagaggaattccagaatgtaaggatcatcaaacctgaagccagcaggaaagagtcatcagaagtgtacttcttggccacacagtaccacggaaggaagggcactgtgaagcagtgaggatttcttgtgccattttcatatggtcataagctccttttaaggctaggaaacgttacccttagcctcctgtaaaaggtcccgtggcagaattggaactgaatactggagaattggggccgtgaaaatgggagagccaccccacatccaaatcaacataccgataaaaaccaaaatatatgtacaacctagatcaggggcatggaccttgtaaaccccgaaatag

SEQ ID NO: 2123 - DNA, 524 bp, Homo Sapiens
  misc_feature (415)..(427): n is a, c, g, or t
acatgaggaaaaggatttaatgaatatataaatgttcactgtgacattgttagcaataagaaaacttaaaacattttagtgttcaataaattgctggccacacaaattataggttatgtgggtagtgatattttatgtagacatttgaaataaaagattaatctatgtattgacatgaaaagatgaccacaacataacatgtcaaaaccaagctgcttaatagtgtgatttcctttgagtaaaatcactcaccacagtattagtgactgctacctctggaaagtgagacaggctatctcttactttattcacttccaaagtacttgattttttttaaataaaatagattagttttaaaattcaaaaattaagaagcagctgtttagtcctggccacacacaaactcttttgttgnnnnnnnnnnnnnaaatcaagagtaagtggaacccaggaaatgattagcaattgttctacttcaccacagtgtttagcacagtgcttgtgacattgttggtgctcaatcc

SEQ ID NO: 2124 - DNA, 1208 bp, Homo Sapiens
ggggcccgcctccttagctgcctgaagtagtgcagggtcagcccgcaagttgcaggtcatggcgctggctgctcgactgtggcgccggctgcctttccgacgtggagccgccccggggtctcgtctccctgcggggacttcgggcagccgcgggcattgcggcccctgtcgattccgcggcttcgaggtaatgggaaacccaggaactctcaaaagaggccttttactctcagctttgtcgtatttgggttttgaaacttaccaggttatctctcaggctgctgtggttcatgccacagccaaagttgaagaaatacttgaacaagcagactacctgtatgaaagcggagaaacagaaaaactttatcagttgctaacccaatacaaggaaagtgaagatgcagagttactgtggcgtttggcacgggcatcacgtgatgtagctcagcttagcagaacctcagaagaggagaaaaagctattggtgtatgaagccctagagtatgcaaaaagagcactagaaaaaaatgaatcaagttttgcatctcataagtggtatgcaatctgtcttagggatgttggagattatgaaagcatcaaggctaaaattgcaaatgcatatatcatcaaggagcattttgaagaaagcaatttgaactgaaaccctaaagatggctacttcaattcaccttatgggtattggtgctatacatttgccgaaatgcctggtatcaaagaagaattgctaaaatgctgtttgcaactcctcctaggtccacctatgagaaggccttaggctactttcacagggcagaacaagtggatccaaacttctacagcaaaaacttacttcttttaggaaagacatacttgaaactacacaacaaaaagcttgctgctttctggctaatgaaagccaaggactatccagcacacacagaggaggataaacagatacagacagaagctgctcagttgcttacaagtttcagtgagaagaattgagaacttttcagagaagatttatgaaatagctaataaacattgccttttcttttaattctaaacttaatatatgaactataactgttctacggctttttaaatgttgtgaccatttaaccgtgtaaatataaaatattctaggcttcttcacaaataatagggtaaaataaataatcgccataagagtggtagaaataaaaaaa

SEQ ID NO: 2125 - DNA, 1509 bp, Homo Sapiens
  misc_feature (560)..(560): n is a, c, g, or t
  misc_feature (732)..(732): n is a, c, g, or t
  misc_feature (1381)..(1409): n is a, c, g, or t
ggatagactgtggtttaagacaaacacaaagcttggaaaattatatttagaacgagaggaatatggaaagcttcaaaaaattttacgccagttacatcagtcgtgccagactgatgatggagaagatgatctgaaaaaaggtacacagttattagaaatatatgctttggaaattcaaatgtacacagcacagaaaaataacaaaaaacttaaagcactctatgaacagtcacttcacatcaagtctgccatccctcatccactgattatgggagttatcagagaatgtggtggtaaaatgcacttgagggaaggtgaatttgaaaaggcacacactgatttttttgaagccttcaagaattatgatgaatctggaagtccaagacgaaccacttgcttaaaatatttggtcttagcaaatatgcttatgaaatcgggaataaatccatttgactcacaggaggccaagccgtacaaaaatgatccagaaattttagcaatgacgaatttagtaagtgcctatcagaataatgacatcactgaatttgaaaagattctanaaacaaatcacagcaacatcatggatgatcctttcataagagaacacagttgaagagcttatgcgaaacatcagaacacaagtgcttagtaaaattaattaagcctctacacaagaatacatattcctttgagtttctaagggagtataacatagatgtaggctgatgtggnagagctagctggttgcagtgcatatcggatgacatctattcactggccgaattgatcaagtcattcatgtcctcgggctggatcatcagaagaggggtggtgcacgatatactgcactagataaatggaccaaccaactaaattctctcaaccaggctgtagtcagtacactggcttaacagagaacaagcttttacagacgtccttaagacaacagtgcagagatgtaatccttaaaagaactgggaatggcaaaactactgtcggttgatgtgtcctgaaaattatcggagttatggcagaagtgcttttttgatcaactggtttgtgttttgctgctgcatttatcccaagaaaaacagctttaatctccagaagaaaaccaaaataccatgggatttatgctgtattgacatcttgccctaaacgtacaacatcatagtaatttgtcatgcggcaacatgaccagagagaagatttttgtcatgattttaaatacactgacacgctactgttggttaaatttaaacatgttttacctgcagaaattctctcacaaataacctgcaataacttgaaatgcatacccttttgaacacttccttttctcatgtataaattaaaatgtttgctgcattttgcaaaatgnnnnnnnnnnnnnnnnnnnnnnnnnnnnntctgtacctgcagtgtagtaaaggtttagacgaaaccccataattatagtggcatactgtcacttaggtttcaagcagcaaaataaacagtgcagctcag

SEQ ID NO: 2126 - DNA, 1478 bp, Homo Sapiens
gggagacgctggcactatggtcatggcggaggggacggcagtgctgaggcggaacaggccgggcaccaaggcgcaggatttctataattggcctgatgaatcctttgatgaaatggacagtacactagctgttcaacagtatattcaacagaacataagagcagattgctccaatattgacaaaattcttgaaccacctgaaggccaagatgaaggtgtgtggaagtatgaacatttaaggcagttctgccttgagctaaatggacttgctgtcaaacttcagagtgaatgccatccagatacttgcactcaaatgacagcaactgaacaatggatttttctttgtgcagctcataaaactccaaaagagtgtcctgctatagactatactagacacacacttgatggtgctgcatgtcttctgaatagcaataaatattttcccagcagggttagcataaaggaatcatctgtagcgaaactaggatcagtatgccgtaggatttacagaatattttcacatgcttattttcatcatcggcagatatttgatgaatatgaaaatgaaacatttttgtgtcatcggtttactaagtttgtgatgaaatacaatttgatgtccaaggataacctgattgtaccaattttagaagaggaagtacagaattcagtttctggggaaagtgaagcatgaagggaatcataggaaaaatgtactgatcatataattaacattatgtactgtatatatcattttagacacatcaatcatgtatccatattatagcttctttgtttagtataggtttttgtatgctgggtttgccttttaaaatgggaaatactttttaagttattcataagctgtatattcaccagtgtggcactcatggtttttaaataagattagtattatctgtttataatgcctgttaataaaagaatttacagtttggtaaaattgctgctaaacaatcattggatcacaatcctcatcagacaaacccatctgtaaaaaaaatgagggagagcttgaggtttcacacaagccatttactaaagaggtagaaatgttttctattggttttaccttgagttagatatcctaaaaaattctgtagtacgtagttttgtcttacctgttaactttccccaattgagataaaagtgttttaaaattctgtttatagtttttgatatgcatatataattatgtgtatatctaaatacaaatgcaaatgaagcattagtaatacttaaataatttttactgtgctacataaagtataacttacttggaaaggatttaccgttctgcaacaacggactggtacatacaggatgatcacaatgggaaggcacataaataatttcccactggaaacctgccctgtcccaccccctttcatttcccttaacccttatctccaaactacttttacttgaggaaactttttccccaaattgaatttaagggg

SEQ ID NO: 2127 - DNA, 753 bp, Homo Sapiens
ccactagtgtaggctattaagagagagagggtatctctgaagactaattaaaatggtaatttttaaaaagatgtgaccagttgacttttagtatatcatcccaagtattatccccaaaatgataatgcaaaacagaataaattggagaccaggagaaaaactggtatgattactggggaggggaagaagcacaggtggtcaagataataatgcatgtttggcctcagctgtagttgccaaagaaactacctgcctcacagatgagctcgcacgggtgcattgtcaaagtctgagaaggatgtattgtactttgaaggaagactttccatttctaagctaccatggagaagtatatgctcctcgagaccagagactgtgacttctgcatctttgattccagcgacatatgataaaatgttttgcacatagttgaatccagcgttgatacatgaaggacagcattacatcttttttctattatacttagaaatttcctctttgttctgcaccaccaacctgtatatcaagcctccttgccccacaaagcttccaaagcccgtaaatttgttaatctagagcaggggtcagcaaactaccacccatgggccaaatctggcctgctgcctatttttgtatggcctacaaactatggtttttatattcccttttgttaatggctcaaaataatattttgtataatacgaaaattacgagattttagtttctctaaataaagttttggaaagaactacc

SEQ ID NO: 2128 - DNA, 336 bp, Homo Sapiens
ctgaccggaagcttatgagcaggatgaacgcggcggcaagaagaacgatcaaaaaccaaaggtaaaaatcggccccgaatcttccccatttttgcaaagcccatgcccccggcagggaaatcgacgccgaaagcaggaggagaaccgccatttcttgcctgaaccatccgatgatgtgcttccgcttccacccgagttgatggaagagccgcacatcccttcggttatcgacctcccaaaaaagcatccggttgataaggtagaaaagggcgacaaaagcgaacaggcaccaatgaagacgttggtcatattccatcgaaaagggaaactctggta

SEQ ID NO: 2129 - DNA, 312 bp, Homo Sapiens
ggtacccatatctgctgccaagaaacagtggaaataaatgataggtttgttttagcttgttagcatactatgatgtccccttgagttgcaaatataatatttttaatactataacgactctaatgaaatggaggtaaaaacaaatgaagttttaaaagtgcctatcatccattttcaggtgtacttaagcatttcattattaaataccgtaatcatccctgaagttcacaatggttgccaatagtcctgggtcaagcatactaaaacctttgaaatattttctagagtgtctatttttacttggcagacgat

SEQ ID NO: 2130 - DNA, 833 bp, Homo Sapiens
  misc_feature (137)..(137): n is a, c, g, or t
aaaagcccatttaaaactaaggtttcccccgtcaggacaagcctttacttttagggaaagtgatgaagattagggcgtaataaccttttgctaatacttcagaaacatcaaaaaggtctgaatatcaggtcacacancaagactcttggaagatattaaaggtgtgaatcatagatcctctcagctatttcagaaaaagcccaaaaacagagacagaattttccaggaaagatacgtgaggagcctcctatctaaatgagtgcatccctgtgacatatgtaaaagacccacaagtttcttgacaacgttatagcagcagaagcaccaccatttttaacagaaagctttagagaatataaaagaagaacaaactgataagttgatactcagctgcaaacgtgtgctaccttttgtgaaaaagtaaagatgactctgagacagtcaacaagcccagagaacagcagtgagctgaagattactcccaggccttgaaacttaaagaagggtgcctcgctggttttgtaaattgattggtgctgatggctcctttttccatctgtttctgctttttgaacaggaacgtgtgtaactattattgtctgcctgtcatgccatcatacttgggaacagataacttgttttctaggttcacaagtgcacagttggaattatgtcccagaaatcacacacagatcctctcccaaacttaatttagatggcttcaatgtgagatttgagacttttgagttggtgagactcagataagattttggatttagagttgatgctgtaataatggattgtgacttttgagcacctatgagtgatgtacc

SEQ ID NO: 2131 - DNA, 251 bp, Homo Sapiens
ataacattgacctcgaccatgtcaagaagaaggtgctcgacgatgccgacaaccgcaaggcgctctggtcgcggttgcagttctccctcgagggcgagcccgatccctggttcgagttcgacaaggcgcaggtcgacgcgcgccagttcgagccgttgtccgtctgagcccgccacccgcatcgagacactggagctgcatcatgagccaatggaaccgatctccgcgtcgagccaatgtgtgactatagc

SEQ ID NO: 2132 - DNA, 208 bp, Homo Sapiens
gagctcggtacccatgatctcttccaggaacagggcccgatcctgacgctgaacaggctgcaacatccagcctgctcaggtccacctggggaagtgaacacctcccagagcacagagagacgttaatgcatctctgcatgaggaccaatagactcgttcttcattgagatcaatctctgtttccatcctcaagagcttggcagcagat

SEQ ID NO: 2133 - DNA, 898 bp, Homo Sapiens
gtgtgtgtgtgtacacagtggctcaattatggatcactacatcctcaacctcttgggttcgagcagtcctcccacctcagcctccgaaatagctgggactacaagcacacgccgtcacacctggctaattattttttgtagagaagggggttttgctacgttgcccaggttggtctcaaactcctggcctcaagcaatcctcgtgcctgggaggatcttaacccaagaagacaaggaatgcttcttgaaagacattatccaaatgaaatacagtgagagttgctaaatactttgttactagtcttccagttaggacttatccttccagggcaaatgttcagacctgggggccgcacattttcctgaatgcattccaggttggcagcacataagacttcaattgagggggaaggtgggctgttcacctgcccaggtgctttagcccaactctcctgccccaggtgcaccctggacagccaagtgctgtctgtggcactgtaatcagtggcgtatttctccttactctatatttaccaagttgatatactggaaggattccaagagcaagcgagtgatagcagacaactgaatgcagtcatgtctttccatgaaaactgcttttcttggctttcttccaacaatggtaggttgccaagagaaaatgcttttggctttacaaatgatctgaccgtagtctggggtggttctggttctgtatgtcattgaaaatgataaatatttctggctattcaattatttagcaaacttttgctcttgatgtactgaactgtgttgtttttttacaccttatatgaatttgtggttttacatgtataccaacttgtggagaaagatgctaaaaaaactccagcttgaaaaatatgtcaggttaggctga

SEQ ID NO: 2134 - DNA, 327 bp, Homo Sapiens
cccatattagttattatggaaaccatcagcctattcataccaccgcggcccggcccagaaatgtcttttatatgatggctttaaaaaatccaggacccatgcaaggttcccataaggtatttaaacttttaaaatatttatactgaatagatgcacaggtcctataatgctaacaagaggcaaaagacaaggaaagatttctctcacaattctactaccacagtttcaaaccaatttctttttcatctctctgttctttaaaaatgaagctttggacagattttctttagttcactttcctaaccatccatgagacaaaaaaaagaa

SEQ ID NO: 2135 - DNA, 587 bp, Homo Sapiens
ctgccaagtcttttttaaagaatctttagatgtccaatctcatgtatcagtgattgactaactgctctcataacagctttcccaacaagcccaaccgtgccacaagcaaaggaagaaacctcaaaagaagtatattaactaagctgaacatcacttccattgaaaacactgtagaatctttagcttctccgcaaagtagactatattatttactttaaaatactctaatgatattcctattccaatcaaagtaagtaaaaggtttaaaggatgggtcagccccactaggatccaacctacatatgtagatatttaccttttcccacagaatctaacaggattgctatgtaagatactttgttaaacagataaactgtgatcttccgtatctaagaaggccttcttctatcttcttccactatgaaaggatctaagaaaatagttttcgatgtaagatatctcaaatatattcacttgaacaggactggatgaggcaaggttaatgtattaccatccatatgcattagtgcattcctgctgatacctaaaggcaataaattcccccaatctgcccatccttttccacc

SEQ ID NO: 2136 - DNA, 1271 bp, Homo Sapiens
tcctgatgccgcccagttgatgttcatacaatataggaatgggctgagtatttgatgtttgctgaaaggcaagaccggatatgtgcctatggcaagttcttggtgttggacagttggaaagttgtgaatagcagtaccagaaaggaccacagatggctgggataaactgctttgcataaaagctggctgagatctatatggttgaagtgaggagctgaacaattcctgagcctgggaaacagcagggccagcccccaaactcagttgggcttgatgctgcccttgcagtggtgcataaatagggattggacatctgctgaactgaagttggctgagagagacctggttggaaaccctgttgttgagccaacggatggcggagccaatcgtgcatgttgggtattgaataaatgacttgtgtccatatagaaggctgggatttgagctgctgcagactgagacacataaacttgcggattctgttgctgctgggcaataagggaaggcatacagcttaactgtgaaaaatgacgtgcagaaggcaggctgcttgtctgtaactgctgaggtttcactttacaaatatttgaagggtccgatgtggttgtagattttgttgctcaaagaagaggtagtgtatgtaccagctcctgatagtgatgctgtaggagtgactgaagcaacaggaatctggggcatggatgcacttgagaacgaattgtaattagcagtgcttggtccactggcactactgctgactccagttgcaattggaggtgctgtggaagttactggagaccccttttcccttacatttggagaattctcccatgctttgcgtgcagactccatcttgaaggtgaggctgaaagtagtgggaggaactgaagttaggctggagctctgttgtatagtctccctcttagggaggggaagggtgttgggcaggggcacattattaaccaaagtatcctccatctttgtattattagtagccacggtgttaggcaaagaagaagagggtgtagtatagtctgttacagactcctttgcattagtaccatattctgcagatgataccgagatcattgttcctatttcagtagacatttctgagactgctttagtctcctttgtcgtgacaggatctgtgcttctgactgtagctgggcttggtttctcttgtccttctggctccacctgttgggcatcttttacttttctatttttttaatgaacgttcctttccaatgggaccagcctcggggtct

SEQ ID NO: 2137 - DNA, 448 bp, Homo Sapiens
ccaaatggtccagagtgactatactatttcacattcccaccagcaatggaggagtgactctggttttgtattcttactggcatttggtgtcatcactgttttatttttgctcttctgataggtgtctagtagtatctcattatggtcttgatttgccttttcctaatggctaatgatgttgaactttctttttctattacagactttttgtgttagaaacagacatgattcgggatgatttttttcctggcttacatgaggagagaaataagagataaggaggttaggttagaagctgttgaactagtctagttgggaacttcagaaggcttcgtgggtggccagtgtgagaacagagagaatgatgggtaagtctgcatggctggatgggaaggattatggaaagaaaaagtaagatgaaaatttgggtatcgatgcctggtgacca

SEQ ID NO: 2138 - DNA, 371 bp, Homo Sapiens
agggggtcgggctatctgtcccaagtgtactggcacaagggctttggcaaggacatggcactgtactcgctgttgagggccaagggagagagggcctatgtagtggagccgaacctcgtgaaacacatcgggctcttctccagtctccggtacaactttcatcccagtctcctctagggtgccaagagatgcctttctgaagttggccacttcttgaagattcaaatatttatctctttatttagacatggttgcctgcaggtatttcactgtttactgttgttagagatataggcactggggcagctgaggaacctcaatatgttaagagccttggtaaggtagcctcctggcaggagcagcagtttgcc

SEQ ID NO: 2139 - DNA, 328 bp, Homo Sapiens
gggggtcggctatctgtcgggctgtaaaacaagtgtctccgtcctggaggttactggaagagctcctgaacaaagtcaagagtagcatgcacttgcagctcaactgtttccaagcagcttcttcaaccatgatgaaaacataaatatctgccacataaaaggagtccaggaaaataacacgtaataagactgttcactctctaagtaccctaaaggtatttggtgtattaaacatagggtttggcatttttctcttttttcttcctctgacttcgaaaattgttggtatacatttcaaccaaaatgacctcatttgaaatgcccagga

SEQ ID NO: 2140 - DNA, 500 bp, Homo Sapiens
tcgcaccccgaacatgtcgggctataatagggtctttaattggcctaatttcaatattgttgtgtctcagaatagggaggcctgagtagaggaagacagggagaattactagtcagcatcgcagtcagaacacgtttctcaagtttgccatcttccatgtgtatggttcataacatcccccaattacaatagtaacatcaaagatcactggtcacagatcaccgtaacagatataacaataatgaaaaaggttgaaatattccaaggaattaccaaaatgtgacacagagacacaaagtaagcacatattgttggaaaaatggcattgatagacttgcccaaggcagggttaccataaaccttcaatttgtaaataaacgcaacatctgtaaagtgcattaaagccaaagtatgcctgtaatgtgaaataatgtcaagcgcataaatctgtgtgggttactactaaattaagtaatccattttgggaggaaggttgaaaa

SEQ ID NO: 2141 - DNA, 627 bp, Homo Sapiens
tagttaagtagcgagcagcaagactgtgtcttgcaaatatttccagctggggagatgtggtcagttgttaccgaatctcccaaatttagcagcacataggcatccactatagatttagggggctgaagatccaaagtcaggtttccaaagaatggtggtgatttgatatacgtagatttggaattccagaaaaacagcttatctgatggggttgctaaggcattccagctttcattcacagtctctattttctgatagacttccttaaacatccccgggatgacatactgacgctccactgcctggatctcgtctctagtcggccagatatctttcagaaatacctgctgtccctttgcatttactcccaatggctctttctcaaagtcgattctgatggttccagcaattgcatatgctattactaaggggggagaggctaaatagttggcccgggtgttggggtgaactcgaccttcaaaattcctgtttccagatagtactccaacagctacaaggtctccctgtgtgatggcttctaccacaggttcaggtaaaggcccactgttgccaatgcagtcaatgcagccatagcccaccacgtcaaacccaagctgagacagatag

SEQ ID NO: 2142 - DNA, 474 bp, Homo Sapiens
  misc_feature (453)..(453): n is a, c, g, or t
gcggctccgtggcatacattaaatcaaaccatgacctccatacattaaatcaaaccatgacctccgaatcttcttagttattttcaggtacaaggttttcagcttcagaaaggacagaggtctccatggttccattttgaagatttttgggtggctactgcttgtttaccagcagtttggtatagaagcccaagacagtccatgtgtggttcaatattgacctaatagcagaataaatttggaccaaacagaagtccttttctttgtcactgtgtttgattaactatcctggatatgctttattctctaaaaacttcatttttgaaaataccatggttattaaacaactagtctttgtgcgtgattaggacataaacatgaatctcacccacttttaaacctttccaagaaataacttttccactgattttattttgaattgttaaaaaactnttagcagggagagaaaatttg

SEQ ID NO: 2143 - DNA, 675 bp, Homo Sapiens
gctctagtaagttggctcacataaatactgttgaatggatggtcttagggacactttgcatccaagaggggatttgaaattaatgttttaggacgcttttcaaagaggaaatattttataaagagaagaatggctaccatcataggaatggtacagatattgagaaaggattcaattctaacaaataaataagaaaacaggatagactgcttaatgatggtgcagttaacataccttctggtcttaaaggactacatactgtactatcgtgatgtacattttatgctctaataaatatcataggaaattattaaagtactaggttcccaccatgttgcaacacttctaaaaatgtctctaatggtgtggttaacagaattgctgaaatgttgcttcattattcagaggatacatgcagatgctgatgaaccagataactctctaaggaatggaatactgcacatttcacagacattatagtggagaataataaaatgttctctcttcaacaaggtgcatgcatttcaatcacagtatttgttagactcagaagaacagtacatacgctttatgaataatccatattatgaaagtaatgatgcacgtagatggtctattatgaataggtttgataaaggcagaaaaccttagccagggtaaatggttaatataaac

SEQ ID NO: 2144 - DNA, 303 bp, Homo Sapiens
  misc_feature (250)..(258): n is a, c, g, or t
agtcgatagtctgtcttgctgtttttctagattctcaatttcctggtcatattgtcgctttttactcatcatttcctgctcaaagcgccggaaaatttgttctcgttgttgctgtagtttgctattgagctgttgttgggctctttgctcttctttctgaagaaatcttaattcccgaagttcctgacgtctgataaaatttaatggtaatgatagagaagacagcaaaaattacacttctgaaatacgnnnnnnnnnaaagctttaaaaattttctttcgagtggaacggtagtaaaagaat

SEQ ID NO: 2145 - DNA, 630 bp, Homo Sapiens
ctagatctattctagaggtccaagcattaccactagctcatcctgtgtctcagatctattgttctctgtgctgactggcttcattcgtaggccttctgtagtaagaggaaaatggctttgggtacttttgacttccatgtccttaacacctatgtctcagacagagatagtatcttttttgataattctggttaaagcacaagaagttctttcattggttcagcttggattattcctggtccaatcagtggggtctgatgtttggattggatgggtgtgaatggtgtacccacctccctaatggggatgcagtgaagtatagggtggttaaccatcccttatcaccatccataccctatggatagattttctgataagaaacacagaagaaaggaaatgatgctaaagagagtaaatagttaactgttaaaagaccaaaacctagtacttgtgtcatctaatagagaatcctatgtacattgtacacttccttttttttagaaaaattaaaataattttaaatagtctttgtgaaagcttcaaagattcttccaggccttatgtgtttgtcctttcagcttttcattataactttatgaaaatattttagccacgacgtgttcggtggct

SEQ ID NO: 2146 - DNA, 801 bp, Homo Sapiens
agtcttcccaacccgtgggttcgaatgaaaggtttgccaccatgacagggtcacagtcagtttatggccccggctgggcactcgatagtgaagcttgggtcgaaaccaatcttctcccacagtgcggtgtccctgtgccatgacgacggtgcccatgagtggaggagcctgaagctcgctaaaggcatcagccatgaatatggctcggaagagacggcgcaaacaagctgctgtgctcaggctctggtccacgctgtagggggccagcagagacaagtcgagttcatagaactccttggggcttagggcattgcccccaaggagaatcagcactcgcggtactagtgtccgtgcaaagaagtcctccaggtggctgaggacactctccagttctgccagggcttgttggcatttcctgctgctcacctcagtggtggcccgaggtttcttcttcagcatctcctctgcctggggagaaggttttcggtaaaagtgcttaagctgttcatagggcagagggagctgctggcgttgatacatgatatgctttagaagttcacaagtaaactgacagcagccttcctggctcacaggcccaggaaacaccactggtaccatgcagtctcttgggcaaaaggcctccgaagcgttgagaggttcctgcgtagagcttgtctcaagtagttctatctgggaggcgtgagtttcttcggacttctcataccactccaaatcagggactgcggctgaggacagaacctccgcctccggcgccgccatcacgacctcccctccgctccc

SEQ ID NO: 2147 - DNA, 924 bp, Homo Sapiens
ggtcccaagggttggtctcgcgctttcggctgcgagctctctgtggtgctggcagcgacatgtggcgcctcccgggactcctgggccgagctcttccccgtacactgggacctagcctctggagggtgactcctaagtccaccagcccagatgggcctcagactacctcctccactttgctggttcctgtgcctaacctcgacaggtcaggtccccatggcccaggcacgagcgggggtccaaggtcccatggatggaaggatgccttccaatggatgtcttcccgtgtctccccgaacaccctatgggatgccatatcttggggcactctggccgtgctggccctgcagctggcaaggcagatccacttccaggcatccctgccagcaggacctcagcgggtagaacactgctcctggcacagtcccctggaccgtttcttctcatctcccttgtggcacccatgctcctcactgcgacaacacatcctccccagccccgatggcccagctcccaggcacactggcctcagggaacccaggcttggccaggaagaagcctcagctcagccccggaacttctcacacaactctttgagaggagctcgtcctcaggacccctctgaggaaggtcccggtgattttggcttcctgcatgccagtagtagcatcgagtccgaggcaaaaccagcccagcctcagcccactggtgaaaaggaacaagataaatcaaaaactctttcccttgaggaggctgtgacttccattcagcagctcttccagctcagtgtttccatcactttcaacttcctgggaacagagaacatgaagagtggcgaccacacggcagccttttcttacttccagaaagctccacgccgcggctacagcaaagcgcagtacaatgcgggcttgtgtacatacc

SEQ ID NO: 2148 - DNA, 650 bp, Homo Sapiens
tagtttgaaatagtttttattggctcgtaagacctttgcatataaaaaaaatacccaaaacactatgcagtattaaatcacaattacatttttttaccaattaaaactacccagaatatacattttttaaagaaaagaaaatcctacagaactgaattctgaaatgacattatgacttaaatactatgacaaaatagataattccttataacattaattcattgcacaaagctgccaggtattttcataagcataaccgctgcaccgagtgcaaatgaacacaatttcaaagttacacatttattcgaaagaactgcgcctccacctatggaactcttaaatttctggcacaaaatgttggtctgttctaacttccaccaggcaaccaactttgcaatccactaactttctttctggccctcccttaaaaaagcaacatccttctgctgtcgtgccctgaggagtcagcacctcctctgcttgaagaaatctacccccctcaactcttcaggcaggtactcctgatccacaggctcgctgtacatggggttgtacttgtagcctttgccatagcccaaatccttcatcaccctagtgggcgcgttcctcaggtgcaggggcacggggggcagtggccctggtggttatcc

SEQ ID NO: 2149 - DNA, 1089 bp, Homo Sapiens
  misc_feature (947)..(1014): n is a, c, g, or t
ggttgatcagaagtttcaatccatagtaattggctgtgctcttgaagatcagaagaaaattaagagaagattagagactctgcttagaaatattgaaaactctgacaaggccatcaagctattagagcattctaaaggagctggttccaaaactctgcaacaaaatgctgaaagcagattcaattagtcttcaaacctaagagcatttacacaatacacaaggtgtaaaaatgataaaatactattttaattgataactagttctttgttaggtataaccacttagttgacactgatagttgtttcagatgaggaaaatattccatcaagtatcttcagttttgtgaataacagaactagcaatattttaattatctatctagagattttttagattgaattcttgtcttgtactaggatctagcatatttcactattctgtggatgaatacatagtttgtggggaaaacaaacgttcagctaggggcaaaaagcatgactgctttttcctgtctggcatggaatcacgcagtcaccttgggcatttagtttactagaaattctttaccttaagcagcacacacatttactacacacacagtgttaacaaagcactgtgcttagagggtaaaaaggaatcacaaaacaagaatctttccaaagttgtctcattcagcaatgttaaggcatctgtatcaaattattttggatgtaaagattcctgtgtctcataatatgaatgtattttttgatatacaagaaactgacataaaatgtgagaaaaccacctataatttaccactgtgaacaattatatatctatctgcttcatcttttctcaaatgcatcaattctctaaaattcctatattgtaacttgcctttttttaaaaaagttagatgctgatataaagtctgcttaattgtcaacttaatgagctctatttnnnnnnnnnnnnnnnnnnnnnnnnnnnnnnnnnnnnnnnnnnnnnnnnnnnnnnnnnnnnnnnnnnnnctgcaacatatttttgtacacaggactttttccttctttcatttttgtttttctctgtataaaggcccagcagtg

SEQ ID NO: 2150 - DNA, 1654 bp, Homo Sapiens
  misc_feature (56)..(68): n is a, c, g, or t
  misc_feature (93)..(143): n is a, c, g, or t
  misc_feature (377)..(418): n is a, c, g, or t
  misc_feature (450)..(697): n is a, c, g, or t
  misc_feature (1475)..(1475): n is a, c, g, or t
  misc_feature (1509)..(1509): n is a, c, g, or t
  misc_feature (1585)..(1585): n is a, c, g, or t
cccccttttttcacaaaaaaaattttggaaaatttaatccctaaattttggggcgnnnnnnnnnnnnntgtgtttttcacagtttttctccannnnnnnnnnnnnnnnnnnnnnnnnnnnnnnnnnnnnnnnnnnnnnnnnnntggggctctcccgtggaacccttgtattccctgccccagggcctcttcaacccgtggggtgaccccccgttttggaaaaacccgtgtctcttttcaaaggaaggaaacccgttcccgggaaaattgcccagcgggagaatttttatgggcatgtttgagagacttcaagaaaccatttgggccacaaggcaaatcccccccaaggggaagcaaggaaccatttttccagttgcnnnnnnnnnnnnnnnnnnnnnnnnnnnnnnnnnnnnnnnnnnacttacagaggctgggtgtgttggctcacacnnnnnnnnnnnnnnnnnnnnnnnnnnnnnnnnnnnnnnnnnnnnnnnnnnnnnnnnnnnnnnnnnnnnnnnnnnnnnnnnnnnnnnnnnnnnnnnnnnnnnnnnnnnnnnnnnnnnnnnnnnnnnnnnnnnnnnnnnnnnnnnnnnnnnnnnnnnnnnnnnnnnnnnnnnnnnnnnnnnnnnnnnnnnnnnnnnnnnnnnnnnnnnnnnnnnnnnnnnnnnnnnnnnnnnnnnnnnnnnnnnnnnnnncagaaacaaaaccaaaaaactacagaatagagtaggggtggagggaagtcatgcatttccagtggctagcactttgcgctctgccttggcgagtatctgcaaacttcctgaccatcaagtgcgcttgcagccatcctggatgtcaactggccacagaccctttgctatggggagtccctggctacatccattagcaagtcagaggtttccttttgtccccatgatgccactctccagcaagctcaaactgctgtcacaattgttttactgtacctaaaaaggaacagataaggcaagagccacagtcaatgttttctgtgaaatggtcttggcaaatagcattaagaaatcttgttgaatttcaaagaaaaggtctgattagaggtgcctgttggaagcagaagcctcaagaaatgaggaaggaaagttaatttgagggtctgtttcatttctgatacagaataatcacaaaaacaagtatatgccgctggctgtagctccccttaggatttggataaccagctggatttccagatggccactcccgttctctatgcttccctcctccgggctatatcctgcagagcttcagcgggaagttctccgtgatgaggtggtcagggtgaagcagcaccacgatgttaacctcaaattccactttgaagttggtggtctccagtgtagggcaggtgaacagcctagggaagaccatgtagatggggacagagaggcccctgccacatccccgtcggcgatctggaatgttctgaatctccgngggcgtcgcgggcatagccttctgcacacccgcnacgtttccacgcgcaccagctgcagctccacgcttctgatgggcggcttccgagctcttcaccccagctctcccgntagtggttgcgtgatgaccaggttgttgagttggggatgtcctccaaggaaaaaattggggagcaaagc

SEQ ID NO: 2151 - DNA, 716 bp, Homo Sapiens
tatagatccagattctattcaaagtgccttattagcatcaggtcttggatcaaaacgacctagtttttcatctacaccagttatctcacctgctcctaacagtacaccagctaacagtaacaccaacagtaacagtagccttataacaagtcaggatgctgtggaaagggctcagcagatgaagaaagacctgcttgataagctagaaaaattagctgaagacctcccccctaataccctggatgaacttatcgatgaacttggtggccctgagaacgttgctgagatgactggccgcaagggacgggttgtgagcaatgatgatggaagcatatcttatgagtcaagatctgaacttgatgtgcctgtggaaatactaaacatcacagaaaaacaacgatttatggatggagataagaatattgctatcatctcagaagctgccagctcgggtatttcattacaggcagataggagagctaaaaatcaaaggcgaagagttcatatgactttagaattaccttggagcgctgatagagcaattcaacaggtcggacgtactcatagatcaaaccaaggtactggctcctgagtatggctttctgatatctgaactggcaggaagaaaaagaattgcatctattgttgctaaaaaacttgagaagtttgggggcacttacacttggggaatagaaggggcaaccgaaatccaagaa

SEQ ID NO: 2152 - DNA, 1863 bp, Homo Sapiens
  misc_feature (1206)..(1210): n is a, c, g, or t
  misc_feature (1212)..(1212): n is a, c, g, or t
  misc_feature (1215)..(1217): n is a, c, g, or t
  misc_feature (1219)..(1222): n is a, c, g, or t
  misc_feature (1225)..(1226): n is a, c, g, or t
  misc_feature (1229)..(1231): n is a, c, g, or t
  misc_feature (1399)..(1410): n is a, c, g, or t
  misc_feature (1557)..(1571): n is a, c, g, or t
  misc_feature (1678)..(1678): n is a, c, g, or t
  misc_feature (1771)..(1771): n is a, c, g, or t
aggcgcttccgcctccggagggagtccccggcccttttatggggccccgcctggagataaagcccctctcccgcccgcggaaagaagctctaaacggcttgttcggcctcgggggcccttccggaggaaccccagagcggctgtgtatgggagctcatagcgcggtcgaaccgtcggcccggagggcgccaggaccctgaggcggaggcaaaccccctttcattccctggggggaaagcgcccgcgaaacccggtggagagaagccccgcctgggcctgcctgagaggcccggaagagggaagtctgtccaccgggggagccatcgccttcagtgctgcagggacggcaccgaggagtctgagccgggggcccggcgccttcccgcagagacctgcgcccacaggtgctgtcttagtggactgggacgggaaccatgtcgctctccttctggactgggagaagggaggcttgggtgttgtgcttttttggttttgtttgttcgtttgttactaaagatctcagtcagggtcggacttcatttttgtactgtgggctgtagctggccctgtacaaggtgtgctcaagagttggttttgcgtatccaacctcggagaattgccatggcactccccttcccccctccgctgacatacttgtataagcggtcatcgttgcgtcatggggcaggcgtggggagcttcctgtcgccttgcgtgggtgtggggcctgggaggaggtcctggggcgtgcacccgccctgggcagtggggaggagagtggcctgagttacttcacccccgcgtgctgctggttaatgtcccgcgtctctgcaccttcgggtgggagcggggactgatctactttcacattctcaagtttttctcatctgcattagaggtgcccagtaggttcccaggttccagcgtgcccctccctcagacacacggacacaatcagccgagaagttcctggtctgaatcacgagaatgtggaggggtggggggtgtcagtggaaaggcataaggctgagctgagaccagttgctggtgaaactgggccaatctggggaggggaacatccttgccagggagtttctgagggtctgctttgtttacctttcgtgcggtggattctttttaactccgtctacctggcgttttgttagaaatgtcagataggaaaataaaaaccatttgagtaaaacnnnnnanaannncnnnnaannaannnccttgtccggccgccctcgggccctcgagaaagcttttctaaacccattccttttgggccgcgccgggccccacataagggaaagagggaacctgggccccataacctgggtttcccaaggaaaaacccggggccctggacacaaagggcttgggaattccccccccnnnnnnnnnnnncccccgggggggaaaccacgagaaggttttttgaaaaaaaatccccccaaagggaagttcctctcagggggcatttttacggggaatctttaccacacacggggatttcccctaacccgcgacccccccacaattcaaaaatatttnnnnnnnnnnnnnnnggtgaccattttatttcatgagaaaaaggggggggtcggaatcttctccaaatgcactttcctccttcgcccccccctatgggagcacccaaccctctcccctaaanacaccgccgcctctttgataaaacacatgtgaaagcttcccgccaagggcgaggtattaaatcaccaacctctctttgtttcctactcccctntcgccggtacaaatacaataataattcctttccgcccccctggtgggccaacaaaccacaacccgtgtccttaacaaaataccaatctctcg

SEQ ID NO: 2153 - DNA, 1259 bp, Homo Sapiens
  misc_feature (49)..(62): n is a, c, g, or t
  misc_feature (70)..(80): n is a, c, g, or t
  misc_feature (100)..(108): n is a, c, g, or t
  misc_feature (160)..(267): n is a, c, g, or t
aagaggagagggagggccccctctcggtgtatttatccccccccccccnnnnnnnnnnnnnngggggagnnnnnnnnnnntaattatttatttccccccnnnnnnnnnccccccccttttttttctacacaaaatttttttccccacccaacttctcttnnnnnnnnnnnnnnnnnnnnnnnnnnnnnnnnnnnnnnnnnnnnnnnnnnnnnnnnnnnnnnnnnnnnnnnnnnnnnnnnnnnnnnnnnnnnnnnnnnnnnnnnnnnnggggcccaggaggggttattttttccattccctccccaaggtttccagggaaattgggacccctggtttcaggcttttttcaccaggggttgccctccaaaacctttggtgccttccgttggcctcctttctcaaaagctgggcatcctttaaaagatgactttaccttcatagccttcatactttttgaacaaggctaatttttcaagtagttactttttcttcaattagtccagaaagcattacaccaagcttgtgctctcgtcccacataaagccgactcctaaccgatctaaaacttctccacaaaaaaaagagaacaacaaaaaatccaataacagctgcacataccaccagttccgatggaaaaccataaggattctcatctggtctcatactctcaggtagtgctgccacaactctgcgtagctcctccaggaccagccccaggtagggctgaggggtagcaccaggctcctccatagcgtcgaggctgctctggcggtcaccgcagtaacactggccacaacaagcggtggagaacacgcagccttgggtctggaacccgaatgcgcacgtgacaaccaaccggagcggaccactgtggagcgggctgcggggggagctggggaacgcgggcacccacaggcctcacaggcccatgttgtcccccaccacctcccctggccctcttgttacactttacatcctgaggcagcgctggtctgagcccggcccgccttagttctggcagttttcacatcacatattttgaagctttattttttggtgaatacacttttaaaatggctgtcttcttcatggattaaacctttgatcattatataatctctggtttgggtagttttctttgctttatctgatatgcacacagacactcttgctttcctttcattaatgtgggtgtaatatatctttgtcatcctgttaattggcctgccctgtattggtaaaatcaagtgagttcttga

SEQ ID NO: 2154 - DNA, 448 bp, Homo Sapiens
ttaattaacaaaaaatttttattaggaaattaagtcaatgtatatcacttttctataattagttttcatttagacatttcaacttttatatttaccttgaactatttttttactgtaaaacacgttatctatcgtaatcagaagcaagttttacctccaatgctatattgaatttgtccattcttccaaacgaccaaaattctatgatgtccagtgtctgctattaccaatctatcagtaacttggtctactgttactttgccaggaaatagcaatggtgaaggtggcaaagaatctttatagagttttattccaattttattatctctgatctgccccctgtctttgtaatactttaaagcaactgaagtatataaaaataatttatctttgtgtccctctccaatcaaagaaaacaacatgtttccacgagcgtccaagtagacag

SEQ ID NO: 2155 - DNA, 632 bp, Homo Sapiens
ggtatctgaggcagctacagattgccctgcaagatgagtttttggagataaatgaaataactggacacacactcacacaagtaacaccacagcagacctcggagtactgctaagtgtacctgtgtcaaatccgcacaggactcaatatagcaatttattcttgatgtatgcaattgcacattgtaattatattaacagagcacactaataatttgtatagattatatatattagatcttgggtatggtttttaccttctcccatggggaacttcttccttcctgatgtggaattgtacatttaaagcttggtcggtgacctttgcataccatcaacgagcacagctaagaacagagtgagagaggcccatggctgattttaccatgtgcccagattaatgtatatagttgattggaatgaggttttatgaatattcatgtttttgaaggcctttaatttctgtctgcatattagcttttaatgtgtgattttaagagagaatactttgacacctgtaaaaatcaaaatactactctttataagacatttcacaaatattcacttacattacaggctggaagtattttattcatatgtatatttataccaataaaatgattttacaagtggaa

SEQ ID NO: 2156 - DNA, 1108 bp, Homo Sapiens
  misc_feature (174)..(200): n is a, c, g, or t
  misc_feature (385)..(395): n is a, c, g, or t
  misc_feature (990)..(1068): n is a, c, g, or t
aatttcaagcaaaaagtttctgcttgattgaggctcagttatcacctgaacagaatgtacttctttatgtacgtgctaattatgaaaatcacaggcattgacaggtacggtacccagccccacccaggcaaacagctccgacatgtttcgtaagtgagacaagccagtgcaagnnnnnnnnnnnnnnnnnnnnnnnnnnngtcttttgcttaccttcttgcttaatggaattgttatggctaagcacatagaaggccaaaaaaggagttttccaaacccagcaaatcaagtgcttggattctgaactgccaaaagaaaactgcacttcccctcttaagtaaaacgaaatgagtttcttaggtaaatgtattcatcagcccagatnnnnnnnnnnnccagttatgtgagcgttagtcactgctcatttccaggaagatcaaacaaaataccagcccagccagactcacatgtgtgtatatatatataaagcaaagagccacacccacaagccagcagctgggtgaaatatcagctgtccacgccgtggtatgccaattcggggaaattactccttggaaaaactggaagaatctacttgctggaaaaaatagcttcatctgcataaaaagtgttctacaaaagaatccctgtggttagcttactcttaggttagatcttctaataaggctgaaattcaaaatcaaaaccttagtgtgtccgagtccagcctgggttccagcattctgttcaggccacttctgaacggccgaaggtgccccattccagacctgcccatttgatggacagagcagacagcccggaacagattcaagcaagaaagtcctccgcacatcgttaaattaaagataaagcctctataaaagttaggttatggttttcatttttacctcctttatggccattttgaaatatttcttcacaggctgtggaattttctagctaaacattctagtttctccttaaaaaaannnnnnnnnnnnnnnnnnnnnnnnnnnnnnnnnnnnnnnnnnnnnnnnnnnnnnnnnnnnnnnnnnnnnnnnnnnnnnngaattctgcccacttttttaaaaaagtagtatactttccc

SEQ ID NO: 2157 - DNA, 1140 bp, Homo Sapiens
ccaccaaggttgtccctggaagaagtaaaagatgagcccggacgtgatggagatggggaggccgggcagcgccttcttgaacacagcaaacagcaggagggttcagacacaagccaattgaggatggccacgtagcaggccagcgtggtattccaggtccccgcttcccgtggcagccgccttgcccaccagcacactgtagaagatgaaagtccccgaggccaagcttcacgcccctttcctcctcttcatccagctcctcccctgggtagccatcaaagggaggctcaaagacttcggggtatgaaggctccccaaaactgttcataggagtcttcttccatctccgggtcgtaggggagctggagggcaccctgagaggaggggtccagcttcgccatgccaaccgtccacaccatggcaggatgagtatatcagggcagggtatatgggctcatttctctcctgggcagtttctaccagcattctcagaggccctttgggacacagcacagccacgagatcatacacagagatggcgcccaggatgacccacgcggaccactctgggaggtacttgatgaacactagggccatgagcgcactgatcatgatgaggtaggcctgctgcagcaccagagggcccttccagtggatgcacaccatgcccactgccccgaagttccagacagtcagcaagagggtggggtagtccatggccacattgtaggtcttgagcacttccccaaggtagatataggtgaagaggaacagcagcatcagtgaagacatgatcaaccagccatggatgaacacgaacacttggggccgcagagaggtctgaatcccggacacttggtttcttcttctcagcaggctaaatgaatgatgctccctggctttcaaagagggcagcgctggtttttaacacgtcactttctatggtcacacagctccctcacatcactctcctgacgtctgagaagtcccacgtcctcgctgggcgaccttgggaaaagtcactttagctctgtggcctcagtttcttcatcagtaaaattcagaggggggactagcttctgtctcaggttccttcagctccaaaagcttgcttctggctgtctcctcactgctggaaat

SEQ ID NO: 2158 - DNA, 474 bp, Homo Sapiens
  misc_feature (123)..(132): n is a, c, g, or t
  misc_feature (156)..(169): n is a, c, g, or t
gattacaaaatttcaaaggcattaagcattttagagaatataaagtacgccagtatacatacatttccagtatatgtcagaccactaagcgcattacagtcccatacaggccgatacagccannnnnnnnnncttaaaaaacatgcataggcagannnnnnnnnnnnnnacagaatatagatgctttatcactgtacttaatatggtgtcttggtcacgatacttaaaaatgcaccactcataaatatttaattcagcaagccacaaccaagacttgatttgatcaacaaaaacccctaaatagaaacggcaaaaaagatagatataatgatgccagttgttttaaaactgaaaagatattccattgccgaattaagaagaagataagtgttatatggaaagaagggcattcaagcacactaaagaaacctgaggtaagcataatctgtacaaaattaaactgtcctttttgcc

SEQ ID NO: 2159 - DNA, 194 bp, Homo Sapiens
taagagtaatatacgtcccctagtcaggaaagcaaggtctaagaaggaaaacaaatgaaaaaatgaaagaagcagcaggagaaagcaagtcatgtgctctgttgaccacattggaagaggagggagaaatagcataggaagagaacctaagagaaagcaaaaacaaccaaagtcctcttgaacaataaatagag

SEQ ID NO: 2160 - DNA, 291 bp, Homo Sapiens
atcgtttacaagaatactctaagaatgattgacagcaataagattatttttgttaattaggattttaaatttcttattttggttgggagattagaagaaatagcctgtgaaaaggttcttccaaagtggaatgaagtaaaattttaatgtcaaatgattccatgtgtctaacatgagtgtcaagtgaaatttttaacattctcgggatattaccaagaattcatctaaacttttgtttattgatattcatcaagagatcggattagtatttttctcttaacggggtcctcg

SEQ ID NO: 2161 - DNA, 1035 bp, Homo Sapiens
  misc_feature (491)..(499): n is a, c, g, or t
  misc_feature (842)..(842): n is a, c, g, or t
ctggaaacgcccaccacgggggctccttgttacacatgttctttttttatccgatcaacctgtgcacttttgatattttgatattatatttgcttccttaattcctcgcgtagagacggtctcaggtgccgtggtctatgctcgtggtcctgtagctgtccgcctcagctcccaccgtgtttgtctggtgtcagcacgaggcagagctgtgtgctccatagcgtgtagctttagactcggagatgagtgctttgacccagcgaggagctcagctaagtgtatccacgctgtggttcagcagcctttagatcatacggcattgtggttcatgtttgaaattacagattttaaatgccatgttcattaagaaatccagggtattcagattctggggtttttcatattgtattattattattcttaggaatagttcaatgtaacaagaagaaaacttgacctttgctctggttaaaacagtaataggcacttgnnnnnnnnngataaattattgaatgagtagtattacctacaaattccagaattttctgggttttaggacgttgtgaagcatgactgattaacagaattttatacaactgtaccaataaaattccaaattggaattgttttgttactctggttgttgtgccaaattgtggtacacttagaaaattctacagtcgtcgatttttagggtgttctctttcaacacctttttgttagtaatcattgccagtagtgccttcatcagttaagggaggtgtcccagcacagatcattctcaaaagcgagcagggaagagctagtgggcatgctgaaggccagcgtggacagcaggtgangcaggtgctcctcacacccagacctgggcatcttcattgagggaaaagaaacagtcattgtgcaaaattctgttagtcagtgattctttacttgcaaattcaagggcttagaaaatgaaagccaacacaaaaacctttgagtgtgcttttggggaacaaatggacctttctgggaccaagcttgagcaagctt

SEQ ID NO: 2162 - DNA, 896 bp, Homo Sapiens
acttaccagccgcatacatgatggagggttttttggtcctgatccagtggccacacctgtctttgaaatgtctcactgaactccagttttaaaatagattcattgcttcaacacagcaagcccaatgcacccagctaagactggcttgaccgacagcctggcctttggtggggggcttcctggggcctggggaaagctggccaccttcaacagctggtacctcttcaacagtgtggcctttcaaaatgcagatgccaccaggagaacatggccacagctcaccacctatggatgccatggctctgggcagctttcaaagcaggttcctgtggtctcctcagctgtttgagggggtaacagcaaatcagcctccattttaaaatgaaaacaccagcctccagatgtagggcctgctgggtgttgctagccgctggtccccaggcacggtgcactttctccacctcctgcagcctccctgttgtttctagactcttgcacctggtgagtgcaaggataggtgacccaggggcctgcagccttgtcctcagctcccatctcctggactgccagcctcaccctctgcagttagcatgggtggcctgatgcagggatcccgagggattactttttagaccttctttcacattcagaaaagtagtatagattcaggagaggcaagaaaattatgctgtccatagaagtcacccatgaagactgatgccaccacctgaaggctcatgattgttaaaaatgtccacgggaacctctcgtccacaggaggtttgtctcaacacttcccatttttacggcattggattgcaagcatggggaagtatctgctcttctcatgttaaaagtggcccagcttttcttaactcagtccaagctgacttgtt

SEQ ID NO: 2163 - DNA, 499 bp, Homo Sapiens
ctatctgtgagctcatcctccccgggctcctccagaatatccctgaacaggagctccacagtcatctggtaggtggcctctggggtcccagcaaggggctgcaggtggctgcgggggtcccacttgtgaaggaagttctccagaatcagggccagaaacaggttgacccagatgacagacgacaccagccaccacaatacaaaatagatcttggaccacgggcctgagtagcgccgatatgcatccagaaacacctgccagttgttcaccaccatcaagttccacagagtgaccagggcagccgcaaagtcatcgaagttgttggcccagtactccagctgctcgaagctcccacagggcgccgagccattggcaggggccaggctgctgtttccaggaagagccacagtgacgcctctaaacaagttgatcccaatgatggcaaatacgtagtagaccaccaccaggatcccgccaaacgcacgcatgttctgcacca

SEQ ID NO: 2164 - DNA, 535 bp, Homo Sapiens
ctttgtgaaagagattttatgaggcttcccaaaatgaagcagttattcacttttaccttcagggtgctttcacaaatgagctactggagtatttttcgtatctttggttgatgaaaaggctcatctccaaacttaatggttgtaccaaggtgtttacattccttcaacaagtcactgagtgctttcttggaacacacagccttgcactgggggttatggggagggaggaagaggctggacagggttactgcatactgccggaaggagattctcatttggctgcagagtgtcgcacaaagtgactccctaaaggcgtctgaaaccaaaagcattttgaggattgttacaagacaccgtgcctggccctcctaatctgtttttttaagaaaagtgaaagatctaggttattacatgaaatttcctgatttttgtatcttggcaacaagttaagattttacaaaaatgttacataggtcaaagaaatacttgtctgactgttgaagcagacagtgaagaaggggcacgtatattctgg

SEQ ID NO: 2165 - DNA, 815 bp, Homo Sapiens
  misc_feature (582)..(592): n is a, c, g, or t
ctgtgtacggttgaatgccactcttgcaaagacagcttgggacacactggccctcttcagctcatctctaacttgctggtagatatcaagagagacttcgcacggaaaagttggtaggctctggcttaactgctctggggacgggtggatggttcatgaactgctggttgatggcttgaggattgctggtgagccatgagccggctcactgcaatctgttggtttatcagatgggccatggctatttgttgccttacaagttgtggactaagctggggagaaagaagaccagagctcatgatgggctgtaatgcgggcacttggtttcggattggagtactgtggtgaatttggctgtgaggagactgttcgttggttttccccagggatgccagctggttcatatttggtaaatgcattggacgctggcccagaacacaatagtctgaaaggttttctcgttccactctttccactttaatcttcttgtactttttataccatctcccaaactcctggcacttggttgctgacacattggcataatatgtgctatttacaatggatgaaatcatactctgnnnnnnnnnnnttatagttattttttcaaaatatgactacttctttttagggacaagaaagagcactttataacctgcactaacctcttttttcttttaaacttaaaacagtcactctcctgtaaactgaactattaacatcaaacacgattacctgaatttaccatccctttaatttatacaacgatagtgctttctccaaaaagccaaccctggggcaatgtcaacaatgga

SEQ ID NO: 2166 - DNA, 640 bp, Homo Sapiens
  misc_feature (342)..(351): n is a, c, g, or t
aaaggttactagccactcactactcacctgcctgagatagagaaaaaaacttaaatctgtccagcttcaggaaggtatgaaaaaaacacggtgatgcagattagtaagacagtagaatcttttccaaccttcttcaacgactgagaataagcaaaaagaacacacttaaaatgccaatacacattaatgttgccaatgttctgggacatcagcttcattattttgatctattaagatgaataacaaaagtcaaatggttaataaaaggaagttctatcaccatctttctgaggaagttacaagtcttaatttcagaggtatatatttcaaatcatatagctnnnnnnnnnngcaaaagactaaacccacaaaacacacttaatcatctttgttaacacactgattaaaatccctgaacagatcccgaacttcctataaacagaacctggaaatatattcctacagaaccttttaagaaaatcacttctctcaattcataatgtaacttcggtaaagccatattcagtacagagagtatccgcataggtaaattcactctattcttcaaagtgaacatgttcaactcttatatctggtagacaaataagtacgctccagccgcgacatgttaggggaatct

SEQ ID NO: 2167 - DNA, 740 bp, Homo Sapiens
gcgaaagcctttgtccttggttcgccctccccccgtatacatcctgtccccttctgggctattatgctgataattggaaagaccatctaagggggaaagatcctccaatgacgaaggcattctttgacacagctgaggagagcccattctgcatgtatcattactttgtggatattataacatggaacaagaatgtaagaagaggggacattaccatcaaattgagagacaaagctggaaacaccacagaatccaaaatcaatcatgaacccaccacatttcagaaatatcaccaagtgagtctacttgcaagatttaatcaagatctggataaagtggctgcaatttccttgatgttctctacaggatctctaataggcccaaggtacaagctcaggattctccgaatgaagttaaggtcccttgcccatccggagaggcctcagctgtgtcggtatgatcttgtcctgatggaaaacgttgaaaccagtcttccaacctattcttggcccagagttgcagtggtaactgtggccaggacacatggccataaataatagaaagaaagctacaaccacaggctgttggaaagcttcacctcacctttctgcaaagcagcaaaaagtatgaaaaaaaccaaggcttttttcagtagcgtcctatggatgtcacattgtacatcaaacaaccttgtgattataaaacgatcctgggaaggagcccctaactagggcagtcag

SEQ ID NO: 2168 - DNA, 537 bp, Homo Sapiens
acatgtcgaggctttcccactttcaaaagcattacattataagctatgtggccaaaacacaatcaataaacaaacacacgcagacagatacaactaaatacacacaaacatacatgccacaacagagagggtctttgattcttaggatcccccttttctcttccatccattaattcctaactacactgttcttctctaaccatgtaactatttctcaatatccatttgtcacatgtaaaatattctcaagaccactcctagccttgtatacctgagacctgtctcccataccaacaccatcacttaattaagaaacaatggcactaaagctttgcttacaaatctgtgaaacaaaggtcatcccacctgcctaccttcccacttcaccttactaataggaggtttaaaggagatatgtgcttaagtacaccaaagaaccagaggtaccaacagggttaagatacgccttgaatccaagaaaatcccctgaagcagcatgtcaatactgagtaacacaaccattccctaggctatcac

SEQ ID NO: 2169 - DNA, 546 bp, Homo Sapiens
aaggactcaaacagaggccggatgaggatgctgaacacccagaacttccagttgtgcagcgtacgggttcggacgtagtcatcaaacatgtctcgcatctggtcaaaacgctggtgtgtgatgggtacccctgtggcgggcagctgctgctggcacaggttaatggcggcattgagctcctcaatctcatcccgcagctgctgggcctcctcctgcaagcccgcacgctcctgctgtagcataaggatgtactcagctgtcttctgcagcgtggtagctttgctcaccttgaggctgggctgggcactgagtgtgctcacgagcccatgaagggtgtcaaaccccagcttgatgttgaagcgccgcttctgctccgcggagatgtgtgtgatacgccggttctcggtcttgttgctgtctggacggccccggctgaggatgggttgcgggggagagacacgcacgctcagagtcccagggcctggcatggagctgaggtcccctgacagccgccgttcactgcctgtggtagggacagacagaccc

SEQ ID NO: 2170 - DNA, 740 bp, Homo Sapiens
cgttggagtggctggatttggatggagatctcgctgcctcccggctgggtctctcccctttgctttggaaggaaaggagagcgcttgaagagcaatgtgacgaggaccatcagacaccgagggatggagagacatcccacagggcccagattcagcagcagcagagctacgtagaggatttgaggcatcaaatcctagcagaagagattcgagctgcgaaggaactggaatttgaccaagcttggattagccagcagattaaagaaaaccagcagtgtctgctcagagaagagacctggctggccagcttgcaacagcagcagcaagaagaccaggtagcagagaaagaacttgaggcatctgtggcacttgatgcttggcttcagacagatcctgagattcagccatccccatttgtccaaagtcagaaaagggtggtgcacctgcagctcctgcggagacacactcttcgggcagcagagcggaatgtccggcggaaaaaggtctcattccagctagagagaatcatcaaaaagcagaggctgctggaggcccagaagagactggagaagctcacgacattgtgctggctccaggatgacagcacccaggagcccccataccaggtcctcagccctgatgccacagtcccacggcctccatgtagaagcaaattgacgagttgcagttctttgagcccccaaaaaactctgcagcaagcacatgccccagctacacag

SEQ ID NO: 2171 - DNA, 233 bp, Homo Sapiens
agcatgagccactgtgcacagctgaaattttttgacttagtctttttgtacatgtgatattttattcatagaatccataaatggaagggaaatttctgagttcagagcaatacatatgatacaaaacttgatatatagactagagtttcttagccgaactggaggggctggcttaggtaatccatggattccctgaaactggggacaccattggaaatatgtgtgagctcagg

SEQ ID NO: 2172 - DNA, 134 bp, Homo Sapiens
acgcacacttcactccctttgccttcctgagctaaagaagagtagccaaaccgccccaaagagaaatctcatccaggttactctagccggaagatcaatggaggtaactaatggaccaaccaagaaacttaagg

SEQ ID NO: 2173 - DNA, 494 bp, Homo Sapiens
  misc_feature (279)..(309): n is a, c, g, or t
tcgtgaaactgccccccacccctcagttaattgcagtctaatgtcaagaggcacttctttattaattaccaaatagtctttgtgaccaaggactaacatttttaagttactcagctctatcctcatgggcctatatatttaatacctccaaagatattttcaggataggctttgtatacttttattggttatttagaatccggtggtatgtttgtggtataggaatgtcatggtaaattgtttttcaataaatattttgaaacatgtttccatatgaannnnnnnnnnnnnnnnnnnnnnnnnnnnnnngtgcacatacagcatttcctaggataaaaataaacaaatgacttacagcctcatcctccctaactccatttgaactcaacttagctcacactcagtgataaaacaacatggtatgtagaagcctaggatcacagggtgataatgtcaattggcagccagttgtgtttttttgaaacatcattatt

SEQ ID NO: 2174 - DNA, 551 bp, Homo Sapiens
gtcacagagtggagatgccattccagcctttttgccatatggccagctgtctccaaagagattggaggtatcagccagcccagggcttgcccatcagcaagcaggagagtgtgggggctcagataaggtccttgtgccagggtgtacactgcaccagcaacttcaatggtgatgcctcaactggcctgctgcaggcctcaaaagaggctggaatattccctatgatggggaggagaaagaaaactactaacggccagaatttatttacaatgacggtacaacttacattgatacaagcaatttggccagaatttatttacaatgacggtacaacttacattgatacaagcaatttaaaagtatgatcttatttctgtgtctgctctgcaacatcagtgctattaggatctccatttcataaatgagaaagctgaggcccagccaggttattcagcttgccctaggcacacaagtaagaaggtgagtgaccataaataatttgctgtcagatctgtattccgagcaaagctattcaacataaacgcaaagtg

SEQ ID NO: 2175 - DNA, 816 bp, Homo Sapiens
catgccttcacctcacctatagctcagtcagtcagtatttttttaaacattcaatagaaactccattgtgcctatcaacctcagagctccaggcaagtagaacgcatgaaccacacattaaaaacactcttacaatattgatcttaaaaaccagtgtaaattaagtaagtctccttcctttagccctacttagagtaaagtgcaccccttaccaggctaagttctcaccctttgaaatcatgtataagaaggcgctgcctatcttgcctaagctaaaagatgccaaattagcagaaatatcacaaattaatttattaccagtacctatagtctctccaacaaggacaagagatcatcccgcctcttgtttgaggagcccatcccaatccaattcctgacctgacaaagtcctaccattcgttccacccaggagaacctagtgtttgtttaaaagttccaaaaagaaagactcactcctgcttagaaaagacttcacgactccaactgctctgaaagtagacggcattcctgcttaatcactcccacatcaaaaaggccaacagagcccagctaaaaacataagtccccaggcctaagtcaggccccttaaaactgtgcctaagtcaggtgaagccattagattcattctttttatctacctcacttatttgtttttgccagttaggtcctctgtgccttcctactcctttctcctcacctctttcatgacaggatgtgtatttgcaaacgccacttagaaggccagtacctccaaggaagtctcctttgcagctgatttatgtgtactgttcccaa

SEQ ID NO: 2176 - DNA, 653 bp, Homo Sapiens
  misc_feature (527)..(527): n is a, c, g, or t
catgtttgtaatccagcactttagagggcacggtgtgaggatctccttaggccaggattttgccagcagcctgtgctgcatattaggagtgagaccttgtctcaaggaataatgttttgttttgttttgttttcctgaagaaaagactactgagagccagtaagactgaaagaatggacatcttcatatcctgttagtttgagtgtgaatttgtacagttttcatacagagtggctctaggtataaaaacttttgagatgttaatagcttttgacctagtcattctactcttaaaagtatcttaaaggaaataatctcaaatgtgagcagttttacgtgagggaggatattctttgtagcataatttatatgaagaattagaaacaccctaaggtccatcagctaggggaggacagcagaggggacggggaagcatcaggagggctcggcagccacaacaggggctgggccggcatctagcaggatccaggtctttgtgggacaaagaatcttagagaagcaacggngacacaggctgtccactgcagcaccagtgagttcaccaagacgaagagttgagcacagagtgtgagacagggatttgcaatgaggagtcatttaccatgagcgtgtatacatgactcaatattgta

SEQ ID NO: 2177 - DNA, 643 bp, Homo Sapiens
  misc_feature (93)..(93): n is a, c, g, or t
  misc_feature (631)..(631): n is a, c, g, or t
catgagccactgcgcctggcctggttcattgcttcttagtgatgccttgtcaattaagccctctcaagtagctttgagtgtcttccagtctcntgattcaggtggctgtgtgtacttcttcggaatcagcattatgaagcctcaatatgactctttatttccatttactaataactgtagtaacaagttcagaaagagcctcttatcgaaactgtgctttccaaaatgagtttcatgttctcacaaacttgggctcctttttccttttgtgtctgttgttttatgaagcaaataataggcagtcctataattatcatgtatcttagcctaaaaaagacttgcagtttctactgtggcattaaagtgagggctgacctactttgcataagcaaattagcacaaggaagtgttagtaacccttcatccacaggacacctggagccttctgagatacccttttttttcccagtgtgcaaatcccaagcttttccacgaggggcacacaatgcatcttgagcccttttgtagccagggcagtttggcttcctgcctagggtgatgatgaagggtggagagcagccatcactccaggcctgccatcctgtttctttccttcccagccacgacatgncgggggatcctc

SEQ ID NO: 2178 - DNA, 1435 bp, Homo Sapiens
ggggccgcgggtggaagaagatggcgtcgggtggtggtggctgtagcgcttcggagagactgcctccgcccttccccggcctggagccggagtccgagggggcggccgggggatcagaacccgaggctggggacagcgacaccgagggggaggacattttcaccggcgccgcggtggtcagtaaacatcagtctccaaagataactacatcccttcttcccatcaacaatggctccaaagaaaatgggatccatgaagaacaagaccaagagccacaggatctctttgcagatgccacagtggagctatccttggacagcacacaaaataatcagaagaaggtgctagccaaaacactcatttctcttcctcctcaggaagccacaaattcttcgaagccccagccaacctatgaggagctagaggaagaagaacaggaggatcaatttgatttgacagtcggtataactgatcctgagaagataggggatggtatgaatgcatatgtagcctacaaagttacaacacagacaagcttaccattgttcagaagcaaacagtttgcagtaaaaagaagatttagtgactttctgggtctttatgagaagctttccgagaagcactctcagaatggcttcattgtccctccacccccggagaagagcctcatagggatgacaaaagtgaaagttgggaaggaagattcttcttctgcagaatttcttgaaaaacggagggccgctttagaaaggtaccttcagaggattgtaaatcatcctaccatgttacaggaccctgacgtcagagagttcttggaaaaagaagagctgccacgtgccgtgggtacccagacattgagtggtgctggtctcctcaagatgttcaacaaagccacagatgccgtcagcaaaatgaccatcaagatgaatgaatcagacatttggtttgaggagaagctccaggaggtagagtgtgaggagcagcgcttacggaaactgcatgctgttgtagaaactctagtcaaccataggaaagagctagcgctgaacacagcccagtttgcaaagagtctagccatgcttgggagctctgaggacaacacggcattgtcacgggcactctcccagctggctgaggtggaagaaaaaattgagcagctccaccaggaacaggccaacaatgacttcttcctccttgctgagctcctgagtgactacattcgcctcctggccatagtccgcgcggccttcgaccagcgcatgaagacatggcagcgctggcaggatgccctagccacatctgcagaagaagcgggatgccgaggctcggctgctgtgggccgactcgcctgatgaagctgcatccagagctagaaacgagattctcgagtagtagactctcgcctacgtcaatatgaagacagtaaacgttcctg

SEQ ID NO: 2179 - DNA, 1045 bp, Homo Sapiens
  misc_feature (759)..(781): n is a, c, g, or t
ggactttaggaacacacagagggtagggatagtggccctggccgtctatcctacccctttagtgaccgcccccatcccggctttctgagctgatccttgaagaagaaatcttccatttctgctctcaaaccctactgggatcaaactggaataaattgaagacagccagggggatggtgcagctgtgaagctcgggctgattccccctctgtcccagaaggttggccagagggtgtgacccagttaccctttaacccccacccttccagtcgggtgtgagggcctgaccgggcccagggcaagcagatgtcgcaagccctatttattcagtcttcactataactcttagagttgagacgctaatgttcatgactcctggccttgggatgcccaagggatttctggctcaggctgtaaaagtagctgagccatcctgcccattcctggaggtcctacaggtgaaactgcaggagctcagcatagacccagctctctgggggatggtcacctcgtgatttcaatgatggcatccaggaattagctgagccaacagaccatgtggacagctttggccagagctcccgtgtggcatctgggagccacagtgacccagccacctggctcaggctagttccaaattccaaaagattgggcttgtaaaccttcgtctccctctcttttacccagagacagcacatacgtgtgcacacgcatgcacacacacattcagtattttaaaggaatgttttcttggtgccnnnnnnnnnnnnnnnnnnnnnnnaattcttggagggggaaataagggaataaggccaaggaagatgtatagctttagctttagcctggcaacctggagaatccacataccttgtgtattgaaccccaggaaaaggaagaggtcgaaccaaccctgcggaaggagcatggtttcaggagtttattttaagactgctgggaaggaaacaggccccattttgtatatagttgcaacttaaactttttggcttgcaaaatatttttgtaataaagatttctgggtaataat

SEQ ID NO: 2180 - DNA, 851 bp, Homo Sapiens
catcattcgaacattgcgtacattggaagtatagcattctatgtaaatgtaatcctcagtgaggttcctcagtgctaggtcccataggattgtcgttgcccttgttaatgaggtttctctgttcagcggcttcactttttttctctttgtacatctagttttgaagatctacttcaagtttgaatcttctagaatgcttgtaagtccagttttaatttttagagtcaatttgtagttacatgtagtttaacttttgggaaacgtcttaacattgttctgaataaacttgctaatgaggtcaggtcatggtacagactgatgcagtcaacatgatttcattgcagagtttattagtatcagcaagtttttgctttgctaaataaaagtactcaatgaacacaattctacataaattttgacataccatctaatttataaaaatcaataaaaaaggttttggtaaaactttttcatgccagatgctgtttacaacaatgaacatgccaataaaacatttgttcattctgttgtgttattttagtcattaaacttctgtggatgaagaatctgggttaagaatagatttgtcatctttaaatatgacattttgtaatgtgtattggatatctcatttctatgataaaggtatatttacagtaaagttctcataagagaaatgagaagctgtgttaatatctaactttggggaaccctgtcagtatttcagatccgatttttaccctttttttcttataagaaagataaaattagaaaatactgttagcaaatgtggctctgccatttgaatataatcaccgagaattccatgtcttaaaagtctcctggaatcc

SEQ ID NO: 2181 - DNA, 1576 bp, Homo Sapiens
  misc_feature (356)..(367): n is a, c, g, or t
  misc_feature (882)..(907): n is a, c, g, or t
  misc_feature (909)..(909): n is a, c, g, or t
  misc_feature (912)..(913): n is a, c, g, or t
  misc_feature (918)..(918): n is a, c, g, or t
  misc_feature (956)..(969): n is a, c, g, or t
  misc_feature (999)..(1000): n is a, c, g, or t
  misc_feature (1010)..(1029): n is a, c, g, or t
  misc_feature (1036)..(1057): n is a, c, g, or t
  misc_feature (1153)..(1164): n is a, c, g, or t
  misc_feature (1288)..(1300): n is a, c, g, or t
aaaatatacttagttactactgaagataatttttgaaatgtaaaaattagatttaaatagtatattttaaatgacagaactataattacagagatcagatcagataggtaaactgcaagatagataggatgaaacttttggcctactgtattacttacagagtttttttgtgtgtggtttttaaaactgttaaggcaagaagtgtcaaatgctttagagttaaataacagatcactgatttcaaagacttggtgtatagtgttaaaaattaaagcttaaaaggtggttagaaaagtggattaatgcaaaaggggtaataaagactgcaacattctcaggaccaaattaaactgctnnnnnnnnnnnngttcattgacttgcttagtcgtatactcaaatgatgataaacctacatgtgcaaaggctcacgtttaagattgtcaagccagcagtctactgttgtgttgccattgcttttccattgggagaagaaagaattaaccagtcattaaaccatttggtaagttgcactttgctgtgctgatcccacaggaaaggcttgaaacacgagaagcagcaaagacagagcacacaagtgcataaggctgttgtcttcggcttgggtgaaatgacagttcctcttcattctaaaggtttactccattgaatttaaggcatttgttcattccagtgttgagatgctttgcatctctgcagaagaaatttattttaaattgtttaaatatctggaaatacttttagctatcatttataaagatagttttgttctcagtttcactataaattatagaacaaatgggaaacaagggtttaatttagttcagccattttacaaggaaataataaaatactaaaatctgnnnnnnnnnnnnnnnnnnnnnnnnnnanccnnccccncacccaccaaccaccaccaccacccaaacccaaacaannnnnnnnnnnnnnacaaacaacccaaccccaaaccacccaaannaaacaatctnnnnnnnnnnnnnnnnnnnnaaaaaannnnnnnnnnnnnnnnnnnnnngggcccccgcccccccaaagttatcgaaaaccttgctttttcctcttctcccaacaaaaaacccgggcaaccaaaaagggtctggttattcccacnnnnnnnnnnnncccccccggttaaaccccggtgcttttccaccaaaattcccaaaacgctctctctcgagggccctcttggggggactcatcaccccagggtcttccgtcccgcccccccaatcaccagcatatnnnnnnnnnnnnngggggcgctaatgcgccacaaaaaaattcggtacaaaactctctcccaccacatttctcccccccaagacacggagacccttctcttcccccaccaacttttgccatatgaacccccccaataatcgtaccagggcgattctattcacacacccacttttcgcccatccctcccatatatacaattatcttcccctatccgaaaaaaacacgcggcacggcgcctaacaaacaagccccttccctcttgctctgccgcgggtactattttttgggg

SEQ ID NO: 2182 - DNA, 132 bp, Homo Sapiens
tcgggagtttgaggctgcagtgatcatgattgcaccactgccttccagcagcctgatgacagagtgggactccatctctttacatatgtatatcttactctcttgatgggaccaagttggtagaaataaaga

SEQ ID NO: 2183 - DNA, 746 bp, Homo Sapiens
ttcctggccaaaaaaaggaacccttagaaagtaactctgctaatatacagccaacagccccacatgtccaccacctacacccatacatcctagctccaaatagtaactcgggggacccgatacccacctggttacaacctgatgtgtataagctctattggggctcccaaaagatttggccaggccaaaatctgccagttttagaactccattttcatctagcaacaagttgtttggtttcagatccctatgtaggatccaatgttgatgtaaatattctaatccttgaagagtcatcaacatgtaggctttgatgtgtgatggtgtcagcacaagactattatcctttattataacctctagatcagtttccataaaatcaaagacaaggctaatattagatttatgtccaaaagcatcaaggagaccaattatatttggatgacttagctcctgtaataattttatctctcttaaggcggttctatttataccatctttagcttctgatctatgtccaagtttgattttcttaatggcgacaatttggttggtgttcttatctctggccttgtaaacggtggcaaactgtccctccccaaggaagtccagcttctcataacgctttgcccgagacttcacgtccagagccatccggcgccgtaaagcccgactccagccgaaaagggcgagctcccaggacaacacgaatttaaagctaccttaaagcctccaacacccacccc

SEQ ID NO: 2184 - DNA, 703 bp, Homo Sapiens
  misc_feature (116)..(124): n is a, c, g, or t
  misc_feature (465)..(469): n is a, c, g, or t
  misc_feature (473)..(473): n is a, c, g, or t
  misc_feature (476)..(478): n is a, c, g, or t
  misc_feature (480)..(519): n is a, c, g, or t
  misc_feature (522)..(522): n is a, c, g, or t
  misc_feature (543)..(545): n is a, c, g, or t
ctaattttagtacttaatttctctttttaatttaagtgatctttctaattcgaaagctgtgttctttttgaataccatgcatgggggttaagctgatgttaaaacagtttgcaatnnnnnnnnntgaatcagcttaagtcatttaatcatttcaagtgcattctgcatcctttaaaaataagtttaagaaatttaagagaattgtgttttcattaagttttgcatatcttttgttatgccatgtaaattccctttttcgtatgattaaaggaaggttatgataaaatgattagttcatttacattcacttgtagcaattacatgagaatttgaattttgtcgtgtttgggtttgttcattcctgtgaatgatggtacagttaggtgagattttctgttatggtacccaaactcaccatttggtcctctttaatctttgagggtttcaataaaaattgttcactcnnnnnaaanaannnannnnnnnnnnnnnnnnnnnnnnnnnnnnnnnnnnnnnnnncanaacaaccaccacaacccaaannnccctttgtgggccccgcctccgccccccaaaaaatctttctaaaaaccatttcctttgggccccgcgggcccccctggggaaagggaacctgggcccaaaacttgttcccccaagaaaaaaccggggccaggaaataagggtctgggaactccccacc

SEQ ID NO: 2185 - DNA, 945 bp, Homo Sapiens
gggaccctgctacatttcctaatcaagaagttggcgtgcagctgggagagctagactaagttggtcatgatgcagaagctactcaaatgcagtcggcttgtcctggctcttgccctcatcctggttctggaatcctcagttgcaaggttatcctacgcagagagccaggtaccaatgggtgcgctgcaatccagacagtaattctgcaaactgccttgaagaaaaaggaccaatgttcgaactacttccaggtgaatccaacaagatcccccgtctgaggactgacctttttccaaagacgagaatccaggacttgaatcgtatcttcccactttctgaggactactctggatcaggcttcggctccggctccggctctggatcaggatctgggagtggcttcctaacggaaatggaacaggattaccaactagtagacgaaagtgatgctttccatgacaaccttaggtctcttgacaggaatctgccctcagacagccaggacttgggtcaacatggattagaagaggattttatgttataaaagaggattttcccaccttgacaccaggcaatgtagttagcatattttatgtaccatggttatatgattaatcttgggacaaagaattttatagaaatttttaaacatctgaaaaagaagcttaagttttatcatccttttttttctcatgaattcttaaaggattatgctttaatgctggtatctatcttattgttcttgaaaatacctgcattttttggtatcatggttcaaacaacatcattatgaaattaattagattcccatggccataaaatggctttaaagaatatatatatatttttaaagtagcttgagaagcaaattggcaggtaatatttcatacctaaattaagactctgacttggattgtgaattataatgatatgccccttttctta

SEQ ID NO: 2186 - DNA, 863 bp, Homo Sapiens
gtcggcctggagaatgtgtccaacgtctcgaccatgttctccagcgcagcctctgagtctctggcccggcgggcgcaggccactgcacaagaccctgtctttcagaagctgaaaggccagttcacgacggattttgacttcagcgttccaggatccatgaagcttcataatcttatttctaagttgaaaaagtggatcaaaatcttggaggccaagaccaagcaactccccaaattcttcctcatagaggaaaagtgccggttcttgagcaatttctcggcacagacagctgaagtggaaattcctggggagtttctgatgccaaagccaacgcattattacatcaagattgcacggttcatgccccgggtagagattgtgcagaagcacaacaccgcagcccggcggctgtacatccggggacacaatggcaagatctacccatacctcgtcatgaacgacgcctgcctcacagagtcacggcgagaggagcgtgtgttgcagctgctgcgtctgctgaacccctgtttggagaagagaaaggagaccaccaagaggcacttgtttttcacagtgccccgggttgtggcagtttccccacagatgcgcctcgtggaggacaacccctcttcactttcccttgtggagatctacaagcagcgctgcgccaagaagggcatcgagcatgacaaccccatctcccgttactatgaccggctggctacggtgcaggcgcggggaacccaagccagccaccaggtcctccgcgacatcctcaaggaggttcagagtaacatggtgccgcgcagcatgctcaaggagtgggcgctgcacaccttccccaataccacggcgctaaaacg

SEQ ID NO: 2187 - DNA, 772 bp, Homo Sapiens
ggtaatgccatcattatcaactacttcacgctctggcaagcacagttttaaaatgaaagacactcatatggaagattttcccaaagacaaagaaacaaaccgggatttcctaccaagtggaagaattgaaagtacaagaactagggagtctccactagataccacaaatttttctaaagaaaaagacattaatgaattcccactctgttcacttcctgaaggtgttgaccaagaagtcttcaagcagcttccagtagatattcaagaagaaatcctttctggaaaatctagggaaaaatttcaagggaaaggaagtgtgagttgtccattacatgcctctagaggagtattatctttcttttctaaaaaacaaatgcaagatattcccataaatcctagagatcatttatccagtagcaaacaggtatcctctgtatctccttgtgaaccgggaaaatcaagctttaatagcagtagttcttcttacatgcctagcccaaaggattattcctattatttagaaaatagattaaaagatgaaccgataagtcaagggacctaaagaacctcaaggattccactttaacaaatttcaaccctgctgtgtctgctttttcattcatttcccaaacttgccaaagatgagcaactttttcttccaaaaaacccccctaccgaatagcccataaagcaaccaggtagccaaccaaaactccccttggaagggactttctttgaaaactacaagagccccgaaattcctgctggaatg

SEQ ID NO: 2188 - DNA, 302 bp, Homo Sapiens
catgtttctaagatttacacttaacgagaaatgcttattctccctttcaaacaatgaatacaaatttgtccatcttgttaagtaatacaacacccttttatcttttaccaaatcctacccccaactaaaaacaaaaatgtaagaaattttgaacaataaagaattaggagggtggggataaacaaactaaaattatatggctttgtttgcggactcaactaaaaatgcttcactcacaataatatacaatcatagggcagaggttaacaatgtacagaatctaacctataatattcatgact

SEQ ID NO: 2189 - DNA, 1154 bp, Homo Sapiens
gggagtggttctagggcaggcgggcgggtttgagagggcggggattgcgactctcacaccctgagctccggtgctcctttcctaactccactggctgcggcatctgtgggaaaagtgtggctgggtcttcgaggagccgcaccaatggcttccgtgctgtcctacgaaagcctggtccacgccgtggccggagccgtgggaagcgtgacagcaatgacagtgttttttcccctggatacagctagacttcgacttcaggttgatgagaaaagaaaatccaaaactacacacatggtgctcctggagatcattaaagaagaaggactcctggcaccatatcgagggtggtttccagtgatttccagtctctgctgctccaattttgtctatttctacacttttaatagcctcaaagcactctgggtcaaaggtcaacattctaccactggaaaagatctggtagttgggtttgttgcaggagtggttaatgtgttgctaacaactccactctgggtggtaaacaccagactgaagcttcaaggagcaaaatttaggaatgaagacattgtaccaacaaactacaaaggtatcattgatgcttttcatcagatcattcgcgatgaaggaatctcggctttatggaatggcacatttccctcattgctgttggtcttcaatcctgccatccagttcatgttttatgaaggtttaaaacggcagcttttaaagaaacggatgaagctttcttccttggatgtgttcatcattggtgcagtagccaaaagcgattgccaccacggtgacctatcccctgcagacggtacagtcaattctgaggttatttatccattcaaatatttactaagcatccacactgtgggaggacctgggcatgcaggggtaaataaaagtcataatccctgcccttatggagctagtggaagagaggatgaaccgcttggggggtcatagactaacccccccaaaacagaacattgggaaagtcttcggaaaattcccaatcctccttccccaacaaataagaacctttttggaaaaatgggggactcttacaaaggccttggaagccaaacttgctgcagaacaggacctccctggtggcttccagggtccccttggtaatgaaaaaaggg

SEQ ID NO: 2190 - DNA, 299 bp, Homo Sapiens
accactccccaacctaggagggattccagactcacagaagtgtccaatctaatcctcttatctcatttcctctggcttcttacatcctgaaacatgtctcacactcttggctacgtagaacagcatcacttccaaaagcttattagtttgcttctctctttttatggccaactcaataagtttacattttaggccccctttatctcctttacttgaatatcaatctcccccaccccattgaaaaatgaccaaaatgttccaatgaaactggtgacgttagagaaacaaaacaacagacc

SEQ ID NO: 2191 - DNA, 541 bp, Homo Sapiens
gaaaacacttatgtttaatggtttattataaaggatattttgcaaaggacacagatgaagagacgcacagggcaaggcatggggaaagaggtgcggagtttccaacccctcccttgtgtgctaccctccaggaacctccaggtgttcagctatccggaaactccctgtacccagctttcttgggttttttggaaacgttccttcctacagtgcttagccctctcaggggagggtttgagacccacaatctgaaaggtggggaaagattagattcctgcctcgggccaggtgaaaggaaggcaggaaagagattctgtttcctgacccaacattatcacaaaagactgtaacaagggctgtgggagttatggaccaggaacctggttgaaaaccattataaatcataacaccacaaggacctatattttgctttttaggacattgtagtaggtgggtagttttcatcctcttgctttttaaaatctatcttgcccagaagtttattgggcatttctatggaaacacaacacctctcttaaat

SEQ ID NO: 2192 - DNA, 523 bp, Homo Sapiens
gaactcggccggaattgcactccccgtctcccctccaaaaaaaatgtggatatttgagaaaagcattccatattttaatacgaagaggacactcccgtgtggtaagggatcccgtcgtctcatagattctgtgtgcgtgaatgttccctcttggctgtgtagacaccagcgttgccccccgccaacctactcaaccccttccagataaagacagtgggcactagtgcgtttgtgaagtgtatctttaatacttggcctttggatataaatattcctgggtattataaagttttatttcaaagcagaaaacagggccgctaacatttccgttggggtcggtatctagtgctatccattcatctgtggtcgttccctctttgaagatgtttccaacagccacttgttttgtgcacttccgtcctctaaaactaaatggaatttaattaatattgaaggtgtaaacgttgtaagtattcaataaaccactgtgtacaaaatatataaaaatttagttaattacttt

SEQ ID NO: 2193 - DNA, 201 bp, Homo Sapiens
atctgttctcaaggggcgaggttgagctgtcatgaactctggagatgtgtcaactgacaacaccagactgactttggctttgacgaagtctgaatagaattggttccaaatgcccactgcctccgtctcctgtggggtgtggcaggacgtctcacagtgagcacacgccatttgggagctcatggtatgtggtcggtttgg

SEQ ID NO: 2194 - DNA, 324 bp, Homo Sapiens
ttgcccttgagattctgaccggtgggaacgaacttcaggctttcgcgtcaatcatcttggaccagttaccggtatgaccctcacgacgtccctcgacacgaagttcccggttctgagatccgggagcggttgacaccacggtaagcctgtcggtgatctcgccggggatcttcggctgatgcttccacccggccggtggaagtttgatggcagctgtagcgaggatcgaccttgccctgcagccacgtggaagactgggaagattactctggtcctgccaggtgtaacggaactgggcgggatcggtcccggcgatgtcgtagt

SEQ ID NO: 2195 - DNA, 197 bp, Homo Sapiens
ctggatattatagtgcaatcaaagatgaatgtcgtcaatgctttcctccagaggctgaaagctagccagagataagatgtatgtatgactagcttatgtgcaaggttcatagcggtggtattattaagcctcaacactgggtgttatctttaaaacgaacttggtcagcctgccctagttaaaaattctttaccagc

SEQ ID NO: 2196 - DNA, 472 bp, Homo Sapiens
gtaagatgtgtatatgagaatgtgtttctgacgtgggggttgcagcagggtctgagcctccgttgtgtctgtttggtgatgtgtgcgtgtgatagaatgggagttgtgtggctgcatgggtttgtgcacttctctgagtgagtatcctctctaatctgtctggaggcgggcttctgaaagcatccaacaccagcgagtcaactggatgggtctgtgagatgtgtgcaagtgggctgtgtgtctctgagcttgagctggtgaacagtatatgtgcatttgtatgtgcaagacagagttatgcccagggacacaggctcaagccccataggaggctgcgcctgggactcagggtaaggagcagccaagagcttgcctgacggtggtgacctcctctcctccaccagtgacagactagagtcctcccctgtagctcctgggagccaagaagagaagagctacatccagaacccta

SEQ ID NO: 2197 - DNA, 938 bp, Homo Sapiens
ggggaaggttggtttgtaaattgcgggattggttctccctggattaagggaaagggaaagggaaattctaaattccttgttaaagtccgtaaaggccatggggggttcatgtggaaaaaggatggcctatagttctgggaggagggagggtattaaatgtagcttgtgtctacagcaggaaggcttggggtgcgggattctggagatgcttgatgtggaagacttaaaatgcctttattatttagtggtgatgtgggagatagggaaggacagggtcctcttggcagatgggctcttcttcctcttcatcagatgaactgtctatggttaggtcaatcacttctactttcttgtttttatttgaggactggtggtgagacgctacctgatgctccaatgtggagctcaagcatccatcgactccattgtaagaggcagaaacttcctgtacttccttttttgatctcatcggtgcccaagtgccatcctccttaaattgtatttcatcacagtctgtacagtactttaggatttccataaacaagccatcaataataaggtgttcatatggagccttcttatcacagacaggacaaacccaggttggttttttctcaattcatctgaatgtaaagagttgcgtcaaaacattgtagatgagaacatgtaagggcccgacacggaattgtcagccgcattttaccaagtggacatagtagagaaacccttaggctggttgtagctatttcactgtctggatccgcagtcaacttctctttaattaaagctctagaatgatccggattccttattccctttgctcgtaacctctgaagaagaactgttgaggacaactgttttacaagatatactgccatggaatagtttcttccaatttctgcagtccaagaaacaacaatcgtgtttggtactgttgt

SEQ ID NO: 2198 - DNA, 1858 bp, Homo Sapiens
  misc_feature (1604)..(1784): n is a, c, g, or t
  misc_feature (1788)..(1789): n is a, c, g, or t
  misc_feature (1791)..(1807): n is a, c, g, or t
gggagagcggcagccttttcccgcgcgtgctgccttcgccgctcgggccgcccgggggaaaacatggcgtctgccctggagcagttcgtgaacagtgtccgacagctctcagctcaagggcaaatgacacagctttgtgaactgatcaacaagagtggggaactccttgcgaagaacttatcccatctggacactgtgctcggggctctggatgtacaagaacactccttgggcgtccttgctgttttgtttgtgaagttttctatgcccagtgttcctgacttcgaaacgctattctcacaggttcagctcttcatcagcacttgtaatggggagcacattcgatatgcaacagacacttttgctgggctttgccatcagctaacaaatgcacttgtggaaagaaaacagcccctgcgaggaattggcatccttaagcaagccatagacaagatgcagatgaatacaaaccagctgacctcaatacatgctgatctctgccagctttgtttgctagcaaaatgctttaagcctgcccttccatatcttgacgtggatatgatggatatctgtaaagagaatggagcctatgatgcaaaacactttttatgttactattattatggagggatgatctatactggggctgaagaactttgaaagagctctctacttttatgaacagggctataactactcctgccatggcggtcagtcatatcatgttggaatcatataaaaagtatattttagtgtctttgatattacttggcaaagtacaacagctaccaaaatatacatctcaaattgtgggtagattcattaagcctcttagcaatgcataccacgagttagcacaagtgtattcaaccaacaacccctcagaactccgaaacctggtgaataagcacagtgaaaccttcactcgcgataacaacatggggctggtgaagcaatgcttgtcatctctttataagaagaatattcagaggctaacaaagacctttttaactctatcattacaagatatggcaagtcgtgtgcagttgtctggacctcaggaggcagagaaatacgttctgcacatgatagaagatggtgagatttttgcaagtattaaccagaaggacggtatggtcagtttccatgataaccctgaaaaatataataacccagccatgcttcataacattgatcaggagatgctgaagtgcattgagctggatgagcggctgaaagccatggaccaggagatcacagtgaaccctcagtttgtacaaaagagtatgggctcacaagaagatgattcaggaaacaaaccatccagttattcttgaaactaacatccatcctgagctaaacaagagaaactaccatcttggccagtgacaagtgttcggagggcagcagagaggaccaagcctgtgtcacctggagactaagaaattaagttttgttttgacatcttcagtcctgtgtgctttcagaaaaccattttctctgcaaagaaaggaaacagatttgcaaactttaaagtctgtcgtggatttatttatcctcagattattgttactgcattaaatctacctttttgttttaaaaannnnnnnnnnnnnnnnnnnnnnnnnnnnnnnnnnnnnnnnnnnnnnnnnnnnnnnnnnnnnnnnnnnnnnnnnnnnnnnnnnnnnnnnnnnnnnnnnnnnnnnnnnnnnnnnnnnnnnnnnnnnnnnnnnnnnnnnnnnnnnnnnnnnnnnnnnnnnnnnnnnnnnnnnnnnnnnnnnnnntggnngnnnnnnnnnnnnnnnnnaaaaaaatttctaacaaactcttccttggggcgcgcgcgccgccccccaag

SEQ ID NO: 2199 - DNA, 765 bp, Homo Sapiens
ggaagcgtgcgtccctggcgcttccttcttcttttccggcggagagcttgggatgtggtaatgccagccacactcctcagagccgtggccagatctcatcatatagttatcaaaagcacatcagtgccgaagaatcggtcatctaatgttaaaaccacttaaggaatttgaaaatacaacatgcagcacactgacaatacgtcaaagcttggatttgttccttcctgataaaacagctagtggtttgaataagtctcagatcctggaaatgaaccaaaaaaagtcagataccagcatgctgtctccattaaatgctgctcgttgccaagatgaaaaggcacaccttccaaccatgaaatcctttggtactcacaggagagtgacccacaaaccaaatctgttgggttctaaatggtttataaaaatattaaagaggcatttctcatctgtatcaacggaaacatttgttccaaaacaagacttcccacaggtgaagagaccactaaaagcatccaggaccagacagccatccaggaccaaccttccagttctgtctgtgaacgaggacctaatgcactgcacagcatttgcaacggcagatgagtatcatctgggaaatctgtctcaagatctggcctcccacggatatgtttgaagtaacaagcttgcctagagatgcagcaaatatttaggtgatgggtgtggaaaaattctgcaaaagaaggtgatcctggaacaatattctgcttcagggcaaggagctgc

SEQ ID NO: 2200 - DNA, 792 bp, Homo Sapiens
gggagaacattcatactgaggccagagtgccatcgaaggtaattatagagacagtaaaatccttttactctgggaaaaataaaatgctgggtgtctcacaaaatttcagaacctgatttcaaacggatcataacaaagaggagatcaaatttagcatggtggactgctcgacaggatatatttgtcaatggaatgtttccacatattataccaccaacatgagaaaaaaatgatcattgtttatttgaagcttgaaaaatgagcaggcggaattgttggatttgtaagatgtgcagagatgaatctaagaggcccccttcaaaccttactttggaggaagtattacagtgggcccagtcttttgaaaatttaatggctacaaaatatggtccagtagtctatgcagcatatttaaaaatggagcacagtgacgagaatattcaattctggatggcatgtgaaacctataagaaaattgcctcacggtggagcagaatttctagggcaaagaagctttataagatttacatccagccacagtcccctagagagattaacattgacagttcgacaagagagactatcatcaggaacattcaggaacccactgaaacatgttttgaagaagctcagaaaatagtctatatgcatatgggaaagggattcctaccccagatttctaaagtcagaaatgtaccaaaaacttttgaaaactatgcagtcccaacaacagtttctgactacaactcaaaaggtttaaatagaaaaacagtaatattggaaaaggggggc

SEQ ID NO: 2201 - DNA, 1002 bp, Homo Sapiens
ggttacatattcatgttaagaaccccgtcttcccttaaaatacattaaaattatgacatttttgctttgtgattgaatttcaaatagcagtatggtatccttttatctagttaatatatgaaagtggcttgaatatagtcaaatccattttaggtactctactgactttttccttcacttgccaagcccttttattgttcactgttagaaaaatagagaaggtgagacagctgggggaaaatgtggagtaaatgataatcaaatgttgaattctaaaagtctctacatttacctaggttggctttctcccccagttcagaagtttccagcttggccaatcatcagaatcacttgaggaacttagaaagaactccctggctgtagctcctatgtaggtttaggttgagactctggattccacaatttttaaaggttaccatctgaggtttctgatcatagtctacttttgaagcagctgctgctgtttctttattccattgaacaccctggaattgacataattttatctatcagcatttctccccttttagtttatttaataattaacccggtctccaaggcagttttcatatgaccatgtgtatattcactgctcacgaaaaagtttaatgttagattaccaaatttaatatagttacagaattactgcataagggcttcccttcttggagactcttacccagcatgggaacagtgatctgcccacatgacagggtggtatgccaggcatagttaactgcttttggttgtgaggtactcatcttcctttagttaccctttagttatgtggcacacatgtcccttattgcctagttcgtcatccacacttttggatcttgtgaaaatgctgttagtatccaaccttaaaatatattagtatatgggtttttattaaaagaattactttgaattttctatttaattcatatgtaaataaaggaacatttcatttcacttaaaaaaattatatcagttattagg

SEQ ID NO: 2202 - DNA, 418 bp, Homo Sapiens
aaccgtaagtgcacgatgcaggtgcataggccccagaccaaactagaccaccagcatgttcatgtccagacctcggcagtggcgtgcactgcttgtgcacctcagttcctccagtgttggtttgtttgttttttaattcagcatcctgctggttttactttccaagcaagatctgttgcgactcccaaatgcgttttaatgagctcatccttatttgcctttcttcttacgtattttgtgtattagattgtgcaggagatattctagaaggcattaatggtttgcattcaaaacgatgtggtttgtccaagttattttctgtctttattactgagacggattaatctccttatttttttcttgatgatttgaagttgtaagagttgtccagctattgcttaataaaattttgcagatc

SEQ ID NO: 2203 - DNA, 1013 bp, Homo Sapiens
  misc_feature (723)..(835): n is a, c, g, or t
ggcggctcaactcgcatctcaagctgggcttcgaggatgtgatcgcagagccggtgactacgcactcctttgacaaagtgtggatctgcagccatgccctctttgaaatcagcaaatacgtaatgtacaagttcctgacggtgttcctggccattcccctggccttcattgcgggaattctctttgccaccctcagctgtctgcacatctggattttaatgccttttgtaaagacctgcctaatggttctgccttcagtgcagacaatatggaagagtgtgacagatgttatcattgctccattgtgtacgagcgtaggacgatgcttctcttctgtcagcctgcaactgagccaggattgaatacttggaccccaggtctggagattgggatactgtaatacttctttgttattataacataaaagcaccactgttctgttcatttcctagctgttctaattaagaaaactattaagatgagcaaccacatttagaaatgtttattgacaggtcttttcaaataatgcttttctaattaatagccaaagatttcatatctaactttgtaaccagaattatacagtaagttgacaccacttagatttaaaggcagacagttttgctttagtacaatagtatacattttataatgatgaacttataatgattaagggacatttctataaaaatactaaaatagttttatgcacaacttcccatnnnnnnnnnnnnnnnnnnnnnnnnnnnnnnnnnnnnnnnnnnnnnnnnnnnnnnnnnnnnnnnnnnnnnnnnnnnnnnnnnnnnnnnnnnnnnnnnnnnnnnnnnnnnnnnnntgtgtcggcctgcttcgaacctcaaaaagatttaaaaaagtttttgggggcccccccgcgccccagaaaaaaatttttcaaaaagcctttttttgtggggcccggcgccccacgtgggaaagtgaaaaaggggcttaaatgttttctcccaagaaaaaaaccccggcggcaaagcaaa

SEQ ID NO: 2204 - DNA, 1414 bp, Homo Sapiens
  misc_feature (951)..(951): n is a, c, g, or t
  misc_feature (1225)..(1243): n is a, c, g, or t
  misc_feature (1303)..(1324): n is a, c, g, or t
gggggaaggatctaaaatggtttcctgttaaattttttgccaggggaacctgaagtcttgggtatagaagggcaaatgccttggggaaaaattcctttggaatacccaagttagcttcccaggtttctttcagggtgtgccctttaatttgccatcttttgggatccaatatctaggatccaagtggaaaattcagtaaacgtagggcatcaccccattattatcttccgggggttttgtaaactatacttgtatagatgatcatgaccattggaaaaactcagctgcaaaatcgtaattgaatctgaacaccacagtcaaaacttaagacacatacttttctggaagttcatgagccttggcccactgtagattccgcacaagagattcagcagaatattctgttccctgtatgggatcagtaagtgcttctcttctcagataaactacttcgaatctctagagcctgtttgcctttggtaaggtgacacttacccatatcttctgcaacttcatccagtaacacagtgattttcttatcttctaataatctgtcttttaaaaatttcataaagattccatttgccaatccagaatgctggatttcaaaagcttctgctccttgacacgtggcatatccaaacacaatattggcggtgacttttagtgcatccaagattggaatggtatcatcgtagtcatttcttttcctacacatatccaataagaacacattaagtccagtttctttttcttgcatcaatttcagtatattttgtacacacagacaattttcagacctatatggatttggagcatcaacggggaccatgaagctgttcccaaaattttcataaccatgtcctgcataatataataacccatatactcccttgtctaaaaggagtaaaaactcatccacagcattacgcatctcatattcagtaagantcaacagtgaaaccacttttgaagtccagctgtctcagtaagttagtcaattcgtacacatccaccaaaggaagctttgagcttgggggtgctcccggtaattcattatttctatcaaaaagggcaaccttgtccttcgcccaaagtggggtcggtgtttggctcttaatatcaggatgaccaagattattttaatcatcttcagtgcactccactggctcaatcgtccttccaaggatgatttcaaacctcctggcaaactggaacgggagannnnnnnnnnnnnnnnnnnggaaaagatccccttaaataattcattcccccccccacattagcaaaaatttaagcaaannnnnnnnnnnnnnnnnnnnnnaaaaaattaaccggaggagacccaataggggtaggccccccgttggaaaaggggctagaggcaaaaggtgggagggggttaggcttgaac

SEQ ID NO: 2205 - DNA, 379 bp, Homo Sapiens
aaatggctttagtcaggctgccaagagtgatatcaggtttgattctcacatacataaatgccagtcccaaaaagcaactctaacttgtgcacctggcttaaaacaaaatgtactgaaaactttgtatttgttaattgggataacccacccattcaggcctcaattccctttggacttgcacacgcacttcctacacacagaagtggcctgttatgcagcaataatcatagtgaaaagcagcaattccgtgaaggctccacagagaaatcgcgtttgcatttcaaacaagtttcctcaaagtaagcgtctttcgattaaatgaaatcacaattccagcttcttatccacagaaaacagcattcactatgtaacttactgc

SEQ ID NO: 2206 - DNA, 744 bp, Homo Sapiens
ggggattcaagacacaggaagagaagtgggtttgaagcaaggttgtggagaaaagcaaaggagacaaaaagtaaccttcctgaagaggacatgtgattggaagttgtcaattgttgaagcattggtaactccagtctctaacgttttagaaaatcataacaagcggttctctaccctgtaaaggtgaactactgagttcttcattatgtctgatggagattatgattacctcatcaagtttttagctttgggagactctggtgtagggaagaccagtgtactttaccaatatacagatggtaaatttaactccaaatttatcacaacagtgggcattgatttcagggaaaaaaagagtggtgtacagagccagtgggccggatggagccactggcagaggccagagaatccacctgcagttatgggacacagcagggcaggagaggtttcgtagcttaacgacagcgttcttcagagatgctatgggttttcttctactttttgatctgacaaatgagcaaagtttcctcaatgtcagaaactggataagccagctacagatgcatgcatattggtgaaacccagatatagtgctgtgttggaaacaagagtgatctggaggaacagagagtagtggaaagaggagggaagccatagcactcgcagagaaatatgggaatccccctacctttgaaaactagtgcttgcccaatggggaccaaacattaacccaagccaatttga

SEQ ID NO: 2207 - DNA, 422 bp, Homo Sapiens
aaagcaaaccattgtatgtgtaagtgtttaagttacctttttgtctattggtctctttgccagccctcccctttcccaatgaaagccatgtcaaattaatcactggattgactgcttcatctttttatttttaatgaaaggtgtaccacggttgtaaagcaataagatttgagatgaacactattgaaacttcgctttttgctaaaaaatagcaagttgaatagtaatcaaaaaacatagaaagattttagttcaaaatgattgctcctttctctacctggacttttaaaaaatcaattgtcatctaatatgagtttatttgtctatagacacaagtatcaatgtctaaaaaaaatcatgactttaaacttccaccgatgaggcaggtaggagataaagatgaattctgaactgttaaaaaa

SEQ ID NO: 2208 - DNA, 1173 bp, Homo Sapiens
  misc_feature (183)..(183): n is a, c, g, or t
aatggatactttaggaacctttaaaaaatgagtttagaaggtaaccaattagaatgtaaaatttctcaaaatcctggaaacctgaaatattaaattcttagaattttctttaaaaactctttcttatgaaagagaaatttgcatagtttgaaaattattatgtcctttcaagggaaaaagganggaattaaaaaacagacacattgatgaaggcaatgagttcttctcagctggtttattctccactgaagctcaatataggattatattttctttacttacaggaagtggtcactgctctgttttccaataaccctcaaaacagaacaacaatgcttacgcgaaataacacaagccttaactattatactttgcaggctttaccatttcaatacacttctagtccaactgctttcccaactctaaagttctgtgagtgaactatgaatatttttaaatattttccagattcatcagggaggctgcttttcttctctgcactgtaatcacactgagctgctgggaagctgaagcagctctctcttctgcctgacttagacgcctttgaagtctgttggctttttcttgatgctctagaattagcttttcattctcagctaccttttcatttgccatttccagctgagaaagcagctcttgggtatgaagtttctgtcgactcagctcactctttagtattattgattctaatttctgcactttcagtaagtttcttcgtttcttctttccacctattggctgccttctgttgagtcgctaggagatgcctcagttcaacaatggaatttctattactgtcttccatctctctcaattgaacttcaaatccacgttcctttattgaaaattcatgttccattgtactgatctttactttggcttttttttgagcctccagggcaatcttccttaaactctcagtctctttccgtaactgtttattttcttgctgaagttttagcctttgttcactgacaagcccacagttctctctctcagactccaatacattttgaagtttctgaatcatttcttggtaacgtgatatttcttctgaggagtcagtttcaagttgttttattctattttctgctctcgtaagtcttagctgaggaccatcgttgcaacgatggtcctcagcttccaacagct

SEQ ID NO: 2209 - DNA, 731 bp, Homo Sapiens
  misc_feature (612)..(673): n is a, c, g, or t
gggcagagagcgaagtgtactcttggggcaaaggggcgcgaggtcgattgggaaggagggatgaggatgccggactccctcggccagtgcagttggatgagacacacccttacacggtgacttccgtgtcctgttgccatggaaacaccatcctggctgttcgatcggtcacagatgagccggtccccccctgaggcacccggattcacctctggaccaccctgatattgcttctcctctgaatgctctgaaaagtgcaggtgcccaaggcatgacttgcagctgtctcctggattgtgtcatcatggggtatcagggctggcaaaacccctgctctgcttttggccttggatatggaaacctcaaccactttgttctcctaccacctctttgcccttcctaccccttcctcccttcagtcagtgtccccagggtccagcctgggctagaagttagaagggcagacctagccctttgggaagcaggggtgggccttcccagagccctttgcccattaaaaaaggggctgaaaaggcaggccccgagggcggccaaggtgggggtttccagggccccctgggttaaattccccccgagccgaacctttttggnnnnnnnnnnnnnnnnnnnnnnnnnnnnnnnnnnnnnnnnnnnnnnnnnnnnnnnnnnnnnntctcccgggggaaaaattgcggaaaagaaaccccatttcccttggggggcttaaaagc

SEQ ID NO: 2210 - DNA, 280 bp, Homo Sapiens
ccataagaagatggatcctgagacctcggttaggaaccagagaaagatctgggatccaggcccttcctttgaaaccctcccaaggaattcctccagccaaagaaacctaagctgccccagtgatcacctacctccacaccaccaccttgcacaaagccataaggcttgaggatggagtcaccgtgtttcaggggtgtaagctggaactggggagtgcagagaaaaaggaaatggaagacctcaaagaattagaaccaggctgggtgctcacgcctgtaat

SEQ ID NO: 2211 - DNA, 341 bp, Homo Sapiens
attacaggtatgggccactgcgcccagccttacacactaaaattttctagtagttcttgattatatggtggtcatctggtatctcaacgttcttcatgtcattgcccacttgtaacccatttgtggtacctcagctgggaagctctggtaaagagggtccagattacagaaaagcacaatataatattcttcatccctcatggagaccttgtggaccagcagctctgtgttcaccaacacgcagtggtccgtggactgctcttggcaaacattcatttagggctcagcagcccatccataagatcctcctggcccctcaaacggagttgttgtttcctcta

SEQ ID NO: 2212 - DNA, 744 bp, Homo Sapiens
  misc_feature (710)..(710): n is a, c, g, or t
tctgagttccaccagatcgagggcgtggtggcggatcatggtctcaccttgggccacctcatgggcgttctgcgggagttcttcaccaagctgggtatcacgcaactccgcttcaagccagcctacaacccatacacagagcccagcatggaggtgttcagctaccaccaaggcctgaagaagtgggtggaggtcggaaactcgggggtcttccgtccagagatgctgctgcccatggggcttcccgagaacgtgtcggtcattgcctggggcctctccctggagcgcccaacgatgatcaaatatggcatcaacaatatccgggagctggtgggccacaaggtgaacctgcagatggtgtatgacagtcccctgtgccgcctggatgccgagccgaggccccctcccacacaggaggctgcgtgacatgggccactctaggacaggtcatcctccccgagtccctgctgctgcgctcctttgcatccctggccagtgaccttgtatttatgaggcctctgtgaggccagcccccaccttcctctttcccacctgtcccaggaccagaatcccagggacagaggactgggtagcaggttccttctgttgtcctgtgtggtgtgtctactgtgagggtgggccctgaggagacctgtgggccacctattgtctaataaagtgggcagttgcccccatctggtggctttccnccttaacgcgcctctaaactataatccccttgtc

SEQ ID NO: 2213 - DNA, 165 bp, Homo Sapiens
tcagaaatattagaattaaaatgtcctcaaaaatttcagggagcaaaacaagtccaaatcctttctgttcttgacctcgtcctcttgctgtcagtaaaacattttcttattgttgagaagaaaacatgggagaacacacaaaaatcatttcatacataatgtttc

SEQ ID NO: 2214 - DNA, 780 bp, Homo Sapiens
ggagatacggcgtaaatggagttggtaaaatattaaagaagatcaacaaggccatcgtctccaagaagaataaagacattgtgacagtggctaacgccgtgtttgttaagaatgcctctgaaattgaagtgccttttgttacaaggaacaaagatgtgttccagtgtgaggtccggaatgtgaactttgaggatccagcctctgcctgtgattccatcaatgcatgggttaaaaatgaaaccagggatatgattgacaatctgctgtccccagatcttatggatggtgtgctcaccagtactggtcctcgtcaacgcagtgtatttcaagggtctgtggaaatcacggttccaacccgagaacacaaagaaacgcactttcgtggcagccgacgggaaatcctatcaagtgccaatgctggcccagctctccgtgttccggtgtgggtcgacaagtgcccccaatgatttatggtacaacttcattgaactgccctaccacggggaaagcatcagcatgctgattgcactgccgacggaaagctccactccgctgtctgccatcatcccacacatcagcaccaagaccatagacagctggaatgagcatcatggtgccccaaaagggtgccaggtgattcctgccccaagtttcacagcttgtagcaccaacaaaattttgaagggaccccgctgaaaaattccttgggcgattacctgaaattggtttggatttcatccaaagggcacattttttgcaaaaaattaccaagggcccaaa

SEQ ID NO: 2215 - DNA, 272 bp, Homo Sapiens
ggtgtgcagctccggggagctgaagcactgacttcagagtgaaggactgtggaccagcttgagaagaggcctcaccagagtgggtgtgggcatgggggctcgagcagtacccagagtaggtgtgggtagccggccaggggttaacgtggggcgtggattcaacacagctggaagcccagagctcggaggccggggtgctggggccaatggaggaacaggagtcagtccatcccgaggggcttgtctcactacaatcttcaccacgcctgtat

SEQ ID NO: 2216 - DNA, 282 bp, Homo Sapiens
cagagtgaggccggcttcctcctgggctcagtgcccctggatgggaggtgggcatgaacaggagaggcttccgagaatcagagtgtgctcagccaggaaaggcggaggccacctattcaggaaacggggctgcagctgctgtgctgagcccgggtgggtggcggatgccagtcctcagttcaccggcctctgcagcttcgtgtctgcctcaccgggagacctggcaaggccctccctaggcaactcctcccattcccagtgcccagtgctgcagagttctcc

SEQ ID NO: 2217 - DNA, 975 bp, Homo Sapiens
ggctctccgggacggtcacatcccgctgcaggggcgggcggaggccgccgcactgcctcccgcaccggggacccaggccagcgtccgggcaacgccccctgctcccggacagactccgtggcccgctcgagccctgggggctccgcagacccgcgcccgctccgcccgcagctcggccccgcgctgcccgcgtcgccgggcccgcgccgggatggggtaggggcagcgccaccgagtcgggcgatgggccgccctctgggcaccgagcagccccccgaggcctgaccaaccgcgaggaccggcggaggagccccgcctggatgtcaagcggatgccaagcggatgccacagttccccccccagcggactccgtggggacatggcttcgctggtgcccctttccccatatctaagccccacggtcctcctgctggtcagctgtgacctgggcttcgtgcgagcagaccggcctccctctcctgtgaatgtgacggtcactcacctcagagccaactcggccactgtgtcctgggacgtcccagaaggcaacatcgtcattggctactccatttcccagcaacggcagaatggccccgggcagcgtgtgattcgggaggtgaacaccaccacccgggcctgtgccctctggggcctggctgaagacagtgactacacagtgcaggtcaggagcatcggccttcggggagagagtcccccaggcccccgggtgcacttccgaactctcaagggttctgacccggctaccttcaaacagttcaaggcccaggtgacatcacagtggaaaggtctggaatggaaagcggccactgcagactgggggaagtggtcatcattgtggtggtgttgctcatgtgggctgctgtaattgggctgttctgccgtcagtatgacatcatcaaggacaatgactccaacaacaatcccaaggagaagggaaaggggccggaacagagt

SEQ ID NO: 2218 - DNA, 816 bp, Homo Sapiens
  misc_feature (806)..(806): n is a, c, g, or t
ctcccctagcctgtgtgaagggcttatgtgtacctctacctcagaatccccttagttggactccttgggcctcaccagaaagacctctatcctttgccaactcctgactttggcaccttgcatttggtgactgtctagcacaggaggttaggtaggcagaggtcctgactggtaggcctgaggccgctctgcctgtgcgctgacatgctctctgtcctgctctagatcaatggcattgcactggacaacaagtctctgaatgaatgtgaatctctgctgcgcagctgccaggactccctgaccctgtccctcctgaaggtattccctcagagctcctcgtggagtggccagaacatttttgaaaatatcaaagactctgataagatgctgagttttcgagcccatggcccggaggtccaggctcataacaaacggaacttgatacagcacaaataactccacgcagacagacatcttctacacggacaggctggaagacaggaaggagccaggccccccaggaggcagcagctcctttctgcataagccattccctgggggacccttgcaggtctgccccaggcctgtcccagtgcctctgagcgtagcctgagcagtttgaggcggcgcagaagcttgagcaggagtacagcaggtacttcacaggggtcatccagggaggagccctgtcaagcatttgcactcagatctgggcaatggtcaatcaagaacaaaataaagtcctgtggattccagcctgcccgctctaggagaatgctgtgctgtggatgactgcagctggccgncttcagggac

SEQ ID NO: 2219 - DNA, 1298 bp, Homo Sapiens
ggatgatgattcccaagaagctgaagttatccagtctctgctggatgttgtggatgaggaagcccagaatcttttaaacgaaaataatgcagcaggagactcctgtggtccaggtacattaaagatgaatgggaagttatcagaagagagaacagaagatacagactgcgatggttcacctttacctgagtattttactgaggccaccaaaatgaatggctgtgaagaatattgtgaagaaaaagtaaaaagtgaaagcttaattcagaagccacaagaaaagaagactgatgatgatgaaataacatggggaaatgatgagttgccaatagagagaacaaaccatgaagattctgataaagatcattcctttctgacaaacgatgagctcgctgtactccctgtcgtcaaagtgcttccctctggtaaatacacgggtgccaacttaaaatcagtcattcgagtcctgcggggtttgctagatcaaggaattccttctaaggagctggagaatcttcaagaattaaaacctttggatcagtgtctaattgggcaaactaaggaaaacagaaggaagaacagatataaaaatatacttccctatgatgctacaagagtgcctcttggagatgaaggtggctatatcaatgccagcttcattaagataccagttggggaaagaagagttcgttttacattgcctgccaaggaccactgcctacaactgttggagacttctggcagatgatttgggagcaaaaatccacagtgatagccatgatgactcaagaagtagaaggagaaaaaatcaaatgccagcgctattggcccaacatcctaggcaaaacaacaatggtcagcaacagacttcgactggctcttgtgagaatgcagcagctgaagggctttgtggtgagggcaatgacccttgaagatattcagaccagagaggtgcgccatatttctcatctgaatttcactgcctggccagaccatgatacaccttctcaaccagatgatctgcttacttttatctcctacatgagacacatccacagatcaggcccaatcattacgcactgcagtgctggcatcggacgttcagggaccctgatttgcatagatgtggttctgggattaatcagtcaggatcttgattttgaccatctctgatttggtgcgctgcaatgagactacaaagacacggaatggtacagcaaagagagcatccaaggtaccattcttgctacagcaattccctgcgcacgtaatggatccatcagcattgactggaccac

SEQ ID NO: 2220 - DNA, 1054 bp, Homo Sapiens
  misc_feature (41)..(41): n is a, c, g, or t
  misc_feature (50)..(58): n is a, c, g, or t
  misc_feature (130)..(130): n is a, c, g, or t
  misc_feature (243)..(452): n is a, c, g, or t
aaaaacccgggattccccttttggggaagggaattaaaaancccatggcnnnnnnnnntttttattctaaaatcaatgggcagggcaaggtgcaaatcaaatataaatcatagtctctgggtacaaaaanctatacatgttctttggattaaaagcaaatgggtggcttggcttttatgtccaagccaaaaatcatctatacaagtaaaaagtgtgtgggtcaggcatggtggctcccacacnnnnnnnnnnnnnnnnnnnnnnnnnnnnnnnnnnnnnnnnnnnnnnnnnnnnnnnnnnnnnnnnnnnnnnnnnnnnnnnnnnnnnnnnnnnnnnnnnnnnnnnnnnnnnnnnnnnnnnnnnnnnnnnnnnnnnnnnnnnnnnnnnnnnnnnnnnnnnnnnnnnnnnnnnnnnnnnnnnnnnnnnnnnnnnnnnnnnnnnnnnnnnnnnnngtgtggatactgttatgccacatgtgataataaaatattcaaggccacagatgcaagtcaccaacttacaaagagaatactgaaggtagggtacattaaaaaaatagagaaatgcaataaagaaaatgccacctctgcctaaatcaggaaagagtaaatgcataggcattaaaacagcagctctgcatactacactgcagtttctcttgtgtcaaaaagatattcactgtgtatcattacaataggtcagtgaatatagacgaggcaataaacggtagcgccttggtattagggcaaagtttagtttcttttcattttacacatgagggcggtaaaagaagaagtgtagaactagaaatgctcatgcttcccatgtcagtacactaagcttgttaagtgtgtggcacaaatggaatagagacatgaagtttaatgagatccaagcttccaacgtaaatgatttcaccgtacgcttggtcgtacgacgtgaggtcgacgtatatacccgggaattccggaccggtaccagcctgcttttttaaaacactgggtctatagtcactattgcattgtgggggaagcggggatggagtggggcaaga

SEQ ID NO: 2221 - DNA, 1112 bp, Homo Sapiens
  misc_feature (35)..(35): n is a, c, g, or t
ggacagggccgcacgaatcgtaggggtggagaacncccgggatggtaccgggtccggaattcccgggatgttgtctgagtgcgttggtcggcggcagtcgggccagacccaggactctgcgactttacatctttaaatggatgagatggctaccactcagatttccaaagatgagcttgatgaactcaaagaggcctttgcaaaagttgatctcaacagcaacggattcatttgtgactatgaacttcatgagctcttcaaggaagctaatatgccattaccaggatataaagtgagagaaattattcagaaactcatgctggatggtgacaggaataaagatgggaaaataagttttgacgaatttgtttatatttttcaagaggtaaaaagtagtgatattgccaagaccttccgcaaagcaatcaacaggaaagaaggtatttgtgctctgggtggaacttcagagttgtccagcgaaggaacacagcattcttactcagaggaagaaaaatatgcttttgttaactggataaacaaagctttggaaaatgatcctgattgtagacatgttataccaatgaaccctaacaccgatgacctgttcaaagctgttggtgatggaattgtgctttgtaaaatgattaacctttcagttcctgataccattgatgaaagagcaatcaacaagaagaaacttacacccttcatcattcaggaaaacttgaacttggcactgaactctgcttctgccattgggtgtcatgttgtgaacattggtgcagaagatttgagggctgggaaacctcatctggttttgggactgctttggcagatcattaagatcggtttgttcgctgacattgaattaagcaggaatgaagccttggctgctttactccgagatggtgagactttggaggaacttatgaaattgtctccagaagagcttctgcttagatgggcaaactttcatttggaaaactcgggctggcaaaaaattaacaactttagtgctgacatcaaggattccaaagcctatttccatcttctcaatcaaatcgcaccaaaaggacaaaaggaaggtgaaccaacgattgatattacatggt

SEQ ID NO: 2222 - DNA, 1043 bp, Homo Sapiens
  misc_feature (338)..(338): n is a, c, g, or t
  misc_feature (352)..(363): n is a, c, g, or t
  misc_feature (525)..(525): n is a, c, g, or t
  misc_feature (527)..(528): n is a, c, g, or t
  misc_feature (530)..(534): n is a, c, g, or t
  misc_feature (536)..(536): n is a, c, g, or t
  misc_feature (538)..(541): n is a, c, g, or t
  misc_feature (545)..(545): n is a, c, g, or t
  misc_feature (547)..(554): n is a, c, g, or t
  misc_feature (556)..(556): n is a, c, g, or t
  misc_feature (558)..(735): n is a, c, g, or t
  misc_feature (794)..(812): n is a, c, g, or t
  misc_feature (959)..(959): n is a, c, g, or t
  misc_feature (1000)..(1000): n is a, c, g, or t
ggggaaacataaataagattacagaggtatcaatttggttaaaattcaccattttataagactaagcaataatcttaacaacctctttcctgaatatttaaatgtgtttgtatggtgttatgactaattgttactgatttagagactaagccctcttaaaacctttagttaaatataaaaagaaattatatatatcttgcctccctgatggaaaactatataaaattgtagacttaaaaggtttgtggaaatacattaggatatcagaaaactaaatatatggagttgctttatgactattacatgttaaataaaaatagcttaattgttttggaaanacaaaccaaaaccnnnnnnnnnnnnccttgtccggccgcctccgcccttcaaaaacttttcaagaccaattcgttttggcgcccggggcccaaaaaggtaaaatgaacattggtccattagctgttttcctaagaaaatccttgggaaaagactaaagggtttggcatttcccccccataaatgatncnncnnnnncncnnnntccncnnnnnnnncncnnnnnnnnnnnnnnnnnnnnnnnnnnnnnnnnnnnnnnnnnnnnnnnnnnnnnnnnnnnnnnnnnnnnnnnnnnnnnnnnnnnnnnnnnnnnnnnnnnnnnnnnnnnnnnnnnnnnnnnnnnnnnnnnnnnnnnnnnnnnnnnnnnnnnnnnnnnnnnnnnnnnnnnnnnnnnnnnnnggtgttccctcctcgcctccgcgcggcgccgtcccccctcttgactccctttggcgctnnnnnnnnnnnnnnnnnnntttcacgccacctactctattttagacccccccgtcctttgggttcctccccatagctataccatcttttgcgtgaccacccctatatacccccccaatgctcaccacccacccaatatcccccctcttttattatctaccttatanttgctcacaccctacgttttctctagctccccagtaagatntcccatacgacaatacccctaacccagcagttataattccagg

SEQ ID NO: 2223 - DNA, 340 bp, Homo Sapiens
  misc_feature (279)..(279): n is a, c, g, or t
atcggcgtccccgggatgcccaccaggcccagggatccacctaggtgggtttggcaaccctggtgatggcagtggtagtggcacatcctgcctttgcagccagccctccgtcacacggactgtgcagaaggatggacccaacaaggggcgccagttccacacatgtgccaagccgagagagcagcagtgtggctttttccagtgggtcgatgagaacaccgctccagggacttctggagccccgtcctggacaggagacagaggaagaaccctggagtnggaagccagaagcaaaaggccccgggccagttcctcagacatggggtccacagcaaagaaa

SEQ ID NO: 2224 - DNA, 591 bp, Homo Sapiens
ccagtctggggaggagagagactggaaacgttcctggactgctgaagaggagacccagttggcttcactttttgagaagattcgccctgtacccaaacccctttccagtataacccttaatgcttgagaacctaaagctggttatcctggcgaacacccctacccttctattgcgggtccccacatgcacacagaactctgacacaggatcagctgcacttaagaaatcatcccagctaagttcattattcctcatggggtggggagatgctgaaaggggtattgtatatcccactgcactgagagggctcaatcagctggatttgagttctggaacacacatcatccccacccctcccccagcgtgggctcaccattcttagtcctttctcaagtgggaccttcaactttctgtgaacacccagtctgcgtcctgggtctgctaggttcgatgatggcgaactcgtatctgcatccggtgcaagttttagctggcagaggtgagaccggtggtgctggtctgcctttgccaactatagccagtctggagacttgataaaatacttcagggaccgtcagatggggatcctc

SEQ ID NO: 2225 - DNA, 488 bp, Homo Sapiens
tggccggccagggtgaccccaatacggagcaggtcttctgccgtcatctggaccaccaggtcaaaggatgcaaaccccgcactgacgaagctctccttgtaccgccccatcttgacggcatccagccaatcaccaactgtcgtgaaggttgtgtaatctgggactgtgcggtccaggaggggctgtgacatgccagactgagcgctggcaatgaccttgaggctggcagcattgcggatgagcttgtccagggtattgacaatctgggagaatttgggcctgaggttccggtcccgcacccagcagtccagcatgagctggtgcagtgctgtgggacagtccatgggtggtggcagccggtaatcctgctccacggcattgatgacatcctgggtgctcatgtcccagtagggtcgctctccatagctcatgacctcccacatgacaattccgtagctccagacatcactagcagaagtgaacttccg

SEQ ID NO: 2226 - DNA, 759 bp, Homo Sapiens
  misc_feature (382)..(382): n is a, c, g, or t
acaaaaacaaataagcaaaacttatacaaacagcatgggggttgggggtgagggacttaaaagtagacatgctacacctaatgtcaagaagcagcttggtttcctttgccagatatccttgtgacgacatggattgtagattcaatgatcctacacagggtatctaaaatgtcatgttgctgcatatgactaaagagtcctctggaatggccacaactgagagataaagcaacctcagggtcctgggagggcaaagcttggccatcacagcttctcaagtcagctaagtcagacagaactgcagagatagaagtagaagggaactcagattcttcctcggctagggtagaatccttggaacaagtggaggtctttaaattcnttaacaatcgtcatatctaccattgttggactgttcttctgcatgctgtgacctgatatttgacatgtcttctgaaaacgaagatggaactttccattcggtattctttaacagaactattttcaggggaaggaagatcttgctcagttcctggatcaataattgaggagtctctggtctcattgtcagaagtgctcgttggggtcaggacctccctggtttctgttttcatgtcactgatgcagctgtctacagtgtgctcctcatcactgctaacacgccgccttttaatgggagttgctccttcatcatctttagtttttctttctttggcttcttgctcttggagtgagtttctctgttgcagacaagtcctg

SEQ ID NO: 2227 - DNA, 932 bp, Homo Sapiens
ccgcttgccgtcttgttcaagagtttcttgagggtggaagacatgaagtaaggcctctcggccgagccgtcattcctctccaggtcctccaagaagcagaggaacagcgtgtccacacacatgccatagacgctgaagaaaccgtgtgcaatcaagtaggagccaacgatcaccgtcagtataggaacccagtaataattgaggggtggtgctgtatcctgcacgatcctgatacggtgggtgaagaagaagaaagccaggatccccacactaccaacgatcagaagtttgcccaacaggaagaggaagtcagtaactttatccaggacagccactctgatgatgtttctcatgagcaggaagaaggcattcctggccgaggtgcagaaattggtgccgtagatggcaatcatgatgtaggcattcctattaaggaatttgatgaacttctccaggcaccagaagcagcatttgagacaggtcatgaggcacttggcaaacttgttctctgcagctttcagccgctgatccaggtactcgagtatcacacgggatgatctgcacaatggccaggatgagcgcgccaaaggccagggagcctgtgtggtacctgagcgcccggccaaaggcagagaagagcgggaaggccggcaggtcgtccggcttgcgaagggcccagtagtaggaggcaaaggccccggccagcgtgacctggcccagcgccagcacgaagttggccaaccagaagaacatgaaggcattgaagatctgcaggcccagcagggcccggtggtagcccgactcaccaccgtagaaggcgaactggcaacgggcattggggcattggcgggactcattggaggaggggaaggtctctgggttgcaggttttcgcagtaaatgggcaggggctgtcatcaaagatcttataga

SEQ ID NO: 2228 - DNA, 466 bp, Homo Sapiens
ctgcgtttttttatggtggccggagtgtcttgctgtactaaggtctgaataatatccattataggaccatgatctggatctctgagacaagcttctttcatcccatcggcttgaacacgggtcacttaacttatctcctttactccatttttctccactaggtggtctatatgctcttaatctctgcatttcctctttccagtgaggaggagtttcactgctgtcatcatcatctgactcagaacaggatcttgatcttggaggtgtgtgatagcgaattgtgcccctccctttaatcttccgtccagactttgatacagatggtttctgaccacttacaatgggtgcaacatcaggaatcttcggttcaggttctgcagtaacaacaggcatatctcttctcagtaaaaatcggttctcaggcactggaggaatctcttctgggcggaccacaggtttttccctt

SEQ ID NO: 2229 - DNA, 810 bp, Homo Sapiens
ttaatttccctactccaccatcatcaacaaagtcgtcattgaattttgagaagcattctgaaaactttgcatggacagagaatcgttatgatgtgaaccgtcgacgacacaactcttcagatggctttgattctgctattggacgtcctaatggaggtaactttggaaggaaagaaaaaaatggatggcgtacacatggaagaaatggtacagaaaacataaatcatcgaggtggataccatggtggaagttcccgttctcgtagcagtatttttccatgcaggaaaaagccaaggactacatgaaaacaacatacctgacaatgaaaccgggaggaaagaagacaagagagaacgcaaacagttggaagctgaggattttccgtctttaaatcctgagtatgagagagaaccaaatcacaataagtctttagctgcaggtgtgtgggaatatcctccgaatcctaaatctagagctccaaggatgctggtcattaagaaaggtaatacaaaagacttacagctatctggattcccagtagtaggaaatcttccgtcacagccagttaagaatggaactggtccaagtgtttataaaggtttagtccctaaacctgctgctccacctacaaaacctacacaatggaaaaaaccaacaccttcctgtgcagtcctgttggaatttgaacttgccatgaggtgttgaagccttgtttcactgagttggagagaccggacctaaatggcgcagcatgactttgctccagcctggcttaatttccttactccaccatcatcaacaaagtcgtca

SEQ ID NO: 2230 - DNA, 241 bp, Homo Sapiens
  misc_feature (114)..(114): n is a, c, g, or t
  misc_feature (162)..(162): n is a, c, g, or t
  misc_feature (181)..(181): n is a, c, g, or t
  misc_feature (203)..(203): n is a, c, g, or t
  misc_feature (211)..(211): n is a, c, g, or t
  misc_feature (225)..(225): n is a, c, g, or t
gcacacagagaaggaaagctctggccccctcagactcatcgcttccttctccccaaacgctcttgattcggttttgcacatagctggaaatgtgttcggcatcttaacactggngacgggccatcgaagtcagaatgtccttctaggtaattgctctctagncacttaaactggggctctngacattctcttggagaattcangacatcangagaagaagtcccncttcaggggacgtcca

SEQ ID NO: 2231 - DNA, 212 bp, Homo Sapiens
ttggggacaggaaacccagggagctctggttttgttcccaggtcctatcagttcagcttcacccagctcctgccggctcctcgggaggagacaaggcttgaaaaccctgccacccaccctgtgcttgaccagccatgtgggcaggggctccctgcaccaaacaacagcatccagggcaagaaagtggagctggccgcccgcctccaaaagat

SEQ ID NO: 2232 - DNA, 1877 bp, Homo Sapiens
  misc_feature (542)..(550): n is a, c, g, or t
  misc_feature (1239)..(1247): n is a, c, g, or t
ttttacataggtacctaccatgttattcacaaattgtgaaagctatttacatggtattcacaatggtgaatactattttacattctattcagtataagtaatctaaagatgatttaaagtatatgggaggatgtgcatacataatatgcaaatactacatcattttataaaaggggcttgggcatctgtggactttggtatccaagtaggtgtcctggaaccaatccccaaggaatcaactctaatgtctaagctccagagctccaggcactctgacacctgaagttcttgaatgaagtgcctgtggatgatatttgtagggcatgtctatactgttaactaattttcttcatgaagattccagaatttatattcccaactgaattttgccctcttcaaaggagtaaccctgggaaagagaataaatgcaacttattttgttaaaaacccttctatcacttttctttaggaattgtcagcagtcagaacaatataagacattccttctgtctcattactctccagccatatctaaagcttgnnnnnnnnntcccaaatttaacacctttgtcattcagaaccatctgataacctgctatttaagtaatttccacaaattgagtgcattaaagcacaaagacttgccactctagtgaatactcagcaccacttgttaaaagtttatagagaaaaagggtttaaaataagcatcaatctcctctgaagagaatatgcaattagacatagaatctggcacatctcttatgaggaagagtcacagcactcaatatttggcatatattctaattttttcaaaattatacttactggaaagaaatggcaaggcagagcgcaagccaatttcacttaaaaaatttacaacacaccatacactttaacaaatctactttaattctaaaagaaattaatctagaactgtcagtaatacacaacatacttttatgtttcttttataggtatctatctaataaaagtttatttgtgtatgtgcaatgcataactctatcttagatatgaatcctaacaggatgaaaatactttcttgcaactactttatgcttatgaaaggtgtgaacttgcaatgtcctcctgtcttaaacccaagttgacagtgccctctcaaaacttttcataaataatgacctaatttcatttaaaaaatggtttcagcaaatatgaaaatagaaagtccgttatttgtccatttgtaatatgagnnnnnnnnngatgatacattcctctacagaaaaagtgggtttagagaacagttctggtagtatttcacatggtaaagtatcaaaagatctaatgagcagcccccttgctcagggaaagacagtgatttcaatgtgtttctcttccgaattgcttagtaactccaagtgattttcaaattggggggcagattactggcactgagttcatcaaatttagatctatcttgaatagggacattatagaaatcaagaacatctctaaccctgcacatctggtggagtctggagttagggactacatgacccaagtcatcagctaaatgagccagaagattgaactttagacgactatcttccagggagatgtcttgccaattactaggaagagatgaaccaaaaacttctttaacgtaagattccaaacgactctggagatcttcaggtggtgtgtatgctcggcttcgtaaaggtggacacactaggataggttcctttttctcttctactgtctcaacaaccactggctctttctcttttctgaatcgagaccaaaattctctacatggtgtccctgagactgtccacatgaagactcttctggtaatgcccgacacagatcgcgccgccatcttcgatccc

SEQ ID NO: 2233 - DNA, 916 bp, Homo Sapiens
  misc_feature (481)..(496): n is a, c, g, or t
gtttgagtgaccctgctggttcccgtacaattttaagatcagaaccgtggcggcagaacaaaccatcatttgttgaacctctgcttgaaagcacgaataagtaagaacagaccagtcatatggtttcagaaagtgttattctgggatttcaggataaattttgtaaaactactaacaaacaacacacaggaaactaatttggtataagaaacgacatatccctaaatagtgcttatttaacttcattataaatacatctacttaacaaaaaaatatattttgtgatcttgaggtcacttcgtttaggtcattatctcaacccaacctccccaaactctggtttgagccaatatgtgttctattgttctcagagcaccagccgactgtacaacaattgttataaaaatgtttattgtttaccaaaaccagtggacctcttatcaaatgctgcttggtaacaaaatctatcacagttttaatnnnnnnnnnnnnnnnngaagctaactatttgtctcattgtcattagttagactttctgcaaggtcacttaatccagacttattcagtgcattaatcagattctcaggtgttgcatgaactccctcttgatcttgccaggcaaccaggagctgcttagctctcatcttcatgtcttcactgtcacactcaatctgcctaatttctgagtctttcatttccaagtagggagccagaatcttccattgttcacccagcttgttggcaaatacctctatttgttctcctgttacaggtttgtctcgccgaacatcaggactttcattttccttcagtagagcatcattatcttcctcatcttcatcctcacctgtttttatttcttcagaaggaggcggtaattccttggctagctttattaccatattttcaagatacc

SEQ ID NO: 2234 - DNA, 926 bp, Homo Sapiens
ctcgggctcagtggttgttgacctcctgtactggagagacattaagaagactggagtggtgtttggtgccagcctattcctgctgctttcattgacagtattcagcattgtgagcgtaacagcctacattgccttggccctgctctctgtgaccatcagctttaggatatacaagggtgtgatccaagctatccagaaatcagatgaaggccacccattcagggcatatctggaatctgaagttgctatatctgaggagttggttcagaagtacagtaattctgctcttggtcatgtgaactgcacgataaaggaactcaggcgcctcttcttagttgatgatttagttgattctctgaagtttgcagtgttgatgtgggtatttacctatgttggtgccttgtttaatggtctgacactactgattttggctctcatttcactcttcagtgttcctgttatttatgaacggcatcaggcacagatagatcattatctaggacttgcaaataagaatgttaaagatgctatggctaaaatccaagcaaaaatccctggattgaagcgcaaagctgaatgaaaacgcccaaaataattagtaggagttcatctttaaaggggatattcatttgattatacgggggagggtcagggaagaacgaaccttgacgttgcagtgcagtttcacagatcgttgttagatctttatttttagccatgcactgttgtgaggaaaaattacctgtcttgactgccatgtgttcatcatcttaagtattgtaagctgctatgtatggatttaaaccgtaatcatatctttttcctatctatctgaggcactggtggaataaaaaacctgtatattttactttgttgcagatagtcttgccgcatcttggcaagttgcagagatggtggagctagaa

SEQ ID NO: 2235 - DNA, 1249 bp, Homo Sapiens
  misc_feature (374)..(467): n is a, c, g, or t
ggtcacacagtctcagattgatgaaattgaccatgactatgagcgagatggactgaaagaaaaggtttaccagatgctccaaaagtgggtgatgagggaaggcataaagggagccacggtggggaagctggcccaggcgctccaccagtgttccaggatcgaccttctgagcagcttgatttacgtcagccagaactaaccctggatgggctacggcagctgaagtggacgcctcacttagtggataaccccagaaagttggctgcctcagagcattcagaattctgtcctcactgataggggttctgtgtctgcagaaattttgtttcctgcacttcatagctggagaatggggaaagaaatctgcagcaaannnnnnnnnnnnnnnnnnnnnnnnnnnnnnnnnnnnnnnnnnnnnnnnnnnnnnnnnnnnnnnnnnnnnnnnnnnnnnnnnnnnnnnnnnnnnnagccactgcgcccagccaacaatccgctctgaggaaagcgtaagcaggaagacctcttaatggcatagcaccaataaaaaaatgactcctagttgtgtttggaaagggagagaagagatgtctgaggaaggtcatgttcttttcagcttatggcattttcctagagttttgtttgaagcaagaaaaaaaactcagagaatataaaatcaacttttaaaattgtgtgctctcttcttcacgtaggctccctgttaaaaacaaagtgcagtcaaattctaagccctggtcaaagacttcctggatcacagctgcagctcaccgccacatcacaggatccgttaacgttaatacccaatactctgtcagccactgtaggctctaagaaccacgtgcagtcttcagcccattaaattatcgattattttttaatgaattgaatttatattgagtcttcaaattaactgaatggatttaaaggggtaccaaggaggggggaaacatcagaatttcccaggcagttgttgcaaggaattggtactaaccgtgactacaacaaaaattcttgattgacttttaaagttatttcctggcattctggtaccttcacccagcctgagtgccctggaagaggaacaggaaatgctgatctctacccctgggtgagaccagaacctcagggctgatactgttgagtggcttcctcggtttactctgtgtactggggaagtattttcatattttttctgggggccagaatgaaaaaagaccgcctctgagtgggg

SEQ ID NO: 2236 - DNA, 955 bp, Homo Sapiens
gctgatgtcatgatagccactcagggccaccaagatcagagcatccgcatccagaggatgctgcccaggaactgccagatgctgcttttctccgccacctttgaagactctgtgtggaagtttgcccagaaagtggtcccagacccaaacgttatctaaactgaagcgtgaggaagagatcctggacaccatcaagcagtactattgtcctgtgcagcagcagagacgagaagttccaggccttgtgtaacctctacggggccatcaccattgctcaagccatgatcttctgccatactcgcaaaacagctagttggctggcagcagagctctcaaaagaaggccaccaggtggctctgctgagtggggagatgatggtggaacagagggctgcagtgattgagcgcttccgagagggcaaagagaaggttttggtgaccaccaacgtgtgtgcccgcggcattgatgttgaacaagtgtctgtcgtcatcaactttgatcttcccgtggacaaggacgggaatcctgacaatgagacctacctgcaccggatcgggcgcacgggccgctttggcaagaggggcctggcagtgaacatggtggacagcaagcacagcatgaacatcctgaacagaatccaggagcattttaataagaagatagaaagattggacacagatgatttggacgagattgagaaaatagccaactgagaagctccaccagccactgatgccagccctggcactgcccctgcacaggagacaagtgcgttcagggcacaggccccgacatcaccccaaggacaacggcacaagtagagagaaactacctacctcacttcaaattatgtttggacttgacaaaaatgtatgcaaatgatgggggatggtagaaaaaaattatttacacaaccttggaagattaggcatgaatacacagagatttaccttta

SEQ ID NO: 2237 - DNA, 1303 bp, Homo Sapiens
ggtaaatcagttgaagaaggaaaatgaacgtgcccaggggaaaatgaagttgttgatcaaatcctgtaaacagctggaagaggaaagggagatactgcagaaagaactctctcaacttcaagctgcacaggagaagcagaaaacaggtactgttatggataccaaggtcgatgaattaacaactgagatcaaagaactgaaagaaactcttgaagaaaaaaccaaggaggcagatgaatacttggataagtactgttccttgcttataagccatgaaaagttagagaaagctaaagagatgttagagacacaagtggcccatctgtgttcacagcaatctaaacaagattcccgagggtctcctttgctaggtccagttgttccaggaccatctccaatcccttctgttactgaaaagaggttatcatctggccaaaataaagcttcaggcaagaggcaaagatccagtggaatatgggagaatggtggaggaccaacacctgctaccccagagagcttttctaaaaaaagcaagaaagcagtcatgagtggtattcaccctgcagaagacacggaaggtactgagtttgagccagagggacttccagaagttgtaaagaaagggtttgctgacatcccgacaggaaagactagcccatatatcctgcgaagaacaaccatggcaactcggaccagcccccgcctggctgcacagaagttagcgctatccccactgagtctcggcaaagaaaatcttgcagagtcctccaaaccaacagctggtggcagcagatcacaaaaggtcaaagttgctcagcggagcccagtagattcaggcaccatcctccgagaacccacccacgaaatccgtcccagtcaataatcttcctgagagaagtccgactgacagccccagagagggcctgagggtcaagcgaggccgacttgtccccagccccaaagctggactggagtccaagggcagtgagaactgtaaggtccagtgaaggcactttgtgtgtcagtacccctgggaggtgccagtcattgaatagataaggctgtgcctacaggacttctctttagtcagggcatgctttattagtgaggagaaaacaattccttagaagtcttaaatatattgtactctttagatctcccatgtgtaggtattgaaaaagtttggaagcactgatcacctgttagcattgccattcctctactgcaatgtaaatagtataaagctatgtatataaagctttttggtaatatgttacaattaaaatgacaagcactatatcac

SEQ ID NO: 2238 - DNA, 1501 bp, Homo Sapiens
  misc_feature (788)..(1091): n is a, c, g, or t
  misc_feature (1149)..(1374): n is a, c, g, or t
gggattcaaacaccgaaatcgatctttttcaagatctaaatccaattcaagatcacggtccaagtcccagcccaagaaagaaatgaaggctaaatcacgttctaggtctgcatctcacaccaaaactagaggcacctctaaaacagattccaaaacacattataagtctggctcaagatatgaaaaggaatcaaggaaaaaagaaccacctagatccaaatctcagtcaagatcacagtctaggtctaggtcaaaatctagatcaaggtcttggactagtcctaagtccagtggccactgatagtataaaccatggtcatttttaggcatgtatcattcatttactcatagtttggcttacttaaattatcaggaatacaatgttgcaatgatgcttaaaaaacacttgttagttttccctgtaccaggcaatggttataattaaaatgatatgctgttgagaagccactcttaagagtccagtttgtttaatgttatgggcagctaccaatttgtggtgtctctgtatatttttgtaaagattctcattttttatgcttgaagtatttggtgaaaagatgttggttgaccataattttgcaacattgtctcattaaaaataaactttcatattcatatttggtagaactgttaacctagaaatgtagcttgctaataagatagaatgatacaaaagtgaagtagtagccacagtacaacactgactgctcagacacatttaggttcagggtggacctttatgtcttgtcaagatgtctaggcccgtnnnnnnnnnnnnnnnnnnnnnnnnnnnnnnnnnnnnnnnnnnnnnnnnnnnnnnnnnnnnnnnnnnnnnnnnnnnnnnnnnnnnnnnnnnnnnnnnnnnnnnnnnnnnnnnnnnnnnnnnnnnnnnnnnnnnnnnnnnnnnnnnnnnnnnnnnnnnnnnnnnnnnnnnnnnnnnnnnnnnnnnnnnnnnnnnnnnnnnnnnnnnnnnnnnnnnnnnnnnnnnnnnnnnnnnnnnnnnnnnnnnnnnnnnnnnnnnnnnnnnnnnnnnnnnnnnnnnnnnnnnnnnnnnnnnnnnnnnnnnnnnnaaatcatgtagggcccccagcggccccccgagacggttactaaaccccttccttttgnnnnnnnnnnnnnnnnnnnnnnnnnnnnnnnnnnnnnnnnnnnnnnnnnnnnnnnnnnnnnnnnnnnnnnnnnnnnnnnnnnnnnnnnnnnnnnnnnnnnnnnnnnnnnnnnnnnnnnnnnnnnnnnnnnnnnnnnnnnnnnnnnnnnnnnnnnnnnnnnnnnnnnnnnnnnnnnnnnnnnnnnnnnnnnnnnnnnnnnnnnnnnnnnnnnnnnnnnnnnnnnnnnaacacactctccacatctacatctttccctccccccaccaccctaatctcttttatctatcacccacactttacctcctaaccttcatttcacttcattcctctcttacctcaaaacacatataaaa

SEQ ID NO: 2239 - DNA, 944 bp, Homo Sapiens
aaaagagcagagctaccatgtcctcttggagcagacagcgaccaaaaagcccagggggcattcaaccccatgtttctagaactctgttcctgctgctgctgttggcagcctcagcctggggggtcaccctgagccccaaagactgccaggtgttccgctcagaccatggcagctccatctcctgtcaaccacctgccgaaatccccggctacctgccagccgacaccgtgcacctggccgtggaattcttcaacctgacccacctgccagccaacctcctccagggcgcctctaagctccaagaattgcacctctccagcaatgggctggaaagcctctcgcccgaattcctgcggccagtgccgcagctgagggtgctggatctaacccgaaacgccctgaccgggctgccctcgggcctcttccaggcctcagccaccctggacaccctggtattgaaagaaaaccagctggaggtcctggaggtctcgtggctacacggcctgaaagctctggggcatctggacctgtctgggaaccgcctccggaaactgccccccgggctgctggccaacttcaccctcctgcgcacccttgaccttggggagaaccagttggagaccttgccacctgacctcctgaggggtccgctgcaattagaacggctacatctagaaggcaacaaattgcaagtactggggaaaagatctcctcttgccgcagccggacctgcgctacctcttcctgaacggcaacaagctggccagggtggcagcccggtgccttccaggcctgcggcagctggacattgctggacctctccaataactcaactggcagcgtgccgagtggctactgggcatccctagggcagccaactgggacatgcgggatggcttcaatctccgggaacccctgatctgtgaccagaactgaacgactca

SEQ ID NO: 2240 - DNA, 462 bp, Homo Sapiens
  misc_feature (208)..(235): n is a, c, g, or t
  misc_feature (309)..(309): n is a, c, g, or t
  misc_feature (332)..(332): n is a, c, g, or t
  misc_feature (357)..(357): n is a, c, g, or t
  misc_feature (361)..(361): n is a, c, g, or t
  misc_feature (376)..(376): n is a, c, g, or t
  misc_feature (405)..(405): n is a, c, g, or t
cgcagctatgagggggggctcatcagctattgctagtattagtatatttcatgtgtggcccaagacaattcttcttccaatgtggcccagggaagccaaaagattggacacccctgctccttatgtccacatggaaagaaagaaagtgatccaagaaactacagtgggctctcattggcatgaaggttcccaaagattgagttaggannnnnnnnnnnnnnnnnnnnnnnnnnnngaggtggagtctcactctgtcgtccaggctggatcttggctccactggaaccttccccctccccggattcaggnaaatctccctggcctcaagtctnccaagtaagctgggatacagggtgncccntcggcaatgccagcntaaattccttttttggaatttttaggtangaaaaagggtttcacccaaattggccctggctggtcccgaacttcctgatttcaggt

SEQ ID NO: 2241 - DNA, 461 bp, Homo Sapiens
gtggggacagaggagtcgtctatggaggagtccgaggaggtggctatggaggagatcgaggtggctatggaggagtccgagttggaggctatggtggagtccgaggaggctatggaggagatcgaggtggttacggaggatatcgaggtggttatggaggatatcgaggaggctatggaggagacagaagccgggggggctatggaggagaccgtggtggtggcagtggctacggtggagaccgaagtggaggctatggaggagacaggagtcggtggcggctatggaggagaccgaggtgggggctacggaggagaccgaggtggctatggaggcaaaatgggaggaagaaacgactacagaaatgatcagcgcaaccgaccatactgatgactgttttgaatgctcctttgtctctgacatgatccatagtgaaattgccagagttttgcctgctgctt

SEQ ID NO: 2242 - DNA, 445 bp, Homo Sapiens
accagatttagtcaatggatcccatcagaaaacctttgaggaaatcctgccagagatcatcatctccaaagagttgagcctcttatccggtgaagtgtgcaaccgcacagaaggctttatcgggctgaactcagtgcactgtgtccagggatcttaccctcccttgctcctcaaagcctgggatcactataattcaaccaaaggctctgcaaatgaccggcctgatttttttaaagacgaccagctcttcattgtgctggaattttagtttggagggattgacttagagcaaatgcgaaccaagttgtcttccttggctactgcaaagagcattctacaccagctcacagcctccctcgcagtggcagaggcatcactgcgctttgagcaccgagacttacactgggggacgtgctcttaaagaaaccaccctcaatagcctgct

SEQ ID NO: 2243 - DNA, 400 bp, Homo Sapiens
  misc_feature (248)..(248): n is a, c, g, or t
  misc_feature (306)..(306): n is a, c, g, or t
  misc_feature (354)..(354): n is a, c, g, or t
ttgacctggtccccaaggaggttgtggagaaatggctggattaccttcggaatgagttgccaaccgtggctttcaaggccagtacccagcatcaggtcaaaaacctgaatcgttgcagtgtgccagtagatcaggcctctgagtcactgctgaaaagcaaagcctgctttggagctgaaaacctcatgagggttctggggaactattgccgccttggtgaagtgcgcacccacattcgtgtgggtgtntgtgggtcttcccaatgttgggaagagcagcctgatcaatagcctgaagcgcagcgcnagtgcagcgttgggagctgttcctggaattaccaaattcatgcagganggtctacctggacaagttcatccggctcttggatgctccaagggca

SEQ ID NO: 2244 - DNA, 442 bp, Homo Sapiens
tcaacgaccctgggctgcctgcctgtacgggatgcgcgcatagaggaagtagatcgatcctgtgactcagacgaggactatgaggctggaggaaccagacggttgctttcctcccactgcaccctggtgatccaccccacagagcacagccccacctacctcctcattggcaccaagcatgaaaaggatacgtggctctaccacctcacagtggctgcaggtggcagcagtgccaaggtgggcactgcctatgagcagctcattggaaaactgatggatggtgaaggagatccagattcgccgctctggaagcaccccatgctgtgctgcagcaaagacggcctatacgcctccctcaccaccctgccctctgaggccttgcagacggaggccctcaagctcttcaagtcctgccagctcttcatcaacgtgccggtggaag

SEQ ID NO: 2245 - DNA, 500 bp, Homo Sapiens
agaggatccccccaaggaggctttgaggggaaacttgggagtgtccatcatgcagtgttaagggctaccacttaattgggaggaatctctatccacagtggcatctccaaggtggttatgggagaaaggaagagaaaaagaagaaaacacacatagatacacaattaaggaagaaagtagaggcatgtgggtttgcatgtatacatgcatgtatgaatgcacaaatgagtgaatgtgggggtgctgcagggagagaagacccacactttcatgtagagcttccttgaaggggctgcagaaccaaaggcccccaccatggtcacctgcctgtgtggaaccactgggccttccttctgacccacggaaccccaatctggaagcacccaatgggggactgcctacctgagacccctggaggtaagccaaggcatcatttccccagtcttcacaatttacatggcccctgccaatttctgctgctcccacaatggcacgtggat

SEQ ID NO: 2246 - DNA, 1248 bp, Homo Sapiens
  misc_feature (1116)..(1140): n is a, c, g, or t
gggagaggcggaagcggagtcggcctgagaggtctctcgtcgctgcaggcgcctcagcccagccgcgtgccttggcccatggccgcctactcttaccgccccggccctggggccggccctgggcctgctgcaggcgcggcgctgccggaccagagcttcctgtggaacgttttccagagggtcgataaagacaggagtggagtgatatcagacaccgagcttcagcaagctctctccaacggcacgtggactccctttaatccagtgactgtcaggtcgatcatatccatgtttgaccgtgagaacaaggccggcgtgaacttcagcgagttcacgggtgtgtggaagtacatcacggactggcagaacgtcttccgcacgtacgaccgggacaactccgggatgatcgataagaacgagctgaagcaggccctctcaggtttcggctaccggctctctgaccagttccacgacatcctcattcgaaagtttgacaggcagggacgggggcagattgccttcgacgacttcatccagggctgcatcgtcctgcagaggttgacggatatattcagacgttacgacacggatcaggacggctggattcaggtgtcgtacgaacagtacctgtccatggtcttcagtatcgtatgaccctggcctctcgtgaagagcagcacaacatggaaagagccaaaatgtcacagttcctatctgtgagggaatggagcacaggtgcagttagatgctgttcttcctttagattttgtcacgtggggacccagctgtacatatgtggataagctgattaatggttttgcaactgtaatagtagctgtatcgttctaatgcagacattggatttggtgactgtctcattgtgccatgaggtaaatgtaatgtttcaggcattctgcttgcaaaaaaatctatcatgtgcttttctagatgtctctggttctatagtgcaaatgcttttattagccaataggaattttaaaataacatggaacttacacaaaaggcttttcatgtgccttacttttttaaaaaggagtttattgtattcattggaatatgtgacgtaagcaataaagggaatgttagacgcaaaannnnnnnnnnnnnnnnnnnnnnnnncctgtcggccggcctcgggccctccaagaggcttttctagaaccaattctttgggcgcgcggggcccccagtaaggtaagtggaacatgggcccttagcttggtttcc

SEQ ID NO: 2247 - DNA, 1060 bp, Homo Sapiens
  misc_feature (40)..(40): n is a, c, g, or t
  misc_feature (137)..(137): n is a, c, g, or t
  misc_feature (1033)..(1033): n is a, c, g, or t
ggcagcccgagcctacacatgatctgtgtcccagccaagnagactctcccagctccatgaggactggcatttactgtgggccccaggaatccaaacacagtgacccattcaggagcaagatcctgaaacagaaagangaagaagaaaagggagaagaggcagaagccaggacgtgcctcttctgatggcccggcgggggaagagcccgtggctgggcaggaagctctgactctagggctgtggtcaggccctctgccgcgtgtgacgttgcactgctccagaactctcctaggctttgtgactcagggagatttttccatggctgttggctgtggagaagccctggggtttgttagcttgacaggcttgctggatatgctgtccagccagcctgcagcgcagaggggcttagtgctactgaggcctcccgcctctctgcagtatcgatttgcgaggattgctattgaggtgtgaatgcgtgcttgtatcccagcagggcatagataatacgttattattgtctgccaagttctacatgtggagaatctgcttctgctttaaaatatcatgtgaaactccctggaaacaagaataaaaaattatgtattatgcagatgatgaaatgtttacatcattccagtaatgtcattgattttcatctttccctgtccttgctgtaatacttttaaattatttggccaaaagctttgtattatgatctcttggtctgtgtagttgtggctgaaaataatgagaagctctacgagttatcatcccctttttttgttagaaacaaagggcttgtcaggtctatttgaaaaacctcatagtcatgtgataagcaacaatagatgtttaatgatttcactgttatagcagaagaccagagaagacgcttggcctctgtacatgaaatatgggctcctgatggacctcattcaattctgtactgtgatttccatgcccaacaactcaagccttaagagagaaatcatggacaactgatttctggctgttttcaggcaggcaccgntttatggcgtcagtgcctaggctggaa

SEQ ID NO: 2248 - DNA, 1927 bp, Homo Sapiens
  misc_feature (932)..(972): n is a, c, g, or t
  misc_feature (1412)..(1490): n is a, c, g, or t
gggtctgtggattctggccaggccgggttcggcggttgctgtgagagcgggcttcccaacaccatgccgtccgccttctctgtcagctctttccccgtcagcatcccagccgtgctcacggtacagcagggtcccggggagtccaggaggcggcggagtgcggcactgtctggagagttcactgtattgcagagaggttggagaaaatcaagtcttgcacgtgccgatggctcaagattccctgaggtcttcagtgctgactaaggagtccgaaatgatgattcatgttataacctattgcaggctgaaccaagtgcatctctttcgagcaatcgtcttaagttccctcgtcgtcaccaattatcataaccaattatcatcgtaaaggatggtaattcctttaattatacccaccttaaaaacatgattctgttccacaaacgaaaggagcacatcagagatgccttcagttctgtgtgcttgaactttgaattccatgaattatagttgcactgaggggagaatcctgtttccatcctcctggttccttctccctttcctgtccccatgtttctctgaggcctggcaatgctctctggatacttgcagacggactggactgagccctggctcatggggctggccaacttctcacgcgctctgcgtgctcctcacctgcttgtccctcccgaagctacagactacagatcggggcactttctgtgtctagtcatcttaatctactgtgctgaatacatcaatgaagcggctgcgatgaactggagattattttcgaaataccagtatttcgactccagggggatgttcatttctatagtattttcagccccactgctggtgaatgccatgatcattgtggttatgtgggtatggaagactttgaatgtgatgactgacctgaagaatgcacnnnnnnnnnnnnnnnnnnnnnnnnnnnnnnnnnnnnnnnnntgaggggcagcagctgcttggagtttgcgtccttcccgtccacccagtgcagctcccagtgctgcagtgtgcgtggcgtgggcatccttccagctgactcatggtttgaaaaaccgttgttttatttaaatatccacagtggtagggcacacactgaagttggcttttcagccagcactgaatgtatccatcaggacatgcgtcttcaggtgcctgatctttgtagtcaggctgtgggaacggtctctgcagagcttcataactgggaatttgatttgaagaagtccatgtcatatgtgtaactagtactaattataaatataaaatacacaatataaaatatgaaactcaataataaacagtgccacctggtacatgggcaccatgccctcctcctcgtgctgtgttttctagtgcatgccacagttcgcagtagaggnnnnnnnnnnnnnnnnnnnnnnnnnnnnnnnnnnnnnnnnnnnnnnnnnnnnnnnnnnnnnnnnnnnnnnnnnnnnnnncctgtggagcccggggtgatgcataaaatcctgtgtgcctgggtcagccgcatcacagacaatgacttgacatgaaatgtcagctgtgctggggcagagagaccttggaaggaagctcttggaaaatacgttgtatctcagtttgatgaaccaattcacaagaggctaggccctctctagcaaagttatgggctgctttacagaatggaagccctgaagtcaacactccatggagaagcgtgtctttcctaatgtcctggtgttctgttgatttaggtgcttgggaacacaatgctcccagttctgttaggacaggcatactgttactttgcaatatccactttataaaatagctcctgcccagtggctcttggttcctgtcaaatgtggacctgtagtttaagaatgacaggtggttagagacccagatatttaaa

SEQ ID NO: 2249 - DNA, 1032 bp, Homo Sapiens
gggccgcgagctggaccagccgtgcaaatctctagaagatgacggtgttctttaaaacgcttcgaaatcactggaagaaaactacagctgggctctgcctgctgacctggggaggccattggctctatggaaaacactgtgataacctcctaaggagagcagcctgtcaagaagctcaggtgtttggcaatcaactcattcctcccaatgcacaagtgaagaaggccactgtttttctcaatcctgcagcttgcaaaggaaaagccaggactctatttgaaaaaaatgctgccccgattttacatttatctggcatggatgtgactattgttaagacagattatgagggacaagccaagaaactcctggaactgatggaaaacacggatgtgatcattgttgcaggaggagatgggacactgcaggaggttgttactggtgttcttcgacgaacagatgaggctaccttcagtaagattcccattggatttatcccactgggagagaccagtagtttgagtcataccctctttgccgaaagtggaaacaaagtccaacatattactgatgccacacttgccattgtgaaaggagagacagttccacttgatgtcttgcagatcaagggtgaaaaggaacagcctgtatttgcaatgaccggccttcgatggggatctttcagagatgctggcgtcaaagttagcaagtactggtatcttgggcctctaaaaatcaaagcagcccactttttcagcactcctaaagagtgggcctcaaactcatcaaggcctctatctcatacacgggacctacagagagacctcccaatgaaccagaggagacccctgtacaaaggccttctttgtacaggagaatattacgaaggcttgcgtcctactgggcacaaccacaggatgccctttcccaagaggtgagcccggaggtctggaaagatgtgcagctgtccaccattgaactgtccatcacaatacacgtggatccacaatgcacgtgatcgggatccttagtcac

SEQ ID NO: 2250 - DNA, 1101 bp, Homo Sapiens
  misc_feature (298)..(308): n is a, c, g, or t
  misc_feature (924)..(934): n is a, c, g, or t
ggcttactgtgaagaaaatactggtcttagttgtaattaggatacaatggtacagtgtgtaattaaaactagagtaaactgttggaatggctgttttacttaaatattatcaaaactagcataacataagcaaaatagataagtacaacactccatttagtgttttgccagattgttaccagaagtctacagataccaaactttcagttctgagtttgtacaggcaagtcctgtgctgggtaaaaagttatattaatattgttatccacaagagatgtgattatgggttttgattacnnnnnnnnnnnccaaaccctgcttttgaaatatccttgtacttaaaattcatattgctaagacactgtattagaatatttaatattccccagatcctcttaggataaactgtgggaatcctcctatgccatggatatcaaaggtccacattagtttttatttctccagtgatcagaaacattgatatcaatccctattaaattagtggggggaatattaactttatctacagtgtattactgtatattaaactgaaatagtccattaaaggatttttttataaatttattttggattaaaaatatcaacaccaataagtttttagaccaagttgtaatttttccaatatagagtctttgcatcacactgaggcatcttgcacagctgcagttaaggtgagaaagaatgctctgtgtgaagacagtgtacacaatgggttccggtttccttgcaccttgtgcagtatcctttatttctgtgctgttctctcctgagcatgaaaaatgatcattatccaatttgtatttccttggtacatattttaaaaacaacacagtcattgactttacaattcagtaatgaagtttggcaaagcctattttgtaaacaagttaattttataatgtnnnnnnnnnnngttaatctaaccttgacttgttatttgcactttcatagtctatacttgatacattcccactttatatacagtaggattctacaaacgtgtagatgtttggccaaatgaatgctgttaataatatgtaaaattctttgattaaacatttattacttaaactacaaaaa

SEQ ID NO: 2251 - DNA, 1199 bp, Homo Sapiens
  misc_feature (907)..(925): n is a, c, g, or t
  misc_feature (1053)..(1061): n is a, c, g, or t
  misc_feature (1077)..(1085): n is a, c, g, or t
ggagtgatgacgcgactctcacgtgaccaggagtcgacgtgtgcagaagtccttatagtccagggcctgtttccctgtagcagctccttattgctggagaaggagaaaagtgcccaagatcctttcaggatatttggttttttgggcgcgacacaaatcgaggtgagggaagagagaggaaaatcccctgaatccctgcaggattaatttattcaaaaaggaaataaaaaatactcaatatgcaaaagtcttgtgaagaaaatgagggaaaaccacagaacatgccaaaggccgaggaagatcgccctttggaggatgtaccacaggaggcagaaggaaatcctcaaccttccgaagaaggcgtaagccaggaagcagaaggaaaccccagaggagggccgaatcagcctggccagggatttaaagaggacacacccgttaggcatttggaccctgaagaaatgataagaggagtagatgagcttgaaaggcttagggaagagataagaagagtaagaaacaagtttgtgatgatgcattggaagcaaagacattcacgcagccgtccttatcctgtgtgctttaggccttgaattcatttttgcctaatattaaaatctggcccccagctttctttctggtagcattttctgatggatctttgacctccatttttacttttaatcatctgaatgaaattttgttttaagtaatttccttgggaccagcatctcatttggattttggattttgacccatttttccaggtcctatttttcaattggaaactttcacacatttgcatgggaatatgttcattccatgttgtaaagtaaaacataacaggttatggcaaagcagcatatttaatatcagctcacatatgtaggataaaattccaaacttnnnnnnnnnnnnnnnnnnnatacatacatccatataacatatatcacaaaccttaccaagcttatttctgtgtggtgtgaaatttaattggctctcttctttttggtctttttgcctaaatgcaccttttatatgaacccgtgtctnnnnnnnnnaaaagaattgaagggnnnnnnnnnaccaggtaagagatccaattaatttgccaacccaccctttatggaagggcaaatgggggggcccccttaaaactccttggatggacagaaactctttaaaaagaaataggggaa

SEQ ID NO: 2252 - DNA, 600 bp, Homo Sapiens
gccctggcccctcctctgggcagcccctttcctccatgtacactgcagtggacagagggggggccccatccctaccctactccctggccgcctgcccctgtggttcccaaggaggggtatgtatgagagccgctctcctgctacctcccaccactgtcccagcagtccctcggcacacaggcatatcagctttcacactttccccatgcactctctcccacccccttccagggcctctgctccaaaggaggcctctggaacccaggactctggggttttacaagagggctggggtgtggaagggcaagctgcaccaaagacggtggatatagccaccgcccccccgccgctgcctagcatctgcttggccaattagttcagcctcagaccatggcactttgagggggtctctacctccccatcaacagctgcagggggaccccagtgccaacttcctctcccactagggccctgccttcagctggtgcttgctgcgattcctgtgccttatgtaactgcccttccttcccttgccctaggaaaaaggctgcatctttatatgttacattcatataaactttgtaactttttggaccattg

SEQ ID NO: 2253 - DNA, 619 bp, Homo Sapiens
  misc_feature (261)..(287): n is a, c, g, or t
  misc_feature (433)..(557): n is a, c, g, or t
actaatatttctggcgcagtgttgctgagcttacaattcagataaatgagggaagcagcttctcccacctctttactttggtcaccactgtggcaccaaggtggtctggccagacggcccacatcctccttgtgtttccccccctctcctctgtatccttccctctgcctttattaataccatcccttgtgcctaccaccctccactcttcctaagatttcttattgccttctaaaccataccctcttcctttcccaatgnnnnnnnnnnnnnnnnnnnnnnnnnnnaggtagggtctcactctgttgcccatgctggaatgcaatggtgtgatcatggctcagtgcagcctcaacctcctgggctcagatgatcctcccacctcagcctcctaagtaactaggactgcagactcctaagtagctggaccaannnnnnnnnnnnnnnnnnnnnnnnnnnnnnnnnnnnnnnnnnnnnnnnnnnnnnnnnnnnnnnnnnnnnnnnnnnnnnnnnnnnnnnnnnnnnnnnnnnnnnnnnnnnnnnnnnnnnnnnnnnnntgagccactgcacccggccaagctacagtttacttctgaaaatcaatgagagttcaaatatt

SEQ ID NO: 2254 - DNA, 271 bp, Homo Sapiens
aggctatttgagggcagcggccaggcaggctgggcaggggggtggggtctggctctgtcccacaggacggtgtgaccactgggtgggctcttgacgggctttcctcactggagttcctcaggccgctctcctgaagcggtgctcagaggccctgaccatcctgccaggcgcccgtgacccctgacctcctccctctgcctcctgctgtggcttctgtccacaagcccctccccttcccctttggacccagaccagccttcggatcctctag

SEQ ID NO: 2255 - DNA, 363 bp, Homo Sapiens
cgtcgacgtgcaatcagtgacagtaaaggagggaaacagaagaggcggcccgacgccctgaggatgatttccaatgcagaccctagtatacctcctccacccagagctcctgcccctgcgccccctgggaccgtcacacaggtggatgttagaagtcgagtggcagcctggtccatgggcagccgaccaaggggactttgaaaaccaaggcagtatcatgagcaggaagaaacacctgagatgatggcagcccgcattgacagagatgtgcaaatcttaaaccacattttggatgacattgaattttttatcacaaaactccaaaaagcagcagaagcattttctgagctttgtaaaaggaag

SEQ ID NO: 2256 - DNA, 236 bp, Homo Sapiens
gcaccatattttcgggtatgagttctgagccccacaatggccataagcacttaaccacagacctagtgacgtatgtataaaatatacactagattccaaagacttagtatacaaaagaacataaaatatcttatttgtaattgtttaaaactgattacatgttaaaatgataatattttaaatataatgggttaggttggtaaaataaaatatattattaaagttaatgtcgacgc

SEQ ID NO: 2257 - DNA, 416 bp, Homo Sapiens
ctaaacagacatacattgaaatcaaactaattctaaaactcagaacttcagattgactctgtgaatgtagggtgatgcctcatgttactttgctgaaatcaaattgcccctcactcatcaccgttggggcaagttctttgtagcatgtatgtgctattgtatgctatgcagtgactccattctcttaccacttttctctaccgctatctgaactggtgtgaagccttcattcattaggatatgttctccttggtagtaatgtttggctttcacttatgaagtccgcctctattttttctcattagtcttcaacaattaaagttggttaattggcaccagcgcagtaggagacaaatgggagctctgaaatcctgccacttggtcataaggttaatattcggatgacccataacttt

SEQ ID NO: 2258 - DNA, 609 bp, Homo Sapiens
taaattcgcggccgcgtcgaccctcggtctgtcaggcaggctgaggtgatgctatcgcaggcaagccagctcccacacaagcccgctcccacatttgatcgcgtgttacttgctgatctcagccacgttgaacacctgctccagcatcggatggaatacataacccttcaccgaatcacgcatcggcagggtgtagttcttctgatacaggtaggcgtacacgctgtccttgagcacgatcttctgggcttcctggtacagctcggtgcgcttggccgtgtcgttgttggccgccgcgtcgcgaatcagcttgtccaccatcgggttgctgtagaacgagcggttgcccggcagcccttgcagggaggagtcgaaccagaagttcatgtacatgtagggatcggagaagtccggcgcccacgagccgatggacacgtcgaagtcacccttgcccaggcgctcgcacatggtggcgttggccagatgttacatcttcaggttgatccccagcggcaccaggctggctttgcaggtcaagccagttgatttccagtacggggtcttcgctgagtacatgtagttcaaggtggtgatttttgtacggagctt

SEQ ID NO: 2259 - DNA, 186 bp, Homo Sapiens
attgagccatcttgcccagccccagtattctcaaaccaagaaaagtatgacaacaataaaagagcctactttttgacaatagagacaaggctatttgtctgttctgaaaggaaaagcttacagcaggagagataagggaggcatccaaggataccaagcatttcagtggaagttcctcaacataaa

SEQ ID NO: 2260 - DNA, 395 bp, Homo Sapiens
gcggccgcctactactactaaattcgcggccgcgtcgacatgggggtatactgaacataggacaagaacacactgaggactggatggaccgagtgcctgtgcttcactgcctccactgccgagcagtcgtgagtaaggggctttgatgcgcatagctgatccggcacgggcgcagcccacataccctgcagtggctgagatgagagcaaagacaaaagctgaggcgaccccagagcaaatgactcccttagctgagtttctctccatgctctcagcctcctcccgtgaccacctgctcacccttcctggggagtgacagggagatattcagaggctgagcccaggagtcaccagccatgcagtattggcatcagtcctgtatcttccttaaagcg

SEQ ID NO: 2261 - DNA, 379 bp, Homo Sapiens
cgtcgacaaatcaagccagttctgctgcatgattaactgtttactgcagggtattattctaccacaataccctggcaaccagctcatattcagttacactatcacagcacaaaaaaaagagagggagagagagaactaattgtatgatcatgtggatattgtagaagccctttagttcaatcctagatgggcctcaagagaataatgcttattctgttgaactcactgccaaatcccaatatgaaactgccaggatcaaaacaagacccaattatactaagagtgcattttatcaacgtcggatttataacaaataggtatgtggccctgtacttgtgcaaaattggtcgacgcggccgcgaatttagtagtagtaggc

SEQ ID NO: 2262 - DNA, 948 bp, Homo Sapiens
  misc_feature (64)..(64): n is a, c, g, or t
  misc_feature (90)..(90): n is a, c, g, or t
ggtttttggtaaccatttcaaacattagggagcctcttcccaagccaaaggggttttaattaangggagttgggttaaccaacttccctncccctcctgtttcggtctgctaatgctgggaaaatctggaaagggtccaatcctgtcacatttttcacttccgtctgttccattaaaaatgttacttgataaggagttattcattccaaatgcctgattcctgttcattccaaatccagacatactgttcacagtaaaaggctgtcgagaaggctgctgctttggcatacatattatgcttggcgagcttctgttggggctacctaaccctgaactgctcatgctatttgtcctgctaggaattccaatgccctgaccaacctgggagtggttcatcatattcctaggattcataggcaaaatacccctgcttggagatggaggcgtgtgaagtgacattgttggtacccctgttgttggcgtgacgtggctcggtaactgagtgccttgtgataagctgcgatttaactgaggggtattgttgctcatccccctcattggaaggcctagtgcactttgttgcccgtataaacttgccccaaactgagacagctgacctgatgtagatggtgatgccagcatatctttttctgaccgatgtggaaacatagaagactggctgtagtacatgttttcgtcatggtagtcactgtcgaccccctctacaaacttctttcttgaagcaccaaacatgctgtttgtcacctggtagtttcttttctcagataatgtatgtccatcagtcctcaccatagagtcgtgtcctttcctcacagtaccggaggcaatcaaatagaactgtcactcaagggtcgtgtcacaggaaggaccgcccaccacgtctccctcgcatgaattttcttgtcccgcggatccaagatggcgacg

SEQ ID NO: 2263 - DNA, 1034 bp, Homo Sapiens
ggggacaaaccagaaagtaaaaaatctggtctgctctggttttggcttccaaacattgggttttcctcttctgttgatgagacaggtgttgattccaaaaatgacgtccagagatctgctcccattcaaacacagcctgaggcacgaccagaggcagaactgcctaaaaaaacaggagaaggcaggctggttccgatttcccaaattagggttctcctcatctcctaccaagaaaagcaaaagcaccgaagatggggcagagctggaagaacaaaaacttcaagaagaaacaatcacgttttttgatgcccgagaaagtttctcccctgaagagaaggaagagggtgaactgatcgggcctgtgggcactgggctggactccagagtgatggtgacatccgcggcaagaacagagttaatcctgcccgagcaggacagaaaagctgacgatgaaagcaaagggtcaggcctgggaccaaatgaaggcgtgagaggtatggctcagtcagtacatagagagatgcaaaaaactaagttggaaagtaaaggctacacacacatatggagcaccccatcccacagcacattacatccacctcacttcacagaacggagaacagagcagaaatgaccagaacacctttgtcaccatcacacagccctcctaaaatggaaccaaagcttcccagctccctcaaagctttggatgcaaagaaggcaccctgacttccacaagacaccagaattcacacggtactcagaggcactgctggggaagtttgttggtctttattagataaatttccagagacctgtccataatacccaacagaacatgactgtttctttgaggaaagggttataatgtctgtggtgtacaagtcgtttttggtataacttctttcctgctgctgctgcttcccggcaaacatagttttcctatttcaggcagagtgcggtatattccaggaaacactgtttcctactcacttagcttacttctttgttgaatgcctcactaatggcaagtttca

SEQ ID NO: 2264 - DNA, 1091 bp, Homo Sapiens
  misc_feature (971)..(971): n is a, c, g, or t
  misc_feature (985)..(985): n is a, c, g, or t
cgctccaccagcgcgaagcttcccgggagctcctcgctggccacccccgcggcccgcagcccggcagaggcgggaaatgcagcgcgcctgcgccgtgggaaccggggctggaggcgaaaagcggggagcggaggggggccgctggagccgagtagcgtacagagcggcgtgtgacgcggggacgccgcgtgctcccaacgtcgccccggtttgacgcacacggcaccaaactgtttgatttaattttggatgagatcgttcttgcagcaagatgttaataagacaaaatctagccttagattgtaagcaaaagaaatcaaggtcaagatctggaagcaagaagaaaatgctaacattacctcatggtgctgacgaggtttacattctccgatgcaggttttgtggcctagtctttcgaggacccttgtctgttcaggaagactggattaagcacttacaacgacatattgtaaacgctaatcttccacggactggagctggcatggtggaagtcacgtcactacttaaaaagcctgcctccattacagaaacttcattttctctactaatggccgaagcagcttcatagaaccaggaaaccttttaaatagccagtttgaattggatgtaaatttgaaattctttgtttttaagccacattaaattatctgtttataaatactaaagcaggaaaatggggggaaacgtgaattacagttgacattcagagcaaaattgaactacttaaaacagtaagtagtctatatattttatatagggtggaagatgtgtttttaaggtttatgaagttttgttggttaactgtgttcactcagtaaaagagcagtacatgtaagcagccattaataaactgttgcacatggatacttatagacagacttattggacaattatgttttttgcagtgttaccagaatcaagggctctgtttattccccacaagacttgcntagaaaaatagaanattatattttggttggaagggaatttaagggttttggaataaaaccaaggaaccgcttgactaaatttaactcaaattagggcatttaaaatcatggaacctcccc

SEQ ID NO: 2265 - DNA, 803 bp, Homo Sapiens
  misc_feature (99)..(99): n is a, c, g, or t
  misc_feature (122)..(122): n is a, c, g, or t
ccccccaggcgatgatctgcctgacgcgggccaggtcctgtgggaaaacaagacttacgatctcaaataaatgaccccccaagtgccctcgccttcttncctgcttgcccctgtgcgcctcngacctccctcacggggaagttccaaatgagttccatttccctctcagttctaggcactctggaacatctttgattaaccagggtttttcatttctttccaacgccattggtgacttttgacttggaatgccgattccttctcctggaagaatggctttcgttgttgcctgcatgcttgggtgggctgtcttcagaaccttttgtccctttcctgtgatgccaggagatctctggactgtaggtgccatcttcacactccgagtaggtcttttctcggtgaccatagtgttctgcataccaaatcatgccgtacagacagaggaaagtggtgaaagccacgcaaagaagccaaagcacaacatagagtatttgggtcttagagaagagatcttgtccaaattttatgcaaacaatggcctccaggaaaccaatgaccccaaacacccagcattgtgttcctacgcgcttgcactgtgtgtcggtgaggtaagcgtagtactgtctcactgtgggagctgtgatgccaccaataaagagaattctaccccaacttaatggatgactggcttggaacacaaagatatgcttcaagaagaaggtattcaactcagtcagctgccagatgatcatgaaaaggtacactccagctactctctgaaaagaagatttggggtcaaaccc

SEQ ID NO: 2266 - DNA, 364 bp, Homo Sapiens
cctacccaggctgttttaaacctagttctccagctaagtaaaatgtgcccaaatggaaaacatctaaatcttctgcagcccattcttcctgtgtctgtgtgttgacaaacctctaatcttccatgtctttgtgttgaaaaacctaaacttccatgtctttttgttgacaaacctctaaccttccatgtctttgtgttgaaaaacctctccatgggtggtgcatctgaccctatcccaaaatgccttaagacgctcatctccttgactgtctgccatcccctcccaaaaataagtggaggctctgtcttttcctcctagtttgaggttctcttctcccagtgtctaaaatgatcaatatgcctag

SEQ ID NO: 2267 - DNA, 452 bp, Homo Sapiens
gatacaggctgatgcttgagtggtgggcaaggaagctgtctctgggagcgtcagaaagttgaagactgagtacttgtcacgcttcactcttggtaagccaactaaagttgaactgggaattgaaaaaagaatcattttagtaacaaccagtaggacaaaatccacctcctgaaaagctttccatctcaagttttccacctcttctgcatgactaaaaagtctcctaagatgctttcacttctcaaagcagttcgagaatctgggtgactgattttaggtcccatgagattttccttattatgataaggacaagaatttaactttcaaaatggatttccattaaggaaaagctccactgataaaaatatacctaaagtttctgacagtctctggtttgaccacatatgctatctttttgtatagtcactttttctcttgagattgagtctcgc

SEQ ID NO: 2268 - DNA, 423 bp, Homo Sapiens
taaccaacataggacataagcaatacgctgaaagggacaagtaagtgcatcaaaaaagcagaacagacgacgagcatgggggtgggctccagcctctgaagaagcgcggaggaagcaagtgtggcagggctgggtggcgctgtcctgcggatgctgattcagaagaagctgacccacagccaagtgtggctgaggtggagctgagaacaggaggtcccctgaggatgactgcagccccatcttttagggtaggtctctcaacacactcacaattcccatccatgtcactgctctgggaggaagtttgacacacacctagcaaacagatcttggaaaaaatgaatccctaaatgtgagaaggtctctactgacaaaggcaaacagaggggcgtagggtcccagaaagccaaggtcaatgcctaa

SEQ ID NO: 2269 - DNA, 418 bp, Homo Sapiens
  misc_feature (127)..(301): n is a, c, g, or t
  misc_feature (322)..(375): n is a, c, g, or t
gtatagtgacaacaataaaaagcctagaagataagactttgtttcaaaaaattcaagtatttagtttggacagaaaactgctgtgtgcttttgaaattttggtgagacgaagcatggtggctcactnnnnnnnnnnnnnnnnnnnnnnnnnnnnnnnnnnnnnnnnnnnnnnnnnnnnnnnnnnnnnnnnnnnnnnnnnnnnnnnnnnnnnnnnnnnnnnnnnnnnnnnnnnnnnnnnnnnnnnnnnnnnnnnnnnnnnnnnnnnnnnnnnnnnnnnnnnnnnnnnnnnnnnnnnnnnnnntgcttgagcccagaagttcannnnnnnnnnnnnnnnnnnnnnnnnnnnnnnnnnnnnnnnnnnnnnnnnnnnnnagactctgtttcttaaaaccacaaaaaatagtcaaaacggccg

SEQ ID NO: 2270 - DNA, 268 bp, Homo Sapiens
gcggccgcctactactactaaattcgcggccgcgtcgacctaacattttcacatctcacatgtaagctgtgagttctttgacgacaagctattttactacttctgcttttaaggcttggtgagtacagtgggtattatatagaagatacttaacacacggttgaaaaaatagaaggatagaaacatcccagcatggcgagccttacatcttcacacaatcttccttttctagaaagtaacaatagattttaaaatagatttttccatt

SEQ ID NO: 2271 - DNA, 209 bp, Homo Sapiens
taaattcgcggccgcgtcgacgtcatgaattaatgatactttgcactgggctgtacgacagtgaggaccttagggcatgaagcctttttcctggtcccagcagctgccctgtgaagtttgttttctcccactgcctccaggccccactgatacccccaaatagatgctgggttatgagaaccagcgaaatcccccatgtcatcagtctt

SEQ ID NO: 2272 - DNA, 434 bp, Homo Sapiens
attccatactagaaggtgagtgtcagttctattagaacaggaacttggtcttattccctcctatatttcggtgcccagaatagcacttggcacacagtcttttgagtgagtggatgaccttgtgcacaatcagttattatcattgaacttcggtaaagcattaattgtggcatctttgtcagatgtttagataagatggttgccgtacgcatagtctgcatgttgtatttttagtctttgaagatatgaagtcaggtaagcaacatcctaacatagtctatttcttgacatctcttacaaacgtagagtatagcctatcctcaggtgtgtgctgaagtttatattagggcttttgggtaccttagaatgtgggtattgcagtctttattcaggatgttatcagtcactggtacagttagtcttgttattaaaag

SEQ ID NO: 2273 - DNA, 268 bp, Homo Sapiens
ctcctcaacgtttaactaaaaacatttttaaaaactacagcttgctgctgacccagcgttttctgtttccatgtgagacattattattacagtatgtttacagtatcaggtgtacagtacagtacatgaaagggtctacactctactgcacaggcctctccagtgaacagggtctgttcacaactgcgaacttcttggctcctgcaagattgtgaatgtacaacaataaaccacacatagttcagcagtcaccttttttgtccttcag

SEQ ID NO: 2274 - DNA, 616 bp, Homo Sapiens
ctgctatgagttgagcattctacacccttccagggtgataggctctgcctgtccaggctacagttcagcacatacctttccctcatggctactcaagtgggaaatcctcactctccactatccttttgtccctatcctcccatgaaatcctatgtgtagtgtgaactaaaggcagagaaagctaacaagtcttggcccaggggctgttctacatcttgccacccaagaagaagatgccagacatttagagaggagggaatcacaaactctacacgtttttcaaagtggggagaatgggctgaagggtctgcttgagggaatgttcttccctcgttccttctctgcagcctgcattgcaggggtcccctggccccagtactctgtggacatagtggcaatggcagcacagctccatcattcctgcccctcaggctgtgacaataatgggtcaggtgtgggggcatatggaccctccagtgatgcttgtatagcagagggtctcgtgaggctgaaaacaccaagcctgctgccccgactccaccccagttagaggatcctgtcgagggcttttgtaactgagagagaatctgtttggtccgagagaggagaagcagca

SEQ ID NO: 2275 - DNA, 702 bp, Homo Sapiens
agtgctagcacccgatcagtcttagctccttcagaatgtccctcagacttccatctgatgaccctttttacaatgtcagtcttctgttgatattcaatataatctgaatttccttggatatcagtattggctgcaaatcttgtttggattggaaacctctaaggtacccctcttcctgttggaactgagagaaggaagtgtcaacaaaagttaagtcagaggtgagcagaaggggtgagggtcagacatctgaacgtgccaaccagcgtggagtagacatgaatggatcaaggtttgatgtactgggaggaagtccatgtagtcagacaattgctctacccagtggctctggggatagttaggagacctagacactgggaggacagtagcaatccataaaatgagctgtcccttacttaggaagcagttttttcataaataaggagtttggggcaaaggatatgcagtgaacctggtaaaaaaaatagcaccaacagctgagttcaggggccactcataggaccaagaatgagatgtgtttcagaatcattaaaactgaccaaagcaagtctccacgtcgtgagtttgagggatccaagttactgttcaggtaaaaaaggcaaaagtagatgccaagggatatggtttggctctgtgtcccacccaaatgcccatcttgaattgtaatctccatgtctacgt

SEQ ID NO: 2276 - DNA, 1383 bp, Homo Sapiens
  misc_feature (1255)..(1255): n is a, c, g, or t
  misc_feature (1258)..(1258): n is a, c, g, or t
gggggcgacccgacggcgagaccccgccccatccccgactgcctgaaccgcgccaggagacggaccgcaagtccagcgtacccacagacgactcaggcgggagacgagcggtgtcatggccgccgacagtgacgatggcgcagtttcagctcccgcagcttccgacggtggtgtcagcaaaagcacaacatctggggaggagctagtagtccaggttcccgtagtggatgtgcaaagcaacaacttcaaggagatgtggccatccctcctgctagccataaagacagctaatttcgtggctgtggacacggagctgagtgggcttggggacaggaagagtttgctgaaccagtgcattgaggaacgttacaaggccgtgtgtcatgctgccaggacccgttctatcctttccctgggcctcgcctgcttcaagcggcagccagacaagggtgaacattcctatctggctcaagtgttcaatctcactctgctgtgcatggaggagtatgtcatagaaccaaagtctgtgcagttcctgatacagcatggcttcaacttcaaccagcagtatgcccaaggcatcccctaccataagggcaatgacaagggtgatgagagccagagccagtcagtacggaccctattcctggagctaatccgagcccgccggcccctggtgctacacaatggccttatagacttggtgttcctgtaccagaacttctatgcacacctccctgagagtctgggaaccttcaccgctgacctgtgtgagatgttcccagcaggcatttatgacaccaaatatgctgctgagtttcatgcccgtttcgtggcctcctacttagaatatgccttccggaaatgtgaaacggaaaatgggaagcagcgggcagctggcagcccacaccttaccctggagttctgcaactatccttccagcatgagggaccatattgattaccgctgctgcctgcccccagcaaccacacgtcctcatcccaccaacatctgtgacaacttctcggctaatggctggtgccccctgagacacagtgtcctcagtctcccgatattgaccttatcattgacactgatgaagctgcggcaaaagaacaccggcgacggcgacgacttagggaaaaacgaagagggctttattgaacttacggggaacccaaactctggggaaacttaggatggtccctcccagaaacaggcctgggggggatagcatccaaccctgaaaaaaccncanccaagaagtggcttgcccaatgaaccttaggaacctggcctcactcccagccagggcaaccaaaatgactttaaaaaatgggggatttagggcgccaagggcccgtaaaatactgggatacaacc

SEQ ID NO: 2277 - DNA, 834 bp, Homo Sapiens
cattccagggtaaagggggccccccaggcccaaaaggtctaaaagtggaggatagaatcccagttcgtaactttttttcgttatcctccattcgggtgggtccccagggattaccaaggctttccttagcattaattcaatcgggggaaaattttaatcctcccgtgcaatatcccagtgagctcctcacccatgcttattcttatattgtggggtctgcacgggcttgccaagagcagagggataagagactggtttttcatttccacaggcataatgtaatgcggtacagccataacaatctgtagcattaacttcgacaccagcatcaagtagcattcgtacaagagcctcattctgctttgtctttgataccatgaggaaatacccaataagcagaacaggcattaagaggataattagtagataatcaatgaaggtaaattttttcttcacagcataatgcaagcaggttctctctttctggtttttgaggttgacattagcatttcttcttaaaaggaaggaaacgattctcacatgccctcgcctgcaagcacagatcaggggcgtgtctccattaaagccatcttgaacgttggcatagctgctgtcttctttcacccaccgccacacttgtccaaagtcattctgataggctgcttggcagatgggctcagagtataggattcccatgctggtccttcacaggcttacttcacctctacagctccttgaatcttctggaggtatttctgatgaatatcaaaatccttcctggctgagaggaaagtccctagaagtccaagctggtggcaagctccaggagtcccc

SEQ ID NO: 2278 - DNA, 1109 bp, Homo Sapiens
ggggcagagagcattctggagccgccagccatggctgccccagagtcttcagctatggctgtcctggagtcttcggctgtgaccgtcctggagtcttcgactgtgactgtcctggagtcttcgactgtaactgtcctagagccttcggttgtgactgtcccggagcctcctgttgtggctgagccagactatgttaccattcctgtgccagttgtttctgcgctggagccttctgtgcctgttctggaaccagcggtgtcagtccttcaaccttctatgattgtttcagaaccatctgtttctgtccaggaatcgactgtgacagtttccgagcctgctgtcacagtctcagagcagactcaagtaataccaactgaggtggctatagagtccacaccaatgatactggaatctagtatcatgtcatcacatgttatgaaaggaattaatctatcctctggtgatcaaaatcttgctccagagattggcatgcaggagattgcattgcattcaggtgaagaaccacatgctgaggaacacctgaaaggtgacttttacgaaagtgaacatggtataaatatagaccttaatataaataatcatttaattgctaaagagatggaacataatacagtgtgtgctgctggtactagtcctgttggggaaaattggtgaagagaaaattttgcccaccagtgagactaaacagcgcacagtattggatacctaccctggtggtagtgaaactgatgccaggagaaactctatcttctactgggccttttgctctggaacctgatgcaacaggaactagtaagggtattgaatttaccacagcatctactctcagtttagtttataaatatgaagttgatttatcttttactaccccagatactgaaccttgaatgggtaatttcccccagtccctaagggtgggaatggaacttgaacttgaaagggccctttgcctggctaaagaaatttcctcctggatttacccatccaaaaataaaaccctgggtaggtaagggatatcggaagaaaccctttacccgggaaaaagaaaattggccccgaaatttttaagggttttggcttaaccccct

SEQ ID NO: 2279 - DNA, 1675 bp, Homo Sapiens
ccggggaggtgttgcagccatggctacggcagccggcgcgacctactttcagcgaggcaggctgttctggttcacagtcatcaccctcagctttggctactacacatgggttgtcttctggcctcagagtatcccttatcagaaccttgggcccctgggccccttcactcagtacttggtggaccaccatcacaccctcctttgcaatgggtattggcttgcctggctgattcatgtgggagagtccttgtatgccatagtattgtgcaagcataaaggcatcacaagtggtcgggctcagctactctggttcctacagactttcttctttgggatagcgtctctcaccatcttgattgcttacaaacggaagcgccaaaaacaaacttgaagttgtctgaaagcttgctctacacttttacattcatcctcacccttttttttgtggggtagaggaggtgcagtaatttactcagtgatctttctactttctagaaactgtccttcaaagctctttaagaccccctcgttagtcagttttttctcttatatgctctggttgagcttgaatagaccagttgttacttaagaaagaaacagagaaagattttagcttttcaatcctatttggcagaggacttcagctaccttcttacagtctttggctgtgttggtaccctcgtgtgctctgagctaagccacatactaaactgactttttggtttgtatacccttgctcccgccttctgatgaaaacaccttaccctcacaaccaccatctttcctctcctttccaaagctctttccaccttgctgcactaagataaagtgacacttccactatatgtcaattccacacacatttattaggtacctgtgaggtaggatcctatcctctcaaacttccatttctcatgctacagagaaagataaggaagatgagcaagtgcctggaatggggcaggctgagcagtcacacaggcatagaggcacgctgagaacctggaggggagactgcagagtgccttccctgatgctgcagccggaagtgatccttccctccacctggcccctgggacactgtgctctgcagtgtgcagggcctgatggcactgctagattgctccttcagctcagggccacagcttaaacagctttacctttcccctcagcacctgtcccactatcttgcacacaggtgctctaaccatgtttattgaacaaaggagggaaactgatttcactttcacttgttcattatcattccaatttttatgtgaaaatggcacaacccatttggggtaccctcaccccaaaataaaagcccaagtctacctttgactggtaccaccttttttgtggtttcgttggtgagaaacctttatctttttcatacctttctattctcaatcacttctccaaaagtgtgtctttccagctctgatttattcaaaacacaagcatttctgtttagagattctagcccatgggttatctggctagttattacctctcctgttcacttagttatactttattattgctcacaggctggggaggcagaatgactctgtcaccactaggagccattagggcttcttccctggaggactgcctgcttgctttctggggacatctagccctcatttcccgttctgtgatcgtggggttgtaa

SEQ ID NO: 2280 - DNA, 1001 bp, Homo Sapiens
caggctggtaccggtcggaattccgggatatcgtcgaccacgcgtcggttttcagacgccctgggaacgcggctgcagggtccggtcttcggtttgcacagctagaggccgcgcagcagcaaaggatgagcggaaccttggaaaaggtgctgtgcctgaggaacaataccatttttaagcaagccttttctctcttaaggtttagaacttcaggagagaagcccatctattctgtaggtggaattctactaagtatcagtcggccctacaagacaaagcccacccacggcattggaaagtacaagcacttaattaaagcagaagagcccaagaagaagaagggaaaagtggaagtgagagccattaatttggggacagattatgaatatggggttttaaatattcatctgactgcatatgatatgaccctggcagagagttatgcccagtatgttcacaacctctgcaactctctctccattaaagtcgaggaaagttatgcaatgccaaccaaaaccatagaagtgttgcagttgcaggaccaaggcagcaaaatgctcctggactcagtgcttaccacccatgagcgagtggttcagatcagcggtttgagtgctacgtttgcagaaattttcttggaaataatccaaagcagtcttcctgaaggagtcagactgtcagtgaaggagcacactgaagaagacttcaagggacgattcaaagctcgaccagaactggaagaactgttggccaagttgaagtagctactgtagaccctttcatgccagcagtggtcatattgagtgccaaagagaagagcttactgggtagttagagttcatcaggagacccaacccttagatttcataagtacccattcccatagccagtaatgtcctcactcctctgtggcttggctgtacttgccatttcttaccacttacctatgaggtaatgcttgttatcttccatctaataaaaatctgctgcagatgtgtata

SEQ ID NO: 2281 - DNA, 950 bp, Homo Sapiens
tggcgttcagaggatccccctgatatttctggctgaatatcaaatgatagtaacaacagaagcataattttaggaaggctttcgcaaacctagccttttaagagaggtttttaacctgaagcatgagaatatatcacctgtggtttttcctttgagatgaaacgtagtttctagttatatcattacttaaagggcttaaaaagaaaaaacttagcaaactttcgaatctttcttttattgctatttacacatacatacacacatacaaaacctttaaatttggggatctgaatataattctggtaaacagctgtcttcatttttctcctctaaagaacttaattcatttgttacataaaatataaggaaatcttggtactattttacagtaaccacaatctaaatatttacatatacccaaaattaacttatgctcatatattaggatgtgagaatatcatctgtttatggacacatgaaacctcctaatgacctggaatggttagaatatttgactttttatatgcaaagtttttcaaccaagtggttagtctaatatttaaacatgtactggcacaatttgtgatgaaaatattagcacatttgcaataatgtttctccataacagagaatgttaatggataccagaattttatttttgtatttatgttcatagtacttttcctcttgtctactccagacagttattccataaagcatttgtataattaaaaggaaaacagaaaaaggaaaagtaggcaaatgtgaaaatagtttcaatatatcttatgatttcttaatgtaaaatgttttgttgaagtatatggctatcatgactaagtgctagaatttatagttacaggcggtgtccttttaaatgtggaaaggcttttaaaatattttaaaactggacctgtattatcctgaatacactattttgaaaattttta

SEQ ID NO: 2282 - DNA, 1310 bp, Homo Sapiens
gggacaagagtttactaaatatattgatactgtaaatagcctctctcgctatttactatcttatagtaattcaggctctaattagctgagggaatgaaacacacaaaaatcaatgaattcctaagagtgcccgaaataagcagtaccagtaacaaatcacagtataagatttaagtgcctgggggaaggatacaatttttagaaattacatattgggtcagttttgttttgtttttggtgaggaaaaggtggtaaataggaaaccatgaatgggaaggatggcaataagtagcaactatactttccaatgactaaagaaagaaaatctcagtatattcgttctcatgaagacacagtcagacactggacaatgtaatgtatgcaactgcaaacgttacaactgcagccagaacaatggctgggtggatcgcacgtaaagcttgccactaaaaatcaaagcagacgttaacaggaaacctgcggggagtgtggaaaagggaaaactgttttagctgaataaaggtgaattatataatttataatagctgtggatgagcacaggagagagaggaaagaaaagaacagtcgaaatgagcaactcaccttaccctctgaccctgattagacaggatcaattgtaaagtgagggcttctccatgacaccatagttctgcccaatactgcatttgggataagaaattctacacttggatgtctcgcttcacaataaaacacagcttaaaaataaaataactgaaagaaatagaattcagcaaatagttattttttgcacttgaactgaaacgtactgtactgtaaattatgactcattttaagtgacctttaaaatcagatgtatttattatgcttgtgtaattatagaaataaagaaatgggtgacaggcttaacctcacctatgaatgtacagtatgtggatttgtgaaactgactgtaggaagtcaaaaacttgtactgtgtcttgtgtttacagttctgatttattcctttgaaaagcctgctgttttggaaatgcacagttgacatgttgaaataaaaatgaataccatttttaaatgtttcttaaatgataaagatgtgaccaaacaaaagtcctatactctaatgaatgagaccaaattcaacatgcctttgttatggaacatttactgtgacagcagaatcgataatgcagtcatttccagccttgtgagctgacaccttcatgggtttgtggactttgtgactttttcttcctgtccccaaagtgccacatgctaccttaaaaaatattaaagtgaattcaaattac

SEQ ID NO: 2283 - DNA, 908 bp, Homo Sapiens
  misc_feature (710)..(718): n is a, c, g, or t
  misc_feature (776)..(816): n is a, c, g, or t
  misc_feature (830)..(839): n is a, c, g, or t
ctggcatccccagggaatggcagcagtgaggtagatgggaggacatttctggtcagggaactggcatcccattcagcatctcaggactcacaggccaacatgtgttccatggctgggaatgcctaccacccacatcagcttctgtttaccttttggcatcaaataatgaacagtgttggaaatctttctacaggcaattacctccccaagagaagccttccttattttggagtaaggtcctaagatagctggatgaatcaggaaaaccatgtcccctctaggtattattaatataagcaggaagggatctactataggaatgaagtatttataaaccactgaaagggatagagaagtgaacattggagaaagccagtagcaactgtgagaaatcagcaacttgcaggaggcacagaaaactcctgctgatggtctcagcttccagcagcacaaaagcagatgatgtactggaaaatgctcagaagatgctacaaaacctcatgcctactgtctgccactgctggagaaggaatcatgggtttctagaagtggcctctcatttagtgggacttttaaagcaaatccctggcctgggcagggaaaattcctggagggaatattagcttcctttagggctttcccagccctcctacccttggcccgggaagaagaaaccccccgaaaaggggcctgggagtggtaagggtttnnnnnnnnnaatcccccatgggaattggggggttcccacaaaaacaaaagggggggccccgtggttnnnnnnnnnnnnnnnnnnnnnnnnnnnnnnnnnnnnnnnnntattttccagagannnnnnnnnnccccttttggcccccccctctttttattttctccttgtgggggggggaaacaacccccccacaaaaata

SEQ ID NO: 2284 - DNA, 1145 bp, Homo Sapiens
gtcaagtagtcgggacggcggggacagctgagccccagggacagaagctggtgatctgctgtgaggggaatgctgggttttatgaggtgggctgcgtctccacgcccctggaagctggatattcagtcctgggctggaatcatccaggctttgctggaagcacgggggtgccattcccgcagaatgaggctaatgccatggatgtggtggtccagtttgccatccaccgcctgggcttccagccccaggacatcatcatctacgcctggtccatcggcggcttcactgccacgtgggcagccatgtcctacccagatgttagtgccatgatcctggatgcctcctttgatgacctggtgcccttggccttgaaggtcatgccagacagctggaggggcctggtgaccaggaccgtgaggcagcatctcaatctaaacaacgcggagcagctgtgcagataccagggtcctgtactgctgatccggagaaccaaggatgagatcatcaccaccacggttcctgaggacatcatgtccaaccgaggcaatgacctcctgctgaagctcctgcagcatcggtatccccgggtgatggcagagaagggtcttcgagtggtgaggcagtggttggaggcctcctcacagctggaggaagcctcaatttatagccgatgggaggtggaagaggactggtgtctgtctgtcctccgctcctaccaggcagaacacgggcccgacttcccctggagcgtgggggaggacatgagtgcagatggacggcggcagctggctttgtttctggctcggaagcatctgcacaactttgaggccactcactgcaccccactcccagcccagaacttccagatgccctggcacctctagggaccaactgggactcattatggaagaatggggtgagaggagacatgaggaaagaccctcttatttgtgattctctgtgttcatgttgctgtttatagtttgtggaaagtgggggaccatcccccttctcaccactgttcctcttgcacgtttcccctcattcatgtggctgtacttaaccttctccaacatacatcctgcattacatgaatggattattcctaataattaataaaaaggtattttttctactatcaaaaa

SEQ ID NO: 2285 - DNA, 1129 bp, Homo Sapiens
tttcctcctttccaagagagggctgagggagcagggttgagcaactggtgcagacagcctagctggactttgggtgaggcggttcagccatgaggctggctgtgcttttctcgggggccctgctggggctactggcagcccaggggacagggaatgactgtcctcacaaaaaatcagctactttgctgccatccttcacggtgacacccacggttacagagagcactggaacaaccagccacaggactaccaagagccacaaaaccaccactcacaggacaaccaccacaggcaccaccagccacggacccacgactgccactcacaaccccaccaccaccagccatggaaacgtcacagttcatccaacaagcaatagcactgccaccagccagggaccctcaactgccactcacagtcctgccaccactagtcatggaaatgccacggttcatccaacaagcaacagcactgccaccagcccaggattcaccagttctgcccacccagaaccacctccaccctctccgagtcctagcccaacctccaaggagaccattggagactacacgtggaccaatggttcccagccctgtgtccacctccaagcccagattcagattcgagtcatgtacacaacccagggtggaggagaggcctggggcatctctgtactgaaccccaacaaaaccaaggtccagggaagctgtgagggtgcccatccccacctgcttctctcattcccctatggacacctcagctttggattcatgcaggacctccagcagaaggttgtctacctgagctacatggcggtggagtacaatgtgtccttcccccacgcagcacagtggacattctcggctcagaatgcatcccttcgagatctccaagcacccctggggcagagcttcagttgcagcaactcgagcatcattctttcaccagctgtccacctcgacctgctctccctgcagctccaagctgctcagctgccccacacaggggtctttgggcaaagtttctcctgccccagtgaccgggccatcttgctgcctctcagcatcagcctgaatcttcttggcctcctcgccctggggcttaattgctttctgcatcatccggagaa

SEQ ID NO: 2286 - DNA, 546 bp, Homo Sapiens
aaacaaatcagtttgttttggtacctttaaatggtggtgttgtgagaagatggatgttgagttgcagggtgtggaaccaggtgatgcccttctgtaagtgcccaccgcgggatgccgggaaggggcattatttgtgcactgagaacaccgcgcagcgtgactgtgagttgctcataccgtgctgctatctgggcagcgctgcccatttatttatatgtagattttaaacactgctgttgacaagttggtttgagggagaaaactttaagtgttaaagccacctctataattgattggactttttaattttaatgtttttccccatgaaccacagtttttatatttctaccagaaaagtaaaaatcttttttaaaagtgttgtttttctaatttataactcctaggggttatttctgtgccagacacattccacctctccagtattgcaggacagaatatatgtgttaatgaaaatgaatggctgtacatatttttttctttcttcagagtactctgtacaataaatgcagtttataaaagtgttaa

SEQ ID NO: 2287 - DNA, 817 bp, Homo Sapiens
  misc_feature (665)..(665): n is a, c, g, or t
  misc_feature (775)..(775): n is a, c, g, or t
gggaaaaatgtttagatgtctttttgtgatgttatataaaattgtagatgactgtggtaaatgtgtaattatgtccattatgcttcaaagttgagttttcatctttgactccaaaatgtcagagggaggccgctctaaactaaaaataacgaaaggttgccaagtattaatactagttacctccctcttttcgtagtttttgtcatgtctgtcaacttactcgattgtgtggttgcattcagaatatttgaagtttcttacgtagacagaaataataaaaatattaactaggaaaaaacagtatagcaccaagccagtatttggtatctctctctagagcgagcaagagagggagagaggaggaaaaaatacacataatacaaacatacatgcatgcacacatacatacatatgtatacacacacataatttgaaaactgattggcacttcaacgatgctgaaattgtttttaaattgaagtttctttcttccacaaagcagccgtttctattcaaatggaaattcagtaccagagaataaatgtctatgtagtcatactgaatttagatagataagggctacagcatactaaatcgacaaacaaatttgtcatgtgactaaaacgttacttcagatgaagcttacattactggtttctgcttgnggtattttctgtaaagtactttttacacagatgggtaaagttcagggtttcagagaactgctttttgtgcaaaaaatttaggttccttttttccaccctttttggccagntaaaccttaatggaaaaagccaagaaaaaaattatcctgaaa

SEQ ID NO: 2288 - DNA, 835 bp, Homo Sapiens
ggggttttcggagggatcagactcagactcacgtcgcactcctcgcagttggactggtgggaactgggaacactggagacctgatttctaactgacgctaccgtcgcggccgccgtgtgggacgacttcagcatgtctcaggccaccaagaggaagcatgtggtgaaggaggtgctaggggagcacatagtgccctccgaccagcagcagattgtcagggtactcaggaccccagggaacaatctgcatgaggtggagacagcccaagggcagcgcttcctggtgagcatgccctccaaataccgcaagaacatctggatcaagagaggggactttctcattgttgaccccattgaagagggagaaaaggtgaaggctgaaatctcgtttgtgctctgcaaggaccacgtgcgctctctgcagaaggaggggttttggcctgaggccttctctgaagtggctgagaaacacaacaacaggaacagacaaactcaaccagaactcccagctgagccacagttatcaggagaggagtccagctcagaagatgattctgacctgtttgttaacacaaaccgcagacagtatcatgagagtgaggaggacagtgaaaaggaggaggccagcctgagactccaggaccccaattctccactttgctcaggggactggccccctggcttctttctgggcttgggaactttccagggcggctctggcacatccttcacccctgcatgtaggaccaaagccagggcctccctctctggaactggatctttttggattccagaagaaattaaacccccctgggtggggtctgggggaacttggg

SEQ ID NO: 2289 - DNA, 1042 bp, Homo Sapiens
  misc_feature (117)..(125): n is a, c, g, or t
  misc_feature (187)..(187): n is a, c, g, or t
agtggcttacttcaaggagcatgtggacaaagccattgctctccagccagaaaaccccatggctcactttcttcttggcaggtggtgctatcaggtctctcacctgagctggctagnnnnnnnnnctgctacagccttgcttgaaagccctctcagtgccactgtggaagatgccctccagagcttncctaaagggctgaagaactacagccaggattttccaaagcaggaagggtatatatttccaagtgctacagagaactagggaaaaactctgaagctagatggtggatgaagttggccctggagctgccagatgtcacgaaggaggatttggctatccagaaggacctggaagaactggaagtcattttacgagactaaccacgtttcactggccttcatgacttgatgccactatttaaggtgggggggcggggaggcttttttccttagaccttgctgagatcaggaaaccacacaaatctgtctcctgggtctgactgctacccactaccactccccattagttaatttattctaacctctaacctaatctagaattggggcagtactcatggcttccgtttctgttgttctctccccttgagtaatctcctaaaaaaatcaagattcacacctgccccaggattacacatgggtagagcctgcaagacctgagaccttccaattgctggtgaggtggatgaacttcaaagctataggaacaaagcacataacttgtcactttaatctttttcactgactaataggactcagtacatatagtcttaagatcataccttacctaccaaggtaaaaagagggatcagagtggcccacagacattgctttcttatcacctatcatgtgaattctacctgtattcctgggctggaccacttgataacttccagtgtcctggcagcttttggaatgacagcagtggtatggggtttatgatgctataaaacaatgtctgaaaagttgcctagaatatattttgttacaaacttgaaataaaccaaatttgatgttatca

SEQ ID NO: 2290 - DNA, 813 bp, Homo Sapiens
ggggagacacaagcgagaggatcatggcggatggccccaggtgtaagcgcagaaagcaggcgaacccgcggcgcaataacgttacaaattataatactgtggtagaaacaaattcagattcagatgatgaagacaaactgcatattgtggaagaagaaagtgttacagatgcagctgactgtgaaggtgtaccagaggatgacctgccaacagaccagacagtgttaccagggaggagcagtgaaagagaagggaatgctaagaactgctgggaggatgacagaaaggaagggcaagaaatcctggggcctgaagctcaggcagatgaagcaggatgtacagtaaaagatgatgaatgcgagtcagatgcagaaaatgagcaaaaccatgatcctaatgttgaagagtttctacaacaacaagacactgctgtcatttttcctgaggcacctgaagaggaccagaggcagggcacaccagaagccagtggtcatgatgaaaatggaacaccagatgcattttcacaattactcacctgtccatattgtgatagaggctataaacgctttacctctctgaaagaacacattaaatatcgtcatgaaaagaatgaagataactttagttgctcccctgtgcagttacacctttgcatacagaacccaaacttgaacgtcacatgacatccacataaatcagggaagagatccaaagacatgtgacgcagtctgggtgtaatcgtaaatttcaaatgcactgagtggggaaaagctttcaaatacaaacctcccctaaaagagcactttaagaatt

SEQ ID NO: 2291 - DNA, 783 bp, Homo Sapiens
tcaaacttccctgtgagatggatgcccaaggcccaaacaaatgaacattcctggaggggatagaagcaccccagcagcagtgggggccatggaggacaaatctgctgagcacaaaagaactcaatattcctgctattgctgcaaactgagtatgaaagaaggtgacccagccatctatgccgaaagggcctggctatgataaacctgtggcacccagcttgttttgtctgcagcacctgccatgaactcctggttgacatgatttatttttggaagaatgagaagctatacttgtggcagacattactgtgacagcgagaaaccccgatgtgctggctgtgacgagctgatattcagcaatgagtatacccaggcagaaaaccagaattggcacctgaaacacttctgctgctttgactgtgatagcattctagctggggagatatacgtgatggtcaatgacaagcccgtgtgcaagccctgctatgtgaagaatcacgctgtggtgtgtcaaggatgccacaatgccatcgacccagaagtgcagcgggtgacctataacaatttcagctggcatgcatccacagagtgctttctgtgctcttgctgcagcaaatgcctcattgggcagaagttcatgccagtagaagggatggttttctgttcagtggaatgtaagaagaggatgtcttaggaggagggcacccagaagtatcgagccatagctatccaaagtggtctgcatttctactgtaaaatgctattgaaacttctaaaactagg

SEQ ID NO: 2292 - DNA, 923 bp, Homo Sapiens
tgcaggccagcaaggccaccaagatcaccctgtcggccatctacaagtggatcacggacaacttctgctacttccgccacggcagatcccagcctggcagaattcaatccgccacaacctgtctctgaacaagtgcttcatcaaagtgcctcgggagaaggacgaaccaggcaaggggggcttctggcgcatgacccccagtacgcggagcggctactgagcggcgctttcaagaagcggcgactgccccctgtccacatccacccagacctttgcccgccaggccgcgcaggagcccagcgctgtcccccgggccgggccgctgacggtgaataccgaggcccagcagctgctgcgggagttcgaggaggccaccggggaggcgggctggggtgcaggcgagggcaggctggggcataagcgcaaacagccgctgcccaagcgggtggccaaggtcccgcggccccccagcaccctgctgcccaccccggaggagcagggtgagctggaacccctcaaaggcaactttgactgggaggccatcttcgacgccggcactctgggcggggagctgggtgcactggaggccctggagctgagacccgcctctgagccccgcctcacacgtggacgtggaccatcaccatccacggccgccacatcgactgccctgccaacctgggggccttcggtggagcaggctgccgacagccttggacttcgatgagaccttccctggccacatccttcctgcagcaaccctgggacgagagcggcagtggcttgctgccccggagcccctctttgaggctggggatgcaccctggctccgactgcaggactgggcagcgtggggcttcttgtagaggccaggccttgtccaacttctgaatgtgcccatgttcgggtccagatctgccccc

SEQ ID NO: 2293 - DNA, 1137 bp, Homo Sapiens
cggcgaacttgcagtatctccacgacccgcccctacaggtgccagtgcctccagaatggtggcagctcacaagcctcctgctgttcgtggccacctggggaatttccggcacaccagctcctcttgactcagtgttctccagcagcgagcgtgcccaccaggtgctgcggatccgcaaacgtgccaactccttcctggaggagctccgtcacagcagcctggagcgggagtgcatagaggagatctgtgacttcgaggaggccaaggaaattttccaaaatgtggatgacacactggccttctggtccaagcacgtcgacggtgaccagtgcttggtcttgcccttggagcacccgtgcgccagcctgtgctgcgggcacggcacgtgcatcgacggcatcggcagcttcagctgcgactgccgcagcggctgggagggccgcttctgccagcgcgaggtgagcttcctcaattgctcgctggaaaacggcggctgcacgcattactgcctagaggaggtgggctggcggcgctgtagctgtgcgcctggctacaagctgggggacgacctcctgcagtgtcaccccgcagtgaagttcccttgtgggaggccctggaagcggatggagaagaagcgcagtcacctgaaacgagacacagaagaccaagaagaccaagtagatccgcggctcattgatgggaaagatgaccaggcggggagacagcccctggcaggtggtcctgctggactcaaagaagaagctggcctgcggggcagtgctcatccacccctcctgggtgctgacagcggcccactgcatggatgagtccaagaagctccttgtcaggcttggagagtatgacctgcggcgctgggagaagtgggagctggacctggacatcaaggaggtcttcgtccaccccaactacagcaagagcaccaccgacaatgacatcgcactgctgcacctggcccagcccgccaccctctcgcagaccatagtgcccatctgcctcccggacagcggccttgcagagcgcgagctcaatcaggccggccaggagaccctcgtgacgggctggggctaccacagcagccgagagaaggaggccaagagaaaccgcaccttcgtcctc

SEQ ID NO: 2294 - DNA, 1093 bp, Homo Sapiens
caaggcgagaggtgctggcgcctcccgtcgcccctgcgctcagagtgtccctgtaaccacgccgcgatgccgcatgccatctatgcctgcatccgccatttaggagttgagtgaggtgcgcacgcccgctgtcagaacttagagggccagtgcagggtcgcgcgcatggcctgggcgggctcgcggcgggtcccagctgggacgcgcgcggcagccgagctgctgctgccggttctcgctcagcccgggcgcgcaaccggccccgcccccaggccctctgccaccgccgcgaccaatgaggtttctgacctcctgcagccttcctctttgcctcgggctgcccagatcttggcggctgaggctggcttaccttcgagccgttccttcatgggatttgctgctcccgttcaccaacaagcgaaaggcttactcggagcgtagaatcatggggtactcaatgcaaggagatgtatgaggtggtgtccaacgtcgcaggagtatcgtgagtttgtgccctggtgtaacgaagtctctggtggtatccagccgtacaggcgtcatttgaaagcccagctggcaggtgtggctttccaactgtcatggaacgttacacctctgccagtgtccatggtcaaacctcaccatggtcaaggctgatcgtactgatggcaagctcttcaaccacttagagactatatggccgattcagccctggtattcctgcctatactcgaaccttgcactgtggactttatcgataacctttgaatcacgttctctgctgcactcccagctggccaccatgtgacagatgaggtagtcaaacagaatgttgctgccttagagccgtcgggcaagccacaaagtatggtccagaaaaagccatcccccgtgaactgatgttcaatgaggtgcaccagacttgaggcaaggcattgctccctgaacctcccttctacccattccctacacaattctcttatttattgggtttggctcctgttccaatttgaaaggagtctgtgttcataatactgttttctcctctcaatttcccagaaattgggttctatgctggctggaaatgttgggg

SEQ ID NO: 2295 - DNA, 1561 bp, Homo Sapiens
  misc_feature (49)..(108): n is a, c, g, or t
  misc_feature (986)..(987): n is a, c, g, or t
  misc_feature (1232)..(1232): n is a, c, g, or t
  misc_feature (1252)..(1252): n is a, c, g, or t
  misc_feature (1472)..(1472): n is a, c, g, or t
acaaactggtccgtgcaattcccgggatgcttggcgcccgcacctctgnnnnnnnnnnnnnnnnnnnnnnnnnnnnnnnnnnnnnnnnnnnnnnnnnnnnnnnnnnnngggatcctggcccctcctcgagcgccgccaccggccgccatggcctctctgggggacctggtgcgcgcctggcacctgggcgcgcaggctgtggatcgtggggactgggcccgcgccttgcacctcttctcgggcgtcccggcgccgcccgccaggctgtgcttcaacgcgggctgcgtgcacctgctggacggggaccccgaggccgcgctgcggccatttgaccaagccgtgaccaaggaaacctgcatggcggctggcttcttccaccgaggagtggccaacttccacctggcaaggctccaggacgctctgactgacttctggctggccctggagcacctgaagggccacgctgccatcaactacacgcagctgggcctgcggcttcagctgcacccctgggaggtgctcccccatgtgcacgcccgcactgtgcccagctgggcgcttctggaacacaagaccgcccgccagccctaagggaacgccctgttccccaatgcccggagggggactcttggaatggcgcctggacctcaccgacttagaactaaaatgcccaaaaacgcgggcctatactggcccgtcaattagctccgtccccccaccggggacaaaggtctctcccgggctgccccactggtggccgcgatggtagaaaacgcccttttggcacgcaccacctggcgcagactccccctggcgcccccaaaggactccacacagggacgggaatgccctccctctctcggcgcgtcattaccattacataaaaggccaacacaaaaacggggaccccttgagggggaaaaacgggtcgcccgtggcggagccccaattgaatagttagataaggaccattataaccgcaaatnnggcggcgcacacccccccgcagaccaaagcacccgcctaagtttagccccacccctttgtgcaccgcggccttccccgcgcgattatcactccccataccctaaaacaccctccaatcgttcgtaccctcccacccaacccctaactcccgcccggatggattttggggcgtattctttccctgcccaagcttgaacatggtctgtttggaggacctctatatggtaatggggtggggcgtcaanaaaaccgaaacgggaccacnggcctccgcagaacgacgtattccttaaaccacgcccccgctccatcgtcggtgcttccgcgcaccgacaaaggactgtgtaaacccatagtatccacccgtcccatttcccgcgcccttaaacctgtaaactggccaccgcaggaccaacaacgctacgcgccaaggccgggggagccgctcagacccctccgttaccctccctggacgaaaacacccngagcccatctcggcccacccctcgaaaccacattcgcgcacagaccgcggaacacacgccatcgagcaccaacacccgacgtccccccg

SEQ ID NO: 2296 - DNA, 867 bp, Homo Sapiens
  misc_feature (776)..(776): n is a, c, g, or t
ctggacttgtaaacgaaaagcttcataagtccctctttgcttagtacttttctcgtcctttccccaggtgcacgtaaccctcaagcactaggaccgtgcggaatccaggctgcgatggcaccttcatttaccgcccgcattcagttgtcctcttgcgggcgctaggctttctcataggcttagtaggccgagcagctttagtcttagggggtccaaagtttgcctcaaagaccccgcggccggtgactgaaccattgcttctgctttcggggatgcagctggccaagctgatccgacagagaaaggtgaaatgtatagatgttgttcaggcttatatcaacagaatcaaggacgtgaacccaatgatcaatggaattgtcaagtacaggtttgaggaagcgatgaaggaggctcatgctgtagatcaaaagcttgcagagaagcaggaagatgaagccaccctggaaaataaatggcccttccttggggttcctttgacagtcaaggaagctttccagctacaaggaatgcccaattcttctggactcatgaaccgtcgtgatgccattgccaaaacagatgccactgtggtggcattactgaagggagctggtgccattcctcttggcataaccaactgtagtgagttgtgtatgtggtatgaatccagtaacaagatctatggccgatcaaacaacccatatgatttacagcatattgtaggtggaagttctggtggtgagggctgcacactggcagctgcctgctcagttatnggtgtgggctctgatattggtggtagcattcgaatgcctgctttcttcaatggtatatttggacacaagccttctccaggtgtggttccca

SEQ ID NO: 2297 - DNA, 859 bp, Homo Sapiens
gggccccccgctggttccgctggtaaaagtagatggcccaagcggtcttcgactctgtggtcctcaagcagttgtgctctgtagaagcattcccggaggagttttcctgaagttcaaaccagcctggccgactgctgtctgacaccagcagcttgggtctggagggaggggcattcggcactgatggcatccacccttggagctagggagtcactggtgataatggacttggccctggacgcctgcaagccggtacttgaggtccttctctgtcagctgagtcacacccggaatcatcacagtccctgtccgcatgcaagccacactgaccagccaccactccgggagccgtgggagtaccagcatcattctgtccccaggctgcaggccgcatgcaccccccagcacattggctgccttcctggactgcttccccagctcctcaaagctccacttgatctctgctcctgtgccattgacccaccagaaggcaggatttggggggcggtgtccagcctcttccagccgactccacacatccagcacatcatgggcgaagttgaagtactcaggcaccagctgccttcccaggctgatggcttcccaggtggccacgatcttctgaggaacaggtagaggtgctggcttcccatgagacccacagaatgccctggagttcctcagtgcctggaggactaggtgtctcagccatggtctcatgcagtcgcctcctgtcttgctcttgaaccaaagtaatgcaaaaggtctctgttttctgcttcagctgagcagagcagggctcgagtggctgtaaacactcagctccctcagaaaacagcctcccacagggacttcagcc

SEQ ID NO: 2298 - DNA, 793 bp, Homo Sapiens
gcaaatttcaaaagccttggtcaatggtcaagcgtgcagcttgtacagcggttcttgctagaggagcggacaccgggttacattactaatgagagttgggtagaactctctgagatgtgttcagatagtgtaattgctacattctctgatgtagttaagtatttacagatgttaaatggagtatttttattttatgtatatactatacaacaatgttcttttttgttacagctatgcactgtaaatgcagccttcttttcaaaacgtgctaaatttttcttaatcaagaatattcaaatgtaattatgaggtgaaacaattattgtacactaacatatttagaagctgaacttactgcttatatatatttgattgtaaaaacaaaaagacagtgtgtgtgtctgttgagtgcaacaagagcaaaatgatgctttccgcacatccatcccttaggtgagcttcaatctaagcatcttgtcaagaaatatcctagtcccctaaaggtattaaccacttctgcgatatttttccacattttcttgtcgcttgtttatctttgaagttttatacactggattcgtcaggggaatgaaattttctcatctaaaatttttctagaagatatcatgattttatgtcaaagtctctcaatgggtaaccattaagaaatgtgtttattttctctatcaacagtagtttgaaagtagaagtcaaaaatctttttaaaatgctgtttgtttaatttttgtgattttaatttgatacaaaatgctgaggtataattatagtatga

SEQ ID NO: 2299 - DNA, 795 bp, Homo Sapiens
accatatgaaggagatgaaataagcatgatgctggtgctgtccagacaggaagttcctgccgtgtgctactctggagccattagtcaaagcacagctggttgaagaatgggcaaactctgtgaagaagcaaaaagtagaagtatacctgcccaggttcacagtggaacaggaaattgatttaaaagatgttttgaaggctcttggaagtaactgaaattttcatcaaagatgcaaatttgacaggcctctctgataataaggagatttttctttccaaagcaattcacaagtccttcctagaggttaatgaagaaggctcagaagctgctgctgtctcaggaatgattgcaattagtaggatggctgtgctgtatcctcaagttattgtcgaccatccatttttctttcttatcagaaacaggagaactggtacaattctattcatgggacgagtcatgcatcctgaaacaatgaacacaagtggacatgatttcgaagaactttaagttactttatttgaataacaaggaaaacagtaactaagcacattatgtttgcaactggtatatatttaggatttgtgttttacagtatatcttaagataatatttaaaatagttccagataaaaacaatatatgtaaattataagtaacttgtcaaggaatgttatcagtattaagctaatggtcctgttatgtcaattgtgtatgtgtgctgttgtttaaaataaagaggtacctacttggaacattgacgaacaacaaacaccaaaacacataaataaggggggcg

SEQ ID NO: 2300 - DNA, 663 bp, Homo Sapiens
gggcctctttgcgctcccagtttgctctgcgatggcacttgaatagtgtagtcacgcatatgagcccctttgccccgctgagcgcggcgtcatcacaggaagggcatcatgcaagcttcacagtagctccagtgtggcctcttcaagctgccagtaaagctttcgttggggcagcacggtcctgtcaggtatttccgccgttgcggcatgcagcatggcagcctggctcaggggccgagatgcgtgctaggggctctgtaaggctccagcctcaaagtagacatcgggtgctagtcctggaaggcctgcccttggagcttgtccgggatgaagtcccagacgacgggtgtagggcaacgtgaatagtgccaaacaggtaggccggaggatcacgccgaatcgtccacaggaaggagttcaagtccctatgcgatccgggcggccggcactgtcctccgtccgggggctgcgggcgaggcacgacggtggcgaggagggcggcgagcagcggccccgccaggcaggcgtgcatcctgccagggcccgcggggcagccgggggaccctcactggcggcgcccctcagcggggcggggagcccccagttgggcacagagtttcctctggagcacggggcatccaaaaacctccgaccgtaccagcg

SEQ ID NO: 2301 - DNA, 908 bp, Homo Sapiens
tggagattgacgcggcagtgcacacctgctggtacgtgcaaaagtagccgacaggccagagtttccagtttcggtggcttcgtaggcttttagcttctgaaatccgctaaaagcggcggttcattcatcttcaagtacctagcctgactggtagggctgctcagcattccgaaacatttcgacctggggaggggggcggcggtgaaagaatactttctgtagagagtgcccctcgcgtcgcccctgctttgaaggctttatgtattaacggaatgccgaacatttgtgtcctacttgctgacagcgcacaggatccttctaacagtatttctcaagtacttaacaaaaagatgaaaacttgaagtccaagccgttgctgctgattccgtctcacagtttaaagactgtccagaaactttaagctttcaaaagctgtacatgttaaaatcctgtgcgtttatcttcatttggctgggcagaaagccaaagtactggactgcctggttcagggctgaacgcctagtacacctgctaacttggagcttcagagccatggacaaccaaggagtcaagagacgccaaagcacagttggccctctcctcatcggacaatcagagcaaggaagtgcctgaaaaacccaaactatgctctcaagatgtactcttgtgggacactacggaaagcagtgtcatcagttcaagttgagtcctaagtggcagaactggctagcaaagttcttctgctgatagggctaatcatacatttgcgggagcatatgcactggacactattgagacccacacttctatgtgtcgaaaattctggcactatccggatgtttgccagggtcatcagaattccagtcggcctctgacctggctctgatgatctaactctaacatctcgg

SEQ ID NO: 2302 - DNA, 1045 bp, Homo Sapiens
aattcccgggatctcccccacgacccgtgacctctgtggaccgcgagcacggagcagggtttctacagctgctccccactttctcggacccggtcctggacccagcccccgactccgacacggctccaccatggaggaggcggaccgaatcctcatccattcgctgcgccaggccggcacggcagttcctccagatgtgcagaccttgcgcgccttcaccactgagctggttgtagaggctgtggtccgctgcctgcgtgtgatcaaccctgcggtgggctctggcctcagccctctgctgcctcttgccatgtctgcccggttccgcctggccatgagcctggctcaggcctgcatggacctgggctatcccttggagcttggctatcagaacttcctctaccccagtgagcctgacctccgagacctgcttctcttcttggctgagcgtctgcccaccgatgcctctgaggatgcagaccagcctgcaggtgactcagctattctcctccgggccattgggagccaaattcgggaccagctggcactgccttgggtcccgccccaccttcgcactcccaagctgcagcacctccagggctcggccctccagaagcctttccatgccagcaggctggtcgtgccagaattgagttccagaggtgacccacgggagttccaggcgagtcccctgctgcttccagtcctacccaggtgcctcatccttgctggaaggggggcctcgctcctccaaaaccatgccctggagctctgccagcacaacgggcgggacccggccaggggaattaggcccggggtccacggaactccccgcctcccacccacggagggacatcgcgcccccgccctaataggccgcccacacccccttgccttaccccccgctccttaacccctggggttctaccgtggggcccccccaaacgaccgcggggcgcccaatggcgaaaacacggctctcccccacccccggtttatcttgatgtgtcacccctcccctgtgtctgcccgcacgccccgcgac

SEQ ID NO: 2303 - DNA, 321 bp, Homo Sapiens
ggaacaggtagcggccaggatgctgaacctgctgctgctggcgctgcccgtcctggcgagccccgcctacgcggcccctgccccaggccaggccctgcagcaagcgggcatcgtcgggggtcaggaggcccccaggagcaagtggccctggcaggtgagcctgagagtccacgacccatactggatgcacttctgcgggggctccctcatccacccccagtgggtgctgaccgcagcgcactgcctgggaccggacgtcaaggatctggccaccctcagggtgcaactgcgggagcagcacctctactaccaggaccagct

SEQ ID NO: 2304 - DNA, 1289 bp, Homo Sapiens
  misc_feature (1054)..(1054): n is a, c, g, or t
tccctccgctgttcccctcacaccagaagcgaccggtccggaattcccgggatcttcccgacgcgttccgccttccccagctgtgcactctccatccagctgtgcgctctcgtcgggagtcccagccatgtccgacgagagagaggtagccgaggcagcgaccggggaagacgcctcttcgccgcctccgaaaaccgaggcagcgagcgacccccagcatcccgcggcctccgaaggggccgccgccgtcgccgcctcgccgccactgctgcgctgcctagtgctcaccggctttggaggctacgacaaggtgaagctgcagagccggccggcagcgcccccggcccctgggcccggccagctgacgctgcgtctgcgggcctgcgggctcaacttcgcagacctcatggctaggcaggggctgtacgaccgtctcccgcctctgcctgtcactccgggcatggagggcgcgggtgttgtgatcgcagtgggcgagggagtcagcgaccgcaaggcaggagaccgggtgatggtgttgaaccggtcagggatgtggcaggaagaggtgactgtgccctcggtccagaccttcctgattcctgaggccatgacctttgaggaagctgctgccttgctcgtcaattacattacagcctacatggtccctcttttgacttcggcaacctacagcctgggccacaagcgtcttggtacaccatgggcttgccacggggggcgtggggcattgctgcccgcgccccctgtgccctaccaggggaaaaatgtcaacgcgctcccgaaagggtcttgggccagcaacccccaagggccctgaaaggaagaaggggggtcctctttttctaggggaactatccacccccgagggctagcggcgatcgggctcccccgtcgccttgttccccctaaagacttggggtcaatccgggcggggggcccccgcgatggtgcggtagagttggtggctcaccattgcggttgcggcgttatgagtatgcgcctgtctctaatcggcccgatcctcccctcgtgttgngtgccatccccttccagcgagtgactatcggcgccgcgcactcctgagttgtcccattttattcccgcacgtccccggcgcggccaacccccgcctctgtatcgcggcaattgtcctagggctttgattgcgttcccccccgtcgtatcgctggcacggcatatatatgtcatgagttgttgtgcgacgtgttcttttcttccgcggttaccggcggccgctagaacgaaagagg

SEQ ID NO: 2305 - DNA, 282 bp, Homo Sapiens
gcgccctgttactgccctggagatttgggcctctctccctccttcctgccgtcccccgcctgagggaggggagcggtgcagcagacatccggagggcagctgggaccccctgactcagccgacgggtgagtcaggctccctgcaggccacaccggacccccccaggcggggatttccccaagatgagaaatcagccaccggaagtcacgccggaccttggacgggcagacagaggctgggaggagttctgggtgcagagccccccaacctgtgctctcatct

SEQ ID NO: 2306 - DNA, 915 bp, Homo Sapiens
ccaccatccatgataggcacccacattcccagccttcacgcctcagctcctcaggcacccagtgcctctcctattccttccacctctgcaggagctgcgagatgggagccgcgggatattcaaacaagatagcttcttcttcctctgcgatcagcaggtccagttctcggcggctgacctctgggagctcccgttcaccctcaatctccagcatccgtatgggctctgcctccaggatcgtgatggcctcaggtggcagcacagtgaccggaatcctctctggctccctgggctctgtaggaacttcaggagggatctcttcaactctctctgggattgcagcctctaagaggtgtcgaatctgagggatatcgaaaggactaggaagtctgggatccacagacatcatcccaaaaaagggatctggagcatcttctagggtctccatcatggccaggtggttaggaagcagcaggctgggtagctcagtctccatatctattcggatctgcagctgggcacggtggaggcgctccaagatatgctggatgtcctccacgaggtactggcattgttgagaatagacgcggatcacaccgatctgaagttgggctgagagatagagggagaagccgggaccgcggcaggccgggctgcgggggttgcactcgtaccagcacgtaattgaggatttcctcgcaggttttcaccacattcaccctcaggtattcgcgcttcaccaaccggctgccgcgagtcgccgccagccagatggtggcaaagcagccggtgtggcgctgaagcacgttgggatagtagaacattgtccctctggtctttcaccctcgattccaccagatccccttcggatctgagtcggaattctttaggcacagaattcccaacaccagatac

SEQ ID NO: 2307 - DNA, 371 bp, Homo Sapiens
agtgggacactgtggttgcgccaggcgctgctcaggttcgcggcgtccggcacccgacagcggtgctccggggtccccaccaggaacacgaaggacagaccagtgaagccattggggatgatgctggcgctgagcaggaagaagatgaggcgctggaagggcccccactcgcccaggaaggcgatcacctcgtcgtagtcccgcatgcttcccactgccgctccgaaacttgcaactacgggtgatgacagcgttctcaggacagtgtcttgtagctggggcgctccccaaggatgttagaacgttcccgggcgccaggcaggctgttagaaattggggcgcgaagccggggaccgttcctgggaaacagg

SEQ ID NO: 2308 - DNA, 617 bp, Homo Sapiens
aggaaattttatgaattcaggtaattaaaaagtccagaagtatctgcctttaggcacagctggatccaagggcacaaatgatgtcatcaggctccagttattctccatctcccagctcagctttttctgtctgtaagcctgattttcaggaaggctctttcctagtgatggagatgaccaccatcagctccaggcttctatcctgctaacccagtaacccagtgggaagagatttacttattccaataattccaagtggagagtgtcattgacccgtttggggtctcatctctacttctaggggaatgaaacactctgagtggccaggcctgtgtcatgtgctaattcctagagccagggaaataaggtctgaggattcaggatggggtgaaaggtggttgcttaaaggaaaatgaaatacaattagcagaataaggggaaacgagtggtctgctctgctcgggcaaaacaagagatgcccattactgtgagggacccttgaagtctggactcttaaatgggtttttgctgatttcctgggtgcatgctaggatgatggggcttgatgcagtagggaagagacgatgtaaaaataataaacaatatataccttcaaa

SEQ ID NO: 2309 - DNA, 342 bp, Homo Sapiens
  misc_feature (178)..(189): n is a, c, g, or t
tgtcacagaacactgtttgcagtagaggaaactggcattgcagtctggtggtataatggcttgtccacataaaccagtacatgttcatcctttagcgcaaaaagccctaatggcgcagtaccctattaaaattcaggacatctccaatattctctctctctgtttttctttgtcatcnnnnnnnnnnnnaaataaacattttcaaggtttgtccaaaagaaggccatataggttcttggctagcggaagacaattcagaacagctgttgcacacttggactgtcaccttctccaggctggcagttgatatcttattttttttccaactcatttttattaaaa

SEQ ID NO: 2310 - DNA, 305 bp, Homo Sapiens
gaatatgaacacttatccttgaacctatcaataacatttttcacatatctgtcaatttttgtgtatctttgtagttgtatgtgggccacttactaatattttagcaagtaataaaaatagaaacgtaaaggaatattggaaaaagtctaatggaaccagaaagttctagcatttttttcccattctgtagtaggtcatctggtttatttggtttggtgaccgcaagtctagaagactaacccttaattgaatggtaacagacaggcagaatgacaatgtagtgttgcagtgcagagcagtacaga

SEQ ID NO: 2311 - DNA, 669 bp, Homo Sapiens
  misc_feature (526)..(526): n is a, c, g, or t
tggagcagccgcagggggagttctatgagtgacctgcgagcagcccagctcttggccaacctggcgcggctcatccaggccaagaaggcgctggacctgggcaccttcacgggctactccgccctggccctggccctggcgctgccgcggacggcggcgtggtgacctgcgaggtggacgcgcagccccggagctgggacggcccctgtggaggcaggccgaggcggaccacaagatcggacctccggctgaagcccgccttggagaccctggacgagctgctggcggcgggccaaggccggcaccttcgacgtggccgtggtggatgcggacaaggagaacttgctccgcctactacgaagcgctgcctgcagctgctgcgacccggaggcatcctcgccgtcctcagagtcctgtggcgcgggaaaggtgctgcaacctccgaaaggggacgtggcggccgagtgtgtgcagaaacctaaacgaacgcatccggcgggacgtcagggtctacatcagcctcctncccctgggcgatggactcaccttggccttcaagatctagggctggcccctagtgagtgggctcgagggagggttgcctgggaaccccaggaattgaccctgagttttaaattcgaaaataaagtggggctgggacacacgaaa

SEQ ID NO: 2312 - DNA, 527 bp, Homo Sapiens
cccagctccacctcttggaagctgagcatgtggtcctggaaatcccccttattgagggcccagacagggcatccccaagcagaaaggcaaccatggcaggtgggctagccaacctccaggatttggaaaacacaactccagcccagcctaagaacctgtctcccagggagcaggggaagacacagccacctagtgcccccagactggcccatccatcttatgaggatcccagccagggctggctatgggagtctgagtgtgcacaagcagtgaaagaggatccagccctgagcatcacccaagtgcctgatgcctcaggtgacagaaggcaggacgttccatgccgaggctgccccctcacccagaagtctgagcccagcctcaggaggggccaagaaccagggggccatcaaaagcatcgggatttggcattggttccagatgagcttttaaagcaaacatagcagttgtttgccatttcttgcactcagacctgtgtaatatatgctcctggaaaccaaaaaaaa

SEQ ID NO: 2313 - DNA, 1660 bp, Homo Sapiens
cggcagtactatacgtatctaaggtagcgaggcctgggtggcgaattcggcacgaggaaagctcgtagaagtccccaacgatggagggcctctgggaatccatgtagtgcctttcagtgctcgaggcggcagaaccctggggttattagtaaaacgattggagaaaggtggtaaagctgaacatgaaaatctttttcgtgagaatgattgcattgtcaggattaatgatggcgaccttcgaaatagaagatttgaacaagcacaacatatgtttcgccaagccatgcgtacacccatcatttggttccatgtggttcctgcagcaaataaagagcagtatgaacaactatcccaaagtgagaagaacaattactattcaagccgttttagccctgacagccagtatattgacaacaggagtgtgaacagtgcagggcttcacacggtgcagagagcaccccgactgaaccacccgcctgagcagatagactctcactcaagactacctcatagcgcacacccctcgggaaaaccaccatccgctccagcctcggcacctcagaatgtatttagtacgactgtaagcagtggttataacaccaaaaaaataggcaagaggcttaatatccagcttaagaaaggtacagaaggtttgggattcagcatcacttccagagatgtaacaataggtggctcagctccaatctatgtgaaaaacattctcccccggggggcggccattcaggatggccgacttaaggcaggagacagacttatagaggtaaatggagtaggattcagtgggcaaatcccaagaggaagttgtctcgctgttgagacgcaccaagatggaaggaactgtgagccttctggtctttcgccaggaagacgccttccacccaagggaactgaaagcagacagatgaggatatgttcttacacctgatggcaccagggaatttctgacatttgaagtcccacttaatgattcaggatctgcaggccttggctgtcagcgtcacaaggtaaccggtcaaaagagaaccacgcagcatttgggaatcttgtcaagtccattattaatggacggagcagcatctaaagatggcacaggcttcgggtgaatgatcacctgatagcagtaaatggagaatccctgttgggcgagacaacaccaacgatgccagtggacaccctaagaaggtctatgtctactgaaggcaataaacgaggcaatgatcagcttaattgttgcaaggagacataaggcaagtgcaatggaggctgaaagtcaccttggtaagccccccctgggatctggagctggaccagtgaaaccggcgttggatgattaacgaaagggagaattccattccctgtacggggacttgaggggtttctgattgcccacgcgaaagctgcgctcataggataagcgggtctgccgtgcactaccagctgccctcatgtatctccctgagcactggcttataccctcaccgtgctggtcgcccctctgtgcccactagcacagaaggtgctgcaccacttgcggcatggtccaggtaccggctcacaatacattctctgactataccccacccatcttcgtcacaccgtgcgaatcgaggcctgccgccagctacacagattccaacgg

SEQ ID NO: 2314 - DNA, 382 bp, Homo Sapiens
tctttgccactgtcagaatctgaatctcactggccctgtggagtagggatcctatctggagaagtgggagcatgggctgcagtcaggactgctgcagactgagccatgtgatggtacgtaatgagttccctcgagggaatgaaacaccctcaccccttcaaagtcacccctttggaattcaacacagacacacatatcccttcaaaaacttttatttgtatcaacagttcctagctcttgacttagcttagagcttttaaaagagcagacaccttatatatttgagattgaaaaagtttctgctattaatcagaaataatcatttctattttctggcttaccccttggaataagccaaaaataaaaccaaagttacatttcc

SEQ ID NO: 2315 - DNA, 458 bp, Homo Sapiens
  misc_feature (119)..(138): n is a, c, g, or t
  misc_feature (328)..(391): n is a, c, g, or t
ctagagtgctgggattacaggtgtgagccactgtgcccggcctcttttgctttcttaaaggagtttggtcgggtatttgtgttgttgagtattgtgtctgggtgtgggtatttgattcnnnnnnnnnnnnnnnnnnnnggctgtcctgtctatggatgtgatatgtcatggatgtgatgtgttagtgtcgagcgtgctgtagaatctcccatttctgaaacaggcgtgaaaacctgtactgattcccacgctcctccagctaccacttcatttgtctgtttctcatttacttcctcttatagcgtggctttaaacatatatacatttnnnnnnnnnnnnnnnnnnnnnnnnnnnnnnnnnnnnnnnnnnnnnnnnnnnnnnnnnnnnnnnncgagatgggttaaagataaagctactcataactaatagaacttagatcaaagcaaaacaagaggggc

SEQ ID NO: 2316 - DNA, 1105 bp, Homo Sapiens
ggcttgtgttcgcagccttgccgtggctggggttccgatgtggtccccggagcgggaggccgaggccccagccgggggagacccggcgggccttctgccccccgagtgggaggaggacgaggagcgcatgtccttcctgttctccgctttcaagaggagtcgcgaggtgaacagcaccgactgggacagcaagatgggcttctgggcgccgttggtgctgagccacagccgccgccagggggtggtgcgcctgcgtctgcgggacttgcaggaggcctttcagcgcaaggggagcgtcccgctggggctggccacggtgctgcaggacctgctgcgtcgaggggagctgcagcgggagtcagacttcatggccagtgtagacagcagctggatctcctggggggttggggtcttcctgctgaagcctctcaagtggactctttctaacatgctgggagataataaggttccagctgaggaggtccttgtcgctgtggagctgttgaaggaaaaggctgaggaggtgtatcgtctgtatcagaactcgcccctctcctcccaacccgtggtggccctgtcagagctcagcaccctctgtgctaactcctgcccagatgagaggaccttctacttggtgttgctgcagctgcagaaggagaagagggtcacagtcctcgagcagaacggggagaagattgtgacagtttgcccgagggccacgtgccaaggtctctaccagtcaatgacggtagatgtaggggtgtaccagctgatgcaaagtgaacagattctctcacgcaaagtggagaccttatcccaggaagcagagaggtgtaaagaagaagccctgtcgggcatgccgagcaggaacagaagcagctggcactgaggtctctcaatgtcaagcaacggacagagtaaacgcatcgaaagcctttgcattgccaaggctggacactgtttcaaagcattctgaaccggatctatgcctcccagacagatcagatggttttaaaagcctacccaggcttggggtaggcactcaaactctcatgaaggatgtcacagtggagaaggcgaaaaccctcatggatcagaatccaag

SEQ ID NO: 2317 - DNA, 1482 bp, Homo Sapiens
  misc_feature (1349)..(1349): n is a, c, g, or t
ggctggtacggccggaagtgatggatctggctccgtgctcccacgcgcttgtgcctggacggaccctcgccagtgctctgcgcaggattggaacatcagttaacatctgaccactgccagcccaccccctcccacccacgtcgattgcatctctgggctccagggataaagcaggtcttggggtgcaccatgatttcaccattcttagtactggccattggcacctgccttactaactccttagtgccagagaaagagaaagaccccaagtactggcgagaccaagcgcaagagacactgaaatatgccctggagcttcagaagctcaacaccaacgtggctaagaatgtcatcatgttcctgggagatgggatgggtgtctccacagtgacggctgcccgcatcctcaagggtcagctccaccacaaccctggggaggagaccaggctggagatggacaagttccccttcgtggccctctccaagacgtacaacaccaatgcccaggtccctgacagcgccggcaccgacaccgtctacctgtgtggggtgaaggccaatgagggcaccgtgggggtaagcgcagacactgagcgttcccggtgcaacacacccaggggaacgaggtcacctccatcctgcgctgggccaaggacgctgggaaatctgtgggcattgtgaccaccacgagagtgaaccatgccacccccagcgccgcctacgcccactcggctgaccgggactggtactcagacaacgagatgccccctgaggccttgagccagggctgtaaggacatcgcctaccagctcatgcataacatcagggacattgacgtgatcatggggggtggccggaaatacatgtaccccaagaataaaactgatgtggagtatgagagtgacgagaaagccaggggcacgaggctggacggcctggacctcgttgacacctggaagagcttcaaaccgagatacaagcactcccacttcatctggaaccgcacggaactcctgacccttgacccccacaatgtggactacctattgggtctcttcgagccaggggacatgcagtacgagctgaacaggaacaacgtgacggacccgtcactctccgagatggtggtggtggccatccagatcctgcggaagaaccccaaaggctttctcttgctggtggaaggaggcagaattgaccacgggcaccatgaaggaaaagccaagcaggccctgcatgagagcggtggagatgggaccgggccatcgggcagggcagcagcttgacctcctcggaagacactctgaacgtggtcactgtcggaccattcccacgtctttcactttggntggaaacaccccccgggggaactctattctttggcctgccccccctgcttgaaggaccccgaacaaaaagccccttacctggccatcccggaatgggcaaagggggccttgggctaacagggtggggtgggga

SEQ ID NO: 2318 - DNA, 908 bp, Homo Sapiens
ctgtcgggaagggctgcaggctgtccgcgagacccgcgggccggctgagctgaccccgcctcgcctttcctgcctagccctcattccacggagccggtcgcgcccggtccttgcgcgacgcttcccggcccaggccgcctggtctggcgctggaggccggagtcccgcggactgtgctggatccgcgcacacccagtggcggcggatgggcggacggggcggccggggacggccggatcctgagcgacggcccgggcatgtcagggctggctgctggcgggatggacaccctggaggaggtgacttgggccaatgggagcacagcgctagccccgagccctggtcgaccaaacatcagtgtgcctcatcgctgcctgctgcatgcgtcgtacgaagacattggcacgctccagggtccggtactgggacctcttgctgctcatccccaatgtgctcttcctcatcttcctggctctggaagcttccatctgctcgggcgaagatccgcatgagcgtccagccccatttttatcaccgttctacatcctggatgtctgtggtggcgctggtgggcattgcccgggccgtggtatccatgacggtgagcacctcgaacgctgcaactgttgctgataagatcctgtgggagatcacccggcttcgttcctgctggccatcgagctgagtgtgatcatcctgggcctggcctttggccacctggagagtaagtccagcatcaagcgggtgctggccatcaccacagtgctgtccctggccatagctctgtcacccatggggaccctggagatcctgtagccctgatgcccatctctcagctgaggactttaatatctatggccatggggggccgcagttctggctggtcagctcctgcttcttcttcctgg

SEQ ID NO: 2319 - DNA, 986 bp, Homo Sapiens
ccctcattcaagcgtggcgcccagagtatgagcaccagcgtccttgacgaagatgctcacggcgcgccagcatgaaggacaggaacagggtgcatgtggatgtagttgcgcgttcagttcaaccgcctaaagtaggccaggatgagcacagctacggtgagggacgccagggacacggagtagcccacggtgtaaatcatgcccaggcggtcaaacacctccccgttcacgagtctcaattggtgagaaatttgacacactcgctgtagttggcccacgtccttgttgtgcccaggcaccagctcccagctgccattgcggtcacagcgtcggtaggcatggcctttgtgactgaagtcataaatgtagtccggacagggcacagccaccacctcacctggtgcccccagcggccagcacaggatgtggtcccattccggcagacaggggcgccctcggtacctgctgccagtgggtgcctccttgtcctcctcagactcagggtagagcttcccagatgccttatctttcctgggcttccctgatgtggacgcagatgtccatcccttgtctgattccattatgctggctggcctcatgcaggacctccttgagccgttttccgcactgggcctgagcacggtgcagcaggaagatctgttcctctttagtcatgacgtcatctgcatccaccagcgcgtacgcggagctgagcacggggcagcagagcaggagcgccaggccgggtgcgatccgggcggtccccatcagccaccgcctagggccgcgtccctcggggcagccgccggccgcacaggcaccagttgtgtgtcctggacactaccactcttcggctgtctggacctcagtttcctcatctgcagcccatgggccttccaagtcgggcactaaagctgcagagcagatctcaagttggccacggggaggccatggatagtccctgagcagcttctgtggctcaggcc

SEQ ID NO: 2320 - DNA, 948 bp, Homo Sapiens
gtctcgggtctggtggctgccggccctgcggcatctcgccatggggagcacggagagggggcgagggccgcagggtgtccttcggagtggacgaggaggagcgggtccgggtgctgcagggtgtccggctgtctgaaaacgtggtgaaccgcatgaaggagcccagctctccaccccctgctcccacatcttctacctttggccttcaagatggcaacttgagagcccctcacaaagaatccacactgcccaggtcggggagcagtggtggccagcagccctcagggatgaaggagggtgtcaagaggtatgaacaggagcatgctgctatccaggataagctcttccaggtggcaaagagggaaagagaggctgccaccaagcactccaaggcatccctgcccacgggcgaaggcagcatcagccatgaggagcagaagtcagtccggctggccagggagctggagagcagagaggcagagctaagacgccgtgacaccttctacaaggagcagctggagcgtattgagaggaagaatgctgagatgtataaactgtcttcagagcaattccatgaggcagcctcaaagatggagagcacaataaagccccgcagggtggagcccgtctgctcagggttgcaggcccagattctccactgctaccgagatcgcccgcatgaggtgctgctgtgctcggacctggtcaaggcataccagcgctgcgtgagcgccgaccacaagggctgaggagcagacatcattcccctgccctggcagtgacttggagccctgaagaagggaccaatcatgggaccacagccactgtgccctgccgtttcctgctgggcccctgcatatgcccctgggcctggggctgccacgtgtttaggaaacaaagtatgcgctactgtctgaaaacaaataaagcagatgcctttgttttcaa

SEQ ID NO: 2321 - DNA, 1096 bp, Homo Sapiens
tcctggcatgctcctcaggagccagccccacccttagaaaagatgttttccatgaggatcgtctgcctggtcctaagtgtggtgggcacagcatggactgcagatagtggtgaaggtgactttctagctgaaggaggaggcgtgcgtggcccaagggttgtggaaagacatcaatctgcctgcaaagattcagactggcccttctgctctgatgaagactggaactacaaatgcccttctggctgcaggatgaaagggttgattgatgaagtcaatcaagattttacaaacagaataaataagctcaaaaattcactatttgaatatcagaagaacaataaggattctcattcgttgaccactaatataatggaaattttgagaggcgatttttcctcagccaataaccgtgataatacctacaaccgagtgtcagaggatctgagaagcagcaattgaagtcctgaagcgcaaagtcatagaaaaagtacagcatatccagcttctgcagaaaaatgttagagctcagttggttgatatgaaacgactggaggtggacattgatattaagatcccgatcttgtcgagggtcatgcagtagggctttaactcgtgaagtaaatctgaaggactatgaagatcagcaaaagcaacttgaacaggccattgccaaagacttacttcccttctagagataaggcaacacttaccactgataaaaatgaaaccaattcccagacttggttccccgaaaattttagaagccagcctttccaaaggtacccccccaaatgggaagggattaacaaaaatgcccgcacaatgaaaaatggagtttaaaaaagacctgcggggaaatggaaattacttcgagggagggcttccaccttctttatcggaacccgggtcccaaaaaacgggaaaggcccccaaggaaacccttataaaagtggcctggaaaagcctgggaacctcttcggaggacttcctgggaaccctgtaaaataaccgtgggacacccaaaaaccccttgggaaccccccctgggaacttgtgcagggagaattgtccaccctcgggaaaaccccgcggggaa

SEQ ID NO: 2322 - DNA, 1105 bp, Homo Sapiens
gggtccggaattcccgggaacgcgagcccggtaatttttcaacggagaaaggcgaggcttgcgggctctgcagagtgagagttagcaagtgtccggctccagcaactctcctctggcgtgacagccggcatggaggatccacagagtaaagagcctgccggcgaggccgtggctctcgcgctgctggagtcgccgcggccggagggcggggaggagccgccgcgtcccagtcccgaggaaactcaacagtgtaaatttgatggccaggagacaaaaggatccaagttcattacctccagtgcgagtgacttcagtgacccggtttacaaagagattgccattacgaatggctgtattaatagaatgagtaaggaagaactcagagctaagctttcagaattcaagcttgaaactagaggagtaaaggatgttctaaagaagagactgaaaaactattataagaagcagaagctgatgctgaaagagagcaattttgctgacagttattatgactacatttgtattattgactttgaagccacttgtgaagaaggaaacccacctgagtttgtacatgaacataattgaactttccggttgttttactgaatacgcatactttagaaatagaagacacgtttcagcagtatgtaagaccagagattaacacacagctgtctgatttctgcatcagtctaactggaattactcaggatcaggtagacagagctgatacctttccctcaggtactaaaaaaagtaattgactggatgaaattgaaggaattaggaacaaagtataaatactcacttttaacagatggttcttgggatatgagtaagttcttgaacattcagtgtcaactcagcaggctcaaataccctccttttgcgaaaaaatggatcaatatccgggaagtcatattggaatttttacaagggtccctagaagccaaaccaaccggacaataatgcttgtaaaaattaaggaatggattatgatggggcgggctccctgtgggcctgaatgactcctagaaaattccccccgaatagcaaattccaaatggcttccagaatggggggtggactcccgaattccacg

SEQ ID NO: 2323 - DNA, 841 bp, Homo Sapiens
cagtcttactgcaaagcaggagcacaacccgtctctttgtctccgtggtcaaatcaattacttcttagaaagtctaatttttttcaaaatgaccatgtacaagagcaaacgcagacatcagagatatatcaacatggcaggagagcccaaaccatacagaccaaaacctggaaacaagaggcccctttctgcactttacagacttgaatcaaaggaacctttcctgtctgttggcggttatgtctttgactatgattactacagagatgatttctacaatcggttatttgattaccacgggcgtgtgcctccacctccccgtgcagtaattccgctgaagcgtcccagagtggcagtcacaacgactcgcagggggaaaggagtcttttccatgaaaggtggatcgagatctactgccagtgggtcaacaggttctaaattgaaatcagatgagttacagaccatcaagaaagaattaacccagatcaaaactaaaattgactccttgctagggcgcctggagaagattgagaaacagcagaaggcggaggcagaagctcagaagaagcaattggaagagagtctagtgctgatccaagaggaatgtgtgtcagagattgcagatcactctacagaggagcctgctgaaggagggccagatgccgatggagaagagatgacagatgggatagaggaggacttcgatgaagatgggggtcatgagctgtttctacagataaagtgatctgaaataacgcatgatgccacaaagcagaaagagaaactgtgacaaccccagacatgtgaaaggaggttcttacctggacaagcagcatctagg

SEQ ID NO: 2324 - DNA, 867 bp, Homo Sapiens
  misc_feature (26)..(26): n is a, c, g, or t
caggctggtaccgtccggagttgtangatgagcagcttcgcgccgccgcccgtctgcagattgttctgggccacctcggccgcccctcggccggggctgtcgtagctcatcccacttcagggactatttcctctgccagtttccatcctcaacaattccagtatactctggataataatgttctaaccctggaacagagaaaattttatgaagaaaatgggtttctagtaatcaaaaatcttgtacctgatgccgatattcaacgctttcggaatgagtttgaaaaaatctgcagaaaggaggtgaaaccattaggattaacagtaatgagagatgtgaccatttcgaaatccgaatatgctccaagtgagaagatgatcacgaaggtccaggatttccaggaagataaggagctcttcagatactgcactctccccgagattctgaaatatgtggagtgcttcactggacctaatattatgcccatgcacacaatgttgataaacaaacctccagattctggcaagaagacgtcccgtcaccccctgcaccaggacctgcactatttccccttcaggcccagcgatctcatcgtttgcgcctggacggcgatggagcacatcagccggaacaacggctgtctggttgtgctcccaggcacacacaagggctccctgaagccccacgattaccccaagtgggaggggggagttaacaaaatgttccacgggatccaggactacgaggaaaacaaggcccgggtgcacctggtgatggagaaagggcgacactgttttcttccatcctttgctcatccacggatctggtcagaataaaacccagggattccggaaggcaattttcctg

SEQ ID NO: 2325 - DNA, 428 bp, Homo Sapiens
  misc_feature (201)..(201): n is a, c, g, or t
  misc_feature (204)..(204): n is a, c, g, or t
cgtttgtcaaagaaacgatgtcaaatatacacttcttgatctcccttctgtttgcggggatcttactatttgatgggtcactgtccccattcttactgatacttttgtcagatatcaccctgtccttaaatcatgatcacttaaatcaggggtcagcaaactttttctgtaaagggccagacgggaaatattttgggcttntgncagcatgcggcctctgtcacatctactcaactctgctgttgacatgcaaaagcagcaatagacaatatgcgtgtaaatgagtgtggctgtaatccaagaaaactttatttacaaaagcaggtggagggctgggtttggcctgcaggctgtagcttgccaatcagtgacttaaattgttgatttttgtttgataaattaaaaataaattgtgtttaagtatccct

SEQ ID NO: 2326 - DNA, 485 bp, Homo Sapiens
agccccaaggtgcctgaggccatggtgcaactctgctggtgactggggcaccttggagcagagcttcacccggatgggaaatcctcactcctgggtggcactccctcctggacaggcccggtggcagagtgtccgtgctgctgggtgctgtccccagccctcctggtccatcttcttaagatgcgtccactgctttatatttaaaattctctttttcacaggcaaggaaaggaaaccactgcttagagacactaggtacagggcatcaagagggtgcagcccagccccgccaggacgaggcgccgacttctcattcagggttgacggagccaagagtttgtgcaaaatgtatgcatggtggttgctgccagcctccctcaaatgactaaatgcatatctattccatgtcaaaacgtgtatcacaatgtacattgaaactgttatctttgtgctctattgtttgaataattaaagaaattacagag

SEQ ID NO: 2327 - DNA, 559 bp, Homo Sapiens
cgccttcatgatggatatccagtataccaaagagatgaaggagtccgctgcccgagtgctacaagaagcctggatgttctacaaacatactcgcaggaaggagtctcatgctgcccgcaggcatcagcgcaacctgctggccaccatcaacgcgttccgccaggtgcggctgaaacaccggaagctccgggaacaagtgaactccatggtggacatctccaagatgcacatgatcctgtatgacctgcagcagaatctgagcggctcacaccgggccctggagaaacagattgacacgctggcggggaagctggatgccctgactgagctgcttagcactgccctggggccgaggcagcttccagaacccagccagcagtccaagtagctggacccacgaggaggaaccaggctactttccccagtactgaggtggtggcacatcgtctctgcccactcctgacccagacctgaacaaagcacctcaagcgcaaggaccaaagggggcccaggctcgcagagggtaggcccgccgctggctgccgaaggggacgccgac

SEQ ID NO: 2328 - DNA, 275 bp, Homo Sapiens
agaggatccgcccttgaacgcacctcaggatggcccgtactttggaaccactagcaaagaagatctttaaaggagttttggtagccgaacttgtaggcgtttttggagcatattttttgtttagcaagatgcacacaagccaagatttcaggcaaacatgagcagaaatatcccttcatcttggaaggtatgtttttccttaagtaaaaataagtataaaacaacccttcatcttggaaggtatgttttatacttatttttacttaaggaaaaac

SEQ ID NO: 2329 - DNA, 430 bp, Homo Sapiens
cgaagtcatcttgaaagaaaggtgaatggaaaatccctttctgtggcaactgttacaagaagccagtctttaaatattcgaacaactcagcttgcaaaagcccagggccatatatctcagaaagacccaaatgggaccagtagtttgccaactggaagttctcttcttcaagaagttgaagtacagaatgaggagatggcagctttttgtcgatcaattacaaaattgaagaccaaatttccatataccaatcaccgcacaaacccaggctatttgttaagtccagtcacagcgcaaagaaacatatgcggagaaaatgctagtgtgaaggtctccattgacattgaaggatttcagctaccagttacttttacgtgtgatgtgagttctactgtagaaatcattataatgcaagccactttgctgggta

SEQ ID NO: 2330 - DNA, 766 bp, Homo Sapiens
gtctgcagagatggctcccaatgcttcctgcctctgtgtgcatgtccgttccgaggaatgggatttaatgacctttgatgccaacccatatgacagcgtgaaaaaaatcaaagaacatgtccggtctaagaccaaggttcctgtgcaggaccaggttcttttgctgggctccaagatcttaaagccacggagaagcctctcatcttatggcattgacaaagagaagaccatccaccttaccctgaaagtggtgaagcccagtgatgaggagctgcccttgtttcttgtggagtcaggtgatgaggcaaagaggcacctcctccaggtgcgaaggtccagctcagtggcacaagtgaaagcaatgatcgagactaagacgggtataatccctgagacccagattgtgacttgcaatggaaagagactggaagatgggaagatgatggcagattacggcatcagaaagggcaacttactcttcctggcatcttattgtattggagggtgaccaccctgggcatggggtgttggcaggggtcaaaaagcttatttcttttaatctcttactcaacgaacacatcttctgatgatttcccaaaattaatgagaatgagatgagtagagtaagatttgggtgggatgggtaggatgaagtatattgcccaactctatgtttctttgattctaacacaattaattaagtgacatgatttttactaatgtattactgagactagtaaataaatttttaaggcaaaaaacaaaa

SEQ ID NO: 2331 - DNA, 367 bp, Homo Sapiens
cgtgcaggcaccggcttttacgcggacacctgtgtacactcacaggtggagtgggcaggtgctagcctgactgcgtgtctgcccatgcaggggaacacggtgctcggggcttaagcccccaacccatcactccctgcgcagcctcggcgtttgcacaggtccctgcctgaggcctgagccattccccaaaggcttccgtgggccagctgcccccctgacctccgttctgcctctggtggggttgccttccctggccaggtgagtcctgacagtgcctctccctcctggggcctccaaggaaagtattttgacatctctctctcttctgtttttattgacttgttaataaaggactttgtagtgacaa

SEQ ID NO: 2332 - DNA, 682 bp, Homo Sapiens
  misc_feature (32)..(32): n is a, c, g, or t
agcatgccaggtccgtccgcgttccgtccttngctatgctcggagagctgaagaccacggcggtggagcgtggggatgggtgggagcacgaacgagatgggagttctgtccccccatgcctggccctaaagtctcttgcacaccagctcgtcactgcctgccctagccaactatgtaccagtctaaacaaccagcccaggcttaactcatgccaactccaccctacatggctgccctgtgccctcgggataaaccccaagcccctgagcttgtgtttaaagccgttggccttgctcccccagctttgtcagctcaggtctgtctacacccagatggtagcgcttgtgacactggcctggcagtcctgctcacagtgttctgtgcctgtgtgctcccaccctttcctcctgctgctgcagaaacccggccatccttccacacccagatctcttgtcctgtcctcaccccaccctgccaccatcagccctgcctggagccacctgccctttggcaacaaaaccaaacctttttgtgggcgttcaagatggtattgtgcccaccagtcagatcctgtgttttgagtcccaaaggccatgccaaggattggctttgggaggctttaatcaccaacccatcaacatcaagcctcccccaggccggttcaaataaatgtatttaaata

SEQ ID NO: 2333 - DNA, 416 bp, Homo Sapiens
ctcgggataggtcctgctcagagcaggccccagattcctctgtagaggcccacacttaatggtgctcagcagtgtctcttgttccttgggggtggcacaggcatcataggcggccaggaggctggcaggggtgctgtatcgatccaccagggctgctgccttctccccactcactccgcgcacctgcatcagctgccgggcaaacacttctcgcaccgactgggccttattcttgatggctcctgcgttgaagtcactgaaggtgaggagtgagcagagagggtttggagaggtcatggcccctgattcagggttcccaggggttccccaggggcggctgcgtagggtgtggccctggtagagtctctgcaggccccgagtcaagagggccaggtaggcggctgactccttaatgt

SEQ ID NO: 2334 - DNA, 1458 bp, Homo Sapiens
  misc_feature (1057)..(1057): n is a, c, g, or t
ccggaaccctgtgtgctggggaggaatcccgcagtggccggggggcttgaggccgctgctttgtctcttcgtccagagccttatgtaagagcttttctcgggaaacaggaagtcctgcttgccaatttcagcacagggagtagtgcaggccttattccaacacacccggcccagccttaaccccagaactcagccagtttcttgcttccgtgcccctggttctcctccccatcgagcccacccctcctttcccaccttcagtcacccctagtgaactgccccagcgatctctgctgtgcttgaccccgagggtcttccaccctcgccctgaccctggacactgcccagcttggccccccatcctgctcctggcacaatgccctctagccagccaaccttccctcccccaaccctggggccgccccagggttcctgcgcactgcctgttcctcctgggtgtcactggcagccctgtccttcctagagggactggaacctaattctcctgaggctgagggagggtggagggtctcaaggcaacgctggacccacgacggagtgccaggagcactaacagtacccttagcgttgctttcctcctccctcctttttattttcaagttcctttttatttctccttgcgtaacaaccgttcttcccttctgcaccactgcccgtacccttacccgccccgccacctccttgctaccccactcttgaaaccacagctgttggcagggtccccagctcatgccagcctcatctcctttcttgctagcccccaaagggcctccaggcaacatggggggcccagtcagagagccggcactctcagttgccctctggttgagttggggggcagctctgggggccgtggcttgtgccatggctctgctgacccaacaaacagagctgcagagcctcaggagagaggtgagccggctgcagaggacaggaggcccctcccaaaatggggaagggtatccctggcagagtctcccggagcagagttccgatgccctggaagcctgggagagtgggggagagatcccggaanaggagagcagtgctcacccaaaaacagaagaagcagcactctgtcctgcacctggttcccattaacgccccctccaagattgactccgatgttgaccagaggtgatgtggcaaccagctcttaggcggtgggagaggcctacaggcccaagggatatggtgtccgaatccaggaaggctgggagtttatctgctggtatagccaggtcctggttttcagacgtgactttaaccatgggggtcaggggggttcctcgagaaaggccaagggaaggcaagagacttctatttcggaggtaataagaaagtatggccctcccacccgggaccggggcctacaacacttgcttataagcggcagggggtctttccatttaccccaagggggaaaaatttctgagt

SEQ ID NO: 2335 - DNA, 613 bp, Homo Sapiens
gatcccagcggcccagctgcagcaggaacacagcggtgaggcagagggagacgtctgcaggaggcagatgttctcgcggagggacccaatgcagccacagaaggtgagcaggaacatgaggacacccaaccacgatcagcaggatggcagggtccactggccaggcaggctagggctgcttctgcatgcttcattagccgagcgtagacacccacagccaccatcaccaatggaaatcacccaagaagagcatgttgaagaagaagagcaggtatttcaccagcgggctgacgaaggagaactcctccccggaggcggccggcgcccaggggtctccgcagccatggccccgccagcacgccaccgcccaccgggggcctatttccacagcggctgccggccggcctgtgtgccccgcgcccgggggcatgagccgagccgcgccagcgcaggagccacaggccggcgggggagcactgcgctagcggcgggaggcgcccgagccggggggccgggagcggcgcgggccggggaaccgatcccgggaattccggaccgggcccacacggggggtacactcccgtgccagcggactctgcggcggggggggtga

SEQ ID NO: 2336 - DNA, 881 bp, Homo Sapiens
gcctccagccagaacggatggggtggctcccactcctgtctgcttcttgactcaagtgcttaggggtccccgtgggcagcgctcgccattgaatgacttccaagtgctccggggcaacagcacgctacagcgacctgtctacatgcggtggtgcccggtgccttgtgcaggaggatgtggctagtatgctgaagagtgtgctggtcgctgtgggcccttaatggactgccgggccttccactacaacgtgagcagccatggttgccaactgctgccatggactcaacactcgccccacacgaggctgcggcgttctgggcgctgtgacctcttccagagagaaagactacgtacggacctgcatcatgaacaatggggttgggtaccggtggcaccatggccacgaccgtgggtggcctgccctgccaggcttggagccactaagttcccgaatgatcacaagtacacgcccactctccggaatggcctggaagagaacttctgccgtaaccctgatggcgaccccggaggtccttggtgctacacgaacagaacctgctgtgcgcttccagagctgcggcatcaaatcctgccgggaggccgcgtgtgtctggtagcaatggcgaggaataccgcggcgcggtagacctgcacggagtcagggccgcgagtgccagagctgggatcttcagcacccgaaccagaaccccttcgaagccgggcaagttcctcgaaccaaaggtctggacggacaactattgccggaatcttgacggctccgaagcggcccatggtgcttacactacggatccggcagatcgaggcgagagttctgtgactcccacagtgcgggtccgaggaaagcccgccaaaaggccaga

SEQ ID NO: 2337 - DNA, 1015 bp, Homo Sapiens
  misc_feature (471)..(514): n is a, c, g, or t
gagggtattgccactcccacaatctcaggcctggtacccatcctctttccactgtgagcagagccagaaggtaggtctgttcagagtctgtgcccctggaaccctggggagtggatatcagatgggatatctccttccattccccggtccaggggagagtcactagttgtaccctactccattaggtcccaaatgggggccccatttcacctgtatcaggactctgagcatccccagctgccccacagcttgcctctggccctcagagaggggtgtttctgtgggtactcctcttaccccagcaaataaaaggaattgtctgaccctagaggcagatgctgcactgcactactccaatgtcttccatggagcctcaggtgctccccctctcacctggcagccccttcagctgctagtgatatcacttgttgggacatttttccaattaaaggttcttgggacaaaccggcnnnnnnnnnnnnnnnnnnnnnnnnnnnnnnnnnnnnnnnnnnnnggggggcggcgcgcgcctccaagaatttccccccgccgaggggcgccccagatctttcgcgctgctcccccgcgttttttttgtacaaaggggcgcccccaaatagggagggggtccgatattataaaaggcccggagggccgggcgggcgccgcccgtttaaaacaaccgctctctcgcggcgcgggcgagcaacactggcgtaccgcggggagactcttggggagagggagacccccttcaacttcgcgggggggcgcgccactatatgtgtggggacacaccctccctaccagagaagattattaaagccgccctctaagggggagacatatatctaacactttttacacggcgtattatacgtgttggtcaacacaccaacgccgcggaaataaatcgttgccccgggctaagaaaagttgtgggcaccacggacagttattactattcaccggacacattttttcatccccgggggccttcttttcataaataagg

SEQ ID NO: 2338 - DNA, 1119 bp, Homo Sapiens
ttcccatggctcctaatggtgagggccagcagctcgtatttgtccctgagccccacagagatgtccaagtgtctccttcagcagggacctggtgtggaccagcattcgccagaaagtcctcgttgagcctgctctcctgccggctgtcctgttcctggccctgcttgaacttgctctccagctcagtgagggatttgtccgagttggagtaggcatccccgatctggtgggactcccgccgcaggtacttgccatagctctcttccccggtctaggtcgtaggagatgctgttgctgatgcccctccagcacgcgcccagcatcctccacctggcggcccagcacggtgaactcctcccgcagggtgaggctcagcaggctgccaacctggctcccctccccctgggagcagcgcctggtggtcactcaccctgaagagcagctggcacttctcggggtcatcgttctcctcatagtccccatcgggcacgaagtagtggtgcagagtcccattggacatctctgggtagagggggccatcgaagtagccttgacacaggtggcagaagaaactcatgcagaagaacttcagaaacaccattctggatattcaggatggccagggaccccaggaggagactttttacccaggcacaaggaagggagtgtctttgcgagtcagcgtctccctgagacagcgtccgcctcagtcccagctggcttgctgctccctggcccccagtccccagcaggcttcatgtggctctgcacaccagcgtctgggtagcgcgcccgccgcagcgcaggatgcacccacccttgcgcccctcgctcggtgactggaactcctccggcacaggcgtagcggggaacccctcctccggggcctggcaagatgctggctctgttgccctcctctcggagtttccccttgctcccgggagatggagtgtgtagctggagagaaaggctcttgccccctgatagtatttcaatttctggactgggtgggaatgcggagcttttcctttggctaaagatatcctgaggatctctccgctctcaaattacagctggtttcgtcacttggaagccagggaacaagtttggaaaagaacc

SEQ ID NO: 2339 - DNA, 956 bp, Homo Sapiens
tccttaagaaccttcacgccttcaagtaccatatttccagtgctgagaactgggatacatcagaaggactgttctccggttaatgtctggggggaatttgggcataatatactttggctctttgtgtctcctcaccactctgaatcaggatctgtgccaattcgtatggatcgacagcagtctcgtaaaccttgttccattgcctcaccgcttctcattatgctgaccccacaattgcccttcgtcaaatttcactccttcatactctgtaccctgttggagtggtcaccatgcattctgtctatatggcacgctgattcacatccctcgttccacaacaagtctgatcacaacgatccgcagaaaacatgaagtcacctctactggctgtcttgtcccggatgatggtctgtagctcccgtatctgatcattcataggcagcagcttaacgctgcgccccgatctgccgggagagttcgcagtcctctaggaaggagttgccagctggtgcgtctatagctgctactgtcaccacgtaccactgttgccctctgagttgaggctggagcacgccgcaggcccacagagtccaagctcggccggcaggctagaatgggcgtacctccgtgaggagaatcaccttggccctggaggctctcgtttccccctgcgtggtccaggatcagatcgccacggtcgcagctgctcgggacttggtggttagaggcagagtttacattgctgcgttgtcgacagggcactggagtccggacacatgtaactccgtggccatacaccgggccccgggctatcccccgctgctactgaacactaaagataaagaggaacgggtagaaaggacagatgctcacgtgctctcatcggttgctcccgccccctcagaacatctaacctggctgtcctttcacccctagccgctgttgtttcctttagc

SEQ ID NO: 2340 - DNA, 888 bp, Homo Sapiens
gctggtacggccggagattagggatagtcctgcagtggctgtaacaaaaccagacccccaggtcccggccaatggaggcgatggagactggagtgggaccgcgtctgtcaaaagcccgactcggcagcagcggcggagtccaggaggagagctggagccgccgcgctgcctccccgcccccgccgggatttattatttggactggacaattaagtggccctgatgatgttaccaagcccggtcacctccacccctttctcagtcaaagacattttgaatctggagcagcagcaccagcacttccatggtgcgcacttgcaggcggacttggagcaccacttccactctgcgccctgcatgctggccgccgctgaggggacgcaattttctgacggaggggaggaggacgaggaagacgagggcgagaaattgtcctatttgaactcactagccgcagcagacggccacggggattcagggctgtgtccccagggctatgtccacacggtcctgcgagactcgtgcagcgagcccaaggaacatgaagaggagcccgaggtcgtgagggaccggagccaaaaaagctgccagctgaagaagtctctagagacggccggagactgcaaggcggcggaggagaagcgagaggccgaagccacgcaggccgccggaagccccgggtcctctactcgcaaagcccaggtctatcgagctggaacgcagggttcaagcaggcagcggtaacctgtacggcacccgagcgcgagcacctcgccagcagcctgaagctcacatccacgtcaaggtgaaaatctggttccagaaatcgcaggtacaagtgcagagaccaggggcaggacaagtctctgggacctgggcaacgcgccc

SEQ ID NO: 2341 - DNA, 915 bp, Homo Sapiens
  misc_feature (121)..(132): n is a, c, g, or t
cagcatcaccagcaacaacaacaacaaaaaatcctcatcaaatcctcacctaagctttcagtgtatccagatccacatcttcactcaagccaggagagggaaagaggaaaggggggcaggnnnnnnnnnnnncccaacaacttagcggaaacttctcagagaatgctccaaaactcagcagtgcttctggtgctggtgatcagtgcttctgcaacccatgaggcggagcagaatgactctgtgagccccaggaaatcccgagttggcggctcaaaactcagctgaagtggttcgttgcctcaacagtgctctacaggtcggctgcggggcttttgcatgcctggaaaactccacctgtgacacagatgggatgtatgacatctgtaaatccttctggtacagcgctgctaaattttgacactcagggaaaagcattcgtcaaagagagcttaaaatgcatcgccaacggggtcacctccaaggttcttcctcgccattcggaggtgctccactttccaaaagatgatgtgctgaggtgcaggaagagtgctacagcaagcggaatgtgtgcagcatcgccaaagcggaaccctgaaagccatcactgaggtcgtccagctgcccaatcactttctccaacagatactataacagaacttgtcccaaagccctgctgggaatggtgatgaaaaacacagttcagcacaaatcaaaagacagccctgagggagaaaaaattggggccctaacatgggccaggcctccttccacatccctgcagaacagaacccattggggccccaaacaccccccaccgaagctggacttccaacacgggaaaacccccccaatggaaccccgcaaaaaacctgaaaaattccctcccctcagggaaaccttccaaagggggaaggg

SEQ ID NO: 2342 - DNA, 1139 bp, Homo Sapiens
  misc_feature (218)..(218): n is a, c, g, or t
cccagggtggaagggacccaccaaaccccgaagggatttttctgtggaaaggggggggaaccccacctgggccaggcgcccggggttcccaaacggcagagcaaggcccgcaaaagggttccagcaggtggctgccaccaggcgcttccagaagcctgtggatacaactggctaaggggcgggcctcggcccgcagagtagaccccagctccaggctnggcagcagagtcaaggtcaggagcccggtgtgggaccggggggctcccgtgcggcaggtacaccgggtagttcgcgagcggtcttgcggcggcaggggacccccaccaagccaaggggagcagcacggcctcgggcgtccccagccgccaccaaccctctgttgctgccaccacccggccggacaccaccagactgacgaaggtcgtgcccgcggcctcagcgaacccggagagggcttcctgcaagagggacccctctggaggaatcacgcagtccacacactgggtcaggtccccgatgagctccgagtcccccaggaagctgtcgatgaggcaataactggccctcaagtccttcttcagtctctccacgttgcggatattggtcagttcttcaagtcccacaagaaggaccatggcgtccaaacaccatttggagtagtctctccagcctcagctcagagatgcccacctcagatgacagaacaatgagggtgatgctgtcatggaagcttttccacaccacagtcgtgttctcggtcctcgcagagctcagctgcacctccagattctgcccaaacatgtggactccattgagggaaccgatgacagagaacgggagctgctgacgggcgggggcgccgccgcgactgctcctgcagaatagggggaccccgctggaggccgcgaggcacagcagatgcacagtgccgcccgtcccctcctcccccatttaggactcccaccgcggtccctcacgtggggactgtcagtgcgggtcttggagcatggcggtaatcagagtaactcggcctgtggtccggagccgccagagggcgagatggggagctgattggaagaggattaacttcccgccttaatcacccaactcaaacagaccatccggaaaattccggaccg

SEQ ID NO: 2343 - DNA, 456 bp, Homo Sapiens
  misc_feature (398)..(398): n is a, c, g, or t
  misc_feature (410)..(410): n is a, c, g, or t
  misc_feature (415)..(415): n is a, c, g, or t
  misc_feature (435)..(435): n is a, c, g, or t
gtagtagaaggattgtatatgaatactggaactatttgtcctcttccagaattggttaagttaaaatacaaatacaaagcaagaatcttcctggaggaggaaagcctttcatttggagtcctaggagagcatggccgaggagtcactgaacactatggaatcaatattgatgatattgatcttatcagtgccaacatggagaatgcacttgcttctattggaggtttctgctgtggcaggtcttttgtaattgaccatcagcgactttccggccagggatactgcttttcagcttccgttacctcccctgttaagctgctgcagcaatttgaaggccctcaacatccatgggaaagagaatcccaggtatttttttgcagtgtttgaaggaaaagtgnggaccaaattcnttaangcctttaccaaggcatttcntgggatttaaaagtggggggg

SEQ ID NO: 2344 - DNA, 538 bp, Homo Sapiens
gtgaccagcatcttcaatctagttaccaccagcttggctagaattttattgaacgcaacttgctagttatgacagagaggaccagggtgagaactaatgctcaagagagcaagattctgtaatcctcttgccctctcacatcacaaattctgatatgccaaacatttggcccaatgagaatgactgatagacttgctgatgtgcatgtggggggatgagttgtgtataagcctttctcctgactggccattcagtgttcaggctgtcattcaaattggataggagaaagttggtgaggaaggaatggagagagcaggatccctggactccctggtccccaaactccttgactgtcacttgtaattgtatataatttttgtgtttcttgctccatttcctcatgctgtcatccttaaagtccatctgggaaggggaaaatgctgaacaccattgtatagtttcttcaactgtcccagccatgttgtacatagatatgtcatgttattatatatataaatatatatataattttgtacgt

SEQ ID NO: 2345 - DNA, 502 bp, Homo Sapiens
ttggcaggctttcccagcctgacaatgcgtcatgtgattcaaaacgtttttcatggttcgacaatgcgggagcgagcaggcccgaacctctccgtttgcttgctctcgtctctgacacttatgagcatgaagcagtagaaccagctgctgctgtatcagtttgcgtttttcaggatctgcagtggggcctgttgcaattgcttgtgtgggtacaattcccactgatgtttgcatctgagacatatttggcacgttggtgactgaagtattcttgatatctgtagggaaggtgggcaaactgttgaccatgctctgtttgctggctaactgggggttcactccagtggctcccattggctgccctccagcttgactaaagggctgtccaaatggacttgtgttcccagttattcccatcttggccatgcctcctgcctgtgcggtgttcagtcccgcgtgaccagtcatttgcggggaaacctgcgttaggtctcactgcaca

SEQ ID NO: 2346 - DNA, 483 bp, Homo Sapiens
acccatcgtgcgatgatcacctctaatattctcctgaagatttgggatccagtttcaaataaggtatgggaaaaacagatgttttcattatcgccacttaatccttacttccgattatattatacatgtttggctgtaataactatactaaagcatgcttgtgaaagtagacttctacaaggacagaaaacccacaacaacaaagatcgatcacgaaagacaaggcatattcattcattaatttacttctcttagacccgggacatgtgggacaaatacttttgacctcatggatggcttgataatttatttatatgttctagagtctgaggattttctttcagtggcagacaacaaaggatgttacaatttacttcaaaataatacaatcatggtttaatttacagtgtaaatccataactattttatagagatggattataatacatgggattataaaaaataacttacccatatgtttgc

SEQ ID NO: 2347 - DNA, 480 bp, Homo Sapiens
ggggagcttgcagcagaaatgaatggggtttttgacactacattccaaagtcacctgaacaaagccttatggaaggtagggaagttaactagtcctggggctttgctctttcagtgagctaggcaatcaagtctcaccagattgctgcctcagagcaagggtggtattgtggaacactgaaactgtatgtgctgtaatttaatttaggacacatttagatgcactaccattgctgttctactttttggtacaggtatattttgacgtcactgatattttttatacagtgatatacttactcatggccttgtctaacttttgtgaagaactattttattctaaacagactcattacaaatggttaccttgttatttaacccatttgtctctacttttccctgtacttttcccatttgtaatttgtaaaatgttctcttatgatcaccatgtattttgtaaataataaaatagtatctgtta

SEQ ID NO: 2348 - DNA, 313 bp, Homo Sapiens
  misc_feature (16)..(16): n is a, c, g, or t
ctcaagggacacacgntctactggtaccgccagccccaggatgagaaggctgagggcctcatcaatgtctccaactatagtctggaaagtggacatgatcagaagaagaaatatgtgtttcagctcacccatgatgtgtacaaacccttcatcttcgctgctgataccctgacagatctgagcatgtgggtgcgtcatctcattacctgcatctccaagtaccagtctccaggacgggcccccccaccccgagaggaagactgctacagtgagaccgaagcagaggacccggacgatgaggctgggtcccact

SEQ ID NO: 2349 - DNA, 1013 bp, Homo Sapiens
  misc_feature (765)..(765): n is a, c, g, or t
ccattaagtaacacagtgcttgttcaactttctcagtctccacactccgtccctgggggaccccaagcacaagctaccatgaccccaccccccaacctgactcctcctccaatgaatctgccgccgcctcttttgcaacggaacatggctgcatcaaatattggcatctctcacagccaaagactgcaaacccagattgccagcaagggccacatctccatgagaaccaagtcagcgtctctgtcaccagccgctgccacccatcagtcacaaatctatgggcgctcccagactgtagccatgcagggtcctgcacggactttaacgatgcaaagaggcatgaacatgagtgtgaacctgatgccagcgccagcctacaatgtcaactctgtgaacatgaacatgaacactctcaacgccatgaatgggtacagcatgtcccagccaatgatgaacagtggctaccacagcaatcatggctatatgaatcaaacgccccaataccctatgcagatgcagatgggcatgatgggcacccagccatatgcccagcagccaatgcagaccccaccccacggtaacatgatgtacacggcccccggacatcacggctacatgaacacaggcatgtccaaacagtctctcaatggctcctacatgagaaggtagacaacgtgggcagtccacaaaacctacggggcatcactattggattgatctgcacaaatacctttgcaagagtacgactttccacaacgcagcaantggtgtgaaatgcaaacacatttgttggccccatgtatttacaaccaccaaaaataggctgctctgccgcaaataagcccttataccagttgttttcgccttatagtccctttagcctattattggggaaccctcactttccgggtaaccttaatctaaagtccctgcaaagtaaggcccctcttaggccaaacactgcgatgaccccatgtttgtcccgcttcgtaaccacgcgtaattagccccca

SEQ ID NO: 2350 - DNA, 1594 bp, Homo Sapiens
aggctgtacggtccgagtcttagatgccggcgaggcggaggaggaggcgacagtttacctggtagtgagcggtatcccctccgtgttgcgctcggcccatttacggagctattttagccagttccgagaagagcgcggcggtggcttcctctgtttccactaccggcatcggcctgtagcgggcccctccgcaggccgctcctaactctgccctaattcctaccgacccagccgctgagggccagcttctctctcagacttcggccaccgatgtccggcctctctccactcgagactctactccaatccagacccgcacctgctgctgcgtcatctcggtaagggggttggctcaagctcagaggcttattcgcatgtactcgggccgccggtggctggattctcacgggacttggctaccgggtcgctgtctcatccgcagacttcggctacctacggaggcatcaggtctgggctcctttcccttcaagacccggaaggaactgcagagttggaaggcagagaatgaagccttcaccctggctgacctgaagcaactgccggagctgaacccaccagtgctgatgcccagagggaatgtggggactcccctgcgggtctttctggagttgatccgggcctgccgcctaccccctcggatcatcacccagctgcagctccagttccccaagacaggttcctcccggcgctacggcaatgtgccttttgagtatgaggactcagagactgtggagcaggaagagcttgtgtatacagcagagggtgaagaaataccccaaggaacctacctggcagatataccagccagcccctgtggagagcctgaggaagaagtggggaaggaacgaggaagaagagtctcactcagatgaggacgatgaccggggtgaggaatgggaacggcatgaagcgctgcatgaggacgtgaccgggcaggagcggaccactgagcagctctttgaggaggagattgagctcaagtgggagaagggtggctctggcctggtgttttatactgatgcccagttctggcaggaggaacgaaggagattttgatgaacagacagccgatgactgggatgtggacatgagtgtgtactatgacagagatggtggagaccaggattgcccgagactctgtccaaaatgcgtctggaacagagactccgagatggacacggaagatggctctgtgatcgaacgccaggtgggcacctttgagcgccaaaccaagggcattgggcggaagtgatggagcggcaggctgggcttgaggccatgcctgggctgcaggtgccccacggtgcctgaggccctggatagtgatggcaacaacccagattgcagcggtggcttggggtcccctggagagaagctaacgccattgggcgacttgaagaggcccgtaaaatggttggcggtccactccaccattttataggcctttacccaggacaaaggggtactggccgccgcagcacccccgatagaattctgcagacttgcctgtgagagtccaggtgcgtcaaagcccatgcgcatagccagtggggcacactcaaacatatgaaag

SEQ ID NO: 2351 - DNA, 1167 bp, Homo Sapiens
  misc_feature (817)..(818): n is a, c, g, or t
gaattaggtgctgctgggagctcctgcctcccacaggattccagctgcagggagcctcagggactctgggccgcacggagttgggggcattccccagagagcgtcgccatggtctgcagggagcagttatcaaagaatcaggtcaagtgggtgtttgccggcattacctgtgtgtctgtggtggtcattgccgcaatagtccttgccatcaccctgcggcggccaggctgtgagctggaggcctgcagccctgatgccgacatgctggactacctgctgagcctgggccagatcagccggcgagatgccttggaggtcacctggtaccacgcagccaacagcaagaaagccatgacagctgccctgaacagcaacatcacagtcctggaggctgacgtcaatgtagaagggctcggcacagccaatgagacaggagttcccatcatggcacacccccccactatctacagtgacaacacactggagcagtggctggacgctgtgctgggctcttcccaaaagggcatcaaactggacttcaagaacatcaaggcagtgggcccctccctggacctcctgcggcagctgacagaggaaggcaaagtccggcggcccatatggatcaacgctgacatcttaaagggccccaaaatgctcatctcaactgaggtcaatgccacacagttcctggccctggtccaggagaaggtatcccaaggctaccctatctccaggctggaccaccttctacatgttccacgttccccaaaccaggacgtacaacccaagccatgggtggagaagatgcacacttttnnggggaaaggaattccccaaaagggtccaccttcccctgtacggtccttccaatggttgcgggcctgcccgggcccccactttcacctgggctgctgaagcccattctggagaaggtacagccctggacgcctgttggcagggcttcccttcggaaccccattggtccggtgggaaaaaacttggctcttaagttccgggggaataaaacttgcttggtccaccaaagttctaccctatgaaacttccttttgaaggccctcttcctgggtcacaaggtttcaaagcaaacctggggcccctgtaaaatggcccacacgggaaaaaccccattgttactctaacccgggg

SEQ ID NO: 2352 - DNA, 1103 bp, Homo Sapiens
  misc_feature (96)..(96): n is a, c, g, or t
ggaaaggtttaagttcccccggtgttaaaaagctagccttggggttggccttctgggacatagatgggccagcctgcttccaaagaaagtggttgntcggcttcagggtttggaagggttcttccatctcatgtagggcagacttcaatccagtgtctgatgctcttccggtctccataattccaagactctctctgcttgaatactttcagtgatgggggacctcatcactcccaagatagttcatcccatcaaacagcttatgatttcctggttccaagactctttagcttgtttctcctgcgatgtgttttttaaataccctttgttgccctgggatttcagctcctctagccccatcctgaccacagctcctgtgcgtccagccatcacaaaggagagcgacaccttcttgacttaagactgtaggtcaagtcattagcaaagttgaagaaacctcaccaggctgccccttggatggcctggggctggggccatggctgagccaagagaggcaaagagatacacgatgcaattgggaaacaggccgctgtgcaggagctcgtcctaagccactgtgggttcaactttacctgccagcgtggcccctccatgcttgcctctggggtcctgggagctcaggacacaggagattagtccagatgtggcggacctagagccccaggctggtcagatgcaaggtcacgcccagactccactttctgactcctgtgcagtgctcctccacagctgaccgggtttttctcctgatggaaaggactcgaagctcttctcctttgcagccgtcccttttcagccttcccagagccacagcacctccgcctcccgcagcactgtcccttctgccctgcagaggggataggcggagctggtgctcacggccacaaagtgaccaggtgccagtcctgtcacatcctttctcaattaattgcttgaacccctccctgcctcattacgtaaaggctcagtgtctccctcttgaggctcccctacccttggattgctcatggtccgcggcaggaagctggaccatgtccacacaacgtgaggatggaagctggggtcctgatcccgaaaattcc

SEQ ID NO: 2353 - DNA, 1899 bp, Homo Sapiens
  misc_feature (649)..(649): n is a, c, g, or t
  misc_feature (681)..(681): n is a, c, g, or t
  misc_feature (803)..(803): n is a, c, g, or t
  misc_feature (862)..(924): n is a, c, g, or t
  misc_feature (1247)..(1277): n is a, c, g, or t
aattcccgggatgcgggggagccccgaccagtggggacactcctccctccccagtgagcagaaggcaccgtggtggtggctctgccccttgctgcagtgagcccaccttgctgcaacattggttctgaggggcccaagagatggcgtcttggtcatttgcccgcatggttgggcagttggttgaggccatgaacagaacttacggtaacaggcacggctggcccaatgcctagtctggagctggagcttgcctttggctttccaggtggctccgtgcagctacagccaggccggctgcctcatctcagctctagggggcacgagccatatggggtctgcacaagagaccctctcccctgcagtaaagccaggggccctggcctgatggggcccccatggggagctggagcctgccctgcagcctggagaagagggtggctgtggtgggcgtgctcatcccctgctaaggagcaggagctgctgggccaggtctgcggcagtgctggggtggcaccaggtgggcagtggtaggtggggtggcttgaggtctgggagggtggccctggccagccaggacacatgcagacccctggctttagtctggatacaggctccctctttcctcccaatcctaagctcctgacaagtnggccaggtggctctgggccctcctgccccgtngcctaggtcaggggtcctggaataccccgtagctctggcaccaccacacgggcctctgatggcaagacttggcccctccacctgtccctaacggacggcaggtcaggaaagccaggactcanggggagaagcaaacccccaggattgaaggctagggttctagggcctttgggtggggagnnnnnnnnnnnnnnnnnnnnnnnnnnnnnnnnnnnnnnnnnnnnnnnnnnnnnnnnnnnnnnntctactccgccccgcatagaccctcgcacccgccccggcacaacatacgcgcccaccccaccacgcaccaaccaacctccgccatacacccgcccgcaagtcccgacacccaccgaacgagccaaaaataaatcgacgaaacaaaccacgccagcagacggagagaagggccagccttaaggcaagtgacccggaggctagtcaaagatgtccgcgcggaccccacgcgcggccccacccattttcccgctgtgcggcggccccgcccccaccacccgcaagcatcgcgaagcaagccaaatagcccacgacgccacacaacnnnnnnnnnnnnnnnnnnnnnnnnnnnnnnntccagaacgacacgacacacgacaggggtaagatccaggctcgccacatcatataaaaaacacgccaacgcacaccggccatgagcctcaccgacccaacgcacaacacacacacacgcacataacccactacaacgaaaacacagagctgacgaccactaggcccccgccccaacaactatactcctgtgcacccccccgcctttactcctccactctcaccgctacaacccaaccaaacaccaccgcctgcccaccacacacccacagcagcaactactacctaccacaacctccgccatcatcccaccgccgcgataaggtgatcaggcccgcacccaatacacaatgtccgcataccgataaacgacgcgacaaaagacgtttcctgtgagtaggctgacggccgccaccgcctctcccgcgaacccatcaacgccctctactccgcacgccccgcggttatctaggagatacgcggcacagcctcgcgctgcattccgtagacgcccgcgcagagtgcgaatatgcacggagagtgaggcgcagagacgccccacgccacgctcatccgaatccacagccgccacgactcggacgtctccgctaccgtcccaccccc

SEQ ID NO: 2354 - DNA, 1117 bp, Homo Sapiens
  misc_feature (123)..(212): n is a, c, g, or t
tggggggtgccaggaggggtacccatagacgggcgtgtggggggttgacacgccgcagtgtgggcccacagggcacatgcgtggtgtgcaacttcgcttatccacaccgtgtggccgccaccnnnnnnnnnnnnnnnnnnnnnnnnnnnnnnnnnnnnnnnnnnnnnnnnnnnnnnnnnnnnnnnnnnnnnnnnnnnnnnnnnnnnnnnnnncaaacgttgtccaggtccattattgtgtcccggggcgtgtggcgggccgtcgtccattagggccacgggattccgggggcacctgtgggtgcgcgttccggcggtgagagggcaggcgaaccagtgggtgggttagcggaagggcagggagggagagtgccctgaactctcttttctcaccagggtccccacctgggtctcccaggatctttgcagggtctcttccatgaggggcccctggtgcggactcccggaaatcaattaggtggctctcatttcgtcggatgtcatgtaccagcatcacgcccccaccgcccaggccagaactgtgtggagccacgatacccaaacacaaggctgctgccaccgctgcgtccacagaagatccctgtttactgagcacctcgatgcccagtgaagtgcagcgggcagcatcggtcaccacggcaccctgctggaagatctgggggtccccgaagtagatctgcatgaccagcgccacggtgacaccggtagcgaaggtgagacaggccgtgacgatgaccgtgagcccatcctggcggcaggagcactcggccgctgcggcggagaacgggtctttgcgcgtctcgcgtagcggcgacccgtcttggctgcccatctccgacgacgacgatggcagccgctgcagccgtgcagacttcaggaaggagtccgggtcggtgtcggggtctcccagaaaggcgtcctcgtccttgcggcccctcagcggggccgcgggcgccggctcgtcctcgggcagccgcgggaagctggtgatgctcatgtagtccactggcgagtaggcgcccagggcgctctcctggctggcctcgttctccgccgccatcctcgccatcccgaaaattccggaccggtaccagcct

SEQ ID NO: 2355 - DNA, 987 bp, Homo Sapiens
  misc_feature (676)..(676): n is a, c, g, or t
tggaccggtccggaattcccgggatgcggggacccgctcgctcgctcgccagccgtccccgcgccccgcgtccccgcgcagccgcctcctggcctcgggcgccgcgcatccaggaaggaagcagccaccctcgccatggcctccccgcccgcctgcccctcggaggaggacgagagcctgaagggctgtgagctgtacgtgcagctgcacgggatccagcaggtcctcaaagactgtatcgtccacctctgcatctccaagcccgaacgccccatgaagttcctccgggagcacttcgagaagctggagaaggaagaaaacaggcagattttggcgcggcaaaagtcaaactcacagtcggactcccatgatgaggaggtgtcgcccacccccccgaaccctgtggtgaaggcccgccgccggcgaggaggcgtgagtgccgaggtgtacaccgaggaggacgccgtgtcctacgtcaggaaggtgattcccaaggactacaaaaccatgactgcgctggccaaggccatctccaagaacgtgctcttcgctcacctggatgacaacgagaggagtgacatattcgatgccatgttccctgtcactcacatcgctggggagactgttatacagcaagggaatgaaggagacaacttctatgtcgttgatcaagggngaagtggatgtgtacgtgaacggagagtgggtgaccaacatcagcgagggaggcagctttcggggagctggcgctcatctacggcacccccagggctgcgacccgtgaaagccaagacggacctcaggctctggggggaatcgaccgggacagctaccgggcgcatccttatgggcagcacccctgagaaacgcaagatgtacccaggaggccctccgcaaaggtctccatcctaaagacccttggaaaaatggggaaccgtctggaccggggcgggatgcccctggaaccccctccagtttgaaaaaggg

SEQ ID NO: 2356 - DNA, 1646 bp, Homo Sapiens
  misc_feature (1268)..(1467): n is a, c, g, or t
  misc_feature (1573)..(1573): n is a, c, g, or t
ggaattcccgggatgaacggggacctgtctgaagagagatgcccctgctgacactctacctgctcctcttctggctctcaggctactccattgccactcaaatcaccggtccaacaacagtgaatggcttggagcggggctccttgaccgtgcagtgtgtttacagatcaggctgggagacctacttgaagtggtggtgtcgaggagctatttggcgtgactgcaagatccttgttaaaaccagtgggtcagagcaggaggtgaagagggaccgggtgtccatcaaggacaatcagaaaaaccgcacgttcactgtgaccatggaggatctcatgaaaactgatgctgacacttactggtgtggaattgagaaaactggaaatgaccttggggtcacagttcaagtgaccattgacccagcaccagtcacccaagaagaaactagcagctccccaactctgaccggccaccacttggacaacaggcacaagctcctgaagctcagtgtcctcctgcccctcatcttcaccatattgctgctgcttttggtggccgcctcactcttggcttggaggatgatgaagtaccagcagaaagcagccgggatgtccccagagcaggtactgcagcccctggagggcgacctctgctatgcagacctgaccctgcagctggccggaacctccccgcaaaaggctaccacgaagctttcctctgcccaggttgaccaggtggaagtggaatatgtcaccatggcttcccttgccgaaggaggacatttcctatgcatctctgacctcggggtgctgaggatcaggaaacgacctactgcaacatgggccacctcagtagccacctccccggcaggggccctgaagagccccacggaatacagcaccatcagcaagcccttagcctgcactccaggctccttcttggaacccaggctgtgagcacactcctgcctcatcgaccgtctgccccctgctcccctcatcaggaccaacccggggactggtgcctctgcccgaatcagccagcattgcccctagctctgggttgggcttggggccaagtctcagggggcttctaggagttggggttttctaaacgtcccctcctctcctacatagttgaggagggggctagggatatgctctggggctttcatgggaatgatgaagatgataatgagaaaaatgttatcattattatcatgaagtaccattatcgtaatacaatgaacctttatttattgcctaccacannnnnnnnnnnnnnnnnnnnnnnnnnnnnnnnnnnnnnnnnnnnnnnnnnnnnnnnnnnnnnnnnnnnnnnnnnnnnnnnnnnnnnnnnnnnnnnnnnnnnnnnnnnnnnnnnnnnnnnnnnnnnnnnnnnnnnnnnnnnnnnnnnnnnnnnnnnnnnnnnnnnnnnnnnnnnnnnnnnnnnnnnnnnnnnnnnnnnnnncaaagaggttagagacaaaattgaatgaatggaaaatggaacctgggttgttgaccatgaaccacgggggccaattgaatgcccgcaagcccttccggatgcccanaaaagggggaaaagggaaatgggatttcccccttggcctgggaagaccctcccaaaaagaaaacccaagccct

SEQ ID NO: 2357 - DNA, 522 bp, Homo Sapiens
tatccccccttggaatcgctgcgggtaatagacatgtactatatagccatttccaatgcaacattagagtacagaacaggtattctgtggctagtgagataatactgctgctgtagggtgcatacacgttaggatcggacgaggatcttactcaggattgcatcatagtacggacagaacaccatcttgttatagttgaccaggcgagcaaatttaatagcaacggcctccagctctctctgaactggactgagtcccccaggggactggtgggcaatggcttctgatgacccgaggcaaggtaggtttctaagaaggtcaggattcgagattccatgatcctgcgaatggggtcatcgggactggtccacggcctggatctggcccttgagcacggtctccttgtccgtggtgaagggagaggaccctacacagggagaggcagctgctcacctccaggcacaccttctccccgatggtagtgaggacgtccttcagatggaaggagggcaggtgcatatc

SEQ ID NO: 2358 - DNA, 460 bp, Homo Sapiens
tcaaacaaatacaaaatatttattacacaaaaatgtcataactgacaaactgccaatttgttaaacatagaaaaagtactaacatttcgttaactctaaacaaaaaccactttacctttttgttactcaagctaacttaactccaagttataaaagttacaaaattttggtttaaaaaatgtcattgtatgattgttccaatttactttgctatgctataacaaaaacaaaatctctttgaaatgttttcagtatttaaattgaataatgtttctaacattaacttatttaaataacttttacatcaataataggccaacacatatattaaataccttcttggtagaagcaggaatactaatgacaaagcctcatgaaacttaatacctctcaattcacaatatagcacaataatcaatctgactaagctattgatatttaaagaatgtggttagtcact

SEQ ID NO: 2359 - DNA, 467 bp, Homo Sapiens
cttgtaaatggctcaccgagtggtcagtagtcacttcaactcttagttcacttttgtatagttgctctgctggaaagaaatgagagtgaatctgcttactcactagaacttccctgtgtgctgtgagccagcggaaccacttgtacaatgccagatttgtttatctttgtacagaagctttgatgaagtgtcttgtatttaacacccttatttaagcttatttaaccttaaattgttaattttataaaatttggtttggcctgcactacgatgagggatggaggtagctgcaggctcagaagagactgagcttgcacagatcagaccgagaagcagggtgagagattctaacgactggatgctgctagtaacacattgtttgtattgctttaccatttttaactgttagatttgagatgaacatacattttgcttttttaataaatgtttaaaagaagtccacataa

SEQ ID NO: 2360 - DNA, 462 bp, Homo Sapiens
acggtaagaaatcaataaaattgttttattaaatgtacacataaaaaggcatataagtttttgaccttcagttgttttggaattaaattacatttcggcacccaaatatcttttaactgacagttttcacactttgcaaaacacacagggcactggaaactctaatgaaccagcatttacataatggtatctgccatatgaccactttggtaagcagcttgttgagattatgtactaagtgctttatgtgatgccaaaaaactttaaaaagcaaataataaatcatgaggctctacaaaatagcttagaaaaacaagttttctatttatttaaaaataagtttgtagttactacattgcagggacaggtattcttacacatacattctagtttgtataaaaggattcaaagaattatgcatcaaaactaacatagaaagtgtccacgttacagtaaagaaag

SEQ ID NO: 2361 - DNA, 503 bp, Homo Sapiens
ccccagggccacaggagaggcaaagggctatctgggggagagggttcgaagctgtggcggactccactaatgtaaccctccaatgtcaagccatgggcgtgatcagtagctaagtgatgacaaggctgttgggggtggacggaaaagacttggggcaaagcagactgtttatagcctgagctggtagggcctggtgcagcagcctacccggaactggcactactctttcccaggttccctgactctctatcctggtctctgagagcgtgccctacttccgtttcccccactccaaacacacctgaggcatcttccagtgctaggccccatgctggccagcaggggtcgggcattgggcccaggagcctctgcagcggtgtgagtcagtggcttccctggggtatccgtgtggctcccgggccctctggatgccaaatcactcctttcactgtttgcgcctctcttctcacacatgcactgccccagacatcagcgcgggaact

SEQ ID NO: 2362 - DNA, 506 bp, Homo Sapiens
  misc_feature (82)..(83): n is a, c, g, or t
ttagagctcacagccttgggaagtgagactagaagaggggagcagaaagggaccttgagtagacaaaggccacacacatcanncagttactgttttaattgtctggcttctctctggactgggagctcagtgaggattctgaccagtgacttacacaaaaggcgctctatacatattataatatattcgcttactaaatgaataaggactttccaactgcgtttctgagttttacagatgggaaaactaaggccaaaggataggagtggggttcacacagctaagtctgaagggaaactggaagcagcaaccacctctgcacctcacctggtctaagaggggttcaggacttgggccaccaaactctagggcctgtccctcaggtgcaattgcagctgctcctaggctatgcaacctctgccagagagcagctgtgagggtgtgagcaaagacaggaacagcagaggccagtggagggagtggggaacagggccaagggagctctt

SEQ ID NO: 2363 - DNA, 497 bp, Homo Sapiens
ttttattcaaagttggaacagaattgctaacatttccactaaaataattactatacttcagttacaggacaaaataccacagaaaggaatgtactttgcaagaaatgtagttcatcttaagtttccaaatacttttgaaggctaatgcagcagctggcaaaagaacacacagtacacaaagaacagtgtattttacagagtcagtaatgaaaactgacagctctttagcagatatgcttttttcattttttaaacaataacactttcaaaaacacatgaaaccaagatcatacatgtttacaattttaaaaaatcagattgtacacaataggttagaatagacaagttagaattgtcatgattttaacaatcttaaatctacaatttcaactgtactcctttcaatatagaaataacctgctttataccaaattctactttctgcttgcaactaaaacactgtacaatgagatggatacaattagtaaaaccttaaa

SEQ ID NO: 2364 - DNA, 924 bp, Homo Sapiens
ctgctccgcccctctctggtgcagtgaagggcgttcggcctccccggctctctgcaggtgcccaccagagtttaagccaaacaacccaggttccgcagctgccaagggctcctttgccaacctgggaatgctcggatccttgtagtaaaagcccttgctgggagctctgcttcctcctacagcccctcggaagccgccctcaagaacttcaccccttcagagacaccgaccatggacatcgcaaccaaggggcccttccccaccagcagggaccctcttccttctgtccctccgactacaaccaacagcagccgagggacgaacagcaccttagccaagatcacaacctcagcgaagaccacgatgaagcccccaacagccacgcccacgactgcccggacgaggccgaccacagacgtgagtgcaggtgaaaatggaggtttcctcctcctgcggctgagtgtggcttccccggaagacctcactgaccccagagtggcagaaaggctgatgcagcagctccaccgggaactccacgcccacgcgcctcacttccaggtctccttactgcgtgtcaggagaggctaacggacatcagctgcagccaggcatgtcccgtatgccaaaagagggtgctgcccctagcctgggcccccaccgacagactgcagctgcgttactgtgctgagaggtacccagaaggttcccatgaagggcagcatgtccaagcccctgaccccagatgtggcaacaggaccctcgctcacatccaccggagtgtatgtgtggggaggggcttcacctgttcccagaggtgtccttggactcaccttggcacatgttctgtgtttcagtaaagagagacctgatcacccatctgtgtgcttccatcctgcattaaaattcactcagtgtggcccaaaa

SEQ ID NO: 2365 - DNA, 677 bp, Homo Sapiens
atcagaggatccctgaagaggtggatgtctcccctatgactgaatgacactccaggagcctcagtttcgcccttatgtgcttatattcactgtattcttcagccataggagtgcggtcttccttctggacatttcttccattctgtctgaaaaagttgtcttcaaaatcccgaagtttctttcgaatccttttcttttcttctctcatttcctggaggtgtcccaggagttcaggtattgaggcagcatggagatttgaaagccctgtgtcctagctgcattttgatggtattttatcatccattggggaaataaatccatcagcgtcatcttcgaattgatccagaaagcatcgtgcactgaaatcggttttcagagtgaccatgaagtctggcttcacattgctatcgtcttctgacccctcctcttcttcctttatctccttgaagaaggaagcagtttcgccctcgataattggctgcagcaaagggcttctccgcttgctggagggggaaccaatgatgggtatggtgttagctcgggagaggatctgtttgaccagccggtacctgtcgtatagtggcttcatcacctgccgttcgttctttgttaccggccgtccatgaatgctttcataatataacagagctttctgcagagccactttctcattagca

SEQ ID NO: 2366 - DNA, 1019 bp, Homo Sapiens
  misc_feature (315)..(325): n is a, c, g, or t
  misc_feature (859)..(859): n is a, c, g, or t
ggtaccggtccggaattcctcgggatcaactttctgggcaaggcagaggtgggtttggctttttaaaaattttttcagcctgtcctcatggaactacatattcttttctaagaacttttcatcctaacctccctactcacatcttctaagtgtctctgctctggtgggaatgtgatggacaacacagagccatctcagaagcctctgtggccaccaccaggccggccagggtgcagggggccactccctgggcagccatagggttctcagcaaggtgcattcgtcgtccctgctgagaatctgatggggcagcannnnnnnnnnnaattaaatgcaagctgagtcatttcaacctgcaaccttcaggtaacaggagttacccaagctccaggaattatgattgtggggtaaacccattctcttgttttcttgcggttctattttataacgcactagaggagacagagacgtcattgcttcacccagggcaagaggacaaaggaggatgcatggaaatacaaacagcccttctcctccaggccataccgactgtccaactagcaacagacttcacctggttttggagcaatctgaatttggaatatgccagagaaaacttctatcaggcaagatggaagactcctaggataggtctctctcatggagggattggcacgatggtaagagtccagtggatggaaaaggcctcctccttaaagatggtgatggaaacgagcactgcacagggaaacacaaatcaggtcccctgaaatccagcccaacctggccagaccctccagtgcccatcagggctttatgaacagggtgccttcagggtctttgtttaggggtggttaanaaagggagcacgtgcttataggggatgctgcttgaactccatgaattttgacttcctggccaaacctggtgatgctaccaaaacccttttaaaaacagttaccatgggaaactttttccctaacaagcattttttcaaaaaacgttacaggggcttgggg

SEQ ID NO: 2367 - DNA, 158 bp, Homo Sapiens
gggagagtggccgggctgtgtcgggtactggctctctccggctgcacaaggtcaggtgcaggcactatatgttttgaaacttcacatatgtttgttgggcaccaataacctttatgttcctctgacttaaactaaaatgagaacattttcttgagcat

SEQ ID NO: 2368 - DNA, 785 bp, Homo Sapiens
  misc_feature (679)..(679): n is a, c, g, or t
  misc_feature (716)..(716): n is a, c, g, or t
  misc_feature (733)..(733): n is a, c, g, or t
  misc_feature (742)..(742): n is a, c, g, or t
  misc_feature (760)..(760): n is a, c, g, or t
agcgccggtgcgctccctccctcgctgattgacagttccctgtccctttccagaagtaaggctccttaaaacgaaaggcgctccggggccgcgcgtattccgcgtcccagccaacccgcctccggcccgtcagcgtttctcttttgcttaggtgcggcttggcgcgccccgagcgctcaacgcggtcctgggcgctgcgggcttctcgcggacacttggaccgcccgtaggggctccgagctcccgacctcccgttgtgccgggagcaacttgaaagtccgtcgtgcactgtccgtgttccctcgagacaacctccaaagtgccagggaagctaaggaagcgtttctgacgctctggcgcctggacttcctctcaccctcgcccccacatcaccccgtcgccaccgggagctgcacgagtgcgacacgcaagggagcgcaggtgtcctcgcggtcccgcatcacatccgcaagccgatttccccagctcgggggctgttatctggcccggattccgcaggatggcgggtccaccccagcgcccccactccccgccctccttcgggtcgccaggccctcgggtgattcagaaattcatcaaatccaaatggcagatcccagtgagacagaacaagctctaccagggaggaacgggaccgcacaggacatccaacatctangctgggtgagacttgctttcatgttcacactgagagngacttttttttccctgnctttggtcntgaataaggaggaggggngacttttctaagctgctctggctta

SEQ ID NO: 2369 - DNA, 678 bp, Homo Sapiens
cagtctttagggtacagtagaaccacatgtcatacttaataaaatacagatgttgggcctctccccaaacacctctaaattagagtcttcagtggtagagttcaagcagtgtaaacttttttttcccctcaccaaagttccttaggcaatcctgatgcttatcagaggttgaaaacgactagggtgagattttaggaaagtaaattcaactatagaaaacctcagaatttgtagatttgggtcagtttaaatatttattgtgtgtaaatgttctcttcccaagcaaggttatgttgtaatctcgacatacttagaacaactgccattatatatgtgtttgtatttattcagaatgaaaaaaactaattgactgattgctttcctttatgagccctggggaaaccacttaattttctgcttaacctgtttgagtttccacattcgtgaaattgagttaaatgatgtctcactcattacctcaaaagttgttgtcaggctcaaatgagccaataggctgaatttggaggaccttgattataggctaatattaagttttattaccctgctgcttgtttcttcaaaactatctttgtgtttcctttaaactctccattgccatcagttcttggtttttgatgcttatatatgatattaaatagacttttctcttgctggctt

SEQ ID NO: 2370 - DNA, 536 bp, Homo Sapiens
ggagccctgccgggacaggaagaggctggggaccgcggcgaaggtggtgagtgctcttgggcgccttctcccaacgtccctgccagactcgcctccgggctgattctccagttggtttcctggactccagagtagctgtccggcctggccccggaggtgcaaagtaagaaaattgaagtcaaagaccatgggagatacagcaaaaccttatttcgtgaagcgcactaaagaccgggggactatggatgatgatgacttcagaaggggtcacccccaacaagattatttaataatagatgaccatgctaaaggccatggcagtaaaatggaaaagggccttcaaaaaaagaagataacaccagggaactatgggaatacccccagaaaaggaccatgtgctgtttccagcaatccatatgcatttaaaaacccaatctacagtcaacccgcttggatgaatgacagccacaaagatcagagtaagagatggctgtctgatgaacatactggtaattcagacaactggagagaattca

SEQ ID NO: 2371 - DNA, 428 bp, Homo Sapiens
ctgattcacatgcactggagttaattagtcttagaaatgtgtgcatccatacaaatgcacaacataaagtgaacatattcctaggccctttctgcctgtgtcagggccaggaagtagaggctgggaactcttctggtccccagtatggcaggcgccagggaggggatggtgtggcccatcccttctctggatacctggccagtggcaggcagcagggaggagctggccgaccctcagtgactgacaagccagcaattctgagttctggcctttgggagtctgcctgctccaagccagtccaccccagctgcagccccaaaagctggctcaaagtccttgggtggattcactggagatgggcaacttaaaacaagagaaactttaatttttaaacctaagtgatgatacagctcttcccttagattatc

SEQ ID NO: 2372 - DNA, 284 bp, Homo Sapiens
tcatgtagcttggaagccgaggacagtcaaggctgacattccattgacagtgttcatgttctgtgccatgcacttggagcttctgctgctccgtcatcaatcatcatttaatttcctgtttataatttagctctctgagcctacaattcttcctagtttcatggaacagttagaagatgagaaaaggatttccttttttattctattgatctggtttatctgacattgatacagttcccaggaacaattttaataaattaatgtagagccatgaatttgaccat

SEQ ID NO: 2373 - DNA, 567 bp, Homo Sapiens
cgttagcccagtcaagcccagccaagcccagccaagccccgccgatcgcgggcaccggagccagccccgcagcgggagcctaacccagaggaagtggagactcctttactgcacatctgtctgctccaggccaggcactgttctaggagccaggatacagaggtggagacagaaacaaacaaaccgataactgtatacaatactctaacgtcagagggaccacagagcaccagcctgcatggaacttccttcctcactcagcttcccacgttgccagctgggacaggggagatggagtaattttgctgtggaaagacttcacgtcttgccgaatgaaagtcccgcctgtctgtcacgctgatgcccgtgcagctgtctgagcacccggaatggaatgagtctatgcactccctccggatcagtgtggggggccttcctgtgctggcgtccatgaccaaggccgcggacccccgcttccgcccccgctggaaggtgatcctgacgttctttgtgggtgccgccatcctctggctgctctgctcccaccccgtgtgccccctgtagagc

SEQ ID NO: 2374 - DNA, 1215 bp, Homo Sapiens
cggtccggaattcccgggatgcactggttggaatcagcaggcctctgtgctccctctgccctccagaactcagtgactcttgaacatggatgttatatattcttataacctgtttccattctccattcaaataaagagcagactgcgatatagtccatttaccccatgtgtgcacattcaggagcgacagtctctgcccccattcccttgagaggggctggatgtaatcacctttggttggactagaaagagctcaaaccattttacattcctgtttgaatttttccaaagcaaaactcactttgaccccattaagaggcaagcctggcacatctatccctgggcctttagaaagccatttgcctcaaatggctatagggttgtggggtggagggaggaagggctgggagggagtggggaggaattgctagctgtagtgtgacacattgtagtgtttgccaggaaaggagccagtcatgccggaaacactgacttctgggaagccacccaggtctcattcctccctgctgttggaggcaacatctcctctttttacagagggtacatccttttttcttacaaattcttcaataaagacacattcttgagtgggccgagagtgacatcatgcacctgcgtccacgcaaccccaaagcgtgacagattggtcaacgaggggcggccggtctaaagaatccctccagagggccgaacttacgcgcacccatgttttttgtaaaaaggggccccctaaaggggaccggaagtataagctccgcactgggcgcgccccgttttacaaacggcggtgaatgggaaaaaactgcctacctttggagatcttttgggaaagaaacccttactttcaggtgggagggaccaaatttgggccaagtttcccctcacgaaaaactttgaagcctccaaagggtcatatatcaaacttttttaaggggggaacaggagggttaaataaaacctccaatatcccttagagggccggaacatatttgggcttacctgaggaagaggatcttttcaaagaaatattataccccggggggagctcccgacactcgtaacctgggtgggggaatctggaaagaatttaccaggggcccaagggtcccctgtaaggaccccacacatcctccaaaaagaggggggccatggggagataaaagagggggaacgacgctctctctgtacctttta

SEQ ID NO: 2375 - DNA, 809 bp, Homo Sapiens
gcaggtcgactctagcagccgcgaatttattgctatcttccaccttctttaaaactcacatatgcagacctgacactcaagagtggctagctacacagagtccatctaatttttgcaacttcctgtggccagtgtgtataaccccttccactatctcacagatagtcacagcgtccattccatagtctgtctcctcacatcgtgttagtattgacacagcacagacaccacaagccatcaggttcttcatggggcaggtgaaatacttctaccccatgggtaaatgtattcacatattaccaagagaagaagcacattatctatgatcttttggcccagttcttatttagcatttttattccagcctacttggaaacatgtttttatttgcaatatatgcctgactgaattaagcttgcttgttttaaacaaccaaatcattggaacagaaaaggatttaaaaaaacaagaatgcatgatctcagagtgattcaaacaccacaacatcaggggaacataaatgatcatagaaggtgcttttcaaaacaactgctattataattctcaaagtcctactctgccaaaagaagattaaaagtcatacattacattacaaggaaatgtacatgtgggaagagggttgctgaaaatcaacaacgcttgaagttaaaaagtgtgtctaagtagataacatagtataatgtgtatctcttaggagatggctgacttgattgatctacgctaagtggagacatttcacatttttaaaaccaaatgttcaatctgtattactccttgccaaccatcgt

SEQ ID NO: 2376 - DNA, 181 bp, Homo Sapiens
aatttgtaaacacaactctaataaatgtgagttttaaaggattgttatttactactttggattgtaattagaacaatgcacatctgtcttccaagattttgtaaatatttttgatttttttcattaaatgtaaattttacataaaagttgtgctcttaataaacatgtaatatataattta

SEQ ID NO: 2377 - DNA, 1007 bp, Homo Sapiens
  misc_feature (82)..(82): n is a, c, g, or t
ttgtcgctgatgatggtccggccttcgaggccgggcagtccgcggtcaaggtgcctgtacagggttctttctcgaggcctgnactactgggagggagcccatgcatgtcggtgacggatgggcccttgctgaccgtgagcagggtcgtggtgccagagctgccttggggtcgccaatgagccctgccactgttctctgtgggctggcggacagtcggtgccccaggctgcatctgttgccctcacgggcggagctgttccctgtgtggcatcctgctcctggctgctgtgtcgggcttattattgtgaccatcctgctgctccagagtgcctttccaggtttcctttagcttccctgcttcctgggaatcaggagcctggacactgccatctctagagcagagtggaggcctggactccctttgctcactccattcgggtccacagctgaggttgcctctgacaagatgaatgggcactgcctgcccttctagtgaaaaggcttggctatggccctgtgtgactccaggtcccaggaaccttgccttcgtcatctgtggatccatccagaacagcggtatctgaagcccaggccatactccctgcctcctttcttctgcctaccagaggctccagagttgagcttgtccttatctagaaacatgtgaagatgcccaagagcctggaggcactgctgtccttcctgcagaaacagtttctcctcctcccctcagccttgtggccagttcctcttcacatgaagcccctggcatttgctggggaagggactggcctggtacttgctgttagggcaggaaggggcaaaaggaagacttgggtagtaatctgggggttcagatgggtagcactaagccagctggcctaaagatgcaataagttcctaggtagtctacccttaccttgaggaatgggaaaatgaacctcagcccattaggcaggaaaagttgatatttaataaacaaggaaagagtgactgagaccatcgtt

SEQ ID NO: 2378 - DNA, 1182 bp, Homo Sapiens
  misc_feature (477)..(531): n is a, c, g, or t
  misc_feature (911)..(911): n is a, c, g, or t
caggccataagagcctcatctgtgcttccgggctccttgcaagaataggcttgggaaatgatctcatccaaccttgaagaagaaatgggatattttcacttcaaaatgccactcagaaagattgatgggaatattttaaggatggaggtttgcttctgaataacccttcggcattagctatgcatgagtgtaaatgtctttggccagatgtgccgttagagtgcatagtatccctgggcactggatgttatgagagtgatgtgagaaacacggtaacatacacaagcttgaaaactaaactttctaatgttatcaacagtgctacagatacagaagaagtccatataatgcttgatggcctgttacctcctgacacctattttagattcaatcctgtaatgtgtgaaaacatacctctagatgaaagtcgaaatgaaaagctggatcagctgcagttggaagggttgaaatacatannnnnnnnnnnnnnnnnnnnnnnnnnnnnnnnnnnnnnnnnnnnnnnnnnnnnnncaactctgcagaaaattaatgattggataaaattaaaaactgatatgtatgaaggacttccattcttttcaaaattgtgatgagtatatgcttatgttcccataaatgaaggtctgtttagaagatcaaccacattcaataaggaattgtggggttcgacatgagttaactttgaaatacgtatgaattctggagaatcctgaaaaagacggtgcttcaaccagcttgcatagcacagagaatattcttggttacagaattcatatgggaactaggcttttaagatgttaataattagctaagctttagtaacccttactgtgctagtagattttagtaggatattggtgttatattgttttgatggtttgaaaatatanttaatatatgtgccgaacaagaaaccgaaagctatattgtactgtgtatttttactttagtcctcataatcatgttgaatttatgtgatcattgattttatttcatatggaaaagctaatttcttcttaaatttacattacctaatattctcactagctatgttctccaatccacactgccttttattgtaatatcatctaaatagatgcagaaaaatggaattttctctattaaagtattttacatttgacataaaaaagaaccagatac

SEQ ID NO: 2379 - DNA, 436 bp, Homo Sapiens
tttcaccatgatggtgggagtataatttgaaagggaatttcagacaactggatactacatatcaaaagctttagaatttatattaatttatcctgagaaaagaaatgtacccccagaaacatagttattaggatgattaaagccctgttgtttacaataagaaacatttagaaattatctaagtgtctggtaataaggaatagttaaacaaattagagtacaaccacatattggaattgaatgtagtgtacatataaaagctagcttttcataatatttaaggaactagatgagattaaaatgtaggactagtgatcaaagaatattttgaaacttatctcccaggggatctttattaaggggtcatgggtgtgctaggaatgttgatgctgcttaagtcaactctaaatagtaagttcagtggcagcagagcggg

SEQ ID NO: 2380 - DNA, 416 bp, Homo Sapiens
ttattaaagaatttggaaacttaccaaaattttgagaagttaagcgtctaaagggggaacatcaggttgttgttaccatttgtcaaactatttcttctgatacagcaacatggtcatgagatcacagttatcgtaacatgataacaaaccaatataacggtcatcaggtgaaaattcataaaagattacccgaaaaggactaactttccccatcattagggctggatatagtctctagccataagcaaacattttgctctccctagtctcttgcattggtcccagcaaaagaccacaatgaggggccactctgcagatggctttaagctgagcctcctcactcactaggaatttcacacaagaacttcagacgagcctgatgtcatgttttatgatcacatcagtcttgctaccgg

SEQ ID NO: 2381 - DNA, 413 bp, Homo Sapiens
gtgaacctcatgtcagaaagatggaaataaaatctatattaacagcaagtgctataactatcaagatgcggtattaagaaataacaaaaattttcattcctgtaatactaagaggctctcttaactccatttaacagacacacagtgccacctatcagccatcctctgtaactgcaggtgcaaggtaaagaaccgctcatagacatgccttcccctctccctgctatttacatgccaaagaccaccacaggttaagaggacagccctactagaagcccctgctgtttctatattgtgttcttgaaaagttttacttccttaggaactggagctttttactgctgaactgaacccagagattgcaatcccagcgaagtctgaacaaatctatgtctaaaatacgggctgttatg

SEQ ID NO: 2382 - DNA, 1076 bp, Homo Sapiens
caaacccagtatatgtcttctcgtgtaagtgcgcgtgggtgggtgcgtgcgtgcgtgccacgcctgcagagacttaagctttgggatacagagtgaccgtgtcatagccctctgggggctttgtgcgggctcttgcgtgggtttcgcagtacagctccccttctatgaagaagtagcccttttgcttgaggttgaggttgcagtcggcacacacgaagcactcagggtgccggtacttatcccgcgccttcaccacagcaccaactatgccactcccacatttgtcacagagcggcatcctctgtgccccgcctgaaccgccatggactttcgtcaccggagctctcacactccgcgttccagccggacggtcatcagagccatcgtccaccattccctggagcactctgaaggagcccgactggcgaggctgtgtgggctcattccgattgtcgtggagcatccggtacacgtccgactcggggggcaccgaggctgtgggctcgttttgaggtgagctaggaatgagaccccgcagctgtccgtgaagcgcatcttgtatattgctagttgaatagagcccaattggcgagttataggaagcgctcactacctgtcttttgtcatcaatgtttgcagctgcaacaaaaggctgggcccttctgttgtgcgcggtaccaatgggtttgaattcctgtggttctgattctaagttgattttgaaaggatgggctttcccatcttcagatacttgtggagaccataagtgagtttctcccctgtcaattttgagacacagctggtgagctgctgctttaatcctgtcctgcgcatcagcatgagtcatggactctgtcccaaagccgtcaatagccaggatgacatctccaggacacaggttggcagctgccgccttgcttcctggtgtaatcctggtgatgaccaaaggctggttgaagtctatgccccctgagagcctgaagccccagggcgcagggcccgggaggatcaccgtctggggcatgccgccttcctcccgcccaccgggctctgagtgtccccgcgcagggcagcca

SEQ ID NO: 2383 - DNA, 387 bp, Homo Sapiens
cgatttgagtacaacagtggtgtatttagatacttgctcctaattttctgttcttcaagaagggattgtacttcagaaaccagagatatcagggtagttttgattgagccataaattctaaattctgattgaaatgggtattgtaataaatggcataatcttttatttaatctagccaattgtgcctgtccagaggaaccggacatttcttccttatgttcatttattcagcaactattcgttgtacccctgctgatggctaggctctttgctactgtggaaggcatcgttgggtgcagagcagacagcattttacctcctgggagactggcagattatatgaagcctttgttgcagatatagattttcacgtgcactctcatacgg

SEQ ID NO: 2384 - DNA, 338 bp, Homo Sapiens
tctataatgtgtgacaggcctgtgctcagttgtcagtatagaaggaaatgctgtcccataaaatgccattcctattttctaatataaaactcttttccaggaagcatgcttaagcatcttgttacagagacatacatccattatggcttggcaatctcttttatttgttgactctagctcccttcaaagtcgaggaaagatctttactcacttaatgaggacattccccatcactgtctgtaccagttcacctttattttacgttttattcagtctgtaaattaactggccctttgcagtaacttgtacataaagtgctagaaaatcatgttccttgt

SEQ ID NO: 2385 - DNA, 274 bp, Homo Sapiens
gacttaataaacagcataaatgaacagagtcgtgcacaagcaaacgaaacgttctctcccagaacattccaggagatgttaaagcagcaggtcatggcataagactggtgagtgatgctgctacctatttcttctaatgagataggagagaatgttggaaccacgtccacagcaacacaaatcctccgaccgcattcctcggagcagtcgtttccccagctccctactaaaaacgtcagatggtaaaatagtaaggcagctgttgaggtccatc

SEQ ID NO: 2386 - DNA, 417 bp, Homo Sapiens
  misc_feature (41)..(41): n is a, c, g, or t
ggaaaagttcattaatacctttaaaccgttccttatttttnttaaggattttaaattgtattttggcttttgcctcccagtatcctttctggttgctctggtttgaattaagttcctattatgctgcagcacatatcaaccttccctaagtaaccatttcctggaatgtgaagcatcggtgccattagcagaccatatgcagaaatgtcgtgtacttgcatttcttttttgtgcactctataaggctggttgtgactcagatcagcttaactttttatattatgttatttcactaactgctacagtcaaaatgatcaaatctttgtacaatagaaaattatttaaattttatttttctactgacatttctaattctagtgtaaatgtttatcaataaaaaattactttcaattctga

SEQ ID NO: 2387 - DNA, 746 bp, Homo Sapiens
  misc_feature (106)..(106): n is a, c, g, or t
  misc_feature (148)..(148): n is a, c, g, or t
  misc_feature (206)..(206): n is a, c, g, or t
agccctcccagccccccaaagctcattggcactcagttttcttccaagaagcttgcccgtgccactggccccaagcgtaccagaaaagacagccccgacccagccncacacttgggctccctgttcagcaatgtcgctttcctgctcntggtcctcttggagctgcccctgctcctgagcatgctgggtgccgtcctctgggtgancaacctcagagaagctctagaagcaggcagaattggcccaagggtgagaaccagtagcatctgctgtccatcaaggccctgtgctgcaacagagcccctctgggggactggaatgacctcctgaccactccctcccgggctgctctctccacatctcctggaatcctttgtgagcctccttcagccttttccctgtgcccgatcctcatgtgtcacatgtgaacctgacggacatggacgccctgagctgtgagtccacgtctcatgtgcacgccccggccagctaagcctcgggccgtcagcaatacctctgagtgcccggatgccctccctgcacccttccatttctccaggagcctggcactgcttcctccaccgttttcacagggagaagcaggtctaggactcccctgcacctttgccaccataatggcccacactccctgggtccaggagtgtagaatatgcggctgcttccatttgctgagtgtgtcgattcaatgatgctttcaaactttaataaatgacaatgtgtaggtt

SEQ ID NO: 2388 - DNA, 407 bp, Homo Sapiens
acttagccaaattcagggagtcaggaatgcttacctgagaggggatttttaatattttacatttacggtggcactaagacaaactagtagtaagttaggctgaaggcgaataaatacctgccaattagacagctgtagacttctgattatctattgcagaagctttatcagagagttcaactgaacatccctaaaatgtttgttgagaagctgagtgaatctatatgaccttgacattttttataaggcaaataatacatgtaactggtaaaacttctttttatgtgcaaaaggtatacagtgtatattcagtgagaggttttcccttcacatgacctcatttgggctctcctactccttccttctctcagggatggcctttattaccagtttttggtgtgtccttt

SEQ ID NO: 2389 - DNA, 526 bp, Homo Sapiens
gtaactgtgtgtgctgtggcagtggcatgggattggtagtggagaagaagcctccaagaagaagaatcaccagggtgtgaggctgcctgtgtgggtgtctggggactctcattccccagggctagacacaggatgagtttctccctctgtgccttggtagaggaagctcattgtgtgaatggattctgtggctaaggcatgactaactgtgccagttcaagaaagtgcagttacggttttttcaggttcagggaacttcacgatatgggaatttccacagggattttggtggccttcggaaacatcagctgggtttggctgtctctttttcatcaggggatgtgtaaagaatttagcttcctatgagaaggctttgtgttcttgttttggtatatccaggcttctaattttattctcccactgttggaagtcactgcatggtgattaagagcagggactcagagtctgtctgcctcttgccagctctgtgaacttgggcaagttaagttctccaagactctgtctc

SEQ ID NO: 2390 - DNA, 407 bp, Homo Sapiens
tctcatgtatttagggtaccgtgaatatttagtgcccccttggtctttctgtcccttttgatctctgtacacacgaatacgttgtactatctacagatgactaatttagttatctgtgtgtaacacttcttttgagtttattgttttcctgtcttctacagcagaattggatattcccaaacaatctgcaagtctggtgtttatcctagagtgctgcctcccttcacaccccctagtttcaaacagtcagcaagccctgcccatttttaacttcctgtttctccaatctggacattcctctacctccaccaaaccagcccatagtatggcttgcttggattatagccagagtctttctaactggtctctctccctccagtcttaagcttaaaatcgtctccttgatt

SEQ ID NO: 2391 - DNA, 562 bp, Homo Sapiens
  misc_feature (54)..(66): n is a, c, g, or t
agctgaagttcattcttagaacctaggtctgtgtttgttgttttgttttgtttnnnnnnnnnnnnnccttgcctgatcttaagtgccagctgggaacttgttcagcatccacatgccagggcctcttgtcaccctcatttagttagaatttccaggggagggaccaggaaatctgtatgctccaacaggtgctccaaacaggcaggcttgggaaatgctacactaggtagccacccattttccttgttcagaaaaaccttaatctcttcctgtccatgtgtggtatatggctgccatgtagccagcaaccacatcaggctgtagaagacacttgctattcctttgttttacctcggttgcatccagtgctccgggcctttgcttcccagtacagctgaccaaccacacggcttccaaggacttgcccccttgtttccatgataacagccaatcgcataaatccatgtggggtgcaaaacatggttatgggtttcagtgatatatctctcaagaatgcttatcttttaacccaggaatgcaaataaaaatttgtatgaatttt

SEQ ID NO: 2392 - DNA, 1072 bp, Homo Sapiens
aagaagtaacccagagaatggcgggtcagtattgagagaaaggataaggacagacaactggaaactaaggcttaccaatttctgtagttactaacacaacaaagcggtcaaaaagtactggggcacacctatacacaagacgtcattaagtatggatgattcactaaggcaaaataaggcaagcaaggatgactatgctggtctcatcgagctaaatgttagtgacctcaacataaaatgtctatgacatccttcagcgatgagaaacatctcaagactcacctcatgcttggagaagagccgcacggcctccagctggtggaaaatagggtagtgctgggagtcgatctggtcacgcctgtagacatcacccaccaccaggaaggcatccagtcccgcgtgcagcaagtcccactggtgtgcagacgtgtgcgctctcagcatgtgagtccgattcaggtaatagttgtcccccttcttcctgctggggtgatcagctgggatgagcaggctgtcaaagttctgccaggtcgtgaccactggagaaaggttgtcgtagaccgagaacaacggggtcccaaagcggcccacatactgcttgtagaagtgctccttcaccctctccttgatcagccacagagggtgatgctgctggttgtgcaggttcctgccaactctggtgaggaccttccgggtgaggttgctgtggtcgtcctgagggtaggatttgcccagcagctccaccacactgcctggagctctttgggtggcacactctgctgcaggaggcctcgatccccaggcctggtgctgatggcctctggagatgtgactggccttactcaccaggtagacatatgcatgggcacctctcctgagagctgagcccaccattgtagaaacttctcacaggttccaccgctcgcccgggaagcccagacccaggtgtttcaaaatcagaagtacggcaggctcgttcgctctcacgggcaagaatcttaaaccccaacttcagagatacccgcgcacgctgggcgctgccattttgacagaaagcgggcctgccccagag

SEQ ID NO: 2393 - DNA, 254 bp, Homo Sapiens
ccctgtctttggtcttgaatcaggaggaggggtgacttttctaagctgctctggcttagtttccatggcctccaaggctatattccttctcttcatacccagcttgggaaacataattccctcttccattgcagcaagcagtcaaaatactgagttaattttattcattctaccacccctgtctttccctggagaaggctggtgcttacatacaagactgatataacttttgcaataaatatatttttacaagc

SEQ ID NO: 2394 - DNA, 1157 bp, Homo Sapiens
agttccttggggtcagtacaggcctcacttagataccaaccagggagtcagcttaaaccttggtttcatctcctttggaggcactttcttgcagatgtggatggtgagtgaatcaacattaactcaggtgagggggctctgatcttaaaggtctactgtgaagacaagtaacacagcattggttcttctggctaaagacagccaaagggagttagattgctcctggacctggcacagtcttggggtgtcacaatcttaagaggctgagggcagagatccacgaattttagcttgcttctccctgtccttggtattacagaaggactgtctgtagcactccctgtgtgaagctgaggaccactacggcatggagctggcccagctgcagagcctcatcagcagtgtagaagagcagctgtccaagagttaggctgacctagaatggtcagagccaggagtaccaggagcagctggatatcagggcccaactggagggtgagatcacccatgtactgggaaccttctggggaaccaaggctgcaagtatgtgtgatgtcacagtagcggtcttcatttatgagtatcaatgttgcagtgtctccaggtagaacgatgagggactgatgttaggttcacaactgtccgtactatgtgaggttggcactatctgacgctgtgattgcagacaaggatatggggctcggagaataattagtttgccccccgtcagagttagtaaggggggagggacataaactaaagctgggtctgtggatgaactgtctccatgtgcatctgctgcaagagccatgtaatccatgtaccacacctggaggtcacgtgcaagagtgctcacatgacctgcaccccaagccccacatagcaacactttcttgagctcaccctacatacccaccagaggctgccagggcagcagcagattctgcgcacagggtgggttggaaccctcctctcattgcagatgagacggaggcaagggaaagagactcacctgcggctgaggcccaccttgtaaatggcttaccttcgagaagaggcgggtaccttgtgactctgcagcttctcacaacttcgacttgtgttttcattttcaaggagttggctcagtggggccacttcctttctttaatgcttag

SEQ ID NO: 2395 - DNA, 451 bp, Homo Sapiens
  misc_feature (49)..(237): n is a, c, g, or t
aaactttaatttttaaacctaagtgatgatacagctcttcccttagatnnnnnnnnnnnnnnnnnnnnnnnnnnnnnnnnnnnnnnnnnnnnnnnnnnnnnnnnnnnnnnnnnnnnnnnnnnnnnnnnnnnnnnnnnnnnnnnnnnnnnnnnnnnnnnnnnnnnnnnnnnnnnnnnnnnnnnnnnnnnnnnnnnnnnnnnnnnnnnnnnnnnnnnnnnnnnnnnnnnnnnnnnnnnnatttttattctttaatgagatcagaggggaattcaccaagaaagacctctgctgttccattgtgtcatccaaaaactgctcaaagctcaaaattataaaaggcttctgagcccctaaagatttttaatttgcttctaatccctgaggggggaacatcatgagggaaaatttgattttcaaagttagttaaataaattgtatgggcttttccagc

SEQ ID NO: 2396 - DNA, 355 bp, Homo Sapiens
agccaggagtgccagggccgagcaagatcacatctcaagcttccccagaagaattagatgggcccgtggggctacactggaagcactgtgtgccctgggaaaataaagcctgaccttcaattctccacgtccatgtttgtaatgtgagttagtgaataacacttccctcccaagactgttatcaggatgacgtgaggaaatgtatggaaagctcctgacacggtgacaagcaggaaccattattagatttaacgccactactcttaagaccagcccagggtgatactggactggagagggtcccatcaggccaagacggaattcagttaggaaggaggagttccctcctgccagg

SEQ ID NO: 2397 - DNA, 423 bp, Homo Sapiens
gggccctgctagtggggcttggcattaaattgaatctttgtattccaaactgggcgaggtgccccgctgctgttagttattcccccagtctgctcccctttcagggagaagacgacgacccactagaagcaaaggcagcaaatctagtcgtagctgttccttggtgtaataaaagcccccagctttcaggtaacctgtctggtcagagtgcagcttcagtcttgcacccccagcagaccctccaccctcctggcaacatcccagagtccgggcagaatcagctgttacagccccttaagccatctccctccagtgacaacctctattcagccttcacatgatgtccatttcatacaaccttctgctcagtcaagacacacacacactgtggcacatacaccatcatcgccagatcttagatca

SEQ ID NO: 2398 - DNA, 452 bp, Homo Sapiens
  misc_feature (304)..(304): n is a, c, g, or t
cagccgggcttccccgagaacctgagcaagctgaagagcctcctgacccagctccgcgccgaggacttgaacatcgccccggcaaggccacactgcagccgctgccgcccaacctgccgccagtcacctacatgcacatctacgagacggacggcttcagctagggcgatgttcctgctcaagagcggcacgtccatcccgctgcacgaccacccgggcatgcacggcatcgtcaaggtgctgtacggcacgtagcgcatcagctgcatggacaagctagacgcgggcggcgggcaacggcggngccattgccgcccgagcagcagttcgagccgccgctgcagccccgggagcgagaagccgtgcggccgggcgtgctgcgttcgcgggccgagtacaccgaggcagcggccctgcatcctcacaccgcaccgggacaacctgcaccagat

SEQ ID NO: 2399 - DNA, 338 bp, Homo Sapiens
gaaatctcatttaagagatgtagcaaagtgttcactaagagtgtttatcttggtacacatcagaagattaatggtagaacaacctgaaggatttagaaattacatataaatctttgcagtcatgctatttgtaaacaggattatacaggagagcaaataaacattataataaaatatgcatttcttagagcagtagcttgcagtttcagttgagttctacttagaaattctttttagctagtgggcatgtgaagatatttagtcacccagaggagccagtaaatgttataatattaataaattaaagctgcaaaagaaataaaatgatgttaataaaa

SEQ ID NO: 2400 - DNA, 460 bp, Homo Sapiens
gcggccgcggaggagctgctggcccgggcggcgcagatggcagcttcctggtccgagacagcgagactaggcgtgggccttcgcgctctggtccatgtatcagaagcatgtgcacacgtatcgcattctgcctgatggagaagatttcttggctgtgcagacctcgcagggtgtgcctgtgcgccgcttccagaccctgggtgagctcatcggcctgtacgcccagcccaaccagggccttgtgtgcgccctgcttcttcctgtagagggtgagcgagacgcggacccaccggatgaccgggatgcctcagatggggaggatgagaagcccccgctgcccccgcgctctggctccaccagcatttctgcccccactgggcccagcagtcccctgccagctcctgagactcccacagctccagctgctgagagtgctcccaatgggctgagcaccgtctcg

SEQ ID NO: 2401 - DNA, 613 bp, Homo Sapiens
acatctgcatacatctctacctgtataattccttctgcccctatgctgccaacctaatgaacaagtcctgacatacactgctcagagggggcttaacaattccatgcccaagaggtatcctatcaagtataacaaagggatttacaaataggctaattcactagctctagtttttatcataagttgtcaccccattcgtaaagcttagatgttgcaaaataataactttgtccacaatgaacacaggcactttactaaaaacgctcttgtagacctgtggttatcatctaaaaccatcgtctagatatggagatactagcaaagagcccttcccttcacccttcctcttctccctcttccaccatccccgtgactaagtacaggatgtctagctccaaggggtggactaataaaggtcactcccagaggacaggccttcctaaaaactaacaaaaggacattcacaaagggactgatttactacatctatttttaacatactttgagcattaagacttatcctttaatacacaatattaactaaaatgcacatatagaacaatggttagaccatctgaactaatctcaggagcacagaacccctctccctgca

SEQ ID NO: 2402 - DNA, 692 bp, Homo Sapiens
  misc_feature (71)..(203): n is a, c, g, or t
ccttctgggctgaaatgatcctcccatctcagctcctgagtagctgtgaatccagatgtgcaccagcatgnnnnnnnnnnnnnnnnnnnnnnnnnnnnnnnnnnnnnnnnnnnnnnnnnnnnnnnnnnnnnnnnnnnnnnnnnnnnnnnnnnnnnnnnnnnnnnnnnnnnnnnnnnnnnnnnnnnnnnnnnnnnnnnnnnnnngacatggcctctcaattttaaaaggttaggatgagccaaatatttattaaatgagtctttcccttattgaagtaatttcagaaatgcaccattggaatgttgtttaatttcaacaggtacaaactcacactcaaggaaaaaacccagccattcactcaaaggaacattattttgatagtattcagatatcgtatacaaatcttttgagcaggttagttttttcatgtaaatcataacatatggtattggtcaagtagtaaagttcatattaaccttaaacatttactaagatactgttttcaagtaactcaggcaatgtatgcagagggtgtcatagtttctgtaagtatataagttttggatcaagatcacattaatgccagggccccactacagatcttctgaatcagagattctgaatctgaggtgaagactcatagctccttaaaattccatggagaaaatatatatacctactattttcccaca

SEQ ID NO: 2403 - DNA, 496 bp, Homo Sapiens
tggatccttgaaattgcctgcaagacccttttggatctggctcctgcctacctctccagcccagcttcaagtcctctattctgccctgccctaatcctgggcttccggagccttctttcaggacccaaaccctccatactccttccatctcagccccaacatagacccttcttccaccagcctcactcctcttcccatctgctcacttcttctcctctgatggtcccatccccaggaagtcccccatgaccccaaagagggttacaccacgtatattcccccagctctcactctcttccccaatgatgaaacaccattataatggaaagatcaattgcatcttaaggactgggtatctgccttcccgactagatctcaggctctaggagggtaagggcaggtcactatgcctgctttcttcaacactgccacccagcacttgtttaatgtctggttcttgatacatatttgttgagtaaataaatgactgtcattt

SEQ ID NO: 2404 - DNA, 497 bp, Homo Sapiens
ccacgcaaagcaggaatctttctttccaggtaatcacggcctggacaacctgctggggaaggcccacctaactgattctgccaattttgacaatgtggacccatctttcatcaggacagagcacaatgacttgggatggaaatgccttatattttagcaaatttgatgtataaatgcttggaatttacacttgagaagctgaggggtggtggttatcgacaggaatctgtcagagagcatacccatggagcatttataattgggagccattccagaattctggtttgcatacaactctttaaaaagccagctaccctgaaatgtacactatctgagctctgcctttgcctgtgatgagtgatgttggtcctgcctcttagttctgctctcagtctccaccatcggcttctcagattttccttccaggaccagcaggcaggtgggtgtggtgactttgtggcagacactgtggcagattaaaggtggttgcaaattga

SEQ ID NO: 2405 - DNA, 545 bp, Homo Sapiens
tctgcggaaggcaaggcggccactcgtcccctggctgcggctgcggggcccaggccttggcgcgcagggagtgggaaggagaaaaggacgagaaggggcaagcaccagccgcaccagcaaagggggcgagggtggcgcgcgcaagatgaggggagctgaagccctgcatcccgaaggaggctgcgcccaccgcccgcaactccactccaggctcgccagccggaagaaagaggaggaagtgggacaacgggggtcctgggcaggggtaggggaaacgatcaactcccactgcccccacccactagccgagttggaatgcaagtcgtcacttaaaaaggctcacccaaaccgcaggcatacctcctcaccccttaaagaaacattgatgtaatagtgtggagaagtaactgagagacgcgaggaaataaatgcacgtgttttctctttttgtttccctggtggttggaatttgcagagttcgtctcagtggtggctgctaatttattcgtttcatcggtcgaaaggggcgtatagaggtgggtcag

SEQ ID NO: 2406 - DNA, 652 bp, Homo Sapiens
cccactggggcttgggcgctcatggcggcggtgatggcagtgcgcagtcctgggagatccgcgcccggccggccaggttttcgacccacggcgctccgcgagcatgtttgcggtgggctgcagcatgggtcccttcctgcactactggtacttgtcgctggaccgcctattcccgtgcgtctggcctccgtaggctttcacgcaaatgctcctcaagtcaggtcctctgtggatcacgctggtagcctctccattgctgggcgtctggtacttcttgggccttggctgcctggagggtcagacagtgggtgagagctgccaggagctgcgggagaagttctgggaattctacaaggcagactggtgcgtgtggcctgctgcgcagttcgtgaacttcctcttcgtgcccccccaattttcgagtcacctacatcaacggcctgacgctgggctgggacacgtacctgtcctacttgaagtaccggagcccagttcctctgacacccccaggctgtgtggccctggacacccgagcagactgaactgtctgcttcctggaccagatgcaagactgtctcctggcggaccaccccctctgacagaaggggaatgggctcctgcagcaagctcgggtcttgagccaagccccggg

SEQ ID NO: 2407 - DNA, 680 bp, Homo Sapiens
tacttgcagagcacttcctctgtgccaggtgttgggttttgggtgcattcttgcctttaatcttcactaaattagagatcgtgatggccatgtgaaaggaagctgaggccgagagaggactgtgtccacgctcccatgacaggacctagatgggcaccaaagcccccactcttagccaccacgttatacagactcccaattcccaggccacatgaggcctctgcaaagtcgaagggtgcaaatatgactggagctgccacttactgagggtgacctgggtgccaggtactgagcgtggcaccttcagaggatgatctgtcaggtgaatgggaggaaagtctccctaaaacctatctgaggagaggggagaggtggctgacccctgccaagaaagcagagctcatggagccaccccccgaggagggtactggctggtgagagacatgggggtgggagaacagaatcttagaaactcactcttatcccatgggaggctcccttctccctcaccttggctgagccaaagacaggcaggctgaagctcagcaaaaggaacacctgaggctcgggtctacctagagctaaaagaggccacacccagggcagaggtgggcaaacaacagcccgcaggtcaaatgcagcggccacatgtttttataaataaagttttattggaacac

SEQ ID NO: 2408 - DNA, 285 bp, Homo Sapiens
gatcgccgcactggggcttggtgattgtagataggccttggggctgctgaaaaaagagcaagcgctgattgtgcgggagaaggagccggacctgaaacctgtgcagcccattcctttcttcacctggaagtgcctcggagagagcttgctggccatgtacaatcatctcaccacctgtgagcccccacgtcccagccttggcaaaaggattgatttgtcggactaccaggaccccagccagcctcttgagtcctccatggtggtgacgccagttaacgtgatcca

SEQ ID NO: 2409 - DNA, 547 bp, Homo Sapiens
  misc_feature (234)..(234): n is a, c, g, or t
gtttctgaggcttgcagccagtggtcccgttagtctgcacgtctccgagttgccctcccagaggagaaagcatatgctgctgggacagactgcagctcctcatggatgcacctgccaccagaaaattgttgttcagtctgggattgctttctcttcccaaagcacaatctcacatgcagtcatgagcccagtccagcctctgggacagaagatttcgtgcttttataaaccaancagcactgcaggtgctgcacaaggaatggaaaatcaatctgagtgtcattaagagcatattccctgaagaagattgctgatgacagtggatttgtcacccagctcagtgtcttttcctgagcaataggaatttcttccatggggaatgaaacctagtgttgtttccctgtctgaatccaggcctttcactgacctgccaagttttcattccattgtctcactgtcattggctgatctgatctctacattgattaattagtttcaagccccttcatattgatctaataaaattggcttgtttaatttgtgtcaa

SEQ ID NO: 2410 - DNA, 383 bp, Homo Sapiens
ttggtcttatcgtgggcacaggccacacactggtcagcctcctggggggggcagaaaagatttgtggggggctggcactgacaccccaggcagtaggatcaggcccttagttgggtcccctttgtgcttcccaaggccacccagcagcaattttcgccatgctcctggggcaaacacccttgctcttcacccagtctctgtggcccctccctcggggccctcctccaagcttgatcctgggcagggacttgagccagaaaatgggaggcacccagagaggaaaacgcattaactaaggtgtaacagcgagtaacaacagtcactgctctgtagaaagcctttcccgtgcttcactgtgccaagccctgtttaatttcattctt

SEQ ID NO: 2411 - DNA, 698 bp, Homo Sapiens
ccaattgatttttgaatttttgaagctgtccatttttttggagcagagatgaaagccccagaggggctggtatgaaagcatgagatttttgcctgtactggggctgatcccacagatgcaggagatgaaacgttcttccagtgccatttgctttccatctgaatgaggcaggtcctgcggcagctctgaagaggcaggggccatcacaaacgaatattgcagcaggtcaaggggacactgctattgtgtgcacactgatggagacccagagtaaaacgtggccctgaggtttgccagaatgtgcttaagaagcaaacctcacatacctgaaactctcttcgtgccctcctgtccttccaaaaactatcagttcgaatatcctgagaaatgtcacataggtaagctgtaggaccatccttgagaggttgctgttggtaaaaaccaatggggccagaaaacatgatatttatatcccagcactctgggctataactttgagcaaattaatctctctgatattctattatagcaattgtgaattgacaatgtcatcatagcccatttcttatttctgaaaaagtgctttttctggatctcattcacttaagaactcaaattctaaacatggagaccatcagagccaaggtccttgttaaaagaaatgtatgttttatatattaaagtttaaaagaaatata

SEQ ID NO: 2412 - DNA, 639 bp, Homo Sapiens
  misc_feature (129)..(129): n is a, c, g, or t
  misc_feature (132)..(132): n is a, c, g, or t
agtacggggggggttccctgggaagtgtgtgctttaaggaccctcagtggggggttcccctgggtcaaggactttccttggagtgtcctccaccgcaaaggacttcttcaaggaccccctggccatccncantgggtgtgtgcctcatgctgtatcggttcccgaggaaactgccaaacagtcaaacctggggcctctggctgtgcttcacccatggagagggaataggtggcaggctaagaggactgtccctgccactgcctctgcgggccttagcggggaggaatcctgagggagctggggtgcagaaacttaggcttgatccccacatccccacttccactgtgtccctgcagcagggaggggagtagacagtcagtgcctgttggataaacagggtgaccctgtggcatccagtgaggagaggcccctggggccctgggctgccaaggaagaggctctgggcttctccctgcagccacctcactgaggagctttgggagacttgaggtgtgtgtggctgctgctacgggctgggaaaggacatgggacccgagacctccatccccaccgggcgccgttcaccctccggcctcacaaccggcaaggcgaggctaagactgaggggccgcgtaggtg

SEQ ID NO: 2413 - DNA, 743 bp, Homo Sapiens
  misc_feature (605)..(605): n is a, c, g, or t
tttttttggtcatacaaaacgtagttgtgaaaggaaaagaaaatgccagccctgtttgacagacattagatttatgatcgttttttaagcctcaagtacgtcacaagaatcggcccacccactgcactgccctgattgtaaacacggccaagtgcccatccctgctcttcccctatcggacctgggctcctccgcttctgaacagcccttgtttccctctcctggtctctggtgggttaaaaagatgcctggctgtatatatatggagagcgtacaccatggagctctctgagctaaaacctccaagacaaacatagcccgctcacgccttccccgtctgccggcaggccgcagatgttaataaaccatggttggggtttagggtttgcccactgattcctcccatccattttacactcggacaagtccaggagagcattttttcccccttcccttaacgtacaaactcagtaaactgttgtaaggcttggcaacaaacttatgaattttggcctccagatgtggctggaaataaaagtaaacacagggtgtgagcaactgcgtttcaggtttgtgtcctgtgaggctgagtctgcaaaaaccangggctcagagagactcatttgccctttgccatgagacaccgggagatagttttcctaaaggtagggatgctgtttggtgcagacaacagatgtagaggtccactagaaaatgtaggtgaaggtttacagtgcagaaaa

SEQ ID NO: 2414 - DNA, 479 bp, Homo Sapiens
aacaaaagtcccaaaacaccaaaaatgtaaacaagataagagattaatattgtagtgatgtaatttaattaaagttatattttgggttaattttaacaactgaagtcttattgttgaaacttattttcaaccaaaactgtgcagttaaatttgtatacgtattcacatactgaaagatgaaccgttaaaatagcacttaattttgtgtttcttcaatatgtcttgatatactttgtgcaattaatattacacatgtaagttgtatggcagtttacagaactcaatgacttgtcatgaggttttcatatgagctacacattgtgtacattgattgttttttatttttacataaatccattctgtcattttcaactttatatataaatctccaatgttatgggaaacaatagattgacacataatttttaaaaattatatttgtaaaatttctctattgtgaataaagtcttttaatataa

SEQ ID NO: 2415 - DNA, 364 bp, Homo Sapiens
gatctctcttccctcccactgagaggtgaagactgaaccagttatgacgtccgtgttttcagtcttggattcttgaagagcgctgtgcctgcggttggttttggtttgggtcagtctttccttaatatttctcagttgttaggattcacttcctaaccgaaaaataaaaagccagatacttctttgtaaaataaaacaattcattaacattggaagctagttgacattttgcgtcgtgtactttttgaacggctgcacgttgtcttgtggtggcagaacctagaaactttctcagttcctgtttattttgtgttgtgttggccgatttttttcaccacagtggctttgtaccattctttaaaac

SEQ ID NO: 2416 - DNA, 568 bp, Homo Sapiens
  misc_feature (474)..(511): n is a, c, g, or t
gagccgccttctcctcctgtccccaaggcatctggctccactctcaacagcgggtctggcaactgtcccaggacccagtctgatgacagtgaggagaggagcctcgaaaccatctgtgccaaccacaacaatggacgcttacaccctcgtccccctcaccctcacaataacgggcagaacttgggggagctggaggtggtggcctactcttccccaggacactcagacactgaccgtgataactcgtccctgacagggacactcctacacaaagattgttgcgggtctgaaatggcctgtgagacccccaatgctggaacaagagaggaccccactgacaccccagccacagatagtagcagggctgttcatggccacagtggccgtcaaaaggcaacgaattgaattggaagatacagattcagagaattcctcctcagagaagaaattaaaaacatgataaatacaaagggnnnnnnnnnnnnnnnnnnnnnnnnnnnnnnnnnnnnnnttgtttagtgaatacagaggaaaggaaaaacaagtattaaaggcacatgaaaccagg

SEQ ID NO: 2417 - DNA, 316 bp, Homo Sapiens
  misc_feature (89)..(97): n is a, c, g, or t
caaactggatcaaataggatgatcacactaaattaaaatcattagctttggtaactagaaagtcactgctctgtttctagttaactgannnnnnnnncttggtagggtcacatttgcttgcttccccacatgtctagtaattttaattggatatttgacatcaccactgttgttcaatgtctggattcctgtcttcctttaaaatactctgtactttgttctggaaggagattaatctctcttgaggatgtttgacctttacagtctttcttaggatgtttttaagctttgttagagaaggttatagaatagctct

SEQ ID NO: 2418 - DNA, 485 bp, Homo Sapiens
gggccgcccctccccgattcccgccacctgccgcctgccaggtggaaggggcgctgcgcgaagcactccgggcctgcagggctgttccgggagagcggcgccccggtactctgggcccacccgccccggcgtcctccgagagtgggggctgcgcgcggggtcagacacctgttcggcccggcccggcgtggtcgggcgcacaggaatgaaagtgaccgtgtgcttcggcaggacgggcatcgtggtgcctgcaaggagggccagctgcgcgtcggcagctcacccagcaggcgcgcagcgtacctgaagacccgggagaaggcatgatatctctgtcttaggagctactaaattgagcctgcctcctgttgctgaactctcgttttttggattgcaatgtggttgaaattgcaggatatcaagacaggccggttaaaaaggttttctctcagtttagtctctatcagatgcagtgccaagtatct

SEQ ID NO: 2419 - DNA, 181 bp, Homo Sapiens
acgttaaatctgtgttgttccagggtcactgtattattattatgattgttgcagtaattaaattaaaatattgtaacaaaattgggccaatgtttaaaccttattctcacattttttaactttatataggtagaaagacatactggctatgctcaaaagtctatgtaccaccatgatgcag

SEQ ID NO: 2420 - DNA, 531 bp, Homo Sapiens
tcaatcagcaaaacacctgtttactacttactaacaatattaaagatgcaaatatttacgaaacatatttttctcactttacatagatgcctatcatttcatttgtaaaaaaggttaattctatttactcattaaaatacttacatttaaatactccagcataatacattaggtgtattaaacatatagatgctcctcagatgaagaatatagtctaatctggttttatacacaataaagacaatttaaaatgtaaaaaactgggcttaaaaaatgcagccaaccacctgttttattaagttttaccaagtatttccttctaaaaagtccttatcggagctaattctttaaagccaacatttactacattaacagatgggttctttaaataagaaattttactttcaactcactgattttatacttagaggctttaaaattttttagaatatgtgaagaccggaattaaaccattctcaccatatttttccaggactgtttgctaactggcttgtttttacataaagcttt

SEQ ID NO: 2421 - DNA, 276 bp, Homo Sapiens
gcagcaatcttcggggatatgaggaacaccagatttctctagtccagtcctaaacaagtaactctttgaacacaaaaatgttggtcctcacagtaagtgcaagatgagtattattcctcaaaatttcaacggctttcataaatgtaatattctcaaagttttgtccatttacttccataatctgatcaccacgtatcagtcctgaatcagcagctatgctaccaggttctactccttcaacaaaaataccaaatcccttctcactccctccattaa

SEQ ID NO: 2422 - DNA, 168 bp, Homo Sapiens
attaagcatgcccagttatgccaagcatagtaaataaaggtcaagtagcatttataatagaggaagtattgttatccctagcatgagtgtaatggtgatatgaaaaactttgtcttgtcattataataataaaaaaatgaacatttattatggaatttctatgagcct

SEQ ID NO: 2423 - DNA, 397 bp, Homo Sapiens
cagaagacaggaaaatgtggggaagtttgggacttcctagagacttgttaaatggctttgaccaaaatgctgataatgattgggacatgaaatccaggctgagttggtctcagatagcgatgaggaacttgtttggtactggagtaaaggtgactcttgctatattttagcaaagagactggctgcattttgcccctgccctagagatttgtggaactttgaactcgagggagatgatttagggtatctggcagaagaaatttctaagcagcaaagcattcatgaggtgacttgggtgctgttaaaagcattcagttttaaaagggaaacagactataaaagtttggaaaatttgcagcttgatgatgagatagaaaagaatacccattttctgagg

SEQ ID NO: 2424 - DNA, 531 bp, Homo Sapiens
gccattctgcactaccctggggtagcctcaaatggaaccaaggccagtggggctcccactagttcctcgggatctccaataggctctcctacaaccacccctcccactaaacccccatccttcaacctgcaccccgcccctcacttgctggctagtattgcagctgcagaaacttaatagccagtatcaggggattgctgctgccactccaggccaacccggggaggcaggacccctgcaaaactgggactttggggcccaggcgggaggggcagaatcactctctccttctgctggtgcccagagccctgctatcatcgattcggacccagtggatgaggaagtgctgatgtcgctggtggtggaactggggttggaccgagccaatgagcttccggagctgtggctggggcagaatgagtttgacttcactgcggactttccatctagctgctaatgccaagtgtccctaaagatggaggaataaagccaccaattctgttgtaaataaaaataaagttacttacaaag

SEQ ID NO: 2425 - DNA, 194 bp, Homo Sapiens
agtgcccagccacccagccctggcttgtaggagggggactcttgccatggctgggctgttgcaggaaatccagggccaagggacctgctcctctctatggcaccaccgtatgtgtcgtctcctcctttgctctctcctccctaccagacttcctgtcccatctaccttccatgtgcacatctttgtaaaggaat

SEQ ID NO: 2426 - DNA, 474 bp, Homo Sapiens
tcagcaaattcaacagatgtgtgcagtgattccctccgttttgtatttgacaccttcatttaaaatgctaagatgcaatatcattcacttcaaagtcgcgaaaatgcagaattgtgtttcctttttatctgtgtgattccttaagaaacatgtttttaaaatatgtgttctaaatggttttttattctgtattactgctttggccatgtggctctcatgactttcattgtaccagattctcagctccctgaaacatggggacgagaagctctggaattacagcaagatttttgttccatgagcgcaatactgtatcattaacatttttaatggtatggattttatagcatctgtgtatgtttgcaaatattaagttattacatgttttaaaatgagcgtttttcatcttaaattttatatgtttgcaaatatatttttttaataaaatttcaaaaccaagttttagcacctact

SEQ ID NO: 2427 - DNA, 449 bp, Homo Sapiens
caagtattggggtaatagccagtgtcttagttgtttaaacagtttaatggaaatcagtacaatattttaccattcaactaatatttactttgttgtatgcaagtatgctctataattggggctaacttcttatattttttcaaatcctttcacttcttttgctttgttcatatatcattctcctctgctattttaaagttataattcattctgatttcttgttttaaaccatattctgaaatataatatgcttagctgaggtaaattattgtattgataagctgattaatttatcttatgaatatttagtttgagatttaagtccaaatattcaaaattgatattaatataattagcattcatatattaacattcaaaattaagaattttttaaattattgatattgccattatttgtatattaaaggttagataaaatttggctttaa

SEQ ID NO: 2428 - DNA, 513 bp, Homo Sapiens
catacacatataactatgaagagaggttgaaaaacagaacattattcatgagtataggttgctattggatgagtttcgaaaggcattacaagaaaaagatcgcaagaaataagtggtttatttgtagcaaaaaaggaacaggaggaatttagaggcttttttaaggtgggaaagccaattgattctgaactccaaaataagagacataaaagatgagattgagaaaatggctttgagcgctgaagactcagtgagacttttcagttgaagtgatttactcagccatattttagaaagtcaaattaaaggtacctttccatgaaggtctatccagctgccatcatgataccctatcaaattgagagaagacgtttgaggatgagccagcagagataaaactaggtctagaaaaatactttaagtgtggttactgtcatatgaaagtgacttgaagcaaataaatcagaagcccactaaaattttgagggacttctgttgccaattagacaatgt

SEQ ID NO: 2429 - DNA, 442 bp, Homo Sapiens
tttgcagccataatttattcattcaacaagcatttgtcgaacacattctatgtgctagatgttgagttcagataattatttcaaaagaagattgtccaagttctgacaaagccaagcccctgggcagtctccacaatcccagcccactcttaaaagcacaaaggctgtagccaccattgtctgccactggacaaacggccaattgctttggggaaagccccatcctgcctggctgtaagtagctctgattgagggttggaggaaggagtaaaagtgagggagtgggctgcttccaacagaactgacgggaactactacctgttaatttgtttttatttacactgaatcagtccatagttcaatcccctagcctatacgatgctctttcccctggccatcatcattccctccctgtcacctacacagtcaacctgtcccaaac

SEQ ID NO: 2430 - DNA, 785 bp, Homo Sapiens
  misc_feature (96)..(96): n is a, c, g, or t
  misc_feature (230)..(230): n is a, c, g, or t
  misc_feature (560)..(568): n is a, c, g, or t
gccagaggcaggcctgtaagaagcacgagctgtatgtcagcttccgagacctgggctggcaggactggatcatcgcgcctgaaggctacgccgccntactactgtgagggggagtgtgccttccctctgaactcctacatgaacgccaccaaccacgccatcgtgcagacgctggtccacttcatcaacccggaaacggtgcccaagccctgctgtgcgcccacgcagcntcaatgccatctccgtcctctacttcgatgacagctccaacgtcatcctgaagaaatacagaaacatggtggtccgggcctgtggctgccactagctcctccgagaattcagaccctttggggccaagtttttctggatcctccattgctcgccttggccaggaaccagcagaccaactgccttttgtgagaccttcccctccctatccccaactttaaaggtgtgagagtattaggaaacatgagcagcatatggcttttgatcagtttttcagtggcagcatccaatgaacaagatcctacaagctgtgcaggcaaaacctagcaggnnnnnnnnncaacgcataaagaaaaatggccgggccaggtcattggctgggaagtctcagccatgcacggactcgtttccagaggtaattatgagcgcccaccagccaggccacccagccgtgggaggaagggggcgtggcaaggggtgggcacattggtgtctgtgcgaaaggaaaattgacccggaagttcctgtaataaatgtcacaataaaacgaatgaatg

SEQ ID NO: 2431 - DNA, 512 bp, Homo Sapiens
agacagtatctttttttgtcagtttattaatttttggtcaagatttagcctgagtcttaaagcatttatttgtggaatgccccactgaagtgtcttctccattggctaagtacatgtttaaagccatgggttttaatgtaagatactttcagtatctaattctgtttcccccactgagggtgctaaagagaattagaatctttactaagacatgctcaggaaagcttcacgagagaacagcttcaaaatcctccctatgacactgaatggtagtgaggaaagaattcttggggatgccagttacatacaatagccttattactgctaatcactgtcaataaaaggtcacttcattcacctctatttgaggaaaacaatgagaatgtatctgatgaactagaatccttgtcagtattgggaaattttaatgttgcaatatctagtcaaactttgagtgtactggttctgtgaaccacctgaaaaaacaaattaaatgtattaaaccataaaaa

SEQ ID NO: 2432 - DNA, 1251 bp, Homo Sapiens
  misc_feature (384)..(384): n is a, c, g, or t
  misc_feature (1191)..(1207): n is a, c, g, or t
ccccctccacagcatggagcgcggccagacgcaggcaatactcatttctcgctcgtctcttctctctcgcgcgtactactgtgttgactaccgtggttgctggttcgtctcttcttcgtcgtctagtttgcttcgctggtttgatgtccctcctttgtgtatttctgtccgttctttacagcggtgtgtccactattctggtatttagtgctcgcccctcgttgtgtggtcaccttctgcacgcacaatacgtgagtggttgccttcatctcgcattgggctgtgtacgaccaggttgtgtgcggcccaccttgtgggtcgttttcccggcgcggtagtgttctgcgccctgtctccgcgctattccggtctcttagtgtatanacccgctttggggtacctccgcgacttcaggtcagcccgcaggcttcggcccttgtcccccttggttctttgttccgtccctcaggtgtgtcccacgggattaccctttgggcaagactcccctgggacgcccagctgtcccccgttttgcgcaacgccagatgggctaagggccgcgggattagggtccccctgaaccaggcccaacagcccccatacctgggccgatcgattgtcttaccagcagcccaaaaagcccaacctggtgtctctgagacagaagaagtggccttgcagccattacgtgacacccaaagatgaagtacagctgagagacccacctacagcaaatccaacgggcagcccaagagcttaggctcagcctcccctggcccaggccagccacctctcagtagccccacgaggggaggagtcaagaaggtgtcaggggttggtggtaccacctatgagatttcggtgtgagccttcggcacctcccctccccaacgcctctgcgcctacaccaaagggccccaggtggccaccttccttccctcaaggggctcccctcccgtgcatggacattttttaaaccaccgattccaagaggatgaggagtgttttctaaaatgcagtaggcttggggagtcggagagttggggccctgagactggggtagcaacccccccttttatcttgttaagaccttcccttccttgatccctggaccagactcagtggacatttgtgcaattgctcgccctggagggaaccagatcatttttaaacccagaaataatttttttnnnnnnnnnnnnnnnnngggcgccgctctagagtatccctcgaggggctaccagcttaggc

SEQ ID NO: 2433 - DNA, 576 bp, Homo Sapiens
tatgcaaatgaagactctcaagaagtgcctttaatgctgtacatgcccgccaaaaatagcgccttttggacgggaaatgctaaagcgaaacatcggtgtcgttgtggttggatttcctcccaccccaattattgagtccagagccaggttttgcctgtcagcagctcataccaaagaaatacttgatactgctttaaaggagatagatgaagttggggacctattgcagctgaagtattcccgtcatcggttggtacctctactggacaggccctttgacgagacgacgtatgaagaaacagaagactgagcctttttggtgctccctcagaggaactctccctcacccaggacagcctgtggcctttgtgagccagttccaggaaccacacttctgtggccatctcacgtgaaagacattgcctcagctactgaaggtggccacctccactctaaatgacattttgtaaatagtaaaaaactgcttctaatatcatcctttgctaaatctcacctttaaaaacgaaggtgactcactttgctttttcagtccattaaaaaaacattttattttgc

SEQ ID NO: 2434 - DNA, 779 bp, Homo Sapiens
gcggccgcgatggcaaggcatcctgtgaattcatgcgctgcgagtggcggggctgcccagaggccgggggagcagacagggccggtgctccctctggaagcttgggtgaccggggccctggctcccacgggatggagggtgtggtcctgtggtcagagcccaagcagcactcaggagaggggagaaaggaggtgcacctggcagcccacatttttgttgctccccaaatccctccccacgtggggatgagaaccttcctgctgtgatgtgacaccttcggggacattgaccactcaaaactcagatcatctcgcccaccctggagagtgcagagctatctgtagacttaggaatacttgatgggcagcggtgcagaccccgggcacctgcgtgcagcctcctgttctcggcagcttctgtcgctggccctggggtccccacagctgcagctctcctgtgaggttgcacggcatcagaaccatcctgaccttcttagggacgtgcctggaaccacctcgtccacgtccacgtccacctgggggcctcgggaggctaggcccctcctcaaaggcccaccagcccggcgctcatgctgagccccaggcacgcagggccggccacctctctcctgaagccattggccgctcctccacccagtgcttctgcccatgcctgccccagcagcccctctgcacggtcaccatcgcctgggcctgcccacagcactggtgctcacctctacctcctgtcctcaggccgtgcggcacgacatggccagc

SEQ ID NO: 2435 - DNA, 638 bp, Homo Sapiens
  misc_feature (379)..(547): n is a, c, g, or t
tcggcacgaggggaaaagggaagagggttctgatattgaagatgaggacatggaagaacttcttaatgacacaagactcttgaaaaaacttaagaaaggcaaaataactgaagaagaattcgagaagggcttgttgacaactggcaaaagaacaatcaagacagtggatttagggatctcagatttggaagatgactgctaattccagtgccacagataaacccacaaggacatagctgttccctaacttggtggatggctccagtttgcttttaacgaaaatcacaacttcaggagacatctgaaaagaatgatgtctctgaaagctgtcctttcagatgagggagaaatgaaggatttcacacttcagaatattttnnnnnnnnnnnnnnnnnnnnnnnnnnnnnnnnnnnnnnnnnnnnnnnnnnnnnnnnnnnnnnnnnnnnnnnnnnnnnnnnnnnnnnnnnnnnnnnnnnnnnnnnnnnnnnnnnnnnnnnnnnnnnnnnnnnnnnnnnnnnnnnnnnnnnnnnnnnnnnnnnnnnnnnnnagtagtctaacagaagaaaatgtaaaattatttgagtgtaaataatagatgtcagtatttatcatgatgggtcacatatagacatatgtac

SEQ ID NO: 2436 - DNA, 635 bp, Homo Sapiens
  misc_feature (59)..(59): n is a, c, g, or t
ggttatcactaccatgactatcaggatggagacgcagatgtgtttccaagggagccctntgtggtctggtccaaatctccccacactgctgtcaaagacttcgtgattatccccctgcacaccaccccagagacatccgttaaggagatcgatgagttggttgaggtctacacggacgtgaaacaccgctggaaggcggagaatttcattttcatgggtgacttcaatgccggctgcagctacgtccccaagaaggcctggaagaacatccgcttgaggactgaccccaggtttgtttggctgatcggggaccaagaggacaccacggtgaagaagagcaccaactgtgcatatgacaggattgtgcttaaaaggacaagaaatcgtcagttctgttgttcccaagtcaaacagtgtttttgacttccagaaagcttacaagctgactgaagaggaggccctggatgtcagcgaccactttccagttgaatttaaactacagtcttcaagggccttcaccaacagcaaaaaatctgtcactctaaggaagaaaacaaagagcaaacgctcctagacccaagggtctcatcttattaaccatttcttgcctctaaataaaatgtctctaacagata

SEQ ID NO: 2437 - DNA, 471 bp, Homo Sapiens
ggcacaaggggggataggtggggggcccaaagaagggcatggtcagcctgtctgggagggagttgcatgtgtgcatctaaggtagggacaggcatgcatcttacaggatgaatatcgagcagagttacagagagggggaaactccttgaggtttcaggaatcacctaatccactgtgactcacaaattcctgcctcttggctttgcctgcagcataactcctggaagtgtgctggggcaaaactcatcccagaccaccatctccatcctcccccaatacaccctggctctcccgggctacccttgagcacggtgcacgtgtgcatgggtgcatgcctgcatatatagctatcccccatgtatttcccaaagccctacataatgcttcagtttgctaaggaaaaaatgttaattactgcaaatgtgtttaaaactgtaaaagtacattaaacaaactctgtaaagtgtgaaa

SEQ ID NO: 2438 - DNA, 402 bp, Homo Sapiens
ctggcggccctggactgagcgtctggaggagtcgtggaggctctttcccttctttctcctctgagagctcgttcttcaggctcttccagcttgtcatgtcgagtgcctggccactgctcagggttggaggctcagtccctttgccctgtctgttccagctctggagctaactcagggatccctgatcagggttacataggtttggtaaaatgagtgctggaaattaactttctcccagtagtcttaggtcatgctcagtgaacttaaactttatccagatatggttttccttcagcctttctattccctttctagccagtgaaagacccgctgccctttgacctcagcccctccaagcccccaagtttaaaacgccaccccctgccaccagaaaaaacagaa

SEQ ID NO: 2439 - DNA, 319 bp, Homo Sapiens
tagtcttcatcgtcttcaagaatatccccttctgactcatagtccaaacttgtgaagtcaaagttttcctccagcaaacaggagttggcagtgggagacacgggggccatgctgtctcgtttccgaatgatctcctctcgcaaacctttcagccagtccttggtcttcggtctaatcttcactgctctgcctttcaccttcataccgtccacgtccaggacactgagagccgagtgaccgttcctgcaaaagtttacccaggccaattttggccctttggcgggaattctcttaaaggggaattcttcttagagttcca

SEQ ID NO: 2440 - DNA, 453 bp, Homo Sapiens
acgatcctgagcacggtccctcggcagatgttcaacgatgcaggtagcggggacgatgccttggatggaaacgatgacctggtgatcgacatcccggagtgaccgtgaacatcacggccatgcccaccacggccccgcccggcgccctccccgtgccagcacacacgagtccagcttcctcggaggtgtttattgatgcccagctgccatgctccggccactgacacaaccaaaaaaggcgtaaacatgcacgggtgtcccccaggagggtggcaggggccctgccttcaaaccccggccccctccaggggacagttatttaaacgagtggccgggagcatctgccacctgctggggaggcaaagaccctgcaatggccacctctttaaaagggcagctggacagggctaggttttttcaatgaagtttctgtattaaaggagtggctttggg

SEQ ID NO: 2441 - DNA, 209 bp, Homo Sapiens
agtaaaaaggtccacaggattgtctcaaaatggatgctgcccgaaaagtcccgaggaacatacttggagagagctaactgcttcccgcctcccgtcttcatcatctccatcagcctggccgagctggcagtgatgatgtactatgctgtgtggaagcctcagaaacagtggatcacgttggacacaggcatcttggaggatcctctaga

SEQ ID NO: 2442 - DNA, 271 bp, Homo Sapiens
gaccatgggaagaatttgcaagggatggatgcaggttccagaaacgaattcaagaaacagaagatgctattggatattgcttgacatttgaacacagagaaagaatgtttaatagactccagggaacatgcttcaaaggacttaatgttctcaagcaatgttgagttggcagcctgtagtcctagctagcatacactacctcttacctgagaggtgtcttttaaaaaacaaaattctttggcgggatcctaattggaggatccctctagaa

SEQ ID NO: 2443 - DNA, 488 bp, Homo Sapiens
gggggagcaaaccctgcccctgcccgcctctcagaaaagctgctgtggtgggcaggggattgggccatctgtctcctggccctggcccatctgcctcctggccttcctgttccagccactggggtgggggccaggttcactgggaccagggctacaggcacagagtctcctggaaaagggagaggggaccctgccaaagatgaggctccagctgccctggggggagggtggtggccattactagagggggcctgggtcctctccccaggggctgccagcatccaggccaggaagcctggagccaagaaccttctggctctgagggagcaagagctggcaggcggcagggctggcacagacagacggaagcagaaaggacagtttggctgctgtgtctgctgcgcacgccccctccccggacagcacctgccacctagaaactttcttagcaaaaaaattaataaaaacaaatccattgtcctcttaaa

SEQ ID NO: 2444 - DNA, 625 bp, Homo Sapiens
gtcactgcttcggatgaggtcattgtgtatcagtacgtgattcggcctggcccctcggcctcggcggcttcttcggcggcggcaggcgagcccctggagtgccccacctgtgggcactcctacaatgtcacccagcggaggccccgcgtgctgtcctgcctgcactctgtgtgtgagcagtgcctgcagattctctacgagtcctgccccaagtacaagttcatctcctgccccacctgccgccgtgagactgtgctcttcaccgactacggcctggccgcgctggctgtcaacacgtccatcctgagccgcctgccgcctgaggcgctgacggccccatccgggggtcagtggggggctgagcccgagggcagctgctaccagaccttccggcagtactgtggggccgcgtgcacctgccacgtgcggaacccactgtccgcctgctccatcatgtagtagcgcctgcctgcccgccactgcccgctgagcctcgctcgctgcttcttcagggacccggccctgccctgccgcccgctgacccttccttccccaccatggcttccggccccaccccgagaggcattgtcgctgcagccaactttgccattaaaactctttgcca

SEQ ID NO: 2445 - DNA, 557 bp, Homo Sapiens
  misc_feature (68)..(68): n is a, c, g, or t
caggtcagggaatgagttgctctaagtgaacagtgaattcttacttctcagcctgtatcaattgtacncagggttcatgattactgtgacccactaagggacgatctttgaggaaacagacctggagggaggtaatttaaggagggaaagtgagtgggttttacagactgctttgtggcgacattcaggaacagaccattcaatggatgacttttcagtacataaaagcaagcagtaatggccaggagagagcaaagatgccctaagaatgacatcagactgaccaaatgtgccttttcaaataagttatgagaacgaatgaattggaattagagcaaggtattggacagaaccatgctagtctttgagagaacgtgtggattgggtggatgtttggaccgaatgaatggtaactttttaatgtgaaacagagaactgatatatgggctgtcatgtcaccctagggtactgtcgctctgtcatgtgtagcaatctttccaaatttttgttggtgggctgaacaaagataaaactaataaagtatgtgtggataccaa

SEQ ID NO: 2446 - DNA, 968 bp, Homo Sapiens
  misc_feature (257)..(320): n is a, c, g, or t
ggacgttccccgcggccggagccatggagatgccgctgccccccgatgaccaggagcttcgaaatgtcatcgacaagctcgcccagttcgtggctcgcaatgggcccgagtttgagaagatgactatggagaagcagaaggacaaccccaaattctcgtttcttttcggaggcgaattctacagttactacaagtgcaagctggcgctggagcagcagcagctcatctgcaagcagcagaccccggagctggagccnnnnnnnnnnnnnnnnnnnnnnnnnnnnnnnnnnnnnnnnnnnnnnnnnnnnnnnnnnnnnnnncagggcgcgccatccatggacgagctcatccagcagagccagtggaacctccagcagcaggagcagcacttgctggcgctcagacaggagcaagtgacagcggccgtggcccacgcggtggagcagcagatgcagaagcttctggaggagacccagctagacatgaacgagtttgacaacctcctgcagcccatcatcgacacgtgcaccaaggacgccatctcggccgggaagaactggatgttcagcaatgccaagtccccgccgcactgtgagctgatggccggccacctccggaaccgcatcacggctgatggggcacacttcgagctgcggctgcacctcatctacctgatcaatgacgtgctgcaccactgccagcgcaaagcaggcccgggagctgctggccgccctgcagaagggtcgtggtgcccatctactgcaccagcttcttggccgtggatggatgacaagcagcagaagatcgcccggctcttgcagctctgggagaaaagcgctgcttcgatgactccatccatccagcagctacagagcccagcctggggcttggtcagtacagggcaccctcataagagtatcctcagtggtccaccgtgcactggcctccagcagagtccagactcagag

SEQ ID NO: 2447 - DNA, 658 bp, Homo Sapiens
gcagccagggcgccggaagaggcctggaaatccacgcggcttcccaaagacggcgcctctgttctgcgggttcgtgacgaggatttatttccacccactgcgcctgggcgcaggtctgcgggtccgcgcccactgcgtgcggcgccacggaccatgtcggtgactgatcaggctttttgcaccactgccacagatgacatctactgccagggcgccctggtcctggggcagtcactgaggagacacaggctgacgaggaagctggtggtgttgatcactcctcaggtgtccagcctgctcagtctctccaaaaggtgcaagatatcatccagccacttggactgagagctcatcccaatccagttcctgatcagatggggccctgccactcgttccagccaggtgacctggtgttcgttaaaaagttccagaaagaaggactcctgcttagaaaagacctcatactgtcatccttaccaccccaatggctctaaaagtagaaaggaatgcttacattcatgacaccccctagtacaaagcatgtttaactgtaatctatgactaactaccctaattactggattggcagaaccctttttctccttctcttgtttagtcttccaaccattatatattaaaattagtttcttaaatttgt

SEQ ID NO: 2448 - DNA, 698 bp, Homo Sapiens
  misc_feature (120)..(120): n is a, c, g, or t
tccaggcgggaccatgacgagacacaggacttttaacaggtaaatggcagaatgttagggactgtttctcctcttctgcagtcaccacccaaagcacttgcctcccctgtattacccaantatggtggctgtggaacacacacttctttaggggatttgcttgggttgggctaccccaacatctatttccctactttttgcacaatgcccatctccctttggggaaattgcccctctcccactgtgtatggtcttgggttggtgggaggtcaaagtgccctgcttagttgagtaggctagctataagtaaaggtattctgccattgcttggtggggtgggctggctgtatgttaaggttccctgccattgtctagtagtgtaggctggctccatgtcaaggtatcctgacattgctgctggggtgagctggctacaagtcaagttgtcctactattgcttagtcgagtgggctggctgcaagtcaggtgtcctgccattgcttgttgcgcgttggcctggctataagtcaaggtgccctgcctttgcttagtggtatgggctggctataagtcaagtgctctgccattgcttagtgcactggctggctgtcagtcaaggtgcctgcccttgcttagtgggtagctgctgtccgtcaaggtgcctgccattgcttagtggggggagctgctatcagtca

SEQ ID NO: 2449 - DNA, 459 bp, Homo Sapiens
tttgtaaaatatactaagataaagccacatgcagactaactttgtcataagaatgaaatgtgaaattatagagggtggctttcagatgtttcccaaagcaacagttgtaaattgaggatcgaaggctctgtgttttgaggaggtggtaatagaaaaagaagggttttcagacttgacaatttctattttattttagatagtagcacatttcttcacatatcactaaaagcatgagaaagtttaaatatttggcatgtttatatcaaacataaaatattaaaggctaaaactggattcttgattttcatataatgtgcttttgggaatctgttcatatatcatgcataagtggctttggaatatttagatgttatgtttgctagggcaaaatctaatattcttatttggtggtggcccacgataaacatattgagacatctatcgttctaaacttgaaag

SEQ ID NO: 2450 - DNA, 434 bp, Homo Sapiens
tccaggcgtgaccattgaccctgacggacgcccgcactcctgcttagtgaggaagccagcatcgtgcagcggctgctggacagaaggcatactcgttagtccgtccttgtctagctggggctcgctgcagccgtcggtgagggcccagctgggaatgtccttgccctcatctcctccctgtcacttctcccaggtaagagacagtaaggtctccaaggtcccttgtttaggtcataggagcagactgtatagatgcaaacatccctcgtaccaagcggcaagaaagaaatcatcctcacactggtcacactgtccaaccacagcagatgatgggcgcgtctgtggacaacctcgagaccacgtagggcgctgtcattacgtatgtcattacttcttggctacagtgtgtcaatgttttcgggctacactgagtc

SEQ ID NO: 2451 - DNA, 536 bp, Homo Sapiens
gaagcaagacgttcatcaacctgagagaagtctccgaccggttcaagctgccccctggggagtacatcctgattcccagcacttttgagccccaccaggaagctgatttctgtctgagaatcttttcagagaaaaaagccattacccgggatatggatggaaatgtagacattgaccttcctgagcctccaaagccaactccacctgaccaggagacagaggaggagcagcggtttcgggctctgtttgaacaagtcgctggtgaggacatggaggtcacagcagaggaacttgagtatgttttaaatgctgtgctgcaaaagaaaaaggacatcaaattcaagaagctaagcctgatctcctgtaaaaacatcatttccctgatggacaccagcggcaatgggaagctggagtttgatgaattcaaagtgttctgggacaagctgaagcagtggaataaacttttccctcgggttgatgctgacaagtcccgcaccatgtctacctatgaactacggactgcactgaaagctgca

SEQ ID NO: 2452 - DNA, 378 bp, Homo Sapiens
ccgggaaccattgacgacgagaggacgtggcttccgtgatcccagagccaggccttttcctggagatgggaaccggagcatctagccttatgcagggccaagaccatgctaactggcttccatgtttatagtttaaaatctgtttactgagggatgaacgtacctcgcaggccgtgggtatccgcagggacagatacactctgtgtatccttaaaacaagtgcaattgaatgtccattggcctaaagggcttagagccttcatagcagggccttcctcagtgtattcaattcgggttaattttgctgtctgatttgcaaggattggtgttgtcatcttttaccttggctttgtccaagttccagggtttcttagaaat

SEQ ID NO: 2453 - DNA, 384 bp, Homo Sapiens
cccaaagatcaaacacagcatttcatgtaatcagaattctaaacgcacaactcgggagctgtgcacggcttctcaagtgattcagttgcagaaccaagagcaaaactcgcctgtttttgtcctcaatggcacccatgagctttccaatagtatagttttctttctttccttgtcctggttgaaggtaacgtgttcctagaaaagaaaatgctgcataggaaaactgagatgccttttattccaacgtgtttgatccctgtcactcattattctgtactttttattgtacattctattcctgtaattattgtgccctttaagtgttgtaaaatcgttttggaatttgtgcctgctagttatgcaataaacaggctctacaagtga

SEQ ID NO: 2454 - DNA, 1509 bp, Homo Sapiens
  misc_feature (192)..(249): n is a, c, g, or t
  misc_feature (608)..(703): n is a, c, g, or t
gcgagtgtggaaactactgcaaagagaatagggaaagttgaagaggtgggcgcgggtactacgttatcaggatactgcgtataaccgccaacgggcaatgggcgaggcatagggggggagggaagattaaactgcgcgactgtcgcgtgttaaaagaacgggatttgataatataaaatgagctgtcctgcnnnnnnnnnnnnnnnnnnnnnnnnnnnnnnnnnnnnnnnnnnnnnnnnnnnnnnnnnntggcggaaggatgctggggccacttccagcattaatggagggacccccggcccctgggtgggaagtcacaaaagggtacgggccaagaggggaagggggcttccctgacccggaggaccccgggggcactgctgcaccttccacggattctgggtctagcgttgccctctttgcagatgcccctgggggtgtgggcccaaagacctaaaaatgatttctgtaaaatgggtacaaggagctccctgataaagcagctcatcttagacagccttttggagttagcgtaactgtccttcctcatttgtagttctcaatagcgaatggtagacctggaggccccatgtgcacctgccagccgnnnnnnnnnnnnnnnnnnnnnnnnnnnnnnnnnnnnnnnnnnnnnnnnnnnnnnnnnnnnnnnnnnnnnnnnnnnnnnnnnnnnnnnnnnnnnnnncgagggtgggtggccagccgggcctggtgtgaggagcagagctgcaagtttcctacagacaatccactgagtgccccagagacgtcactgaaaaacttcccagtgctctgacgtgccagcagtagggcctgaactgtcatccctccacgggcctccctgaggcctcaggccctttcctttgcagcaccaggtctgccttgcacgcatcccaggaggaaacacacaggcagcctcctgctgcgcggagggcaacggagagattcatgaggcccctggtcgctctgcagacatttaaaatgacgcttctccttgcaccagctcccagggaaatgtcaagcccgggtccacctgacggagggcagctcacccgcctgcatctatcctcaatgcacttaaaatatgaagacatgaaaggtggctggaaaggccagagcgggagcctgacaaacactcctgcttctgggtcaccacgcgagcactcctggcaaccgagctgtgggttcacagacgctgcctgaaaacaaccgccacccccgagagcagcggagcctccttcatcagccatggcggctggcaacgccgaggacagagcgccagctctagaggcgtggggcctcattctgggcctgggaccctgcgagggacggtcacatgtccagcccagctcccggctggcagtagacggtgactccacggcgacagaacctgcatccacccgcgcctgtcgggtccggggagcggccctggaggatcactcctcagtaggtgatcttccagtgggtgggttgctcacacgccttctcttg

SEQ ID NO: 2455 - DNA, 487 bp, Homo Sapiens
tgtaaagaaattataaaatgtcatgaaaacaaaagagaataatatgtccaagatcagcatttcccacatgacaaacagtaggcttcctgaaattccaaaccctcttcctcctattgtattgacttgctcataaacaataccaacagacaaaccaacagagaatgcatggaacagattatccgtaccttaggccgtaaattccacgcagataacgtcaagatatgggcaggttccaaaagagtttctgcctctcccaacctacagttatctgggctgaggcagccccctttttgaagctgtgtccatggaatttatgatctgatgtagggttgttctgttctactggcacttcacggttacaggagaacaaccccaggacagagcccagcagtctgcccaaacacttcaaattctatctgcaaagaactccaggccttgctcaacccactttctgggtggaatataataaaaaattttccttaattca

SEQ ID NO: 2456 - DNA, 501 bp, Homo Sapiens
tctacctgtaccccattaaaatatgagcacagaaaataaagtgtcttgctagatgttgcgtccccagttactgtccccagcgatctgaataaccctcagggattcccacaccacagtttcagaaactagattaaaagttaaatgctgtgactttaagagttcattcggcctcgatgtgattttaaacagaaatgcaaacatggaccctgaaatcaagagacatcaaaatggaaagggaaaacataaagtctcctaggacaagccctagatccccccaagaatggtctatcaattctttggagtctccaaatcccagtttgagaaacagtagcccgggtggtctccagtgagcttctcagttagaagattttgtgtttcatctactctataggctggtaagcttcaatcagaggatgtactataagaatgtggggtattacttctatatggcctcagtgaataatgtgcacaggccactaaagaaaatataagcactatttt

SEQ ID NO: 2457 - DNA, 513 bp, Homo Sapiens
agtgttttttgctattagcattttcaagtttatccactgtttcttttacaggttaactaccctgtaaaattacttaaaaaaaagtgttaaggcaatgtcatcaacataggctggcattttatgtgcatcctaaaatggaggattcctttccatgtaaacaaggtaaaagaataattattctgtaaaagtcagtttaatctgtttgtatatttgcctcatctatagaaggagctaaagcatacagatgacttaacacttcaaaatacattgatacagtttaattaattttgaagccaaaactagccaaactgtgtgcattaactaccatatttatgatgtagcactgggtatgttctctgcataaatctctgtggttttagtcttgttccaactttcagccaactgcattcactacttggttggtgcctgtggccttagggctactacatagtcttcagtgcccattcttgatgaaaagtagagaataacctgtataataaacaaacattgttt

SEQ ID NO: 2458 - DNA, 313 bp, Homo Sapiens
actgccccagtgaggcaggatagcttcacagaggagaggggtggggacgagacccttgggctcagggaggctggagatctgtttggagctccctgcaggcccaagaagtccaacaagccagtgtgttgagccctttcgaggctcatttcatcatacatctttcatgtcaccaagattgaattaaggaaatacggcaagagacccagtgtttgaatgcagggaggaacttctgactgtggaggagagggaacctggtggtgggaccatggaggcagggtgcagaggtgcacaataaaattgattatcatcgtta

SEQ ID NO: 2459 - DNA, 180 bp, Homo Sapiens
tatgattttagtttgtgatttaattctgggagcaagaatgtttcaacaattgcacatcaatcaacatgatacatcacatcaagaaaatgaaggataaaagccatatcatttcaattgatactgacaaagcatttgataaaattaaacatccatcatttttaaaaccctcaaaatactgaa

SEQ ID NO: 2460 - DNA, 423 bp, Homo Sapiens
ctgctcatcccatgcctggcagtgtcatggtaggagcctagggcgatagggccctgtcccagggctgctgggtgctgacctggtggcccacagtccagagcctgccacaggaggtgcaagacagagcaagctggacagatggaggaagccaggctgccagacaaggcctccccaccccacctggcacagaacaaggcgggtggtggggccaggagccggggtatgcccagacacctgcatgcctgaccaggagcccagaggctcagaacccaccacccagctgcaggtcagccctccctggggcgcaggcgtccccaacctctccccctgtgccctgaagctggacattttggggcaaagccagccaggagagccagactaaacaaagtggactcaataaagtggattttcccagaaaaaaaa

SEQ ID NO: 2461 - DNA, 379 bp, Homo Sapiens
tttcgctttcttctgccgaatggaacgtggtgactcgggagccgcggagcgcctttcgaggcagctttgtctgcggaaagggagcgctgcggacggcctgtcggaatggtcaccgcccgctttccgcgggaggcgcgccgggcaccgctgggcgatttctccgcctcagcgaaagaaaggagaagccggcatttgtggccgcccagtcttcgttccgatttgagccctggcgtcggcgggaggtgacagtgctgtccgcgcgcaccccctccgtcgccgtcagggtcgtgctccttaggtttcctgcggtttttctgctgctctgagacggtctctgggaccaagttctcacagcatcgtcttctcctctcgcaaataa

SEQ ID NO: 2462 - DNA, 490 bp, Homo Sapiens
gcggccgcagcgccgtctgctcagcgcccgggtcaataggagccagtccttcgcaggcgtcctcggcagccacgagcgggggcccaggagtttcccggtcttcagcccgccggggcccccacggaagccccccgcgctctcccgagtgtccaggatgttttccgtggctcacccagccgccaaggtgccgcagcccgagcggctggacctggtgtacacggcgctgaagcggggcctgacggcctacttggaagtgcaccagcaggagcaagagaaactccaggggcagataagggagtccaagaggaattcccgcttgggcttcctgtatgatctggacaagcaagtcaagtccattgaacgcttcctgcgacgactggagttccatgccagcaagatcgatgatctgtatgaggcatactgtgtccagcggcgtctccgggatggtggctacaacatggtccgtgcctacaccactgggtccccggga

SEQ ID NO: 2463 - DNA, 447 bp, Homo Sapiens
gtcccatggaggaaccaggcctggcgccccggccctccccagcggctggtgtgggcagctgttccctgcctcgcagtgtcctggaggcagctgtctcgcagactcagcttggtctcccgcaggcttcagaaaaacccaattgcacgtgtgggattcttccccagcccttgggtgcggggtctctgtgcacttgagagctgggggacccacccaccgtctcccactccaagttcatcccagagcgttgggcccgctgggcacctggcacctggcctgcagatgctgctacgagtgaccagtgctgtgtggaggaggccaagggcggcccctgggaaaccgggcttcaacagtacaaggaaaagaaacttgctctgttttgtaagagcgtgttccttttcctcttttttgtcactttaaagaccaaaaagaataaagaaagaaaagaaa

SEQ ID NO: 2464 - DNA, 654 bp, Homo Sapiens
caggtttctgtcagccatactaccagcagtacaagtaccttggcgttggttcagcgctgacttcgcatccaactcgagctggctccgggagaagaagcggctgtgtccactgtgcaagtctgtggtggccctagtcacggatggtggcctcaacctgacatccaccttcctcagaaaaaaccagtgtaagaccctaaccatgctgatgcagcccgcggggtccctcggctcctacagctaccggagtccccactggggcagcacctactccgtgtcagtggtggagacagactacgaccagtacgcgctgctgtacagccagggcagcaagggccctggcgaggacttccgcatggccaccctctacagccgaacccaaacccccagggttaagttaaaggaaaaattcacccccttctgcaaggcccagggcttcacagaggataccattgtcttcctgccccaaaccaataagtgcatgacggaacaataggactccccagggccgaagctgggatcccggccagccaggtgacccccacgctatggatgtctctgctatgttccttcccagagcccctgccccggctccccgccaatagcaaccctgcccactcgggcttcatcctgcacaataaaactccggaagcaagt

SEQ ID NO: 2465 - DNA, 384 bp, Homo Sapiens
atccaagcctcaagtcatcatttgtggcccagggaagatggaatacaccaaatgggacaggcctggcatgtacccacagagactaagagttggtgctggtggttgtgggtggcaaatgatattacctgaagaagggacggaatgggtgctgggcaggacaaagcatcagctgtccagttcaggcctctcctctttccctggtgtcttcattttcctccgtctccctgctgtcccttaccctctgcccaatctatcattactcctggtcttgggagttgccttctgaggatactccactgggggtacctgagcctggattagagggcagggggaggatattgcctagccaaagtgggtgttcaataaagaaccatttggagataa

SEQ ID NO: 2466 - DNA, 505 bp, Homo Sapiens
ttttttaagtctggcaaggatttattaggaagcttattagtcacagtgaataaaagccatgaaaagaagaactcaaatctccaaattctggcatcggacttacaacactagttagaagctaataaacattaaggaatttccaaggggaatcttaactaagtctcaatcttactgaccagattacccacacacatagaaatgatccccatgctctccccagactgcttagctaggcagtggaaaagaccttctccccaagcttaagctatcacgcatcagcaggagactcctgtccttctagctataaccacaggacacatgtgcgtgacagacaactccaagctgggcaacttgacaagaatgctgaacaatgagaggggaaaggagcaagcaggaacaagtgttttagttggagaccctcctgatggctactactaacacaatccggaggcatcagaaagtttcctatagcccacaaatagtttcctttaaaaaaacagaaact

SEQ ID NO: 2467 - DNA, 602 bp, Homo Sapiens
agctgagcacttaatgtaattaattccaggttatgactcttaaaaaacattggccattagagaaatagttctatttgcccatccaaatcacctgaatgactttttgaaagaataggggtccacatccccagatcccatcccagctgtgcacagtctgaagcaagcagagtgaaacaagttggcaacttgttccaagcgtgggcctttgcagtctgtgatccagtgttactccaggtcccagtctgtcccatacttgtcttttgctacagttagttagttactttgttatcatccccttgtaaactgccttcaatatctgggataaggaagacaaagcttaatgacaactaaggttctagctgacatctttctttcatatttaatttttgtgagttttcatctgttttctgtttgtttatgtgtcctaggttcgttgacctaaccacatgggttttgttttttggttttatattagaacttagaaaagtttgttttacagcagtattatggaacagaagagaccattttaaataatttttttaaacagcccaaaacacacaaaagatacttgttttctagagacagggtcttgctctgtcacc

SEQ ID NO: 2468 - DNA, 708 bp, Homo Sapiens
cgtacatgtcatagctttccatgagtacaccccttccccacagtgagcagtgatggcccgaatgttattatgacatggtgagcgctctgccatcttacgcgaacgatgttcactatgacttatgatcaacccacgcaggactcttctctccctggtcgcctctccccatggtctggaatcttccagctctgccagaattggcctttcccagatgctgcactgtcccagaccacacagaagtctggtcacctctgggcgcctgggatggtcaccgaagagaagcacgctgtccccgtctctcctggcttctgccagaaaatcgaacaagtgcaattaacacactgttactgccgaagcctgaaactcccaggacttgtccttgatccttccagaaaccaccaggtccggcacttggagccccccggagagggacctcccagccgagccctcaaagaactccatgaaatcaggaactgcttgatgaaatgtatctccttgtacctggaagatgaagcccaaacacccacacctctgtctcccccagggctcgggatgtctccagcagcccggccacgcagcttcccaggtgggctcggggaggtgggagcagggaccatctctgtcccctccaccctcactccatccacctcggagaccaccctcccccagccagatacggaataaaactacagacgcagacgtcggaat

SEQ ID NO: 2469 - DNA, 1057 bp, Homo Sapiens
caggaagcccctggtcccagagaagaagcaaagggccaggtagaggccagaagggagtctttggatcctgtccaggagcctgggggccaggcagaggctgatggagatgttccagggcccagaggggaagctgagggccaggcagaggctaaaggagatgcccctgggcccagaggggaagctgggggccaggcagaggctgaaggagatgcccccgggcccagaggggaagctgggggccaggcagaggccagggagaatggagaggaggccaaggaacttccaggggaaacactggagtctaagaacacccaaaatgactttgaggtgcacattgttcaagtggagaatgatgagatctagatcttgaagatacaggtaccccacgaagtctcagtgccagaacataagccctgaagtgggcaggggaaatgtacgctgggacaaggaccatctctgtgccccctgtctggtcccagtaggtatcaggtctttctgtgcagctcagggagaccctaagttaaggggcagattaccaataaagaactgaatgaattcatccccccgggccacctctctacccgtccagcctgcccagaccctctcagaggaacggggttggggaccgaaaggacagggatgccgcctgcccagtgtttctgggcctcacggtgctccggcagcagagcgcatggtgcttagccatggccggctgcagaggacccagtgaggaaagctcagtctatccctgggccccaaaccctcaccggttccccctcacctggtgttcagacaccccatgctctcctgcagctcagggcaggtgaccccatccccagtaatattaatcatcactagaactttttgagagccttgtacacatcaggcatcatgctgggcattttatatatgattttatcctcacaataattctgtagccaagcagaattggttccatttgacagatgaagaaattgaggcagattgcgttaagtgctgtaccctaaggtgatatgcagctaattcaatggcagatttgaatccagaaaaataacac

SEQ ID NO: 2470 - DNA, 530 bp, Homo Sapiens
  misc_feature (422)..(435): n is a, c, g, or t
  misc_feature (463)..(472): n is a, c, g, or t
ggcctctgctgcccccttccccagcccttagcacagagagggacacatgcccctcccccagctgcgtttttttatagtagatttttaacaaaaaacggggagaaataatgcatttctgtggatacagtgcccaccgccctcctccacttggaaacggtatcctccctgcccatccgtctgtctgtcgcccttctcccggccctcactaagccccggcacttctagtggtctcacctggaggcaagagggaggggacagaggccctgccacgtcctgctgcctcctgctctctggaggtactgagacagggtgctgatgggaaggaggggagcctttggggggccacccggggcctggacctatgcagggaggccacgtcccaccccacctcttgtttctgggtccctgctcccctttggggnnnnnnnnnnnnnntttaattttctttatggaaaaattgacnnnnnnnnnntagagagagaggtatttaactgcaataaactggccccatgtggcccccgccttgtaaa

SEQ ID NO: 2471 - DNA, 715 bp, Homo Sapiens
cggtccggaattctcgggatgtcccaggaacgatggactcacgcttttgtccttaaactgacttaccatccgaggagttcccatgacgccaaaacagcgaatgtccatcaacaggaatcggatgggaacagaattccatggtctcaatgacttaagtttatgggaagtcattgtggccataatggtagcagaagtagcgagcacgctcaggtgataggacgactcctgagacccagcgaccgtggagacagcctcgggaagccctggcccgtggatggatcccttggctgtctgaggactgctccagaagtgcgggaatccagggcccacccagaagaccgtgaacagttccttagcctcccaccccccaaggcagctcttttcatccaactcagtttacaggcgtggtttgtttttcaaactgggcttcctggatgtacaaatggaactgtggtgagggtgcgggcctggggttttctcctgggcgtcaccaagggcagccctgggctctggctggggatgaaaacgaaacccgatcgggaaagtaagtggagcccccggccccgccgagccacagccccccaactgcctattcccactgcccagttgtttgtccacatcaggagttgctgattgaattcttgctactcttctggctctggggtcggccagtggattcaggagttgaaacaataaagcgcgcgtcacgatagtg

SEQ ID NO: 2472 - DNA, 736 bp, Homo Sapiens
cggcgccatgcaggtctccagcctcaatgaggtgaagatttacagcctcagctgcggcaagtcccttcctgagtggctttctgataggaagaagagagcgctacagaagaaagatgtagatgtccgtaggagaattgaacttattcaggactttgaaatgcctactgtgtgtaccactattaaggtgtcaaaagatggacagtacattttagcaactggaacatataaacctcgggttcaatgttatgacacctatcaattatccttgaagtttgaaaggtgtttagattcagaagttgtcacctttgaaattttgtctgatgactactcaaagattgtcttcttacataatgatagatacattgaatttcattcgcaatcaggtttttactacaaaaccagaataccaaagtttgggagagatttctcttaccactatccatcctgtgacttgtactttgttggtgcaagttctgaagtttataggttaaacttagaacaacgacgatacctgaatcctctacaaactgatgctgcggagaataatgtttgtgacataaattcagtgcatggcttgtttgccacaggaaccatagagggtagagtggagtgctgggacccaagaactcgaaacagagttggcctgttagactgcgccttaaacagtgtcacagcagattcagagataaacagtttaccaacaatctctgctttgaaatttaatggtgccttgacc

SEQ ID NO: 2473 - DNA, 837 bp, Homo Sapiens
tgggaagtccacaaggcattttattccacaggaagaaaaatgatgactctgatatgaaaaccagactcaagagtcttcacacactggtgactgtaatagtgtttacataatagagaaccagatatttttagaattttatcaagcagctactatggtattttgaggcccagatcatacttacaaacaaagtggccctggagccttcagaacattgcgatgagcacccaccaagcagcaagacactcttgggatttggggaaggggccgcttgtctgttttccactgtgtagtgaccaggcccaggggctggggaagcactggcctggctcacccttcagtgagcacagagaagcagcgacagccagggagtgacacgggtcggccaactgtgctgggtcaagggactgggtagctttggatatctccttacccaatttactcttattccatttattttactttcctcagagacgaactgtgtgtttgaagcagacaagaaaagcagtagaaatgatcttaacaaagtcttaggcattgctggctgaatatcagtttacaaagagacggggcatttaaggagccaggggcagggcctgtttcctccaaagctttggatgttttcctggtgagaaccaggaggggatgtcaaatgcccctgaaaccttctggccttgtctggcccagggctgcagggcaggggagagctgagaagtggagcagctcgcggttggccctcccatctcccacccagccccgccctaggtggtctttggattccattttaacatctgcctctcctaaggtgcaaagccgactgtcatctcagcggggatcctt

SEQ ID NO: 2474 - DNA, 677 bp, Homo Sapiens
ggtttggggtaccctggttaccccaaactcagaccagggaaccttcaaaccgaaaaccacctcctcctgcttgagcaattgggccctcaaaccgcagaggtgtccccactggtcctggaggaccttcaaatctcaaaggacacccacctcctagctgaccttgtggcccctcaaatctcaaagggcctcctccccccatttgtcctggtgacccatcaaaccgaagagaagctggtgtgggaggtccatcaattcgagggcttaatttattgggtccttcaaaaatcatcttcgttgggccatctcttgctactgatggcctactaggtccatcaaataacggtctgtcttcagctaaagctgtaagtcgctgatttgtatccaggccggcgaatcttgatgctggaccatctacaaatggtttatctgaatcttcatatcgaggtcgcttaagtggaaaacgatcattgaatggagatctctgctcttctcgcacaccttcttgatactgaaatagctgtcgaatttgatgcacaacaacaaggaagtcatcctgtgtaatttcaccagatgctaaacgttcactcgtcttttgaagtaattctcttttgcttgcaagagttaactctttaggaatctgaagattggcatctacacttaatcgatgctgttgctgc

SEQ ID NO: 2475 - DNA, 508 bp, Homo Sapiens
gtccagacccccagtccctcctccttcaggcccaggagtccagacccccagcccctcctccctcagacccaggagtccagaccccagcccctcctccctcagactcaggagtccaggcccccagcccctcctccctcagacccaggagtccagaccccagcccctccttccccccggccaaagggagagcttggtctctggacctgccttaggaaggagagggagggcaggaaggaaaaaaaaggacttggaggtggcaggagtccgagccctgctccttgtgggcgctcacactgcccccggagcctgctgggagtggggccacccgtggacagctgaggttggggtcaatgcctcctgggcacccttgcctcgccccagaccggcccgtccagtccccatcacacctcggcggcctttatttattctgttcccccagctcggccacttctctgaaggagggctgggttctgggcctgtatcgaataaacacaaacctggatggcgc

SEQ ID NO: 2476 - DNA, 205 bp, Homo Sapiens
gcacactcagcctctccaaagtgcacaggattacagcgtgtgaaccactgtgcccagccggcaccaaaacttgcacctatcctaaatatggagcttcagtgtaagtggcctcccagagacatcttggactttttaaaaaatctagttattgggttctgggagggaccttcctgtttgggggctccaggggtagggctccaggggt

SEQ ID NO: 2477 - DNA, 354 bp, Homo Sapiens
caagtttcagcaaatgcttgttcccctcagcccagccccaggagttaggactgaggctgggtcagagtctggagtggggaatggggtagtttggaaccacatgactgagtttgaggggtgcccctcaccccagctgaggtaggtgggtcagagtctggccaggtgagaggaggcaccccagtgcttggccctgactctgccccctggacaccttcttcagtcaggaccccaaaacaaggagacacaggtaggaggagagggacaactggagtctggagccctaggtgaggggtggttaacccctgtgtgtgtgcatacatgcacactcacacacacataccacacaaagacaag

SEQ ID NO: 2478 - DNA, 491 bp, Homo Sapiens
atactaagataactgcttgtgttagccatacatttgtggcaatttgttaacagcagtcctaggaaacagatgtgtgtagtaaggaagtgataatgttggaagctgaataggtaataatattaaatgaaaaagaatgccaaactcaaattggtagatatatgcttaaaataagcacatatgaatgtatattgaagggaagatatagacttttattttcatggggtgtttttagtaaggttgcttgaatgaatagaaagcatttcacgtataccataagtagtatggactgttaacacgaacctggaaagaggtccagtcatcctacgtggcagcagagccatgctaggccccaggctattttttgccctggtcaatttgatttttgggttttgactccagcaatattgcctcacaaattcatttttttaattcaagtacccacccaaatcctacccatctgcacctttttccctgggctggactcttgcctg

SEQ ID NO: 2479 - DNA, 616 bp, Homo Sapiens
  misc_feature (28)..(28): n is a, c, g, or t
  misc_feature (122)..(122): n is a, c, g, or t
caaccgcccgttcgtgtaaggcctgttntagcaacaccaacctcccgtgcgggcgaacctcaagctgccagtcccgaggcttccacgtgtcagagcaaatgtgatgacccaaaagaggagcntctgtcacaggagagaggccagggctttcagtgaaggggagcagaagaagtgtggttcccagacccatcacaccaggaggaactctaggtgggacaagaggacactggagcaggaggacagcagttccaagaaaagaaagcttttataggaaagcccagtgacatgggccagcagccacagcatattgtaaactgaagatgaccagctcgtgggaccatctagataagcttgttttttgtaaggagtttgtgtgctgttggaaaacatggaaaatgcatccttaacacctgagcctctggtcatcttcagtattttctgtcatttgcaaaagctttcagagggcattgtgtatccgtaataatgtccttgaagtcagagactggaaatgttgatctcttagtcttctatagacaaggaggtcagactggagtgaatgttgtaaaagttgaaatgtatatttgtatagcaaataacaaaatccttttaaaattta

SEQ ID NO: 2480 - DNA, 658 bp, Homo Sapiens
actctgttatgctcaggagaccgaattgcggtggctcagtacagcgagatgtcaaggtggagtcccgttttgatgagcaccagagtaagcctgagatcctgaatcttgtgaagagaatgaagatcaagacgggcaaagccctcaacctgggctacgcgctggactatgcacagaggtacatttttgtgaagtctgctggcagccggatcgaggatggagtgcttcagttcctggtgctgctggtcgcaggaaggtcatctgaccgtgtggatgggccagcaagtaacctgaagcagagtggggttgtgcctttcatcttccaagccaagaacgcagaccctgctgagttagagcagatcgtgctgtctccagcgtttatcctggctgcagagtcgcttcccaagattggagatcttcatccacagatagtgaatctcttaaaatcagtgcacaacggagcaccagcaccagtttcaggtgaaaaggacgtggtgtttctgcttgatggctctgagggcgtcaggagcggcttccctctgttgaaagagtttgtccagagagtggtggaaagcctggatgtgggccaggaccgggtccgcgtggccgtggtgcagtacagcgaccggaccaggcccgagttctacctgaattcatacat

SEQ ID NO: 2481 - DNA, 761 bp, Homo Sapiens
  misc_feature (588)..(588): n is a, c, g, or t
tgtgagaaagctctttactgggggtacagcgaggaggagcaaggccatctccccctacctgcccccaccccctcctagggtcctggggtgagggggggtcttccctccaccggaccaccactgtctttggtacaataaatagaaaaaaagggggagaggggcccaagggtccagtccttagtggggagggagcggccaaaaccctctccttgacccccctgccccaggccccaatcagtgcaggcctcacccaccccagctgggtagcagcaattccagtcaaggagagagatgaggatgggagcccagggcccccagatgggggagggtatggcttcaggaggggccccagggagggggcagggtcacgagctggctgcatgtgctctggggtacaccacggaggcccaaggtgaaggccccaagagtggacagtggtcatacaaggaggctgggaaggggtggacgacctccagtcatccgagtccggagggctcgaggcaagccggcgtcgataggggggcaggcagctgggtgaggtggggagcagtcagcagggccgcccaccaggctcacatccatcagctnccgggggtgggggtgaggtggtgatgggggacgaccaaggtatcggggctgggggggtaactgggccccggtcccaggcagtgacgaagcagaggcaggggcctgatgtgtcttgtggggcacatcaccccctcccagggccgcaccggcttggaaggtggaactggggctgt

SEQ ID NO: 2482 - DNA, 464 bp, Homo Sapiens
gtgaacacttacgcaggtgacctgcagaagaagctggtgccctttgccaccgagccgcaagaacgcctggccaaggactcagagaaactgaacgacgaaatagggaaggagcaggaggagctgagggacaggcagccgacccatgccaatgaggtgagccagaagaaaagggacaacctgccaaagctacagcatgcgcctgaagccctacgcagaccagatgcagcacccaggtcaacacacaagccgagcagctgaggcgccagatgaccccctacgcacagagcatggagagagagccgcaggagaacaccaacagcctgcaggccgcgctgaggccccacgccgacgagctcaaggccaagatcgaccagaacgtggaggagcacaacgaacgccttacgccctacgctgacgaattcaaagtcaagattgaccagaccgtggaggagctgcgccgcagc

SEQ ID NO: 2483 - DNA, 647 bp, Homo Sapiens
tgctaaaattaatgtggggagacacaaaggatcccaaatagccaaacaatcttgaccaaaaagagcaaagctggagacatcacactactgtattgcaaaatttattacaaagctatagcaatcaaaaaagcatgatgctggcataaaaacagacaagtctaccaatgaaataggacagagagcccagaaataaacccatgcatctacagtcaattgctttttgacaggaacacacattgaggaaaggacaatctgttcaaaaggtggtattgggaaaactggatatccacatatagaagaatgaaagtggatctttatttcacccctcatatgagaatcaactcaaaatggaataaagacttgaaactatgaaactgaaactataaaactgctagaggtctggacagagatttctttgatatgaacccaaaagcataagcaataaaagcaaaaatagacaaatggaattgcattaaagtgaaaagctaccccatagaaaaggaaacaatgaaggaaagagacaacacacagattgggagaaaatatttgcaaatgatacactggagaagggactaatatccgaaatatactaggaactcaactactcagcaacaagaaaacagacctgaggcataacaagaggcccg

SEQ ID NO: 2484 - DNA, 594 bp, Homo Sapiens
atgcgcccagttcctccaggcattggaagatatatccacacagctcacaggaacttcctgtgctcattggatgaaaatccctcagtcccgtgagtttgtccttcaaaaacgtgatgctcgactgccggaagctatgaacgcctgtgtgaaagctctggtctccctgaggagctaccatctgcaaatcgtgactaagtacatcctgattcctgcaagccagcagccaaaggagaataagacctatgaagacccttcaaaactggaagccaatagaaactggaggcactgatttaatgaatttcctgaagaccgtaagaagcacaactgagaaatcccttttgaaggaaggttaaagtaacccaacaagagcacattttatcataacagagacatctgcatgcattcctgtcattacccattgtaacagagccacaaactaatactatgcaatgttttaccaataatgcaatacaaaagacctcaaaatacctgtgcatttcttgtaggaaaacaacaaaaggtaattatgtgtaattatactagaagttttgtaatctgtatcttatcattggaataaaatgacattcaataaat

SEQ ID NO: 2485 - DNA, 438 bp, Homo Sapiens
agagagagagagaaatcatccgagagacgcgagctgtacgcgcctgactgctggaggtaatgccatgagcagcagaatggagcgctcctgtctgggcttgctcagggcctctccacgggaccttctgtgcctgctccattgctccgcccttccccagtgctaagcactgagtcacctgataaagatcgcagtggcccttcaggttctgccacaggctggggtcaggcaggcacttgccaggtgcacggcaccctgaccttccacaaggtatttccctcctttgacaggaagaagataaagcttttttcctgtccattctgagacgcaggctgtgctgctccatggcactttctgagtgccaccagctggcagggcatatttctctccatgatcttcactaacgtgacagtgacatagatgtcactgagcaaaacagga

SEQ ID NO: 2486 - DNA, 511 bp, Homo Sapiens
ggaattgagccccgtgtcttcattctgatgagtacacaactccaagttctatgaagcaagcctagtttcttcatctatctttaccggccaccaaacaccttagggtcttagactctgctgatactggacttctccataaagtcctgctgcaccgttagagatgactttaatcttgaatgatttcgacttgctgagtaaaatggaaatatctccatcttgctccagtatcagagttcatttgggcatttgagaagcaagtagctcttgcggaaacgtgtagatactggtctagtgggtctgtgaaccacttaattgaacttaacagggctgttttaagtttcagagttgttaagggttgttaagggagcaaaaaccgtaaaaatccttcctataagaagaaatcaactccattgcatagactgcaatatcatctcctgcccttctgcaagctctccctagcttcacatcttgtgttttccagaaaataaaaacagcagactgtcaaaaaaaa

SEQ ID NO: 2487 - DNA, 542 bp, Homo Sapiens
  misc_feature (258)..(292): n is a, c, g, or t
gaagaaattccctggcactaggataaatagaggttgtaaaaccatcttttctaggtgctataaaatagaatcctctcatggtgcaagagtccttctatttctagggggtctaggattatttttattattgttgtaacctttcccattctggaaaatcttcaagactctgtcttgtaaatgtcaccaacccagtaggttctacagaagcaataaaagaaaaacatacccaaaataagtttcaattttgaaaagattatnnnnnnnnnnnnnnnnnnnnnnnnnnnnnnnnnnntgcagtctatatttatgggccctcttctttcactagaaatctctcaccaaactcagcatctcaaaggaatgaatgaataatagatgcaacagccctgaggtaggggctttcttgatgtgctcagaatcgcagtgtgggctggagtgtggtaagagagaagaatgcggagagtaagttggaagagggagggaagggtcagatcatgtagggccttgtaaatgttgaaaattaggactttggattttattct

SEQ ID NO: 2488 - DNA, 477 bp, Homo Sapiens
ttaggctaaactaacaatatatatacgatatatacccttctacctccacatgcactgaatatgcatttaattgctctactcttcattctgtggcaacctaaccacaggggaagtaagaagtttgttttggtatttcggaaactaaagtccttatgggatggggtctagaattgattctcctttcctgagttttactccacggagtcttaggtacctggtaaaaagttgtcttctaaattaagggtcattgctttgttgtctagctgctaatgtcttacttttgtttcttttgctttttaatcagttcttaataggatatagttttatgttttccaagttataacttggagttaatggtcactagattatcagttatgagcagtgttaaaatctcctattaatgtgtaatgtacctgtcagtgcctcctttattaaggggttctttgagaataaaagagaaaagacctactttatttg

SEQ ID NO: 2489 - DNA, 740 bp, Homo Sapiens
cacttaggcatatgttatcccactttaaatatttagtgcctactgaatcagaaaatataatataaaggatgtctcacttacttgagtagatatgtttccaggtggctataatattaatacattgcagaagcaagaggtgaaaccctagaataatttgaattaagggcaaacaagaaagaccggatccccaacaaatacacctactttaaatgttgagtgcattgagcacacatatgtctttggtaaatgtgtttctactagacatctagaacaatgaattgggaaaaccttggcagatcactcttctctgaaatcatacctgtgataacaactcatgttttccttcttttctagagtgaccgtctccttatcaagggaggcagaatcgtcaatgatgatcagtccttttatgctgatatttacatggaagatggcttaataaagtatgtatatggaattcttctctttattggtttgcacttcctccttcattaatggctcataaaggaggttgaattacatgaatgtagtgaaaaaaatcttaatttaatcaacagaatgaagtgagatactgaaggcaaatttgggcagaaagtattgatgagcattctacgggtcatggaaaagtggaagatgtggccctcatccttaaggatactggaaaatgtgcacaaattacagcaccctaaaaatataaggctttgtgcaataggtatcaaaggagttgaagtcgggataag

SEQ ID NO: 2490 - DNA, 538 bp, Homo Sapiens
  misc_feature (312)..(348): n is a, c, g, or t
cgagaccgagcgtgcaacctgagggccaaacaccgagggctgcagaagtcaactggcagagctggtgggcaccatggaccagcaggtggaggagttccgacgccgggtggagcctacggggaaaacttcaacaaagccctggtgcagcagatggaacagctcaggcagaaactgggccccatgcgggggacgtggaaggccacttgagcttcctggagaaggacctgagggacaaggtcaactccttcttcagcaccttcaaggagaaagagagccaggacaagactctctccctccctgagctggagcaannnnnnnnnnnnnnnnnnnnnnnnnnnnnnnnnnnnntgcagatgctggcccctttggagagctgagctgcccctggtgcactggccccaccctcgtggacacctgccctgccctgccacctgtctgtctgtcccaaagaagttctggtatgaacttgaggacacatgtccagtgggaggtgagaccacctctcaatattcaataaagctgctgagaatctagcctc

SEQ ID NO: 2491 - DNA, 436 bp, Homo Sapiens
cagtttagatgttgtatttgtttttcaaatctatccttttctcgtattttaaacttcttttgtgtgtttaatcaacgtgtgtgtgctaacgttttgagagatctgatcttgctattgtgttaactgttgcttatggtacattgtttcctcatgcattttgtgattttggattgtgaagtcattttcagaggactccgttgtgcagcctgagttgagggcatgtcacactaaagcaatattgtgtttgcttctgtgaggcatcctgggatatctccatcctaagaccagtttttatagtaatatctcctatggattgagaataaatgaataccaagcccatgtaaggaagacgactttggttttaaattcttatgggagactccttaccccatccagaacctgggctgaaacaaacttccttgtcatctataagtgg

SEQ ID NO: 2492 - DNA, 341 bp, Homo Sapiens
gttcatgactataaatataacgcaaatatgattatgctcacaagctctggaatggtaaaaaaaccccacatatctctaaagtgtctctctatccttgctttcaagtcatgacaaaaaaattcacagcagtttaaaggatggtgaaagactaaacatgggcccactaaaatagagattaattttacctattacactcctatagtaaaaattgtaataagtatgatattgtattaagtaacattctatagtaagccgttggagcaaatacagcatttaacaggttcatttacagatccggcatggtagccttcagacagaacatcttattttcactcttgaac

SEQ ID NO: 2493 - DNA, 422 bp, Homo Sapiens
ctcggcacccggctgttctagccacttaacacactaactgagataacaaaaataggaaacatcccagtccgtcactctgtagtcaaagaaaaacttgtcatagttaagagactaggaaaaagctgttgtaatagttaagccacacacctattcacaatgcctattctccaaatgctaggcagttaggcagcatgatgatatttactacaaactaggtaatgtcattcataggacttattcttagataaaataacatgttaaatataaaactaaaactctttgcccacccatccaataggagtactcactgtatgagagccatcaaagacgtatcataaacatttacagtgtaacacgctaagtgctataatgaaagcagagaggaagaagtgactaaatctgctttaaaaaagggaagtcaa

SEQ ID NO: 2494 - DNA, 532 bp, Homo Sapiens
gaccaaacaatttggacatgtcattctgtagactagaatttcttaaaagggtgttactgagttataagctcactaggctgtaaaaacaaaacaatgtagagttttatttattgaacaatgtagtcacttgaaggttttgtgtatatcctatgtggaataccaattttaaaattttaggtagttctgtgtcaaaaaacttcttcactgaagttatactgaacaaaattttacctgtttttggtcatttataaagtacttcaagatgttgcagtatttcacagttattattatttaaaattacttcaactttgtgtttttaaatgttttgacgatttcaatacaagataaaaaggatagtgaatcattctttacatgcaaacattttccagttacttaactgatcagtttattattgatacatcactccattaatgtaaagtcataggtcattattgcatatcagtaatctcttggactttgttaaatattttactgtggtaatatagagaagaattaaagcaagaaaatctga

SEQ ID NO: 2495 - DNA, 339 bp, Homo Sapiens
ggcatatagtaaatgttcaataaatggtagctatgattgtcatcaactcaaacagcctcccttcattcacctttacctcataaagcaactctttctagaatgttctatatataacaattgtattaaaggcttcttgaaggagaagccatttgtttgtgtctttgttcaacaccaggctcctgatgctttcagtagtgtctggcgcacagcaggcatttaaaaaatatttgttaaatgaattttatagaattaagtctatcacactcttttgagtactaaaatgctattatagtctgtggataaaaataataaaacaaggccaggcgcagtggctcacac

SEQ ID NO: 2496 - DNA, 462 bp, Homo Sapiens
gaagtaataaagcaaacttagtgaaatgttaacaaaccacgtaaactctctggcactctgtttcttcatctacctggagacaaaaagagggctgaactattttgtttttattcacactgtcatgaaatccatttaggagttgaggtcagcattagaaaagcgttattaatgaatctggatagaggatttaaaagcattcaaaatcaaaactaaaataaactaatatcatatttatataacaccaaggcactctaagcatgaaaagcttatggttaactacatgatatctgtatacttcttctccaaactaattgagttacatgcttacaagagtcaatttgcatttgtactccaaagtatttatgcctattatacttatagaatatatttaaatatgtaaactaatgaaatacaaatagaaagttattttctataaaaactaaattgataaacatgaacaac

SEQ ID NO: 2497 - DNA, 414 bp, Homo Sapiens
aaaatattaattaaaagtctttccacattgaaaatccctgaatcaaaagcctttaaatgataaatcttatcaacatctaataaaatattcatgctaattcttcaaagtaacttccaaaaatagaagcaacacttcccaatttactctatgaggccaggagtgccatgataccaaagctggaaaaaagcattgcaagaagactagaaagaaaaatccgtaatgactacagacacagaaatccttattaaatactaggaaatttattccaggaacataataaacatgattatataccatagccaagtgagattttattttcataaatgcaatgttagcttaatatctaaaagtcaattaagataatacacaatattacttgaatacatgacaaaaagaacatttcgatagacacat

SEQ ID NO: 2498 - DNA, 481 bp, Homo Sapiens
tttggctacttgagttgtggtcctaaaacataaaatctgatggacaaacagagggttgctggggggacaagcgtgggcacaatttccccaccaagacaccctgatcttcaggcgggtctcaggagcttctaaaaatccgcatggctctcctgagagtggacagaggagaggagagggtcagaaatgaacgctcttctatttcttgtcattaccaagccaattacttttgccaaatttttctgtgatctgccctgattaagatgaattgtgaaatttacatcaagcaattatcaaagcgggctgggtcccatcagaacgacccacatctttctgtgggtgtgaatgtcattaggtcttgcgctgacccctgagcccccatcactgccgcctgatggggcaaagaaacaaaaaacatttcttactcttctgtgttttaacaaaagtttataaaacaaaataaatggcgcatatgttttctaaa

SEQ ID NO: 2499 - DNA, 418 bp, Homo Sapiens
agaggtccacgaggcgagacagacccaaagagagaggcaaggacgtgggcgttggtcggtcttgcggggaggaggtgccgtgctctccccacttcctgacccagcagaaagcgcccgggcgtgtccagataaaccgcgccttaatcgaggcgccattccggcccggaacaggccaggcccagggtgcagagtggacactcccaggtgtccaagccggcgagctcgggtcccgcagaaccggcggccctggagacgccccgagggcagccccgctgcagccttgctcgggtcccctagcccggcgcctccgcaaaccaacccaccgcgggccgccgagccccgctccgggatccgccggctgcctccatcccagaagagtgcgcagagaattaaatctagatatttacatgttaaaaaa

SEQ ID NO: 2500 - DNA, 568 bp, Homo Sapiens
  misc_feature (112)..(125): n is a, c, g, or t
ccacgcgtccgcccacgcgtccggtgaatttctaattctaatgttcagtgcaatggaagacatttatttggacagtaatactagcaaagttggtagatatttgattcttcannnnnnnnnnnnnncattagttgaagtgggttttagttttgtttaaaattataaccagcgtattttcacatcattctgtaagttaaatgatatcaaacatgaaagagatgttctcatttttctttttctgattaaacgtctgatgcatatcatttttctataagtaatcagttgcttttaaaatcagaaggctatattattctaatgaccctattcgatctaaatgggtttgagaatccatatcagcaacatacgtgttttttgacagaaagtgaaaacaaattccgtaaaactgttagtatcaaaaagaataggaatacagttttcttttccacattatgatcaaataaaaatcttgtgagattgtttatgttttgaagcaggaggatttcttgagatttgatggaagtgggagttgggaaggattcaccatacttgtgttctcctccctttataa

SEQ ID NO: 2501 - DNA, 644 bp, Homo Sapiens
  misc_feature (420)..(540): n is a, c, g, or t
gctcgtgaatatagacccgtgtttaaaaaagcaggtggtacgccctccggatttcccgggatatcgtcgaacccacgcgtcgccttgccatggcagcaaaatacgacgactaccaccacgagcgctggcacagggatccatcccgccatggcaacagcagcagacggctgccgcagcttctccaggagcccctcagatgcaaggcaaccccacttattggtgcccctgccctccccggggttccacgccgcttgtgccgcctggcggggcttcctctcttccgcttgacgcttgtccaccggttacctgtccggccgctggcctgctccgcctccccggctctctccgcttcccactacccccaacggtaccctactcctcacctcacactcgccacatctcatcatcaccatatatcgnnnnnnnnnnnnnnnnnnnnnnnnnnnnnnnnnnnnnnnnnnnnnnnnnnnnnnnnnnnnnnnnnnnnnnnnnnnnnnnnnnnnnnnnnnnnnnnnnnnnnnnnnnnnnnnnnnnnnnnnngccaccaccatcccatttcctcccactccttttctccaccatctcactcatccctcgtctcattcccctcgaaccctctactccatccacctccaaccattcca

SEQ ID NO: 2502 - DNA, 529 bp, Homo Sapiens
gtgtttctgcacattcttcagggtggccacagactggggggtccaaggagcaggtgtagggacagaaggagggtctgagaaacgcacagcccacatgggccttgaaggatgcggcctcacccagagacaggagtcctggcaggcccccctccagcgtggagatgcctacgcgtgcggcaaggactggagggaagcgtaggaacacagagggcagcagccccacagcggaaccaccaggggcaaggacagcggggctctgcaggcttcactgggccacggccagcccgcatccacccaatgctcaggcctcagggccaagagggctcagcctcagcacggggggagccctggggtggggagacgcgagcgcccacctgcgcaccccagcagccttccgccctccgcctgggctcaggggagcagagcctggaagacggcaatgacagggtcctcgtgggtggtcaccaccagcacgctgcggaacttgtcaaacagcatgagcagctgggagcgccgcgtgttctcgttg

SEQ ID NO: 2503 - DNA, 454 bp, Homo Sapiens
ttttaaataaaaatgctgcaaggtttccgcctctgcattccccttgtgatggctggcaggtggtctggaagcgtcccggatggcggccaagcgcttaggggcaggtgtcctggcagcgaagggcagcccggccgcacgacgtcactgcacagcggcgtccgggtggctctggtatcgctgcctccaaacctcctggatcttcctgcaccacttgtgtgcgttcccgctggggtccatcagataatacgtcctgttaggcgtgtggacaaagaaagttttaaaattcttggcctctggtcgaagttcttgtgaccaaggaatttcacctttcagaactttgttgacaggatccacataatataaatgtggtccttctggtgagcaacagctggtcgtcgtcttgcaaataaacccttccgcttatccactgggcccatctttaagtattaaatta

SEQ ID NO: 2504 - DNA, 632 bp, Homo Sapiens
  misc_feature (105)..(138): n is a, c, g, or t
  misc_feature (142)..(182): n is a, c, g, or t
ctcccctcagcccccttgcaagttcatggcctgtccctccaagacccctgctccactggcccttcgaccagtcctcccttctgttctctctttccccgtccttcnnnnnnnnnnnnnnnnnnnnnnnnnnnnnnnnnnttcnnnnnnnnnnnnnnnnnnnnnnnnnnnnnnnnnnnnnnnnncttgtgcttcctcagacctttctcgcttctgagcttggtggcctgttccctccatctctccgaacctggcttcgcctgtccctttcactccacaccctctggccttctgccttgagctgggactgctttctgtctgtccggcctgcacccagcccctgcccacaaaaccccagggacagcggtctccccagcctgccctgctcaggccttgcccccaaacctgtactgtcccggaggaggttgggaggtggaggcccagcatcccgcgcagatgacaccatcaaccgccagagtcccagacaccggttttcctagaagcccctcacccccactggcccactggtggctaggtctccccttatccttctggtccagcgcaaggaggggctgcttctgaggtcggtggctgtctttccattaaagaaacaccgtgcaacgtgacaaagaaac

SEQ ID NO: 2505 - DNA, 185 bp, Homo Sapiens
caagaaggtgtgcaggagagaagaggccccggcatggggatctgggttctagagggcatgtgatgactgtaaatgttcactgggtgggtagggagtggtatccagtgttcaagtgcagaaatctttggctttgctaccagttccatatgatgagaaataaacgttcgctgaggttttgtttcata

SEQ ID NO: 2506 - DNA, 562 bp, Homo Sapiens
ctgtgttcactgcaaatatattaaatatacaactcttattgagcataattttcataaaattaacccccaacaaaattataatgccttttgttgtaattttacacctttatgtatttgatagtacatacgagttcagaaacttatgaatcttaagaaatattacatgcaaaaagtctctgaaagcagtttgcacttctaaacaaataactgaaatgttcggtcagtaagttattgatgcactcaacactggggtatttacaattaattattaaagaaaaaatccaaaatcagttcatattttaagtgcagagtctgggaatcagtcttcattactagaatctgaatcctcagatgacgacgatgtactatcagatccagatgaagcatcagctttctctgaaccctcatctgtgctgttttcattgagaggacttggttcagttcctcctttgtcttcctgatctttaattctggaatcttcttcttttacttctacagacttagacgagcctaagtcactgtttttgttttgtacatcaaaagtattggactgggacaaagt

SEQ ID NO: 2507 - DNA, 531 bp, Homo Sapiens
gcttctagaaggtcttatcaaaagttcctattttaaaaattatcataaaaactaaagggcccttcaaatgaccataaagcagtacaaatcaccaatcctagctaagtaaccaggtcacctgcaaaagcagcacctcggaaacaagagagcctgctgcattcacactcaaagcacccatcatataaaagtatcctagttaaatataaaaagcaaagttcatttccccaaagctcaaacagcctatgctgctcctgttcttttgccaaatctacccaaggcctgaggtggaggaatgctactttccccacaaatggtgggtcccactcctggccccagacctgaaggctgcagagttggaaacccaaggtccaaggagagaaacatgctgagaagttggtggtggacacaaggctgcagtaagcactgttagagcccatcagatcttcctaaatccagggactcaggactcgggaggggagactgcctgctcaaccctgctccttgggaaaacagaatctgggacatgtctct

SEQ ID NO: 2508 - DNA, 767 bp, Homo Sapiens
tcgaaaagaggagggtggtccgcagacaccccgggatgtcagcatcccccgacctgccttctggcggcacctcccgggtgctgtgttgagtcagcaggcatggggtgagagcctggtatatgctgggaacagggtgcaggggccaagcgttcctccttcagccttgacttgggccatgcaccccctctcccccaaacacaaacaagcacttctccagtatggtgccaggacaggtgtcccttcagtcctctggttatgacctcaagtcctacttgggccctgcagcccagcctgtgttgtaacctctgcgtcctcaagaccacacctggaagattcttcttccctttgaaggagaatcatcattgttgctttatcacttctaagacattttgtacggcacggacaagttaaacagaatgtgcttccctccctggggtctcacacgctcccacgagaatgccacaggggccgtgcactgggcaggcttctctgtagaaccccaggggcttcggcccagaccacagcgtcttgccctgagcctagagcagggagtcccgaacttctgcattcacagaccacctccacaattgttataaccaaaggcctcctgttctgttatttcacttaaatcaacatgctattttgttttcactcacttctgactttagcctcgtgctgagccgtgtatccatgcagtcatgttcacgtgctagttacgtttttcttcttacacatgaaaataaatgcataagtgttacaagctcaaa

SEQ ID NO: 2509 - DNA, 532 bp, Homo Sapiens
cttgcccagagaaaaggggcacaacagacaagggctagcatgggccctgggaagcacggagttcagggtggggcaggcttgctgtgtcctggcctggcaacatacctgcactgtgttgtggtagaagaacacaaagctgggaggcagagaactggttctaatcctagctgtaccctgacaagctgtgtgaccttggccaagttactttcctctcctggacttcatatatggtttttccatttctttgcatccctgaagctccatgacttaggggccatcaacttggttgtccctgagtgtttccaagaataccaacagtgcccagggttttactcagcttggagaggaggcctagagcctccctgtggtgaggaggaaagaggttagagcaagtttgggtctgcagtgctaggattagaggtggcctcacaagccaaaaccgctatactcacagccttaggacagtgactccctactcgctgcctcagtgtttccagctgtaaaaaaggacccttggtaccttcgacagaac

SEQ ID NO: 2510 - DNA, 464 bp, Homo Sapiens
tgggtgaaggacccatacccccactggtttttgagatcggcattcagcgctgtcttatggcagccacagccccaggtggccccagagcccttgacatgtggccacctggggctgagtgtgactgaggccctgaatttttacttctataaaattagttccagattagtttacattctaattagtttacatgtaaacagccacacgtggctggtggccaccaggtgctgacgcccagctctggatgaccacacctgctacaagagatgacttttctagagaagagtagaaacacagcggcagaaacacagctctgcacttccgagggcctcccactccttctgatgagactgcagaggaagtctgtttggccaagcatgctattaacacgttttcctgcttgttttgttttttaacagagcaaacaggtctgtttctattaaaatttaaaaagcgttaatatttaa

SEQ ID NO: 2511 - DNA, 400 bp, Homo Sapiens
tcggcacccggctgcttagccacttagcaaaggcagctatcctcagtgactgcctgactgtaagaacatacataaattgggaaatatctatagtatgttagcttattttttttgagcagttcctactccctagcacatatctttgatatgagcaatcctgaagaatagtctactgtgacagagactggctctgttctttctttaaaatgtatcacagctcccagatgccttgcaatttggtgggctcgtgtgactggctgtcaccagcagtgtggaggagggggtgatgtgtgtcacctccaggtggttaagagcttgtgtaacttctccccatcgtgtctgaaggctggatgcagccaaaatttcaatgctttagaaagtagcagaatgattcattgga

SEQ ID NO: 2512 - DNA, 515 bp, Homo Sapiens
tgctgggattacaggcatgagccaccgtgccccgcctattcttcttttaaaccaaaaaaactttcaggtgagtcaaaaccaaaaccaataagctttttatgacttaaccatggatgaaagagacaccttcaaaatcaggtgcaaaggaggcagcccccccagcccggaaccaccccacagacagtagagaagggcccttgtcagcgcaggagtgaggggcgctttccagcactgacccagcgacaaaggtgaaggtgggaaaagccccttgtgcacgtggacggtgaaactgagctggcgcctcgggcagtgatgcttgggctggcaaagaccagggtagtagagttctcactggtcataaggccaagctctcaagacacaagacaaacaggaaagaaacacctgcccctgggaggaaagaacccttgagcaccaaaaccaaatttacatgagcgtcccgagccacgcgaatgactttttcccaccaagctgaactgggaagagcaggaacaagg

SEQ ID NO: 2513 - DNA, 502 bp, Homo Sapiens
atcaccatcttcatttaaaggatgaagaaactggctcaatgatgaagtaatttgccccaagtaacatagctactaagtattttatataaattataatgaccttatcttcgtactttacaagcatttaaaaatacatcatctcgctttaatgctcacagcaacctatgaaataggctttccgattactgttttatagataagaatggaaatttagtgatataccctaggcccactcgaatcctagtttatatgaagtacagctgtttctttacattgtacttgatcactacctgggtatgggagcctctatttttatgtaccaagtacattaagggtagggtataggggaggaaagatggaagtaaggcagtttaaaggcacaggaaagaggctggagcccaggtgtacaggcccatctaaagaccataaactggtattgtaatgtcaactgcacatgccactctgaaatccaatattggcccaaaggtttttcttgatatta

SEQ ID NO: 2514 - DNA, 775 bp, Homo Sapiens
gatgtgtgagtcctgtatgagtacacggcgtgaacagcacgggttccaggtggagggtcgccgtgccgcataccccgggcctgtgcaccggcctgcctgaccccgtcaagggcaccgagtgctccttctcctgcaacgccggggagtttctggatatgaaggaccagtcatgtaagccacgcgctgagggccgctactccctcggcacaggcattcggtttgatgagtgggatgagctgccccatggctttgccagcctctcagccaacatggagctggatgacagtgctgctgagtccaccgggaactgtacttcgtccaagtgggttccccggggcgactacatcgcctccaacacggacgaatgcacagacacactgatgtacgccgtcaacctgaagcaatctggcaccgttaacttcgaatactactatccagactccagcatcatctttgagtttttcgttcagaatgaccagtgacagcccaatgcagatgactccaggtggatgaagaccacagagaaaggatgggaattccacagtgtggagctaaatcgaggcaataatgtcctctattggagaaccacagccttctcagtatggaccaaagtacccaagcctgtgctggtgagaaacattgccataacaggggtggcctacacttcagaatgcttcccctgcaaacctggcacgtatgcagacaagcagggctcctctttctgcaaactttgcccagccaactcttattcaaataaaggagaaacttcttgcaa

SEQ ID NO: 2515 - DNA, 133 bp, Homo Sapiens
ttattttacagtgtgttttatgtactgttattaatatatacttatttaaccctcaaaatccttctgacttttattttaaacttacacatgggagggttatgtaatttatccaatataatattgttaatcgcat

SEQ ID NO: 2516 - DNA, 510 bp, Homo Sapiens
ctaggcctgtctcccagcattgtgcaaggctcggaagagaaccaggaagtgaaactgggtgaaaacagaaagctcaatggatgggctaggttcccagatcattagggcagagtttgcacgtcctctggtcactggaatccacccagcccacgaatcatctccctcttgaaggattttatttctactgggttttggaacaaactcctgctgagaccccacagccagaaactgaaagcagcagctccccaaagcctggaaaatccctaagagaaggcctggggcaggaagtggagtgacaggggacaggtagagagaagggggcccaatggccagggagtgaaggaggtggcgttgctgagagcagtctgcacatgcttctgtctgagtgcaggaaggtgttccagggtcgaaattacacttctcgtacctggagacgctgtttgtgggagcactgggctcatgcctggcacacaataggtctgcaataaaccatggttaaatcctgaaaaa

SEQ ID NO: 2517 - DNA, 387 bp, Homo Sapiens
  misc_feature (50)..(173): n is a, c, g, or t
  misc_feature (182)..(217): n is a, c, g, or t
gggaggtggggaggggaggagctgagtccaaccaggtgtggtggctcatnnnnnnnnnnnnnnnnnnnnnnnnnnnnnnnnnnnnnnnnnnnnnnnnnnnnnnnnnnnnnnnnnnnnnnnnnnnnnnnnnnnnnnnnnnnnnnnnnnnnnnnnnnnnnnnnnnnnnnnnnnnntctgtctcnnnnnnnnnnnnnnnnnnnnnnnnnnnnnnnnnnnnctcaaggtacagtggtgggagtcaaaaaaagcataaggagaaaaccaagactgaaaactgttattgagcttagtctgtgcctagttcagtccctagcattttacaagttttctctgagttaacaaacttgtgggggaaactgaggctttcagatgttgaataacttgtgt

SEQ ID NO: 2518 - DNA, 782 bp, Homo Sapiens
tgatgtaataacgaatacaaatgcatattacactgatatgcatatctacaagaattgacactggtacatgtatttatgttctgtagaagctaagcttggaaaaacagtgcaggaccaccaccacatacttggagaggagagaaaacgtcagcactttcttcttatttgaacctccctaatgtgaaaataatccaaccatctacagacaaaaatattccctcacaaatggtagacaagattcttttctataattagccctttcttcctttggaaagccctgtgaagaaagtgttgtaatgaagtactgcttcaaaataaatgatccatattattgcacactcagcaaacacactagagaacagcatctggatcttggaaaataaatgtaaaagaggctattggtaaatcatgccaaggtcacatcaggatttcagaggattgcgtgtattcatgggaagaatgaaccactataagcattctgggaagcaccacgttatccaaacaatggtaactcctaatttcctctttttcattaagatagggtacagttatcaaccccaaacataaacttgatgtgtatcaccaggcagtctcttcctactaactctgaatatgctcaagtagtaagcatttaacactagaatacaagttataatgcccagcacaattttaatataattttaacctttcagaggaggatagttttggaaggcaaagaactctgactgctgaagaatgaaacacgaagtaaagtctgtaagtggatagaacaggggggtccg

SEQ ID NO: 2519 - DNA, 625 bp, Homo Sapiens
ccacttaaaaaaataaaataggcctttcaaagggcttgaatttaatgttacttctgaaatgaaatgatatatgttttataagttacatgtttcacaatttcatttgatcttcccaccctcatttttgctacagagccaggggtaaaatcaggtccagggtttctttccttctcacaagaatcttctcatgaactcaagggagaatcatgaaatcttagaaacaatctttttgggaagacaaaacagactcactttcctttgtcatttcaaatagactgtcctgaaatatcctaaaatcacatcaaaactagtaaaaatgagtgtaatcattttcaaagttctgccataatataaacatgtttgagtgaaggccttagctttgcttgtatctccacttgtacacctccagcaatgtaaaacttagtagcaaaggctgcctattctattttgagaccgctggtatttctggcaagttctaaatcagctgctttatatttctcacccttccttagacctatattccctttttctggacccacacgaactaatacctcttctgaaatttatctgacatttgactgaggtaaaagtatgcttgggttacccaggcatggtggtgtgtacc

SEQ ID NO: 2520 - DNA, 549 bp, Homo Sapiens
atgagccactgtgtcgggcctcaataaataaatacatgaatgaataaataaataaataaagatgcttcacaaatttgtatatcatccttgcacagaggccatgctaatctctgtatctttccaattttagtatatgtgctgccatagcgagcacagcttcaatttttaatagcaagttggatcaggattgtgggagaaaattctagcttgggcatagagatttacagactaacagtatggcccaggagagaatatagaatgaaaagagcaagaggtgaagcttgaaaactttggttatattaacatttaagatgctagcagggaaaaatgtgcttatgaaggatgctgaaggagagagatgagagaataaagaggaaaactaggagacactagtattggagaaagctaagagatgagagttttaagaaagaatatgtgtttagtgatattgaaagtccagaaaagacagatgagataagaatagaaaaattctattgggtttggtagttagaggtcattagtgacttttgtgatcagctatttctatta

SEQ ID NO: 2521 - DNA, 351 bp, Homo Sapiens
accaacaagatgagggtaacctgctgagccttcctatctgcagcaaaaagtaggccttggagttcagaagtagagcaactgttattttcactgagaaggaaagttccttctcaagtcagctgctgatctttctatggaatgagaaagagtgggaaccatgaaagaagagcttgggaggtcaatgggaccgacatagagggtgaaggtcagggggaagaactcaaagggggaaccacagcatccctctccccatccccaaggtggcacgtgaatgttctggagatgaacaaagggcatgagggagtaggggcatgggagagctccagggcaaccgccgtgcataggagcata

SEQ ID NO: 2522 - DNA, 1402 bp, Homo Sapiens
  misc_feature (974)..(1005): n is a, c, g, or t
  misc_feature (1141)..(1149): n is a, c, g, or t
gcggccgcgccgcagagatgtgactcgggccgaagcgccagctggagcgtcggcgctgcggggccgcgggggtcgaatgttcgtggcatcagagagaaagatgagagctcaccaggtgctcaccttcctcctgctcttcgtgatcacctcggtggcctctgaaaacgccagcacatcccgaggctgtgggctggacctcctccctcagtacgtgtccctgtgcgacctggacgccatctggggcattgtggtggaggcggtggccggggcgggcgccctgatcacactgctcctgatgctcatcctcctggtgcggctgcccttcatcaaggagaaggagaagaagagccctgtgggcctccactttctgttcctcctggggaccctgggcctctttgggctgacgtttgccttcatcatccaggaggacgagatcatctgctctgtccggcgcttcctctggggcgtcctctttgcgctctgcttctcctgcctgctgacccaggaatggcacgtgcggctgctggtgcggcatggcatgggccccgcgccatggcaactggagggcctgaccctatgactgcatgctggggccccgcatcctgctgttccgagagatgcattgcgccccctccggggtaaaacgtccttgaactcccttacaggcccctccgcaagtctgccatgcccttaaattgcagggtccgttacgcccacccccccggggacttcccaaccccgtacaaaaccacggttggcgtaccgcagcccccgctagccagggttcgcgccccgccaggcggtttccgtaagaggcccggtcccctgcgccatttctccccgcgaaaaacaagtagagccccgtctgaaccgccatccttgcgccatgtgtgccggcaacccccaccccctcgacaaaaacacccccgcagaaaaacagggcggcgccattacaactttatattcccgcggtnnnnnnnnnnnnnnnnnnnnnnnnnnnnnnnntgtgttatttgcccacccaattcctcccccgcggagtgaggaggtcgccctaattgtcgccacccttcgcgcggggggtggggacccccggcgcttgttcctatagacccctccccctggggggcgtgttacagannnnnnnnnatgatcgccccccccaaaaaacacgcgcgactccccccgtgttttatgtggcgacacccctcttttcctttatcggcagccatccccgggcggagccgattccccatatacacaaatcgccctttcatagacccctgtggggcggctccctttggcccctatcaagcccgaatggggtgggcgcccaacacaacaagagatatcccgtataatactcccaaccgctttgataagtggcgcacaaacccctttt

SEQ ID NO: 2523 - DNA, 590 bp, Homo Sapiens
ccctgaaagtgactgcctgcagaaagaccagcagttgatattaaagcgcaaatgaattcaacctcagccctgaaaataacagaattttgaagtttcctatgactaattcacaaaaaaagtaattgtaaactagtactattatggaattactctactgttctttctttaatagtggcaaatgaaagcataagcttaagcattttttcatattctgaagtctccccacacataataaccaagtggtagactcacagccgtccaacttaaaaaggcaaaaccttaccttggaattggaattactgtaaacagcctactgaaaatgcatttttatcatgtaacattcttctacttgtttaacattgctgattttctctggcagcataattttgtggttaagagaatgaattctgaatgtacactttctgtctcaaaccctggctgtaatttcagctagttaataattctttgtgttcagttccactatctaggtattttcctcaaaaggtaaatacaatggtttctgaaagaatcatttgcattatcagcctgtttgggatgtctgagatcagtgcctctgggttgttaatact

SEQ ID NO: 2524 - DNA, 355 bp, Homo Sapiens
gcggccgcgagcgcgggagctggagcgctgtcagccgcgctgagcctgcgcctggcgaccgcgatgcaggaggcccgggactgagggaggacggcgagacggaggcccgcgacccgcaccgccggggcaggcacccgggtctcgggggcagcaacgccggggcccttgcagaacggggactgtttggggaagtggctcccgcacagtgcccggagaggggccctccctctgtgcccccttgggaaacactgcttggtacaattccaatacccagctgtaccctgccctgaagatagaagacaaaaccctggctctgtcactcacgcgaggcataaccaaccattcttttaataaa

SEQ ID NO: 2525 - DNA, 516 bp, Homo Sapiens
  misc_feature (57)..(57): n is a, c, g, or t
  misc_feature (195)..(195): n is a, c, g, or t
gtgaaatggggctaacacccccactcgagcggttactgtaaggatccagtgaattanagctggtaaacgtttggcatatgccaagcaaagggcagatgcccaggcaggcgctcgcaccagaagagactgagaagtggttgaagccgccctcacctggcttccagctactgcaaagacagccttggggggacacgncccttcttcttcctctggtagaccagaagctggactatcaccccaggaacccgaggccgccccagagtctgctgtgctgccagccaaggggttggtgagtgaggcggggggcgctccttcccacaagctggtctcagtgagcagaaacaggggtgcagtgaggaggaactccaaagctggggcggcctgctcggaggacggccgcgcaggctaaaagagcggcccgcggagaaggcaaggaggcggctcggctccccggacgtcagcctcggcggccccacctacctgccctgcagattccccgaatgccgcggcggccgc

SEQ ID NO: 2526 - DNA, 426 bp, Homo Sapiens
aacgtatatcttaactttattgaataagtaagtagccattacatatagattgcaagtcattcttggtcctgcttagagataggtgtttattccaaggtgaaatgacagcacaaatccacagttctactgcaagtgaaatactactttcagggtggcttggtatggacacaatctccctcaatacccattcaaagcagtctttgctttcacctctccctttaggtgagggattcacggtatgtaaaataagcttgtaaagaacccttctgtatcagaggtagttttgtgcctgcactgtgaaccatagaaggcatttggtcaaaggtgtcataaaaggggcagaagaggtacatcagagcacagagttgggatcgattatttttttcaagttaattgcccatagtagcaaaagtatcaaccaaaatt

SEQ ID NO: 2527 - DNA, 497 bp, Homo Sapiens
ccaaatcttaagcaccgcgcctgtacagtcaagaggagaaagtgtttgaagaccacagtttggctctgccacttgcctgtccatgtcaccttgaagctttgacctgactccctatattgtttcctcagttgtagaccaaaggcaatggtgtctgccctcctaccttagaagacaaatgcaagggcatttcaccacagagaggacctttgtgctcactttggcccaggaggcagtgatgctcatggttgcatgactttatgagtcgctgggccagggtgaggacctgggcctcctgactcctggcccagagttcttgtccatcagttcatactgcaattttatgtgaaagcattatgactgtcctacccatgggagagtaaatgtagattgaatgctaggagtcttaaagctggagagtatagattttgaggtccccatttgggaaacatgtgccagaaatgtctaggtgtttaataaaacagatattggattatctc

SEQ ID NO: 2528 - DNA, 512 bp, Homo Sapiens
  misc_feature (125)..(125): n is a, c, g, or t
gggcccccaggccccaaagaatttaagcgtcttatctggctcggaaaaaagttgaatgaccagacattctacccaaaaggagatatgatgaggagtctgatgaggaagctgtgaagaaaaccaanccaaatgtgactagtctggaaggggacagccaaagaccggagcttggaaaagatgaagtttaaacagtgtcctacagagaacatggctcgtgagcatttcaaaaagcatggggctgaacactactgggaccttgcgctgagtgaatctgtgttagagtccactgattgagactactgcaagcccttgcctctcctcccttgcctttgtctcttcagtcctctcacttattctatttcccaaccccctcccacttgtttgtgtgatctcagaactgtgccaagcagacactgggacaaagggagaatatcttgctcccctcctgagtcagcctggtgttgccctttattccccttatgtgcatatgattaaagagttattttaaaagg

SEQ ID NO: 2529 - DNA, 1127 bp, Homo Sapiens
  misc_feature (640)..(677): n is a, c, g, or t
ggcagcagcagcgcgggggagcctggaggagcagagagcagctcgtccccgcacgcccccgagagcgaaacccccgagcccggcgacgccgagggccccgatggacacctggcgaccaagcagcgcccggtcgccagatcgaaaatcaagttcaccacaggcacgtgcagcgactcggtggttcacagctgtgacctgtgtggcaagggcttccgtctgcagcgcatgctgaaaccgtcacctcaagtgccacaaccaggtgaaaagacacctgtgcaccttctgcggcaagggcttcaacgacaccttcgacctgaagaggcacgtccgcacacacacaggcattcgtccctacaaatgcaacgtctgcaataaagccttcacccagcgctgctctctggagtcccacctgaaagaaaatccatggggtgcagcagcagtatgcctataagcagcggcggcacaagctctacgtctgcgaggattgcggctacacggaccccacccaggaggacctgtacctgcacgtgaacagtgcccatccgggcagctcgtttctcaaaaagacatctaaaaaactggcagcccttctgcagggcaagctgacatccgcacaccaggagaataccagcctgagtgnnnnnnnnnnnnnnnnnnnnnnnnnnnnnnnnnnnnnncagacgttcacactgccacgtatgtctacgtggatttttggttttcagcttcccccaccccactggctcttcttaattagaagtgaccagttcacctctgtgtccttttgaaacatcagcagtagggtccattccaagattgtcagttaccgttagtgacgtcaggccctgtaacctgtgtcctgtctggcgcagttgctcacattcaccaaagtttgttttcatgatcctgatggccaagaacaccgtgtgggattttttttcccccaaggattttcacacacggaaggagaggtatttcttagagagatcatcattttatggtgccttgaaataaaaatacttatacttgaaatgctgtttaagcaaggcaagtgaattttgttattctgaaagagtttacagaaactattttaataaatgaaatgttcttgtgaagcttttaaaagc

SEQ ID NO: 2530 - DNA, 518 bp, Homo Sapiens
ccatgtagccaggcccggaatgggcctctctggacaagagccaccctttcactgtgcatatgatgctgatgcaattcctccatcatctctggacgtgcagaccagatccagaagaaaggcctggcgtgtggccaaacagcgtgaaaccttggcacaggactgaggatcctctcctccagaaaagccccctcgaggaaataaattagtgcggttctctttgacccccaaagacaagacaagcacttatttttattttcagaagacaaaagaaccaagatgccaactggctgcgaatgctctatctccagtctgtctctgtgtactggtagaggctgggaggagtagggggcagcctgttccatttctgatagtgcccttgctcttctgtctgtcatcttgcaggatgcccgagggccagatgggcttagctaggccaaagtaacagactcaagagttattgtacattactgaccacgctcatttgttcaaaagttagaacatctggctgcaacaggaaa

SEQ ID NO: 2531 - DNA, 732 bp, Homo Sapiens
gcggccgccgggagacggccaacttggagctgctgctgcagcgctgcagcgaggtcacgcactgggtggccaccgaagtgctgctctgcgaggccccgggcaagcgcgcgcagctgctcaagaaggtcatcaagatcgcggccctctgcaagcagaaccaggacctgctgtctttctacgccgtggtcatggggctggacaacgccgctgtcagccgccttcgactcacctgggagaagctgccagggaaattcaagaacttgtttcgcaaatttgagaacctggacggacccttgcaggaaccacaaaagctaccgagaagtgatctacaaaatgaagccccctgtgattcccttcgtgcctctgatcctcaaagacctgactttcctgcacgaagggagtaagacccttgtagatggtttggtgaacatcgagaagctgcattcagtggccgaaaaagtgaggacaatccgcaaataaccggagccggcccctttgcctggacatggaggcatcccccaatcacctgcagatcaaggcctatgtgcgccagtttcaggtcatcgacaaccagaaactcctcttcgagctctacctaaaagctggaggcaaacagtcagtgagagtggagggctcccagtaaagacccgccagatccttgggcacctggcactacaagcactttgcacgaagtctcacccaacatctgacatctttcccgtggagcaactt

SEQ ID NO: 2532 - DNA, 478 bp, Homo Sapiens
cgcccactgcccttgctgttctgggatcttcgctgcagttcacgggaaacaagcctgagtccgctcgcacccgcggctgctctcccggctcggcccggccgcctctgtctccggccaccgggtggcgctgccgagccagagccgccgcgtcccggcgctttccaggagccccaggcccggaggaggcgaagcccgcagagcaaaggtggaaacacgtgcctacgctgtaaagaaatcctgttccagagcatacctgttgtacaaacagacactgttcctaacgagaggagtgacgtattttcatcaccgtttttaatttgttttcttacgggtttacgattttgaatttttcttatttggttgaaagaattttgattctatcagcctgagtgagttcagcctgtaaaaaggatgttaagctgtgggtaaaatatgcaaacgaaaagaaatatattgtacaaattctatataataaaga

SEQ ID NO: 2533 - DNA, 710 bp, Homo Sapiens
  misc_feature (122)..(122): n is a, c, g, or t
  misc_feature (219)..(219): n is a, c, g, or t
ggggaatgcttacaggttggaatctggcctcccagcccgaaatgtcaaacgccatgcacaagaaattgctcgtatggccctagcataactagatgcagtttcttcctttcgcatccgccccngaccccatgaccagctgaggctacgcataggggtccatactgggccagtctgtgctggggttgttggcctgaagatgccccgttatggtcttttggnagacacaagtgacactgccttctgaatgaagtctaatggtcaagcgctgaagatcccatgtctcctctaccacccaggatgccctagatgagctaggatgcttccagctagagcttcggggggatgtggaaatgaagggaaaaggaaagatgcgaacatactggctcttaggagagcggaaaggacctcctggactcctgtaaacccccattctttccaagtcagatagtcttctgctgctggtacctgggtgggcaatggccaccatgtctgcacacaccagaaatggacattttcatatgcaatggaaaacagccacaaaaaaacctaccttatatggaagttgtagccctctgcagctcagccctgtacatatacctgtccctctctggcttggtccccttcctccctactttctgtaaatatctgtatctaaaccagaatattttggtcaaatataaaacaataataaaaaaagttctgatgtcaaa

SEQ ID NO: 2534 - DNA, 493 bp, Homo Sapiens
agcaaagaaaggcctttacacagcatcaccctgtgccatcccatgcaccgtgggactcagctaaaggactgtgcaaagagggggctcctgagttggaattaggcaaaaggggcagaattcgtttgatttttagagaaaatctctggagagtttcttttgattcatagaattccttttagatttctttccagcataccaactagctttagtagtgctgctacaaccagctcttataagtaagagtgaaaaagtattcttttcttctttaaaaaataagtttttcttgcttatagttaattctagaaaggcaatactaaaggtatatatttttttcaaaatgctattttttactgcacttgataattatcctgacagctctgatctctgtaatagattcactcttcagctctgggcagaaccagaggcagggttcacaccaaatttgtaaataccatatgtgggtctggtgtccaggaacttttttctttctgtt

SEQ ID NO: 2535 - DNA, 602 bp, Homo Sapiens
aacccgaaccgggagggctggctcctgaagctgggaggtggccggttgaagacgtggaagcggcgctggtttatcctcacagacaactgcctctactactttgagtacaccacggacaaggagccccgaggaatcatccccctggagaatctgagcatccgagaggtggacgacccccggaaaccgaactgctttgaactttacatccccaacaacaaggggcagctcatcaaagcctgcaaaactgaggcggacggccgagtggtggagggaaaccacatggtgtaccggatctcggcccccacgcaggaggagaaggacgagtggatcaagtccatccaggcggctgtgagtgtggaccccttctatgagatgctggcagcgagaaagaagcggatttcagtcaagaagaagcaggagcagccctgaccccctgcccccaactccattatttattacggagctgccccgcctgggtggccggacccctgggccttggggctgtggatcctggttccctgtttggaaaattcaccacctctagctcctcactgttctttgtaattaacacgctgttggtaatcttattaattatttaaaaa

SEQ ID NO: 2536 - DNA, 1163 bp, Homo Sapiens
  misc_feature (582)..(599): n is a, c, g, or t
aacaaaaggtgcagctcctatgattcattttgcatagtacctggcactataagccttagatacactttagctggtattattactgattattgcccaaactcataggtcagttgcttttgtttctatttcatgccttttcactccttgagcctttatcttctttagaacagtttacaactgtgttaactcatgtctgtgcgtgtctgtaaaggtaggctaggagtgtttgccttgtttttccttgagataagattttatgctctcttagggcaatggagatatcttattttttcatctctctcttagtaactggcatagtgttgtacacatactaggtgctcaataaagacttcgagatcttaaaatattagcagtacagagatcttccactaaaaccctctcatttttcagttgttggaactgataaaaagagtcttgggccacacaactgactgacagacacttttgcagtcaactactactgtgtctcctaacagcctctattctcatgcccacggctttgaaagggaaacatgtttgacttaaaccctgactccttgagggaagttccatttacaaagnnnnnnnnnnnnnnnnnnaagagcatagtatgtttcagataccatgcaggattgtaggattctgggattcagataccatggaggattcatcattaaatcacgatacccaagctcaaggcgtttataatctattagagaagacagatccctaaatagatgtttcaataatgtgattgtgttgtcataggagagctaagctctggcactacatgagcttctggataagaaacctaactcatgaccagaagacttcagggagagctatttaggagcagtggcaaatgcctggacatacacataaaactaagtaagaccaaaatagccagttggtgtttttatttatctgaatgtaagaacatagattatcgatcaatgaacaattgctcagatttaaaaagaaatgaggaaaactaaaatgttagtcctcaaattcctgtcacttcccacatgtgccctgcagtcatttcctgcaaatggaaacttccaacaaaatctctgggctggagacctggggttccagtttctttcaaggtcttgtggtagggaactaagtggctagggcagccgggtgccgagctgata

SEQ ID NO: 2537 - DNA, 1119 bp, Homo Sapiens
gcacgtccagaatgaaccggatccggtcgccgttggtgcgctggagcaccttggcccccacctcctggtagacgccctgcaggtacttcaccaccaggtccagctgcccctcatcctccagaggagtaaaaataactgcactgagttgacgtgttggtgctggaagtcgccacaacaaaatgagtatttccagaggggaaatagacatttctgagttagacaaatcccttgcagttcatcgacagcacatgatgaaagctggctgcagatccagggagcaggaagccactctgcagcaagacgtctgccacgtggtatcggccaggctcactgcagcacttgagcgcccacagggctcccgacgctgagctagggacgcccccggccgcaaggggctggctaccgaggccaccgtgacatggggtggactgagacagtcggccagggaaggcggtggccttgcgcagaggctctctgctgtacgccttgcctggttggccctgggtaaactgtcctcgccggagcccagcttccttacccgtaaagcgcggaaactggggccgcaacttcccaggacagttgtgagaattcagcgcagctgactgaggcccacgatctaactctaacggccagagccgcagcctggctctgctacttcccacaatcatccacaccgcgtacaaccgcagccatggcacttcacgagctacacacagaggcacatatttactaaattcaccaaagtaaaccccattttaaggcacgcccatcaaccatcatcccacctacccaaagccgtctgtccccttttacaatccaagctgcctttactccttctcaagcacacccctgctcacacccttaacgcaaccacacggcccacttaacacataactgagtctttctccttaattagaggtaacaaccctgtcccctgcctctgtcattagagactccaccgctagccgccgtgagcgccccaccaagtccccgcctcattatggggcaggtgcgctgtcccggtgtcctaaactctcccacgacaccgggcggttcacgtatccaccccctgcactgcgcctacaggcttgcacgctgggccggcgtcagcacagcccc

SEQ ID NO: 2538 - DNA, 652 bp, Homo Sapiens
  misc_feature (26)..(26): n is a, c, g, or t
caagagagtgtaacaagatgataacntgggagtaagtctgtggagagtagaggattccaggacaacggccatgcatctggcttcagtggctgagtgcatggcgaagccttccggtgagatggggaatgtagaaaggtgtttaggaaagggacgttcacttttggacatgctaatataagatgtctgcagagaatccaggtacagttacccctaggaagcgggaaatatgaaactagacccagaagacaagtgaaagtgagaagtgtcgacttggaagtcaacgccacgcaggtggaatctgaagatatgcgacagaggaaatcacccaatccaacggggcccaagaatctcaggggcaaagcggagaagtaaaggagggcacggaaacgaaaggagagtgttcccaggaggaggaaggaagggacaggtggtgtggaactcaacaatggcatcaatggggaagagactcaaaggaggtcaatggatttgaaatcaggggctcactgatgacatcagagagagcgtgctttggggagtgataactcctattgtgggagttaagagaaaacaaacagggtcattaagtgtgcagacgactcaaggggtttcacagattaaacaggaaacaatggtaagtggctaaagcagcggg

SEQ ID NO: 2539 - DNA, 479 bp, Homo Sapiens
ccaagccgcaaaagctggggaggtaggaagggtcactgtgagggcccagggcccctctcttcccatctcccttgtcctggtggccttcagtgtctcttccagttccaggagctgctgggaagctggccttcattgttggtgacagggcaaccatgggactaggaggtggcccatacacatggctggctggtcctgaggccacccacctttgtcccaggacatgggccccgggcccggtgtgggggttaaacccaaagggcaaagggtagcccttggtactgtgggtccctcaaaaaggagagtggggtgcagaaatgcctcagcatggctcatgcacacagcattctcccgtggggcagggttccctcatgcaacaggcctccctgtggccagcctctctgcctgtctctcgctgcgtccccccaaccccttgtgttttattggttcattgttaataaatatcaaatgaggtcccgctc

SEQ ID NO: 2540 - DNA, 545 bp, Homo Sapiens
gcggccgctgcaggagctgtgccgttagcgcatcgtggccaccgtgggccgcgagaacctggctcgcatccccctcaaccccgtcctccgcgactacctgagctccttccccttccacatttgaccggcagcgcccgccgtgcacgcagcattaactgggatgccgtgttattttgttattacttgcctggaaccatgtgggtaccctccccggcctgggttggagggagcggatgggtgtaggggcgaggcgcctcccgccctcggctggagacgaggccgcagaccccttctcacctcttgagggggtcctccccctcctggtgctccctctgggtccccctggttgttgtagcagcttaactgtatctggagccaggacctgaactcgcacctcctacctcttcatgtttacatatacccagtatctttgcacaaaccaggggttgggggagggtctctggctttatttttctgctgtgcagaatcctattttatattttttaaagtcagtttaggtaataaactttattatgaaagtttta

SEQ ID NO: 2541 - DNA, 543 bp, Homo Sapiens
  misc_feature (83)..(196): n is a, c, g, or t
aaggaaaatcaccccacatctcagcatcccaagaacagacactgttaatgtgtggtaggtgccccccaacacacccagctaannnnnnnnnnnnnnnnnnnnnnnnnnnnnnnnnnnnnnnnnnnnnnnnnnnnnnnnnnnnnnnnnnnnnnnnnnnnnnnnnnnnnnnnnnnnnnnnnnnnnnnnnnnnnnnnnntgagccaccatgcctggcccggctgttgtagtataaagtgcatgtcagtggcatgaagtggatgtgtaattcttcccctagcaccctcccagtgaggcaagccggcattgccattaagctgtttctgtggtttttctagcacgacttttatggtatggcaagtctcaaaaaaagaacttgtcgggaaaccatttctgaccattgctttcagcttaattaaccagtattagcaagaatgtaaaaggacagatcaggtgaactatcttaacaaataccaaaagtaaatgtctctatatggagggtaagatgtagacaaactcagacacaataaagaaatttaaagaggt

SEQ ID NO: 2542 - DNA, 580 bp, Homo Sapiens
gggcactgctgccatgaatgccttcctgctctccgcactgtgcctccttggggcctgggccgccttggcaggaggggtcaccgtgcaggatggaaatttctccttttctctggagtcagtgaagaagctcaaagacctccaggagccccaggagcccagggttgggaaactcaggaactttgcacccatccctggtgaacctgtggttcccatcctctgtagcaacccgaactttccagaagaactcaagcctctctgcaaggagcccaatgcccaggagatacttcagaggctggaggaaatcgctgaggacccgggcacatgtgaaatctgtgcctacgctgcctgtaccggatgctaggggggcttgcccactgcctgcctcccctccgcagcagggaagctcttttctcctgcagaaagggccacccatgatactccactcccagcagctcaacctaccctggtccagtcgggaggagcagcccggggaggaactgggtgactggaggcctcgccccaacactgtccttccctgccacttcaacccccagctaataaaccagattccagagtaaaa

SEQ ID NO: 2543 - DNA, 519 bp, Homo Sapiens
taagagttaaatctgagtcctggctctcacttgctctttgaccttcctcgcagctccaggcatgaggctaagcctgggatgttacgctcaaagcctgcccttctaggcctggttctgcttgttcctcagcctcccctttctcttctcccgcatgcatccaagatggcagcactaggttcacatgcctctgtgccgttgcctattttgcttctttttgggctactcttctaactggtgaacgtctgtccatcccctttaagactcagatcaggcatgcccgcccccagggctctcccagtagctctccccttcaccacagcctcccctgcaagaagccctgtgttctctgcatcatagcataacatacactgtattgacaaggctctctctccacctggctgtgagctctgtgaacacagggaccaagtcttattcatctttgtgttctggtgcatggcccagaataggtgctcagtaattcacagatggggtcatagctgtggatacaaactgctcccc

SEQ ID NO: 2544 - DNA, 773 bp, Homo Sapiens
  misc_feature (609)..(704): n is a, c, g, or t
atgtgggagaaaggaaatacccattccaacccactgtagtatcctgtcccaccaaaggagaggaaaaaaactgaaaagcacttgtgaagttaacagttcagaagcacaggctcactaaaagactaagaacctaatcataggactgcaaaacactttccctctcccacatcttaataccaaattactaaagacctatttaccataattccttttttacccaggtacatcatgtccagctatcaagaaaaaaaattacaaggcatcctaaaaggcaaaagcagtttgaagagaccaagtaaaactaagagagtaagcaccaaaaccagactcagatatggtggggatactggacttaccatatgaagagattaaagcaactatgactaatacactaagggctctaatggataaagtagatagcatgcaagaatagatgggcaatataagcagagagatggaaattcgaagagagaatcaaaaagaaatgctagcgataaaacaaatttaaaaacccactgtaacagaactgaagaatagtagactggacacagctgaggaaagaatccctgagcttgaagacattatcaacagacacttcccaaaccgaannnnnnnnnnnnnnnnnnnnnnnnnnnnnnnnnnnnnnnnnnnnnnnnnnnnnnnnnnnnnnnnnnnnnnnnnnnnnnnnnnnnnnnnnnnnnnnnaggtataagtgtactagaacaccagaaagagaagagaaagctaaagaaattttgaaacatcactgaaaa

SEQ ID NO: 2545 - DNA, 1165 bp, Homo Sapiens
atgttgtcagggctcaacgggttggtttgtgccactgaagacgacctggcttgtaactacatttctgctcctttaccttgactcaccctgtttctcctcctctttatgacccgatgagagtttggaattatttacctaagaaaataaggtacatcatgaggagagaaaagccagctatgtgacgacgaacggaatatccaatcggaatagctactgggaagcagctcatgccaccagaggaggagtggccagagtgagtttcccaagtagcgtgagtcacgacagtcttctgtaggaaaacatttttggcaaaaggaggaaattgcaaagcgggaaaacgaaaacagcaaaaacttaagtcactgcagttgtcattatactaggtcaagaaaagagatccaatacttagaatgttacatttcttaaacatgttgggaaagagggaaaaaaaccaaccagtctcctaaaaggattccattaagctcctctatttggattgtacatacattgtctataaatccaaggacacttagaaagatacttgatttctaaaaatttagtttaaattcatggttggagtgcataaaattcagaaatggaaacccagtgactgactgacttgtgatatttttgtctgctcttggactgaccagtcttgaattcaagcacttatcaagacaggttcaaaaactagttgtaaggtgcttttagatgttgacctttctgctccctctaagcagtgaagctcatggctatttaatacagcttatcagaagtgctattctgtaaaacagccttatggcttacacttttgagatagaaaatgatcaatacttcatggtgatcaataacctattgagttgaactttgcatacgtacattatacattacactcactaaaaaatactctcaattaattattttgctttttcctttttggacaattcctgagctcagcctaacaggtcataattcatttttttaagtaagtcttattctcttttcagggtaacatatacagacctacatctcctccttccattgaatgtgcctaaaagcattctgtcatttacttacaaaatcatacaaaatgattgattgtcctcttaggtgtgacatttgtgtccccctcagacttttagttccctgatcaccaggattgggt

SEQ ID NO: 2546 - DNA, 628 bp, Homo Sapiens
atggggtggctcattgtaagtttcaagctctgggtgactgagcggtatttggaaagcacggtagacaccccgcccctcacccttcagtgaaacccagtcgggtggctctgcatgccagggagtgtgtacctcttgtctgcatggggaccgccagggcgagctcctgccctcgttgccctctaaggctgtgtgacccactcagtggctcctggcccccagggctggtggctggaagaatgccagaggggcagagtcctcagttgagaggcgtgtgttggcttcggatccatgagagtgcacaccagcttcctgccctgtgccgcgcggagctctccacgtcatcttctgcatgcatggaggcactatcaaagaagtacctgtcgtgaggaataaatgagttaatatggaaagtgccttggagctgtcagctgcagctgccacacagagtggtgcccccaacaacgtctgtaccacaaatcgagctgtttctcccaccacctccagtccataatgttatggctgagtttttaggaaatggcagaagtgagtgtagactcttaagaatgctgttagaaaaagcggattcatccagttcttacttgctcagtcaacaggtgactgcataggt

SEQ ID NO: 2547 - DNA, 556 bp, Homo Sapiens
gacgggagtgcaaggcaaataaggaaaaggattagaaataataataataataaggcctgctgtgtaagctgacagtatttgtagctgatagggggttgggaggaaagtgtctactaggagggtggggtgagattctgtgttgatgtaggaggccgagaaggcccttaactcaaagtagcttatttatccaaaatgttctggatgcatcatctccaaccaaggaccccttatttatcatgcctttgttctcttttccctcagatgtatatttctttaaaaataattttcctaataacaaaacttatttctaaaacagcttaaaaattcaaagaaaaaccccaaacactgacatcacctacacttccactacccaaagacaaaatgtgcccactgtgtgcttttgagtgtattttcttttagtttgttttttgttgggtgcatatttatgataataacaatgatggacttcaattgtactcactgttctattgttggttttaattagcagcaagttgtgatcactttccccaggtgaataaatcatttgcaaagcaaa

SEQ ID NO: 2548 - DNA, 448 bp, Homo Sapiens
  misc_feature (264)..(289): n is a, c, g, or t
gactgcagctgtttacagaaatatagttgcgagtatacaaatgttccaatagaagcaaaatatctttttaatatttaacaagttatcacagatagctaaaaacatagatgcaaatgaaattcccccagagaacaaactgaaaatatctggtatcagtgctctgaaatcccaactatgaaagccatatacacaaaaatgtaacccttatatcattgcaggacaatggaagaaggcagttcagtggttgatcagtgtgctcaagcnnnnnnnnnnnnnnnnnnnnnnnnnntggcagaatggtagccaaaccacttgagaacaggttaatgaaattattggtactatacttaaaaaattaagtaaaagaagtgaatgaaactcatttaaagttgtcaaaaaattagcaactacttggagcttatcaattaaaaggaaacaaggtaagcag

SEQ ID NO: 2549 - DNA, 561 bp, Homo Sapiens
tcgactggtccgcagatctctactgcaccattttctacaccagacctgcttggcaccacagggagctcttttcctgccctgcacaatgacattccaaccaccaccagccagacattacagccaaccttgctgattgtcacaagcaggaccttggggccactggcactgtcagatagtaagccatttcttgggtagaggaggaaactcctctccacaaatccacttgggcctgtgcaaatggcacttgaaagagtccccatgcacttggagtccatgagccaatgggatatgcaaagacgcttaaacatttcagggctggtttctctgttcatatccaattctggtgcttaggaacagggacccatgctgatgcccaagggcaaaaagccccacttcctttaaggaagtgaacaggcctgaccctgatgcccaataacgggcaaccctaggctttttgtttttcttgcttttattcctttttgttgttggccttgtgctgcgtttgtttacaaaagatgtattttgtttaaccaaatattaaaaatggaaaactccatataa

SEQ ID NO: 2550 - DNA, 526 bp, Homo Sapiens
cgtcttgtggacaggagggaacggccactagaaggtggccgaactaattccaataacaacaacagcaatccatgttcagaacaagatgttcttgcacagggtgttccaagcacagcagcagatcctgggccatcaaagcccagaagagcacagaggcctaattctctggatctttcagccacaaatgtcctggatggcagcagtatacagataggtgagtcaacacaagatggcaaatcaggatcaggtgaaaagatcaagaaacgtgtgaaaactccctattctcttaagcggtggcgcccctccacctgggtcatctccactgaatcgctggactgtgaagtcaacaataatggcagtaacagggcagttcattccaaatccagcactgctgtttaccttgcagaaggaggcactgctacaaccatggtgtctaaagatataggaatgaactgtctgtgaaatgttttcaagcctatggagtgaaattattttttgcatcatttaaacatgcagaagatgttta

SEQ ID NO: 2551 - DNA, 733 bp, Homo Sapiens
cgcgaggggcacagacacatcacgctgaatgcaatttaccgaagattggttcgaggaggatgtctcaacatggctttgtgcagccgatttaaaagatcttgtaggtatttatcaagatgaataacattgatggaaaagaactgttgaatcttacaaaagaaagtctggctaatgatttgacacattgaatctctaggactgcgtagtaagagtgctgaggaaaattgaagagctcagggaccaaggataaatccctttcttcaggaattcctgatagaatttataatgtccaataactagagaacttatgacaagaatccggtacatcgcatcagatgggctattcatatgaaaaggaagcaatgaaaaattggatcagcaaaaagaaacgtacaaatcccatgacaaatcttgttctacctatcagcggtacttacaccaaataggactctgaaaatagccatcaatagatggctggagacacaccaaaagtaaaattgttgatattgtattatttatattttcagtgatctcatttgaatgatttataggtaaatactaatcagacattattaaaagcaaaacaggaaaaaggtaaacttcttaaatttagttacctataaaaattgtcaattttcattctttaaaaaacacatgaacttactataaaagcctttttgtactagtgaaaagaatcttcagctatatagaaataaagttatactttaaaaaa

SEQ ID NO: 2552 - DNA, 542 bp, Homo Sapiens
  misc_feature (318)..(318): n is a, c, g, or t
acacaaaaggaattataaaccagcgataatcaccacacccactgttccaaacaccacatgtaaccacaggccaaagacattgtttgcacaccaaagcataaaaacactggcatctacaggcacaccaacgccggcacgcatcaggtttcagcttgtaaaaaaaagggctttaatccacacaccaaggagcacaggctgttcagtatatgcaaacatgtgttggtaaaagacataaaaataattgtgttggatctgaggtgatatgttctgaatgtaagcaccgtcaacatcagacacctactcatggacatgtggtgnccggattttcttaagatgtttccagaaatgactgatattttatatttatacattttagatgacaaagcttgatatttattgctgtcgcacattttaaagttttctttttgggttgctctgagtcaagagaggttacatggtgttaaatcggtacctgataatgtacccaaatactatggccacataataaattgtgctgcaaacaacatgtcttgtatttaaaa

SEQ ID NO: 2553 - DNA, 401 bp, Homo Sapiens
  misc_feature (228)..(258): n is a, c, g, or t
gaattccctagtaatagctgaagcagacccagaagctgcaaaacatggaggcccaggcagggtgggctgcccctggcgaggcgcgggctatgaccgcacctcgagcaggagtggggatgccacgtttgcccccagcgcccggccctttgtccccccgggtcattcccggagccgccccgaccctgtccgggccccccccagatcctgagagtgagaagcctgactgannnnnnnnnnnnnnnnnnnnnnnnnnnnnnngtttaagtggagaagtgacggaccctcagggccagctgctcctcctgtccagttcacgctgttttgtaaccactttctaagcattttttattcacaattggaaacacaaatgtaatgcaagaataaaaaatattttggggcag

SEQ ID NO: 2554 - DNA, 806 bp, Homo Sapiens
ctggtacggtcggagtgtaggatctcccttttggaatgggctacaccccagagttaccatagtgtatcacgagttgctcatgaccaccaaggagtatatgcagtgtgtgaccgctgtggacggggagtggctggcggagctgggccccatgttctatagcgtgaaacaggcgggcaagtcacggcaggagaaccgtcgtcgggccaaagaggaagcctctgccatggaggaggagatggcgctggccgaggagcagctgcgagcccggcggcaggagcaggagaagcgcagccccctgggcagtgtcaggtctacgaagatctacactccaggccggaaagagcaaggggagcccatgacccctcgccgcacgccagcccgctttggtctgtgagctgaggctgtccccagagaggatggcagcaggtattgggtcctcagccttctggcgggagccctgaggctgcggacaaagccctttcatctgaggactttcatcatgtgcatatcacggccccccagggcagttcctgctggaccagactctctggcagaggaggtggagttcttccatgcaggagcacggcatggcgggagcggggctgcagagtatccgaggtgctgccggggcagcgggaggtggctggacccatcgcatctaaaactggcccaggacacttggtgtatgcgtgacttggctgtggctgtcttttttaatccttgtgtaaagcagcaaaaaagacctaaagggaattgtaatttggttataattcaggatttggaaataaatttattatttgtaaaac

SEQ ID NO: 2555 - DNA, 528 bp, Homo Sapiens
  misc_feature (446)..(456): n is a, c, g, or t
cagtgtgcaagtttcatgacagaatcattaagataatcaaattgtcctaattctggtgcgattcatggatacactggtaaatttaggcaaagtgaaacttatccagcgtagtttctgttctttaaaataaattggaaattagagactaagcacaattagtctataaatgttctataaatcaaaaacttacctcttgcactatcatgccttgaaatttactttttcgaaagggaaacaagtttagcagcagccttcaaagaacttctttctatgatgagccaaattcatctttgccagaaaagaaattttgataattccaagaagcctgattagaacaaatcagatataccttctcttgtctgcatgactttgtgagataaaagagagggcttccaacttttttctactagcttgatatgtattatcacttaaaatggttgcctttnnnnnnnnnnngtagagatactaattaccagtaagtaatcatccaaataaatacgtcataaaataaattaattattttttctt

SEQ ID NO: 2556 - DNA, 594 bp, Homo Sapiens
aaagtagcttccacaggtaagtacttaactaatatgaaccaaaatagcttccacaggtaagtacttaactaatatagaccaaagtagcatctcctcaaaacaatcctttgtgaggttttgtaagtagaacagtgacttactcttttctgagagttatttttgggaagaaaaagaccttgctttatatccaggtaatcaacaagtcaaaattttccagaatcgcggacaaaattacttcttaaacacgtttcaattaatagcatactgtttctggagcaggtatgctttcacatgctctgtcacttggtgtaattcaaatgtaaatgtgtaagacaaagtatatatttttctcatatttacaaatgatgaaatcaagggttaagtcaaggaaaatggttaaaatcacagtgattaaatatggaagttaagccttaatcccaggtttgtcaaactccaaagcccatagtcttctcatattccatttttagggggaagtaggtagaccgcccttctagtttctaaacctaacaagtttctaggtcatttgaatcatgatctttacatgttgtggctagaaatacagtttacgtaact

SEQ ID NO: 2557 - DNA, 187 bp, Homo Sapiens
acagtcactttcaaacacactgtgacactgtgaatttgttaacactgaggtgattaaacctaaagtgcacgaagacttagttaactatgtctactattaaaaatactcgggaaaattctgatgaaaaaggacattcagcaattagttctcacgataaaattactttttggccgggcgcggttgctca

SEQ ID NO: 2558 - DNA, 125 bp, Homo Sapiens
aatgagggtccatatgaagatttaactattctaagaactgtaaataatattatacttcaagacattaagagtacattgtagacttccaaatattaaccaggttcttaataatagggtaccgagct

SEQ ID NO: 2559 - DNA, 677 bp, Homo Sapiens
ctcggccccggttgtctagccacttactgagcaaggggggccaggagtgcaccgctaagtggtttctcatctaggggggcagctgtctgaccagaagctgccgtgcttacatcagcaacaacagcagtcaacagatttgtctaaagtgtttttcaagtgcttttccgtatgtggcttaaaggccgaggtgaggctgccgggttgtcaaagccactcaagcagacatctgagcaaatctctgaccaagaacccaggccatcgatctggtgggatggccgctccacaggaagctgagggtgggggagtcacctttcctcactaggagctgtttgcttcagcaaagcaggatttgaggagttggggtctgaagggggaaaagcttgctgaggtggaggtggcgataagcctggacttgccctcacctcaccccacaggccaggattcgtctttgggtttcagggtgcatgtctgtcttagcactgactgcgtgccaagccctggatgttggtcaggcagacacgggctcagcccttgaggctcacagtccggtgggttgcacaggcagcggcagctgatccctcttaccgggtctccttctcgggactcccttcagtccacttaccccgtttctgccccccaggccttctctgggcagtgactgtgatggctgacaggaa

SEQ ID NO: 2560 - DNA, 346 bp, Homo Sapiens
aaaagcaaacaaaaaaacatttgtctcataatttctatgggtcaggaatttgggagtagcccagctagctggttctagcttagatctctcataagattacaatcaaagcatcctccaagtcatctgaagacttggctggggttgtaggttctgcttccacaatggcttacttacatggctgatggcagaaagctctagttactcatcacatggagctttccatagagcaccttgaatgtcatcaagacatagccggtggctttccccaaagagtgatcacagagagaacaaaacagtcacttagcctcaggagtcagaattcctcatttctactacattatattca

SEQ ID NO: 2561 - DNA, 685 bp, Homo Sapiens
tgcctatttaaatccctgatcctcatatgttatggtcctgaaattcattttcataggccttatttctaccctagtgctgtcacttcctagctcttcccctcaccactgccctccttcagcctttaagattgggcttcccaactcagattgcctgtctcgggtctgtcatactttgtgccaacccctccgccccatttatcttcctacttttatgccacactcagttctttaattatcacagctttcatcagtccgtgataagcactagaaggagttctaatctctgtgatttagttctgttttttatactttacagaaaatttcatgatagtccagacttgaagccttaccaacaaattattactctttgcctgcaggcaaaataaattcttcatctagttaagaaaagggtcacatagcctgaaacgagaaaattaatggcgtgagttaaatcctttgtatattaaagatgcatcaagacttacttcctggaataaacagcattgtttaatgatgatctatcttgtattgctttaacaccagagaaaacatttgaagagatccaaactactttttattaagctgtgtatttccacaaaaagtactgagattaattgcagtttgccatttttccaaaatcaactcttaaaataaatttattcgttcatttattcacgtatccatt

SEQ ID NO: 2562 - DNA, 732 bp, Homo Sapiens
  misc_feature (607)..(618): n is a, c, g, or t
agtatagctagacacacatcttactagccaggagtttcaccagcaagcggtctctattctgttttaaaagaacatagcttctttctcttgctgaggtttatatggccacagtgtaggcttcttggagttccctgattttctgctcaggtcacatatactattaaaaatcacacattcattttcaaagtattaaaatataatcaaatagattcaacactaaaattaagctgaacataatttattctttttcttggacatgatgtgagaaataaaacatcctggcctgggagtcagaagattaggttttcttgatctcaaggctgagtggtctcgaccaagttacttaacctttgtaggcctccttttcctctgacgaaaaacaagggagttgcactggataagttttaaagtcccttttcaaatttcattgaaacactaagtcatgatcttgaacagtgcctcttgactatgaagatcaactaccattagagtgtaaaattaattctagtgtttgcaattttctgatgcttatattatgttaatgggagttttctatacttccaggagccaatcattagaatttggctaataaaaacataactgagannnnnnnnnnnnacactgtacataaagtttactttggcattcacagggacgatctggagagagctttttgttatacatgttcttattttattctcttattgttgaaatcctattctgttctcaagt

SEQ ID NO: 2563 - DNA, 448 bp, Homo Sapiens
accctcacttgacttcctggctataaatcaccacttttggttgttgcgttcagaattgagcccaatctttctcccccactgcaagaccccatttcacctatcacgatagtccctcttgagtaaagtctttcattctgtctttaacaagcatcatagatatttggttccttcacaggacccccatgctctagcagaaattaatgcatgtggtagaaccaaccaaagagattttatcatgattggttcagggatggatcatgactgaagacaggccatctccagtcattccagaaaatatctgcagagctataagggggtgaaatgcttgtggtggaattactagtcacaggtaaacatgcttactacatacaaaaagtctgtacagctgtgcaagaaacagagagggggagagagaaagaagcttgatggccgggcgctgtggctcatg

SEQ ID NO: 2564 - DNA, 578 bp, Homo Sapiens
atttaaatgaatcagcctaaataattgcctagtgttttctttatgtcaaatgttgtcatttggagatatctctgccagcagaaagaataatgtatgtcctccctcagtaaacattccaacactggtcctaaaatctgaaggtggctgatgagggactttctctggccttttcttccatgactgtttgctcccctgtctctgctgtacctggtctccttgctgttccttagtcataccagtcctagcttgccccggatgtgtttggtttatccgcttacttagaaagctgcttacaaatgccaattgccatctcctttgagctattagaccctcgatttcagagcctgtgttttcttctgatgcctggagatgtggagcacagaaagtggttccacaactgtccttagaaggggccacagctgctccttgtcctgccttgagaaggtgcagaaacaagagaatcactatggccactggccattgatcgagttgcggatttagcaggctgggtttctatcccagccagagggctaacagggtttggttaagttaaggttagagcacttcattcaccacgc

SEQ ID NO: 2565 - DNA, 926 bp, Homo Sapiens
  misc_feature (277)..(326): n is a, c, g, or t
  misc_feature (578)..(649): n is a, c, g, or t
ctctagccacttagacagaggataatcacaagttcctggaggataatattggaaagggaatctgacaggagagacatctgatcacactcagaggtggcagaggaacggcagtgggatgtctgttgccttgccatccagttgtttggctcaaacctctgcatacgcttcctcaaccagtacttctccaaggggcctcacatcaagtgagtttttcaaatgcatggagctacaaggcccactccagactagagtcagaacttctggggcaaaagtttgnnnnnnnnnnnnnnnnnnnnnnnnnnnnnnnnnnnnnnnnnnnnnnnnnnctccctgttgctataaaccatggccagatcgctgctcctgcctgggtcggtgtgtctgcctgaccattggtacttagagaacaggacggagacctgtgtaattctctccattcagaagctactctggcaccatacacaacggtgcacaattgaagggcctgttctgctcctccacatggcacccttagaaacgtcacttccccaccttgtgtggcaacagccccggccaacgtgcttatgaagagccatggnnnnnnnnnnnnnnnnnnnnnnnnnnnnnnnnnnnnnnnnnnnnnnnnnnnnnnnnnnnnnnnnnnnnnnnnatgagccaccgtgcccagcctagggcctggttcttaagaacgccattcccttcttgatcctcaggcccagtgagtgaggcagcgtggcagtccaggacctcccaacgccgagcacatcctctctccttcctcgctggggcagatgcttacacaggtagagagcccaagcccaggctagcagcctcagttgctcagtcatgcagcaggcgtatgctgaccccctgttacagtcctgggcagacagagatgtgcaccacactacagaaataaacacagt

SEQ ID NO: 2566 - DNA, 559 bp, Homo Sapiens
gatttagagctcagagccacagaattgagtaaacaacttgaaatggagaaggaaatagtatccagtacaagattggatctacagaaaaaatctgaagcccttgaaagtatcaagcaaaagcttaccaagcaagaggaagaaaaacaaatcctgaaacaagattttgaaactttaagtcaagaaacaaagattcagcatgaggaattgaataacagaattcaaacaacagtaacagaactacaaaaagtgaaaatggagaaagaagctttaatgacagagctttctacagtaaaggacaaactatcaaaagtttctgattctttgaaaaactctaaaagtgaatttgaaaaggagaatcagaaaggaaaagccgctatattagacttggaaaaaacttgcaaagaattaaagcatcaacttcaagtgcagatggaaaacacacttaaggaacagaaggaactgaaaaagtcacttgaaaaagagaaggaggcttctcatcagttgaaattggaactcaattcaatgcaggaacaacttatacaggcccagaatactttga

SEQ ID NO: 2567 - DNA, 643 bp, Homo Sapiens
  misc_feature (127)..(161): n is a, c, g, or t
tttactgtttcttctgttattctagcatctctcaaaaaattcacagtactccattttggggtccaaactgtaatgctcaaaataataaatgcttacacgaaaattatttattgagaatattcatatnnnnnnnnnnnnnnnnnnnnnnnnnnnnnnnnnnncaaggtggtatatttgaagtgaatggtgattggaaatttttagctgtaacaaaaagaaagaaaacaactttttttaaagcctcattctcttttctttcaaaatgtaccttattcccacacactcttgggctgacctttattttatcaataagctcaatattactttgtttaaaataagatgcttcagcaaaagtcattctctctttaaccatataatttaaaaactcctcttcacgattgatagcaaaatcagaaacgttagggcaccagtgagttgaaaaaactggtcttaagttggaaaaactattattaataatattatcctatccatccatatctattgaaattggacaggtccataatttcattttaattaattataggaaagaagaaaagataatacccatttgttctatcacccctctccctatcattaactatcaaataaataaataaaagcaatctgatttccaacgtggtac

SEQ ID NO: 2568 - DNA, 434 bp, Homo Sapiens
ttccaaagtctcggttcgcacaaaattccggggagagttaacaagcaggggaagaagtgggtgagggaacgccgcagagcagcgccctgacagagggcgactatgtgcccgactcccctgccctgtcgcccatcgagctcaagcaggagctgcccaagtacctgccggccctgcagggctgccggagcgtcgaggagttccagtgcctgaacaggatcgaggagggcacctatggagtggtctacagagcaaaagacaagaaaacagatgaaattgtggctctaaagcggctgaagatggagaaggagaaggagggcttcccgatcacgtcgctgagggagatcaacaccatcctcaaggcccagcatcccaacatcgtcaccgttagagagattgtggtgggcacacattatggaggcgcagtcgcctacgca

SEQ ID NO: 2569 - DNA, 679 bp, Homo Sapiens
ctgctccgcccctctctgggaccagggggcctccctctccggtggaaccagtgtcacatgcctgtgcatctctgtgattctcagagggtctgaggtccgagcaccctgctgtggcctgtgggaagacgctacaaagtcccactggatctaaaccagaggcctgttctggcgagcagggaaactgtgtcctggcagagatcgtggtcctgggcacacaggacccctcagcacactgaggtggagctggggcgaggggagggggtgcgctctgggtaactgaaggtgtgaagcgcccagggcctgtttctgggcagtgcaggaagtcccagccccatgcctgtggtgagatcccctgtagggccccccccaccatggaaacttcggggcctctacggtcttccaaagctgtgtcctcatttccactgcagcagaggggcgtccccagctccgtcaaacagccctttctgtttctggagtcctacaagtggaggcccaaatccgttcccatgttgaggcaaggccctggctgttccttcaactatggaaaccgccttgaactcttcctttgggacatgcctcctcgaccagccttgaaggggtgctcctctctcactacctggaaccaaacacccccttcctttgtgtacaagggcaataaagagtagaccttcatcttcaa

SEQ ID NO: 2570 - DNA, 849 bp, Homo Sapiens
  misc_feature (161)..(223): n is a, c, g, or t
  misc_feature (791)..(804): n is a, c, g, or t
ggacaaacacgctctacgaggagtatgtagagaagccctgaagctggtcctcaaagtaggagggaacgaagtcaccgaactctccacgggcagctcggggcacgactccagcctcttcgaagacaaaaacgatcatgacaaacacaaggacagaaagcggnnnnnnnnnnnnnnnnnnnnnnnnnnnnnnnnnnnnnnnnnnnnnnnnnnnnnnnnnnnnnnngttaaggaggataaaaagaagcgagatcgagaccgggtggagaatgaggcagaaaaagatctccagtgtcacgcccctgtgagattagacttgcctcctgagaagcctctcacaagctctttagccaaacaagtaagaagtagaacagacaccccttcaagaagctttgaatcaactgatgagacaatggcaaagaaaagatccaagtgctttcttttcatttcctgtgactgattttattgctcctggctactccatgatcattaaacacccaatggattttagtaccatgaaagaaaagatcaagaacaatgactatcagtccatagaagaactaaaggataacttcaatactaatgtgtactaatgccatgatttacaataaaccagagaccatttattataaagctgcaaagaagctgttgcactcaggaatgaaaattcttagccaggaaagaattcagagcctgaagcagagcatagacttcatggctgacttgcagaaaactcgaaagcagaaagatggaacagacacctcacagagtggggaggacggaggctgctggcnnnnnnnnnnnnnngactctggagatgccgaagcacacgccttcaagagtcccagcaaa

SEQ ID NO: 2571 - DNA, 523 bp, Homo Sapiens
tatcttcactgtcacctgtatcctgttacacatactcagttcctaattgtaagctcaattttggtattagcaaaagcatctgtcagtttttcctcaattactcacacctcttcttgcctaaataaaacaaagaaacaaagaaaacaagtgtggtgtcattacacgtctcgggagttcctcgtcactgactttatatatataaaaaaaagaatgcacatgcgggccacgttcacagatagacagattcacccgaaatgagaatgagggccttaaggctgccgaaaacaaatgggtggaaatagcaacgttgtttccgtcaattccaaatgtgcactggctgcgtgagacaagccaatctccaattcctatgcttttttcattaaaaagaaaaaactatctcgagaggaaaaagttctggtcaaataggagttcagtgtttgttatctggtaacagtttttttatcttcctacaattacttggggaaggagtgtcttcggggaggaaaaactgacacactgacaa

SEQ ID NO: 2572 - DNA, 512 bp, Homo Sapiens
gagactgaagtggcaagaagaatcgaatatactctgttctaacctttctgatgtttgcttgttaagtgggaaacttaaaaatttctactgtccactatagtagtactttgaaaaataagttttctcccagcacaaaaaccatgtcagccacacacaagtaagcaacctacaggcctgtctcttgacctctcgtttataggcacaagcctcccacaggcccagaattattttgcccaccagctgcttgccaggtctgatactcacctaaaagaactttagggagcattgccaaaccagcctgatgaaagggagttctcatgtatctaaatgagtagcaagaattcacatgggaacttcatttatgtcagtggactgacaatagcagacatgatcactaagctttctgtgaagtaaataacaagtctgctttcactttctgttggataagactttggaatttcagaattttctttccaagatgtcaaattaaaaatggtttttattactcagtg

SEQ ID NO: 2573 - DNA, 638 bp, Homo Sapiens
  misc_feature (194)..(194): n is a, c, g, or t
agaggcctccggctgcagggaccgcctgggaaatgctgcctgctggcttggcagatgtttctcagaagattcatctcctctctctgtcagctgaacatcagttcaactgcatcaagccagatgggcttctggagttcgccaagcggctggagcgctggggccgtggagcctttggtcacctgcgcctcttccanaactggctggaccaggatgcagtcacagccagggaagccatccggcggctccgggctacctgccatgtggttagcgactcatgggactcatcccaggccttcgcagattatgttagcaccatgtgatggggcccgtacctcacagtctcatgctcggtaccatcagcaaacaggggctgaagcatgggctgcccagaaccccaaccaccagttctatctttctctttctgtcaccttttttctcttttttccttcttcccttgcactgaggtcctggaggccttgatgaggcccagcaaacaggcattctcacagctgggtttatagtctttgggccccttactcagtatcctgggaaccctgggccaggaggttacagtggtcatcataattgctgaagagatcccctcccctgcccctgggttcctgccttccctcctcaag

SEQ ID NO: 2574 - DNA, 170 bp, Homo Sapiens
tgggggaagaggagactggggttgtcgggatgacccagaggctcctggcttagcagacaaactggatggtgacaccacgtgatatcaatactttaacacagttttcattcctcttatcttccaatctttatccatgtaaatgcacttgctttgccgggcgcggtggctca

SEQ ID NO: 2575 - DNA, 1081 bp, Homo Sapiens
  misc_feature (189)..(406): n is a, c, g, or t
  misc_feature (487)..(515): n is a, c, g, or t
aataaaacagaattttagtatctactgcacagatatttcacagcacattaaaagcaaataatttggcacacagtatagcacatgctaaggactcaataagtgttgttaaagttgtgcctgatttattatttaataattttttgagacaaggtcttgctccgttgcctaggccaaagtgcactggcatgnnnnnnnnnnnnnnnnnnnnnnnnnnnnnnnnnnnnnnnnnnnnnnnnnnnnnnnnnnnnnnnnnnnnnnnnnnnnnnnnnnnnnnnnnnnnnnnnnnnnnnnnnnnnnnnnnnnnnnnnnnnnnnnnnnnnnnnnnnnnnnnnnnnnnnnnnnnnnnnnnnnnnnnnnnnnnnnnnnnnnnnnnnnnnnnnnnnnnnnnnnnnnnnnnnnnnnnnnngtgcgagccaccgtgcctggccaaaactgcttttgttgagcatgtgatttattttcaaaaccaaatttgtagtcaatctcnnnnnnnnnnnnnnnnnnnnnnnnnnnnncctatgaccttatacagagttgtcttgaaggttgtacttggcttctagttcaaatgatcaagttttaaatcatgtttagtgcctgagcctagaacctaattcagcaccaagatgtttccccaaattgccacactaggtcagtaggcaagacaagtataatctgttttacaatcaagggtgtaagtaagaagttacctgatttgcctgacgccacagagacataagtaaagcaaagactggaccaaaacacatgtatagtgaatgaactgaatgtctcaattcatgccaagaaaagtgtttaactattatcaaagattacagacttcaaaatcaaggtattgtttggcaatacaaagatgacatgcaagtacttttcggtggtcaatgccattgatggactataatcagaaagttctatttgcattgttcttactgtagtgcaaaggctttcgataatccaatcttagtattgtttgtatttaagattgctagccttggatcacaggtaattggtctgatcagggatcaaatccatgaaactaagaaaaattgcactagcacaacct

SEQ ID NO: 2576 - DNA, 636 bp, Homo Sapiens
ccacttaatgaggtccaccaccgctgggcccgggggcagctcggggagcaggaactggcagttgggacccccgtagcctcgggcacactcgcacacatagcggtggcccctctcgtggcaggtggccccattgtggcagggtgcgtgctcgcacctgctgacgggggcactgcagttcctgcccgtgtagccaggcgggcaggtgcaggagaagtcgttcacgccatcccggcaggtgcccccgttggcgcacggggaggaggcgcagtcgtccacgttgtcgtcacagtgcctccccgagaagccggcctggcagcggcacaggtaggcatcaccgaggtccacacacttggcaccattagaacagggtgaagagctgcagtagtcaattttcttctcacagttgaagccggagtagcccacggggcagcggcagctgtaccctccatcggggctgtctgagcaccgacccccgttaaagcaagggccgtccgcacaggtcatggcactcaattcacagattttgccgtagaagccgggtgggcaggtacaggagtagctgttctcgagatcctacacgatggagaggtcagaaaaggctttccaaagttgctccaaggagcccacacactccat

SEQ ID NO: 2577 - DNA, 340 bp, Homo Sapiens
gaactctagctcggtacccagccgcgtcgattgccccaccaacaacaccagagatagcagaaacaacagaaccagccgcgccttggataccctgcactagaccagcaatgatttgtgaacccattgagaccatctgcccggcgatacctgtaatggtgctaatgatctgtgagcccatactgataaatgaagcgatgacgctttgaacgcctgctgtgactgcgctcaggaaattggacatagctgcactcactgcggaaacgacagatgagaaaatactcgatactgtggaaagtacgctagaaagcacgctagagacgacacttagcacggcttggaa

SEQ ID NO: 2578 - DNA, 557 bp, Homo Sapiens
  misc_feature (498)..(515): n is a, c, g, or t
  misc_feature (523)..(523): n is a, c, g, or t
acccggctgcttatccacttagtaaattaatgaaagcctattgtgaacagggttaggcaatgaggttgatcagattctagacttcatgtgcaaccaatcaatgaaatagacacacctgtaaagttgaagatggaggctaaagatacaattaatgtgttccaaggacaggaggttttgactaaaaatggagcctgctactttattacagaactctgttcttacggaccaagaatgcattttcaattagaaaactgcgatttggttccatcacaccctgactactacagtatagttttctctatcattttcctcttccccattactttattatatgtatatattagttacaatgtaactatgtaaacaattaaatgtgtaactgcaagatctctaggagtaacagaattctacatcttcatatagtctttatggcatattgtatatgccatagttataatgcataaaagcgttttgcatttttttaaccaaatggtcaannnnnnnnnnnnnnnnnngagacggngtgttgctcttgttgccaagctggagtgcagtgg

SEQ ID NO: 2579 - DNA, 543 bp, Homo Sapiens
  misc_feature (483)..(483): n is a, c, g, or t
agcaccaattttcaattttgtacataatgcacatctcttaacacttacatttctaaatatattagattttggggttagtttgctgattgggttttttgcactgggtgtgaactttaagaagcaagattagcagtaacaaaaatctatggcccaggctatgacgaagcaattgggaactcttatggcattcccttgtttaagcatatcccagtattgatgcagggagccacactaagtaattccttggctgttggtaacagaagggaaataaataatgatgtgaggtagttctttccacaagagggtaatatctgactacacaatatccctgcaatgtctgacgaattactagagcatctgcttgctgtcatctgtaagtaaactcttagcttggtactaactgaacttgacaaatcatgagctaattgcagttcctaggccttattttctgagccaaccgaggcaggagacactacaacacanaaaaaaatgtgaaccacagagaccaccaagtacaaaaactgcaaactcataagcattaaa

SEQ ID NO: 2580 - DNA, 582 bp, Homo Sapiens
tagccacttacaatgatcaatccattacttttgctttggaggatgaaagttatgagatatatgttgaagacttgaaaaaagatgaaaagaaagggagatgattttctttttctataataatgtaataatgactaataaaagtaaaacattttaataaatctaccaaactttaaacaatggattaacttagacatggcaaacaggtcatgctgtgtgctaactctaatgcattggcagtgggtgcctgaatccacttctatgtcaagatggattcagaagctttgtcaggttcatcagagaagaatgctgacattgaaatgcagtatctgttgtgaaagatggaaagaggggccacatgtatttgctatctctaaattatccaccagatctttctagccctattagtatcaccaaagtacaacctttatgccactgctatgaaaaatattttaaatattttaataacaactatattggagaattcatcacagcatattcgtgcattcttgagacctttctcaaaaccacaaaaaaattagcttatattgatatataataaaaggggaggatattatctgatgt

SEQ ID NO: 2581 - DNA, 612 bp, Homo Sapiens
tcaggttgaccttgtttttgaatgagcaagtttccttcatgggatctcccaactagaggtttaagagtttttgtctctttaatctttacattttatgatgtattttaaagtgttgagtagtgcttaactgaccaaagactaactccacttaattgagccaaacaaaatttttgctgacaatttgttactccttcatgtgacatataagaggcctgtgattaaggtgaataatgttaagaattttatttctaatttgctgttagctgggtatctttgtgtaacagtttttggatctaacatagttgttttgattccacagtgtctcatgcgggagcctccatgtcatctgcttcatcagacactggaatgagtccctcatcatcgtctcccccacaaaatgtacttgctgtagaatgtaggtgataaacattttctctaccttcccagcagtttgctgccatggacataaatccccaaaccctgaattacaaccacagaaagcactcaactggtttgacattgctaagtatatcctgtatacttttccaggctggattgtatctattcccctctctcttcttttttcttgttgcaaaaaataagctgattaat

SEQ ID NO: 2582 - DNA, 385 bp, Homo Sapiens
taatacaaccctaatttaatttataatcattcccttaatcttcctcttcttttgtatattccccatcaactaccccattacccaaaatatgaaacaaagactcatcataagggtccttcctcttttctatcctccctccatattcagttgctaagtctcaactactttgctcccatcaagattctctttactatttcttctatccagaccttcctctttattcctattgtcattgtcttattttaggttctcatcatctttcactaagataactacaacagcttcgtgaccagcgtaggcaacaaagcaaacccccatctctacaaaaaatacaaaaattagctgggtgtcgtggtacatgcctgtagtcccaaaacccaagaag

SEQ ID NO: 2583 - DNA, 772 bp, Homo Sapiens
  misc_feature (715)..(715): n is a, c, g, or t
gggacccggctgctctatccacttataatctctcccacaatattgtgacttgattctgttccaggtgaaccttttcctagtatttcttgtattctttattatctgtcatgttagggcagctgtggagcttcatttttacaactgctgaatctaaatttaactgctgattttctaccatccattttcaaccttctttaaaaagcctggtgagtaactttatctgtcatggcccatttcaatgccctcaatagtaaaaccggcgaatgtggagacccatccttaatgaagagaccagtttggtcattcttactattttccatggattttcaacatgattaagaaaaaataatttgaggctgagaattgtagttacccaactgaatggaaggcaaaggaagaaactagacgctcccaggtaactgcccagtttttgtatttgtttttcctttccaccaatgacaaggtatgctcaataactttactcccgaaggaggatatcccattctgaaaaacacaccactgtatgcgataaaggcagggggaggaaacattacactgtgggagagggaacaaacgtttgatcagcgtgtaacagaaaacagttctggcaactattatttcttcttctccctcaaatccaggaaaggtccataggccattttctgtaatatttcaccaaccaaaatgatctcttggacttgaaaataaacgcccncatttccaaccctccatcactctaaaattattagtgatcttcaggtacttgaaaaag

SEQ ID NO: 2584 - DNA, 507 bp, Homo Sapiens
tgaagtggtggattccttgtttttgctagtatctcatttagagttgagatggaccttaaaactcatctgttttaactcactttttaatagatgagttaaacttaatttacttaaggatgtacagttagagcctggaacttcaaccattattcactccccatgccctgtttccccccacttcgaaattaaatgcggttagcatcatatagttcattttccccctccatgctgctgtgtgattcttgactttgggtatgagtttttcatccttcaagcagggttctgtcagttcatggtatagtgattcagtgttaaaatggtggtgtctcagctgtgctgtgcacattccaaccttgtcaaattaatagtcctgagcaagcaagaaaaagaggtaataacatacccatttctttatgaaaataagcttataaaattttttcatgggctatttttactgagcaaattgtatgtctcacatgttaacacaataaatatcttgacaatttt

SEQ ID NO: 2585 - DNA, 731 bp, Homo Sapiens
actttgagtgccgggcggcgcagcttcccgacatgccgctggaggagcatgggccagcaggtggactgtgaccgcatgcgggggctgatgtgcgccaacagccaacagagtcccccgctctgtcacgactacgagctgcgggttctctgctgcgaatacgtgccctgtggcccctccccggccccaggcaccagccctcagccctccctcagtgccagcacggagcctgctgtgcctaccccaacccagaccacagcaaccgaaaagaccaccctatgggtgaccccgagcatccggtcgacggcggccctcacctcgcagactgagtccagctcaggccccgtgacggtcaccccctcggccccaggtaccaccacctgccagccccggtgtcagtggacagagtggtttgatgaggactaccccaagtctgaacaacttggaggggacgttgagtcctacgataagatcagggccgctggagggcacttatgccagcagcctaaggacatagagtgccaggccgagagcttccccaactggaccctggcacaggtggggcagaaggtgcactgtgacgtccacttcggcctggtgtgcaggaactgggagcaggagggcgtcttcaagatgtgctacaactacaggatccgggtcctctgctgcagtgacgaccactgcaggggacgtgccacaaccccgccacctatcacaccccatcctacaaaaaa

SEQ ID NO: 2586 - DNA, 560 bp, Homo Sapiens
ctctctcacggacatcggacatcctcataatcagactgtcaggtgggcagaagaaatccagactagtagaccacaaaccataactgaacaagactctaacaagaattcttcaacagcagaaattaacgaaacaacaacctcatctactgattttctggctagagcttatggttttgaaatggccaaagaatttgttacatcagcaccaaaaccatctgacttgtattatgaaccttctggagaaggatctggagaagtggatattgttgattcatttcacacttctgcaactactcaggcaaccagacaagaaagcagcaccacatttgtttctgatgggtccctggaaaaacatcctgaggtgccaagcgctaaagctgttactgctgatggattcccaacagtttcagtgatgctgcctcttcattacagagcagaacaaaagctcccctgatccaactagcacactctcaaatacagtgtcatatgagaggtccacagacggtagtttccaagaccgtttcagggaattcgaggattccaccttaaaacctaacaga

SEQ ID NO: 2587 - DNA, 364 bp, Homo Sapiens
gatgctttagtggcctaacccagggtcaaatacagctctttctagcaaaatcaggcagctctgccccatcggtaggggcaccgattagtctactaacagccagaggtccatctaggagggtgccgggaggagctgagcccccggaggtgggctcctggtgacgggtgtccaagaagcggtttccttgggagcttccgcctccgtgggcctctcagcccgccccgtgtggccgcccgggtgtggctcagccatgtcccctccccaggtccttcattcacccctcccctccccacagtggaattgttgaagtgtggcgagtctgtgctcgggacaataaagcttgtgacaggtccaggaccccggc

SEQ ID NO: 2588 - DNA, 378 bp, Homo Sapiens
gatctgtgttgaggaaaacagtggaaggagcgtggccccttactggcactttcaatgccatccgcctcccgggatgcactttttaaggcaaaacctttcaatgaagaagcatgttttgctgtcggcagagggatccgtgttggaatccggggtgcgcgggccctcaaggttgccccggatggcgggtgacagtgctgtggggctttgccctgtggcttcccccgccggcacacaaggagctgctggagagccgtcacagcgccaccccctcgatgcccacagagctgcagcctctgcagagtgtcagctccttcacactgtccaacttgatctcagcgattttttgtcataacacgtagaaactgtcagaaaaaagaa

SEQ ID NO: 2589 - DNA, 499 bp, Homo Sapiens
aatttgaagtaatatattatgggataaaaggccacaggaaataagactgctgaatgtctgagagaaccacagttgttctcgtccaaggtagaaaggtacgaagacacaatactgttattcatttatcctgaacaatcatctgtgaagtggtggtgtcaggtgagaaggcgtccacaaaagaggggagaaaaggcgacgaatcaggacacagtgaacttgggaatgaagaggtagcaggagggtggagtgtcggctgcaaaggcagcagtagctgagctggttgcaggtgctgatagccttcaggggaggacctgcccaggtatgccttccagtgatgcccaccagagaatacattctctattagtttttaaagagtttttgtaaaatgattttgtacaagtaggatatgaattagcagtttacaagtttacatattaactaataataaatatgtctatcaaatacctctgtagtaaaatgtgaaaaagcaaaaaaagaa

SEQ ID NO: 2590 - DNA, 485 bp, Homo Sapiens
  misc_feature (49)..(49): n is a, c, g, or t
  misc_feature (54)..(54): n is a, c, g, or t
  misc_feature (114)..(114): n is a, c, g, or t
ctaagcaggccttggtaaggatgtggactatattctgagttaagcctanaatcntagagagttctgggcaaggactgagacctgactgagaggtgaaatgcagtctgcttgctntgcggggaatggatcagagtgggctaaatgcaggagcaagccagtcagacagtggctgctgtgaaaccccctgctgcatggacacctggatgagagagggcaggcagcagataggcagggggcagggcctcaaacactcgcagcctgtccactctcaaactggaaactgtatctcaagttcagcagttggctttctgagtctccggagttatctaccaaaatatttgagctggcttttatcctatatgagctgaagctggcaggaggctacttgtaaaactccttccttaggaaagaaatgatacacgctacgcgaggaaaaaagaaaacagctgtgaatgaattcttccctcactttcgaagatgtgggt

SEQ ID NO: 2591 - DNA, 355 bp, Homo Sapiens
gataaacatggaaccatatggaatttctgcttgatctatgggtcataggaccgtaagagaattaatttaactcagaggatttcctctgacaggtatcagaatcatggagatcaggatcaaagtaatgatgtgtgataagcaaaaagtcctcaaatggttttaacataattttctccaggaggacataacacagattagggatcggtactctgagcattaggtgttttgccactttttaagttctttgcttttatctcctctttccttgcaatactcttgtcttctgcctttctttgcctgattgttcctattttatttaaaattttaatttttgtttattcaagtatcatgacaa

SEQ ID NO: 2592 - DNA, 674 bp, Homo Sapiens
  misc_feature (388)..(398): n is a, c, g, or t
  misc_feature (431)..(539): n is a, c, g, or t
ggatgaaccttgagaacattgcgctaagtaagagatgcagatgcaaaaggcaatgttgcattattccatatacaggaaatgcccagatcaaatatatctatatatagagaaggtagattagtgtttgtcagggactgcaaaaacggggtaattggagagtgactgccagtaagtacaggaatgctttccagcattgctgaagtattctgaaattaggtagtggtgatggttgcaaaaccttcggaatatagtaaaagacgctgaatggtatgcataaaaatggtgacttttgtgatatatgaattatactttagaagtaataatagcaacagtaataaagagaggtatctttccacacctccatgtcctgtatttttattaagaaagnnnnnnnnnnnggctttttaaggccaggttcagtggctcactcnnnnnnnnnnnnnnnnnnnnnnnnnnnnnnnnnnnnnnnnnnnnnnnnnnnnnnnnnnnnnnnnnnnnnnnnnnnnnnnnnnnnnnnnnnnnnnnnnnnnnnnnnnnnnaacttagccaagatagtgatgtgtgcatagagttccagctacttctgaagttcggacaggaggatcgcttgagcctggaagtttcaggtagcagtgagcagtaatcactactgcacttcagcctgagtaacagaa

SEQ ID NO: 2593 - DNA, 728 bp, Homo Sapiens
attttctgatgttatgtgtgtgttggaactgaaaacttaacaaaattgtgtctcaccagagggattttatgcattctctttcagataaggtgttactgagttactatgagtctcaacacccctcaaatgaatcaggtaatttggagggctgggtagctgtagtgcttgaattcttaagtatggggtaaagataaatccaaaaaaatcctttttgccccataggaaaaaagatagtctcagaaggttatctccaacccaagctcatggtaaaaccttagattctcagaggatgcattctcatccattttacagcttaatcgttaggataaagttttggctacacttaatacagatccaaaacaagagtggtttatgctagataaaactttctgtcttagccagggctgcaatggctcaacaagttgtccagggaacccatctccttctatcttgtggttctgccaacatctacatggttcaagagtacttgggagcatgacaatgcctggtcagcaggacacagaaaaacagatgtatgcattctatttccctttaagggtacaacctagaagttgcacctaacacttcctcttatctcacattggtcagaactcagttgtattactacacttagccataagaaggcaagctggggaatgttctattactatcccaaaagaggaatgaatattgggtgacactataagtggctaggggtgccgagctca

SEQ ID NO: 2594 - DNA, 497 bp, Homo Sapiens
agaaattcttccattgaagaggttaaggagcttcattttcttctagtaaaaagggagaacataaaaacgtatagaataatcttggcatcgttctcaatatatagtatgcattctaaaaattataattacaattctgtaactgtcaggttccagctaaagatttttctagctcagatgctgttgtagcaaaccacacttctgttatgggacctgggaacagaaaagttggttccctgactctcaatccatcagtgctcttttcaactcaccaactataaaagaagggggctggatgtctataaaagtctgtggtgtctgtgccccacatccctggacacagcttttgggggcgggaaaatgaggcagtcagaagagatggagacatggacctgggtcaggctactgggtgctgggatcaaggtgcaggtcagtgggggacaatgcactggcctcagtagggactgcccagccatagaaccctcagggaaaatgaattt

SEQ ID NO: 2595 - DNA, 240 bp, Homo Sapiens
  misc_feature (126)..(137): n is a, c, g, or t
tcatttctttatgtattttgagtctatattattagatacatatagattttaaattgttttctcatcttgctgaattaaatctttaatgtttccagccatgggttggttgactgcaataatttagcnnnnnnnnnnnnttttgctaaattttaatgtcactttttgatatgacgctttggatcagtccaactttgtgttccctgcttttccactcaggttatcagttgattgggagccact

SEQ ID NO: 2596 - DNA, 168 bp, Homo Sapiens
ttaataaggaaagaaaaaatatggtatgctgaggttgctaagacctacagtaaaaacgaatcttctatccacagaattgtcaaaaaggaaaaagaaattcatgcagttttagtcatctactgcgcggtcttgggactcgtccccgcgggataaaggagtactgtggtc

SEQ ID NO: 2597 - DNA, 441 bp, Homo Sapiens
gtgtaagcctgagtggattttgcttttgatttagctttaagtaactataaatcttcgtttttctaaggaagtgtttttggttttgttctgaattctcttccacgattttctgtgtgtggaggtaaatccacttgctgattcacactcatagtcctcagacggtctttataatcatcaaagaacaggaaaacagaaccaagaatatacaaaatattctgcttgtgcttatactttctcatttacagtgtttacagaaaatgattagttggagtttgactctctttagaatttttgtaaagtttccttgctggtctaaaacaaaataatactttaccacagggtcattaatgttattcatcagttctagaattcagctatgagtttaggaaaagaaaacccgctggcaagagtagctggctggcatttattgaatgttcctct

SEQ ID NO: 2598 - DNA, 922 bp, Homo Sapiens
gtatgggaatcatttaatcatcttgttagatgcctgatcttattacttattaggactaattattaagaaattaaagcacaactcatttgctgttgtcttcagcgtagttggtgactttggaaggtggcagatttagcccagtgattgtcgtcttttctcaaaatgttttcagaactcctttttttactattacaacaacataatatccattgttggaataagcatatcattccctttaaagtcatactctcagtcgtgatattaattctggtatatttattaaagtcagctcgtgctttactctttttagaagtattcaacttccataggctaacattgccccaacaaagtaaaaatataggtcacgagaagggcatcttttactgaatccattttgctagatttcgtgtgagctgtttctgaagtctcccaagaaaattttctgaaatttcttgaatttttaaatatgctccttttcgatgaccttttgatagttatatccttctttaaatctgacctacagtaacattacctttctaaagaacagaaatccttggtgttgggggaggagcggcttttatatagttgcttatgaggtttgttttgtttttttcctaaggaaggctgggttgcttttgtgattttatctgtttcaaatggttaatattcagttccattcacttctcctgtatacagcttcataaaggtagatgagatgaaccttagaacatacaatctttttctgcagacagaatttcttaatcattacataaacgttattctgaaaagttttcagtaatttcatggccctccccaatagtaactttcagtatttatactgaatagctctttgcaactagcctaaaagagtcctttatttttgttcttttttctctcttatctgtggagattgaaaatatat

SEQ ID NO: 2599 - DNA, 511 bp, Homo Sapiens
  misc_feature (60)..(95): n is a, c, g, or t
gtgagccatgattgtaccacttcacttccagcctggatgacagaacaacacctcatctcnnnnnnnnnnnnnnnnnnnnnnnnnnnnnnnnnnnnaacaataaagaaggtcagccatgcttgtactatacaaacctagtaagaaggttcagcagaactcatgtgctaccagcccaactaagatctctgaatgtagaagggaagcagaaagccctgagaactttctttttagtgtaacccatgccactcattgcccaagtattttgttgatagtatgaaaaggttaggtatagagacaaagaaactattctcattacttcccttatgctatacctccagccttcatccaggaaaaaaagaggactcttactaggaccacgaatccaaacctttttctgccaagagctgtattttggcatctgtttgaatttcatgacaccgtctctgtttctattcctgttttctcattcataaattcttatatcaatgtttcccactttcacatgattgct

SEQ ID NO: 2600 - DNA, 925 bp, Homo Sapiens
catgtcgtggcttgctttactcatattcctcagcatctgaatgaacttaatcaaaaattttcagggaccattgtgaataagtacattatcaggtaaaatttaccagtaaaatgtattgattataacttagaaaggtgaaattaaacacagttcaccaatgatgtttcgtaggtattataacatgaattctaaagaagacgctggctgagcgcagtggctcacggccaatacaaacttgtaattccccttttactccaggagtggttctatctactcttataatggcatctttcatttaaagagcactcaatattcttcacttgtatcatttaaaagggtgaaaaacatgcttgaatgtcattaggattgtatttcataccagactcatcaaatattctcatggggtaacaccctttgatcaagacaaagtttaattaaacaaatgactaccactggcacttggtcaaaacataaatgttacagcaatgattattcttccctcttctatatattgagtgaattagaccactgtatgatctcatctgattctaacattccatccattccaaagagcaagtccaagagccttgtcagtggcacagccaggaccagcacgaaggtcctcaattcctactccactttgactctctaaacataaatatgatactcagtaatatggttcagaacatcacaaccagtgtactatgaaccacttgtttactctgagagactgatagttgaaaatcatgtatagagataaaaaaatcaaatcattatttttattgatccaaaagttcacacgagttgaaataatatttaaatagtatttggatggctgtctcagaaaaattcctaaattcagtatttatgtataatggctcaaaatattttgaatataaaaggcactgatagccccgacggaatc

SEQ ID NO: 2601 - DNA, 724 bp, Homo Sapiens
aacggctatgagaatttacagatagtagtttaaaaagagttggcacacgaaatgatagtatagttcaatgggtctcaaatgttgcctcatactagaatcactcaaggagtgatttttgagatgctgacactggtgctgccctatacacccaagaagccagaacctctggtggggcccaagcccaggctgcagctcccaaggtgacccaatggtctgctaatctggagaaccagaggctcactggtgctgcgggaagatggtttctagggtgagaatgtccactgcaaagccagcaacagtcagcgtccatctgagtcttctgcttttctgcaaccagggtaagccttctctccctgaggcagcctgctccctccagagcagccctggacttccctggctgtttgatcactggaaaaataaagtcttcctgcatttgatgtcgagcttcctatctcctacttttcctgtccccacccttcacagacctgaactactgcacacaccataagccctgcaagaatggagccacctgcaccaacacgggccaggggagctacacttgctcttgccggcctgggtacacaggtgccacctgcgagctggggattgacgagtgtgaccccagcccttgtaagaacggagggagctgcacggtgagtcggaggctccatggcatctcacccggaagctggggtgccctggtgttgaatggagtgtgtgggct

SEQ ID NO: 2602 - DNA, 606 bp, Homo Sapiens
gtcgtggctctgtagctcagcagccgcactgggctctcaagggccccaaggcttgtgggtggttaaaacaaacacctttgtgacacatggccaggacgtcagggccactgtgatgaccataaaaaggcgaccaagtttatctgtggtataattcattttaagagtgtaaataattgcccctgaattttacacttatgctgcaattagacacgttacggtgtccggctgggccatggctctgctcatcagctctgtgggtcattacagagccagcatcccagaagctccgccagaatcacggtggatcctgtgagaatgtcttccccagagcagagtgcaaaactccaagaaatgagtcaaaacacttttgcatgtacctacatagctttatgctcaaattataccccacatttcagaaaatggttttaagtcaattaacatgttgggttttatacccacacatatccaagtgatgtataatcgcaagtagatacaaaatttagtatttataaaattatcctttagatttctaattttatctaaattttaaaaacaatatattccaacaagaaaaagccttagaaattatgcctaatttcaaacatg

SEQ ID NO: 2603 - DNA, 755 bp, Homo Sapiens
acatgtcgtggctcgtacaggctgtgtgccatctctttggtccatttgtatctgtattcttagctcttagtatcaggatttgcccggaggtgttgaagctggcaatcatccttccattccaacaagaataaatataatttatcacatatatgtatgaaataaatgtatttaatatgtatagtaaatgttgaaggtttttaaagaagtgatggaatttgtaactaattcatggaatttataacagttcaattcattatatgctattgaagtagcagtctcatttttaatctcagaaactgtttctttcataattcatgttaaattaagaagtcatttgggaatttaaaaagcatctggactttcctccctgccccccttccacaactgtctgtgaataaattgaaagaggaaaatagtgcttacataatcttaaaccttttcttttgacatgtcttggaatatttaatttctattattgtgataatacaagtaaaacaaaattatactacaggatttatagatgtttactttttttgaggaaaatcactcaaaacaataagcttttaaacccaaactcaacaatcattgctttttgttcttagtgatagtgcttgcgctgatacaatatgatcaaaatatttggccactattacgaaatgtcctaaagatgattattataataagagcccatcttaattggtaagtgccaaatatggtgctaagctctttattcttatgactaccttagagatacg

SEQ ID NO: 2604 - DNA, 463 bp, Homo Sapiens
gtcgtggctgccttgctggtgcatgggctacagcattagttctgggattgtctggttcattggttcatttattaccttgctcactccttcattcaataataattgagtgctcactcagttgtttaagtcacgtgaagggtacaaatcagcactaaaatgctgcctgtttagccacgacagacattcttcctcctgtgctgcatacgcattcaaagcccaatgggaattaagatccaaactgtttgttcactcatggaatactcatgcaataaattgtttagtgccctcaacaaagagtccttgccacaaagcttattagtgagcagtccaagttttccctcatcttattaaatataaaatttgtttagaagtgaaaacagaaaaatacgttctgaaaaaggtaagtttttgtcccacgaaaagatgcttgtgggcctaactgtctatagttgtcccagctccc

SEQ ID NO: 2605 - DNA, 586 bp, Homo Sapiens
tcccatagtgctgggattacaggcatgagccaccacacccagccggccactgaaaagttttaaaagaagtttagactttaaaatatgcctgcacacaactatattgggcaaagaatatagttttacttgtccaagaactgttgattaatttgcaccaatttggaaatgataaatactaactttttatggtatagtcgtttttgtttggctgaatccagagattatttccttgtatatgtatctagaatatgtcctactagttattgtttggaaacatactcgacatctttaattttggagtttaattttggtgctataattcagagatttaaaaaaggtttgagaatgccttgctaagtgatggcaggcttagcacagtggcaggcttagcacagtgtttggcatatagctgggtcccaggaattatttacatatgtaatggaggaaggagaaatgttttattcaatgaacataggctaaacaattcactcttcatttggaaaaggtgaaaaatggggaaatttagataaattgattatgaaacggttattgttccggccctatctcagacttgttgttgttgttg

SEQ ID NO: 2606 - DNA, 625 bp, Homo Sapiens
  misc_feature (494)..(514): n is a, c, g, or t
tggatctccacggtgtccaagggtgctgaaggaccccaaaagctcaggagaaatggggaggggctagacaaggtgctgtcctgggcttctttttcaaaatgggcaaaaagtatggctctgaaaatttggaggtttaaaagtttaccatatctagaaatacatgggaaaaaagtcactattcatttgtgaaattaggccccaggaaagcaatcagcagtgtgactctgaaagtaacaatatctcatcaatttaatctcttcctgcaatagaatgactacactggcaaactgaggtagagatcaaagtaatgatcttgattttagtacagatcccagttcttttctgcacgatgcattcaccaatgggctgatgaagtaaaatctacactgtgtagctcttagatgggcgtgcaattggctgccagtttgaaatgaaaccaagaaggaaattaatggtgggccagagggattagttgtgggaaatccatttctccnnnnnnnnnnnnnnnnnnnnnaaatctttatcagtaacttcaatgatagaatagataaaatgctcataggtctacaggtgatatcagctgctgctagtaggagaatggaaatcaaagcacattttcttaaga

SEQ ID NO: 2607 - DNA, 386 bp, Homo Sapiens
tgttgcccactgacatgttaccagaagttgtaccatgatgttgttttgacccctgtgagctgatggccccggccctgctctgtgcacatttctgtccgtgttccccagcactctggttggagagagtccacatcttcagctccgtgtggacatctccctgtacctctgcatcagcacatggatttaagagttatgtaatcgtgagagaatggtgtttgtggtttttccccctctttggctggtggaggataaagttcctgctcttttacctccaagacgagggcctcattgattcacttccagaagtgctgcacttctgaagaacaaggatgcactaaagttagcaagtttataataaagttaaatataaattattttgttttagg

SEQ ID NO: 2608 - DNA, 525 bp, Homo Sapiens
tgaaaataagatacacaataatcattgctctgtgtgattacagataggattatccatctgcatagccttgtaaaagtgccattttatttttagtgctaaattcttgttaaataatgtagttttatatagctgatagaccaacctatatccaaacttttataaaatattaattattcttgtttttctcacacaggcatactccaaatgcttcttccagttcatttttcagccatcagttcaagagccaatgcctttttaaaataaagcttctgtggtcttgtttttaatggctcaactgtctgatgtaattgagtgaaggtttgcactgagaaattagcattcaggccttacccccatgaagtattactgttaacatatgttcggactgcttcccttcaccaatgtgaacaactctttttcccaaacagtgttaaaagccactttgcaacacttgacttcatcttaatgtacattcactgttgttacatacatatctaagtaaatcaaagttttgggtgaaaaaaa

SEQ ID NO: 2609 - DNA, 751 bp, Homo Sapiens
gtgtttgcggtgtcctggggcctcccttgttccgacctgtcaattctgctgcctgtcacgcgggtggttctgcccatcccgcctccgggtcaagcatcttcaagggaaggacggactggagccctcaccgtggactcaactctgcattctccgtgccacattcctccagttcccacacgtagaagggaacgaaactgacgtctacctcatggggctgctgtgtgggtttgggaggcaaaaatctatgaagggttttttgaaatcccataggtgccacatctatgagatgtttgataaatgtgaatatgcttttacatttgggcttatctaatttgcaataagagagcctctctctatcaacaccagcttctctctcgggctgtttgctcagggaaggcaagaaagccacgtgctggccctctgccttctctaaagtgctgttggagcatggaggagctggaggagatggggatggactgacagctaagagggcggctgctgggactagatagtggatgaagaaagaaggacgaggaagccgtggggcagcctcttcacatggggacaggggatggagcatgaggcaagggaaggaaaagcagagcttatttttcacctaaggtggagaaggatcactttacaggcaacgctcattttaagcaacccttaagaaatgtttatgtttctttattaccaatgtaatctatgattattgaaggaaatttagaaaatgcgtagatacaaaattaaa

SEQ ID NO: 2610 - DNA, 370 bp, Homo Sapiens
tgtttccaaagagaagcgtgggattcaaacattcatgagagggagcctctggcagaggtgaaaagaccggcagggggcgagaggcgggagtcaagactgtccattggtcggcgtaagagttcctccacgtgcctggccacatccatggtctcatccaggtcgaattctccatcctgatcgagtacatggtcagggttctgtgggtacatgttatagggagcctgggggcacacagctggggagggggcctggtccatgtacgtggcgctgctgcccccagcatctgcagatgcattcacaaactcagggaccacttgcttgatctgtggttacacatatccatcaacagcttagccagcaaacgcatcct

SEQ ID NO: 2611 - DNA, 873 bp, Homo Sapiens
  misc_feature (679)..(700): n is a, c, g, or t
cccctggtatccccacccctatgtaggaaagtacattaagtattaatgaggggaaaggaaatgagctctacgaggatttcaccctgcatgggagagagcagggttttctcagattcctttgtaatctctagttatctggttgtttctgacaggatgctgcctgcttggctctacaagctggaaagcagcttcttagctgcccttaattaatgaaagatgaaaataggaaattgccctgaaggggggccagcagggtcacgggggcaaggaatctctcagggtttcctgtgggaatcctcagtgtgccccaacctggtttctccccttccaggccaccctgtctctgtaaaggatgtctgctctgttcaaaaggcagctgggatcccagcccacaagtgatcagcagagttgcatttccaaagaaaaaggctatgagatgagctgagttatagagagaaagggagaggcatgtacggtgtggggaagtggaagagaaactggcgggggagaaggaggctaacctgcactgagtacttcattaggacaagtgagaatcagctattgataatggccagagatatccacagcttggaggagcccagagaccgtttgctttatacccacacagcaactggtccactgctttactgtctgttggataatggctgtaaaatgtttnnnnnnnnnnnnnnnnnnnnnngaggcactagtctatctgcaattactcaacgaggcattttcataggaaacagactatgattaatccatttattaatcccacacacttaccttactaagtctttgctttaataaatgagcaaccctgggtatagtcttaaaattctgcacaataaattttgagaaagaattaaa

SEQ ID NO: 2612 - DNA, 605 bp, Homo Sapiens
  misc_feature (151)..(289): n is a, c, g, or t
  misc_feature (531)..(546): n is a, c, g, or t
acaagccagtaaaaacagttaacacatattttaatgacaagctcatcatcaagaaaaacaaccgtatactttgaaaaataatttaactcatttctgattaagaatgaaaagaagagaaaactatatactatcttcgtttttctggggtttnnnnnnnnnnnnnnnnnnnnnnnnnnnnnnnnnnnnnnnnnnnnnnnnnnnnnnnnnnnnnnnnnnnnnnnnnnnnnnnnnnnnnnnnnnnnnnnnnnnnnnnnnnnnnnnnnnnnnnnnnnnnnnnnnnnnnnnnnnngctacctattgaaaaaccacagtattgggagaaaaccctatcttgttaaagccatcttctgggaaaaccttacccaaagcagtcaactgcctatttagcatctgtcaatagttctaactctacttcatgtttcagaacactgacacacaaaatgtggtccacaaacctctagtggtccccaagactatttcagaggatctactagtttaaagctactttcataatgatattgtctttttttnnnnnnnnnnnnnnnnctgtgttttgagtaaatgagtatttgcaccaatggtacaaaagggtaccgagctcaaag

SEQ ID NO: 2613 - DNA, 649 bp, Homo Sapiens
cccaggagatggtttaccttgatccaactaccctcccagtaaaactaagaaatccaatccatgaagaagatcccaaaaatggtatccatcaaggattaaaaggatcatgtaaagcacgtcttaaataacttaattttattacacagattagttattctgttagctaggatccaatgaaacccgttcccaataccctctctcatgttggaaaaggaggaatgttaagacatgctgcagtgataaagtaaccattcttatctaaacgtgagaaatgataacagttaaaagtttctccagtggcattttaagttaatgttaactttccatacaaaactcatttccttcccaatctttcctctctacacaaccacaagtaggtttgccatctacacctatttgtctatatattctacaaataaaagttcccaatatgggtttttattaaaactgaaaatgtgaacactgaaaagccactctacgcactgctgaaagatttgaatgcaataaaatttttaaaatttactcatattttgctgtaaagcactcatgtaaattaaaagagtaacttaaaaactaaatttaagacgtgccttttctcttaaatcaatacacttaaataacttctcaagaaaaaaagcatttcctaagt

SEQ ID NO: 2614 - DNA, 631 bp, Homo Sapiens
atgctgtcatccagactgtatttctccatttgccttatttgcctgcaagagtctttttgtgagagtgactcatgataattgtggcttattacctgaagcctcatgagaaacggtattgaatgctttctgaaatcagaatgtactacttgtttgtactactagtttgtttaaaaaggaaatgagattactttggcctggctttttccatgcttttcatgtcctatgtagctcaaaaatttgaaatgacaggttatagtgctactgagaattcacgtttaagatgtagttcctagaatttgatttttctctctttgggtcaacattactttgttttaatctcccactgacatctggttcttcatcttctttcaaagattactgatgatagctccccattcattcatttgaaatatatcattacttttgttttatggcccagcataccgttcatttttataaatgtttcactggtccatgaaaagaatgtaaattctgtagttgatgagtgcagggctctgtgtgtttttggtcaagtttatgtgttgtgttgcttacatcttttagagctttaccgaatttttgcctatgagatctgttagagacagagaggttaaaatctcctcgtataatt

SEQ ID NO: 2615 - DNA, 854 bp, Homo Sapiens
attctccataatgcatgggaaaccagtaaatgtgttttagagtatgagaatgtttaaggtagaaatacaaattgcatggctgtaatgaaatcccatttctacttccccaaaatggtgataaaagtctgttctccacacatttttttcccccttggggagtaagaataggaaaaggcaaggaagatctcaagaagatgttcagtttcccatctggaacagtctggagaagtacagagaagtagctagcacacacagaaagagaaattaaagacacaaaagaggacttaaaacatatgttctggaaacctgaagagatatcaggagatataaatgagttttttcttatttatttttctgaattttctgtaaaggaattttaactggaaaaacaacacaaattcttaaaaatatatttgtacagagaaagaaacaagtgtaaatacaccaagatatcttttttgccccagaaaaagtaaaaaaagggatcagttaggaggacatcctttctatatctcaatagttacctgctttcagtgggctactatacactttaaagatactataaaccaaaacagttaaattctgagcattgtatcgtaagaagtaacaattccacaacacacttcacttacatgttactttcatttgaagctgactattctttgtcaagcataaagtaaattaaatgctttcaacatctcctggaaagtaaaattttatcttccatattttacatagagaaggaaaaggaagaatagggaaggagaactattcttattgttttctgattcaaccataggttttaaaattgaagtggtattcattaagaagctatttttgaaagatattatgct

SEQ ID NO: 2616 - DNA, 402 bp, Homo Sapiens
tgtccaacacaaactgctcagcaatgtcgaaggtgatatgtacaagacaggcctacatgacagagctcacctagctctgggaactgtggaaggcttcctacataatacaccttgcacacagtagaccctccataaaagtctgttaaggggatgaatgaagaacaaaatcagtgaggattcacttgaacatggacttaaaagaatgcgtaagatttgggcaagccaaaatgagaacgccaacagtttaggagtgagagtgacagctacagggaggcaggaaaatgagaggacgctcccagcaatgactagaaagaagtctggtgcaaaagaaaaatgctatcagtgatgggttagaaaggtacttattaaatgagctaagaaaagactttctacgtgacggat

SEQ ID NO: 2617 - DNA, 421 bp, Homo Sapiens
actctgaggctgtagtgattctggtgtacttttcgatgggtcagttataaactttgctgtgggtccctgaaacaaaaactaaatgaggcttccctctaatcttgttttacatccttgagagcatgactttgtgaccatgtggggatactctctcttggtctccaccatccagagaacaggaattttcaagttcatgtcaggcacccaatccgaaagggctgggagtctgagatgagtcagcacattcttcatcccaaatgtgtcaagcccttgggtgagttttgtctgaaaaggtcccatctctatagggcatttgtcatcttttgctatcttaagcccatttctgagagtgaattcttggggatcatggagatgcctcttctaccctagataccttttgcttctaatgtaaaaagaaagg

SEQ ID NO: 2618 - DNA, 1036 bp, Homo Sapiens
attgaataaattcattcttcccccactgaattttaatgtcatctatttctcagttttctatgctgttccactggtcaacccctgtgccaatactaccctgtcttaaattactaaagctttaaaataagtcttgaagtcagctaggtcagtcctatccacctaatcagtttctggaaggtatataaagtcatgcagccactctggaaaccaacttagcattaccaagttgaacatgtcattacccaattatatgccttgcctcctagttgtacaccttagattagtgcttcccaagctgtgagtcttcatccacagggtcatgagttttcaaccaaaaattttcttttttaatgagatagaattcaataattattttaagacgacatctcagacaagaagagagactgttattccatgcaccttttgttttggatctatcacattatgtaagtatgtgtgtacaggatcccatgtgaaaaatatttatttcttgctatcttgcctctgagtagagaaagataacagacataaagaacacagaccagaaaggaaagattgggattttgctttgaaagctattgcttaaagttatttccacaaatgtacaagaatatgtaagaatgtatatttatcattgtaatagtgaaaaattggaaatgtcaatatcctctgtaaaaggaatgcagacaacagaatactatataacactgaaaatgaatgaactagagctatgtgtattgatattgaccagttgataaatctcaaccacatgaagtcgagtaaaaaaagcaatttgcagaaggatacatacaaatatgacaccatttatatagtagactgaaagcatgcagaacaatccattgttgtttacgtgtgtaacagtcataggaatgacaaccactgccttcagaattatggcgacctctgcgatggaagagaatgggatcagagaaggatacacaataggctttaactgattttgtgattattgatattagaaatgtttaaaattaagatattaacatttcatgaagct

SEQ ID NO: 2619 - DNA, 681 bp, Homo Sapiens
tggagacagagtggccagatctgggtggagtctgaggccgctaaaggcatcagcagcacagaagcagagtctagatcaaattttacaagcgttctctggttcaggaaggctgacttgttttgggaacagaatggagcattctgaaacatttcactgaagaaggagctgggagtgctgttgatttgactgggttcaggggagcatgccttatccatgactcccttttgcttagtttgttgcttctagctttatagcctccttccttccttggttggaagtcctgtggctgggagggcttgtgtttgtgactgctaacctcaccaggacaaagagcccaggtgagctatgtgcttgagcacacttgggagaggacacagcagtgcatgaggcccaggctgcagctcacccctgtggtttgagagggtcccctgtttagagtgaatgaatgggcatcttggaagctttctcaggttaccaaagagtaggtctgagttttggctgaggctgctgctttttgggtcaagactcggggtggtggtggattaaattaactatgaaccccagggaatatcttgaccctgactggaatacaactgttgtggctcaagtaggttaaattttatccccttaagaaaagtgtagttattttaattaaaatacgatagcctcgacatgttcggg

SEQ ID NO: 2620 - DNA, 633 bp, Homo Sapiens
agctgagccatctaatatacagggtggcagggatgaagtcaccgttactgtccaacagcttttattttaagctggtgtgggctgggcatatcaaagacaggcaaagaaaaataacttggagagttgccattgaggatatatccacagtgagccaacagcacccacacaagcagccctcgtctgtataatgccctctactgggtcttgagggagattaaaaggaaagatctcttccatcctggggaacctgagatatgacagcagcacacaaatacaggcagatttatagttctaagcagagttccagtagctaagctaagggaaggagagtcaggagataagctgttagctgaattttattaaagacagatgacttcactagtaaagataaagtgggacctcccgtggttgggctgcaatattttaagtcccaagtgactgctgaatactcgctttgcagttggaaaaataagctggttttggccagataaacagtgtaagaggtcatctctgctctagaggaacatgtaacctaattgagacacttctacatataatgcaagatagcatatgggtagtcaagtagtagaattctgagaagagaaaatctgactggactcattaggtaaacat

SEQ ID NO: 2621 - DNA, 206 bp, Homo Sapiens
cggcttatttcataatttcatacaaattcaaacataccaaataaaaattcttcatgttacttgaattttccaaatggattttctgaatttaacttgcatgtttccttgctccctaagcaaagggtaactatccatttcttctattaagatttgtttctttctcctggctttaattgaaaggtcagtcatgcatttaccattcagtt

SEQ ID NO: 2622 - DNA, 174 bp, Homo Sapiens
acaacagcatcaaaaagataacataagtatttaataatttaacaaaagaagtgcaagacttttatactgaaaaatcaaacatcattgaaggaaatttaataagacatggatgttcaaagacttaatactgttaacacggcaatactccccaggttgatccacagatagaatgca

SEQ ID NO: 2623 - DNA, 445 bp, Homo Sapiens
ctctagccacttatcttgaataatgggaaggcagagacaactgaggatgccagagggtggagactaacgaggtgtcactcggtggaactgaggaacaatggcagacgagacaccccagcgaggccacgcacccgtgggactgacagagatggtggtggcagcagagctgggtctctgaggctcttgctgcgccagctcttgcatcaccaacacctgagcacactgtcccctgcgagcagtggctctcagcgagagggaggagcatgtgggtttatcacaaccatcctgggagagcaagacatttgcaacacagatgacaaagtgaatgtcccaaatatacaaagagctgctacagatcaataagaaaagtggacgaaggatctgggggctgaagggggagctttttcaaagtacacataccagctgggcatggtggctcatgcct

SEQ ID NO: 2624 - DNA, 1040 bp, Homo Sapiens
ccgaacatgtcccggctttagaggagttggagaactgaaaactcttcttgttgaatatttcataaatataatttatttaacttgaaccttcatctgaaaagcttccctttcccccttaagaaatttttaccaagaagagtaagctaaagctattgcatatttttggcagagaaaagtagattaacttttggtatatttagtgaccaccatgagcacatctgaacgcagcagcagctaacatgtgagagggcatgatctgcccaattattacaagattgcatttcctcatgccatctctaatcagaggaaaaggtttaaattagcagcaatctcaagaatgtgaatcaagtctgggcagaacttttgtatctgactcagtgtaagactgtttagttcttgtttcaagtagtctgcacaacaaataccatgcctgcaaatatgcaacaaacactcccaggaagaatatgtttgtttcttccatggattcaggtaataggaactatgaacagatcttataaaattttgtgggcatttatgtgttgctattaaaatggaataaagattttctatttctgggggcaatgtagatacaaaattagaaagtcagacaggtagatatgtttggcctttaaataaagtttagctttaaactcctaatcttattgaggtacttaaaaatatgtaagaatcaaaatattttactgacagtggaaccatggttaagtcaagagctttagggaaaagagtatatgtatatgaatatgcctaaaagtaaatagggataatggattcaagtttttgtttcatatgatatctaagaatcagatttcttggagtagaatcccatgagtgaattcatctttccacaaactatgtcatcaggctcatttttcaaaaccaatgtgcacaacacctggtcaaacttctgcgtcaactacattccgtgtcaataaaatgtttgctttgccaagggagactctgagaaagtgaccaatatgtagcaactgagaagtcatttaaaggacatcagaaaatgactg

SEQ ID NO: 2625 - DNA, 592 bp, Homo Sapiens
  misc_feature (55)..(55): n is a, c, g, or t
  misc_feature (116)..(132): n is a, c, g, or t
  misc_feature (157)..(193): n is a, c, g, or t
gagatgtttgacattacttataattcagacaacctttgttttcatccaaatattntgggttttaccactgcataagttttgtacataagtgctatttgtcatataattttagtttnnnnnnnnnnnnnnnnngatacgacacaggaaagactaaggnnnnnnnnnnnnnnnnnnnnnnnnnnnnnnnnnnnnntatcaagggtcggggatgatgtggagtaataggaaccctggtacattgctggtgggcatgtaaaatagtgtagccagttggtttggcagttccacaaaagttaaacaagatgtccatatgacctagcaattctgcttctacatgtaaaccctaaagaattaaaaacagatacttaaatacttgtgaatgttcacagcagcactacttacaatacccaagaggtggaaacaactcaaatgttaatcaatggatgaatggataaattgtggtctatacatccaatggaaaagaaattcagtgataaaaaagaatgaagtttattcagtgattaaaaaatgaagttctgacatatgatacaacatgaataaactttgaaaacactgtaagtgaaagaagccg

SEQ ID NO: 2626 - DNA, 678 bp, Homo Sapiens
cgacatgtcgtggcttttcaaatactggctgtatcatacgagctttgctgctacctttccaaagccctaagatcccagagcccagcctgggaagtattacttggaaagagcctcaaaaaaactaccctcacttctggagggctgatgtcaatggagggctgacttcaaaccctggcgataggtcacaaaagcccggctttcaccaactgtcataggctgtgtgtccagtgtgcaaagccagacgctgccaggccctgtgcacctcgattgctggcctctttcaccattctgaatgaccaagcgaatcccagaatagaaaggcagtgttaacaagctcattcactgggcctggagtggcaggtggcatatcaggtgacaggagtaggagccaagatccctcggcagcctagagttgggatgagacgaatagtgcaggactgaatggggaaaaccgtgagttcacttcaggtcaacaaaggtaatgctgcctgtctctgtgccaggcacacccgggggacagagacacagaaaaacagagggattttttttccctcagagcttatattaagaccctgagattgggaacccaagtaagacaattacacaagaaaaacggcatatgtggaaaaatggcttagtgacgtcagctgaccacagacactgaggatgcactgttac

SEQ ID NO: 2627 - DNA, 292 bp, Homo Sapiens
tagccatctcaggcatgggctttgattcaacatgtcattcaactctctttgcaaacatggagagtcagaaagtatttaagaggcttcctaccaccactgcatcagatgaccccagaagagtccaggtcaggtccatggtttgctgtgcatctatttattacaagaggactctgcctcatgtcttattcatccaactcttcacaactttttagtaggctctgtctgaagtcttgatgaggctcaattcccattggcctgctgttattagcatacctgggaattttttaataac

SEQ ID NO: 2628 - DNA, 451 bp, Homo Sapiens
ttttcatgttgatctttaaattttcccacaccataagagaggagcaaaggaaattaccagtttagactaagttacagtatgtgtttcataagtgattaaagctatatcatacccagttattagttaacacaaattcagccacattctgagtattgtttgttcacctttcagacttggtgatactggaaatgtcagtgtaaataacactaaggttaggatcttctaagtgtataactgtctcctaagcccatcactgtggcacactgtagagtgagcttatagtttaattgagatatttatcttattggaaatattaaaaagcctatgcttgtgtaagtgaaaaaaaatcacattcatttgtttaaaaatgtaaagctattttgtagaggctcagtacttagttccaatgcactgttgtatgaatgcattaaaaattgtaaagtaccatgaa

SEQ ID NO: 2629 - DNA, 416 bp, Homo Sapiens
tttcccccagccgcacggtcccaggccccagagaagatgagtctatggcatcaggttcttaaacccaggaaagcacctacagaccggctcctccatgcactttaccagcgcaacgcatccactctctgttctcttggcagggcgggggaggggggataggaggtcccctttcccctaggtggtctcataatgccatttgtggagagaacaggagggccagatagataggtcctagcagaaggcattgaggtgagggatcattttgggtcagacatcaatgtccctgtcccccctgggtccagccaagctgtgccccatcccccaagcctcctgggaggatccagccaaatcttgcgactcctggcacacacctgtctgtaacctgttttgtgctctgaaagcaaatagtcctgagc

SEQ ID NO: 2630 - DNA, 358 bp, Homo Sapiens
gtgaacatcagtgaggcgcactcgcgatggccgctcactaccgagttctgtcagccgaacaaggatgaggatctatcggaatcctctgtctccccacccacagtcactcacttaaggacctgcctggtcactgtccagggaggcccctaaagtggagcctcaggaaaaggtgcaggctcagagctcctgaaggaggtccctgctgcagccgtgtcacagccggggtgaaggtttcgcccatggtctccacctcgggatcccgtccttgtcagagaagtgttccttggatgagcgcccaaagggaggagcccatggccctttcttctgtgactgattaaaaatctcgatgaaacaagac

SEQ ID NO: 2631 - DNA, 551 bp, Homo Sapiens
ttattgtctcttacacctgtttcaacagagctgtcagaaaatggggaaggtgactttaggtatttgggaatggaagatagtcatatcccaccaccagtaccaagtgaattcaatgatgtttcccagaacacacatttgagacaggaccataattattgtagccccaccaagaaaaatccatgtgaagttcagccagactctctgacaaataatgcctgcgttagaacatttaacttggagagtccgatgaagactgatattttcgatgagtttttttcctcctcagcattaaatgctttagcaaatgacacattagacctacctcatttcgatgaatatctgtttgagaattattgaattaatgcttgttaacttttttcatataatatttattattattagaagaacttacaatgtgttcaggtagtgtttatacactggacttgtgtaattacttgtgtaataaccatgaacaaaatgcaaggtttaacctttggttctgcccatgaagcatgtaatctttcttacacattaaaatcactgaatgtgtt

SEQ ID NO: 2632 - DNA, 451 bp, Homo Sapiens
cctaggaaaggggtcaaaacttcaagacactggtggtggtgggagatcaggaaaataacttggcctagctcaaacaatattggataatcccctccttgggggagagggattagagtgtgctcctactggccccttggagcctcccctagcttacacagttaacttgattttaaaatccaaggccaggagagaagaatccaaaaagcaatatttttcatcacatgccaaaaacgggggatagagagaaggagtggcaggcctaggcccctccgattgtcccttgggggttacccctcagcccacctcactatggtgctgggtagaggggatacctgggttctaacctctaaataggggagatcccagcctccacaaagaggcccttttattttttattctgattagccattttaaaccaacgaggaataaaaagaaatcctgatctaaccag

SEQ ID NO: 2633 - DNA, 1397 bp, Homo Sapiens
  misc_feature (1289)..(1299): n is a, c, g, or t
ggtgggctcactgctagaacagggggccctactggagggaacccgcttcatggggcgacacagtgagtttgctgcccatgccctgctactctccatctgctccgcatgtggccagctcttcatcttttacaccattgggcagtttggggctgccgtcttcaccatcatcatgaccctccgccaggcctttgccatccttctttcctgccttctctatggccacactgtcactgtggtgggagggctgggggtggctgtggtctttgctgccctcctgctcagagtctacgcgcggggccgtctaaagcaacggggaaagaaggctgtgcctgttgagtctcctgtgcagaaggtttgagggtggaaagggcctgaggggtgaagtgaaataggaccctcccaccatccccttctgctgtaacctctgagggagctggctgaaagggcaaaatgcaggtgttttctcagtatcacagaccagctctgcagcaggggattggggagcccaggaggcagccttcccttttgccttaagtcacccatcttccagtaagcagtttattctgagccccgggggtagacagtcctcagtgaggggttttggggagtttggggtcaagagagcataggtaggttccacagttactcttcccacaagttcccttaagtcttgccctagctgtgctctgccaccttccagactcactcccctctgcaaatacctgcatttcttaccctggtgagaaaagcacaagcggtgtaggctccaatgctgctttcccaggagggtgaagatggtgctgtgctgaggaaaggggatgcagagccctgcccagcaccaccacctcctatgctcctggatccctaggctctgttccatgagcctgttgcaggttttggtactttagaaatgtaactttttgctcttataattttattttattaaattaaattactgcaaaacagaggggggataagcgggggcaaaggactagagggagaccgggcggggctcggccagccgtgagggcgggccgagaggccggcgggatactcattcttcgtgtgggcggcccgcccctagggccgccccggagaaaaactttttttaaaaaaacccttttcctttgggggcggcgcggggggcccccgtgtgagggaaaaggggacacccggggggcccacacacgtgggtccttcccaaaagaagaaacccgcgggggcgcaggaaaacaaagggggggtggtggagttctcgccccccccctttatgtgaaaaacgccccccnnnnnnnnnnnataatacagaaaagggatttttgatacaaacaacattttccccagagcgggtgggcgcgtcctcccgtggagggtcactcttattacctggggcgatc

SEQ ID NO: 2634 - DNA, 288 bp, Homo Sapiens
cgggttctcgcttgtaaactttattgtaactcttccgcccttttcaggcgcagacaacagaacaaagtatagaggaacaacaaaatatataattagccctccctcccccccataaagcaattcacggatacagaatacattctcttcacagtaaacctaagaacacttgtaacaattgcccacagcgcgcatgctaactaaagtaacctcttttgagaaacacttaagacaaaattgtcaaaccaaagggggtgggtggaggaggaaaagagagaagccagagagaaa

SEQ ID NO: 2635 - DNA, 573 bp, Homo Sapiens
tgaggtatctgtgttacaactcgttctgtgtcagatattagtgtaaagtatgcatgcagtctggaggggggacctaagaacaaaagtgtagctgcattagaaaccatgaaaaaattagatatagtttggtgacttttagacagtggtaaatatagaaccatgaattctggtcacattccatttctctccaacatgaaggatcaaaaaatgtttttcaatgtgttctttgttccactggaaacttagagtcatgagtttatgagctgatttggtcaccttcctctgcctttgttcactgtgagttctgatgtcttagtgacttagttcttagaagtcacgccttagtttgaaacagattctccacggtggtccccaaaacactgtctgcatatccataagaattgagcgctatgggtgttaacgtgcatgaggatcagtttgcagcagcaagtacaaaaggagaagaggaacatccgttgaatgagtgtgttttgtacataacttcagatacttgtgaacatgccttatatttgtccaacaactgtcagaataaagaacattctaaaatgagaa

SEQ ID NO: 2636 - DNA, 530 bp, Homo Sapiens
agtgaacgtggacatgctggagcagatggacctgatggacatatcggaccaggaggccctggacgtcttcctgaactctggaggagaagagaacactgtgctgtcccccgccttagggcctgaatccagtacctgtcagaatgagattaccctccaggttccaaatccctcagaattaagagccaagccaccttcttcttcctccacctgcaccgactcggccacccgggacatcagtgagggtggggagtcccccgttgttcagtccgatgaggaggaagttcaggtggacactgccctggccacatcacacactgacagagaggccactccggatggtggtgaggacagcgactcttaaattgggacatgggcgttgtctggccacactggaatccagttttggctgtatgcggaattccacctggaaagccaggttgttttatagaggttcttgatttttacataattgccaataatgtgtgagaaacttaaagaacagctaacaataaagtgtgaggacggtaaaa

SEQ ID NO: 2637 - DNA, 488 bp, Homo Sapiens
ggctagggtaataagtaatgtggaggacaccagcataggagcagagtttagaacttaagaggacaagaaagctgctcagtggctggcgtatagctgtgaaggtaaccaaacaccaaagagggagtctgtcatttttataaggctggaagcgaatgttccttttctaccttaacatacagtttagggggttgcaccaagacaaagtttccaggctggagggtaatacatatccagcgcgagtgaagtccccactccaacatataccctttttgggtgggtaaacacctctttgcatgtggacagaaaatgtttatacttaaacagacatattttgcatatttttatctggaaacttcttctagttttaaactcttcccacatctatgccaatgccaccattctaaaacttacactccttttccacccctggtcttttccttgtccttccccacaacttggtaaaggtccattttgtccttacttcacac

SEQ ID NO: 2638 - DNA, 922 bp, Homo Sapiens
ggtacatttctaatagacatgaatttggaaggctattatccactgctaattacaatacttcccattataacaatgacctctggcagatttttgaaaatcctgtggactggaaggaaaagtatataaaccgtgattattcaaagattttcactgaaaatatagttgaacagccctgtccagatgtcttttggttccccatattttctgaaaaagcctgtgatgaattggtagaagaaatggaacattacggcaaatggtctgggggaaaacatcatgatagccgtatatctggtggttatgaaaatgtcccaactgatgatatccacatgaagcaagttgatctggagaatgtatggcttcattttatccgggagttcattgcaccagttacactgaaggtctttgcaggctattatacgaagggatttgcactactgaattttgtagtaaaatactcccctgaacgacagcgttctcttcgtcctcatcatgatgcttctacatttaccataaacattgcacttaataacgtgggagaagactttcagggaggtggttgcaaatttctaaggtacaattgctctattgagtcaccacgaaaaggctggagcttcatgcatcctgggagactcacacatttgcatgaaggacttcctgttaaaaatggaacaagatacattgcagtgtcatttatagatccctaagttatttacttttcattgaattgaaatttattttggatgaatgactggcatgaacacgtctttgaagttgtggctgagaagatgagaggaatatttaaataacatcaacagaacaacttcactttgggccaaacatttgaaaaactttttataaaaaattgtttgatatttcttaatgtctgctctgagccttaaaacacagattgaaaaaataaaaa

SEQ ID NO: 2639 - DNA, 715 bp, Homo Sapiens
  misc_feature (474)..(478): n is a, c, g, or t
  misc_feature (480)..(485): n is a, c, g, or t
  misc_feature (487)..(487): n is a, c, g, or t
  misc_feature (490)..(491): n is a, c, g, or t
  misc_feature (493)..(546): n is a, c, g, or t
  misc_feature (582)..(582): n is a, c, g, or t
gaccatataaccaaagccatcaaatcgaaaaatgtggatgtgaatgtgaaagatgaagagggtaggcctctacttcactgggcctgtgatcgaggacataaggaacttagtcacagtgttgctgcaacatagagctgacattaactgtcaggacaatgaaggccaaacagctctacattatgcctctgcctgtgagtttctggatattgtagagctgctgctccagtctggtgctgaccccactctccgagaccaggatggctgcctgccagaggaggtgacaggctgcaaaacagtttctttggtgctgcagcggcacacaactggcaaggcttaatcaaaagactggaaaactgcagtctgtaatagcataaggcttccattatgaaagaaaactacaaaaataatacttcttttccacccgtctttggtatgtattggctaataaaatcagttctgtggaactgggaaaannnnnannnnnnanaannannnnnnnnnnnnnnnnnnnnnnnnnnnnnnnnnnnnnnnnnnnnnnnnnnnnnntcatcaaccttcccccggaacaaacacattcaccancacttaaagaaatttgtggccccccttgggcccttaaaaaatttttcaaaacatttcttttgggcgcccggggccccgtagggaaagggaacccggggcccaaacgggtttccccaaggaaaaacccggggcc

SEQ ID NO: 2640 - DNA, 788 bp, Homo Sapiens
ggtggaagacaaagcaaccggaagcgaaacagagactgctctctgaagcctgcaaaacccgcctctgctggttcttcatgcatcaccctgatggctgcgctctgtccacggactgctgcccgtttgcccatgggcctgcggagctgcggccaccccggaccaccccgaggaagaagatttcatgagctgcatccttgccagccgaggcctggttggggaggccaaaccaaggagagcttccccagcagtcgtcagtgctgtggtctctgctctggctgtgtttcagcccacctcctcccagctttctccacatcctcacagtgatgaaccgtatttcataaacatcacacgccagagaagccacagttactcggaagcccccagctgactgcctggcttgtttcagatgcagccgcttgaaacgtgcgcagcatcttcatatcataaagattgtgcacggatccttacaatgtctcctgggggagagcggctgaggctgccttgcacagggcccttcccagggccgctgtccgacgcctgccccccccatgttccacatcctgtgaagaaggatgggggctccctcgagaaagtaagacccgtatctgcccagccgttttctcaccaccactgggaagagcagcctggctctgggaagcaaggaatcccaccagaattggggtatttttttaaaaaaggttgtccagggccttggcttatggctggaggtttggtttttttagagtttcccggagaaaataaaaacccctccctaaattttccctgcc

SEQ ID NO: 2641 - DNA, 1524 bp, Homo Sapiens
  misc_feature (78)..(78): n is a, c, g, or t
  misc_feature (88)..(88): n is a, c, g, or t
  misc_feature (111)..(111): n is a, c, g, or t
  misc_feature (142)..(142): n is a, c, g, or t
  misc_feature (164)..(164): n is a, c, g, or t
  misc_feature (201)..(202): n is a, c, g, or t
  misc_feature (204)..(204): n is a, c, g, or t
  misc_feature (206)..(206): n is a, c, g, or t
  misc_feature (215)..(216): n is a, c, g, or t
  misc_feature (222)..(223): n is a, c, g, or t
  misc_feature (226)..(227): n is a, c, g, or t
  misc_feature (233)..(233): n is a, c, g, or t
  misc_feature (238)..(239): n is a, c, g, or t
  misc_feature (246)..(249): n is a, c, g, or t
  misc_feature (251)..(252): n is a, c, g, or t
  misc_feature (490)..(490): n is a, c, g, or t
  misc_feature (550)..(550): n is a, c, g, or t
  misc_feature (579)..(639): n is a, c, g, or t
  misc_feature (669)..(679): n is a, c, g, or t
  misc_feature (780)..(780): n is a, c, g, or t
  misc_feature (783)..(784): n is a, c, g, or t
  misc_feature (807)..(808): n is a, c, g, or t
  misc_feature (815)..(879): n is a, c, g, or t
  misc_feature (881)..(882): n is a, c, g, or t
  misc_feature (885)..(887): n is a, c, g, or t
  misc_feature (889)..(909): n is a, c, g, or t
  misc_feature (913)..(913): n is a, c, g, or t
  misc_feature (917)..(917): n is a, c, g, or t
  misc_feature (920)..(920): n is a, c, g, or t
  misc_feature (1258)..(1276): n is a, c, g, or t
gatgatacagcgcggggcaagcggagagaaatgagataaattgctggacggagggtagtgtcggcggatgtacacggngtgacgtganctacggcggcgtgggcagtgtgnagtaggataaacgagaggatcaggcgcatanacgggcgaccacaaaaaggcgntcgggccgcgcgaacgctaccgccgccgcgctcgccnncnanccgctcganncgccannccnngcactnccacnnccgcggnnnngnnagcggacggcctacggcgactaggatacggagcggcagggcacgggaggaacacagcgtgagcgcttcgcggaagaggggggagaagaaagacggaggcgcatgagtgagtcgggcacggagagcggggcgagggcggttggaacagtaggtcgaaaaaggggggaatggaattcacaatgggcgaggcgcggaccagggccgaaacggaaaagcgcggcgaaaggaaggacggcganggagccgcgcagcggatggcgcgaccgacgggaacaacggaggcgcggaggccgagtggngccaacaagggcgcgaaacggcgacagcnnnnnnnnnnnnnnnnnnnnnnnnnnnnnnnnnnnnnnnnnnnnnnnnnnnnnnnnnnnnnggaacacgcggggcaaaagaaggcggccannnnnnnnnnnacaaaagggaacaggagggggggaagaggcggggcaagacgagaaggaacggccagacggaggcggcgcgccgcgaaacgggcgggcgaggcgccggcccnaannaacagagcccaaaccaaagcccnnaccaagnnnnnnnnnnnnnnnnnnnnnnnnnnnnnnnnnnnnnnnnnnnnnnnnnnnnnnnnnnnnnnnnnannaannnannnnnnnnnnnnnnnnnnnnnaaanaaanaanccaacaccaagtccccaaccctaccaatgaactaaattgaatcaagtaactactttcccacaagatacttcccacctcaaggagcacctccaaactttcgggccaaataacctttcctgtggcctaaagttgtacctagtagttggagataatgaaattttcactgtttaccaactatggaaataaaatagcttcatgatgtctagacaatgccatgatacttcctgatttttttctattaaacctgaaacaaggactaaactccatgacatacagtttatagacactgacattttattccagatcccatggagaaccaaagagatttgtagaaacgnnnnnnnnnnnnnnnnnnnaagtcactagacatcgtggaaaatccattcctagataactcaagaataaaaatatttaccactgtgaaaattaaactagtttctattaatgcttgactacagcaaaaaagaagtgttattaaaaacctttgtctaatcaaactataattgtttcagagattcagataggagacttcaaatgagatctacctattaaacaaaaatgagaggtttgagttagacattcaattcctgaaatagatgatctt

SEQ ID NO: 2642 - DNA, 972 bp, Homo Sapiens
ccgaatcaggtccagtagagatgctccaggatgtgattgacgtcatgaaaaggagtgaaagctggacattgaagaagccaaaatctgtttccaagaaactaaagagtgtattccgagtaccagatctgagtgggatgctgcaagttcttaaagagctgacagatgtccagtactactgggtggacgtgatgctgaatccaggcagtgccacttcgaatgttgctatttctgtggatcagagacaagtgaaaactgtacgcacctgcacatttaagaattcaaatccatgtgatttttctgcttttggtgtcttcggctgccaatatttctcttcggggaaatattactgggaagtagatgtgtctggaaagattgcctggatcctgggcgtacacagtaaaataagtagtctgaataaaaggaagagctctgggtttgcttttgatccaagtgtaaattattcaaaagtttactccagatatagacctcaatatggctactgggttataggattacagaatacatgtgaatataatgcttttgaggactcctcctcttctgatcccaaggttttgactctctttatggctgtgcctccctgtcgtattggggttttcctagactatgaggcaggcattgtctcatttttcaatgtcacaaaccacgggagcactcatctacaagtttctctgggatgtcgcttttctcgacctgcttatccgtatttcaatccttggaactgcctagtccccatgactgtgtgcccaccgagctcctgagtgttctcattcctttacccacttctgcatagtagcccttgtgctgagactcagattctgcacctgagttcatctctactgagaccatctcttcctttcttttcccttcttttacttagaatgcctttgaattcatttgcctagggcttccatagccaagcatcataaattgctggatttaaactggaatttg

SEQ ID NO: 2643 - DNA, 566 bp, Homo Sapiens
tgtcgtggttagggcaaacagctaggcatgatggacatcagatgggtcactttgaaatatcaggtactccattataaagtgggttgataaacataaagtctatttttttataggaccaatgggatagattaaatactacaccctcgattaaagacttagcaccatggaaatcaaatgataaaagccataccacaaaaaccaacaaaaaattaaaacaccaatgccaatccacaaaaaaatctgtaatttatatcacatatagtacatatttcacattctaataaaatttcatgaatatgctgtataaatttgcaaaagaatgtttctccataaaatttttaagtaaaaagaaaatgatatttttatatcactgatataaccacacacatatattcagtaacaagtatcatgcttaatgaacatccagtaagaaaaggaaacagaatttctcaaacttaccaagtttgaacaaagaggaaaaaatatataaaacgttgatctcagaagagagatgggataaacacatgattattactatgtggaaggcactgttctgtgtactctcg

SEQ ID NO: 2644 - DNA, 412 bp, Homo Sapiens
gtcgcggctgtatgcaaagaagctggaggcatcctgcctcctgacctgtgactcacatgggatgctgcaagacctcattcctaacatctcacaggaagagatcagctgagaatggtacattcaggcaggagacattcttgggttttccagtgtaaaagacatttaaaaacaattgactaatgagaggaatgtgtagcaaatgttgaagctgccagtattcttgcaagtgagccaatgaccttttaagctacatctacaactgactagtttcttggccatcatcccaatgaaggctcctttcccagtttagactgtattgagatctggattggcagtaaaacttttaacatcctcagatacaaatttatttcagcatgaaatcacattaaatcagctttctaataaaggcctc

SEQ ID NO: 2645 - DNA, 544 bp, Homo Sapiens
aggatccccctgccagctgtggtaaatgaggcaggtctgttcacaggcctcatatcagcgtgctcaagtgcctgttgcagtaggccaggtaggcctgttatcaggcctcttgatggttgcacaggcaccaggagtggtggacagggatgggttgatacccattctccctggcagtgcacttgggctctggtggctgtgctagtagtcggagtagggtaggcctttcctcaggccccccgatagctcctgcagcctctggctgcagcagacaaggcggtctgatccccacgtcctcgtattgtgcatttacacagtggtggcgggtggggtaggcctgtcttcaggcttccagatggcgcttgtgggcaccagtggcagtcagagtggatctatctgtaagccctgggacaaccccccagtgggccactcctcaggcctcctgaagccacatgcaagtgcatgacgacgctggtgctgggcagggtttgaaacacacaaaaactgtgggacagggtttctgccagtgacagaggccccaggcagg

SEQ ID NO: 2646 - DNA, 485 bp, Homo Sapiens
  misc_feature (369)..(423): n is a, c, g, or t
gctggcatgggtgcccacacaaggggatttaacatgtagagattaagctcaattcattcaggagggaggagggcattttataataagtgagcaagagtcactgagaagctgctagaggattcaaatgcaagtgaggctaaagaaaacagaaagcatttctctgaagcctagcataggctttaaagggagtaagggtaaggtaaaaattcattaagaaaaggtatctacaaggagcaaaaatgtatactgtgttttcttatttgctcaaaagtgtttgtgtttcaaaaaaaagtttttagacttgaaagtgtttaagctttaattactttaagaaattaaatagctcggccaggcgcggtggctcactcnnnnnnnnnnnnnnnnnnnnnnnnnnnnnnnnnnnnnnnnnnnnnnnnnnnnnnncagcgacagcctggccaagatggtgaaaccaacgtctgtactaaagatacaaaacattatct

SEQ ID NO: 2647 - DNA, 197 bp, Homo Sapiens
ctcccattttgtttcacagccctctccctttggctccctctaggttccttcctcagcagtggttctttattgtctcagggcatctgcttttgttgtttcacagttgttaacattcttctttctgctttcatgtatttggccttttctcagtgttcaagtcttggatcaaatgtcacttccccagaaagccctctcca

SEQ ID NO: 2648 - DNA, 666 bp, Homo Sapiens
tccgccgacatgtcgcggctccttaacttttcatgttccttgaagtgctgtcctttgaagtcttgttgtttcaaatgctgtcttcacatttgaagaaggaggcagtcatctcctcctccaatccttattgactggcatcaggagagaaatgccttcaccagtcagcctgtctatggataatgagactttcttaatccttttctatggatgcacctgctctacatttctttttccctcttgagggctaattcttgactttgcatgccttctttcaatcctgcaaagctaggttaggtgctaagagcctcctgtttgttttccctaggatggtgtcctgaaatactcaagtttgtgtaccttctcccaatcccacagagttgagctggctgtctacataatacgcttgcattcactgtccatgggggcacatttagggactcagtctgggggtggggggtgtagagtttgggaacagtagatgaggtgtctcaagcagctcgtggatgggcttcctgatggagtctgtagaacacttcagagggccagcagcttctctttcctgctctcagcctctcccaatctctcagccatgctgattatctcagcaatctgggtgaggtgagaaagaagtggggctcttgggcagtgttgtggatggctggggga

SEQ ID NO: 2649 - DNA, 788 bp, Homo Sapiens
tccaaagagacccttgtggaaacaaaagcaaccacagtcaagctcacgtgtttgctctagcaaagaagctttggaaataagattttcatcctactggggttaagagaagcccatgagagtaactgggacttcccttccaggaatcagcatgcatatacagacccaaataatgtgagtaaggacagtaagaccaacaggagaaactaaagagacccacatatgcatgcaaacacaggtactctgtcttggataagctcttgaactcatgaacagagatgagttctcttcaaggactatggaaatcactttgcaagagctgttctgattatgaaaatctgaaccttacttagatatcctaacccagtcatcctaagggaatgcaacaaaaagttgcttctcagtcctcttagcacatctgaacacataatcactgtatacatgccaactctcgcataaaactggaaatttcttgagggaagaaatcatgtctgatacatgtctaagtcccctttggagagctgtaccactgaggccagcagaataggtggagcagtaagtcaactgtgcattgacccatcaataaattgtggagtttggaacttcccagtcaggagttgttaaagagtcctcacacaccccaggataatggcaaagcatttgggcatctgactcacagagtgccagattacacaggcaccagtcaaataagaccttgtccatttcctatatagtccccttctctgccccctccctagaagcagcagagcaagtaatacaagagggaagcc

SEQ ID NO: 2650 - DNA, 525 bp, Homo Sapiens
cagtaacgagacacagatgaactggggaggaagagagttttgacttctgcaactggttacagggaaacggcctggaaattatcaccagaccaactcaaaattggaaagttttcctgagctaatgtaccttctaagctatatgtgtatgtggaagtgtgcattcatctaaatacataagtgattaacttcttttaatctataactaagtctgagtcctaaagaccttcctctggaacctcagttaaattcacttaatctaaatgggtctaggtgctgggggcccttatcttgtctcctgctaaatcacagaggtttggagagtcccttcagatctccaataaacttgtctgtggaggcctgaggagtttcttcagacccccagtaaaactcgtttaatactaaatggctcctgttaagaatgccttcggtatttcgtcatgctgtaaggcccaggaaaaacctacgcaaaactcttggtgggcttttgttacattccagactttggataagggcactggcttcttt

SEQ ID NO: 2651 - DNA, 538 bp, Homo Sapiens
tgcacacgccgagtgtccaaaccaataatcacattttaaagttaaaaatcataactaaggacaagaaatcatattaaaaagtattccaaagccttgtttcacacataacctacttttggaaactaaaggagggaatgtaaagtacttaattcacctttcacgtttttttgtttgtatatctttatgaaaaaggactttcttaaccagggtccactggacaagaacacagttctgccattagcttggaaacaagcaattgcaaaaaactcttttaccacctgtgacaatatcccattttatctgcataactttggcatcttacgtcactgtcttgtacagtctatgccaacagtttcagttttttctctccttttggggcgaggggaaatttcatgtggtcaaatggcattacaaaattactgaaaagtcactttactttccctaaaatcttccaacagagaacatgtcaactgtcaataagcacatacacaaacacactcacagaaaagactgtaatcccagcactttggatacagac

SEQ ID NO: 2652 - DNA, 571 bp, Homo Sapiens
gaaatcactggctagtcagtcaaggggatcccagtgccaaaagtcacaacttgactggtggacctggttcaagcacttaagagctgttagattaaccagacatgaaaaaataagactgtcgtgagaggataaactggacacaaaacacagcagtgccaccaccttcaggaagtatctgcacaagaaggcacaccaaaagcattgcacaacccaacactgtggcatttccctcttaagcttttacctcaaatttgagagatccaatattcaacataaaaatgaaatccttaatttctaaagaacctaagtactccaccttctggataaacctgtcttttatatgagtaagtgttaggtcccagaagctacaaaatactggcaaaaatggcaaaatcacaacaaagataatttagaattacaatggccattacatggagcatttcagataaacagcactgcactttaagaagtccatttaaaaataaggagtcctaattcaggccaacccaggggcatctattggtatgtagaagcttctaaaaagatttcaggccagcacagtggctcatac

SEQ ID NO: 2653 - DNA, 407 bp, Homo Sapiens
cagcctggctgagagatgaggctggactcctgtccccgcgggccgctcacctgacatgtggacctgcagctttgtccccactgtgcatgccggcttgagactggagccccgcggtgcagggcagttcaccgggtcctgcaggaccaggtgccagccactaagggggggcaccgccgatgccaggggttttgcccacccgggccccagcgttcccagagccaaatgacactaacttatagaaggggagggggcaaagggcttcttcctcaggccagctcttctgaggaggctctgccctctccagaggtgccagaccgcggattttatttagcaagcccagaccttccggtctaacgtctcacaccacgacggactccccttcctaataaaactcaaagacaagatgc

SEQ ID NO: 2654 - DNA, 659 bp, Homo Sapiens
  misc_feature (90)..(90): n is a, c, g, or t
  misc_feature (131)..(183): n is a, c, g, or t
ccagaaccctcgagcctaggagagactgctccaggcgacatgacctgtggtagctggaagtgggacagggaggcgcagccacactcctgncctggtccgagggagatctcaggaaaccgactggggaaatnnnnnnnnnnnnnnnnnnnnnnnnnnnnnnnnnnnnnnnnnnnnnnnnnnnnngcagatggaggcgcctcactgggaggtgccccgccagacctgggcagtgtcaggcaggactcactcaccgctgagcagatgagagaagttttagtcttggcgggtggaaatgagacgaagccacagttatcacactccagactcctgcccttttattttctccagccccttcttccttcagcaaaatctaggactcccgagtggcttccagggggccgtcagtcctcagccgcgcctgtgtccggtgcccgaggggcgggcggcggtgtctgtatgtatgtgtacatatgcacatagaccttagagtgtatagttaacaaacgcccatctgctcacccatgcccacccagcgccgccgccgctggctctcggggcacctggcaggaggcgggtgtgtgaatagcatatatttttacatgcactatatctaggtgtgtgtacaagtgtgtgtaaaaatatataccttgtgtgtaaaa

SEQ ID NO: 2655 - DNA, 1247 bp, Homo Sapiens
  misc_feature (1169)..(1169): n is a, c, g, or t
gcctaatgagcaccccgatcggcgggtccctggagattgtcttgcacagcctgggccagaagtgtttaagcttttcccgagcagagacagtggcacagctgaggagcacagaacctcaactgtctggtgtgggtgaccggcagtggttgtatcagacatgtaccgagttcggcttctatgtcacctgtgagaatcccagatgtcctttctcccagctcccagcactgccctcccagctagacctatgtgagcaggtgtttgggctctcagccttgtcagtagcccaggctgtggctcagacgaaactcctactacggtggccagacccctggggctaacaaagtgctgtttgttaatggggacacagacccctggcatgtgctaagtgtaacacaggctttaggatcctcagaatcaactcttcttatccgcactggctcccactgcttggacatggcacctgagaggccctcagactcccccagcctccgcctagggcgccagaacatcttccagcagctacagacctggctcaagctggcaaaggagagccagattaagggtgaagtctgaatctcataccctttccactccctgcatggtcacctcagtcctggacatacttgttcactgaacaaaagaaagcagcttgttttgaaagaagaaactcccaggaattggaattcagcacctgttccgcacgtaattggcatgtgtctgcaaacatccttattcccaacttaaagtgctttattgcagagagttatggaaatataagtggatgattattctcattgtaaatattggtattttgaatgttaaatgtcaaacaaatgtgacttatgctggtgccctcgccctgctgatcagattctggttcaaattctgccactccagctccatgggttaggggctttgctgtaagtttctttttctggactttaggatcctgaacctgtccttgcttctcaggttctctcactgtaaccctttccctcagtctcttcctcttctctttcccctgtcactatttgtctttctaatctccttctgtttctctgaatatcttcatttctatctctgtgtttctgtctatttctctgtttatctttctgtccttcaatctgtgtttttgtttctggctctccgtcagtgtctttttctctccnctctctcttgctctgccatggctatttccactgctctatttctgactctcatttttggtctctgtgtgtctctagtca

SEQ ID NO: 2656 - DNA, 489 bp, Homo Sapiens
tattttcttcttttcttggttctcagtgttggaaagtaatatggtaaaacttctcttctccgaggacaatagaatagtatttgttgtatagactgaaccatcctccaaaatttggaagtcaggatcacttgaatgaattagatttgcagctgtaaagcactctttcaggttaactctaccaacaagtttctcggcatctagtttggagggaacatgtaatgtcacatttttgcaggcatcactggcaaatattaagatcgcgagggtcagcaggagcagccggcagagggctccgttccaggagccggaggggcgggctgcctccatggagagggctcggggcaggtcgcgggccgagcgtcgggccggggtaggagggctccgcggggcgagggccgcggccggagcgcagtctgggcccgctgctcaggaggagcgcgaggcggaggaggtggggcgcgcggagaggtgcttttcttagcttctctg

SEQ ID NO: 2657 - DNA, 840 bp, Homo Sapiens
  misc_feature (720)..(720): n is a, c, g, or t
  misc_feature (766)..(766): n is a, c, g, or t
gggactgatgtcgtggcgctttaggggaagaagttggtgtttcgctgggccctggtactgaagacgcggtccgggtcgcccctagctgtttcctactcacccaaagccccgcacccgccttttctctctctcctctggcaggatgaggcgtgcaggcctgggtgaaggagtacctcctggcaactatgggaactatggctatgctaatagtgggtatagtgcctgtgaagaagaaaatgagaggctcactgaaagtctgagaagcaaagtaactgctataaaatctctttccattgaaataggccatgaagttaaaacccagaataaattattagctgaaatggattcacaatttgattccacaactggatttctaggtaaaactatgggcaaactgaagattttatccagagggagccaaacaaagctgctgtgctatatgatgctgttttctttatttgtcttttttatcatttattggattattaaactgaggtgatgcatgtaattgtgaatttggaatttgttccaacttaatggcttgcagtaccactttgataaaaatcagcatcaaaacattcctagtgttcaaatactgtggcattttccattgaaaattgctgaaattttgcttattttataaatcacattagttaatacagtggtcctttggatactggtttcttaatgactcattttagcccctattttcaggggtantgagagggtgtggctcccactaatttccagttggttttctattggnttcccacttgtccgattaaataaccattataatattttggttggaatcataagtgccgggttaatgtcccatga

SEQ ID NO: 2658 - DNA, 429 bp, Homo Sapiens
gcagggcctggcaagctggcaaccggggactccaaccccccaggaggccgaatgctgagcttggcaatggtggcctggatggagctgatgggcacatccccaccgaggaccaggtcctgggagtcctgaggaaggtggttcttctggctgatgcttgcactggccaagggtttgcatggaggaggcacaccatggcgctgcaggacctgctccacgtgtctcaccactgcctcatagcagaacctgaggtgcagcttctcctgcagcatgtgctttctctgctgccgcatgcgccgcaccagctgaggcagctcagggattccgttcccagcctccacctcctgcacagctgcatagagcagtgcaaaggctcccgtgcggcccacaccagagctgcagtgcacaatgatgggcgtgtgcagcggccgc

SEQ ID NO: 2659 - DNA, 430 bp, Homo Sapiens
ctcttccccactgcccacatgagaacttgaagttattgtattaatggccacgtgtgttgttcttaacagaagttactctatttgtcaaaagactaagaagaaagacgtacctttccaacatggctaaggtaggcttcagccaagcagataggagggaacaaagcagtttcctgaaaagaggtgaaagctctaagtccctgttaagagtgagtggttgctctgtccatctggagggcagagggcaggcagggtggccttgcctggccactggcagaggagtccaggtgggcccccgtgactcaaagctagaagcctgccccctttccacccatcctcaggaaggctccaatctcctggctctctcagggcaggagggaaggcaggtcaacacttaaaagatgcccgatggccaggcgtggggggctcgtac

SEQ ID NO: 2660 - DNA, 662 bp, Homo Sapiens
ggcagcacttcttacagccagtcagatagtcagtgtggttctcctccaaggggttggtcagaagagttggatgaacgtgggcataccttatataccagtgactatactaatgaaaagtggctcaagcatgttgatgatcaaggtagacaatattactacagtgcagacggatctcggtcagaatgggaattgccaaagtataatgcttcatcccagcagcaaagagaaataattaaaagtaggagcctggacaggcggctgcaagaaccaatagtattaacaaagtgggagacatagcaccattgtattggacactaatgataaggaatctccaactgcctcaaaaccctgctttcctgaaaatgagtcttctccctcctcaccaaagcaccaagatacagatcaagagaaatatggattattaaatgtaacaaaaattgctgaaaatgggaaaaaggttcgaaagaactggttgtcttcttggggcggtgttgcagggttcatctttactttttaccaaaacttcaaggaaagtaccaccaagttgggttttgggcattaattcagctcccaaaccagaagtttcacaggtggaaccctccaagggggggcaaacaaattggagaatggggctttccaaaggggaataaattcccagtcag

SEQ ID NO: 2661 - DNA, 1405 bp, Homo Sapiens
ctttcgttagctcaggtttatcactgctgtttcccgctgaggggtgtggctggctaagcgttttgagctgctttgctgcggtgctttatgcttgttccttttgatcgtcgtgtatttagagccgctgctcgcactggaacgggaggcggagcagagtcgactgggagcgaccgagcgggccgccgccgccgccatgaaccccgaatatgactacctgtttaagctgcttttgattggcgactcaggcgtgggcaagtcatgcctgctcctgcggtttgctgatgacacgtacacagagagctacatcagcaccatcggggtggacttcaagatccgaaccatcgagctggatggcaaaactatcaaacttcagatctgggacacagcgggccaggaacggttccggaccatcacttccagctactaccggggggctcatggcatcatcgtggtgtatgacgtcactgaccaggaatcctacgccaacgtgaagcagtggctgcaggagattgaccgctatgccagcgagaacgtcaataagctcctggtgggcaacaagagcgacctcaccaccaagaaggtggtggacaacaccacagccaaggagtttgcagactctctgggcatccccttcttggagacgagcgccaagaatgccaccaatgtcgagcaggcgttcatgaccatggctgctgaaatcaaaaagcggatggggcctggagcagcctctgggggcgagcggcccaatctcaagatcgacagcacccctgtaaagccggctggcggtggctgttgctaggaggggcacatggagtgggacaggagggggcaccttctccagatgatgtccctggagggggcaggaggtacctccctctccctctcctggggcatttgagtctgtggctttggggtgtcctgggctccccatctccttctggcccatctgcctgctgccctgagccccggttctgtcagggtccctaaaggaggacactcagggcctgtggccaggcagggcggaggcctgctgtgctgttgcctctaggtgactttccaagatgcccccctacacacctttctttggaacgagggctcttctgtcggtgtccctcccacccccatgtatgctgcactgggttctctccttcttcttcctgctgtcctgccacaacctcttgtagagtgtggcaggctgtatctttcagtgtaacaaagttctaataaaggtcataactgctaccctgtaacttttgccttattctagaaacttctactccttgaatgacatgtgttggtacatgtttcttctcattcagatagaatggttaattattgacttgttgcttctgcacacgtgtcctggaaataaaagtttcttcccacaccgccacaacctctacag

SEQ ID NO: 2662 - DNA, 1058 bp, Homo Sapiens
  misc_feature (373)..(402): n is a, c, g, or t
gggggcgtggctggtgtaggcgggtggagaaggatcggggccctcgccgctctgtctcattccctcgcgctctctcgggcaacatggcgggtgtggaggaggtagcggcctccgggagccacctgaatggcgacctggatccagacgacagggaagaaggagctgcctctacggctgaggaagcagccaagaaaaaaagacgaaagaagaagaagagcaaagggccttctgcagcaggggaacaggaacctgataaagaatcaggagcctcagtggatgaagtagcaagacagttggaaagatcagcattggaagataaagaaagagatgaagatgatgaagatggagatggcgatggagatggagcaactgnnnnnnnnnnnnnnnnnnnnnnnnnnnnnngaggaccaaaagttcaaacagaccctccctcagttccaatatgtgacctgtatcctaatggtgtatttcccaaaggacaagaatgcgaatacccacccacacaagatgggcgaacagctgcttggagaactacaagtgaagaaaagaaagcattagatcaggcaagtgaagagatttggaatgattttcgagaagctgcagaagcacatcgacaagttagaaaatacgtaatgagctggatcaagcctgggatgacaatgatagaaatctgtgaaaagttggaagactgttcacgcaagttaataaaagagaatggattaaatgcaggcctggcatttcctactggatgttctctcaataattgtgctgcccattatactcccaatgccggtgacacaacagtattacagtatgatgacatctgtaaaatagactttggaacacatataagtggtaggattattgactgtgcttttactgtcacttttaatcccaaatatgatacgttattaaaagcggtaaaagatgctactaacacctggaataaagtgtgctggaaattgatgtttcgcctgtggtgatgttgggtgagggccatcccaagaaagttatgggagtcccctatgaaagtttggaaataagaagggggaaggact

SEQ ID NO: 2663 - DNA, 841 bp, Homo Sapiens
  misc_feature (72)..(72): n is a, c, g, or t
acacccccaccagtagttgttttttccccgcgctattttttccacccccaccatgcgcgggggagggcgccncccccggcgcggcggtccgccattccaaataattggcggataaagtggtttttttaaagaagaaagagattcttttatttttggaggggagcgcccgaaagaggagggtgccccgtaccaactggtgggtgggacctcttctccgctcttacttggttagctgttttctccgtctttatccactttgtgttggttggtggggtgccgttatgtgtcttttgggatgtgtggtgtgttctccccctaagaagggggactgtggggaaaacttttaattccctttgttacactgagcatgatcattttatctaaggcagaagaaagaacccagacatctggtactccagaacataggtgcaaaaaattgttttccatttcaaagttttttcaatacttccgaggggaactaatgcaaccaccgttgagctttgctctccacgtgatgcagcataaaattttctctcatttcttcaatataggaatgtcttgctgcagactatgtgtcttccgagttagcaagcaaatgcgtttaaaaggtcttagttgtgcaatgtccaaaactgaaatctgagaggcagtgttagaacttaagcaaggcagaatttttagagtctactcaaatgaaagcctaagtgaagcatataaaaattcagtcttttctattattttcaactggaattgatggcaacattccctggtaaggatgggtaactggtgttatctccaggtccaaaatatcccaactacttaaaggggacccaaaagagga

SEQ ID NO: 2664 - DNA, 656 bp, Homo Sapiens
  misc_feature (290)..(300): n is a, c, g, or t
gggttatgacaaagtcataacaaatgtgactaagtcattacaaatgtgactgagtcattacagtggaccctctgggtgcattgaaaagaatccgttttatatccaggtttcagaggacctggaataataaaaagctttggattttgcattcagtgtagttggattttgggaccttggcctcagtgttatttactgggattggcatacgtgttcacaggcagagtagttgatctcacacaacgggtgatctcacaaaactggtaagtttcttatgctcatgagccctcccnnnnnnnnnnnaatttggtgcctgcaactttcttaacaatgattctacttcctgggctatcacattataatgctcttggcctcttttttgctgctgttttgctattcttaaacttaggccaagtaccaatgttggctgttagaagggattctgttcattcaacatgcaactttagggaatggaagtaagttcatttttaagttgtgttgtcagtaggtgcggtgtctagggtagtgaatcctgtaagttcaaatttatgattaggtgacgagttgacattgagattgtccttttccctgatcaaaaaatgaataaagcctttttttaaaccaaatttacaagcccccagacctaaacaacaccaccc

SEQ ID NO: 2665 - DNA, 604 bp, Homo Sapiens
agccggtccggctaaggaggttacaaaactgtgtaagaataaacaggtaatttaacagatggttatgtaaattggcaggtcgggtaaagaacaaaataagcttacagaatatgccatttaaaaatcctaaccaaatatttcatttcatacgtatattaaaatgcaacctggaaaagaaaccctgatctcaattcagctttgagtctataggagtctactttctagaagatttcaaatttcatttgccaagacatcataattagctgtatggttcagtgccacattaggattgtcgacttcattcacagcaggcaagaaggcagatgtaaaaggaagcaggttatgacaggccatcctatattcttcatattgggaactacagttcccaaagctgccatcaagcagtgcttcagaaacctttattaatgtctttacatctttatcttttatagtttcatctagtctagtggctatagcaattgctttctcctgccttgacttgtccagaaaatacatcattttagcacctgaaataccaaggcatttcaaaatgaataaacacctatactttacattttatgtatacctcctaagccgggtcctc

SEQ ID NO: 2666 - DNA, 730 bp, Homo Sapiens
  misc_feature (232)..(259): n is a, c, g, or t
  misc_feature (431)..(431): n is a, c, g, or t
  misc_feature (485)..(486): n is a, c, g, or t
  misc_feature (629)..(629): n is a, c, g, or t
caggataatcacttgaggccagcatttcaagacctgcctgatcaacatagtgagacaccacctttacaaaaacttttaaaaataagctgggcacagtggggcacacctgtagtcccagctacctggaaggctgaggtgggaggacctcttgagcccaggagtttgaggttgcagtgagccgttatcacgtcactccactctagcctggataacagaacaagacctcgtctgnnnnnnnnnnnnnnnnnnnnnnnnnnnngggctaagactctaaatagacatttctccagaaaatataaaaatggccagtaaatacatgaaaagatgcctaatgtcattactttttagggaaatgcagatcacccttgagcccccaccgcacgtgcttcttggacggtcgtggcaagtgttggtgaggaacgtagacacanctgctgcagccacttgggaagatagtctggcactttcctcgaaaagttaaaccnntagagttaccgtatgacccagccattcctcccccaggtctatacctaagataaatgaaaacacttgtccacacaaaaatgtacacctgagtgttcacagcaacatcattcataatacccaaaaagtgaaagtaacccagtgtnctctgtggatgaatggtgacaaacatgtctgcctacacagactgatttgcaggaaggatgaattgatacagtgacgtggtgactgagcgcacggagatctc

SEQ ID NO: 2667 - DNA, 118 bp, Homo Sapiens
tagagaggctcagtaaccagcccaaggtcacctgggtaagaaatggtaaaatgaatccaaagggaaaatcttacatacacttcagatatagctgccaaccataacaataacgtaatgg

SEQ ID NO: 2668 - DNA, 513 bp, Homo Sapiens
atttgtatcagaggtgtagtggtagggttagtgagaagtagtcagattctgactgtatctgaaggtggagctcatagaattggctgactggatgtcggctatgaaagacaggaggcaagcaggaggcaagcagggtgccaagggttctggcctgagcactcctgagaggctgaggactcagaggagcaggcttgaggtggtagagggatgaggggagacttggaattcaatcttggacatgttgagtttgaggggcctattagacagttcctccaattaaatctacaagaggccgggcgcggtggctcacaatactcttctggaacaagtagaaaatgaagcatctcaggcaaagtcccatagctaggcaggaatggaggagaacctgcaggaaagaccaggctccttctacacaacaccgcctcccagtgccaaaatggtaattcacagctttgaaccagaggaatgctgagaaaaggttacatacacaacagcaagtttgcaaagacctgt

SEQ ID NO: 2669 - DNA, 668 bp, Homo Sapiens
tgccgtggctgtgttggtacacatgcttggtattgccatcccttgccgcttcactgctgggttattctatgggtgtgtgggagagaactcagtcagacaccaccacaaaccctggcactacctgcatgctaattgtggtttataagaaagttaggcaagtcatagctgcaggagatccttggtgacgtgatttatggccaattgacatgaatgttgttgttactaagaaacatttagtgagccagccattgtgctcggcgctttacatgaattatctcatttaatcacgatttctcagataaggatactgaggctggagaagtggtgtttctagcttcaaatcttctagctaagcaagtggcagaatgaagatcccaaaagatttttttctgatactcaattctacattcttgagcacttttcaaagagccccgaaacagggacatctatgaaaccataactatctttgaaaaacctaagagaaatggttaaaagagtgaaatgtactgcgttatctgtattccttagagatttatagcagctgcagtatgaaataaaagctcatctcagaatcagaatatacaccagaaacttgacactgtttttctgaatgttaaaatttttggctacaggaaaataggaaatacttttctaaagcataacacttt

SEQ ID NO: 2670 - DNA, 535 bp, Homo Sapiens
tgtcgtggctacacaatgttactagacacatctgatgtgaagtactcttgatagactctgtttattactcatgctagacttttggctttccttaacctgggggttccctgaagcagaaagaattttatttatccctatattcaagagtccaggagagtgcccaacacaaagcaggtgtttcataaacacttgctaagttaaaggaatacacaggcaggcatggtggctcacagccccatgcccatggaactctgatgaagcccacagatcatagttctccgaaatatgtagcacattctcaagaacaaaactaacacttattttttatacaaaaactatcctgtgatttgaatacatagttgaaaattatgttctaggtacattttaaattacttaccttgagggtgccttttgagaaaacgttgaagaaaataatatattagtgattctttggagctcacttctaatttgaagggatttagttcatttttttcattccaataaaaatgaaaataggccgggcactgtggtgcat

SEQ ID NO: 2671 - DNA, 869 bp, Homo Sapiens
attccccgaacatgtcgcggctgatttcacttaacataatgacctccagttccatccatcaggcctccttttttcacggaggatttattttaggaaactggcaattgtgagttctttctctacctctttgagaggcaaatcttctcccaaattttcttctagcctcctcctagttttgcaacccaggaatgcctttctcaagacttcagagccatccctttaaaatgcaattattgaaggagatgatacatctgtgtctcagtttttgtagaagggcagattcccagttttgaaaaattccaatgagccaacgcagatagctttacggcatttcctaacctcttcctgatgtctctagttccttctcagcatctcaccccggcacttaaaaactccccagccttttgtttcaatgaagttaagctcctctcttccgtattgcagtagtcctgactgagtccttccttgaaggtttaacttgtctggtgcaattttttctttgacaatgtccagatcaaatgatcccataaaaacatcgagtgtgattttagcctgagaagggggagggtgagaagatagattgggaggcagctgtgtaggcaggggacttggccactccctaaacctctcccagtctcacctgtaaatggagtgcataggtagcagtgcttctcccccaaggctggggcgatggaatcagttagactattgagggcatctggaagggcatctgtgtcagggttagtcctcagggtatggtggccaatgggtttcttttggttgactgttgacaatgcgtttgttgaatggcagcctgcactaggtgacgctgaagccacagaagacactgcagtgggaaaaccagcatg

SEQ ID NO: 2672 - DNA, 500 bp, Homo Sapiens
  misc_feature (314)..(335): n is a, c, g, or t
  misc_feature (346)..(416): n is a, c, g, or t
tgtcgaggctcataagctatttccattagacagcagtgctctggagcaaatggcctatgtgtgtgccccaggggactcaagggtgtgcaccatctcacttttcctcctcatagtggagggactggtaacaaatgctcacaaacgggggaagccgcgcacacagccatgaacatggatgcacccgatttacacatagcattgctgacaagctccaaaacgaacatgggttgaactgtaaaatacgattgctgacaagctccaaaacgaacatgggttgaactgtaaaatatgatatatgtgtatacttatacacnnnnnnnnnnnnnnnnnnnnnngagacagagannnnnnnnnnnnnnnnnnnnnnnnnnnnnnnnnnnnnnnnnnnnnnnnnnnnnnnnnnnnnnnnnnnnnnnaagcgattcttctgccccagccttccaagtagatgggattacaggcacctgacaccacacctggctaacttttgtatttttaga

SEQ ID NO: 2673 - DNA, 241 bp, Homo Sapiens
tttgtcgaggcttccgggaggaacaggaggtgagactaaagaggcaagttgggaccacttggagagattttcttcctttaacagagtgagtatttatttattttttcccaggcacctgtgtggcctgatctgccctctagtggccatttgcaatactaactgtagccaagaagggtctaaaaatgtacgggcttggtccaaagcagatctcaatctcagtcctgctattaataaatattcg

SEQ ID NO: 2674 - DNA, 399 bp, Homo Sapiens
ctggtgtagagatgaaaaatgtagattcttagcccagtctgcctgggtttgaaccctagccctacagtgtcttagctgtggactaaattctctgggctttggatggcagtgagtgctcagtatcagctatcatcactctgttttttgagtattttcaggccctagagaggtgtcattttccattttagttgaccaactgtgggttgcatagaagtttgtataaactgttgtggtagtgctttaacagaaatgttttactttgagtttccgttagtgttttctgagccataaactgatttaaaattcctcttcctgctcacaccaaaaagttgaaaatctggtcccaaaaagttttattggattggttataacaaaatcccatttcagaattagccacga

SEQ ID NO: 2675 - DNA, 125 bp, Homo Sapiens
ctctcttcacagaggcaataacgaaggtggcgtgactatcgccctcccggtcatcgttgtgcataagacaagaataggagctcagcccggcagaactccacggcagcacgcctcagggtgagagt

SEQ ID NO: 2676 - DNA, 639 bp, Homo Sapiens
  misc_feature (43)..(87): n is a, c, g, or t
gtggggtcacgtgttaccaggatggtctcgatctctgcccttnnnnnnnnnnnnnnnnnnnnnnnnnnnnnnnnnnnnnnnnnnnnntgagctagcacgcccggccgtcttgtgtcttctttactgtgactgggtcgtttttaagaaaggttatcagctttgtgtttggtttcccacagttgataaaaatctatcaaaaacattataatttgcaaggaaaaaggtttttcaatggctgcaggaaccagaaagaaatagcatttcttatctgtataaacacaaacatttaaagctagtcacaccgcaggtaaatccaatatagtatgcaaaagttctataaaaatgaacaagagatacacgtttactttcattgctccaacagtcaaatgtaaatctgcatgagagttgcgctgcagcagtttgctggtccaatttaagagttcaacggtcctttttgtacatctggcccactgatgtccacatcccagataaattttcaaaagacggaaatcagggcaaagactccatataacaaagcgcaaggatatgctactaaaagtagctgtccttccatggctaatgcagaaataaatattttggaagcagaaaacctacaccatacaatactcccagcagtga

SEQ ID NO: 2677 - DNA, 894 bp, Homo Sapiens
gcgcttgcaggtcatgggagaatctttcggtctccgcgagagacgaaaaaagtataattcaagctcagatttgtgttgaaaccagcctcaagtttcacctatcctcactgatccgtggacttctgtatgatcagggtgctgtcctgagagcgctgcgggataaaggaggagcgtcctgcttcccggctgccctgttgctgtcggagtcacaggatggcggctgtcgtcctgcccccaactgccgctctgtcttccctgttcccagcctctcagcgagaaggacacacacagggcggagagctggttaatgagctcctgaaaagctggctaaagggcttggtgacctttgaggatgtggcccgtggagttcacccaggcaagagtggggcttggtcggcaccccgccccaaacgcacccggtaccggggaacgaggacggctggcaaaaactgacaaagaacacttagccctccacctggcgggcaacccaaaatttcgcatcaacaccaaaaaggccgtactccataccgcacggctgggggaccccagggacgtgttctatactacggccttcaacactatacaaacagccagcgagaaaattggcgcctgaggagaagacaaatggagccaaagagagttcgaataataaatcaccatataattagaagagttttagagatcggtctaataaatcccttataaaaacactcttatttccttcaaaacagcgctctatttcgcaaaaatcggggaaggaagcgcggggggcatgctccttgtgagcgccaccgccaaaaaaggtctcatggggcttcaggcctggcccaacaaatctctgcctcgacggaacgcgtggtggtttatatggggaacatactttctgatgtggac

SEQ ID NO: 2678 - DNA, 874 bp, Homo Sapiens
  misc_feature (682)..(682): n is a, c, g, or t
  misc_feature (691)..(692): n is a, c, g, or t
  misc_feature (699)..(699): n is a, c, g, or t
  misc_feature (705)..(706): n is a, c, g, or t
  misc_feature (710)..(710): n is a, c, g, or t
gggggggcctgctgggtggcttagcactgcagggctctgcgcgggaacgctaacctggtccggagcgagtctgggtctcagccccgcgaacagcctttcacgagtcttcaagctttcaggctatcttctagtcaagatgagtgataagccagacttgtcggaagtggagaagtttgacaggtcaaaactgaagaaaactaatactgaagaaaaaaatactcttccctcaaaggaaactatccagcaagagaaagagtgtgttcaaacatcataaaatggggatcgcctcccaacagcagatttcgacattacctgagagtcttgattttaggcttgttttttgtaaacccatgtgtttgtagagattttaggcgtcttcggatatcttctcacctatgttccctggctaagaagtcagaggtagccaatgtttccttaaattcatttttaaacttaccattggtgcatatgttccagatggcagatgctgtcaataatctcaccattgatgacccttgtggatggaagtcttgcatcctatactggataagcctgttttaacctgctatgatgggtgcttccaatgcttccataatcttcatgaagttgcatggcttttgcaccttttcacagtttatttgcatttctattggggggaataaggtaacccatattctcccgnaaagaaaannaaaggcnaacacnnattnccctggtggggccggcctcggccccccaaaaaaatttttccaaaccctttccgttgggggcgcgcgcggcccccgaaggggaaagggggaacctggggcccttaagttgggttccccaaaggggaaaccctgggggccaaggaccaaagcggcgctgggaattt

SEQ ID NO: 2679 - DNA, 1026 bp, Homo Sapiens
  misc_feature (624)..(633): n is a, c, g, or t
  misc_feature (704)..(704): n is a, c, g, or t
  misc_feature (948)..(958): n is a, c, g, or t
ggggacatattcttggaaatttcaaatctaagtttggcattaaaagggagcgagtgccttttattcttacctatgatttcatccatgtcattcaacaaggaaaaacaggaaatacagaaaagtttggccggttccgccagtgttgtgaggatgcatatctgattttacgacggcatgggaatctcttcatcactctctttgcgctgatgttgactgcagggcttcctgaactcacatcagtcaaagatatacagtatcttaaggactctcttgcattagggaagagtgaagaagaagcactcaaacagtttaagcaaaaatttgatgaggcgctcagggaaagctggactactaaagtgaactggatggcccacacagttcggaaagactacagatcttaacgatcagccttcgctcctaatgtatttgtctggcttcattttcattcttcatttttgaactttgcacctaaaattgaaacattgaccccgggttagaagatgtttattaaaggggaaatggaaaatccctgggaaacctccaggaggtttaaaatttaaaagaaaaccaggggccatttcccccccactggaaaccccctaaaatccctgcgagccacaattnnnnnnnnnnggattggaattttcccccccttctccgggcctttttcttttagacactgggcctcttccccaaacacacantctgtccttccactgggataaaaaacctggggccccaatgggggcaaataaaacccccgtgttctccccctggcttgcgaaagtttttgggcgcacccgcccccccggggggagatggccctacagcgtaaacgggggctcctgggtttgctccccccgcccccgttcggcggccgcgggcctgcgtttgctccgccacaataaatttttgcggcggaaaaactttgtcccccaccaaaaaaannnnnnnnnnntagaaaaaataacagttgccgctttcgatcagacaatgggggggcgcggggcagcgcgccaggaggtc

SEQ ID NO: 2680 - DNA, 1250 bp, Homo Sapiens
  misc_feature (290)..(324): n is a, c, g, or t
  misc_feature (369)..(527): n is a, c, g, or t
taggctagggaaatggacaggtaactagccgtaactttgtgtatcacggtttgacacatgaaccttacagtcaacctctgggcatttccccccactgaggctaatcacagtttacccaggaagttgaatagtaagctctaactagttcctcttgggacactttattagagattttgtttagaaagtgttctatgcttaacacttcagcaccatggctgagcttaaattctcaactctaagcaacagaagttttagaaagtcactttgcacccggtgcggtggctcacgcnnnnnnnnnnnnnnnnnnnnnnnnnnnnnnnnnnnagatcacgaggtcaggagttcaagacagcctgaccagcacggtgnnnnnnnnnnnnnnnnnnnnnnnnnnnnnnnnnnnnnnnnnnnnnnnnnnnnnnnnnnnnnnnnnnnnnnnnnnnnnnnnnnnnnnnnnnnnnnnnnnnnnnnnnnnnnnnnnnnnnnnnnnnnnnnnnnnnnnnnnnnnnnnnnnnnnnnnnnnnnnngaccgagacaccgccataatggtaaggaggctgagtacaaagctgcccaggaaaatggcgataccataaaaataaagtgtgctacagacagatgtgttggcagaaggtggaagttcagccatggctgatggtggtgagtgcatcaagatacacttgtggctctgactgaagttttggaaacattcactagtatttcccagacagaatacaggtgtcatcaatagcagaggtatcaggcttgagaaaacaaaggccatttgacaaactcgacaagtataatctatcaccagtggaaatgtgctctgtccactctgggtgtgtttcatcctcagctctgtgtacaaataccagatgtaattgacggtgtagagaaatgaggaaatgtagaatatctgtccaactgcttgtaggttatagcagatgatgtccttatttgctactgaagctccatagagaagtgtctccgtgagccagcaaagtcccaggagcaggtcacagaagctctagataaaaaagtggtcttatctcagagtagccatgacaaattgtatccactgtattgcaggaagaacctgtaatcccgacactttgagaggctgaggtaagacgatcacttgaggccaggagtttaagaaaaaagaaacctgggagagaaaacaagtcccaactgtcctccagaatgctagcgtctagtggaaaggtcatagggacttcagtcccagc

SEQ ID NO: 2681 - DNA, 914 bp, Homo Sapiens
  misc_feature (348)..(356): n is a, c, g, or t
ggtttccgccatatggggggattctcgggaagttattccagtaggggggccccccgggaaaaaaaggttttcggaccccgggggggaaaagtcaaagttttttcccactgttgtttccccggaattatgaggaaaggatgaccctttataaacaagacggtttgtaccaggggggggaaagccccctttaaaaaagggcccaggccgggtttgccccttttcccggttccaggggaggccccgttaatttttcttcaaggttcccaaattattattgccttggggcccccaagttaatggttggtgcctggcctgaaaattgtgggcaaagggcttctgggggggtgnnnnnnnnnttgtctgaaggggaaagttcccaacctgggatttattccattttgtggaggtttattttaaaaggcttagggcatatcttacaggatactgatcttcttagccgtggaggaaactccagatccctgtatttgctgaggaggcacaaggaagcgctcttgactcggcatggtaccatgactacctcctggaaatccaaatctaaatccatgaggtctcatcccccatactagcaacatcaggaggatagggtccacgctgatcttttgggaaaacagcatatctaggtcctaaaggaggggcaacaggagacctaatgttcccaggatagggaggtgggggtctggtgaaagcctggttaacattctctggttgccagtgttgaagaggccctggatgaggcactgcgggtgagtcctgtgaccccttctcctgtcgacctgcaatcttcttctgctgttgctgctggagaatgatttcacgtaacttctgccgcatttttgcatatggatccattggagatggtggtcgtgagttagaggacccaggtgaaaacaccc

SEQ ID NO: 2682 - DNA, 516 bp, Homo Sapiens
atgtccgtggctgtgttccaagaaaacgttatgtgccaaaaacagacagtgggccaagatctaagccatgggcggtagttgtgccaaccactgggtctagaccactcccatttataaagtgatttcggctttagcagcttcctggaaggtggtgctgctggctgataaagcagagggatggagctttgtagaattcaggtgatgatagggcttggatctgagtccccagcgcgtctcatgttgaattgaaactttggaggtggggactggtggcaggtgattggatcatgagggcagatacctcatgggttggtgctgtcctcgagatagtgagttcttaccagatctggtttaaaagcatgtggcacctctgtcccactctctcttgctcctgtttttgccacgtgatgcacctccttcctttttgccttctgccataattggaagcctcctgaggcttctccagaagctgaacaggtgctggtgccatgcttgtacagcctgtagaaccatgag

SEQ ID NO: 2683 - DNA, 609 bp, Homo Sapiens
ataccaggaaaaccatttggagatcaatgctttaaaggagaaaatgtgaactagtgggtgggagacacaaggaggcactgtgacctgctaacacaaggagaccacactgacagcaagctatgccaatgacaggggcttcctacgtctagaagcattccagaaagggcacaaaaatgtacaaggggacatcaacatcgtatggttctctagcagcattttccaaagtagtttccaggtaacatgattcccaggaatcagggttccttcaaaaggaaatacagaaaatgctatattctgtaccctgagaagtcctgtagttaagcaaataaaacaaaaatgaaacccctcatgggtttctctaacctagtttttttgctaagtagccctttttacgtctcatactcgctggcatacctgaaacttgtgtttggtggcaaatgcttcccatgggaaataccaaactccactatctttctcagttcagcctctccttggctgaaataaccagataacagtttccaactctaagaaatacttatggttgaataagattaatgggagctagactggtcagctaaaagaaataatcatctgaagcaagcaaaggga

SEQ ID NO: 2684 - DNA, 370 bp, Homo Sapiens
gtcccttcccctctgtcctccctcagcccaggggacatcgggtcttgaaacagaaacagcagggccccagggagtgtcctcttcccatccaggcctctgggctcctgctgacgtgagctgagtcccttggggctggtggatgtgccaggatgtgctagctgggcacctgcttgggaacagagtctcaccgtcataaactgcagcttaaatcctaggccggggagttggaaggtgtgtagctatgttcctctcgccttctctggagctgaaaaaaaatccactttaggagacaggacacagttctcagacaatgaagccaccaaccccttgtctccttatgccatgggaatgttaacaggacttatatgtt

SEQ ID NO: 2685 - DNA, 537 bp, Homo Sapiens
cttgtcgaggctacacgctactgtatgcactcagtcacactgtttaatgacaagtttttgtcaaattcatctttgtaacccccatattgccttacacatttccctcaaaacagtagttgatcaaaaatgtatcaaagaatatcataacaatatattgttatatactatttttcatggcaaattcaaactttcaacttattggagggtgaaataagtcttggtgaagtaacttgagattataatcattttaagtgtattataacaacgctttgcccataagagaggtgtgcaatgaatagttgcggttctcgagtgttgctgagtcgagtacttttctacattgtaaataatacaatttaccattgaactttaggaaatacataagttgaaggttgtctgtatcatattctctacaataactttctcctccctgtaaaactgccaaacctgcacttctataatagtcatccaggatcaaaagtttctcccaaaatatataccatggagagtgcctactcccactaccgaattcatttt

SEQ ID NO: 2686 - DNA, 583 bp, Homo Sapiens
tggctgtggagagtccatagatccaacttgtttaaataagccattcagattactagaagcaagctatgtcagccaaacttttgctacagcctttttattttaaagtataatactgtatttatatgattccattttcatttctgctaagtagacttggaaaaggtcaattatgcttctgcatcctgtgtgcaaaaaaaggagacaccatttaatgaatgagatgtgtgctcaagcaaagaaagcatcaagcaagtcacctttgcaatcttgagcaaaaactaaacctcagagattacacgtgtgacatgccacattttgcagattagggatacatggcttgttttccaattcaagtaaagtgtgtccatatcctagccacttcatctgatcctcacaagcaacaagtcttactcccacttcatccacaaaggaaaacaaaattgcataaagccagacactaggactggcagatcaatttattgcagaagttagacaccatgcaagggccattaaagacatgactacaaataactcacaataacctatttccaactataccatatcattagtgcaggttcacttt

SEQ ID NO: 2687 - DNA, 479 bp, Homo Sapiens
  misc_feature (43)..(58): n is a, c, g, or t
  misc_feature (89)..(328): n is a, c, g, or t
ttgtcaatcacgcatgtacacatctccatgtctaacagattcnnnnnnnnnnnnnnnnctgagacagagttttgctcttgttgcccagnnnnnnnnnnnnnnnnnnnnnnnnnnnnnnnnnnnnnnnnnnnnnnnnnnnnnnnnnnnnnnnnnnnnnnnnnnnnnnnnnnnnnnnnnnnnnnnnnnnnnnnnnnnnnnnnnnnnnnnnnnnnnnnnnnnnnnnnnnnnnnnnnnnnnnnnnnnnnnnnnnnnnnnnnnnnnnnnnnnnnnnnnnnnnnnnnnnnnnnnnnnnnnnnnnnnnnnnnnnnnnnnnnnnnnnnnnnnnnnnctgaagtgtgcttttaacactttgtaggaatgctagtggcaaagctaaggcttttgcttaaacctttgcgaggacattgacacctgccaggcttaggacccatcagttaatgggagtgcaagaattggtaatatgttatgctaagtttgag

SEQ ID NO: 2688 - DNA, 526 bp, Homo Sapiens
gagacgctgtctccataaacaaatcacacaaagtatggtgttgtagctgtgttctagaacctgtgctacgcactgaggacaaaactgtgatcccaacagaactgggctgtcttctcgcccagccccttgagcagcagagcaggcagcagatgctgggaaatgcctgatggtgtagccatgtggcagggggatgtgtagggcaccgagaaagcgggtcttcttgcagaattaaagaaatgacagtcttaggctcctggtggaattgcaggtagctagtgatagggagggaagtagcagagaggcaggactttcaggcagagcccatgtgccacatcctgagggaagagtacagagacattatgtgtagcagagagtggagaagtagtgtccagtgtcaggagcagtccaccccatgcgtaacgaggaatagagcaatgcagcgaatgagtgatgagcatgtcatgccaccatcccttgtcattagattatgaatgtggcttcaggctgggagaggtggctcacgcgg

SEQ ID NO: 2689 - DNA, 332 bp, Homo Sapiens
tgctgggattacaggcgtgagccactgctcctggcctttccagattatttttttaatagccagattcattgacaccttttgaatgtggctatgatgttaatctttctttcttggcactactgcccaccccttaaaatccccttctttacctggctcagcactgctctcagtggaacatctctgtgcttctctgaagacaactcagtcttgtcccttggctcatcttctaccttaaatgctggtggccttgcttgcttatatccttcatgtgtgcttattctcgatatctgttctccctgagtggccttattctttcgatatgtatcatccac

SEQ ID NO: 2690 - DNA, 2080 bp, Homo Sapiens
  misc_feature (201)..(247): n is a, c, g, or t
  misc_feature (306)..(306): n is a, c, g, or t
  misc_feature (345)..(365): n is a, c, g, or t
  misc_feature (395)..(395): n is a, c, g, or t
  misc_feature (421)..(421): n is a, c, g, or t
  misc_feature (966)..(992): n is a, c, g, or t
agcagactcgtgtcgcccatagcgggggagaagaggcgctcagttgtgtggggtgcgtgcgctcgcggaatgggtcgtctctttggttttatttttctgctcccagcgcagtatctaatttctactagttcacctgtctcaacggttttattttttctaaaagtacattagactccagcgatgcaagaccatctgtgtatnnnnnnnnnnnnnnnnnnnnnnnnnnnnnnnnnnnnnnnnnnnnnnnggccggtcggagggagcgagagggagggtggcgcacgtgggcggtggtgcggcgtagcnagattggtggtgataagcgactggagccaggagagaaannnnnnnnnnnnnnnnnnnnnagagtgcttcacgataatatcacatacacnaagccagttgggccgttgatgacgcntgtggggttggtttgctcacaggtgtggtgctatatatctctttatatgtttcgctttgagtgagcgagcgacgtgaaagaaaagaacgagggagggtgagacggaggaggctagagcgggaggatggacgaggaaggatatcatggagcaggacagggagtgggggcgggaagacaggcgtccagacacagagtgcatgtcgtgggcaggggtgtgtgttggcgcggacgaccgagtaggtctgtgcgacgagcacaaaacacacccttccaccccgccccagccctctaccccaccgtaattggtgaggtgagagggcggaggagggttgcgtggtgtgggctaggggccggggcgccgcccggcatcgtgcactcccttatccgagtagaaagagtattttcacaggcgcaggcgggatggggtgtgttggaggggcgggcggggtggagaggggtctagttgggtgcgaggacgtgcgtgccgaggggcggtcgggggagagggtggggcgggagttgttgttgggagggccattcattcnnnnnnnnnnnnnnnnnnnnnnnnnnnattcattcagcaaatactaagctcccactatgcacataagagatgttcaatcaatgttagatgaagggaaaatattcagaaattcacaagtcactccagcactccaaaaacatacaactcttcatgctcctcccttctccgttcttggcctcatctctgcccacatcacaggttgttaaatgctcacatgaacaagaacttaagcacagtatgacatggcctgtgacttatacaaatgtctgtcccaccaagaggccatcttttaaagtaggtactagttccaagcctaaaaacaccctaacgggtcttcagcttcatctgaggatatgccacagtgatcatgcctgctatagaggacacaagacctccaagtccaatgatgccaggattggatttatagatccccagctggtccaaagggttcaggatatcacaaaggttcttcactgtgtccaggagcaagggaggatgctgcttcagagatcggaataaaagaagtagaaaggattggagccattctgtttcctcctcagccacgctgaaccaaagaggatcctgggatgctgatttcgtctttctctgccctatcacatgtaactcgtttcatctgcagggagatttcatacagatccccgacaaggctcagcagaagagaatagtagtagtggtgagcagccctcgttcgccatttctctttgttgatgccagaggtgagacctacgctcctcacccagaggatggtgtcacagatgaaataaatcacacggttcaggttggctaatgttaagcataagcgaggtaccaggtcagtggcatgaatgctctgctcagttgcctgtatagcatgtaccacattgcctagtctgaaccatttacgaccagtgctcacactggactccagtttcttgagcttcattaccaccttctctttgccagctttgggctctaacaaatatctaagcaacatgcatgtgtactgagtggctctgaagagtcggtcccggcctgggtctggttggtgaagcgggtgaaggcgtccatggcttctagcccaaagccacgagtcgcacggggctcaggcgtgggtc

SEQ ID NO: 2691 - DNA, 2000 bp, Homo Sapiens
  misc_feature (1582)..(1599): n is a, c, g, or t
ggggaggtgcgggcggcgagcgaggcagccgggtgcttcgcagcggagctcgaggctctgtagcacccagttggacccagtcgcccaggcaccgcccgcgccccgcggccgtctcctgcgcctcccagaggagggagttcgagcatcccccgcggcggccactcctcggggccaggagcggggaagcgaagtgcgagagaccccggaccccagcgctgtctcttcccgccgcccgaaccaccatgacccacttcaacaagggcccttcctatgggctctcggccgaagtcaagaacaagattgcttccaagtatgatcatcaggcagaagaagatcttcgcaattggatagaagaggtgacaggcatgagcattggccccaacttccagctgggcttaaaggatggcatcatcctctgcgaacttataaacaagctacagccaggctcagtgaagaaggtcaacgagtcctcactgaactggcctcagttggagaatattggcaactttattaaagctattcaggcttatggtatgaagccacatgacatattcgaagcaaatgatctttttgagaatggaaacatgacccaggtttcagactactctggtggctctagcaggtctggctaaaacaaaaggattccatacaaccattgacattggagttaagtatgcagaaaaacaaacaagacgttttgatgaaggaaaattaaaagctggccaaaggggtaattggtctgcagatgggaaccaacaaatgtgccagccaggcaggtatgacagcttacgggactaggaggcatctttatgatcccaaaatgcaaactgacaaaccttttgaccagaccacaattagtctgcagatgggcactaataaaggagccagccaggcagggatgttagcaccaggtaccagaagagacatctatgatcagaagctaacattacagccggtggacaactcgacaatttccctacagatgggtaccaacaaagttgcttcccagaaaggaatgagtgtgtatgggcttgggcggcaagtatatgatcccaaatactgtgctgctcctacagaacctgtcattcacaacggaagccaaggaacaggaacaaatggttcggaaatcagtgatagtgattatcaggcagaataccctgatgagtatcatggcgagtaccaggatgactaccccagagattaccaatatagcgaccaaggcattgattattagatccacacagaaggagctcagtatttagtcctttgtttttattcagtgagaaccaagctagccttgagtaatttttatcttgtcttcctaaaacactattaagcttattgtacttttaagaaaaattgccttacgtacattcctttttcctttttctgcctcttccctcaatagttgccttttagtgctgtaatagttaaatcctacagcataatcaataactcgcatatgaagtaaaaaggaatactgtgaaaggggagtactcttgtacagccagttcttttatgcaaaaatctatgcatttttacaatcttatattaaactggtattttcaaacaataggaaacnnnnnnnnnnnnnnnnnnccagcttactgtatctgggttctacatgggaagactaacctcatgcttattggttaaatgcggtcttctgccaactaaattctaagatgcagccattttagagatttacatatcaaatggtttctaacaggtattggtttgcctaattttcaaaacaaacctccttgatccacgggggcccttttgatgaattacaatgggggaacctccatttcccctttacccgacggcggaacaccacaattcttttttccccaagcggggttgctctctctttaccaagcaatcctttggttacccaatcaccgtgtgcgccttgtgtggtaacactttttcaacgcgccctcatgcggagacgaaatcgcactctctttgcgcctctttttttctctccggccttc

SEQ ID NO: 2692 - DNA, 847 bp, Homo Sapiens
  misc_feature (726)..(726): n is a, c, g, or t
gggattggtggcggaggcaatggccggcaaccagctgtaagcgaggcacggaagacatatgcttgtgagacaaaggtgtctctgaaactatggatggtacaagaacttcacttgacattgaagagtactcggatactgaggtacagaaaaaccaagtactaactctggaagaatggcaagacaagtgggtgaacggcaagactgcttttcatcaggaacaaggacatcagctattaaagaagcatttagatactttccttaaaggcaagagtggactgagggtattttttcctctttgcggaaaagcggttgagatgaaatggtttgcagaccggggacacagtgtagttggtgtggaaatcagtgaacttgggatacaagaattttttacagagcagaatctttcttactcagaagaaccaatcaccgaaattcctggaaccaaagtatttaagagttcttcggggaacatttcattgtactgttgcagtatttttgatcttcccaggacaaatattggcaaatttgacatgatttgggatagaggagcattagttgccattaatccaggtgatcgcaaatgctatgcagatacaatgttttccctcctgggaaagaagtttcagtatcccctgtgtgttctttcttatgatccaactaaacatccaggtccaccattttatgttccacatgctgaaattgaaaggttgttttgtaaaatatgcnatatacgttgtcttgagaaggttgatgcttttgaagaacgacataaaagttggggaattgactgtctttttgaaaagttatatctacttacagaaagtaaatgagacatagtccagagccg

SEQ ID NO: 2693 - DNA, 822 bp, Homo Sapiens
  misc_feature (50)..(51): n is a, c, g, or t
  misc_feature (70)..(71): n is a, c, g, or t
tagaaaaagcttcttcggaggggccgaagggcggcccggaccaagggttnntgtggatgtgggggggttnngggggtttttaagtttggaaagtcaccgctttatttcattctcctgggaggttctggaggggttccttgggcagccggaccctgggtcctggggaaggagggcatggtgggggtgggcactagtgggaggggtggaaaggcaccacattggtgcccctgcatgtcgtggatgcagcgcacggactgtacctgagggtgacgggccccaaagtcgctgctgtccttgtagtctcccttctccagcaggtactgcagcccacggtagccagggtactagtagccaacccacgtgccactccgcacccacacagatgacaccttctcctggtagccatgggcgtggaagctgggtacatcgtcatctatgatttccatcttcttcccggtgaagttggggttttcatagaggatgatcttgtgctcttggctgtccactttgatgggcctcaggctgctgagtctgtcctctggctgctggtccaccagtcccagtgggcgtactcgcccttctcaaacacaaactgctcgcccttgcagttggcctgttcatagctcacccagcgtgtagaaaaaaatgccccggagaagctgagctgcacgcagctcccgcctaagcagtcagggccatagacgtgagctgttttctccccaggacggggctccaaatggtccccaagccgccgcggtgccccctgaagcgggtcctgaaggaaccggacccgctttccttcttctcattctggactccccc

SEQ ID NO: 2694 - DNA, 1222 bp, Homo Sapiens
  misc_feature (111)..(111): n is a, c, g, or t
  misc_feature (357)..(367): n is a, c, g, or t
  misc_feature (616)..(640): n is a, c, g, or t
  misc_feature (646)..(646): n is a, c, g, or t
  misc_feature (684)..(696): n is a, c, g, or t
  misc_feature (715)..(852): n is a, c, g, or t
ccaccgtcgtcgaaattcgcggcgccggggtggttcgcggaaaacaagggggcacggcgagacggtgtgcatttaggggaggtatggtgggatcgggtgggttcgtggatnagggggggcccacccaccaggagcggagggggttgcgacaaggggcgcacggtttggagacgcggggccaaagcgcacacacctcgtggtgtgtatgatggtcgatgcatcttgggcggcggcgggtgaggaataaatttgtgtgctcgcggccccgatgtcttttcccaggaatgttttgtgtatgagggcggcggcggggggttagggatgtttggcgttagtcgaccaggtcggcttccggcnnnnnnnnnnncgcgggttgggagacctaaagaagattgtgggggggaagagcagcgttcactgtatggtatgggggtgggtatggcgtggcggcgcgggggcccgccgccccgcacatttatgggtgtcgtttgggggggcccgcgcgaggtatggtggggcagggcgggctgtttgggcgccccttgtgagaggaggggtgtaaggacttctcgggggggccgccggcggcggtcttaagaagagggaggggaatccnnnnnnnnnnnnnnnnnnnnnnnnntgggtncatttgtttgttcccgttggttttttgtaggggtgttnnnnnnnnnnnnnttggtgtttttgagggtgnnnnnnnnnnnnnnnnnnnnnnnnnnnnnnnnnnnnnnnnnnnnnnnnnnnnnnnnnnnnnnnnnnnnnnnnnnnnnnnnnnnnnnnnnnnnnnnnnnnnnnnnnnnnnnnnnnnnnnnnnnnnnnnnnnnnnnnnnnatttattacacgctttatttgagttaaagataaaaaacaatatacttttatgtaaattgctatggcaatgtagtttacagtaattccttttatatatacttcgtattattcttttagacattttataaggaataaagctaattgtatattaagtttaacaataatcagaaaatattctccaaaagaatttcctgaagtggcttgctaggtataaagctcataattgtcaagatacttatattagggacatgaacccaagtcgttaaataaaaataagatatttgtaaaaaagtgctatagaagaaggtgcacaaaaaacatgcacttacacatactttccaaaaggatgtaaactgtacttttaggcact

SEQ ID NO: 2695 - DNA, 1132 bp, Homo Sapiens
  misc_feature (807)..(807): n is a, c, g, or t
  misc_feature (903)..(904): n is a, c, g, or t
  misc_feature (973)..(974): n is a, c, g, or t
  misc_feature (1038)..(1038): n is a, c, g, or t
  misc_feature (1065)..(1065): n is a, c, g, or t
  misc_feature (1083)..(1083): n is a, c, g, or t
  misc_feature (1101)..(1101): n is a, c, g, or t
  misc_feature (1109)..(1109): n is a, c, g, or t
gcttgaagagcaggtcatcaaagaaagtgacgcatcaaagattcctggcaaaaaagtagaacctgtcccagttactaaacagaccacccctccctctgaagcagctgcctcgaagaagaaaccaggcagaagaagtctaaaaatggaagcgatgaccaggataaaaaggtggaaactctcatggtaccatcaaaaaggcaagaagcattgcccctccaccaagagactaaacaagaaagtggatcagggaagaagaaagcttcatcaaagaaacaaaagacagaaaatgtcttcgtagatgaaccccttattcatgcaactacttatattcctttgatggataatgctgactcaagtcctgtggtagataagagagaggttattgatttgcttaaacctgaccaagtagaagggatccagaaatctgggactaaaaaactgaagaccgaaactgacaaagaaaatgctgaagtgaagtttaaagattttcttctgtccttgaagactatgatgttttctgaagatgaggctctttgtgttgtagacttgctaaaggagaagtctggtgtaatacaagatgctttaaagaagtcaagtaagggagaattgactacgcttatacatcagcttcaagaaaaggacaagttactcgctgctgtgaaggaagatgctgctgctacaaaggatcggtgtaagcagttaacccaggaaatgatgacagagaaagaaagaagcaatgtggttataacaaggatgaaagatcgaattggaacattagaaaaggaacataatgtatttcaaaacaanatacatgtcagttatcaagagactcaacagatgcagatgaagtttcagcaagttcgtgagcagatggaggcagagatagctcacttgaagcaggannatggtatactgagagatgcagtcagcaacactacaaatcaactggaaaagcagcagtctgcagaactannataactacgccaggattatgctaggttggtgaatgagctgactgagaacacaggaagctacagncagaagaagtccaaaagaagaatgctngagcagcagctactcagntggaggttcaactaccanaaactganagaaagtgggaagaagttcccac

SEQ ID NO: 2696 - DNA, 836 bp, Homo Sapiens
  misc_feature (342)..(477): n is a, c, g, or t
  misc_feature (503)..(515): n is a, c, g, or t
  misc_feature (640)..(649): n is a, c, g, or t
cgtcggggctattaagtgagaggctattattatatcctatatacagggaggacaaggaggtctcactaatactctgctagctgagtagacatgaagggaataaggcataacatattttgaggattagcattccaagcaaagtgtaaaactacaaaaatcctaaggtagaagcacagttgatatattcaaagagaaataaggaagacaacatggatagactagggagcatatttgatgctgaggtcagaaagttaaggggtagggatagggataggggctagagaaggtagggccttgcacatcattgaaagaacaggggatttcctttgaaagagatgcaannnnnnnnnnnnnnnnnnnnnnnnnnnnnnnnnnnnnnnnnnnnnnnnnnnnnnnnnnnnnnnnnnnnnnnnnnnnnnnnnnnnnnnnnnnnnnnnnnnnnnnnnnnnnnnnnnnnnnnnnnnnnnnnnnnnnnnnagagcgaaactctgtctcaggggggnnnnnnnnnnnnngccagtacttgaattaaagtgtaagaattatttgtgtttacacttcatgtaatttatttccaaatttatctagataattggaaattgacctgcattttaaaatctgtagccaacagttaatgttnnnnnnnnnngttcccttccccaaatgcagttaaaatctatgaactgctgtttgctatttgataatatacttgatctgaatagtaattatacattattagattacatgacttcttagaaatatggaatcaattttgactatagcaaaaagaaattatacaaagcttgaaaataattttgttattttataaatgtgta

SEQ ID NO: 2697 - DNA, 643 bp, Homo Sapiens
  misc_feature (240)..(526): n is a, c, g, or t
  misc_feature (532)..(532): n is a, c, g, or t
catggacatgactcagataggctggaggacatgaggtgcgtggataacacacagattatctgagcattctgggatcactgagatgccctgtggttactgtggaatcgcatcccagaagctccgaccacatccatccatgcagataaacccattttccaggcactcacagcaccattgttaattttccacaaccatctgggaaaagtggtatcttcctgctccacaaaacatatggcagannnnnnnnnnnnnnnnnnnnnnnnnnnnnnnnnnnnnnnnnnnnnnnnnnnnnnnnnnnnnnnnnnnnnnnnnnnnnnnnnnnnnnnnnnnnnnnnnnnnnnnnnnnnnnnnnnnnnnnnnnnnnnnnnnnnnnnnnnnnnnnnnnnnnnnnnnnnnnnnnnnnnnnnnnnnnnnnnnnnnnnnnnnnnnnnnnnnnnnnnnnnnnnnnnnnnnnnnnnnnnnnnnnnnnnnnnnnnnnnnnnnnnnnnnnnnnnnnnnnnnnnnnnnnnnnnnnnnnnnnnnnnnncaacanaaacaacaacaaaacacgtggtggggagaaggggtaacaccctacacatggtagccaaagttacctgcttttaagtaataaatgtgaacacctactgctatcacattttaa

SEQ ID NO: 2698 - DNA, 607 bp, Homo Sapiens
gatgatcccccgaacacgtcggggcttgagtatcttcaggtcaggatgcatgagcaataaagggcaagtcaggaggagcacccagcaccctgcagcccagctgcacaaaggcagatgctccagttcacagacaactgcaggggaggcccagctcaggtggaggcgttgttttgtttttgctttattttccttctaatcagcatgcagtagctctgtgatgtaattagcaaagagagaggaaaaccatggagtggtgttgccagagctaacctggaaatagaatcatttataagaaaaatagctcaggagaaaaagtctcagagtgagagaagctggggaaacagatttcttgcacttcaggccagatcctggaagccttacattgcatacatattctctcctgtgagggctggtgctccaggaagggaggaagcaatggtagagcaactcttctagaacagtggcttttgctcaggaaggcaagcgatgggaaatcttgccatcttttcaggatgcagctgggaaaactctctagctgctcagtttaattagagcccccaccaagtctcataggagggggctctcgcttggctgccttgctagggta

SEQ ID NO: 2699 - DNA, 711 bp, Homo Sapiens
  misc_feature (19)..(19): n is a, c, g, or t
cttggttgttcatatgtancatgctgtctttgaagggttactgtaaccatgaactggatttatcttggcaacattttaagaacatgtcttcctctatatacatatttgccttccctcatttttaaagaaaaccagtcaacaaaaggaaaatcaaggtctacctgaagagaccttgtgatatacaaagcaagataggtaaaaataatgccaggcttttatgagctaataaataagtcaggctaaagacaagaggatagaaggaatgtgaaatatacacatgatttcatatggatgtggaattgttaacaccagtgctacacttaactcagttggtatggaaagatctctcaggatagtggtaggaatggaaattttctattaaaatgaaaaacatcccactgttgcagtctcaattcctttccacttaacgggtgtttattgagtgcacaacactatgcctggtgcccaccatgtggttacagaatgaaagatgcttgtaaggagttatcaatcaacatacattgcttgtttatccaaacttgtggaaaggagtatattctagatgatatagaaatgacagagtaccagtacatcttttatatctcactcagaatatgttctagctgttacattgaaatatgagtaagccttgccgcttgagcattctcaatattgtgaaaaaaatacaggagcccgaggatgttcgggggc

SEQ ID NO: 2700 - DNA, 347 bp, Homo Sapiens
  misc_feature (184)..(184): n is a, c, g, or t
  misc_feature (188)..(189): n is a, c, g, or t
  misc_feature (191)..(191): n is a, c, g, or t
  misc_feature (199)..(216): n is a, c, g, or t
ggtcgtggtctgcacagtgcttgacttacagtgtaagaatcatttgtgtttacacttcatgtaatttatttcccgatttatctagataattggacattgactcgcattctactatcagtagtcagcagttgaggttaaaatgaacagttccgttccccaaagccagttagcgtttatgagccgntgtnngntcatctcnnnnnnnnnnnnnnnnnnccaagatgaaggaaatgtgtgcacagagttccatcattgcagcgtgttacagtgctcagtagattcagagactcatattagatgagagatgggactaggggtggtgtctcacgcaattagccggacagttt

SEQ ID NO: 2701 - DNA, 739 bp, Homo Sapiens
tttggctttgagatacaaaaacagtaacctgcacaaaacagaaaccaatccatgtagttagacttattctcaaaaacttacaaaattcctcaaatcagctcatggccaaaagggatattcctccaattagtaactttcccttaaaacataaattacaaaatgaatagttatttctgttttctttctatccttcaagggtcctaagtcaaatgcagtaacactttaggaaatatgtcataccctgcttccattgttgtggaacatatcaaagctgatttctggtttgaattagttcgataggtaatttggggggatgaaatttggtttggctcaaaaattccttggaacactttatacataatgtgttgagtttaggatttggtaaattagtgtggttcattctttttgttgttctcattcataaatcatttggttaaggcataaaactgaaataataaaaacaggaactgtgacttctttggctaaggccaagataaagtctcaaatcaattcctgtgatatttatgaagagcagatggacctgggttccttcggtctatattagggccaaaaccaggcaaaatgaacagtccatcccacccattctgaattatcctcccactgccaagatgaatgaaaaagtctaacttccaggtagcagttcaatctctatcagcaaacccagtccttccaaaccaaaggaagtcaagattctaaaaaaacttgatcagccacgaca

SEQ ID NO: 2702 - DNA, 221 bp, Homo Sapiens
aacagataaatttaaagtattgggtttctctggaagttctgcaaattagtttagttcattccacagtttgatgcaaattgacccttggtgaaacttcacagtaaaatacacggaatcttaaatataattttaaggaacaaaaacacaaatctctttaatgaatttatattctgctgtcaacaaaggctttcaaggaggcaataaatgttctctgcaatccc

SEQ ID NO: 2703 - DNA, 709 bp, Homo Sapiens
  misc_feature (615)..(615): n is a, c, g, or t
aaagaaggaagcagatcacctggtgacagccctggaggaaaggaggaagccccagagccacctgatggtggagacccagggaacctgcaaggagaggactctcaggctttcagcagcaagcgtgatccagaagtaggcaaagatgagctttcaaagccaagcagtgatgcagagagcagagaccatcccagctcacactcagcacagccacccagaaaggggggtgctgggcacacggacgggccccactctcagacagcagaggctgatgcatctggcctaccacacaagctgggtgaggaggaccccgtcctgccccctgtgccagatggagctggtgagcccactgttcccgaaggagccatctgggaggggtcaggattgcagcccaaatgtcctgacacccttcagagcagggaaggattgggaagaatggagtctttcctgactttagaatcagagaaatcagattttccaccaactcctgttgcagaggttgcacccaaagcccaggaaggtgagagcacattggaaataaggaagatgggcagctgtgatggggagggcttgctgacgtccccagatcaaccccgcgggccggcgtgtgatgcgtcnagacaggaatttcatgctggggtgccacatccccccagggggagaacttggcaacagacctggggcttacggcactcatcctggaccaagatca

SEQ ID NO: 2704 - DNA, 495 bp, Homo Sapiens
tattccaaggagctgtacctgttctgaccacagcttaccttgctaacaacttctgctacataccctcctcatgctggtcacacagccctccttgcagttgttcgaaccctcaggcttttattcccgcctcggggcctttgcattttacatttccaccagtgacgggaacattctcattcccctaattttttcctgagtggctcctctccatccagggtaagttcctcaaagcagttgagtctgacggtcttacctaaaggaggactcacctgaatgccccctcatgccccttttttcccatccttctcccaaccccattcaacatgagccgtccctgcatcccaggccctgcacggagtgctaggatacatcaacaaaccagaaagagacaaagatccctgccgatgggagccaacagtccacgagaggacaagaaaccatgaaccacaaaaataaggcaattttggtttgcttcaaggggtcgtctgctgtgcc

SEQ ID NO: 2705 - DNA, 766 bp, Homo Sapiens
  misc_feature (129)..(130): n is a, c, g, or t
  misc_feature (153)..(153): n is a, c, g, or t
cttaaacttccactatttaacagctaatccatttcaaacttggtttgagcctagcaattgcagaactcataaaattgcttgtgaaattacacaccatattactagcatatacattgcagtgctccaatnnatgctaacagataatagattttnctttaagaattttatcaaatatttcactatttggggaaattttagaggaggggaagcctgtattcaggatgatagagggagcagagacttactgtctctcttccacattataaatgaactgcctttccaggtccaacatgctgtcaggttgcttcagctcggtgtgaatgtaagtgtggggatcaaacacacacacctatacacatacatattaatatgcagaggattttaaataattgcaaatgtcttgtggctgttttatttctacaaaattctgtaagatgtataccagaaaacataataaagataagctcagttcttcattgggaaaaaatatttttaaagaaaatttagaagtttttgctgaattaaagtatcttcaattttaattactggatttggaagttgaaatgccatccttcaatatcactggtctcaaattcattgatagaattttttcttaaactaataagtggggtaagtataatctcctaaattggtacccactggctgctcctaaactggtttccagtcatgtcctccagtatgtgatttttataaattaaaggtaatattgtatattaaagttcaaataaagatgttctttaagtta

SEQ ID NO: 2706 - DNA, 358 bp, Homo Sapiens
ggttggggtgacgattcacaaccgtcctttcctcaaagcgctagtcactgacgagttgcaagggcttgatgcgaccattccgaaggcgactgtggccagagacgacaccacggtgaccttccatgacgttgacgttcatgccaatggaattcggcacgtccgggagaaatcccagacagtggccgagacgatgtcagcctctggccgtgttgactggtctgagctgtcgcggttggcgggtgcagaaatcacctagagacgacaacaccggggaaaccggcagggtgacgatcgtgcggaagatgtcggaattggagctcggtaagtcagtattccgccaggttctcccaggcacgac

SEQ ID NO: 2707 - DNA, 351 bp, Homo Sapiens
gagttgccggcggtagtgggctggcatccggctctcatcggcgggttcgcggtcaacgggcatggtggattcgttcctctgctgcgatcgaaagtggccggacgttgcgtgatgcggatggctggtttacaggaccgggagcgccagtcccgtggtgtcggtgtcgatgacggccaggtgccaccggccgaggttggcaatgaacaactccgatgctcggaaggcgcagttcgtggggtgacagagtgtgtgggccgtggggtcggtgagataggtttccggcgtaccgccagcggtcaggcgaatgatgcatgacggttcgtaacaggcgatgtagagcgtgccattctg

SEQ ID NO: 2708 - DNA, 517 bp, Homo Sapiens
  misc_feature (105)..(105): n is a, c, g, or t
ggacgaggaagaaacgaacgtgatagttctcagctacccccagtactgccggtaccgctcgatgctgaaacgcatccaggataagccatcttccattctaacggnccagtttgcattggccctggggggcattgcagtggtcagcaggaaccctcagatcctgtactgtcgggacacctttgaccacccgactctcatagaaaacgagagtatatgcgatgagtttgcgccaaatcttaaaggcagaccacgcaaaaagaaaccatgcccacaaagaagagattcattcagtggtgttaaggattccaacaacaattccgatggcaaagccgttgccaaggtgaaatgtgaggccaggtcagccttgaccaagccgaagaataaccataactgtaaaaaagtctcaaatgaagaaaaaccaaaggttgccattggtgaagagtgcagggcagatgaacaagccttcttggtggcactttataaatacgtgaaagagaggaatacgccgactgtcatc

SEQ ID NO: 2709 - DNA, 314 bp, Homo Sapiens
gaaactgcccaaagaggaaagattgaatcctaaaggggatccttgcccccatgggaggccccctactagaaggacgtgaaagcagcttttgggggaaactgaggcagtggggaagacagagcagaatgagccctcaccctggctgggggtccagcacaggctgtatctgcagagggtcccagaggaacgctggagccaagagaagccctgggaaggaggggtggggaacgacatgcatgtgagggatggcacactgatgtgtttatgcacctgcacacaggagcgcatggccatggctttggaaaggagaatgg

SEQ ID NO: 2710 - DNA, 407 bp, Homo Sapiens
caccaattaatcttttattttttattgcatacatcaatatttaacagaagaaaaataaagaacccctaatgttaaactgaattacatgttatcttctgattcttttcaatgtagacctaaattttcacatgtatcagtaaacacaatttatgttcttattaacatttttgaatctcacttttttgcatacaatttgacatatatcaatattattgaatggctatataacattctgtgatagcactagcaatacaccaaaatttacttaaccatttccaatcgttgggcttttttcccccttaaagttatctgagtggaactgctagaaaactttgtaaaaatagcttttctttcttttaaatattttcctgggcatatgccactcaaagtgagtatgtcaaaagatc

SEQ ID NO: 2711 - DNA, 275 bp, Homo Sapiens
tatgattatccccgtacgttggtcgaacaggaaggttctgcaggagtcttcaaaacgccagccagccagcagtggccacaagcttccagaagaacagtcatttgatgggtttgctcaggctccgcctacagctcaactccctgccactggccagcccactgttaacaacgactattcctattaccacatttctgaagcacaaaatgtctccagtcatgttccataccctgtagcgttacatgtaaatatagtcaatgtccctcagccagctgccg

SEQ ID NO: 2712 - DNA, 399 bp, Homo Sapiens
atctttgctaatctccaagatggggatatctaatgcaacatttctcaaccatatttgtctgtggaacccccccttttttttgagtgttctgtaagattgatgttttgcaaaacccatcttgagaaataccatcttgttggaattaagtcctagaagcactcacaggcttgactcatcttcctttacatgcataccttctcttttgagtggcaagactgtgggtctgccttatcagaacttgggaattccatctttaaaataaactgggggggctttctgatcctagctgatctccctatatatgagtgtgagtgtgctagacagctcactgagctgaaatcaaagaaatttccaggccatcttcagggatctgagtataattcattgaacatgagacct

SEQ ID NO: 2713 - DNA, 587 bp, Homo Sapiens
  misc_feature (517)..(517): n is a, c, g, or t
  misc_feature (564)..(564): n is a, c, g, or t
actctagttgagcccccgaacaccgtcgtggctcttctgctggtcggctctctcctggtggatcgtaataacctgcagtcagctatcctggtccagagggagcccgttaaaccctgtggaatcttatcacgctgctgctcagaacgagccagtgtctttctgtctcactcagagtgtaagctacagtccttattgtggccatcaggtgctgtgtgttctccagccccctccccaccaccgcagtcctgccggtgatcttagctgctctcccctcggcaccccctgcggccccctctgccgcagcactcgtggcctgctgttccttgaacatgcttggtgttttctctcctcaaaggcttctttctgtttacctgaaatgtactttcctagggaatctatctggctcactcgcttactttttccacatctttgcttaagtattgccttattggagaggcaccctaccataaactagaatcccttgccccagctgctctttgtcctccgtattgggctntgtttttgttcttaccagttagaaccacttgacacacgatacatgtngttgttacccttttctaccacta

SEQ ID NO: 2714 - DNA, 807 bp, Homo Sapiens
ggataccgtgattagtataacaaagtaactcgaagagtggtagaatagagagacataccttaacaaagcattaataatcacccaggagcaggaaacaatctcttagcctttaaatgtgccacttctctgaacctcatcaatgataacagccattccctcatagtctttttcactccagtaatatgtgcatttaggcagaaagcatgttcacctacatttactctctgcaggtgctttactccatgaactgtctaatgacggtgctcataagcagtttgatcactacctcgaagagctcatcttgcccatcatggtgggctgtgccaagaaaggagaacgagagtgccacattgttgtgctgacggatgaggattctgtggactgggatgaagaccaccctccaccaatgggggaggaatattcccaaagtaggagcttctggcatggcgtagatgttttcagcaagaaacttgctacctggagtagcagcttgatcctagaaccaatgtgaagatcaatgtggagcctgtgatgagcacactcacctggatgacaaatcccgagtgacgcaggtctagcctgtatgctggggaacacagtgaatgttgttcaccattcacgctttctctggtgtctcgtactgtgtaagattactgacggcagcacattaaatgatggtggtgcattgcgtctgcttaattgcatgtttaaatgccttttgaattggtaagaagtcataagtctaataacagtataaggatatacactataaagtcttagtctcactcctgtctcatctattctagt

SEQ ID NO: 2715 - DNA, 263 bp, Homo Sapiens
tctagtgcattaggaaacctcaacatgtcagcagataaataaggtctctgaggctgagattgtcttggccaggtgatggtgcctcttctgtaataacgtcctgacaaatgataaacattgcaatttatactataggactttatagtcgctagatcaactacaaagaatacatgtgctcatgtgggaaaaaataacatggaatgatgtccctctgtcacagccagagatgccacacccatgacgagtcgaaggccaatgttggt

SEQ ID NO: 2716 - DNA, 570 bp, Homo Sapiens
ggagcccccgaacactgtcgtggcttgcagatggctgcttaggaggtggggctgcagcagagagaagagcactgggcccagacacgcaggaagaagagaggccattgtgggaaactgaggtgctgttaaaagaaaacccacagtgtcacggaaaccaggcatcagcagtagcagcctctcagcaggacaaggggccaacctagagtccccttttgctgtggtgactcccaagaactgtgatggctcacctgggggaaggttctagaagctcccagcagcagcactgccaccctcagaatgcaggtctccaccaggcaacatcacattaggtaagagtatgcccctagtcattatgtggataggtgcttataccaaataccagggtcacagcccttgcaataacttgaccctcatccttgacaactctggagaacattacaaagcattatggctacaagctgtgttattcatttccagttgccatgaacatactttgttttggactgaaatgtcatcgtgcactaccctgaaagtcatttttacttgattggatgtttgacattgcaatag

SEQ ID NO: 2717 - DNA, 550 bp, Homo Sapiens
atccagctgcacccgattccaggggcagcttagtgtgctttttcattacaaaaaataaagacattaaaaatgcaaaacaaatgacctggaggaagaggagtgtttggacccacgcagttgtcttggttgtaaacagtgaacattgtgctttgttgtctcatttagatggaggcctgcagcatgggaggtaccacgctggcagtcagcagtcacaccagggtggtcagagacactggtggcagcatctgtgcttgcaactgcattcccagggtgtctgttttgttcccaagtgtctcccacaaaattccccaggaggttctccgattaaatgtcctcagagtgaaaagcatggacaccaaatcactccgtatccacttccatgagatgtcttgatgctccagttcaatgagtaacaatttctcaagaggctctgattagttcattaaaaaataagcacccccacctcattccccgtgatacagcacatctagtaatctaggcgcctcagctaagctgcatagctcttagcacacaggacaggtcattttta

SEQ ID NO: 2718 - DNA, 555 bp, Homo Sapiens
  misc_feature (132)..(152): n is a, c, g, or t
ttcttgctggataggtatctacataagtaaattacatataatattcaacatatacagtaatatacttgcacacaaaaaaattttatgaaattagtaaacttccatttacaagtagagagagaaagaactttnnnnnnnnnnnnnnnnnnnnngagacggcatcttgctctgtcacccagactggagtgcaatggcatgagccaccgtgcctggctggaaaaggtttttaataaattagcaggaaaagtaatagtaggacaagagttggctgaatccctctaatggcaaacagagctctgtgtagggctaagaaacactaaattagaaaaaaattaaaaatctgcaagaattctggcctgctctattgttgaccacccacttagtatgtgtaaaccactcagctaggctccgcagtctcaacagtagtaagacatggtcctggaccttgtgactctgtctcagagaaacatgaatgcacgataggtgaccacaatctcgtttcaacgcacaagggggtaaggagactaaccatctcaaaccacctttgactacaca

SEQ ID NO: 2719 - DNA, 854 bp, Homo Sapiens
ggtcaagatagcagcagcaggtgtcaggtctcaagacaccaccccctccagcttctggggcccaggagcctctccctgctacagggggtgggggtcctgctcagcagggtaggtggtggttttaggtcttgtcaccctcactcagtggaactgcctctgggagctttggcgtctgtgactaaagggacgctggattgctcaggtcagctgctcggggctcccaggctgggtgtgccttagccacaggcagggctgtcaataacccccttcctcactggccaccacctgacatcagcaccagtgacaggctggtcagagggcggggctggtgagggtttgtcctaagaggaccaccgccatctctgggtctccagggggagagcctggccctgtcctttgctacccagggctgcccccaggcccatgaagccaataggagagcgtgtggcactggcccacaaactgtccctgtcctgtcttcctcccgagccatggcctctgctagctccaccttgaaggagccccccacatcctcccctacatcccagagatgccaccacttgtgtctccacaatgtgctcctgcccacccgggttccgcactgtccgacccctgcacaccactcatgtcaccacggcgtgcatcatgttcatccccatctatttatttaagcctttctttgcttgtagggcattttgtatgtagagcagttgaaaacagaacctcagaacttaacatctgtcctgatgttaaagtgcttttcatgaccaccctgttatctatgtatatgtaaaggtaaggatgagatcttaagtttacaattaaaaactcagtactcaatatttaatattcta

SEQ ID NO: 2720 - DNA, 327 bp, Homo Sapiens
  misc_feature (251)..(251): n is a, c, g, or t
ttctgaggggaatggaaagagagctcaacaggtttgctggacagctctgagggtgtccagaatggagcccctgaatctgttatgccatctgctgttaatggttgtgtggttttctccttggtgttgagtatcctgaggagaggaacagagaaggtgataggtagaaggatctggggttgggatttggttgagtgagtgtttaagagagtgtgagggagttgagatcattggttagtgggcagttgatgtangatggaggagaaaggagatgtagacagaagaggcctgtcagagaagaagaaaatagaggtgctagcaaattggagc

SEQ ID NO: 2721 - DNA, 522 bp, Homo Sapiens
accatgtcgcggctcataaacataatttcatatgttccagcttcatttataatgaaagttatggaggttaagactaaaattacagaccctttttaagttattttacttaggctggtaaatatttaaaaactgataatacacactgctggtgggaatgttggaaaacaatttgtcaataggtattaacattgtaaacgtatgttcccattcctctaggaatttcactgctaggactgtatcctaacaatatgttcatgcatgcatagaaaaagtatgaattagaatgttctcagcaggactgtttgttgtagcaaaaagccagaaatagcctgaatattctcagcagaaaactgcttaagttataacacagtcgtacaaacaatgacataaaaactctaaaaagtgcaataactatacctatgttgacagggcaggatctcttaggtggattgttaggtgaataaattaaagtgtggttcagtttacacattggtattaaaaattttaaatgatatgcatttc

SEQ ID NO: 2722 - DNA, 495 bp, Homo Sapiens
tatgaaccataatcacctctgtgaaggagaaccaaagagctcagatctgggatgggaagaagtccagctctgagctgttggagctttggtcctgtccttgtcaggccttctgagccactggccttccccacctgtgccgcagcctccaccatcaggttaaagcccactgctgttgtttgtcgtgttcagtcgccaacccatccatctctcagactggctctttcagaaagtaaaacagacagggccttggctccagtctccgacaatgtcaggaaaacttgctgaaagtggcctttcatttgagcctgaacactaaaggagaactggcagaaacacccacctcaagccagctgggggctggctgacctttctagctggtcggggccctggcgcccacactgctgtcggctctccccggcgctgcctctggaaagcagtctcctaagtgcaatctctaggcccctgaccaaggtatttttagccaccctccctggt

SEQ ID NO: 2723 - DNA, 803 bp, Homo Sapiens
  misc_feature (298)..(319): n is a, c, g, or t
  misc_feature (527)..(527): n is a, c, g, or t
ggcaaagtacttaaaaagtatgtatattatccatacaaaaagttatgttttacgcttataataagaaatactggtatctcatatcgagatacaattaattttaaaaaatcatacatcatttaaaaatcttcacacatgaacaggaaagatatcatttctatgctttaaaaaaccctctattgagcattttcaaatattaattttattttgggggaaaatgcccacaacaataattgcaagatctttctcaatagcttcagtttgctgttggatgcctaccttaactattgttttaaannnnnnnnnnnnnnnnnnnnnnttaaaatagttttccaggtattttcttctaccttttttaaaaataaatttccaaaaatgaaaacagagtttatgtatttttgtcaatgaaggtttttattttgtagtttatagaatttgttccttatcagtttgatacttgatcaacattcttagactttttaatctgtatttactttggggggaaaaaaagcactcctatatcttanatgtccttcttttttcttttcccttttagggtatttgttctcttggattgaaatttatgcccacagatttttcttttcatttgaaaatgaatgtgaagatactgtttacagcttctggtaattgcacttttcatcactctgatcaatttcttgtaaagtgctatgggaattattttttcctgggaataataatgattttactactgccctccgaagttttaaaaaaagtttctggtaaacaagaaaacaggttgtttgccacccaaaaaccaaccc

SEQ ID NO: 2724 - DNA, 821 bp, Homo Sapiens
ggggcgccttttctgacgatgcgaacaacatggcggcggaaagtggtagcgattttcagcagagacgtagaaggcgccgggacccggaggaaccggaaaaaacagaactcagcgaaagagagctggcagtagcagtggcggtgtcccaggagaacgatgaggagaacgaagagcgctgggttggacctttacctgtggaggcaacactggccaagaacaggaaagtcttagagtttgaaagagtctatcttgataatctccccagtgcatccatgtatgagcgcagttacatgcatagagatgttatcacccatgtggtatgcaccaaaacagattttattattactgccagtcatgatggacatgtcaagttctggaaaaaaatagaagagggaattgaatttgttaaacattttcgtagtcacctgggagttattgagagtattgcagttagctctgagggagcattgttctgttctgtgggtgatgataaagcaatgaaggtgtttgatgtagtgaactttgacatgatcaacatgcttgaaacttggctattttcctggacagggtgagtggatctattgcccaggggatgcaatttcttcagttgctgcttccgaaaagagtaccgggaaaaattttcatttatgatggcccgaggagataaccaccccacttcatattttttgacaaacttccatacattcaccttcttactcaaaattacggcctaaaccccatttttaccaaaccagtcagtggcccttcctgcacaaaatttgtgggaatgattcggaatccctggcactgggggcccctca

SEQ ID NO: 2725 - DNA, 1678 bp, Homo Sapiens
  misc_feature (376)..(385): n is a, c, g, or t
  misc_feature (1119)..(1123): n is a, c, g, or t
  misc_feature (1127)..(1127): n is a, c, g, or t
  misc_feature (1129)..(1129): n is a, c, g, or t
  misc_feature (1131)..(1131): n is a, c, g, or t
  misc_feature (1336)..(1361): n is a, c, g, or t
  misc_feature (1668)..(1668): n is a, c, g, or t
gggttctctttagacatcttctacttgctcttggccttgagatcgtgtaacaaaatgaaggagggctctcttctttcttcctcatcctactcaaaaacttcccgagagcagtggtggttttgagggttttgacttctattacttttggcagcctggaaagttgtgtcttctgggaaagagacccggggaggccaggagtagctgagggtcctttctgtgcccttaaaccgcccagaggagccctattccactctggttttaggctgatctgagagggtctccctttgttcctttctggagcatttctctaacgtttattacaattaggagggggaccccacatctgtgagattctgtttcatttgaggtttacagnnnnnnnnnngtggccagatgtgttccccccatgggtgagaggcctgggcaactgcctggtgaatgtgtcttgcggcagctgcagcaagtggaggggctgaactactggccagctcactggatgatgggttaatacaacaactgcactgtaaggactcagagccacacagaacttctgagaggggctgttagcattgcgcagcatcttcagttctccagtaaatgatattgcgttcgtgcctcagctttaagcacaagtagcagcagctcctgcttgagttctgagggcatcatggccctatgattaaccagagtgatctaacctagactaaaattgggaacttatttgcaatttttgaccctgaccactaactagtgattcttctccaaaattgagaaagacagcacccattgaagcagatatgtgtgtgaaagtatatttttcaattccagatttttaattttaaggctccaggaaagaaaggagagtagaacatttttcctcattttatcaaatcctctcttgccctccctcaattcccctgtaacattcctgaagctgttcccactcccagatggttttatcaatagcctagaggtaaagaactgtctttttctctgattctttaataaattatctttatagaatatgcacaagtttttctacactcagtgttaaagtatttattaatgggaagtcaacttaatgttttgaaataaatatatgactctgtttaatgcacnnnnnccanananatagaaaaaacaaacaaacacgaaaaccccgaggcgcgaggcatgcatagcatgcaccatcctggttgtgcttgggcggggccgcccaaaaacctcgcctgaccaaatcgttatatacccccctgcccccgtgagcgcagggccccaaagggccgcaagggtcttcccacgaagtccctgggaaacgcccgacgcgggggggaannnnnnnnnnnnnnnnnnnnnnnnnnaagtgcgaccgcgctcgacgtgcgaacaaccctccattcggaccgctgcgagggcctccacatcggccttttacgccgcggcgccgcgctatgggagccgaaaggatacacggggaaaaccgcaatgggagtgtcagtgccttcgcccagcaataagcactctccgtgcgtggatgcgccttaagccggctataggaaaaccacccgcccatacccgggctcgatatacgcttcgcgatgtccccttactgaccacctcccccaagtctgccccctcgacgaaataccaatcctcccctctgggtgntacgcggcgg

SEQ ID NO: 2726 - DNA, 603 bp, Homo Sapiens
ggagtgtagaaactggcaagacagttcagtgagttatgcagctggagcactcacggtccactgaagctctgaatcctcagggatgccacctgcacattctcatactctgtccggggtcccagcctagcctttaccacgatactggtcctggtttggggggattctgaaacctcaaactaatagaactttcttctctttttttctagtaggtgtagtccttccttaatttcaactcattaaaaaatgctttatagtttagggcagtggaaggaaggctggcatcaaaatattttgatcaaaaaagatgacaatgtaaaggctcagttgtggcagacagttttttgaaagtaacttgtaaagcatttaccatatcctaaatttgcactctttgcagacttgtgcacatatattccgctttcagaatagttttgcaaattgtacacaaacaaacaaaaaggtggaagctttttaataaagaaattgcatttataaatgatctgtattagaatataataaatctccagttatagtcaattactacccatgttgtacaacagataccttctattttagttgctaataaagggctcacaactcaaaaaa

SEQ ID NO: 2727 - DNA, 830 bp, Homo Sapiens
  misc_feature (565)..(574): n is a, c, g, or t
ccttgaagaataatttaggtgaacggtaccaaatagaaaattttggctagactgcttcccaagaaaagcctaggtagactccggcgacttgggaattcaaggtcagcaatggcaggtaaggaggcgaacttgggctcttttgtgagcagcactgtagaaaggatttttcaaggaaggtacagccatgcataaacagcagttatctatggcatgtgcaaacaagcaagggggaaagttgtattgaagagaggggtgaattaaagtccctaaaattcaagtcccttctttagggaggtgagaacctccttggcatatgccctaccttaatctgagctgtgttatagaaaagtacagactctggtgtttgggactgacatctccaaaccaagaaaattaaataaataaaaaaggcaagggaagtttaaaaaatggttctttcactagtggaatagagtctgaataccagaattcactgagaatctatttacaccacagtttgattgcgcgcacacacacacacccatacatatgcatactctcacatacattcccaatctttaatttnnnnnnnnnngtcaaacaatcaagaatgactgcttgaaaaataatttgtaaaatgcctagagctgggctaaatttcaaccttatagcagatcctgaaaataaatttcataataatatttccatgcctaaatatgccactgttaaaactgaaaaaaatttaagcatgtaacattaaacactaaaattagtttaagcactcagtagcaaatggtttttcttgtaaaactaagtttctttcaccggaaatggcctgaaatattagtccc

SEQ ID NO: 2728 - DNA, 2211 bp, Homo Sapiens
  misc_feature (1083)..(1083): n is a, c, g, or t
  misc_feature (1275)..(1275): n is a, c, g, or t
  misc_feature (1814)..(1830): n is a, c, g, or t
  misc_feature (1838)..(1887): n is a, c, g, or t
gggctctgatgcaacgccggaatcgcggaaaccgccggtgcacgttggagtcataagacggcgtcggtgttgcagtctgtgtccttggaggtgaccagggccactgcaggcatggtgctagcagagctgtacgtctctgaccgagagggaagcgatgccacgggagatggaaccaaggagaaaccatttaaaacaggtctaaaggctttgatgacagtagggaaagaaccatttcctaccatttacgtagattcacaaaaagaaaatgagaggtggaatgttatttctaaatcacagttgaagaacattaaaaagatgtggcatagggaacaaatgaagagtgaatcccgggaaaagaaagaggcagaagatagtttacgaagagaaaagaacctggaagaagcaaagaagattaccattaaaaatgatccaagtctcccagagccaaaatgtgtgaagattggtgcgttagaaggatatagaggccaaagagtaaaggtgtttggctgggtccacaggctgcgcaggcaaggaaagaatttaatgtttctggtgttgcgagatggtacaggttatcttcagtgtgtcttggcggatgagttgtgtcagtgctacaatggagttctcttgtccacggagagcagtgttgcagtgtatggaatgctaaatcttaccccaaagggcaagcaggctccaggtggccatgagctgagttgtgacttctgggaactaattgggttggcccctgctggaggagctgacaacctgatcaatgaggagtctgacgttgatgtccagctcaacaacagacacatgatgatccgaggagaaaacatgtccaaaatcctaaaagcacgatccatggtcaccaggtgctttagagatcacttctttgatagggggtactatgaagttactcctccaacattagtgcaaacacaagtagaaggtggtgccacactcttcaagcttgactattttggggaagaggcatttttgactcaatcctctcagttgtacttggagacctgcctcccagccctgggagatgttttttgtattgctcagtcataccgggcaganagtccagaacacgaaggcacctggctgagtacactcacgtggaaagctgagtgtcctttcctgacttttgacgaccccctgaaccggttgggaggacttggtttgtgatgtggtagatcgatatattgaagtcacctgcaggggagcatagtgcatgagctcaacccgaactttcagccccccaaacggccntttcaaacggatgaactattcagatgctatcgtttggctaaaagaacatgatgtaaagaaagaagatggaactttctatgaatttggagaagatatcccagaagctcctgagagactgatgacagacaccattaatgaaccaatcttgctgtgtcgatttcctgtggagatcaagtccttctacatgcagcgatgtcctgaggattcccgtcttactgaatctgtcgacgtgttgatgcccaatgttggtgagattgtgggaggctcaatgcgtatctttgatagtgaagaaatactggcaggttataaaagggaagggattgaccccactccctattactggtatacggatcagagaaaatacggtacatgtccccatggaggatatggcttgggcttggaacgattcttaacgtggattctgaataggtatcacatccgagacgtgtgcttataccctcgatttgtccagcgttgcacgccataaccattttctccagaagcgtggaggaaagattatgaaaggaacaggctctttnnnnnnnnnnnnnnnnngccagaannnnnnnnnnnnnnnnnnnnnnnnnnnnnnnnnnnnnnnnnnnnnnnnnntaccataaaaactatctcaaatcacctgaacatcaagtgatattaaggttgtcatcttaagaaaaaatatccatttttttcttaagttcgggaaacaaagttcggggaaaatacctggcatgaaactgtagttagggatacatttcagcattttactcactttatccaagttattcattttattcaagttatatgtatgtataattcaacaattttagattatggtgtaagatactccagtaacttatctttctgtccttttaagtgtacctggaattctttgatttattttattgcatcaatgaattaaaacaaatatcttgg

SEQ ID NO: 2729 - DNA, 1152 bp, Homo Sapiens
  misc_feature (158)..(158): n is a, c, g, or t
agcgggtggagtgccccccagagtcgcgccgacagctggaaatataggagcgtcgcccagagagatgagatgcgccacacgtctctataacgcacgcaaggtactcattgtgggacggggcgaggccgtcgagagggataatcgcgccgcggggaccnccgacgtggaggaattctggccaggccgaatgccccaggtgcccccgcatccagaagcaccatcctcgctgggggggaaaatacctccagggcagttgtaagagaaaccttgcagcggggggcatcccttatacggctttcctgcgtaccgcagcatgtttttccatttaggtgcaaaaattggggttcccatcgtatactcgtctaaagtcctaaatccaaggctcagtgtttagtaaggttatagaagcattggcaccagcaaccttcccacaggatccgtagttttggtactttatgaagaagctgttactaccttaagtatacattggtgttaattatgctctttcatgtagatccgttacacctgcatttaagaaggtctgcactttcttctacctgccctcaccagcggccctgtgaacagccgcaacagccgcacattcactgtccattaagcttgtggagcttgtcagggacctgggcttgtcaccgttatctccagcacctcaagagcagtgcctggccctcaaacacctattgaacgcttgaattactaagacacggacagctgcaagaatacagcaaaatgtgaatgtccctcttttcagtggctctcccctcaaggaggtcaccctaaacatcccagtaccactaatggcagaggcatgtgtgtgaagccatggattcttccaagctgatggtgaagcctcatccccaaagacccagggtcctcctgatgttctaggtccccaactcttctctctcccactctggtccttccatcagaagttaataatccaagatcccttcttccaggacccagctctttggttttaagatctgctgtcatcttggagaatcgtccctgaaaataatctaacattatctccttcactttactgttgttggcaccattccatggagtagctcacgccagatgggaagaggagttaacttctgagcagtgtctctggtacccactcttcctagt

SEQ ID NO: 2730 - DNA, 1080 bp, Homo Sapiens
ggggaaaaccaagccgggcgcctcttgcaatggagacggtcatttcttcagatagctccccacctgtggaaaatgagcatcctcaagagaccccagaatccaacaatagcgtgtatacttccttcatgaagtctcatcgctgctatgacctgattcccacaagctccaaattggttgtatttgatacgtccctgcaggtgaagaaagctttttttgctttggtgactaacggtgtacgagctgcccctttatgggatagtaagaagcaaagttttgtgggcatgctgaccatcactgatttcatcaatatcctgcaccgctactataaatcagccttggtacagatctatgagctagaagaacacaagatagaaacttggagagaggtgtatctccaggactcctttaaaccgcttgtctgcatttctcctaatgccagcttgtttgatgcctgtctcttcattaattcggaacaagatccacaggctgccagttattgacccagaatcaggcaatactttgtacatcctcacccacaagcgcattctgaagttcctcaaattgtttatcactgagttccccaagccagagttcatgtccaagtctctggaagagctacagattggcacctatgccaatattgctatggttcgcactaccacccccgtctatgtggctctggggatttttgtacagcatcgagtctcagccctgccagtggtggatgagaaggggcgtgtggtggacatctactccaagtttgatgttatcaatctggcagcagaaaagacctacaacaacctagatgtatctgtgactaaagccttgcaacatcgatcacattactttgagggtgttctcaagtgctacctgcatgagactctggagaccatcatcaacaggctagtggaagcagaggttcaccgacttgtagtggtggatgaaaatgatgtggtcaagggaattgtatcactgtctgacatcctgcaggccttggtgctcacaggtggagagaagaagtcctgagctgggggaaggggtcatgcagcaccagggatagcccacaatgcacgtgatgcc

SEQ ID NO: 2731 - DNA, 233 bp, Homo Sapiens
  misc_feature (177)..(185): n is a, c, g, or t
ggtaatatctgtcccctcccatccttcaaaatatttcattttgtggggtatctctattttacttaaggccctagggtgctgattttggcttggtcattgttttatactgatccaactgcaacctttctcttacactttacaaagcattatccatatataaaatgttaattgaaaccnnnnnnnnnaagtttatatctgatgctgctacatcattataatgcttttcattaaag

SEQ ID NO: 2732 - DNA, 523 bp, Homo Sapiens
gaagtgcttcttccccagttgaataggagctggtgtttgtctaagcctctgcttatgcatgaggtataatgctttttatatgttatataatgctcttacgcgttagctatctgaatgatagatttaataaaatatacctcataatattatggggaaaggatgacgactgttatagagaggaacttgggagtatcacttctgtaatccttatctaacctgaatctgttagcaggaaactgaaaaggcctgtgtatgacaatgagataaacaattttaatctcttagcaatgtcaagtggaaaatctaactacctgccagtagtttaagaaatggctaagagattttgttgggcacaaataatcctgagacccagattgctgagccaagggtaggaaaattggttttgctatgtgttacagctgggaagtgagaaggtcactgtttgaccaactactaaaaaaaccttatggattaaacattcgccgtgtaggggacaaatattactctaaagcggacccgttgt

SEQ ID NO: 2733 - DNA, 230 bp, Homo Sapiens
attccctaagaagggaaaaagagagggaagaactacactaatgttagagataaggtatgttttggctcaaaatgtgtcatgaacctaaaggtaacttgatgggcagaaatgtctcagccatgtgaaccaagaagtgggaccaccagtgcaaggctgtgggtggcagcactagatacggtggtggcaggagtgtgacatgtagcactccatgggggacagatattactcct

SEQ ID NO: 2734 - DNA, 721 bp, Homo Sapiens
tacttgtttcattaacaattctttgcatgtggggagcccttgtatttaacctattaaataaacaaatcttaattatgactaccagcatttccccaatcttgtctctgctattataataccattttttaaataaaatgattatacagttaggatgccttcttccttgcagcaacacttattttgcaaatttgcagttgtatttaggctaccaccagcaactctcttggcaaacattgagcaactcctaccacaaaaattaatgagtagagagacaaggtctgcacacctactcattttgttcttccattatcaagttgtgggactctggggaagtgatccaggggacatctacagaaaccaaaaatggagttttgtaacactgtgagttgtttattcttgtaaataataggatcttcttgactggactggaagcttcaaggaagctgtgtcttctgtttttcgtgtgcatccttcgtggttctaaatatgatgctacatgaatataaggtgtttcctgtcgttgtgggctggtggagctgtgagggcttcagtgggataaactggaagaaggagcctgggttatgaagttcagcggatgcttcttgggttttatcttccttgacctccccggaccgtaaattcctccatgaaacactggcttctgaatcacaaagtttctctcctgcctccctggccgcctcttatcagctgcctttctttg

SEQ ID NO: 2735 - DNA, 611 bp, Homo Sapiens
tgagaagtgggatctcactatattgcccaggctggacctgaactccttgaaatcctctcacctcagactcctgagtagctggaactctacgggcaagccctgcaagaaaaggtggctgaagtggaaactcggctgcgggagcaactctcagacacagagaggaggctgaacgaggctcggagggagcatgccaaggccgtggtctccttacgccagattcagcgcagagccgcccaggaaaaggagcggagccaggaactcaggcgtctgcaggaggaggcccggaaggaggaggggcagcgactggcccggcgcatgcaggagctagagagggataagaacctcatgctggccaccttgcagcaggaaggtctcctctcccgttacaagcagcagcgactgttgacagttcttccttccctactggataagaagaaatctgtggtgtccagccccaggcctccagagtgttcagcatctgcacctgtagcagcagcagtgcccaccagggagtccataaaagggtccctctctgtcctgctcgatgacctgcaggacctgagtgaagccatttccaaagaggaagctgtttgtcaaggagacaaccttga

SEQ ID NO: 2736 - DNA, 173 bp, Homo Sapiens
tgatgattacaagcatgagccaccgtgcccggccagtaattttcaatagaaagaaattctaatacactaacaggaaaacctagagtgaatgaagtgtactacaataggactttacaactctgaaacaaaagagctattaatggacccatttctcccactctaatccctcctca

SEQ ID NO: 2737 - DNA, 1023 bp, Homo Sapiens
  misc_feature (829)..(924): n is a, c, g, or t
tttagagtaatattcgtccccacgctaaagaagctcacagcttaatgcaaatgagaagccaggtgaggacatcactactcctgctgtgcactgggaactagaaacacaaaacctgactctggagggaagctaaggaagcattctactcttgagttgacataagtgcatctgaagcttctgatctccgatgagaacaatgggggacaccaaacagaatataaaacccatgattgaatacatcaaattgctaacatggcagtaaacagacatgaggtgaagatggagaagaaggaaacccaggacgaaagtcagcctcgcgtttggaacccatttccctgcgtttcattgctgaattccagaagggactactgagatgcaaagaagcacagcagctttggcatcacatgcgtgggattagatggaaaacaagtggattgagggtctgccaatgaaagcgatccatactgaagtccactggctctggttgagacccagaagagtcatgcatcagaatagaggtggacaggaaataccctggcctttgtagggactgagcctgcagagacgacctcaattgcagcctgtacggaggacccctgaccatcccccagaagtagactcccatctcttctgcagcaagataacatgctactaggcctcaatgcattgttaaatattttttaaaaagtatctcacatttaacaaaaaaagatcagtcatatggcagcaaaatacaatgtagtatgaccaaaacatgaaagactgtgaaaatgaatttggaggtgacccaagcattgaattcaacaatccaggctgggtgcggtggctnnnnnnnnnnnnnnnnnnnnnnnnnnnnnnnnnnnnnnnnnnnnnnnnnnnnnnnnnnnnnnnnnnnnnnnnnnnnnnnnnnnnnnnnnnnnnnnnttgggctgggcacggtggctcggccactgggaggtttctaagggactaactcgcctcttcacttgctatagatgtactgaatttcgttctggagatcag

SEQ ID NO: 2738 - DNA, 362 bp, Homo Sapiens
  misc_feature (246)..(300): n is a, c, g, or t
gtaatgaatgcaagaaagccttcagcctttttattggagcctcaaacattgacatgagaaagacgccatagatgtatatggaatgttatttctttgtcaatgtaaccctttgagagtgccacctacgtagattgaatgtcatttattgagcatctgcaaaagttccaagtgtgtggcagctacagtgcatttttcactatacccaggtaccttgctaagattttttttgagacaggttgtcactgnnnnnnnnnnnnnnnnnnnnnnnnnnnnnnnnnnnnnnnnnnnnnnnnnnnnnnngggcttaagtgattctgttgccttggccttgcttgcatatggcaaggccttgccatatgcaa

SEQ ID NO: 2739 - DNA, 357 bp, Homo Sapiens
tgaattacacagtcagtcatcaattgccatagagaagttgaaaacaaattgagttgagcccggaaagaatgtcagtgaaatgggaaaaaacacttgctgggaactgcctgggggtgcagtgacctcccttgtaatagcccaggtcccaccaactcagcagcataccaagagagattgcagatagagctgggtggatggccagtcaccagagaaccaaatccttctcgcggcaggctgaacgctccctgtagttcatgaaaatattaagcactggtaatataaaatgtgttatgccttcttcttggaaaacagtaaaatcagttttttcgttctcctttaatggatgggggcagggag

SEQ ID NO: 2740 - DNA, 534 bp, Homo Sapiens
  misc_feature (160)..(203): n is a, c, g, or t
aggattacttgaggccaggagtttgagactagcccgggcaacagtgagaccttgtctctacaaaaaaataaagaattagtcgggaatggtggtgtgcacctatagtcctagctactcagaaggctgagggagggaggctcactggagctcaggaattcannnnnnnnnnnnnnnnnnnnnnnnnnnnnnnnnnnnnnnnnnnntgacagagcgagaccctgtttcagtaataaataaattaaaagtacagattctcgggtctactccagacctgctgaatcagaaaatacgcgggcaggcccagccgcctgtgccttcaccagctctcctggttaaggcctgagaaccctgctacggaaccccgagtacctttcagaacatgctgacctcattagcagggatcagaggccctttgtcatctggtctatggccagtgtccctccctcatctggtggacttggtactgatgccgaaccacctgagggttccaaacgtgccagtgtttctcccagccccgacatgttgtggggatcc

SEQ ID NO: 2741 - DNA, 614 bp, Homo Sapiens
  misc_feature (575)..(575): n is a, c, g, or t
acgaacacgtcgtggcttgtagggtaggggacgctacttctctcccatccagttcatttttaaataaaagtagtaaagttttaaagctgtatgagaaagagagaggcagggcagggccaggtggccgcactgcaagtctgaaatcttcatgggggtcagtagaaaccaagcgcgacccctcttccctcatggacaccgggctcccgtctcctgctgaattcaactcttctgatgctgagggacaggacagcaggcaggaggcggcgcctcgccctaaagggtgctcaggcgtgtatcagtagtaaggtggactatgcatccaagttctggtacaaaggtctccggaatgtgtctcagacaagccttcagagcctcagaatcaggaaaattagtaataggacctggttcttcctggggtaatcctgatttcaaaaaccatcagcccacgcctcagattttagctttggaaaatacggtgaccagaattgtacatggaaacagtcagcaaaagatgtggataacctaccaagcgtttcttactggttgtgatgtgaccaacacattacaccctttanacctctagcactgtgtctttgactaaaatgaccttttta

SEQ ID NO: 2742 - DNA, 809 bp, Homo Sapiens
ccaggagaaggaggagctgcgcgagctcaatgaccggctggcggtgtacatcgacgaggtgcgcagcctggagacggagaacagcgcgctgcagctgcaggtgacggagcgcgaggaggtgcgcggccgtgagctcaccggcctcaaggcgctctacgagaccgagctggccgacgcgcgacgcgcgctcgacgacacggcccgcgagcgcgccaagctgcagatcgagctgggcaagtgcaaggcggaacacgaccagctgctcctcaactatgctaagaaggaatctgatcttaatggcgcccagatcaagcttcgagaatatgaagcagcactgaattcgaaagatgcagctcttgctactgcacttggtgacaaaaaaagtttagagggagatttggaggatctgaaggatcagattgcccagttggaagcctccttagctgcagccaaaaaaacagttagcagatgaaactttacttaaagtagatttggagaatcgttgtcagagccttactgaggacttggagtttcgcaaaagcatgtatgaagaggtaactatatataattttgctttgtaaaggaatggaggggttctagaatgactttgtcatagctaaacatgtaattatattttatttatgatttctttgccacaaaaatatatcagataaagaaataataaggtttggggatggggagaaattttgcaggtagattattcaagctactgctgctaaaagaccgcatttgagaactcaagctgttaccgtaaacagatatgatttcacttcatcttacttattttt

SEQ ID NO: 2743 - DNA, 264 bp, Homo Sapiens
gtctgttcagtcttctgcactcatgggcgtaaactctcaaagagcaccactgggtcttagtccgtggcataaagactattctcaatgtagatattgtcttctgcttggacttccttttcaactgcattttgcaaagctttaatttgaaggctgctaaatgaaacattttggcaatgatgacacccaaaagagcaagaagcaccaagacagaaatacagactccagcatagattcctttagtggtattggccgtcagtagactat

SEQ ID NO: 2744 - DNA, 763 bp, Homo Sapiens
  misc_feature (550)..(567): n is a, c, g, or t
  misc_feature (569)..(583): n is a, c, g, or t
  misc_feature (587)..(603): n is a, c, g, or t
  misc_feature (605)..(613): n is a, c, g, or t
gataaaaaaatacttgactttgtaattctgtatattctatacaatttatagcagagccgttttaagacagccttgtcacatttttttgttaattgtgaaaattttattgagtgatgtttaagtatgcattgagtacatgaccaactagaattaaagtaagtgtaaacagtgaacatactgtatgctgtacaagatataatgtaacttgctgttttagcatctgtattttggttagaagatattattaaatgcagatgttaaggattggaaaagtctaattttatttttagaaataatggatataaatttgtttttgcttgattaaaatagcttattcctacattaagtctctttttaaatgttttcatgttatttcttttgtgcagctatttcatctgtgtgagtcacagctttgtttccacgtattattcagtttatttctgtttccttacttgtttacattccgtggtacctacttacatgcttaggagtcaaatggattatgacattaggaaaaaagcagaataaaagagattgaagtcttctgaannnnnnnnnnnnnnnnnnannnnnnnnnnnnnnncgcnnnnnnnnnnnnnnnnnannnnnnnnnaaaattgtgtggcccgctctcgcccttaaaaaaatttttcataaacattctcttttggcgcgcggcgcccaaaaaggaaaggaaacttgggcaataccgtgtttccaaaggaaacccgggccaaggactaggggcttggaatcccccccc

SEQ ID NO: 2745 - DNA, 687 bp, Homo Sapiens
  misc_feature (124)..(162): n is a, c, g, or t
ccttaaagaattcactggtcaaggacaccttcccccaaaaggaaagcaccaaaggaccctttttaaggggaatgtttccccccaaacatttgaaaagggttcaaactaaaacagcttaaggttnnnnnnnnnnnnnnnnnnnnnnnnnnnnnnnnnnnnnnnccctgaacccacccagccataaccaccttccttaatcgatcataggagtttcttttcattttataaaaagattaataaaaaatattgaaaaaattttctcatatttgtaaagataatagaattcataagtttcttagaaaacagaccagacactgccctccagtttccaccccgttgctgggaggatcagcaggactagaaagtttgggatactggagctgctggtggagaacggggaagtccagcccagaagaaatcaggaaatagggctcaggggcacgtgaggtgtggtaaggagcaaactccacgtgatacacggctgcgcagaaaaggggaacacaaggtggtcggaaaggccttaaactcctccttgacatacaaaaccggtttttacaaagatccaagcagtttggtcccaaactgaggtgaacacttcaaagtttattcacatgcttttgttttctctttcaagaatcaaagtttcccaaattaaatgtttctaatattactacatatgcctaaaaa

SEQ ID NO: 2746 - DNA, 794 bp, Homo Sapiens
  misc_feature (82)..(82): n is a, c, g, or t
gggaaccaaattggctctccaccaaatttatatttgttatctcccaacgagcccgcagtggcggggtttgaataagcggganaggagctggtactccccactaggtaatttattcataaactgtaaaaaaaccgtgtgaattttgacagtgcaattgacctagtccttgagaggttctccatagacatagtctgtcttgcaggattcatgagaattctttctgccccctttgtcccaaaagtggaatggaaaaatgctcaatatccacccatccttgctcccttcttttaagggttcaaatgcccatgagcaagccctggaaaccggagtcacagttactgggtgcactgtacactttgtagctgaagatgtggatgctggacagattattttgcaagaagctgttcccgtgaagaggggtgatactgtcgcaactctttctgaaagagtaaaattagcagaacataaaatatttcctgcagcccttcagctggtggccagtggaactgtacagcttggagaaaatggcaagatctgttgggttaaagaggaatgaagccttttaattcagaaatggggccagtttagaaagaattatttgctgtttgcatggtggttttttatcatggacttggcccaaaagaaaaactgctaaaagacaaaaaagacctcacccttacttcatctatttttttaataaatagagactcactaaaaacaagactagttagtgcagcatatctgagacatacagttttcttggtcttttttatgctctttttctaaccaagcaa

SEQ ID NO: 2747 - DNA, 964 bp, Homo Sapiens
  misc_feature (641)..(641): n is a, c, g, or t
  misc_feature (779)..(779): n is a, c, g, or t
  misc_feature (837)..(837): n is a, c, g, or t
  misc_feature (839)..(840): n is a, c, g, or t
acacttcggcagtatatgatctgactccgcagactctccgatttttctgcccaggcctttactgagctcaggactccagctaaatcaaaatactcatgctctcacccagagtgacaaaatcctgcagataggtttaagacctagtggatcagagcagtagctactgggaagttaaaaggaaggggcttagaaaatgaatgggaccaaaggcatcacttctgatggagatgaagccatcttgaaagtgagtggtgtcctttggaggcatggtggatgaaaggcgcaaaggaagcaagaggttaaagataatggcccattagatacaacagcaagcccaagattccgaagaagacagacaactccccctagtaccacctagacattactttttaaagacattttacattattgtccagcagaaaaaggctgtcttggacccatgaaaacagtaaactgtaactaaacacttcaacatgaatttgaaaataaataattgtggatataaaagaacaccagagatcagaaattcaaaaactcagaataaaaatgaaaaagctacaagcataccatcagaagagaactgactgaaattgggaaataatttgaacaaaaagataaatcttcacagatatgaatactanattatatcttaatgaaaatagatatggtcacaagtacattaaggcacgtagaaggtaggggtaagaaaagctaagagaagcaaaacaaaccaagcaatattaaagggagagccaaaaagacccagaaataaaatgacngataaagaagattgtcaaagaaaagatgatacaggtaagattggaaactcatgagacnannagatagacgggggcataaagttaatatttaaaattcaatattaaaactcaaataaacccccaaagaactttttggaaaacaaaagaaaacccttaaactttatcttgaaaggggtctatcttgt

SEQ ID NO: 2748 - DNA, 499 bp, Homo Sapiens
tcacgcatcgtgggtggaaacatgtccttgctctcgcagtggccctggcaggccagccttcagttccagggctaccacctgtgcgggggctctgtcatcacgcccctgtggatcatcactgctgcacactgtgtttatgacttgtacctccccaagtcatggaccatccaggtgggtctagtttccctgttggacaatccaggccccatcccacttggtggagaagattgtctaccacagcaagtacaagccaaagaggctgggcaatgacatcgcccttatgaagctggccgggccactcacgttcaatggtacatctgggtctctatgtggttctgcagctcttcctttgtttcaagaggatttgcaattgctcattgaagcattcttatgatggctgctttataatccttgtcagatattaataattccaactcctgattcatgttggtgttggcatcagttgattatcttttctcattaaaattgtgatgctcct

SEQ ID NO: 2749 - DNA, 1999 bp, Homo Sapiens
ggggtgttcgagtggacaaaatggcgaagatcgccaagactcacgaagatattgaagcacagattcgagaaattcaaggcaagaaggcagctcttgatcaagctcaaggagtgggcctcgattctacaggttattatgaccaggaaatttatggtggaagtgacagcagatttgatggatacgtgacatcaattgctgcaaatgaacttaaagatgatgacaatgactattcatcatcaacgagtttgcttggtcagaagaagccaggatatcatgcccctgtggcattgcttaataatataccacagtcaacaaaacagtatgatccatttgctgagcacagacctccaaagattgcagaccgggaagatgaatacaaaaagcataggcggaccatgataatttccccagagcgtcttgatccttttgcagatggagggaaaacccctgatcctaaaatgaatgctaggacttacatggatgtaatgcgagaacaacacttgactaaagaagaacgagaaattaggcaacagctagcagaaaaagctaaagctggagaactaaaagtcgtcaatggagcagcagcgtcccagcctccatcaaaacgaaaacggcgttgggatcaaacagctgatcagactcctggtgccactcccaaaaaactatcaagttgggatcaggcagagacccctgggcatactccttccttaagatgggatgagacaccaggtcgtgcaaagggaagcgagactcctggagcaaccccaggctcaaaaatatgggatcctacacctagccacacaccagcgggagctgctactcctggacgaggtgatacaccaggccatgcgacaccaggccatggaggcgcaacttccagtgctcgtaaaaacagatgggatgaaacccccaaaacagagagagatactcctgggcatggaagtggatgggctgagactcctcgaacagatcgaggtggagattctattggtgaaacaccgactcctggagccagtaaaagaaaatcacggtgggatgaaacaccagctagtcagatgggtggaagcactccagttctgacccctggaaagacaccaattggcacaccagccatgaacatggctacccctactccaggtcacataatgagtatgactcctgaacagcttcaggcttggcggtgggaaagagaaattgatgagagaaatcgcccactttctgatgaggaattagatgctatgttcccagaaggatataaggtacttcctcctccagctggttatgttcctattcgaactccagctcgaaagctgacagctactccaacacctttgggtggtatgactggtttccacatgcaaactgaagatcgaactatgaaaagtgttaatgaccagccatctggaaatcttccatttttaaaacctgatgatattcaatactttgataaactattggttgatgttgatgaatcaacacttagtccagagaaatcgcccacattctgatgagcaagtaaaagaaaagttcacagaaggataaaacacaaggctatcagatgggtggaagcactccaagttctgacccctggaaagacaccaattggcacaccagccatgaacatggctacccctactccaggtcacataatgagtatgactcctgaacagcttcaggcttggcggtgggaaagagaaattgatgagagaaatcgcccactttctgatgaggaattagatgctatgttcccagaaggatataaggtacttcctcctccagctggttatgttcctattcgaactccagctcgaaagctgacagctactccaacacctttgggtggtatgactggtttccacatgcaaactgaagatcgaactatgaaaagtgttaatgaccagccatctggaaatcttccatttttaaaacctgatgatattcaatactttgataaactattggttgatgttgatgaatcaacacttagtccagaggagca

SEQ ID NO: 2750 - DNA, 868 bp, Homo Sapiens
aaaaaagggacccaacccaaaagccaaccaaaaagccctaggtgggccatggttgagcaggagtccccctgaggagggaaatgatccacttctgggaaagcttttcctgaaggccaagggatgaaaccagctattatccacatttcctttttcttacaactggaaccatgaaatggctttaaaacaattgtaagaaagaaaaaacaaaacgcaaaaggtagaatctgtggaatgttaacaatcacaacagaacatttaccagagttacagtgttttgttacaataatactttgcaggaatgttcacgttttctgccataggactggagcaaagggtctcaaaagaaaacatttttttaaaaaagttttgttcatcaggtacatttcaagtcaaagttaagcaggtctgctacataatgttcagcaagaagatgtgttcaaaggcaaacactgatcaccttcttgttcagaaagctcaatcttaaaggagtcctatgtaagaaaaccacttgtaaaatatatccttgtatacggacttcaaaaactgatcatacaaaaaatttttgaaaaataaattagataattaaaaacgtcttttccagcaaagctggacattaggctgtcctcactgagccattattattgctgcttttactgtaacttggatcatttttttccagccacatctcagccagccgctgtgtggacccataggtcgatgctttggaccccaagcacattttgtactgtttggggtcaagattgggatcacaaaagacaggatggtggacgtggactactcctacttcctggctcctaaacgtcttcaaacctgcctggacaaccttgttgaaatggtcgccaatccg

SEQ ID NO: 2751 - DNA, 953 bp, Homo Sapiens
  misc_feature (325)..(325): n is a, c, g, or t
  misc_feature (394)..(394): n is a, c, g, or t
  misc_feature (750)..(750): n is a, c, g, or t
  misc_feature (765)..(765): n is a, c, g, or t
  misc_feature (779)..(779): n is a, c, g, or t
  misc_feature (784)..(784): n is a, c, g, or t
  misc_feature (795)..(796): n is a, c, g, or t
  misc_feature (800)..(800): n is a, c, g, or t
  misc_feature (817)..(817): n is a, c, g, or t
  misc_feature (828)..(828): n is a, c, g, or t
  misc_feature (863)..(863): n is a, c, g, or t
  misc_feature (874)..(874): n is a, c, g, or t
cccctttccccggaagggggggaaatccccccttaaaaggccttttttacaataaaaaccccatttccgcctgaaacccggggggacttttcccaataaaccccagggattgccggcaaacttttccagggggggagggcttaatggaatcccccctggggaggtgaatggttccaaacctgaaggtaaagggttatttcgcataccgggtaccatagttttttggtactagcccacccataccatggatcttcctgcattttcaccactttgggtcattttcaggtttttcaatacatcccattacatctcctttctcgaaatnaagttcttcatcattagatgagctgaatgggtaaagagcctgtaccacatgcaacacttgcccagtatntaggttattgacgactgctgctaatttctctgacagagaacccacagtggtcacccaaaggactgtcaccttcttcagttacatagttggaagggaaccatccaacttgtccattgtagctaccacgccaccacccatcactgcatttctccatgacgatcacctttgtcccctttatcaatgataattcatcctctctctcagccatgtagttaaatttcacataagcgggcatgttgaggtcatagagacgtccccctgggtcaacaaaactatcatcagcaggagatgcagaatctggcacactaggttttcttttcacttttccaatgactaaagtatcccttaagtttttncacaagaaagtcttnccaaccagtttttnccttnccacagatgannaaancacaaatcctttgttantcaaataatgncgatcgcaccagcattacaaataatcagccagaanccataatctcnctttcttctgaagtaccaatcttgttcttgttgggccacataaacaaattggctactaccaccactcttctgcctcttt

SEQ ID NO: 2752 - DNA, 806 bp, Homo Sapiens
  misc_feature (493)..(493): n is a, c, g, or t
  misc_feature (702)..(702): n is a, c, g, or t
  misc_feature (718)..(718): n is a, c, g, or t
  misc_feature (755)..(755): n is a, c, g, or t
cagcaacagagagcaggacgtgagacttctacctgctcactcagaatcatttctgcaccaaccatggccacgtttgtggagctcagtaccaaagccaagatgcccattgtgggcctgggcacttggaagtctcctcttggcaaagtgaaagaagcagtgaaggtggccattgatgcaggatatcggcacattgactgtgcctatgtctatcagaatgaacatgaagtgggggaagccatccaagagaagatccaagagaaggctgtgaagcgggaggacctgttcatcgtcagcaagttgtggcccactttctttgagagaccccttgtgaggaaagcctttgagaagaccctcaaggacctgaagctgagctatctggacgtctatcttattcactggccacaggggattcaagtctggggatgacctttttccccaaagaatgataaaggtaatgccatcggtgggaaaagcaacgttcttggatgcctgngaggccatggaggagctggtggatgaggggctggtgaaagcccttggggtctccaatttcagccacttccagatcgagaagctcttgaacaaacctggactgaaatataaccagtgactaaccaggttgagtgtcacccatacctcacacagggagaaactgatccagtactgccactccaagggcatcacccgttacggccctacagnccccctggggctctcncggatagacctttggggccaagcccagaagacccttncccctgcctggaggatccccaagaattaagggagaattgctgcaaagccac

SEQ ID NO: 2753 - DNA, 617 bp, Homo Sapiens
  misc_feature (568)..(576): n is a, c, g, or t
cttccgcaaactcagctctaccgagtctctgaccagtggtgcatcacggcttaatctcaacaagatgctccaatgataatgggcaggaaggacctctagaaggcaaaatttagcctgctgacaatttcccacaccgtgtaaaccaaagccctaaaattccactgcgttgtccacaagacagaagctgaagtgcatccaaaggtgctcagagagccggcccgcctgaatcattctcgatttaactcgagaccttttcaacttggcttcctttcttggttcataaatgaattttagtttggttcacttacagatagtatctagcaatcacaacactggctgagcggatgcatctggggatgaggttgcttactaagctttgccagctgctgctggatcacagctgctttctgttgtcattgctgttgtccctctgctacgttcctattgtcattaaaggtatcacggtcgccacctggcattccttctgaccacagcatcattttgcattcaaattaagggttaagaaaagagatattttaaaatgagagtcacttgatgtgccattttnnnnnnnnnggcatattgctttttctaatgtggttatttctctgatttgc

SEQ ID NO: 2754 - DNA, 1034 bp, Homo Sapiens
ggtgttcaggcttgtcctcagctgagaggacacaggctagagggactgtgcagaaccaggctgggagaagggctgggaaaactgggagtagggtggatcctcatggagcaggagagtagctcatggctccaggagcctgaggccatgcagttgatggtgagctgacatcaattctaagactcatcctaattgaggggtgttaaaaagtgtgctgcttagaatgaccaaatatagttattgtaaaaaatgatatttatgaactttttattttagaaaacatgaattttattgctccctgtattatttgtttgatactaggattcatgctaaactttttaagaatgtattggatatcaagaagcattccttacattagtagcaataaatattagaataaatatgaaattgaactattttcagaaaaagggcagtatattaagagcagggactgttctctagttatcgaggaaaactggactttgtttgtgtttttggtggaggaagaagtttaagatactttagtcttaaattgaggtttgccaaatgagaagttcaaaaacttgggctttctaatcagaatttccaggaggaggaaagtgtgtgctgaatattttaaacatttcccactgatcatacaaagtcctgatttttaaatttacacttataatgccctttgtatttaaaataatttttaacatgttgctttttccaaattaaaaatgaagtagagtataccaaatgcataaactttcattagctaaggaactcatgtctgaattttgttgtagttttgaatgttgtgctctttcatacagaacgggaaacataatcctcaggtatcccagcatctcttgttgaattgaagattattcattgctttggcctcacaaagttttgatttcaactatcataagtgaaaatatcttcctttaatgttctaagtagtgataatattactagaatgaaagaataaaaagaaattgttcttttaaaatatgtgtaacttctaaaaataaaacttaaaatttatacga

SEQ ID NO: 2755 - DNA, 982 bp, Homo Sapiens
ggtgggaaaagctacagaaagatgacacagatccggggcaactgaaaggcctctcagcgcatactcatgtggaacttccatattactctaagttcattctaattgctgcataccttgcttcatacaatccagcaagaactgacaagaggttttttcttaagcatcatggaaaaatcaagaaaaccaactttctaaaaaaacacgaaaagacaagcaatcatctccttgggccaaaaccatttccactagacagattattagcaatattatatagtatcgtggacagcagagttgctccaacagcaaatattttttcccagattacctctctagtgacccttcagctgttaaccccggttggccatgacgatcagcttgatggaccaaaatacaaatgcacagtgtctctagacttcatcagagctatgcaaggacggtgaactttgacataataaaatacttgtatgatttcttgtgaaaacaagcttcaaagccatatggacactgtgacaatgactaagccaagctgtgttcatccagctacttagctggccaaggagaggagttctctggctctatgcgatttgtccaaacaggtgctggcccagcatggaatctgatgaaaatattctgattggtctgggtggatgtgagcagaagactatttaccagggaccctggagtatttggaagcaacgtgttaattataaacagcagggtttgagcacaatctgttctactcttaatgatgttatcttaacactgaaattgcctgaaacccatttacttaggactacattttgctctgtgaactatcccctgcgctttgaacgtgccagcagcccttgtttatatgcccattcttttcacttcctctccacaggagcctctgcagtcgcttgccaaagcagattttcctaaggccactgttttaaaagatcatagttgcaaaatataataaatacaagttctttttaaaatc

SEQ ID NO: 2756 - DNA, 1670 bp, Homo Sapiens
  misc_feature (1372)..(1397): n is a, c, g, or t
aactgctggtccggtccggaatttccgggatatgggagccgcgcgctctctcccggcgcccacacctgtctgagcggcgcagcgagccgcggcccgggcgggctgctcggcgcggaacagtgctcggcatggcagggattccagggctcctcttccttctcttctttctgctctgtgctgttgggcaagtgagcccttacagtgccccctggaaacccacttggcctgcataccgcctccctgtcgtcttgccccagtctaccctcaatttagccaagccagactttggagccgaagccaaattagaagtatcttcttcatgtggaccccagtgtcataagggaactccactgcccacttacgaagaggccaagcaatatctgtcttatgaaacgctctatgccaatggcagccgcacagagacgcaggtgggcatctacatcctcagcagtagtggagatggggcccaacaccgagactcagggtcttcaggaaagtctcgaaggaagcggcagatttatggctatgacagcaggttcagcatttttgggaaggacttcctgctcaactaccctttctcaacatcagtgaagttatccacgggctgcaccggcaaccctggtggcagagaagcatgtcctcacagctgcccactgcatacacgatggcaaaaacctatgtgaaaggaacccagaagcttcgagtgggcttcctaaagcccaagtttaaagatggtggtcgaggggccaacgactccacttcagccatgcccgagcagatgaaatttcagtggatccgggtgaaacgcacccatgtgcccaagggttggatcaagggcaatgccaatgacatcggcatggattatgattatgccctcctggaactcaaaaagccccacaagagaaaatttatgaagattgggggtgagccctcctgctaagcagctgccagggggcagaattcacttctctggttatgacaatgaccgaccaggcaatttggtgtatcgcttctgtgacgtcaaagacgagacctatgacttgctctaccagcaatgcgatgcccagccaggggccagcgggtctggggtctatgtgaggatgtggaagagacagcagcagaagtgggagcgaaaaattattggcattttttcagggcaccagtgggtggacatgaatggttccccacaggatttcaacgtggctgtcagaatcactcctctcaaatatgcccagatttgctattggattaaaggaaactacctggattgtagggaggggtgacacagtgttccctcctggcagcaattaagggtcttcatgttcttattttaggagaggccaaattgttttttgtcattggcgtgcacacnnnnnnnnnnnnnnnnnnnnnnnnnnaaggtgtcttataatcttttacctatttcttacaattgcaagatgactggctttactatttgaaaactggtttgtgtatcatatcatatatcatttaagcagtttgaaggcatacttttgcatagaaataaaaaaaatactgatttggggcaatgaggaatatttgacaattaagttaatcttcacgtttttgcaaactttgatttttatttcatctgaacttgtttcaaagatttatattaaatatttggcatacaagagatatgaaaaaaa

SEQ ID NO: 2757 - DNA, 752 bp, Homo Sapiens
  misc_feature (323)..(323): n is a, c, g, or t
cagccggtgcgccgaaaacgcaggagagctcgcgcggcttctcgcgaatgagcgccgcaaacggcatggcgatagcgtcggccagtgaggagactcagaagtatctgtgtacttgggccatagccagggcgccccccatggcctggcaccagcacatgggcaggcccccatgtgggggccaacccctaggatttgtcctcaggggctccagggagtgggtttttgggcaggaaaaattcggggaattccgaagttatcccctttgaaaagggataacccgttagctctgggggtgccccctcgcaaactgtttacagggcaancacaaacattgtggatggggccggataatgttcgccctgctgaaactaggatacctacttcgttattcgacaattacgttaaattccattatgcatatgaaacacacgattatatccacataccacttatacatatataagtcttttgaacttcagggataattcgcagatgtgcttaatgctattgccctgattattcaatttatctgtgctttacaaaaaacttcatagtcaagtggatgcaagggatagggttgcagaaagcgtgtggttattaatacaaaaagggaactacttgaggctaaatcctttgtaatcctgatacagtacagatctcagattccttttcagttctgtaaactaatcgtgttgatggttactcaaatgtaaaagtaccagtttgttataaccacacacacacatacacgt

SEQ ID NO: 2758 - DNA, 457 bp, Homo Sapiens
  misc_feature (233)..(343): n is a, c, g, or t
cccaaaaaaagtgtaaatccagcataaagatataacaattataaacatatatgcaccctacaaaagaatcccaaaatacataaatcaaaaaagtttcaaatggatcgaacctacaaatgttgagaagccgaataataatttattagaataaatgtaagagaatatttttataatcttttgaggccttaagcaacaaagaaaaaaacatctgggtacagtggcacatgaccatnnnnnnnnnnnnnnnnnnnnnnnnnnnnnnnnnnnnnnnnnnnnnnnnnnnnnnnnnnnnnnnnnnnnnnnnnnnnnnnnnnnnnnnnnnnnnnnnnnnnnnnnnnnnnnngatagatgaatttagtgataaaaaacttaagaatttttctatacgtggcaaaagcatgataaatgaagtaaaccgataaacaactaggagaaatatttataataaacatgaaaa

SEQ ID NO: 2759 - DNA, 390 bp, Homo Sapiens
gaagaacaaagacataaacagcagcataatagaaatcaagggagctcgtgtctctaaaggtggagaaagacattaaagaagacagtattagccaatggtatgaaacacttgttgcaaacatgctcattggatttggctagtgacaagtcagtgattaccttgagaagaacagttgtattctttattgttatttacatacatatctgtcttccctaacctaatggtaaacttcttttgcagtcaatgagtaaacattctgaggggtgggaagggagttctgaaatatgtaatttctgactcaaagagctcacaatttaatggaaagacaagtaaaaagatgacaggagaaagtgagagttgctgatggaagtctaaacaatattaagggga

SEQ ID NO: 2760 - DNA, 834 bp, Homo Sapiens
  misc_feature (613)..(663): n is a, c, g, or t
gggggggcgtctttggggcttctggcagatggcgggttcctccgcgagagccgagaaccgcctactccaggaggaaagcccgagggttgtgggtcctgctatagccagggccaagctccaggaaatcgtggccattcaggggtagtttgcagcctcatttgtaacattattgtgttgtcctgtgcatttccaatgcattacataaagacatggtcgcttttaggagaaatgtctgaaaaactaagaagatgcagaaaggaactgactgcagccattgaccgggcctttgaaggagttagttattcccaggagtgcacaggccagcagaggctggaactgagcgccgcgccgctctccttctcgctgcccgtgcacaggctcctctgcagaagacatcctctgcaagcctgctcttctgctgctccttttgctgctgtcccatgtgctcctgagaatgagaaccctgcctttgcaacaaaccatgccccggtaaatgcaaaaccacatgctctgtgccccgagagaaaacctctaaccagcaagggaaaatgtattggatgcattccctcaatttttggcacccctgaaagaagagtccttgggagaactggcnnnnnnnnnnnnnnnnnnnnnnnnnnnnnnnnnnnnnnnnnnnnnnnnnnnttatgggagagaagattttggaggggctggacttccaaacattgccacctccaacaaaattcctagccccaaggagggtcaccaaaaggaatcctggccttggaataatgaatttggacccattaaccaaggccatccccgaaaacttaattggaaaaagaaatggggcct

SEQ ID NO: 2761 - DNA, 243 bp, Homo Sapiens
cgggaccgcttagagtaatatctgtccccattctgtgcaatggcagttcactatactaatctggatccttagtgctttctgagccaccaaagacccgcatgtatgggacttccaaattcattttcgagatatcctatatgtgttggtaccatgtggccagccccaggagctgagttcagcaaaaccactttggtaggttgagccagaatttggactggaattgagcagaggtttataccagag

SEQ ID NO: 2762 - DNA, 552 bp, Homo Sapiens
  misc_feature (78)..(78): n is a, c, g, or t
acatgctaagataataattggtcttagaaagactttacagcaagtatttaatgaaagccactacacttccagctctanaaagagccagacacaatccctgcttccagagttcaccattcagaatacaggaggtcaagcactgattctgaatcattaatgggctttgatttcgtctttcaagatttgcatagatactgatttcttccggaagggcaaataaaatcttcccttacacacatcattctttggattctcataaggggtattttgaagtctgtatgtagacaaggccagtagatactttgttttctctaactgccttcttctacttaagactatgtcaagtattttgttttccctttcagttctccccaacatacaccttctgcagttttgtctatccagtccgcttttctgtaacactttgctacccccttctgttccccttcactgtttcctctgttgctttcctccttaatagaagcctggtgatctgggcttccccatctttcctttcctggcttcttattcacatgacggtgcgttgcccaa

SEQ ID NO: 2763 - DNA, 430 bp, Homo Sapiens
ctactgtgaagcttgggaaaagggagattaaaaacagaacaagtgaaaatggcacaaagcccactgcatctatcaaaatacatccagttttcttaaataaacacttctaggattgttgcaagcctttaattaatttccagagctgtggaaaagtagatattgaccagtttttccagtgttcgtatcgctgctatgaaacaacaggtttttggaggccctcactccaccatttcagaattgcttctctccaaccccctatcttactggtaaagaaactgagtgacatgacttgtataagtttatgaagttagcagaaaaatatgaaacaaagcccagcccagcaaatgatctttctgcatactgtccagcctctggcatttctatcctcatttcctgaagctgcaaagaattctgtgtcagagtcactccg

SEQ ID NO: 2764 - DNA, 452 bp, Homo Sapiens
taaaagacgaatagaaatataggtcaaactaggggaatacaagcccaaatgtctctctaaataaacttttctttgacttctctgagaaaagttgatttggagggatattctcctctttgacactgttttctccaacactctaattaagtaaggtcaaaaactgtctcttattggtcccttaattccaagttcccagtacagtggtttgtacagtgagtacagaatcttttaagtagtgcacatgtaagatgtgatgtggattaaaactctgatgctctaccacatgattcttaaaacccaaaagttctcaacttagcagaaagccagatataggacaatataatattttctaagctttttagtgtttaaagtatttacaactcatttacctcaaattacattcagtggagattccccagaccaaattttagagggtcagggtcagatgggaa

SEQ ID NO: 2765 - DNA, 546 bp, Homo Sapiens
  misc_feature (500)..(500): n is a, c, g, or t
tgtcgcggcttaattgtgaaacacgcataaccctctgcaccacagcggcttgagggttacccctgagacttgaaaaactggagcaacaatgggtctgtgttgagcttctgtgcaactgtctttgcaatggaggcacaccccactgagtctgggaatgacgcgcatggatcccagctgggtgatttccaccaacgcaactgcagaggtcagcgttaactgccacccctaactgaacgtccacaattgggctcaagaaatacttgcctaagtttccctgatgctttctccccaagctccacggcctttttacattcttctaacaggtcccggacacacccatgcttgtctggatatagtgttatttcctaagtaatgaaaagataaaataagtgctttcaagaaagcataaaaggtctgctaccacaaaggaagagaggagaaagttgcatcattgttctcaactgtccccagctggcccccatgttcttgctctcattccncaccccaactccctcatctgtgaattcactcacagtgaggacactg

SEQ ID NO: 2766 - DNA, 417 bp, Homo Sapiens
ggtaatatctgtccccatagtttgtatcaccacttctggagctatctttggatggggacgcaacaagtttggtcagctacgtcttaatgatgaaaatggtaggctctcattatgtatagtttaagtgtactttttgaaagagatggtcttttgagttagatcagtgattcttagtgtaagagagaaatgtatcttccctggtatagaggtggggatgagatgttatttaaaaattccatttggggaatgcagtgggaagatacaaaatatcctttattcattaaagaactataaaaagtatatctggacaaaatgtttagtattggatgtttattaaaagacaattgaaaaacattacttcaaattgttaatccattattggccactgttagtggaaaaaagctgtaaaattattct

SEQ ID NO: 2767 - DNA, 789 bp, Homo Sapiens
gcccagaggtgcccagccacaccttccttcggcccaaaaggactttcctggccgcgccgaaccgacccttcattcatgctgcagtgctgcaacgtttccgccaccaagggggaaaagcggccgcgatctcaaaccaaacacaagaattggcgtgtgactcatctgcttggatacctccagtccccaaactgtgttccaggagttttcgtggccgaagctgcccgatgtttgagcctcttcttcccagagaagaagatggactgaaagctgccagttggggactttttgtgatcacggcgttgcagcgttttaaaggaggtgatggggcttgcgctggcttgtcttcccacccaagtgaagagttgatgttcactggttatgcttagacaatgtgcagtttgtgttaatttaaaattttgggtgggataggggcataggcttgtgaagggcagtccggatccggaggaactcgtctttgtccctggtaggagagacacccccagtctatcctcgatgccgtcagccttggccatcttcacttgccgcccgaactcgcacccgtttcaggagcgtcatgtctacctggacgagcccatcaaaatcggccgctcagtggcccgctgtcgaccagcgcagaataatgccacttttgattgcaaagtgctatcaaggaaccacgctctcgtctggtttgatcacaagacgggcaagttttatcttcaagacactaaaagtagtaatggtacttttataaatagccagagattgagtcgaggctctgaagaaagt

SEQ ID NO: 2768 - DNA, 508 bp, Homo Sapiens
cccatgttggcaaggctatggagtaaagggaacgcttaggaacgcttatgcgctgttggtgggaatgtaaacgagttcacccactgtggggcacactttgtagatttctcaaagaactgagaaagcaactagcatttgacccagcaatcccactgctgggtgtatacccaaaggaaaataaatcgttctacggcactgcgcccgtatgttcattaccgcactatctgcaatagcaaagacacagaatcaacccaagtgctcatcaatggtgacttggataaagaaatgtggtgtatatatactacggaatactacgcagccgtgaaaaggagggaaatcatgtcctttgcagccacatgagtgcagctggaaaccattatcctaagggaactagtgcaaaaacagaaaaccaaataccacatgttctcacttaaaagtgggagctaaacattgggtacacatggtcataaaaatgtgtacaagagacactggggacagaatattactt

SEQ ID NO: 2769 - DNA, 774 bp, Homo Sapiens
tcagagcaagcctacacctgtgaagccaaactatgctctaaagttcacccttgctggccacaccaaagcagtgtcctccgtgaaattcagcccgaatggagagtggctggcaagttcatctgctgataaacttattaaaatttggggcgcgtatgatgggaaatttgagaaaaccatatctggtcacaagctgggaatatccgatgtagcctggtcgtcagattctaaccttctggtttctgcctcagatgacaaaaccttgaagatatgggacgtgagctcgggcaagtgtctgaaaaccctgaagggacacagtaattatgtcttttgctgcaacttcaatccccagtccaaccttatttgtctcaggatccttttgacgaaagcgtgaggatatgggatgtgaaaacagggaagtgcctcaagactttgccagctcactcggatccagtctcggccgttcattttaatcgtgatggatccttgatagtttcaagtagctatgatggtctctgtcgcatctgggacaccgcctcaggccagtgcctgaagacgctcatcgatgacgacaacccccccgtgtcttttgtgaagttctccccgaacggcaaatacatcctggccgccacgctggacaacactctgaagctctgggactacagcaaggggaagtgcctgaagacgtacactggccacaagaatgagaaatactgcatatttgccaatttctctgttactggtgggaagtggattgtgtctgcctcagaggataat

SEQ ID NO: 2770 - DNA, 225 bp, Homo Sapiens
aaataaaaagttggaaggaaattaatattaataatgaaaaagacactcagtgagtttcctagatggtctaccttgaggttgaaatagtcagcaaaagtaacacaatctgttccacaggtgtctaattcacacaaacatgaccatactgaaggtcttgtgttttatagcatccagagaagacgttcctgtcagtaggggacgaatattactctaaagcggaccacg

SEQ ID NO: 2771 - DNA, 694 bp, Homo Sapiens
acacgttacagagagatgggctcgctgctcttgctttaccatgctggcctcagtgattctgccagagatgaagtgcagcagaagtggattaatcaggatggctgtcaggttatctgtgctacaattgcatttggaatggggattgacaaaccggacgtgcgatttgtgattcatgcatctctccctaaatctgtggagggttactaccaagaatctggcagagctggaagagatggggaaatatctcactgcctgcttttctatacctatcatgatgtgaccagactgaaaagacttataatgatggaaaaagatggaaaccatcatacaagagaaactcacttcaataatttgtatagcatggtacattactgtgaaaatataacggaatgcaggagaatacagcttttggcctactttggtgaaaatggatttaatcctgatttttgtaagaaacacccagatgtttcttgtgataattgctgtaaaacaaaggattataaaacaagagatgtgactgacgatgtgaaaagtattgtaagatttgttcaagaacatagttcatcacaaggaatgagaaacataaaacatgtaggtccttctggaagatttactatgaatatgctggtcgacattttcttggggagtaagagtgcaaaaatccagtcaggtatatttggaaaaggatctgctt

SEQ ID NO: 2772 - DNA, 353 bp, Homo Sapiens
aatcaaggtaatgctgaagttctaatctgtggtacttcagaatgggatgttggcaaatagggcatttgcagttcagatggggtcatactggagtaggttaggtccttaatgcaacatgactgatgtccttataagaacagaagtgacaaagacacacagagggaagacagccatggtacagtggaggaagggacaggagtgacacagccagaggccaaggtatgcctggggcccctggaacctggggaggtcaggaaggaccctcctgtagaactttcagggtgagtaacgaccctgctgacactttgatttcagacatctggctttcagaatggggacagatattactctta

SEQ ID NO: 2773 - DNA, 892 bp, Homo Sapiens
accgtcttatgagatgaggccagcttccatcagaagggccaggtcctacaggctgtagaacttgaggcttctgtccatgcctgttgaagcgatgaacttggcgtgatgcccgaaggccacccctgtggtcaggccgctatgctctgtaaagtgaagaatctccgtccattgtttgcagatgtagatctggacatccgtgcccccaagagccaggtaggtaccactctggtcaaagatcagtgactttacctcaaagttgttatccagctgcaaagtcttaaagttcttaagcttgcgcagatcccagagcttgacagaggagtcatcagccgctgtagccaggtagtaaccattctcagagaaggcgatgctagtgatggggcccgagtggccagggaagttggccacattagtacgttccttcaagtcccagatcttgatctgagagtccatggttcctgttccaaagatgagtccgtcagggtggaactgtgcacaggtgagagagcagccggaggtctcatctgtcaccttggtgagcacacgccctgtctggatgtcagagaaagcccagtactgatcatcggaggagctcaggagatagtcgccagtggcatgaaggctgaggcctgtcacagcactctcatgggcccgaaccacctgtacacaagaggcattggggaccgaccaaatcctgatagtggcatcgggggaagcagaaaacaccaggtcctgggaagggtgaaacaccacgctggtgaccttcttggtatggcctttgagggtagccaggatttgttcagaacttttgtcaaacacaacgacatttttatccgccccaccagtgaggatcttgtaggtgtcggacggtcgggggtccaggacggtcggg

SEQ ID NO: 2774 - DNA, 715 bp, Homo Sapiens
tgtcctgctcatgccttccttggggatggccgtccaaccctccccacctggacatccatttttgttgatgaagatgacacctgctgggattacaggcgtgagccactgtgccttgccacctattctgttttgaacttcattttcctaacaacatcctgaattactgagcttttgtatcacttcatgttaaagttttcattcttatgtaccaaagtactaatttgaatttgtaatgagtctgatggtatatttcaattttttgctttgaggactggctgctacattgcagaatatcttatatccctgactgctttccaccaaatgtcagtggtgaccccaatccaattattatgacaactgaacatgcttatgcatccctcatgcctttattttttattttgggaaatctttcagcttcagtttttgctgatatttatgtgattctttgttctgcaattcaaatttctgggagccaaacagtctccttggatcaaattactgatttttgactagagcttctcacttcagattctgtcataagattatggcttaacctatggttgtcctttgatttggtgccatatgaaataaaacattattttctatggctatgtattaagaattttgtgcaattctgtttttcttagaaggctgagggtgtgttgtcagacaccatgactgatgtgacaggtgtattttattatgcggccgccag

SEQ ID NO: 2775 - DNA, 1262 bp, Homo Sapiens
  misc_feature (924)..(924): n is a, c, g, or t
  misc_feature (1021)..(1021): n is a, c, g, or t
  misc_feature (1234)..(1234): n is a, c, g, or t
  misc_feature (1240)..(1240): n is a, c, g, or t
tgagccaccatgcccggctggccctgtaatttcttaaagggatcagaagccctgatctgaagttaggcagtcacctctgtgacctcaacaacatctctacattttgctttcttcatctgtaaacctaggtttatcagatcttcttcctggcgacgctgtgacaattaaatgaactgctgctcatgggaatggctgggtgacttcggtagctggcatgctgtcagtactcactagcaccctgtcctttccccaaaaagaaagaagcagaaagctgtatttgttcccatttatgggactaagagatcaggaacaataaggatgtgttttgcgcacttttacactcattagaggatgaccatatatcccaaggaagatgaagccagtaactgtaagacacaattacaagtttgacttttctccctctatgatatgctctgttccatgagggcaatggaggcaccagagaaggcaagaggaaacatcattagtccgtccttcagcatcaggtggtcccactgctcctgaggcaccctcagttttcagggtcactggtttcctccctcctggcaaactctagccacaagcgctcagactcgaaggtgttgaactctcttttcttccttacaagggtgccagaattcttaacggcatttgtttatcccagtaaaagtgagtccttcacaatgagaagagctaacatttattcaatcaacaaatgctgagtgtccgccatggccagatactctttgacagtcgtcacagcacacagaacatgtgattagtaaacataatggtgcaggacatcagcctgctaatgttattcccaggtgtcatcaaatgagtgacaatttgtacaatgtttcattaaatgcctatttagaggataaccatagttgatgacacagagaaaaagccaaacccagnaatgcaagaatccgtagccagcagagcaccgtggaaaacaacgtccaagttgcaggtagcagcttgcaggataaccacagttggccgacgctttcanggcagctggggagaattctcagttggtccattttatgggttaaaatgggttttactaaggtctaaaaaattcattttctaaactcctagacttatggtttccattactatatgaagaatgagccaacaaataaataacaaaatattcactatggaccccaaatttccaggcatgaagagagccccaattctctgtgaactgcaagagaaaccnttagtncggatagatgaggaattggttt

SEQ ID NO: 2776 - DNA, 1124 bp, Homo Sapiens
tttaagttcaaaagtacatttatttaaaatgtgggcaagatatcaatataaaagaaaacagagtataagaaataaaaataatcaaagtacaaaacatttcaaatctttaacatccataatttagagatagcaaggtctttatttacaccattttatttctagttgaagtcccgtaacagttttgtgaaaacatttaaaaacctggcaaatgaatcataaaacctaatgtgggctcttaaagtcatataatacaaaacataatttatgtttcctcagaataaaattgcacatcttaaaaagatgcagtatatttattatatctgtcttcctgcttcacagtctgatcccccaggaaagcagctggaaaacaagagcatgtgaaggaagcgcagcagctcctcgccagccagacagccagccccgcaccgcaggagtcgacatgcacggcagcctagacgccatcagttaaacttatatgattcatagtccagcgtttgagtgagcactccagtcagaacgaactctgcattgtgaacatctatgcctctggcaaaatattctcggcataaatgaaggtcattttcacaggatattaaaattatttccgacaaactcgagttctgcttgtgctccacgagcttccggaaagatggctgcttggataacacctttcctcctgcacactctacgattgccttcatagtggaaagacttgggcagattccaggtgtgatgtaaaaatattttgccttaaagagtggagaaacgtgtgcccgttttaaggattcttccaagctgaaagagaaaagtacttctgcctcagcatctcggagaatgtagttctgctcatctggaaaacagaacagcacatactctgaaaagtgtggacacgtgaagtgtggcaagtgtgacccacaaaattctcgcccatattcagcgtatggaccagtttgctgactgctgggcaggagcaaccacatcatgacagaaatgcagggatctgttcaccaacggccagaaatacaaaatcaatccctgagtcaaccagcagatagaaaggctgctttttaggtgaaaggagaaaaagaatgtctaaaatttggaaaaacaaaaaatgatgaatt

SEQ ID NO: 2777 - DNA, 979 bp, Homo Sapiens
  misc_feature (964)..(964): n is a, c, g, or t
gggtccctgccctggccaaggaggaggctgaaagagccctgagctgtgccctctccattccactgctgtggcagggtcagaaatcttggatagagaaaaccttttgcaaacgggaatgtatctttgtaattcctagcatgaaagactctaacaggtgttgctgtggccagttcaccaaccagcatatcccccctctgccaagtgcaacacccagcaaaaatgaagaggaaaaaccaaccggtgggagacctccaccctgagaaatggtcctgttgccaaggaccacccacaagctacccaacagattcctatgggagttctttgaattcccaggcggcggccggatatttcccaataaaaggcccgtgggtgcagaaaaggggcattcagtacagtggctgcccactcaggatcacaggcttttccatttgggcgggccagatcattcccggaccccctaacctggcaaaataacctgggctccatctccttcactgggattgtggggcttcaatccttcgctagaatattttcatttgaaaaaacccagaaagatatatcctggaggccccctgggttttttagcccactgagaggctttggtaacatgggcacaacccaccttttaaagaaacccatcccaccgggtccccggttaaagtccccattaccaaagcgcctccctgaaattccccccaattgcccgtggcttcttggggcacaccaaccccgtgggcaataatacccaccctgctcctttggccttcccactaccttttctaagttaaaagagcgagagacacaaaaagtcccacagttgttttacttagaaatacacctactcggggacaccgcttgcccaggcccccctacctatatcgaaacgtcgcattctatacaaacgcgccgtatttgtaggaaaatcacacacttttctccaccgctcggaagagggactctctgnttccaacacagttct

SEQ ID NO: 2778 - DNA, 1033 bp, Homo Sapiens
ggaacctgataaaatttagtgaaactttgtaatgatctatgtgcacttttacttgtaaaatggaatttctgtatgtttatacttgtaaatatgattgttgttagtgctcctgttgctcatggtgtcctgcctcgcatttgtgattctgttaatgacatgtatcttaactaatttcttagtggtgttgtaatagggagatggggcaggtggggggttatttgtaccactgaatcttcattaatttggttctttactgttttgaggggagaaagaacgtgaaatggtttgtgtattattgaattttaagcaatattttagaagctgtgtgactgctttaataactttttcccagtgttatttgaatcatactacccgttatactaaagctgaatgacaattgtgtgaaagttactgccttcataagatcaagtcaccactgttacacagctgacatatagtgtattacctttgcagctagtaaactataaagtttagatattgaatctcgttacagggttatttatataatgtgacattattcagtactgacagactacatgaagtagttttaaaatctagtgctatttttattttaaaggttagcaatgaggaggaaatgtgatctggctgtgtttgtcttctgtacaaagcctgaagtgcttatggttttttggctaacacccacagagggcaaagtttaagactttcttgtaaggactaactgttcttttcaagctactgtttgtttttctaaaagcaggatttgcttccgtaggaggcaagttccttgatgtggaatagtgcaacctgtatatgggttattataataggaaagacatttgtacttgcacagtttaaatcattcttaaattttgaacatgtgaattgtcccaaaaaatctttaattttttggtaatttttactctttttgtgcacatgttgatttcttaatggtaaatccttcatttaaagatagtgttctctgttgagaatatttacatggaataaaacaatcttttcatggcctgttaaa

SEQ ID NO: 2779 - DNA, 745 bp, Homo Sapiens
ggcccccaacagttcctaatgactatatgaccagtcctgctaggcttggaagtcagcatagtccaggcagtcagcatctttaaatcagagaccaaggacacacagtggaagtagtggaggaagtggaagtcgagaaaacagtggtagcagtagtattggcattcccattgctgtgcctacaccttcgccacccactattggaccagccccgggctcagctcctggttcccagtatggcacaatgaccaggcagatatctcgacacaactctactacttcttcgacatcttctggtggatacagacgaactccctctgtgactgctcaattttctgctcagcctcatgttaatggaggtccactttattctcaaaattcaattgctgatagtccaactccaccgccaccacctccaccagatgacattcccatgtttgatgactctccacctccccacacaacaaccaccagtggattatgaagatgaggaggctgcagtagttcagtataatgatccatatgcagatggggatcctgcttgggcccccaagaattatattgagaaagttgttgcaatatatgattatacaaaagacaaggatgatgagctgtcatttatggagggtgcaatcatttatgttataaagaagaatgatgatgcctggtatgaaggagtctgcaatcgagtgactggtctgttccctgggaactatgttgaaatcaatcatgcactatactggattaa

SEQ ID NO: 2780 - DNA, 779 bp, Homo Sapiens
  misc_feature (724)..(724): n is a, c, g, or t
ggtgtcatcctttagaataatgggaattaaagttgagcagttttccatctctaccaaatccttcaccacaagcagcattctattacagtatgaagaattgtctcatatgttaaaactgtacttttctctaacctttctctcactcctacaaggcccttttctcaaatcatatttctgagagaaatgtatggttctttctcacaggcctgctgatttgtaactgtgccatcgaatagagcaattagatccatcagacctttttcccctcattaggttcagtggaaccattctggttaaaacagcatgaactgaactcagtttacattcatattctatgggcaataccatttggtttttggaactgtttatctgctgttccctatcaagtattaatgtagggatgtcactcaggctgcgttgcactgggctgagttcaactgcgacgctctcactgacgcgtgcttacatgtgcttctcacttccggagcacaggcaggtggctgcggggtcccagctctgaatggatgcccatgatgcaactggggcagcccttgctttttgcttgctctccccacagaaacctttgtccttgcaactttatcctttgtcccgattgggtcccagatacacaaaatgtacaaatgtaaacttgctcattttattaaaattctttagttctttggtctttctggaattttttaaataaaaaatgcccttgatgganggatggttttcactcgcaccatacttagtctaaataagaagtctaggatctacaa

SEQ ID NO: 2781 - DNA, 1129 bp, Homo Sapiens
gggagagcgtgcgttcggtggcccataggggaagatggcggctgctcctttggaggagcgggattgagaggatcggggtggggagaccaaacaagagagacatttctggctctgaaggcgaacgcttcgctggccatttaggagctctgctcaaagccagacgtatcctagaaggaaaacatcaccatggctacagaaattggttctcctcctcgttttttccatatgccaaggttccagcaccaggcacctcgacagctgttttataagcgacctgattttgcacaacagcaagcaatgcaacagcttacttttgatggaaaacgaatgagaaaagctgtgaaccgaaaaaccatagactacaatccatctgtaattaagtatttggagaacagaatatggcaaagagaccagagagatatgcgggcaattcagcctgatgcaggttattacaatgatctggtcccacctataggaatgttgaataatcctatgaatgcagtaacaacaaaatttgttcggacatcaacaaataaagtaaagtgtcctgtatttgttgttaggtggactccagaaggaagacgcttggtcactggagcttctagtggggagtttaccctgtggaatggactcactttcaattttgaaacaatattacaggctcacgacagcccagtgagggccatgacgtggtcacataatgacatgtggatgttgacagcagaccacggaggatatgtgaaatattggcagtcgaacatgaacaacgtcaagatgttccaggcacataaggaggcgattagagaggccagtttctcacccacggataataaatttgctacatgctctgatgacggcactgttagaatctgggactttcttcggtgccatgaggaaagaattctcccagggcatggtgctgatgtgaaatgtgtagactggcatccaaccaaagggttagttgtttcaggaagtaaagataagtcaacagccaatcaagttctgggaatccaagactgggcagagtcttgcacacttcatgcccataaaaacacagtaactggaagatgacattaaacctcaatggcaattggctactcacagcatcagcctgttacacggtgccggc

SEQ ID NO: 2782 - DNA, 675 bp, Homo Sapiens
tcatccagtcctagcaagatatatgggagagctttaaaaaaatgcagatcacatcctgaggtgatcggtgtctatggtgagtctgttacagcctatggggaggtgacaaggcggggtcgccggcagcatgtcaggttcactgaatatgtaaaagatgggctgaaacacacgtgtgtgaaattctacattgagggctctgagccagggaagcaaggaacggtgtatgcgcaagtgaaagagaacccaggaagtggtgaatatgattttcgatatatatttgtagaaattgaatcttatcctagaagaactattatcattgaagataatcgatcccaagatgattaaaataatcaagcaagcaggtttctgatggatgttgaatggcgtggactcgctactccgttcttcacagctgccttccagaatgtgttcaaaagaaagacaagaaggagtgtatggcttataaagtgaatctaatacagtatttgttgcatttaaacaaactagacattttcttacggaaaaattatgaaatacagcatattttatgttctcccattgactcaatcatgacaatatttctgctttaacaccatctttcatgattagaaatgtttgttattggaaatgttacaccatgtaaataaaggaaatagattttagtattgcgaaaaa

SEQ ID NO: 2783 - DNA, 798 bp, Homo Sapiens
ggggaagcggggtaagtggggctgcagggtggaggtggagaaatagaagcgctgcgggctctaagctagtgaggtcaccaaaagtgtgaggctaacgcaaggcaaggtggtgaaaaggtggcttctgttttcgcgtttgtttttgtggggagaatgtctgtctctctgctctgctgtagtgagggcttgaaggctcaagcgggtgatgggcttagaactttgagcctatgatcagcttaggcatcagagattttggtttccaggccatctgctttatctgaagattttcagctgatgaagaactaggaggctcaaacactatcttacctgagtccaggacaagtgacttggagagtgtgctcttctgtggcaggatcaggtctgtctagggcaggatggcccaggatctcagcgagaaggacctgttgaagatggaggtggagcagctgaagaaagaagtgaaaaacacaagaattccgatttccaaagcgggaaaggaaatcaaggagtacgtggaggcccaagcagggaaacgatccttttctcaaaggcatccctgaggacaagaatcccttcaagggagaaaggtggctgtctgataagctgatggcatggagccctgcccctgagtgtctgtccctcttcagccaagcccaagtctcctagacccccagggaagccaggggaactgtccacctttctcttcatcacagaatgagtaaaggatccctggaacaaatggcattggggaacccatttccccactcccaccttttaaattctttttctcccattatt

SEQ ID NO: 2784 - DNA, 1016 bp, Homo Sapiens
  misc_feature (458)..(467): n is a, c, g, or t
gttaactctcactcactgcactccgcctcctgggttcaagcaattctcctgcctcagctcccaagtagctgcactacaggcctgaacacgccggtaatttgtgtattttatagtagagatggggttcaccatgtaggccaggatggtctcgatctcttgacctcgtgatccgtccaccttggacttgcaagcggctggattacaggcatgagccactacacccagccgatttttcctttttgattaaagatgctattacaatgtaaatatttcttacacagaaagtcacagcacatgtgcccattgatacaaggctgctgaggcctggtctccagttggaaatataattaagggtggcaaggactggagtcagttggagagtgcatagccagtctgtgaagacaactgccagatactggcaatactccagcctggtgacagagtgagactctgtctcnnnnnnnnnngtttcaatgtttactcctagagaagccaaaaatccagatttgtatatgaaatcttaccattttaaaagattggcagctaattatttttttaaaaagctgtgcagtgtgatgtgtcccaaacggactggctcatgggtggccacgtcacaacctctgatctcagaccgtgcatgccttgtcctcttaagacaactcctgtggcaccgtttctccctccacagggccaaagccatagtgtccggtcccaaggacaaggctcttccagtgctaggagaggtatgagcagcctctcacctgtgagctgtggggatcacaaggctgcctgcctcagtcttggagtcctgttgggtgaatgaggcagatgggaaagagcctcaccagcagctgcttttggagcaggggtccaaggaagagagggtggcctcgacatcaaactgcctggatttttctaccaccctgttacatcataacaacttctgaaacacacaccagccctgagttctgggctcatttgaagcctggaatagcaataaatctttttaacttgca

SEQ ID NO: 2785 - DNA, 1460 bp, Homo Sapiens
  misc_feature (843)..(918): n is a, c, g, or t
  misc_feature (920)..(1121): n is a, c, g, or t
  misc_feature (1239)..(1253): n is a, c, g, or t
tgtgtgaccaggataagcggagagggggagcttccggagttgtttgtgcaagaggagaagcagcaccggatacgacagttgcctgttggtaagaaggaggtggagcattaccggaaacgctggcgggaaatcaatgcacgtcccatcaagaaggtggctgaggctaaggctagaaagagggggaggatgctgaagaggctggagcagaccaggaagaaggcagaagccggtggtgaacacagtggacatctcagaacgagagaaagtggcacagctgcgaagtctctacaagaaggctgggcttggcaaggagaaacgccatgtcacctacgttgtagccaaaaaaggtgtgggccgcaaagtgcgccggccagctggagtcagaggtcatttcaaggtggtggactcaaggatgaagaaggaccaaagagcacagcaacgtaaggaacaaaagaaaaaacacaaacggaagtaagcagagctgccaggctcccaggagagcatggggactaggaggaagggtgtggcatggctcagtctggcccccttgattaccggcctagcccctgctcacatcacagctgtctgaagaacagtgaggtggagtgcctagaactcccgtggtggtcctgagcagagaggaggatgtcctcctgcctgcctgaaggtctcccatgaaaacactgctgaactgtgttgacactcatgaccctttttttaaaccgttaaagggaagttcggtgttggagcgatactcaatgtagtcagtctacacctggacgtgtgggccacttaagccctccccacccccatcctattcctgaataaaaccaggataatggnnnnnnnnnnnnnnnnnnnnnnnnnnnnnnnnnnnnnnnnnnnnnnnnnnnnnnnnnnnnnnnnnnnnnnnnnnnnannnnnnnnnnnnnnnnnnnnnnnnnnnnnnnnnnnnnnnnnnnnnnnnnnnnnnnnnnnnnnnnnnnnnnnnnnnnnnnnnnnnnnnnnnnnnnnnnnnnnnnnnnnnnnnnnnnnnnnnnnnnnnnnnnnnnnnnnnnnnnnnnnnnnnnnnnnnnnnnnnnnnnnnnnnnnnnnnnnnnnnnnnnnnnnnnnnnnnnnnntcttattttttttatttccggagacgcccacaagcttcgctttctccgtcaccccgttttttcccctcgtccccctctgaaccgccccaccccacagttgtcccccgctgctggccgnnnnnnnnnnnnnnnggcgcgtcctattcttctctttaagccgcctccatccccccgatttccctcaattttaccccccctatatcctatatacgccttttcccccgccttttcgttattccgccctctccatccaccctcttttataccacgtccggctattttccgcccatgattttccctcatcccctccccggatatcccccttcttttctttttccc

SEQ ID NO: 2786 - DNA, 639 bp, Homo Sapiens
  misc_feature (379)..(573): n is a, c, g, or t
aagtaatatcggtccccgatattacatgggaatgtttcacttacttaaattccctttaatgaagatctttgtgcatcttctcatctatattagtccctgatgattataccccaaggatattaaaatctcagtctgtcagaatcaccagaaaatatcttcaaatgtacacttagcaatctttgcaatatgagttggtagttcaaagtatttattatctgtagctaggatgctgcatttgtcactttgcaaatgagttttaaagtagttgcccaattgctggcttgaactggatgattaaatcttaagaaaagttaggacaacatagaagaattgttgaagatactcaaaactggcaaggggctggatgtggtggctcgtnnnnnnnnnnnnnnnnnnnnnnnnnnnnnnnnnnnnnnnnnnnnnnnnnnnnnnnnnnnnnnnnnnnnnnnnnnnnnnnnnnnnnnnnnnnnnnnnnnnnnnnnnnnnnnnnnnnnnnnnnnnnnnnnnnnnnnnnnnnnnnnnnnnnnnnnnnnnnnnnnnnnnnnnnnnnnnnnnnnnnnnnnnnnnnnnnnnaggctgaggctgcagtggccagagattgcgcaccacactccggactgggggacagatattactcta

SEQ ID NO: 2787 - DNA, 914 bp, Homo Sapiens
tttgtcacaattcatttttattaatagaaaataaacacttattccagtttcaaagttgttatacttgaagttgctaatttaaaaaaacgaattttaaataatcacttaataatcctgctttgactaagacaatgaaatgtggctttaaaaaaaagtattcagcaccatttgctcataggtctttcagagtttgttcttaaagtttctggaactttcctgtctgtaaagtaacaggaattactgagctacattggaaagcctctctgggacaggcagtggggagttaagcagtcatcataaaggaatcagtgtacattcagcatggtgacttgactacacaacaatcccttcccctctactgtagctcaagagagacatgcttctaaccactgaggtatgaggagtctcagactgttatttgctgttagaattggtcttcccagctaataacagtacatctctggcacagatgctattggtccttaatgtcctgtgattttaggaaatagtttggatttagttcaatttattcagaaaccaaacgtgtttaattagcttcactactctggcagagtaagggtatgctggtttagtatctttataaaatatatataatgtataggtaaatcatagtcttaaatcatacctaaaatactgtatcattctaaaccaatatctattttaacaaaatgtttataactaaaaacagctgatgaaacactaaatccaaaggtatgaccaaaaggactcagtctgtgttgcttaaaggaacttttaaaggcatgtgcccttcaccgtcattcgaggagcagggaaacgagcgcccttctcctcctcctaacatagaaatcctgtgcgggtgggcccaaaacttaccactccaaaacactcacgaaaagtcaactgtcacacag

SEQ ID NO: 2788 - DNA, 655 bp, Homo Sapiens
tatctggtccccgactcagagctatggtctgatccgaccatatctgatgctcaggaggtgcgaagctgttgaatgggctggtagtttgcctccatagattctagtcacccatgtcttcccactgctaagtttgcctttcagagataatgatatctggtatgcgtgtctgtgtgaagagaccaccaaacaggctttgtgtgagcaacaaggctgttaattcacttgggtgcaagtgggctgagtccgaaaagagagtcagtgaagggagataggagaggggcagctttatagggcttgagtaggcagtggaaagttacagttaaaggtggttatcctcagcagaggagggggtcacaaggtgcatggtggagagatgatgggactcattgtccagaagaagaatgtcacaaggtcgattgatcagttggggcagggcagaacaagtcataatggtggactgtcgtaacgttggtcagtcagttaaggcaggagctgtttcacttctgtggttatttagctggctcctgcaggccatctggacgtatatatgcaggttacgggggttacaacggctgagcttcggctcagagccctgacaatatccagaaaatgatgtgcccacaatttggctgagggcacccctttggacatcggc

SEQ ID NO: 2789 - DNA, 991 bp, Homo Sapiens
  misc_feature (466)..(466): n is a, c, g, or t
ggattgaagaaagtatgcggatgataaagccaagagagggggaagaaaccttaagaatagaggatatccttgaagtaattgagaaggaaggagactcaattgcagtgatcctgttcagtggggtgcatttttacactggacagcactttaatattcctgccatcacaaaagctggacaagcgaagggttgttatgttggctttgatctagcacatgcagttggaaattttgaactctacttacatgactggggagttgattttgcctgctggtgttcctacaagtatttaaatgcaggagcaggaggaattgctggtgccttcattcatgaaaagcatgcccatacgattaaacctgcattagtgggatggtttggccatgaactcagcaccagatttaagatggataacaaactgcagttaatccctggggtctgtggattccgaatttcaaatcctcccatttntgttggtctgttccttgcatgctagtttagagatcttaaagcaagcgacaatgaaggcattgcggaaaaaatctgttttgctaactggctatctggaatacctgatcaagcataactatggcaaagataaagcagcaaccaagaaaccagttgtgaacataattactccgtctcatgtagaggagcgggggtgccagctaacaataacattttctgttccaaacaaagatgttttccaagaactagaaaaaagaggagtggtttgtgacaagcggaatccaaatggcattcgagtggctccagttcctctctataattctttccatgatgtttataaatttaccaatctgctcacttctatacttgactctgcagaaacaaaaaattagcagtgttttctagaacaacttaagcaaattatactgaaagctgctgtggttatttcagtattattcgatttttaattattgaaagtatgtcaccattgaccacatgtaactaacaataaataatataccttacaga

SEQ ID NO: 2790 - DNA, 380 bp, Homo Sapiens
gcatagagtaatattcgtccccacgtatccgtattatgacgccagaattctgatagctgccgtgaagcaggactgtggcaagtggccaagtgtgataaaaacctatttttcattttaaaacaatacagatgtcagaatactttaaagaagtatttaaagatagattgagtagaatggaacaaatagtaaaaatctaatgagaagattgaaggtttttcatttgcttttgatggaattacattttttggaaacagaagaataccaggttatgtctttcttgatctgttagtttctctctctttctccctttttcctgatctgtgaatgctggtgctagacactgctgaatagacaggaaaaatggattttctggtgttttt

SEQ ID NO: 2791 - DNA, 1437 bp, Homo Sapiens
  misc_feature (1174)..(1318): n is a, c, g, or t
  misc_feature (1325)..(1340): n is a, c, g, or t
gggaggagcaagcgtctgccgcggtggccgggtgccgatttgacaagatcaaagctgcaggaaaatggacagtgaggttcagagagatggaaggatcttggatttgattgatgatgcttggcgagaagacaagctgccttatgaggatgtcgcaataccactgaatgagcttcctgaacctgaacaagacaatggtggcaccacagaatctgtcaaagaacaagaaatgaagtggacagacttagccttacagtacctccatgagaatgttccccccattggaaactgacgcttggctcctttcttgtggatggattttctcaaagtacacagataaagcatggtttgtttcagtctccaaattcaaacctttgagtaataaatcagcactcaaaaatgtacacccatttagtttgtggtagcaaagtgcaatgcgaaattgaatgagaaactgagatttctcagtaatggtgaatatttcgctctttaaacctaaaactcttcattgagtagcttatatttgaacatgattggttaaacatttgcctctacctctgattttgctttgctgtcaaagtttaacaccttccaactacttatgtgtgtcctgtaacacaggtgattgaacgtatgagagggaaaggcaaagaaaaaggaagccagacactaggagaattattaacttctcatacttccccacattgagaagcattcggagtgtatttagcctgtagatgttgtgatatgcaaatatcccattccctggttactggcattcctaagattcttcatggtattttcaaactttggataaatttacagattagaaagatatctgacagttaatctctgttctccttacaaattccttttgtgctgctggaaaggatctttggctaggtggatgactagttttattcaaagccttttctcaaagccctttcagttacaaccaccccactatggaatcagtatttagttatacatttgtataagaacctgtattttgaaaaacacattcatgtatatttattcctggaattatttgcctgttaaacagtgtctttcatgttctctccccagattgtaaactctgtaagaagctgcttgtatctgtatcccttgttgaaactctgaaaacactgaataactaaaatctcttctcatccttttnnnnnnnnnnnnnnnnnnnnnnnnnnnnnnnnnnnnnnnnnnnnnnnnnnnnnnnnnnnnnnnnnnnnnnnnnnnnnnnnnnnnnnnnnnnnnnnnnnnnnnnnnnnnnnnnnnnnnnnnnnnnnnnnnnnnnnnnnnnnnnnnntttgcgnnnnnnnnnnnnnnnnaaaaaattttttaaaacttttttggggggcgcgcggcccccaaagggaaaggaaaaagggggaaataagttgtttccacaaaaaaaccccggcggcc

SEQ ID NO: 2792 - DNA, 199 bp, Homo Sapiens
gtaatcatacttcaagccttagttgagaatatttcccctacaaatctctcctagacatggtctctgattcccaatctctaggctgttagcagagactccatgacattttcatattaccaggacctagcaacatgtgccactcagtcaatttaatacatgtttgtgatgtggactgaaaatatcaaaatagtctgcagtt

SEQ ID NO: 2793 - DNA, 509 bp, Homo Sapiens
tatgaagggaaaaaatttcaacttcttatttaatttagtagtcgatatccttttgactctcctcaggtcatgtttactggtgaaaatattccttgttcatcctcatgtttatagcaatggtcatatctgtttatccattctaacagaagactggtccccagcgctctcagtccaatcagtttgtcttagcattattagcatgctttccagctgcaaggaaaagagacgaccaccggataattctttttatgtgcgaacatgtaacaagaatccaaagaaaacaaaatggtggtatcatgggaaatttgaacacagacacatacacaaagggaagaagatgtgaagatacaggaagaatgtgaagatggtcatctataaaccaaagagaggcttgggacagaccctaccctctcagtcttcacaggacaacaaccctgcccgcaccttgatcttggacttctagcttccagagctgtgagaaaataaatgtctatcctcttaagccaaaa

SEQ ID NO: 2794 - DNA, 1541 bp, Homo Sapiens
aggaccggctcggaagtacgggatggaaaggggtgcggcagcactgccatgggaagagggtgatccgacccggggaaggtcgctgggcagggcgagttgggaaagcggcagcccccggcgcccccgcagccccttctcctcctttctcccacgtcctatctgcctctcgctggaggccaggccgtgcagcatcgaagacaggaggaactggagcctcattggccggcccggggcgccggcctcgggcttaaataggagctccgggctctggctgggacccgaccgctgccggccgcgctcccgctgctcctgccgggtgatggaaaaccccagcccggccgccgccctgggcaaggccctctgcgctctcctcctggccactctcggcgccgccggccagcctcttgggggagagtccatctgttccgccagagccccggccaaatacagcatcaccttcacgggcaagtggagccagacggccttccccaagcagtaccccctgttccgcccccctgcgcagtggtcttcgctgctgggggccgcgcatagctccgactacagcatgtggaggaagaaccagtacgtcagtaacgggctgcgcgactttgcggagcgcggcgaggcctgggcgctgatgaaggagatcgaggcggcgggggaggcgctgcagagcgtgcacgaggtgttttcggcgcccgccgtccccagcggcaccgggcagacgtcggcggagctggaggtgcagcgcaggcactcgctggtctcgtttgtggtgcgcatcgtgcccagccccgactggttcgtgggcgtggacagcctggacctgtgcgacggggaccgttggcgggaacaggcggcgctggacctgtacccctacgacgccgggacggacagcggcttcaccttctcctcccccaacttcgccaccatcccgcaggacacggtgaccgagataacgtcctcctctcccagccacccggccaactccttctactacccgcggctgaaggccctgcctcccatcgccagggtgacactgctgcggctgcgacagagccccagggccttcatccctcccgccccagtcctgcccagcagggacaatgagattgtagaacagcgcctcagttccagaaacgccgctggactgcgaggtctccctgtggtcgtcctggggactgttgcggaggccactgtgggaggctcgggaccaagagcaggactcgctacgtccgggtccagcccgccaacaacgggagcccatgccccgagctcgaagaagaggctgagtgcgtccctgataactgcgtctaagaccagagccccgcgagccctggggccccccggagccatggggtgtcggggggctcctgtgcaggctcatgctgcaggcggccgagggccacaggggggtatcgcgctgctccttgaccgcggtgaggcccggccgaccatctcttgccctgaaggggccctctggtggccggaacgggcattgggaaacagctcctctttcccacttgcttctaggggccccg

SEQ ID NO: 2795 - DNA, 524 bp, Homo Sapiens
ggcttggcagcagtgcactatattcaaattcatgcatcggcaaaatgtaaatgactgcatgttatgaatcctcaggtggtggcaaagaatcgataacggttctcaggtactgagttctcaaagtgtggaaggtcttctgcggagggggaaagggaacagtactcaactggcgatcagagacctgggttccagtgcagctctgtcaaatcgattcacttctctagagccccagtattcccaagaggaataccatatctttgcccatctcactgcgtagtggggatcaatgaacacaaccaactgtggatgtgcttggggaaagcctggcacatttgtatacctggaaggcatgatcgttcccacagggagcgtgtggctcccgcagagggccctggtcattcgggatgacaggtatagggaaaaggctaactcatggccatttgacaatggagtggagccttcatcttcctgctccctttaaagagcatgagctccccccaccatgtattttcataaggggaatg

SEQ ID NO: 2796 - DNA, 844 bp, Homo Sapiens
  misc_feature (599)..(609): n is a, c, g, or t
atgtcctgcatcatcccctctacacatcctctgcctgacctgcactagtcctcaataagcatgtagcacatgaatgagtgtatgtgtcttatttcatgctcttttatatttataatcaacaaccctgtgaggtaggtaccatcatcttcattttactgatgaagatgctaaggctcaacatgatgaattaacttactcaaggtcacatggctaataagaggcagaaacaggatttggactgactcagatatgtaggtctgacttccaacactgatgttcttaataattatggtatgtatacagctgctacaaatcctctacaaaaaggaaggtcttgaaggatatacagcagtatgttgaatgtatcagccaggcacctacattaaagccgtgcaggtaaaaaggtaagtgcttgctgaatggaacaacagatgaatgctaagagctgtcttgggaagactaaacaaactccacacaacacaggcgctgagatttgagataatctgtggatcagggtttcctagcccatcacccctgagcaaggcaatgtacactcattactaacagtgagtcactaaggcagttgtgtttctctctcnnnnnnnnnnngagataaagtttcactcttgtaatttcacgggctgtttgacactgaggtaaatcaagcaggcatcagccactttattcaggtcaccctcacctaggtccagtctctcacagagggggcccaggccctgtaagacagccagctgcaacttgaaggtcagcgtgtgcgagtaaactggaccagccctggcactgatgggggcctgggtgactagggagccagccagctttggcagga

SEQ ID NO: 2797 - DNA, 306 bp, Homo Sapiens
  misc_feature (74)..(155): n is a, c, g, or t
gggtaccgctttagagtaatatctgtcccctgaactttggcatgagcggaagcagctgaaactcttaccagaannnnnnnnnnnnnnnnnnnnnnnnnnnnnnnnnnnnnnnnnnnnnnnnnnnnnnnnnnnnnnnnnnnnnnnnnnnnnnnnnncagctacaacaaagactggaatgttttaacttcatttactctccttcatgacttatttgttactattttcatgtattatgaaattctaccttgattttaccccatagatattattatattactaaacaattagtggggttttttggagggg

SEQ ID NO: 2798 - DNA, 532 bp, Homo Sapiens
agtacggaaaatgatctggcataaaccagtcctctcagtggaggaggtcacagtgacatttgtattattaacattttacacttctatttttccaagaatagaagcaatatgtttaataattacccctgcctcaaatccttaaactcaatatcacaggcactgagtataagcaaatctgggatgtcctccaacagatgtgcaatagcacagctatgttattctcaaaaatactattttttcctataaaaatcaaatgctcagtggccacacttttaacagctggcattagatgacagtaattgaatttttatgtgtcacagcccatctaagcttccttttaggtattttttagtatgtccaagagaaaacacctgcttcaggtttatttaggggtagtgacctataaggacatcaactcaatttttaaggttagactattgttgggtttactgaagaaaaaggaacgggaaaaaattaaatcacaacacacctctttaggtcagttaaaggccatatctctagctgggatatt

SEQ ID NO: 2799 - DNA, 440 bp, Homo Sapiens
cactgctagtgggaaaataaattagttcagccattgtggaaagcagttgggtgatttctaaaagaacttaaaacagctaccagtcaagccagcaatctcatgactgggtatatatccaaaggaatataaattgttctaccataaagacatgcacatatatgttcactgcagcactattcacaatagcaaaacatgaaatcaacctaaatgcccatcaatggtagactggataaagaaaatgtgacacatatacaccatagcatactacacagccataaaaaagtacaagatcatgtgctttgcagcaacatggatggaactgaaggtcattatcctaagcgaactaatgcaggaacagaaagccaagtaccacatgttctctcataagtggaagctaaatattgagtacacatggacacaaagaagaaaaccacagatat

SEQ ID NO: 2800 - DNA, 867 bp, Homo Sapiens
taccctgccttgatgtcctgctgtgtgaattcccaggttggcctggtggccatgtcgcctgcccccagcactcctctgtctctgctcttgcctgcacccttcctcctcctttgcctaggaggccttctcgcattttctctagctgatcagaattttaccaaaattcagaacatcctccaattccacagtctctgggagactttccctaagaggcgacttcctctccagccttctctctctggtcaggcccactgcagagatggtggtgagcacatctgggaggctggtctccctccagctggaattgctgctctctgagggagaggctgtggtggctgtctctgtccctcactgccttccaggagcaatttgcacatgtaacatagatttatgtaatgctttatgtttaaaaacattccccaattatcttatttaatttttgcaattattctaattttatatatagagaaagtgacctattttttaaaaaaatcacactctaagttctattgaacctaggacttgagcctccatttctggcttctagtctggtgttctgagtacttgatttcaggtcaataacggtcccccctcactccacactggcacgtttgtgagaagaaatgacattttgctaggaagtgaccgagtctaggaatgcttttattcaagacaccaaattccaaacttctaaatgttggaattttcaaaaattgtgtttagattttatgaaaaactcttctactttcatctattctttccctagaggcaaacatttcataaaatgtttcattttcattaaaaatgaaagccaaatttatatgccaccgattgcaggacatcaagccagggatccttaaaaattgg

SEQ ID NO: 2801 - DNA, 632 bp, Homo Sapiens
cgtatcaggccggacggggtggggctgggaactgcggcgttggtgctctgtgcagcctagaagctgaggctttgtcggaacatgcttctacgtgtgaaaagtgtgcaatgccttccagagaggggcttagcgatggagaggttccagtcggaaggaagctgcaggccacatgataacaaggacatcctgctgatgctgagtgacatggacatcaacgccatcgccgggacgctcaagctgtacttccgggaactgcccgagccgctcctcacggaccgactctacccagccttcatggagggcatcgccctgtcagaccctgctgccaaggaaaactgcatgatgcacctgctccgctccctgcccgaccccaacctcatcaccttcctcttcctgctggaacacttgaaaagggttgccgagaaggagcccatcaacaaaatgtcacttcacaacctggctaccgtgtttggacccacgtaactgagaccctcagaagtggagagcaaagcacaactcacctcggctgcggacatctggccccatgacgtcatggcgcaggtccaggtcctcctctactacccacagccaccatcaccaaaactgggcccagcctaaatgcgtcaatagca

SEQ ID NO: 2802 - DNA, 674 bp, Homo Sapiens
  misc_feature (454)..(467): n is a, c, g, or t
agcacccttcccctgaactgctacacatcacccacctagatcgaaagtttgggctcatctcccattggtggcaaagacctccatatgagctgcaggcacaaaggagggcaaagaactcgattcagatgaagtctaagatccaggttgacaagatttgtgaagaatgacggaagaggtgactgcactagcttgaaatctggctgtacttctagctaaccggtgcaaggggccacacttgttttcactgtcaagcataaaatattatcacagggcagaggtaagaatgtctctggcaaggactagcagtctggatactgtatttctaatacatttactctgacattcttttgaggaatacatggagaactgacaattggttatgttagtttacatgttcccttgttcttattacattaaacgtatctgtaagaagggtttgcttagcatccccagnnnnnnnnnnnnnngtgttcacattctttaggtctgacccgtggtaaggagagggaggattagagaacatctactactgaccatatggaagttttggatgatataaattcagagattcagaccagctgaatcaaattaaaatgtacatgtaaaaaatgtgttagataatgggaggcaggacagagagagagccaggtgagtggggagtcacgctgaggccg

SEQ ID NO: 2803 - DNA, 581 bp, Homo Sapiens
  misc_feature (70)..(82): n is a, c, g, or t
  misc_feature (241)..(255): n is a, c, g, or t
gtgggtggtcgctttgcataaagagcaccaactgaaacgcagaaagtattatttcttctactgtgggacnnnnnnnnnnnnnggtttcttaatttcagccttagtttctcttctctacaatggggaaattagtacctttgctgtccaattccaaaattataaagatttaaagatgatatatgtgaaatcacttcaaaatctacaaaaacacaagactattttatgtcttaaaatgttaaannnnnnnnnnnnnnnaagccaaaagttttctaaagtaagtgtaagctgtttaaactaatctacagactctattaacatttccagaactttctaaacccctttcttctaagcatagctcaatcaatcatcgctatcacttggctttccttacccttaagtataatgcaataacaatggcatcaatgcttttgcaataaataattaacatattttgaaatgctcagcatataaatgttctaaattctgaatcttcaaactaattatgtgtttggtgtcactctttgatattcatgttaatgtttgggccttttcacattctattttgtgtataaaagctacaa

SEQ ID NO: 2804 - DNA, 649 bp, Homo Sapiens
  misc_feature (261)..(261): n is a, c, g, or t
  misc_feature (489)..(500): n is a, c, g, or t
  misc_feature (518)..(574): n is a, c, g, or t
tttgggaaccccagcaggaggaactcaggagttggatgactttagggggtaaaaaggtatagaagaagcatgaacgaatgtgtgaatttgttgaaagaaaatgatgtctttgaatttccacaagaatgttgcaatttcatttttaaatttcgtaaccaaaggaccaggcttagctaatagtataaactaacatttaggcctgtgaatacttcccaagctatgaggggaccctttcagtcaaatattcactgagcatgtganggccaggccctgggagcttacttttcaaaagtgtaccataaaccagctgccaagcgagaagctcccctgctcctgcctgacatccccgcttgtaatgctggcctgggtcctgcctgtccactggtcactcgagtcaccattctccagctccccacagaccagcctgggcccacctccttgccctactgctttaggctactccaacctagtagtaacagtttttggggnnnnnnnnnnnngagacagggtcttgttcnnnnnnnnnnnnnnnnnnnnnnnnnnnnnnnnnnnnnnnnnnnnnnnnnnnnnnnnntgggctcaagggatcctcccacctcagccacctgagtagctgagaataaaggtgtgtgccaccatgcccaggtaa

SEQ ID NO: 2805 - DNA, 428 bp, Homo Sapiens
tttgcgatggctttgacctaaaacatcttctgtatgtcaaggttaatatattttcttcagacattcctaacttgactagtggttaacatttagcaccttggttgtcttctcaatatataggattggggtgaaaaataaggaacttagtctttgagaagggacagtatgtggttcgtattgatcaaggatcccaaataatgcaatcattctcatctgttgaggatgtgggaacttttctatcaggaaaatttagtttacagaatacttctgcatacaacattgattaggaaacaaagaactttaatgctgtacctctgcatgaagtttctgtgagctttctttatcttgcttaacttatcctcccttccttccccaccaaaattgggattgttctaaacaatttcaatttaattcattgtcaacaaaac

SEQ ID NO: 2806 - DNA, 593 bp, Homo Sapiens
tggcttccaaactagtgttcagggccttgggcacatgcagactggtgttgggatgtcactggcaataccagtagaagttaagccctgtctgagtgtttcttacaaccggagttatcagagaaatgaacattacccttgtattactccatgttttgaaaggtgattatttgtgaagctgataaccgacccagactgctttgtgacatgaagctatgggtaagcgttttgtaaacttctgttcaaaaggaaagggatctaaatgacatcagaactcttcaggtaccagcaccaggaagactgaatatcctttttaatgcaccatgaatcctgggagactaagcaaattaacagtatgtcaaattctgttacaacaaatccctgtatgacaaaaatgttcaagtcctggctgatggtccaaatatttcaaaaatattcagtacaacagaaaatttggacagacttcaatttgccattttgagaattgacctgtggtagcattctgggcctaatggtggcttctaagtcaaagactaaatgtttatctcatctatggacttgccaaacagtcttttatgaaagaaagttacagtatt

SEQ ID NO: 2807 - DNA, 699 bp, Homo Sapiens
actgccttctcaggagcatgtggacgtttctgcagataatcccagtcgtgttcaaggagttatcagatgggcttctctcaaacatttcatacaactccagcgcggccaaactgttttgggatacagggaaaggtgcggtctcgggtggaaagttaatgatcccattggacgtcttgtgcttggtaagccactccgcagtcttccggtagctgtttttctccatgctgaagtggacattgaccacaatctgctccacgtgaacaggcacaggcatctggctgtacatggttatctcaacgcacaaaacgccgcccacgtggaccacggcattggagggatcaaaatggagatctcgcagttgtgcaaaggaatgcatgggtagcactatcttatgacctgagctgtctgacggctggctggcaaagtcaagtatctcctggcagaagtgcttgcgctcctcttcagtgaggtggtggtcactggctaagaggctgctggtctgcaggtagttttcaatttgtccaaggtgctcttgacattcggccagctgctttccttgtgtgtgtgatggagagtccccagccatcagccaggtagtttttcagtgctccttgaagatagatttctgccctttgtggagccattctctcctcagtgtaaatctatgccgacgatcttttcctacataagatagcagga

SEQ ID NO: 2808 - DNA, 554 bp, Homo Sapiens
ggttcaccctgaagaagttggttcggcgactgcacatccacaagcctgcccagcacgttcaagccttgctgggttacagatacccctccaacctacagctcttttctcgaagtcgccttcctgggccttgggattctagcagagctgggaagaggatgaagctgtctaggccagagacctgggagcgggagctgagcctacgggggaacaaagcgtcggtctgggaggaactcattggtagagtgaccttgaccatcacattccctccttctcttccccatttatgcctccacattttagatcctcactagaagatttctgtggaatgatgaagttattactttgcctggttgttgtatttgatttataaggtctgccattgactacaccaaagtaaacagtggtacctgctttgagtaatgttggcatcatagatcattataccagatgtagttgggtgatgtacaagtttttatcaacatatgacaaaagaaccttctctctcattgtactcatatcgatatctctgtaactcattccaaaaaaggcaggac

SEQ ID NO: 2809 - DNA, 664 bp, Homo Sapiens
  misc_feature (425)..(534): n is a, c, g, or t
  misc_feature (555)..(579): n is a, c, g, or t
tatacatatatttgtccttcgtatagcaagttttttgctcatcagcagagagcaacagatgttttattgagtgaagccttaaaaagcacacaccacacacagctaactgccaaaatacattgaccgtagtagctgttcaactcctagtacttagaaatacacgtatggttaatgttcagtccaacaaaccacacacagtaaatgtttattaatagtcatggttcgtattttaggtgactgaaattgcaacagtgatcataatgaggtttgttaaaacgatagctatattcaaaatgtctatatgtttatttggacttttgaggttaaagacagtcatataaacgtcctgtttctgttttaatgttatcatagaattttttaatgaaactaaattcaattgaaataaatgatagttttcatctccnnnnnnnnnnnnnnnnnnnnnnnnnnnnnnnnnnnnnnnnnnnnnnnnnnnnnnnnnnnnnnnnnnnnnnnnnnnnnnnnnnnnnnnnnnnnnnnnnnnnnnnnnnnnnnttgtggccccccccgcccctnnnnnnnnnnnnnnnnnnnnnnnnnggggccggggccccgtaaggaaggggaaatgggcctaactggttccaaagaaaacccgggccaaaaacagggttggaatcccccc

SEQ ID NO: 2810 - DNA, 687 bp, Homo Sapiens
ccagcagtatgattgcagtgagccatgattgcactcagcttggacaaaagaatgaggcccactctcgaaaaacaagaatggggaaaaagctaattggttacaatgaaggttgctagaggtggaatacattatattaaaactgataagagcaagaatatttatcccgccttttctatataaatgcagcactaggtaaccaaatagtagaaggggaaatttttctttatagaagcagtacagctgaaaaataagtgagggagaaaaaaccagagtatcaacaatttgcaaccactgatgaaataatgcatccaggcatgaaacattaatgtcagctaagcctacaaaattaaagacaaccagacattatgtgcttcttgataaaagaagtgaacatcaccttataatgtagtcttacccttactcacctaaaaaagaacctgaagctgaaactctagagccaacttgcaatttataggggacagatgaacatgttaaatcataccatgggatacaaaagcaaaattcaaactatgggaaaacgtgaaagacaaataaccttgtttcttaacaataaattatgaagaataaaataacagatagagtgggaacttataggacccaaagaaacataaaagatatatccatcacccacaatgtgcaggaactttatttggatcccgaagtttt

SEQ ID NO: 2811 - DNA, 500 bp, Homo Sapiens
gcggccgcgacgactgcctgctgttcgaggccggcacggtggccacgctggctccagaagaaaaggaagtcattaaaggacagtatggcaagctcacggacgcgtacggctgcctgggggagctgaggctgaaatctggtggcacgtctctgagcttcctggtgttggtgacaggctgcacatctgtgggcagaattccagatgctgaaatctacaaaatcactgccactgacttttaccctcttcaggaagagggccaaggaggaggaacgcctcatagctttgaagaaaatcctcagctcgggggtgttctatttctcatggccaaacgatgggtctcgctttgacctgactgtccgcacgcagaagcagggggatgacagctctgaatgggggaactccttcttctgaggcagccacaggttttcatctggccttggtgctttggattccccagaagtgaattcctgatttctgccggaagaaggggaccctcccca

SEQ ID NO: 2812 - DNA, 572 bp, Homo Sapiens
gggggggacagagtgactgtggacacaaggaagatgctggcgtgaggtgctctggacagtcgctgaaatcactgaatgcctcctcaggtcatttagcacttattttatccagtatctttgggctccttctcctggttctgtttattctatttctcacgtggtgccgagttcagaaacaaaaacatctgcccctcagagtttcaaccagaaggaggggttctctcgaggagaatttattccatgagatggagacctgcctcaagagagaggacccacatgggacaagaacctcagatgacacccccaaccatggttgtgaagatgctagcgacacatcgctgttgggagttcttcctgcctctgaagccacaaaatgactttagacttccagggctcaccagatcaacctctaaatatctttgaaggagacaacaacttttaaatgaataaagaggaagtcaagttgccctatggaaaacttgtccaaataacatttcttgaacaataggagaacagctaaattgataaagactggtgataataaaaattgaattatgtatatccctgttaaa

SEQ ID NO: 2813 - DNA, 1365 bp, Homo Sapiens
agaagacctctcttgggcaagaacgctccaggagcagcagaaggtagcacagaggattaaaaaaagtgaagcaccagctgaagtaacacacttttcaccaaagtcaattccagactatgactttgaaagtgatgagattgttgctgtttgtgcagctattgctgagaaagagaagacagtttcagcaaataaaacaatggttattgtgtctgcttctggggccatagagactgtaactgaaaaggaggatggtgctacaccaccagatggctctgtttttatcaaagcccgatgaagcagtatgcataggattatttgaatctgtctttttgattgcctcttgaagttttgacatagagacatttactctggagatagataggagaactcctggttgtaaaatatgtttttcagatgaggcatataaaaactaaaatggcaggattattgtatagtgtttggaatatgctttgataagttatgatttatatttctcaaggttaaaattctgagtaaaatggtctttgattaataaacttagtttaatctgaatatgtaaatgaatacattttaaagacaaaacttgaaaaatgtattcttgaatagtgaataatttgatcaatgttactgaaatgctgtctcaactttagttttatgataaaggaagtgtgtgatttccctccctctgagaaatatactgcgcttaatatttgctgtctttttcttgcttcattagagtaagtctgtcagaaagcttgaatatttttgacattcattttgattcaaagttgtcatttggttatatgtggaatctttgaaagtttggctgaaaatgcacacaaatgtgtacattctgaacattttctgaagtttctcttaattctgatttgtgtttctgttttgactttgaagttgtaacaatgatagttgtctccttcagtatttggtaaaagtgtaaagtattgataaatatgagaatgatggttttattttttaattgttacagtaagtaatccttaccacaaatgagtcatttttaaaatatgcatttttaaatgaatggcttttacagataggttaatggcaattgtactgctatattatcccagtcaaaaccaatactttcttttctttattttacaaagctttaaaaaccctggaaacaacttacttcttgcttgtgtctttccatttgatgactgggaattacttttctagataactttttttgaaactactcagtgaaatgaaaaataattacaattttaaatagctaattatatctttctaaaataaaaaagtagggctggttattagagtgccaatgaataaataacttaagcacaaaatacctagaaatgggaa

SEQ ID NO: 2814 - DNA, 908 bp, Homo Sapiens
  misc_feature (175)..(176): n is a, c, g, or t
  misc_feature (284)..(321): n is a, c, g, or t
  misc_feature (325)..(330): n is a, c, g, or t
  misc_feature (338)..(339): n is a, c, g, or t
  misc_feature (375)..(375): n is a, c, g, or t
  misc_feature (380)..(380): n is a, c, g, or t
  misc_feature (483)..(503): n is a, c, g, or t
  misc_feature (626)..(647): n is a, c, g, or t
cttattgctgtggaacctcttttggaggacgttaaaggcgtgttttacttgtttttttaagagtgtgtgatgtgtgttttgtagatttcttgacagtgctgtaatacagacggcaatgcaatagcctatttaaagacactacgtgatctgattgagatgtacatagttttttttnnaccataactgaattattttatctcttatgttaacatgagaaatgtatgccaaatgattagttgatgtatgttttttaatttaatatttaaataaaatatttggaaggnnnnnnnnnnnnnnnnnnnnnnnnnnnnnnnnnnnnnncaannnnnnaagccttnnaccccaaaaaacctctcaaaaaaatttcattaaccntttcnttcccactctcgttaccccaccttggcccccaaactgtgttctcataaaagatccccggtaaagggaccctgggccctgagattctcgccctgaaataccggnnnnnnnnnnnnnnnnnnnnngggaggtccctgcaggaatgtcccccagagggaaggttctgtgagggccattttaatgggagtgcctctttgaggaggacaccctctccggggcggttgcctcccaaaggtcaaagttagtgnnnnnnnnnnnnnnnnnnnnnnggggggggcgccaactcggcggggaaatcttcgttggggaccttcctgtttgcggatttgaacgcccctcatcggacacccctcttccgcgaaatttgtttatagcacccattgagaaaacatcccgccggtgacaacgcgggcgtagatatacctttggccccaattgtctccatccggtggtcccaccggggtccctccaaaacttggcccccctaacgagaaaaaattcgtggcccaacgcaaaaacagcgcgattcg

SEQ ID NO: 2815 - DNA, 975 bp, Homo Sapiens
  misc_feature (491)..(501): n is a, c, g, or t
ctctacaccacaaaaataccccctctcccccatttggcaaaaaccccccaggggcggggccccctttatcagggcaaatttccaacaaatgagataacgcgaacaacatctttctattcacgtcagactttctgagagatcttttagaaagttagtttttaagatcagtctaaaagatattccagaacatactagaatatgatctaattattctttcagttgtttacagaaaaatgaaaccacagaattattcctgttacctgggtggaagatcctaatagctaggtgtaaatttggataaggtacagtaattcgaaataagtagtgcatgaagttttaatgtctggtttctctataaagcataaatagattttaaataccttatatctgtgacccagaatgtcaaattacagcatgtattgacagtagctgtctattgcagagaggcaatacttggcctgctatgaaggacaataaagaaaaaacaaacnnnnnnnnnnncttgagagaaaagagtattaaatagaaataatatcagggaaaataaaagcctggtcccaaaataaaagggccattaattgaagagaacgattttactttttcttgacaataaacagcattatccctattattaggaataatgtaataccacctcattcttattatgtattataatcattatgtatatatgaacacatatataaaaatacagacactgcatggtgactaagcaattttggaataaatccatagactaagtcacagcatgcataaattgtttatatcttaactgctcatttatacctgaacaaattttcattaagcatactgctaattttcaaatgatgtaataaaaaatctggtggcagtactgtattattttgctgaattaccatttgagaaaaaagaagctacctgcttcatctattccaatatagtagatcctgggtcgtcttataagaatacatgtataga

SEQ ID NO: 2816 - DNA, 1487 bp, Homo Sapiens
  misc_feature (60)..(68): n is a, c, g, or t
  misc_feature (106)..(106): n is a, c, g, or t
  misc_feature (109)..(109): n is a, c, g, or t
ggttttttgtacagctgccaagcttaaccatggtttttacatttttagagggttgtttgnnnnnnnnncaaattaaacaccagccaagaagaatgtatggcaaagncancaggtggcctgcaataatttactaaccagctttttacaaagaaaagtttgctggcctctctgttctatcaaaaaccaactgagagagatagctactggaatataccaatgagtattaaacaagacaccactgtaatgtgccagtgccatcagcactactcatttctaaaatgaggcacttctgtttgaatatgtacatttccaaaacataattacatctggtaagtagtactaactctagccctttgaaattagacctgcacgtgaaatcatagcattcttaggggctgaagtcaataattacaaagcatttcagatgtcaatcattgagctcttcagtagttagtggtttaagaccatttacagtcttaaatattaataaaactcataatttagctattgtcaataagaggtgatattgctgcattatttaaataacatgctataaaaataggtttagacatcccaattccttatactcagaagcaagaataactagttaacttagtaactactttcaaaaatgggaaatgtttaataaaaagtgcaaaactttagctaaaaggctttggaatgcaaagactggagcctcttagcaatcactcccagctggcataggcttctcctaataaagttagtctgcaatgattgctgtgggaaatgaacagctgtctcttgtcagtgagcctttttataaaaaggatgacaggtccatgagcaaattctttaaaagtaaaatcagttcagagctgctcaacacacaagttttcagtgggttggttaaataattcctggtcagtgggctataatcatgccacaaaacagcatggtactggatattttccttcttcgggccatactgctaagcatcacatcacaaagacatctctgtgaagctgagttttaaaatgctcagtaaatgctgaggtagatggtttcaaatgaagatcttctatactctgattcgattgggactagcttctttgtgtatcctccttctgggaaatatcttccgcttaagtgcaattaactgctcagcaaaaaatgagaatatagtaaacataatcaatgttgctagtacacaatgggtccaaaacttcaatttgtctcgataagccctccattcctgcagctcatgcatatgaaggaaacggtttcgatactctcttggcagttcaaattgggaaggtatggggaacatggattcatagaagtccctgagaacagccttcactgtctgagcatctttatgattgtggtcaatgttgtcattcaggcaaacaaacttcctagggttttttcttatgtcatccaactggccaaccacatgagacacgttggtacgactcattttaaaagcgatttcttcttctcccatg

SEQ ID NO: 2817 - DNA, 1073 bp, Homo Sapiens
  misc_feature (968)..(968): n is a, c, g, or t
gccatcccggagggcccagccagcgggctcccggaggctggccgggcaggcgtggtgcgcggtaggagctgggcgcgcacggctaccgcgcgtggaggagacactgccctgccgcgatgggggcccggggcgctccttcacgccgtaggcaagcggggcggcggctgcggtacctgcccaccgggagctttcccttccttctcctgctgctgctgctctgcatccagctcgggggaggacagaagaaaaaggagaatcttttagctgaaaaagtagagcagctgatggaatggagttccagacgctcaatcttccgaatgaatggtgataaattccgaaaatttataaaggcaccacctcgaaactattccatgatcgttatgttcactgctcttcagcctcagcggcagtgtactgtgtgcaggcaagctaatgaagaatatcaaatactggcgaactcctggcgctattcatctgcttcttgtaacaagctcttcttcagtatggtggactatgatgaggggacagacgtttttcagcagctcaacatgaactctgctcctacattcatgcattttcctccaaaaggcagacctaagagagctgatacttttgacctccaaagaattggatttgcagctgagcaactagcaaagtggattgctgacagaacggatgttcatattcgggttttcagaccacccaactactctggtaccattgctttggccctgttagtgtcgcttgttggaggtttgctttatttgagaaggaacaacttggagttcatctataacaagactggttgggccatggtgtctctgtgtatagtctttgctatgacttctggccagatgtggaaccatatccgtggacctccatatgctcataagaacccacacaatggacaagtgagctacattcatgggagcagccaggctcagtttgtggcagaatcacacattatntctggtactgaatgccgctataacccatgggggaatggttccttcctaaatgaaagcagcaaacttccgaaagggcgaatgtttggaaaaaagaccggataattt

SEQ ID NO: 2818 - DNA, 145 bp, Homo Sapiens
accaacattggctcgaagcatgctggaacttcaaccccagcagatgacggggaatgggggtggatgtcaggtaagcaatttctggtcccactacaaaactttatttttgattagagtaccattctcaatctcttctacaaaaagc

SEQ ID NO: 2819 - DNA, 967 bp, Homo Sapiens
  misc_feature (948)..(948): n is a, c, g, or t
ggagagaattcagagccaaactaacatcagatgcagagaaggaatcagtaatgatgtttggacggaaccttcgtcagctccttttaacaagccctgttccagggcgcaccttaatgggagtggatcctggttataaacatggttgcaaattagctataatttctcctactagtcagatacttcatactgatgtggtttacttgcattgtggacaaggcttccgagaggcggagaaaataaagacacttttgctgaatttcaactgcagcacagtagtgattggaaatggaactgcctgcagggaaacagaagcttactttgctgacctgataatgaagaattattttgcaccactggatgttgtttactgtatcgtcagtgaagcaggagcatcaatctacagtgtcagccctgaagctaacaaagagatgccagggctggaccctaatttgagaagtgcagtttccatagcaaggcgtgtacaagatccattagctgagctagtgaaaattgagccaaagcacattgggagttggaatgtatcagcatgacgtatcccagactttactcaaggcaacactgggacagtggttggtagaagaatgtgtcagctttgtgggagtggatattaacatctgttcagaagttttgttaaggcatattgcaggactcaatgccaacagggccaaaaatattattgaatggcgagagaaaaatggaccctttatcaaccgagaacagctgaagaaagtgaaagggctgggcccaaaatccttccaacagtgtgctggcttcatcagaatcaaccaggattatatccgaacgttttgcagtcagcaaactgaaacttcaggccaaattcaaggagttgctgtgacatcttcagcagacgttgaggtcacaaatgagaagcagggcaaaaagaagagcaaaactgcagtgaatgtnttactgaagccaaatcctt

SEQ ID NO: 2820 - DNA, 662 bp, Homo Sapiens
cttagcaatcacgaatactagtctccgtctcagttttcatatctgtaaaatagtgacggcagtcaccagcaagtgccaaaactctcacagttaaatatttaactctgaggctgactgcagtctcatttctattctcaccttcccaggacactgcctcatcaatcctcttgtctctctcacattttcagtctcagcacaagtccattgccctcttcatatttcacctgccaaacaaaatccttactctgaacctgccatttctttgcgctaccatctcctccatttaaccacttttgctgtcaccaaaacagatgacaaagcaaatatactcccaagagtaagcattgtgcctccaccccatgccccaggttctcctcttcaatgttcatttactccttagccaatcacaatccaatccaatcccttcttgaaaatcaccagcacccatctgtcaatggctcttaggttctattcctggtcttcccaaccctctggtagaaaaccactatctcccactggaagaaaaggataaggtaacaaagacaaaaaggcaggattctattcccagctgtgttactagctactttgtatgatactggagaagccatgctgtttctctgggcattagtttcagtatccatgtcctatagtgaagtcgtatt

SEQ ID NO: 2821 - DNA, 598 bp, Homo Sapiens
tatagaggacccctttgcgatggatatgaccagaaacaacggctggacttggggccaaatatcagtcgcacttaacttaatattgcttggataaaatgtagtttgcagtgttctgaaccaaatccattgaaacttcaagtcctgtcagctctatttttctagatacatcttggatccctcctcctgtctgcacattagttcaactctctgttccaagcactattcttgtcactgggaatataatgatgaaaaagacagacaaggctaccgtccttatcgtttattgcttcaactatggcaaaactcctgatttgtttcactctatctagtttctccattctattttaacactgtggccagactgatatttttcccagactacaaaaatgatggcgtcattctcccaattatattccacaaaatccctcaatattaacccttacctatatataccaatatcaatccctacccactcttccctaccagagccatgcttaatctcttgtcactttctgaacatacaacttcagctttcttgcctttgcacatgtcctttctgccagaatatatctttcccatctcaccctagaaaaatccc

SEQ ID NO: 2822 - DNA, 608 bp, Homo Sapiens
tgcgatgaatttgacccatctgagggtatcccagagccagtctgaatgatgaatggggatccccatttggacaatttttgctttcaggtggcaaagtgagtcttctctttgcactaggggtttagaacctggaattgtggcaaggcatgaaactccttctgttcatgtggaaacagagctgggaattaacattcatttggtaatttcctcagagatgaagtaggctcagttatctgcatgaaaggtagctgtctctggaaaagctaaagatgtgatttctgcatttcctcacttaatatgcaccaagaagtggacattgaccttcagagagtagagctttcatttattgggtaatgaaccaatttgctgtcaaattgtttcatcagatgctattagtcacctgggatacagtggataaggattttaattttattattttcaagggacaagacttttgggactgagcttaatttaggaagacacagtagagtatgcattttctgtagatttctaagaacgagtattttaattattttgagatgatgagttataaaaggtctgtgagttgatttactttttgtaaaccctttggcttgataacagggggc

SEQ ID NO: 2823 - DNA, 447 bp, Homo Sapiens
  misc_feature (32)..(32): n is a, c, g, or t
aggatccccggcgcgtatcgactcactatatngggccaatatgagtgaaaagtgttagaacaatacttggcacagactaagtactcagtaaatattagttgttattggaatggtatcagggtagatggcagagtagaaagctccaggaaattgtgccttcaccaaaacaattgaattaattgtgtaaggaactgtgtgagacaactattttggaactctgagtatagaagaacacttgtagcatccaggggcaaagtctctggtaaatttcagaaaatcatggtcaagttcagctttcacattgtagcagctaccatcttccaccctcaacctcatggcaggcagctgtcagtccacaagccttcctggtgcagcacactggagccagggtgagcaaagaggattttcacgtatcagaagagaaagaggaggtgccctaatatacag

SEQ ID NO: 2824 - DNA, 500 bp, Homo Sapiens
taccgagaaagtgaccggcaagactaatccgcgctaagggaagctgtcaagggccgacgaccttgcctgcgataaggcattgatggctagcccccatgtaagccatcaaacacctcgccgacggggtttcgctaccgatttgacggcgccgacctacgatgtacctgatcgatacaaggaatcagcgccgggtacatggcgagctcgtcatggagatgggtgaggcttggcgaagtgcgaatctcccccacttctgaggtcatgacctttagggaaacgatgccgagaagcccaccaaaaccgtggtgtcaccaactcgaggacttaggtgtggcgagtctggagcaggcagagtctcgtctaggctgaacgcaggggtcattggagacccacattctcttcctggcgggaacacctcgaggaaagagcaggcgggaagtcaccatccaagagcttgaagccatgcttaagcgcactaccgaaaaccggtcagcatcacg

SEQ ID NO: 2825 - DNA, 1187 bp, Homo Sapiens
  misc_feature (908)..(963): n is a, c, g, or t
  misc_feature (983)..(991): n is a, c, g, or t
  misc_feature (1026)..(1038): n is a, c, g, or t
  misc_feature (1063)..(1115): n is a, c, g, or t
ggggcggaaaagcgggctgtctcggaaactcagagccgggttcctcccgggtttctgccgggtttctccctgcggctcctgggttgttgagactcttgtgaagatggcttgcgctgccgcgcggtccccggccgaccaggacaggtttatttgtatctatcctgcttatttaaataataagaagaccatcgcagagggaaggcgaatccccataagtaaggctgttgaaaatcctacagctacagagattcaagatgtatgttcagcagttggacttaacgtatttcttgagaaaaataaaatgtactctagagaatggaatcgtgatgtccaatacagaggcagagtccgggtccagctcaaacaggaagatgggagcctctgccttgtacagttcccatcacgtaagtcagtaatgttgtatgcagcagaaatgatacctaaactaaaaacaaggacacaaaaaacaggaggtgctgaccaaagtcttcaacaaggagagggaagtaaaaaagggaaaggaaagaaaaagaagtaacctagtatcagcatcaagtatgtggtactactgtaagagacatgaatggagacttctaatttgtatcggagggaaacagaagctttttgtttgcatcatttaactgaactgtgaacccttgtgcctctcatctttatcatcggagttgacagtgaaacaaatttacatcagaagtttgcatctcgcgtatatgccgtataaaagaatttttttgtctttcaatgcagttttttggaagaaaatatttttaaatggacaatggactgtacaataagttacttgaaataagttgtttcagataaatttcaattagatttaaaataaacattatgtccaccttttaagttaatgaaataaaatttgaaactgnnnnnnnnnnnnnnnnnnnnnnnnnnnnnnnnnnnnnnnnnnnnnnnnnnnnnnnngaagaaacgccacgaccctnnnnnnnnntttcaaaaccatttctttggcgaaaggaccccccnnnnnnnnnnnnngtggaaatagctgtttcgttggcgnnnnnnnnnnnnnnnnnnnnnnnnnnnnnnnnnnnnnnnnnnnnnnnnnnnnnaacggaaggaaacagggccactcctgtttccccaaaaaacccgccactgaaaaaaagggcggggacccccac

SEQ ID NO: 2826 - DNA, 557 bp, Homo Sapiens
atgacctggagaggtaaagcacctccaccaccactacaatggcaaggttgggttaccccagtattaatgttgggcaagattactgtggaaaggaacattagttggggcaacgtaaactttacttgagcaaatgatgctcccccttactccccacctcctttctttttcttaaaattaactttatcttggaattatttttttaacctagaaataatgaagtgtatataccagaaatgtaaccatctcagaaaaccttcagcttctctaccactgagatatgtggatcacaaagtgaggatcctcatatttatttgcctctaaagagaatagggttaagcagttgctgtcttgtagttaaggaatccttatagcagtcaggcagcatgtgacttaactcactttaccagggctagggttctttatggaggtttgaaggcaagtttacagttagaagcgttcatttctcaggctgtattctgaattcacatatcttttgaccatttcaaaatgctgagagtgacaatgcagactttgggtgttctgaactgcgggtccgt

SEQ ID NO: 2827 - DNA, 1070 bp, Homo Sapiens
ggggagccgggtggatggtactgctgcatccgggtgtctggaggctgtggccgttttgttttcttggctaaaatcgggggagtgaggcgggccggcgcggcgcgacaccgggctccggaaccactgcacgacggggctggactgacctgaaaaaaatgtctggatttctagagggcttgagatgctcagaatgcattgactggggggaaaagcgcaatactattgcttccattgctgctggtgtactattttttacaggctggtggattatcatagatgcagctgttatttatcccaccatgaaagatttcaaccactcataccatgcctgtggtgttatagcaaccatagccttcctaatgattaatgcagtatcgaatggacaagtccgaggtgatagttacagtgaaggttgtctgggtcaaacaggtgctcgcatttggcttttcgttggtttcatgttggcctttggatctctgattgcatctatgtggattctttttggaggttatgttgctaaagaaaaagacatagtataccctggaattgctgtatttttccagaatgccttcatcttttttggagggctggtttttaagtttggccgcactgaagacttatggcagtgaacacatctgatttcccacagcacaacagccctgcatgggtttgtttgtttttttactgctcactcccaaccttttgtaaagccattttctaaacttatttctgagtgtagtctcagcttaaagttgtgtaatactaaaatcacgagaacacctaaacaacaaccaaaaatctattgtggtatgcacttgattaacttataaaatgttagaggaaactttcacatgaataatttttgtcaaattttatcatggtataatttgtaaaaataaaaagaaattacaaaagaaattatggatttgtcaatgtaagtatttgtcatatctgaggtccaaaaccacaatgaaagtgctctgaagatttaatgtgtttattcaaatgtggtctcttctgtgtcaaatgttaaatgaaatataaacattttttagtttttaaaataaaaa

SEQ ID NO: 2828 - DNA, 501 bp, Homo Sapiens
cagaagatgaaatccagagaaatcgtttgtcagaggaagagatccgaaaaattcctatgttttcttcatataatccaggggaaccaaacaaggtattatacctgaagaaccttagccctcgggtgactgaaagagatcttgtgtcattgttcgctcggttccaggagaaaaaaggacctccaattcaattccgaatgatgactggacgaatgaggggccaggcttttatcacctttcccaataaggagatagcatggcaagcattgcatctagtaaatggatacaaactacatgggaaaatattggtgatagagtttggaaagaacaaaaagcaacggtcaaatctccaagcgacttctctcatatcatatgctacaggcatatgaattttagaagaggaacatacaagcaaagaatgccaaacggaaatggaaataaagcgttctctagaaaagaggatgccagtcacaaatcccccagttgtttgtttatggttgctgg

SEQ ID NO: 2829 - DNA, 696 bp, Homo Sapiens
  misc_feature (14)..(14): n is a, c, g, or t
actgacctaaacancgagggaaacttaagaacgtttaaaatataggagtccgtgatttccctgtgttttcagtttctttccttctgtgaacgatgagacttggagaacgggctggtccttcaccacttcctgttggccctggctggccggggaaggtggcagcggcaccggactgacctgcagtgacccgcgatgccgcgccacgagggacacttatggcttcattcgagagctgctgccaaaacgcctggcgccgccaccgtcgggggctggcttcgaggacgcccgcctgcctcgcgggtcgtgtccgcgggactgtgttcgtacgtgcatagtttcgatatcacatcgcggggctgtgttcgtagctgcgtcgtttcgatatcacaccctctgtgtgccgccttacttcctgcttcgagaatgtataacgtggaaatccacgggaccaaatttctgcagaggccttgccggatggttccataactgtagagtctaattgctatccattacagaaattaatcgttcagttgaaagaagtactgatgacttttcaaaacaaatgaaccaccgtagctgacagagaaccgtatcgtagaggtttgtagttagtgcttatttttgcatgttgatgttgactagctaataaactgtaaatgtaaaccatgcgaataaaatggttttctatttctcaaa

SEQ ID NO: 2830 - DNA, 513 bp, Homo Sapiens
ggtcagccaccgagagcacatccacatgaatgccactcagtgggaaactctgactgatcttactaagtggctgggcagagaaggcttgtgcaaagtggacgagacaccaaaaggctggtatattcagtacatagacagggacccagaaactatccgccggcaactggaactggagaaaaagaaaaagcaggaccttgatgatgaagaaaaaactgccaaatttattgaagagcaagtgagaagagggctggaagggaaggaacaggaggtcccctacttttacggaattaagcagagaaaatgatgaagagaaagtcacgttttaatttgagtaaaggagcatgtagctcatcccggagcaacatcttccaagtcaagtactctggggaccgagtgcactgaagacgataggaagttcagcatcagtgaaacgaaaagaatcttcccagagctcaactcagtctaaggaaaagaagaaaaagaaatctgcactggatgaaatcatggagattg

SEQ ID NO: 2831 - DNA, 706 bp, Homo Sapiens
  misc_feature (465)..(602): n is a, c, g, or t
  misc_feature (604)..(607): n is a, c, g, or t
  misc_feature (616)..(631): n is a, c, g, or t
  misc_feature (656)..(666): n is a, c, g, or t
tcctgtaacccgcacgcctagggcagctgtgccgtggcaggcatgcgctcccctggctgagcaccccagagattctcctgcaccttcctcatgccgcacgctgctcatccgtctccatgtgtgtgtaagatccatgccattcactgactcactaacacctgcaaaatctttaaggaaaaaagctgaagggtacgaccatgcacatatgtgacctggaaaatgcaaatttagatcttttatgatttaattgttattgtttcccatagaagttccctccctttgaaattaatatataatgtataaattctgcactgagccatggcggagctgggcagcccctaggttagagtggagacggaggcccaggcgcaggggtcacacctcatctggtttccttcccatctcacagcttagcttgtgcttctcaacaccaagtctttaagagcaataaaaactacaccatgnnnnnnnnnnnnnnnnnnnnnnnnnnnnnnnnnnnnnnnnnnnnnnnnnnnnnnnnnnnnnnnnnnnnnnnnnnnnnnnnnnnnnnnnnnnnnnnnnnnnnnnnnnnnnnnnnnnnnnnnnnnnnnnnnnnnnnnnnnannnntttgttggnnnnnnnnnnnnnnnnaaaaaaatttttaaaaatttttttnnnnnnnnnnnccccccaaggaaaaagaaaaagggtgctaatttgttcctc

SEQ ID NO: 2832 - DNA, 1614 bp, Homo Sapiens
ggggcgcaggcgcaacgcgactcccgaggcgcgggccgcccccttggctggtttggatccgggtcagtcgggtgccgagatttgggagagacgctctgaactgactgccccgcatcaccggagcgtcccagctgcgaggagtgtaaacaggaacatcgataagtagtgtaaaaacttgcacaatgaaatccgaagccaaggatggagaggaggagagtctacagactgctttcaaaaaattaagagtggatgcatcagggtctgtagcatctctgtctgttggagaaggcacaggtgtcagagcaccagtcagaacagcaacagatgataccaaacctaaaaccacatgtgcatctaaagacagttggcacgggtctacaaggaagtcttcacgaggagcagtgagaactcagcgtcgtcgacgttctaagtctcctgtccttcatcctccaaagtttatacattgcagtacaatagcgtcttcttccagcagtcaactcaagcacaaaagccagactgactcacctgatggcagcagtgggctgggaatttcatcccctaaagagttcagtgcaggagaaagctctacttctctcgatgctaatcacacaggggcagtcgttgagcctttgagaacttctgttccaaggctcccatcagagagtaagaaggaagactcctctgacgctacccaagtccccccaagcaagtctcaaagccagtgatctctctgactttcaatcagtttccaagctaaaccaggggcaagccatgcacatgcataggcaaggaatgccagtgtaagagatggcatgatatggaagtgtattccttttcaggcctgcagagtgtccctcccttggctccagaacgaagatccacacttgaggactactctcagtcgctgcacgccagaactctgtctggctctccccgatcctgttctgagcaagctcgagtcttcgtggatgatgtgaccattgaggacctgtcaggctacatggagtattacttgtatattcccaagaaaatgtcccacatggcagaaatgatgtacacctgatagcaagaagctaattcatatgctttaaaccaatgaaggcttgtcaaagagatttagttaatggcagaccttgtggccactttgtgtgagaagacatctctttctgctcactgtgcttgcaataaaaacttttcttggcatctcagttaatcttcattctttcaacttactctcttgagttcttacatacacttcaaggcgagcggatcaaagaaaaatcccccttatttagaaatgttcctgggggatgaagaaaccataattacttgagactggcagcagtgggtatatggtaaaagcctttgtaaaacagtgcatttttcagatttgtttaaggtttgctagccaaggaaagtaaaatgtgattttgtaactgcactaaacatttgtcatgctgtagttgccagcccagaatattagaagttacaagactgatttaaaccgtctctgatttaatgcaagatatattgtgtctataaaggtttctcttgttattgttaagccagagatctaaggtttagattcaatttgaataaactagctggcctgca

SEQ ID NO: 2833 - DNA, 1025 bp, Homo Sapiens
agcatcctgctgttcgcagtggtataaaattcagtccccttatataatctggctccagagcagagaatgggtgtagctagagttgttgagtatcactttcccctgggcacgatgcttcatccagttctcctactaccactgcatctgtgtcagcaacagcagctccaaggacagttcgtgtggcaatgcaggtacctgttgtaatgacatcattgggtctagaaaatttcaactgtggcagttcagtcagttaaagcaggtgcaccattaataaccagcactagtccaacaacagcgacctctccaaaggtagtcattctagacaatccctactgtgatgccagcttctactgaaaatggagacaaaatcaccatgcagcctgccaaaattattaccatcccagctacacagcttgcacagtgtcaactgcagacaaagtcaaatctgactggatcaggaagcattaacattgttggaaccccattggctgtgagagcacttacccctgtttcaatagcccatggtacacctgtaatgagactatcaatgcctactcagcaggcatctggccagactcctcctcaagttatcagtgcagtcataaaggggccagaggttaaatcggaagcagtggcaaaaaagcaagaacatgatgtgaaaactttgcagctagtagaagaaaaaccagcagatggaaataagacagtgacccacgtaatggttgtcagtgcgccttcagctattgcccttcctgtaactatgaaaacacgaaaggactagtgacatgtgaaaaaataaaatagcagctcccaccatggacttcaggctgttagtggcagtaactgacataaacatttgccaaggaagccttcaatcaaagtctaagaagattttaaaacattttttatggttattccaaaaccattttgaccttactggaaataaattaacctatccccctgtttcggggggaaaagaacctccttatggggaatgttgaagaaaaactgccctctttacaaga

SEQ ID NO: 2834 - DNA, 952 bp, Homo Sapiens
gggagatcactaatcaacaaaccagctttcggggtctgacgcgatccttgcctcaggcctctcgaggtccagacagccgcccagcccgctctgcgacgcagcagtgaatagtgtggtacctccttgtctcggttcaggtccagacctccccgtcttccggctgccctgaacgtcaggcgacctcaggaccctgtgattggcgcctgcgccggcggaccgtgaccgaggaaacccctggagggacttgggcattccttgggctccgtgcctgttcttcgtgctcctttcgggcaaggatctcacattatcagtctttgaccgacacagaatgcctggcatttgataaatgtttgttgaacttgaagagacatatggacaatgaatctgcaaagatactggggagagataccaatatcatcaagccagaccaacagaagttccttcgatttgctcccacgggagttccgtctggtggaagtccatgacccacccctgcaccaaccctcagccaacaagccgaagccccccactatgctggacatcccctcagagccatgtagtctcaccatccatacgattcagttgattcagcacaaccgacgtcttcgcaaccttattgccacagctcaggcccagaatcagcagcagacagaaggtgtaaaaactgaagagagtgaacctcttacctcgtgccctgggtacaactcctctccctgatgacctcctgccttaagattgtaagaatcccaatgcaccattccagatccggcacagtgacacagagagtgacttaaatcgtgggaaaggggaacctgtgactgaactcagctggcactccctgtcggccgactcctctaccaggcagtgaccaaaagtcctggaccacgagggcaaatgacatgtgctaatgagaatgtcctggagaacactaactgacatgacacggacatag

SEQ ID NO: 2835 - DNA, 1540 bp, Homo Sapiens
ggggctggcgcgggcgggagctgcggcggatacccttgcgtgctgtggagaccctactctcttcgctgagaacggccgctagcggggactgaaggccgggagcccactcccgacccggggctagcgtgcgtccctagagtcgagcggggcaagggagccagtggccgccgacgggggaccgggaaacttttctgggctcctgggcgcgccctgtagccgcgctccatgctccggcagcggcccgaaacccagccccgccgctgacggcgcccgccgctccgggcagggcccatgccctgcgcgctccgggggtcgtaggctgccgccgagccggggctccggaagccggcgggggcgccgcggcccgtgcggggcgccaatggatcgccactcccgctacatcttcatctggctgcagctggagctctgcgccatggccgtgctgctcaccaaaggtgaaattcgatgctactgtgatgctgcccactgtgtagccactggttatatgtgtaaatctgagctcagcgcctgcttctctagacttcttgatcctcagaactcaaattccccactcacccatggctgcctggactctcttgcaagcacgacagacatctgccaagccaaacaggcccgaaaccactctggcaccaccatacccacattggaatgctgtcatgaagacatgtgcaattacagagggctgcacgatgttctctctcctcccaggggtgaggcctcaggacaaggaaacaggtatcagcatgatggtagcagaaaccttatcaccaaggtgcaggagctgacttcttccaaagagttgtggttccgggcagcggtcattgccgtgcccattgctggagggctgattttagtgttgcttattatgttggccctgaggatgcttcgaagtgaaaataagaggctgcaggatcagcggcaacagatgctctcccgtttgcactacagctttcacggacaccattccaaaaaggggcaggttgcaaagttagacttggaatgcatggtgccggtcagtgggcacgagaactgctgtctgacctgtgataaaatgagacaagcagacctcagcaacgataagatcctctcgcttgttcactggggcatgtacagtgggcacgggaagctggaattcgtatgacggagtcttatctgaactacacttactgaacagcttgaaggccttttgagttctgctggacaggagcactttatctgaagacaaactcatttaatcatctttgagagacaaaatgacctctgcaaacagaatcttggatatttcttctgaaggattatttgcacagacttaaatacagttaaatgtgttatttgctttaaaattataaaaagcaaagagaagactttgtacacactgtcaccagggttatttgcatccaagggagctggaattgagtacctaaataaacaaaaatgagccctatgtaagcttctacatcttgatttattgtaaagatttaaaagaaatatatatattttgtctgaaatttaaaaaaaa

SEQ ID NO: 2836 - DNA, 1121 bp, Homo Sapiens
  misc_feature (92)..(92): n is a, c, g, or t
  misc_feature (109)..(109): n is a, c, g, or t
  misc_feature (148)..(148): n is a, c, g, or t
  misc_feature (340)..(348): n is a, c, g, or t
  misc_feature (614)..(614): n is a, c, g, or t
  misc_feature (626)..(626): n is a, c, g, or t
  misc_feature (650)..(651): n is a, c, g, or t
  misc_feature (658)..(688): n is a, c, g, or t
  misc_feature (691)..(721): n is a, c, g, or t
  misc_feature (724)..(743): n is a, c, g, or t
  misc_feature (745)..(747): n is a, c, g, or t
cctaatgaataacagacgatgagttacagtgggctcgcccttcccccccgcgagggcgggtttcttacaacccctgaactgttttttattgnggggcgccaccgacccnggggccgtttgtgttctcccgcccgcgctttttttcaangccccgggggagaaaaattaaaatgaccgcaggcgggccgccaggtggcgtttgtttgcgcccccgggcggggcgatatgtttgttttcccccacacgtgcttgtgggagggggctcctcccacgcccgcggagggaagttgggttataaaataacaacccctcttttctccgcagcgtcgcgttcgtggtnnnnnnnnncttttaataagaatttgtccgacccgcttccggccgtctccccgtgtttagaagggggcgggcgaaaataccctctctctaacccccccttttgggggttttctctcgcaacaccccttcggtttcttccccccggccgtttttttctttgtggggaaggattccacggccccgtttctctttctccccgcgggctcttttgttgtcccgggggggtgcccccgtggcccttttccctttgccggggtccttcttgcccaaccctntgggtttcgccngcttttctttgggcgctgggggcnnccccccnnnnnnnnnnnnnnnnnnnnnnnnnnnnnnnccnnnnnnnnnnnnnnnnnnnnnnnnnnnnnnnttnnnnnnnnnnnnnnnnnnnntnnntttaagggaattaaacatttattaagccaggcactgagctgggtattttcaataatgatgtgaatagaaatataactaacatattatattgggatgtctaagattttgtttggcaggcattggttttggcatgcagtaaaaatgaagatgttatgataatagcagttagtgttatctccaatactattgacaaagatttaactacccatgttgtcccctcaaaataggaggagataaatgaataaaaccatggaaaacagagagcacaatgtgccataagcaaagatttacagaatgaaaaatgcaaaataacaaatcagataactatagtcttctataaatctttaagtctaaaaaaatagacattacaatcc

SEQ ID NO: 2837 - DNA, 842 bp, Homo Sapiens
aaaaattcaaggtttgtgaacatgtcccagaatttcggaaaagtggagagggcccaacccaaaggtttcgttaaatagcccaattccagggagtttaccatcccgggtaggaacctcaagaggactttggaagattcccagtttttgtttcttttcctccattcccggggggtaatttcccggagtcccgcaacctgtgttccatgagttttcttatgtgttattaacaccccatacacagatctcccagtgcattgtactccccccatttggatggggtctgtaggaaagtgttttctggcaaaatggtcattaacctcttcaatcccggaatatatttcgcgctgagtttcgtcatttaaaacatgtgcaacatgctcggaaaaaatcttttctctgccagttctgggcatggataccaaccatagtgacaccgatgggccaaggcgcatttccaatggccatctgaagataagcatcatttgccttcacgtattctctctgcaacatgaatttaataatatccgttattgattctttaatatcagcaggaagattccttttccgtagctttctaaaaagtggtcttaggtaggactcggtctgtatctgggtcgcactgttcagtttaccctgcacactgcgtttcacataatcttctctggcattcaattctttagcccaaacgccaagaagaaacttcaggaatttggtgatgatgtccatgtccttatgatcatcgcctttccctaaggactctccaagcgcctctaactcttcaattgtggtgttttcctcatgaactttcagatcattctgtgtgtcttcctctccaggctcct

SEQ ID NO: 2838 - DNA, 609 bp, Homo Sapiens
  misc_feature (469)..(502): n is a, c, g, or t
aacctggggaccgtttatagcacagtggtatgctctgggatccaaatggacctttgaactttcgtgaagatgggaccgtcccctggaggaaagtcattcctgcctaatccatcgagagaaagaggcttacgaaaaactttgcctctgatgctcagccccacccccaaatagcacacaagcttgttaaccccacctcttacaaaatgtttagattctgtaggtgttaaaagcctttctggaagtattgcattctgccgtgtttataggtgttcactttcctccagagctgattaactactgacatgacttggctttctcatccagaaattatggaaacagggtctgtcagtggcaggaggccgtgctgtgttttacttggatgacacaatgcagtttacttgcctcttcatacccatgcatgctgctcaccctagacaatgacatataagccgtatatagatcaatgtcnnnnnnnnnnnnnnnnnnnnnnnnnnnnnnnnnnaagtgtaacaaggaacactaaaacagtgttgattcttgtctctgaagacaaataattaaaccttttttttcccaactaaagaatggatttaattaaactatgtattg

SEQ ID NO: 2839 - DNA, 505 bp, Homo Sapiens
atgccacccaaggatatagtcagcaagaatggaagtgaacgaacgcgcgaagctgctgtagtcagagactagactctcccgtgagcttgaatacatccatggctctccccctgcgaatccgaagcacgccacgcgcgggggcgagagtccgctgaaatgagcgcacctgaggcccgctcatcgaagtgcgtcgagtaaccctgtcctctttgacccaagtctgatccgtaccccctcttggccagatactcttcaatggcctgccggaacaaccaacgccaccgacaccttcatgctcgcggcgagccgttgcagctcggcgtagtcacctgctgggaaactgatcgaggcccttacggtctcggtatcggattgttgagcactggcgcgactggatttcatggcgaccactccgctgatatttcaccactttacaccatggtggtgaacaattgaactatggcaagccagtgcaaccttgtggagcgccgcggtttgtgtcgag

SEQ ID NO: 2840 - DNA, 1410 bp, Homo Sapiens
  misc_feature (494)..(510): n is a, c, g, or t
  misc_feature (554)..(600): n is a, c, g, or t
  misc_feature (633)..(845): n is a, c, g, or t
gggcgccccacatcatgtaaaacgctgtgttttttgtgcttgcccccccctgttgtttctcgctgcggggtgcgcaggtgttttaattgtgaatgtatagggggcgcgacaaacaaagtatcggagaggcgctcgtccccagcgcgggggtgctgacatattatttatttgctccctcgcacattgttggacaaataaatgtgtttcgcatttgtgtcgggcgggagatatctatgtatagagagtttaaatacacacccgccctctgttactcggcatgaggtgttatcccgccccgggggggcggggcgggcgatattatttgatttattaatgaggggcgcgccacacgcggtgggacggaacaccttttcgtcattagtaatagccccccggagagaaaaaccgctcttcaagaagagttcccaccgctcggctggagggtgatttttactacacagcggatgtggttggtgtctaccgcggcggggggnnnnnnnnnnnnnnnnnggtgggggggtccggacgaagggtgttgtttggggtaaacaggnnnnnnnnnnnnnnnnnnnnnnnnnnnnnnnnnnnnnnnnnnnnnnnctggggggcccgccgcgccccccccgacggggnnnnnnnnnnnnnnnnnnnnnnnnnnnnnnnnnnnnnnnnnnnnnnnnnnnnnnnnnnnnnnnnnnnnnnnnnnnnnnnnnnnnnnnnnnnnnnnnnnnnnnnnnnnnnnnnnnnnnnnnnnnnnnnnnnnnnnnnnnnnnnnnnnnnnnnnnnnnnnnnnnnnnnnnnnnnnnnnnnnnnnnnnnnnnnnnnnnnnnnnnnnnnnnnnnnnnttttttggttttaacattgtttattatataattcagggactaaaaggataggagaaaatttaaagcagtattaaatttgtgtctgtggactggcattccctgttggaaatattaacagaaaaagtaagaaacaggaatagagaatgatctaggcaatatttttctaaaattagatgaatatgaatattttcaatcagtatgtattgcattgtaatcagcatgtattaaaatcactttaatacatgttggctaaagtattagcaaatccactacagcctaataacttgaccaataacaacaatgcttttatacagtaataaacaaatggcatcttttggatttcttaatttgtccaaattcagctcctactgatgagattccatttaagacaccttgcaggggcagacctttgctatccatgaatgatgccttggctcacctggactctcagactcttccaaggcacatctgtcaggcatgtcctccacgtcttggaagtttgccgagtttgagttgctgtcatgcttgaccgggctgactggagcaaaactggccacatcttatt

SEQ ID NO: 2841 - DNA, 763 bp, Homo Sapiens
aggctggtaccggtctgggatgtatggatcttcgggccattgcttcttgtgctgccatggtgcccctattgttgcccctttctacagaggaacggtgaagaaggaagaagaacagtcagaatgtcaaactttctgttggtacattgttagccaaaatgaagacctgtgttgatacctataccaaccgtttaagaatctaaaagggaaaatgttaaaacaggagtaaaaccagatgcgtcctgatcaagaaccagaaaggacttactcttttggtaccagacatccaaaagactgctgagatagtttatgcagccaccaccagtttgcggcaagcaaatcaggaaaaaaaactgggtgaatactccaagaaggcggctatgaaacccaaacctttgtcagtattaaagtcacttgaagaaaaatatgtggctgttatgaagaaattacagtttgatacgtttgaaatggtttctgaagatgaagatgggaaattgggatttaaagtaaattaccactacatgtctcaggtgaaaaatgctaatgatgcgaacagtgctgccagagctcgccgccttgcccaggaagctgtgacgctttcaacctcactgcctctgtcttcatcctctagtgtagtagtacgctgtgatgaggagcgacttgatatcatgaaggttctaataactggtccagcggacacccttatgcaaatggctgctttgagtaagatgtgtatgttcctcaagattatcccagttcacaccac

SEQ ID NO: 2842 - DNA, 803 bp, Homo Sapiens
  misc_feature (761)..(761): n is a, c, g, or t
ggtggctcaggagaaattggatcagaaacaagtgacaaaaaggattcattttatacagattcaagtagtatcttaaactacagagaagattcgaatatactttcatttgatagtgatggtaatcaaaacatactttcaagtactttaactagtaaaggaaatgaaaccatagagtccatctttaaagctgaagatttgcttccagaagcagcttcactctctgaaaacctggatatcagtaaagaagagacccccccagttagaacacttaaatcacagtcatctttaagtggaaagcctaaggaacgttgcccacccaacctggctcctctctgtgtttcttataagaatatgaaaagaagctcttcacaaatgtcattggataccatttcacttgacagcatgatattggaagaacagttattagaaagtgatggaagtgatagccatatgtttttggagaaaggaaataaaaagaactcaactacaaattacaggggcacagcagaaagtgtgaatgctggtgcaaacctacagaattatggtgaaacttctccagatgccatcagtacaaattcagagggtgctcaggaaaatcatgatgacctgatgtccgttgtggtatttaaattactggtgggtatggggaaattgacatccgaggggaagatacagaaatctgtcttcaagtgaacccagtgacaccagaccaattaagggcatatcagcccttcggcattaccctttgtaatcgtcccagnttggtttccgaatcagaaagctggtaatttcaattccaaaac

SEQ ID NO: 2843 - DNA, 1470 bp, Homo Sapiens
gagacctgtttgtcccaatggggaagtttgatgctcgaagtgaccgaactggggaggtcatctttaaggacaatttttcttctgcaattgccggtgtggtagagggagattaccggatggatggccacatacagttaatctgctgctcagtggatggggaaatccggggctacctgcctggcacggctgagatgaggggcaacctcatggacaccagtgcagagcaggacctgatccgagagctgagtcagaagaagcagaatctgttgctggaactccgtaactatgaggaaaatgccaaggctgaattggccagtccactgaacgaggctgatgggcatcggggcataatcccagccaataccaggctccacaccacgctctcagtcagcctggggaatgagacccaaactgctcatacagaattacgcatttccacttctaatgacaccaacatccgagcagtattgatttttgcagaaggaatttttacaggtgaaagccacgtggtacatcccagcattcacgacctctccagttccatctgcatccctattgtgcctcccaaagatgtccctgtggatctgcacttgaaggcattcgtgggttacagaagcagcacccagtttcatgtatttgaatcgacaagacagctccctcgattctccatgtatgcgctgaccagcctggaccctgccagtgagccaatcagttatgttaactttaccattgcagaacgggcacagagggttgttgtatggctcggtcagaactttctgttaccagaagacactcacattcagaatgctccatttcaagtgtgtttcacatctttacggaatggcggccacctgcatataaaaataaaacttagtggagagatcactataaatactgatgatattgatttggctggtgatatcatccagtcaatggcatccattttttgctattgaagaccttcaagtagaagcggattttcctgtctattttgaggaattacgaaaggtgctagttaaggtggatgaatatcattcagtgcatcagaagctcagtgctgatatggctgatcattctaatttgatccgaagtttgctggtcggagctgaggatgctcgtctgatgagggacatgaaaacaatgaagagtcgttatatggtaactctatgaccttaatagagacttgctaaatggatataaaattcgctgtaacaatcacacagagctgttgggaaacctcaaagcagtaaatcaagcaattcaaagagcaggtcgtctgcgggtggaaaaccaaagaaccaggtgatcactgcttgtcgggatgcaatctcgaagcaataacatcaaacacactgttcaaaatcatgcgagtggggacagcttcttcctagtgaggaaaatccaggtcatgaagttcctggcaaagatttcctgttaaaaacctatgctggttgctgtggatcacacccg

SEQ ID NO: 2844 - DNA, 879 bp, Homo Sapiens
gggcctcttcaagttgactgcagtccatcacccacggccattattaatttgtttttgcaaaggccaggaaggtgaatctaatggagatggaaaccaccacacctgcttccctggtctctgatgttggtgttaacctctgcaattcctcaagcaaagcactccttctatcaggctcactgtcttgctggagggaggaagttccacaggctctcacttggttctttctgccgtaacaacccttactcctccggccaaggagccaatgtgagcattcagctggcagctaagaatgtgtatcccaataaacagggcagacctacagacccactggacccactatagatggacttgggccacagtgccttccatgacttcaataaacagaggggtgtggtgatcttgacaaagtcctggcgtcaatgtcagtgtccggatacacaccatgttcccgtcctcaaaaagcctctctgtacccctctatgttggtgacacaaccctggcaaatggccacacactcctttggggacagagtacgagcgtaactggtgcggagtgggtggcatgctttatattgggagagccgcacgccctacggcttccagcctcctcttcagtttggcagctgtgagtctgaatttcactcaaatctggaaactgtggtgagacactgtggcagctgctgtccggctggcagagcctgacgtgtctctgatcatactcactgggtcagcaacaccctactgaccttgtccagaatcccacatcccagttgatatcagggcaatcagtttcctggctgttttccccaatatcaacccgggcttacagaagacagtcaccacagagctcctaccaggagtcactcccgtaccaggggat

SEQ ID NO: 2845 - DNA, 727 bp, Homo Sapiens
tccgaagagacacccaagaacaagtgggcctcatggtggagctgcgatagtgtcagtgaaggtggttttgctgattctgatagccattcatccttcaagactaatgaaggtggggagggccgggctgggggaagccgaatggaggctgagaaggcctccacctcaggactaggcatcaaggatgagggagacatcaaacaggccaagaaagaggacactgacgaccgaaacaagatgtcagtagttactgaaagctctcgaaattacggttacaatccttctcctgtgaagcctgaaggacttcgccgcccacctagtaagactagtatgcatcaaagccgaagactcatggcttctgctcagtccaaccctgatgatgtcctgacactgtccagcagcacaggaaagtgagggggaaagtgggaccagccgaaagcccactgcaggtcagacttcggctacagcggttgacactgatgatatccagaccatatcctctggctctgaaggggatgactttgaggacaagaagaacatgactggtccaatgaagcgtcaagtggcagtaaaatcaacccgggctttgctctaagggctcaacatatatcaactcctttgtagtcacagtgaccttgtctgactttgcaaattctggggtcattttatgatcactgtggatagactacaggtgagttaaacggtgagcattcagaacttttccgagtaa

SEQ ID NO: 2846 - DNA, 691 bp, Homo Sapiens
cagtgaggtttcaacattttgttagctgtgtgcagcattcccagagcttcagtctctgtgcatactcagctttgtagaaccatgctgcaaagccatataccgatggggttatccatgcaactatctccattcctacaatgtccttaatatgagatcatcaaacattgatagtagggactccatggaatatttgcccagtaagggtaagaaatctttcgggtaagagtatggatggttcttcttttacccaatctgcttatagctttttttgtaaacagggaaatgttgagtggtacttgtattcccttatcaaattaatcacatagcttttatacagaaactcttcctgtgtgagctgttaaggtgccaaattggctgtcatttgtattcatgacacataccataaagcatctgctaatgctttaatggattgattcaattaagacctgagtgacactatttgtaaatataactagttgtgaagcacacatacctttattttgggaatttatgagaaaatatagaaaaccacagatcagggattcatatatgtagctcaaaaattcccaaaagtttactgttagagttggcaatctcctatcactatttcagtgtcagaacaaactgaaaataatggctcgtgtttatgttgaagataaatagcaccattactgggggaagttattcaaaa

SEQ ID NO: 2847 - DNA, 1417 bp, Homo Sapiens
  misc_feature (716)..(820): n is a, c, g, or t
  misc_feature (972)..(981): n is a, c, g, or t
ggggctcgtgaccaccatttccgacccgggcaagatggcagcggcgctgcgcgtgcgttgttgagtgttcgggacgccggcctgcaggcgccatggtcttcctcaccgcgcagctctggctgcggaatcgcgtcaccgaccgctactttcggatccaggaggtgctgaagcacgccaggcacttccggggaaggaaaaatcgctgctacaggttggcggtcagaaccgtgattcgagcctttgtgaaatgcaccaaagcccgatacctgaagaaaaagaacatgaggaccctctggattaatcgaattacagctgctagccaggaacatggactgaagtatccagcgctcattgggaatttagttaagtgccaggtggagctcaacaggaaagtcctagcggatctggccatctacgagccaaagactttcaaatctttggctgccttggccagtaggaggcgacacgaaggatttgctgctgccttgggggatgggaaggaacctgaaggcattttttccagagtggtgcagtaccactgaggactgttgctgtattgattaggaaaagagacagagtaatttgcagtttgtttgatttatacttttgtttatctacaacccaataacagacatgagggatggccctgtctctctgggacagagcctcacagatgatgtccatgttttgtgtgaatgaaactcaaacactcttcnnnnnnnnnnnnnnnnnnnnnnnnnnnnnnnnnnnnnnnnnnnnnnnnnnnnnnnnnnnnnnnnnnnnnnnnnnnnnnnnnnnnnnnnnnnnnnnnnnnnnnnnnacccttgccgagccgcctcggccccctcaaaaagttttcaaaacctttcttttgggcgcgggggcccccaaaaggaaagagaaactgggcccatagctggtttcccaaggaaaacccgtggccattaacaaggggcttgggattcccccacnnnnnnnnnncccccggggggaaaaccggagcggttttagaaaaatatccaaaagggagttctcggagggcctttaccgggatcctatccaacgggggatcccacagcggaaccctcatattatcatttttaacgccccccggccccgggcccatttaattggaagagaactgtggggaaaatttcatttaaaaccctttccggccgcgaaatgggaaaaccccctcccaccaacacggcgtttggttggaacacctttaaatcccgccccgggggggaattcagaacccaccttttgggcgcctctttggcggtaaaaaatatatttcccccccatggggggagaaaacacgcgggcgggcagaaaaaaatattgtgtctctcattatttgggcgcacaccctgtattaaaaatccaaaaacactgtggggggaaacaccttccc

SEQ ID NO: 2848 - DNA, 444 bp, Homo Sapiens
tttcccacgctcagtcctataaccagcctttctcaggaactccaagctagaggtactaaaacttaaccctctatggaaggggaaacaaagtacgaatgcaaactcacttgatgtgtcagttatcttgctctgggacttccaaacaagaactctgctctcaagtctggtgtacctctgagaacacagtgaaagccaggggtctacagaaccacagacccatcaacaagaggccccgggtagactaagatctgaaaagctttacttccaaagtcaagctcatttcttaagggcatatagttaacagcttgtagcagtctataggtaatcttcttattctttcataatcttatacaccatcacagagaaacatggaagcagactagtcagagaaagctaattctgaccaacttgatactatatgaaaataagcaaaaagctatagca

SEQ ID NO: 2849 - DNA, 301 bp, Homo Sapiens
actgagaggtctgctggttagtttgatgggcttccctttgtaggtgacctggcctttctctctggctgcccttgacattttttctttcattttggaacttcaagaatctgatgattatgtgtctggggattgatcttctcatggagtatcttactgtggttctctgcatttcctgaatttgaatgttggcctgtcttactaggttggggaagttctcctggaggatattctggaagtatattttccaccttggttccattctccctgccttttatgggtaccctgatcaatagtttggtct

SEQ ID NO: 2850 - DNA, 500 bp, Homo Sapiens
ggacactattaaatgcaaaaactcctttcaaaacaaaaaagaactaccttatattcaacatttaatgttcttggcctctgcttttatgtctatacaatatactgagttcagtatggtgtccaagagtgccctgtgtggatagacatgtgcactccttccaggagtgggtactgattccagactccagatgcctattattagttaggcttctgagcttgcaatcatattgaatgtatgaagagcgaaatcaaattcttatttttgtacagttttgaagtttatacttagaactgaccacctccccggccacgcggagagctgtacagtgtgtaaatctgcctttatcttggattgattggtacagtatttttgcatctgtgggacctaccttttcgttcagtagtttgaactatatataaactgtacaatctgtaaagtttttatagaataaatattcagctgtgaaaactggttaaataaaactaatatttcttaacacc

SEQ ID NO: 2851 - DNA, 353 bp, Homo Sapiens
gaggtgttaattattgagcatagagcctcgtatttgaaactatttctaagacacactgtttgcatcatgcagttgtgggaactaaagtggtgtcccacacagttaaattttctttgaaagacagaggttgatccattttgtgcttgattcgacaattacctgtctgtgtgatcagcgggtgtcgtatgtgtgctgttaaggcagttggggtattatgcttaatcagtttatttgcatgttattttgattctaaccagaatggagcaatgaaatattataatgaaattctagtactttttaaatatgggagaccaactgtaatttattcataccctttgctacactcccggtcc

SEQ ID NO: 2852 - DNA, 285 bp, Homo Sapiens
agcagtttgagttggtgtagtgtattcttggttatcagaatactcatatagctttgggattttgaattggtaaatattcatgatgtgtgaaaaatcatgatacatactgtacagtctcagtcccataaaattggatgttgtgcctacacacaggatctagaagaatatgtcaaactataaactgcttgtgattgtgaatgactttgttctttgcttgtgtttttcaatttcctataatgcacatactaacttttaaaaaataaaggttattttaaaagcctgaaa

SEQ ID NO: 2853 - DNA, 177 bp, Homo Sapiens
ctagattgatattcttaagcaataaaagtttactggttgtcctatttgccatattattgaaacttggaaaggataatttgaaacaaggtttgaagttaactgaaatatggagattgaatttatactcaattcttgtgaaaagtcttgcttaataagtatgattaaactttgcttctt

SEQ ID NO: 2854 - DNA, 1422 bp, Homo Sapiens
  misc_feature (924)..(924): n is a, c, g, or t
  misc_feature (943)..(943): n is a, c, g, or t
  misc_feature (1234)..(1234): n is a, c, g, or t
ccggaatttccgggatggcgcggtttgggaacccgcggaagcctgtgctgaagcccaataaacctctcattctagctaaccgcgtcggggagcggcgccgggagaagggcgaggcgacttgcatcacggagatgtcggtgatgatggcttgctggaagcagaatgaattccgcgacgatgcgtgcagaaaagagatccagggcttcctcgattgtgccgcgagggctcaggaagcccgaaagatgagatcaatacaggaaaccctgggagagtctgggagtttacttccaaataaattgaataagttgttacagaggtttcctaacaaaccttacctcagctgaaaatggacaagtattttcaatgactgaaatatagcttctgacaactatgcagaggcattttagagacattggcattgccatgccctctttggagggtagaagaggcaaaacacttttttcaccctttggaatcatagtatgggtagaagttatgatttatcttgaaataaaatcctctgaacagaacttgggccttttgttgggacttaggtactctccttcattcatgaggcctccccctacaccccaggaaactcctttccttcctgaatctgccctaggcaggccgaccgactgcccagtgcatgtgacttatcccctgacatctgaacgctcctcacgcccactctagccgccccttagctctttcggtcgcgcgagacgagagaggctaaagcgcctcctcgtaccagccgcgccagggcaccctgcgacgcatggggcgcgtggctactgcggcagacagacctgccacgaccgaaccggtgccggcgcgtcctcgacgtaccatatatccccgactctgattctctcgcacccggacgaccgccgcaacgctcgctcccgggattcctaacancacggcgaggcgcatgagncacataaagagaggtggagggtgggagtgaggtctataaaaggagagatgctatggcgctctcacgctgagtggagggcagaatcgtgtgcgcagacggtgcgcggccataatatcgtcctgcctgtccctcaaatgtgatgcggctgcggccgcgtccctatcgcggctggcacgcgccgtgaccatggacactcaacgtgcggggtgccacgcggatgacgaggcacgacattaacgcggaaccgcgcccatcgccgctcgggctacgcggcgggcaccgctgggacancggacggtgcaccacacctggcacgcccgaacgcactatgtgcgcgccggaaggtctcgcgactcgcagcgaagtgcggcgaacgtcgcgcgatacacacaacgataatcgacaacagaagtaagtgtatccgatgcgacctctctgcgcccccgcgttcggcagagacccgacgacgatcgtgcgcg

SEQ ID NO: 2855 - DNA, 1005 bp, Homo Sapiens
  misc_feature (740)..(752): n is a, c, g, or t
  misc_feature (784)..(784): n is a, c, g, or t
  misc_feature (976)..(976): n is a, c, g, or t
ggtactgttggcactagtggcaggagaagctgctggtatcatggaaaacataagtgacgatgtgattgttggccgatgcctggccattctcaaagggatttttggtagcagtgcagtacctcagcccaaagaaactgtggtgtctcgttggcgtgctgatccctgggctcggggctcttattcctatgttgctgcaggatcatctggaaatgactatgatttaatggctcagccaatcactcctggcccctcgattccaggtgccccacagccgattccacgactcttctttgcgggagaacatacgatccgtaactacccagccacagtgcatggtgctctgctgagtgggctgcgagaagcgggaagaattgcagaccagtttttgggggccatgtatacgctgcctcgccaggccacaccaggtgttcctgcacagcagtccccaagcatgtgagacagatgcattctaagggaagaggcccatgtgcctgtttctgccatgtaaggaaggctcttctagcaatactagatcccactgagaaaatccaccctggcatctgggctcctgatcagctgatggagctcctgatttgacaaaggagcttgcctcctttgaatgacctagagcacagggaggaacttgtccattagtttggaattgtgttcttcgtaaagactgaggcaagcaagtgctgtgaaataacatcatcttagtcccttggtgtgtggggtttggnnnnnnnnnnnnnaaattttgaagaataaaacttcatattccccncacggaagaccaaccacacgacagcgacacgaacaaagcaacaagcacaacacaggcaacccccacacatctatggtgttgagattcctaccccccaatcaaacactaatcacgtgactccgggcgcctgactcaagaattcaccttcatcctctttacgcctgagccaacaagcccaacatacatataccnacatctcgtgcgctcgctcacgccgcccg

SEQ ID NO: 2856 - DNA, 922 bp, Homo Sapiens
gggtagctgagagatggctacagaatatcccatcgcaggacgaaaaacgtgaaaaagccgaggctttgttgaagaagcttcatatccagtaccggcgatcgggcacagaagctgtgctcatagcccacaagctgaacactgaggaatatttaagagtgatcggaaagccagcacatcttattgtcagtctctacgaacatcctagcatcaatcaaagaattcagaattcatctggcacagattatcctgatattcatgcagcagctaaagaaatagccgaagtcaatgaaattaatttggaaaaagtctgggacatgttgtaggaaaaatggctatgcccttcaacaaaacctggtgaaaaaccatcagaattatttgaacttcaagaagatgaagccctacgaagagtgcagtatctcctcctgtctcgtccaattgattatagttcaagaatgctgtttgtatttgcaacatcaactacaaccacattaggtatgcatcagttaacttttgcccatagaactcgagctcttcagtgtctcttctatttggctgacaaggaaactatagaatctctctttaaaaaaacccattgaagaagtgaaatcttatatgagatgtataacttttctggcatcatttgagactttgaatatccccatcacatatgaattatttggcagcagtcctaaagaaggaatgattacgggtctgtggaaaaaccacagccacgagtccatggcagtaagattggtgactgagctgtgtatagaatacaaaatctatgacctgcagctttggaatggactcttgcaaaagcttctgggctacaatatgattccttatctaaggaaagttataaaagccatctccagtatccattcttcatgggaggtccctacttaacaaatagtcagcacag

SEQ ID NO: 2857 - DNA, 614 bp, Homo Sapiens
gggatttaaatattagaacggtatgtaaggtagtataattaccactattttaaaacaattcagttaaacactgctgcaatatttcagtgttgtgcttgaaaatatgtacagtttttttccaatattaataccttatgttgtccttaaatatttctaaaagcgcctttatttcagcattacctttttttcatcactatcttttataaaacattaatataagtcgttacttttagaaactaaaggaaataatagctggaaaaccctctgtagtttaaaatcagtcattaaactcacaatagggtaagtaaatatagccacctgttaacatgtaaataagcataatttgttccaaagatggaatattgaaacttagttcatgtctgctgtaaaatattatttaaatgctgctgggcatttcacttaaagaacttaatgtcaacagctacaacaaagaccaaatctgaactgctaatgtggctgctttgtagggaatggactaatatcagtgtgttagatcttaaggtatcagaatttcagaatcctgcgacgattttatttctaaattcatgtactgtatgtccataagtgaaaataaaatgtcatattcttttcta

SEQ ID NO: 2858 - DNA, 796 bp, Homo Sapiens
  misc_feature (705)..(705): n is a, c, g, or t
  misc_feature (751)..(751): n is a, c, g, or t
ggtctgaacattgtgaatattacacatgtctttctaaattattctagggtatgcaaatgtcaatggtatgaaacaccactgtactggaagaattaatatattactttagtatgtacctgagctaaatgactgaagctttaggggtgcatagaaaccaccataatttgtatgacattttgaagtgaattaaatatttttgaacatgcttcttcgacagccagtgttatatttttcagatcaacacaaagcacaatgattactcgaaattcagtattttcaaatttacatatttaaagtcatgcaagctgtaacttccctgtcaaaattactggctgccaaatttatacctgtttcttcagctgtaccttttgatatttaaagtttttaaatttctgtaaagtagattttgtagaatgtaatgtgttcactgcctttgtgaagcggtatataattgtataatttctgtgtgtaaactgaatgcttgggctttcaatacagtattcatataaagcaataaatattaatgttatgaaatatttgactacatttttatcaaaatatgaaagaatccccccttttttagtttcagatacctgaactacacagatgagcttctaaaactgatgcaaacagtttctgacactgtataatatgcttttgggtgatttggggggcaaccacaagttttgcgttttgactacttanatcatcatggctataaataccaaaacgatttgggatccatttatgntttgaagggataatatactactgactgactttgactgtcaggttc

SEQ ID NO: 2859 - DNA, 586 bp, Homo Sapiens
  misc_feature (304)..(539): n is a, c, g, or t
ggggaccatcacatgggtagggattttccatccagagccaataaaaggactggtgggggccgggggtggctattgtgggaagtcataacccacagatagatcaacctaagaatcctggcccttctccactctccaccatgcaggacaaacatcttctcaagcagtcaacgtagaatgcttgggaaatagtcataattacccacatatagtaattaatagatggtaattaattgatccttgatgtgatgttcttttgcatatttccttcattctaaagttgttccctggccgggagcgttggctnnnnnnnnnnnnnnnnnnnnnnnnnnnnnnnnnnnnnnnnnnnnnnnnnnnnnnnnnnnnnnnnnnnnnnnnnnnnnnnnnnnnnnnnnnnnnnnnnnnnnnnnnnnnnnnnnnnnnnnnnnnnnnnnnnnnnnnnnnnnnnnnnnnnnnnnnnnnnnnnnnnnnnnnnnnnnnnnnnnnnnnnnnnnnnnnnnnnnnnnnnnnnnnnnnnnnnnnnnnnnnnnnnnnnnnnnnnngagtgagactccatctcaagaaaaaataaaaataaagttgttctctg

SEQ ID NO: 2860 - DNA, 426 bp, Homo Sapiens
ggggcagagaggggctgccttatatttgaaacatgctttctatcatgcattgactgtatgcattttgttaatgcacattctgtttgtttaaggtgtgtaagatacacacccttctagatgaaactatatgtgccacactttgcactactcataatgataacctcaagactatcagaagaaatatttaaatttccattttatgaagaaaggaaccaaattattatgctttttaaaacaaattaccagtttacataattaatcagggtgcattttaaagtctaacttcgtttattgtataatgcatcatttgaaaatacaaaggaagaaatacccctttgttttttaatgatgccaagagttggacgtaaatggctagttgggccagtatttttatttgaaagaaatccaataaaggtaatttggggg

SEQ ID NO: 2861 - DNA, 1069 bp, Homo Sapiens
tcccgggatctccgaagtggcagcagccagagagggagtcggtgtggacgcgaggagccgggcgcttagaacagaggcttgcacaggtggagatgtggaagtctgtagtgggccatgatgtgtctgtttccgtggagacccagggtgatgattgggacacagatcctgactttgtgaatgacatctctgaaaaggagcaacgatggggagccaagaccatcgaggggtctggacgcacagaacacatcaacatccaccagctgaggaacaaagtatcagaggagcatgatgttctcaggaagaaagagatggagtcagggcccaaagcatcccatggctatggaggtcggtttggagtagaaagagaccgaatggacaagagtgcagtgggccatgagtatgttgccgaggtggagaagcactcttctcagacggatgctgccaaaggctttgggggcaagtacggagttgagagggacagggcagacaagtcagcagtcggctttgattataaaggagaagtggagaagcacacatctcagaaagattactctcgtggctttggtggccggtacgggggtggagaaagataaatgggacaaaacacctctgggaatatgcactacaagggagacacggaagaaaccccgagtcccgaaaaattaatcccaagggctttgggtggccccggatggaaaaccaaaaggatgcgagggggataaaaacccctggccgggttcccgtgaaaattggaggcctccgaccccaagcttaatacggagagagggggcacacataaaaacctccttgttcgctgcagccccggggggtgtaagggggaaattggcggccctgggccatacggaaaacaaggcgccgtgacactccaacagaagatcggcaccgtcccatccacacggctgcaaacttgcgccaaaatgcatctaaaccacgagaacgcccgggggggatccaccccgcgtgggcacgccgcggggagagagggcgaacgccgaaacccaggtgtggcgagcaaagctaccccataaaaccttgggtcgggcgatag

SEQ ID NO: 2862 - DNA, 295 bp, Homo Sapiens
  misc_feature (1)..(1): n is a, c, g, or t
ntcctgtgctggcctccctgtctatggggatgcctttctgaacttctttgtacaccatgttaggctgtccttctctgtggatgcccttctcaccccatttgggcttcagcaccctgtgactagccactactttctgtgtggtcactgccttccttgttccaggtgggctctgacactgtgctctgggccatgtgactcccacccagagtagacgtctgttttgcctgaccccacttaatggacttggatttattgcttaggaaagggagggggagataaaaagcttgaagattac

SEQ ID NO: 2863 - DNA, 218 bp, Homo Sapiens
gagccggaccatctcagtggggttgttagttcttcactatcaggtagaaactaatatcaattccaatgaagaaactgaagttcgaacagaatggtccagtaactggcccaaagtcaccaaaccagtaagttgcagagcggggacaagagctaagaatcattaggctccacagctcattgcagtttctctctccaaggtgcaggctaattctccttgtc

SEQ ID NO: 2864 - DNA, 341 bp, Homo Sapiens
accactcgaggtggttggcctgatcatcaagatcctgaagcgtacagaagtgtttgtagagggaggaagtgaggtgggtcccccaccagcccaggccatgaaactcaatgtgccccgaaagacccggctttacgtggatcagacactgcgagagcgggaggctggcaccggtgagcctcagactgggtcctttcccttcttcctcctccactgctcctacacagcaaagctgggggaatgctgcccagcctccctgtgcactgggaggagatctcggccaactaggtaggtcactcacctctgcaaatccaggatagagagtgttggggggtaccgagctc

SEQ ID NO: 2865 - DNA, 541 bp, Homo Sapiens
aaggagagcctgggctggctcctagtgaagccgttatgaccctgggaatgcaccatctttcacatcactgcctggccttcctagaatctcagcttcttaaatcaagaaaattgtgtcttgttcatgtctgaattccccaagtgaacaacagtgagtgggtgcttgacaaatctttgttggtaatgagcaaaaaaggggattctgtgcccaataccatgaaatcaatgcacagaagattcaatcaatcaagaaaggtgcacagacactggccacacacactgacatttgtttgcagatgttccagtccccctgaattccaccaatccattcattcattccacaagcatttttgctggggtggaagcagggccatacagggtgtgtacatcacagatagggattctgctgcaactatctcccagaccctattctagggccaggggatagaaacagaatcgaaaacatattcattgtcttttttgggcttatattatccaggagagagaaataaacaattccaaataaacagtgtcatacagcg

SEQ ID NO: 2866 - DNA, 1209 bp, Homo Sapiens
  misc_feature (971)..(1146): n is a, c, g, or t
  misc_feature (1153)..(1153): n is a, c, g, or t
  misc_feature (1155)..(1169): n is a, c, g, or t
accgaggtatgaaaggtccctgctcagaccaacatgaagctagtacaaatccctcactttaaggaggttatcatcatggctaccaactgcgagaactgtgggcatcggaccaatgaggtgaaatctggaggagcagtagaacccttgggcaccaggatcaccctccacatcacagatgcctcagatatgaccagagacctcctcaagtctgagacttgcagtgtggaaatcccagagctagaatttgaactgggaatggcagtcctcgggggcaagttcaccacactggaagggctgctgaaagacatccgggaactggtgaccaaaaatcctttcacactgggcgacagttccaatcctggacagacggagagactacaggagtttagccagaagatggaccagatcatcgaaggtaacatgaaggcccactttattatggatgatccagcaggaaacagttacttgcagaatgtgtatgcgcctgaagatgatcctgagatgaaggtggagcgttacaagcgcacctttgaccaaaatgaggagctagggctcaatgacatgaagacagagggctatgaggcaggcctggctccgcaacggtagcagtgggtggctcaagggccagcctccagcgctgctctttctgtaggttatttattagtattggatgaaggcgaaggctgggagtgtctttcccaccagcccttgcccatggtggggaggacatctggtctgagtcagagatctgtgcacactttctaaacagcttgtgatgcaagtgtgagcctattgtgttacttgaccttattttggaagttttgaattggcctaggaggaaacccagaaatgaaccaggggtatgtcatcacttttttcatatcaagtcctcaccctccttccacataatgctctatcctctaaggttggaactctgaagttggagaaggtggaataaagttacacctggnnnnnnnnnnnnnnnnnnnnnnnnnnnnnnnnnnnnnnnnnnnnnnnnnnnnnnnnnnnnnnnnnnnnnnnnnnnnnnnnnnnnnnnnnnnnnnnnnnnnnnnnnnnnnnnnnnnnnnnnnnnnnnnnnnnnnnnnnnnnnnnnnnnnnnnnnnnnnnnnnnnnnnnnnnnnnnnnttggggngnnnnnnnnnnnnnnnaaaaaaatttttaaaacctttttgtgggggcggggccccc

SEQ ID NO: 2867 - DNA, 305 bp, Homo Sapiens
atgatcccctcccacgatgacggaactgaacttccctgctgatacaaggctaccaggtcctgactagactgctgatagggctgagatcaacagggtcagcttctactcagcctgagatatcatcccagaatagatgaaaatgtagttgagcttttaagaatgaaagagattctgtatgaatgggagggttaaagggagaggagagacagtaggtaaatcaaggagcctgggagactgttcccttcatcaagataaaggtgcttaggatagagaggtagagtgagagtgagagctttgagccacga

SEQ ID NO: 2868 - DNA, 699 bp, Homo Sapiens
gggttgggggaattcccaagggccccttgagttccattgagccccgggggttttctccgtaggggaaaacccaggcttaattgccccatgttttccactttgcccttggatgggggacccgggcgcgcccgaaaagggaatgggttctggaaaaagtttcttcaggggggcggaggcgggcccgaacaggaggtaatatttgggctttgctattcgtgccccgggggaaagcggccaaaactttattgagatagtttaagtcaaatatctaatataaaaccagcttgcgttgtttcagcttgtcttcatttaaacttgtggttgctcttcacctgcttctggcattttacagtgttcctctttaggtattatcttcaccttgacgccggaacccaaatccagatttatccccggtgtttgactgatgcagctcttgcagatcaccttccatgtcgcgcactgggatctcagctgtatcctgatcttcttctgtctgctgcccaggtgtaggatcccgactttcagctgctggttcttctttttggggctctccattactgggctcctgggactggctgtgtggttctgtgtttgtgtgtgtccgccgtgtctcagtagcggagaaagaatccagacctcagggacccgagtcgccggctcacagctccgccgcgttccccacactggcgaaggggcccc

SEQ ID NO: 2869 - DNA, 367 bp, Homo Sapiens
  misc_feature (29)..(29): n is a, c, g, or t
cgcgcagacactggacagaaggcggtgcntgggagtccctggggccaccaaaacctgcagaaaagtggtaaccacaatgctcctagcctagttcagactgaagacctcgatacctggtgacacatgggatccttggtaggacaagcctcgaaaagttttacaatagcgagtgtgaactttatcagaaccaaagtgatgtcactaattgttttttaaccctgacaaataaatcccaagaaggctatgaagagaggatccttatgcttgtgttcctggaaacaaaactattacaaaagtgtctacaaaaaccacaactttgcacaaaggctatttcaactttacacaaaaatatttctgcaaggacacc

SEQ ID NO: 2870 - DNA, 1814 bp, Homo Sapiens
  misc_feature (1099)..(1237): n is a, c, g, or t
  misc_feature (1243)..(1247): n is a, c, g, or t
  misc_feature (1367)..(1376): n is a, c, g, or t
  misc_feature (1653)..(1662): n is a, c, g, or t
ggggcaggcaaacctgaggtcctcagaatggcgggcacaggtttggtggctggagaggttgtggtggatgcgctgccgtattttgatcaaggttatgaagcccctggtgtgcgggaagcggctgcagcgctggtggaggaggaaactcgcagataccgacctactaagaactacctgagctacctgacagccccggattattctgcctttgaaactgacataatgagaaatgaatttgaaagactggctgctcgacaaccaattgaattgctcagtatgaaacgatatgagcttccagccccctcctctggtcaaaaaaatgacattactgcatggcaagaatgtgtaaacaattctatggcccagttagagcatcaagcagttagaattgagaatctggaactaatgtcacagcatggatgtaatgcctggaaagtatacaatgaaaatctagttcatatgattgaacacgcacagaaggaacttcagaagttaagaaaacatattcaagatttaaactggcagagaaagaacatgcaactcacagctggatctaaattgagagaaatggagtcaaattgggtatccctggtcagtaagaattatgagattgaacggactattgttcagctagaaaatgaaatctatcaaattaagcagcaacatggagaggcaaacaaagaaaacatccggcaagacttctgaaaagacaatttagcaggtagaagaaaagttgggctttcaccaaaggcatctgaacttttaatgaactttgaaggacaacagcatcttcccaaaaccattgatgtttaagtgtttagaaatcatagaaggtgtaggctgctgtggtaattctatttgtatatctcaacagaattaaaatgtctagcttggtggtatttttatagccataaaagaaaatctttaggctttcaaaataaggatgactttagaatatattgtgtcactagaactaattttcagccatgtggaccatattttgtatccaaggatccttatttaaagctttcaacatgtacaggaagttggaaatttttggtttatgactttgtctaataaagagatagttctaaacacnnnnnnnnnnnnnnnnnnnnnnnnnnnnnnnnnnnnnnnnnnnnnnnnnnnnnnnnnnnnnnnnnnnnnnnnnnnnnnnnnnnnnnnnnnnnnnnnnnnnnnnnnnnnnnnnnnnnnnnnnnnnnnnnnnnnnnnnnnnggaaannnnngggggcccgggggccccccggaaaatggactaaggggcggggttgggaacccggcacacacagacacgggggccacccggacccggcccgggacattcccacaacgaaattcccgggggnnnnnnnnnnggcgccctattactcgaaaaatccccccgcgccgccgcgagttcccctcttcccgcgccggaccctcggccccttgagcggcccctctcccgcgcgggagtttgtatatggccattgccggggccgtggcgcgaaaaccgtttcctgcaatgggggatctgtcgcgccccgcggcactcttcaagccgggtatataaaaaaccgtgctcacaaggtgtgggccactgcaactcttcgcacacggtgccgcaccacaaaccggccccgcgactaaatnnnnnnnnnntttgtccgccggcgccttcaggtgggaatctttggggcgggcttgaaccccatttttctccctggcgagcttacaacaggtacaccttcggcgccatcccccctcccccgggagaccgcggccccagttctccggaagcggtacttcccccc

SEQ ID NO: 2871 - DNA, 550 bp, Homo Sapiens
  misc_feature (162)..(170): n is a, c, g, or t
gggtagttcttctacgcatagctcacctttctaaacccagttaagcatggaagagaggtagtaggtaggtgcagtgtgtggaagctgcaaacaagtaggccttttattcattgatatcttttcccaagtactggattttaaatctgtatgtatctgtttgannnnnnnnnctaatatttcagttgagctgctgttttcttccatgcaatattgtatactcaattgtgtatagaagaagctggtgagagtgccctcctacataaataagcaattgcagtgttttgcatgcaaaatataaaaaatttaaattgtcctgattctattttgtaaatggagaaacaatcatatctttctaagcggtaatggaggaagactagtgctttgtgcattttgatatatttgagttcattttttccacaatgtcatacttttgacgcagttgggtttctcataagtatcctagttcatgtacatccgaatgctaaataatactgtgttttaagttttgtgttgcaagaacaaatggaataaacttgaattgtgctacaaa

SEQ ID NO: 2872 - DNA, 680 bp, Homo Sapiens
  misc_feature (585)..(629): n is a, c, g, or t
tgctatagaccagtgtcaaaaagcaggctggtccggtcggaatttcccgggatatcgtacgaccacgcgtccgcaccccctttcagagggccactgggttaggacctgaggacctcacttggcctgcaaggcccgcttttcagggaccagtccaccaccatctccacgtgagtgaagctcatcccaagcaaggagccccagtctcccgagcgggtaggagagtttcttgcataacgtgttttttctttacacacattatggctgtaaatacctggctcctgccagcagctgagctgggtagcctctctgagctggtttcctgccccaaaggctggcttccaccatccaggtgcaccactgaagtgaggacacaccggagccaggcgcctgctcatgttgaagtgcgctgttcacacccgctccggagagcaccccagcagcatccagaagcagctgcagtgttgctgccaccaccctcctgtctgcctcttcaaagtctcctgtgacattttttctttggtcagaagccaggaactggtgtcattccttaaaagatacgtgccggggccaggtgtggtggctcannnnnnnnnnnnnnnnnnnnnnnnnnnnnnnnnnnnnnnnnnnnnaaagtcaggacgagaccatcctggctaacacggtgaaaccctgtctctact

SEQ ID NO: 2873 - DNA, 1807 bp, Homo Sapiens
  misc_feature (1285)..(1391): n is a, c, g, or t
  misc_feature (1510)..(1533): n is a, c, g, or t
  misc_feature (1783)..(1783): n is a, c, g, or t
acaaaaagcatcgctgaagaactggaactcagtattttgaaaatcagtcacagtcttaatgaacttaagaaagaacttcataccacagcgacacagctggcagcagatctattaaaataccatgctgatcatgtggttctaaaagcattaaaacttactggagtagaaggaaatttagaagctttggctgaatatgcctgtaaactctctgaacagaaagagcagcttgttgagacctgtcgattgttacgacacatatctgggacagaacctctggaaataacctgtatacatgcagaggagacatttcaggtgactggccaacagataatttctgctgctgaaacattgacattgcatccatctagtaaaattgctaaagaaaacctagatgtattttgtgaagcttgggaatcccaaattagtgacatgtcaacactgctgagagaaatcaatgacgtgtttgaaggaagacgaggagagaagtatggctacctttcacttccaaagccaatgaagaataatgcaaacctgaaatcattaaagccagacaagcctgactctgaggagcaagccaagatagcaaagcttggacttaagctgggtttgctcacctctgacgctgactgcgaaattgagaagtgggaagatcaggagaatgagattgttcaatatggacggaacatgtccagtatggcctattctctgtatttatttactagaggagaggggccactgaaaacttcccaggatttaattcatcaactagaggtttttgctgcagagggtttaaagcttacttccagtgttcaagcttttttcaaaacagctgaaagaagatgacaagcttatgcttctcctggaaataaacaagctaattcctctatgccaccagctccagacagtaactaagacttctttgcagaataaagtatttctaaaggttgacaagtgtattacgaagacaagatccatgatggctctcttagtccaacttctttcactttgttataaactgctgaagaagcttcagatggaaaataacggatgggtctcagttacaaataaggacactatggatagtaaaacttgagaagcttttggggtcagatctctggaacatcatgtgatgaagctgacatttttaaaaatcaaatgatcctttatcttttcagaaattcatcaattttataaagaaaacaatattgaaattttgctctattttctgatcatgaaactgattgtaaagctttttgacaactaataaatgtcttggtaattgctnnnnnnnnnnnnnnnnnnnnnnnnnnnnnnnnnnnnnnnnnnnnnnnnnnnnnnnnnnnnnnnnnnnnnnnnnnnnnnnnnnnnnnnnnnnnnnnnnnnnnnnnnnngcgaagagcgagcggacccctgtcctagccgccgggccgcgcccggccaggagccccggcccccccttgtcggcgtaccggggcctttcgccccgcgaaacaccgaggccgttacacgnnnnnnnnnnnnnnnnnnnnnnnngacagacacactgggagtcgtgctgcgcaccccccctattattttcgcgcacccaatttaaagaggtgggccggccgcgcccacccgtccatcacctcgatatgcacactacctccgccgtcggggccctcgcggcccgccatgctgttcgcaaacactcaccgcccggccgcgggtccgcgatgctgcgcgtgtgtgagaagtatggtgagcgcgatatggcggcaacaccactgtcgacttgtctcgnacagcgagaaagcaacacccgccc

SEQ ID NO: 2874 - DNA, 1729 bp, Homo Sapiens
ttacgtttacagaacaccagcaagtttattgagtaattaaggtgacagccatagaactttgcaaatgcgtttccataaaagttctgagttacttgactatgaaaagtgaattttcattttaaccaaccccctcctccaatactaccagaaagcatgagattctgaagaaatcttcacaaatctactcttaattatggtagcaatgttccagtctcaattaggttctgctgggttcctggagttgggagtgaagtggctcttgagtggctcccagcacttgtggtagttctcatccaaacacctggaggccttgagtccccactttgtgaccgccagacttaaagatgattcaaacataaatgccatggtgccatcggcaatcctctcaggtgccagcttgaccttgctggccttctcaaagcagtcagcatcaggtccatggggggtcattgtgctgtgtagactccctccccctggcaggaacccaccttgctttgcctcatagtgacctcggatgagtcccatgaactcactcatgcagttcctatggtaataaggaggcctgaaggtcttatcagcaaccccccatcgaggtgggaagatgacaaaatcagcaatggccactccagggcggacagacttagcagtcaatactgtgaaaatggatgggtctgcatggtcaaaggccactgagttgataaccatgaaattcttcaggttgtacttgtagggtgtataattcccgtgccaggccacaacattgaacggggagacatcctgtttggcagcaaacagcttgccctggtatttattaatgaccgtgtaaccacctggtacttggcgatcctcataccaggcaatgggtatcaagaaatcacgaggattggccaagccattggccccaattggtccaaggtcaggtaactcaaagtggacaccatagacctccaagatgtagcccctggtctcctcaaagacatctatgctgaaccgcattcctctctgaatgacgcagatctcattgggctgtacaagcatcttgccaaactcggtgtaaatgagaaggttccctttctgcggaacaatcaagaagtccccatctgaattgtaaaagcatctgttctccatggaggtattgcagaggaaaatgtggatagcaagcccattgttagactttatgtctccagctccacacaaggtatgcaggccactcacaaagtctactttcttctgagatgcttttggaatctcaaatggtttccatctaagctggttaggatcaggatcaacttcatcccagttgtgagtgacatggccttcgtcaatggattcaaagggcttgtgagaaactgaaggtagaatcctatacagccagcttctcttattggtgctccgtggacaagtgaaagccgatcctgagagctgctcagcatagagattgtaggggcagacctgaggattattctgtccttctggcagggaacctgggcagcgaggatcctctgaagaacactcattcccaaatccagaaatgtactttaactcagccattttctctctcctctatgtgtggtgacttcaggaaacccaggcccagaggatataaagccacaatgcttctttctccttcaaaccactctttggatattccggttcccactgcttcactgcgccctcgtgccgaattcgccacccaggcctcgcgacctgagggaccgtatagtactgc

SEQ ID NO: 2875 - DNA, 988 bp, Homo Sapiens
  misc_feature (41)..(41): n is a, c, g, or t
  misc_feature (47)..(56): n is a, c, g, or t
  misc_feature (168)..(168): n is a, c, g, or t
  misc_feature (263)..(263): n is a, c, g, or t
  misc_feature (852)..(864): n is a, c, g, or t
aatttaaaaaacccccggaatactagagtatacatactttntgcgtnnnnnnnnnntcccattgcagaatcactgagatttctcaattccagtttaccatgagggcaagtttcttttctgtgatagctgtgttttgaaaaaagttgcctgtttagcccatcatctccncaccatcacctcccatggggagatgcttcatcatcattttggatccatgtcttcttgcgtacgtttttctgctttccctacccacttgagaagcnggctgatgctccttaaactgtgatgaaaatacattgtgaagacggttacctgaaaggggcctacaagggaacatctttgccacacaaagacagtacagcttcgctgtgttgaggtttggttctggtaaaatggggacacgtttattttgggggaactcccaactctagccaagtcacacagtaagaaacagggtccagggctaaacgggtgcactctcttgctgctggtatcccccttggtgaacagtcctacaagcagcctgcagattcttctccctacatctcctgtaaggacgaaggagtggtgtaacctgagctccggccctgtggagaccctcatgaggcctgaggctaagaatgaaacagatctttgcttcttccccagattacttacatacgtgcatgccatgcacacactacttcaaacctttctgtagtcttgagtaaaagcatttagcctggaatatgtccaaactctaggaagccaaggggagatggagaaaaataaacaaactaagcacatgatatgtgctatagctcacttcagtatattaacgatggtttaaaaaaataatcaccatggtcaatnnnnnnnnnnnnntacaacacagacaacataaggacaatggagacgtctgccagcagccttgccctcatgtgtgctcttcctaagagtcaaagtccctgctcctgactctaggcttgtctcaaaatgtcaggtctac

SEQ ID NO: 2876 - DNA, 1039 bp, Homo Sapiens
gggaggctctttccaacgctgtaaaaaaggacagaggctgttccctatggcagaaggcaaccacagaaaaaagccacttaaggtgttggaatccctgggcaaagatttcctcactggtgttttggataacttggtggaacaaaatgtactgaactggaaggaagaggaaaaaaagaaatattacgatgctaaaactgaagacaaagttcgggtcatggcagactctatgcaagagaagcaacgtatggcaggacaaatgcttcttcaaaccttttttaacatagaccaaatatcccccaataaaaaagctcatccgaatatggaggctggaccacctgagtcaggagaatctacagatgccctcaagctttgtcctcatgaagaattcctgagactatgtaaagaaagagctgaagagatctatccaataaaggagagaaacaaccgcacacgcctggctctcatcatatgcaatacagagtttgaccatctgcctccgaggaatggagctgactttgacatcacagggatgaaggagctacttgagggtctggactatagtgtagatgtagaagagaatctgacagccagggatatggagtcagcgctgagggcatttgctaccagaccagagcacaagtcctctgacagcacattcttggtactcatgtctcatggcatcctggagggaatctgcggaactgtgcatgatgagaaaaaaccagatgtgctgctttatgacaccatcttccagatattcaacaaccgcaactgcctccggtctgaaggacaaacccaaggtcatccattgtccaggcctgcaaaagttgcaaaccgtgggggaaactgtgggtccataaacttctccaaccatccttgggaagtgggcctccttccccagcccattctgaagaaaccctggaaggaaaaaaatgcctgttttaacaagaaccccccggtgtgaaagaaagggacttcccatttggcctttttctggcttctttcaaacgcccaacaacaaaaccttgggttcccttgg

SEQ ID NO: 2877 - DNA, 810 bp, Homo Sapiens
  misc_feature (714)..(714): n is a, c, g, or t
ccaagcccacgcgggttccgggtcccaagatttggctccaagagctattcgcagagaaacagcctcgcacaaaaagccaccgcccccgaaacccgcgggaaatctgtttcctgtgaaaggcctggcctccgggcattggcggtttccctgatcctcccatcccaaattttccggcaggggattgatcgaggcgacatttaggactggggtgggcgagggagtggcggttctcgtcccaagttacaggtgaggacgttcaggccaaggcgtagccaagatcgcgccgccctgtagcttgaggaggcgccgggattcgaaccaaggctgtgcccaatcctaagccctgcgaggtcttgtggaaccgacatgacccactctttggtttgtccagagacagtgagcagggtgagttcagtgctgaatcgcaacactcggcagtttggaaaaaaacatctttttcgaccaggatgaggagacatgtttggaactcagaacaagggcccctcccagtgggtgacgctggagtttccccagcttcatcagtgtctcccagctgcagatccagtttcaggggtggcttctccagtcgccggggctgcctggaaaggtcacaggggcactcaggctctccacaaggattgaagatttctacccctgaaggacaacactcggcttcaaactttccccataccagctggctgaaaggggaccggnctggaaggggacgttttgaggatgcccactgaactttttttgcccgggggggtcatctacccacctccggatggcttgggggaaaaagtggtgaaa

SEQ ID NO: 2878 - DNA, 418 bp, Homo Sapiens
  misc_feature (285)..(340): n is a, c, g, or t
tcatgggagggtccttcatcggagtgctaaagctttgagtagagtctccctggatcacataccaggtcagggaggagtctgtgtcttcctctacgtttatcctggcatgtgctagggtaaacgaaggcataataagccatggatgacctctggagcaccaggggccaggacttgtctccatgtgtatccatgcattatataccctggtgcaatcacacgactgtcatctaaagtcctggccctggcccttactattaggaaaataaacagacaaaaacaagtaannnnnnnnnnnnnnnnnnnnnnnnnnnnnnnnnnnnnnnnnnnnnnnnnnnnnnnncatgaccttaatggatcataggaattgcagtcatttggtgctctgctaaccatttatataaaacttaaaaacaagaga

SEQ ID NO: 2879 - DNA, 233 bp, Homo Sapiens
gtggcggaccgcacagctcacacaaataataagctaacgggtggtatagtttatgagcagcgaaagaaaaggccacaatcaattggactctttcaagcagactggacttgtaaatcccccgagttatctccaactcactgtgcaacgcaaagtgcccggttagacttaaataacggtctcaacagtcatgtgtttccgtgcaggacacgtcactctgctcctttataaacttg

SEQ ID NO: 2880 - DNA, 607 bp, Homo Sapiens
agtgtcgacgacaacgagtgggcgaagtctacccccctaagcacatcaagttctatacatacgcagtctactgcctgccgcagggactgctcgtgcccagatgctatcttccacccggtctgtggagacaatggaatcgagtacctctccccttgccatgccggctgcagcaacatcaacatgagctctgcaacctccaagcaactgatctatgtgaagctgcagctgtgtgagccgggggatccgctgcagcgagaagacaggatcgtgccctgtcccctgtgcccacttcctgctcccggccatcttcctcatctccttcgtgtccctgatagcctgcatctcccacaaccccctctacatgatggttctgcgtgtggtgaaccaggaggaaaagtcatttgccatcggggtgcagttcttgttgatgcgcttgctggcctggctgccatctccagccctctatggcctcaccattgaccactcctgcatccggtggaactcgctgtgcttggggaggcgaggggcctgcgcctactatgacaacgatgctctccgagacaggtacctgggactgcagatgggctacaaggcgctgggcatgctg

SEQ ID NO: 2881 - DNA, 621 bp, Homo Sapiens
ggcggcacggcacaggcatccaggccccaagttggagcagagtcatcagacgtcagaggtaatgtccagggacaggtctccgggtacggggtgcagagtccgggacaggactcgaatacgtccatcgagtccagtcccagctgtctcctgggacgagcagtcccaggttcagactacaacctcacaaccgattccaattcaaccacatacatctcttcagatacctgcccaagggccagccacagtcacaaccccagggacagtcttcaactcaaactctttcatcaggacaaactttaaatcaagttgactgtttcatccccatcccgtcctcagctacaaatacagcagccacagccccaagtcatggctgtgcctcagctgcaacaacaagtccaggttctctctcagatccagtcacaggttgtggctcagatacaggctcagcaaagtggtgtgccccagcaaatcaaactccagttacctatccaaattcagcaaagcagtgctgtgcagactcaccagattcagaatgtggttacagtgcaggcagccagtgtgcaagagcagttgcaaagggttcagcaactcagggatcagcagcaaaagaagaaacagcaa

SEQ ID NO: 2882 - DNA, 498 bp, Homo Sapiens
  misc_feature (169)..(201): n is a, c, g, or t
tgcactcagccagggcgacagagcaagactgcctcaaaacagaaaagaaaacaaaggctaattctcaggctctacaccgaacctactggatcagaatccctggagctagggaccagaatctgtttattggtgattctgttgcatgcttttgcactattctaaaacctannnnnnnnnnnnnnnnnnnnnnnnnnnnnnnnnagctgggctgtcccagcgctatccacagggaagctcctataaagggctgcatctctggactcacagctatcagaccattgagatgtggaagctgttgctgtgggttggtgagtgtggcaggtcccagcagtgtcactcagtccaggaagtgccaggctttatgagttcgtcatctctctggtgcctgagacgagcagcctgagactcagggaagccctagattaggtagagatgggatgggccatagttaatggtcagagctcagagggacccagggagaagtggtggacactcaca

SEQ ID NO: 2883 - DNA, 1370 bp, Homo Sapiens
ccccgggacccttaccctgaaggtgactggcttccttaggccttaagcccaggagtttttatattctgtctgcaaggacaaaaatagaattcggggaaaataaggtagtaacatctaaaacacttgtagcaggaaagacgtggagaagagcaatagcaaaggacagggtagactgcttgcatggataatatttgcctttaaagagatgcattggtccacagcaactggaaaaggggtgtagcaagaagaatggaaagaagagaagcaaggccctctaattccacttacctcaaaagactgagccctgaggactatgtgaatacacacccctaaaggcaaaggctctcactccaccatccctttctcacaaaagcatctggtgtgccatctctccccacagtagggtattggccctcagcagagaacagaagcccatcatagtacaggtattgatggatgctcagactcctaaaaacctaagtcaaagagaagggctcctacccacctactctgagcttttctgcacaatgggaccctctgtgcagacagccatgcttccacagggttagagttaagggaatacaagtatacaagaggataacaaatgccaactaaaagtgaaaggccaggtctttttagacttggtggggaaggctggctgatacattctccattatctgggatgcacggaagagtcaaaagggaatccagaggggctagaaaaccagaagactagacttgtttcatttaaaggcagggagagagagcaagaaacagaaacaaagagaaaaaattaaaataatattaaggataagaagccaggctttaaaaatgaacatcttagaaaacaaaacaaacaggaaggagcttccttgggaacagaagacacttcaatttcccagaagtgaagaacagcagaagacatgggcttctgtatctagactcagaagcttggggctgtctggctctctctgctcccccgaacacagccaactcaagtgaagagtgaagatgggacgaggtccacttgtttctccctctctctagagcctgtcctcagaggaaggcaggggtcctcctctttcagctgtttgctggtaggagccacaccctatatctttgaagcccttctggtagtagatagccagctgtatttctcttctgagttctcacctctgttttatatgatgttaagatttaaaatattcagaaacttgtattaactggaacccctgcttacacctcaggtggagggggcttgatggtgactggctggggagtcctccggggtggggagggctttgctgcacctgctgctgggcagtgttatagtagtcctcgtgccgattaaccccggcctcctcctgcca

SEQ ID NO: 2884 - DNA, 688 bp, Homo Sapiens
gtcatataagcgggggaagatgaggtaaggaaagatgactcgtgaagttaataggatgtctctaatttctagatgtgcctgagcttctgttcttttcctctttctttgtgtctctcttgaatatatttactttgtgtctcttaactctgtttaaggttctgtgtctatgcatctctctctttcttttttcaaccttctcattctcctatccagggatttaatcagcagaattactttttgataggggaggtataaggtttggcctgtaaggttctaactgccttcttttttctcacagaggtggcttatggcagatttttcctccttcaaactccaaacataatttttaagactatgtgccagtggactcttcccttatatctctgcaccacaagttgttggatgtttcctcttcctcccttatgtctacctcaccaacctcgctcatcatttggcccttatccttccttgtacacctaccttcagatttctgcttacactttgatttcagagctttattccccagtctgttcttactcctttgtcgcttatccagaatgatgctatgtgtagcatcttgctgtaaatcctgtacaatgattctgtgtaaatagctgtggcctatgccaataatgaagagcaagcctttcaggtaagcaaattaaagttcagtttgctcatcgacaaa

SEQ ID NO: 2885 - DNA, 253 bp, Homo Sapiens
tacttctcactctagtctaaagctatgcacatctcttgctagactagtacaatcaacccctaattaacctcccttcttctcagactcttatattcttgttatcctcagactggcctgggtgatcctttcaacagagaaatgccatcatttggggaccacaaaggtaaagtttgccctcaaaaagcttcaaaggtccccttagaggtcccacggttttgagggcccttacgtgtgttaaaaaggctttgttccc

SEQ ID NO: 2886 - DNA, 490 bp, Homo Sapiens
agagccaagactacgacaacgtgctggcatggagaggagtatagagcatgtaatcacacctgactaatacggctcaagtaacacacttcaaatatctctcccattaaattttcaatcatcccattaatcatttccccataactcaatggcctaaaactggcctgacttgggggaacgatgtgtctgtatttcatgtggctgtagatcccaagatgactggggtgggaggtcttgctagaatgggaagggtcatagaaagggccttgacatcagttcctttgtgtgtactcactgaagcctgcgttggtccagagcggaggctgtgtgcctgggggagttttcctctatacatctctccccaaccctaggttccctgttcttcctccagctgcaccagagcaacctctcactccccatgccacgttccacagttgccaccacctctgtggcattgaaatgagcacctccattaaagtctgaatcagtccaa

SEQ ID NO: 2887 - DNA, 595 bp, Homo Sapiens
tcgctattcatcggcaccatgaaagagaagcctctcagcacggaggtgccgtctacccggaagtgcttgcccggtggcatgttagtcacggtgaggctgacgttggtaggccccactgcctgggtgcccaagggctccagttcacactcaaactcctctacaaagtctttccggggcactggtctgagttttgagctgtccttgggcagtggccggcagggactttggcccacagtgacctgatgggttccctcaggcaccagaccagaagggtgaaggtagaagttggagccacacagggtcagccttgtactgccccttagaggtccactgtgggggtggaactcagtaagcttaggtgggcagtggtcctgttgccaggagccaggacactccttctgctggccgcacatgttcccacaccagccacagcccatgaaatgccatgcccttaggcaacgcccacaggtcaggaagtggcggcagccagggcctcggataggtacctggaaaacctggtccccagaggcaaagagtaggtggtccccaagcgactgacatcccgctgcacgggctgcccacagaaacttccgtc

SEQ ID NO: 2888 - DNA, 733 bp, Homo Sapiens
ggggaattaagaaaaggttcccttgagagtcctgcaacggatgtttttggttctacagaggaaggtgaaaaaaggtggaaagacttgaagaacagagttgttgaacataatattagaataatggccaagtattatactcggataacaatgaaaaggatggcacagcttctggatctatctgttgatgagtccgaagcctttctctcaaatctagtagttaacaagaccatctttgctaaagtagacagattagcaggaattatcaacttccagagacccaaggatccaaataatttattaaatgactggtctcagaaactgaactcattaatgtctctggttaacaaaactacgcatctcatagccaaagaggagatgatacataatctacaataagggtcttagtgctttagaaaaaagttaaaattggaagtcattaaaaaaagactgttataatggtgtatatgttggggttttttttctaagcttctttgtcttaaattttaaaatagtgaatatgtttgagactccctttgacctttcagttccccaagttcattgttaactttgcatttgcaattggtgcaaaaatacagatttctgtcgtctgaatacacaaaaagttgtgtcataacttacccagatatgtttttctatcatttgaaacctttttagctactgtttgttttcattcaactaacaaacatattccaataataaaagcagtatatat

SEQ ID NO: 2889 - DNA, 541 bp, Homo Sapiens
tccatttcttcaatcatagcttccaatatactcaaaatatgcttttgatatggaaaaaagtcctcctgcaaaagtgggtgttttaattgggtaggtttcatctttccttctttgcttctcatgatcaggaagcgactcccagccaaagtgaaagactccagtcaaaatttccacggttatggttacttccataaggagaaggtttgttgaattcaaacgtgtccagatctatggatgcaatatctggacttacgacagccgtgtagttctcagctattctggccaacagaggttctagccaaccatagaaacactcacagtgagcatctaaaaatgtgagcgtttcagctgttgcgactgttgctcctagcaaccgagcagtgatcagacctttcctttctcttcctctgactatttttactatagaaaattgttttacatattcatctagtatatcatgtaagtactcatctacactagcatcatccaccaaaatgatttccttcaccagtattgcaggtgaaaaatagagcacactgtg

SEQ ID NO: 2890 - DNA, 990 bp, Homo Sapiens
  misc_feature (814)..(822): n is a, c, g, or t
ggggggcgtcatgggcggcctcttctggcgctccgcgctgcgggggctgcgctgcggcccgcgggccccgggcccgagcctgctagtgcgccacggctcgggagggccctcctggacccgggagcggaccctggtggcggtgaagcccgatggcgtgcaacggcggctcgttggggacgtgatccagcgctttgagaggcggggcttcacgctggtggggatgaagatgctgcaggcaccagagagcgtccttgccgagcactaccaggacctgcggaggaagccctttccaccctgcccttcatcccgctacatgagctctgggcctgtggtggccatggtctgggaagggtacaatgtcgtccgcgcctcaagggccatgattggacacaccgactcggctgaggctgccccaggaaccataaggggtgacttcagcgtccacatcagcaggaatgtcatccacgccagccctcatccgctacatgagctctgggcctgtggtggccatggtctgggaagggtacaatgtcgctgggcagatgggggccagcacagcagcatccacccagcctgaggctcaagctgcccttaccaccccatcccccacgcaggaccaactacctccgtcagcaagaacccaagcccacatccaaacctgcctgtcccaaaccacttacttccctgttcacctctgccccaccccagcccagaggagtttgagccaccaacttcagtgcctttctgtaccccaagccagcacaagattggaccaatcctttttgcaccaaagtgccggacaacctttgtggtnnnnnnnnntcttcacattatcataacctctcctctaaaggggaggcattaaaattcactgtgcccagcacatgggtggtacactaattatgacttcccccagctctgaggtagaaatgacgcctttatgcaagttgtaaggagttgaacagtaaagaggaagttttgcacacgcaa

SEQ ID NO: 2891 - DNA, 571 bp, Homo Sapiens
  misc_feature (394)..(518): n is a, c, g, or t
gacaccaagattgttgatttttaattaacaccagttggtggcactagaaacctgaaatttttcaaagatgaacaaagaaaaattgaaaaggtaatctaaacatggagaatttttaggaaaataaatgaaaaatataattgtatattagagatgtatttttcttctggaatggaattctttttctaaaatgcaaatcgctatccattttgactgcaatgatgaaacttgtttatcttccagaggacatatatatatatgtgtgtgtgtgtattgtacagatacctttaatttgattacactgtttcttgtaaatatgtttctgtataaaatgaaacttttcaagaggattctatgtatatattgtacttattaaataggtaatgcctaattaccnnnnnnnnnnnnnnnnnnnnnnnnnnnnnnnnnnnnnnnnnnnnnnnnnnnnnnnnnnnnnnnnnnnnnnnnnnnnnnnnnnnnnnnnnnnnnnnnnnnnnnnnnnnnnnnnnnnnnnnnnnnnnttgggggggcggcccttggcccctaaaaaaatttttttaaaaactcttcgttt

SEQ ID NO: 2892 - DNA, 575 bp, Homo Sapiens
cctcccagcatgatgcttgactgacccgaggaaggtcctcatgtttcgcgcctgtcattctcggatggctgtgaggcattccttggcaagggacgctgcgtaccagcggtcctcaccgcatctcacatggctcctgtgatgcatgttgtcgctttcccacccgggatctccatctctcttcccttcctgctgtcagtaagagatcacatgtctgtgtagtgtgaatgccttgtcgctgtcctgtgcttttgcaccattgagttgactgcctctgagaagcagcactaggcctgttgaaatgcaatgtgctgccctgagatccagtttcaagaatgggcaggtaaacgcagtgtgggaaaggaatgtggaatgagaacttggtggttcaccgctgtactatttgtgtaaatgtttacgtatgtgataagctacatgtatgtaaatgttgcaatacccctaacagtcgagtagtagtctcccttacaggaatttttgacggggttcctcatcatcaataccaaataaatatatgtaggaatgcatgattcaaacagcttcctgaattttaatcttgt

SEQ ID NO: 2893 - DNA, 557 bp, Homo Sapiens
  misc_feature (391)..(391): n is a, c, g, or t
  misc_feature (393)..(394): n is a, c, g, or t
ggggcgcttcctcaggctgctgtcgccgctgctgggagatgggcctactcgcccgccaccctgcgctgccgccgctctgaggagttaaagaacatccatgatagcagtcttctgtaaatcgaacttttcaagaattctctgaaggaaccaagtaggatattcttacatcatgacttaatgtgaatgcaagaacaagaaataggttttatctctaaatataatgaagggctgtgtgtaaacactgaccctgtctcaattctaacaagcattttagacatgagtttacatcggcaaatgggttcagatcgagatcttcagtcctctgcttcatctgtgagcttgccttcagtcaaaaaggccccccaataataacccactggccctgtggaanannccttgtccggccgcctcgggccctcgaggaagcttttctagacccattcgttttggcggcgcgggcccccagtagggtaaagtgaaccatgggtcataagctggttttcctaacgaaaacctgctggcccatgacctagcgtgtttgggacttcctccccaat

SEQ ID NO: 2894 - DNA, 1244 bp, Homo Sapiens
ggacagagtccagatggctgttctaccgttatgtttcccaagataatgggaggagcatctgcaaacgagatgctgctcagtggacgaaagctgacagcgcagaaggcgtgtggcaagggcctggtctcccaggtgttttggcccgggacgttcactcaggaagtgatggttcgcattaaggagcttgcctcgtgcaatccagttgtgcttgaggaatccaaagccctcgtgcgctgcaacatgaagatggagctggagcaggccaacgagagggagtgtgaggtgctgaagaaaatctggggctcggcccaggggatggactccatgttaaagtacttgcagaggaagatcgatgagttctgagtgtcgggctgcccactggtgacaccgggatcgggctgagcaggagaacatcaccggctccagttcccctgatccattctcacagcctgaaacaagctcacccgtagcttacgcttggaagcaggactgggaacatccacgctatttattatcgaggagttttaaagtactgtaactttaaaataaataactacaaagcttctttgtccaaacgccattattttatacttatatacacgcaggtgtaaaagtataaaggtgagcactagactgctcttagaagctctaatttttgttttctttggctagtactgtataaaaaacagaattgtgttttattggttttggatgacagaaaagtctggaataatgtttgttttcctcatttcttccttctagaacacagaatctaaaggggtgttagccagcctcgcctccctgccccacgtagagacacagagtgatgtgaggcgttggctttttctccaagaaggtacagatacctcagattcgggaaactcaaaatcaaaagacttagcttctaggataaatacttctgatgaaaaatccgctgaggagcataccccaaaccagacatatgcttaggattcatgctgagatatcaattggtttccccttctttttaaatacgtccagttcttacccagttaacatgaagaaaccactgtctctagaagaaaagcttgttttggcagtattagtgaatcactgaatagcttaagtatgactatctaagttataagtaagccctttaggggggttttaaataattttttctgaccctttctgaaaaataactacctaagtgcctcctgggtgcctggggggaaaaatactactttataaaaaagggttttggg

SEQ ID NO: 2895 - DNA, 1215 bp, Homo Sapiens
  misc_feature (877)..(891): n is a, c, g, or t
  misc_feature (925)..(925): n is a, c, g, or t
  misc_feature (975)..(985): n is a, c, g, or t
  misc_feature (1003)..(1164): n is a, c, g, or t
gggtctcctcttggtgattctgggtgtcatcttcatgaatggcaaccgtgccagtgaggctgtcctctgggaggcactacgcaagatgggactgcgtcctggggtgagacatcccctccttggagatctaaggaaacttctcacctatgagtttgtaaagcagaaatacctggactacagacgagtgcccaacagcaaccccccggagtatgagttcctctggggcctccgttcctaccatgagactagcaagatgaaagtgctgagattcattgcagaggttcagaaaagagaccctcgtgactggactgcacagttcatggaggctgcagatgaggccttggatgctctggatgctgctgcagctgaggccgaagcccgggctgaagcaagaacccgcatgggaattggagatgaggctgtgtctgggccctggagctgggatgacattgagtttgagctgctgacctgggatgaggaaggagattttggagatccctggtccagaattccatttaccttctgggccagataccaccagaatgcccgctccagattccctcagacctttgccggtcccattattggtcctggtggtacagccagtgccaacttcgctgccaactttggtgccattggtttcttctgggttgagtgagatgttggatattgctatcaatcgcagtagtctttcccctgtgtgaggctgaagcctcagattccttctaaacacagctatctagagagccacatcctgttgactgaaagtggcatgcaagataaatttatttgctgttccttgtctactgctttttttccccttgtgtgctgtcaagttttggtatcagaaataaacattgaaattgcaaagtgcaannnnnnnnnnnnnnnattttgtaataaaacacggtccttttcccattanacccatcctccccctctctatttcttgtgtgttttattatattgctcttnnnnnnnnnnngcgccaaacatatactannnnnnnnnnnnnnnnnnnnnnnnnnnnnnnnnnnnnnnnnnnnnnnnnnnnnnnnnnnnnnnnnnnnnnnnnnnnnnnnnnnnnnnnnnnnnnnnnnnnnnnnnnnnnnnnnnnnnnnnnnnnnnnnnnnnnnnnnnnnnnnnnnnnnnnnnnnnnnnnnnacctgtaaaatgtcgcgctctgtgtcaccattctttctcctcctaaacacc

SEQ ID NO: 2896 - DNA, 980 bp, Homo Sapiens
gtggaaaagtatggctggccccatgaagatgctgcacagtttacagatttcctgatcccgatgttagaaatggttcaagaaaaacgagcctcagctggcgaatgccttcggcatccttggttgaattcttagcaaattctaccaatattgcattctgagctagcaaatgttcccagtacattggacctaaacggtgactctcattctttaacaggattacaagtgagctggcttcatcctcagacctttattttgctttgaggtactgttgtttgacattttgctttttgtgcactgtgatcctggggaagggtagtcttttgtcttcagctaagtagtttactgaccattttcttctggaaacaataacatgtctctaagcattgtttcttgtgttgtgtgacattcaaatgtcatttttttgaatgaaaaatactttcccctttgtgttttggcaggttttgtaactatttatgaagaaatattttagctgagtactatataatttacaatcttaagaaattatcaagttggaaccaagaaatagcaaggaaatgtacaattttatcttctggcaaagggacatcattcctgtattatagtgtatgtaaatgcacccagtaaatgttactttccattaaatatgggagggggactcaaatttcagaaaagctaccaagtcttgagtgctttgtagcctatgttgcatgtagcggactttaactgctccaaggagttgtgcaaacttttcattccataacagtcttttcacattggattttaaacaaagtggctctggggtataaagatgtcattctctatatggcaactttaaggaagaaaagatatgtttctcattctaaaatatgcattataatttaccaagccccattttgtgatttttgcataattttttaaaagtaccttttaaagaaggagccatttcccctttaaaaatgtgaagggctccaataacctgg

SEQ ID NO: 2897 - DNA, 841 bp, Homo Sapiens
gggcgcatgagcagtgctgctcccaacccgccagtcgcggtctccggcgccagctacgccgctgccgctgtcactatggcccattacaaagccgccgactcgaagcgtgagcagttccggaggtacttggagaagtcgggggtgctggacacgctgaccaaggtgttggtagccttatatgaagaaccagagaaacctaacagtgctttggattttttaaagcatcacttaggagctgctactccagaaaatccagaaatagagctgcttcgcctagaactggccgaaatgaaagagaagtatgaagctattgtagaagaaaataaaaaactgaaagcaaagcttgctcagtatgaaccacctcaggaggagaagcgtgctgaataggattcttctcagtttgaaagacaatgaaaaatggttttgtatgacttgaatagtttgtatagtatataatcttttctgaacagatgctatagaactcttttaatatgtttaattcacctatcacactctgttaaaaacacatagaatcatcaataaaaactcaatataactttctttgggtcttaaagcaggagaatccaaagtaaatcctgaacaaaacctaaacacagccatctaactcattaccttaaaagacattcctgtttattagcctgattaggaatgatgccactggttgtaattttagcccagacagtttaaccatggagctattccttgggtgcagttcagggatatgaaccccggtacacgtcattctttgaagggggacactgtttcccgcatattcccctaatagcaagctggaaaagaatctgcggtgaacacaaaatga

SEQ ID NO: 2898 - DNA, 1150 bp, Homo Sapiens
  misc_feature (905)..(915): n is a, c, g, or t
gggggaggagggaaagcggcgagtaagatggaagatgaggaggtcgctgagagctgggaagaggcggcagacagcgggcaggaaatccaaatctcctcccaaagtgcccattgtgattcaggacgatagccttcccgcggggccccctccacagatccgcatcctcaagaggcccaccagcaacggtgtggtcagcagccccaactccaccagcaggcccacccttccagtcaagtccctagcacagcgagaggccgagtacgccgaggcccggaagcggatcctgggcagcgccagccccgaggaggagcaggagaaacccatcctcgacaggccaaccaggatctcccaacccgaagacagcaggcagcccaataatgtgatcagacagcctttgggtcctgatgggtctcaaggcttcaaacagcgcagataaatgcaggcaagaaaagatgccgccgttgctgccgtcaccgcctcctgggtcgtccgccacgggttgcactgccgtggcagacagctggacttgagcagagggaacgacctgacttacttgcactgtgatcccccttgctccgcccactgtgaccttgaaccccatgcactgtgacctccccccttctcccccttcccactgtgattggcacatcgacaagggctgtcccaagtcaatggaaagggaaagggtgggggttaggggaaggttggggggacccagcaaggactcagagagtcagacagtgccacttggccacttggggtaaagccagtgccagcaataacagtttatcatgctcattaatttgggatttcaaaacaccaaatgaaaactcacacccacccacccccaagtgcatgtctccatcacttaaaaaagtaggttccatttggaaatattcctttcnnnnnnnnnnncttccccatttttggtttggttaatacaaatatcctgatttggcaagaaaaaagggattggggagggggttttaacgggggttaaatggaatttttaatttaaaaaaaggggaagcttgggtaaaccctacctttaaaaagtgttctggggaaaatttccttataaaaatttttaccccaaaggaattttttgggggacgcttaacctctcgggaaatccaaaaggccgggccca

SEQ ID NO: 2899 - DNA, 866 bp, Homo Sapiens
  misc_feature (656)..(657): n is a, c, g, or t
  misc_feature (843)..(843): n is a, c, g, or t
ggtaataagtttgtagttacatgtgaaactctaaatgcatggcaactgttaatgtcataacagtttagttattttgttctgttctgtcatgtgccacaaaatatgtacttttttcacttttttccctttgtatatcagttacgggttacaactggttcattctgaaaacaacaacaacaaaagtccattcatattttttaacaattgtataagtgcccaagtaattcactacagcctaaagccttgcctttgtaatttgacttctgacatgttggcaatcaaagcatgcacttgtaacaatgaaaaagaaaaagcattttatattactactcaataaaatgtgcatgaacttacagaattctcatccttccactgagtccgctgaagggatttatgtgcacaaccaccatgtgtcttctaggtgctggcccaccaccacacatcacaggctgatttccacaggcttcttcctaggggcctcgtgatctgaggggtggtgcctacttccactgtaagaaagaatcttggtggatttgtgtctcaaatcagataagagaagccggtttaaagagcagatgccatcttctggcttccctcaaggaggccagttagaaaaccagagcattcctttttattgaaaaataaaattaatttgnntatcaggttgttcagttgtattggatgccctatctatctgctaaagcaaaaagtactaagctactaagtgcattttcatcacagaaaaaaagtgcatttgtattaccaagaaatttgtatacccacgccttcagctactatctaatcctcacccgaagatttaagatcccccaaatttcagtttgntttgaaacattgttcattcttaa

SEQ ID NO: 2900 - DNA, 943 bp, Homo Sapiens
  misc_feature (787)..(787): n is a, c, g, or t
ggggttgtcgcgagaactctgcctttgggccgtaggttagtgtggggccgtgtctcagtccacccaaggtctcctcggatcgcctggagaggcactcggacctggagcagtgaggagaatgaataccttccaagaccagagtggcagctccagtaatagagaaccccttttgaggtgtagtgatgcacggagggacttggagcttgctattggtggagttctccgggctgaacagcaaattaaagataacttgcgagaggtcaaagctcagattcacagttgcataagccgtcacctggaatgtcttagaagccgtgaggtatggctgtatgaacaggtggaccttatttatcagcttaaagaggagacacttcaacagcaggctcagcagctctactcgttattgggccagttcaattgtcttactcatcaactggagtgtacccaaaacaaagatctagccaatcaagtctctgtgtgcctggagagactgggcagtttgacccttaagcctgaagattcaactgtcctgctctttgaagctgacacaattactctgcgccagaccatcaccacatttgggtctctcaaaaccattcaaattcctgagcacttgatggctcatgctagttcagcaaatattgggcccttcctggagaagagaggctgtatctccatgccagagcagaagtcagcatccggtattgtagctgtccctttcagcgaatggctccttggaagcaaacctggcagtggttatcaagctccttacatacccagcaccgancccccaggactggcttacccaaaagcagaccttggagaacagtcagacttcttccagagcctgcaatttcttcaataatgtcgggggaaacctaaagggcttagaaaactggctcctcaagagtgaaaaatcaagttatcaaaagtgtaacagcca

SEQ ID NO: 2901 - DNA, 503 bp, Homo Sapiens
ataataagagtcttcagagagatgatgggaggggccagtgaggacaggaacagagagtagatgtcctataataaaggggcttctgggaggtgcctgggcacagatgtctgttcagcaggtgtgtgggcctagaggagagagcagagcccagaaatgtcttttgcaggcccacgttctgacttgaagctttcgtgggcatgttgccattgggttttgcccttgcaaaggcttcctaggtctccagtggcccctcaggacccagggtcccagctgctgcttggggatgtgcactgctggccgccggccttgcagtctctctaccctggggaggaacagtggcttctcagagcctggggcatacagaagaaggcaggagttgatttttgtgttgggtttggggtttctttgtcctcaaggtactgttctgtttctctttacccctctgctttatttattgtaagcattcccacgttaaataaactttggctgttgtctacaaatat

SEQ ID NO: 2902 - DNA, 805 bp, Homo Sapiens
  misc_feature (736)..(736): n is a, c, g, or t
ggaacatttaaaaagacagattccaatgtggagtgccgtgcaggttgcgagctgccgggtttgcacttcgaggagattttcctgtgtagtttttttcctaatgtgagcgcagggaagccgtggcattactgcttttgggatttttattcacgtgcacgtcgcgtttggttgctcgctccacccccggagacctggtgtggtggagaaatttgaacccgcagccttagctccgaaaaggccgagttacctggctctccctgagtgtcgaggaggacatgagtgaaatgaccagcgaactcattttttataggactcggtgaagccggattctgcatttccctacttgtagactcattttgtggaatagagttgatcgctgtctcctccgcaaagcattttaactcgaataagcaaatgccgcctctgtttgaacgttttggtatttacaagagagaaatcattttacctaagagaactaattgaattggcagcatccttgaaatacctccggacaaggatctgggggtgggggtggaaaagcaactgcgaaatagcagacggagaaattcctttggaagttattccgtagcataagagctgaaacttcagagcaagttttcattgggcaaaatgggggaacaacctatcttcagcactcgagctcatgtctttccaaattgaccccaacccaaaggagaactggggtaccccaccagcaagcatgccagtactgggnccttatttcctatggaccgcacaaaaaaattgtgtataggaataatccagtttagatgggctcaaaagg

SEQ ID NO: 2903 - DNA, 922 bp, Homo Sapiens
acagagcaagactccgtcgtccgtctccagtaagaaatataccaaaaaaaggaaaacagggagagagagggaccttggcaggagccaatgtaggcaaggtagcaatagaaagtgactagaggtgaaggaagagcaaatgaagtaccataaatcacacagaacaagtggctcactgcttttctcctctgagttcattaacgtccagtatctgtccacagggcatgtgcccatactgctcaatgcagagctgagtaggtggaacaggctcccaaagctagaaatccaagtgacagcaaccagttcagaggccctgggaataaacagggtccaagcagtgcagataaaggcagtacaatctacagtatcatctgcttggcttacaagtagtgtgaaggatgacctcgtagcatgtgatattccagaacagcatgaaggtcatatggaagtggagaagcatacccaccaccgtctcaatcttgaggttgagagaactgaatatccaaaggaaaacggggtgcagaaaagtcagcaaaaacaaagcacaatagaaggcatactcattgctgatgcccaagcacagctccagcagaaggtgataggagaccttgtgcaggagtatccccaagggcaaatgtaaaccagactggaacccaaagggcctggggatctactacaggctcccttagcgggcgacgtcgggctctacggactccttcacgcaacaggtagtattgcagtggatttggccacagatcctctttaataatctcagcaattttgtcggactctggaaggctgtggtctgaaaaccaagtgaagaagctgcagatgaggtcttggtttctgcgaatgaaggactggggttcatgccccctgcgccatataattggagtagaaagagacaccactcggccggagatct

SEQ ID NO: 2904 - DNA, 1109 bp, Homo Sapiens
tcacatgctccacacgttgatgcctaatgtcttcttgaggtttcctttagagggcactccttacctttggtgccagccattctgctattctgatcctacttcccctcattactgatcttccttctctgccatcctgaccccttcctgtccttggatgcctttggagttgcagagaagctgtctttatcttcctggtgtgatacttgttttctaatagtaggaaatagtgttttcttgttctgcccagttttctctctttatagatgagacatctaagttcctgctccctggatgtatgtcagtttttctcttacatggtaatgttctgatctgagtccggtatctccattgtctaactttgcatagaggaacatacctgtgctttggtggggacgttgtgcttgtattcgtgcagtttaatgttgaattagctctttgtggagacagttatataagtaagcatttctagggagtctttatatccaaaagtgaggcttaatctctgaagagtagactgataggaagagagtacctggagagatgatgcagtcccaccttctcatgagacaaaggaggaagcaggccaagtgaagagggtgatgtgccaagcagtgtcagcagcagatcgcacattggagtgccacatgctctccacccttgagaggagaaaacctgaagacttgggtttttcctgatgtgtgttttcttgtttgtagaaaagtattgtttctatttggataggactgagcccaagattaatctttcagattcttaagtattttccacccatggcgttagctagctttgtatccataacagagttctttataaacatgagctaagctaattctagctcatagaactttcctatgtaaattgtaggaaggaaaaaatcatcaagtgtaaattgttgccctgggtcaaacttcaaattattttgtttcttgtagtttaatgagatttatagtgaggagatggaagggatttttaaattgcaggactaaaggggaatggcccttcctacagccattctgttcccatccccttcccaggaacaccattacagttggggtgggggcctgcgtgggcttcagcctcgtgtggaacac

SEQ ID NO: 2905 - DNA, 573 bp, Homo Sapiens
tgatacataaacaaacaaaaagaaaccctcatcctctgttgatcctgttcccaattgacccttgaacctagcgcaggatgtgtgctaaaggccaacaagaaggacatcatgaccctaaatatatcctctacaagctgctacctaatgttttaaattcccccttaaacctttggtgcctttcattcatgtttgctaaaatgccacttaatctaatatgttgagctagtatcaattaactttacactacacagtagatacagggaacacaccatccattcccataccctgtgagatcatctaatccaaccctcttgcattaacacaaatctaagaacatccaccaaatgtccagatttttaactctggtactcagtttcttgaagtgcaaaatacagaagttgaattgaataattccccacatcccttcttctcatgatattctaaagagcttctgagcctgttttccacctataaattagacacattggtgaatctgttcttattcctaaccaaactgttataagggtcaaataaaaccatgtttgtaaaaagcttctaggatagggtcccgca

SEQ ID NO: 2906 - DNA, 580 bp, Homo Sapiens
  misc_feature (564)..(564): n is a, c, g, or t
gaggatcctgcgctttaactgcgcgttacaatggatgcccacaatgccagatgttagacattcgtccgggactaataccacaggcacctgggccaagattccctttaatacagcctggaattccaccccaacggggaatcccacccccatcggtacttgattcagctcttcatccaccaccccgtggaccttttcctccaggagatatttttagtcaaccagaaagaccttttttagctcctggaagacaaagcgtagacaatgttactaacccagaaaaaaggataccacttgggaatgataacattcaacaggaaggagatagagattaccgggttcctcctatagaaaccagggaaagcattagtagacctccccctgtggatgttagagatgtggttgggcggcctatagatccaagagaaggtcctggacggcctccactagatggtagggatcattttggaagacctcctgtagatataagagagaatcttgtgaggccaggtatagatcatcttgggcgaagagaccactttggctttaatccagagaaagccctgnggcatagaggagattt

SEQ ID NO: 2907 - DNA, 543 bp, Homo Sapiens
gcacaatgtctactataaagtagatgcccctaatacttccctctttacatttcttcataatccttataacgacctcatgttgtaaggattattaactctagttttacagatgaaaaaagctgaatcacaggaaggttaaggagtaagcctaacagtcacatacctggtaactgtcaagtacccagatctgctgtgccctaaaacttgacatggacatgttacctcactgggattattttactctgtcatattatgaagttcagaactttgtttgaattatgcccattatgctttaaattttaatacaagaacaattatttacaaaaaccagaatcaaccataatttccactcataattttagaggacaaagacctgtaaatagcctacctatatagaaattcaggaacagaggacacactccagatctcaaaatgaactagccaaattactcattacaagctctcatttacacagaagaatgatttctaaatgcatatcaacaagaatgagtggggaccaaatgaaccaaacataccacagaa

SEQ ID NO: 2908 - DNA, 421 bp, Homo Sapiens
tgtaaaagtaaccaggcagctaaagaagcctacttcccttgctaaacaatgacccttgcatatgttcctcttattgcaaccttcaggaggccccctaaactttataagggccctctccttaatttgagccttttcaacgtgtttcctccttcccttaaactttttattgaaatctacattacagaaaagggcattaaatcctaagtgtatagtttgatgaattttcataaagtaaacatgcccatgcaacctattcctagataaggagttgagaggcattatcagctcatctggtcacccacccggtgagctagcatcctaagtttagcttgtttttgacctttacgtgaatggaatcacttgtacaagttttaaagtaaccgtttagaatgtttattgggaattagattacaaagtaata

SEQ ID NO: 2909 - DNA, 893 bp, Homo Sapiens
gggagacctgagcatggcggccaccaggtgcctgcgctggggcctgagccgagccggagtctggctgctcccaccgcccgcacggtgcccacgccgggcgctgcacaagcagaaagacggcactgagttcaagagcatctacagcctggacaagctctaccccgaatctcagggctcggacaccgcctggagggtcccgaatggtgcaaagcaagccgacagtgacatccctctagatcgcttgacaatatcttattgtcggagtagtggtcctggggggcagaatgtgaacaaagtgaattccaaggcagaagtcaggttccatttggcaactgccgagtggatcgcggagcccgtgcggcagaagatagccatcacgcataaaaacaagatcaacaggttaggagagttgatcctcacctctgagagcagccgctatcagttccggaatctggcagattgcctgcagaaaattcgagacatgatcactgaggccagccagacaccgaaggagccaacaaaagaagatgttaaacttcatagaatcaggatagaaaacatgaatcgggaaaggctgagacaaaagagaattcattctgctgtaaagacaagcaggagggtcgacatggactgaaatcaccctctgcagctgggagggctcttctgggcgtccgggcagctgcagctgagaggactttcacaccataaggagatttctgtttttctttttggctgttaatgcttgtctataacattggagccatcacaagaatgttcatttggaatgaaggctgcaggcactggttgcagacgtctttataggcagtcaccatgttgtcaaaccttaataatgcacctcatgtattagtcacaataaaaatcagaactcaaaa

SEQ ID NO: 2910 - DNA, 223 bp, Homo Sapiens
cttcaagtgagtggaactttccagggacaacaactcacaggctatggatagactacggatgcacttcactgtggcctctactcatgaggggcctaatggacgaggaggaggaggatctgcccaatgggcagtcatggggtatagtcccctctccactccaggaaggtttggcaaaggcagaagctgactgcaaagactggatgggcttggatgcaatggctca

SEQ ID NO: 2911 - DNA, 700 bp, Homo Sapiens
tcgctgaacatgctccaccacttcttccctagagtagggcctgtgctgtgcctggccgcccagaaacgaaaagctacaacctggcccttgcggcccaagctgctagggagtacatcagagttacagatcttggctctgtggtaaacctacctccaattctaccacatggagcaaatctatagctcaaaacccaggtgccacaataggttcatcagatgctgagcctagaaccccagacccacagctgccctgagcacctgcacctggaacccagagccactgtacctgcctataggccatatcatacttgacagccgagaagtatcttcatggctaagtaacttcattgtggggcaaatgaaaataggaggactccaaaaaagcccttgccattaacaacctatgccattactgctacaaacttttacaacctaggccactgaggaaaacaaagttactgccaacattaaatactgtggataaagctgaacaaagactataccatttcacttatctggaaacagagttactacacccttctcaactagcacactaaggaccaagtgcaggtgaaagcctctatgaaagtgactgtagaaaaatgggaagacgccatggtttcgccagatgccagacatcaatgcagggacaaaagaaacatgaaaaagcaaggaaatgtgaaacatgaaaggactcaata

SEQ ID NO: 2912 - DNA, 1161 bp, Homo Sapiens
  misc_feature (875)..(1028): n is a, c, g, or t
  misc_feature (1041)..(1052): n is a, c, g, or t
ggggccagcggcggagtctccaactgggagagctgcagctgccgagaggaggagaacgctgaggtcggtcggaccaacggacgcgctgaccgctgccaactgcagctcgcgctgcctcctgctcgcgccgtgccactaaggtcattcccgcctccgagagcccagagccgagatggaaacggtccaggagctgatccccctggccaaggagatgatggcccagaagcgcaaggggaagatggtgaagctgtacgtgctgggcagcgtgctggccctcttcggcgtggtgctcggcctgatggagactgtgtgcagccccttcacggccgccagacgtctgcgggaccaggaggcagccgtggcggagctgcaggccgccctggagcgacaggctctccagaagcaagccctgcaggagaaaggcaagcagcaggacacggtcctcggcggccgggccctgtccaaccggcagcacgcctcctaggaactgtgggagaccagcggagtgggagggagacgcagtagacagagacagaccgagagaggaagggagagacagagggggcgcgcgcacaggagcctgactccgctgggagagtgcaggagcacgtgctgttttttatttggacttaacttcagagaaaccgctgacatctagaactgacctaccacaagcatccaccaaaggagtttgggattgagttttgctgctgtgcagcactgcattgtcatgacatttccaacactgtgtgaattatctaaatgcgtctaccattttgcactagggaggaaggataaatgctttttatgttattattattaattattacaatgaccaccattttgcattttgaaataaaaaactttttataccnnnnnnnnnnnnnnnnnnnnnnnnnnnnnnnnnnnnnnnnnnnnnnnnnnnnnnnnnnnnnnnnnnnnnnnnnnnnnnnnnnnnnnnnnnnnnnnnnnnnnnnnnnnnnnnnnnnnnnnnnnnnnnnnnnnnnnnnnnnnnnnnnnnnnnnnnnccttgggcccccnnnnnnnnnnnnaaaaattttttaaaccctttttttgggggcggggcccccaaaggaaaagaaaaggggtctattcttttcccaaaaaaacccgggccaaaaaaaggggttgatccccccc

SEQ ID NO: 2913 - DNA, 230 bp, Homo Sapiens
aaaccgtagctgtaatatcaggttacatactttctgttttattttcccttttctctgtgtttttggttacttgagatggcctcctctctctcactcctggtttgggaaggccttgcttcctctgaaagcttgtgagcagagggctgatctgatcagatttgctcttctgagtggtgctctagaagccacgtggagcatggatggtgtggagcatgtgcaggtaccggctc

SEQ ID NO: 2914 - DNA, 440 bp, Homo Sapiens
ggcaaaccagcctgcctggtcactgactgcttactctaccttagctggacctcgtctcccagggattagagaaaagagcaggagtcctgggtcttcccagttgagactgctggagctgagacacagtactctcttaaagaaggtggggagctcccagggcagaacccactggtgttcatgactacccctggctcctctcaccttgtccctccactgccaacagaaaacaaagcagctgactgagatggtcaaaggactttggaccataggggatctttggaaggctgtggggtcttgctcttccttagcactcctttctccttgtgagatctctcctcagctggaatgaggaatgtagtccatctaaactgcttgctaggctcaattaccacttctgtttgctttgtggatcctgggataacatgtatatgtgtacacga

SEQ ID NO: 2915 - DNA, 550 bp, Homo Sapiens
  misc_feature (442)..(451): n is a, c, g, or t
ggggattcttcccctctctacaaccctctctcctcagcgcttcttctttcttggtttgatcctgactgctgtcatggcgtgccctctggagaaggccctggatgtgatggtgtccaccttccacaagtactcgggcaaagagggtgacaagttcaagctcaacaagtcagaactaaaggagctgctgacccgggagctgcccagcttcttggggaaaaggacagatgaagctgctttccagaagctgatgagcaacttggacagcaacagggacaacgaggtggacttccaagagtactgtgtcttcctgtcctgcatcgccatgatgtgtaacgaattctttgaaggcttcccagataagcagcccaggaagaaatgaaaactcctctgatgtggttggggggtctgccagctggggccctccctgtcgccagtgggcacnnnnnnnnnnccaccctggctccttcagacacgtgcttgatgctgagcaagttcaataaagattcttggaagtttaaaacgcgattaaataatatgagatgaaagcttg

SEQ ID NO: 2916 - DNA, 553 bp, Homo Sapiens
gatatatggaggatggggaaagagttctaaagtgtctccagctgtgaacccaggaggtcaagtgggctattaaaatctaacgttgagtaaatgtgatagtgatgagaaaggaattttgtgtactgtaaccttgcagtagagatgcagctgtccttcgtgtgtggaaacacacctctcctttacatagttgggaacctcattagaaatgacctcagctgccccatatctacgttcctttcagcagttgtccaagtaggagtgtatccagtgaagacatatcaaatcacaaagtcattgtcattagagtgtacttgattactgggcatccttgtaatataatttcataccactgacacattatacttgtaagagaacatctttcccagagtgcctcagaccttattgctttaaaatataataatgttttcattacttttattatttgaatgatttagtaaagttgactgaatctggtatagactttgccagtatgtgtgtgaagtttttatcaaactgtaatatttgtgaatggaatgccttgcaccatcgtcga

SEQ ID NO: 2917 - DNA, 1474 bp, Homo Sapiens
  misc_feature (427)..(483): n is a, c, g, or t
  misc_feature (498)..(593): n is a, c, g, or t
  misc_feature (1188)..(1188): n is a, c, g, or t
  misc_feature (1302)..(1302): n is a, c, g, or t
  misc_feature (1344)..(1344): n is a, c, g, or t
  misc_feature (1355)..(1355): n is a, c, g, or t
  misc_feature (1417)..(1417): n is a, c, g, or t
  misc_feature (1420)..(1420): n is a, c, g, or t
ccgcggtgaggccgcgccgaccatctctgcactgaagggccctctggtggccggcacgggcattgggaaacagcctcctcctttcccaaccttgcttcttaggggcccccgtgtcccgtctgctctcagcctcctcctcctgcaggataaagtcatccccaaggctccagctactctaaattatgtctccttataagttattgctgctccaggagattgtccttcatcgtccaggggcctggctcccacgtggttgcagatacctcagacctggtgctctaggctgtgctgagcccactctcccgagggcgcatccaagcgggggccacttgagaagtgaataaatggggcggtttcggaagcgtcagtgtttccatgttatggatctctctgcgtttgaataaagactatctctgttgctcacaannnnnnnnnnnnnnnnnnnnnnnnnnnnnnnnnnnnnnnnnnnnnnnnnnnnnnnnntatagaacagacacnnnnnnnnnnnnnnnnnnnnnnnnnnnnnnnnnnnnnnnnnnnnnnnnnnnnnnnnnnnnnnnnnnnnnnnnnnnnnnnnnnnnnnnnnnnnnnnnttgactgtgggtggaagggcccctacccccacaacaaaattcttataaaaaacatttttttgtggggcgcgagagggccaataagagaaaaaagtagcaaacggggtcttcaattcttcaaacaaaaagagagcacagtgggcaccaaacagagggtgttgtgatatcctccacacaaataaaaataaaagcacctcgcggggtgaaaaaccaaagtcggtgttacgtaaaatatacatcataaacgaagtctgtcgaggggctgtatatacggagaacatcaccacacaagcagcaaacaacacaatatggtagtcatcataattcataaagataaattgaccacacgcccggccagcagaacagaaaccatgaagacagacataagtcgggaggataacatatatcaaaaacacacacaatatactcgaccaaggacacgtaaggaaaacgtcccaatgacacaaactgtctcggcgctagcgaagaatacatagttaatataccatcgcagcagacggaagatagagactatgcgcacgcgactaacatagctacgaggcctctacgatatatataaatataagtatttctnacaccataagagcacacaacgaaactaatcccggcacaaataaaatacacaatcattgtagtcccaacactttgtagggctcaccaccatcataatatataactacaacaaatngatgcgcagcagcaatagcgactcaccacgcacacgatgaancgtacgccgtngtgagaatacacgcaacacaatatataataatctcctcttcgccgtcaagaacacatctacnttntctcgagaatcgacacatagaccacgatcgccgtcgtctacatcatcgccccac

SEQ ID NO: 2918 - DNA, 706 bp, Homo Sapiens
ggcttggggaactggaagaaatattggatgtgattgaaccttcacaatttgttaaaatccaagaacctttgtttaaacaaatcgccaagtgtgtatctagcccccattttcaggtggcagaaagagcactctattattggaataatgaatacatcatgagtttgatagaagaaaactctaacgtcatccttcccatcatgttttccagcctttataggatttcaaaagaacattggaatccggctattgtggcgttggtgtacaatgtgttgaaggcatttatggaaatgaacagcaccatgtttgacgagctgacagccacatacaagtcagatcgtcagcgtgagaaaaagaaagaaaaggagcgggaagaattgtggaaaaaattggaggatctggagttaaagagaggtcttaaacgtgatggaattaattcccaacttaacaaaaacaatgacaacaacattacctaacctgtggagtcacacgtttatgtagtagaagatggagcaacagttttctggtattgggcaactttacagtaaatttcacctttgtttcattattacagcagcactgtatatacctgtcctctaagtaaaggaaaaaacaaaataagggacttcaatcccaaagtttggaacagtaaatgggacttcctcagaactttggcaaacattaatcatttgttcctccccctcttttt

SEQ ID NO: 2919 - DNA, 871 bp, Homo Sapiens
  misc_feature (817)..(817): n is a, c, g, or t
ggggtggggaaggatcgcaggcgagattacgaggcgaggctcgcgcgcccgcccccgccctggcccccagtgcccacccggtccgcccggcacagccatgatcaaggcgatcctaatcttcaacaaccacgggaagccgcggctctccaagttctaccagccctacagtgaagatacacaacagcaaatcatcagggagactttccatttggtatctaagagagatgaaaatgtttgtaatttcctagaaggaggattattaattggaggatctgacaacaaactgatttatagacattatgcaacgttatattttgtcttctgtgtggattcttcagaaagtgaacttggcattttagatctaattcaagtatttgtggaaacattagacaaatgttttgaaaatgtctgtgagctggatttgattttccatgtagacaaggttcacaatattcttgcagaaatggtgatggggggaatggtattggagacaaatatgaatgagattgttacacaaattgatgcacaaaataagctggaaaaatctgaggctggcttagcaggagctccagcccgtgctgtatcagctgtaaagaatatgaatcttcctgagatcccaagaaatattaacattggtgacatcagtataaaagtgccaaacctgcccctcttttaaataaaaatgtaaaaaaggccactccccaggtaaaacccagggggaaagagtcatcttagtttaccatgcagttgttttaccaaaaaatagagagaagagtcttaccttttgctcttggatttaagtcaaggtactgtatanaagtttgtggaaaaatcagtatggaaagttcaatggtggctgttcttggctcaa

SEQ ID NO: 2920 - DNA, 819 bp, Homo Sapiens
aaatctttcacggagaaaaaactctgcattacaaaatgtggtggcttgagtaacagttacttctctttcatgaatttctttcagtgggcattaactgtccatttagcttcattaacagttttaccacgagaccagcctgttttgtatgtactataaagctcattttattttccatgctatggatctgaaaacaagtatcagtatctcccaattgccacataaaacaaccatacttaagactgatgagtaaagccttagtttccatgttgaggagatgaagtccttttatattcactcctacatacacagggatgactttatgattgctggggcttgcctttgtaaatatctgtcctgtgaaaaatgctgctccataagtaggaatttcccagcaattctgtaagaacatgcgctgaaggtgatgcatttctttactgacaccttcacttgtactgagattcttgtattcatgaagtatgcgatttgtccagtgaggtgccttacttttcagtttggtaacaggtacgatggattttagattttcttcatttaggaaaccttgcttgtgttttttactctcataatttccatagactatttgcaaaagcagacttgccaatgttatcagcttagcatcaggagctgtataaaagcccttcaataaattatatctggcttcatcaaagagaataagaatagctagtgggtcttcaatctgtttttcaacttccaagggaagtctcacatctcttcttagaaaaagctgaggtgtttccctttgaggatccagattagtcaattcagcaagtatttctggcc

SEQ ID NO: 2921 - DNA, 846 bp, Homo Sapiens
  misc_feature (569)..(578): n is a, c, g, or t
  misc_feature (592)..(618): n is a, c, g, or t
ggcatattttttattaatacctacatcaaatggaaaatatctgaaattttttttccatagcaggtattttctactagaagtagttttactacttttcatttagaacagagtatgagtcttaatctgaagtctttttcatgcccttgttttaaaaaaactactttttttggcctcaaaaaaatcaagggtgtaatttttaataaattgttaatcctatgttttgtaattttcattttaggagcttgacttatttttttctctctcataaaaacacatttgcgttaattgtaggagaaattttctcagcattttgcatgttctttctaatctttgctggtctgaatatattggtagtaattactgtaattattcaacaaaaagcatatccgttcaaaaatttttccactatgtcttttttctagtggctactgttttagttttctagttgaatatctctgacaagctttccgtatggttctgttatattttcatctacatgcaatgcgctattaattttattaaatgaaaactaatcccccttcatgtgggaactataacccacagaccgnnnnnnnnnnatgcctaacttcgnnnnnnnnnnnnnnnnnnnnnnnnnnntatcatatggctcaaaccccgtccacgccccccctccctgcttattgtatccccttccaggcgcatcgcaactcaattgcctgccctcccgtttctttttgggcggcttgttcctgggccccttgcaaaaatcctcttataaacccccctcctctggggggccgcgcgttccctttctggagtatcccaaaccgcgggcacaaacgctggcccctccaacgaaaaacg

SEQ ID NO: 2922 - DNA, 693 bp, Homo Sapiens
  misc_feature (411)..(422): n is a, c, g, or t
atcagcatctcactttcttctccattcagccccaaccccctccctgccatgctttccaccccaaggacccaccagcagggagcagacggcagctaattttggtaccacttaagggtccccccattctggcccccatcctctccctcaccccaattctttctcgctggagctgttatttcccaagaagccgcatcgcccaaggttggcacctctcctaacctgccacacgacagctctcacctctctaggaattgggggctgtcaggtcacaggtgggatctggcattttgtgtatgacagtccatttctagatggtttgcctattaaagaagtgggggggaaatactgttttctccttaaccctcaagctaccagtctctcctcttccgcgtagaggaagaggggagcagnnnnnnnnnnnngctgaagtataaaaaccctcctcctcccgttattatttaagctactgccatcaaccccacccccataaagctgtgaagccctttgcctcgcttttgacagcgtgggggggccccgtgggcagggacttcggatttgcatttctgggttgtttttccttccactctggggtctcgttcaggcataggggtctcctcaccccagccacatgtttctttaagaatcctttggtcaaccaggaccttgatttttcaggcattttggtctggggta

SEQ ID NO: 2923 - DNA, 797 bp, Homo Sapiens
  misc_feature (714)..(714): n is a, c, g, or t
gggcaatcacagatgagctcaaacagtgtaaaaacaacctgaagctgctccgagagaaaggaaataatccttccatattacaacccgtcccagccgtattcatcggcctattcctggctttcctgttttggtgtttcggtccattgtggtagagaaagaaaccctggccctggatgcccatgttggctgccctggttgcagtaacagccatcgtgctgtacgtgccaggtctggccagagcttctccatgagagcgttccttgagtccgtacaccgtcctccctctagaagctggcatcacactcatgctggggacaaacagaaccattttcttcctctttacctcttaaaacagcagaagtacaagaatacagctgtagggtcattgctttaaattatataaaatgtatctgtctataaagaagatataaaattgtgactttattctactgtaagcaataatttgcttgcaatttttcatgtaatttttaaattagtatgttaagattctgaatattatggtggcctaaagtaggcttcttggtacaccagattatttataacattaaatttatgagtattttactctgaattctgatcaccagataattcatttttctgatttgataactacccaaaccaaacaaccaatacatacatgggaaagaagagcccctgtgttgctcagtgccctatcagtttgaaatatatacncctatatatattttttacatattttacgccatttttaactggtatgaaaacactgaagctattgggaaacagaacttagagac

SEQ ID NO: 2924 - DNA, 796 bp, Homo Sapiens
  misc_feature (238)..(247): n is a, c, g, or t
  misc_feature (324)..(333): n is a, c, g, or t
cctgtagtttcattacctttttgaataatgtcatacaaaaaatgtatttgtttttttgtgctgtgagaattgatgtttgtagattaataatcattttgtttagaattacaaaatagtttttaaatattgtctgagaaaagccaaagttaatgcaacctagtggaaactgtaagaccatttgagtattgtttgttttattgatgcatttggattttgttgtttgatggaatttgagccnnnnnnnnnntacgcaggctttcctatttctacaactgattgtacttatgcattttgtaccagtggaactttttatactggagattnnnnnnnnnntggaaatttttgtggcttgctctggtgggcccctgacaatgactgatttcaagtttgatttcgggttgattgattgattgattgatagaaagaaagttgcttttcttttgagaattaaaaactttggcttgatttcttttttccctttgcttatatctagcattagaattttgtcttaaaataacagcggtaagtttcactttttattctgtattgtgcagttacacaataaggtaattagatttagaagtactcagtcactttaagtggataaatgtattagttaaaactttagggtttgcttttttgctgtttagatcaaagttttttctgattcttctgtcctcattgtgaacataaccgtgtagttgaaacagtcaaacttatttttgtaatgtatgttattgtgtgatgcagttttttgcttctgtctccaatattaaaccattttcctaataaaaaa

SEQ ID NO: 2925 - DNA, 825 bp, Homo Sapiens
  misc_feature (464)..(464): n is a, c, g, or t
ggcaaggtgttgtgtttgaatcccctgaggaaagtgctgatcaatctcaagctgacagagactcaaagaaggccaagaaagagaaactttctccctggcctgcggaccttgaaaagcagccttcccaccatcctttgcggatcaagaagcagttgttcccagatctctatagcaaagaatggaacaaggcagtgcctttctgtgagtctcaaaagagggtgactatgttgacggccccactgggattttcagtgcacttaaggtctacagatgaggagtttatttctcaaaaaaccagggaggaaattggtttagggtcccccttggtacccatgggagatgatgatggaggtccagaagccacagggaatcagagtgcctggatgggccatggttctcccctgtcccacagcagcaagggcacccctcttctagctactgaattcaggggtctagcactcaanatatcttctgactccagtgaactttttccaggcagggtattcttccaggagatttgaccagcaagtggaaaaataccataaaccctgctgaagacaggagagtacagaatgacaacattgagcccacactgcagttttgaagatagtaactgatggctggtgggaaagagtttgtttttggggcctacttttctatctttacaagactcttatgggcccaccgtggagcagcacttcccaaaacttgttcactggggtcctcgtgcctatggaatccttctttttataactaagtttaagaaatactttttttataaaatctttggagtatgcgtgagcaaattaaaagttctttgaagtc

SEQ ID NO: 2926 - DNA, 135 bp, Homo Sapiens
tgcttggtagacttttatgtgggttgtgacactgataattttgttaatcctaagagataattatatttctattttgtgttagttgctttgcataaaactttctgttttagtggtggagcatgtgcagggaccggc

SEQ ID NO: 2927 - DNA, 203 bp, Homo Sapiens
cttgcacatgcccacacacaaactatcaggtcgggacccccagatgctggctgttgagatgcagtcctcacacagtcgagacagtcattaaatgaatgagtccccttatccttgctcgaaccttcacgaagtcatcttttgctaagtgactggtgagcacataaattgctactgaaaacgtgtggagcatgtgacagggaccg

SEQ ID NO: 2928 - DNA, 676 bp, Homo Sapiens
  misc_feature (44)..(106): n is a, c, g, or t
agcttcacactgactagctctgactggacaagtattaaatgcannnnnnnnnnnnnnnnnnnnnnnnnnnnnnnnnnnnnnnnnnnnnnnnnnnnnnnnnnnnnnnaagtggtatgatgtaggcacatctaaatggttaagcccccagaggccagccatagtagatgctgataaaaataccagttgttattaccgtatgtaaaatcttgtgtaattttctttcaagtgactgaactggccttggcttaaacacttgacttctcaggaaacaaaaagctaactccgggtgtggggtaaattgagaattgcctgtggctggcccctgtcccacgcacccttccctgttagggatctggctgagagtttccattccgttcttattccagggcaggaaatggaaacacaggaagcagatggttggcatgggaaaggctcccaaagacacagccactgtcacccagccccttgtttccctctcagtctctaagggctcccatttttccaaccatcactagcttttctgccaccttcagagccctgtaaatgctgtgactgccagagtctaaccagcggttcattttagttttgcctcaaggtggatggtctctggttcccccttgactagaaatctggggtgtgggtagctccaaaaggtggtctgtagcgggtctacagc

SEQ ID NO: 2929 - DNA, 453 bp, Homo Sapiens
ctgaccatgctccacacgaggcctggctcaggctgttctttggaatgtcccatctcacctgctctaccagccagaattctaccctttctcaaaggcctggtggatggtctgcctcgttatctgatgcttttcctctccactccaagttcctgttgcagtcgccaacctgggtttgttttctcgggcttgaaggccttcagggatcctcacccaagtacccacccaagtccctgaagaaggaggatgaggttgggttggaggagaaaggcgtcttccctcaccacagccttctagaccctgcctggtgcctggtcccagtcagtgcttacaacatgttcccagaatgactgggggaatcgtttccaaggcctccttggcctctggagaggtggtgtcggagaagacgggatggctgagcaaggtgacagcagagggaggcagcagaggtggggg

SEQ ID NO: 2930 - DNA, 662 bp, Homo Sapiens
atgggtgtcgagataatacgggacagatgtgtgcacacgtgcgaacgtcactcacacgcacgctagtcgagagtcctcctggggccagtaccagcacagtctgaatgcagtgaaaaccttcacagagaaggtggctggccccagccacagtcgtgcggggacacagagacgcgcagggcatgacctcaccctccaaaggcgcactgtcccatcaggagtcacatcacagatcaagctgaacctgtcttccctccagagccccacactccagtctgcaggcacctgggtgggccttgcactctcgctcaggcctttgcacctgctgtgccctttttaagaaatgcccttccccgctgctggctccctcttagctcttgtgggctcgtcaacacctcctgttgtgcccctcggttgggctccctcagcccctccttccctcctcctccaggatgtggaggtgtcagagcccccatgcactggctcctggagaacagggctgattgctttcatctgtgtgtgcccgggcctgctacacataacaaggcctggaaaggcctccgaagagaggggccgttgatgcaagtttggaagaatcatgagccatgaagaaggtgactggtgagggatggggcagtcagacggagggacagtcaagcaaggac

SEQ ID NO: 2931 - DNA, 832 bp, Homo Sapiens
  misc_feature (776)..(776): n is a, c, g, or t
  misc_feature (778)..(778): n is a, c, g, or t
  misc_feature (794)..(794): n is a, c, g, or t
ggaatcttttgaaactaagaaaatgtgtcaaattgtgtgcattcattctgtaggtaaaattcttaaggattgccatgtcagtccttcagttgtacagtgaactgttgtacactggttcaatgaaaggaagttaaaagtaccttttacatattgtaaaagtggatacagttgatttgtgagtaggcactctttaatccattacctggcactagcaacattagaattttaaaataaaataattgggaaagaaggtgggtcatgtattaatcagtgaacagagatttacctaaccaacagacttggattgtcttttgacataatcaaaatgcaacacatgcactttgtgtgtctcctcttaattgaagggagggctgagggatgttttctcttcttgtcttgtgtataattctctattgcttaggatattaaagtagagcactcaagtgtgggtttctgtgttattgaggatttgtttggaattcaaattacagttatgtactggatgctacagacttataacagcatagtgaatggtaagactagtgcaaaacagttatttctgaaaattaaagaccattattgctaccaaatcaatgtgactatttcatatgcattttgcctttgttaattttaaacaaacaaagtatcattagtgatcagctagctaccttctactttccatttttcaagtggattgttctcttaatttgtatataacctgttgtctaaattttatgtacagtcttttataataaaccattctcctatatgaaaangnaaacaaaacaaccaanaaaaccatgggcgggcgccttcggccctcgaaaagcta

SEQ ID NO: 2932 - DNA, 527 bp, Homo Sapiens
ccgcacccgtcgggtatgtgccacactcttccgtccaaccagtcattgtactgcacaaatgccagccatgaccacatcggcgcgcgttcatgtaaaacgtaatttctccagttgattcatccctgcacgatgatgcccatactgtatgctttcataggtgaaagggaagatctgtaggatggtgaagttcaggatctggtcgccaggggtcctcagctgcatggaagaggggtctcggcccaccagggttaagcccacactttccgtccactgtaccggggccgcctcatcggggctggatgcctggtatacgcggcaggagtcttcgtactgcttctcggcctcagcctgatcagtcacaccgttggactcatacacgggagtcacgttgtggcagagcgcgatggccttcacggcttcgtgcacgcggctgctcatggtccgccggaccttagtggtgagcgttgggcccttctgagccggtgatctctgtgtcttgtgagtgtgcttgtggggacatgtgccag

SEQ ID NO: 2933 - DNA, 932 bp, Homo Sapiens
  misc_feature (769)..(770): n is a, c, g, or t
  misc_feature (772)..(773): n is a, c, g, or t
tacccacggctagacgaggcccgtgttaatcggcacgaggcgggaagctggagcgggccggcggtgcagtcacgggggagcgaggcctgctgggcttggcaacgagggactcggcctcggaggcgacccagaccacacagacactgggtcaaggagtaagcagaggataaacaactggaaggagagcaagcacaaagtcatcatggcttcagcgtctgctcgtggaaaccaagataaagatgcccattttccaccaccaagcaagcagagcctgttgttttgtccaaaatcaaaactgcacatccacagagcagagatctcaaagattatgcgagaatgtcaggaagaaagtttctggaagagagctctgcctttttctcttgtaagcatgcttgtcacccagggactagtctaccaaggttatttggcagctaattctagatttggatcattgcccaaagttgcacttgctggtctcttgggatttggccttggaaaggtatcatacataggagtatgccagagtaaattccatttttttgaagatcagctccgtggggctggttttggtccacagcataacaggcactgcctccttacctgtgaggaatgcaaaataaagcatggattaagtgagaagggagactctcagccttcagcttcctaaattctgtgtctgtgactttcgaagttttttaaacctctgaatttgtacacatttaaaatttcaagtgtactttaaaataaaatacttcctaatgggggcctnncnnccacggagcgggcacccgagaagaagaaaattgggggggccgccttcgggcccttcaaaaaaacttttcctaaaaccatttctttttgtggggccgcgggggcccccggtaagggagaaaggggaaaccagggggtcaaaaacccgggtttttcctaaa

SEQ ID NO: 2934 - DNA, 239 bp, Homo Sapiens
  misc_feature (129)..(188): n is a, c, g, or t
cttcacatgctccaccacaaaataaacagatagatagataaataaacatcagccaagtgtggtgacatgtgcctgtagtcccaagctacttcaagaggcagagatgggaggaccctttgaactccagcnnnnnnnnnnnnnnnnnnnnnnnnnnnnnnnnnnnnnnnnnnnnnnnnnnnnnnnnnnnntcgaactccgtcctcaaaaaaccacaccaaaccaaaactacgctcgtctgc

SEQ ID NO: 2935 - DNA, 492 bp, Homo Sapiens
tcacgcccactaagtagtacctgaacagaaattagaacaaggcttagcttttccactttctgaattgggtaatggagactggttttgtgtagttgtatttcagtatttcatgctgtgatggaatccaactccctgcccttgagcctcaatgcatgcttaagttatctcggtattacaaagcagttcaaagtaaaaccattttcctggaggtaggagaggacccaagtgatgagtcaacccataaaacatagagaagtgagaaattctgaatcaggtgtttacacacccaggttttgggtggggagagtgatagaagcactttatcattcaataacctaaaaaggcatctggcatctaagctctaaaaaggagtagaaaatgagagacacctgcaaataaatcttagcgaaggggctaaaaaggagcaattgcttttcatcagaaaaatatgagagttgcctgcaaagtgccttggtgatgcagatgagcctt

SEQ ID NO: 2936 - DNA, 1022 bp, Homo Sapiens
  misc_feature (636)..(652): n is a, c, g, or t
  misc_feature (712)..(712): n is a, c, g, or t
  misc_feature (726)..(727): n is a, c, g, or t
  misc_feature (750)..(750): n is a, c, g, or t
gggaaagagaaagaaaatgccgaaaccaatcaacgtaagagtaactacaatggatgctgagctggaatttgccattcagcccaatacaactggcaaacaactttttgaccaggtggtgaaaacagttggtttgcgtgaggtctggttttttgggctgcagtatgtagacagcaaaggttattctacatggcttaaactaaataaaaaggtaacacagcaggatgttaaaaaagagaatcctttacagttcaagtttagagctaaattctttcctgaagatgtttctgaggaattaattcaagaaataacccagagactcttcttcttgcaagttaaagaagccatcttaaatgatgagatatattgcccgccagaaactgcagttcttttggcttcctatgctgtccaagccaagtatggagattacaataaagagattcataagccaggctacctggctaatgatagactcctaccccagcgtgtattggaacaacacaaactaacaaaagaacagtgggaagaaagaatacagaactggcatgaagaacatagaggaatggtaagggaggattctatgatggaatacctgaagattgcacaagatctagaaatgtatggagtcaactattttgnnnnnnnnnnnnnnnnnggaactgaattgtggctaggtgttgatgctttgggtctgaatatttatgagcatgacgancagttaacacctannatttgtttttccctggagtgaantcagaaatatttcatttaatgacaaaaaatttgttataaagccaatcgacaaaaagggcacctgatatttgtgttttatgcaccctcccctgagaatcaataaagcggattttgggccttaatgtatggggaaacccatgaactatatcctggcgaagaagggaagcctgggtactatttgaaggtacacccgatggaaggctccaaggctaggggaggggaaaaactcccaaaaccccttggggaaaggggccccccttttggggtttgtg

SEQ ID NO: 2937 - DNA, 1607 bp, Homo Sapiens
cgtcaagcgatcccccatcaagcagtagcagggattgtcactagcattgtgctctacttcatacgtttactggctccacatgctctatgctgctctgggggccattgtttcaccctgttcctggcttacgacacacagctggtcctggggaaccggaagcacaccatcagccccgaggactacatcactggcgccctgcagatttacacagacatcatctacatcttcacctttgtgctgcagctgatgggggatcgcaattaaggagcaagcccccattttcacccgatcctgggctctcccttccaagctagagggctgggccatatgactgtggtctgggctttaggcccctttccttccccttgagtaacatgcccagtttcctttctgtcctggagacaggtggcctctctggctatggatgtgtgggtacttggtggggacggaggagctagggactaactgttgctcttggtgggcttggcagggactaggctgaagatgtgtcttctccccgccacctactgtatgacaccacattcttcctaacagctggggttgtgaggaatatgaaaagagcctattcgatagctagaagggaatatgaaaggtagaagtgacttcaaggtcacgaggttcccctcccacctctgtcacaggcttcttgactacgtagttggagctatttcttcccccagcaaagccagagagctttgtccccggcctcctggacacataggccattatcctgtattcctttggcttggcatcttttagctcaggaaggtagaagagatctgtgcccatgggtctccttgcttcaatcccttcttgtttcagtgacatatgtattgtttatctgggttagggatgggggacagataatagaacgagcaaagtaacctatacaggccagcatggaacagcatctcccctgggcttgctcctggcttgtgacgctataagacagagcaggccacatgtggccatctgctccccattcttgaaagctgctggggcctccttgcaggcttctggatctctggtcagagtgaactcttgcttcctgtattcaggcagctcagagcagaaagtaaggggcagagtcatacgtgtggccaggaagtagccagggtgaagagagactcggtgcgggcagggagaatgcctgggggtccctcacctggctagggagataccgaagcctactgtggtactgaagacttctgggttctttccttctgctaacccagggagggtcctaagaggaaggtgacttctctctgtttgtcttaagttgcactgggggatttctgacttgaggcccatctctccagccagccactgccttctttgtaatattaagtgccttgagctggaatggggaagggggacaagggtcagtctgtcgggtgggggcagaaatcaaatcagcccaaggatatagttaggattaattacttaatagagaaatcctaactatatcacacaaagggatacaactataaatgtaataaaatttatgtctagaagttaaaaaaaacaataaaaagggcgccgctctagagtatccctcgaggggctaaacaagcttaggcgtaccc

SEQ ID NO: 2938 - DNA, 852 bp, Homo Sapiens
  misc_feature (621)..(623): n is a, c, g, or t
gggacagaagtccactcattcttggcaggatggcttctcatcgtctgctcctcctctgccttgctggactggtatttgtgtctgaggctggccctacgggcaccggtgaatccaagtgtcctctgatggtcaaagttctagatgctgtccgaggcagtcctgccatcaatgtggccgtgcatgtgttcagaaaggctgctgatgacacctgggagccatttgcctctgggaaaaccagtgagtctggagagctgcatgggctcacaactgaggaggaatttgtagaagggatatacaaagtggaaatagacaccaaatcttactggaaggcacttggcatctccccattccatgagcatgcagaggtggtattcacagccaacgactccggcccccgccgctacaccattgccgccctgctgagcccctactcctattccaccacggctgtcgtcaccaatcccaaggaatgagggacttctcctccagtggacctgaaggacgagggatgggatttcatgtaaccaagagtattccatttttactaaagcagtgttttcacctcatatgctatgttagaagtccaggcagagacaataaaacattccctgtgaaagggcnnnaaaccaaatggatactgccgccccagtttgtaaggccctcaaacgcaccccggtcaccgataaccgtccagtagagccggctcccaataaaccgaccgacacaaaccggacgcggttacgcccgccgcgaggtcgcccgctgagatcgggaagcgggccgcccgaattcgctcaacaaactaccaccgcccatggtgaccgggcgcagcagagagttatcaatatgcgg

SEQ ID NO: 2939 - DNA, 1485 bp, Homo Sapiens
  misc_feature (561)..(606): n is a, c, g, or t
  misc_feature (1050)..(1050): n is a, c, g, or t
  misc_feature (1264)..(1264): n is a, c, g, or t
  misc_feature (1321)..(1321): n is a, c, g, or t
  misc_feature (1405)..(1405): n is a, c, g, or t
  misc_feature (1414)..(1414): n is a, c, g, or t
tcaagacagtttgtcatggctctgttgattgcaactccttgtatagcttgtattttgatttagtttatattctgcttattatgtatactgtgttcttatatatgagaaagcacaaatgcgaaagaggtcatgtcttctcaaaatctagcaaaggaagtagtctgcattggtgtgcattacagtattttgcttaatgaaagcctcagttctgaatgttgatatgagtagttaaaaggaagtggggccattttatgtgtttatctgtgtcaagtatttctggtaataagaagcacttaatttacacatattttaatcctgtgaaagattccacatagagaaaagaaagatacctaaccttcaacaaatgttatttttggaaacacaatttttgtcattaaatgttatattatttcacatatataaaacagatgttatgtaagaatgttgtatattttaacataaatcatttagagaaattatctagattcattaattttcatagtgcctttttcacatgagtcagctggaaagtctgcaataaacagtatttgctgtctgttnnnnnnnnnnnnnnnnnnnnnnnnnnnnnnnnnnnnnnnnnnnnnncacccccgagaaccccgtagaggccacaaaaaaccccccaatataatcgccggtgggaggccggaccccagtaggggaaggtagacgagaccgtagcgggggatacccgcggggggcaagcgcagaggggcgtgcaaatgtttatttttgtctcggggccccgggcgatcgggcggcgccgcaacagaccaatccgatgaagactccgccccgagtgtggcgccggcgggcgaggcccccgcggagggggagccttcagaatgtggaccggcccttctgcgcagcgcgggtgatcgactgccacaagaacaacccacagtccactgcgacgttccgactaacaccacctcgacggagtttgcgctactgacgatctacgtgcgacgcacaatgaccaccatatgaaaaccaggtcgtcgcccccctgcgcgtgtcggagcaccngctccgtccaattgtgtggtccgacctctactcacgtcagacaacaaccgctgacgcacgcagggtgcgacgcggttttgattgtaatacgtagtcccgcgtgatcctatgagtatgcgtgggcgccgtcagcaccacaccgcgccacacgccgagccagcggacgcgtgttgtgctacgccgccccacatgtcgtccaccccgccctgtagtngtctctgcactcacgcgcgcttatctgttacagccacaggactctccctccgccgcnacccgcgagcgcgggtatgcgacatctataccccgagcaatacgcgcgatcgctcgggtggaaggtgatgacgggactgcgacncgccagcantacgcagcggggcacagactctgctgccacgaccgccgcgctgatgagagcgtcggcacagaaatcgaccg

SEQ ID NO: 2940 - DNA, 743 bp, Homo Sapiens
tgggagcaaaaaagaaaagacagaaaagaaacctcagagatctgtcattttccacctattacattcattttatgatacagaaatggtcattcagttgcagatagtacatgactgttgggatcaggcccccaaatctggccataaactggcccccaaactggccataaacaaaatccctgcagcaccgtgacctgtttgtgatggccatgacacccatgctgaagattgtgggtttaccggaatgagggcaaggaacacctggcccacccagggtggaaaaccgcttaaaggcgttcctgaaccacagacaatagcatgagcgatctgtgccttaagggcttgctcctgctgctgataactagccagacccatccctttatttcggcccatccctttgtttcccgtaaggaatacttttagttaatctatcatctatagaaagaatgcttatcactggcttgctgtcagtaaatatgtgggtgaatgtctgtttgaggctctcagctctgaaggccgtgagacccctgatttcccactccacactatatttctgtgtgtgtctttaattcctctagtgctgctgtgttaaggtctccgtgaccgagctggtcttagcacgtgacttttctcgggtgatagctttaatagtatcagcagaaccgggaacaaattagttatgtgtctaatccggggtttttaccacaatatgcttgaaaagcagcccaagcgaataccggattgtt

SEQ ID NO: 2941 - DNA, 1119 bp, Homo Sapiens
gggagccagagctgcgcgccgcggcggcggaagatggctgcggccgaggtggcggacactcagctgatgcttggagtcgggctgatcgaaaaggacacaaatggagaagttctgtgggtgtggtgttatccttccacgacagccacattaaggaacctgctgctgagaaaatgctgccttacagatgaaaacaaacttctccatccctttgtctttggtcagtacagaagaacatggttttatatcacaacaattgaagttccagattcttccattttgaaaaaggtgactcatttttctattgtcctgaccgccaaagattttaacccagagaagtatgctgccttcactaggatattgtgtagaatgtacctgaaacatgggagcccagttaaaatgatggagagttatattgcagttctcacaaaggggatatgccagagtgaagaaaacggctctttccttagtaaggattttgatgcccgaaaggcctacctggctggctccatcaaagacattgtatctcagtttggaatggaaactgttatcttacacacagcacgtgatgctaaagaaaagaattgtgggtgtatcaccccaagatagaagcggtccaggagttcaccaggactctgcctgccctggtgtggcaccgacaggactggaccatccttcactcttacgtgcacctcaacgccgatgagctggaagccctgcagatgtgcacaggttacgtcgctggatttgtagacttggaggtgagcaacagaccagacctctatgatgtgtttgtgaatctggcagagagtgagattaccattgctccccttgcaaaagaggccatggcaatgggcaaactgcacaaagaaatgggtcagctaattgttcagtctgcagaagatccagagaaatcagagagccacgttatacaggatattgctctaaaaacaagagaaatctttaccaacctagcaccattttcagaagtttcggctgatggagaaaagagagtccttaatttggaggcgctaaagaaaaaacgatttccaccagcaacagaaaacttccttatcatctcgcagcagccgacaaatgctgaaatctgactgtgtgacagac

SEQ ID NO: 2942 - DNA, 943 bp, Homo Sapiens
aaccggctcggatatcccgggatatgtcgaccacgcgtcggtgaggtgtgggtgttcgtttctcaggtaaaacatggctaaaagcttacggagtaagtggaaaagaaagatgcgtgctgaaaagagaaaaaagaatgccccaaaggaggccagcaggcttaaaagtattctcaaactagacggtgatgttttaatgaaagatgttcaagagatagcaactgtggtggtacccaaacccaaacattgcccaagcagacaaatgcacatgtgaggtacaaagatgcaaaaagatgaacatgaaacatggcagactgcatacattcaagagaacaccaaaacaagcactcttctagaaccagcatggcacagtacccgaatatggcatgaacaaccaaaggcaaagcaaaaaaggctgaaggctaaagcgagagcacaaagcaaaggggcacaagccaaagcaacaagcccagtctgaacagtggcacacagggtatcggccctggtacactcttaacaacccttgggacaactgccacccatgggcatagcatgacggaaattcagcactgtagataaccaccatgtatacttattgattatccaactgcccaccacaatgaacaaaccattacgtgaaccatatattcaactgtgcggccttattctccttctaactttcacatagccccaagccatacgattcccttcacaggtatatggtgtaggggaaacttgacattacaacactattatcattctgaatacacattcccaagtcgttctaacgtgactactttctaccatgggaatggttacgccaaactaatccagggtatatccagtcaagggctccaaagtacacgggcccggcatcaactaatggctaacgaacacgcacataccacaatggcaattatacgacactaagagactacacacgaag

SEQ ID NO: 2943 - DNA, 726 bp, Homo Sapiens
  misc_feature (41)..(56): n is a, c, g, or t
  misc_feature (64)..(218): n is a, c, g, or t
gggccccgccccccaacaaaaggttttaaaaattttttttnnnnnnnnnnnnnnnncccaaaannnnnnnnnnnnnnnnnnnnnnnnnnnnnnnnnnnnnnnnnnnnnnnnnnnnnnnnnnnnnnnnnnnnnnnnnnnnnnnnnnnnnnnnnnnnnnnnnnnnnnnnnnnnnnnnnnnnnnnnnnnnnnnnnnnnnnnnnnnnnnnnnnnnnnnnnnnctaacaaaaaccacttttatttttaaatcaatttactatcaaatacacaacagaactcggtgtggaggcagtgtttgatttcaactggttatctgttaaaaggcttgtgtcccagtgcaacactacctttgtgcagaaaatgttcactgaaaataaatatcctaagaatggataatcttcactgtagcatcttgtcagtggcactacttttaaaaaaatgattccctttagaaaagctagtatatttgtattcagagattacaagtgagggaacacactgtgaatattaggtttaccatatgtgaaatttgtttttgacttacaaaaatgcccatgtcacatggttcaccttttatctactaaagtttaaaacaaatgtcatttgtgttgaactttgttttttaaaaatgcagtgattaggaccattattagaacttcttttactcactatagacaaaattctttttgataaaatctttaaaaagttacttactacaaactgtaaaaa

SEQ ID NO: 2944 - DNA, 1940 bp, Homo Sapiens
ccacgcgtccgcgtacctcacggaagccggctttggccctgcggctgctaccgtcgccgcggagaaattgttggatctggcagtctaggaatgaatctcctctcagcctttaagctcacctggtcagaatccttggatgagcctgtgggaccgttcctcctagcccggtggtttggaaccagtggctttgggactgtaagaggatggacaaagattctcaggggctgctagattcatccctgatggcatcaggcactgccagccgctcagaggatgaggagtcactggcagggcagaagcgagcctcctcccaggccttgggcaccatccctaaacggagaagctcctccaggttcatcaagaggaagaagttcgatgatgagctggtggagagcagcctggcaaaatcttctacccgggcaaagggggccagtggggtggaaccagggcgctgttcggggagtgaaccctcctccagtgagaagaagaaggtatccaaagcccccagcactcctgtgccacccagcccagccccagcccctggactcaccaagcgtgtgaagaagagtaaacagccacttcaggtgaccaaggatctgggccgctggaagcctgcagatgacctcctgctcataaatgctgtgttgcagaccaacgacctgacctccgtccacctgggcgtgaaattcagctgccgcttcacccttcgggaggtccaggagcgttggtacgcctggctctacgatcctgtcatctccaagttggcctgtcaggccatgaggcagctgcacccagaaggctattgcagccatccagagcaaggccctgtttagcaaggctgaggagcagctgctgagcaaagtgggatcgaccagccagcccaccttggagaccttccaggacctgctgcacagacaccctgatgccttctacctggcccgtaccgcgaaggccctgcaggcccactggcagctcatgaagcagtattacctgctggaggaccagacagtgcagccgctgcccaaaggggaccaagtgctgaacttctctgatgcagaggacctgattgatgacagtaagctcaaggacatgcgagatgaggtcctggaacatgagctgatggtggctgaccggcgccagaaagcgagagattcggcagctggaacaggaactgcataagtggcaggtgctagtggacagcatcacaggcatgagctctccggacttcgacaaccagacactggcagtgctgcggggccgcatggtgcggtacctgatgcgctcgcgtgagatcaccctgggcagagcaaccaaagataaccagattgatgtggacctgtctctggagggtccggcctggaagatatcccggaaaacaaggtgtcatcaagctgaagaacaacggtgatttcttcattgccaatgagggtcgacggcccatctacatcgatggacggccggtgctctgtggctccaaatggcgcctcagcaacaactctgtggtggagatcgccagcctgcgattcgtcttccttatcaaccaggacctcattgccctcatcagggctgaggctgccaagatcacaccacagtgaggagtggtggcaggactcgtgggccctctccggcctgtttcccctgccactccagcccccttgagctgggaactcaggctcctggaaaaacctgggcagtgggaggctcagctgcgggccattgatttgagcctttgagggaggatagggctggcctttgtgaagccagcagaggctgagaacctcaggcttccctagatccagagcccctccccatcttcctctctctaaaaacaaccctaccccccattgccaccttcactcctgtgtctccagctgattagcctcagactcttcttttattgtttttcttttgtaaataaaaagcaccaggttccaaaaaaa

SEQ ID NO: 2945 - DNA, 1823 bp, Homo Sapiens
gccacgcgtccgcttccgagagcgcctgccgcccctgcgccgccgagccagctgccagaatgccgaactggggaggaggcaagaaatgtggggtgtgtcagaagacggtttactttgccgaagaggttcagtgcgaaggcaacagcttccataaatcctgcttcctgtgcatggtctgcaagaagaatctggacagtaccactgtggccgtgcatggtgaggagatttactgcaagtcctgctacggcaagaagtatgggcccaaaggctatggctacgggcagggcgcaggcaccctcagcactgacaagggggagtcgctgggtatcaagcacgaggaagcccctggccacaggcccaccaccaaccccaatgcatccaaatttgcccagaagattggtggctccgagcgctgcccccgatgcagccaggcagtctatgctgcggagaaggtgattggtgctgggaagtcctggcataaggcctgctttcgatgtgccaagtgtggcaaaggccttgagtcaaccaccctggcagacaaggatggcgagatttactgcaaaggatgttatgctaaaaacttcgggcccaagggctttggttttgggcaaggagctggggccttggtccactctgagtgaggccaccatcacccaccacaccctgcccactcctgcgcttttcatcgccattccattcccagcagctttggagacctccaggattatttctctgtcagccctgccacatatcactaatgacttgaacttgggcatctggctccctttggttttgggggtctgcctgaggtcccaccccactaaagggctccccaggcctgggatctgacaccatcaccagtaggagacctcagtgttttgggtctaggtgagagcaggcccctctccccacacctcgccccacagagctctgttcttagcctcctgtgctgcgtgtccatcatcagctgaccaagacacctgaggacacatcttggcacccagaggagcagcagcaacaggctggagggagagggaagcaagaccaagatgaggaggggggaaggctgggttttttggatctcagagattctcctctgtgggaaagaggttgagcttcctggtgtccctcagagtaagcctgaggagtcccagcttagggagtcactattggaggcagagaggcatgcaggcggggtcctaggagcccctgcttctccaggcctcttgcctttgagtctttgtggaatggatagcctcccactaggactgggaggagaataacccaggtcttaaggaccccaaagtcaggatgttgtttgatcttctcaaacatctagttccctgcttgatgggaggatcctaatgaaatacctgaaacatatattggcatttatcaatggctcaaatcttcatttatctctggccttaaccctggctcctgaggctgcggccagcagagcccaggccagggctctgttcttgccacacctgcttgatcctcagatgtggagggaggtaggcactgcctcagtcttcatccaaacacctttccctttgccctgagacctcagaatcttccctttaacccaagaccctgcctcttccactccacccttctccagggacccttagatcacatcactccacccctgccaggccccaggttaggaatagtggtgggaggaaggggaaagggctgggcctcaccgctcccagcaactgaaaggacaacactatctggagccacccactgaaagggctgcaggcatgggctgtacccaagctgatttctcatctggtcaataaagctgtttagaccag

SEQ ID NO: 2946 - DNA, 453 bp, Homo Sapiens
  misc_feature (404)..(404): n is a, c, g, or t
  misc_feature (434)..(434): n is a, c, g, or t
ttgctagggattgagtcgcgaattatagctaatgatttgtcagttgtcgggaaagatcatttggatagcagctatgtatgaaatgggaaatgagatagtattctatttgcagtgaatagttcagactgtcccataccacagccgagcagtaactgaaattaggatcttaatttgcgatgataaaaggtctaaggttcatttaattaagctcctttaacactgtctttctagatttttcacccagtattttcaaaatttgggaatgtaaacaattgatatatttattgtatgttggctagcagttcatccttctgcaaaatatgcattcagagaaatgtgaagcttgttttaatgaagacttaaaccatttgtgtcatttgtgttttcatattcaaatacaccanattaaaattctgaacctatattttcatcantaccttcctgatataccag

SEQ ID NO: 2947 - DNA, 834 bp, Homo Sapiens
  misc_feature (774)..(776): n is a, c, g, or t
gggacacccggaagcaggggcccgagcggagccggccgcgatgagcggggagccggggcagacgtccgtagcgccccctcccgaggaggtcgagccgggcagtggggtccgcatcgtggtggagtactgtgaaccctgcggcttcgaggcgacctacctggagctggccagtgctgtgaaggagcagtatccgggcatcgagatcgagtcgcgcctcgggggcacaggtgcctttgagatagagataaatggacagctggtgttctccaagctggagaatgggggctttccctatgagaaagatctcattgaggccatccgaagagccagtaatggagaaaccctagaaaagatcaccaacagccgtcctccctgcgtcatcctgtgactgcacaggactctgggttcctgctctgttctggggtccaaaccttggtctccctttggtcctgctgggagctccccctgcctctttcccctacttagctccttagcaaagagaccctggcctccactttgccctttgggtacaaagaaggaatagaagattccgtggccttgggggcaggagagagacactctccatgaacacttctccagccacctcatacccccttcccagggtaagtgcccacgaaagcccagtccactcttcgcctcggtaatacctgtctgatgccacagattttatttattctcccctaacccagggcaatgtcagctattggcagtaaagtggcgctaccagggaaaaaaccacacaacacaaacccnnncccttgtgggcccgcctcgggcctccagaagcttttctagacctttctttgggcgcgc

SEQ ID NO: 2948 - DNA, 347 bp, Homo Sapiens
gggggtggacaacaccgtcagaccgggagaccagggcagctcttcacagcccaactcagaagagagaggagagaacacgtcttacaggatggaagagaaaagtgatttcatgctagaaaaattggaaactaaaagtgtgtagctaggttatttcggagtgttatttatcttcccacttgctctctgtttgtatttttgttttgtttttgattcttgagactgtgaggacttggttgacttctctgcccttaaagtaaatattagtgaaattggttccatcagagataacctcgagttcttggtgtagaaattatgtgaataaagttgctcaattagaattattaaaa

SEQ ID NO: 2949 - DNA, 960 bp, Homo Sapiens
  misc_feature (406)..(406): n is a, c, g, or t
  misc_feature (408)..(408): n is a, c, g, or t
  misc_feature (437)..(451): n is a, c, g, or t
  misc_feature (478)..(478): n is a, c, g, or t
  misc_feature (508)..(517): n is a, c, g, or t
gacgcgcgcgggtggaacagagctcgcacgtgggcgggccgccggcgaagccggtccactgtgcggcgaatttgtgttcaaaagaacgcctcttcgggttgttgccgccccgagaaattatttatgtgtgttggcgaggaagaagtcccaaagggcggccttagtttacaggaaccacagtgggtgctcgtctgggggggaaacccagatctgcgggcaccccaatcgttatcgccttcggaccgttaactgggggccgccgcgtcggccgccgcaaagcgggaaatagggtttgtgaggaacaaagcctttgttgcggtagggggctaccaaaggggccggggcacaaaaaccaagagaagtacgtgatcctgtactcgagcggcgaggtcgttcttgggcgcgnanaggggcaagggcgccccccctgggaaccnnnnnnnnnnnnnnnccctgggaaagtcccttgtgttgggtnggggagaaccaaaatacctgttcatcgccnnnnnnnnnngcccatttgttttgagatggcctgggggacttttggagaccacaagggggatggtcaaagggtttttatccttccccttttttataacactgtcattttctatttagaagtgacagtaagaaaaacatctaatccaactcaggcagaggtcaaaaacaggcaggcaagagagtactgaagtcaagtgcagtcagagaatgttatttcattaagatgtgtaaactggtttgaaaaaagttattatcacaatagaaaactaaaactggattgtacagcttgtaaaatcaagttaaattaggtgtgatattatcaagagtctaagaattcatctgaagcaattatttgatcgacgcaaatatattctatacaattatatttaaagtgaattatggtcctaataagcttaagcatttaatactgcaataaaatgaacagaaaaaccc

SEQ ID NO: 2950 - DNA, 791 bp, Homo Sapiens
  misc_feature (150)..(157): n is a, c, g, or t
  misc_feature (159)..(175): n is a, c, g, or t
gtccaatgggcccccagggattcttccctagggaaaaaccagctttatggacccatggttccactttaccctacctggggcccccgcgcggcccaaaccgaatgggttttagaaaagcttcctcgaggggccgaggcgggcccgacaagnnnnnnnntnnnnnnnnnnnnnnnnntttttggcaaatttttcatttatttagcaaatatttcatttcaacaaacatttacagattgtctaccaagtggttttagagatatgctcaagcctacaatttagccattaagcaatgttagcatattttataattttttcttaattacagattaacagcagagttttgcatcagaacctctgaacagttatactgacttagcatcaatagagctaatcaactgtctgatcaagactaaagttattttactttatttgtatttgatctaataatttttataacggccattaattaaaatattatggctaaacagatatgacatttatacacacccatatatatttcatgttttattatataaatgacgacttctcaaattcttgacatttaaagttgactgaaagaggcatatcaatatattcattcttaatctggcttttatggggaagttctgtgaaatgtctttcattaatttaatggaatcataaactggagcggacattatttgagaagctgcttgaaaactaagatcttgtagttcccagactttcaaaggcatcatttgtttgttactctcaatcaggtatttttggaatgctgtcagattatctctacc

SEQ ID NO: 2951 - DNA, 433 bp, Homo Sapiens
ggctgaggccgccagctgcatgggatgtgcaggcggtgatcaactttgcaaagcttaaacattattttcccttcttcctcccttccctttgaatattccctctcaggtaaaggttgtggccagaaagcacgggcagcctgggactcctgttgccatagcaacccagctaccgccgaggacttctgcggcttttccagcccagcagcagccgctccaggtactttctgatggctccacagtgcagctccccagactttcctcactcggatttgaggactcgatgtgctgaggcaggacccagaggggtcccaagagcctgtcctcttttgttcaaaatacatcttgaaacgtctttgtgaaggctcttagttttaatgcatggatgctgttatttttccctactgttactgaaattaaaaagtgtttgtctctg

SEQ ID NO: 2952 - DNA, 1465 bp, Homo Sapiens
  misc_feature (224)..(234): n is a, c, g, or t
  misc_feature (783)..(783): n is a, c, g, or t
  misc_feature (884)..(884): n is a, c, g, or t
  misc_feature (1155)..(1155): n is a, c, g, or t
  misc_feature (1193)..(1193): n is a, c, g, or t
  misc_feature (1204)..(1204): n is a, c, g, or t
  misc_feature (1413)..(1413): n is a, c, g, or t
gatatactggtggaaggggggagaatcccataactaactgctgaggagggacctgctttggggagtaggggaaggcccagggagtggggcagggggctgcttattcactctggggattcgccatggacacgtctcaactgcgcaagctgctgcccatgtttccctgccccacttcacccccttgggggctgctcaagggtaggtgggcgtgggtggtaggaggnnnnnnnnnnnacccagggctctggaaggacaccaaactgttctgcttgttaccttccctccgtcttctcctcgcctttcacagtcccctcctgcctgctcctgtccagccaggtctaccacccaccccacccctctttctccggctccctgcccctccagattgcctggtgatctattttgttcccttttgtgtttctttttctgatttgagtgtctttctttgcaggtttctgtagcccggaagatctcccgttccgctcccaagcgggtccagtggaaaattcccccttccccctggggaaaatgcacctacccttggtttttggggggggttttagggggcggatttattggattttcaaggcagggctttgcctccttttcggctattttttctttaccccttgtgccctcttttgtcccacccttcttaaattttgggaagaggaaaatggtggcacaggaacaacggaagaaataacaagaggcaatggttcgtgagaataggatcgcgaccccttcctatcgccatgagaacacacgttcattcagcggggncgcgccaattattcctcgacgcgtgtagtactagagtcgacacacaatatttacgcacttaacgttgtctaagaacatcatgcgacgcgtgctgggtgctnctcttatgtcacgcattattgtgaatcgtgtcctctcacatgatttccatatcttcaccccacccacgaatcacatctgacccttttcttcactcttcagaacctcgttatacagaatactgcgaaacacaactcctaaccttgtcttaacaccaacccactttgccgcccactctcgtgtatccgcaaccattcttatgcgatgattcccctccaactgcgggaaaaacccgcgccgcctccggcgcaccacagcaccccctcgtctatncccccgctctggcgcggcgccgcccccgccccccactnatcgcccctancacaacatacgagcgtataaacacgagaagccacaccccaacgagcccacaccctacacctccacccacctccggttgcttcacttcacagccaaatacacccaggcattaggaccgcaggcgcgtgagaaaatacttaaccctctgtaagcgacttccccgcgccgaaagctagaatacacgaagaggtaaggtgcgcactgtaaggncgtaaatcccccccctcctctgcgccacgcgtagagcgacagacctataccg

SEQ ID NO: 2953 - DNA, 912 bp, Homo Sapiens
  misc_feature (229)..(397): n is a, c, g, or t
  misc_feature (411)..(421): n is a, c, g, or t
  misc_feature (461)..(469): n is a, c, g, or t
  misc_feature (513)..(567): n is a, c, g, or t
  misc_feature (696)..(707): n is a, c, g, or t
  misc_feature (781)..(781): n is a, c, g, or t
  misc_feature (790)..(790): n is a, c, g, or t
  misc_feature (852)..(852): n is a, c, g, or t
ggtatgtattttgtggtattgagagtatagaaagtttagagtgtcaaacatgcgtttaatgtgtatttttaaacaaatttatggcaattaaaatatttggagacaagggtatcacatttcaatttgtaaagatctttttaactctactgtgtcattaagatgctttgtacaatgccaaaccatagttggagaaactaagtttaataaatatcaaatagattttctgtannnnnnnnnnnnnnnnnnnnnnnnnnnnnnnnnnnnnnnnnnnnnnnnnnnnnnnnnnnnnnnnnnnnnnnnnnnnnnnnnnnnnnnnnnnnnnnnnnnnnnnnnnnnnnnnnnnnnnnnnnnnnnnnnnnnnnnnnnnnnnnnnnnnnnnnnnnnnnnnnnnnnnnnnggggggggggcggnnnnnnnnnnnagaaaaaaggagcacaagcaccgcggccgcggcgcggcgnnnnnnnnngggcgggaacaacaaggccgccccaacacccaccccacaaaaannnnnnnnnnnnnnnnnnnnnnnnnnnnnnnnnnnnnnnnnnnnnnnnnnnnnnngccggggaccacaaccagcaccctccaacaacaaccaccagaggggaagcgagtcgagggggagccaataggggcacccaccacccggccccgccacacacagggagacttgcctaaatacattatttnnnnnnnnnnnntcgcataccactcccatatcaaatcttggatttgattactatgaacaacctttctctcccggcgctgggaaccntctctttcntggcggctcggtggtcagcaacatctcctcccccccgggggctacaaccaccaaaaccgccngccatcaacacataaatacagtttctctcctgcgccgagaaataaacaaccgccgcacct

SEQ ID NO: 2954 - DNA, 585 bp, Homo Sapiens
cgaacaacaaaatgcatcagagagccaaaacattcagtattgcattttcacataggtgatgaaatgactttggaactttatctgtgttatagttatgagttgctttgggagacttggagctctctgtagctattgttcataacactttgctccataaccctgatgtccgcagtatctaagtatctcagccttcatccattaactctactagggagcccacagccaccatttccactaggaggtatcaatatttgtggtatgacataaggctcccttgaaataacaagacttttgagcaatctgaattaaaaatacatcaaaaaagtaatagcgctcatttgctaaatgcaaaaaataatcacctttgataccaatgtgcaccaatatgcctaactagctagccagctggagataatttaccagggaatgtttcaaagccctaaccttgaagtttggaaacaggtggtcttctatgctgcagagaaactatgcattaggtctcttttcaattagaaacctttactatttccaatgtatgtttgttaaaaataataataataaaaccaaaagcctttgtggaaaccc

SEQ ID NO: 2955 - DNA, 1538 bp, Homo Sapiens
  misc_feature (262)..(262): n is a, c, g, or t
  misc_feature (1330)..(1341): n is a, c, g, or t
ccattcgccagccaaaatgtacaaaaaaaattcatttcaaataactcaggagggatgataatggctgactttggtaaattcactcaaaagactgtgggagagccaaactcaactcactgtatagtctgtgcatatgtgggcttgtagcatgtaggtttttccaaaagaaggaaatataaaatgttagattaagaactataaaactacagggtgcttataaaaggtggcttactccttattgttattatactatccaattttnaaaatgcagtttaaaaaataagcactgagtcttgttattacaaggcaggcaaatgtttctccctcattttgaaaagactgaactggcaatgcttttcctgaacatttagaaaagaggcagtaagagtactctggtttgggttcaagtgagaggcttttcatgaatgttcagaaagcctgactaaaagaagccaaaccaaaaccatttaatgtgaacacaaacctcttttcttttagtaagttttacttttaatacagagtgaaagaaaataaaaatttaataggctaaaacaagtcaaacacccattctacacagataaaaaccttcacaaaggtcaactgaagtaatccagagctgaaactgaattgtgcagattttcaatgaagtcacagaagtcatgtaacacaaacaaaagtcgattatatttacacactcagcaagccctctaagaaatgtgccccaagaagcattaacctttgttttgtgccatcctgaagacttgcacattttatttttcagatagcttaacatttttaatcgagtgtgttctctaccatgcggtaatgctttggtactattcatacagggtcttgcctatcctaaagacttgccatttccccaagaggagctttgattctgctttagaagttttacataaattaaaatctttatcaaatattaatatgaagggaggcacaggatgcaacatatatagtcaagttacctctctgtatatttagaaattactttctcctccaaggtatttgcaacagaaagctcagtctggcctgcttaataatcagtagtacaggggtgaatcatcagaagctgggaaagaccttaatatttcaaaattattaacaactacctctaggggcaagttcatgttactgagttatgacaaatttattatcatgagggaaaacaagagtagccagccatcttaaaaatgccccaaccactgcttctcaaaacagaaagactaaaaactacatacagtttatcatacaacaaatcccatctctgtcccctgaaattcccctagtttcattcattagaaggggattnnnnnnnnnnnngacttaaagagcactttacagcagcattcagctttcctatgaaatactcagcatcttaaatattatatacaactctttttttagtaagctagacactggcttcagagttcgtgggagtgggggaaatcaacccattcaaaactactctagaaattgtcttttggcagaatagcaggtatccaagttaaaaataagag

SEQ ID NO: 2956 - DNA, 1177 bp, Homo Sapiens
atagtgcccccttaaaaatgtggccaaaaaaacccatccaaaaaggaacccaaatttggtttatttaaacccctttaaaataaacgaggtctcttatttggctaataaaatctccaaatattttaaaatatatttccttcctactgccaataaaatttaagataactctctgtttaacgggctttggaagagttaattttataaggaaataaaaaagattgacttgcctcctgaatgtccagtgataaactgaaccctaatttccctacctcaacaacataaaaatgatgtaaagtggatcaaagtatgtaacaagttcaatattaaaaatgcttcttcatatggtctttcactaaaataatcaacgtaaaaataatgtaaaaatgtgtttttgcttgaagattatagtgaacgttcaaggaatcacaatttttgagcttttaccatccagagtactatactatgggaaaatactaccagtgcctcatattaaaaaagcacagggataaaattccaaatgtaaaattgccaaaaatcaaataacaactacattctccataatctttccttatataaaacctcaaagctatccatctgttttagtggtttgagtgagcactgaaaaccaaacatgtttattcagggtttaaaactaaatttctcctctgaaaatctggaggcaaagatagtagagacacttaaggtaactctgtccaacttcttaagcccatgtatggaaacagtctacaacatctcattatgtcagcattgatgcaccttcttcaccagtggcatcttgggaaatatgaaggtcttcaagcatctcagccagactaattcgaggtgctccttcatcatcggtgtcactttccacagggatggctgaatctctgtaaatgttgacattttttcgaattgcctcatcttcttcaagatcttcaagaaaatcttggtattgcctttcatcatctgtatccatgttttctctctctcttgcaagctctttcaatttccagtttctacgacgctgacgtttggtccggtcatagctcttcttgattaataccacatctggaactctatctgagttcattttgttgacatgctcatcatttaagttacagttggccaaatcaaaccctaacaccaggtctccgggatttagaagatgtccccc

SEQ ID NO: 2957 - DNA, 1134 bp, Homo Sapiens
  misc_feature (899)..(907): n is a, c, g, or t
gccaatgcaaacgaaccacccctggtgtttgttgggaaaggaattacctttgacagtggtggtatctccatcaaggcttctgcaaatatggacctcatgagggctgacatgggaggagctgcaactatatgctcagccatcgtgtctgctgcaaagcttaatttgcccattaatattataggtctggcccctctttgtgaaaatatgcccagcggcaaggccaacaagccgggggatgttgttagagcaaaaaacgggaagaccatccaggttgataacactgatgctgaggggaggctcatactggctgatgcgctctgttacgcacacacgtttaacccgaaggtcatcctcaatgccgccaccttaacaggtgccatggatgtagctttgggatcaggtgccactggggtctttaccaattcatcctggctctggaacaaactcttcgaggccagcattgaaacaggggaccgtgtctggaggatgcctctcttcgaacattatacaagacaggttgtagattgccagcttgctgatgttaacaacattggaaaatacagatctgcaggagcatgtacagctgcagcattcctgaaagaattcgtaactcatcctaagtgggcacatttagacatagcaggcgtgatgaccaacaaagatgaagttccctatctacggaaaggcatgactgggaggcccacaaggactctcattgagttcttacttcgtttcagtcaagacaatgcttagttcagatactcaaaaatgtcttcactctgtcttaaattggacagttgaacttaaaaggtttttgaataaatggatgaaaatcttttaacggagacaaaggatggtatttaaaaatgtagaacacaatgaaatttgtatgccttgannnnnnnnncatttcacacaaagatttataaaggtaaagttaatatcttacttgataaggatttttaagatactctataaatgattaaaatttttagaacttcctaatcacttttcagagtatatgtttttcattgagaagcaaaattgtaactcagatttgtgatgctaggaacatgagcaaactgaaaattactatgcacttgtcagaaacaataaatgcaacttgatgtgccc

SEQ ID NO: 2958 - DNA, 941 bp, Homo Sapiens
aaccattccagtttggcccttcccatgaaagccaggggggttgtatgggaatatctcaaccaatttaagctatattcattaaagctattataggttaggtagctgtaaaaaggcccaacacaggtaggcagggaaatattaataggagattatatgtccttaaagtgcttatgagaaccacaaatcgctttatggtagctcctgtgtaataaataagtccatcccaagcccataagattaactagaacccaagctcaaaaacaaacagatcatttacctcgggttgtaatgagcgcaaaaatgaatccatggcctgaagggatataaattcgcctgtgtggtttccatacctgtaaattccttcaggagttctaagtatgtatgatggcatattatatatgccaatatctgtcatataactcttgttgtcccaattttctacattaacaaaaataaactcaactcttccagtaaactttatacttagtgcagagaagaaagctgggggctggtcaaggtttgcaaataggtatatttttaaccaatactgatcacttttattccattcttctttcaagtgttcagcattataaatggttttgatccgagaaggctgcatgagcagttatccatttaaaaatgtgctctacttcaatcttgcgtccactgtattctttaagcatgactttcccttttgaagtacttgtttgtggaacagacataatgagtgtggatcggacccagcctcttctcctgcaatatctgggatcactggaacagttaaatgtgcctgtacgtattccaaatcttgacacctttttaaccattttctcccagtgaattttgcccacacaagggacttctgtcatctgctatgacctgaaccagccagatgccatcttttgtgtcttccacaagctcatagaagtgaggtgatcttc

SEQ ID NO: 2959 - DNA, 470 bp, Homo Sapiens
gggacgcgtttcctgttggccgagctgcgcacgtgcggccggaagggaagtaacgtcagcctgagaactgagtagctgtactgtgtggcgccttattctaggcacttgttgggcagaatgtcacacctgccgatgaaactcctgcgtaagaagatcgagaagcggaacctcaaattgcggcagcggaacctaaagtttcagggggcctcaaatctgaccctatcggaaactcaaaatggagatgtatctgaagaaacaatgggaagtagaaaggttaaaaaatcaaaacaaaagcccatgaatgtgggcttatcagaaactcaaaatggaggcatgtctcaagaagcagtgggaaatataaaagttacaaagtctccccagaaatccactgtattaaccaatggagaagcagcaatgcagtcttccaattcagaatcccggcggggacagattgcggtctatccacttgt

SEQ ID NO: 2960 - DNA, 743 bp, Homo Sapiens
  misc_feature (465)..(472): n is a, c, g, or t
  misc_feature (474)..(553): n is a, c, g, or t
  misc_feature (555)..(556): n is a, c, g, or t
  misc_feature (558)..(582): n is a, c, g, or t
  misc_feature (594)..(672): n is a, c, g, or t
ggttggcgtgtcattattttccatttgacattagggcctttccaaaatgaatgtgaggaattgctttcacttcaagactttccttcttttcactaaaactctagaaggtgttacaagggggagggaaggggggcaaagtccttgaacattttctttggctcgtgccatgttatgatcatataccttttaaataaggggaaatagtatctttaaagttaatgtctagccaagagtttagtaaacgaagaattaaactgcactgttgatcggtgctttgtgtaaatacatctttaacatttgggtggagaggggccttaagaaggacagttcattgtaggaaagcaattctgtacatgagtttaagcattcttgttgcattgtctctgcagattctatttttgtttacaatattaaaatgtatgttagcaaaatgggtggattttcaaataaaatgcagcttccacnnnnnnnnannnnnnnnnnnnnnnnnnnnnnnnnnnnnnnnnnnnnnnnnnnnnnnnnnnnnnnnnnnnnnnnnnnnnnnnnnnnnnnncnnannnnnnnnnnnnnnnnnnnnnnnnnaaatgtgggggnnnnnnnnnnnnnnnnnnnnnnnnnnnnnnnnnnnnnnnnnnnnnnnnnnnnnnnnnnnnnnnnnnnnnnnnnnnnnnnaaggggccctaaaagcggttttctcccagaggaaaaccccggggccataaaacaagggggggttggaatat

SEQ ID NO: 2961 - DNA, 1045 bp, Homo Sapiens
  misc_feature (631)..(644): n is a, c, g, or t
  misc_feature (813)..(814): n is a, c, g, or t
gggagcgcacgacgtgcgcgcaccctctcccctcgtccaccgctgccgcctccttcttctgccgctcctggtgctgcttgtgtgctcgtttggtgcggacctggtacctcttttgtgaagcggcagctgaggagactccggcgctcgccatggccgacgaaaagcccaaggaaggagtcaagactgagaacaacgatcatattaatttgaaggtggcggggcaggatggttctgtggtgcagtttaagattaagaggcatacaccacttagtaaactaatgaaagcctattgtgaacgacagggattgtcaatgaggcagatcagattccgatttgacgggcaaccaatcaatgaaacagacacacctgcacagttggaaatggaggatgaagatacaattgatgtgttccaacagcagacgggaggtgtctactgaaaagggaacctgcttctttactccagaactctgttctttaaagaccaagattacattctcaattagaaaactgcaatttggttccaccacatcctgactactaccgtatagttttctctattctttcatttcccccttccccattcctttattgtacataaagtaactggtatatgtgcacaagcatattgcannnnnnnnnnnnnnaactaaacagccaatggtatgttttgattgacatcaagtggagacgggatggggaaaaatactgattctgtgaaaataccccctttctccattagtggcatgctcattcagctcttatctttatattccagtaagttattttgctctcactgttttaaccaaaaaaaannccaacaacataaaaatccttgcataccttgttcaattggagaattttaatgtttttcatttatcattgtaaaaccaaggacaattttataacttttttgtacgtagctgttacatgtagggcaatctgtctttaagtagggataaattactctaaaacaaaaaagaatcctagatagttttcccttcaagtcaagcgtcttgttgtttaaataaacttcttgtttaaaatg

SEQ ID NO: 2962 - DNA, 692 bp, Homo Sapiens
  misc_feature (498)..(498): n is a, c, g, or t
  misc_feature (500)..(500): n is a, c, g, or t
  misc_feature (502)..(502): n is a, c, g, or t
  misc_feature (507)..(507): n is a, c, g, or t
  misc_feature (515)..(515): n is a, c, g, or t
  misc_feature (517)..(521): n is a, c, g, or t
ggggagcagaaagtgctgtcccgcctcgtggagtcgctgagcacccaaatccgggccttgacggagcagcaggagcagctgcggggccagctgcaggatctggactccaggctccgtgctgggagctcagagtttgattcagagcacaacctaacaagcaatgaagggcacagtctgaaaaacctggagcaccgcctaaatgagatggagagaactcaggctcagctgagggatgctgtccagagcctgcagctttctccaaggacgcgggggtcttggagtcaaccccagcccctcaaagcaccctgcctcaatggagacaccacctgagctgcccatcctgcctcatcacacgtggtctgggagcagagagatagccatcttagggggggtgtctgactttgccttagccctacttggcctacagtggggagtggagctgctggtcccaaccactctggcagtatgaagttgcccagtaaaatcttgattccgccncngncggcnggtggggnannnnnttttggcggcccccttcggccctccaaaaaatttttttaaaccatttcttttggcgccgggggcccccctaagggtaaggggaaacctgggccctatacctgggtttcccaaaggaaaaaccccggggcccacgaaataaagggggcttgagaattccccccccacacaat

SEQ ID NO: 2963 - DNA, 670 bp, Homo Sapiens
ggtattgaagaattaatagagaaacttcagtctggaatggtggtaaaggatcagatttgtgatgtgagaatatctgacataatggatgtatatgaaatgaaactatccacattagcttccaaagaaagcaggctacaagatcttttggaaacaaaagctctagcccttgcacaggctgatagactgattgctcagcatcgctgtcaaagaactcaagctgaaacagaggcacggacacttgctagtatgttgagagaagttgagagaaaaaatgaagagcttagtgtgttgctgaaggcgcagcaagttgaatcagaaagagcgcagagtgatattgagcatctctttcaacataataggaagttagagtctgtggctgaagaacatgaaatactgacaaaatcctacatggaacttcttcagagaaatgaaagtactgaaaagaagaataaagatttacagatcacatgtgattctctgaataaacaaattgagacagtgaaaaagttgaatgagtcactcaaggaacaaaatgaaaaaagtattgcccaattaatagagaaagaagaacagagaaaagaagtacagaatcagctagtagacagagaacataagctagcaaatttgcatcaaaaaacaaaagtacaagaagaaaagattaaaaccttac

SEQ ID NO: 2964 - DNA, 706 bp, Homo Sapiens
  misc_feature (497)..(498): n is a, c, g, or t
  misc_feature (501)..(502): n is a, c, g, or t
  misc_feature (504)..(511): n is a, c, g, or t
  misc_feature (514)..(515): n is a, c, g, or t
  misc_feature (523)..(523): n is a, c, g, or t
  misc_feature (531)..(532): n is a, c, g, or t
  misc_feature (546)..(546): n is a, c, g, or t
gggaagccgagctgggcgagaagtaggggagggcggtgctccgccgcggtggcggttgctatcgcttcgcagaacctactcaggcagccagctgagaagagttgagggaaagtgctgctgctgggtctgcagacgcgatggataacgtgcagccgaaaataaaacatcgccccttctgcttcagtgtgaaaggccacgtgaagatgctgcggctggatattatcaactcactggtaacaacagtattcatgctcatcgtatctgtgttggcactgataccagaaaccacaacattgacagttggtggaggggtgtttgcacttgtgacagcagtatgctgtcttgccgacggggcccttatttaccggaagcttctgttcaatcccagcggtccttaccagaaaaagcctgtgcatgaaaaaaaagaagttttgtaattttatattactttttagtttgatactaagtattaaacatatttctgtattcttccacanntgnnannnnnnnncgnnacgaatanggaaaaannaaaagatgaaaaanaaaacatggtcggccgccctcggccctccaaaaagcttttctaaaaccattccgtttggcgccgcgggcccccagaagggaaaggggaacatgggccataagcgggtttccctaaggaaatcccggggcccatgaactagggccttgggattcccccccc

SEQ ID NO: 2965 - DNA, 1323 bp, Homo Sapiens
cagaatttgatacccctgggcatacactatcttggggaaaaggtcagaaagacctcctgactccatgttacagtagacaaaacaagttggactcttttggacctataaaccctactctgaatacaacatacagcttccttactacatttttcaaagaaattagtgaggtgtttccagatcaattcattcatttgggaggagatgaagtggaatttaaatgttgggaatcaaatccaaaaattcaagatttcatgaggcaaaaaggctttggcacagattttaagaaactagaatctttctacattcaaaaggttttggatattattgcaaccataaacaagggatccattgtctggcaggaggtttttgatgataaagcaaagcttgcgccgggcacaatagttgaagtatggaaagacagcgcatatcctgaggaactcagtagagtcacagcatctggcttccctgtaatcctttctgctccttggtacttagatttgattagctatggacaagattggaggaaatactataaagtggaacctcttgattttggcggtactcagaaacagaaacaacttttcattggtggagaagcttgtctatggggagaatatgtggatgcaactaacctcactccaagattatggcctcgggcaagtgctgttggtgagagactctggagttccaaagatgtcagagatatggatgacgcctatgacagactgacaaggcaccgctgcaggatggtcgaacgtggaatagctgcacaacctctttatgctggatattgtaaccatgagaacatgtaaaaaatggaggggaaaaaggccacagcaatctgtactacaatcaactttattttgaaatcatgtaaaataagatattagactgttttttgaataaaatatttttattgattgaacctttgaccctctatcttattacatttagaggcctggcatctttcttgtgagacaagcttaaggacacaaaagaaacacaactttgtgataccactcttctgaaggctacttatagtaataacttcatagatgaacagcatgattcaggtacagtggctttaaacatcaaagcacatttctcattatataaattaaaacgggtggctccagtgccactatcaaagcttaagttatatcttttatctagttctctgaatgtactgaaacagtactttattcgtccaataaataaagcaataaaaattgttcttactgaaaatgaagtagctaggtgctcctgaatttctctccaaaaactaaaacatttaggtcaaaccacttctccggttgagcagtg

SEQ ID NO: 2966 - DNA, 837 bp, Homo Sapiens
  misc_feature (594)..(681): n is a, c, g, or t
  misc_feature (686)..(713): n is a, c, g, or t
  misc_feature (724)..(738): n is a, c, g, or t
ggggctttagggtccgcggttggtcggaccggggcacttggcctgaagacctggaattggcgacttcgatattaacaaggatggcggcggccgcagcaagtcgaggagtcggggcaaagctgggcctgcgtgagattcgcatccacttatgtcagcgctcgcccggcagccagggcgtcagggacttcattgagaaacgctacgtggagctgaagaaggcgaatcccgacctacccatcctaatccgcgaatgctccgatgtgcagcccaagctctgggcccgctacgcatttggccaagagacgaatgtccctttgaacaacttcagtgctgatcaggtaaccagagccctggagaacgttctaagtggtaaagcctgaagcctccactgaggattaagagcaacagccccagagcctgggctctgctggacttagtataatgtgaaaaaaatgtgttctcctattcctcataaagcttgtgctgtaaaatactttctcagggtgttcttgtcctcatctaccctctaccccttactgtgcaaccactgaggcaaagtagcttaatataaaaataaaactttattctgtctcnnnnnnnnnnnnnnnnnnnnnnnnnnnnnnnnnnnnnnnnnnnnnnnnnnnnnnnnnnnnnnnnnnnnnnnnnnnnnnnnnnnnnnnnttttnnnnnnnnnnnnnnnnnnnnnnnnnnnnctgtgtggcgnnnnnnnnnnnnnnnaaaaaattttttaaaacctcttcttgtgggcgcgcgggcccccaaaggagaagaagaaaaggggcaaaaattgttgttccccaaagaaaaccccggggc

SEQ ID NO: 2967 - DNA, 1288 bp, Homo Sapiens
  misc_feature (958)..(1036): n is a, c, g, or t
  misc_feature (1043)..(1102): n is a, c, g, or t
  misc_feature (1155)..(1174): n is a, c, g, or t
gggtgccacgtggggaaggctgaggaccgggagcagctggtggccaaggccctggagcactgtgggggcgtcgacttcctggtgtgcagcgcaggggtcaaccctctggtagggagcactctggggaccagtgagcagatctgggacaagatcctaagtgtgaacgtgaagtccccagccctgctgctgagccagttgctgccctacatggagaacaggaggggtgctgtcatcctggtctcttccattgcagcttataatccagtagtggcgctgggtgtctacaatgtcagcaagacagcgctgctgggtctcactagaacactggcattggagctggcccccaaggacatccgggtaaactgcgtggttccaggaattatcaaaactgacttcagcaaagtgtttcatgggaatgagtctctctggaagaacttcaaggaacatcatcagctgcagaggattggggagtcagaggactgtgcaggaatcgtgtccttcctgtgctctccagatgccagctacgtcaacggggagaacattgcggtggcaggctactccactcggctctgagaggagtgggggcggctgcgtagctgtggtcccaggcccaggagcctgagggggtgtctaggtgatcatttggatctggaggcagagtctgccattctgccagactagcaatttgggggcttactcatgctaggcttgaggaagaagaaaaacgcttcggcattctccttaggacttatctgcttgtagatttggctgatccaattaacatgtggggttcttggtgtgggtctggggagctgaaggattttatggagctggtgctttggaggaatcttaagggaaaggagtagaagctcaggcctttgaaggatttcagctcctcctctctgtaatttgtgctttaagcattttttttcctaaaataaactcaaatttatcctcnnnnnnnnnnnnnnnnnnnnnnnnnnnnnnnnnnnnnnnnnnnnnnnnnnnnnnnnnnnnnnnnnnnnnnnnnnnnnnngaaacgnnnnnnnnnnnnnnnnnnnnnnnnnnnnnnnnnnnnnnnnnnnnnnnnnnnnnnnnnnnngcctttttccctcaaaattacacacaacaagaaaaacaatttttttggggggnnnnnnnnnnnnnnnnnnnnacaaaaaagattttttacaacaaccctttcttgttgtggggcggccgcccggcccacccccacggagtgacaggagcaaagcccggggggacacaaattgcgtgggttttccat

SEQ ID NO: 2968 - DNA, 167 bp, Homo Sapiens
tgtccatacacttagctgcattaggatgaatatcacgcgtctcacatctttaatccagcctttcgtgacatgttggaaagatacatgtgaaacctacccagttaccctttctgaattgggaggaaaaccaaccaatgtatgtatgagaaactcagaagtctgaatag

SEQ ID NO: 2969 - DNA, 484 bp, Homo Sapiens
  misc_feature (80)..(96): n is a, c, g, or t
tgaacccaggaggcgagcttgcaggggcctgaatcatgcaaggcactcaggcctggcagacagagtggaccccatctccnnnnnnnnnnnnnnnnnggtgtgcttattctgagccagacttcctaaattccattctcactctgcctcttattgactaggtggccttggacaagttacaataacatctttgtgccttagttttctcatctgaaaactgagcataacctaccatatagaattgttatgaggattaaattaactcatatatagaaagcccttaaactagtgcctcacatatagtaagcctcaaatatatttcattaggattatttaggcttgttaacataagagcttttctttataaactatataaaattaaataacccccagaattgcgtttaaaagttaccactgttattcattgttctggaagagttggccaatttagttaagaatacaaaatcagggccaggcaccggtgtca

SEQ ID NO: 2970 - DNA, 401 bp, Homo Sapiens
gaagagagctgtcatgtttgaaaacagaagtgaagatatccctggagagttagtgaaggtcattgatggaagctccaggagagagtggggataatggaaggaataaagttatccacatctcatcttaaagctagcatctttaatacagtataaccaagatgattcctgaaggaatactccacctgaactcaagagtagttgcttaccaagaagaagcagttcaattgttcctaaaacatataatttgtctatctgtatagttcgacttttagataaggattataattttcaaatattaactattttccatttatgtatctagaaggaacagctgaactaatataaaagcatatgttttgtggacattgtcacataatagtttgcctatccactacagtggc

SEQ ID NO: 2971 - DNA, 391 bp, Homo Sapiens
gatcaagtgactttattccataaaacagtacatcagctgggcaggttcggtctcctctggatgtatgacagtcattatttatttgttctgtaaacataactaggatacagtgacactgtcataactaaatttgaagtaaattagtactgtgacctccaagggcaggtgtgaagcatgttatcagcgcctgaaacaccttgtagtggtttcactaacataagttaaaacataagcacttaggaagaaagtcttccctcattaatttctggcatagtgcagctacatgttcatcctggaacttaaagtaccttcctcttagaaaatcaaagtgttttcacagcaagtttaataaattaaaaatgtagagaaaaaaggaactagtgaacaaaag

SEQ ID NO: 2972 - DNA, 2875 bp, Homo Sapiens
  misc_feature (2094)..(2157): n is a, c, g, or t
  misc_feature (2705)..(2705): n is a, c, g, or t
ggattgtgagaaggaggctctgtataagtggcttctgaagaaagaaggaaaggataaaaatgggatgcctgtggaacccaaacctgagcctgagaagcataaagattccctgaatatgtggctctgtcctagaaaagaagtaatagaacaaactaaagcaccaaaggcaatgactccttctagaattgctgattccttccaagtcataaagaacagccccttgtcggagtggcttatcaggcccccatacaaagaaggaagtcccaaggaagtgcctggtactgaagacagagctggcaaacagaagtttaaaagccccatgaatacttcctggtgttcctttaacacagctgactgggtcctgccaggaaagaagatgggcaacctcagccagttatcttctggagaagacaagtggctgcttcgaaagaaggcccaggaagtattacttaattcacctctacaggaggaacataacttccccccagaccattatggcctccctgcagtttgtgatctctttgcctgtatgcagcttaaagttgataaagagaagtggttatatcgaactcctctacagatgtgaaggaatggacaagagttgagcagcctttctgctgattatcacacatcatgagctgagtgactgcagcttgccaaatctttgtgtttctgggtctgaccaattagcttagttcttctcctgcctaattttgaactagtaaagcaaagtgagtcatcagattatgagttactgtttaaaagaaaaatgctgtttattcatgctgaggtgattcagttccctccttcttacagaagtattttaattcaccccacactagaaatgcagcatctttgtggacgtctttttcacaagcctccaaggctccttagattgggtcgttactaaaagtacattaaaacactcttgtttatcgaagtatattgatgtattctaaagctagtaaacttccctaacgtttaattgccctacagatgcttctcttgctgtgggttttcttttgttagtggtctgaaataattattttcctgtcctattaatacatagtgtattttgcacaaaaaaaattaacctggtcaatagtgattaccaaaatatatattaataatcttggcaatttttgacattaattatgaaacattttagcccacgttagttctacattattcttcacttaaactcagctactgcaaattttgtctttctgtaaatgttattaaaatatacagtgagctctttagaaggactcagtattatttcaagactatttttgaggtaattctagccttttaaaatattctacagacctacggggcttaaaagaaccccagtaccgactaagcaaataggcaaaagacatgttggaaatgtagtatagtacttgaaacagtcactatcatagggataattggtgcatcctgtgtaaatggaagctgagcttgacacctggtgcttttaagtagggataaagtcatcctctcactgcaagcacagcatacctgtacctccaaaagtgacgttttagtgaacaggccgttttcaacacttgtgccttggggtgttcattgaagctttgtgaaaactactgatgttttctcagtctccttaaagttacgtccatgctttaaaatgtctgtgtaggagagaagtggggtttataatgttttctctaagatatctttgctgctttccagactttgaaactattaagcttcttaactgcctcttaccggaaatacttctggggaaacttcatggtcccaaaatgtcattgccatacagcttcactagagttctttgaaccacagctgaaaagagctttgtattattttttaattccctccccagatatcatttaggagtattatataaaggtggtgggcaaaaacaatgtaaggagcctttccagttatcttgagttgcagctctgtagtttcttgaggccaaacacactgtattttacaagtcaaaatataatttacattaatcactatgttaatgagtatgtaaaacattcttttgcattgatgaattttgtatctgcttccattaaaagcataacagccatacgnnnnnnnnnnnnnnnnnnnnnnnnnnnnnnnnnnnnnnnnnnnnnnnnnnnnnnnnnnnnnnnntttattttgtcgggcgccctcgcaccctcgaaaatgcctttcctaaaacccttcgatttggccggcgccggaccccagtaggctaagtggaaacttggtccataaactggtttcccctagggataaccctgggcccctggacctaaggggctttggaatctctcctccaaataaaagaacgcccccgggcgggcaaacccgaagggtttttgaaaccaaaccccagaatggaacctctcgaaagggcattttacttggaattttattgaaacggagtgggcctgaggccgatgcctttaaatatcctatattaagggccccgcgccccgttgaacatattttttcaaggaaatacctgggtggatattttcatatataagcacttccgcgggcacgaatatgggaaaaagccctctcacccaaaaccggcagagtggattggaaacccttggtgaattcccacacgcggagtagattcaggacgacactggggagagtgagtttgcggcatatagaatattttttccacacccctctggtggcaacanaccgctagatgtgcgtgtaacaacaagcttgtctcgccactctatttgtgcgtgatcacaagaattgcaaacacacgccgaaaagcgttgatgagggcataaaccctccacgaacccctgagacatgactcgcatcctgtgtctaaagacgacatcatacgtgtgtctgt

SEQ ID NO: 2973 - DNA, 516 bp, Homo Sapiens
gggactcgctgcctcggcagcgcgctgctcttctaagatggctgccgctaccggtgcggtggcagcctcggccgcctcgggtcaggcggaaggtaaaaagatcaccgatctgcgggtcatcgatctgaagtccgagctgaagcggcggaacttagacatcaccggagtcaagaccgtgctcatctcccgactcaagcaggctattgaagaggaaggaggcgatccagataatattgaattaactgtttcaactgatactccaaacaagaaaccaactaaaggcaaaggtaaaaaacatgaagcagatgagttgagtggagatgcttctgtggaagatgatgcttttatcaaggactgtgaattggagaatcaagaggcacatgagcaagatggaaatgatgaactaaaggactctgaagaatttggtgaaaatgaagaagaaaatgtgcattccaaggagttactctctgcagaagaaaacaagagagctcatgaattaatagaggcagaaggaat

SEQ ID NO: 2974 - DNA, 725 bp, Homo Sapiens
gggatgccgagcccaggccggttccggcgaagttaaaccctcggagctggcctcggactgctggggcgttaccccttcggccacccccgctgaccatggcagtgtttcatgacgaggtggaaatcgaggacttccaatatgacgaggactcggagacgtatttctatccctgcccatgtggagataacttctccatcaccaaggaagatttggagaatggggaagacgtggcaacgtgtcctagctgctctctcattataaaagtgatttatgacaaagatcagtttgtgtgtggagaaacagtcccagccccttcagccaacaaagaattagttaaatgctgaagaagccttcaggaatccaaatcctgaacatttggaatgagcccagatagaaatatcgaatgcaaagctactggcttcacagagacaaccatttatgatttgctgttctgtaagagtgtggattctttctatcaactgctgatatcatcttcaggaagcaagtccataacatgacatatctggattttgtgcttagaaccttaaattggaagcattcttaattatgcatctaaatttaaaagaagataatttcaaaacagtgctttctttcccttggtttcatcattttcatatcttaaaccaaattacttcggtatctgacaacagcatcatctacctcagtcattaggatttcttaataaaaaagagattgtatttttg

SEQ ID NO: 2975 - DNA, 852 bp, Homo Sapiens
gtggccattgacatgtggagcctgggctgcatcacggcggagttgtacacgggctaccccctgttccccggggagaatgaggtggagcagctggcctgcatcatggaggtgctgggtctgccgccagccggcttcattcagacagcctccaggagacagacattctttgattccaaaggttttcctaaaaatataaccaacaacagggggaaaaaaagatacccagattccaaggacctcacgatggtgctgaaaacctatgacaccagcttcctggactttctcagaaggtgtttggtatgggaaccttctcttcgcatgaccccggaccaggccctcaagcatgcttggattcatcagtctcggaacctcaagccacagcccaggccccagaccctgaggaaatccaattcctttttcccctctgagacaaggaaggacaaggttcaaggctgtcatcactcgagcagaaaagatgagatcaccaaagagactacagagaaaacaaaagatagccccacgaagcatgttcagcattcaggtgatcagcaggactgtctccagcacggagctgacactgttcagctgcctcaactggtagacgctcccaagaagtcagaggcagctgtcggggcggaggtgtccatgacctccccaggacagagcaaaaacttctccctcaagaacacaaacgttttaccccctattgtatgacctttgctgagggtatgtcctgctcctttccaccagtgatttgtattaagacagcacttatattgtacaatacttcagactgttttttttaaatacataaaactttatgttaaaaaactctattaacatgaaaaaaaa

SEQ ID NO: 2976 - DNA, 739 bp, Homo Sapiens
  misc_feature (513)..(539): n is a, c, g, or t
ggggccgactcctcccgctaaggcgggaacacgcggggcccaagatggcggccagccggtaccggcgttttcttaagctctgtgaggaatggccagtggacgagaccaaacggggccgggacttgggcgcttacctgcgacagcgggtagcacaggcctttcgggagggagagaatacccaggttgcagagcctgaggcctgtgatcagatgtacgagagcttagcgcgactccattcaaactactacaaacacaagtaccctcgccccagagacaccagcttcagtggcctgtcgttggaagagtacaagctgatcctgtccacagacaccttggaagagcttaaggaaatagataaaggcatgtggaagaaactgcaggagaagtttgcccccaagggtcctgaggaggatcataaggcctgagctcaggccttacctcgtgcacatacctaggtgtggagtcttgtacattgccatcgtcaataaaactgccccagtttccccttgaaannnnnnnnnnnnnnnnnnnnnnnnnnnccctgttcggcccgcctcggcccctccaagaaagcttttctaaaaccatttcgttttgggggcgccgggggcccccgttaagggtaaagggggaacactgggggccaataaaacctgggtttccccttaaggggaaaatcccccggggggcccatgaaaacctagaggggccttgggggaaattcctccccccccaatat

SEQ ID NO: 2977 - DNA, 852 bp, Homo Sapiens
  misc_feature (712)..(712): n is a, c, g, or t
  misc_feature (735)..(735): n is a, c, g, or t
  misc_feature (739)..(752): n is a, c, g, or t
  misc_feature (754)..(763): n is a, c, g, or t
gaggcttccggttctttattccggaagttgctctcagaggcagcgtgcgggtgtgctctttgtgaaattccaccatggcgtaccgtggccagggtcagaaagtgcagaaggttatggtgcagcccatcaacctcatcttcagatacttacaaaatagatcgcggattcaggtgtggctctatgagcaagtgaatatgcggatagaaggctgtatcattggttttgatgagtatatgaaccttgtattagatgatgcagaagagattcattctaaaacaaagtcaagaaaacaactgggtcggatcatgctaaaaggagataatattactctgctacaaagtgtctccaactagaaatgatcaatgaagtgagaaattgttgagaaggatacagtttgtttttagatgtcctttgtccaatgtgaacatttattcatattgttttgattaccctcgtgttactacaagatggcaataaatactatgggattgtttgtattaaaaaatttacattgcttcttactattcagcagtagaaactttttacacagtaacaccattcgttgttggtatttagttttctgaagggtcgcagttgccttgagcacttggtattcgcagagcttggacctgtagattttgaggcagattaagaattctgcctgatgggtaagcttccagtattgggaggtggagaaggggagggttcaaanaaataataagagtgatggcctancaannnnnnnnnnnnnnannnnnnnnnncttgtcggccgccctggcccttcaaaagctttcctaaacctttcgtttgggggcccgggcccccgtagggtaagtggaacttggtccaa

SEQ ID NO: 2978 - DNA, 413 bp, Homo Sapiens
  misc_feature (185)..(200): n is a, c, g, or t
ggggcaccaggaagtctgaaggtttccacattcgatgatgtcaacctaaaccagcagccatcccgcttgtccctcttaggcatttcaggcttcctttgggatttcaggtgtcccatgatcttgatgtgctgctaggctggagcacacactggccattactgaacacagccatattagggaaagcnnnnnnnnnnnnnnnntcctctattgtatatttattcaacaactgtttatgtttccaggacaactgcaaagaaaacaagctgaggtggttatactgttgctgttaaaagttggtatcagtaagatttgtgttttgtgataatccctaaatcaacataccacttgtaaactgaacttcgagaaagaaacatgatgttcattctgtaaatatacatgcagacaggtcatgt

SEQ ID NO: 2979 - DNA, 451 bp, Homo Sapiens
  misc_feature (15)..(15): n is a, c, g, or t
gagcagctgcagcgngcgcctgccagcgaggacagccctgttgtgaaggcccgaaggggcccgctgcgggctgtcatgcagtccctgcggcgcccccagctgctgcggctgctctggcgcggcccccgagtgaggagctgtggcccttggagctggcctgggcccactgacttagtcctagacctgggccagggacagtgggggctccgtgccccctggacccaccggcagctgggcacatgtctcacccgaatatcggctgcctccagaccacaggactgcagcctggggcttccggccccacacagctgggctgttttcttaagggcttgatttccaagggccacatctctgcaccttccaggctctgaactttgagacagggctttagcactgtgcagaggggagatcctgagttttctttaaaaaatgaccttttgttcactccaaa

SEQ ID NO: 2980 - DNA, 476 bp, Homo Sapiens
ttgcggggacccggacagagcgggggctccgttccagaaagatttattggcgccccctataacccgggccggttcttggtgccgggcacagagatgcattgcgccacggccctgctcgcggaagctcccgagggcccggaatcggcagggcagtcagagagggcttcagggaggaggcagctagagctgcgaccggaaggtgaggtgagcgtcatcccccccggcgcaaggaggagtggacccatggaaggacaggggagcagcagaagccaagcttctaagggcttggaatgtcacacccagaagttagacattcagctggtatttgaggacctgggaactgacttggagtgtgtccctcagtggacaccagctagagtcaggaaggtgggagttggctgctgaggagcctatatacggaatacactggagtgagcagaactgggggatagggcagcgtcccacagaagaagtga

SEQ ID NO: 2981 - DNA, 1001 bp, Homo Sapiens
acaagaagcccaggggttcaagaaagtctcagcaagctcctgaaagagctatctcaccagctccatcaggaccgagcaaagggggctcaggcctcgcccgcctcccatagctccttaccccaagccctacacgaaaaggacctgcttctccacatgcaagagctctgcgaggggatgaagctgctggcatctgacctcctggacaacaaccgcatcatcgaacggctaaatagagtcccagcacctcctgatgtttgagctccatggggcacatgaggcatcctgaagcattagaatgattccaacactgctcttctgcaccatgagaccaacccagggcaagatcccatcccatcacatcagcctacctccctcctggctgctggccaggatgtcgccagcattaccttccactgcctttctccctgggaagcagcacagctgagactgggcaccaggccacctctgttgggacccacaggaaagagtgtggcagcaactgcctggctgacctttctatcttctctaggctcaggtactgctcctccatgcccatggctgggccgtggagagaagaagctctcatacgccttcccactccctctggtttataggacttcactccctagccaacaggagaggaggcctcctggggtttccccagggcagtaggtcaaacgacctcatcacagtcttccttcctcttcaagcgtttcatgttgaacacagctctctccgctcccttgtgatttctgagggtcaccactgccagcctcaggcaacatagagagcctcctgttctttctatgcttggtctgactgagcctaaagttgagaaaatgggtggccaaggccagtgccagtgtcttggggcccctttggctctccctcactctctgaggctccagctggtcctggaacatgcagccaggactgtgagtctgggcaggtccaaggcctgcaccttcaagaagtggaataaatgtggccgtcgcttctgt

SEQ ID NO: 2982 - DNA, 466 bp, Homo Sapiens
catatgtgaacattgtatcataggtaatgtcgtacagacccttatatacagtgatctgtcttgttcctgcagcaaaaatcctctatggacataggaggtgctgtgtcccatgccctcttgccctgacagtgtcccatgggcccccttctgctccctgccccctccctgctactgctgatgcactctcctctccctgcagcccctggcttcccagccttcctcctgaccccttccaacagccttggaactccagctgccaccaccctctgggtcggacactgggacccactggcccagtcttggctgctgcttacccctagccttgatgcctgcccagggacccccagccccctcccgttgccctgcagctttaacagagtgaaccatgtgtattgtacaggcgcggttgtcattgcagaaaccgctgggtggagaagaagccgataaagtctatgaatcaaaaaaa

SEQ ID NO: 2983 - DNA, 370 bp, Homo Sapiens
  misc_feature (59)..(59): n is a, c, g, or t
cttggatgggggagaagttcaaggaatttctgctcggccacgcgtggggaacccgcgtnccccgccatgtggcagaggggtctcagtcgtgctaggcatcgggcggcagcgccgacagcccttccctcgccagtgcccctcggccactcctgggttggagcccgattttatttgtaaagttgacagtcgagcaaatgttcctattttcgtgggatctgcacacgtctttgtcagttgtggtcatgatcttagtcacctgctaattatttttacaatgattacaacatttcctcactgcgggatatttctgacccgctttagaacttaagacctgattctagcaataaacgtgtccgagatgaacggtgaa

SEQ ID NO: 2984 - DNA, 654 bp, Homo Sapiens
ccatcacagcagtagcagcccatcacagcagcagcagcgttctgctgaactccctccctcctcaagctgcccctgtcccaggagaccggcagtgtcctacctgtgtgcagccccttggaacctgttcaagtggctccccccgaatgacctgccccaggggcgccactcattgttatgatgggtacattcatctctcaggaggtgggctgtccaccaaaatgagcattcagggctgcgtggcccaaccttccagcttcttgttgaaccacaccagacaaatcgggatcttctctgcgcgtgagaagcgtgatgtgcagcctcctgcctctcagcatgagggaggtggggctgagggcctggagtctctcacttggggggtggggctggcactggccccagcgctgtggtggggagtggtttgcccttcctgctaactctattacccccacgattcttcaccgctgctgaccacccacactcaacctccctctgacctcataacctaatggccttggacaccagattcttacccattctgtccatgaatcatcttccccacacacaatcattcatatctactcacctaacagcaacactggggagagcctggagcatccggacttgccctatgggagaggggacgctggaggagtg

SEQ ID NO: 2985 - DNA, 812 bp, Homo Sapiens
  misc_feature (128)..(128): n is a, c, g, or t
aagaaggccatctatgcatcgaaggctgtggagagccggcccctcttcctggctgcttctatcttctttgccatcaaagatgccatccgtgcagctcgagctcagcacacaggtaataacgtgaaganactcttccggctagacagccctgccaccccggagaagatccgcaatgcctgcgtggacaagttcaccaccctgtgtgtcactggtgtcccagaaaactgcaaaccctggtctgtgagggtctaaagagagagtcctcagcagagtcttcttgtgctgcctttgggcttccatggagcaggaggaacataccacagaacatggatctattaaagtcacagaatgacagacctgtgatttgtcaagatgggatttggaagacaagtgaatgcaatggaagattttgatcaaaaatgtaatttgtaaacacaatgataagcaaattcaaaactgttatgcctaaatggtgaatatgcaattaggatcattttctgtctgttttaatcatgtatctggaatagggtcgggaagggtttgtgctattccccacttactggacagcctgtataacctcaagttctgatggtgtctgtcctttgaagaggattcccacaaacctctagaagcttaaaccgaagttactttaaatcgtgtgccttcctgtgaaagcctggccttcaaaccaatgaacagcaaagcataaccttgaatctatactcaaattttgcaatgaggcagtggggtaaggttaaatcctctaaccatctttgaatcattggaaagaataaagaatgaaacaaaaaaaa

SEQ ID NO: 2986 - DNA, 342 bp, Homo Sapiens
ctcagcaggacacgtgaacacccagacacccactcagggactcaagtctcaacctccctccccggtggagggaggaactttggcactagcccttggagccaggaaaaaagactcgtgtctcaggcagactcttactctggttactaagatcatctgtgcatgacggggagggtggaacaggtcccggaggagtcgtgaatggttctcaccaggacctgaatcgttgcttgtgtttgagaattggaggaatgagtcagcaggcgtggctcatggcccccccgtgtgcaggatcaattgtaggaggaaatttcttttttattaaaagcgaatgtgtatcccaaa

SEQ ID NO: 2987 - DNA, 620 bp, Homo Sapiens
ctggtacgggagtggcagcaagacctggcttcggattgtctcccattttcccagctccccctgcccaccaggacccaccgttggctgccatccagttggtacccaagcacctgaagcctcaaagctggattcgctctagcatccctcctctcctgggtccacttggccgtctcctccccaccgatcgctgttccccacatctggggcgcttttgggttggaaaaccaccccacactgggaatagccaccttgcccttgtagaatccatccgcccatccgtccattcatccatcggtccgtccatccatgtccccagttgaccgcccggcaccactagctggctgggtgcacccaccatcaacctggttgacctgtcatggccgcctgtgccctgcctccacccccatcctacactcccccagggcgtgcggggctgtgcagactggggtgccaggcatctcctccccacccggggtgtccccacatgcagtactgtataccccccatccctccctcggtccactgaacttcagagcagttcccattcctgccccgcccatctttttgtgtctcgctgtgatagatcaataaatattttattttttgtcctggaaaaaaaa

SEQ ID NO: 2988 - DNA, 501 bp, Homo Sapiens
ccgaggtaaataggggtagaatagaatagaccgtctacagcgttcctggacgctaaagcctagaattgcttcgtgaaactccagtttcgttttatgaacgcgtgtgtgcgggaggcgacgtgaactgacttgactgtgggtacgaaaagcccaaagccaccgcccaggaagaaccgcgcttggctgcggcccgggaagaaacatccacggccgcgttagaaagagggtcgcacgctgccgccgaggtagaggggtccccgagtcctggggcctcgcaccccacagcccgagtcccttccccgcggaagggactcgtggctgtgggtagagacgcgcgcttggcgcggccagccctgcaggcaggagctgagcggcgcagggacacgggcagctgggaggggcgcctggtgatttactcacttccctcctagccagagaagtgcagcaattccaaacagttctcataggagcgtccctgacaacttcatgttataaaaaaaa

SEQ ID NO: 2989 - DNA, 1444 bp, Homo Sapiens
gggtctcagccttccgctggtgcagcatctccacgcagggcctcagcccctgtccttggccttgcctgacggactgcaccatgggtgttccttgggcatggaggaggcagcaggaaggggtgacaggagcaggagcaggtgcagggcacctcacaccacaggcctcccccacctctgagctgccaacagccaagactcctggcgaggccgggagaggaggggtgagagggaaggagggtctctgtgaaagcaagccccaccccccagagcagagcagagacccaggtctgcaaatcacaccctccccccacgagttcctcctttgaggccagcagcacccgagggagggcaggggctgcacggagaccagagaaaaggaaaccagcccacagaagaataactcaaagcatcaagtcccatagcgtgtctgctgaacgagtgaatgggccctaaaaggctccttctctacaaacggcacgcatccatccgacagggggccacaggacacggccgggaccgtctgcgtcttgtgccgtgtgcaagccaacaaaccgagtgcagcccggggcccatctcagacctcacccacacggcgtgcccagcacatgtgtgcacacagcagatgacaggagagaacacacaccaccgtctctttgcacacgtgtgcccctgtccggcccggggggctcatctctccttcacgtggttctgtgctcccgggcccccgctgccggccccatccccactgcccccactgtggaacccgcaggccccgctgcatagcacctcggtgaggtcgtccatgatggcggtctctttggggtccagcaggttgaactcccgagcaaagaggatgaagtggacgtagagcgtgttcaagtgtccgtgcagctccagggccagcgtctccttgaagtgggcccagtagatgtgtgccagcacgtggaacaggtgtctgcagatcttcctcaccagggactcaaaggagctggggaattctctgccgtattttgtggggaacacgtcctcatccgtcaccagcttctgcacggagctcatgacgaagtcaacgtactgtggggccgtgcacttgaccttcttcccccgctcgtcataccagtagtactgtgtgttgcacacggccatcgtctgacacgtctctcctgtgcagaactccgagatggtgctatactgcaggttgatgtggtggaaaaacgtcgtggtgttgctggccagccactcgttaaggtcaatctcgcggggcagcaccaccagctccttgaactggaagtcggtgatcctggccttggtgtgctcaggctccaggtaggccttcctctcctccgcagcgggcttcttgccattgggcttggctttggacttccccatgagccagtccatggctgcgcggggccgccgcgcccgctgcccgacgcgatcggcc

SEQ ID NO: 2990 - DNA, 1565 bp, Homo Sapiens
tgtgttcatacatttccatttataaggcacaaaacccacaaatctcacaaaaaggaagaaaacaaaagatttgaagacaataaagtaaactcggaggaggttcatcaaactggagttaaatcatgtccctttttagtaactaagggacctcatactgacaggaatcattgcctctgaaaagagggcttctgagcccttcttttgacacagcctccttcactggattagtgcagaagtcaatcctcagggagggctgcatggccacaacacatcaatcccaagcaccacctatcccatagaagcttctgggcagcaatgctccaaacaaaccagggtgcctggttcacatgttctcacccaaaggagccttcagggaccaatccacagtaaacacacatgcttgcctatcccagtacttgagtattttatgggttctgctctaagctgaagcagaactgcctgcctgagaaccctgaactaggttagttttgtgggtccttcgtggggcagcatctatgtaggaggctggactttgggttcctcttgaaataatgaggtccctagagggatccttagaaccaactaatcctaccaagagcttttaaaacatgctggtcaaatatggcgattccctggtgcaacccccagatctcctggtctgttaggcagccctgataactctcaagtaatcctgtagtccactggtaaaaaatagatgggtcccatgataccatatagtatctatgcttattggctgggcctcctggtggctcttggcactgtaatttctagtactgtttagattagtattatatgagaataagcttcctgaatgtccacatgaatccaagcatttcctggaagtatgactgcttcctagtcctttatattaccatgcaaggtagggatgtgagtgaacagcacgtcagagaaaactgccaggtgtagacagttatcctgagaaaagggttagtattatagttgtcgagaaaggagggaccagaaatcagatgaactgagtaattcatcatgtcatcttgaaggcttttccactctggacaacttgaaatccaaatgaaattcggtccttgggtcaatttattccattaccaaagaacagcatagtaggatagccattccaacagggtgaggaccagccacctacttactttccagtccaattttattatccattcagcttttaggaattgccctggaggccatagtcggaattttgctaaattttcaggcatgaagatgattctccttaattcaatgtctcatgaatcttagtcaagatcccttcccttcctgtgccttgttaagctatgatccaaaaggaaaaggagtattccttttattaacaacgactaaactcttaaatcctttggctttcccacactgcagctataacatatccttggatatatgtattaatttaaaagcctatgccttaaaagctcagcttctacttgtatcaagttttctccatattatgaggggcttcctccacacgttgccccacctgccagcctcaggaatctttcttggtcagtctgacttga

SEQ ID NO: 2991 - DNA, 402 bp, Homo Sapiens
  misc_feature (225)..(286): n is a, c, g, or t
tggacactgatcaggccctgctggccaggtccctgtgcgcatgccatgcgaggggtcagggccgctccctagggtccctcctgcccaacatgtggaggtggctggttcccatgaacgtggttgtcagaggcgggggacagcagaggctgcagactggcccacttccctcctccccagggatgccaagcttggatcatggccctaatcccaaccccaaccccatgnnnnnnnnnnnnnnnnnnnnnnnnnnnnnnnnnnnnnnnnnnnnnnnnnnnnnnnnnnnnnnccaggtcctggtggagcctttgcccagcccagtcctctctgcctcctcctggctgaagctgtttgtcaggattaccctcgggctaaagaggaaaaataaagatgttgagctaccaa

SEQ ID NO: 2992 - DNA, 499 bp, Homo Sapiens
tgctgtgggcttcagggttggagaagggctgggaccaaccgggtgagatccacaagtctctggatgtggctgaaggcaaatacacaattgaagtactttctgttttgaagtgctttcccttttgaatctggtttgaaacatgcagcttctgtctctagcccaaggaaagaccaaaacatagggaaataaaagcatttatctttgtcttggaagtaattgttgaagttgtgcagttgatcagtgcacagttagatgcaatgtttatagaaattgattgttaaaccaaatttacactggcatgtgtggtgtagtttctaaaaggcacttcacatttgaaatttttcttaccttagaaagtttctagtgatctaaatgtctagttttgtattcttttgtgtgtgttcactgtttctcagtattaccacttgaataattctctgtacaggggggtttgtgctatacactgggatgtctaattgcagcaataaagcctttcttt

SEQ ID NO: 2993 - DNA, 573 bp, Homo Sapiens
  misc_feature (290)..(311): n is a, c, g, or t
tcccgggctcagtgggcctggggcctctctgacgtggtgcctgctggagggaggctcgtcgtcaccagctgactgctggtccggcttctgaccggcctttgtcctggctccgtagcagaacactgtaaaagtgcccgcgtctttgcagtagttgcagatttcagtcgtcgtgttacttgtgcacaaacagaagctgggtcttacccgcagcacgagtgtctcgggctgcccggagtcgcccgggagcaggtgctgcagccaaagttacgcgggggccacgcgggccggcnnnnnnnnnnnnnnnnnnnnnnaacctgtgtttcacgtgactcagcagtgcccgccgccgtcaccagctatgcattcactccgtttccagtgagcagatgtcttgcttggaaagtggacctgtgtctgtgtctgtcctgagaacttaccagcagaaatcctcatttctgtgctacggatttaccaaaaattgtcaagtctttttcagtttaacagttcctttaaatgtgtagtatttgaggaaaaaaatcaataaacagttgatctcgtgcatatggaaaaaaa

SEQ ID NO: 2994 - DNA, 519 bp, Homo Sapiens
  misc_feature (28)..(28): n is a, c, g, or t
  misc_feature (89)..(92): n is a, c, g, or t
acagggcttgaccctcacaggggcaccnccccctctttgtgaatcatagcctatggtactctgtttgtgaggcacagccccccccacannnnaagaccccagctctacccacggaccagcagagaggtcgccgttgatgtgtgtgctaaaggaggcctggacggagctgggtctgggcatggctcaggctcgctggtgggccaccttcgctagctatgtgattggcctggggctgcttctcctggcactgctgtgtgtcctggcggctggaggaggggccggggaagctgccatactgctctggacccccagtgtagggctggtgctgtgggcaggtgcattctacctcttccacgtacaggaggtcaatggcttatatagggcccaggctgagctccagcatgtgctaggaagggcaagggaggcccaggatctgggcccagagcctcagccagccctactcctggggcagcaggagggggacagaactaaagaacaataaagcttggccctttagtg

SEQ ID NO: 2995 - DNA, 476 bp, Homo Sapiens
  misc_feature (150)..(169): n is a, c, g, or t
ttttttttaagtgcacggctgataggcttttattacagactgggggcggtaacggctggacagagaacggaaaaggaacatctgagaccaggctcaaagctagggggttacacaacctccaataacacaaggtgagtgcagcacttctannnnnnnnnnnnnnnnnnnntcacttactcataaacggcacagcctacggtacaagaaaaagggcaaggtaggtaagggcacccaacaccctccctgcctgcagggggccacagggttaatgtgccttcctgcacgcaggcttaagagggataaacaaggagagggctgcccttggagaaggcctgcggataatagtgactgaggcacaggtccatgcaggggaaggaagcacagttcacagagtggcaagctcagtgccagccagtgcaagcaacaggcagttctttgatcctggcttagtcacagcaaacatttaccagccgcgc

SEQ ID NO: 2996 - DNA, 521 bp, Homo Sapiens
gcttgggattggttaaccctggaggtggcctcgtgggtgcagtactgtttctgggcaccttccatagttcatgagacagagaggcttgcgtgtgggaggtagggccagaggaccacgtcgatttgatgtctgacagtttacctgcaacactaggtgcggatgcaatgctgctgaaagagctactgtagccggaggcactgagtggccaggcactcgaagaaggcagcgtggcattctgagatgatggcggggaggaccctccactcttgaggaggtagcggttgacatcctggatggtggtgttgatggtaggcccagtggggacactgccaggagtgacgtcagggtcattctcagggtcaatattctgcagtcctttccatggaactcccggatggaattctgggggccagttgatgctagagccatttgagattttatcactgtcagatttggcacgtgaccagctatggggaacagctacgggaggactggctggtgactcactattctttacagag

SEQ ID NO: 2997 - DNA, 519 bp, Homo Sapiens
gcgaccgcacgggcaagcccagcagatgccccgtcagagtactcgcagaggtggccgcagcctgcgggacagtgggagctgccttccagccacttcatgatgtgctgcaggtggccgccgtggctgcagccctggcaccacacgaagagacccttgactacgtggtggcagacggcacacatgctggcgcacggtggcacctgtcgcagacccagccccggctgctcatgggccgcttgcagtggctgcagttgacgtgcagggtggtggaggcctggttgaggcagctgacggcgcggctggtgctcagcttgaccacctcgttggacacgttccagaggcggaacgctgcagcaggtcgatgtaggaagtgtaccagtgctcctgggtctgctcgtcgatgtccttgcgcacccgttcacccaggacgatgagcacagacacagccatctgcacgtcgccctgctcagcgtagaagtgcagcatgtcgcgcaccagcacgccgaagaagtcgggcgg

SEQ ID NO: 2998 - DNA, 602 bp, Homo Sapiens
tacccgaacgtcatcttcatcgccatcaaccgacatgcggttctgttcatccaccccagagaccaaggacctgctcaccacctatcccttcaccaagatctccagctggagcagcggcagcacctacttccacatggcgctggggagcctgggccgtggcagccgcctgctgtgcgagacctccttgggctataagatggatgacctgctgacctcatatgtgcagcagctcctgagtgccatgaacaagcagcggggctccaaggccccagccctggccagcacctagcagcggatgctggcgtgtctgctcaggcgcccttcccgacctctagcctggcggcaccttcccaggccctctcaacccagggcctgtccttggcgggcagccttccatgctgccccccatacaaagcccactcagccccgcaggcggccccctcttgctctgcgctgcccagggaggccaaaagacgggcccagaatggggtcgggagtctcggacccccaggctattggtggatgactgactgacaggacacctcccaaccccaccccaccccaccagaatgttcaataaaaactcctggagcaggaaaaaa

SEQ ID NO: 2999 - DNA, 438 bp, Homo Sapiens
tgggaccccgggcccccttctgcctggcttgcctgcttctgccctttccagaggggtctcactgacagccagagacagcaggagaagggttggctgtggatcaaggaaggctgcccctgtaccctgtggggaaatggtgggtgcatggctggatgcagaggtggaaggccctgggccacaggcgagagtgggcgtgtcacctgtcccaggttcccagcaagtctgcagctgtgcagtcctggggtccctgaccctgtcgcccagggggcgtgctgtccagcaggggccctgccttgcaaggaacgtctcttccggcggctgggccgctcctgcctggtctgggctgtgtgtggcgccctttcctccttgtttgttcctctgtgttctgtgtgcgtcttaagcaataaagcgtggccgtggctcgcgtgcctgccatct

SEQ ID NO: 3000 - DNA, 442 bp, Homo Sapiens
gtgaggagttcagtgtaaccaggtgactactctgaactggggactgagtcagcctctgacgctgagctgaatgcccaatgacaaacgtgaccagccgtgcgggcgggggcaaggccaaggacacagagggccgagggcccagggccaggtgtggcgcttccagacgtttctactctctcattttattcatggcgacttgggaaggaaatctgtctttaatgagcaaatgtaaggctgcgttttctttgcgaagtctccacaggattttcacggcaaaaccaatgagaaaatgtcctttcaaagagaagaccgagtgtcccgagaacattttcttgaaagcgcgtgcacgggccgccctctcgaggcatcgtaatgtgcttcaaagaacacttggtaaaaccctctggctaaaaaatcaaaatttccaaagcatatacatttg

SEQ ID NO: 3001 - DNA, 462 bp, Homo Sapiens
tttagtaaaagaaccaaatttacttcagtttaaggcaaattccacacagagactgtctcagagacgggcacagaaccagacaccgtagaaacaccaccaccatgcatgacggggaagcagaggcaggcggaagacgggggcctggcctgcaccaggcacggagaggtcagtgggctgaggagctccatgcggcaacagggattggcatgcatgatctgctccccgagtgggcaaaggctgggcagctgggtgggcccgggagggagatccccttcttccccacctttcccacagcaggggcaggagctcgggctcagatgccagagccccaggctgaaggactagggtatgtttggggtgatgggatgagacagggtgacccaaaagccaaggcggcctcaagtagggtcacatctgttaggagtaggatggggggaactgggcatgggatgaatgaccctc

SEQ ID NO: 3002 - DNA, 448 bp, Homo Sapiens
tgattgcaattatatgacattctgggagaggcaaaactatcgagcgagtcaaaggaccagtggttgctgagagttgaggggaaaggagggatggcaggtagagaggtgatttttaagacagtgaaagtactctctagggtactgtaatttgtcaaaacgcagagaatggaaaacagtgaacggaaaacacagagtaaaccctaatgtcaactctggacttcagttaataacaatgtaccactattggctcatcaattgtaacaaatgaaccataatgatgcaagatgttaataattggggagcctgtggaagatgggaggggtaaagggttatatgagaattctctatactttttgctcaacttttctgtaaccctaaagctactctaaaaaatgaagtgtatcaagtaaataaataaccaaccaccactcaaccaccatcattgagg

SEQ ID NO: 3003 - DNA, 515 bp, Homo Sapiens
  misc_feature (304)..(328): n is a, c, g, or t
gctggcgcagcccctcagggtggagctgggtgaggtcccgccaggtggtgatgctcctggtttcccgttgccttgtctcactgctgcgccggtccttcctgagtctgacctttcctccccactgctgccacctccttgaatctgactgccttgaacctcacgcctgtcagtgcccccaaaacctgatggcttgtccttcccaaggccaactgccttccgtctcctgctgcttctggcctcactgagtctgaagagctgttaactaccatggccagtcctccctgagtctgaccatcttccatcnnnnnnnnnnnnnnnnnnnnnnnnngggtcttcctggaatctgaccattcgttgtctgctatgcccgtcctcaccaagactgactgcctgctgctttgctactgcccgggcccatgagactgacttcccactgctctgcctgcctctccccactgcactggcacagccccgccttgccgctactgatccattgccggtgtgaccgcggccgc

SEQ ID NO: 3004 - DNA, 589 bp, Homo Sapiens
  misc_feature (16)..(16): n is a, c, g, or t
  misc_feature (84)..(84): n is a, c, g, or t
ttttcaggactggaancctggggtgtcaatcagctgcagaacttgggaagttctgggtctgcagatgatctacaagtcagtgangctgccagtgctcaaagttccgcgcatgctgctggagaaccttcaggggcgaatccaggccaaaaagtggttcccgcgtgcccttctccgtgcctgactttaacttcctgcagcattgtgccgagaacttgtcggacctctccctggactgaccacctcattgatgcagtgcccggtttgggctgtagggggcgggagagtctgcagcagactccaggcccctccttcctgaatcatcagctgtgggcatcaggcccaccagccacacaggagtcctgggcaccctggcttaggctcccgcaatgggaaaacaaccggagggccagagcttagtccagacctaccttgtacgcacatagacattttcatatgcactggatggagttagggaaactgaggcaaaagaatttgccatactgtactcagaatcacgacattccttccctaccaaggccacttctattttttgaggctcctcataaaaataaatgaaaaaatgggatag

SEQ ID NO: 3005 - DNA, 929 bp, Homo Sapiens
ccttttttgggcggggggacggaagaaagggcgcctactgtacaacttggggggcctagactcgagatcacagttgccaaaaacagctgtaaacgacgccagtactataacgtctaaggtacgccagctgggtgcgattcgcacgaggtcctccggacggccgggggcggactccgggacccaggcgccgggagccggcgggctacctgcgagtcgagttagcgttgtcgccgaaccgaagcctcgctcgccatgggggaggtggagatctcggccctggcctacgtgaagatgtgcctgcatgctgcccggtacccacacgccgcagtcaacgggctgtttttggcgccagcgccgcggtctggagaaggcctgtgcctcaccgactgtgtgcccctcttccacagccacctggccctgtccgtcatgttggaggtcgccctcaaccaggtggatgtgtggggagcacaggccggtctggtggtggctggttactaccatgccaatgcagctgtgaacgatcagagccctgggcccctggccttgaaaattgctgggcgaattgcagaattcttccctgatgcagtacttattatgttggataatcagaaactggtgcctcagcctcgtgtgcccccggtcatcgtcctggagaaccaaggtctccgctgggtccctaaggataagaacttagtgatgtggagggactgggaagagtcacggcagatggtgggagctctactggaagatcgggcccaccagcaccttgtggactttgactgccaccttgatgacatccggcaggactggaccaaccagcggctcaacactcaaatcacccagtgggttggtcccactaatggaaatggaaatgcctgagccagggccagcggggcccggttccaataaagagacttgggctgaaaaaa

SEQ ID NO: 3006 - DNA, 411 bp, Homo Sapiens
  misc_feature (22)..(22): n is a, c, g, or t
tgggctcccaaggcagcatccncagctgctcccacccccaccccagctgcccggcggctgggcccacgagggctctggggacacttcaataggaaaggggcctggcactttgtgattgccacgtgtttcctgttaagccgcctgcccccagtgcaaatctctgtgttttgctctctcctgaacaaaaatgtaaaccgacgccggaaagcaaatggtatcgaatacctttcttgcccataagggtttttacaaagaacgtgtctcactaggaactaggacactcatcggccccgagaccaactcctggataaaaggaataaggagaatcgtgtttgtaacgagttacaggattgtttctttcctggattttaaacttttgttaaattgtgaaattatggaggagttttatag

SEQ ID NO: 3007 - DNA, 467 bp, Homo Sapiens
ggggctccctgcgtgaggacggcaaggtgcgatgtatgtctaacttattgatggcaggcagccccctgtgccccctaagcctggccctggttattgctgagctctgtgctcagtgcatgcggcctggccgtggctcgtctgttcctttggggggcccgggcgggttgtgggaatcagtcttcacagacagacgtgagccaggcggaggactcgttccttgcagaggtcagtcctcacctgcaggtgtcggggtgggggggaccaaggaggggcaggcacacaccatgtctgacctgaacccgattctggggagcatcttcccgctccggccccacgacctccacagggttacattgtaatatatatgccccagctaacctgtctgatggtggcatcttcctgcagacatttcaaacatgtaacttttatatgaaaaaaaataaacacagatgaaagctgcccaaaaa

SEQ ID NO: 3008 - DNA, 986 bp, Homo Sapiens
  misc_feature (448)..(480): n is a, c, g, or t
  misc_feature (701)..(710): n is a, c, g, or t
  misc_feature (789)..(797): n is a, c, g, or t
tgccagatgggagcctcccagaggcccagagcctgtggccaaggccactgttttgctagggccccagggcccacatttgggaaagttcttgatgtaggaaagggtgaaaaagcccaaatgctgctgtggttcaaccaggcaagatcatccggtgaaagaaccagtccctgggccccaaggatgccggggaaacaggaccttctcctttcctggagctggtttagctggatatgggagggggtttggctgcctgtgcccaggagctagactgccttgaggctgctgtcctttcacagccatggagtagaggcctaagttgacactgccctgggcagacaagacaggagctgtcgccccaggcctgtgctgcccagccaggaaccctgtactgctgctgcgacctgatgctgccagtctgttaaaataaagataagagacttggactccnnnnnnnnnnnnnnnnnnnnnnnnnnnnnnnnngggggggcgcgttaaaatttcccctcggaaaggggccccgaattttaacgccgttacccgcagtttttttgttccaagaggtggtcccctaataggtgaaggtcgatattatataaggcctgatgcacgatggcgacgccgtttaacactgtgcgatgaacggtgaaaaactcgtggctacctgggggaatctgtggagaagaggaaacctttaagtatcnnnnnnnnnntgggtgaaccaatagtttgggtgcaacagaaattttatctctataacaggagagaatttttaagaggggccctctatannnnnnnnntatagactttttataagaaattttttacacggtgtgttatatagtgtcggtgttttaagaatataggttaggacaatatttgtctattgggtgagttttggaatagagttttggggaatacacgaggagttatatgagtttatagtagacaaattttttattacaaggggagctaaggtgaaaataaga

SEQ ID NO: 3009 - DNA, 431 bp, Homo Sapiens
  misc_feature (114)..(114): n is a, c, g, or t
ccaggccgaaggtcagccttgagtcccgtttaacagcagatccagaagaccttgagagtaggcgtcctctaaccacgggggagagtggctgtgcagggctggggggtggtctgngcagacaccctccaacccaccacacccatgcatactcttgggaagcagcttcctgggagattagaaattctacttccctgactggagctaaatcccaccagccaggacccaaactctccttaccgagaaggaccccagctcttgaagggctgagtggcctgctgggggtgggagggtgtctttactatgtcctaggtttcgtagatgcccctctctggggttcccctcctccagcccagcggccctctttcctgtctgtgtaaattgttccgtgaagccgcgctctgttttgggaataaacttctatagaaaacaaa

SEQ ID NO: 3010 - DNA, 413 bp, Homo Sapiens
ttttttacttttacataatcccatttaatttaaccctcacaacaaccctgtgaggtaggtatttgccccattttacaaatggagaaatcgaggcacaaaagattaaacatcttaccaaagtctgcacagccacttatatgctggagctagaatttgaacccaggtgtgcctccactttttaatactagaccaatcttttcacgggggaagtttcctagattaacaccctcacatcttttaagaccattccaaaacctgcgttctgttttgcagaagccctcactgtgtttctgctgccctgaaacagtggaggcagacaaaggtgagtgccaagtgaggaaccataagaagtggtagatctctgtggagtgccataagaaccctcaagagccttaacaaaggtagttggggga

SEQ ID NO: 3011 - DNA, 382 bp, Homo Sapiens
agctcctagtggctcatgggtgcctcctgccccacactggggcctgccataataactggcccaggtaccaatgcccaggttggacccccctgtttggggtgctggtgaccacccccgggagcctgccctcccttgggaccagggggagactcctggcctcagccagtgcctccccggcccatctgggtggggtgcccacaaaccctgtgcccccagtttctgctttctggctctgcttccagggatctaacctggggggtctcagcaattctgtggcagcacatagacagcgatgaacctacccgcccacagcccattttgaggaaaaggtgatggcggcaggcaatccaaaagctcagtttattaaatgtgtgcgagtcgg

SEQ ID NO: 3012 - DNA, 405 bp, Homo Sapiens
cagccagttcaccactgtgctggaggatgagggcagccagggcacggatgcccccaccccaggcaatgcggagaatgagcctccagagaaagagacactgtccccgcccagaaggactcctgcacccccagaacccggcagcccagcccccggtgaggggcccagtgggcggaagaggcggcgagtgccacgggatggacgccgagcaggaaatgcgctgactccagagctggccccggtgcagattaaggttgaggaagactttggctttgaagcagatgaggccctggattccagttgggtttctcggggtccagacaaactgctgccctacccgaccctggccagcccagcctctgactgacgcatgcccaataaactgaccccacactcaaaataaaaaaa

SEQ ID NO: 3013 - DNA, 538 bp, Homo Sapiens
  misc_feature (313)..(351): n is a, c, g, or t
ggcctggtttcagtccaactttgcaattaatggcattggaccatattaatccttaatggttcgaacctagaaccctgcccactgcggctccctgccaggctccctgcaacccctaacgacctctgatggtcgttgtgggggtctcttgcctggctcccagggctagggttagggctctggaggtgctttcactcaaccaagggggccacagcactggggagtgaaactgccccgcctcaccctgcgttgcctctgggtctgtgagggtgggctggcaggaggcctaggccttgccctaggggcagtcctgctnnnnnnnnnnnnnnnnnnnnnnnnnnnnnnnnnnnnnnnactcactgacatacctaccttcaagatgagttcaggtgggctcagttctggggcttgggaaaagggccccagtggctttgggaagcacccccagcccagggtgaaacatgcttcttctcttcctgtggttccatccgaaggattgtggtgagccccgtgccttcagttaataaagatttgtattgtg

SEQ ID NO: 3014 - DNA, 440 bp, Homo Sapiens
  misc_feature (108)..(108): n is a, c, g, or t
  misc_feature (142)..(142): n is a, c, g, or t
catttcacaagttaggaaaagaaagtggtggttccgaagctcgaaatgatgggctcttttcctcctccacccccccaccttccatatcaggaaagaaataaaacgcancaatgagcctttatttcaggagagaagacttcanaaatacgtgccagtaatggacaatttgagcttttcactggaaatactcacaccgcaagctggaaagggattaaaaagccccacgtggttgatctgggtttatacttgcaacctccagttccccacgtatgttctttgcaaaggttggcctctagatggatgcaagtaagggaccctctggggctcgggctcggcgcctcgggcagggctgacgttgggagcgctatgagctgccgggcagggtcctcaccgggggcttcctctgcgggccagggctgccgggcgccaccagggacgcg

SEQ ID NO: 3015 - DNA, 452 bp, Homo Sapiens
tgccaaccccgagatgcccctgtccttcacaataaaccgaggattctgggtgctgctttcctactaccaggggctgctgcccttcatcccaatccctgagaagttcttcttctgcttcctgcccaacatcatcaacaggacctatttcccattttcctgctcttgcctgaaccagttattggctgtggtttcgaaatggctgatcatgaggaagagtctgatccgacacttggaggagcgaggggtgcaggtggtcttttggtgccttaatgaagagtcggattttgaagcagccttcagcgtgggagccactggcgtcataacggattatcccacagcactgcggcactacctggacaaccatggaccagctgcccggacctcctaagtccagaagcctcgaggtctcctgtttctcttcaacaaaaataaatatttgcctttcgaaaaaa

SEQ ID NO: 3016 - DNA, 454 bp, Homo Sapiens
tgtccatccactgaggcgtgcatagactaaacatggccagtccaggcactggaatccaggccgtagaacggcgcccacggtcaaaaggaatgagaccctgatgcactgggcgacacagacgggcgacacagacttggagacatcatgctaagtgaaaagccaggcacacggagcggacggcgtgatcctgctcacgtgatgtgtcccgaatgggcacgtccagagggaagaagggagatggcgctgccggtgcccgggacgggggttgggagcgacggttgctggtttggggtttctttctggggtgaggaagtgttttgatattggccgttggtgatgtttgcatacctctgaatatgctaagacccacagaattgcacactttaaatggatgaattgtatggtatgggaattacacaattatgtctcattaaagcagttattttaaaaatct

SEQ ID NO: 3017 - DNA, 747 bp, Homo Sapiens
ctatagaggatcccctgttgctaggtggagtccccagatatgatgaggcagctcagacaggagaacatggacccaatcctctgagcctcacccacaaagagaagacaaagggtggcctgtgcctccccgtcctcctgctccctagtggcccagggccccaggaaataactggagtaggcaggcagtgtccccttctgtatttttaagggactctcagcctccttgcagcgttaaagggagagtactttaaacccatataccagctgtgcttcagtttctctcactttgccctgggtaagctgctgtagggtcagaagtaaccctttctgtgccagttgagaatgagcctgtgtggtagctgatgtcagaggacaaagctctctgcaagggctggacacagagctgcagagtcctgaacatccctcctttcaggctgcagaagggagaggcaatgaagacaggtgctccggaagcagcatcagggctcttgaaggggactggtggggactcaggctgggtgcagcctccaaacagagaacggaacttaggtgtgtctctacagctaggcccagactagcccagaccagaacaaacacccttcagagcctaaccaaagaacataagctgcaaaatgtgcacccatattttaagctgctttttcaggggataaatagtgtttggggacattgaaatggatgttctcaggttgtatttatttcggccaaataaactagagaattgtgtaaa

SEQ ID NO: 3018 - DNA, 436 bp, Homo Sapiens
gtgttgggaaggggacaggttggaagggagacagaaaaacaaaatcaaagaggagaaaaaaacatgactcttcccaccctccaccacccctggccccaggcctgagtcaatgagggtgaggatgagcacacacagcgggcgaacagcaataacttaggggaggagcgccagggagaacacagagtgactgctggactccacagctgaggaggctgcctgtctagaggtccgaagggctgggcctggggtaagtgagcaaactgaggaaggtgggtgaaaagagaggactagggactggagaaacttcactgagtcgtgggagataaagtgctcaatgctctagatttgggctggaagggctggagtcagctacctccaggggggcagggcccgggactggcgggtgcgtgacctccgcccggctagagtccctggc

SEQ ID NO: 3019 - DNA, 845 bp, Homo Sapiens
cagcagctctacccctcacgacgcaaacatggcagcgcagaaggaccagcagaaagatgccgaggcggaagggctgagcggcacgaccctgctgccgaagctgattccctccggtgcaggccgggagtggctggagcggcgccgcgcgaccatccggccctggagcaccttcgtggaccagcagcgcttctcacggccccgcaacctgggagagctgtgccagcgcctcgtacgcaacgtggagtactaccagagcaactatgtgttcgtgttcctgggcctcatcctgtactgtgtggtgacgtcccctatgttgctggtggctctggctgtctttttcggcgcctgttacattctctatctgcgcaccttggagtccaagcttgtgctctttggccgagaggtgagcccagcgcatcagtatgctctggctggaggcatctccttccccttcttctggctggctggtgcgggctcggccgtcttctgggtgctgggagccaccctggtggtcatcggctcccacgctgccttccaccagattgaggctgtggacggggaggagctgcagatggaacccgtgtgaggtgtcttctgggacctgccggcctcccgggccagctgccccacccctgcccatgcctgtcctgcacggctctgctgctcgggcccacagcgccgtcccatcacaagcccggggagggatcccgcctttgaaaataaagctgttatgggtgtcattcaggaaaaaaacaatctgtttaacaaaggggggcgcgtcttaaaattttcccggagggggccacgagtttaagggttccccaagtttttttgttcacaacttg

SEQ ID NO: 3020 - DNA, 489 bp, Homo Sapiens
taagatgcattggaatcactgtagaacacatagatttggcgtgagatggcttcattgtgaacgagttcccgtttattgtgtcaaagtcaagccattgagcagccaggtacggatgggccaactgccgagccacggtggagaaggtggagaagagcgatggagttctcagcgatatcagagctgcctcggtggatggagctgaattcctgaggaaaagctcaactcagttatggacggatcttgttcctccctatcaggggatccccaaggagaacgcttggcgtgtcctcctttggtccagcctgggttgcagcttcgatgctccctctgtgcaggggggaaggtacctgcagattgcccatctgtaccccaggatttaggggacacctgatgaggtatttgtgtttaatcatcatcttgatgcggacgcttttaggaacaaggactgagactgggagggattataaataaacactcaaatgacaggaa

SEQ ID NO: 3021 - DNA, 524 bp, Homo Sapiens
tttaagtattctgtccctttaatagctttgttttaggggtaactcccctcgccttgtggggaggcttaggacgggcgggtgcaatcctcgaaggggagtctcagcgaccatgggggacaccatccacatgcaggcggtagttggggcctcggcagcgcctctcggggtgccgggggtccctgttgcccctcagtgccctgtgggccaagggctgcaggggccggctgttaccgctgaggctctggaagatctgagatggaggattctggctcaggagtctcagggagtgcatctgaagggaggtgatattgagggcccggtcaatgaggatccaggtgacagtctcggagcagggcggggtgctgagagagccctgataggtgatggtccgatgtgagctgctgcccccagtgcagcccagagtaccagcgctcgaggggcgctcagacgagctgcagcccccatccccaggaggcctccgagggacccctgcccaacgccctgcccccctctctcaggggtac

SEQ ID NO: 3022 - DNA, 303 bp, Homo Sapiens
ctttcttgcctccgtgtgtaagctccttgtacaacccagacccatcttgtattttgtggcccagaaaactgaacgactaatttgttcctccgtagtccaaagggcagagttgcggaaggccgtcggggcttggtgagcaggggctgtaatacagtctgtgggctccttaccctgcaaaggctgtttcagctcacacagagtcatccacacaaacccacggatcccagttgacagtcagtggaaagctcgtctccctagcgtccagggtggggattctgctgcaataaagagcttcctcagtga

SEQ ID NO: 3023 - DNA, 494 bp, Homo Sapiens
  misc_feature (319)..(319): n is a, c, g, or t
cgctgttatggacacctgcagatacatgtcatggagtgcattgagtagggcggccagtgcaaggccactgctgccgaggacgtgcccgggacctgtgcagtctgcgctttcctctccctgctgcctagcccaggatgaagggctgggtggccacaactgggatgccacctggagccccacccaggagctgggcgcggcaccttacgcttcagctgttgatccgctggtcccctcttttggggtagatgcggccccgatcaggcctgactcgctgctctttttgttcccttctgtctgctcgaaccacttgcctcgggcntaatccctccctcttcctccacccggcactggggaagtcaagaatggggcctggggctctcagggagaactgcttcccctggcagagctgggtggcagctcttcctcccaccggacaccgacccgcccgccgctgtgccctgggagtgctgccctcttaccatgcacacgggtgc

SEQ ID NO: 3024 - DNA, 502 bp, Homo Sapiens
  misc_feature (125)..(125): n is a, c, g, or t
acctgttttgctggggggctctagatcactggctccagaactcccggctgccagggtagcccctacccccagccccttgctcctggacagcagtgggtctcacctttagcctctgcccccagttntggtctgacccaacagaggggctctatgatattaagaaggggcccttcctgctctgtgcctcaacctattctccataatagggagtctaatcctattccttccctgcctgatgaggatggtgtgaggatgaggaggacggcatctcatttggggctttttggcagtgggcctcattttaatcctgcagggctgcctgccagtggatctatccagctgcttccttgtagccaagaatgagttcaatgaattgtgattcactgattttattgattttgttttaaaacagggagactggtatttttgaagctgctatcattttctatttctttattaatttctttgtaatcatcttattaaagttttcttatttagtggg

SEQ ID NO: 3025 - DNA, 458 bp, Homo Sapiens
gggagccctgctgaatccatcaagaggatgagtgtgatggtgaacagcagtgattctactctttctcttgggccattcattcaccagtccaatgaactgcctgtcaactcccacggcagtttttcccactcacacactcctctagacaaactcataggaaagaaaagaaagtgctcacccagctcgagcagcatcaacaacagcagcagcaaacccacaaaggttgccaaagtgccagccgtgaacaatgtccacatgaaacacacaggcaccatcccaggggcacaaggactgatgaacagttccctccttcatcaggtaggaaatggactgtgagccccatgggaatgcccatttcttctcccttaagatcttttgtcagctcagaaatgtgtttggttgggttggttggttggtttgtaaacagatattcagcttcatggtgtcttcttaaaaaa

SEQ ID NO: 3026 - DNA, 364 bp, Homo Sapiens
gccaaaccagcatctgaggtggtcttggaggcaacagggtgccaggttctacctgggctctgccaccatctctgcaggatcctgagcagcttctgctcctgcaccaggaggacctggacctctggcacgaggaggctggatgtcatcaacactgagccctcagtgtgctctccactgccccctcttcctcgtagctcagcagtcgggagccctctgctcagtccctttaacctagtcctgccacccaccagctcctcaaaggttttgccaaaaaacctgaacacaccaggatggcactgaggaagaactgggctacctttgttgtactatctcttgcaagattttaaatttgggaaaggcaaaa

SEQ ID NO: 3027 - DNA, 612 bp, Homo Sapiens
ggggcccccaggactgcagggcacagaccaaagacatggctgcccaggccccgtgggtgccggaagcggggccttgactgggccaggccactcccccgagctccagctgccttaggaggagtcacagcatacactggaacaggagctgggtcagcctctgcagctgcctcagtttccccagggaccccacccccctttgggggtcaggaacactacactgcacaggaagccttcacactggaagggggacctgcgcccccacatctgaaacctgtaggtccccccagctcacctgccctactggggcccaacactgtacccagctcggttgggaggaccagagcctgtctcagggaattgcctgctggggtgatgcagggaggaggggaggtgcagggaagaggggccggcctcagctgtcaccagcacttttgaccaagtcctgctactgcggcccctgccctagggcttagagcatggacctcctgccctgggggtcatctggggccagggctctctggatgccttcctgctgccccagccagggttggagtcttagcctcgggatccagtgaagccagaagccaaataaactcaaaagctgtctcccca

SEQ ID NO: 3028 - DNA, 490 bp, Homo Sapiens
agaaagatggtggaaacgtgaggtccaaaggccttagcttgggcatggtctatgtccctcctgttcctattccatttgctgaaaggagtcttatcgccaagtccaacagtaggatgggttgggagagaagggagtggattttttaacacgtcataccacacccttctgggcttggtcttgggtccaagctgcctggaaatttggagttcggggtcttgtacttccactcgacacatccctgtgtctccatagcaactgtttactgaccccttcctctactccctctgagaccctggccatcctcctggggtcttcagtgggcaaagcttcggccctctggctcgaagcgtctctgtttcttgcatttctgcctgcatgctggggaggcctggaaacactcaccctggttcctcaatagaactgctgtgacaattagaattcttttgtcaaactgttctttatctaaattcagagagtaaatttaaaaaaa

SEQ ID NO: 3029 - DNA, 459 bp, Homo Sapiens
ggtctggcgcggggcgagcggcgccgggagcccgaggcccggccgggcgtcctgcgcgaggcactgcgggctcctgcctgcgagattaggcgaggggcggaaagggaggcaaggagaggccgagaggagacaggcgatcggattttccaggagtctggtgtggaagaaaaacccacctcgaactcaaatccacaataataatccgaacgaataataagggagccgtctttctggccgggcgagagagagggagagagaagggggaacgggaggaagcgaaatctccgtttcatggaggctgaggcaagagaaaatttcggagcctggatgtggaggagcccaacagcagaactaactcaggaaattgtctttcagaaaaaggccgaacgtaggctgggtctgagaatcaggctggggtatggtggaggaacctgcatgtttaaaggaacaagaaaatga

SEQ ID NO: 3030 - DNA, 1004 bp, Homo Sapiens
  misc_feature (365)..(365): n is a, c, g, or t
ctgcttccgagaacagagcctggccatgctgagcaaggcccaccgagcccctggcaaccgagcccccgatcccacagagagtcgaagtcttcatattcagcacccagggtatagataggtagccctgctgccctccacgtgcaacacatcatacatcaccctcctaggtttagtcttttaagtaactggatagtttcaaagtttcactgctccagtgtgatcattcttagatgtctaagaaagggaatttggtgggatctaagtggggacagaaggggtcctctcgtcctcccctccagcaacttttggttttatgttagaacctaaccctaagcccaggcttttctctccactgactgcctgtnagctagtctctccaccttggccatttccagccagctcccacccatcttttcttgaatctcttcctgtttcccttaggacgactgaggtgtgggctgacggaatgccctagttgaggtagtataggtgctcaggcccctaatccagacctctacctgttgctaccccccttcccctccctccaggactaagaagcaagatttcccaggtgctctgaaagctaattacttactcatcgaaggatctcaaatcaaagctgacccagtcttcatatccttcaagttcctttccattcctcaaggctttgttttgtgtctatattgatcccacagccactgcacttgcccttgccacacttgatctcaagggcatcttggaagtatttgaccatttcttgagatatggggggaaaaagtctttgtattggcatcttggttccagactcccctttccaaacctagaaaaatacagtgacctttgagcatacccaagatccctttctcactgttgcctgtcccctaactcacctccccacagcccctatcctttccccctcaacaaaaacaaaatctaccttacttgaggaattaggtaggtaaggaatgatcacattggagtttgggattaaaaaccccaaaaaa

SEQ ID NO: 3031 - DNA, 469 bp, Homo Sapiens
cagagagctgggatgttgtcagcaggcatcagacagagcaaaaagccatttttctttattctattcctgatacaaagcaactgagatatgcgtttctctttggaattgaggaagggagaataatggagcttttgcggtgatggacagggaaaaagtgggggagcagttaattatccatcttgacaggtgtagacacaggctgggaagctgggtgtgtcttaatccctgctcctgaaccaccgtggggagcaggaagcctacagtttccttatatcagcaaatgcatcatgttgaaacaattttactgcttgctttctgaatttaaatatagattttccctgagaagggctcaagcatgcagatggtaagaaaaacaacagtctagaaagatatcttcaagttccttctcctggttggtggaaatagagcaattcttttccaaaatataatttttagagttttaaagtaa

SEQ ID NO: 3032 - DNA, 497 bp, Homo Sapiens
gccatctgtagctaccctgttcttcccaactctcctccctagctagagcaccagccctggaaccacggggctttaggtctgcttgaaggtgaggacgtgactcccacatgtaatcaggagaaagggacagaggaagccccagcccccactgtggctatcctgactccagtggccacatctcaggtgccaggggctgtgggagcttgtgccgtccttggccaaacaccccgcaggcaaagatgcacccctgctgatggagagccttctgcttctgccctctggccctctaccataccacttccccagccagaaccggcgtgcagctaggaggaatgggttgcacggcggagggggtgaggtgggaggcgtctcactgctctcagggttcaggtagaatgttgctggttttgaagctcacctgttgtggagtgttctaatcagttttggctttctgagtttttgtggaattaaagtgctgctgctgcgaaggctgaaaa

SEQ ID NO: 3033 - DNA, 495 bp, Homo Sapiens
cccagcatgatcctgaaatctgcatccgccgtggtttgtattcattgtgcatatcagggataccctcaagctggactgtgggttccaaattactcatagaggagaaaaccagagaaagatgaagaggaggagttaggtctatttgaaatgccaggggctcgctgtgaggaataggtgaaaaaaaacttttcaccagcctttgagagactagactgaccccacccttccttcagtgagcagaatcactgtggtcagtctcctgtcccagcttcagttcatgaatactcctgttcctccagtttcccatcctttgtccctgctgtcccccacttttaaagatgggtctcaacccctccccaccacgtcatgatggatggggcaaggtggtggggactaggggagcctggtatacatgcggcttcattgccaataaatttcatgcactttaaagtcctgtggcttgtgacctcttaataaagtgttagaatccataaa

SEQ ID NO: 3034 - DNA, 670 bp, Homo Sapiens
acgtagaatttgccggatacattcccatcgaaacgcttgacagattcgattaatcggctcactatgggaattggccccgagccagaatccgcacgaggaacttatgtacgaggcaggagtattttgtattagaagaggcctattaaaaaacaaagttgtttcggaactagagaggacaaaaatggcaattttgagtgccaagtcagaaagtgggtattacccttgtaaagaaaaaaattacaaagcaggggtttagagttatttatataaatgttgagattttgcactattttttaatataaatatgtcagtgcttgcttgatggaaacttctcttgtgtctgttgagactttaagggagaaatgtcggaatttcagagtcgcctgacggcagagggtgagcccccgtggagtctgcagagaggccttggccaggagcggcgggctttcccgaggggccactgtccctgcagagtggatgcttctgcctagtgacaggttatcaccacgttatatattccctaccgaaggagacaccttttcccccctgacccagaacagcctttaaatcacaagcaaaataggaaagttaaccacggaggcaccgagttccaggtagtggttttgcctttcccaaaaatgaaaataaactgttaccgaaggaaaaaaaa

SEQ ID NO: 3035 - DNA, 709 bp, Homo Sapiens
  misc_feature (279)..(315): n is a, c, g, or t
  misc_feature (320)..(320): n is a, c, g, or t
tgactgtgtaaatacactttattttccatttttcccgcctgggcgacatgtgaacaggcagtgtgcaaaatggtggcgggcagtgtagggggcgtgtggagagccccgtgggtgcctgccccggtccccaggcttcgtaacactgaaaagtgggcagctaggaagcggggacggagcaggggtccccacccaggaagcgccagggagattgcttgtgacgctactctactggaggctccgggagcaccgaggggggcagcccccagggtcatgaggccnnnnnnnnnnnnnnnnnnnnnnnnnnnnnnnnnnnnncatcnttggattttggcaccgttctcacctctgattcagcagagacaacgggaccaccaggaggaagtgaggggaggccgctcgctgggaagctcctgcctgggggcctggctctggctgagggtggggctggaaacacatgaaaaaagggaagtagatggagaccgaggacccctgtagagatacccctccatcactggccaggatagggggcgcgagtgtctcccagagaaagatgtggggcactggggagaggggtctcttcacttcctggaagctgctctggccccagagaagcagggaggcttcccgtagccactcagtccccaggcgccccgcacatagtagggggactttggtttccgctgcaggggccacggtgcgtgccacacgg

SEQ ID NO: 3036 - DNA, 569 bp, Homo Sapiens
agacagcccctcaccctgcctgggctcttgccaagcggccttggatggatgaagtcagagaggtggggtgagggtgagcttactcagggcccccagaggaagccctcagcctctgccctccccccacacagggcgggagcccaggcctgttcctgccagctgtggctgcagctgtgctcctgctccctcctggaatgtgcgacaagcccaaatgttccggggaggcggccggggcagggggcttagaagtgctaatatggttctgtgttttgcctgaaacgataccaggttcccctgaatagcaactttacaaggtccatgtgggagggaccaacccagatgccctgctgagtgtccctgaaaccatggcagctccatctgtcaagatggcaggggccggagtgagggggctgctggcttaacagcaggcatctgggcaggccagtcctcaaagcagctcctgaaggtctgtgttgcactgtcaccagtctcaagctatgcctctaatttcaccagggatattgactaagaagacaataaaatctttttctttgtgtaataacctcaaa

SEQ ID NO: 3037 - DNA, 589 bp, Homo Sapiens
ctaccctctaggaggaagttgttaatggggctcttttagcccactgatgcttacttaggccggagagcaggggacacggtgctaggttccctcgtgcagtgcctggtgctctcaaattgtctcaaaaggaccaagaggaaaagagtcggaggggtagaccctgcagcccctgttgagaagaaagattccagtgaagttgctgatggtatggctgtggtctgggacttgcggtgtctcggcatacccctctcctcttcccacctcctcctggctatgttctgcagcctcccagagtagaaaactactttgttacttaaggttgttcaccttgtaccagtggttatttgagtttgttcctattacaccaatccttacttgaggtggttcggattacagtttccaaatgcattctgggattgcctattccagagagggtacagaaaaagcacacagatggcttgtctcaggagtgttgaatgtgtgccccgctgctgtctggggggatgggagtgggctctggggtcatatgtgaacatccccttggatgatttgcggttgcttagaataaaacttgctactagcaaaagaa

SEQ ID NO: 3038 - DNA, 556 bp, Homo Sapiens
cggcacgagtccaaccatagcacttaagtcacctgctgtgtccctttcatcccttgtttttcaccaagtagactggctgctcccagagggagagcacatgtctgatttacatcagggctgtcacagatttacacagagggaatccgtggcaagtcccatcactcccactcctggaacttgagtaggtcatctcacctctctgagccgctctttctgataagatttggctctgtttccccacccaaatctcatcttgaattgtaattcccacatgtcaggggagggacacgtaggactggacaggcgggaggtgattggatcacggggtcggattccctcacgttcttgtcgtgatagtgagttctcgcgagaggtgatggttttaaagcacggcacttcctcattctcgcacacacgccctcctgctgcccatgaagaaggtgtctgctttcccttcgccttccgccatgattgtaagtttcctgaggcctcctagccatgcttcctgttaaatctgcagaactgtgagtcaattaaacctctttcttttataatt

SEQ ID NO: 3039 - DNA, 648 bp, Homo Sapiens
  misc_feature (77)..(77): n is a, c, g, or t
  misc_feature (126)..(126): n is a, c, g, or t
acgcgatgttcagaatgactttccagcttgctgcttcagaagctttgtacataagagagctgctaccaagcacccangactgttaagcatggcactactgaccacgactctgtctttcctgttgtnctccgttggggctctacagaaacaggctgggttccagcagccaatctccccgctgtctccccctgccccgagtctggaagagggcaaggacacttccattcctctgtaccatggagtcctgcagccccttaacccctgcgtggcaactgtgtacagcttacccctgcctccagttgcaccacttctagatgtgcctttaaaagatctaactatgggatgggagaacttgagggtgatcgggaacctcccctgctgagggtggtgtcagggttccgtgactccagtgggccagtggtagcctgtcccagacaactccgtcaccccagctctgcctgtgcctttatccctgacagctgctgcactagccttcctgcttccctaaggacttagtggagggggaaagttgtttttggtactacttggtgggaagtaaggggaaggttggatcttgggtttggtctacccacccaagagaaaagactgttaactggaagaaaaaatatatatataaaattttatgta

SEQ ID NO: 3040 - DNA, 729 bp, Homo Sapiens
  misc_feature (261)..(261): n is a, c, g, or t
caggccaaacagttgcacctgcactgtccgacctgccatataaggctcggagcccagcctcgatggggagcactttgccatggagatgcacatagtacatgagaaagagaaggggacatcgaggaatgtgaaagaggccagggaccctgaagacgaaattgcggtgctggcctttctggtggaggctggaacccaggtgaacgagggcttccagccactggtggaggcactgtctaatatccccaaacctgagatgagcantacgatggcagagagcagcctgttggacctgctccccaaggaggagaaactgaggcacgacgtccgctacctgggctcactcaccacaccgacctgcgatgagaaggtcgtctggactgtgttccgggagcccattcagcttcacagagaacagatcctggcattctctcagaagctgtactacgacaaggaacagacagtgagcatgaaggacaatgtcaggcccctgcagcagctggggcagcgcacggtgataaagtccggggccccgggtcggccgctgccctgggccctgcctgccctgctgggccccatgctggcctgcctgctggccggcttcctgcgatgatggctcacttatgcacgcagcctctctgttgcctcagctctccaagttccaggcttccggtccttagccttcccaggtgggactttaggcatgattaaaatatggacatatttttggag

SEQ ID NO: 3041 - DNA, 901 bp, Homo Sapiens
  misc_feature (175)..(175): n is a, c, g, or t
tctagacgatccgttcaccgaggggtggttgtgagccgtattgatggagagcagagggagagggcaggctccagactcccacacgccacacagcactctgccaggctaggagaggacaggtgcagctcttgcagctctgcgggtgtgcgggcaaagggcaaggcccacgggctgnatgtcacttccccgactgtctcttggttggcttgtccttgtgcaagacccagcctgtcacgacagagcctggcaacttcagaggaggagccaggatcgaatggaaggggggaattggggtccaccatagtcttctgctctggtcctccacgggtggaccaggatggagtctcctgcctacctcactgcattgcactggacctgggatgcctatccaccctctggcagaagacactcaccaggttatctgtgaagagactctgggatcccatcacctcaaagccagagggtccccaagtcaccgctgagagcacttgagcctcaaggatgtaagcctgaccataggatcttgactccaacagcggcaacccccacccccattgtggtccgtccttaacccatccactcttcttcggaggcaactgagaacacataaagcaagcagctacctagcatccccctcctaaagctttagactcagagcccagggtcccccacaagcctcaaggtagcctcaggtttctctaatttcctccactcccagttcgaagcaaacagcttactgcctagtccccgccaatcccaagggcgggctggctgatggcagcatggtgggctggcctgggtgtggagtgaaagagtcactgtggtgggggcgagaggaggacttgggagctggaggtgtgaccccttcagttctgttcctattaaaggaccttttgaaggg

SEQ ID NO: 3042 - DNA, 448 bp, Homo Sapiens
gtgccctggggcgacgggtccccctggccggcggcccaggcggcgccccccacctcgtgggacttttctttgaaggcccggagacccctggggcaaaactcccacgggccaggcctgccgctggagctaaaaagcggcatttgcgcagttgggcttgcctggaaacttggcaaactttggtcggatcctcccctgcagagcgagggcctggcctggcgaccccctcatttcaagtcgcttctagggaccgagcgccctaagctcagtggccttcagggtgctgcgagcaagcggggcggcacaaaagcgcgttcggtccaagccaggccccttcgaggactttgtgtagattggtacctaagtttaatgccttttgagtttctttttaaacagtattaatgtaataattaatgtaataaaaagaacaaaggacgaattcgttcgattg

SEQ ID NO: 3043 - DNA, 378 bp, Homo Sapiens
ttccagttttcaataatctgccttttaaagcaaaaaaactacctgagcgtcttgccaggagatggcagtcatcctcggtctggtcaaggaattcacccgaaacaaacataatctcaatgcagttttaagaaccatcgagtgaacagagtatccaatttctccagtcacagaggtgaggagtgaaaaacagtcttgggattgggtgacacaggccaagttgccgtcctgactgattgtgcccccaccccactattgtcttctcagggcaccttgctcaactctagacccgctcaccacttagtgttaagtgtccgcaaaggcacagcctgcgtcctgctgagcgctcctgccctctgatacataaagcaccatcacagg

SEQ ID NO: 3044 - DNA, 300 bp, Homo Sapiens
ggaatctcctgttcctttttttaggcaaatctctctcttcccttggtttatttttctgtccagatgcagaatctttattccgagaaggagagtcttttcgtcttgttaattcattcttttcatctctacgtttggaacttgaatactctctggtgtcatagtcagtttttttgtctctattgggagtgaagtctttatttgaggaagcatcgagtggaatcatctttatctgacgttctagcctctttggaagattgagacagatcttttaaaatttccttgttcattcagacgtcctta

SEQ ID NO: 3045 - DNA, 705 bp, Homo Sapiens
  misc_feature (479)..(550): n is a, c, g, or t
atctagaggatccctgtacaggctgatgcagccgttctctgtgcagaggtgagccatcctaggagcagctgtggggtgaaagtgtccttccttaaactcagtgctcctgctcattctctcagtatggctaatagctcatttaaatatactatggtggtttttaatttttgtgactcattccctcccctcctcacctgtgtttttcctgtgtgtcagggacattttagggggaccaaaaggatctctgtctctgctctgtgcttgctctgaggttgaatagagaatgttcagggctgttcttatttgagtcactggagctgttgtgagctctgacggcctgggagccccactactgtcacatgaggacagggcgtggggtggctcaagcatggccgcttggggttgggtcctagtgctgtcatgttggaggtgtctgacctttgcactaagtttccccacttacactaaatggggataannnnnnnnnnnnnnnnnnnnnnnnnnnnnnnnnnnnnnnnnnnnnnnnnnnnnnnnnnnnnnnnnnnnnnnntaatgcagaactactcactgctgctggagtgcgctgttatattctttattaggtcctcagactttttctatgcctaagcttgagggtctctctcagctgtgtttttctgtatttataattataggaggctcaaaaaaattcccagggccttttgg

SEQ ID NO: 3046 - DNA, 913 bp, Homo Sapiens
aggctgatgctccttggaagaataaccccaagagagatcctccataaatgggacgatgtgaactgaacttcagccctctccctagaaatgccagccactgcatgagttcaagaagaaaaggccccacaggcttgggacttggcctgctgaagctctgtccttccccacagcttttcctgagccacaggtctataaatgtattacaaggtgttgagtagattgtctgcggccaacccgaggtgtcagagcatggaacaggaacagttgaggggcggctgtccagaactaaatctcgcatcagtccgtttcccagaactgtggagcgtgagtggcttccctataggaaaaaaggctggtggaggccaggtgacgaggccagataggaggagttccatgcggcttgtggaggccagaataagaatacgctacctcagcccttccagacctcagtctcctgcaggggtctctctcagatgtatttccaggctttctgataaattacccaatttctatttcatctgggtcatctccttcttaaagttctgaagatcattatttccattcaacctgccacattttgctacagaactgtgtcccactcttgaggataaagtcctctttgtccctgcagaaggcatttgaggaggagatgcacatgctggagagctgtgcatcgtgacttcaccgtctctggaaatcatggaaggaatctcaggaagagtcgagcatctccacggctcactgtttcaccttctgctcctggctcctcctgggtgggcagggacactgatttccatctgctacctggccagcaagcatcctgccacccacagcgcccttctgcactttgacattttgaagaaaccacggtttgtccagaatgaaagaagatgtccagggatcctctagatca

SEQ ID NO: 3047 - DNA, 698 bp, Homo Sapiens
gcctcatgcctaagatattaactgaaggctgagtcggggctgcatggaaggagacaggatctagtcgtggaggaataggggagagaaagactaagggtcagctatcacagagaagtcttggataagacagagatgcggatgggtcaatgaggaaggaaaaggaaactgtgtgaacaaagaaaggttgggtaagagttagctggaatgtatggcaactgaggacgtgttccatgccaagtcactgggaaagccactgaagcatgtaaaagtggggatgaaactagattagagctatgttgttggaagactgctctggcccgtgtttaaaatgggatcacacaacggcattggaattagaagttattgcaataatgggaacaagtaacaaggacttgaaccagggcctatgtaataacagcagggcaatgaggatggaaaggatacttgagtaattgcagagtcttgttgagagttagaggcagattctggagtctcaaacggtatctttctcttacagaagaaaataaacagatttgaatgggaaggaacttgagtttaattcatgtaaagtctgagatgcttgaggactcatatagatagccaataggtagtgacagatggagctttgcaggatagtggagaaagtaggtctccggtgcaggttataatgtggatattttcaggctgtctgggagtag

SEQ ID NO: 3048 - DNA, 904 bp, Homo Sapiens
acctcacctgcagtcctcctccctcagaggagatcctgcctgctgcgcctttatggtagcgtgtgttgccgtctggcagctcagcctctctgcatgactcagcccactgcaagtggtaccctcagggtgcaggtgagggggccctgaggagtggaagggagcagggagaaggcagaggagagctggataaccaggaatagaagagctaatgaaaaatcaagatttgggtggaagaaatggggtatggccagacgaggggaggaatggacagcagggtggacaaaacgaacaggttctcatggggggctgagaagagggatactgggggccgtgacttccccagaaaatgttgagtcatttgtgcagcaagctggggagatgcagaactgggcacaagtgcatggagttctgaaaggcacaaacctcttctgttaccggcaacctgaggatgcagacactggggaagagccgctgcttactattgctgtcaacaaggtgatgagtcccttggtagtaaggccaccaagggcacaggcccaggagcctctccttcaggccccaggagggtgggcacatacctcagagagatagaagcagccctcctgctcctgacagtgccacatccagcttcaggggcccgtattttccccaactacagcatcactgtgagaggatcgtcccattcacttgccatcctcagtccctgccaaatctcagagagggttctctcgcctgcaggttcagggcttttcatcctctctccctcttctccctcagattccaatttatatctactttaccacttcccatttctctccaggtccaattgcccttctttgctccctatcccttttatgggctttcccgcctactttttgtcagttagctgctgagcatcttgcca

SEQ ID NO: 3049 - DNA, 681 bp, Homo Sapiens
taacaaggctgatgcggcaggcagccccacaggcagaacctgtagtgaaagtctactgtagatatagtgagatcaaatatatggtcatggaggaagaatgtagggttgtggcactggcacagacacaggaaaatccattatccccactcttttatttttgctattctgatcatttgtcccccttttaaaaataaacttcccatgtcttccatttgtggtactaaaatttgctactgttatagaccatattttcctattatttatctgttcaaattcgtattattacaactaatagctcttgaattctttgctaaaggtaacagcaacacttccagaggcttctaaaacactactgttttgcagggcaggagtattctggaatctatttacttagatataaaataaacctcgaatattaaaaagttgtagccatctgagagaggaaagtttacgtgactgaaaatgtagaatacttcaacgtgcatgttactacttaaaactagtctttctgctggaatctacggagtatatctatatatgcccccttgtggttaattattgctcctttaataatatttacttgaaatgatccacaattatttcataactttagcagtgtgtattggaactactgtacttaaaggttagtaagtttgtatatgccatactgtatacttgggt

SEQ ID NO: 3050 - DNA, 689 bp, Homo Sapiens
gggatggagagtcttctgggatgtcagagatgatggggcccctggccctgtgagggctaaggcccaaatttgtctctgggagaggctgtaagtagaaggctaggcccagcccttggcctgtaggcacagggagagccagaaccccaccaacacccacctgggccaggtctaagggagaaggtttgagggaggaggctcagtccatgctggagggcctgggtctggttggggggaaggctggcttccatcttctcttccttttaggggatggggagaaggaacaggctctccataagcccagccatgcccttgggaagggggaagaagacaaacctaccgactggatgaagtaggggtcctgcagaagggcaccaggtagagggcaggtgttgaacttggcaggtgttgggcatgagctcccctcatccagcatcagggacagctttctcttgcctcctgcattgctcggccccgccttgccaatgacccggtgctgctgaccgtggctctgccgaagtgtcaccacctcccgccacaagatctcgttctgcctgaggaaggggtgggagggtgccgaggcatctgagagttcgcccagtcaccaccccccacagaatggcgaggctggggacccaggagaccaccccgctgactggccatcccagaggtgcccataagtctagatttga

SEQ ID NO: 3051 - DNA, 431 bp, Homo Sapiens
ctgatcaggctgatgctagatccagtggctatgaccaccttcaagagctattcacaatggggctggccaagttctaccttgaagggcctcataagacctataaaatgtgtctcatgccacaaacactgtgacctccaaaccatctctcttctccaagtgatctgtcccacatacctttggaataaaaagtgaatcaggcttcactatatacatgctagagacacacacctgaactcataagataatgtacctcaattttttattttgaccatgactcgcagtaataactacattttcaaatctgatattgtatcctcatgcatgtgtacttataaaacagaaacaagtttcattaaacagcatttgcctttaatacactgaatacactacggtgtcttttattttattttttcaagggaaaattctcgcca

SEQ ID NO: 3052 - DNA, 815 bp, Homo Sapiens
ggactcgtcgacttctgctctcacacgagtataaagcgcctgcagggtggtctttgtggaagctggtcttagggtgggctgggaataggcaggcagatccagggcatgctctggactcagctggtttatacctatatgaccattacagttgtctacagatcacatccattctggctggtcaacatgcatgctgtactggctgttaaataaaaatattctgaatgtcactccttttgagggacagcacagccttccctaggcattctcctatatattccccagccaaattgtagagtcagatgcacccacatttgcctgtgtccttgatttagcaggaaggaaaggaatagtcggggttgatggatgcccacttctcttctctttctcttggtcaactcaggagccttttagtctgagggaatggagaggcaaagaaagaagggagagtaatagaattgggagggcagagacttaagggttctgcttcccagccctagaaattctatcattgctcagccccaatgagaaagcagaaacacctaagccatcatcaaccactaacatctcaacttgccagttgctgggtgctggcccctggcaggaatgggccaagccaagcaggggagactagagagcaccaatggccaacacagctgcctggctggggaggctgtgctgtttcccctggagacctgactggtctgtggttcccacaggaacagggttgtcttttgagcccccagtgtctggtttcattcatctcagacttgttatttcactcatctctaataaaggattggggggtcagtaaaaaa

SEQ ID NO: 3053 - DNA, 484 bp, Homo Sapiens
  misc_feature (167)..(167): n is a, c, g, or t
tccacagtctcgcctgtctgtctctggccttggtggacctggctccctccctaggaggcttttgccctcagcttgaatacagttcctggtgcatcaaagctgtaagttctcagctgtctggccctgcacttcatcacctctttcctacaaataaaacattttggaanaaagtcccattcttccaatatgcttaaagagaaggggtaggagataaggagaaagaacagatacggtttttttcccctttaaggcctttagattttgaggtactgtaaggggcctagaaggacaaaaggctttcattccctcttccttttggcaggcaggttatcagtccttggcagaaaggcccagccctatccttttctgtatcaaacaaaatccttgaggttggtatacaagttaaggctgaaaaaaggccttaaattcccagtaaagaatgtgaaagcaagcatgtaaaataaactggtcttcatgaaaaaaa

SEQ ID NO: 3054 - DNA, 1386 bp, Homo Sapiens
tacacaataacaaagaatctaaccccaactagacagctagttgtaagcgggttttttaggcatactatacggtttaagtacgaggcctggtggcgaatcggcacgaggagcagagccaacgtgtagcggcgcccaagcggcccagcgggctcgcgtcgcccgctctcctcaccgagccgcaaatcggctcaggatccgcccctgacgacgcgggccccgcccctggagacacgcgccgcgcagtcgtcacccgcccgggatcaggaggccgggggcgcccgccggtcgggcctgggcggcgccatgaagctgacgcggaagatggttctgacccgggccaaggcctcggagctgcacagcgtgcgcaagctcaactgctggggcagccgcctcacagatatctccatttgccaggagatgcccagcctggaggtgatcacgctcagtgtcaacagcatctccaccctggagcctgtgagccggtgccagcgcctgagtgagctgtacctgcggaggaaccgcatccccagcctggctgagctcttctacctgaaggggctgccgcgtctgcgggtgctgtggctggccgagaacccgtgctgcggcaccagcccccaccgctaccgcatgaccgtgctgcgcaccctgccgcgcctacagaagctggacaaccaggctgtgacggaggaggagctgtcccgtgcactgagtgagggagaggagatcactgcggccccagagagagagggcacaggccacggcggccccaagctatgctgcacactgagctccctcagctccgctgctgagactggccgggacccgctggacagcgaggaggaggcaaccggcgcccaggatgaacgtggcctgaagccgccttcccggggccagtttccttccctctcagccagggatgcctcgagcagccacaggggcaggaacgtcctgactgccatcctgctgctgctgcgggagctggatgcagaggggctggaggccgtgcagcagactgtgggcagccggctgcaggccctgcgtggggaagaggtgcaggagcacgccgagtgaccgcaggacctgaacgccgctccagcctccacggggaccccagcgtcttccccagcccccgggagctggagggtggctgccatggccgcagccccggccccacacaaaagcctccccggtttgccacatcggccgagggcaggagtgggtgttaggtactggctaaccggggcggtggagatgcctgtctacaccagtcctgtccccaggactccccttctgtggtctggaggttctaggctggcctgggctcttaaagggaggattttgcaggctgtcctccctaataaaagattttcccaaggttaaaaaaaa

SEQ ID NO: 3055 - DNA, 982 bp, Homo Sapiens
cggctctggctgcccggcggttgagagcatggcctctccagtggcaggtagggcgcctccggagttaccggagcggaactgcgggtaccgcgaagtcgagtactgggatcagcgctaccaaggcgcagccgattctgccccctacgattggttcggggacttctcctccttccgtgccctcctagagccggagctgcggcccgaggaccgtatccttgtgctaggttgcgggaacagtgccctgagctacgagctgttcctcggaggcttccctaatgtgaccagtgtggactactcatcagtcgtggtggctgccatgcaggctcgctatgcccatgtgccgcagctgcgctgggagaccatggatgtgcggaagctggacttccccagtgcttcttttgatgtggtgctcgagaagggcacgctggatgccctgctggctggggaacgagatccctggaccgtgtcctctgaaggtgtccacactgtggaccaggtgttgagtgaggtgagccgcgtgcttgtccctggaggctggtttatctcaatgacttctgctgccccccactttcggaccagacactatgcccaagcctattatggctggtccctgaggcatgctacctatggcagcggtttccacttccatctctacctcatgcacaagggcgggaagctcagtgtggcccagctggctctgggggccaaaatcctctcaccccccaagacctcccacctcaccttgcttccttcaggactcagatcatgaggacttccttagtgccattcagctctgaggccagagcatggtcctccacccttcctgccattctgccctgggctcctcaggtagttggaattcctgacttaggacttggggttgggtccaaggtgcttacatcccaggggcctcatgcctaagatagagggtgggagcgaacccacatgaaccaatacagcccagctccaactagaaaaaaaa

SEQ ID NO: 3056 - DNA, 568 bp, Homo Sapiens
  misc_feature (179)..(179): n is a, c, g, or t
tgctaagtgggatcaagagagcagcactcggagagggtgtttgccagtctgagtgtcccgcggtgcccgccaacccgcttcctgactgacctgagcaaggtcttactaagcagtcccatctctgtgggaggcatgcaacgcgtgcagggagttcaggtgccggtcggcgtagccaggcntggaggccccccaggcagaaggccgcccaaaggcggggccggcgtctcgcagactaggggctgggggcggccacagacggcctcgaaaccacagcccttaccccaatcccacgagccccgccaacgaaccacaggtgctgggctttagagaacatgggaaggcggccccagacctggcgggaacgcctctccctcagagccaggccccggccccgtctgggaagctcatcttgcgaagctgagggagctcagggcaaaggccaggctagcgcggaccggaaggggccgaggctgcacgggcctctgccagaacgctcaagacatcccggcctgggtttacaacgctgttaggaaaattaaccaatgaataaagcaacgttcagtgcgcc

SEQ ID NO: 3057 - DNA, 1131 bp, Homo Sapiens
actctgcacacgtatgtgaagatttcagccggcggcagtcatagcgggacactactctacaccaacatccagcatatcaagtgcccggccagtgcacgtatcgactgtttccagtcaacactcaatgtcatttcgaagctgaacaaaatgagccttccatcatgaacacctggaaagacgagaactatttatatgacaccaactatggtagcacagtagatttgttggacagcaaaactttctgccgggctcagatctccatgacaaccaccagtcaccttcctgttgcagagtcacctgatatgaaaaaggagcaagacccccctgccaagtgccacaccaaaaagcacaacccgagagggactcacttatgggaattcatccgcgacatccccttgaacccagacaagaacccaggattaataaaatgggaagaccgatctgagggcgtcttcaggttcttgaaatcagaggcagtggctcagctatggggtaaaaagaagaacaacagcagcatgacctatgaaaagctcagccgagctatgagatattactacaaaagagaaattctggagcgtgtggatggacgaagactggtatataaatttgggaagaatgcccgaggatggagagaaaatgaaaactgaagctgccaatactttggacacaaaccaaaacacacaccaaataatcagaaacaaagaactcctggacgtaaatatttcaaagactacttttctctgatatttatgtaccatgaggggaacaagaaactacttctaacgggaagaagaaacactacagtcgattaaaaaaattattttgttacttcgaagtatgtcctatatggggaaaaaacgtacacagttttctgtgaaatatgatgctgtatgtggttgtgattttttttcacctctattgtgaattctttttcactgcaagagtaaccaggatttgtagccttgtgcttcttgcctaagagaaaggaaaaacaaaatcagagggcattaaatggttttgtatgtgacatgatttagaaaaaggtgatgcatcctcctcacataagcatccatatggcttcgtcaagggaggtgaacattgttgctgagttaaattccagggtctcagatg

SEQ ID NO: 3058 - DNA, 726 bp, Homo Sapiens
  misc_feature (333)..(333): n is a, c, g, or t
  misc_feature (336)..(336): n is a, c, g, or t
ccgacagcgagtccagcaagccctggatggcctctgagaggagcccacgacactgcagccccaaccagatgcccctttctggattattctggggggctgcagttcgactctgtgctggccagcgaggcgcccagctcctgacactgctggagaggccccagccgcttggcgatgccagcccaagctctgcagtcccagcggtgggacctagggaggcatggtctgccctctgcatcctctggagccagccgagcaggaggcctaggagggtcctctgagactccagacctgaggcgagaagggctgcttccctgaagctcccacagtcccatntgnttcaggcccccgccttggcctgtgttcttcctggccgcctgggtccaatgctcaggtgctggggcctggttcccggagaagtgtgccttctctctcccttttcaggcaccgccccctgtctctaagggccaaggcctctccctcctccaggaagccttcccctaccccttgtcgcccctccctcccagagcacctgctgtctgggtggctcactcagcacttggtgtggccttcccttctacctagcgggatggggctcccccaggggctgtcccggaggcggtgggcctggttaaataaggcagggtttatatgcactttcttccgatctgtacctgagaggttcgtggaaaagatggcaaatagggaataaaaagattttgtgtcaac

SEQ ID NO: 3059 - DNA, 168 bp, Homo Sapiens
tgtaggagatagaacctcagaaaacctcccttcaaaattagaaccaagatgagaatgaagttgaaggatgaagatgttttatataatatctttacttacaaaaattaaaagaccaaagatgtgctgtaattctgaacttcactggatctacaaacatcaatagtggtc

SEQ ID NO: 3060 - DNA, 221 bp, Homo Sapiens
ctgacacaggctgatgcagagaagaaatcagaattctatcagatacatttaacaaaaaggttgaaataataaaaaagaatcaagaagaaattctggaactaaaaaatgcaattgacatactgaagaatgcatcagagtctcttaatatcagaattgatcaaacagaagaaaattagtgggcttgaagacagtctatttgaaaatacacagtaagaggaggc

SEQ ID NO: 3061 - DNA, 576 bp, Homo Sapiens
aggatcccctgtaacaggctgatgcgggtagcagctccgtggagttctgcatgatcagtctgcaggactgcagtgccaccccaccggagacctcggccgtcttgtaattctggtgaactgtgatcttgctaatggattttaactgtatttaattaaatgtgatttttaggaagtgaaattgcagatgatctaagtatcttatattcaaatagagcagcatgttacctaaaagaaggaaactgcagtggctgcattcaagattgtaacaggtaaactgcacgttttcaggtttgtcaagagattgttataatttcattatggtgaatgcaatatccaagatcctaaattttctgcctaaggatctaatttcttaagagctttatggtatgttaattgattgatgcataaaaatcataaattatcttacgtatatgaagagagttatagaagattgtgcaaacttttttcatttccactgctaccgccctaattcgtgctcttttcatatcactcctagactactggagaagcctgataactaattccaatccactgcggcatcagcctgtttgaagg

SEQ ID NO: 3062 - DNA, 581 bp, Homo Sapiens
ttttggcttttaaaaagtaaatttattaccacacataatcagtccagagagtagagagattccatcatgtcatcaagacccatgataaatctttaaacattttgatttttttgaactttacactgtcactctcaacatatgggtctcatactttggctggttcctctgcagtgcctcaaactctgtcccctgagcagaaagccggggctgtatttacccaagtggctctgccctgcacttttcataattgtctcacatttaggacaaagctgcaggtagaaacagggagaaaagagcagttgtatatgtcccttggtttcacagctcctcaaagaaacagagaattaattacatggtagatctacactatactgaatgccaagagggagccatcaccagccctctattattgctgctcccacgtcttgaaccaaagcagcatcctgttctcagacactaacttgggtttggagacctgagtgtttggagacacgatgtctaaataataaagcttggagaatgtgggcatcgatcccactacctcttgcatgctaagcaagcgctctaccacttgagctaat

SEQ ID NO: 3063 - DNA, 679 bp, Homo Sapiens
atgacatataaaaagtcccctcgtccccattaagtataaaatagccaggcattggggggaagaagctccctatggtgttattcaccataaccttagtgtttctcaactggaacttgttcgtgggaacactgatttgtgtttagaggaaactatttggtttgcaaaacaacaagcaaaatttcttacttcactagtatcctattctaatattgctaaatttttagaagtggtggcaacacaatttaaaaaatgttctactttaggggtaatggggaggctcatagaaacctgaaatccccattctagccctggtccaagaggatgcaatgcagtagaaggaattttcctgattctcacaagttaatctgaagttaaggctcaattctcagtctattacgggtgaatgttttgcatcagtgaatcatttcaacagattttgggggggcagaaaatgatgatgggctaaagatagaaactgcagcttacatgggaaatttggctttagaaaagttaaagcttatattgtttcgtggtacaagtttgttaactagctcacctcctatacataataactgactgcaggctgagatacttctgtcgggtttcatcattctcacatcccatttccgctgagccagatgcttgctagcgacaggcaaggtgaaccaagagaaagaga

SEQ ID NO: 3064 - DNA, 877 bp, Homo Sapiens
agctcgtaccgggacactccaagccggcacgaaaagagcctgggactgctcaccaccaagttcgtgtcccttctgcaggaggccaaggacggcgtgcttgacctcaagctggcagctgacaccctagctgtacgccagaagcggcggatttacgacattaccaatgttttggaaggtatcgggctaatcgagaaaaagtccaagaacagcatccagtggaagggtgtggggcctggctgcaatacccgggagattgctgacaaactgattgagctcaaggcagagatcgaggagctgcagcagtgggagcaagaactagaccagcacaaggtgtgggtgcagcagagcatccggaacgtcacagaggacgtgcagaacagctgtttggcctacgtcactcatgaggacatctgcagatgctttgctggagataccctcttggccatccgggccacatcaggcaccagcctggaggtgcacatcccagagggtctcaatgggcagaagaagtaccagattcacctgaagagtgtgagtggtcccattgaggttctgctggtgaacaaggaggcatggagctcaccccctgtgcctgtgcctgtgccaccacctgaagattggctccagagcccatctgctgtttctacacctccacctctgcccaagcctgccctagcccagtcacaggaagcctcacgtccaaatagtcctcagctcactcccactgctgttcctcgcagtgcagaagtccagggaatggctggcacagcagctgagatcacagtgagtgcgcctcggactgatagcaagacagtgtgagctcagttcactccactggcccaacacactgacacccgccactcatcttctcctgctg

SEQ ID NO: 3065 - DNA, 675 bp, Homo Sapiens
ttcagaggatccccttaaaggctgatgctggatctcccaatggggtggttgcgctgggctctgtacctgtgagctgctggtcggctgaggtggcaagctcggggaacatgaaggtcttgcaggcagcccacctgcgtctccgactacatgagcatctctacttgcgagcggaagatgaatggtcccaccaattgcagcaccgagctccgcctgttgtaccagctggtttttctgctctccgaagcccacacgtgtgtccctgagaacaacggaggcgcggggtgcgtgtgccacctgctcatggatgacgtggtcagtgcggataactatacactggacctgtgggctgggcagcagctgctgtggaagggctccttcaagcccagcgagcatgtgaaacccagggccccaggaaacctgacagttcacaccaatgtctccgacacgtctgctgctaacctggagcaacccgtatccccctgacaattacctgtataatcatctcacctatgcagtcaacatttggagtgaaaacgacccggcagataatctataacgtgacctaactagaaacctccctccgaatcgcagccagcaccctgaagttctggattcctacagggcacgggtgaggggcctgggctcagtgctatacaccacctggagtgagtgagc

SEQ ID NO: 3066 - DNA, 983 bp, Homo Sapiens
tggaacaggctgatgcaaacacctccccaagtatgcaagagcccacttcctcgggggcacctccagcctcaacagcacaggctccttgtggccaggctgcatatggccagtttggccaaggagatgtacagaatgggccaagctccactgttcagatgcaaaggctgcctgggtctcagccatttgggtccccattggcccctgtgggcaaccagccacctgtgcttcagccctatggccctcccccgacaagtgcacaggtggctacgcagctgtctggaatgcagatcagcggtgctgtggccccagcccctccttcttcagggctgggctttggcccaccaacatcgctggcttcagcctcaggaagtttccctaactctggtctgtatggctcctatcctcagagccaggctcctccccttagccaggcccaaggtcatcctgggatccagactccccagcgatctgccccatcacaggcctccagcttcacacccccagcttcaggcggtcctcggctgccttcgatgactggtccactcctgcctggacagagttttggagggccctcagtgagccagcccaagcatgtgtcttcacctcctcaagctctgcccctggcacccagatgactgggcccctgggaccactgccacctatgcactccccgcagcagccaggctatcagccccaacaaaatggttccttcggaccagcccggggccctcagtctaattatggagtgccccacccagcagcacccacctttggcagtcagcctgggcctcctcagccactgcctcctaagcgcctggaccctgatgccatcccaagccctattcaggtcattgaagatgacaggaacaaccggggtacagagccatttgttactggagtacggcgccaggtgccacccttagtcactaccaacttcctggtgaatgaccaagggattgcacgtccccgatacatccgatgta

SEQ ID NO: 3067 - DNA, 837 bp, Homo Sapiens
ataaatatttgtgaatgaaagtctgtacattgtatttatgctattggtattgctatgacctgaaactaaaaggagtcgtggaaaagatttcttatggaagagaaatatccctttgattaatatcacaatctcgtaaatagagaaaacaaaaaaatatatactactggagcattcatgtatagttggagattatgactcatttatgggtgtgtttggggactcagaacaaagatgagggaatattccttaaagctctgtattgaaataacgaaaagcagtcacattttaataatagaagcttcctagcttactctttctgtaatcttcttttcctaaatgtaagagagcctcataattatgaggcctattactagagtaaggctgtcaaaggcagcaaaatgtctttctgttaggaagaataacataaacttgacatgtatggtgggggacagaaggtttcaaaagtttaagaatctgtgttgtcttaacaaatagatgcttctcaaggagcttacgctagtggttactctgtccagtcagggtttttttcttctttaacttgggttcatttcctgatggcacacatgaagtttggatcatatggtttgactttagctatggtccttagctatggggagcagcatcagcgacctgtgacatgtaaattaaaaatacaatgccagggcccttccccagcccctctgatagagaacctcttggccatctgtatttttagatgttccaggttagtctgattaacacccttggttaagaaccattgggaggatctgatcgccagtttaaggggaccttcaagcctgtaggtctttatagttt

SEQ ID NO: 3068 - DNA, 495 bp, Homo Sapiens
tggtaaactgacatggtgttgctgggtatgtctcatggagaggtgctttcactgcttccctgttcacctagtcttcaatctggtccagagtttcagccccacctctggagttgagtcctgccttctccctcaatgtgacaaatgttggccaatggtatatcgcagttgtgatgcaagcagaggcttggtaaatgcctgcatactggggtttgtcctcttggaatgctcatttgtgggagccctgaacaactatgtaagaagtctggctaccctgctggagagaacacatggtgggaagagactaaaattatgtgaagagagtcaggccagccatcccagcttctctgctgagccccgccactcagccaacctgccagctgaatgcaaccgtaagagtgatcaccagcaagatcactagaaaaaccacctaactgagcccaccctggattgaacaatcataaacaaataaaatggttattgttttaaatcacaaaa

SEQ ID NO: 3069 - DNA, 456 bp, Homo Sapiens
  misc_feature (238)..(251): n is a, c, g, or t
ctcatggcctgcctggtttttgctcagcctgtcttcagcttgaggagctgggaagctctggtggatgctatgaactcacttgctgaagagcagcgttcaggtgcatccccagccagggcacgtggctccctcagccatgaattcacttctcttcagaaggtttggcttggcatgaaaaactttattcaaaagaatgggaaaatgcttctggaaaacccttccctgaagagagagaacnnnnnnnnnnnnnncggtgatcacaccctcccatccttcctgcctcctgccccaaaccccgggttcctgggtttggaagggccttctttccaagctgggagctcctgggcccccaccattcactttttgtccttgctgctggcaaacagtaaagaaactcactttccctgtggcacgttatgcttcagaattaaaacaatgaagattaaaatttgaaaa

SEQ ID NO: 3070 - DNA, 899 bp, Homo Sapiens
tggtacgctccggatttccgggatatcgtcgaccacgcgtcgccacggcgtcggtgcactcgaatcctggaggaggaaataaagggaaagggaagtcgtggagaggcaggaaaatggttacgcagcccggccctctggagtccccatgggggcggtagctgaagttggcgagcgcagcggtggatgcagagctggctgcacccaggctgggccagtgtgtcctgtaagacttcttgcattccttctgctgcttttttgggatgggggtattttgttcatttgtttttgccctgttttgattttggtcccacagagcaggggatgtagtttgtacccaccatggcgcagacttccaaataaatagtactggtcatttctctctgcactatttctgcgcgctgtcttctgagctttcttcctcaccagtgggctgtgcttgttccatttctgtacacccttattttataccgtttttcttcaacaatggcgaaattgactgtagtgctgaaccaaaagtatccctttccctccttattcctcaccccaagaacattctagatcacatgggtgcttgtgccttccgattttcttgcatttgttacttccctgacctgaagttgttgttacaaaatcagtcagactttgtggggctgacaggacacggtgcaagccagcaggggtgtccctgtgagaagttctgcagagtgctgggccatgtgcctggcaactaccgagtaggagccactctcttggggcccctggcttaattcaattcctctctttcaaagtcaatggtgcccagcaattctctctccacttctatctgttcactttaaactcacacgtacggcacaaggacacaaactcgagacaatcctaggacaaacaaacaaccgcgg

SEQ ID NO: 3071 - DNA, 814 bp, Homo Sapiens
  misc_feature (64)..(64): n is a, c, g, or t
  misc_feature (751)..(760): n is a, c, g, or t
gcggctccactagggggtatgttttctgggcagccacccggtccccctcaggccccgcgggctntccgggccaagcttcgcttcttcaggcagctccaggcgctcctagaccttccagcagtactttggtggacgagttggagtcatctttcgaggcttgctttgcatctctggtgagtcaggactatgtcaatggcaccgatcaggaagaaattcgaaccggtgttgatcagtgtatccagaagtttctggatattgcaagacagacagaatgttttttcttacaaaaaagattgcagttatctgtccagaaaccagagcaagttatcaaagaggatgtgtcagaactaaggaatgaattacagcggaaagatgcactagtccagaagcacttgacaaagctgaggcattggcagcaggtgctggaggacatcaacgtgcagcacaaaaagcccgccgacatccctcagggctccttggcctacctggagcaggcatctgccaacatccctgcacctctgaagccaacgtgagcaaagggcagaggcagttggcctatgagtgggctgatgcgtgaggttggccacacattccttcctgtggacttgacattttggaagaactctttgccagataatgagttcattttagttttatgctcccattgaaaaattttccactatttttataagctgttaatttcttgagtactttataacatgtctgtagcttggataaaccaagtaagtannnnnnnnnngtctttagcgaagtttagactgtgaatatgatgacacagattctttttaaaaaa

SEQ ID NO: 3072 - DNA, 512 bp, Homo Sapiens
tctcgaggagccacattttcctcctttgtgttaggggacataacaagctctgctgggcttgagggacccagaccaggtgtctgcagtcagctcctgagacacagctggccggcacaacaggtgttacatcaggggtttcctgtggccgtttgaactttgagcatttatctaaattaaattggcccagggttggctggtgggtcacccagcagaggcttctccccatagcacgaggatgtgttgcctggggcacggtgactgcggttattcctggaggtcgccaaacatgccaaccttgggctatttgagctggagaagctatgtgatgctagccggtggctttctgggctaggccccagtttgaggctcccctgggaactagagccaggaacagccagtggcactgacaaggggacggagtccaaggcgttattgggccacctgacagctggacagaaaaggggcagacacaccgaggatgcgatttaaaataaatgcagatgtttacttgg

SEQ ID NO: 3073 - DNA, 569 bp, Homo Sapiens
caggagggtcagtatactggatcccaaatcgtagatggtaggagaagctactctctctgtcaccgctgtcacaaagcccagggaggtcagactatccgctccgttgctgagcagcataccccggtgtgtagcagattttcacccccagagcctggcgatacccccactgacgagcccgatgctctgtacgttgcatgccaagggcagccaaagggtgggcacgtgacctctatgcaacccaaggaaccagggcccctgcaatgtgaagccaaaccactagggaaagcaggggtccaacttgagccccagttggaggcccccctaaacgaggagatgccactgctgcccccacctgaggagtcacccctgtccccaccacctgaggaatcacccacgtccccaccacctgaggcatcacgcctgtcaccaccacctgaggaattgcccgcatccccacttcctgaggcattgcacctgtcccggccgctggaggaatcgcccctctctccgccgcctgaggagtctcctctgtctcccccacctgaatcatcacctttttctccactgga

SEQ ID NO: 3074 - DNA, 469 bp, Homo Sapiens
tactgtgaagactggccagaggcacagaggatctcagcctcgctcctggacagccggtcctacgagacgctcgtggatttcgataaccacctggatgacattcggaatgactggacaaacccagagatcaataaagctgtcctacacttgtgctaggcaggcaccgctgtgactgggctccgggcctttccactacgttgaagaagaaaacctatttttaaatgtaaataaaatatctggtagcctgtgtggaaagctgaccgttttaagaagtggcatgtgccttgaaagggggcagaatgttcagtcggtcgtgtttttaacacagagtctctagaagaggtgcagacatcccgtctgactgtccctgtggactctctcagttgtatgttgctataatcctccaaatcaaagctctttctgcttgtgcaagattgttcctattaaacagttttaactaaccttttat

SEQ ID NO: 3075 - DNA, 483 bp, Homo Sapiens
aagtgatgccaggtagaaggcctggctcaagtgtcctggtccaggagctctgaaagaggtcccctccttgcaggagcgtgcagcttcccaagcacgggcacgttcacctcacagtcatatctggtcagttcgggcagcaggtaggactcaaatgagggcccgagcagccggcttgccatgcctgacaccttgtgggcagacgacaggctgtagtcctggtactgggtggcgtagcacagtggcgggaacctgctcttgctgttctccccggaactgatggcagatggaggctgtggcaccggcagatgtctcaggggatggcccaggcccctcatggggtatcgggtgaacttatcattgggtacatttgcgctcagtggcttgtccggcatcaaagggcagctcccacgcctgaggttcttcatccgtttccacatcaaatgtgaggtgctgccaccaagttgggtctcccgcatacgcaag

SEQ ID NO: 3076 - DNA, 506 bp, Homo Sapiens
gcggccgccatgacctggagcgccacggcccggggcgcccaccagcccgacaacaccgccttcactcagcagcgcctccccgcctggcagccgctgctgtcggccagcatcgcgcatgccgctcttcttctgcgcgggcctggccttcatcggcctgggcctgggcatctactactcctccaacggcatcaaggagctggagtacgactatacaggcgacccgggcaccggcaactgctcggtgtgcgccgcggctggccagggccgggcgctgccgcccccctgctcgtgcgcctggtacttctcgctgcccgagctcttcccaggcccagtgtacctctactacgagctgaccaacttctaccagaacaaccggcgctacggcgtgtcccgcgacgacgcgcagctgagcggactccccagcgcgctgcgccaccctgtcaacgagtgcgccccctaccagcgcagcgcggccggcctgcccatcgcgccctgcggcgccatcg

SEQ ID NO: 3077 - DNA, 1567 bp, Homo Sapiens
  misc_feature (1441)..(1441): n is a, c, g, or t
  misc_feature (1488)..(1488): n is a, c, g, or t
ggggccgccccgacgcttccgcccggtccgtcggcacgtcggccctgcctcccggaccaccctgcggggcgcaccagcgatctggggtgcggggctcggcctccctgcgctcctggctgacggtgtgaccttgggtcttaaccatgaacttctctggaggagggaggcaggaagcagcagggtccaggggtagaagggctcccagaccccgagaacaggaccgagacgtgcagctgtccaaggctctgtcctatgccctgcgccatggggccttgaagctggggcttcccatgggagctgatggcttcgtgcccctgggcaccctcctgcagttgccccagttccgcggcttctctgctgaagatgtgcagcgcgtggtggacaccaataggaagcagcggttcgccctgcagctgggggatcccagcactggccttctcatccgggccaaccagggccattccctgcaggtacctaagttggagctgatgcccctggagacaccgcaggccctgcccccgatgctagtccatggtacattctggaagcactggccatccatcctactcaaaggcctgtcctgccagggaaggacgcacattcacctggccccaggactgcctggagaccccggtatcatcagtggcatgcggtcccattgtgaaatagctgtgttcatcgatggacccctggctctggcagcagatggaatacccttcttccgctctgccaatggggtgattctgactccagggaatactgatggcttcctccttcccaagtacttcaaggaggccctgcagctacgccctacccgaaagcccctttccttggctggtgatgaagagacagagtgtcagagtagccccaagcacagctccagagaaaggaggaggatccaacaataaaatattaatttataaaaaagaaattttaaaaagtaacaagaaagaactcgtttgaaaccatgtttcatcatcctgtagctacatctggtcttccttgtgtgctgggggactgcagataggtcaggggtatcagcctcagccactcagacaaggaaagggggcaccacatgagctcagggacccccacccccatccctggcctgggtgatggtacagcgtctggccctgccaggtccttggcctgcacaaagtcagtgacagcaggtgaaatgcccagctgggtgcctgcctggagcgggtgtggggcagtgagcccctgtgggtgtgggcttgggagtggctgtgacagggtggtgagcagggcaggggcaatcagacagccctcagaaggcctcatggccccccgtgagctgcaggaagaggtcttcatccagctcctccccacgggcccgctcccgcgtcgacaggaaaatgtagcccccgatatactcgtgtacaattcggcagctggcagacacgcagctgaaggccancatgatgtgttcatcaaactcgatggccacctgcccgatgtcccagntgacattccactggcgcatgttgctgaaacgccaggtcttgaccacgtcggccacggccaagtcgatgcggatcagtcg

SEQ ID NO: 3078 - DNA, 577 bp, Homo Sapiens
cagttgaaggcctcgcttagttgtactggattctcagggagccctctgtggccttttgctttgcgtgctgtttcccttgtaccagagggcggcaccgtggaaattctgttttccctgtagcatattgtgttggattgcattactggcagagaaaggacaaggtgccattcaagtcctagggtgggcttccagctgccttaatagaagtactcaagtcttttgggtagtgagctggaaagcctacaggaaaagaggggtacctgttttcatttgaaaactttgattcatggaacctttaaaactaatctcagaaaaatttttggtgcccatgcagctgtagttgttcactgctttcctggatggatgggactcttatgtcataacttctgttactcctttggcccatagctaaggtcatccttccccacaggggtggctttgggattggatgatacagcttttgcttctgtgtagtatacctgtacatacttgtttcaggcagcctttctttaatgttttcagttggtttgtattctgtagctcagtagctgctaataaagttaaagatcctgaaaaa

SEQ ID NO: 3079 - DNA, 797 bp, Homo Sapiens
  misc_feature (554)..(585): n is a, c, g, or t
ggtggaacaccagccatggtcagtcaccgggtcttcttggaaacacatcaggcccagttcccctttcttgtgggtccgggagcccaaacaatagtgttgaaaacttttctggggccgcagcgggccgacaagagttaagtcttcaggtgaggagatttgattgcactcagcctttccagttgtccatttccagctactcttttccagagactttgatatgtttatattatagatataatacataaaacatctagagtgagactctacgttctccccaaaagaagagaaccaagccgtccttccctgctcccagccccagtgatgcgttggcgggaggccacctcccttcccgaccaggagccagggcctctgggggacaagccttgtgggcagcccaggccggatgggctggggaaagctgagggcaaaggagaacccccctcacctcattggtcccccaggatcaaaagtaatcccaaaaccaaaaggaaagggagtctcagacccttcccccagctgccgacggacagtctcattttggcaagtatccgagnnnnnnnnnnnnnnnnnnnnnnnnnnnnnnnntggtggattagcagagacgcgcacattcacattgcacaaggcactgctggagcaccagaggccagatacaagtgttgatatcggctgataaagcaaaatatttggaaagcttgtcatacctccggtccctctggaatggactgatcgtgcttcgtgtacctaggcaatgctgaaggcatacagtacaaacaaggctgagggtcccagtggcc

SEQ ID NO: 3080 - DNA, 707 bp, Homo Sapiens
agcgcgacggggagagaggacagacccccatggtgcccgggacggccggtaggtgtccacctctggactgcaggaaggagccgctggaatcctgtagcagatgcccatataccatggtgtcctcgatgactgcatacacatgggagtcattgtcctttcgccctttctgaaacttttttggctgcctcggcatctcagtattgatgttgccattgtagatacccacagcggggccctgatttgtcttctttttcttctttttcacacagcaaatgatgagcccgagggcagacagcagtaagactccacctcccaccgctgcgatgaggatgacagtcaagtccacagtccttggggtaagtgtcaccgagaagagcaggtctagctgcttgccgctcgtggggctgcagttagagatgttgacccagaagctgtgatggtggaagcttggcttggggagcacaatcctcgtccaggctgaagatctcctcagcccgggtccgctgctcctggatgatcatgaatgcgcgccctgtctggcagaccacgccgctccgctcctttaaagaaagtcaggcagccacctgtctctggcacgctgatgttccaggacacagagtgagggatggcaggccccgtcccagttgggggtcctcaggtagaccttgctttttgtgtcagggtcaccgtgcacaatgcacgtgatc

SEQ ID NO: 3081 - DNA, 1805 bp, Homo Sapiens
tttttaagaaaatcacgctttaatgtctggtcctcgatcaccttagcacagcgcttctctgaggagaaatgccagctctgccgcatggctgcaggcaatggtccggggggaagcctgcagcccagtgcctgctacaagctctagtgactgcagccaggcggcctcccctgccgcataaagtgcttgaacagagccgccgtgcctcagaggactgggcctgtcctggagagagctggagacaggatggcttctgagcatagccagctccagccctgaaagccacagctgtgccactgcgtcgggccagcgctccgcccgacatacaccaggttgcgggaaaagcagagttgacccagccaagaacagactgctgacctcctgggccgaggtgggcaaacagatcctgcacacgaacacacagtgagctgctgtggggaaccctgagatgcttgtggagtggagactcaatcagattccagaaactttctctggggtgatgctggtggccatttctccctcctccgtcctctctgttgctttgatggggctgtgagagagcccaggtgtggggtaggcctcactggtccagctcactagcaagaccctgctcgtaaacttcgcacatattatatatttcttcgtcccgatagtagagtcttctcttcatgcagtagaggactatgatgtcacacagcacggtcgccatgcctagcagtgccaggccagagccgatgttgatcatagtggggatgatgtcaaatttccctgccttcccgaacacaatgatgtcgaagcggatgccataggccttgatgagcgtgcgctgctcgttgccagccaggtctctgtagtacttggcaaacctgaaattgtagccaggagatacgttgtgctcaacgtcccgtgtatcgaggcggcggaaggagtacctgggcaagcagagggaggcggctctgtccaggttgcagtcccagttgacctggatgcccatgatgcctccctccacggccatgtcctggaaactgtgtcctgcgttctccactattttgccaagacggaatatggggcagaagggatctgttttagcatcataaatgcacgacttgaggtaagtagtggtgatgttgggaaggatattcctcttgctgaaattaaatttgggataccagatgttgttcttaaccaaaagagtgaagttttctgcagcctttaaaaaagcaggttgtggcacgtgtgtgtcatcctccaccgggcaccaggccgccacctcacacgtcttgacagacccgttgaaagctacgcacctgcctgttgagactccgttgctgtgggtgccggcagagccggcagtacagctggcatctgatttacacacagtggtcgcatctggaatctcggggcacaggccctgtgtctggttcatggtgaggatcacgttggtcatgacgaagagggagttttcctcctgagctggtatcacataatccgccacatcccagatccggaatccaagtttagaagtgttggtcacagccacgcccttgaccttggtcgtaacggagctgaccacggagtcagtttcctggtagcccttttcccacacaaacacccacccgatgacgtaggccaggatgagcagttgcacggcgcggttcatgagccccactttgcggctgcggatgagcacgatgcgcggcgtgtcgtactcgaacaggaaggccgccagcgcggcgcagcagcccgccatgccgcgccgcccgctcccagtccccatccatacactccggaccgtacagcctgcttta

SEQ ID NO: 3082 - DNA, 484 bp, Homo Sapiens
cctcaggacatttccgccaggatggggagcggctgaaagacttggcgctgtctcgtccaaccgcctgatctgtgcctaaggagataaggttgctgaattccttctccagaagctgccgggcctgtgcattctgcgtggggatctgcaggagcaaggccaggtcggagtagtcgaaggtctcgctccagggcgagcagtgccccgtgctaccccgctctccgtgaggcttcgtggcaaacttccttcacgcccagcccggacacccaacccatgacccgctcattggaccacaccatcacgtctcggatctgggtctgactttcttcccgcctccgctccaggtccttccggtcatagttgagccgtgtcaggcacataatcccataatgtagactcaccctgtgaaagctgtccaccatcttgagttggccccggagctccttcttgtaaaggtgatctaacattcgagcgtccaccagcgact

SEQ ID NO: 3083 - DNA, 691 bp, Homo Sapiens
tgatttggatgaaagtagaaaagatgtcttccaactccaacttctcagaagtcaccctttcgggtttagccagtgaagaaaacttcagcaacgtcagcctgcggagcgtcaacctgacggaacagaactctaacaacagcgccgtgccctacaagaggctgatgctgttgcagattaaaggaagaagacatgtgcagaccaggccggtggaacctcgagcttcggcgctcaacagtggggactgcttcctccgtgcgtctctccccactgctgcttcctgtgggtaggagagtttgcaaacgtcatagaaaaggcgaaggcctcagaacttgcaactttaaatcagacaaagagggaacttggttgtagagctacttatatccaaaccattgaagaaggaattaatacacacaactcatgcaggccaaagacttctggaagcttctgggtggccaaaccagttacccaatctgctggagacccaaaagaagatgaactctatgaagcagccataatagaaactaactgcatttaccgtctcatggatgacaaacttgttcctgatgacgactactgggggaaaattccgaagtgctcccttctgcaacccaaagaggtactggtgtatgattttggtagtgaagtttacgtatggcatgggaaagaagtcacattagcacaacgaaaaata

SEQ ID NO: 3084 - DNA, 637 bp, Homo Sapiens
tctaccaagccaagatagtgtaaagatcgatggggcagactcaggagtagtgagctccctgtttctagtggtgtgcaagcccagaggggagcctatggcagagacactgaaaggggaccccacgagtctggaggaggcgatcccagacaccaggataggctcacctgtgcccaggcgtcggaactggaatccctggggagaggtgacgtaggaggccacagagccgctggagatgacccggagcagcatctcctgaatctgagcaccatccgcattcccttccgagcccacatcgagctccacaaaaacccagccatccagctccttgatgaacaccacactgacaacctggtctccgggaattttcaagtactccgactccagcgtgtctaccacagcctcggacacctctcgaaactctctggagcctgcatcctccagctgagggctgtactcgatggagcgagtgaaattcaccagggctcggaaataaaccatctggaagtccccgctgcccaggtccccactgcccaggtcgtctcctgagatgctgtcagccagcatgtcctcatcatcagaaaggtacgaatgtgtccagcgcatttggcttgctgtgacggcctctatgtctcaggga

SEQ ID NO: 3085 - DNA, 459 bp, Homo Sapiens
ccaccgctccccctcttaagaggcagggggcaagacatggccagctggtgccttgaactgacacaggtgcagaggctgtagggggtggggagccaagaataattacaggtttctgaagcatcaggccctgcctgacacaagcgctcgtcaagaaaactgctctttatggaaaattaatgggaagctgaaaaagcgacagggccattgttgttcttaggaagccatcactcctctgaaaagaggcctcctcccacgtccttgggctcttgacgaactgcttagagtcctctccttttggagcagggaccgactggttgccattgtcatgggatgtgatgggtttttcccattggagtgtctctcctgcattttctcattcttaaatctcactttcagtgcagatccagccctttgcactcccagggagtttgaggagggagcggtgactatctatgtggt

SEQ ID NO: 3086 - DNA, 649 bp, Homo Sapiens
tgaatatcccccatgacatttcactgtatgtatcaacaccggtggcgacggcaccaactcaagcacgcccgtcactcaccctgccactgggcactcgggcttctccggcctttgctaatgctggccggccgctactacaggtggtttatgcagtccccagaacatgttactcagcacgttcgtctggggtgcaggtgactaaacacacaacaggtttctggtctcagccaggaccaacttctgaggctggggctataatggccatgatgcatgggcccagagaggagggggagcacatgtttcctcccagtcccagggcatctgctgtggggctggcccaggcctgggggcaggaagaaccatcgggagaggggacagaaagcaaagaggaggggacagggctctctaatactcaccactatggccccaattcttaataatgatgggaagtagaagccatgctccctgaggcctgcgtgcagtcacccacctcgggcgagggctttcccagtaccagctactatgcaaagcagctgtggtagaaaggggttccaatcccggttcagctgctcaaggttcattaagaaagcaggacctgctaaacaacgagtggaaccgcctgcctcacaggttgctacccataacagcg

SEQ ID NO: 3087 - DNA, 719 bp, Homo Sapiens
gctcggtacccttgcatatggcaaggccaaggaaacatgcctaaattggtttttcaagattgcctccatcagggaactcattccaagattttacgtggaggcatccatcctgaaatgtaacaaattcctctccaaaacgggaatttcagagtgcctgccccggttgacatgcatgatcagagggatcggagacccactagtgtcggtgtatgcccgtgcctacctgtgccgggtgggaatggaagtggccccacatctcaaagaaaccctaaataagaacttttttgacttcctccttacgttcaaacagattcatggggatacggtccagaaccagctggtggtccaaggagtggagctcccatcttacctccccttgtacccgcctgccatggactggatcttccagtgcatctcctaccatgcccccgaggctctgctgaccgagatgatggaaaggtgtaagaaactaggaaacaatgccttgctgttgaattctgtgatgtctgccttccgggctgagttcatcgccacaaggtctatggatttcattggcatgattaaagagtgtgatgaatctggtttccccaagcatcttctttttcgatcactgggattaaacttggccttgccatatgcaagcaggccaaggtcagaagatgaaccacgtgcgaaatagaaaaagctacctatggagtgtgcccgagatcctctagagt

SEQ ID NO: 3088 - DNA, 607 bp, Homo Sapiens
ggacctgatttcccacaatcaccaggctcataaacgggatccaggattccaacacagccagcagcttcaaagattgggctcaaacatggtgctacaactggcccctgaacccatgtccttccctgtgctttattttggggagatgaggactttcagctatcttattgccatctcgttttcagccttgaaggagcccttagaaataaagtgaaaagaaaacctggcctgaaacaactgccaaatcccaattagggaacaaggttgggaggagagaggagggggcaggatctgaccaggttgtaattcagtaactgatgtctctaattgatcactgagaggaagaagcaggaatggccttctcagtcagcattcatggtggcaggagaatccaggatctgttccttgaccttcttgttctggaaatgagacttcagccctgttcatcctttggctcccacactacctactggactctccttgccacctgttgctgctgattgctcacccccatttctaagacactgacaggaaggaagggtgtctcccagctggcagcataggtttcattttagcatccgaaaagctgagcatcagcctggggatcctt

SEQ ID NO: 3089 - DNA, 299 bp, Homo Sapiens
cagctgatgccttagtctctagcctgaagaaggaatgaggtgcttatttattcactaaatgtatttactgaatacctattgagtagtactccaagctaattcagttgctatacttataataccactcttccctaagatttcattctgtaaaattccaagtacacagcaaagttgacagaattgtacggtgaacacctttaaggccaccacctggattcagtcattgacactgtattatatgaactttatcagatacttattttgagacaggatctagctcttattgcccaggctggagt

SEQ ID NO: 3090 - DNA, 142 bp, Homo Sapiens
tggaatgcgtttggctctggctgatgctggtgacactgtagaagatgccaactttgtggaagccatggcagatgcaggtattctccgtctgtacacctgggtagagtgggtgaaagaaatggttgccaactgggacagccta

SEQ ID NO: 3091 - DNA, 540 bp, Homo Sapiens
  misc_feature (43)..(57): n is a, c, g, or t
  misc_feature (90)..(143): n is a, c, g, or t
  misc_feature (388)..(402): n is a, c, g, or t
  misc_feature (438)..(476): n is a, c, g, or t
ggaggaaaacaccgtctccgagacaagggctggaggaaacacnnnnnnnnnnnnnnncagacacgaaaatattcatgaattaaaaagctnnnnnnnnnnnnnnnnnnnnnnnnnnnnnnnnnnnnnnnnnnnnnnnnnnnnnntcctcaaaggatttaaactgcagcaaaaactaggccaataacgcaagcctgcaccgttatcaacagctgaccctgaagactacagaatggcgaagcgggtgggcattatggagcctctcaggacagacacgaagaggttgccaaacacccggaatcagctgggtgaagacggaattgcaacaataggatggccaggtcaaaccccctggagtaaaaggggaataaaaggtcccaattaggaattnnnnnnnnnnnnnnngactctccctgaccccggcccctccccagccccacnnnnnnnnnnnnnnnnnnnnnnnnnnnnnnnnnnnnnnnggtagctctgggcaattcactttatcttccctccccccatgaaaaggaagatgctaacagacac

SEQ ID NO: 3092 - DNA, 446 bp, Homo Sapiens
gaggtcagctgtcctcttgtcatcttccccaccctgtccccagcccctaaacaagatacttcttggttaaggccctccggaagggaaaggttacggggcatgtgcctcatcacaccatccatcctgtaggcacaaggcctggctgggtgcgaagctcaggggcccgcttgaggactgcacaccgggcccacacctttcctgcccctccctcctgagtcctgggggtgggaggatttgagggagctcactgcctacctggcctggggctgtctgcccacacagcatgtgcgctctccctgagtgcctgtgtagctggggatggggattcctaggggcagatgaaggacaagccccactggagtggggttctttgagtgggggaggcagggacgagggaaggaaagcaactcctgactctccaataaaaacctgtccaacctgtggca

SEQ ID NO: 3093 - DNA, 410 bp, Homo Sapiens
cgtccgggaggaccgtgtgaccctcgcagaccggggacccaaggagaggcctcggagagaggggaagccgcggaaggagaagccgcggaaggaggagagacctaagaaagagaggccgcggaaagaggagaggccacgggccgccagggagccccgggaagccctaccccagcgctgggagtcacgcgaagggggccaccggccgtgggcacgggactccagggacgccgagcccaggaagaagcaggcctgggtgtccccgaggcgtcccgacgaggagcagcggcctgggagtcgccagaacctccgcgcaggcaaggggcgggactgacccggccccgcgccggagtccaggggccccttctggacgccccgcgactctggcgaaataaagcgagtgctgcggccaa

SEQ ID NO: 3094 - DNA, 191 bp, Homo Sapiens
catattcagccagtgtttattaagagcctactacacgccagacactttacatgctgatcacatttactcctcacaacaatcttgaaagggagacatcatcagtgccatttgaacaaatgaaaaaatgaggctcagagagattcaataccttatccaaagcacaccagacaataagtgcaaaaacaaggatt

SEQ ID NO: 3095 - DNA, 330 bp, Homo Sapiens
aggatcctgcatatggaggccgtgatgtgagcctgtggcagccgacccccctccaagccccggcccgtcccgtccccggggatcctagaggcaaagcccaggaagcgtgggcgttgctggtctgtccaaggaggtgagggcgccgagccctgaggccaggcaggcccaggagcaatactccgagccctggggtggctccgggccggccgctggcatcaggggccgtccagcaagccctcattcaccttttgggccacagccctgccgcggaacggcggatccccccgggcatggcctgggctggttttgaatgaaacgacctgaactgtc

SEQ ID NO: 3096 - DNA, 785 bp, Homo Sapiens
ctgtagcttcaagttctaagaaagatgaagaagaacaaatactagcccaaaattgttgagctgctgaaatattcaggagatcagttggaaagaaagcaagaaagataaggctttgatgggccacttccaggatgggctgtcctactctgttttcaagaccatcacagaccaggtcctaatgggtgtggaccccaggggagaatcagaggtcaaagctcagggctttaaggctgcccttgtaatagacgtcacggccaagctcacagctattgacaaccacccgatgaacagggtcctgggctttggcaccaagtacctgaaagagaacttctcgccatggatccagcagcacggtggatgggaaaaaatacttgggatatcacatgaagaagtagactgaaatatcagatttgtcatcaggaatactctttgtctactgtggtcctgtgcacgttggcctcagatggactacaggagattacaacgtacaaggcagatggagcattgacgttttcaaaaccattattcctgtgactggagaggcatcaggagaggtctcgttcgtctccagctcataaaatgtagcagcatcatccttgacagtgatgtttttcaggccctccattgagaacctgaggaaatctgtaaagataagtggtgatgttgtttcaaacgttcagaacagataccatcatcctgcctttgttagctgctgtagggaaagtgcgttacagatgtctgctgacctcacaagagtgaaaagataaactgtgcatgtgtttccc

SEQ ID NO: 3097 - DNA, 482 bp, Homo Sapiens
  misc_feature (460)..(460): n is a, c, g, or t
gcggccgccgcttcacctacccctcactgctggtcagccacaggcgcatgcactcgggggagcggcctttcccctgccccgagtgtggcatgcgcttcaagaggaagttcgcagtggaagcgcaccagtggatccaccgctcctgctccggggggcggcggggccggaggcctgggatccgggctgtgcctcgggcccccgtccgaggtgaccgggacccgcctgtgctcttccggcactacccagacatcttcgaggagtgcggctgagcggcaccgcaggctggagttgagcctgaccttggcacgaaggactgacggatccctgaggtgggccactgagtcggggactccggaactgaaattcatgccctgggctttcctcaaggatccctcaagtttccaacttgtaaaaagaaaagtgcctgtaaacattcgatagattagacttgcacccattnccagtcttttgtccctcgtgcc

SEQ ID NO: 3098 - DNA, 457 bp, Homo Sapiens
  misc_feature (179)..(223): n is a, c, g, or t
tggtgaacggactaatgcactgtggaagtgacgtgtgacctgcatgtccggcatgcgttgaatgagcagaatgtgttgaatgcgttgaatgtgctgagtgcgttgagtgagctgaatgggaagctttcaaaggtggtaatccagcactgataagcatagcatttgttgaagctcgcaannnnnnnnnnnnnnnnnnnnnnnnnnnnnnnnnnnnnnnnnnnnnatcacgttctcggtctcgatctttagaccgatcttcacgatcccggtctcgaaaacgatccttcccatcggtccccgcacgcttcttgccagagggggaatcctcccctaggtccaaccggtgccgcttggacatcctcgcactcttcgaacgggcagttattaaggaagaaagctggctgctgtatgggcacagtcgaggacagccacttaactctggaggacccccacgcaa

SEQ ID NO: 3099 - DNA, 597 bp, Homo Sapiens
gtgtggcaggtcattaggattaggcagaatctctcagagctgctggacaaggaggtctacttattttgtgtggatggtaattatggcatgcacgctgaatgcagttctgagcatggcagcggcccctgagggtcagatcagaattgcccacaatgtgttttttaactaggaccaggtgcagcatgctagtcttgattggaaagatttgacaggatgctaattactgaacagtgggttttgtcaacgccctggtttcagaatatgaactgaggagtcaaacagttggaaacagcacattgctgatttacactggatcttgccttagaaaccattgtctgcctgcctaaccagcctttcataaaatttaaacaaaactctttctacgtagtgatcctcaagcaatatttttgatacagcaagtgtcaaacttgctatagcataaaagccggggctcctgatttccaggtttctaaaaaggaactgaggtaaaacagatgcctgaccgttttaaaggatcttttttaatgttttatgactgcctgtctgtttgaatactggcaaagggataaataataaattgacatcaaaaagtactaa

SEQ ID NO: 3100 - DNA, 653 bp, Homo Sapiens
atatcataatgagtggtgattactctcatctcactacatgtgcctgagttactgcgtgaacgtttaagctggaatgctgacagtatacattttaattttcacagcgtgttttaaattagttgtaggatggttggtttaaaagctaacaaaaacaagcagtgtgtggcagcctgttgccctggtcatgggcccatttccagtgtggctgactggcctgtggaacaaatcttagcaactgggaaggctgctcacactagaggtgtcgttctcctaggtgtactttcggctccatgcttccatcctgaagctcctggggaagcccgattctggggttggtgcagaggtcctggtcaactttatgaaggaggctgcagaaggaccctttgccaggggcgaggagaagaacacacccgaagcttcagaaaaggagaaggcctgcctggtggacgaggactcccactcttcagctgggacactgccgggccccggagcctccctcccctcctcctctggcccagaccgaagccaggacagcacagccgtagcactctcagactctagctcaacgcaggacttctttaatgagcccaccagcttactggaaggctccagaaatcctacacagagaatagctgccgatctcagtcccaagc

SEQ ID NO: 3101 - DNA, 347 bp, Homo Sapiens
ttcctccttttcagaactactctgtgctaattgttctgccagtatgggcgcatcagctccatcctgacaaacaagacatttaggtaaaactttgtaggcaccttctgcttctctgcttcattgttcctgtgatagtcctgttgttattacagcatgtacccaaaacagcctcacattgttacaggaggcaggccaggacatcaaagtcatcatctttatgtggcatgactcttaagaggccattactgtatctcatggcctcttgatgtggaaagaagttgacagagggttgcagggtttaaaaacatccattaacatgaaagctaataaacctgtcagagaacaag

SEQ ID NO: 3102 - DNA, 791 bp, Homo Sapiens
aaaaaatcggctaggtacgaggctcccgtgtttaatcagcacgaggacacgcccagcactcaacccttgctgagtacacccgggacaccccccatctcctaccagtctgacattcccagcagcctcctgactaacagagaagtctacctgcctgcctacccaagccagatggcaccagcaggtcacctggaccccactcacaatcctgggacaccagtgactacacacctccaaccttggaggcccctccaggtccccagctgcaccattcaaaccctcccccagcgtcccggcagtccttgggccaagcgagcttaggacgctacgggtgaactggccttcagtcctgccacaggcgtgatggggccccaccagcatgtctggagccggggaggccccagaaccagctctggacctgctcccggaactgaccaaccctgatgagctactgtcctacttgggcccacccgacctccctacgaacaacaatgacgacctgctttctctgtttgagaacaactgatcctgtgtttaccccaagcccggcggggacacgctcacagatgtcaccacagccctgcccttcatgcccagccccatgggacacccggtggtcttccccaaacctcccccaaaacacacctggagccagagccttctgccgccagccctgcccctgaattggaagcagccctgtgctcgatgggaggggctcccaggccggcagcccttgccacctccctctgccaagcctgctgctgcagaacggtttttgctgaggtgcccctgcc

SEQ ID NO: 3103 - DNA, 307 bp, Homo Sapiens
cttcaatttaattgaagttacttagaaaaataatcaggcttgaatggcttttcctggaggaaggttcatgaacattttcacgcttttgttggcaatgtggaattcagctttctttaacagtacagcaagatacagggagcgttttctacaacaggctctctactgcatacaaatatgtgaaaaaagaaaatcacactccacaaagatgtgacattacatgtccatatgccatactgagcatgctcataagaaagtagtatgggcagctccttctggacctaacaaagtgtagcagactgaaatttgc

SEQ ID NO: 3104 - DNA, 814 bp, Homo Sapiens
  misc_feature (25)..(25): n is a, c, g, or t
  misc_feature (259)..(259): n is a, c, g, or t
cctgttttatgcagagatgaaatgnagaaatggtcagcctctgcaagctagcttatttgaagaggcacggaaaaaatatggcaaagacttcaaggacatacggcaagattgtcttccttggaaatcattgactagcatcattgaatattattacatgtggaaaactactgacagatatgtgcaacagaaacgtctaaaagcagcagaagctgagagtaaactgaacaagtatatatcccaacctcagcaaaacaaatanccaaccaaatatccactagtaatgggaagcctggtgctgtgaatggagctgtggggaccacgttccagcctcagaatcctctcttagggagagcctgtgagagctgctatgctacacagtctcaccagtggtattcttggggcccacctaatatgcagtgtagattatgtgcaatttgttggctttattggaaaaaatatggaggcttgaaaatgcccacccagtcagaagaagagaagttatctcctagcccaactacagaggaccctcgtgttagaagtcacgtgtcccgccaggccatgcagggaatgccagtccgaaacactgggagtccaaagtctgcagtgaagacccgccaagctttcttccttcatactacatatttcacaaaatttgctcgtcaggtctgcaaaaataccctccggctgcggcaggcagcaagacggccgtttgttgctattaattatgctgccattagggcagaatgtaagatgcttttaaattcttaaccttatatgttgtgcttctgaccattttctcttttcctctctttcc

SEQ ID NO: 3105 - DNA, 808 bp, Homo Sapiens
aagccagcctggtgcgatcccctggcttttctgaagggcctggatttttagggggtgaggggccaatgggtggcccccaggatccccacaccttcaaccaccagaacttgacccactgttcccgccatggctcagggcctaacatcatcctcacaggggactcctctccaggtttctctaaggagattgcagcagccctggccggagtgcctggctttgaggtgtcagcagctggattggagctagggcttgggctagaagatgagctgcgcatggagccactgggcctggaagggctaaacatgctgagtgacccctgtgccctgctgcctgatcctgctgtggaggagtcattccgcagtgaccggctccaatgagggcacctcatcaccatcccccttctgggccccatcccccaccaccattcctttcctcccttccccctggcaggtagagactctactctctgtccccagatcctctttctagcatgaatgaaggatgccaagaatgagaaaaagcaaggggtttgtccaggtggcccctgaattctgcgcaagggatgggcctgggggaactcaagggagggcctaaagcacttgtaactttgaaccgtctgtctggaggtcagagcctgttggaaagcaggggtagaggggagccctggaagcagggcttttccggatgcctaggggtgggcagtgccagcccctcctcaccactcttccccttgcagtggaggagagagccagagtggatactattttttattaaatatattattatatgttaataaaaaaatcatatc

SEQ ID NO: 3106 - DNA, 610 bp, Homo Sapiens
atgaggagtgagattatattggggtaagtgctatataccatggagacagcaactaagtcacgaaagattctgacctcatgatccaaacacttcccaccaagctccatcttcagcactggggatctggtttcaacatgagatttgggcgggacatccaaactatatcagctgtctccctcatccaagaccatgtgatccgtagctcacttttgtctagcaacagattaaatacagcattttctgtgtgatatctttgttgaggtctttgcagatggctgtttctctgtcctgaaactttcttcatctgctctttcaaaatgagtgactcttcatcctcgaagtctatgcttatatattgcttttcagaggaatcttttctgaactcggcattctgccttcaaccaactattttctattatagtttcctgtttgtgagttaatagtccttttgaaaatttgactactcatttaccttcttgggttatttgaaattatctcctcttcactagattctatagaagcatagccatgcctgccctctttactgtttctctactgacttgttgcaatgaatattgtcagtaaacatggaaataaatcagttattcag

SEQ ID NO: 3107 - DNA, 616 bp, Homo Sapiens
  misc_feature (15)..(15): n is a, c, g, or t
  misc_feature (36)..(36): n is a, c, g, or t
  misc_feature (73)..(73): n is a, c, g, or t
tgagagtcaattctntgcagaccatggcagccagcnccacatctaagcattctggatctgctgccatcttganaattagttcctcgtgtgaaaagacacagtggcgccttaggcgtcggtaatgatttacacattgacgtccaatgggcaaccagtcagcagtacagaagttcacagcttcagcaaagttgtagccctggttaaatccagagtgataggcacgaggaaatgtcacaacaaactcgccagcacactgattggtcctgtacacaggcacaccatgctccattagcacgttggggttcatgatggtaactaactgatgcagaagatcaggctgggattcaaataactcgggggccagctctctcatcacctcctccagttgctctgcagcatgagatggcacaccataccatgtctttggctccccccagtgcaagtagttgatggaataactccagtgatcctcaatgtgccagcaaaaagaagagaagcacattcccacatagagccacggcactttcataccagagatgtccacattaatatgtgcaagaacagactgttccaggacaggcatgttattcaaattccaaccagaaagtgcatattc

SEQ ID NO: 3108 - DNA, 567 bp, Homo Sapiens
ctttgctggcttgatgatctcccggaatatgtgaatcgcaccgtttctcccttgcttactccctttctccatgcatgaattttcaatgcagacagctgtacgatatacgaagactctgagctgtttgcctccgatggtttccagtatttgcccgttgtaaagctcattaaggccaacttttactttcaatatgtgattctgcagaattaatttaaggaggcgctgatccatgctgagagtatcatcagaaaatcaattattcacaggtgccagcaaagtgtattctccatctggcctcagagcagatgccaagcctaattgggccaccagatccgtgaaggtggtttgctgttttccagccagctcaataacttgtttggcagaatcaggaattaggacctgatcaatcaaatggatcacaccattagttggtcacaatatcctttgttgttcaccattttgattccatttactgttatactgtcaccgtcacatcctatctcaattgtatttccttccagcgtctcaagactgctactcccataatagactcagacacctcaaacg

SEQ ID NO: 3109 - DNA, 760 bp, Homo Sapiens
cgttatattaacaaagtaactagtctgacatgaaaaatgtggtgcctatgatataagtcctgattagagcacatcttaattggtgcactatagcttttgataatccagatataacaacagacaagcagtaataaatgaagagacttactatgtatcacacaagcaaggtttctgaattacaaataacttcaacaatgacatcaaaacctatgaattaaatcttaactcacgcggttataaagttaaattctcatgtgtcttagtgagaatgctatcatcaaatacattctaaattctttcattttttagtgtacaaaggttatgggagaaaggataaggtgctttttaaataagctaccactgactcacacacatccatacacgcatcagtgcaaactatgaaaaacactaattttaaaatgaaataatgattatctagactaaaaggagactttggaatagaataattttccatgactaatttgtttacaaatatagataactcaatgtacatatagtcaacgaaatattcaaagaataactttatatactcttgttctttaaattctatcctctctttcagaattcttccatttaagtttgggtattttcctagtttcaacagatgaacagaagacttcattgaacattttgacagtaagctactagagaccaattatcaactggtgctacacatgctgtgttatctccctgactattaaactataaccctctcctgttactttgaaaacaagaacag

SEQ ID NO: 3110 - DNA, 1212 bp, Homo Sapiens
  misc_feature (52)..(52): n is a, c, g, or t
  misc_feature (55)..(55): n is a, c, g, or t
gagggcaaaaaagggggctcaaaagaaaattgaaaaagaagcagctcagctnagnggaagaaaggtgaagacacaggtcaaaaatattcgacagtccatcatccctgttgtcagtgctatctcctcgcggatcattaagacccctcggcggtttatagaggatgaggattaggaccctcaaattaaaattgcccgattagagtctacaccgaatagtagattcagtgccccgtcctgtggatcttctgaaaaatcaagtgcagcttctcagcactcctctcaaatgtcttcagactcctctcgatctagtagccccagtgttgatacctccacagactctcaggcttctgaggagattcaggtacttcctgaggagcggagcgatacccctgaagttcatcctccactgcccatttcccagtccccagaaaatgagagtaatgataggagaagcagaaggtattcagtgtcggagagaagttttggatctagaacgacgaaaaaattatcaactctacaaagtgccccccagcagcagacctcctcgtctccacctccacctctgctgactccaccgccaccactgcagccagcctccagtatctctgaccacacaccttggcttatgcctccaacaatccccttagcatcaccatttttgcctgcttccactgctcctatgcaagggaagcgaaaatctattttgcgagaaccgacatttaggtggacttctttaaagcattctaggtcagagccacaatacttttcctcagcaaagtatgccaaagaaggtcttattcgcaaaccaatatttgataatttccgaccccctccactaactcccgaggacgttggctttgcatctggttgttctgcatctggtaccgctgcttcagcccgattgttttcgccactccattctggaacaaggtttgatatgcacaaaaggagccctcttctgagagctccaagatttactccaagtgaggctcactctagaatatttgagtctgtaaccttgcctagtaatcgaacttctgctggaacatcttcttcaggagtatccaatagaaaaaggaaaagaaaagtgtttagtcctattcgatctgaaccaagatctccttctcactccatgaggacaagaagtggaaggcttagtagttctgagctctcacctctcacccccccgtcttcgggtcgttcggtgatcct

SEQ ID NO: 3111 - DNA, 634 bp, Homo Sapiens
gtgggacgtcataatacacgtgacgtcagaggaacagtacacctcatgatggcattctcgctggcctccacacggctgggaatgggaaggcgagtggatatgtatatcctgaaagaagcttgctgactgaggcagatgcaggtcacacggaggttcactgatgaagtctatcagaacgagagccgctaccccgggggcgactggaagccggccgaggacacctacacggatgcgaacggcgataaagcagcatcacccagcgagttgacttgtcctccaggttgggaatgggaagatgatgcatggtcttatgacataaatcgagcggtggatgagaaaggctgggaatatggaatcaccattcctcctgatcataagcccaaatcctgggttgcagcagagaaaatgtaccacactcatagacggcgaaggctggtccgaaaacgcaagaaagatttaacacagactgcttcaagcaccgcaagggccatggaggaattgcaagaccaagagggctgggaatatgcttctctaattggctggaaatttcactggaaacaacgtagttcagataccttccgccgcagacgctggaggagaaaaatggctccttcagaaacacatggtgcatcag

SEQ ID NO: 3112 - DNA, 1230 bp, Homo Sapiens
tatcaaacatcctgaagaagttgttataggacccggtcatgatggcgctatccgaaccgttccagcaacactcaaacttgtcaaaagatgcagtcgttctcatagagagagcagagcttgctgcgcaggtactcgtggacctggtgggtctccaccggcctgctctccaatgttgaggtcccacaccttcaccgacaggtaagtctctggtcatcatgtaccgcccacttatgactgaattttacatcggatatggatgaaattatttctgagaagaaggacctacttgcttgggatcttcaggctcttcaaaaaactttggagtgtctgtcgcacagggccgaggagcgcatgtcacacaggcggatggtccctttgctactgctgtagacgaacacgttgcactggtgcgggtggaactcggctgcagtgatgacttcggtcagctcctccatgttagcaggcttgatgtccacgatgttaaagcttctatctgtgatttctaagtgccataaattaattctcaggtcatctgcagaaagatatgtttcatgatcactatttactgaaatggaatttatatgatatgtgtgagcatttgcaaaaattcgccgtggactcgcttctaccataagatccatgggcttcaatattgggacccgtagcgccgtgatcctaaatgggtctcgaagtcttccatcttcgtctttcaggttataaccttctgctcttttatcccgttcacttattttccataattttatagttttatcatttgtagacagtagaaaatgagcagcattctgttgtggtaaccacctaattttattaattttttcctcaatttctagacttttcaaatagtcaaactccggttcatgactttgaaaggtgctgtaaacattatattctcccctagaatgagggccggcttttattctcttgttcacgctgaaaaataacaactctgccgcccttgtctcctgttgcaagaagatctccagagtaattaaactcaacggtggaaatgatgtccgcttcggccacgtcctcgtcgatggcccccttgacctgcgagaagcaccactggaagtcgttgccgcccagcggggcagcccacgcctccggctcctgccatggcagccggcggcagggacgggcggggaccgcggcagacaagggagacaggcactccgcagccagctgcagcacgagcagctcagccccagg

SEQ ID NO: 3113 - DNA, 706 bp, Homo Sapiens
taatattgcgtgaaatatctgaatctatcccccgtggaagaagtagaagcactatttaaaggagataatttaccaaaatttataaactgtgaatttgcatataatgataattggtttattacatttgaaacagaagctgatgcacaacaggcttacaaataccttcgagaagaagtcaaaatttttcaaggaaaaccaattaaggcacggataaaagcaaaggcaatagctataaacacatttttgccaaagaatggatttagacccctggacgtgagcctgtatgcccagcagcgctacgcgacgtcgttctacttccctcccatgtacagcccccagcagcagttccccctgtacagcctgatcactccccagacgtggtcagcaacgcacagctatcttgacccacccttggtaactccatttccaaatactggatttataaatgggtttacgtctccagcgttcaagcctgcggcgtctcctctgacttctctcagacagtatcctcctcgaagcaggaatcctagtaaatctcatctgcggcatgcgattcctagtgcagagaggggacctgggttattagaaagtccttcaatatttaacttcactgcagatcgattaattaatggtgtccggagtccacaaacaaggcaagcaggtcaaactagaacacggattcaaaacccttcagcatcagcctgct

SEQ ID NO: 3114 - DNA, 1473 bp, Homo Sapiens
cgctgtccctgatcgagcggcgggagcgagggcctggacgtagtgtcttcaacagttgtaacagcagctgccatttgctgaatgacagcatgtgtcacacactctgctgagtattacaggcatttttttctaatacaaagtcttgtagtgtggaaatacttgcagacttgaaggaattatcagtctttcattttctatcatcagtgtcctatgatagtttgtgcttccctccctcatccctttgttcatgtcactctgttcaccaacccactctgctgaaatgtcgttatttcttcaaggcccggaggaaatgctaccactctcatcagagggttcagagatgggcagtgagaaggagcagagtccagaaccacacctgcctgaggaaggggaagggggtaagccttggagagtggatgactcagagggttcttggatcccacctggggagaaggagcatgggcaagagagcctgtcggatgaactgcaagaaactcatccaaaaaagccatggcagaaagtcactgtccgggctcgagagctaggggaccccattgctcatccaaggcatgaggcagatgagaagccctttatatgtgcccagtgtggcaaaaccttcaataatacctccaacctgaggaacacaccagcggatccacactggtgagaagccttacaagtgttctgaatgtggcaagagcttctcgagaagctccaaacgcatccggcacgagcggatccacctggaagagaaacactacaaatgccccaagtgccaggagagctttcggcggcgctcagacctcaccacgcaccagcaagatcacctaggcaagcggccataccgctgtgacatctgtggcaagagcttcagccagagtgccacgctagctgtgcatcaccggacccacctggagccagcaccctacatctgctgtgagtgtgggaagagcttcagcaacagctccagctttggcgtgcatcaccgcacccacacaggtgagagaccttatgagtgcactgagtgtgggcggaccttcagcgatatctccaactttggagcacaccagcggacccacagaggggagaagccctaccggtgcactgtgtgtgggaaacacttctcccggagctcgaatctcatccgccaccaagaaaactcacttgggcgaacaggctgggaaagattccagctgaaggagagccccattttagagtgagggagagagagtgagagaccctaacctattggaggaagatcttcagcatcttttgctgctacctttgacctcaagcccttcatcccactttggagaatggtttggtatagccctctgaaggtccaggatctcaggaagtcctgaggagggactctggaaattaaaaaccttggcctctttccagggccaaattctcgtgttggcaagtcagaagaaccagtctggcctttactttcttgggggtgaacgagaa

SEQ ID NO: 3115 - DNA, 609 bp, Homo Sapiens
  misc_feature (524)..(540): n is a, c, g, or t
cggcttaggaggatcacatacatacaatgttgtacaactaatttttccagtatgcataaaaatttatatttgacaacagagaatatgcttcatcataaacacagcaatatcttttccactttgttactaataagttgcatgttttcttagtaattttaaatacctccatctgaaaagtatagggtaggctgaccacaaaagatgaagcctaacagttggtaggggtaccgcacttacataatattctaaaaacgtgcttttcctaggtactcagtgactatatacagtagtgaatatgaaacattcctgtatcaatcccatttcctacaaagttgacctaatttcaagcataaaactgaggtttccacctttagaagggtagaaaacaagagttaagtaattgggtagtcctaaaaaaacacatcacaactacatgactaagatactcatttaaaacttgtgccaagataacccctcccttccaaactaaaattgactcactggcctattttacttaattttgnnnnnnnnnnnnnnnnnctaaatggattcctaagcactcatttcctctctctgcccccatcatttaaaatattcagactttcaatc

SEQ ID NO: 3116 - DNA, 570 bp, Homo Sapiens
  misc_feature (77)..(187): n is a, c, g, or t
  misc_feature (208)..(321): n is a, c, g, or t
gtgatgctcccacgtcagcctcctgggtagctggggcttaaaaagcacatgccaccatgcctggcctttttagttcnnnnnnnnnnnnnnnnnnnnnnnnnnnnnnnnnnnnnnnnnnnnnnnnnnnnnnnnnnnnnnnnnnnnnnnnnnnnnnnnnnnnnnnnnnnnnnnnnnnnnnnnnnnnnnngtgcatgccaccatgcctggnnnnnnnnnnnnnnnnnnnnnnnnnnnnnnnnnnnnnnnnnnnnnnnnnnnnnnnnnnnnnnnnnnnnnnnnnnnnnnnnnnnnnnnnnnnnnnnnnnnnnnnnnnnnnnnnnntgagccacttgcacccagatggccctagagttttgatagagatggagggtttactgggaattagggcgcttccagggaaatgactggagttgaggtaaactggaaccagatcattaagggcgatgaatcctgggccaggctgtgcagacatttctcatatgcagtgggcagctactgcagactttgagctggggagaaggctgtgcgagtagagcgttaacttgggcgctctgccggtaccagctcatc

SEQ ID NO: 3117 - DNA, 1447 bp, Homo Sapiens
  misc_feature (15)..(15): n is a, c, g, or t
  misc_feature (28)..(28): n is a, c, g, or t
  misc_feature (997)..(1007): n is a, c, g, or t
cccgggtccctttcntgaggaaccggcnaagaaatccagaaccatccatgggactgtgattctgaggctgctgagactgacatgttccccattgacagaaaccaagctgctctttataatatgcacctttaaaaaattagaatattttactgggaagacgtgtaactctttgggttattactgtctttacttctaaagaagttagcttgaactgaggagtaaaagtgtgtacatatataatatacccttacattatgtatgagggatttttttaaattatattgaaatgctgccctagaagtacaataggaaggctaaataataataacctgttttctggttgttgttggggcatgagcttgtgtataccctgcttgcataaactcaaccagctgcctttttaaagggagctctagtcctttttgtgtaattcactttatttattttattacaaacttcaagattatttaagtgaagatatttcttcagctctggggaaaatgccacagtgttctcctgagagaacatccttgctttgagtcaggctgtgggcaagttcctgaccacagggagtaaattggcctctttgatacacttttgcttgcctccccaggaaagaaggaattgcatccaaggtatacatacatattcatcgatgtttcgtgcttctccttatgaaactccagctatgtaataaaaaactatactctgtgttctgttaatgcctctgagtgtcctacctccttggagatgagatagggaaggagcagggatgagactggcaatggtcacagggaaagatgtggccttttgtgatggttttattttctgttaacactgtgtcctgggggggctgggaagtcccctgcatcccatggtaccctggtattgggacagcaaaagccagtaaccatgagtatgaggaaatctctttctgttgctggcttacagtttctctgtgtgctttgtggttgctgtcatatttgctctagaagcnnnnnnnnnnnggaggggaaatgcattttccccagagataaaggctgccattttgggggtctgtacttatggcctgaaaatatttgtgatccataactctacacagcctttactcatactattaggcacactttccccttagagccccctaagtttttcccagacgaatctttataatttctttccaaagataccaaataaacttcagtgttttcatctaattctcttaaagttgatatcttaatattttgtgttgatcattatttccattcttaatgtgaaaaaaagtaattatttatacttattataaaaagtatttgaaatttgcacatttaattgtccctaatagaaagccacctattctttgttggatttcttcaagtttttctaaataaatgtaacttttcacaagagtcaacattaaaaaataaattatttaagaacaaaaaaa

SEQ ID NO: 3118 - DNA, 754 bp, Homo Sapiens
ccagaggaagagggcatgaggacacagccagcagcgttactgggtcgtgatgattatgctgtatatgtgagagagaatattcaggtgggaatgatggttagatgctgccgaacatacgaagaagtgtgcgaaggtgatgtgatgttggcaaagtcaccaagctggacacagatggattgcatgatctcaatgtgcagtgtgactggcagcagaaaggggacatctactggtttaggtacattcatgtggaacttataggctatcctccaccaagaagttcttctcacatcaagattggtgataaagtgcgggtcaaagcctctgtcaccacaccaaaatacaaatggggatctgtgactcatcagagtgtgggggttgtgaaaggtgtgatggatgtcagatgtttcctatcaatggcatccagattcaaatgcagaaactgtgatgactttgatttttgtgaaacgtgtttcaagaccaaaaaacacaataccaggcatacatttggcagaataaatgaaccaggcttcagcagaagaaacacttcctataaatctcgcccaaacaggaaaggagaagcattagggtgtccgactacgtgggtttcatagctgtggaaaagccaaaggggagactcctgaagaaaggcggtgaagactgtgaagagcgggtcaggaagatgagcacagcactgctactcctgtgggcacagggacagcatgtctccagccagcaccaccttgtttaatacatg

SEQ ID NO: 3119 - DNA, 608 bp, Homo Sapiens
cgagatgtcctcatgaataacaacatctgtgaagtaaaattatatctccaagaaacactgtaaatgcccaaaatgctgcagtcctccacagaaaaaccttcttcttagtttctgattgatcaattactgtaactgttgctaaaggcaccttagagccagaatttggtccgaatactatgattatttccttcacatggcatggagatagcaccatgactaaacaactatacttctggcttttggaatcacagctttttattaatgatgtttttttaatactcttaaattcagacacatttctccgatccatttctacagcagaatctcctccattagaaatcaacttcattttcttagctacttgaaggactctagatagagcttcagactggcccactttatcttcagaggaccagcttcttctaatagcacttttgtggaaggtatttagttgggaacacagtaattcctgagctacacaactcaatacgtatctcatttggtggcagttcatcttcagaactgaaaagttcttgagatcctgtatgttcttcaggaccctatcagagtttatgtgaatgcggctattttctgtttttaggacaaaa

SEQ ID NO: 3120 - DNA, 274 bp, Homo Sapiens
cgacatgtccccagccaggtccagcaggtcattttcaccatacaggctggcccagccacagtgtgcgcttcgttccgtagtcgtggatctgctcttggatctcaggcatcgcctgcctcgtgagcttcacagagaacaccacgagcatcttcgctgttccgcaggcgcgagtcaatttcagcctgtagcatctcaggaatcttcactctcagaggcgcatttttctccaggaaaatattccagatgtcttccccagcttcggatacttggctgc

SEQ ID NO: 3121 - DNA, 465 bp, Homo Sapiens
ggtgcgctactaccagagcctgcagttcatctcaaggtggacgtgtacggacgctcggacaagcccctgcccaaggggaccatgatggagacgctgtcccggtacaagttctacctggccttcgagaactccttgcaccccgactacatcaccgagaagctgtggaggaacgccctggaggcctgggccgtgcccgtggtgctgggccccagcagaagcaactacgagaggttcctgccacccgacgccttcatccacgtggacgacttccagagccccaaggacctggcccggtacctgcaggagctggacaaggaccacgcccgctacctgagctactttcgctggcgggagacgctgcggcctcgctccttcagctggcgactcgctttctgcaaggcctgctggcaactgcaggagcaatccaggtaccagacacgcggcatagcgcttgttacacctgag

SEQ ID NO: 3122 - DNA, 715 bp, Homo Sapiens
  misc_feature (452)..(461): n is a, c, g, or t
agaggaccccccgatgcctcagccaggagaaagttaatgcaacaggaccacatttcgtgagtggagtgattgtgaagatcattagcacagagcctctacctggcaggaaacaagtccgggatactttggcagcaatctcagaagttctttatgttgatttgctagaaggggatacagaatgccatgctagatttaaaactcctgaggatgctcaagcagtaataaatgcctatacagaaattaacaagaaacactgctggaaactcgagatcctttctggtgatcacgaacaaaggtattggcagaagattttggttgatagacaggcaaaacttaatcagcctcgggaaaagaaaagaggcactgaaaagttaatcaccaaagctgaaaagattagactggcaaagactcaacaagcgagtaaacatataagattttctgaatatgattgnnnnnnnnnncagttcacctcttaatacttcacaagatacttgagctgttcttgggagattcacttttattatggtagcactgcataattaatgtgtttttaattaaaagaaatatctttgttcctcaacttgtaaataagacttttttctagagacaaatatgatgtataccacaatttttcttaaacattttatttgttgaaattatcttagatgtcagtgtcaggtgatttagtaaataaatgtgttttgaacattaaaaa

SEQ ID NO: 3123 - DNA, 598 bp, Homo Sapiens
tctttccagctcttcctccattctggcaagtcactgcatcctccctggggtgaaggatggaaggaaagctgggacaagcagggaacgcatgattcagggatgctgtcactcggcagccagattccgaaactcccattctccaatgactacctcaaccaatgggtggccttgtgactgttctttaaggctgaagacatccaggaaagggggcttggacactggccaaggagaccccttcgtgctgtggacacagctctcttcactctttgctcatggcatgacacagcggagaccgcctccaacaacgaatttggggctacgaagaggaatagcgaaaaagcaaatctgtttcaactgatgggaaccctatagctatagaacttgggggctatctcctatgcccctggacaggacagttggctggggacaggagacgtgctcaatcttcatgagacaaaggggcccgatagggccagcagccacaaggccttgacctgccgagtcagcatgccccatctctctgcacagctgtcccataaacccaactcccggtttctgtatgtctaaggccagtatcccaaagctcttccacgtcact

SEQ ID NO: 3124 - DNA, 866 bp, Homo Sapiens
gcaacactgaggggcagtggctcctgccgtccaatcgcatgcccgtccgggggcgtggctgctgctgtgcatgtccttgcgagggagtcttgtctcccagcctgtcagtttcctcccccagggcagagctcccccttcctgcaagagtctgggagccgtgcagggctgtcctggctgctctggggaagccgagggacagccataacacccccgggacagtaggtctgggcggcaccactgggaactctggacttgagtgtgtttgcctcttccttgggtatgaatgtgtgagttcacccagaggcctgctctcctcacacattgtgtggtttggggttaatgatggagggagacacctcctcatagacggcaggtgcccacctttcagggagtctcccagcatgggcggatgccgggcatgagctgctgtaaactatttgtggctgtgctgcttgagtgacgtctctgtcgtgtgggtgccaagtgcttgtgtagaaactgtgttctgagcccccttttctggacaccaactgtgtcctgtgaatgtatcgctactgtgagctgttcccgcctagccagggccatgtcttaggtgcagctgtgccacgggtcagctgagccacagtcccagaaccaagctctcggtgtctcgggccaccatccgcccacctcgggctgaccccacctcctccatggacagtgtgagccccgggccgtgcatcctgctcagtgtggcgtcagtgtcggggctgagccccttgagctgcttcagtgaatgtacagtgcccggcacgagctgaacctcatgtgttccactcccaataaaaggttgacaggggcttctccttctctgggaggacatctcg

SEQ ID NO: 3125 - DNA, 634 bp, Homo Sapiens
actaggaggtatcacatacgtggtcatgaatggttggagtgagagggagagcaggccaggagagagtcttatagagaaatcagagagcctttgaaatatcttaggcaggaagcgaggtgatcagatttacattttaggaagagccctcaggatgttctgtgaaaaagccttgaagaggccaaggttagtagggggaaggactattaggaggccattgtaatagcccaaatgagagaagataagggcttgaattagggcaaccacagttaggatagaaggaaagattagctttgggaagtattaaggaggaaaaggtggcaggccttggcaattagagagaggggtgaaaggaagggggactctaggatgactgcaggatttttagcttgggggactgggtggtgccattcaccacaatggggaaccaggagcaaggagcagattgtggggaggaaagaagatgatagttgagttttggacatttggattttgagatatgagtgggcattgtaaactttgaaggagagatacatatttggaatcatcaacatgtgagtagtatggataggaaacaagaatagatgagattgcccaagcagagggggtagagttaacagtaagctgtgatacctcc

SEQ ID NO: 3126 - DNA, 327 bp, Homo Sapiens
tatcacactttccataatggttcatagattaagtgaatttgcaatacgcttgagctcagatcagaccacatagaacttcataaacagtagttagtggcttagagtaacttgtacctcccagtgtgcttgcaaataataggtagtctatcaagagttcttaagtggtttggtataatttgtagtttacaccattaaagagtcaaacttttgaatttctgagttgtctttttaggtagcctcagattgcaatgtagtaattcaatctagtagtaaaaatatatgtgatttttgatatagtccagttgagagagaaatgtgaattcatta

SEQ ID NO: 3127 - DNA, 461 bp, Homo Sapiens
tatagcgcctaggtggctgataccacgaggccatgttggtgacacctcgagctgctgggaggtatctcagcaaaggcaagcttactgccctactcctttctagggctgtccaagtcacttgttgggagcccaaagccatgagaaaggcagagatttgcattccagcaatactgtctgaacattaacctcaaaccccaaaagctgttgggcaatgtgtgagctgtctgtccagcattccacatgagctcagctaattgaagaaccctgatcaaacagtagtatagaaactcccagctcagcagtcaaatcaggttcccctgtcttcctgccgttggcccttctctcagcccccatgggctcagtgcctgtctcatacccacctgaggccccacaggcccagccctagccctttccccagaactttccccatcccagacctagttctgtacaatgtcctccca

SEQ ID NO: 3128 - DNA, 375 bp, Homo Sapiens
ctgtcttgctgtcagtgaatttacagcatgtgggtagatagcactgttcctacagcacccagccaggaactagcactgtgaggtagaatttatgaaccccaggctccagcacttccattcagcaagtcctgtgtccttcccatcccgagccctggggccagcccaagcttataagtcccttgacaccatctctgagagacctagcttagcaaaactacctggggtatctgttcggtgtttggcacagctctgggcctgtaagaaaatgtagcaaagatgaataaagacctagagtgtggccaggtgctgacagtgaaggcacaagtcaccatctgtatgtgcttcctgtggttaccatgaccaattagaacaaac

SEQ ID NO: 3129 - DNA, 569 bp, Homo Sapiens
ggacccggcttagaggtatacataaggacttctgggtatatctatctaggtttctggaggtaaagtgtaaacattttggctatgctagttcccaagtttggtaatggggttaccgtcttacagactccaaacttgtattccacagctttatcaaggtgcaaaaggcatttctgtttagggtactcttatacaagacaaaacattccaaggatactttgtacagatcacctgacataattcagttgccacagtgactcagtcagagagattgttaactggttttaaataaatctcaagtattgttactcttatacccactgtatataaagtcagctttaaattcattaacagctcatttatgttcttctaaactaagatttgaatgtttctgatatctttatttccaataattgtcatggcccttttgagagactgcaaaagctcttaaaccttgagcaaaaacaaatattttcattgttcaactcccctcctttctggttgcacattactcatgtccgcctcagagcatgaattagtttatgccagaatggatcttttctgtgatacct

SEQ ID NO: 3130 - DNA, 467 bp, Homo Sapiens
ctgaagaggtgtgctagaaggaaaggtcgtattatcaagaaagacctaagtcaaaaggtcacattcacctttggaagacaaatctcttcgatgctggatgttagcagggaaaatcaacagcaagctaaaagttcacttagaactttttcatcaaaacatccccagtgtaagcaacttgagatacccctctgagaattcagtcaatgcgtgtctattgagctcaggatcatctatgcaattaatcattggggaaacaaagtgaatagcacagctggcggcttaaaaaaaatattcaattcaccccagaggctcctctcctatgtctctcagggacagtaacagtaattttagcccccattttaaatgagtatgttaccattggggaatagttttcttctcaattcttaagagaaattcccagccttcctaacttaataaagacactataatctatataactaacgacc

SEQ ID NO: 3131 - DNA, 670 bp, Homo Sapiens
agaggacccggcttaggaggtatacagtgtgcaggtgtgggtgaagagtattcactgtgtgcaggtgtgggtgaagagtattcactgtgtgcaggtgtgggtgaagagtattcactgtgtgcaggtgtgggtgaagagtaggctgtccaggatttcaatccttggcttttgctctgcagcaagggctggctgagggcactgtgaggcttcttcaggcccaggagtcaggcccactttcccttttctcttgagggaatgactcagagaacactcctgccaccggaggttctgcaggcttttgagaggcagccagtggaggctgatggtagcagttggtgagaaagaggaagtatgtagtggccattcctccggccactcctgacaaatatttctgtcactaaacagcacctctctgtggcagccttaggctgtgttctggaaagggaggagctttcctctccctgtgggagggcctgtcatctgtggcttctgctttgcccttggccacagactagattgcacaacacagccaatgagagtccctcttccctcacaagtgcttggagtgcagaccttaacttacagggttgtagaagtgaccgtgttccacaactgcagggtccaggtcacagccggcgaagcacatgaaaattgacctaaggttagaatg

SEQ ID NO: 3132 - DNA, 778 bp, Homo Sapiens
agagttgcatgaccgaatcgcgccctgtacttcagcctggcaacagagcagactccgtttccaaacaagatctaagtgggttgtcccatagttgagtcaggacatgtcccgcagaagcagaatgagcaaaacttgagagccacagaccagcacggcgggtaattcagtgtccgcgtcatcagtggtacatgcctacagccatgtcgaaattgtgtctggagaagcacatgacgcagactctccctgatttacaaggctcttcatcatcaggtccctacttaactctaatttcatctcttgtcttatctattatttagtctgatatcatgcattaattatatatactgtacattgatacacagcatttatttgaaagataaacctcttggatgtgactctggagacaagaccagcagctcgagaccattcaatccaaggtataaaatgggagaaaatcagctccatcatggtctgaattgaggatgaggcagaagagcagagaatagcggatgcccaggtggcagcaacttaactcttttcctgtggacttgcggggtctccccacctccactgcgtcgggacatgccgtgtgccgtctctttatccatagctgcctccggcatcagcagagaaagtcatgggcagatggagctttggattagttcttttttccagtcttcctttactttatctggataagattgggcagattgaatttgatcttctatactgtggccagggagcagagtggatctagaccatgcaggttttcctactg

SEQ ID NO: 3133 - DNA, 597 bp, Homo Sapiens
  misc_feature (68)..(68): n is a, c, g, or t
cgccaacgaaaggacgaactgatccaagagccggcgggagccaggagaaagcggagctccgcatcagncaggcccgcacaggcaccctccaaagaggttctcattagggatgcaaaatgaatctggcttcacagctggtgtagaccaggctcctgccccatcctgggctacccaggcccagccggtgctgacagcaaagacagaaggtcggtttctgcctaaagcaaacgctcagcgaggctggaacagaggggagtgctgcgtggtaggggcgagggcgcttggaggggcctctgcctgcagcgtctgggtccccagcccagggctgcttctttaaagacaaacaaaggcgaagatgcggaggctcggaagccggagatggggaaatcagttgtcataaaagagagattcagagagggacaccgccagagtgcgaggcagagagaagccgggagaggaattcaatgccgtgtgcgcagcaataaaataatatgaccgctataaaagtttatagcgtataaatttctgaaggttaagaaactaaacagcagcaaagcaaacagcgaggggaaactttccgggctgaggaccatcgtt

SEQ ID NO: 3134 - DNA, 1165 bp, Homo Sapiens
cgaactcgcacccgtcatacgctgaactatgcgaagactttaatcagtagtagcttcagtttccgctgggcccctaattagtcttcgaattcctctttttcctgcaggaccttttggttttgcaaaactttgcttgtgtgcatgctgcttgggatgtacttcttcataaaggaagtctgcagtcaactcatccccattgtctatctcgatctttctaattacatccatttgtagttgtctttctacaatttctagcagacggctcttgcagctagaatacagcatccgctctcttatactgcatgtgtatccaggcattgaataaataaaaactatggactctaaatagtctccttcatgggaatgtttatacagaaagaaatggtaacgagctgaatccttgggaatcctctttggcaaatctttcagttctgtatttgttgtgttggccaaaattataatttcattttttatatctatttccaactgcacatagttgagctgtctattattcaatttttccaaagcctgaaaggcttctcgagaaatgggaaatgctactccttgtagtgtttgatgcttagtgtccacacccacgtcagtctgtacctcattgattttaatctgtcgtagttcttcctcagctgcagtcagtggggcaggggaagattgtgacagcaagtattttttatatccatgtaatgatacatcttcctttactgttccaaatacttcatctttaatgtggccacctccaaattccttcttcagagttgctcttgttgctgcatacaacattttttgacgaacatgagaatgatctggagaccatgcaatgaatatccattcatatccctgggcattctgagaatctaacctgaataatatatagcatggttgtttgtcctccaacaggggtaaaacaaaggaatcataatccttatcccaggaatctgaaggctgactatatgatccaatcacaagttgctcattttcaatagatattttcagaagtctgtactttccatttctggctctggcaaagatctctttaacatcttcacttgcttggatgccggtctggtgggacatggcggcggccgctagctcccggctccggcgctgagtgcagccagcggccccgccggcggccccaggaagtggc

SEQ ID NO: 3135 - DNA, 720 bp, Homo Sapiens
aggtgactctagcaggatcttaccctggtatccccacccgggttacaatgacacgcctcctgcaggctagagaagcagagccgcctgtgcatggtcaggccttgacgaagctgacctggaagagaacattaagaagggcaaaaagtgcatccgtactcccaaaatctccaagcctatcaagtttgagctttctggctgcaccagcatgaagacataccgagctaaattctgtggagtatgtacccgacggccgatgctgcaccccccacagaaccaccaccctgccggtggagttcaagtgccctgacggcgaggtcatgaagaagaacatgatgttcatcaagacctgtgcctgccattacaactgtcccggagacaatgacatctttgaatcgctgtactacaggaagatgtacggagacatggcatgaagccagagagtgagagacattaactcattagactggaacttgaactgattcacatctcatttttccgtaaaaatgatttcagtagcacaagttatttaaatctgtttttctaactgggggaaaagattcccacccaattcaaaacattgtgccatgtcaaacaaatagtctatcaaccccagacactggtttgaagaatgttaagacttgacagtggaactacattagtacacagcaccagaatgtatcttaaggtgtggctttaggagcagggggatggagcacccat

SEQ ID NO: 3136 - DNA, 970 bp, Homo Sapiens
ggtaaaagagacctttcgacatcttctacacggccccccagccgtgcacatacgtcgtgagtggtgcgcacatgtggcgagcacgtgcccaacagccccttccaagtgacggctctggctggggacagccctcggtgcagccccctctacggtctcagcagctggccccacagtacacctacgcccagggcggccagcagacttgggccccggagaggcccctggtgggtgtcaatgggctggatgtgaccagcctgaggccctttgaccttgtcatccccttcaccatcaagaagggcgagatcacaggggaggttcggatgccctcaggcaaggtggcgcagcccaccatcactgacaacaaagacggcaccgtgaccgtgcggtatgcaccccagcgaggctggcctgcacgagatggacatccgctatgacaacatgcacatcccaggaagccccttgcagttctatgtggataacgtcaactgtggccatgtcactgcctatgggcctggcctcacccatggagtagtgaacaagcctgccaccttcaccgtcaacaccaaggatgcaggagaggggggcctgtctctggccattgagggcccgtccaaagcagaaatcagctgcactgacaaccaggatgggacatgcagcgtgtcctacctgcctgtgctgccgggggactacagcattctagtcaagtacaatgaacagcacgtcccaggcagccccttcactgctcgggtcacaggtgacgactccatgcgtatgtcccacctaaaggtcggctctgctgccgacatccccatcaacatctcagagacggatctcagcctgctcgtacggccactgtggtcccgccctcgggccgcgaggagccctgtctgctgaagcggctgcgcaatggccacgtgcgcattgcattcgtgcccaaggagacgggggagctcctggtgcatgtgaagaa

SEQ ID NO: 3137 - DNA, 450 bp, Homo Sapiens
caagaatctcgctctaattacactgtatgtcgcaatggcatcaacagaaaagcatggatttgattatgcaaaggactacttcacagacttaatcactaacgagagcattaattacttcaaaatgtctaagagaatgtatccccataggcccgttatgatggtgatcagccacgctgcgccccacggccccgaggactcagccccacagttttctaaactgtaccccaatgcttcccaacacataactcctagttataactattgcaccaaaatatggataaacactggatttatgcagcacacaggaccaatgctgcccatccacatggaatttacaaacattctacagcgcaaaaggctccagactttgatgtcagtggatgattctgtggagaggctgtataacatgctcgtggagacgggggagctggagaatacttacatcattta

SEQ ID NO: 3138 - DNA, 1056 bp, Homo Sapiens
tccctttgctgtcttgggatgggcaccttcccctgggcacctcctggtggcgtagtgtgtccgtacctcccctggctgtgtccttatacaggccttccgtgcagggcttctccaacttgcccatgcacagtagggtctttcagggttctgctgtgggctccctagggaagcccatccatctggatggtttcaaggatggtgaggaatttagagttgacctccagccccaacatccttcctgatcacctgaaccacagttttgctgccctctaggtgcacagacaattcaggtccatggcccagatggtacttgctgtcttctgcaaacctgccccttctgggtacttcccttgaccccgagatcactcaggagccagacaggaaacttattctattcctgttttctctttctgcccaccacatccaatctctcaaaacggtcaggtctaccttaacatctcttgatttgagccactcccactgtcatcagctttcacctggattatcgtgacagcctcctactgcttctctatcatgtggccagagctatcttcctaaaatgcattgcatagttgatcaagtcactctctggcctaaaaccttccttggctccctgctgccctcaggataaagtctggacccctcagcatggcttgtgagactcatggtgtccttgtccctgctcacctctctggtctcatcacttgccttcttgcattctgggtcccagcctcctgtatccagagatgcagtggctctccattgccactctgattcctcctttcttttggtcacagagaaagggtactttctctgtcaaatctcaacttagacttgacttcctccaaggagctttggctatactctctcctcccgacccccaccctggcatactacacagatcactctgggctcacttgcctgcctaatggtcatctccccagtagactgtaagctccttgagggcaaggattgtgttggaatttttgtattaacagtgcctggcttggtgcctggcacctagaaagcactcaataaatgtttgtttaatgaaaa

SEQ ID NO: 3139 - DNA, 692 bp, Homo Sapiens
actgatcgacacagtaacagctgacactcatcaggggctcaccccacgctccaggccttctcaaccctcacccgcatctgacatttacccgtcaggggcatgtggcgggcattacagcatctcatcctcaccctcaactgccagagggcctctgcatcctcgtcttacagatgagaacatgggggtgggggtgaggacgtgatgattaaagtggaaggatctatgtcaccattagcacgcacccccctcacgccacctcagtccagtgatcccaaagccactattacacacacctcctcagacacgtcaagtcctccagatggaggaaccggttccagaattggaaggcctggctagagatgcaggtgaacacgaatccacccatgccagtgggactctgcatttgtaagcccctttagaagagctcaaagcacacctgggccaggcaagaatgaccttcaggattctgcctggggttaacacaaggcccacagacatccagagagcagccaggtgacaggtgccacgccgtcctgcgggggaggtggcgtagaggggagacgtccatttctgagtcaccagggttctccatccaattccggggcaagcaaggcggtctctggcttccaggtgggaagagagaccccagtctcctgaaacagcatcagcctgtttaatggtaccgagctcga

SEQ ID NO: 3140 - DNA, 534 bp, Homo Sapiens
tgatctcagaggatcccctgatgcaggacaagtggacactcgcagtctagcagaagcttgttcagatggggatgttaatgctgttcgtaaattgctagatgaaggcagaagtgtaaatgaacatacagaagaaggagaaagcctgctgtgtttggcttgttcagcagggtattatgaattagcacaagtattgcttgctatgcatgctaatgttgaagatcgagggaataaaggagacataactcccctgatggcagcttccagtggaggttacttagatattgtgaaattattacttcttcatgatgctgatgtcaactcccagtctgcaacaggaaacactgcgctaacttatgcatgtgctggaggatttgttgacattattaaagtgctccttaatgaaggtgcaaatatagaagatcataatgaaaatggacatactcccttaatggaagcagccagtgcaggtcatgtggaagttgcaagagttcttttagatcatggtgcagcatcagccgttgaaggaccggctac

SEQ ID NO: 3141 - DNA, 580 bp, Homo Sapiens
  misc_feature (570)..(570): n is a, c, g, or t
taagcctagggtacccaaggctgcagtaagctgcaatcatgccactgtactcaaacctgggtgacagagcaagacactgtctctataaaaattaagaatacctgagaaattctcaaaagtaagaaaataaggttgtaaaaatgaagaagctcaacatactaaaactaggaaacatacagatccataacaagacatgcaaagcaaagttcccaaagtcacagacaagaagagaatctcaaatgctggaaaatacataattatggttgcatgatataaccagtgactctttcaacaaaaaccttgcaggccagaaggaaattgtgtgctatagttgaggtgccaagcgaaaaatagcttctatgtaagaataacataaccagcaaaactgtgctacaataatatgaagaaaaagcaaagacctctaatagataaccaaacgtggaaaaattatatcaacactacatgtgccatacaaaaaatgctgagaagagtcctcctacctaaaacttatatgatgctaaaaaacagaactatcatataaaaataggtagcctttctaggaaagatatnaaagatatgc

SEQ ID NO: 3142 - DNA, 583 bp, Homo Sapiens
tgggatggttgttaaaaatcaaattcctaggccacatcctggatccaccaaacacaatcttttggaaaggagcctggaaagttgtatactaaacagttactacaaatgatttttatcaggtacgtttgagaaagcagtagcctacaacaacagtcttcaactattagctcaagaaaccacaatttaaacaagtactcctggtggttcacattgggacaggtccttaaatttgatcatttttgactaagtacccaccatggggcaactcctcttggttagactatacacttgttctaatttaatggtaatgttccttatacagaaggaagacacaataacctccatcaaatacctcataaatgtttttaccaatggtaatgtgcccatcaacagggaatcagattgaagtcctggcttcaaagtggagatggcagccaaactggcctaaagtttggagaaagtacaaacttatctccaatctgtgccaactttctgagataatgggtagagtgaataacttaagactgtaaaggaaaaacccttcctcctcagtaattaaactggaattaacctcgccatgcct

SEQ ID NO: 3143 - DNA, 267 bp, Homo Sapiens
ttacataatcaaattgctcaaaccaatgatatagatcaaatcctgaaggcagctgggaaaatagtacatgttattttacacaggaacaaagataagaatgataccaaatttcttgccagaaatagtgcaagtgagagacaacagcagtgcaacttgatctttaaagtgctgaaggcaaaaactgcaaacctagaattttatgcccaatgaaaatatattttaagaaagttaaataaacatattttcagacacataaaagctgggaga

SEQ ID NO: 3144 - DNA, 854 bp, Homo Sapiens
tattagacgagtgagaactgaagagtaatgtcttgagtccttagggaaagctactccactactcttctgcagctgtcactatatagtccctgaggtgtccctagtgaagacagaagacctagaatagcacagagggcacccttttggtccttcctcaagtctgtttactcatcttcctgtctcgtgcacacataaggtgccctaaaatcaaccttaatcagtcccgaggcctagttgaagcctaatgaggagggtagaagagttctcatggggaggcttgtagttctagtcaccagtgcagtgagtgggtggcagcaggacaccctgtcctgatccagattggggaaactagggttatctggtctctctgttgccagttgattttcttttccttttagccaagcttcatggttcctggaccccccagttctgtgtggctcttctctagaggagcattgacccccctgaatcagctctgtccttggcgggacagtccttccctgctggcagtctcttctcgttggctccctcgacctgctatctcctctgaaagcctggctgaccaggaatggggtctcccctcacattggggagcttgccctttacctccagggctgctgctgcctgggtatctgggaccccagatcaggctctggagacgctgctacctgaggggaaggcctgaggtccaggtaagaagggaaaatagactgggagtgggacaagggacttgactctgctgaaccagatgaacaggagctggaaaggcaaggagctgaagcctctgggagtctgggaagtgaagttccactcctcttggcatcaaacaaggtttgggagtgtaggaggtgcgg

SEQ ID NO: 3145 - DNA, 675 bp, Homo Sapiens
cacaagaatgaaactccatctcaatcagtcagtcaatcttgcagatattggagtgtttcagatttcagatttggggtacttaaactgtacgtgaaaattagctgctggggaggagaggaattggaatatgtgacatggactcccacattttaaggatttttctaggactgcatctttctcttaataagtcagatccttatttggttgaaaatgtttactgcatgactatcactgactatgtaagatgctgatgtacaactctatgacttgaagattgagttgcttctatgggaatatgacaccatttgaattaatttgttctcaatattttaaagagttttagtgaattctgctcatataaaaatcaggttcaataatgcgtgctttttacgctatcattgagtatccagtgtttacaaggtgtttctgagggataagattattattgctgtgtaaagaatttggcagatggtgtgtaccttctaagttagcttgagggttatttaaatctcatctttttagcttgctgaagttgatactatgcaggtgcaagtttatattgactatttgatattgctgtgtttttatttgaaatgggactgttaaacacatttttctttatattgagcaatagagctggaatatttaagatgtatgcattaacccttgcattgg

SEQ ID NO: 3146 - DNA, 1076 bp, Homo Sapiens
  misc_feature (984)..(984): n is a, c, g, or t
cacctagtgatggatgtgaggcgctatggaaaggctggttcacctgaaacaaagtggattgatgcaacttctggaatttacaactcagaaaaatcttcaaatctatctgtaacaactgatttctccgaaagccttcagagttctaatattgaatccaaagaaatcaatggaatacatgatgaaagcaatgcttttgaatcaaaagcatctgaatccatttctttgaaaaactcaaaaaggcgatcacaattttttgaacaaggaagctctgattcggtggttcctgatcttccagttccaaccatcagtgccccgagtcgctgggtgtgggatcaagaggaggagcggaagcggcaggagaggtggcagaaggagcaggaccgcctactgcaggaaaaatatcaacgtgagcaggagaaactgagggaagagtggcaaagggccaaacaggaagcagagagagagaattccaagtacttggatgaggaactgatggtcctaagctcaaacagcatgtctctgaccacacgggagccctctcttgccacctgggaagctacctggagtgaagggtccaagtcttcagacagagaaggaacccgagcaggagaagaggagaggagacagccacaagaggaagttgttcatgaggaccaaggaaagaagccgcaggatcagcttgttattgagagagagaggaaatgggagcaacagcttcaggaagagcaagagcaaaagcggcttcaggctgaggctgaggagcagaagcgtcctgcggaggagcagaagcgccaggcagagatagagcgggaaacatcagtcagaatataccagtacaggaggcctgttgattcctatgatataccgaagacagaagaagcatcttcaggttttcttcctggtgacaggaataaatccagatctactactgaactggatgattactccacaaataaaaatggcaacaataaatatttagaccanattgggaacacgaactcttcacagaggagatccaagaaagaacaagtaccatcaggagcagaattggggaggcaacaaatccttcgggaaat

SEQ ID NO: 3147 - DNA, 469 bp, Homo Sapiens
taggaggttatacaccaaaattgataggagacagacctaatacatacatatacacaaaagcatggcagaatatgttgtacaacaagaaggagcaaaactaaatgtggcaatggtaaggccatcgatggttggtgacagttggaaagaaccttttccaggatggattgataactttaatggaccaagtggtctctttattgcggcagggaaaggaattcttcgaacaatacgtgcctccaacaatgcccttgcagatcttgttcctgtagatgtagttgtcaacatgagtcttgcggcagcctggtattccggagttaatagaccaagaaacatcatggtgtataattgtacaacaggcagcactaatcctttccactggggtgaagttgagtaccatgtaatttccactttcaagaggaatcctctcgaacaggccttcagacggcccaatgtaaatctaacctccaag

SEQ ID NO: 3148 - DNA, 921 bp, Homo Sapiens
  misc_feature (94)..(94): n is a, c, g, or t
gggtgcgggggcaggacaccttgtcgttgggatcgcagtggtagttgtcgatgtcccactcgcgggtacacgactgggtcatcttcagcccccnaccccagcactgtgcagacgaccaccaccggtgcctggacccccacgccgaccccactctccacacccagcatcatcaggaccacaggcctgaggccctacccttcctctgtgcttatctgctgtgtcctgaacgacacctactacgcaccaggtgaggaggtgtacaacggcacatacggagacacctgttatttcgtcaactgctcactgagctgtacgttggagttctataactggtcctgcccatccacgccctccccaacacccacgccctccaagtcgacgcccacgccttccaagccatcgtccacgccctccaagccgacgcccggcaccaagccccccgagtgcccagactttgatcctcccagacaggagaacgagacttggtggctgtgcgactgcttcatggccatcgtgcaagtaacaacaacacggacggcgatcgctgaagggtggagtgctgagccagccgaccatgccccaacctgactccaacggacttccaagaccgtgacgcgtcgaggacacccgacggcatagctgctaggccactgggagtgccgactgcctactgccaccgggctggggcagacacgccactatgctcgacctctccgacggcacgtctaactaacagcatacccacgggcaaacgtgcaacactcaacgtagacctggatgggcagggacagtcacgcaccacatcacgagggacaaacacccgcgcagccagcatccgagcaactaaccacctggaaaacacaacagaacaaaggagtaccaagcaccacggcaccccctcagagagcgcccacgagaact

SEQ ID NO: 3149 - DNA, 263 bp, Homo Sapiens
agttggggtgggagttggggtgggcatggggagcagatgagcatggggaggaggtgagcattaggaagggtgagcatggggaggaggtgaacatgaggaggaggtgaaccttggtaggcagccctcctgggaattagtactcatccaggtctgtgctataggaagtgaactcactgcgctgccaacttggtgaccgcctcaatgttgaggtggacgctgccccaccccaactctgaactgggtaccgagccctcgaattcgat

SEQ ID NO: 3150 - DNA, 661 bp, Homo Sapiens
aaaagtttccacttgcgatacaccagcaccaagttccaggacacactccacagcaggaagtgaccactgcctgagcaggggcggggactggagcctgctgcccttggtcgcctagactggatagtgggggtgggcggaaggcaacgcaccatccctctcccccaggccccaggacctgcaaggccaatggcctggtgagactgtccataggaggtgggggaactggactccggcataagccacttccccacaaacccccaccagcaaggggctggggccagggagcagagcttccacaagacatttcgaagtcatcattcctctcttagggggccctgcctggtggcaagagggaatgtcagcaggaccccatcgccatccctgtgtctctacacgctgtattgtgtatcaccgggggcattattttcattgtaatgttcatttcccacccctgctccagcctcgatttggttttattttgagcccccattccaccaccccagtttcctggggcacaagtgtctgtgcatgtcccccaggagccaccgtggggagccgatggggaggggatggagaaacaagacagggcttctctcaggcccagtggccggtcagccacaccagggcaccgcagccaataaaccgaaagtgttacagccaa

SEQ ID NO: 3151 - DNA, 864 bp, Homo Sapiens
  misc_feature (685)..(686): n is a, c, g, or t
cgggggccggagagcgcgggcggctggggaatggctgctgccatggtgccggggcgcagcgagagctgggagcgcggggagcctggccgcccggccctgtacttctgcgggagcattcgcggcggacgcgaggacaggacgctgtacgagcggatcgtgtctcggctgcggcgattcgggacagtgctcaccgagcacgtggcggccgccgagctgggcgcgcgcggggaagaggctgctgggggtgacaggctcatccatgagcaggacctggagtggctgcagcaggcggacgtggtcgtggcagaagtgacacagccatccttgggtgtaggctatgagctgggccgggccgtggcctttaacaagcggatcctgtgcctgttccgcccgcagtctggccgcgtgctttcggccatgatccggggagcagcagatggctctcggttccaggtgtgggactatgaggagggagaggtggaggccctgctggatcgatacttcgaggctgatcctccagggcaggtggctgcctcccctgacccaaccacttgacttaatctcactttcttaaattcttctattctcagacactgctctagtaccattccttcctcttagccccaggagcaaattaaaaggtacagttaaaatccccccaacgcacactcaccaaacaaaattnnaccttgttcggccgccttccgcccctcaaaaactttcctagaacatttcctttgggcgcgcggcccccaaaaggaagggaacatgggccatagctggttccctacgaggaacccgggccgtgacctagggcctggaaatccctcccccaataaacaacgcccgcgcgggcacccgagt

SEQ ID NO: 3152 - DNA, 297 bp, Homo Sapiens
tctagaggatcccagttcacgtaggggtgcggcagagactaactcaggtcacagttaagtatgagtaccttaccaggaaggatataagtgtcaaggtctccagcatcacatcatggtacaggcatccctgagcctcattaagaagactccattcctccagggaaaaagtttacagccacgtcttcaaaggtcacactgctctgttatgatggggatagatgaaaccataaatggcccgtgctgaagacccaccatccacttcccccacatatctacccttgcccatcctgtctccca

SEQ ID NO: 3153 - DNA, 1088 bp, Homo Sapiens
  misc_feature (752)..(752): n is a, c, g, or t
tgcagaagaggcctcaacccaacacctgtccaagttcgttcccatgaggcgtcttcccaggtcaagatgcaccaaacagtcacgtggaggttttacacattccttaactttcagcaactaggagcctgcctcctttaattttaggattctgccaccagtgtggtcttcccagctccaaacgtgccgggagatcacagaaacgaaacaaaacagcacagtgtccccagcggcctcttgtcaggaccagcactcatcaccctcccaaggctttgtgaaggtctccgaggctggacattcctaggaaacccagagagtggaggtgggggccccacggctaaaggcagggcgccagggacccacgtggctttctggtgtccagcggccgaggggacacagacggtgccaagcatggttctcttcggccaaggctcccccgctgctccaccccaccctctccggaagaagtcctcaggatacgttttgcctcgggcggagggcaggacacaagctaagctgcagaaatggaaatggaatggaaccgacacgtctgcctcagtgtttcctggaggagtcagcgctgctccgggagcctttcatgttttgtccaggcagctgcgtgggcacctccgggggcaggcagctgggcagggcggccgaagtggaggccacatgctcctcaaagctgttgatgcgaggctttttggtgggttcgggggctggctagcggggtgacactatagcgtctcatgaancgggttaggtcccttccttgaatcctctgacctctcccggtgtgtgcagacggactcccacggttcagggcagatgggattcccacacgggcaggccataagcgacaggcggtcagttttcaggacggtgtgaaaaagggcattttcagggaagggcatctccctcctgcacctcttattcaaggaaagtagggcaaccagggcagcgcaaggaagggccctgggtgggcaaaatgacccagccacatttttcctggccggtttccggtttccatggatcacctggggttccaaagcgcctgggaccaaaggttcctgtgtagggaaattcccccc

SEQ ID NO: 3154 - DNA, 661 bp, Homo Sapiens
gaaggactaccaggacaggtggggtgaggcagagaagttctagtatgcagctgcccaggcaagaggagaatggggtctccacagacctgaagaatgaagacacgacagaataaagactcgatgtcaatgaggagtggacggaagaaagaggcccctgggccccgggaagaactgagatcgaggggccgggcctcccctggaggggtcagcacgtccagcagtgatggcaaagctgagaagtccaggcagacagccaagaaggcccgagtagaggaagcctccaccccaaaggtcaacaagcagggtcggagtgaggagatctcagagagtgaaagtgaggagaccaatgcaccaaaaaagaccaaaactgagcaggaactccctcggccacagtctccctccgatctggatagcttggacgggcggagccttaatgatgatggcagcagcgaccctagggatatcgaccaggacaaccgaagcacgtcccccagtatctacagccctggaagtgtggagaatgactctgactcatcttctggcctgtcccagggcccagcccgcccctaccacccacctacactctttcctccttcccctcaaccgccagacagcacccctcgacagccagaggctagctttgacctcatcctactcgacc

SEQ ID NO: 3155 - DNA, 1011 bp, Homo Sapiens
aatgtgacatatgacagtggtacaaaaaagcaggctggtacggtccggaattccgggatatcgtcggacccacgcgtccgccacgcgtcggctcgctgcagtgctggagagaggcctctagacttcagtttcagtttcctggctctgggcagcagcaagaattcctctgcctcccatcctaccattcactgtcttgccggcagccagctgagagcaatgggaaatggggagtcccagctgtcctcggtgcctgctcagaagctgggttggtttatccaggaatacctgaagccctacgaagaatgtcagacactgatcgacgagatggtgaacaccatctgtgacgtcctgcaggaacccgaacagttccccctggtgcagggagtggccataggtggctcctatggacggaaaacagtcttaagaggcaactccgatggtacccttgtcctcttcttcagtgacttaaaacaattccaggatcagaagagaagccaacgtgacatcctcgataaaactggggataagctgaagttctgtctgttcacgaagtggttgaaaaacaatttcgagatccagaagtcccttgatgggttcaccatccaggtgttcacaaaaaatcagagaatctctttcgaggtgctggccgccttcaacgctctgagtaagcattgctgggtgtcaggagagaaaagccaaagaagggggtgccagacagctctgtgcaacctctaggccatgagtgggatagataccactgctgctttaaaaaatgggagaccatagaccctcaggagagaagaatcccttctaccctggactcgctctcttctctggaactaacttctcccccataccctgattgtctttggagaaaatgttctggattctagaatctaaggcagagccttttaagccatactgtacacataaatcacctggaaccttgttaaaatgcaaatcctgactcaggaggtctgagttagagcccaggatttcatatttctagcg

SEQ ID NO: 3156 - DNA, 805 bp, Homo Sapiens
  misc_feature (683)..(694): n is a, c, g, or t
  misc_feature (711)..(720): n is a, c, g, or t
ggggaaacgggcagataagctgcaggagcgactgcaggacatcctcactaacagcaagagccgctcaggccttgaggagctggttctctcagagatgaactcaccaagccggacccagacaggggacagcagtagcatctcctccttcagctaccgggagatcttgcgggaaaaggagagctcggctgttccagccagggtaaggggaaaggaagaacctacagctccagcttctctcaacccaaaaatctgagaacccctccccttttctcctcacctaaacccatctcctactttgggcgcagcacacatattttcttgtcaacttttccccaagcccaccaacttggattcagattgcgacatgcaggacaggccagtcattctctctctctgactttctgtttaatcatctgtgggctaattcccccttctctggtgccataaattatgtggctcataggaggtgcaccatcccaggagaaggtcccttttttcaacttgtaatgatccctaattattattgccggctgtcatgtcagcctccctaacagccactttcctttgggaataaccttttttaatggtccacaaataacatgtgcttcactggaagaacatttttttaaaaaccccccaaggagcaaagcattttttttaaaacccttaaaggtctgggcccnnnnnnnnnnnncctcatccccaataaannnnnnnnnnttggggaaggccaaaggtgggcccgcgaccccttggagcctccggaggtttaagaaaccaaccggggaaaacgggggtataaacc

SEQ ID NO: 3157 - DNA, 700 bp, Homo Sapiens
tcatgtcctgcctggcatatcagtgctttcatgccttaaaaattaagaaaaattatctatctctatgtgctataagatggtcttcaacttctactgtgcctcgaattactacccattatactatttatccccgggataaggacaagagatgggaaggagtgaacatggaaaggtttgcagaagaagcagatgttgtaatagttggtgcaggccctgcagggctctctgcagctgttcgtctaaaacagttggctgtggcacgtgaaaaggacatccgtgtgtgtctagtggagaaagctgcccagataggagctcatactctctcaggggcttgccttgatccaagtgcttttaaagaactcttcccagactggaaagagaagggggctccacttaacactcctgtaacaaaagacagatttggaattttaacagagaaatacagaattcctgtgccaattcttccagggcttccaatgaataatcatggcaattacattgtacgcttgggacatttagtgagctggatgggcgaacaaacagaaaccccttgatgttgaagtataccctggttatgcagctgctgaagtcctttttcatgatgatggtagagtaaaaagaattgccactaacaatgtaaggatacaaaaggaatggtgcaccaaaagcaacatttgagaaagactggaactcattcttc

SEQ ID NO: 3158 - DNA, 676 bp, Homo Sapiens
aggatccttacttaaaggtatcacagctctcgcaggacaaagccagaatagccaatggggcatctgtggggacaggaccaaaagagtcgctgcaaggacggtgaggcccgtgccgtttctcctctatccttgctagggtctctgtggttcccagccctgccggctcaggcacctgcactcctccacactgtgggcacggccatggctggtggcatgggtgacggtggtatccatggcgatgtcgctaagtcccacgctagccatcttggtgttgtacacggtctggatgagcacggcctccaggctctgcagcacctgcagcagctccgcgcgctgcaccatgcccggcaaaaaattcagtttcttgatggtactagcctcatttgaagcgcttagtagctatcttattggatgagtgcaggcacgcaacatttccattgcaccagaaagttctgtcggaagcgctgtgtatgttaagtgctgggtattgctggaaggagttgctgtggtcattatccctggttccctgtcccatattggaaccgttccagctctcattggttcttcttgctgctcctctctctgctgggctcttcctgctttcttctcggcagcctctcactctccctttgcctgaccacacccataatgtataccacctaaggcggaccgagcc

SEQ ID NO: 3159 - DNA, 497 bp, Homo Sapiens
tgcacagtatcttcgctccttctgggtctctctgtttttgacttgcttatgcttcttcaactctgcgcctggataactttcatgttaatccattctgagtcatttgttcttcttggcctgtcaagacacccaaaaaaggccaagctgttcacccagggagccatactggcacattccttctgcgcttgatactatctgttaattcccttcagccagggaccagtcactttaggctattagcctgcaggtcatttagaagatttaagtaaatatctgatttgaggaacctgggataagagtccttttccataagagtatatatgactttttgtgcttcatcaaaacacgtgggggttggtgctttaatcttattggctgtagattctcgagtgcggaagtcaatattgatttgtttagcagcatctgaatgcacaaatgctttatatatctcttctgctttacagggcaaaagatcagactctgctttcttatagtct

SEQ ID NO: 3160 - DNA, 391 bp, Homo Sapiens
gaccggctaggaggttacaaagagataaatgcaggcgcttgggtaccatccactgagcacgtccccaggagctgctggtacagcttgcctcaatatcttatcagtaagtgcattcctggatgtgcttggagtcagcttgcactagttattcccttaagggagggggataaggggactgcaagtgaagaggctaaaatggagtctgtccagctctctcagctgagagagagtcactcagattaaaacaggatagggtatcccagatagacagttcattagatatgtaactgatgatagatagactacttttatggctcctcccatgtccattaaaactaaaaccgtgtgtgattatgtttccttgaatcattaccacttttttcctcctaag

SEQ ID NO: 3161 - DNA, 612 bp, Homo Sapiens
  misc_feature (535)..(535): n is a, c, g, or t
ttaatctcaccagcccaaattctaaaagttaatgccactagtaacaatcaacagcaggaaatacaaacctgctaacaaccagcccactcattagcaaaaaagcagtttaactcaaatacttagaccaaagtataacactaaaccaaactgccccacccaccagcaagaagagaagatataattacttaaaaatcaacataagcttagtatttcttacaaggataacaatgttccaactcccgagagagtgctcagaaggactaaaggtggagtgaaggcaatgtctagggattagtatcccaaagtgtttaaaaacccaaagtaccacaaacacactcaacttgtctatgaattagagaacaagatactgctgctgcttctttttgacttttgaaatatacaatgttttgtaggctctgcccttcaatgtgaaagcaggacattaaatttgaaattatttgacaattaaatgtttaggaccatctaacttcaactgcaaaactaaacagatctaccttgtccttccttcaaaccncctcacaaaaataagagaaaacaattcaaacatgattatttttttaaagtccttgaaagtattaaaactctcagaga

SEQ ID NO: 3162 - DNA, 524 bp, Homo Sapiens
tgttgtcctgcataccttgggtgctgagttatcacctacttttgctttttcaagaatattatttttatttttagtattatttccactgtttgcaggaaagtcattttataaatggtctgataatggctttggaatttgaagtttaaagattagaagcgtgcttgggtcttgcaccaccaaaaggaacactgatagatggcaggctcgctactaccttgggggaagatcgcccaagcactgatggaacttgactacagaaattatgtaaataattattattcattaggtcaccagtgctgtttaaaagtagtccactcccttctgaggcctcattacctatctgttcataaagatacgactaacattctgacttgcttgactatatttatttttattctgttactgaatctgctttggagggtaaagtctttggaacaaaaagaacacctgggtcttgcattccataggaatcacaaccattagatagataattcgctgctggtgtgtatataacagtggaaaaa

SEQ ID NO: 3163 - DNA, 610 bp, Homo Sapiens
  misc_feature (463)..(463): n is a, c, g, or t
cgaaggcgacgatggcgcgtccatcagcagaaagagatagtccccttatttggcctttctttcattcaagccttctaaaaagggttctgtaaagagaaagtgcctttgaaagtgcggtctatagtcagatgttagccagacgctcttggaataatcccttcgtaatagcctcattgtgtgtttcctttttgggttttaaaagatgtacactcaagcctacaagaccagtaacctgcgaatgaagatcatcaagaatgacttcccccagccaccctctttaactggagggggcgctcaccaagagcacccattaccagcaataccaaccccggtgtcaccctgcagaaggggctacaccatcaactgggaccagacgcgcccccgccgaactcgccatctggctcatcaacgttcaacaagtgagtgggttgtcccagcacaggagcagtgtagctcaaagctngataacgatgccttgttgcaaagtcctggacattgcgtctaacgaaaccacaggctagcccatgtgatccacgcaggagtacctagaggggtgactatctacccaggagttaagaattaaaggcgcgccatcgtgcccttcgtccgc

SEQ ID NO: 3164 - DNA, 821 bp, Homo Sapiens
ccttgatgtcctgctctatgttaatatccagacaccttctctgtggttacaagagaagcttgagtgagggcactttctgtcctcagaagtctgtggaatgactttttggtagtgttttctcgtctcactgaaacacaacatggcaaggtgggtagcacaggattcattcttattttgcagctgaggaaacaagctcagagaggtcaacggacctactatctgctctccagctggaactggaactgaagacatctgacttcagtaactcaacattctactgccacttcctgtcctggatacacaacgggagtaatgccagagctgcttctaagaacaggtgcgcaaaggaagtgttttagtctcattcttctgacaattgccaaggaaatactcctcaggccttgtgtgcacagcattgccaaaagtctgtggttaggaacatacaaaaccacaatggagactgggagtgggaagatgcgcggagaagatactgggaggtctgtggcttgcccctggcttgagtttcacattgagtgcttacactgtcccaggtactgtgcctggaccacagagctgacagtgggatggtccaggagtctgcccggtggtgctctcattccagtgggttcaacagtgagccagaagctgccaataagagagtagtggactgcatcgggccgaccttagtgttttgtttggtccagatagtgtatagttatttaagttgctcacttctagcttctgcgaagcaatttctgctggattcctgaataagtagcagccaccccccatcttgcaggcaggacatcgagacaggggat

SEQ ID NO: 3165 - DNA, 794 bp, Homo Sapiens
aagcgcacgatggcgcgtcctcggcggagctggtgatcggctggtgcatattcggcctcttactactggctattttggcattctgctggaaatatgttcgtaaataccaaagccggcgggaaagtgaagttgtctccaccataacagcaattttttctctagcaattgcacttatcacatcagcacttctaccagtggatatattttggtttcttacatgaaaaatcaaaatggtacatttaagggactgggccaatgctaatgtcagcagacagattgaggacactgtattatacggttactatactttatattctgttatattgttctgtgtgttcttctggatcccttttgtctacttctattatgaagaaaaggatgatgatgatactagtaaatgtactcaaattaaaacggcactcaagtatactttgggatttgttgtgatttgtcgactgcttctttttagttggtgcctttgttccattgaatgttcccaataacgaaaattctacagagtgggaaaaagtgaaggtccctatttgaagaacttggaagtagtcatggtttagctgcattgtcattttctatcagttctctgaccttgattggaatgttggcagctattacttacagagactatggcatgtctgcgttacctttaaatctgataaaaggcactaaggagcgctgcttatgaacgttgggaaaacactgaagacattgaagaagtagacaacacattcaaacgattaaatccaagcaaagatggtcgcctttgcagcaggggcggc

SEQ ID NO: 3166 - DNA, 507 bp, Homo Sapiens
ccatgtcaagtacacacccacatccctctatatcccataatacaacacacaaaaatccaatctgtctccttctacctaagcaattttagatagtcactttctcataattaccttaagctccctgacttgctgctcgtcctttctctggcaaaatctcatccttggatgagcccgactttgtgtttgctcaatgacaccactcacctgaaccagaaaaaatatcaaaaagtggtcagagatatcatcataaattcaaattacttacataaaaaattggccctaaatgtttccagaaatcaataaaagttttgtttctccaaagacatcatttcttcagaaacccaacgtgtatacctattttttctatgttcttctaacattcattcaacttctctcatctgatatcgtgccaaatcattcaaagagaaaatatatcccactagtcaaaagccaaccatattcccatcaccctgagaaaatcatatgcacaggcgcgccatcgtgccc

SEQ ID NO: 3167 - DNA, 262 bp, Homo Sapiens
gttcacatctttggccactatttgcttgtgaaaaggtataatgaggtggtacttatcatttttactgtgtctcatgttttgtatatttttgtttcatcaactaagatgcactgtaacatctctgaaatctggatatattatcaatggtttatcatagttttgttagcaatacactgtcttttagtggtgcctaaaataatggtatagttgtgaggtgttcttagatttgatgaagcacagtatgcaggtaggcctgatggga

SEQ ID NO: 3168 - DNA, 292 bp, Homo Sapiens
cacgatgcgcgcctaaacacagtggtgagtgtattttgtcttgtaatccttcatctcctaatgaccttgtgcagtgtaggtacttttttatgcccatttcatagatgagcaaatggaggctcagagggcttaagtaactcaaggacacttaaggtagtcaccatggaaataagtagtgaagtcaagagtaaagcaagatgcttctgggcatcagagcctaccttcttcatcatggtattaggccttcccaggtcagttgtttgtgatttgccttctctcaaacttagtttca

SEQ ID NO: 3169 - DNA, 767 bp, Homo Sapiens
caaagttaggagcttattgtcatccagcactgagttcaagttctcaacccactctggatccacatcgccattcgaagacgatccactggcgcttctgcagctcgcctctcacgctgtcgatgatctttctcagcacgtgtgtgaagagcccatctgtccattcctggtgttggggtccagggttccgtagaggtggtctttgctgatggccttggggtcgatgatatgggccacaccttccacaccctcgagtctctccaatgccttcagcaggacacgccaggccatgctcttcccacttcccgagggccccaccatcatcaggccatgattgatctgggtgatctgatagagctggagaaccttttcaacccacattccaccaacttcttctccatctccatatgtcaaatacatctcctgacacactttcttcagctcctctcgaagggcagtcatctcacccctgtgatactggactccagggaacacgtccgacaggaggctgaagagcagcgggatgtcccctgccaccagctttggcaccatcgtctcacagacgctctgtatcagaatctcttgttcagggagattttcagcaatttctccttcatcaactgcttcccctcgttcctctttctccctctttatcttctggattctctctctcttcacattgcctgcactcaccagcacactcttcaaagcccgaagacacgaagtcataatggctttggaagagctgctcatcgcatagtttgcagata

SEQ ID NO: 3170 - DNA, 770 bp, Homo Sapiens
  misc_feature (554)..(617): n is a, c, g, or t
aagcgcacgatggcgcgtcctggagataatttcttaacctctctggtcctcagtcatctattctgtaaaatggcaatgagagaaactctgccctatagggctactgtgcagattaaatgagttaatgatagaatgtgtgagtgggcaatggatgtagctactattatacagacccatctcatccatcaagaaaaatcaattcagttccttggtctttaatacgaatgaataaccacagagatttactcacagaggagtaagaggagaataacgattaaaaaacaaaaatggaccctttaggaaacaagagataattagggaacagatgagaactcagggagaaggaaaacctaattgaaatcctcaagaacataaaaacacggaggggatgctgtgaataaaaaataaagaggaaacaaacactcttagaaattaagactttaattgttaaacgtaaaacaaagaaatcaatcgatggagaaaaaggcacaaagtgaaggaaatctctccagatgttacaaggaggagacatggacacgggacgcgcgggaggnnnnnnnnnnnnnnnnnnnnnnnnnnnnnnnnnnnnnnnnnnnnnnnnnnnnnnnnnnnnnnnnggaaaaggcggcgttgagagactggacgcgcggtaggaaaaggcggcgtggagagacgggacgcgcgggaggaaaaggcggcgtggagagacgggacgcgcgggaggaaaaggcggcgtggagagactggacgcgcgggatgaaaaggcggcg

SEQ ID NO: 3171 - DNA, 179 bp, Homo Sapiens
ctgcagattatagggggggtcggcgaacaccatgtcgaccgaagcgtcgggcaaggcgcgcagcacctcgaatgcagtcgccccgatggatgacgtcggtcttcaactcagacatggaaagcgccccgcaactcagatagccgggatggtgatccttaggtaagcgggggtcagtatac

SEQ ID NO: 3172 - DNA, 777 bp, Homo Sapiens
cctgtgttctcctcctcgagctgccagatgtgagcaccaacccgagccctgcagctgaacccgcaccgccgctcctgggccgagaagcagtgcagcatcctcaaaagcagcgggttcagcatctgccacagcaaggtggaccccaagcccttctacgaggccagtgtgcacgactcgtgctcccgtgacacgggtggggactgtgagtgcttctgctctgccgtggcctcctacgcccaggagtgtaccaaagagggggcctgcgtgttctggaggacgccggacctgtgccccatattctgcgactactacaaccctccgcatgagtgtgagtggcactatgagccatgtgggaaccggagcttcgagacctgcaggaccatcaacggcatccactccaacatctccgtgtcctacctggagggctgctacccccggtgccccaaggacaggcccatctatgaggaggatctgaagaagtgtgtcactgcagacaagtgtggctgctatgtcgaggacacccactacccacctggagcatcggttcccaccgaggagacctgcaagtcctgcgtgtgtaccaactcctcccaagtcgtctgcaggccggaggaaggaaagattcttaaccagacccaggatggcgccttctgctactgggagatctgtggccccaacgggacggtggagaagcacttcaacatctgttccattacgacacgcccgtccaccctgaccaccttcaccaccatcaccctccacagcccgctaagcgat

SEQ ID NO: 3173 - DNA, 157 bp, Homo Sapiens
ctagaggatcccagtcatgtaggggtgggggtgtacttaagagaagaacacaactgaaaatatctgtgggatatgtgtggctgtgtgtctttacacttgcatttacagttctttataatagtacataacataaattgttcattgcactgtttagagt

SEQ ID NO: 3174 - DNA, 545 bp, Homo Sapiens
agttcaagttggggtggggtgggagtaggtagagctgagaatactacatcttagtggtgacctttagccacgtgggtgaagtggctaaggccatggccatatctgttgtcccaggccaaagactaacaactgccttgggaatcccttccttgtgtccttaccaaatgatagctcataaaactctgataatgtaacaaatcactttcaaaggagttcccagaagtcttcagaaagactaaaattctgtctcttcctgctttagacagccattaagatccccaactaattttaccgaacctaaaacccacaaagaggttgtttgtgttattgttcaatcttcagttgtaagagtaattctctatttttatattgaaacataattacttgatagctcagggtctacatttcattcaactttttacaccaaattctgcagagtggtcaaaatggaatattgggggctgttgtaaacagaggcttaattttattagaagtagccagttatttattaaagcatgatgttaataaaataggcatattctgga

SEQ ID NO: 3175 - DNA, 291 bp, Homo Sapiens
gggtgatctagaggatcccagttcaagttggggtgggctggcatgagatgctccccgaccatcttcagcctggtgcagcctgctgactccctgatgcaccccacctgcccctcttccctgtttgcagtggcacgcgctgtcgcgagaagagcaggccaagtactatgagctggcccgcaaggggaggcagctgcacatgcagctatacccaggctggtcagcgcgggacaactacgtgagtgcctagtgacacacagcaggggtgggcaggggaccctttgagataccatg

SEQ ID NO: 3176 - DNA, 690 bp, Homo Sapiens
gagctcccactgctgtagtcagagagtcacccagggcggccaccactttgatgtctgctggtcgggagctggtggacagaggttggaacactattggaagccttccacttctgtacacagaaagtcactgccccagttctcaatggctggcttgatggggtacgtgtagttactattccgaggggttctcaggaagggctcattctgagtgggacaggtgatgggcatctctgctctcaggtccagggtctctgttttgcttccaagtggttcaagcatattggtccaaagggctccggccagctgggagtggaatttctgatttgggtggatgcagtctggggcaaagaaggacgtatctgggagcccatccgccaggacagggagctggatgttctggaagaagggctgcagcaccacagagaagtcctcctgcgtgtcatagcggcctgaccccaccagctcgcgcatgctgctccggtaggctcggctgaaggcctccagcctggctagctcttgggagttctcccgcagggtcagaacgcagttacacaaaacgctggcctgctgcactgggcacttgtctgggtttcccaggaacacctgccgcatgatagtggggttcaggaagtccacgaggttgaccaggactctgggcacctctctatgcagcccatcaagacaggggac

SEQ ID NO: 3177 - DNA, 1011 bp, Homo Sapiens
  misc_feature (833)..(833): n is a, c, g, or t
  misc_feature (942)..(942): n is a, c, g, or t
  misc_feature (964)..(964): n is a, c, g, or t
cggtccggaattcccgggatgggccacaggcagctccttgccagctctcctcctcgcacagccgctcgaaccgcctgctgagccccatggcccgcgccacgctctccgccgcccccagcaatccccggctcctgcgggtggcgctgctgctcctgctcctggtggccgccagccggcgcgcagcaggtgggtcccggcgccctggggtccccgggccggacgcggctggggtgggcgccccgcgccgacagccccgctcaatcagcgagtctattcttccctaggagcgcccctggccactgaactgcgctgccagtgcttgcagacactgcagggaattcacctcaagaacatccaaagtgtgaaggtaaagtcccccggaccccactgcgcccaaaccgaagtcatgtaagtcccgcccagcgctgccgctgccaccgctggggtccccgactctcccgctgccccaaaccctgtcctcagcccgacctcctgtctcacgagattcccttctctctgcagagccacactcaagaatgggcagaaagcttgtctcaaccccgcatcgcccatggttaagaaaatcatcgaaaagatgctgaaaaagtaagttataatttccatgtacacaggcgactggagctgttggtcagaaatactggcgtctgccccctaaaaagtaaatcaggaaaacccagggttagctgcaggactgaaaaaattattattttcacaaagttgccattaaggttattaatctgttctggtgccagaggatattcccagtgcccagggtcaccacccaggttcttccctcctgccagtgaatgtangtaaaactgctttcatgtaaggtctcattggagtttgccagttgtgctgaagtgttttccacctgttaaaaaaccaagcttcatttcccctagttctactgactttcanaactgaaaacagaccccctggnttttttgtaaaagtttaaggggtgaaatgcaaagatttcacaataaa

SEQ ID NO: 3178 - DNA, 871 bp, Homo Sapiens
tatagcaccgtggtacccagggtgagttggtggagaacagagagataagaagcagagggcttggggaaagcctgttcctctctgactcagccctttttggcattattgcaagagcttgactcctggttgccttttcccagccagttttcagttggggtgaaggtttctgcaagtgtgaggtccagatgctgctgctcatgttgggctttccttttgggaactatttctctttatttatagtgtcgggcttccggggaaagcaatcattggtgtgtatgtgtatgtgcatgcacacacgtgcatatacacatttgtgtatgtggaaatgtgctgggcaagtcaaaactatagaagagttgcctcctgtctctcgaatcttccagagatatcacttaattgttaacagcttttgtgttaatccccgttcagcccctagctcttttattctaccacggctggagagttgatacctgcagtcagcctgccagtgactcttagtgtctgtttctgacttatttttcctgtctctgtcttccaacccccaataatatttccaccggggatgcatcatttttactcccaatattctgtagagagggagtcaggatgctgtcttcccacgaatagtactcagtaacaaaccaattgcattttagttgggcagtgctcccacccaccctccagatcccttccagctaaaacccttcccccttccctccatgtgtttctcagtttcccgtttcgtttgttggactgttccactgcccctcctcctcaccctatcacccatggatcgtaatgtaaaattcttttaccatgtcaagaaattattaaaaatacaggtactttgacctctttctaaagccgcaaa

SEQ ID NO: 3179 - DNA, 501 bp, Homo Sapiens
  misc_feature (150)..(208): n is a, c, g, or t
  misc_feature (237)..(245): n is a, c, g, or t
  misc_feature (248)..(298): n is a, c, g, or t
ctgtgtcctgcctcaaagaatctttgcgtaccccaaggccctgaagagattcaacttatttactgatttacagttcttatttttttaagacagggtattgctctgtcattcaggctggagtggtataatcatggctcactgtgacctcgnnnnnnnnnnnnnnnnnnnnnnnnnnnnnnnnnnnnnnnnnnnnnnnnnnnnnnnnnnntggaccactcaccatgcccagctaattcnnnnnnnnnaannnnnnnnnnnnnnnnnnnnnnnnnnnnnnnnnnnnnnnnnnnnnnnnnnnacacttctgggctacagtgtcctccagctgtggcctcctagagtgctaggattatagctatgagacatcatgcccagcctgcttcataattttaccttttaccattaggcctatgacccatcctgaactgatctttgtgtcttgtgtatacacgtctgtaatcccaaccaaccgggcccggccaaccctattttttaaagaaa

SEQ ID NO: 3180 - DNA, 264 bp, Homo Sapiens
gctgagtatccaggtcatttggtgtgggcagcggacggttgggggcatggtctgcaggctcatctgtgtccgcctttcactccactaatgctgtctcagtgttttctctctctctctttcgagcttgcactccggtacccgacccggcgccctggcccatcccatgccggggggccagtggaaagaagacaggccgtccagcccgtgcccgcctgcggcgggggcacccagcaagcccacccaaaccccaccccaaattgaact

SEQ ID NO: 3181 - DNA, 661 bp, Homo Sapiens
cacaaataaataaaggggaagtcaaaacggaaggggcaataaggagaaagggggaatctaactcttgttctaaagagacattctggcacttcatcacagccagtagaagaacaatgtaaaacctccatctcactacacatttgacgtcttccactccaaacgctctaatctagtcagaaaagagcacagctcttcgctgaaagtcccccagggttccctgcatcaagccactacagggttattgaaaaatataatacttcacttaaggatatgctgcttttctccttgaaaacattttgtagacctgtactcatttaattagggttgcagaggagatggaaaaacaagctgtttgattatgaaggcaacacttctgtcagtagaattgctttggattgtaaatatgtttacttcagaggaaatcagtcagagtggatggctcagcaaaacccatcacaactgcggaaaaaggaagtgactggctagaggtaaggaaatagattttctctaagttaactggcctacgtgtgaatcgaaccctgcaccctggcctcattagcaccaacactgtgaagaacagctgtggcagagaaagtgccacggccccaccccatcaccagattcagtagaaaggcccttggaatttcctacaaggttcagt

SEQ ID NO: 3182 - DNA, 487 bp, Homo Sapiens
  misc_feature (316)..(325): n is a, c, g, or t
gagaggatcccagttcagtaggggtggggtcaaagcccatgggagcagaacttactgtggtagcatgcgcaatggcgataagtgaggctaggcggagaacttgcctatatgcggctgcgttgggcatgccggaggtgagcatgcgcagtagcgggggcgggcacgcccgcggtgagttggctgcgccggagaggattctaaacagcaagctgggaaaatgtggtcagatgtgggcatgcgcaaagcggctaccatgtgagagggaggtggggctcaggcaggtgacatcctatcccctatgggtgtcccctagacnnnnnnnnnnaacatcatcacttccccattctgaccccataacctcccaacgctgacccccataatgtcagtctgatttctgtcgccctggtatactgaccctaataatggtctgcgctgacccagtcacccggtagggaccccagcagggcagcagactgactctgtagtc

SEQ ID NO: 3183 - DNA, 471 bp, Homo Sapiens
accgaggcgcacgatggcgcgtccaacagatggaaattcctactttgcctcttggcatgcatacccagcctcttttctaaatgggtctcagtgattgtccaatgtgtgccccaaatcagatgaaatacaatcatcagaagcaaagcaggaaggtggtagatgacggacagtatgtaagtcggtctttgctgccagtggctttacttcatccttgagaaaatcatctttggtaaagtcataagtgttgaaactcgaaactagggtttaccctagacccacccattggccaaccttaatgggcacactgactttttaagagtgtgaaagttattagctaaatgacttgttccatggccccattatatcacagacatgttgatgtctctgttatcaaaagacgtgcaaaacaccccaaaatcgttgatgacattaacaggtaaaatgacagggacgcgccatcgttccccggtc

SEQ ID NO: 3184 - DNA, 606 bp, Homo Sapiens
cctcctcagcatcttgaggtaggtgggattgcagttgtgagccactgtgccgtggtcaatttttagttgaacttttagataaggatatacagggtttgcatacacaaaaaatgcaaataattcttttgttttaaatagcttccttttccctaaagagattgctgcaagtaactatgtactgtcctatatcttaagtgagctctacctacttctattcatgactgttagttgatacagagtatggatttcctaataagccattatatatttaactttatagaaagggaataacttgaagatccatgagatacttgggttcctaatttgtagaaagtgctgtaaaggatacagtaaaatagaagtttctctctcaaagcttagaagtttctctctcaaagcacctcaaaggttaagacctagcaaaatgtaattgctctagaaggcattcaatggcagcggttagatgatgagtcacacagtgactcattcaggagaaaagaggaggtgactctagaaatcttgaagcaggagtttggcacgataagtgcagaaagatgaagaggtggaagagaacagcaagaacaaaattttagacagtatatgaca

SEQ ID NO: 3185 - DNA, 475 bp, Homo Sapiens
cgcgccgaggtcagaagatatagtaagaaacacacacacaactccagcagccaccagctagacttgagtagagagagcaggtccaagtggaggtggaagttggaaagttgcatctgcaggcaaggcgaaagtggcctacacccactcctggagcaccctgcttgacgagcaaggtagacgaggctgagggatactgctggtgatgacggtggtcgtggtgatggtgctggtagctaacagatcttgagcgtaccaggccctgagctgagtcctctaacgggcagaatgtcgctgcatacggacagcagcctcaagaggacaaggtgatttagtgactctagcctcttcccgcggtgccagcctgatttcaccctctccggaacacacatgcgaacctccggggaagagagccagtatcgggtcctaacgcagggaagcgctccgttttctgagagggacgcgccatcgtgcgctt

SEQ ID NO: 3186 - DNA, 569 bp, Homo Sapiens
  misc_feature (507)..(507): n is a, c, g, or t
  misc_feature (523)..(523): n is a, c, g, or t
aggatcccctgccttgaggtcctgctgccagcacagtgggagtaggtggtagcgctggagatgaggggagatggaaaaggtgagacttggaaggacaatcctggggtacggagggaaaacaaactgctctgattcctgaagcccaaacaaacataactttccatcttctaacaactagaaagcagaagtctcctgagagttcaactctgatttgatatcagtctctcttatgcctaatcagctgtcctgattatgtgactcaggactctgagaaatatcctcaggaaaacctaaatatgttcatgagaaataacatttaagcatgacagtgtgcagaagaactagacaggtcacaatggaatgtgatgaggcaaaagagaaaaagaagtagatagacctgcctatgcctttcttagaagatgccaggagggtggtcagattctttcctctgtcagaaaagtagctgtatgtgtcaaagtttacagattatccatccactctctcttntactagggattaactnttactatctgtaccattcctgtactctgacattacctggttatgtc

SEQ ID NO: 3187 - DNA, 450 bp, Homo Sapiens
cccgaaccgcacgaggcgcgtcccccagggccttcggcggccgctctgcctgcgcgctgctcctgctctgctacctgaatgttgtaccatctttgggtaggcagacttccctgacgacatcagtgatacccaaagctgagcagagcgtggcttacaaagactttatttattttactgtctttgaaggaaacgttcgcaacgtttctgaagtctcggttgagtatttatgctctcagccttgtgttgtcaatttggaagcagttgtttcatctgagttcagaagtagcattcccgtgtacaaaaaaaggtggaagaatgagaaacatcttcacaccagcaggacacaaatagtacatgtgaaatttccaagcattatggtttacagagatgattatttcatcagacattccatctctgtatctgcagtgataggacgcgcctcgtgcgctt

SEQ ID NO: 3188 - DNA, 550 bp, Homo Sapiens
tggatccactgcctcgatgtcctgctcttctttttcttagttaagtgttaaaattaaattgcacaataagttatgccttatttatggcccttccggtaatttttaaaataacctttcaaattcttcctctttttaagccttctgggtaatcatctttaaaaaaactggatttctggatatctactccactccatctctattgacttttaaaacatgataatgcaaacctataacactggcaaccatcagtgaacctttaatttcattgattaatagcgtttgaagcttcctcagggaataacaatgacatcagcagtggttgacagtggaggtactattttggagctttccagcaatggagtagaaaatcaagaggttaagcattcaatgaattacatttctattttcttcatagaaatttgtgcatgaactaattttgaaattaataggaaacatatttgagagtaaaaatgtacaaagcatgaaattatacatgtacatgtcgtgtatccttatataatttaagtaatagaaggtcaaggaaggtgtt

SEQ ID NO: 3189 - DNA, 493 bp, Homo Sapiens
aacgagaggcacgatggcgcgtccacgaggccttctctgtgactgaggatacccgctccatccatccaagatagaaactcagctcgtggtgggggcttgctggcaaggtacctgtcattaccccccgcctcgactcgagaattaagttgtacctctttactaggttggtggcagcaggctgtgatcggtatcctacagccttaccctcgtgtcctggatcttttccttccatttcctgtgtacagcctttttggggacactgccgttaccccactctagctagcatagctctgtctgtaggtgctccataaaggtgataggactgaccacaccgtcacctttcccggaaacccaagagggagcgttccacagagggagcgtgtagtggggggaactgttttataaattaatccgtttattgaaaggttcacaaggacaaagaggcaacagcaagagtcaggcacagaaataaaggacgcgccatcgtgcgctt

SEQ ID NO: 3190 - DNA, 387 bp, Homo Sapiens
catacgacgaggcgcacgatggcgcgtcccaggaagaagaaattgtcgagacgaataacatgaggtcatatagaatcccacttttggtgatttcaagtcaagaaagtaaaactactggtcagaagttatatgtaaggctctttcaacgtaaattaagctggattaagatgaccaaattagagtatgaagagattgccttagacttaacacctgtgattgaagaattgacgaatgcaggctttctacagacagaatctgagttgcaagaactctctgaagtgcttgaactcctttctgctcctgaactaaaatccctagccaagaccttccacttggtgaatcccaacggacagaaacagcagctggtggacgcgccatcgtgcgctt

SEQ ID NO: 3191 - DNA, 400 bp, Homo Sapiens
  misc_feature (21)..(21): n is a, c, g, or t
  misc_feature (314)..(314): n is a, c, g, or t
ttacgcctagcctcctccttnaagcgtttcaattcccttcgagcctgggtcccatgccaatatgcagcaatggtcgtgactgcttccttacagcgcttcttgatgcttcagttcccgcagaatttttcgagccttccaaccccggatataagactgaattactaaggcggaactctttgtctgctggtacctcttttgttgcgcatatctcctgtaccaggcggcaatcacaatttggctttttttcattagcaggaagtgtgtgcggcatttccacccccgatatatcttctgaatgagagtggccaagtccnccaggcgttgcttcctcaggtcttctaatttgaataatgttcttgggtttcggatgaatatctttgatctaccaaaggagtattct

SEQ ID NO: 3192 - DNA, 644 bp, Homo Sapiens
agacgcacgatggcgcgtccctacgtgatcatcagatgccgccaagggtgtggccgcctacataagtcggaggacccgctgttcgtgctggagcacagcctgcccattgacacgcagtactacctggagcagcagctggccaagcccctcctgcgcatcctcgagcccatcctgggcgagggccgtgccgagcctgtgctactgcggggggaccacacgcgctgcaagacggtgctcacgggcaaggttgggcggcctcctggccttcgccaaacgccgcaactgctgcattgcctgccgcacagtgctcagccaccagggagccgtgtgtgagttctgccagcccccgggagtctgagctgtatcagaaggaggtatcccatctgaatgccctggatggagcgcttctcgcgcctctggacgcagtgccagccgtccagggcagcctgcacgaggacgtcatctgcaccagccgggactgccccatcttctacatgcgcaagaaggtgcggaaggacctggaagaccaggagcagctctgcggcgcttcggaccccctggacctgaggcctggtgaccttgcaagcatcccatggggcgggggcgggaccagggagaattaataaagttctggacttttgcta

SEQ ID NO: 3193 - DNA, 692 bp, Homo Sapiens
  misc_feature (662)..(662): n is a, c, g, or t
  misc_feature (672)..(672): n is a, c, g, or t
tgatcccctgcctctgatgtcctgcaatggtttaacccagtgaatctagtatcccctggagtataaaacctagagtggaatagtttcagctgcagtttgatgtggggcatgcacagaaaagacttcatttctcccaggcagctttcctgacacttggggactggcttgccatggattttaggcttctcttgcttcttgttgcctgtctgtgagtaataaagttgctttgcttaacttgatgtgacagtgttctgtctcacaagactcatccttggcgtatgtgcaaaactgagcttgtgtaaaaacctcctgtcagtgatagactttagtagacattcatgagggctttagagtcctcctctgagagtgatactggtgcatagtattggcgaggtatttagaatcctcctctgagattgatattggtgtgtggtaatcccctctcagggattgatactggtgcactgtattctacttcacattaggggccttataaaagagtgaggaagcaatgattcatattcttaggaagcttacaaccaaacataatacagatatgtgaaaagaactaacgtggatggtttcagatggttgagaagtcattggaggaactgcagtcagcgtgtcttcgagggagatatctactgatgggattggtgtangaagacagtnctgcagtacagggcagcagg

SEQ ID NO: 3194 - DNA, 522 bp, Homo Sapiens
cacgatggcgcgtccttaaaagaaacaacaggacccagcagacagattttacaaggtgtatttttacatatcctagcagatacacttggaagtattggtgtaattgcttctgccatcatgatgcaaaattttggtctgatgatagcagatcctatctgttcaattcttatagccattcttatagttgtaagtgttattcctcttttaagagaatctgttggaatattaatgcagagaactcctcccctattagaaaatagtctgcctcagtgctatcagagggtacagcagttgcaaggagtttacagtttacaggaacagcacttctggactttatgttctgacgtttatgttgggaccttgaaattaatagatagcacctgatgctgatgctaggtggattttaagccaaacacataatatttttactcaggctggagtgagacagctctacgtacagattgactttgcagccatgtagtgaatggaaagaaagtatgcacctgttatggacgccatcgt

SEQ ID NO: 3195 - DNA, 896 bp, Homo Sapiens
ggtaccggtccggaattcccgggatgagaggaagctctttcgcggcgctacggcgttggcaccagtctctagaaaagaagtcagctctggttcggagaagcagcggctggcgtgggccatccggggaatgggcgccctcgtgacctagtgttgcggggcaaaaagggtcttgccggcctcgctcgtgcaggggcgtatctgggcgcctgagcgcggcgtgggagccttgggagccgccgcagcagggggcacacccggaaccggcctgagcgcccgggaccatgaacggggaggccatctgcagcgccctgcccaccattccctaccacaaactcgccgacctgcgctacctgagccgcggcgcctctggcactgtgtcgtccgcccgccacgcagactggcgcgtccaggtggccgtgaagcacctgcacatccacactccgctgctcgacagaaaactgaatatcctgatgttgcttggccattgagatttcgcatcctgcatgaaattgcccttggtgtaaattacctgcacaatatgactcctcctttacttcatcatgacttgaagactcagaatatcttattggacaatgaatttcatgttaagattgcagattttggtttatcaaagtggcgcatgatgtccctctcacagtcacgaagtagcaaatctgcaccagaaggagggacaattatctatatgccacctgaaaactatgaacctggacaaaaatcaagggccagtatcaagcacgatatatatagctatgcagttatcacatgggaagtgttatccagaaaacagccttttgaagatgtcaccaatcctttgcagataatgtatagtggtgtcacaaggacgcgccaacgtgcgcttcgggcatcctctagag

SEQ ID NO: 3196 - DNA, 511 bp, Homo Sapiens
  misc_feature (121)..(121): n is a, c, g, or t
aagcgcacgatggcgcgtccaggaagccctcccctgccaggacagtgggagttggccgggtccttccaaagtgcctacggaaagctttgtcccatccttgaaaaattgctaatgggtttgngagatacgaggtggagatgactagcaatcaaactcaaaggtggaagtcacatcgaggcagatgagcagatgaggggacctagagaagaagagaggtgcaaggagagcccagccagcaggaacatctgccccagtaggcagcactgccccacatcagagtcgaggaaaacaaagctcggattggataaaagaaacttgcaaacacggtcagtgcttactgcatgtgggctcagagcacgttaccctcctcccctgcatgcttcctgtgaaacgggtttactgctctaacctctcagggacactgtgaagaccaaacgagaaaatagaaacaaacatatttataaaccataaagtactgacaccaaaagatgacgcgccatcgtgcgcttcc

SEQ ID NO: 3197 - DNA, 455 bp, Homo Sapiens
aacgcgacgatggcgcgtcctgttgatgggctggaagatgattggcgccactctgctgggagatgggcccgcgggttccccacgtaccagcgcaccaggccggggatggagtcgaagctctccatctcgaactggtactgcacgcggctgtaggcctcgcttgaagtcccagaactgtccggttgattttgaagtgctgagcgaggttcttccactgacaggtcaggacaaaagttcccagggctggacagagagtcacgaactaggaagtcaccatctcgctgcacaagggttttcagacaccctgtcgggggatgcggccgtggtaccaggcatgagctgcgcaggtcctcgcctgctcaggagcagctcctcctccagctccttcttcagtttctcgggggtcctgtccatgatgtgcctcctccttatacacctcgcatattccacagttt

SEQ ID NO: 3198 - DNA, 825 bp, Homo Sapiens
acgagccaccaggcccagcctgagtggtattttctttagggaccaggtagactttaaaacgagggtaagagaaaagccagtgtctttctgaggtaaataatttctgccaggaaacttcccagccccaccagcagccaccctaaaaaaaatcactcgtgtccccagggacttctaaagcttggggctccaggaaatcatccagtagagttggagattcagagatttcttgaagccagggacatgctcctaactcctttcccattaaaggtgttagaatagaccagagggtgtcccttttccacagtaatgggatcggctggtgtgccttcagggaggaagagggaggtggtcaagcttgaaaaactggctttaggatggttctgactttgttctccctccccaagtgttctcaacctccattctgcagtgttcagagttttagggaaagggtttgggtgccccagcatccaggtgttgtgtggcttagcgcatgtgaagtgaaaaccttctggggttgtttggaagcagctttctggttcttgtgattgtatcctgaggtcccagaaccctattctcccacgaggatcctcagtgaccatggtggccacacgcctggccagcctgctggctcctgggtgagctgaagaaccttgcctgtggcacttttcgagggtgagctggaaccgagagaacatggtccccgtgctgggactcatgcgggtcatttcctgccggcctggtttcgcctggtcgtgtctttatgagcaccatgtaagcctccttgtattgagataattgggcattaaacattaaactgcagctttg

SEQ ID NO: 3199 - DNA, 1543 bp, Homo Sapiens
ggcatccgggaagccaggagaagagcagtgatcgaggtgcaaactctgatcacatatattgacttgaaggaggcccttgagaaaagaaagctgtttgcttgtgaggagcacccatcccataaagccgtctggaacgtccttggaaacttgtctgagatccagggagaagttctttcatttgatggaaatcgaaccgataagaactacatccggctggaagagctgctcaccaagcagctgctagccctggatgctgttgatccgcagggagaagagaagtgtaaggctgccaggaaacaagctgtgacggcttgcgcagaatattctcagctatctcgacctgaaatctgatgaatgggagtactgaaataccagagatctcacttttgatactgttttgcacttcatatgtgcttctatgtatagagagctattcagttcattgatttatacgtgcatattacagtctcagtatttatgatagaagcaaattctattcagtatctgctgctttcgatggtgcaacgacaaatatcattacagacacgttaacttttccacttcggatcattatctgtatgatgtgcgtgtggtctgtatggtatagtcctttcttactagcgtacttgaattcagaacaaccaaaatagaggcagcttctgtacgacttttaacatgggatcggtgcaagcattaaaatgcaaggatcttgccagcaatctagaaactaggccataaccgttaccaataatactaggaaagatgcatgagaacacaggggaaaactcagcaggcgacacactcaagcagctacagggtcaacaacacgaacgcaggtgacagtggtcgactgttacagcagtcaactggctgcgactagacagcgactacgccgacgcccacgtatactacaacgggcctgagtaaggagcctaacccagactacaagcggggagggcgcggctcacgacgcaaggtcagaaaggtacccaagaacgagcatcgtggaacactttccggtagacaacactcaccacacacgctcaggggacaagacagaagccatcgtggcagcatacgagaccacccaattccatacgaaaacagatgagtacgaaagacaggcgaaagatctaggaacacacaggaaggcagaacaaaacagtaacagaacaaccaattgaaacgcaccctaagataacgccccacaaagacaagcgcacgtcgggaaagaaaacgggacactctaacagaacgacatacaacggcggcaaacacacaagcgagaacacaccagaccgaacaaaaggcagccccgtacgaccaaacgatacggcctagcaccgaggcagggatgacacacaacccgacgacgcacgcaaccacaaggtaacaccacccaaaaacaggatgagtagacacagcaaagacgagcggcagacgggtgaacaccaccacgaccaacacaagcagcgcgacaaagaccgcggcaccaccacagcacaaaccacacacaagcgccgaagaccagcagcacagaccc

SEQ ID NO: 3200 - DNA, 1249 bp, Homo Sapiens
  misc_feature (167)..(167): n is a, c, g, or t
  misc_feature (176)..(176): n is a, c, g, or t
  misc_feature (643)..(667): n is a, c, g, or t
aattccccaagcccgcttaattccatgggccccagggtttttcccttaggaaaacaaggttaagggccccaggttccactttacctaagtgggggcccggggcgcccaaaacggaaaggttctagaaaaggttcttcgagggcccgagggcggccgaacacggtaantttatttgntattgggttttgctttgtcagcctttattaatcaagagtaaagccgagccctagggtttccttaacaacaacaaaaagaacatcaaccttgtttatggcaaacagtgacttaattcttaatgactgttcattatatgtttaacaccacagagcaagaattgatcacgtttcaatcacttattcttctgagattaaaatacaagattaaaacagattaaaataaaattcactccaagaatttaaaaaataattccaaatgaaagacatttcaaacactgtatatagaactcaggaccaaaagaagaccttaaaacattttttacctttgaggtagcacaataatgctgaattagatttattttattacagtgagcttaaaaaaacaacacggaatctaccctttgctcaaggtgggctaaatggttttacgcaaacccctccatgaggttagtgacagttcttgtccnnnnnnnnnnnnnnnnnnnnnnnnnaaagtataaagatagccctgcagtgtgtaaaaggaaacctatgggaaggctgcttcccataaaatagacaatagaatcattgaggaacgtcagcagtcaagacaggaggaacaagaggtcattgtagtgaaaaaccaaaacaacttgtatcttggcaagattggtttacaagttcatgacaagaacaaaaattccaacatcagccaactgaaaataaaagataaaagatgacattcatggatctttttatttttctctgtgcaaaatgctcttctttctgaattagagggtagcttgtacactgtgacatgacatgaaatgctgtgtgcccagggtgctgctgggtgccaacagcacctctcactgaatacgatatcactgtgtgcagagaaaacgggcaatcagaggataaacataacctctcctggctggagaaccatttcttgcgactttgctgctgaattcactcattaaactgctcaaaggaaaagctctaccctgatttctgagagtctacagcaatatatgtaacacaattatatatgaagactattgactaacaggacaatagcacatgaacct

SEQ ID NO: 3201 - DNA, 1508 bp, Homo Sapiens
gtaaaagtcgactacagatattagtctcaggacggagtctacaaggcctatcctcttccagcagtcaaggtctccatggactggctaagactcagacccagggtctttcaggaggcagtggtggataaaagacagtacatttggccctggttgatatctcttctgaatagtttccatccccatgaagaggacctctcaagtattagtgcgacaccacttccagaggagttcgaattacaaggatttttggcattgagaccttcttacaggaacttggatttttccaaaggtcaccagggtattacaggggacaaagaaggccagcaacgacgaatacgacagcaacgcttgatctctataggcaaatggattgctgataatcagccaaggctgattcagtgtgaaaatgaggtagggaaattgttgtttatcacagaaatcccagaattaatactggaagaccccagtgaagccaaagagaacctcattctgcaagaaacatctgtgatagagtcgctggctgcagatgggagcccagggctaaaatcagtgctatctacaagccgaaatttaagcaacaactgtgacacaggagagaagccagtggttaccttcaaagaaaacattaagacacgagaagtgaacagagaccaaggaagaagttttcctcccaaagaggtgagaagggactatagcaaaggaataactgtaactaagaatgatggaaagaaggacaacaacaagaggaaaactgaaaccaagaaatgcaccttagaaaagttacaggaaacaggaaagcagaatgtggcagtgcaggtaaaatcccagacagaactaagaaagactccagtgtctgaagccagaaaaacacctgtaactcaaaccccaactcaagcaagtaactcccagttcatccccattcatcaccctggagccttccctcctcttcccagcaggccagggtttccgcccccaacatatgttatccccccgcctgtggcattttctatgggctcaggttacaccttcccagctggtgtttctgtcccaggaacctttcttcagcctacagctcactctccagcaggaaaccaggtgcaagctgggaaacagtcccacattccttacagccagcaacggccctctggaccagggccaatgaaccagggacctcaacaatcacagccaccctcccagcaaccccttacatctttaccagctcagccaacagcacagtctacaagccagctgcaggttcaagctctaactcagcaacaacaatcccctacaaaagctgtgccggctttggggaaaagcccgcctcaccactctggattccagcagtatcaacaggcagatgcctccaaacagctgtggaatccccctcaggttcaaggcccattagggaaaattatgcctgtgaaacagccctactaccttcagacccaagaccccataaaactgtttgagccgtcattgcaacctcctgtaatgcagcagcagcctct

SEQ ID NO: 3202 - DNA, 412 bp, Homo Sapiens
  misc_feature (288)..(322): n is a, c, g, or t
gagaggatcccagttcagttggggtgggaaaagtcaactccgatgccaccattgcgggcaggacgaaggatgctttcttcctagaggctccgagctgagctgcgaactcgccccccgcccttgggacaagaagacccagtcacatcactgcacccgtcctgtgtcctcaccattgctatgcaaagtgattcttgttgtacataagatttaaataatgcacctatttaagacatgttgacaaattgcgggtctgggacccgcctcttatttatgaagtctttgaccgtnnnnnnnnnnnnnnnnnnnnnnnnnnnnnnnnnnncctggcgtgtagtactgtataaaccagtcagctgtcgggttagtggtagtattattgttatttttttaaaggaaacaaacagacaacaaa

SEQ ID NO: 3203 - DNA, 565 bp, Homo Sapiens
gtggggtgggaggtcaactggggtgggatggtggggagataagaaccgtgagagaagtggcacaaaggagttatgggacaaagggtccaagataggcagaaaagaaaatgtgccagtagatggggaacgaaaggaagtcggagggctcagacactgagggggacagaacatctccatgtgcactctcatctcttatagtcagcaacaggtatccacggcgcagggccctacatcatctgctaccctgaaggatctggaggtaggaggctctgggcggaggtgcagtgaccccgcaggccagccctccaacctcctcccgcagcggggactgggtgcccctctgccagctgagacagcccacacacaacccagccctaatgatcgttctctctacctctcccccaagtcctcctccgcctcctcctctctgcatgcgcgtcagagcccgtgccaagaacaagcagcagtcctgaactcgaggtccataaaaatcagtcgactgaatgacaccatcaaatctttgaaacaacagaagaaacatgtggaacatcagctggaagaagaa

SEQ ID NO: 3204 - DNA, 744 bp, Homo Sapiens
cttaagtctagtacgagggcctgggcttaaatcggcacgaggggagcccttagatcatggacacagcatggcatatccatgcccacggtgctatcactcagatcatggacacagcaccgtgggcatggatatgccatgctgcactgctgcctgggattgcagctgaggtgggagtggagaatggttcccaggaagacagttccacctctaaggtccgaaaatgttccctttaccctggagtgggagtgaggggtcatacaccaaaggtattttccctcaccagtctaggcatgactggcttctgaaaaattccagcacacctcctcgaacctcattgtcagcagagagggcccatctgttgtctgtaacatgcctttcacatgtccaccttcttgccatgttccagctgctctcccaacctggaaggccgtctccccttagccaagtcctcctcaggcttggagaacttcctcagcgtcacctccttcattgagccttctctgatcactccatccctctcctacccctccctcccccaaccctcaatgtataaattgcttcttgatgcttagcattcacaatttttgattgatcgttatttgtgtgtgtgtgtccgatctcacaagtatattgtaaacccttcggtgggtgggggccatatcctagacctctctagtatcccccagactatctgtaacagtgccaggcacacagtaggtgatcaataaacacttgttgattgag

SEQ ID NO: 3205 - DNA, 911 bp, Homo Sapiens
  misc_feature (500)..(521): n is a, c, g, or t
agagcataatggcagcgtctgaggttgctggtgttgtggccaatgcccccagtcctccggaatcttctagtttatgtgcttccaaatcagacgaaggtctcccagatggtctaagcaccaaagactctgcacagaagcagaagaactcgcctctgttgagtgtaagtagccaaacaataaccaaggagaataacagaaatgtccatttggagcactcagagcagaatccctggttcatcagcaggtgacacctcagcagcgcaccaggtggttttaggagaaaacttgatagcccacagcccttttgtctttctggcagtggggtctcactcttgatttgaaaggatgtggcccagcacagcagggagaggaggggggacaccaagcccttccgggagaagccctccattcccagccactccggtcctccttaaggggcaggggtggcccttacctaaagccagctttgcccttcccgtgaaatttgcgctcttgaaagnnnnnnnnnnnnnnnnnnnnnncccttcccatttcctaaaaagggaaagggttaaaccatggggacacacccagccctttgggaatttcccccgaacctggataaatggtccctccccagccaaaatgggggggttttgaaatggagataccccagaaggggaattcaccgtattgattcgatcccgagaaataacattctcttcccctgcgaagcgttttctcccccgaaccacttcgattggataacgagagtgggactttttcagagaccacgcgttgaatttcatcggtgcgtcaccgccctacatgtccagaaatattttgcatgaagtaatccttgcccgcagcatactactgcccgcgcctcgtcacccaccccaaggtaaagtaagcagtgacacgaagacaga

SEQ ID NO: 3206 - DNA, 870 bp, Homo Sapiens
ggatatgaaaaaggcagaggctcgtctgcttgaggaacaacgaagagttcaggtttaccttcatgaaagcacacaagatgaattagcaaggaaatgtgaacaagtcctcattgaaaaacacttggaaattttccacacagaatttcagaatttattggatgctgacaaaaatgaagatttgggacgcatgtataatcttgtatctagaatccaggatggcctaggagaattgaaaaaactgttggagacacacattcataatcagggtcttgcagccattgaaaagtgtggagaagctgctttaaatgaccccaaaatgtatgtacagacagtgcttgatgttcataaaaaatacaatgccctggtaatgtctgcattcaacaatgacgctggctttgtggctgctcttgataaggcttgtggtcgcttcataaacaacaacgcggttaccaagatggcccaatcatccagtaaatcccctgagttgctggctcgatactgtgactccttgttgaagaaaagttccaagaacccagaggaggcagaactagaagacacactcaatcaagtgatggttgtcttcaagtacatagaagacaaagacgtatttcagaagttctatgcgaagatgctcgccaagaggctcgtccaccagaacagtgcaagtgacgatgccgaagccagcatgatctccaagttaaagcaagcttgcgggttcgagtacacctctaaacttcagcgcatgtttcaagacattggcgtgagcaaagatctgaacgagcaattcaaaaagcacttgacaaactcagaacccctagacttggatttcagcattcaagtgctgagctccgggtcctggcccttccagca

SEQ ID NO: 3207 - DNA, 671 bp, Homo Sapiens
  misc_feature (267)..(276): n is a, c, g, or t
aggctgcgctgctgaccaccctccctggggcccgggctctgtaggaaagttggtccttgactgtggcattgcactctgcactgtttctctctgcagacctaggggaaaactgcaggtggaagtgcttttctactaaggcctcttactttgggggggatgctgccctacagaagacatagaagatggggaaatgccaatgggcaaagagctactttgaatacataattctcttcaaagacttcaccagcaaaccaaaacagcaggttnnnnnnnnnngatgcttttttgggtgcaagtctaacctgtctagcatagagatcttcttgattttctgattattttatgtagcttgagacaaagtgaatcaacttccacttagttgtaccgagcataaaacagaacttgggcttcctggcagtgaggccactgtcccatcacagatttttaaaataaatatgatttgaagtagtgtgatctttcacacaatcatactcagtaggacctttatgaaatagggcaagtatctgtctcatgcgagcacacatgaaggagggtttaggttaaggtctgcagataatccaaagggcttttatgagatacattacccacaaaagtccatattgcctttgttgcctaacacagacaaaatagacttagatttattaatagaa

SEQ ID NO: 3208 - DNA, 402 bp, Homo Sapiens
ctgagacgaacagctggcgtccagagcggtggcagaacgaggtgggcacaaaggctgggcccgcaggcctaagatcatttggtgcggcgcctccagcatctccataagagaaggtgtcaagtgggtgtgtccccaatgagcttgaacaagaagagatgttccaggcatttgagccccgatggagcgcagagccggcaggcagggagcaagagcttagcgaaccttcccggctgctctgggtacattgtgcttgcagtagcactccacgtaggtctcggtcattgggctccacgtccagctcagccatccaggatcctctccaccaggcatcgtcctcgttggcgctgctggtcgactccaccttattctcgttccgtcccagacttaactgaagccagattc

SEQ ID NO: 3209 - DNA, 862 bp, Homo Sapiens
  misc_feature (30)..(30): n is a, c, g, or t
  misc_feature (182)..(226): n is a, c, g, or t
  misc_feature (269)..(324): n is a, c, g, or t
  misc_feature (349)..(363): n is a, c, g, or t
  misc_feature (497)..(507): n is a, c, g, or t
taccagctgaggcaagaggatggcatgagnccaggagttcaagaccagtctaagcaacatagtgagatcccaactctaaaaaaattagaaaactaaaattagccaggcatgttgacacgcgactgtagtcccagctactctggaggataaggtgaaaggatcgtttgagctcaggtgttcannnnnnnnnnnnnnnnnnnnnnnnnnnnnnnnnnnnnnnnnnnnntgtgagatactgtctcactatacaaaaattagcaatgctgccnnnnnnnnnnnnnnnnnnnnnnnnnnnnnnnnnnnnnnnnnnnnnnnnnnnnnnnnttaatcaactgcacacagctgaagnnnnnnnnnnnnnnngcaactgtcctaaaaaaccaacagtattcatttaaaggcaggtactatactcactgtgttccataatatatgctccataaatataattcctcctcattcctggacatcacttagaaccctagaactctggcacnnnnnnnnnnnaatccgagaggtggtcgtctcatttttacacatccttgtttccatctcaccaaatgcatctgcctcccgtgatccaaggataagtttccttttagctttcgacaacgtacaacatgtagaaaaaaaaggaactcagaatatctatacaaataaaaaagggtatctgagcaactagcaaagtgcaatactacacctgccatttttaagtattcaaagttttcaaaacattttctgcagaaaatcttgaaatcgaaaagtctagtgaggcacactgactggatttcagagtgtcatttttaagctcaaattttgaaatcattatgttcagacaaggtcctgtgtcatcatgaacccc

SEQ ID NO: 3210 - DNA, 1755 bp, Homo Sapiens
ggtccggaattctccggattggcggtagcgatcgctgcagcgagggtctggcggctaaaccgtggtttgagccaggctgccctcctgctgctgcggcagcctggggctcggggactggctagatctcacccccccaggcagcagcagcagttttcatctctggatgacaagccccagttcccaggggcctcggcggagtttatagataagttggaattcatccagcccaacgtcatctctggaatccccatctaccgcgtcatggaccggcaaggccagatcatcaaccccagcgaggacccccacctgccgaaggagaaggtgctgaagctctacaagagcatgacactgcttaacaccatggaccgcatcctctatgagtctcagcggcagggccggatctccttctacatgaccaactatggtgaggagggcacgcacgtggggagtgccgccgccctggacaacacggacctggtgtttggccagtaccgggaggcaggtgtgctgatgtatcgggactaccccctggaactattcatggcccagtgctatggcaacatcagtgacttgggcaaggggcgccagatgcctgtccactacggctgcaaggaacgccacttcgtcactatctcctctccactggccacgcagatccctcaggcggtgggggcggcgtacgcagccaagcgggccaatgccaacagggtcgtcatctgttacttcggcgagggggcagccagtgagggggacgcccatgccggcttcaacttcgctgccacacttgagtgccccatcatcttcttctgccggaacaatggctacgccatctccacgcccacctctgagcagtatcgcggcgatggcattgcagcacgaggccccgggtatggcatcatgtcaatccgcgtggatggtaatgatgtgtttgccgtatacaacgccacaaaggaggcccgaacggcgggcctgtggcagagaaccagcccttcctcatcgaggccatgacctacaggatcgggcaccaacagcaccagtgacgacagttcagcgtaccgctcggtggatgaggtcaattactgggataaacaggaccaccccatctcccggctgcggcactatctgctgagccaaggctggtgggatgaggagcaggagaaggcctggaggaagcagtcccgcaggaaggtgatggaggcctttgagcaggccgagcggaagcccaaacccaaccccaacctgctcttctcagacgtgtatcaggagatgcccgcccagctccgcaagcagcaggagtctctggcccgccacctgcagacctacggggagcactacccactggatcacttcgataagtgagacctgctcagcccacccccacccatcctcagctaccccgagaggtagccccactctaaggggagcagggggacctgacagcacaccactgtcttccccagtcagctccctctaaaatactcagcggccagggcggctgccactcttcacccctgctcctcccggctgttacattgtcaggggacagcatctgcagcagttgctgaggctccgtcagccccctcttcacctgttgttacagtgccttctcccaggggctgggtgagggcacattcaggactagaagcccctctgggcatggggtggacatggcaggtcagcctgtggaacttgcgcaggtgcgagtggccagcagaggtcacgaataaactgcatctcagcgcctggatatctacc

SEQ ID NO: 3211 - DNA, 322 bp, Homo Sapiens
tttcgtcatagcctggcaactttgctcctgcccttgcagacagggatgctgtccttccagcgttttctaaacttcgggtcagagcccaaaggtccccacccctgggtagggctgttttcactgggcggggggcgggggaatacactccttgggaactgtcacaactgcccgtaactaatgaattgtgcattgccacctgaggcctgtcccccatgagaacagcagcagcgtgaaggcgaggctgtccagctgaatgcctgtgtcttctggggaccagagtcaggctctggccatgggggatagttgatggagtgacccattt

SEQ ID NO: 3212 - DNA, 491 bp, Homo Sapiens
caaggggccacttagggcactgctagcagggcttcaaccaggaagggatcaacccaggaagggatgatcaggagaggcttccctgaggacataatgtgtaagagaggtgagaagtgctcccaagcagacacaacagcagcagacctaaggcatctctactccctccagaggagccgcccagattcttgcagtggagaggaggtcttccagcagcagcaggtctggagggctgagaatgaacctgactagaggttctggagatacccagaggtcccccaggtcatcacttggctcagtggaagccctctttccccaaatcctactccctcagcctcaggcagtggtgctcccatcttcctccccacaactgtgctcaggctggtgccagcctttcagaccctgctcccagggacttgggtggatgcgctgatagaacatcctcaagacagtttccttgaaatcaataaatactgtgttttatacagaaaaaa

SEQ ID NO: 3213 - DNA, 674 bp, Homo Sapiens
  misc_feature (617)..(617): n is a, c, g, or t
actgcctcgatgtcctgctttgaaaagtatgtgtttagggaatgtttttatttgcatacttactatgtttgctatggaaaatttagaaagtaatgttaagtaaaatgaagaaaataaaaaccatctgtactccctccattctagcattaactactatttagattttggggataaagttttcctgtctttttacattaatacaataatagttaacatttattaagcattttctagtaccaagtactattccagttgctttacatgtattcgtctaatcttcacaataacttcaagggggcaggtattattgtcctcatttttacagataaagaaaatgaggcaccaaatacatgattggtggggtattttagttttttgaaaatgctatttatatagttttataccttgttttttcatattattatccttctgtgtatacctaatattctattatgtgcatagttcctcatatacttggtcatatcgtaagttttggattttaagttctttgcattgttaattataaggttttatgaatatttatttagcagaatttctacccacctcctcctgatcttcttccttctaataatttggcaaccaaaaattgatagttntaatttgcatttcattgattacccctgatatagaattttttcatatacttatgccaa

SEQ ID NO: 3214 - DNA, 500 bp, Homo Sapiens
caagtgactggcaaatgggaagtcctgctggtacaagctttgcaacactaagaaccatgtctccttcccaaaattctaacagctgaaatattgactgccggagatctcctaaagtttttcttttatcaaaggtcaaatcccacacgctttctgtttgagagactactgggtgcagagccccattgaagaaatgatactgagggcccaagtgaagatgcaattcaaaagtattgtttgcagaatcacattctgcccttttggtttgcagttcaatgttagctgcatccatttcattcagtaaatgacatggaaccccatatcttggattagctcgagcttcagggggtctctgcaactgggatttccgataaaacaacatgtaggcactgtctttaccctgaaattgctgttcaatatccttttccctgattggctggactttagaatcatttatatcaaaccagtggggacaggagatgctattgtttaaacctggggat

SEQ ID NO: 3215 - DNA, 439 bp, Homo Sapiens
tttgtttaaaatcctagaaaacagtgaaataagtttataaaaacatagtggtataaacgctaacccaatcttacatgtaaatctcacctcttaactaagatggggagaggcacaggaaaaccaacgtcaacaaggacttaaactaggagtgataaggctcttaaatataaaaaggcatatggaagttgcagtctacattttatatcaaccaatcactttcctgatggtcagtcaggtttccaaggaaattgctggaagttctaattaagtaaaaaattcagccacacactaatatcaaagcacttttcattagagtactgtactctaactcgtcagttgcagtactggaatggtgtttaaaatagcaatgtttgcttacagcactgcaaatatgatttctggttctgtgcaaaaaaaagatttttttcgaggggagggg

SEQ ID NO: 3216 - DNA, 1806 bp, Homo Sapiens
tgtattctctcgttggtgtgtgtccccctttttgttctgctgatcggttgtcttgtttgtgcgcagagcctatgtgttgcaatgccgttggttcttttccgttttcccctttgtgtcccctcgccgtggccttctgtgtgctctttttgatgtcccttgtggatctgggggtctttctccgtgcacttgttctctgtgtgttccgtatgggcttttcccggatatcttgttatggatgtcctttgtttcatttccggtttgtcgtgattgtgtcgttccgggagcttccggccagtcatgtcgccatgaggacttcctgctgttcatctcatggtctcacggcttgtcccggtctcctctcctcgtcaggatcttcggggacgatgtgaattcgggttccgcagaaagtgctcgttgtgtcaccagggcccagccttcccgtgcacatgccgtagtctgtgagcattgatgtgcccgtccgcatccaggaggacgttgtccagcttcaggtccctgtagatgatccccctctcgtgcaggaagtttgagggcgatgcagtatctcgtcctctgtagtgacctggcgtgctctctcagggagcttcctctgcctctgcatgtggaacatcaggtccccgccgttgacgtactcaatgaccaggtactatccgacttgtcgtctggaagcaggagtgtaatccagaccaggaaggggttgctggatgcctgcgtcaaacacgtgcttctcatgtctgtacccagtcgatatcctcgtcatcatgcaccagcatctttccgtcaccactttcatggcgtaaatttggtcattcttcttcaaccgcaccaggagaaccttggcgtagctcccagcgcaccgatgactctgattaggtcaaagtcctgcagcccaagcccctgagagattttgattccatccatcccatcgataactggcttaaggtcctcacgagtcgtctttaatgctgtcatgcttccagggatgaggaaatgtaagcaattccatctgtctccatcggaaggaaggtcggcgtcctcgttcttgtcgtctactggaggctcttgggaaggcatgacagaatccatatgctccctgcaggtcagcgggacgaggccgctggcagcgcttatggaccagcagtttgcagttgatgcacctgtagccttgcctcgcgaggccccatatcctctcgctgcactgaccgcagtacgctctcctgttaaagcgcttggcttggaagaggtggccgttggcacggtacagcttcctccatcttctggctccccggcggtagatagatttgtcttctcccggacatggcaggccaggctgctcaggggtgctcgggaaaacatgaatgatgaggccttcatccctgcactgacgggccaggcggaaagcctcttccagctccatctgggaggacaccgtgcaagggtcaccttcgctgtccacccacttgagggtgagcgggtgctgctggtgcagacgacacatgtctctcacttcctcacagagctcctcgaaggtcgtggcggcgtccacgctggtgatgaagatgtcccccccgtaatgcgccttgaggcggacgcggccgccgctcccttccatcttggggccggtcctgctgggcatggcgcgctccccccgccgccgtcagcgctgcgccccgggagctccggccatggcgcggggcgggggctccaggtggggccgcggcggaacgcggaaggcagcgctcagcctcgtgccgattaaccaccaggcctcgtacctagccgtaagtt

SEQ ID NO: 3217 - DNA, 771 bp, Homo Sapiens
ttagtagggatattatcacccacatttacaaaaatgaggcctagaaaaattgtaaaatgaaagtgatagagatgtctgactctgaggcccatactttcaactggccaattatgatggtcaacagattgttttggcagattggccaccgaggcaagaaacgccaaagatccaaggacaattttaattctaaatggcccaaaattgaaacctggatgctacacacattagcaaatcaaaagtatagctgacatcaaggagatagcaggtgggcaaaggggactctatccagattatctgaactttcaaacacctttcattgactgcacagcaaagggttttgtttgttttaaactctgcttcagttatcaagattttggagaaaaactgtaggtctccctttaccattcaaagaaaagtagatttgaaataaagttcaggactaaataggcacatctcttgataaagaagtgctgtctgtcaacattatttctcccccaaaaattagtagggccattcttatttgtcagattttgaaagtaaaataagagaattcagtttccagttatggtgccccacaacaattcttctactgaacgcagccaaaaattctggacaaaatattttcacaattttcttaaaagcaacacaaaaataggaaggaattatctggccaaaataaaagggaaaatgggaacccagtgaggtaaaggaacaaaaagccatttttgcccttaggatattgaccaatcacaacaaacagccttgcaggac

SEQ ID NO: 3218 - DNA, 681 bp, Homo Sapiens
agctggaccgagggccgatggcgcgcctactaaaccaggcagtttatggcaaatacctgccttgaccgtgcttaaattagtgaacttttgggcaccaactggtcgatttaccatagaaattggtagttgctgcaaaaagaaaatgttgctgaagtgctgctgaaagggccagagatgcaaggatttgggatacattttgaacctttaagctgtctgacattgacctcctttcattattaataaagaagaatcaggagcttaggatgtattaacaccaactcattaatatactaaccggacaatgttctacaaacaattctacattgtaaaggactggattggcacaaaataaaataattttattttattcagcttataatatgactcgatggaggaaaatttgataagcatgagagaagaccattcttttcatgttcgttacaggtaagactattgctgtcttaatggatgacttttaatccttattttaaagtgtttttaactctgatgaccatttcaagtttcagttgaaaatactcaaatataccagccatagtattgtctgtagacaatattttctttttgttgtaagttttcctttctgtaagaaaatgatagtagagaccaattatgtactatggtttgtttaatgttctctgctatcattttcttacagaaaaa

SEQ ID NO: 3219 - DNA, 739 bp, Homo Sapiens
  misc_feature (557)..(607): n is a, c, g, or t
tgtcctgccttcttcacaaaggaaaagatttgtcatgcttctttggaaatgggactgaattctgatgtattagcttttacatatgaaaatttgtattttaattccttgagtttgaataacagataatatgggaaatctaatatcatacaggctcagaatatctgctctgttcagtatcaaacttatcctttgcaaactctcttcttcctgttggtttgattttaattttgaccaataataccactggttcttggcccccatgtccagcccagctagtcaggaaatccagtcatttccacctttttagtattgtatgtctcatctttagtatatcgtctgtgctataagtcttataccactatcctgtttaaaattcttctggaaagccaagtaaactagaaaggataaagttgaaacttgttagcatggcacatgtggtccttactgatgtggccgtagcctgccttttcagacccatctctatctacttcctactcaagtgaatttgattcctgcttcaagcaacaggaacagctcctttttcttaacctctgcannnnnnnnnnnnnnnnnnnnnnnnnnnnnnnnnnnnnnnnnnnnnnnnnnngttctttagggttcaactcaagggaatcacttgtatgaaacttttccttttgtcttcaggtagaggtaagcatacattgctctgtaattccatcatgcctttatttattcacactgtgagagatggtattgt

SEQ ID NO: 3220 - DNA, 324 bp, Homo Sapiens
cggcctccactcctcgccgctcaccctgcaggcggatgagcctgctcctgggaggcgcccgtggctgttgacgagactcgttgaactgaaccttcaggcggtcgatctcacgcagcaactcggggctcctctcatgcctcaccaactcctgggtcacctccttgtactccaccgtgggcttcatgggcccgcaaggacctccacggtcggcgagcagcttctccacctccttctccacaccgctcctcttgcccgccatctcctgcaggcttggccttgagccgagtgatctcctgctctgtctaccggatcacctggaagata

SEQ ID NO: 3221 - DNA, 592 bp, Homo Sapiens
  misc_feature (237)..(256): n is a, c, g, or t
gtcctgctccagcagagtagtagttgattgctcacttgtagcacctgttccatcctttactcgtagggtttatctcaaaagagaaaagtgtaataattaccctaggaaagaatactagtaactggggctgggcttaaataagtgcctcccagtataaatggacaccttcttttcaaaaaagattttatactcggcctggagaacaacctcagcttatctctgaaagtattatgtgtnnnnnnnnnnnnnnnnnnnnaaaatattagcagcggcttcagaatttctatttacgtgaggcgctctgccttaatctggttccgagagtggccgaaggacttgtttgaagcaccctttgcactgcaagatgagatgtttttagagtgagcttatttggattggtttggagctgagggtaatgatgaggacagctgaggcctatcccagccactctggtgttctcaggactaaatatcaccttcagtatttttagatttcttgccagcagataaatttagaagcacttgcaatgtgcttttctgggtctgcagcatggaagtgttaagttcctgtccagcttcacctcacaggtggg

SEQ ID NO: 3222 - DNA, 441 bp, Homo Sapiens
ccgaagctgccgaatgggggctgaatgtgcgagtccatagctgaagaggagcgccagatggtggaggaatacacttatttatgaaactgtcttgagttcttcttgaattgccagttttcagcctcctcatgcctccgtctcctttagacgacagggtagtagtggcactatctaggcccgtccgacctcaggatctcaacctttgtttagactctagttaccttggctctgccaacccaggcagtaacagccaccctcctgtcatcgccaccaccgttgtgtccctcaaggctgcgaatctgacgtatatgccctcatccagcggctctgcccgctcgctgaattgtggatgcagcagtgccagctgctgcactgtggcaacctacgacaaggacaatcaggcccaaacccaagccattgccgctggcaccaccaccactg

SEQ ID NO: 3223 - DNA, 578 bp, Homo Sapiens
gtactgctgagagctgactgggctaatgaggcagggaagtacattctagaaataaatacaaacactgaggaaggagagagcctggtactttcaggacattgcacttgttcctgtggctggtacagaggtgatgtgccaaaggggaagagaagaggccacagaagctgcagaagtcagcctgtgtctgcagaaacaatcccttctgcttcttatgacaccatcagcacctgttaattataacactgctccaggtagagttaaaattccatgcatgcatgatctcttaaattacccgtctgtggaatatagcatgatgtaattctgtggttaagtttttaaaagtaaagtaagtgtcatccagaaagaaatgtgacttgaattgcgacctgagtatgaacttgaatttgtcttaatggattcacggattttctgtttacgggattggggaataattatctgtaatgtgaaatcatctacatttattctgaaaattcacctgtcagaacaagtctatctataccttttctctctgaataaacagattccaaacgaccaaagaaaaatggtttcttttttga

SEQ ID NO: 3224 - DNA, 449 bp, Homo Sapiens
gatatgctcgtacccgtcagacgctgaactatgtgcaggtgggcctaaagccgcttgtccaagagtgcatggtgcatgactgcgcagatggaaaaaaagccctcctctcctccagaagaattaaaatttcagtgtggccaaaagactctgaggccccgctttaagattattgggggagaattcaccaccatcgagaaccagccctggtttgcggccatctacaggaggcaccgggggggctctgtcacctacgtgtgtggaggcagcctcatcagcccttgctgggtgatcagcgccacacactgcttcattgattacccaaagaaggaggactacatcgtctacctgggtcgctcaaggcttaactccaacacgcaaggggagatgaagtttgaggtggaaaacctcatcctacacatagttcagcgtctgacgggtaccgagaccga

SEQ ID NO: 3225 - DNA, 536 bp, Homo Sapiens
tgggtgctagtcgtctccagaggatcccctgtcggagggattcgatgggaaagctgtatggcaacgacttcagccagaccaccatctcacgatttgaggccctcaacctgagcttcaagaacatgtgcaagctcaagcccctgctggagaagtggctgaatgatgcagagtcctctccgtcagacccctcagtgagcacgcccagctcctaccccagcctcagtgaagtatttggtaggaagagaaagaaacggaccagcatcgagaccaacatccgcctgactctggagaagaggtttcaagatgtatctccctcagggtctctgggccccctctctgtccctcctgtccacagtaccatgcctggaacagtaacgtcatcctgttcccctgggaacaacagcaggccttcatctcctggctcaggactccacgccagcagccccactgcatctcaaaataactccaaagcagcagtgaactccgcctccagttttaactcttcaggatcttggtaccgatcgaatccctccacg

SEQ ID NO: 3226 - DNA, 461 bp, Homo Sapiens
tgtggaggattcgatcactcatgctagtctaaccagaggggcctgtgacggtgtctgcttctctttcaggattcccagttgtttctgtgtcaggcactaagcaatctggcggcttttggtccaaatgggtattttagttgtctttttgcaccttttaatccctcttcgaagagtcaagttcaaatgctggaaaccgtgatgtctctggtcccaggacatcagagagaaagtgaatagcgccagccatgccttcaaagagcgaatagggtctgtcaggaatgcggcacccgtgtgctccgtaatctagacaccactctgcaaacttgcaagctcggtagaggtacttcttatcctgcgtgagacggtaaagggacaggaaggaatagccgttgccagcagtcccatggcatatcccgtagcccttccgcagcaaacctcgctgccaaatcacatcgacccta

SEQ ID NO: 3227 - DNA, 419 bp, Homo Sapiens
  misc_feature (147)..(165): n is a, c, g, or t
aagtcacatttacaaaaagtgtctccaaatgcttgactagggaaaaacccctttcaatagaggagcatgtgcaacaattccacaaataatcgctatccagggcaaggcacattgatatggaatttttgttttcgtgcaaattaaggnnnnnnnnnnnnnnnnnnncaacattgtttcggggagaaagatgaggagcaaagtgtcttcccaagaatttcagttacttgattgtataggacagtagtagaacccttctgtagggctgaaggacatagtttaaaggcaagtgcctagagtagggattacaatattgtgtcttaatgcactctactttatcctacattaactatataaaaattagttactaacactagacatgcagagactttctctgatcagcagtcgtgccaccatctcgg

SEQ ID NO: 3228 - DNA, 865 bp, Homo Sapiens
agccggtaccgacgatggttggcaggaaaatgaaattttctttcaaaatagggtttaaacatagataggttttaaaaataaaatctcctactttctagaagacacatacactgaaacaccagaaacatttggaacatcagtttcctctatgtgttgctggtcaaagactcaacctcttttttctttctttgccttaaaaggtcacccctaaacacaactaaaactatgccatcagctgactccaaggtacacacagtcctgtatctggaactactgagtggcaggcatctttctctgcctctgacagtggagtccccatcactgcagagcatagccaaaggagtcaaaggtctcagcgggtcactgccttatcaaccctcaccagtcccttatgttttttaatattttataatcttgacatgacaccaagatgctttaataaaaaagcacctctaactcggtcttgtattcacttaccttgagcctgggacttctctaggctcctgaggcaaaaacaggtagaggggagatggtggaacataaaacacaattttgcttggcacccaccttggcgtctgtccccatgaccaggtctttcaattcgatgattttgtcattgatggaggagcgatatcgtttctcaatgatattatgggttgtccgcctttctccttctttggggggctcaagctgcttgactcccccaggtacctgcttaatgggcactttctcttgccccatcattacaggcattgtggtcagaatggtcccactgctgcgcaccagggtctagaatagggacaggtacacagcagaatgatccctttgttcgctggtgtatttccgaagatcctgtagagtcgcg

SEQ ID NO: 3229 - DNA, 266 bp, Homo Sapiens
ggtgaagcaaaactgattgaaaataccaagataagacagaaaaagtgactggaaagaggagcttttcttccaggcatgttccagtttcaccctaagactgaccttcaaataatcaggttgtactgaaataaaggacttgttaaaaattaaaattatgtcatcgagatgatagcttttttcctcctccaacagtttattgtcatgtgttgtgggagagctcgagtgaagagcaataaactccaggtcttataagaatgtacatacca

SEQ ID NO: 3230 - DNA, 940 bp, Homo Sapiens
acctgggaatgccagggatgcattctgccgagccaacatgacttgttggcttcttgacccagcgggccagacatcaccctcagattctcaggtttctataaaccttggcaggaagagaggagagggcacgggttggattgtatgccccccaggcatgttaagggggaaattagagaaagggaggcccagctctgttgcgcaggaaaagggtgtctacaggaagcacaaacaggaccctgggtctcatgcagcatgcagcaaacagcagagttaatttttcttctctttgtctctcttcagagtctgtgagcctccagcctgggagccctgggactggagcagctcagccgccgtctttctttgcttgaaagcattcacttcatcatccagggatttcttcttatcctccagtttcttcttctcgtcctggtgcagtttcttcagacggtcaaacttctcgtgcagctctttctctgcctctttgagctccgcttctttctctttgactcgctggacgaacatctgtctcatctcctcttcttttttctggagttcccctaggaactcgttccttttggcctcatatgtctcctgtaaactgaagggtttgctgtcagggtcggtgtccttgaagcccatctcctccagcttacagcggcgatacagctcatagtgccgggtgtgggtctgctcccgcagatcctccatgttgacccgaatcagcatctcccgcagcttcacaaagtcgcagtgggcctcgttttcaacctgcacagtgccccaaggatactgccgcgccctcatcatcttgttgcctatcttcagttcttctgtgctgccaatgacagcaaacggcaggtgggcgttcatggttccattgatctctgccaccgactcatcatctgtaaggaaactgatagatctggactccgttgctgac

SEQ ID NO: 3231 - DNA, 924 bp, Homo Sapiens
  misc_feature (55)..(55): n is a, c, g, or t
  misc_feature (65)..(65): n is a, c, g, or t
  misc_feature (101)..(101): n is a, c, g, or t
  misc_feature (108)..(108): n is a, c, g, or t
  misc_feature (414)..(538): n is a, c, g, or t
  misc_feature (546)..(559): n is a, c, g, or t
  misc_feature (584)..(773): n is a, c, g, or t
  misc_feature (806)..(815): n is a, c, g, or t
  misc_feature (832)..(840): n is a, c, g, or t
agaggccatcaggcttctctggccaaagtttgtgccaaccgcgccccccccaatntaggcaccanggggctcaactgtggtcaatctgacccagaatcttncgtacanagatggctgcatcgtggagaggggacgaccacgagctctgttgtcccgaggtggggtgtatgctgacatgtggcagctgcagcagggacaggaagaaacctttgaagacactaagcctcagaccatggaacggtgacaaaagtttggccacttccctctcaaagactaacccagaagggaataagatgtgtctcctttccctggcttatttcatcctggtcttggggtatggtgctagctatggtaagggaaagggacctttccgaaaaacatcttttggggaaataaaaatgtggactgtgaaannnnnnnnnnnnnnnnnnnnnnnnnnnnnnnnnnnnnnnnnnnnnnnnnnnnnnnnnnnnnnnnnnnnnnnnnnnnnnnnnnnnnnnnnnnnnnnnnnnnnnnnnnnnnnnnnnnnnnnnnnnnnttgggggnnnnnnnnnnnnnnaaaaattttttaaaacctttttttnnnnnnnnnnnnnnnnnnnnnnnnnnnnnnnnnnnnnnnnnnnnnnnnnnnnnnnnnnnnnnnnnnnnnnnnnnnnnnnnnnnnnnnnnnnnnnnnnnnnnnnnnnnnnnnnnnnnnnnnnnnnnnnnnnnnnnnnnnnnnnnnnnnnnnnnnnnnnnnnnnnnnnnnnnnnnnnnnnnnnnnnnnnnnnaatttagcccccgccggggcctttttgggaaannnnnnnnnnaatttaaaaaacctttnnnnnnnnnttgggaaccgcccccccaacggggggtgggaaagaccctgaaaccccccgcgggggttataccacacctttttgcccccttggg

SEQ ID NO: 3232 - DNA, 225 bp, Homo Sapiens
taaaccgcttgcgtgttgatgaggggattgcgaatttgggactctgccatattctttccgtctatttaaaaggattggattatgaaaataaagactggtgtcctgaactagaagaacttcattaccaagcagcatggaggaatatgcagtgggaccattgcacttccgtcagcaaagaagtagaaggaaccagttaccatgaatcattgtacaatgctctacaat

SEQ ID NO: 3233 - DNA, 663 bp, Homo Sapiens
  misc_feature (154)..(174): n is a, c, g, or t
  misc_feature (424)..(435): n is a, c, g, or t
  misc_feature (437)..(438): n is a, c, g, or t
  misc_feature (440)..(442): n is a, c, g, or t
  misc_feature (444)..(445): n is a, c, g, or t
  misc_feature (448)..(449): n is a, c, g, or t
  misc_feature (451)..(453): n is a, c, g, or t
  misc_feature (455)..(459): n is a, c, g, or t
  misc_feature (489)..(507): n is a, c, g, or t
  misc_feature (560)..(592): n is a, c, g, or t
ggtatcaagagtatgtggttatgacacaccatttcctcacatttttgaaccattctacatcccagacaaatggaagtgttatgatgcccttcgaaaaatgatcaactattgaccatatagaaaagctggaagattatgactagatatggaaatnnnnnnnnnnnnnnnnnnnnnatatttcctccgacttacctctttttgaaaagagagtttttattaaatgaaccatcatgatattggctgaaaagttctacattctattattgtattgtaacacacatgtattgatgattttcattaagagtttcagattaactttgaaaaatattccacatggtaatcttataaattctgtttaattacatctgtaaatattatgtgtgtgatagtattcaataaagtaaaatcaaattgtctttggaannnnnnnnnnnncnnannncnncannannncnnnnntaaacacaacccccggaacaaacaacaacnnnnnnnnnnnnnnnnnnnttgtgggccggcccccgcccctccaaaaaaatttttttacaccatttgttttnnnnnnnnnnnnnnnnnnnnnnnnnnnnnnnnnaaaacagggcccataaacctgtttttccatagaaaaaacctgggggccttgaaaaaaggggcttgggaatt

SEQ ID NO: 3234 - DNA, 220 bp, Homo Sapiens
aagacacactgataaagtatgtaaagcccccacaaattaagtgcatatataaggtatggactttttaaaatgaaaaactgcaaatatcttacaaataattttgttcattatatctatacaatgcaccattcaattcactcattacaatactttgcaccaaaccttgctatctgcaatcttaacactcctcaaatatgagaaaaacacatagtttccactg

SEQ ID NO: 3235 - DNA, 939 bp, Homo Sapiens
  misc_feature (618)..(651): n is a, c, g, or t
gggtagcttggggaagctgaataaactctaggcccagggctactaaagacttcaggatagaattctccatcaaatatacagcataagtaaaactgctctgcactgtttaatccatttccaaggggcttagaaaagctaacaagggtgtgtcccctgtcctgccccaccggtttgctggctttgtaataacataagaccattgtggttgttggtgtcagataccttcccatcctgagctctctcacctacctgctctctctcctagagcaggatactggggtacttttaagaagggtgctccttttaagatgcccagaaaagctgtatttaactcttgctatttgtaacttggggatggtctcccctgccccagggcacataagagcaaaggctccaatggtcagtggatgactctgcaaaagtgaccccctgtgccagaagctatagccctctccccaacaggtctctcttgttggccagagggcctgcttcccatgggcattgcaagtgccaccgtgcggggcctggctctgcacacccaggaaaaagtctgcagacccccagcccttccgcaataattcaccagaccagaagccactggtgtacagagaacacttnnnnnnnnnnnnnnnnnnnnnnnnnnnnnnnnnnctctgtatactgtatcagcagctttgtgtaaaaatggcaatcaagagagtctaatatatttaaaacttttttaaaaaaaatcttcgcagatctttgatatcgtactgaggtaacttccacgtagccccttgccacgcggcaccggtgggccttgggtccaaaactgtggctcagccacatcccaaagggggcacatgtccctggagttgcttccagctgccaaggcctgtgacagaattcgctgttaagagtttttaattaaaattattaaattccttttaataacaa

SEQ ID NO: 3236 - DNA, 325 bp, Homo Sapiens
tcgtcctctagcaggatcccctatccgtctcttagaagctaattcctattgaacaacaatacagtacaacacagaatgttagagaaaaagcctttttatcctgctttctttgaacacatacttgatcaaaattatttgtaaagaacatctttcctactttttgattttaacaaatgcaaatttagttctctaaaacttgaaaataaaaaaagaaaccagttctgtgaaaacggtacctcatttctggaaaataacttataccagcccttctgttctagggaaataaaagtctagcagttcaaagtttaagttctaagacacggta

SEQ ID NO: 3237 - DNA, 1620 bp, Homo Sapiens
ttggagcgcgcttagagcccagggtggctatcgcagatccatctttacggggctgtcgcaagtatttaaattgtgtccaattaaagcaacgtagtggaccggacaaagaactgcaaattttcgttccctctttttccccaagggcccccctttaggttggcatccgggggggttgaagccaatccatcatgggggaagtattatggggaaaggcctccttagtccagtaaaccctgtgtaagtcactagctaccagcattcagaggggccatagcttagcccctttcatctcccacctgagggcctgtagatttcaggagaagccccacctcaggggcggttcactttgccaaggaagaggatgttgttagccacaatgaacatcagaaagggcctgttgaacactagcctctgagagttcaggcgggccgacctgaaagtgaatattgtccccgtggctgccgctgctctggttcccgactcgtccacctccaccacagctttgtgcaccatctcagacacctggatatttgagtggttgctgatgccggacagatcagcatgggaggtgaagacgttactgatccccagactggggaggactttctccagctgataggagccctcaatggagaatttgggaaggtaaagctcgagctgcctctttttgaacatcttaagccacttcctcagcgttttctcactcagtccattctccacctgctgcatctttccctcactggggagaatgaacaaacccgtggcattgccctggtaggggacccccaccaccctgcaggagaggttccggtccaggaggtagtgatactgatctcgcggctcatcatgggtacccgcaccacagtctccggaggtcacgtagaagtcttgctcttggggtgcctttgtggttgaagcttgtctccccacttagctttaaagaagatgtaattcacccatgatcacgaccgcattgctatcgagggtcttaagcaagtccacaatcttgcccttcgtttgctttgccacataatcattgatctgcttcatggcccctgcagagtccctaaagttggtagggaaagtgtctgccaggtacagcgtcttcatggcacttacgaaggtgtcctgcaggtctaccaccaggtcggtgaaaagggcattgccgaggctcagctggaagccatctctgggctggttgagttcctgaaggagctgctgaaagcctctgtgcagctccttctctgagcttttctggaggttgaggcccaggccctccaggatctgcatctttgtgctggacccagcccccagggagagcatggccaggctcatggagatgctcacaggggagaagaagatgctctggctgggggcagcggaagccaaggccctgtagaggtcaaaggtaaagtcccttctgctgctgggggccaccgtggcacctacatggaggtcctcgactctcttcttcatctcccgggggtggtggcggtgaagggaggccccctgagggctagagaagcaccaggcacaagaggaggaagagctgcatggtggctgttctttgtttgtgtcccgtagctgagtgtgcacacagtggaggtggcagtccctccc

SEQ ID NO: 3238 - DNA, 795 bp, Homo Sapiens
gggggtagcgcggggactggctgggaagcggtcggtcgagtgtggcctgtgtggactcgcatcttgcccgaagccgggcggaggagagctcaagctaagggtgatcagcccatgacctaaacctccagacaaaataaaacagggaaaatttgctagaatcaagaatgatggatccatgttcagttggagtccagcttcgtactacaaatgagtgccataaaacctactatactcgtcacacaggttttaagactttgcaagaattgtcatcaaatgatatgcttttacttcaacttagaactggaatgacactttctgggaacaatacaatttgctttcatcatgtaaaaatttacattgacagatttgaggatttacagaagtcatgttgtgacccatttaacatacacaagaaattagccaaaaaaaatttgcatgtaattgacttagatgatgccccttttctgagtgctaaatttggaagaccgcttgtacctgggttggaagctttgtccaaaatgcccacagataatcaatggcaagtgtgggatgttgactactgaagacccgccaaaaaaaggaaacccttgagctcagaatgggaagaacctgccttaaagccttttggagggccatttacaaattttaccgaattccacgcgaaagggccacaactggaatttttggctctccacccaaaacctgggctgttgacgccccattcattgtcctacccgctgtcaactatagaacaccctggttctgtgtatcgcgccactctcgcggcccacttct

SEQ ID NO: 3239 - DNA, 697 bp, Homo Sapiens
gaaaccatctgctcctgtccatctctgggcaactgatagatgggggtgctgctttctgaaatgggaaggtgagaagagaggtatacgttggagaaagatgagtggattttgtgatgccagtaaggcatctaacacagacagaaataagtctgaagcttaggtgagagatctgggagaccaatttgagcgtatttggcgaataggagatttaaaaatcctggggatggatgagagtaagaaagcatgaaatataaatgggaaaggggttcaagtctgagccttcaaggatggcagcatatggagatcaggttgaatctaaaagaatcaggagtctaaaagaattggccagaaagttaggaggaaaacacagaaatgcaccaaggaatgcaagtttcaagaggaggagagtgaccagaggtgctgaatgctgccaagagatcgagtaggaagagaatggaaaactgtccgctggagcagttctcaactgggggtgattattgcctcacgaggatgcttggcaatgcctatagacattcttggttgtcaaaacataggaggtgctactggtatctagagtgtagaggccagggatactgctaaaatcctctacagcacagacagcccctcacaacaaagaataaaatggctccagctgggcgcggtggctcacgcctataatcccagcagtttggcagga

SEQ ID NO: 3240 - DNA, 207 bp, Homo Sapiens
agaaaagaacacgaacaaaccgattcagaaatcaagcaatgctaaaggagaaacaagatgttttgcaaaagttacttaacgaaaaagacctcttaatcaaagccaaaagtgatcaactactctcttccaatgaaaatttcactaacaaagtaaatcaaaacgaacttttgaggcaggcagtaacaaacctgaaggagagaatattta

SEQ ID NO: 3241 - DNA, 498 bp, Homo Sapiens
aattccagtttagaagtagcgacttgagtaaatggaataattcttctgtccatggtgaggggaggatggggggaaggtgctcattttgcctttgaacttgataagagcagagaacagtcaggttcgtgctgagaatgtaagggatactttttcctgaattgggcagtgggtggatggagcccaacaggacatcctgggaaggattcccagagcagggagagggcaagcacagaattgtggaaggaattccgtgccataaacacagaatatcttatttaacagtggaacttttttgctgtcttctttagaggtggaaaacagttctttccaaggacaagcttaatgactgctgtgcctacacacaaaactacaagatacatttaagcatcagtttagcaccagaaatgcagtttacagaagatttgcatgaaaatcttaaaaacaggttgaaaatgtcctaggctcagctagtgcacttttaagttagcaggacatcga

SEQ ID NO: 3242 - DNA, 195 bp, Homo Sapiens
atagcaggagagaggacccattagctggtcagacccagggggaatgaaaggagggctgtgaggagatacctcattaaacttggcttagctgaagaagagagatgccaaaggaatgaaccaacccttcacataaaggagactggctgaagctgaatgaaggaggccctatagcagaagtctgattctaagagacag

SEQ ID NO: 3243 - DNA, 706 bp, Homo Sapiens
  misc_feature (98)..(106): n is a, c, g, or t
taagctttaactgtgttaatagtgtaatgcggttttaattttaaatgggttgtgttcaaactctaaaatgctcacttcatgaaattcgaaaatttatnnnnnnnnntaattgcgtataattcgaccactctcttacatctcagcttctttcctcttgaatataatcttgattgaaaggctttttatctaagaacaaccaaaatcatctgtacaaaactcagagggaataggaaagagagtcacatctttgtcatgggacatagtcccaactacaaattcacttctatgtttttaagactgttgagctttgccttaaatttacctctgtattcttcagtttcctcacttaaaatgaggagtatccttctcccacccacactgcatctgcaaactgccgatgaaaaaaggcacctgtcaaaagttctgaggacataaaatgttctagaaaaacaatcatcccaatagcgcttatatgtgctcagtgtagagggtttaaggggattatggttcaaagactcaacaagaggaagcattttttcctaagggtggattgagagtttcctgccaaccactttacctaacaattttgatatttataaggagaatagaggcacacagagactgcaaaggcaggtagccaaaaactctaacggggctgttcctccaacaaagccagaacagaagtccccatccagcaggacatcaa

SEQ ID NO: 3244 - DNA, 602 bp, Homo Sapiens
gggaagtataaagcgttgagctcaacgctttatacttcaggaagcgtctgagacgttccagaagtagagagagagacagaagccgagagcgaagaagatctcgaagtagagacaggagacgctcaaggagtagaagccggggccggcgatcccgatcctccagtcctggaaataaaagcaagaaaactgagaatagatctaggtccaaagagaaaactgatggtggggaaagttctaaagagaagaaaaaagacaaagatgacaaggaggatgaaaaagaaaaagatgctggcaactttgaccagaataagctggaagaagaaatgagaaagcgaaaagaaagagtagaaaaatggcgagaagagcaacgtaaaaaggctatggaaaacataggagaactgaaaaaggaaatcgaagagatgaaacaagggaaaaagtggagtttagaggacgatgatgatgacgaagatgatcctgcagaagctgaaaaggagggaaatgaaatggagggtgaggagttagatccattagatgcttacatggaagaagtgaaagaggaagtaaaaaaatttaacatgagaagtataaagcgttgagctcaa

SEQ ID NO: 3245 - DNA, 630 bp, Homo Sapiens
atgagccaccgtgcctggcctagcctcttgatttttctatgccagctgtcaacctgggtgatcctcccaccacagtaatttcttatcctcagtaattctttatccctagtagttatggaagtttggttggttgattggttggttttatattatttctctttgaatgaagcagttctgaataccttcatcctgccatcttagcagaattactgcaatgaaataaaaaagattttgagtatagaaccaaagtcaatacacgataaggaaggatcttgattttattttacatccttgtctcgaaggtgcttttctacttgttaaattatctatcttattaggacattctttgtacgtttgatgtctctgcttcccattctgttttccttctaggaatctatatccttgtggagacttttctcatctaccaacatttttatgtcccctcaagtactgaagcctttgcaagctatcattggacagctcaagttgtttatagattttacccgaaggccaatctaaaggaaagtatcttagaagaaagatgccttttccttttggtggatattttctctttaataaaaatcttatacagccttataatattgtaataaaactataacccagcacttg

SEQ ID NO: 3246 - DNA, 318 bp, Homo Sapiens
aaccatagttcatcgaaatgcagctttttctgaacttcaaagatagaatcccatttttaatgaactgaagtagcaaaatcatctttttcattctttaggaaatagctattgccaaagtgaaggtgtagataatacctagtcttgttacataaaggggatgtggtttgcagaagaattttctttataaaattgaagttttaagggacgtcagtgtttatgccatttttccagttccaaaatgattccattccattctagaaatttgaagtatgtaacctgaaatccttaataaaatttggatttaattttataaaatgt

SEQ ID NO: 3247 - DNA, 548 bp, Homo Sapiens
ggttggatgacacagcagaaggccaacgaggtggagcagatgatccgagacctggaagccagcatcgcccgctacaaggaggaatacgccgtcctgatctcagaggcccaggccatcaaggcagacctggcagctgtcaaggcaaaagtaaaccggagcactgctcttctgaagagcttgtctgctgaacgtgaacgatgggaaaaaacaagtgaaactttcaaaaaccagatgtccaccattgctggggactgtctcttgtcagctgcgttcattgcctacgcgggttactttgaccagcagatgcgtcagaacttgttcactacctggtcccatcacctacagcaagccaacatccagttccgtacagatattgccaggacggaatacctttccaatgctgatgagcgtcttcgctggcaggccagctccttgcctgctgatcacctttgcacagaaaatgccatcatgctgaaacgagttttagatataggatttgaaggtaagtcaaataggcgaataaaaaagcagaagtataaagcgttgat

SEQ ID NO: 3248 - DNA, 595 bp, Homo Sapiens
  misc_feature (24)..(24): n is a, c, g, or t
tagtgagagaccactgaagagttntacgagaggaattaaaacaacagtagtattgtgctttgaaacactctttgttcatctgcgggagggctttttgctttctctcttgcttgtttctctttgtcctgggaaattgcatggaagccctgtttagctttcatgtttcaatgagggagagaagtttggggttcatgcttctctttcctaataatcctggcctcagctctggtataggactggtctataaactaagtggaaagtcatcacaaagaccttctcccacctctgtttaaactgggagagtcggtggtcacgccccttcagagtaaggggttcagagacataggcaaaaggaaacatcttccatgctacctctggctaccatggaatgcctcacacctgtttcctggaaacacataatatcgaagttggaaggaaccatagaagtcctccaaaacatgttcctggaacttggaaggtgtaggagatcagaatctgccagcccaaaatatgtcactttagcaaaagcattattttgaataagagacaactgagaagaaacagaacaaaagctctctgccctgcctaaaagcag

SEQ ID NO: 3249 - DNA, 187 bp, Homo Sapiens
tgacgatggttggcaagcagatgttctacatcataggggccatcaccctgaacaaccttctcctgcggaaggacatgtgctcctggagtaaaggcatgcagatcaggtacaatgtcagtcaactggaagaatggctgcgtgacaagaatctgatgaatagtggggctaaagaaaccctggaacctct

SEQ ID NO: 3250 - DNA, 654 bp, Homo Sapiens
ccttgatgtcctgctgaattggatttgaaagatgatttgcagcagacacaaggaaaatgtagggaaagacagaagagtgaaagtaccaacagtgacacaactctgggctgtaccaatgaggcagagctgtccatgggcccatggcagacctgtgaggaagacccagaactgaatactcccacagatgttgtggctgatgctgatgcccgtcattggttacaactgagtcccaccgatgcttcaaatttaacagatagcagcgagtgcctcacagatgactgtagcataatcgccggggggagcctcactggttggcacccagactctgctgctgtgttatggcgaagggtcttggggatcctcggagatgtgaataacatccagtcacccaagatccatgccagagttttctgctatctctatgaactctggtacaaactagcaaagatacgggataatctagcaataagcctggataaccagtcttctccatctcctccagttttgatcccaccactcagaatgtttgcatcatggctgtttaacgcggcgacactgccaaatgaatataaggaagccaaactacaagcctacaggctgatctgtgccatgatgactcagagtcagactagcggggatcgtctcagatcgacc

SEQ ID NO: 3251 - DNA, 268 bp, Homo Sapiens
gtaccgagatggttgcaagtgcgagggaagatgggttgaaaggaaaggtgacaggaaagatgtgtttagcatccatgagcagctggggagagtctttcctgtctcgtaaacgcatctgtatagtacgaatgaacgacacagagactctttcttcaaactcattaactggagtatacaaattcaacactttcacaatctgggcagtagttaaagcattgcacatagaacaaatggcttctgcatcatcatctgttttctttttcacttg

SEQ ID NO: 3252 - DNA, 649 bp, Homo Sapiens
  misc_feature (233)..(283): n is a, c, g, or t
cttgatgtcctgcatataagggagccacataagagaactggtctagcctattagaaggtgagaggccatatggaagagaacagaggttccctgacagccacaccagctggcaggcatgtgagtgaggcatctgggatcttccagcctagtgcatgctccagacaaatacggccacatgagtgagcccaggcaaaacagtaaagagctgcccagccaaccctcagaataatgannnnnnnnnnnnnnnnnnnnnnnnnnnnnnnnnnnnnnnnnnnnnnnnnnngtacataagcattaacttccactcacatccaaaaattcattgagaggccaagtgcaagaaagaaagtttcaaaaacttcattttttaaggccttagtttgaaggccgtagttgaagataaatgaaattgcttactttttggactgcgtttccctttttcatgagacccagaaacttgcagaggaagaagttccttactctcttgtgcggctgagaattaggaagcaagggagctacaattcattaatgaagcattattcttagtgtttcctggaactgcctttgagttcttgggagtaaataggctttattcatccaaagaattatacaggaaagttgctgaaaatatcactggctttgtttcttg

SEQ ID NO: 3253 - DNA, 397 bp, Homo Sapiens
ggtaccgacgatggttggcagtgaagttatatctcagtggcggagagcagttgttcttaaaaatactaattataaacttcaaaacctctgttggcatgctgcctaactataaaccagttgttttacctttgggttctcatggccccaactggccttaaagggcgttcttctgcaccctcaagaggcggtggttatttacctgaagtcgaggcttccaggatccagagcactctaggtcagacaccgtggggacaaatgtgaccattctactctgtcagggtttaccacatccagacactcactaggttccgtttcactaattttggtaaaagtctgtaactactataaaatattattagattcttaattgtaatcgcagtaagccttgcaaccatcg

SEQ ID NO: 3254 - DNA, 644 bp, Homo Sapiens
  misc_feature (503)..(578): n is a, c, g, or t
gccttgatgtactgcggcgaaggggcgaggcctgaccctgagcatcagctacgttggccttcaatgcagctataagcagtgaagaccaaagtctaacctgctgaaacagcaaggggcaagacagcattgacttcaacaggccttttttgtaaagcaaaaggtaagatgacaagatccggtcttgtctgagaacagctgcacagaatacacattataaatgagcactttctcctatctcagcaccctggtgaatgggtgtcagagaagtttctggacctgtcagggactcccagggcttagccagagggtcaaagtgttgtgcccactcactttttcttctttagcatactgtggagtgagacatgtgggaaaatcggatcccagagattacctaagcatcacttctcagagacgttttggttaagggactacttcctgagaaacgttataatttatgtgggtattgagcttgaattttttttaatcataaaatcttaggctgnnnnnnnnnnnnnnnnnnnnnnnnnnnnnnnnnnnnnnnnnnnnnnnnnnnnnnnnnnnnnnnnnnnnnnnnnnnnaccagtgtggtcaacatggtgaaaccctgtctctactaaaaatacaaaaattagccaggcgtggtg

SEQ ID NO: 3255 - DNA, 1001 bp, Homo Sapiens
  misc_feature (63)..(127): n is a, c, g, or t
  misc_feature (711)..(830): n is a, c, g, or t
aagaggcagtgactcgtatcttggtcatagtctgtttaccagagagatccctgttcgagattnnnnnnnnnnnnnnnnnnnnnnnnnnnnnnnnnnnnnnnnnnnnnnnnnnnnnnnnnnnnnnnnnaatgagatggtcccatccattgctggacctgaataaaacctattcatggctactggaagggcataaaagagtagcttcactgggacatccatgcactctaggtccaagtattgaatcaaggtttgccaaagaaaagaaactcattcctcctggttcgtacagagctctaatggcacacatgctactcacccaacaatccacgcggtttcccctgctgggaagtgtctccaggaaattgcacagtgtccaggaaatggcacaatcaggtatcaaggaacacaggcgaacttctccagaattatgctcttggtttccctgggaggaacggtcacataagggttaccatgaaacacagaggaatagtgtgaggctggagtcgtacaacattcggatcgctctcacagctcatctgtcagcctggggaatgcggtgtctgtcattttccagagtgcttgttcagtcagcggtatcaattgtcagctttaggagataggagacatcctgtcaccccatccagagcctgtacttggaactacctttatgacgatgatgaagagcagctgcggccgggcgtggtggcttannnnnnnnnnnnnnnnnnnnnnnnnnnnnnnnnnnnnnnnnnnnnnnnnnnnnnnnnnnnnnnnnnnnnnnnnnnnnnnnnnnnnnnnnnnnnnnnnnnnnnnnnnnnnnnnnnnnnnnntagatttagctttggttctttgatgttctatccttaactatcttttatctgatatttaccatcagatagttcacaaagtccatctagacaattagatattaaaatctttattatatcatctcctatttttatagactatgctatcagaatccctcaacagagggatcctct

SEQ ID NO: 3256 - DNA, 434 bp, Homo Sapiens
aaagacttctaccatgcagagggtgacctgacttcctgtattgcggttgtaacttaggggagggcctcaggttgtcagaggagacaggaaaagcaggagttgggttataagtgcaatcagatcagatggagaggtggcattaaagtgaatggattttcttttcctgtgtctgtgagtaggagaaatgttttagttatttgctgcatcatggatgtggtagccagggctgtttaattacctgagaagtggggctaattgtatcttgaacagtgagtcactttcctggcataattttctctgtgcccaatcattaccatataaaagttgtcagtgctggccctcaggagtgggatttgaagagggggagttaataggaagctggcaggagctggggctgagtgggagcagagctgatcatagggaggtggggataa

SEQ ID NO: 3257 - DNA, 567 bp, Homo Sapiens
tgaagaaacattagagacaacctgggccaagcaatttattttatgattaaagaaacagagcctgaagaggctcaaaaaagtgaagtgatctggccaagtctctgaaagtgagagagtcaggtcttaaaatttcaccttagggatcccaactcaattttctttccacagtagcaaatttccagagttaggaagcaactctcttacctgctaactactgaagaattaaaatctagcatgagacagatttcagcaagaaaatagcacgtgtatctctactccttcaaactctctcctcttgcagtcttcaccatggcagtaaatggatggtaactatagtctaacatttgctctgtctttccttttctcacattccacaatcaatgcatcaccaaagccttcaaaatgtatcaagtctgatcacatgaactgctcaaatcctgatccaagcccagcctcatcatctctttgcttagaatttaatgtttagagcatccaactgggcatggtggctcacatctgtaatcccagtgactcgagaggttgagcgggagagctgtttgaagccaa

SEQ ID NO: 3258 - DNA, 509 bp, Homo Sapiens
tagtgttatataacttttaatggaaaatgtcaaatagatacaaaagtataaatcaggttggcaagtgaaatacaggccaaaattgggcccaccagctgtttttgcacagcccaaatgttaagaatgatttttacatttttaaatagtgaaaagatgtaaaagggtaatatctaatgacataagaaaagtatgtgaaattcagattttattgtccaaaaagtttggaacacagccacatgcactggtgcgtggccccctggtggcggcttcatgccactactgccaagtggcaagagagccccatggctggaaaagccaacaatctttaccatctgctccaagccctgcttcactcccctgtgtgtacctatccttgcagcctcaaattcccggccaatcttgtttcatttatagttactcccgcccacggattcaaggaaatccagacacctataatttcatctcatggtgaatttaaaagtttgaaaatcaccagatgtatatatatg

SEQ ID NO: 3259 - DNA, 182 bp, Homo Sapiens
gcaaactcactgagatccaagacaagacttaaaaatcataaaagaaaccacaaaagcaattcaggaagtgaaggaagagataaatttttttaaaatatcaatcagaacttctggaattgaaaaattcacttaagtaattccaaaatacaattgaaagcttccacaatagactatttcaagcc

SEQ ID NO: 3260 - DNA, 1304 bp, Homo Sapiens
  misc_feature (755)..(767): n is a, c, g, or t
aagcgacatttgctataaagttgaacttcgtatgccttgaaaaagaaatgacaatatggaacatcccaaggctgtcccatagggttggaagttgtgtagcattcactcccttacctactggcattcccagtgccctctgtccatacctacttctaggattgcaaaggagtcttccaactagagaaaaattgtccactgacatttgggatttacttttctccaatacctgccaatacagaaaactattatcagttgttattgttatcccttgaaagcgagggtgacaaaaacaacaaaacaccgttataaacacatcaaaggttcattctgactgaggtaagactttccaagcccttgttagattaggccttataaaacttgtgtgcattataacctaaactgtgcaacctgtgaagccaagagtgaactgatgtttcatttatattttcatccaaatgacattatctgcacgtttttaaaatttaaaaacaaaggactatttaaaaatacagtttattaacaaacgtgaactactttctgttacattaggtgttccctagtgtttcttaatttctttttagaaagtgtatttttattagtatttttccggtgaacagaagatttgtttggatttaaacatttactaagacagtacctattaggaaaaccaaatattgcaaatggtcaattcgattttaatttctccaaagatactctgttatccagaagattaaaaagcctacattgagtgcttnnnnnnnnnnnnncaactgtgatgatgtgagcagaatggcaagtaagttaagcatttttgatcctgtaatcatggtatcattacaatgaaaggaattcacaaactactgccagaggaagtttgttttttaatttaagagggaaatataacctataaatttgtttcttccaagcttagctcttaaatttggagactcaaagttaaacatcctcaacagagtttcatttataatattgaattgtcaatttgtattttgctagctgatctgtgatcaaccattttaactctcatctctagggatggttaacatttataattgcaaaacaaaccaactataaaaaaagaaactaagagagaattggaactttaattaccttgtgggttttgcaaataggctcccattttcccatggttggagtagaattataaacctttatttaactatggccttagggccctaagaaaaaggtgggccaaatggaaacctgggggccatgggtaaaattttttaaaaatggggggtaacctttttggggggcaaaattcccct

SEQ ID NO: 3261 - DNA, 855 bp, Homo Sapiens
gggggcaatcgttacgacctgtaacttgagggccaccgaactgctactcccgttcgcctttggcgatcatcttttaaccctccggagcacgtcagcatccagccaccgcggcgctctcccagcagcggaggacccaggactatcccttcggcgagacggatggaaaccgagccccctggaggacctgcccctgcagttctgcctcacacggctcaagtcaccaccgtgaacaagggaccctaaagaatggccgagccttgggggaacgagttggcgtccgcagctgccaggggggacctagagcaacttactagtttgttgcaaaataatgtaaacgtcaatgcacaaaatggatttggaaggactgcgctgcaggttatgaaacttggaaatcccgagattgccaggagactgctacttagaggtgctaatcccgatttgaaagaccgaactggtttcgctgtcattcatgatgcggccagagcaggtttcctggacactttacagactttgctggagtttcaagctgatgttaacatcgaggataatgaagggaacctgcccttgcacttggctgccaaagaaggccacctccgggtggtggagttcctggtgaagcacacggccagcaatgtgggggcatcggaaccataagggggacaccgcctgtgatttgggccaagctctatgggaaggaatgaaggttgttagcctgatgcaggcaaacgggggttgggggagccaccaattcttcaataaacgtgggggagggctcccccacgttgcctctactttattcattaaactgagtagctcctcctgacttttaagggcattttttaaaataccgtttcg

SEQ ID NO: 3262 - DNA, 332 bp, Homo Sapiens
attaaaagtattagttatttaaggaaaaggtctgcccacaaaatcactagcttattatttgcttcctgtgtgcctgcttgtctacctagcatagtaggccaaaggtccaaaggcatttagcattcctaggggaaattgtggctgtttttctgagccagatctcttgatttgggtttacacggagtcctttcatggactatcctgagtattgtcagttaaaacgtcttggggcataagaacttgtctgaatctgtcatacataccactgctgtcttttccgagtggtattacaagaaagatttttgtggtgtgtttgttctaagagacggata

SEQ ID NO: 3263 - DNA, 1055 bp, Homo Sapiens
ttaggatggacctggattttccagggaaaacccccccatttccagaaatttaccaaataccattaattttccctccatgtgcattccttcagttcattgaacagggaattttgtagggcccaccatggctatttactttggtggatggtagtagtaaatgaacgaagggcggacttcctcagaaattggtaataaacggtggtcccgactcttcccatttttcaggtacaaccaaatctttgtctgtataaatcagcagatcaaatgaacaagaaacttccaacagtggcagaaatgtcaccgtagctgtgatctgtctgatcactgaacggatttcatcctggatagctttctgagacttttctctgggtgcactgtcatcttttgcagtcttgtcacactcaatatcaaactgccatctttccaggacctcaccactttcaatatttgagataactacaaccagtttctgaactgaacacttgtataaccaatctttcagttgttccaccacattatttaggtattttatgagctcaagatcagtagttacaagcaaggtgagtccgtatttctgcactcgagtaaaggtttcagatggatatatgccacgctgatataaaatgctgttgatgccgaatgagaagaactcggccacgatttgcggcgctcccgcgcagggtgattccctgctcccgggagagctgcagcgccatggccagggacacaaacaaaagcacgcgcttccactccgcggacagcaaccacagcggctccaacagcacttccccgccaagcgtttcaaaagtaacgacgcagcacgtcgtcaggtcctttgcgcaggcgcgacgagcctttaagcccagccccacgcagcggggacctgccctttctctcagccttcctgtgatgtcgcgagagcggccggttcgcgcaggcgcatttggtggacctggtcgcgctgtgccgggtgtgacactacggtaggtgtaggttaggatgtgtcttctggtcgtggtctactagttgggccgagggaagaagatgacgattcc

SEQ ID NO: 3264 - DNA, 1008 bp, Homo Sapiens
gggtccagagagaggaacctgccccagaagaagaggagcccctgttgctacagagaccagagagagtacagacgctggaagagctagaagagctgggaaaagaagaatgttttcaaaataaggagcttcccagacctgtgttagaagggcagcagtcagagaggaccccaaataatcgccctgatgcccctaaggagaagaaaaagaaggagcaaatgatcgacctacagaacctcctaaccacacaatctccctccgtgaagtctttggcagttcccacaatagaggagctggaagatgaagaggagagaaaccataggcagatgataaaggaagcttttgctggggatgatgtcatcagagatttcttgaaagagaagagggaagctgtggaggcgagtaagccaaaggacgtggacctgacactacctggctggggcgagtggggtggtgtgggcctaaagcccagtgccaagaaaagacgccggtttctcattaaagcccctgagggtcctccaagaaaagataagaatttgccaaatgtgattatcaatgagaagcgcaacatccacgcagctgctcatcaggtacgagtgcttccatatccatttacccaccattggcaatttgaaaggaccatccagacccccataggatccacatggaacacccagagggctttccaaaagctgactactcccaaggtcgtcaccaagccaggccatatcattaaccccataaaagcagaagacgtgggctaccggtcttcctcaaggtcggacctgtctgtcatacagaggaatccaaaacgaatcaccacacgtcacaaaaaacagctgaagaaatgctctgtagattgagttgctggaggagtgacagccaggagccctgacttcacttcctttggtccagttttactctgatacagggtggattccaaaactggctcagtacattgcatgtagttaagccacattttaaaaataaaggcattttttaatctaaaaa

SEQ ID NO: 3265 - DNA, 366 bp, Homo Sapiens
ccgtctcttagaatacaataattcaacacaaaagatgaactcatttcaaagaacaatgtaaactgaacttaggccttgtacactatcttgcgactaataacacatatggtccccattagaataaaatgtcactaaatcaaggccagagatttcgatatattggctttctgtcctgcctccttacttccaaggcaattgatgcaaactgcataaacattaactgggcagagaaatacttagtaatattaaatgtatggggaaaactataatatgaggaactgaaatttccttagaatctttatggggccagaaatcgaagcatcttaatgctgataaaaaataatttctaagcctataagattctaa

SEQ ID NO: 3266 - DNA, 883 bp, Homo Sapiens
taggctagtacgagactggggtgaatcggccgagggtctaccatctccagagggaacgctgcttcctggaaccacgggctcgtttctatgcggctgaaatagccagtgccttgggctacctgcattcactgaacatcgtttatagagacttaaaaccagagaatatttagctagattcacagggacacattgtccttactgacttcggactctgcaaggagaacattgaacacaacagcacaacatccaccttctgtggcacgccggagtatctcgcacctgaggtgcttcataagcagccttatgacaggactgtggactggtggtgcctgggagctgtcttgtatgagatgctgtatggcctgccgcctttttatagccgaaacacagctgaaatgtacgacaacattctgaacaagcctctccagctgaaaccaaatattacaaattccgcaagacacctcctggagggcctcctgcagaaggacaggacaaagcggctcggggccaaggatgacttcatggagattaagagtcatgtcttcttctccttaattaactgggatgatctcattaataagaagattactcccccttttaacccaaatgtgagtgggcccaacgacctacggcactttgaccccgagtttaccgaagagcctgtccccaactccattggcaagtcccctgacagcgtcctcgtcacagcagcgtcaaggaagctgccgaggctttcctaggcttttcctatgcgcctcccacggactctttcctctgaaccctgtaggggcttggttttacaggcattatgttgtgtttccgaatgtttgaggtaagacattatggtggaaccgccagctgacaggaccatcttacacgagaa

SEQ ID NO: 3267 - DNA, 1092 bp, Homo Sapiens
gatcaataaatcaatttatttaaaagaatatgttacaataaattacactaagtgacattaccaaacaattttagagtggttagcttctagaacaaggaatgaaagaaacaatgtttagccattattgtgtctgtgtattttctcttcaacatttcttgaaatcacaaataaaaaatacaagatactgcagtgaaaatacaattagagtttctctgaaataaattaaatgtgcatggcctgggaaaaactgaagcccagctcactggcttaaaagggggtcatgatataaaattaatgtccaagtttagcaggcggccaagtgcccccaccccgtatcactcccctctttgattctattccttaccacagccctgaccttcccacataccctagattattgctgaggagtgagctgatgctgtcctggcagcaaagagggcctggcgtgatgtgctcaggtttaggggaacaggaagtcaagaggtggacctggaagatggggagctagagaagcatacccactatctctcttctccctccctctctctgagtgttctatcacatcatcctcccaaaggaagctactgtgacacaatgaagctggtgaagaaacagcagtatgctggggtcaacagatcaaacagcttctactgctgaatgaatctagccaaacagtatgatggcgagaagggagagcacagcagtccctcctggtctggaaaattcaggtcaactaggatgcagtccccttcaagaaaactacctcctaggagcccagcccagaagttggcaaattctgagataggagagagtttcatctcctgtcagtgccctattttgctgctccaagtgctgggtttggagctacaggaagggataacccaaagctactggcctgggtaactaaaggatgaaactaaatgggccaggcatgaggatgttggaatatttatctaattcccccctgagagctcagtccaggcctaggagctgccctgagcatgcacatatctgtacctgtgtttaggcctagggtaaggacggggtggaaaaatggagaatagaataaacatataaagagcagagggcccc

SEQ ID NO: 3268 - DNA, 361 bp, Homo Sapiens
cccctgttcctgtcttcttgaaactctgaaagtgataaaggaagctgctatcttgaatgaaacacaacttatttgaagataacatggccttgcccagtgaaagtgtgtccagcttaacagatctaaagccccccacagggtcaaaccaggccagccctgccaggagagcttctgccattctgccaggagttctgggtagtgagaccctcagtaacgaagtattccaggagtcagaggaagagaagcagcctgaggtccctagctcgttggccaaaggagaaagcctttctctccctgggccaagcccacccccagatgggactgagcaggtgattatttcaagaagcagaactgggtccga

SEQ ID NO: 3269 - DNA, 723 bp, Homo Sapiens
  misc_feature (495)..(495): n is a, c, g, or t
  misc_feature (514)..(518): n is a, c, g, or t
  misc_feature (520)..(526): n is a, c, g, or t
  misc_feature (528)..(529): n is a, c, g, or t
  misc_feature (531)..(531): n is a, c, g, or t
  misc_feature (536)..(536): n is a, c, g, or t
tagtgatggaggaagtgacccagaaacacagaaagaaaaaagtattcagaaacagaattcattaggttcaaatgaagaaaaatcgaaaactcttaagaaatcaaacccatatggagaatggcaagaaattaaacaagaggttgagtctcatgaggaggtagatttggaacttccaagcactgaaaatgagtatgtatcaacttcagaagctgatggtggcggagaacccaaagtggtatttaaagaaaaaacagtcacttctcttggagtcatggcagatggagtggccccagtcttcaaaaagagaagaactgaaaatggaaaatctagaaatttaaggcaacgaggtgatgatcaatagttgcaggagagctttttgtacatgcttttaggacagaatggagacttatacacccaaagtttatctgtgtttgtttgtaagtattatgatgctaaaaatttagatttattctaaatgtatttgatgtgaattanaataaatattttttcaaannnnnannnnnnnannanaaaanaaaccttgtcgggcccgcctccgcccctcgagaagcctttctaaaaccatttcgttttggcgcgccgggcccccgtaaggtaagtggaacatgggtcataagcctggttttcctaaaggaagatccctgggccatgaacaaagtgccttgggaattcctccccccaaaaaaaggaaacgccccgcca

SEQ ID NO: 3270 - DNA, 794 bp, Homo Sapiens
  misc_feature (48)..(48): n is a, c, g, or t
  misc_feature (64)..(64): n is a, c, g, or t
  misc_feature (454)..(462): n is a, c, g, or t
  misc_feature (569)..(597): n is a, c, g, or t
tatttatgatgctttttttcattgtcttttatacatttgggattatanattatgtacatgttanaatgagcatctcaaagaagtctgttaaatcatgactgaaaaaaatcaatcagatgtatcttcaaaaagtggagtcccagttttatgaatcagagatataaaccagaaattctataactgatcatagaagaagaatccagtaattgaacaaatcctatttaatgacatccttgtagcatagatggtctataatgctgaccacagatttcttagaaatgctgctctctctatttaactaacattttgttcagttttgcctccagtggaagcagaaagggttttttcagctgttaaatcctaaaaatcaatataatttatttatgtaagaaaaataactcaatcaatatatttttgaaccttttaagtactaattttctttttatcaagtagnnnnnnnnntgtatttgccctaaatccttaaaatacaaatgctataaaaattcctgtatcttgaaagccttactgcaaatgagtattatagacatccagcagagtctggttttctnnnnnnnnnnnnnnnnnnnnnnnnnnnnnatggaaaagctgctttccccgggttccacttataacctccggtaggtcacagggttcaatgtggatctgacttaaaaacccaccagcatgctctatcccttgttatccttatggaatctgtatgttaactctctgggtgttcaggcttctatttgactgctcttgtgaccctgtttgctaaatgaatatgacactgc

SEQ ID NO: 3271 - DNA, 488 bp, Homo Sapiens
cagccggtacctgtattggtggtgctcggcggcgttgaggcgggatccgggcgagccgagtgaagattgttttgatggtgatcatacctttgaggacataggacttgcagctggccgaagccaacgagagaaaaaacgttcttacaaagattttttaagggaagaggaagaaattgctgctcaggtcaggaattcttccaagaagaagttgaaggatagtgaactttacttcttggggacggacacacacaagaagaagaggaagcactcctctggatgattactactatggagatatttcgtctttggaatcgtcacagaagaaaaagaaaaagtccagcccacagtctacttgatacagctatgggacctgttgaaagctatcacttccccactggcagcaggctccaagccctccaaaaagactggggagaaatcctctggctcttcaagccattcggagagtaaaaaggagcaccaccaataca

SEQ ID NO: 3272 - DNA, 667 bp, Homo Sapiens
atgtcctgccacatagttagctgccctgtgccaattactttgcacaaaagaccttgttggaaataatgatgtgacccttcacaatgtagttcagcaccctccttcttgtcctttcctcatctttaggcagaaggcatctgcctaaaacgtacatgtgattttatcactcccttgcttccatgtcttacaaaggctagacagcatggcatgtgcctggacaacagccacagtaactcaccacagtagtgtgacaactcctgagcttgtctatactctgtccagcgaaatgagaccactgattaaatggcagtgtcatttatgctatgtttctagatgcttactcttcatttttgtacttatcttgtagcagaccagtaacaaacagtccatggtctggttctgttccatggaccacacttggagtagcactgggttagaaagtcacctagtatgtagtgtatgcccagtaaatatctgttcaatgagtgagtagtggtgacggtggcttcattgaggtagtgtgaagcatctcctgctatgggggtccacggtacctgtgcctgagtggacacatttgtctgaaaagctaggtttaaaattatagtactatgatattatatatcaaaaatatcttctttctacccaaaacctttggtggaagcataaa

SEQ ID NO: 3273 - DNA, 460 bp, Homo Sapiens
cgtctcttagaaaacacatactcgtttaccacttcttcataacctgtgtccataaagagctgagccaggaagtcatcagtaaaaaaatatgatctggtcccatcttgtctaacataaaagttttctccaagtttgctgctggctttaaacctaagcatggcatgatcatacagtccgtagtcacgaaacaagacacttttgcctggttttaataccttgtaaatgttttgtaagacaaggtgcatcttatcaggatgaacagctgacagcacaaatatcaacataacaacatccacagactctggcggtacatgatccagaagatcatctttagtcagatcacactggaataccttgcatctttctgtatcatataaaggattttgcttaacatattcaatggctcttggagaaaaatgcacaggcataggcagaagaatctcggatcttctttaaagac

SEQ ID NO: 3274 - DNA, 661 bp, Homo Sapiens
atcagtgctttcagaatgcccatgggcagtgctggatgctgctggtgcctcctgcctcctcgggatgcccccaggcaactgttgccctgtagattcccatttctcaggaggctgggtcatctcactcggtgctaccttgcttctctcactagccccttttttgcctctgccctgcacccatcctgggatcaagcatggtgttgacagagaggtgagactatcttgcaatgaggcttggctaagacataagctttgacagctcaccctggtcccaggaatgatgccgtggaggtggagccagcccagcccatctgctctaagggcagatcctgtccaagaccctgtgcctctgagcccagctggtgctgaacaatgactaaaggagaacgtgctgacagaaatctgaggctctcctcatcaaaggggtgagaccaccttactctctcttctcattcacagcgatttgtacacccatttgaatctaattttccctaaacaaaatgtcagagtgcaatgagaacaaagtatgacttatttggccctgaataatactatggtccagggactcctatatagtaaaaaccccacatatcctggcaagaaagagatttcttattagagagctgcccacactgtacactatactacttgttgatgtctg

SEQ ID NO: 3275 - DNA, 578 bp, Homo Sapiens
atactctttggaaaggcacgaagaagcagagtctgataagccagtggtgattggttccatcagacatgtggttcaggattacagagttagtcacattgacttatttactgaaccagaagggttaggaatcctaagttcctactttgatgatactgaagaaatgcagggatttggtgtaatgcagaagacttgttccatgaaagtacattggggtacgtggctgatttatgaagaacctggatttcagggtgttcctttcatcctggaacctggtgaataccctgacttgtccttctgggatacagaagcagcgtacattggatccatgcggcctctgaaaatgggtggccgtaaagttgaattccctacagatccaaaggtagttgtttatgaaaagcctttctttgaaggaaaatgtgtggaactagaaacaggaatgtgtagttttgtcatggagggaggtgaaacagaagaggcgactggagacgatcatttgccgtttacgtcagtggggtctatgaaagtttttaagagacggtagggtaaacgaggctccggaattacgttaatcgtggtca

SEQ ID NO: 3276 - DNA, 510 bp, Homo Sapiens
gatgtcctgcgaatgagcaggagaaaaaagaaggagggagtgagagaaagggaaacaaggagaaatagtttgagcagtgcacctggccataaaacaccagggcggggctgggggtgtctttgcaaatggtcacgtcacaccaggcctagctgcaccccagtacaccaggccaccagtacagctgtggcacccgctcagtcgtcttcctttgcggagcacctgctgtcagggtttattgcagaaggagccaagatcacacctttatgtaggcaacaaaataaatccttacaaaacatgaaaggatttttacagccaccctatgaaatgggaactgagtacccccattacagagaaggaaacggttacatagtctatctaaggccatgtgaaatgaaggactggactggaactagaatgcagacctagctcatacaaaagcctggaatgagtcttgcatatccactgcccaagtgaaaaaggaaactattggccgggcactgtggctcatgc

SEQ ID NO: 3277 - DNA, 498 bp, Homo Sapiens
  misc_feature (417)..(440): n is a, c, g, or t
gcttgcgaaggggacatgcgtgctggaacctgtcggaactccatgccttcctcgcctgctcacctgctcgacgctggaatcgggacaggtgcaaagggacgcagacgtctgggacagctaaggcccgtgtcaccggagggctccgcacagtcgttctggtttcaacgaataagcaaaactcgggcaagtactgcagctatttggaaatgttttccaaaccacagtctctttagaactaagcctatttgaaacggtcggtgtaggcttactgagatcaggagacagggaggccccgcacatcacacagataaagtcagacaattgtaattaatacttttgctgcctcaagttgttttttaaataaagtactttgaaatgcatgagaatcatgctgcaatatgatcattctagagcaannnnnnnnnnnnnnnnnnnnnnnnttcaagatgaaactaaagcagtttttaaataaattacttgaattttctgtgtaaaaaa

SEQ ID NO: 3278 - DNA, 558 bp, Homo Sapiens
  misc_feature (533)..(533): n is a, c, g, or t
ctatatcagtgctgatgatatctccattcttaatgaacgcgtagagcttctgcaaaggcagtgggaagaactatgccaccagctctccttaaggcggcagcaaataggtgaaagattgaatgaatgggcagtcttcagtgaaaagaacaaggaactcttgtgagtggttgactcaaatggaaagcaaagtttctcagaatggagacattctcattgaagaaatgatagagaagctcaagaaggattatcaagaggaaattgctattgctcaagagaacaaaatacagctccaacaaacgggagaacgacttgctaaagccagccatgaaagcaaagcatctgagattgaatacaagctgggaaaggtcaacgaccggtggcagcatctcctggacctcattgcagccagggtgaagaagctgaaggagaccctggtagccgtgcagcagcttgataagaacatgaaaagcctgaggacctggctcgctcacatcgagtcagagctggccaagccaatagtctacgattcctgntactcggaagaaatacagagaaagc

SEQ ID NO: 3279 - DNA, 425 bp, Homo Sapiens
tttttttgaatttaaatcatttattttcacttattactaatcttactacagagaataatacaatactataatgtatcatcctcagtaaattaatcttcacttagaaaatgttactgataaaatacaacatttagaattttcatttaaaaatacaaattttatgaaaatattaagaatttttaggatgggaattataaaagtcaatgctgaacaaaattctacttttagatagtatgtatcttaaaatattatgaaaaatattctttattctgaaaacaatgtcaggaaagaatacctgagttctctaaaaccactagttctaatttcaaattgctgttttggtaacataaagaaaacacatttacaatttaacactgcagttacctgtcaaataattaaaatagaataaatgttgcatatacatt

SEQ ID NO: 3280 - DNA, 669 bp, Homo Sapiens
atgtcctgcacccaatgctactgccaagactagcacccatgtactcatggaatgctctatccactgtcatggtattccacacagcaccctctgaccaaggcactcattttacagctaaagaagtgcagcggtgggcttatgctcatggaattcactggtcttcctatgttccccatcatcctaaagcagctagattgatagaacagtggaatggccttttgaagtcacaattacaacgccaactaggtgacaatactttgcaaggcttgggcaaagttctccagaaggctgtgtatgctctgaatcggcgtctaatatatggtactgtttctcccatagccatgattcacggctctaggaatcaaagggtggaagtggaagtggcaccactcaccaatcacccctagtgatccactagcaaaatttttgcttcctggtctcatgacattaagttctgctggcctacagatcatagttccagaggtaggaacgatggcaccaggagacacaacaatgattccattaaattggaagttaagattgcccacctggacactttgggcaccttctaactttaagccaacaggctaagtaagggagtatagcgttggctggggtgaatgacctggactatcaagaagaaactcagtggacttactcacaacaaag

SEQ ID NO: 3281 - DNA, 724 bp, Homo Sapiens
  misc_feature (135)..(135): n is a, c, g, or t
  misc_feature (379)..(509): n is a, c, g, or t
agaggtcagatgtcagattgtgaatgagggactaagatgggatttgcccgaaatagcaggcattcaccaattctttacttcacccttcatcataagaccctcattttatctagaacagtcatagatcttgtcaanaactacatattccagcctctccaggtagtcatgtgatgaagttcggactaatgtgatataaatagaagtgctttatgggacttccagaaaggagaacccttacaaaaggaggagtgcccccttttttgtcccttctttccttcttcctccttcctggaacttagatgtgagacccggagctctggcagccattttagactatgaggcattttgagaatggaagtaatgtgtaagaaacaagagnnnnnnnnnnnnnnnnnnnnnnnnnnnnnnnnnnnnnnnnnnnnnnnnnnnnnnnnnnnnnnnnnnnnnnnnnnnnnnnnnnnnnnnnnnnnnnnnnnnnnnnnnnnnnnnnnnnnnnnnnnnnnnnnnnnaaaccctgtctcaaccaaagccgaacaagagctattaagaagcaggccttagtggtggattagatgtgggaggggacctgcaattctggtcaagatggagtcacttgtatcagaccaacccttctgccaataacagttgcaaatgctggacaaataataaactattattggaagtcactgagagcagcatagaaaggagaacttgcctgccaatg

SEQ ID NO: 3282 - DNA, 707 bp, Homo Sapiens
gatgtcctgcagcccgaccgacacacaccatccccaaaaggaaatttttaatccaattaactgtcttaggttgggctgctgaaacaaaataccacagcctgagtgacttaaacaacgacaatttatctctcactgctctgaggtctgagttgattctttgtgaaggccctttcctagcttgcagatggctaccttcctgctatgtcttcacatggcaaagagagagctagctttctggtctttacttataagggaccagtcccatcatgcccatcatgaagactcaatctgctaagatctcaactaaacctaactatcacccaaagagcccacctccaaagaccatcacattgaatgcgagagtttctacatatacatttgtgggaaacacaaacatttactacaactgtaactattgaagcaaaaatgtcgcccccaccatacacatccaacaccacagtagaacatttattacaatagaacttacattgacacgtcattatcaacgaaagtctgtaatttacattagggtttattcttggtgtagtgctttctatgggctttgacaaatgtataatgtcatgtattcaccattatagtatcacagaagtttcactgccctaaaaatcctgtgttctgccttttcaacacttcctgtcacccaatttctatcatctaatcttttgactgtgtccatagttactgtc

SEQ ID NO: 3283 - DNA, 303 bp, Homo Sapiens
cctagaagagagatgataaggagtgggaggtacacattctaggcaggaccagtttaaagcctgctttagccagaagggccagccatatacttagacccatcaaacaggaaggtcattacaaacaaaacttcctttactatgaaaactatctcaatccccataaatggatgtttaattttggttgtgaaccagaggaaaggttcagatgatggctgtgagtcagaactactgtgtaagaagaccccaacaaggctataacttttatcccaaataaagacaaataggagcaaaagactaattagg

SEQ ID NO: 3284 - DNA, 367 bp, Homo Sapiens
atcagacactcacacctgatagccctgagacacgaagaaccttcgtgaccaggagatcatccaggcagacagagacagtgccaggagaaactaagctcagggcttggcctcagagtcccaggatctgtccttgggttcccaaagtgcataaaagcaaaactcactggaggcacttatttaaaatacagatttccaggccctgcccagatataataatgaagaagtttaggggatgggaagaaaggtagaacctcagggtctgcatgtttaagacatttcccaggtgtttttgatgttgtctctttgggaatgactgtaccaaaccaccttgagagaattaaagtgggccgggtccggtggctcacac

SEQ ID NO: 3285 - DNA, 648 bp, Homo Sapiens
ggagcccaagtgtttttggctgaaattcctgctgatccaaaactctatcgacatcacaacaagttgaggttatgctttaaggaattcatcatgagatgtggtgaagctgtagagaaaaacaagcgtctcatcacggcagaccagagggaatatcagcaggaactcaaaaagaactataacaagctaaaagagaacctcaggccaatgatcgagcggaaaattccagaactgtacaagccaatattcagagttgagagtcaaaagagggactccttccacagatctagtttcaggaaatgtgaaacccagttgtcacaggccagctaagaaaagccatcttcattcgtggagactgtggccctgcaaccctggagaaggacttgctggtacttaaaaaaatgggacatttgccacccaggacctgactgtacactccctgatcagccagcactctggaagctttgggatcccaggaaccatggaattattcccaaatggactctgaccagatttttgccatactggggggtggcgggatggaggatgggtactcaggcatgactgcgtattttattaaagtgtgttgttccacaatgtaccaaacaaggcataagcagcttctcctgctgactggccaatcactgcccc

SEQ ID NO: 3286 - DNA, 405 bp, Homo Sapiens
aaatatatatacagtaaaaataagacttaaaactgctgcctacagtgtcatgttttggatttagttcatcctattgatttttagtacaaaactagaaataccctcttcttcataacatctatagttatcaatatattttcttcttttcaatgtgaaataatacttcaagatgatctatatacacaatgttgtcagttcaagctgtcatataaatataaatgctttcgtaaaaaaagtattttacagacagatagtgttatatacattgttcagtttgatctggggcaaaagaaaaaaaagctaacacaagcttaagtgtgatatataaaaagaatgatacataaatgacgtttaaaaacctgcatagaaaatgagcttaaaatagtagtgtgatttaatttgtaa

SEQ ID NO: 3287 - DNA, 909 bp, Homo Sapiens
gaaatccggcaatccgacctgaggacttgcgagccgctcagctcccgggacgtttggagctgctgctaaataatttctgctcagccatgtcgccggctccagatgcagccccggctcctgcgtcgatctccctgtttgacctcagcgcggatgctccggtctttcagggcctgagcctggtgagccacgcgcctggggaggctctggcccgggctccgcgtacttcctgttcaggctcaggggagagagaaagcccagaaagaaagctactccagggtcctatggatatttcagagaagttattttgttcaacttgtgaccagaccttccagaaccaccaagaacagagggaacattataagcttgactggcatcggtttaacctaaagcaacgtctcaaggacaagcctctcctgtctgccctggactttgaaaagcagagctccacaggagatctttccagcatctcgggatcagaagactcagactcagccagtgaggaggacttgcagacactggatcgggagagggctacatttgagaagttgagccgacccccaggcttttaccctcatcgagttcttttccagaatgcccagggccagtttctttatgcctaccgctgtgtcctaggccctcatcaggatcccccagaagaggcagaactgctgctacagaacctgcaaagtagaggtcccagagactgcgtggtgctcatggctgcagctggggcactttgctggtgctatatttcaaggaaagagaagtggtgacacacaaaaacttttcaccgctaatacgggtcgggcccaagcggggcaacagccccgggggcttcggggatggcgcgaggttgggcccatcaaacatctggctggagcccaacctgaggcgcctacaatgaggccc

SEQ ID NO: 3288 - DNA, 880 bp, Homo Sapiens
  misc_feature (352)..(352): n is a, c, g, or t
  misc_feature (673)..(697): n is a, c, g, or t
acccattccccccatgtttccccttttccagccccttttccaagggcggaaggtttttacccccccaaatggtttttttcctttttgcccccatggctaggaaacggtttaagggaaatggggagggagcccccattttggttaggggcttttgcggaatgaccctaccagtgggacagtgggggccaggaatagaacttctggacatgagaaaaaggcaaattttcatgttcctccagaattcaggtcttacatgcctttcgttattttgttatcacaaaattaaaaacctgaggcttagtcactattttatatagataatggagagttgactgtaatcatgttatgactntagctctttaacatgaaaaaattcacaagaaagcatatgataaaaagattaaaaagactgccatgacatctagaagcatttattttatgcaaaaaacttaaatatgattatgtgtacacataaagtgcacacattacctatgctgaacaatgccaagaaacataatatattgatgcaacagttttctaaaataaacataaaaatgagcccagaccatcagacaaaagcaaaacacttatttccaaatagcacaatgctgaaaattgatagcaatcctaaaacacctccaactttccttaaaagctgccaaagtccaactannnnnnnnnnnnnnnnnnnnnnnnnacattaataaaaatctggtgacaaacattataaaaccaaatgctggacagtctttactcctttaaaattccaaatattccaacataatcacaggagtaaaaaccattttaaagtgatatgctttatgaaacaaacaacaatatgtacatttattggcaattatattaaactaaaatgagggga

SEQ ID NO: 3289 - DNA, 566 bp, Homo Sapiens
cggtcctcgtctctacttgtctgacgcgtgcccagtacaaggtgtctggctgactttgtcctaaataaggctaacattagtgaactaagaacagcgtcacgtggtggccatgcctggccttcaggagcacccctccccgatgcgctggcaggagcgccccaatttccggtccagcttcaccattttcatgatggcttcctcccggccacggcccatgtggtcgaatgtgcagtcgtgctgctcggggaggcgatgtaacatacagaacacataaccgcagcgacacgatcccaattcctgctgcaccagctccagtttggtttggcactggaagcaccgacgtcgactcttctgtttagatcgactggtttcctcggaccgttccgtattctcaagtagtcgtggccgttttactggtgaagcctcattctcagactgtgaatctgtaccacaggatctttaggttggtgtgattaatgagacatgagctgtgtctgtgcatggcccacactcctctttactcggtgaagttacattcagttctgtcggaagcggctgctggctgg

SEQ ID NO: 3290 - DNA, 1140 bp, Homo Sapiens
  misc_feature (60)..(60): n is a, c, g, or t
gcttcaggtggagatttgtatcctggcttttttccacaaatgacccaggtttcgatctcnggaaaacagctagtaagaacttctcattaggggagaaggccatctgcgtgactgtcaaactgtggaaaactaaattctgcacctgtttccaagatgtagtgttccaaagaatgatagctgcatgctctttcttagctgccttacaagctgaggcaagcagagtctttgaactgttacaagtaacacaaaatatttcataaccgtgcccatatagtttttgaacttcaggccacaaagtattctgcagaagatgatcctcagtgggaggctcagtaagtatggagggctgaaaggccacctgctgatactcaaaaccagtactagttaacagctcctcttcatcagaaggctgagaagctatatctccctgaaagacagcttttatttggataatcccaatggcagggacagtggctccttctggaagatcactatcttgattacagagcacatgattcagtgattgtcctgtaatggcacaaaaattttccacaaaattccgaggtgcagaaaaaacccgaagaactttttcatctgctccagatacaaactgaaaccgattaatcattgccaaacatttcaggtcatacccatgtatctgaggccttgcaatttcatgccaagtcacctgtgattggtcttttctcttccatggagcaaaaagtctagttgtctgatcagtaccacagtgataataaattctccttctggatcccagactaggtcttggacaccatcaaagtgtcctgaaatgacatctctggagtccactctcttgggttaactgtattctgtttccaaaggtgcacgctccgtggaaagcatgagcatgatcatggagccatcttcattgaactggcaatcataaaatcccaagtattcccacctacttcacctactcgaacctgttctagccaactcctgactcttcatctggagcccagagaatcatggttttatccatggaagcagataataatctcattggctgctgtaggacaccatctttgtaaaacacaggttgccagtgaactgcatttacccagttttccatgccggcctcggccgtacacccccggc

SEQ ID NO: 3291 - DNA, 672 bp, Homo Sapiens
aggatccccctcggctctaccttgtcttccgctcttccagaaccatgaagcagttcctggaagagcagaagacacaaaactctatgctcccacccataaggaggcagaatttcaggctcccccagagccaatccaacaagaagtggaacgcagagaacctgaggagcatcaggtggaagaggagcacagaaaggccctggaggaggaagaaatggagcaggtcgggcaagcagaacatcttgaggaggaacacgatccatcaccagaggagcaggatcgggagtggaaagagcagcatgagcaacgagaagcagccaacctcctggaagggcacgcgcgtgctgaggtgtacccttcagccaagccaatgatcaaattccaatcaccctatgaggaacagttggaacagcagagactggcagtgcagcaggtggaggaggcccagcagctgcgggaacaccaggaagctttgcaccagcagaggctgcaggggcacttactacggcagcaggaacagcagcagcagcaggtggcaagagagatggccctgcagaggcaggctgagcttgaggagggccggccgcagcaccaggagcagctccggcagcaagctcattatgaacgctatggataatgatatcgttcagggtggggataccagaggggggtacc

SEQ ID NO: 3292 - DNA, 604 bp, Homo Sapiens
cccaccaccatgaccctgatctgcagcccacattcaacgtggttgtgaaatcttggtgggtggatgatggccccaggttccagggcaaagtagcatggtctgtgtctagtttaggaacaagtgaatgggaatcctgggcatatcgttatgtggatttgctacagacagttgggacagaccaggcggcccctgatttctgcccggattcccctgtgttaggagctctggagaataagactttaaccagagccaaagatgatcatgattaggaagggcaggcccagagtgcattccaaaggcaaatttaaaggaaactgatatctgccatttagatcatttacgtgtgttgccatgtcctacacctggggagttgaaaagccgcagaggcagaacactagtgtgaaaaacatgagtcttacagcctccacctgctgtcaccctacagagcatttgatgcctgctagagaagcttctctagtgatttgagacagtgtgggacacatacccgatgaggggaccattatactgtctgacttatggttctggtttttattttttgatagctctcaggaccaaccccaaacaagaaaatgttttttacatt

SEQ ID NO: 3293 - DNA, 1215 bp, Homo Sapiens
  misc_feature (612)..(723): n is a, c, g, or t
  misc_feature (842)..(871): n is a, c, g, or t
  misc_feature (980)..(980): n is a, c, g, or t
gagcagacaggctaaaatgtgaacgtggggtgagggatcactgccaaaatggtacagcttctggagcagaactttccagggatccagggaagatttaggggcaggagacagacacgtaacaggaactcggaaggtagaacttagaattcagaacttgggtttcaattgtagaatttggaatctggaatacagaattgggaagaagaacagagatgacaaaagaccacttgaagagaggttcctaatactagacagatggagagtggcttggctgtttccccctgcatattggggttgaaaacttaaatgtgtagttccagtccttctatgcagagtctctcctgccctccctccttcctgcaggcaaatatacaagctagaccctgttccctcaccctgtatcctgtctcccctaattgacattctatcagcccaaccctcattctgcagggccacctggtgtgtggaggtggcgggaggggtcagtgactctgggggtctcctcagtgacccccatacctcatcatgaacccttgggtagcttgattctgcctaccatccaggaaaacttgtgctggaattgctgatggaaacaattaaatatttactatnnnnnnnnnnnnnnnnnnnnnnnnnnnnnnnnnnnnnnnnnnnnnnnnnnnnnnnnnnnnnnnnnnnnnnnnnnnnnnnnnnnnnnnnnnnnnnnnnnnnnnnnnnnnnnnntatcaaaacaattcctttgccccacgaaccacaaaacgcacgggaaaatggcccatagttgccttcataggaaaatcctggtttggcgcagggctttgcctcctaaaaaattttataannnnnnnnnnnnnnnnnnnnnnnnnnnnnnaaaaaaacccaaaggggcaggttccgaaaggtcttttttcctggaaaacaaacccccccgcggggagctccaaaaggggggtggttttttattttccccaaaatcaaanaaaaaaccccgcgcccgcggggcgggctgcaaaccagggaggtgtttttttgttcccaaaattccccctttagaggcgtttttcccgtcgacgcaaaccttggataaaggcctctatttccccaaaaaaaccgggggtgggtgtccgccaaaacccgttggaacactcttcccccacaatgagggaaaatatagcgcgcgccccgccccctgtggcggggccctctttatggtat

SEQ ID NO: 3294 - DNA, 418 bp, Homo Sapiens
aataccacgagcagccattaggggcagtctcacctcagggccaggcagggagggtcccacagacactgggcaaccaagaagcaactgcagaggtagtgctgggccttgcacaggcctgggcagggtccacctaccagcagtgccctacctcccacttctgttgatgaatctataagacccagggagggcaacacaggaatgaggtggccgctgagaacaagactcctgaaaataagcagtaggcaggccccaggccctttagccaactcctgtggactggcagacaaccccaggagcctatggtctgacagcatctacgctgccctcccaagagcaagcagtggcctcaggtcaggtccatggtcaaggtctagcagagtctgcttcctatttgctctccctcctactgcttaccctt

SEQ ID NO: 3295 - DNA, 563 bp, Homo Sapiens
ctgtgttacttgtgtgaggcaactaattaagttatagtagacttgagttaatagtaattcatatgaaaaagactaagggttttattacccacaagctcagtttgagtcaggagtgaaatgtgcgtgtcaggaaaacaaaggctatagtaacagatacatagtgttaaataactttgacagtttggagcatcagacagaaatacccaagatccagcattactaggcctcaataagtgtcactgggtgtggctagatctgttgactctggctggattcattattttcttttgggaatctctgtatttggtggaaatttttagttattagaaatctgttaaagaaatggtattaaatcattacatgttgaaaagtgatgatttccttcctattcaccctacccaaaacacaatatatgtgttgtggttttcatcataatatatcatatttctgggcactcatcaattcgcggggcctctgcatggcattatgttggcaacagaaactatttgttgaagactatgctgtaggaactgattgttctacacacagctttaaaatgtatc

SEQ ID NO: 3296 - DNA, 477 bp, Homo Sapiens
aggagatgaggccttgggcccacagaaagcagggagctgaaactgagacctctatttaaagctgggatccttacaggactactccttaagacaaaggcaggttagaacaaacccactcactggcaaaggaggaagacaaagacagttgtctccttggccagcactttcaatgagaagaaaaaagaattccttaggaaatcaataaccaataggcctgcccacattgaatgtacaattcaaatttacattgtctaaatgatccaagaagtaagcaatgaaattaacatgaaagaggccctgggcagaaaaaacctttagggtacctgacagaaataaaatgcaaaatcactgtagagcaactcttcttcagtatagcctcatgggaatctcaagaaaaaactccaatgaaggtgagttcacaatccacaattataaagcacatgagcaaacaattcactatgagattcacatacaaaa

SEQ ID NO: 3297 - DNA, 583 bp, Homo Sapiens
  misc_feature (168)..(168): n is a, c, g, or t
ataggcataagccactgcacccagactcacatctactattgaacactttaaaaactctttcagatttcaatcaaagtaaaataatatcttcttgctgaagcctttcctgaaacatataaactcaccctctaggcaggggttagcattcagtgctctcacagtagttcntaaattcttctcattttgcgattacaacatttcattatattgtaattgtcagtgtatatatctgtctttcacactagatctaaagcaaagtgccaaggatatagagttggtgttcaataaatgttggcttgttggttggttgaaatatcttcattttctacaatttaaaaatctgtattatattaactatgtggtctcctactcttataacaaatcacaaacatcagttctttaactcagaatccacagattaccatcaatctgtaatatcgatattaaaaatgagagcaactacctactgagcacttactatgcaacagtttaacactttatttacaatattttatctaatcatagcaatatctttccaatttgcttttaagaaaactaaagttggccaggcacggtggctcat

SEQ ID NO: 3298 - DNA, 168 bp, Homo Sapiens
agctctgtacccctctaaagcgcccatttaaccttttttaaaacaacagcttaaaagctttttggataaaaagcttttattactacatctctgcatcttctctccggggtctaagaaaagggctcaaattcgcggagttgagaaacgagaaaatccaaataaagcgaa

SEQ ID NO: 3299 - DNA, 574 bp, Homo Sapiens
ctgtccctgtgcagatgttggtcacatctgcctctgtcctgacactggactcccaggctgtaactactcagctccttcagccccctgggcttgatctccttgaaggcagggatgcagggaacaaggccgggagtgggagcagcctgtgtgaattctcaatccctgggggaagggggagggttgggccccagggacagcagggactggagctgggtgctagagagcagagcctgttgggctgcatgcagggagcttgcgaattttggggcggggacagggcctggagcaggtataaagggctctggcatcattgtgctacttctttctgtgagtccacgttcactgaccatttggggtgtacccagcatctggcggatcactgggccttctgggagtacaccatcaggcgggagagacagtggacacagaccgttaccatgccctgtgcccattttgctgcttctctggggcccagaaggatggatgctgagttaggagttagaactccttcacttgcttagactctgaggaacaaatgagatgacgtgggtataaaaactccttgtaaagcatt

SEQ ID NO: 3300 - DNA, 658 bp, Homo Sapiens
atcccctgcctggaggtcctgccttccctttcgtgccagacctcactgcccacagtctacctcagcctcgtgctaggcctctgttccttggtgcagtggcttcctctgccaggaatgtggctccccaaccccgctccctttcattggtccctgaggtgaacacatacctagttagccttccaggtagctctccagtcacctcttgtgaaaactgctctgcttcccatatgtattgatagctgcccctctttgtgccctcccataggccccttgcattgtaacatcacgatgtgtttgcatgcttgtcttttgagctgctttaaggcaaggagcctctcttactcatcattagctcctcactgcattggacagagcctgacaccaagggggccttccgtgctggcagaacaaagaaatgaatggatgcatggacagatagagagactaatgcagcttgttgagacaggggctacagcttcactgatgtaagaacaactccaccctcatgccccagcctttttcttggggcaggggcacatgataacctttctcccacactaaaccttgctcactaccagactagtaggccttaaactctgggagcaagaatggaactccttcctatctcaacaccccctgcccagagattttgattcaa

SEQ ID NO: 3301 - DNA, 572 bp, Homo Sapiens
aaagtctctctaatgtggggctctcaacctggaattctgggacccttagaggactcatggatagctcacagggtctctgagccacttgaaattgcagtttaaaaactgtgcattgtgtactttctggcaagagattccatagcttttatcagattcttaaagggtctgtgaccctaacaaagttgaataatacgaaacaaaaatccctgctctaatccaggtgagcctttgagacaaagtagatggactgaaaactcagctgaatcttcccactgagctagaagagagtgctaagcagagaaggcgtagacagaccacaggccagctggatagctgacccacagccaggactggtccacgctttgcatagaggaggagagacccagccatgaccgacatcccatgtaatgttctgagagtcctgttcccagaagctcttcccagtggcctgctctctccactgtgccctggcctgctagaggggagcattccaacccaagctgcagttgaggaccaggagtacatgcactcctgaagcccgctccctaaataaggttcatgctcagcctcca

SEQ ID NO: 3302 - DNA, 273 bp, Homo Sapiens
tgcctcgatgtcctgcactactaagccagaagaggaaatgatccagacaactcagattttaatgtaactgaaataagcacaaacttacacactagggctgatgtattacaatagagtacgatggacaataatactgggtcaaattcatccacttcatgtggacagcttgagtctccgaaagaatgcgacaatacattcaaagaacataaatgctggaatcagttcttgctagcaacacgagccagcaatgttattatgtgaaactgcatctcg

SEQ ID NO: 3303 - DNA, 619 bp, Homo Sapiens
gggagcctggaagggaagtgagaaaccagccgaccggccctgcccctcttcccgggatcacttaatgaaccacgtgttttgacatcatgtaaacctaagcacgtagagatgattcggatttgacaaaataacatttgagtatccgattcgccatcaccccctaccccagaaataggacaattcacttcattgaccaggatgatcacatggaaggcggcgcagaggcagctgtgtgggctgcagatttcctgtgtggggttcagcgtagaaaacgcacctcaatcccgcccttcccacagcattcctccatcttagatagatggtactctccaaaggccctaccagagggaacacggcctactgagcggacagaatgatgccaaaatattgcttatgtctctacatggtattgtaatgaatatctgctttaatatagctatcatttcttttccaaaattacttctctctatctggaatttaattaatcgaaatgaatttatcttgaatataggaagcatatgcctacttgtaatttctaactccttatgtttgaaaagaaacctccggtgtgagatatacaaatatatttaattgtgtcatattaaacttctgatttccc

SEQ ID NO: 3304 - DNA, 558 bp, Homo Sapiens
gggtattctttccagttgttgtaattcataaattatttgaaaagaaacttttgtagaaagtccaagaataataactctagataaagattagtgggacactcaggcaaaaatgttggtctttctttgacatgttgcaaaatgttatcaattttgtcatggatataatttgcagcccatggatataactggttgataagccagagaaaaataatttagtgttctaaaattcatggcatgtgtggtttattaatgccatggactttctcctttctggaataaaatctatggctgtaagaaaactgagcatatgtaaactctgtgatgattaccctttatcacatgaattcttggaatgagaagtttcatctgcttttttaaattcttagtagatatttggcattgaggagaaacttgtagactattatagccctgtgaattaactgtaacaaagtgcccttttttcttcaaattgcttcccccttcccaggatgacccacttccatgtcataaccggaacccctactctaactggattccagggccggtaaattgcaattt

SEQ ID NO: 3305 - DNA, 765 bp, Homo Sapiens
  misc_feature (48)..(48): n is a, c, g, or t
  misc_feature (142)..(153): n is a, c, g, or t
aaatgccaaaaaacatcccaataaaaggtgccattattagtattccancagtgcagcaagattttttagcaactgcgtcgggctttaatttggaactatggccatgagaatatgttaagttcaaagaactgccagatgtctnnnnnnnnnnnngtgtaattagtaaaaatatggattttccctccaagggcccaaaggaagtgttcagttactttgaaagcccacgaattttatcaaacacacacaagaatatgaatctggaacatttcaattctgattcaattctacccattgaatcttcatgacctggagaaagtcacttacaaattctttagattttatctaaagaatcttatccacaaaaagtgggcataaaaataaaggcatatgtaaaaataattttttctaaacatgactacaataaagctaaagatggttactaaggcttacaatttcaacaactcattgtacagtacaatcatttttaattctgctaattatagctggaggaagtgtggataattacaattctcaaggaattcaaatcaaattctttagaaaaattaatagtttcaacttactaagctacttaatctgctctcctagagttgtttaaaacagctaattatataggggtttgaccctttactcccctctaccttctggtagagcagctgaaagtagtgaaaggagaagtgacaagagggagaaaagcagcaacagattgaaatgaggtattcgctgatttcataaaccccaatcccc

SEQ ID NO: 3306 - DNA, 1288 bp, Homo Sapiens
gttccggcgaggaggccgcgccagtgacagcgatggcggcggagtcggcgctccaagttgtggagaagctgcaggcgcgcctggccgcgaacccggaccctaagaagctattgaaatatttgaagaaactctccaccctgcctattacagtagacattcttgcggagactggggttgggaaaacagtaaatagcttgcgaaaacacgagcatgttggaagctttgccagggacctagtggcccagtggaagaagctggttcctgtggaacgaaatgctgagcctgatgaacaggactttgagaagagcaattcccgaaagcgccctcgggatgccctgcagaaaggaggaggagatggagggggactacccaagaaacctgggaaagccacggggagccgatcctatagccctgaccacaggcagaagaaacataggaaactctcggagctcgagagacctcacaaagtgtctcacggtcatgagaggagagatgagagaaagaggtgtcacagaatgtcaccaacttactcttcagaccctgagtcttctgattatgccaatgtcaaatcccctccatcttgtaccagtcctcatcagatgtacgtcgaccactacagatcctgggaggaggaccagaagcccattgtttcacaccagaagcctgggaaaggccacagcaatgcctttcaggacagactcggggccagccaagaacgacacctgggtgaaccccatgggaaaggggttgtgagtcaaaacaaggagcacaaatcttcccacaaggacaaacgccccgtggatgccaagagtgatgagaaggcctctgtggtgagcagagagaaatcacacaaggccctctccaaagaggagaaccgaaggccaccctcaggggacaatgcaagggagaaaccgccctctagtggcgtaaagaaagagaaggacagagagggcagcagcctgaagaagaagtgtttgcctccctcagaggccgcttcagacaaccacctgaaaaagccaaagcacagagacccagagaaagccaaattggacaaaagcaagcaaggtctggacagctttgacacaggaaaaggagcaggagacctgttgcccaaggtaaaagagaagggttctaacaacctaaagactccagaagggaaagtcaaaactaatttggatagaaagtcactgggctccctccctaaagttgaggagacagatatggaggatgaattcgagcagccaaccatgtcttttgaatcctacctcagctatgaccagccccggaa

SEQ ID NO: 3307 - DNA, 1184 bp, Homo Sapiens
  misc_feature (544)..(556): n is a, c, g, or t
  misc_feature (757)..(757): n is a, c, g, or t
gggggcgcgtcattgtcgtcatcgttgcccgaccgctttccgggagactggagtcgaaggccgtgagtcagccataatggcaggtgaagaaattaatgaagactatccagtagaaattcacgagtatttgtcagcgtttgagaattccattggtgctgtggatgagatgctgaagaccatgatgtctgtttctagaaatgagttgttgcagaagttggatccacttgaacaagcaaaagtggatttggtttctgcatacacattaaattcaatgttttgggtttatttggcaacccaaggagttaatcctaaggaacatccagtaaaacaggaattggaaagaatcagagtatatatgaacagagtcaaggaaataacagacaagaaaaaggctggcaagctggacagaggtgcagcttcaagatttgtaaaaaatgccctctgggaaccaaaatcgaaaaatgcatcaaaagttgccaataaaggaaaaagtaaaagttaactttttggttttgatgtacacatattcaaaaagtacatcttnnnnnnnnnnnnngcaaaataattctgtggcagggcaaggtttaaatgtgtttcttattaatatgtaaattcacagtaaatatgtaaagctaaatactttcctctccaaagatcattatctttattgattagcactgaggattttaacattgtgatatattatatatttataatttaccatctcttgatgagactcttatttctttatataggncagtcttgcaagtaccattttataagcagctgtgaaatttaagtgaaatgttctttgtaaacatttgtactattttaaatgaataatgaccttatgaagtatgctatctgtaggctgaaattataggtacatctgttttcactatatgatattaagaaagcgtgaaatgacttaaatgttcatttttttctgtatagatactttatcatgttttcatgattttaggaattactgctttgttgatattcaaagtgtgaaactaaaactttatggttgtactttaattcttggcatgttgcctctatgtcccatttaaaataaaatacattctcattaactttagatgggaaataaggttgtatgttgatggatgaattttggcatgatgactgtactctcaataaaggctgaaaatgttgtataaaaa

SEQ ID NO: 3308 - DNA, 253 bp, Homo Sapiens
gaatacaggcgcgagccaccaggcccggccagtgtcctttcttatacacgtacatacatgatgatggcttgagtcagctgcagggcagtgggcttaatgagagggatctttgtaaagacagctcttcacttcagctcagtagctttggtcataggcaagtttgttttccattatcataatttgatgattcttgtgatgaattcaatgctagttcttaaagaactcttttatgtctgtggtggagcagtgcaag

SEQ ID NO: 3309 - DNA, 351 bp, Homo Sapiens
cttgccatgctccaccactattcataaagtattaaccaactggcaccaaggaattgcctccagcctgagtcctaggctctaaaagatattacatatttgaactaatagaggaactctgagtcacccatgccagcatcagcttcagccccagaccctgcagtttgagatctgatgcttcctgagggccaaggcattgctgtaagaaaagctctagaaataggtgaaagtgacgaggtgggggacagggctttctctttccggcctaaggactttcagctaatcagagttcatggcccctcaagctacattgccgttgtagaccccgaggatggtgaccaccgtgtgccaccc

SEQ ID NO: 3310 - DNA, 991 bp, Homo Sapiens
  misc_feature (863)..(863): n is a, c, g, or t
  misc_feature (895)..(895): n is a, c, g, or t
tggaccggtccggaattcccgggatggaagatggcggcagcggcggcggcggctgcagaacagcaaagttccaatggtcctgtaaagaagtccatgcgtgagaaggctgttgagagaaggagtgtcaataaagagcacaacagtaactttaaagctggatacattccgattgatgaagatcgtctccacaaaacagggttgagaggaagaaagggcaatttagccatctgtgtgattatcctcttgtttatcctggctgtcatcaatttaataataacacttgttatttgggccgtgattcgcattggaccaaatggctgtgatagtatggagtttcatgaaagtggcctgcttcgatttaagcaagtatctgacatgggagtgatccaccctctttataaaagcacagtaggaggaaggcgaaatgaaaatttggccatcactggcaacaaccagcctattgtttttcagcaagggacaacaaagctcagtgtagaaaacaacaaaacttccaatatacaagtgacatcggcatgcagttttttgacccgaggactcaaaatatcttattcagcacagactatgaaactcatgagtttcatttgccaagtggagtgaaaagtttgaatgttcaaaaggcatctactgaaaggattaccagcaatgctaccagtgatttaaatataaaaggttgatgggcgtggctattgtgcgtggaaatgaagggtgtattcattatgggcaaaaccattgaatttcacatgggtggtaatatggagttaaaggcggaaaacagtatcatcctaaatggatctgtgatgggcagcaccacccgcctacccagttcctccagtggagaccanttgggttagtgttgactgggtacgcctacagnctctgcatgggtgctgaaggggacgctcttcaaggtgcaagtaaccaacccgaaacatggggctggccaattctcaaaaaaaccctgggggaaaca

SEQ ID NO: 3311 - DNA, 608 bp, Homo Sapiens
atctggatataagtgcgtgaacaggatgtatagctgtttaatcgttttctagatggtgacctttacagagcaaaggttttcaatatgtatggcccagtttatgagtttttcttctgtggtcatgctttgggtatctgtgaacattgcctaacccctaagatttcttctgtgttttattttcgaagtttaatcatttagtctcttctattaaggcatatgaacctttaaaattgaatttttaattcaatttttgtagatgacgtgatataagggcagaagtctactttttgcatacaaattttcagttttcccagcaccatttaatgacaaagtatctttccccaattgaattaacatggccatctctcttgaagatgaattgaccataaacacaaggttttattttgggattttctgtctatccttacactgataccgcctgcatggagtatgctttaaatgagcttttaaaattaggtagtgtaagtagtcttactttattcttcgttttcaaaaattttttgaatggtacagattctttgcatttctgtataaatcttagggtcagcttgtcaatttttgaacaaaagcttctgaaattatcatag

SEQ ID NO: 3312 - DNA, 336 bp, Homo Sapiens
acgtacaactatccgagctttgacaaagctgacaaaaacaagcaatgggggaaggattccctattcaataagtggtgctgggataactggctaccacgtgcagaagatagaaattgaactccttccttacaccacatgcaaaaattaacttcagttggattaaagttaagattgggaataaaatgcacttattaatattaagttgggagctcatgtaagaggtcaatcatagcataagatcattactaaagaattaaagaaggatgagagtgaaattacatgaagattgaatttatcagaatttatggcagcaattgtgctaaattcttaaagaat

SEQ ID NO: 3313 - DNA, 807 bp, Homo Sapiens
gggtaaactgtccagtttaagtaagggaaaggtcccggaaggaaaccttaaactggaaagggggtacggttccccaatatcaagaaagatttggacttttaaagggtttcaccgaagtttgtgacctttaattagcttttacgttgtaattcctacttttagcggaacaccacacagtttcaaaaatttagactatagtgtccgaacaggatgcagttaccatatgaagctttaactcaaaatttggataaagaaaaaaaggcacaatgaacttcaactcaattttatgtgcacaagagttgaaaaatctgagccaccttaaagagaaattgattctaaaatttataaaacctataaataatcagagcccaaacccactatattaaaacagatttctctagcaagtaaaaatcttgcagtttaaacatacgcttgtatccactttagatacaagacaaaactcactctttaaagtggctccaccttggcagatacatatatttgtaatgaatgcacacctgctatgtgttgtttatcagtgaaaacaccccagctgattcacaaagctctgatggcatctgtctcatcttcatcacagtaaataaaccccccaatggataactaaattagtttagattttctatcccttcacatcaatgcattgggaaattatacccagtaaacaagagcaacaataccatttctgtgacagcacaaattatttagtttaaaaatttttaaatccatattctttcattaataactgggtcagacaatttaccaaaagcaataacttgacatagtacc

SEQ ID NO: 3314 - DNA, 293 bp, Homo Sapiens
gtaacaagcctgcaggtgcaccccgtgaatcgaaaattaaaaagttcttatttcttgtctagctcttggaagggttagagatgcccagtctgactctggcagcagagagagaagacggtgtctttttggatttttctagatgctctgaaactacccctcacggggaacaggaagtcgggactgatagccagttaattcccacgttgtcaatcatatactaagaggaaattcagggaagcagcagcacagcctaacttcaataaaaacaatgaaggccagccacggtgcctcat

SEQ ID NO: 3315 - DNA, 548 bp, Homo Sapiens
ggacttctactcttcataaatgtgcccaagtaaatatgtgtttttaatattcaaccctggaaaattagtaattcagatgataaaagctcatgttttggtgtctttgtactcagattgtgaacaggcatatttcactgatttagacttagtatacttgatgagaatgctcaggttgaagagatagttctgtcagcaatccaacatctatagcaatgtggaaaaagtaatcaactcatatttcacgaatttgatgtatgttgtgatttagagggcatgagataaagtttatatttgaactgtgtggggtagggggaagaagaggttgcttaagcaaatagtggggtgattgtggaacaagatgtctctaagatgagaagttattttcttgcatcatagaagcactctttttacccgtgagtgattgtgttaactataaatcatttatatctgtacattaaagcagattccctcaattaggcaaatttggttagccaagcccaagttattgtttgtacttgaaagtaataaagctgcatttccttaaaaat

SEQ ID NO: 3316 - DNA, 129 bp, Homo Sapiens
ctctctagattctttctctctgggcagggcatctctgaaagaaaggcagtagccctagtcaggggcttatacataaaactcccatctctctgggacagagcacctgggggaaggggcggctgtgggcgc

SEQ ID NO: 3317 - DNA, 435 bp, Homo Sapiens
tcgatctagaggatcccttgcgagtgaatggctcacccttcaggtctaggctcaaatgtcagtccttcagggaagtattttctgatccttcaaagaggtcaggtcctggtgacctccttcagagcacctgtcaccacatcactggtgcatgtctgcctccttcccaactactgtttcaagagaggccccttccctgttgttgtctcagaccccttctttccttcaaagcacttatcacaatttgtaactgctttatttctttggtttcttcttagctgtctccccaattctctttgtataatttctatgaagagataagctgaggtctgtcctgcggtattcccaggacccagcactgaacctaggaacagagcagagattctcaaaaagtatctcctgaataaaaagtgtttgtggtggtggcggcacctctag

SEQ ID NO: 3318 - DNA, 413 bp, Homo Sapiens
tctgttaccattaatactcaatagtcctatttttcctattgtaaaatccaccatgctaattgcagaaggtatattagaagtcaactggagccattcattattaacaatcacttaagaggcagtttcattcaagcaagcttttataaatcccaactgtattctcccccagaaaggcagcagtcaacatccttaaacatactaacttaataatcaagtgatctaagtcttcacacaagtcaatgaagaaaacatttaacaaaatagaatcaaagaaagcattttacctcaccactaaagagcacctttgaaactagtggctatgctttcagagaagggctgttaaaatagctaggcttacaattatataaaacacatttctctagctctttaacaaggtgtcacaagcgattatt

SEQ ID NO: 3319 - DNA, 547 bp, Homo Sapiens
acgacttcagaggatgtgatagtatcccaggcaagcctccagtcatctgctagggatgccagtacttctcagaggggtagaaattagctctgtgccttgcttctaagtggacccacttactctctccctaataggatgtccccatttctagcatgacaatgttccccgtccctggtttcctgtactgggcaggtcatttcagtggggatcccatggaaggcacatggatactcgtggtcatgctgctaacctatcaagccattttccttaatctgtactctggaccacacactgtcccagactcacttaagaaatatttactggtcatttactagatgcaaggaatgctgaaataaaagacactgctcttaccaaaaaagctaatctttccattcctctagtacattgtacttatccaaattctgcactgtccctttcatagatcttgaatagtactcaaattatataaatatctgaggtacaaacaacaacaaagtcatgtcaaagtacttcaggagcttccagtacaaagaccagagtggatggg

SEQ ID NO: 3320 - DNA, 684 bp, Homo Sapiens
caaagagctcatagcatagaaaaaaactgtgtgtgtagtgaatgtggaaaagcttttcgttgtaagtcacagctcattgtacatctcagaattcatacagaagagagaccttatgaatgcagtaaatgtgaaagagccttcagtgcaaagtcaaaccttaatgctcatcagagagttcatacaggagaaaaaccctactcatgtagtgagtgcgagaaggtcttctctttcaggtcacagctcattgtccatcaggaaattcacacaggagggaaaccctatggctgcagtgaatgtgggaaagcctacagttggaaatcacagcttcttttacaccagagaagtcacacaggagtgaaaccgtatgaatgcagcgaatgtgggaaagcctttagtttgaagtctccattcgttgtacaccagagaactcatacaggagtgaaaccccataaatgcagtgaatgtgggaaagcctttaggagtaagtcctatctccttgttcacatccgaatgcatacaggagaaaaaccctatcaatgcagtgattgtgggaaagccttcaatatgaagacacaactcattgtacatcagggagttcacacaggaaataatccttatcaatgcggtgaatgtgggaaagcctttggtaggaaggaacagctcacagcacatctgagagctcat

SEQ ID NO: 3321 - DNA, 454 bp, Homo Sapiens
acacactgtggttaactgcgtgtaatgaatctccagtgtcactttctcagtccctctcccgccgtgatctttatgaacttaacattttttgaagactgtaggatagttgtcttataaaatgtccctcaatgtatgtttggtgttacctcattactacccctggtatgcgtgtatggaggaaacagaagtgctgttgtgcccttctagctgcaccccataaggtgacacagggtgtcaatttgtcccatcattggtggtggtcacttggaacctgaggcaggtggtgtcagccagtctcccctggaaagttactctttgtccctttgtattggataaatattttatagggagatattttgagccttcgtaaatatcctatttctcatcaaagtttggcccattctttttagtaaacttccatctgagccctgaggatggtcatggtttccaggtt

SEQ ID NO: 3322 - DNA, 775 bp, Homo Sapiens
atgatcccctgccttcatgtcctgcaatcgagagtctgaaaagaaaggacagagaacaagtacatttcaaataaatggaaaagataataaacccaaaatatatttgaaaggggaatgcttgaaagaaatttctgagagtagagtagtaaggggtaatgttgaaccaaaggttaataatataaataaaataatccctgagaatgatattaaatcattgactgttaaagaatctgctataaggccattcattaatggtgatgtcatcatggaagattttaatgaaagaaacagctccgaaacaaaatcgcattggctgagttcttcagatgctgaaggtaactaccgagatagccttgagaccctgccatcaaccaaagagtctgacagtacacagacgaccacaccctcagcatcttgtccagaaagcaatgcagttaatcaggtagaagatatggaaatagaaacctcagaagttaagaaagttacttcatcacctattacttctgaagaggaatctaatctcagtaatgactttattgatgaaaatggtctgcccatcaacaaaaatgaaaatgtcaatggagaatctaaaagaaaaaccgtcatcacagaagtcaccacgatgacctccacagtggccacagaatcaaaaactgtgatcaaggtagaaaaaggcgataagcaaactgtggtttcttccacagaaaattgtgcaaaatccactgtcacaaccaccactacaacagtgaccaagctttccacaccctccacaggc

SEQ ID NO: 3323 - DNA, 161 bp, Homo Sapiens
aatcaaagttcttcatcaaggtcaaaagccacatgttacagaaaaagtgacttactccatagaggttacatgagatgctctggaagcacttaggttaattccttcacagtgtttgctaggatgtcaattttggtggagctgctgagtcagaaaatgataga

SEQ ID NO: 3324 - DNA, 555 bp, Homo Sapiens
tactactgaatattaccataaaaataaattatgccaatttaacttgcagttttaaattcccatcctgaatgagacaacataagttttagagtatcaactttccaaagtacatttgatctatcctctagtctctgccagatccctgagcaaatgaagggttccacagccaaataaatgtgggaagctctgcatattatcacctttctcccagatttccaattatgttagtatatgaatagttcagaaaggctctgcagatcactccacgtcttattttaaaaacatgtcaacagacaacaaattcccctaattaacaaacgaattcctttctcatgctatcatcatctagcaatatttagggaaatgcgttacgtaaagataactaactcaccttcccgtatactggtgaagtgttttatacaaagcaagaactgctgattcttcttcacaagggggattttcttgatccatgccattctcttctgaaagataaagaaatactagtactctgtattttccaattaagtgttatcaaaaggactgaagacattaagc

SEQ ID NO: 3325 - DNA, 491 bp, Homo Sapiens
ggcgtcagacgatcccatctcaggcaggacgacccgccggaagtctctggcctggcaggaagacaagtaggaaagccagcaactccatccgggggtgagggtgagagggagacaggtgggaaagccagcaactccatccggggctgagggtgagagggagacaggtgggaaagccagcaactccatctgggggtgagggtgagaggcaggacgtcctggaaccaaagaggcttgacatccagcccagatcagaggaggacaaagcaggaaggacttcctggaggaagtgacttataaggtgagacttgaaaaattaggaagaatcagaaaggagaagcaaagggggaaagagcattctagacagaaggaatggcacgcacaggccatgaacgaaggcaccgttggtggaaagcccagggagaactttggctacagtgaggagggaagtggggagtgtggcgagaggcaggtgagggccagatgttcccatc

SEQ ID NO: 3326 - DNA, 1156 bp, Homo Sapiens
actggctgaatgaagagaaggtcatccagaggcttgtggagttgatccacccgagccaggatgaagataggcagtcaaatgcttctcagactctctgtgacatagttaggctgggcagagaccagggcagtcagctgcaagaggctctggagccagacccgctcctcacagcgctggagtcgcaggactgtgtggagcagcttctgaagaacatgtttgatggagaccggacggagagctgcctcgtcagtgggactcaggtgttactcaccttgctggaaaccaggcgggttgggacagagggcttggtggactccttttctcagggactggaaaggtcatacgctgtcagcagcagcgtactacacggcatcgagcctcggctgaaggactcccaccagctcctgctcaacccgcccaagaagaaagcgatcctgaccaccattggtgtgctggaggagcccctggggaatgcccgtctgcatggcgcccgcctcatggcagcactgctgcacacaaacacacccagcatcaaccaggagctctgccggctcaacacgatggacttactgctggacttgttctttaagtacacctggaataactttttgcacttccaagtggaactatgcatagccgctattctctcccacgctgcccgtgaggagaggacagaagccagcggatccgagagcagggtggagcctccgcatgagaacgggaaccggagcctggagactccccagccggccgccagcctccctgacaacacaatggtgacccacctgttccaaaagtgctgcctggtgcagaggatcctggaggcctgggaagccaacgaccacacgcaggcagcgggttggcatgagacgttgggaacatgggccacctcaacacggatcgcccaacgcggtggtgcaaaacctggagcggggccctgtgcagacgcaaatcagcgaggtcatccgagggctccctgcggactgccgtggccgctgggagagcttcgtggaggagacgctgacggagacgaaccgcaggaacactgtggacctggtgagcactcaccaccttcactcctcaagtgaggacgaggacattgagggtgctttccctaacgagctgtcccttcagcaggccttctctgactaccaga

SEQ ID NO: 3327 - DNA, 209 bp, Homo Sapiens
atggctacacaggaataaacaaatgaaaacctataacatgatgagtaagagttctatggtagagaggtaggagaggaaaggtgaaaactgccacaagccaaatgagactgcagcaaagtatgtaaggagcctgttctcaggtccacccacatccagctatcaccctctctgaccgccttttcccatgagcctgaaagggtcacagacac

SEQ ID NO: 3328 - DNA, 850 bp, Homo Sapiens
agagagcgtgtagtcgcccacgaaggtctcactctctcgcacgaggaaggagccgtcaggggctccggtctcgatgcagtactcagtaagcaggcgctcagcgatgtgacgcccgtcacgccctgcccctagcttcccatggaaccacttctcattggagtgcagctctgtgctgctgctgacctccttgggctcctcctcatcctcgttgccctggtcactgctggtctcctcagagtagtagatcttgctgctggtcagaacaaagtagtggggataccattcgtggttcacagggtcctccaggtagaggatgccattcttgatagagttgctgatgtcgttctcagagtacatcatggatgtaggcacctcctcgtaggcactgccctcagccagcttcttgtgcttgatgaggatcttcctcttaagctggttgggtgaggggagcccgtcggcagagatctccacgggcttggtgaggagtgtgtcccccagcaccttcttgaagtattgggccatgtttctctgctgggcaatgctgcagtggtcctcaatggacaggatgactgggtactctgaggccacaaaggcatgctccttgatggtgtgcaggacatctgagaacttgatcttggtggtaagggtgtgcccatggtaaataactggcatcccatccgggccgtcccagcagtccaactcaatgcagcgacagcccatccgcaggcagcgagcataggcttccaaggaggactcactggagaactggtccccggtcacggtacagtgttgtgcgaggaggagatccacgtagtgggaaagaggcttgttcatgtcgattacggccaag

SEQ ID NO: 3329 - DNA, 529 bp, Homo Sapiens
ttaatggccaggtgagcctcaaagtatttgcgcaaggccatgcaggtatgtttcccagtttggcggctagcaaatatttcatcatcactcagaagtgcaccctgatcttccaaatttagaatctccaaagtactgatcaagttcaccagacgacgaagaccatcatagcggtcaaagagctccaagacggcccgaaatgagaagcaaattgaaaaaaacatggtagcatggcagcatcctgaagcatgagaacactccattaaccacagggtatagttcaccacatcagacagaacattgtggggatgcatgcaaactctttccatggcatcctgattgtaggataggtaatacaaacacatagacacaccagttgcagccatagaaggacgaggtatttccagtaatttctgtactccaccatgcgcaacaaattctgtggcaaatttgttatggagcaggagagatgctaggtgctttagtgcctcaaatgtaagcaggacatgaaggcaggggatcatatagagtc

SEQ ID NO: 3330 - DNA, 646 bp, Homo Sapiens
ctcctcatcacatcgaattaactctttcatgaccatcactttgcccgtggctttgtgtgtcaccttgatagcctgcccaaagaagcccttccccaggacctccccatggattaggtcacagggccggaagatctgctgtgaatagctgctggaacaacgaagggattctgagcggctgatgtcacggctgaacagcaggggctcctttggggagctggggccaggggacttggagatactgttactgcgcctgaagatgaggaaagacgggagtagggatgtgtagtcctcagagaccggccaagaaaccctggagggaggaaacttaggggcacctgttcattccaatgtctatagtttagatgttattattggggaacaggggctcttacatcagatgtatcattttggggttgctgacatcagtcatttatttaagcatagtaaaaacacattcaaaatgggaactctgcatacatcacacatagaacaattaactagattctactagctgataatgctcagtatgtgacatatatgacaacactgtagatggtaattcaccatctcccatatctgcttgatttaagtactaactggtttagagtgatagttatactagtatccaaaaaatgagcaaatggga

SEQ ID NO: 3331 - DNA, 676 bp, Homo Sapiens
atgccctgccttgctgtcctgctggagtacaggaggagtcctccactcacaagatcgtgaggtgctggttcggagtgttcagtggacacacgcttggcagtgtaatttccacagatcctctgaagaggttcttcagtcataccctgactcagatactcactcacagccctgtgctgaaagcatctgatgctgttcagatgcagagagagtggagctttgcgcggacacaccctctgctcacctcactgtaccgcaggctctttgtgatgctgagtgcagaggagttggttggccatttgcaagaagttctggaaacgcaggaggttcactggcagagagtgctctcctttgtgtctgccctggttgtctgctttccagaagcgcagcagctgcttgaagactgggtggcgcgtttgatggcccaggcattcgagagctgccagctggacagcatggtcactgcgttcctggttgtgcgccaggcagcactggagggcccctctgcgttcctgtcatatgcagactggttcaaggcctcctttgggagcacacgaggctaccatggctgcaacaagaaggccctggtcttcctgtttacgttcttgtcagaactcgtgccttttgggtctccccggtacctgcaggtgcacattctccacccacccctggttcccgg

SEQ ID NO: 3332 - DNA, 1025 bp, Homo Sapiens
ggggcagaagctaacacagatcttctctggagaaagatatcctcatcctaggcttcagatgattcctgcaaataattcatcaagcacatgaccttcagctggagagtggaagtcttttggagattagtgcagggtggagaaacttgtggtggagaatgttgatgtgttaacacaaatgaggaccagctttgacaaaccagaccagatggctgcactgtttaaaagattatcatctgttgacagtgtcttgaagaggatgacaataattggtgtaattttatccttccgatcattggcacaagaagcacttagagatgtgttatcctaccacattccttttcttgtaagttcaattgaagattttaaggatcacattccaagggaaactgatatgaaggttgcaatgaatgtgtatgagttatcatcagctgccggattaccttgtgagattgatcctgcattggtcgtagctctttcttcacaaaaatcggaaaacattagtccagaagaagagtataaaattgcctgccttctcatggtgtttgtggcagtttctttgccaacactggccagtaatgtgatgtctcagtacagccctgctatagaagggcattgcaacaacatacattgcttggccaaagccatcaaccagattgctgcagctttgtttacaattcacaaaggaagcattgaagaccgtcttaaagaatttctggcgcttgcatcctccagtctactgaaaattggccaggagacagataaaactacaacaagaaatagagaatctgtttatttactgctagatatgattgtacaagaatctccattccttacaatggatcttatggaatcttgttttccttatgtcttgctgagaaatgcataccatgctgtctacaaacaaagtgttacatcttctgcataaaattacctacttaatcaagataagcacgcatttttgtagactatggttaatacctgtagacagtggaactattttaccttaagacctgagcaagccaggc

SEQ ID NO: 3333 - DNA, 1626 bp, Homo Sapiens
  misc_feature (813)..(931): n is a, c, g, or t
  misc_feature (934)..(934): n is a, c, g, or t
  misc_feature (936)..(937): n is a, c, g, or t
  misc_feature (953)..(969): n is a, c, g, or t
  misc_feature (975)..(975): n is a, c, g, or t
  misc_feature (990)..(1010): n is a, c, g, or t
  misc_feature (1064)..(1122): n is a, c, g, or t
  misc_feature (1139)..(1149): n is a, c, g, or t
  misc_feature (1241)..(1249): n is a, c, g, or t
  misc_feature (1352)..(1352): n is a, c, g, or t
ggatactggctttgctgtaatgcttgaaaaggcgttggtatcttcattttacagttcattaacccaagtacgttttcttatttaaatgacaactttggtgctttaaaatgaggtaccactttttaaagctagctgtgtcgagttaaagaaaaaatcagcagttttttctcccagaaatgtttgccaaacactattcatccccatcttaagttttacaaggtgatgtaatcagcttgttgtagtgatgctggccaaatggtgctcagcaggtgagaacaaaaaaaccccagatctcagtgaactaatacacagcttgagcgtttccatgtgctaatgttgcacacttactaaaaaactttggaaatggaaaataatgtattagtgcaacagttgatgtgcttctttgggcaaagatatagttttgttccacaatttgtacttaaaagcgaaagaacattgaaaacatagacttactggctgtagcaatgctggcctgttaactgataactagaacttaggttcacgtttatgtaaagtgtgtaaaacctagtagagcttgcatagtcggcactcagtaaatgtttggttccttttgccccttggtaagtttattttaccatcctcccacctgccattctgactttattaaatcaacatgtggaccagagtgttaatgagatgttattgcagaagagattgagaaaattggtatatcatgcagataacatacaaaatctttttgtaacgtaaaaaatgcagttttattattgcttgtgcctcaactgtttaagtgaatattaaagggcttggagnnnnnnnnnnnnnnnnnnnnnnnnnnnnnnnnnnnnnnnnnnnnnnnnnnnnnnnnnnnnnnnnnnnnnnnnnnnnnnnnnnnnnnnnnnnnnnnnnnnnnnnnnnnnnnnnnnnnnnntgngnnccccccaaacccaccnnnnnnnnnnnnnnnnnctttcntttacgcaaccgggnnnnnnnnnnnnnnnnnnnnnggaaaaattatttatttctttgggcattgggggggcggcgccccaggagcctgnnnnnnnnnnnnnnnnnnnnnnnnnnnnnnnnnnnnnnnnnnnnnnnnnnnnnnnnnnnttctgagtttcccctcnnnnnnnnnnntacgcggggctggtcaccaagagggttttcccaaaacaaaccccaaaaatggtaatttttgggggccccctttttggtgatatttttttacnnnnnnnnnggtggggggaaaatcttcttttatatatattattttcacagccgcgggcggcggcgccttttttttatccggagaaggggggggtggaacattttatatttanccaacctctcctcgcgcccaccccgcgggaggacaccccttcctccaccacaaaaaagaattatttttgccacccagtggagagaacccccacaggggggcggagaaaaaacacacctgtgggctcctttttgtgggagacattttattattttctccccaaacggctggggaaaaaaacagcgccccaacaagaaaatatctgcttctctcattttctaacaaccaccatctttttttctacattataaaacgctcgtgtgaaagaggcacaa

SEQ ID NO: 3334 - DNA, 327 bp, Homo Sapiens
accatattggccaggctgttctcaactcctgacctcgtgatccgcccacctcagcctccttaaagtgctgggattacagctgtgagccaccctgcccggccacttttgtatgatttctaatgtatttgtaatttacctaacaaattgcctaatctgctatgttaatgtatttatgaattaaaataaatacgactgcatgtttggtggttcatttttgtggaggtggctgtggtgacatcaaccaagaatctgaatggtactgttgaaggaaaatagcatgatagcttcagttctaaagccctgaaacctagtctcaggtggtacctc

SEQ ID NO: 3335 - DNA, 1154 bp, Homo Sapiens
  misc_feature (109)..(109): n is a, c, g, or t
  misc_feature (287)..(287): n is a, c, g, or t
  misc_feature (447)..(447): n is a, c, g, or t
  misc_feature (461)..(461): n is a, c, g, or t
cactggttaaggactaagcaaaaaggaaagtgacctgtatctcctgtttccaaatttctttttctttctttgggccacattctcccatggcccatgtgaaaattaaaancaaaggattgcgactgtcctggccagagaagaaggttaaagctgtgtcatagagaattgcagattatagttctaccttcatccctgtgatatccatgtctctcagagaggtctggctacaccaggatgttctttgcgatagcattcaaagtccttactttggtcacatctgttacctntagggaatattctgagcaagaaagtgaggctcccatggcaacagatgaatttcgaaacttcattcccgagtctctagtagaccgagcagaacagtggaatttctgtagcacctgaaccctcaagggatcccttgtagatttctgtctgttataccacctncctggcattaccancaatcctgcctttttgcctgctcaatgagtcgctttattaggggtagcccttctaatgctgaactgtcacatccactggtcaacacgcgttcaaatcccaaggttaagaaggtctccagagctgccattggatcatgaaccatgtcaaaggctcggtggaaagtgactggcagagggcggcaaatagccataagggacatacacagctctttgtcaatgtgtccatcttcagtcaatgccccaaaaaccaaaccatcagcaccataaagcttggcaagacgaatgtcagccttcatcacctcaatttcacgatctgaatacaaaaaatcacctccccgtggccgaatcatcacaaaaactgggatctgaacactctgcttcactacttgaaggacacccatgctgggtgtagttcccccctctgataaaccagaacataattcaatccgatcagcacctcctctttctgcattcacagctgattccactgaatcaacacaaacttccatgagaaatccatttgctgctccggccttcccggacggtatccgcgctcgttttcgctcagaggaggccccctgccttttcatgctccacgcgttcctccctcgtgcgcctgcagtttccacttggaatttgggctccggcgcgcaccagctaagaagcgcgtcaacagctgcgcgcgcccgtccc

SEQ ID NO: 3336 - DNA, 798 bp, Homo Sapiens
ggctactgcagggtgaagaattactcagagctttggatcaagttaactgagctttttcttaatttcattcctttttttggacactggtggctcactacctaaagcagtctatttatattttctacatctaattttagaagcctggctacaatactgcacaaacttggttagttcaatttttgatcccctttctacttaatttacattaatgctcttttttagtatgttctttaatgctggatcacagacagctcattttctcagttttttggtatttaaaccattgcattgcagtagcatcattttaaaaaatgcacctttttatttatttatttttggctagggagtttatccctttttcgaattatttttaagaagatgccaatataatttttgtaagaaggcagtaacctttcatcatgatcataggcagttgaaaaatttttacacctttttttcacattttacataaataataatgctttgccagcagtacgtggtagccacaattgcacaatatattttcttaaaaaataccagcagttactcatggaatatattctgcgtttataaaacttttttaagaagaaattttttttggcctatgaaaattgttaaacctggaaacatggacattggttaaatcctattaataaatggatttccttaaaatgcctggaatggggtttaatttattttcaaaatggggggaaaaggcccatttttaacgtttaataatcggaagaaggattatggccattattatatctctaaaaagaggggaattgtgggggccaa

SEQ ID NO: 3337 - DNA, 1122 bp, Homo Sapiens
  misc_feature (764)..(799): n is a, c, g, or t
aagtcatataagcgtgttataaaatttatttgtgtaagcattcagacatttttaggtgggaaagatgatatgcagaatccactacaaggtgcaacagaaaatcgtattggaaaggacggtacatctggcgcagaccagcagtggcacgattccaaacaaatgtcagacgagagcgcttcatggggagaaactgaaaattataatttaaagcttcatgaggcaagatatgttccaatttaaaacactaagaaatagtaccatcgatgaaaaaggaaatcaacctctaggtgtaccaaaaggggcgtagggcaaacggggaaaatttgcatttgttgaggtacaaataggagtgttctgtaagagaggggcattaattattaatgacaaaccctgcaaatacaaaataaaacccaaatcactggtcacagaattcaaaatgtacatgtaataaaggcaaggcaatagactcaagttatggcctgtcgaatatttactccactgacgttatctacagaagcacttggccagtttgtacacagtgattccttatgcacgccgaaagggtttccgtaaaaatgacattatatacaaatctgtacacccatccaccagagcgattctccagctcccagagggagttatcaacttaaagcaggatacctgaggtttcatgtctttagttgccttatcataatcccaaatatacatttcagggtttgtttttgtttttaaagacactttcctggaatatgtgcactatggtnnnnnnnnnnnnnnnnnnnnnnnnnnnnnnnnnnnntgatcgctggaaggagctgaccctccccacccatctgagagacttcatctggctgcagcacagtgaagactgtgtgtgtccctggacgggcgcctggcgctggggtggctcccagtggcgcacctcttcggtggagtcagcgaaggctctcgttgacttttaaaaaaggaggaggatgaagaaggaaaaaaggaaaaacaaaccccaaatgccaaggaatttcagtgggatgaagttcctccaccacttagagagtatctctggagccgctgcacgagctgggccaccatggtgtcgagatgccaggcacgcctcctccccag

SEQ ID NO: 3338 - DNA, 743 bp, Homo Sapiens
accagatcgaccaggctgccgtattcatgaggacctgttcagaagcattcagcaactacgaacagaagctcacaaggagatacattcccagcaagtgaaggagcacaggaccgctgttttggatttcacttgaagattacttgaaaagagtatgtaaaccttactcagaacagagagccatccgagttaaaagagtggtggataagaaaagattatctaagctggaacccgaacccaatacaaagaccagagaatccacatcttctgcgaaagtttcacagagtccttcaaaagactctgaagaaaaccccgccactgaagaacgtccagaaaaaattttggctgaaacacaacctgaattgggaacgtggggagataggcaaaggcgaagatagagttaaccccagaagaaatacaaatgtttgaacaggaaaatcagcgactaattggtgaaatgaacagcttgtttgatgaagtgaggcaaatcgacagggagagtggttgagataaccagactccaagagatattcacggaaaaggttttgcaaccaggaagctgagattgacagcattcaccagttagttgtgggggcaactgaaaatatcaaggaaggcaacgaagacataagagaggccattaaaaacaacgctgcttccgcgtgtggatcctcttcttcctcgtgatgtgctccttaaccttgcccgtcctcgatctgtcctggttaaagatcctgtagagtcga

SEQ ID NO: 3339 - DNA, 824 bp, Homo Sapiens
aattcccctgggcccttacagggttgattttggccacctcccccgcttgggcctctcccaaaagggggtgggagcccacctgtgccccaggcccaggaggtttctattcttttgaagatatcttttgaaaagaagccgcctggaaaggggcaggatccaaaattaaatggccatgaaaagtgtactccccctccggcctgctccttataagggaaccccttatgactagaacccaagaccagtacccacagcctgaaagggaatttcagacaaccctaccatagaagtagtgaagaaaccttaatttctaatctcctagtgaatacagtgaggattccatttgtgggcaatggggacgctgggagttcctccctcacagactagagacggcacctaagattctgtaactctgggaagggtaccagccttatagaaattccagtgggtcaactgcctcttgaagcatgcttaaagtctcttaacaggtttataaatgccaatttctggttggtattatatccacagcatagcactgtctactgcatcaggagggctatggagacttaatatactagacatgcgattaaaaaaactgaaagaaaagggaaaggacaacagagtaagggggccaaagaaatggtgatgcagtcttctaatagatgtgaatggggaaggaagaaaagagaagtttagatccaaaatgaacaaagaagtcaagcattaaattccaaatgaacaggtatacagaaatgaaaagttaatgaaatcattgtattatcacaatccaagagctcaagatggaatttaagctttttctccttccc

SEQ ID NO: 3340 - DNA, 810 bp, Homo Sapiens
tgacgcccgacatggtaagagacaggcagccaccgctgctgcatttgcttctcttaaaactttgtatttgacgtcttatttccactagaaggggaactggtcttaattgcttgatgaagagcaggagactcatttatgtgagtcttttgagtgaccattgtctgggtcactcccatttaactttccctaaagcccatttgaaggagaggtcgcacgagctgctccacaacctctgaatggggatggcatgggtaatgatgcttgagaacataccaagccccactggcatcgcccttgtctaagtcattgactgtaggtcatcatcgcacccttgaaagtagcccatgccttccaaagcgatttatggtaaatggcagaattttaagtggcaaattcagataaaatgcatttcttggttgtttccaatgatgactgttatctagagggaatttaaaggcaggggtttactgcagactcagaagggaggggatgctccgggaaggtggaggctctgagcatctcaataccctcctcttggtgcagaagatatgctgccacttctagagcaaggggacctgctcatttttatcacagcacaggctcctaaattcttggtctcattctcaagatgttttaatgactttaaagcagcaaagaaatattccacccaggtagtggagggtggtaatgattggtaatgctttggaaccaaaacccaggtggcgctggggcaggactgtcagggaactggggtatctagtagagggagactaaagatggaagccagcctggcaggcaatgcgcgaagat

SEQ ID NO: 3341 - DNA, 1607 bp, Homo Sapiens
ccacgcgtccggcgggaagatggcgttggaggtcggcgatatggaagatgggcagctttccgactcggattccgacatgacggtcgcacccagcgacaggccgctgcaattgccaaaagtgctaggtggcgacagtgctatgagggccttccagaacacggcaactgcatgtgcaccagtatcacattatcgagctgttgaaagtgtggattcaagtgaagaaagtttttctgattcagatgatgatagctgtctttggaaacgcaaacgacagaaatgttttaaccctcctcccaaaccagagccttttcagtttggccagagcagtcagaaaccacctgttgctggaggaaagaagattaacaacatatggggtgctgtgctgcaggaacagaatcaagatgcagtggccactgaacttggtatcttgggaatggagggcactattgacagaagcagacaatccgagacctacaattatttgcttgccaagaaacttaggaaggaatctcaagagcatacaaaagatctagacaaggaactagatgaatatatgcatggtggcaaaaaaatgggatcaaaggaagaggaaaatgggcaaggtcatctcaaaaggaaacgacctgtcaaagacaggctagggaacagaccagaaatgaacctataaaggtcgatacgagatcacagcggaagattctcaagagaaagtggctggatgaaatttcattcaggttacaggaaccaaagaaagacctgatagcccggaatagtggaggattattggtaacaaaaaggcaattgaacttctgatggaaaccgctgaagttgaacaaaatggtggtctctttataatgaatggtagtcgaagaagaacaccaggtggagtttttctgaatctcttgaaaaacactcctagtatcagcgaggaacaaattaaggacattttctacattgaaaaccaaaaggaatatgaaaataaaaaagctgctaggaagaggagaacacaagtgttggggaaaaagatgaaacaagctattaaaagtctaaattttcaagaagatgatgatacatcacgagaaacttttgcaagtgacacgaatgaggccttggcctctcctgatgagtcacaggaaggacatgcagaagccaagttggaggcagaagaagccattgaaagtgatcattctcatgatttggacatcttttaagtacattttcaacagtttgaagactaagcctttctaaaataacattgtaataaaccatttttactgagattgcaacgttttgcactgataaacatgagaatctggaggaaagacaattgttttcttgtttaaaatatgtgtggaaaggaatgcaattgatagaacatttaaagatatatctgacaaaatacttaagagtatatagcacaggatttaatttctcaatctgttgcatgtgctaattatgagtattactagttgataatcagttttgtctaggtcataacataccatttgtaagtttgtttgctttttcaggtttatctttgcagtgaattatgctttgctttaaaacattccgctaaaatcataatgggacatataaattattaagctgtt

SEQ ID NO: 3342 - DNA, 463 bp, Homo Sapiens
gttgatattaattccattagactcttatgtgacgtgaagacgaagacttccccctgagtaagttcagacagcttctgataacatttctacatcgattcctcaggatttaactatatattcttgaaaacatctcaattttaaatgtttctttcaagatggtgaattaaacagagatagcccttcaacaggttgaactcagcatatgctgagtctgaaatggaaatgatgaagttagagaaccatacaacaatggtaatgatttcagaaacatggtgttgagcagaacaaagcagacacaaaagagtacctatggcatggcatgcatctgtatacgcgaaattccagaataagcaagctaacctatgataagaaagagactggctgggaagactgagagttcactttctggggtgacataatagtgtagatcttggctgggcatggtggttcacgcctgtatccc

SEQ ID NO: 3343 - DNA, 769 bp, Homo Sapiens
  misc_feature (677)..(720): n is a, c, g, or t
ggggggagccagcggtatggcgtcgggctgcaagattggcccgtccatcctcaacagcgacctggccaatttaggggccgagtgcctccggatgctagactctggggccgattatctgcacctggacgtaatggacgggcattttgttcccaacatcacctttggtcaccctgtggtagaaagccttcgaaagcagctaggccaggaccctttctttgacatgcacatgatggtgtccaagccagaacagtgggtaaagccaatggctgtagcaggagccaatcagtacacctttcatctcgaggctactgagaacccaggggctttgattaaagacattcgggagaatgggacgaaggttggccttgccatcaaaccaggaacctcagttgagtatttggcaccatgggctaatcagatagatatggccttgggtatgacagtgggaaccggggttgggaggccagaaattcatggaaaaaatgatgccaaagggtcactgggtgaagaaccagttccccctctttggatataaaagtccatggttgtaatagggcctgaccctggtccataaattggggctaagggcaggacctacattgatttggggcctgggcaatggcttattaatgggggagggggagaacccccaaatctgggggaatcaatccaatttnnnnnnnnnnnnnnnnnnnnnnnnnnnnnnnnnnnnnnnnnnnnctgtttcctctttggtactggggggaaaacaccctttaagggggagccc

SEQ ID NO: 3344 - DNA, 404 bp, Homo Sapiens
ccagtttgtcacctttaagcagaattaaaatggagaatgcgcagatcatctacactcagctagctgccaaatcaaagtttttaagcctaaaggtgcagacaggaaacaaaaaactgaccgagagaagatggagaagagaacagctcatgaaaaagaaaagtatcagccgtcctatgataccacaatcctcacagagatgaggcttgagcctataattgaagatgcagttgaacatgagcagaaaaagtccagcaagcggactttgccagcagactacggtgattctctggcaaagcgaggcagttgttcgccgtggcccgatgcccccacagcctatgtgaataacagcccttccccagcgcccactttcaccttcccacagcagagcacttgcagtgtcccag

SEQ ID NO: 3345 - DNA, 530 bp, Homo Sapiens
  misc_feature (54)..(54): n is a, c, g, or t
  misc_feature (96)..(131): n is a, c, g, or t
acctgtaatcccagcagtctgtgagactgaggcagaaggattgcttgagaagtntgagattggcctgggaaatatagcaagatcccaaccctattnnnnnnnnnnnnnnnnnnnnnnnnnnnnnnnnnnnngtatttctccccttcacggtaatttggagccagtacttcttgcaccattcatttgtccacagcatgggacaaaggataatgccttaatgcctgctgcaaatagaacagtggtgcttagcagctttagataatgcattgtaggtgttttgcaaaaaacatactttcgtgactaaacatcataagctccaagtgagtgattcccccgcgtaaatgaatgattctgtgaggataacacttctaagatgtgagattccaataaatgaatctgtaggctgctgtgatgaataccttgggtggggtagaaaggatcgtcatttagaacctgggttctgactccaaatgacttgttttgttctatcccagaaatattcctaaaatcgatttccagtttccaaaaga

SEQ ID NO: 3346 - DNA, 924 bp, Homo Sapiens
tggtactccctcctccgttggtaacattcctggagcctggttcttgccagacctggttgatggcctccacctgctcctggaagagcatggagaccttgtccacttccacttctcggattatctgggcattttccctatttctgtttcacacaacatactgtatccttagcgtgttccatcgctctgatcatggcttgcatggcggtgaatatgttttggtaaaccagcttcgtgaacccctttctgtcttcgtcgctgtaaccagacccatggataattctcatctgcttgataaaggtgcttttcccactttcaccagttcccagcagcagcagcttaagctcacggcgcgcgtccttcttgtcccgacgaagctgtcgctcgatctccgcgctgatgcgctgcgactccttctcctccgcggacaggcagcagcagccgaccatggtgcgctcagctcagtacccgacggggcgacgcggccccgggcacccgaattcctcggcccggccgctcacccggccagcatgcgacgggcacaggggtgtggaaagaaaagacgggggccgacttgagctttggagtaagacgcctggacctccgaggctcaatcccccttcgaaagtcggctctgaggcggggtgaatgccgagcgctgggaacgctcgagtgcaccccggatccgggctcagcccgccccactctcgctctggggaggaggagggcgagtcgagaagttgggagcgttgctggccccgggaagatgcgcgcgccccttggcacaggagccggacagcagtcgggggcgcagacgagttggaacgtcggtgctcgggggagagtaggatctcctgggcctaggggtgtccccaggcgggaggtaggcgcggagtgggttggaggcaaaggacctggctggccttg

SEQ ID NO: 3347 - DNA, 542 bp, Homo Sapiens
gcttctacatgaacgtgttaacgagttatgtgttgaagcactttgtcggatggaacaagccaattgctcctttcaggtgtttgataaacatccagggatctatttgtttttagtccatcccaatgaaatggttcggcgttgggctatcttgactgcaagaaacttggggaaagtggacagagatgattattatgacttacaagaagttttactttgcctttttaaagtcattgagttggggcttttagagagtccagacatttatacttcttctgtcctagagaagggtaaactgattcttctgccctcacacatgtatgatactaccaactacaaaagctattggttaggtatttgcatgttgctgaccattcttgaggaacaagccatggattccctgttgttgggctcagacaaacaaaatgattttatgcaatcgatacttcacactatggagagggaagcagatgataataaactttacttgctgaatgttgttgaatatagtgatgatgatgcactttaaaaatgatagtgtcact

SEQ ID NO: 3348 - DNA, 621 bp, Homo Sapiens
acttggctatgtggcagatgctggccttgatgggagtccacagaaaatggggcctcactgactgcttgtccaggtatctcagtgggagggaatgggagtgggaaatggagtactcaaggccacaagacaggccgccatagaactttggccttggggaatgaaccaaagctagtttggagagtagggtgattggggtgatcacttttccctttaaaggtggcatgctgcaagaagaaaggctttgaagagtgatgggtagtcactaaccatggcactatgctatcttctaaccaacgttatggggtcctggaatgatcctaggtctgcactagaagaggtagacccagaggaccttgtctaacataccccttgcttcttgacttcttcccatacctgcgttctttccggcctcaattactgcctgagatgttacacccttccagcataaatgatgaaccgcttcatggtgcctgtagaggcctcttgcagagcaccctgcagtggtatggtttgtgtatgcctcactgcactgtagagaaatgaagagcatgaggggaaaaatgagtagggcctggacttttagctagttttgaactctgcagttgctatgacttggggttg

SEQ ID NO: 3349 - DNA, 524 bp, Homo Sapiens
ctaacggcctctctcttccattgctttagggaatgtccaacgctgttatctgagacctctccagcctgtcctatgaccacacacaaccacaccctgacctatgcactcagcaggcaacgggtccttccctaaatgctcttggcatgttcatacgtcctcttggacagctccatttccttccccagtcctagtcatgcctgtctgaggctcaccccataatgccaattctccatacaacctttctagaccaatccagtaggaattgactattacaataactcccgaacaccagctacagagcacaatgcagcaattagaagcaacaaaccaagagtacacactgcagtcaaatagatattttaaaaaatagtgctggtggctgggtccggtggcttatgcctataatcccagcactttgggagccaaggagggtgatcacgagtcaggcgttcaacaccagcttgccaagatggtgaaccccatctctactaaaaatacaaaaatagccagccgggtgggatacc

SEQ ID NO: 3350 - DNA, 641 bp, Homo Sapiens
  misc_feature (496)..(496): n is a, c, g, or t
  misc_feature (547)..(547): n is a, c, g, or t
taagccttcaagtatcaagttcaatgccacctcctcagggaagcctttcttgccaccccaggctagggctggcagacaccctcacagtagcagccttcactcttgcagcaccagtcacaatggcaattaaagaattattgagaaatttacaagtgtcatgagggcatcatcagctttgttcactcatggatttccagaacttgcacattgtaggtgctcaaatatttatactgatattcagttttcccctctaactctcccaactcctactcaattaactcaagaaaagtcctatttttattttttattcatgtttgaccccaaacaaaataaaccatagcaccctaccccaccaccacccaacatgacagattaatattagaatgatgctattttagatctgtaccaaagaaaatgatgtgaaagaatgaagaatgaaggactacatgtatctctaaatctgagtttataaaatggcagtttacattgaattcangtaccacgtgtgatttacttaacttgtgctgcttaggaaaatgaaatgtangtttgtgaatccattgagaaaccaaaagatctggcaacatagatgatggattcccgcatggtgactacagactgggagtgagtagccgtggtgc

SEQ ID NO: 3351 - DNA, 572 bp, Homo Sapiens
caagggtgtgggcatcatctctgagggcacgagactggggaggacatcgcccgcccggctcaacattcccgtcagccaggttaacccccgggaaggccaaggcctgcgtgatccaaggcaccgacctcaaggacttcacctccgagcaaatcgacgagatcctgcagaatcacaccgagatcgtctccgcccgcacattccccccagcagaagctcatcattgtggagggctgtcagagacagggtggcaattgtggctgtgaccggggatggtgtgaacgactcccccgctctgaagaaggccgacattggggtggccatgggcatcgctggctctgacgtctccaagcaggcagctgacatgatcctgctggacgacaactttgcctccatcgtcacaggggtggaggagggccgcctgatcttcgacaacctaaagaagtccattgcctacaccctgaccagcaatatcccggagatcacgcccttcctgctgttcatcatggccaaaatcccgctgcccctgggcaccatcaccatcctctgcatcgatctgggcactggactggtcc

SEQ ID NO: 3352 - DNA, 418 bp, Homo Sapiens
  misc_feature (97)..(106): n is a, c, g, or t
ctccctgctatggtgcgaatgtctcactttgaaacttaattgccattgtaatagtattaagaggtgggactgtcagggctattgaagaaaatggttnnnnnnnnnntagtgggaactttaagaagtgattaggctgtgagggccctgcccttaattaatggattaatgcagtgagttttgttatcctggtagtaggttccttataaaataatgagtttggctcccctttgtctcttttttgtctttctgccttctcccttgggataacgcagtgagaaggcactggccagatgctgttccctctctcttgaacttctcctcctccagaactgtgagccagtaaatttcatttcattataaattactcagtctgtggtattctattatagcagcacaaaatagactgagacactcccat

SEQ ID NO: 3353 - DNA, 522 bp, Homo Sapiens
aaggcagggattgggggggatgggggaagtggcccaataaattcatttctgtaacaagcatcttttatacatattactaaagagaaaattagtaagaaatgcaaataatagttctttatcatattatgacagttaattaatagcaacctggtttaatgaataaagtcactcagagtccttcagcacttcctaagtagaggccagaatctgtagggcttcttttccccccaattgtatagctcctagactccaagcactatataggcccctgtatagaaatgctcactaatgaagagggagggctagaagcttgtctgcattcaaagatcactggtgagtcattcagcaagaaaaggccccttaccaggaatagtcacagttccgtggcattgtactagcaaaagggtctgatcaaaggtctcctgtggagcttgaatggttccctttcatactacgaccataattaaaaccactaattctcttttaaaatgctgcaggatgccatgtagggctctgtctgga

SEQ ID NO: 3354 - DNA, 591 bp, Homo Sapiens
acaaagtcttatatttaatcttgtctcgtattgttaaatgaatacatccaagtgtttcataaacaagttatatcaattattgtacaatgcagtggcttaaagactcatagtaatctctttcctcagatcataacggtttagaaccgacctgatcattccctattgtgttatttttaaattaccatgtacatgctacatacctaaattaatggcatgatatttaaagtaatcagcaatctccataccactgaatctaaaatctctatcagtgtcccatcatggcttgcgatattatatggcattgctcattgaaggcatacccattcccatgagtgggaaagcagggttagtagctccactgtgatatataaggagctgaaaaatattcttgtcttaccgcggatttcctagaaaatcaagcctctgaagtacagcttgtgtgctaatgctttattaaggggtacagtctcaagacagcaagaataagggggaaagggaagggaggcaagaaaggagggaaaacatgtaagtgtggttcatcactgggctggccacagcatcactagaaaacacagctggttccttttttat

SEQ ID NO: 3355 - DNA, 638 bp, Homo Sapiens
cccccggctgcaggaattcgattaggtgattggtgccaagtagtaaaagatggtacacctgcatatggagccattcctgaaatagtaggcatcaagacctctgtagaatccagaagttaccaccttcctttgcataaattgttttgaatagcatgaataattcctgtatagctgtgttcacctttcacctggaatgctaggcggaccctaaccatgtcaagagggtaagtactagtataactgctgtcatacctgccatggatccagccattaatctgtgcacatgtacctgaaattcccagcttcgtagtaattaacgttttataatgctcaatatgcctataaactggattgcaccatagggaaagattcgaatcatcattgcaccatttcctttatacaatccaaggaatccttcttcttgaggaacagcacgcaatgcagaaaactactcctaaatgcttgtaatggtgattgtgagcttgtatataaaacctttactcgatccaatggagcaactgatgttttggcgcagcatccatcaatacctgaggaaggctgggaatcttggtataatgtggttatgcaggcagtcacttcaaggtattaatccaactggcaggttcagtttgaagtca

SEQ ID NO: 3356 - DNA, 986 bp, Homo Sapiens
  misc_feature (793)..(801): n is a, c, g, or t
gggagctgaactgagctgaaatcctaaaggccgcggagtcggcggtgttgtaggtagcggtaccttgagtggcaacagaattcgattaaattacaatgggaaacatttttgaaaagctctttaaaagtctacttgggaaaaaaaagatgcggattcttatattgagtttggatacagctggaaaaaccaccatcttgtataaattgaagctgggggagactgtgcctgccgtccctacagtaggtttctgtgtggagacagtagaatataaaaataacaccttcgctgtctgggatgttggcagccacttcaaaatcagacctctgtggcagcattttttccagaacacaaaaggtgccagaagcccaggaagcacacatcaaggctcacttgccagcggggtgctgccaataaaatgtagtcacgtggaatttggaatgtggaaaggaggtagaagtcatcctttcctcccccatagcagcaggtgtgcaggctctggtggtcagctggactccatactcccccaccagtcaccagcctggggaccgtggggctgcaaggacctcagcagcggtctcccaagtttcctgacttcttccatcctctggaaatcacctgggtttgctgccgataatggcctccacatccccctgtgttccctacaaagagacgcccccggttccccctttaggactggacacccccctggctcttaccctttggcccctttcacctgggccccccgacacaaggacctcctaaacccccttggaaattcttttgcatggcaagnnnnnnnnnttttcttttcatcggggcgtaccttttggtgggtcttcctttaccccgggggaatgcgctcttcaaacatagcgttccctttgggttggcaacctctaagtgttttgagggcccaggtcccgaatcctatgttggcgggcgaaactatcgcgtgggcctttttattctttctccccgggacaata

SEQ ID NO: 3357 - DNA, 1022 bp, Homo Sapiens
ggggactgggctgtacggtgcgcgtgacggctgcgtgcggcgggaatcatggctgctcgcagagctctgcacttcgtattcaaagtgggaaaccgcttccagacggcgcgtttctatcgggacgtcctggggatgaaggttctgcggcatgaggaatttgaagaaggctgcaaagctgcctgtaatgggccttatgatgggaaatggagtaaaacaatggtgggatttgggcctgaggatgatcattttgtcgcagaactgacttacaattatggcgtcggagactacaagcttggcaatgactttatgggaatcacgctcgcttctagccaggctgtcagcaacgccaggaagctggagtggccactgacggaagttgcagaaggtgtttttgaaaccgaggccccgggaggatataagttctatttgcagaatcgcagtctgcctcagtcagatcctgtattaaaagtaactctagcagtgtctgatcttcaaaagtccttgaactactggtgtaatctactgggaatgaaaatttatgaaaaagatgaagaaaagcaaagggctttgctgggctatgctgataaccagtgtaagctggagctacagggcgtcaagggtggggtggaccatgcagcagcttttggaagaattgccttctcttgcccccagaaagagttgccagacttagaagacttgatgaaaagggagaaccagaagattctgactcccctggtgagcctggacaccccagggaaagcaacagtacaggtggtcattctggccgaccctgaaggacatgaaatttgctttgtcggggatgaagcattttcgagaactttctaagatggatccagaagggaagcaaattgtttggatgatgcaatgggcacgcagataaaaagtgacgagtgggtttgcccaaacacaaataaacccaaaagcttccagggttaacggaaagaccatgatgcagaagcaagccctctgttgattccctggcccagcaacctgttgaagct

SEQ ID NO: 3358 - DNA, 837 bp, Homo Sapiens
gggaaatggaaacctgcaaggacctagacacatgcagaaaggcagagtggaaactagcagagttgttcacatcatggattttcaacgagggaaaaacttgagataccagctattacagctggtagaaccatttggagtcatttcaaatcatctgattctaaataaaattaatgaggcatttattgaaatggcaaccacagaggatgctcaggccgcagtggattattacacaaccacaccagcgttagtatttggcaagccagtgagagttcatttatcccagaagtataaaagaataaagaaacctgaaggaaagccagatcagaagtttgatcaaaagcaagagcttggacgtgtgatacatctcagcaatttgccgcattctggctattctgatagtgctgttctcaagcttgctgagccttatgggaaaataaagaattacatattgatgaggatgaaaagtcaggcttttattgagatggagaaaacagaagatgccatgggcaatgggtgaaccattgtttggaaaaaagccctttggttttcaggggaaaatgtgtggaaggttgaccctgtcctgaacaaatatagaaagcttgggttctggaggacttcccaaaccagaggcacttggattttactgaaaaaacagacaaatccccgaaaaaagaatcctactcctcccaaatgggcaagaaatcttccaaggggataagaaaatccccaaaacggaatgggcttcccccaaagaaatgcagaagtcccacccgcaaggttaaataatccataaaggagaactctcggcggaaaaatgaggggtcaaaagaaccccaa

SEQ ID NO: 3359 - DNA, 1063 bp, Homo Sapiens
tggttccaggggtagtaaagtagtccacctattgataaaccaggggcatttgggcaaaatgtttggccaaccaaggccctgggggaagaggaaagaagccatcctatgaaaatgtacttccatctctaactcacccaagatgccaggcctcctaagcttcatgacttgcaaagccaaaatgaaatttagcattacatgccattctaggtcatctagaagctggttcactggggccatctcagaagagctgctcaagagggtagcaagtctacccagaagggtatgccttaatgatcttcacgtcgtccacagggcggtcctgggagtttgtttctaccattcccacgcgattcaccattcctatgccctgacacactcggccaaaaatggtgtgtttgccgtcaagccactgggtgggggcgagggtcacaaagaactggctgccattggtatctggccccgcattggccattgcgagaattccagcccccgtgaatttcaagtctggatgaagttcatcttcaaactgtttgccatagatagatgcaccacctcgacctgtccctgttgggtcacctccttggatcatgaagtctttgataattctgtggaattttgtgccattgtagtaacctcgacgagccaactcagcaaagttcttacaggtctttggagcatgcttccagtacagctccagcacaatgattcccatgctggtctccaagtaaacgttgggtggctgccaggaatctgggggaattgccgccatagcgaagccggcggcggaatgcttgtctagtaattgctacttccggcgtcgattagctggggacccgtcgctgctgcacacttccggtccgttcaaccctttcgataccaggatttgggtggccaagacaaggaagaggacggtcccttcttccaatgccgggaagctggggtgggagacgagaagaagctgggctcaagaacagaggaaaacgcaaacttcattcgcgcctcgtgccgtattcgccacccagtcctcgctaccttaggaccgtatatggttatccttgggcta

SEQ ID NO: 3360 - DNA, 828 bp, Homo Sapiens
ggtcctggagcactgtaaaaagagctgattcaagtaagtagatgcctgttttgagaccagaaggtttcataattggttctacgacccttttgagcctagaattattgttcttatataagatcactgaagaaagaggaacccccacaaccccctccacaaagagaccaggggcgggtgatgagacctggggtttagaaccccaggtgagacctcaaatcactgcattcattctgagcccccttcctgtccccaggggaggtgtattgtgtatgtagccttagagcatctctgcctccaacccagcagttctctgccaaagcttgtggaggagggagagccctgtccctgccctcaggctccccagtgctcctggcccttctatttatttcgactgattattgcttctttccttgcattaaaggagatcttcccctaacctttgggccaatttactggccactaatttcgtttaaataccattgtgtcattgggggggaccgtctttacccctgctggactcccacctatccgccctgcagcagaaccttggcggtttataggtaatgatggaacttacactcctcttcccgaaggcccaagtagccctctgggatcttgcaacacacgtcgacttcccagccactaggccacctcccaagtggcccttctgcccttaccccaacacagaggcaactctccccctctcgggcaagaaggagcgaggttctgggggagactccggagccgcgcggggggcgcctgcgtgagcgcaagcgcaaaatgtggcgaaagagcgtggggcggggacctcgcgggccgccggcgggc

SEQ ID NO: 3361 - DNA, 1498 bp, Homo Sapiens
ggcggcgcgcgcggcgcccagcccgcagaagccggtggccgcgcaggaggacggagccctaaccgcaacccgcgccgcgccgcgccgatttgatttgtatccactgtcaccagcactgctcacttaggactttctggatccggacccaggcagcgcacactggactcttgaggaagaaggagactctaattttggattccttggtggaggaaaataaaacactctggtcttgccgccaacgatgcaagtgtgactgctggcgtcttcatgagctccagaggtcacagcacgctaccaaggactctcatggcccctcggatgatttccgagggagacataggaggcattgctcaaatcacctcctctctattcctgggcagaggcagtgtggcctccaatcggcacctcctccaggctcgtggcatcacctgcattgttaatgctaccattgagatccctaatttcaactggccccaatttgagtatgttaaagtgcctctggctgacatgccgcatgcccccattggactgtactttgacaccgtggctgacaagatccacagtgtgagcaggaagcacggggccaccttggtgcactgtgctgcaggggtgagccgctcagccacgctgtgtatcgcgtacctgatgaaattccacaacgtgtgcctgctggaggcgtacaactgggtgaaagcccgggcgacctgtcatcaggcccaacgtagggcttctggaagcaactgatagactacgagcgccagctctttgggaagtcgacagttaaaatggtacagacaccttatggcatagttcccgacgtctatgagaaggagtcccgacacctgatgccttactgggggatttagtgccactgaagcctgcgtcagcagcccgagcggggccggcatctgctccccgccgtctgctccctctccactctcttctcaaatggctgacttctggttctccctcaagtgttttttacactgggtgttcaaatttattttaagagatagggagggaggggacataaagggaatgcatacattgctagtcacatttttaaaattaacattttggaatagtgtttatggaaatctttagcttttaatcatttttaccaatttgaacagtttaataaactggttctgctctcttctgaatctcatgcctttggcaccttggtaggtgcaggaggagctcagtgcaaaaatcactttggggcctcattaaccctttagagacaagctttgccccaggctgcggaccagacagatgcttagggaaggttgataccagcttcagtctctactggattagccctactctttcctttcccctccattatttagtgactctgtaagtaagttaaatacacccttattatttagctgttaagtaactataatgaaatctgctgcaaaatctctcttggaatccatgtgcccaggattatattagcattatttttaataaatctatatgcttaacataaaaa

SEQ ID NO: 3362 - DNA, 1260 bp, Homo Sapiens
ggttttggttttcttttttaataactatcaactcaaacttagggaaacttgcctttgtcttgggggaaaaaaaacaactagacaataaagcttcttttacatcatttgctaacctgatctcgttttaagagagagatggtagttatgttgcaagagtaaaatttataccatgaatgatacaggtctagtctggtggcactaattagagataatagcattgctgacaaaattataatctgctggtggcatttgcggaaaagaagcccttgcaaatttctaaacaacagtaaactctgttaggaaattctaaaatgtcttcaggccaaaaagggtataaggttagtaaaatgcctcaacagagtttgaataaaatattgaatttgagagttactggaattggatatgtaaaaacagggtggtaggttgggtcatgcttacaatggtctcaagttcaaataagctactgtgacaatacaccacttcacaggtcacacgcatttccaggggcttttcctttccctcagtaggtgctggcagagggtgtgctcagtcgctttccaatatagatgcctagccccaaagccaaaacatgagaaaggaagagagatggaatgaacaccttcagaaattctgcggagaaaataccccctttcttcatggctccacttttcctcatgcttaaagacacagaacgtttagggtgtctgaagtggaactccttgggtggaatgttttcgggtctactggaccagtctgatacccagtccgcacttttcttcaaagcctcgacttccttctctccttctacaacttcttcttctgactgagagctatggtccctgctggtgtgcatttccacatcaaacatgatctgcccatcttcttgtggcgaagggctgtcacagtgagaactgcctctggaactactctgtcctgattcatgttgtgcatccaaaagaatcttctccatgtctccattgtggatggaggatgaggatggtacgtgttccagccccccatttttcccattgccattatcattgccattgctgctgttcatgggtagctccacccaggaactgttgaggccggccggcgggggcagagactgctcattttcctcgcagttgttgttgttgttgtgcaggggcggcggcggctcgactaggtgggacgacattgtcggacagctggcaggactgcggcagcagcaggaccgtctccggcactcagccagcaacacaacaagccgagtccccc

SEQ ID NO: 3363 - DNA, 855 bp, Homo Sapiens
ggaccggtccggaattcccgggatgggagctaagccagacccgggtggcggtggcagctgcgaaacccagggagccgatgccacgtgacccaatgtggacttcttttaaacctttctaatgcccataacccagcctcagacccatggagcccacgagagactgcccgctgttcgggggcgccttttccgccatcctccccatgggggccattgacgtaagcgacctccgaccggtcccggacaatcaagaagttttctgccatcccgtgacggaccagagcctgatagtggaacttctcgagctgcaggcccacgtacggggcgaagcggctgcgcggtaccactttgaggatgttggtggcgtgcagggggctagggctgtccatgtggagtctgttcagcctctcagtttggagaacctggccctgaggggccgctgtcaagaagcctgggtcctctctggcaagcagcagatagctaaggaaaaccagcaggtagcaaaggacgtgacacttcatcaggccttgctgaggctgccccagtaccagactgatctcttgcttaccttcaatcagcccccccctgacaacaggtcatctcttggccccgaaaatctgtcacctgcaccctggagcctgggtgactttgaacagctggtgaccagtctgacccttcacgatcctaacatctttggtccccagtaaaggcgctgaagcactgcatgatgttgctgagaacttggggactcggttctgtgagggggaaaagaggttgaaaagagggtttcctcttatttcttccctgtgcgtaaacataagacaatccctcttcagaataaacttgctttattaatct

SEQ ID NO: 3364 - DNA, 1652 bp, Homo Sapiens
  misc_feature (1400)..(1543): n is a, c, g, or t
  misc_feature (1551)..(1551): n is a, c, g, or t
  misc_feature (1582)..(1582): n is a, c, g, or t
  misc_feature (1584)..(1584): n is a, c, g, or t
  misc_feature (1588)..(1600): n is a, c, g, or t
ggggcggacggcgttggtttgaagaccttcagcgttgccctggcggagcagagacaggccctcggggtggaggtctttggtttcataagagcctgagagagatttttctaagatatgtgtaacacaccaacgtactgtgacctaggaaaggctgctaaggatgtcttcaacaaaggatatggctttggcatggtcaagatagacctgaaaaccaagtcttgtagtggagtggaattttctacttctggtcatgcttacactgatacagggaaagcatcaggcaacctagaaaccaaatataaggtctgtaactatggacttaccttcacccagaaatggaacacagacaatactctagggacagaaatctcttgggagaataagttggctgaagggttgaaactgactcttgataccatatttgtaccgaacacaggaaagaagagtgggaaattgaaggcctcctataaacgggattgttttagtgttggcagtaatgttgatatagatttttctggaccaaccatctatggctgggctgtgttggccttcgaagggtggcttgctggctatcagatgagttttgacacagccaaatccaaactgtcacagaataatttcgccctgggttacaaggctgcggacttccagctgcacacacatgtgaacgatggcactgaatttggaggttctatctaccagaaggtgaatgagaagattgaaacatccataaaccttgcttggacagctgggagtaacaacacccgttttggcattgctgctaagtacatgctggattgtagaacttctctctctgctaaagtaaataatgccagcctgattggactgggttatactcagacccttcgaccaggagtcaaattgactttatcagctttaatcgatgggaagaacttcagtgcaggaggtcacaaggttggcttgggatttgaactggaagcttaatgtggtttgaggaaagcatcagatttgtccctggaagtgaagagaaatgaacccactatgttttggccttaaaattcttctgtgaaatttcaaaagtgtgaactttttattcttccaaagaattgtaatcctccccacactgaagtctaggggttgcgaatccctcctgagggagatgcttgaaggcatgcctggaagttgtcatgtttgtgccacgtttcagttcagttctgaagtgttattaaatgtgttcctcagcgacagtgtagcgtcatgttagaggagacgatctgacccaccagtttgtacatcacgtcctgcatgtcccacaccattttttcatgaccttgtaatatactggtctctgtgctatagtggaatctttggttttgcatcatagtaaaataaaataaacccatcacatttggaacatnnnnnnnnnnnnnnnnnnnnnnnnnnnnnnnnnnnnnnnnnnnnnnnnnnnnnnnnnnnnnnnnnnnnnnnnnnnnnnnnnnnnnnnnnnnnnnnnnnnnnnnnnnnnnnnnnnnnnnnnnnnnnnnnnnnnnnnnnnnnnnnncccccccncacccccaaaaaaacctttaaaaaccacccncnaggnnnnnnnnnnnnnaacaacaacgggcaacgagggccaacccggggtccccagggaaacccggccc

SEQ ID NO: 3365 - DNA, 1548 bp, Homo Sapiens
  misc_feature (214)..(226): n is a, c, g, or t
  misc_feature (1278)..(1366): n is a, c, g, or t
  misc_feature (1400)..(1440): n is a, c, g, or t
  misc_feature (1471)..(1471): n is a, c, g, or t
tcatgtccgtcccgtgattagtcttgagtggtaggatcgctgttgtccaggataggcatttgcctaattcctggcatgacactctagtgacttcctggtgaggcccagcctgtcctggtacagcagggtcttgctgtaactcagacattccaagggtatgggaagccatattcacacctcacgctctggacatgatttagggaagcagggacannnnnnnnnnnnnacctttgggatcagcctccgccattccaagtcaacactcttcttgagcagaccgtgatttggaagagaggcacctgctggaaaccacacttcttgaaacagcctgggtgacggtcctttaggcagcctgccgccgtctctgtcccggttcaccttgccgagagaggcgcgtctgccccaccctcaaaccctgtggggcctgatggtgctcacgactcttcctgcaaagggaactgaagacctccacattaagtggctttttaacatgaaaaacacggcagctgtagctcccgagctactctcttgccagcattttcacattttgcctttctcgtggtagaagccagtacagagaaattctgtggtgggaacattcgaggtgtcaccctgcagagctatggtgaggtgtggataaggcttaggtgccaggctgtaagcattctgagctgggcttgttgtttttaagtcctgtatatgtatgtagtagtttgggtgtgtatatatagtagcatttcaaaatggacgtactggtttaacctcctatccttggagagcagctggctctccaccttgttacacattatgttagagaggtagcgagctgctctgctatatgccttaagccaatatttactcatcaggtcattattttttacaatggccatggaataaaccatttttacacaactaaaaacacacaaaagcagggggtattcggcataatcaccctttttccagggtgtgtgtcggatcacccggcctgccatgcaccggggtgggctgcgggggggccactgttccccaacacctcatggcgatcgacatcccccgcccttgcgccccataatcccctgtgacgcgtcccccgggacattacgccccccttatcaccctccgaacccaccctgtggccccctatggaaacccaccatgcgcccctgcccttattttacatatcgtcccccccctcttaatatatccgcccgcctcacgcatgatggcgtataataccccgctccattcctccccccggtccccctgctgcacaggggnnnnnnnnnnnnnnnnnnnnnnnnnnnnnnnnnnnnnnnnnnnnnnnnnnnnnnnnnnnnnnnnnnnnnnnnnnnnnnnnnnnnnnnnngcgactccattccctataccccgcactaaagatnnnnnnnnnnnnnnnnnnnnnnnnnnnnnnnnnnnnnnnnnttactttcttctctctcccggcctcctatcncacgactcgcccaaaggttgtgtgcgaatccccgccagacctaatacccccgcctctgcctcctctaaagtaccccc

SEQ ID NO: 3366 - DNA, 1395 bp, Homo Sapiens
aacaagaaagaagacaaagacaagcaaggacaccagagaaaacaaaggaaggcttagtgacctaatgaccagggttaaaacaagcaggctggtaccggtccggatatcccgggatatcgtcgacccacagcgtcgactcacaccgtacagcaacatgaacggacagactcaacggcttccacgaggcgttcatcgaggagggcacattccttttcacctcgagagtcggtcggggaaggccacccgagataagattgtgtgaccaaatcagtgatgctgtccttgatgcccaccttcagcaggatcctgatgccaaagtagcttgtgcaaactgttgctaaaactggcaatgatccttcttgctggggaaattacatccagagctgctgttgactaccagaaagtggttcgtgaagctgttaaacacattggatatgatgattcttccaaaggttttgactacaagacttgtaacgtgctggtagccttggagcaacagtcaccagatattgctcaaggtgttcatcttgacagaaatgaagaagacattggtgctggagaccagggcttaatgtttggctatgccactgatgaaactgaggagtgtatgcctttaaccatagtcttggcacacaagctaaatgccaaactggcagaactacgccgtaatggcactttgccttggttacgccctgattctaaaactcaagttactgtgcagtatatgcaggatcgaggtgctgtgcattcccatcagagtccacacaattgttatatctgttcagcatgatgaagaggtttgtcttgatgaaatgagggatgccctaaaggagaaagtcatcaaagcagttgtgcctgcgaaataccttgatgaggatacaatctaccacctacagccaagtggcagatttgttattggtgggcctcagggtgatgctggtttgactggacggaaaatcattgtggacacttatggcggttggggtgctcatggaggaggtgccttttcaggaaaggattataccaaggtcgaccgttcagctgcttatgctgctcgttgggtggcaaaatcccttgttaaaggaggtctgtgccggagggttcttgttcaggtctcttatgctattggagtttctcatccattatctatctccattttccattatggtacctctcagaagagtgagagagagctattagagattgtgaagaagaatttcgatctccgccctggggtcattgtcagggatctggatctgaagaagccaatttatcagaggactgcagcctatggccactttggtagggacagcttaaccatgggaagtgcccaaaaagcttaaattagtggcaaaagtgtacttccctggagtccaaactcatgctgtcctgtga

SEQ ID NO: 3367 - DNA, 1186 bp, Homo Sapiens
  misc_feature (139)..(156): n is a, c, g, or t
  misc_feature (161)..(271): n is a, c, g, or t
  misc_feature (606)..(606): n is a, c, g, or t
gtgggggggattcccaaccccttttttcttgggcccaggtttttcttttgggaaacaaaggtaaaggcccccgggttcacctttccctaaatggggccccggcccgccaaaagaaaagggtttgggaaaggtttttgtnnnnnnnnnnnnnnnnnnccaannnnnnnnnnnnnnnnnnnnnnnnnnnnnnnnnnnnnnnnnnnnnnnnnnnnnnnnnnnnnnnnnnnnnnnnnnnnnnnnnnnnnnnnnnnnnnnnnnnnnnnnnnnnnnngctttttaaaagtttttatttcaaaaaataaagctgcagttcatttcacataaatatctggggagggaaggggagtgggatggggtgggggcttggcccctacctcctcttctctttcacactgtattgtaaaagcaaaggggatggcttgccgaaccagcgggagagcccatatctgcttccatggtcatgtgatccagggagaacttccattgtcaaaaaggaagctgcacatgctgaggggttaggcatcaaggcggtgacacaggaccctccggagatggcgtacctcagctctaacagaacatcggacatacttgttctgcaggacgctnttattcttgtctttgccagaactcagccgctccaggcacaggttcaactgctcatcatagcgatagtagtgggctttagagtggtcaaagctgctgaaggggaggccgaggttgctcagtgctggctcttccccagtgggctgggtgacccggtccaaacctcgggactggtagaattcccgaatccgtttctcttcactgtcttgcaagccaggcaccagcttatacacgatgtcctgcatgacccggtccagtttgaggttgagcagtggctgtgtctcgtggatcttaatgttgcacatggggcagtacttgctagtttggaggtacttcacaatacaactcttgcagaaagtatgaagacactctgtgatggtggtggcatccacgaagtagccggcgcataggcagcaaacaatgtgttcattcaagtctttgatcttcactcgaacctcctcctcgttccgtagcgggtccatcttgtacactgactggagctggttccgaagcctcatcgcgatcgcaatctggcccccctgaggagacgccatcttaaaggctgatcccagccggccacccc

SEQ ID NO: 3368 - DNA, 1049 bp, Homo Sapiens
  misc_feature (719)..(774): n is a, c, g, or t
gtgccaaaagaaatcaccaaaggtctcatccaaggacactcgggaaatcaaaactgatttctcactttctattagtaattcgtcagatgtgagtgctaaagataagcatgctgaagacaatgagaagcgtttggcagccttggaagcgaggcaaaaagcaaaagaagtgcagaagaagctggtgcataatgctctggcaaatctggatggtcatccagaggataagccaacgcacatcatcttcggttctgacagtgaatgtgaaacagaggagacatcgactcaggagcagagccatccaggagaggaatgggtgaaagagtctatgggtaaaacatcagggaagctgtttgatagcagtgatgatgacgaatctgattctgaagatgacagtaataggttcaaaattaaacctcagtttgagggcagagctggacagaagctcatggatttacagtcgcactttggcaccgatgacagattccgcatggactctcgatttctagaaactgacagtgaagaggaacaggaagaggtaaatgaaaagaaaactgctgaggaagaagagcttgctgaagaaaaaaagaaagccctgaatgttgtacaaagtgttttgcaaatcaacttaagcaattctacaaacagaggatcagtagctgctaagaaatttaaggacatcatacattatgatccaacgaagcaagaccatgccacttacnnnnnnnnnnnnnnnnnnnnnnnnnnnnnnnnnnnnnnnnnnnnnnnnnnnnnnnnggaggaagctgagaaactacctgaggtgtctaaagaaatgtattataatattgctatggatctgaaagaaatattccaaactacaaaatataccagtgaaaaggaagagggcacaccctgggaatgaggactgtggtaaagagaaacctgaggaaatccaggaccctgcagctctgaccagtgacgctgagcagcccagcgggttcacgttctctttttttgattcagacactaaagacataaaggaagagacctacagagttgaaacagtgaaa

SEQ ID NO: 3369 - DNA, 795 bp, Homo Sapiens
  misc_feature (603)..(656): n is a, c, g, or t
gggggggacggacgcactagaggcgacctaaacatggagacagcgggcgctgcaactgggcagccggcctctgggctggaggctccggggtccacgaatgaccggcttttcctggttaaaggtggaattttccttggtaccgttgctgcagcgggaatgctagctggatttattacaacattatcattggctaaaaagaaaagccctgaatggttcaataagggaagtatggccacggctgcattaccggaaagcgggtcttcccttgccttgcgagctctgggctggggctccctgtatgcatggtgtggggttggtgtgattagcttcgcagtctggaaagctttaggagttcacagtatgaacgactttcgaagtaaaatgcaatcaatatttccaacaattcccaagaactccgaatcggctgttgagtgggaggaaacattgaaatccaaatgagatgagcatggatgaatttcaaaatgcttgttacagaaaagggtggctctgggagacaccatgacagcaaaaggactgggactgatttctcccaggaacatgggcagattgctgactgaaccagtgcactggatagcattcagnnnnnnnnnnnnnnnnnnnnnnnnnnnnnnnnnnnnnnnnnnnnnnnnnnnnnnacagttaagaagactatttaaaaatagtaattacaggaataacttccttatgtggaggggaccccataggaaatggttctgtttgtaacagttgaagcaaatttcatactaaaaaagtttataataaaagtatgataag

SEQ ID NO: 3370 - DNA, 256 bp, Homo Sapiens
tctttgatctacctatgaatttggcaaactggtttcctccaccaagaatgagaacaaaaagagaagaaatccgaaacataattctgaagctacaggaagatcagagcaaagagaaaagaaagcataaggacacttactcaacagaagcacctttaggcgaaggaacagaacaatatgtcaatagtatctcagattgaccatttctgttacttgtcatttctactttcagaaactaaatgactttcaaatttgggta

SEQ ID NO: 3371 - DNA, 1019 bp, Homo Sapiens
  misc_feature (505)..(727): n is a, c, g, or t
  misc_feature (897)..(897): n is a, c, g, or t
cattcagtgggcagcagaaaggagaggctccttgaagctgctcagtcagaggcccccgtccctccttttgccttccgcaggactgaagacctgaaggggctggcttttggagtgttgaggtgaatatctgggagcagagatcatgaatagctcagggcagtgaatggcgcaccaagagcagggctgtgtgtgggaggctgcagccaggattgcctcagctcctccccctcaggctgggaggatagcacaggctaggggctcggggtggagggtctcagctctgctgcccccaccccagtactagcctagcttcccaagctgtggcttagaggatagttggcttcctgcctctctcctctaaaatagcaagtctgggaaatcctggggtgagtggagtcaccccactcccagttgctggcagagactgagactaaagcatcacttaataaaccccccaagcccaaacaacgcgaccttatacatccctcactcgcgcccgttcgcnnnnnnnnnnnnnnnnnnnnnnnnnnnnnnnnnnnnnnnnnnnnnnnnnnnnnnnnnnnnnnnnnnnnnnnnnnnnnnnnnnnnnnnnnnnnnnnnnnnnnnnnnnnnnnnnnnnnnnnnnnnnnnnnnnnnnnnnnnnnnnnnnnnnnnnnnnnnnnnnnnnnnnnnnnnnnnnnnnnnnnnnnnnnnnnnnnnnnnnnnnnnnnnnnnnnnnnnnnnnnnntcctcccctagcgctacgcgaacgtccttgcttccgccgcgcccgcccgccgttcgcgtgcccgcctcttcctggcccgttcccatgttcgcgccctcggccgtcagctatgcctccctcgacccgcgtaacgtcctcccgccccgtcgggtccgccgtatactcgcctnacctcgcgcccctcccgccccacgagattgcgctgccagctcccgcaccctgcgatattgcgcagctcccgcgcacgccctgatctccgctacatgccccctctgctccccgttctcctccg

SEQ ID NO: 3372 - DNA, 638 bp, Homo Sapiens
  misc_feature (354)..(362): n is a, c, g, or t
  misc_feature (490)..(490): n is a, c, g, or t
  misc_feature (500)..(500): n is a, c, g, or t
ggcgactttggaaggtttaattggctgggaaatttctatattgtattatcctacaatttgctttttgctattgtgacaacattgtgtctggtccgaaaattcacctctgcagttcgagaagaacttttcaaggccctagggcttcataaacttcacttaccaaatacttcaagggattcagaaacagccaagccttctgtaaatgggcatcagaaagcactgtgagacgcacagacggcgtcttctgccaccaagagacccgagaactccagattcacgacattcctgtcccatgtagaagcatttccattcaaccgtggcccctcttcagaaacctagacctatcagtgccgnnnnnnnnncataatctacgaagaacttggctatggctgatcttttttaaatttaactttctgatggaccctgtagtttccagttaagtgcagattccttacagacatatagaacagcgcattcttctgtagacatntgctcatgtnggtatatacaatcacccatatgaaaaaaattgttttcacctgatatgaaaatgttagaaaaggcaaactccgggacttctaaagatttacttaaatcccattatgtactttattcagaatgtagaagctgacttgaaa

SEQ ID NO: 3373 - DNA, 1445 bp, Homo Sapiens
  misc_feature (1287)..(1295): n is a, c, g, or t
tgaagtgtctaccttctgcagactccaatggctcaggaactgggaatgcagtgccaggctcgtggtatcctgcagcagatgtggggagttttccttctttatgtttccatgaagatgggaggcactacaggacaaaacattgaccagcccactgagatgacagctacggaaggtgccattgtccagatcaactgcacgtaccagacatctgggttcaacgggctgttctggtaccagcaacatgctggcgaagcacccacatttctgtcttacaatgttctggatggtttggaggagaaaggtcgtttttcttcattccttagtcggtctaaagggtacagttacctccttttgaaggagctccagatgaaagactctgcctcttacctctgtgctgtctcatcaggaggaagctacatacctagcatttggaagaggaaccagccttattgtacatccaaatatccagaaccctgaccctgccgtgtaccagctgagagactctaaatccagtgacaagtctgtctgcctattcaccgattttgattctcaaacaaatgtgtcacaaagtaaggattctgatgtgtatatcacagacaaaactgtgctagacatgaggtctatggacttcaagagcaacagtgctgtggcctggagcaacaaatctgactttgcatgtgcaaacgccttcaacaacagcattattccagaagacaccttcttccccagcccagaaagttcctgtgatgtcaagctggtcgagaaaagctttgaaacagatacgaacctaaactttcaaaacctgtcagtgattgggttccgaatcctcctcctgaaagtggccgggtttaatctgctcatgacgctgcggctgtggtccagctgagatctgcaagattgtaagacagcctgtgctccctcgctccttcctctgcattgcccctcttctccctctccaaacagagggaactctcctacccccaaggaggtgaaagctgctaccacctctgtgcccccccggcaatgccaccaactggatcctacccgaatttatgattaagattgctgaagagctgccaaacactgctgccaccccctctgttcccttattgctgcttgtcactgcctgacattcacggcagaggcaaggctgctgcagcctcccgctggctgtgcacattccctcctggctccccagagactgcctccgacatcccacagatgatgcgatcttcagtagggtactacttgggctctaggtcctgcagaatgttgtgaggggtttannnnnnnnnaatagtgttcataaagaaatacatagtattcttcttctcaagacgtggggggaaattatctcattatcgaggccctgctatgctgtgtatctgggcgtgttgtatgtcctgctgccgatgccttcattaaaatgatttggagaggcaaag

SEQ ID NO: 3374 - DNA, 805 bp, Homo Sapiens
  misc_feature (349)..(350): n is a, c, g, or t
  misc_feature (466)..(466): n is a, c, g, or t
  misc_feature (470)..(470): n is a, c, g, or t
  misc_feature (505)..(505): n is a, c, g, or t
  misc_feature (540)..(540): n is a, c, g, or t
  misc_feature (649)..(649): n is a, c, g, or t
  misc_feature (748)..(748): n is a, c, g, or t
ggacgctttgatctattgagtaatttatatatagtgtaaggtaaggccggattctttaaagatgttcttttgattcccaaccaaatctcggtgaaagcctgtatcaagcagttaagaaaacgacatgagtattcaagccaacatttgttctgaatgatttttcttcctcgtataggcttaggtggtttcccaacagacaggtgaaagcaagcgtttggggaactgatggctcatgtaactaggatacagcagtgaggcggcagttgggctcagcaagtgttttgtaaatatgcttgaagaaatccccaaaaagagaacagcaggggtagatagtggcttaggctagaannaaacgtgcatgtgggtgttatgtaggtgcatatatttgcagcagagggaaggagagaggacactctgttgttgggaattgtgggctatagaagataaaaacatcttttgtacaaanacanatttcttttcatgctgcttcagagaaaaaaactanattagctacaattatgtgctaactatgtttccaanacagttgtcctagttctgttttattgtggacagaacctagctgtacttaacaaaatgtgaagcctgtctagacttcccttggagaatattgaaaagtacaaagactccncaggctgtgtaacccgcctcgcctagcttcaaatgtctgcactggacgggcgctgttctctgacgggcttggagatgacagtagtgccatgctaatgcnactcaggtctcagagggtctccccacatgaacaagattctgtattaggctccctgct

SEQ ID NO: 3375 - DNA, 1759 bp, Homo Sapiens
gggggcaggaagaaggaagcggcgccgccatcgcctcccggcgctccctccccgactcctaagtccttcggccgccaccatgtccgcctcggctgtcttcattctggacgttaagggcaagccattgatcagccgcaactacaagggcgatgtggccatgagcaagattgagcacttcatgcctttgctggtacagcgggaggaggaaggcgccctggccccgctgctgagccacggccaggtccacttcctatggatcaaacacagcaacctctacttggtggccaccacatcgaagaatgccaatgcctccctggtgtactccttcctgtataagacaatagaggtattctgcgaatacttcaaggagctggaggaggagagcatccgggacaactttgtcatcgtctacgagttgctggacgagctcatggactttggcttcccgcagaccaccgacagcaagatcctgcaggagtacatcactcagcagagcaacaagctggagacgggcaagtcacgggtgccacccactgtcaccaacgctgtgtcctggcgctccgagggtatcaagtataagaagaacgaggtcttcattgatgtcatagagtctgtcaacctgctggtcaatgccaacggcagcgtccttctgagcgaaatcgtcggtaccatcaagctcaaggtgtttctgtcaggaatgccagagctgcggctgggcctcaatgaccgcgtgctcttcgagctcactggcctttcaggcagcaagaacaaatcagtagagctggaggatgtaaaattccaccagtgcgtgcggctctctcgctttgacaacgaccgcaccatctccttcatcccgcctgatggtgactttgagctcatgtcataccgcctcagcacccaggtcaagccactgatctggattgagtctgtcattgagaagttctcccacagccgcgtggagatcatggtcaaggccaaggggcagtttaagaaacagtcagtggccaacggtgtggagatatctgtgcctgtacccagcgatgccgactcccccagattcaagaccagtgtgggcagcgccaagtatgtgccggagagaaacgtcgtgatttggagtattaagtctttcccggggggcaaggagtacttgatgcgagcccactttggcctccccagtgtggaaaaggaagaggtggagggccggccccccatcggggtcaagtttgagatcccctacttcaccgtctctgggatccaggtccgatacatgaagatcattgagaaaagtggttaccaggccctgccctgggttcgctacatcacccagagtggcgattaccaacttcgtaccagctagaagggagaagagatgggggcttgaacacggggcttccttacagccccggatgcagattttagagggagggcaggtgcgggctgtgtgtgtctgtgtgagggcaggtcctggacttggcagtttcttgctcccagcacccgccccttcctcacctcttccttattccataggctgggagagaaactctctctgcttccctcgcccttggagctttccccatccccctgattttatatgaagaaatagaagaggggcttgaagtccccctcgcgagtgccttcttgcaattacctgccttagcgggtgttgcgggtccctccttcacagccgctgagcccagaggtcccgctggcccctcctctgaattttaggatgtcattaaaaagatgaatctaaaaaaaa

SEQ ID NO: 3376 - DNA, 904 bp, Homo Sapiens
  misc_feature (463)..(463): n is a, c, g, or t
  misc_feature (508)..(508): n is a, c, g, or t
  misc_feature (612)..(612): n is a, c, g, or t
catatggcatgggcaatcacagtggtggtggtgggggtagcaggtttggaccttatgagtcttacgactccaggtcttctctgggtgggcgagatctgtacagatctggctatggttttaatgaacccgaacaaagccgcttcggaggtagttatggtggtcgatttgagagctcctaccggaatagccttgactctttcggaggtagaaaccagggcgggtctagctgggaagcaccttactcccgttcaaaattgaggcctgggtttatggaggacagaggaagagagaattactcttcctacagcagtttttcttcaccccatatgaagcctgcacctgtaggctctcgggggagaggaacgcctgcttatcctgaaagtacgtttggaagcagaaactatgatgcttttggaggaccatcaacaggcagaggccgaggccgaggacatatgggtgattntggaagcattcatagacccggaattgttgttgactatcaaaacanatccaccaatgtgacagttgctgctgcaagaggaataaagagaaaaatgatgcagccatttaataagcccagtggaacctttatcaagaaacccaaactagcanaacctatggagaagataagcctcagcaaatcacccacaaaaactgatcctaaaaatgaagaggaagaaaagcggcgaattgaggctcggcgagagaaacaaaggcgcagaagagaaaaaaacagtgagaaatacggagatggatacagaatggcatttacatgttcattttgtaaatttcgaacatttgaagaaaaagatattgaactgcatctggaaagttcttcacatcaggaaacattagatcatatacagaaacaaactacatttgataaagtagttatggagttttt

SEQ ID NO: 3377 - DNA, 417 bp, Homo Sapiens
tgtttaaatcaaatgaaaacaacttgctgtaggagatgaagaagtaaggagcaccccatctgagtgtgagatgcctctggggtttgtccaacacacagcccagccgaggctctgagggaggtcgtggtgcagccactgatgcatcacagccacacgtggcattcacacaagcatggtttatgacttgggtaattatccaagctgttccacaaacctggaggtcactcatcgtaaaagtctttaatcataaagatgtgtttcctcttcacagaaggtgtgttttgttctggaagggctcagagtccttgtccttttttccaattgggtgtcagagtacagtgcaagcaactggtatttgctttcaaatctttttcttcaccttttaggcccaattttactgcttttttaaaagatgtc

SEQ ID NO: 3378 - DNA, 548 bp, Homo Sapiens
cctccgtgcatgtgcctcccccaacctcatgtgtctgatgcagcactgcaggtgaggcacggtggatcctgcaggttcagaggggttgtgatccacctgaagtcacagtcgggcaggggtgtgccagagttgaaactgccgaccttccagatggagttcactagtctccccctggcgtatacctttttggttgtcaaggccattatcacagagtcactttagaggacactagggctactgttgatggttcacccagagagccacttagaggccgtgtgcactgcctgatcttacacccaggaatttgtagttgtaacaaggtccctgcggaacttccatttgcttctgtcttctgtcctagaagtggactttagaaagactcttgtggtagacatgtgtactgctgtgttgctgctggtctaatgtcttcaacacgtattcttagtgactcttaacgcttttaaccttagattgtgaatattcacaattcttacttgtcatagtctggttatcctctttatcttctgtgctgtttttaaaaagcatac

SEQ ID NO: 3379 - DNA, 692 bp, Homo Sapiens
ctaaactagtgatcccccggctgcagaattcgattgcacctttgatctaggaacatggagaaacagattgaaccttgtgatggaattggcagcaaagtcatattgtgaaaatgtgtgtgtacaggaatgagagcaatttgtagctctttgtttttgcagttccttgtttacgcagttttccacaggagtgatggaataagatttgtatttttaaaaagttcactctgagtgtaatgtcaccacaagtttggaggggacagggaaaacgagtcaaggcagggttaacaggtcattgcagtaatctgtgggagagatgataaataagagcgtgcaaagacattattgcacacttttcatcctctgcttctaaacatctctagaattgggatatctcaagatattccatactgatttaaagtcatccgagctgcccctcaggcctttgagcatgtgatgcccatacccatctctcttattatgtcggtaaagaaacttcagccctagagaagttaagttgctaaggaacacgtaattcgtaagggacagagcagtcagatcttggaaacttagtttcttgaagatccagttgattttctactaaagctccagtgatttgcgtcgatgggatagtcaaaggtgccatcgaattctggagccgggggtcactatttaaagggcgcacgcgtgagcca

SEQ ID NO: 3380 - DNA, 589 bp, Homo Sapiens
  misc_feature (565)..(565): n is a, c, g, or t
caccctattgagccactgcctcgatgtcctgcaaaatgtttgatctatttggcttacttaatgaacactcttggtatgagtgagtggaaaaactactgatcacaaaccccatgtatccaaatcagatgggacttaattacagaggagtctgggagtaacatcactgcacacctgatgtcttaacatgtcccaagagacaaaaggggactctcgaattaaacaaagattagttttgtttagcaagcaccttcttgcattggaagtaattagcgtcttaatccacacagatgctagacttcagaaaattggttaaaatcataactgagttagacaatcacaaggtggttttacaattatttacacacctttaacccactcagaaaaaataatgcagctcgctgtcagcactcatttaattttacataaacatgctctttgaggcctgaagtaaacctgactgattttcaacatgaaaataaaacataaaaactgttcttggagttatttctaaacagaacttgtctccaatcctaacgtaacagaaatgtatatgaggttacattangattagagacaagagtattcttgg

SEQ ID NO: 3381 - DNA, 1084 bp, Homo Sapiens
ggaattctccggatccgcgccccgaggttgctcctctccgaggtctcccgcggcccaagttctccgcgccccgaggtctccgcgccccgaggtctccgcggcccgaggtctccgcccgcaccatgcggctgggcagtcctggactgctcttcctgctcttcagcagccttcgagctgatactcaggagaaggaagtcagagcgatggtaggcagcgacgtggagctcagctgcgcttgccctgaaggaagccgttttgatttaaatgatgtttacgtatattggcaaaccagtgagtcgaaaaccgtggtgacctaccacatcccacagaacagctccttggaaaacgtggacagccgctaccggaaccgagccctgatgtcaccggccggcatgctgcggggcgacttctccctgcgcttgttcaacgtcaccccccaggacgagcagaagtttcactgcctggtgttgagccaatccctgggattccaggaggttttgagcattgaggttacactgcatgtggcagcaaacttcagcgtgcccgtcgtcagcgccccccacagcccctcccaggatgagctcaccttcacgtgtacatccataaacggctaccccaggcccaacgtgtactggatcaataagacggacaacagcctgctggaccaggctctgcagaatgacaccgtcttcttgaacatgcggggcttgtatgacgtggtcagcgtgctgaggatcgcacggacccccagcgtgaacattggctgctgcatagagaacgtgtttctgcagcagaacctgactgtcggtagccagacaggaaatgacatcggagagagagacaagatcacagagaatccagtcagtaccggcgagaaaaacgcggccacgtggagcaatctggctgtcctgtgccctgcttgtgggccgtggcggtggcccataggctgggctgtccagggacccgcatgcctcccaaccccgctatgccaggtgcctgtggctggtgattccgcgagacagaaccttccttggcccacgtttggaccggagctcacacgccccaaaacggtggaccgcggctt

SEQ ID NO: 3382 - DNA, 584 bp, Homo Sapiens
  misc_feature (516)..(516): n is a, c, g, or t
accgcccctagcctgcaatttcttaatctagaaatttttctattgaaatcccatttatcacatgggatctcaaaagtaaaatacaactgcagtaattctcagtttaactactgataccacagtcatgtactccctagcctggtctctccatttccctcttagttctttttccttcaccttgtacgtctctacctcatattatggagggctgtcaactgaacattagtctttaacctgtaaaaataatgaagactatctttgtttcagtctgaccttaaccctaacacctctctgtatataagttcagattttaggcagtgcttgctctaggtcacaaccagtttaaatacactcaatagcctgaccttataatgctagtcatagattacaaatggaggctgagtttggtgaataaaatggaattatcttataaaggaggatgaagagtctggttcttgagtaagaagttataaaaactcaaatcataacttctgttcacaggtcagttaaacgcanaatggaatatgatagtaagaagatatttcatgtaatcattcctaacattaaaaaagcagaatgaatta

SEQ ID NO: 3383 - DNA, 267 bp, Homo Sapiens
ggcggtccgaaggcatcaagtatcggaagaatgaggtgttcttggacgtcatcgagtctgtcaacctcttggtcagcgccaacggcaatgtcctgcgcagcgagatcgtgggctccatcaagatgcgagtcttcctctcgggcatgcccgagctgcgcctgggcctcaacgacaaggtcctctttgacaacacggccgcggcataaagcaaatccgtggagctggaggatgtgaagttccaccagtatgtgcggctatcacgcttcg

SEQ ID NO: 3384 - DNA, 643 bp, Homo Sapiens
caaagagactcaaatagagatgacacatatatctttcacatgttaatttgcatttgaaactttgagctttgatacaggttggcttttctcttttggaatgaagaaatcaagagactaattttttacccatccatccatctatccacctatccatccacccagccacatctttcctaagtgacaggtaaatcactagttgttgggaatgcaaagagataaaccttgccatcacagtatatttagggagatagacaaacagcagtgaatataatgtaaatttagtataataatcaaacgacaaagtgctgggggacacggcttgatgaatggcttgctggggagaaagcagaaagaccatagcattcatggagatggtgggcatttgttttccaaggctaccataacaaacaaagaatcacaacctgggtggcttacacaatagaaatgtactgcctcacagttttagaggctaggagactgagatcaaactgtcaacaggattggttctgaagggtgtcagggagggatacgcttagggctttctccaagcttctagtaacctcaggagtcctcagcttctaaatgacatcctccgtgtgtctcacatcatctgatcctctgtacatgtcattctgtgtccaaa

SEQ ID NO: 3385 - DNA, 590 bp, Homo Sapiens
gaggacgcctggttacgggcacaggtcatctcaacagaagagaacaaaataaaggtatgctatgttgactatggttttagtgaaaatgttgaaaaaagcaaagcatacaaattaaacccgaagttttgttcactctcatttcaagctacaaaatgtaagcttgcaggcttggaagtcctaagcgatgaccctgatctagtgaaggtggttgaatctttaacttgtggaaagatctttgcagtggaaatacttgacaaagctgacattccacttgttgttctgtacgatacctcaggagaagatgatatcaatatcaatgccacctgcttgaaggctatatgtgacaagtcactaagaggttcacctgcaggttgacgccatgtacacaaatgtcaaagtaactaatatttgctctgatgggacactctactgccaggtgccttgtaagggtctgaacaagctcagtgaccttctacgtaagatagaggactacttccattgcaagcacatgacctctgagtgctttgtttcattacccttctgtgggaaaatctgcctcttccattgcaaaggaaaatggttacgagtag

SEQ ID NO: 3386 - DNA, 426 bp, Homo Sapiens
tgactggtatccccaccctcctgagattctctgtaggtctgggttagagtgttcttcagcctcttatttcttcggataagctcctgttttctcgggtgagatgtctatctgagcccggtagccactggtatcctcttccttctgcatggtgggctggtggatggtggtcttggtgatgttgatctcggtctcaaactgattttttaagctaatgatctcctcatcatagttgtttcttaccttactcagttcattttcatattcccagcggcgcttggcctcctcctgaaactcagctttgagtctctcgatctccttatttttgtcctgaatggtcttggcagcctcctccagggactgcttgtgccgggcattgtcctcagacgcgctgctgcatgacctgcttcagttctatctccagatgct

SEQ ID NO: 3387 - DNA, 602 bp, Homo Sapiens
cttgatggcctgcaatctcccaattcctcgttccaaagctagggcctgcatttacaatgtatatagctcccagagggctctggaagcagcatgaaataatgctgcctgacagtttgatagctaatcaaaggaagatggctagaaagtcaatgaattgaggtgctttacttgacaatttatcttaataaacagttcttaaacaaagcctcgtacaggccaggaggtaagacattcttctgtaaagtcaaacttccaagatgtactggttcaccaaaaccaatgggcgattcaaagaagtctttaagggagtaattatgccaagggaagaatccacatattcaagacatagctttcttaagaagatggagctatttaattttagcaagggcagctgctcttctttctgtgttctgaaacaaggcacgaattaaagcttttacttcactggaagagaacgcagctgccaggggtccttttccatctgcccaccgatccccaatttcttgcaagctggcttgtagcatcatcatcaattccttgaatggcatccattttggcacatagactggaacctcttcttgatatttcttgttcttgctttc

SEQ ID NO: 3388 - DNA, 356 bp, Homo Sapiens
gatcccctgccttgatgtgctgcctggaccatgtcatcagctactaccatgtggccagtgacactgagaagatcatcagagagggccccacaggtaggctggaagagtacctgggaagcatggccaagattcagaaggcagtggagtatttccaggacaacagcccagacagcccggaactcaacaaagtgaaactgctctttgagcgcgggaaggaggccctggagtccgacatttcgcagcctgactgacgcggcacatgtaaggtcgtctctgcccgtgctcagtctatggatctagatcatgtggtgacgcatgatcttggaggcccaggtaggactgtgacccatgtgagc

SEQ ID NO: 3389 - DNA, 846 bp, Homo Sapiens
ggccttgcacttggcagtgatcactaagcaggaagatgtggtggaggatttgctgagggctggggccgacctgagccttctggaccgcttgggtaactctgttttgcacctagctgccaaagaaggacatgataaagttctcagtatcttactcaagcacaaaaaggcagcactacttcttgaccaccccaacggggacggtctgaatgccattcatctagccatgatgagcaatagcctgccatgtttgctgctgctggtggccgctggggctgacgtcaatgctcaggagcagaagtccgggcgcacagcactgcacctggctgtggagcacgacaacatctcattggcaggctgcctgctcctggagggtgatgcccatgtggacagtactacctacgatggaaccacacccctgcatatagcagctgggagagggtccaccaggctggcagctcttctcaaagcagcaggagcagatcccctggtggagaactcttgagcctctctatgacctggatgactcttgggaaaatgcaggagaggatgaaggagttgtgcctggaaacacgccctcctagatatggccaccagctggcaggtattttgacatattaaatgggaaaccatatgaagccagagtttacatctggatgatttactagcacaaggagacatgaaaacagctggctgaaaaatgtgagctgccgctgtataagttactaaaaatttccggatccagaacaaaaactgggcttactctggcggcagaaaataaggccctggggatccttaaaaaatgcctttccggcttgagtcctggttccctctcaaaccccttatggt

SEQ ID NO: 3390 - DNA, 804 bp, Homo Sapiens
  misc_feature (549)..(612): n is a, c, g, or t
  misc_feature (614)..(646): n is a, c, g, or t
  misc_feature (648)..(652): n is a, c, g, or t
  misc_feature (665)..(677): n is a, c, g, or t
acatgtatttttataaaccaggtaatttactattatcctggaatttagactaggtttgtttcatttgttgacttagtttccagccaagaaggaaacgactgtctcccccatgtccaggtcacagtttcaagggcagagtccagagagcagacagagttctgtgagagcaggagagcagtctggaaaccctggctgtgcataccgtgtcagccgtgggcctggagatgggagcaggtgagacgcagagccccagtactgagaggaggaagccctcttacagggccccttgcccaccccaagtccgtgtctgaaacacggagcgggtgctgcttcaacccgcatttaatgctgtgtaagtagcgataaccacgtacgagtctgtctggttgatttctaatgtgactcctctggtatttcctcctggtaataaatacaagtgtgacctttcagattgcatatctcaaaagtaacattgctaatgttttataataaaatatattatgtgtgttttggttggtgaaaataatacagactacattttaaaagatnnnnnnnnnnnnnnnnnnnnnnnnnnnnnnnnnnnnnnnnnnnnnnnnnnnnnnnnnnnnnnnnannnnnnnnnnnnnnnnnnnnnnnnnnnnnnnnnannnnnaaaattttttagnnnnnnnnnnnnntcgaaaaatttttttaaaacatttctcttggggggccggggccccatgagggaagggaaactcggcctttattgtttctcccgaagaaaacaccgggcctgaaaagggggggtgggtttctcccccc

SEQ ID NO: 3391 - DNA, 790 bp, Homo Sapiens
  misc_feature (318)..(327): n is a, c, g, or t
ccagcccctttaatttttaggctaaaaaggtaggttttgggcccttcaaactttttagttctccaaggttacgttcatattcacctgcctaaatgtgccgttttttacccataaaaatgccagtccaattatgtggccatgtaaaatgttggcacaactccactgtcatttacagagatttccattgggaaagccatgcctactttatattaacacatggctaggggccaaactcagccagtgaaatggattacatatcggagtaacacatatacaatcatatttacacagatacacactcatgccacacacgaaagnnnnnnnnnngggagaaggaacaaatttggaaaacgatgccaaggatgctacactacatgaaactacatgactttttttagcaacagtaatttccaggcctttacataatattacatggttatggttcaattattagacagccaggaagtaatcccgagccaaaacaaaggaaggttgtaaagcctcattgtagacaaggcctgagcatccacagagaagatacaatgtttatatgaatcctggtgtgcccaagtgtgatctactctcttcactgactactctgagtgctgatgagaatatatatattatcctctgactggcttgaatagctaagacaatacagaaaggtaacagagtggtttcacaccctcatgtgcttctgaaataaaaccatgggctcattagtgggtagctcactatctgtggcaaagactagactattttatgcaaaacacaaccactgcaaaccccc

SEQ ID NO: 3392 - DNA, 1557 bp, Homo Sapiens
  misc_feature (1448)..(1448): n is a, c, g, or t
  misc_feature (1453)..(1453): n is a, c, g, or t
  misc_feature (1471)..(1471): n is a, c, g, or t
gacagactccacaaaccctctgatgagacgattgatgtggccagggtccagttagcatcagtagaaggatgtcactaggaaaggcccaggtatctggtaagtgactgtgaggtgtcacagtacctgtgacaggagagtgtcctgatgtgcttgggagaaaggccgtaatgggggccaggcatggaagagacagtgtgtggccacagaaattcctgtccatccaccaccagtgctgctccctgtgtgggctctagggcgagtggcccgaaccttggcccagtgctttgtcccaggccagagtcttggcaatgccacatgctggcagctttctcactgagaaggtcctagcttacccctgtgtgctggccttggattcagccccgagagaggggagagaccattcctcctgtggagtgggttccttaatcaccaagaccggccactctcagaactggcgtccactgtaaatccagggtgccttacgtgtggctctgtcccttatgctgcaggggaaaagcttgcattgccattggttcccacctcctcactggcaagaaagatgccagggctgttaagcactgtctcctcaccttctgtttctcattgtgggctcctcaaatgggatttgcatgttcctgtcaagcgtaacaacaatcccttctctctgtgacagaggcccaggtgggacagtttctactatttgatatttgagtattatctgggatgtggttctggagctgcccagagctgtgcttagtagagtgtgtcttggaaacatgcccctgggcacactgtatctgctacattagtgggctatctcttatctgcagtgttcgcttttgctagaaagaggatgtggaggaaggaggaggtgggcaatctggcttgagttgtgctgtatcctcttccttgttagcttgccttagtctcactggagaccatttgcggatagtgcttggtccatgcccagcaggacagggctttgctgcttctgaaaagctggtgttctgtatctggggctggggggttcctgtggcctagctgctcaggaaatcttggagaagcatttccactctggggtgtaaacccagtatgagtttgaaattcaagcgtttgtacctgagttggggagagaattgcaaggcatactttctctgaaagtaacagaaccattcaggctgccatgttattaaggaatctgaactgttgatagcagttaccttgtgggtgatacaatgggaggcggcaaaaaaactacctgcataggagaccctgccctttgtcaagagctgggagcacatttcatcagagtagcaggcccacctggtgccagagggcctgcccctcctgcttctgttcttttgccttgcagtctcctggagagagcctctcttttcctgtacagcctttgggcccaaatgccccttctagctttctcaaagaagatncaagntttatttcattcctatgnttttaaagaggttaaaagggacttaacaaagtggaaaagaaagtttttggggccttaaataaaggcctaatgttctccctttaagg

SEQ ID NO: 3393 - DNA, 693 bp, Homo Sapiens
  misc_feature (537)..(537): n is a, c, g, or t
  misc_feature (566)..(566): n is a, c, g, or t
ggggccagaacaagatggccgacgcggcggccacagctggggccggtggctccggaacgagatcgggaagtaaacagtccactaaccctgccgataactatcatctggcccggaggagaaccctgcaggtggttgtgagctccttgctgacagaggcagggtttgagagtgccgagaaagcatccgtggaaacgctgacagagatgctgcagagctacatttcagaaattgggagaagtgccaagtcttactgtgagcacacagccaggacccagcccacactgtccgatatcgtggtcacacttgttgagatgggtttcaatgtggacactctccctgcttatgcaaaacggtctcagaggatggtcatcactgctcctccggtgaccaatcagccagtgacccccaaggccctcactgcagggcagaaccgaccccacccgccgcacatccccagccattttcctgagttccctgatccccacacctacatcaaaactccgacgtaccgtgagccccgtgtcagactaccagggntcctgcgggaagaagggctgccatcccanaaagcgccgatgtggaaccgggcactttaccccgttttcatggccccaagacagggcgaaaacttccaaaggtcttttttccaaggaaggaccggtcccagcaccattttttcccctttggaatttg

SEQ ID NO: 3394 - DNA, 1361 bp, Homo Sapiens
cgggctcagtatgtggcgccttcctcgcgcgctgtgtgtgcacgctgcaaagaccagcaagctctctggaccttggagcaggcctgccgccttcatgtccactctcctcatcaatcagccccagtatgcgtggctgaaagagctggggctccgcgaggaaaacgagggcgtgtataatggaagctggggaggccggggagaggttattacgacctattgccctgctaacaacgagccaatagcaagagtccgacaggccagtgtggcagactatgaagaaactgtaaagaaagcaagagaagcatggaaaatctgggcagatattcctgctccaaaacgaggagaaatagtaagacagattggcgatgccttgcgggagaagatccaagtactaggaagcttggtgtctttggagatggggaaaatcttagtggaaggtgtgggtgaagttcaggagtatgtggatatctgtgactatgctgttggtttatcaaggatgattggaggacctatcttgccttctgaaagatctggccatgcactgattgagcagtggaatcccgtaggcctggttggaatcatcacggcattcaatttccctgtggcagtgtatggttggaacaacgccatcgccatgatctgtggaaatgtctgcctctggaaaggagctccaaccacttccctcattagtgtggctgtcacaaagataatagccaaggttctggaggacaacaagctgcctggtgcaatttgttccttgacttgtggtggagcagatattggcacagcaatggccaaagatgaacgagtgaacctgctgtccttcactgggagcactcaggtgggaaaacaggtgggcctgatggtgcaggagaggtttgggagaagtctgttggaacttggaggaaacaatgccattattgcctttgaagatgcagacctcagcttagttgttccatcagctctcttcgctgctgtgggaacagctggccagaggtgtaccactgcgaggcgactgtttatacatgaaagcatccatgatgaggttgtaaacagacttaaaaaggcctatgcacagatccgagttgggaacccatgggaccctaatgttctctatgggccactccacaccaagcaggcagtgagcatgtttcttggagcagtggaagaagcaaagaaagaaggtggcacagtggtctatggggggcaaggttatggatcgccctggaaattatgtaaaaccgacaattgtgacaggtcttggccacgatgcgtccattgcacacacagagaacttttgctccgattctctatgcctttaaaatcagaaatgaagaagaggccttggccatggaataatg

SEQ ID NO: 3395 - DNA, 792 bp, Homo Sapiens
  misc_feature (301)..(573): n is a, c, g, or t
ggtaaaaaagaatttgattgacaatatatccagtccaatataagtatgaaggattctctctcctgagattgtagcaggcagccaaacattttcaaatgatgcccaaggttttagctgtcttgtgtgcatccacagtctgcgaagaagacatgataaggacatcagggagccaacaagactcctaatagcctcactacattcatccagtgcctattctgcatgcctaagcttagagttcttttatatacctctacggccagcaaaatgctcaggtctgctcttggtagggtaaacataaagnnnnnnnnnnnnnnnnnnnnnnnnnnnnnnnnnnnnnnnnnnnnnnnnnnnnnnnnnnnnnnnnnnnnnnnnnnnnnnnnnnnnnnnnnnnnnnnnnnnnnnnnnnnnnnnnnnnnnnnnnnnnnnnnnnnnnnnnnnnnnnnnnnnnnnnnnnnnnnnnnnnnnnnnnnnnnnnnnnnnnnnnnnnnnnnnnnnnnnnnnnnnnnnnnnnnnnnnnnnnnnnnnnnnnnnnnnnnnnnnnnnnnnnnnnnnnnnnnnnnnnnnnnnnnnnnncagggtaggttactcacctattattatcatttctgatgctgagtatgctaattataagtgataattttttcccttttattataaaacttgggcttgatcctgtgattaagccagaaattttacttttattggaaggttcctccaccatattaaagccttcacctggaaaaaaagaatttggtggtttcctcaattaaataatccctttataatggaaaa

SEQ ID NO: 3396 - DNA, 937 bp, Homo Sapiens
  misc_feature (676)..(676): n is a, c, g, or t
  misc_feature (723)..(723): n is a, c, g, or t
  misc_feature (730)..(730): n is a, c, g, or t
  misc_feature (799)..(799): n is a, c, g, or t
  misc_feature (843)..(843): n is a, c, g, or t
  misc_feature (846)..(846): n is a, c, g, or t
gggaggacagactgaagaaacatccaaggtggtcttgaaggacactgggatcctgtaacacagccccggatatctgtgttaccagccttgtctcggccacctcaaggataatcactaaattctgccgaaaggactgaggaacggtgcctggaaaagggcaagaatatcacggcatgggcatgagtagcttgaaactgctgaagtatgtcctgtttttcttcaacttgctcttttggatctgtggctgctgcattttgggctttgggatctacctgctgatccacaacaacttcggagtgctcttccataacctcccctccctcacgctgggcaatgtgtttgtcatcgtgggctctattatcatggtagttgccttcctgggctgcatgggctctatcaaggaaaacaagtgtctgcttatgtcgttcttcatcctgctgctgattatcctccttgctgaggtgaccttggccatcctgctctttgtatatgaacagaagctgaatgagtatgtggctaagggtctgaccgacagcatccaccgttaccactcagacaatagcaccaaggcagcgtgggactccatccagtcatttctgcagtgttgtggtataaatggcacgagtgattggaccagtggcccaccagcatcttgcccctcagatcgaaaaatggnagggttgctatgcgaaagcaagactgtgggttcattccattttcctnatatcgngatcatcaccatctgtgtatgtgtgaatgaaggttttggggatgtccttttgccctgaccctgaactgncagattgacaaacccagcagacccatagggtattgatctgcagnaantccttggggtggaaagaaactggtttcatcttcgggaatgccaaaccattttatagcatggagcccctacctgtatcccctgccaggatgc

SEQ ID NO: 3397 - DNA, 747 bp, Homo Sapiens
  misc_feature (450)..(450): n is a, c, g, or t
  misc_feature (519)..(529): n is a, c, g, or t
  misc_feature (560)..(568): n is a, c, g, or t
gggggcctaccttgcatcaatcccacgaagggagctgtatggtgggtggtggggaatctgggagagaaaccttagtaatgctgggaaggagcagcagagtctggggaccacccggtaaatggcacattcctgacacctggctgttttgatgttgcttatttcagaagcagaattaggtaagcaaaactccccggtgtgactgagacacacagaaggcacccatacccccacctccagcctgttgacagtaccattttgtagcagttttactactgtgtgatttttgtttggacatctgaagtagagcttgttttgtttttaaataagaatattcacaaattaaaaaccagcggtcctatttgaatcctgggggttacgctgagtggagcgcgctgatgcataagaaatgaggaaattagaacgaaaataggtatggtgccccgtaatggntagctttaaagaaaaaggtcccccaggaataattttttgtttgggcttgaattcaaaaattacctgggnnnnnnnnnnngggtggggcttttcaaccttgggtaaaatgnnnnnnnnnttggttacctttaaaccctaaccttccaccatttggcggaagaaagtttcctggaaagggccccgggaagttaaaaaccttgggggggccccctttggaaaaaacccccggttattgtcctaaaattggggcgaaaatgggcccccagggggggtttcccggggttagagccccgggtt

SEQ ID NO: 3398 - DNA, 385 bp, Homo Sapiens
tgaagcggaggtcgtgcagcccgatcttggccgaatgttgattgccatcgatgatgatctctcctttcggcagactcgtggatccgaaataagcccagggtcagggacgacttcccagctcccgtccgccccacgatgccgaccttttctcccccattgatcgtgacattgatgtgcctgagaacgaagtccaggtcctctcggtagcgcaggcagtagttccggaattccactcggcccacctggggccagctgctgggcggagctgtctcctggatttgccagggcgcctccttctcagtctctgaatactccttgagcctctccacggccacgatgttggtttccatttcagatgacatccgaaccagccagttcaagtacg

SEQ ID NO: 3399 - DNA, 695 bp, Homo Sapiens
  misc_feature (164)..(182): n is a, c, g, or t
ctgtttgaaacagttttatactttctgatatagtacttgaaattcttaccagaaaattactttggagttttgaagcctttattaatactacttttaaagaagcagttgttttattgtcaatgttttttttcccccaagcatattttcttgtatttctgtttccnnnnnnnnnnnnnnnnnnnatttccaattcaggatattgccctgccatccatgaaaactgttctggcaccaaaagtaatgacaaatgttaagtgtaataatagaaaagtagagcaaagagccattcagcttcagtctttacataccatgaataaaacattaaaacatcatatggagaagtttacatggtgattgttcacctgcagtactgtggagttttaacattttgtcctcttttcagtgaaacagagtaaaaatattcatctaccattactgttatttgctgattttgttttactttttgatggtaatattctatccttatgacactattgcaaccaaattggctttaccatcttggctttagtaggtatagaagacaatggattaccatctttattgctgtaatgtgttaagcattatatgctagtagaatctagtttaattgtttcaggtggaaagtattctttgagtttccatattgaatgtgtttggactaaacaaacaataaactactgatgtctgcagcattt

SEQ ID NO: 3400 - DNA, 249 bp, Homo Sapiens
  misc_feature (164)..(180): n is a, c, g, or t
cccacaaggaagaacaaaagggaatgtaagaaaatgggggaagaggtgagggaataaaaagaaataagatagaggtaaattttccaaagaggaaaagagattaaaaggtagcacaaaaaactagagtttaaagttctgggcaattcacagacaataatctcaannnnnnnnnnnnnnnnnatttttccctatcaaaatttaattgcatgtatcaacattatagataaaaccattaaacaatcaagacca

SEQ ID NO: 3401 - DNA, 383 bp, Homo Sapiens
ctaagacatttcactttatttaaaagaagccaatatacaggatataaagggcatgatatttacaacagtacagtaaacaggttggtttccggtagatcgagtagtctttccatgagtataaatcccccccttccctgtgatgctagacccagctggcagacaacagcaacggtggggcaggatcatggggtataaagtctccctgggtggggctaaaaatcaggtagatgcaaaaacatccacaaggggtcttgcagggaagggctttgcatcatttctttgagggcttgggagggaagggtcttggtgagggatttgctcagaactaacacacagctcaccctgagcctggaaatcatccattcatagaaaattcccttcca

SEQ ID NO: 3402 - DNA, 1309 bp, Homo Sapiens
aaagaaggtactactgctgtaagaagttaacaagtaataatttcctatttaacatctgttcataatgacatttccgctgcatttttttccatcaagaataccaaaacagtttcctaatatacagtatttgaaagtgtttgccatattggctcttaaaatgatagactaatttttctcattcaataaaagaaaatttctaataacaaaatacatgtaaagttagaattttataatttccacaaaggaagcagcatttattaaccagagtacttgtttgcaattttttatctgtgaaaatattttaaagctcttacaaaacttaaatttttaaaaaatcagctcaaaaattttttccatgttgttgggcataccactgctgtctctgctttcggttttccaactctgtaagaagggcttgtctgtatgcttcatacattttaacaatctgctccaattctttcatgaagagcaactttagcattccctggtatgtatccaggtcagccagctggaagagttcccacttcagaatgtggtcatatttcacaggggctcgtgcgtaaacctgaagccagtccaggaatttctgccagtatgatatggatttgcaggtaccaggaagggactgatttctttcagtttcctgtggctggtatgtgacaggaggtggttgatcataccggaggtacactaggagcacagggatgcctgtattgggcctccttattggtgtgatctacataataggttccaaattcggatgactcaactcgttcccattccaggaggaagtccttctcgctcaagaggatggctccagtgagttgtatttgtgttatgatctatataatattttctccctctcattgtccagtccacagaccagccaggaggaaggggtaaatcttcagaaccatggttagtcaaatttcctaaagatgtagcagcaactctcccaatacctgaagcatgcctcccctgattctgtggcattctttggaagagatcatggttgtattcataatatctgtagtcttcatgtgcacgatctccaagtggccgctttctctgaccatcaaaaaaattgtctgaataataatatcgggaaccagagtctccattttcaacagcaaaactaacttccgttacaaatgactgagaagaaccatactctctagggacatctgctagacttctggcaagataagaaggtgcagataatctgttgctttctcttctcattatttcatgaggtgttctttgaattggagttctaaggaaactctggtttcttgaaactacatctccc

SEQ ID NO: 3403 - DNA, 573 bp, Homo Sapiens
  misc_feature (276)..(284): n is a, c, g, or t
cccctgccttgctgtcctgcgcatcccaaacccagcccctgcttctgtgtcttccatcgagacgtacgggatttggggacatgttctcaggtccatatcctgctgtgagctaggaaggtgcctggtattcacctgcctcattttctcctccttgggcaagacaaagcagagctctcttaggaaccagatgagtacagatttcaaggaagtatctagaaccttgatatcattgctgaaatcaagagctgaatatagagaacatcttggcttatagannnnnnnnnaaatcctgctctgtttgagttgttcagtgccataccctattacagaacaaattatgtgtggattattagttataccggcaggtaaaccagtgactaaggccccatcctttaccctgagagctattatttttctgcctgtggcatggttcatttgctaattatggttgttcctcagagtcagtaacaggaaatgacaacagtaaaccatccatggtggggggtgcgcctgaatgtgagagaacgatggagggattgagaccagtggatttctagagggcctaccccactt

SEQ ID NO: 3404 - DNA, 204 bp, Homo Sapiens
tcagacagccggacacacccacggctgacttggggatgatctcggtgagtttctcgtaggtcttcaccatcctactggtcaccgcgaagatgggctggatgttgttttcagccagcttgtgcgccagctggcccaccgatgggtagtcgaattcgttgctcctcttgtacaagttgtcctccaggtgaccacgccgccgtcgtt

SEQ ID NO: 3405 - DNA, 246 bp, Homo Sapiens
  misc_feature (154)..(154): n is a, c, g, or t
aactgacacattttctatcattttcatttgtgtttccttttcatttttcttcccctctgctagtttggaagttatattataccaagttttttagtattagcctagaaatcttaacataaagacttctaataagcaatatctttaattttttttncctacccaatactagatcatgagcattttcccacatcataaagaattggtcacaagtcagccccaaacatagtccagtggaatccaatgata

SEQ ID NO: 3406 - DNA, 492 bp, Homo Sapiens
cactcacactctgcccacccatctcagtgctgagatcgttaaggaaatgaccgaggtctttgacatcgaggatactgagcaggccaatgaagacaccatggaatgcttggccaccggagaatctgatgagctgttgggtgacacggacccacttgaaatggagatcaagttgctccattctccgatgacgaaaatagcagatgccattgaaaataaaaccaccgtgtataagattggagatctcactgggtattgcaccaatccgaaccgtcatcagatggggtgggctaaacgcaatgtggaccaccgccctaagagcaacagtatggtggatgtctgctcagtggacccccgctcagtgctgcagaggatcatggagacggaccccctgcaacagggccaggctctggcatctgccctgaaaaataagaagaagatgcagaacgtgcagataaaatcgccagcaagctgtggtgcagaattaagatccgg

SEQ ID NO: 3407 - DNA, 405 bp, Homo Sapiens
cttgatggcctgcagactctgagagccaccccggcttcccagtgacctccttccactcagcacccccttcccctgggagaccggaacgaaccacactgaaatgagcacgtcgaggtcactgtcgaacccaccgagggaggccaggacagcctcatggccaggctgagccaggagcccagaccagttcctgccagggagaggagccaccaacttcccctagtatctccctgctgtctcagaggctcatgttctggaaactatcattgtctttaaggtgattttatgtatattaaagtcacgtacagtagtgcccttatccacaccttcgcttgctggagtttcagttacccatggtcaaccaaaggccaataataggtgagtacagtacagtaaaatattttgagg

SEQ ID NO: 3408 - DNA, 233 bp, Homo Sapiens
tctgacatcactggcattgcacctgggtgtgcccccctccccacgctatggacccagataggaggggttaggcatgggggaggcacagaatgctggagagatgcgtcctggtgaacgtggggcagcccctcccacgacccccaccagactgccttaggttttgtcagccccactccctttccttcccctctgcctcccacacactctgggggtccggctgtctaagggatcgg

SEQ ID NO: 3409 - DNA, 590 bp, Homo Sapiens
  misc_feature (471)..(471): n is a, c, g, or t
cgccaccccccctcctggtcttaaagtttgaagcctgcatttgtcttatctgagttcttgccacaggaaatcaacgaattgaaactcaccagatcactgcatccagacaatgagatgccaaacccctcatccctcctgatttccttatccctccctaattcctttgaccaactcctcttccttacctctccctaactctggttttcccacatgtagttacatttcttccctgccgtataaccccctgattttagttgactagggagatggatttgagactgatccccattttccttggctaaagcactcaattaaagccttcttcccaggcagtactcattgtcttggtgattggctttctgtgcagtgagcaacgggacctagactggagccctggcatttcagtaacagattttggttccctacctgagaacacattgcttgtggctcagctgctgcagactgggactntcagaagccccctgtacagctgtctgacctttttttggctggaggtgggtttccatctttttctctttggctctgctgctgccagccccaaatgtattgctgattgcctaggaagacag

SEQ ID NO: 3410 - DNA, 600 bp, Homo Sapiens
  misc_feature (529)..(529): n is a, c, g, or t
gtgcttttttagcaaatactacaactgaccatttgcagctgcagtcagttcttgaaaagtattttcaaacgcagcgcttaaagtcactgtaggtcaccacaagtacactcttctcatctctggaaatcaggcttagttttttctggcacaccagcatctagcttgtaaagacaagaaattatatgactgaggtcaatccagggagcacctgcttctgtcacctgatgaaaaagatgatccctaaagagtttcaacagataacggtctccagtctctgaccaagtgggatccttctgaaacctgggggaaatgaacattttacctcagtaactcatgctgtatggtctgtggccatatgtctattttttagactccaaactagttttactttttcccaataaacaaaaaattgggagggagtctggtacagtgtttttaaaaaataatctaactgaactagtaagtctatgaattccagttttcagttagcaaatgtcagggggaaatcatcccttatgcattcctattntacattacctccttatttcagcccctaccattagataaaatggaaaaggttaaaatgtctttaaatatctt

SEQ ID NO: 3411 - DNA, 587 bp, Homo Sapiens
cgcaggcacctacaaggttgtgccctccacctacctgccggacacagagggggccttcacagtgaccatcgcaaccaggattgacaggccatccattcacagcaggagatgctgggccagttcctccaagaggtctccgtcatggcagtgatgaaaacctaacagggtggccccctgtgccagctcaggtgactggagcccgagggcctgacaggttcccagcagctgggccggcaagccttgcactgtgggggctggtcctgagtcttggcctgcctcccagccctgccagggggctgcggcctaggggtccacgggaagcctccgtcaggagagacgcagccctgggggccagctggtgctgcaaggaagggtgggaagcttgctggcttctgttgcgccactgagacggcagagaccccaggatcccagagcttcccaggatccctcccagatcctctgctgactccatatggaggcctcacacccagagggtagggcagcagatcttctttataactatttattgttcgaatcacttttaggatgtaactttatgaataaacatgagcgctgatgatttgcaa

SEQ ID NO: 3412 - DNA, 469 bp, Homo Sapiens
tcctgcacttctcatagcacaggatcctcagggactgggagccctccagctcgatctcaaactcctcatcccacttgggctccgctgtgtcccggaacaccctggttttggctttgctgacaaaatagccgaaggaatccacctccaggctacagtacaggttggctgattgcttaaatcccttggcagagtggacgacgacatgaaggaagccatagagtcctggagactcatcgtcgtctttattgctggtgacaggaatgttgtgtacagtcctaagcttgaaacaggatcctgtgagcacctggagctccactgagctcaggacaaaggcctggagatccttcttctgtagtttctgaattgcttctctccactctgacctctcgtagtccgaggacagtaggaacaggtaactctttccattccgattgtggatcctgaacgggattgtgggggagttgagcag

SEQ ID NO: 3413 - DNA, 284 bp, Homo Sapiens
cagactggcaaagtgtttccattgagaattcaagacacatttctcccaagttgagccatgaaaagtttttatgaaaatcaaatgcccaaaactggattattacattggaaaattgtgtgttaagtgagaggaagaaaccagctcctcacaaataaagtttctatatttaaattcacagggagctaaagtggagcacctgcaagccagattgggcagagcatgccacagaagactcaggttcaagatgcaaatcaaactcaatgcatttaaaaggctcctgattg

SEQ ID NO: 3414 - DNA, 712 bp, Homo Sapiens
  misc_feature (475)..(663): n is a, c, g, or t
actctagaggtatcccctgccttgacgtcctgcaaaacaagtaacatactctaaaacacaatactcggctttttaaaaatttaccttaatttctgctccttttgcttacttctgccagtcccatacagtaagcatatgctcattggagtcatcaataacacataaatgaacacctgaatctgcttttgaaaaatccaggcatcctactccacgctcaaaagtgccaagtccaataatctgcagtgtggatagagtaacagaatcccacactctgacgtggggttgtagaggctgcaaaaacacaagacagcagagcaactggacaggtggatgcaaataaacaccaatagcacacagaactgatgccatttaaaaaagtaatagggatggataagcttctaataaattactagatttagacatgcctccaaatgaatcttaagtaggtattttcttatactgtgaaaataagaannnnnnnnnnnnnnnnnnnnnnnnnnnnnnnnnnnnnnnnnnnnnnnnnnnnnnnnnnnnnnnnnnnnnnnnnnnnnnnnnnnnnnnnnnnnnnnnnnnnnnnnnnnnnnnnnnnnnnnnnnnnnnnnnnnnnnnnnnnnnnnnnnnnnnnnnnnnnnnnnnnnnnnnnnnnnnnnnnnnnnnnnnnnnccaggcacgggggcccacaccggtaatcctagcactttgtgaggccgag

SEQ ID NO: 3415 - DNA, 1369 bp, Homo Sapiens
tgggaatacaggtgtgagccaccacgtttgcctagagacatctagttttgttagtgcttgaatcaatccattcctcctacaggcccgccaagctgccccctgtgtgctattctttgatgagctggattcgattgccaaggctcgtggaggtaacattggagatggtggtggggctgctgaccgagtcatcaaccagatcctgacagaaatggatggcatgtccaccaaaaaaaatgtgttcatcattggcgctaccaaccggcctgacatcattgatcctgccatcctcagacctggccgtcttgatcagctcatctacatcccacttcctgatgagaagtcccgtgttgccatcctcaaggctaacctgcgcaagtccccagttgccaaggatgtggacttggagttcctggctaaaatgactaatggcttctctggagctgacctgacagagatttgccagcgtgcttgcaagctggccatccgtgaatccatcgagagtgagattaggcgagaacgagagaggcagacaaacccatcagccatggaggtagaagaggatgatccagtgcctgagatccgtcgagatcactttgaagaagccatgcgctttgcgcgccgttctgtcagtgacaatgacattcggaagtatgagatgtttgcccagacccttcagcagagtcggggctttggcagcttcagattcccttcagggaaccagggtggagctggccccagtcagggcagtggaggcggcacaggtggcagtgtatacacagaagacaatgatgatgacctgtatggctaagtggtggtggccagcgtgcagtgagctggcctgcctggaccttgttccctgggggtggggcgcttgcccaggagagggaccaggggtgcgcccacagcctgctccattctccagtctgaacagttcagctacagtctgactctggacagggggtttctgttgcaaaaatacaaaacaaaagcgataaaataaaagcgattttcatttggtaggcggagagtgaattaccaacagggaattgggccttgggcctatgccatttctgttgtagtttggggcagtgcaggggacctgtgtggggtgtgaaccaaggcactactgccacctgccacagtaaagcatctgcacttgactcaatgctgcccgagccctcccttccccctatccaacctgggtaggtgggtaggggccacagttgctggatgtttatatagagagtaggttgatttattttacatgcttttgagttaatgttggaaaactaatcacaagcagtttctaaaccaaaaaatgacatgttgtaaaaggacaataaacgttgggtcaaaatggagcctgaaa

SEQ ID NO: 3416 - DNA, 555 bp, Homo Sapiens
gggaggagttgtacctccattggcttcctcactccaaaataggtgctgatccttcctattcctattctttgccaccttttgggtgtggtgtcaccagcctgtttagccaagtagctttgggcataggctgcccaatctgagcaaacaccagtgaggctctattgagccaagaccaagtcctcaaagcacctgaaccactgtggccttctcagcctacagcagtgtggtctcttacatggccacaaagggacacacagtgacaaaaggctcggaatgttacaatggtaaaatgagtgatctcaaatccactgacagatataaaataggcttagagaggaaaagctgcctctggtcaagtagatcatggcagcatgaattccaactcacttttttacaactccaacttctatgtttatctttgttactttcacttttttacaacctggccagaggcattttttaaatcaggcccaatatcagtattctttttgtgtgtgccaattttgttatcacatccctatgaagttgaaaaataaagttaattttgaccaaaat

SEQ ID NO: 3417 - DNA, 884 bp, Homo Sapiens
  misc_feature (326)..(355): n is a, c, g, or t
  misc_feature (768)..(768): n is a, c, g, or t
  misc_feature (840)..(840): n is a, c, g, or t
  misc_feature (845)..(845): n is a, c, g, or t
  misc_feature (855)..(855): n is a, c, g, or t
  misc_feature (864)..(864): n is a, c, g, or t
ggtgattcctgagcaaattccctcaaagtgaactcttgttcttaaattttgaattttatggtgagattgtaaagatagaggcaattgaaacattgttccttatttatgaactgcttgaagtgaatacttaatttaagtttgcactttaataccaaacttaaaaccaaacactcatttaaaagtaggttaagtgatcatggatcattgttattagctttgtggctttgtgaaattctaaaggaatcaaataattcatcatgatttaaattttctagagattttgatttttttataatgtttctttcctgtagattgtgttcttgttnnnnnnnnnnnnnnnnnnnnnnnnnnnnnnaaaattacagtgttcattgtcattgacctcagcagcaaatttgacttgaattcacttaggatcgcaggaatcaggggaaagtgattttaaaggtggcctctccagcacattttaagaaaagggaccaaaagttattttagcttcctcaatagattgcatgttgcttattacgataataaattaatattaaatgcaatatatgtcttgtctttattatggcatctatttaggagttgttcaaatcactgcagtagggctctgcaaataaaataatgtaacctattatcatggatctaatgtactgtaactttatcagtgaaaagtaaaatctcaaataacaagtacaaacattgaacaattacctataaagatttgtaaaagtaaaatttttcccaatagatttcatccttggncattttggaagaagaacctgcaggccaccctggttgttaaccttttttaataaaaataaaccatctggtaanaaaanctataacttnagaaaaaangaaaacttgtccggcccgca

SEQ ID NO: 3418 - DNA, 789 bp, Homo Sapiens
ccttttacacctagaggatggaatgctttttgtttaagaaaagttgtgcaaacccattgtattaagatttaatataagtcccagttctggtgtaagtttccagaagccatcctttgtctgtagactgaggagttctgtccaaggcacagcatcctgccagtgttgtgtgcacactatttcatcctcttcttttacttccagaaagcacgggatactgtcatcttttgtatcacattttatttgtaaaaagcagctgtcttgaagtacttctgatagctcatcactttatgtgtcagaactttgaaaagcaaagacaggacatcgacttccttcgagactgcctactgattcttctagaagacagagatctactggggtagtccgggactgactgcaaagagcctcaggtaaagcagaggccattggcagcctaaggttggcagtcaaagaggctgcggaaggttgaaaatgaaaaggagagtaagcagagggatgataagacccaaaacctctgatgggatcagggtctgtaggaagagagaaatgaagctggggagaatccagctcagggaaggtgccagcagaaggcctggtagtaaagcctccaggatgtggcagtggagcagactgtgcagagcttaatgagctccctgaaaaaacaatgccacaatagggtgcagaaggtgccctctggggaggtcctgtgggacaagacgccgactgtgggatccagtcagcacaagcgccaggcacagggccttgactgaattgagatgcatcacactgtct

SEQ ID NO: 3419 - DNA, 1015 bp, Homo Sapiens
  misc_feature (300)..(300): n is a, c, g, or t
  misc_feature (399)..(399): n is a, c, g, or t
  misc_feature (403)..(403): n is a, c, g, or t
  misc_feature (421)..(421): n is a, c, g, or t
gggtggaactgagaaagaagttgggctgtaaatcatttaaatggtatttggataatgtatacccagagatgcagatatctgggtcccacgccaaaccccaacaacccatttttgtcaatagagggccaaaacgacccaaagtccttcaacgtggaaggctctatcacctccagaccaacaaatgcctggtggcccagggccgcccaagtcagaagggaggtctcgtggtgcttaaggcctgtgactacagtgacccaaatcagatctggatctataatgaagagcatgaattggttttanatagtctcctttgtctagatatgtcagagactcgctcatcagacccgccacggctcatgaaatgcacgggtcaggaggatcccagcagtggacctttgngaanaacaatcggctataccangtgtcggttggacagtgcctgagagcagtggatcccctgggtcagaagggctctgtcgccatggcgatctgcgatggctcctcgtcacagcagtggcatttggaagggtaaaggtggatgctgtggcgggaacgttgcttcatcaggcgttgcctccggtgtggagtttggggctttaggaaagcctgggttgggtggagcagaaccatcttggagaagatgacagttccctgtcctcccggagatgcctgggtgtgttagcagaggtgacacgtgtctgacagagacgggagctctgagtgtccacgggtgaagaagtgagtgtccacgggtgaagaagtgagtatgtttcacctggacattaaggtgatgttgagctgctgttaaggaatttcttgcttatagaggcaaaccacagtatcattttaactctagaattgggcttgtacagaaggataaaacccaggaaaatggatatttctattcagatttatttatgcctctttttaatcccctttaatgatgcagtggtttttatctgatcaggaacttgtcatgatttcctttcttagacttcataggagatagtgcttt

SEQ ID NO: 3420 - DNA, 848 bp, Homo Sapiens
gcggccgctcctgctgctgctactgccgccgccgcagcggctgctcgggctgagcacgccccggaacaggccgccgcgcgctgcgcgccggacccgctgcccctgccggcccggccgggtcgggcggcccagggcggcaccttcctacttctgcccagccacagccctcccctcacagttgagcacctgtttgcctgaagttaatttccagaagcaggagtccccagagccaggcagggggatgaaccgcgagggagctcccgggaagagtccggaggagatgtacattcagcagaaggtccgagtgctgctcatgctgcggaagatgggatcaaacctgacagccagcgaggaggagttcctgcgcacctatgcaggggtggtcaacagccagctcagccagctgcctccgcactccatcgaccagggtgcagaggacgtggtgatggcgttttccaggtcggagacggaagaccggaggcagtagctgcaaagcccttggaacaccctggatgctgttgagggccaagagatctgtgtggctcctgggccggctgagtggcagcagccccccgtggtcccacctctcgaggtgggaccacggggagggttctataaaaagattttttgcaaaagtgcgagcacattatgtagaaaccacaagtccgccaggactagtaaaagccagactcccactgaggccactaatcctgaaggaatgaggagggagcagttacccaaatcccgaggtggagaaggctgtgtggaaaagagggtccccctctcggagctaagacctcaggggagccagcccgagcatcccctgtcgggacctctagaacgccacc

SEQ ID NO: 3421 - DNA, 1690 bp, Homo Sapiens
  misc_feature (1642)..(1642): n is a, c, g, or t
caccactcctatagatcagtcacaaagtgcacagtgggaatcgagaatcgatagggttaattttggagcagtggcttataccattcacctctgtttttttgtgattatttcacagataatgagaccttaataacaaataggcgtaaaaaaattttcacattgaaatgatagaaacatttgatgtaataaaacttggttggcttgatattttaaggaattgaaacctagcaatcttattggagagacaagaattggtctccagctgcctttgatcaagattcgggtgcaagtggagcaggagccatatacctggagggaatgtgctttgtcacaccaaagaggatttttccttcttcaaacttgtatgttgcctaggtttcaaattctttgccgcaaggctgatctgctttcattaactggaattctgtaggagatactggtgacctaagctaagttgcactcagcatactcagtgtcaagctaatgaggttctattataaaggttctacttttaatctgagggaaaacatgttcagggcttctagaacactaaaaaatttggcttaaaccagtgttcagtctggtgccaaacttcgaatggaatacaaattcacataatctgaactttgttcacaggttatcctaatagagtaattcttcactttgctctattgaactgtcttaaggatttgtttaaacagctaagttacttgattaaaataatgataaaattgtattttggtctttgctttaatattaaagttaacaagttttcattttataatgagatcaaagcattggaatctgccctattttgtagccgttgctttggatttgtgttggatgtatcctgcagttacacttgccagccccactcacaaaagttgttcatttcatttgggtcactggctttatttgctagtcttgtctgtgaactgagcatctgcctcagttttattacttgaaatcttggcaggcgcttaatagggaacatacatacagctatgtaactgtgaataattgtatatatctctagttaagaatgagggaatggggaggtttgctttctaaacaagtgcattctgaaattgactcaaaaatttttagtgtgggtcctaaagtttagagatgggcaaggaggtctctaatccaccgcttcccgcttgagaagggaggggtatcaaaattgagccccaagctgtttgttccagtgtaccaagcactggactttatgcctttggcctggagatggcagaagtgaaagctggccatctgcaaaaagcagataagtgagtttgaaccttttgcattttgttagctcagtcagtcctcatcgtggtcctgaggcataggtactgttgtaccaaggtcacttatctaacaaaaataacccttcatgtattttaaatttatttgacaagtctgcagacaatccttatctaaccagctattttcttaattgctacagcttgacctaccagtattccggagtaaccagcaaatgcaaagttgaccttgttcctgcatcatctttttgatggttcaaatttcagcctccctgactactacaaagccagagcagtcttagtaccagaaacagtgttgcactttcgttgcatgtgctgtgtgacccaagggacanggagtcacttgggtcatctctgtccccagtacagatcttgatcatagg

SEQ ID NO: 3422 - DNA, 908 bp, Homo Sapiens
  misc_feature (831)..(831): n is a, c, g, or t
  misc_feature (837)..(838): n is a, c, g, or t
caacgatggtcctcagctggagaggactttttacagaaggagaagatgtacataattttcttttggagcagaagttggacttcatagagtctgacagtccctgttcctctgaagcactttcaaagaaagaactgtctgccgaagagctgtataagcgactcgagaaactcattattgaggacaaagcgaatgatgaacagatctttgactgggtagaggctaatctagacgaaatccagatgagttcacctacattccttagagctttaatgactgctgtttgtaaagcagctattatagccgactcttctaccttcagagtggacactgctgttatcaagcagagagtgccgatcttactcaagtacctagactcagatacagagaaggaactgcaagcactttatgcactacaagcatcgatagtaaaacttgatcaacctgccaatttgctgcggatgttttttgattgtctatatgacgaggaggtgatctccgaggatagcttctacaaatgggagagcagcaaggaccctgcagagcagaatgggaagggcgtggctctgaaatctgtcacggcattcttcacgtggctgcgggaagcagaagaggagtctgaggataactaaaacttcaaatacacaaaatgaaacaaaagaaacaatttaagtatttttttaaaaagtttcacgtcttcgccaatcacagtgcagcaaggccaattctcgcagaaacccccacgtgtgcacgagtgggagaggggaaagagaaaaaaaggtgatcatgggaggaaaaaagtactgggataaaagtaaaacttcaaacccttangggcgnnggagcactaaaaaccaaaaatacatgggtattattttattagaaaaaataattttcctgggtttaaatcc

SEQ ID NO: 3423 - DNA, 720 bp, Homo Sapiens
ggcagtaaggataggtggctgagacccactgccctgagctactagtgtggctgtgcctgtgggtctctagaaccatctgcattggacgtgaagccacagcaggtggctggactgctggcctgttcctaatgagctacgctgggctttgaggtagaggttggggtttatgaaccccaactctggcttaaagatcttgctgtggctctgttatgttctgaggccttgggattagcctcttcctcattacggagctgattttctagtctgtggatcagctatgcctttggacacttctcttttccattgtgccttttgaatgttgtcttctcactcagcatcagcacttcgatctaaatgcagactagggagttgggaggaggaaccaaagtgaaccatccttcatttattcagtcattcgttcatctgtcaaacacgtatttggacatcaaggttgcagagatgaacaatgcatggatttcatctttgaggagttcaaaacctagtggagagaacacatggtacaatcgtaacacatgaaggacaagtaagtgctgcagtaaaggtactaataacatgttccttggaacagaggaagaaaaaccacgaaaccatggaaattagggaagcctttacagagggtgtgacaaaactcaatttgacattttcaagctatgtacaatgatgtgcaccttgcagatgctcaataaagtaattactgac

SEQ ID NO: 3424 - DNA, 498 bp, Homo Sapiens
ggtactagaagaaaaaacagatgaagatgaaaaaaccattaaatttggagaattccaacaaaagcctctctggtgaactcagagaagttaaaaaggaccttagtcagttacaagaaaacttaaagatttcggaaaacatgaatttacaatttgaaaaccaaatgaataagacaatcagaaacttatctacggtaatggatgaaatccacactgttctcaagaaggataatgtaaagaatgaagacaaagatcaaaaatccaaggagaatggtgccagtgtatgataaaatccatgtagtgatgaggaatggtgttaaataatgtaatatataaaaatcatgatataagaatgtttgaaggtgatgcatgtttgattttagtagtataaatgtattttagttcaaatgatgtataaagttttatgaatgtgagtttctgcttttgaaaattgcttgtaattcctagccttcaaattattaaacactccttgagtgaaat

SEQ ID NO: 3425 - DNA, 2183 bp, Homo Sapiens
  misc_feature (454)..(454): n is a, c, g, or t
  misc_feature (1711)..(1711): n is a, c, g, or t
  misc_feature (1738)..(1738): n is a, c, g, or t
  misc_feature (1779)..(1779): n is a, c, g, or t
  misc_feature (1873)..(1873): n is a, c, g, or t
  misc_feature (1923)..(1923): n is a, c, g, or t
  misc_feature (1940)..(1940): n is a, c, g, or t
  misc_feature (1964)..(1964): n is a, c, g, or t
  misc_feature (2046)..(2046): n is a, c, g, or t
  misc_feature (2062)..(2062): n is a, c, g, or t
  misc_feature (2090)..(2090): n is a, c, g, or t
  misc_feature (2108)..(2108): n is a, c, g, or t
  misc_feature (2116)..(2116): n is a, c, g, or t
  misc_feature (2128)..(2128): n is a, c, g, or t
  misc_feature (2150)..(2150): n is a, c, g, or t
  misc_feature (2159)..(2159): n is a, c, g, or t
gcgcctggtactcggcggcgccggattccggggctgtgggggccaggcctgggcgagcatgatcctgggctgacttggagccgcaggttttctggtcgttgaggaccctcgaggagcgtcctggtggagccgagggagtaatgtgtgtttggaaatttatttcctggaatggaggaacaagccaccctcttcttgtcccagtaatcgttgtgtgttggaaattttagcattcaggtgccaggaatgcagatgggacagccagtgccagaaacaggcccagctatactcctcgatggatactctgggccagcatattcagacacttattcctcagctggtgactccgtgtatacttacttcagtgctgttgctggacaggatggtgaagtggatgctgaagaacttcagagatgttcgacacagtctggaattaatggaacttactctcccttcnagtttggaaacctgcagaattatgattgccatggtggatagagatcacacaggaaaaatgggatttaatgcattcaaagagctatgggcagctcttaatgcctggaaggaaaacttcatgactgttgatcaagatggaagtggcacagtagaacatcatgagttgcgtcaagccattggtcttatgggttataggttgagtcctcaaacattaactactatggttaaacgttatagcaagaatggcagaattttctttgatgattatgttgcttgctgtgtgaagcttcgagcattgacagatttctttaggaaaagagaccacttgcaacaagggtctgcgaatttcatatatgacgattttttgcagggcactatggcaatttgaatgcttagaattttaaacctgaagagacactgtgaattcttttgcttggaagaagtgaactggactactttaaaacttttaagggttttctatgttcttcctacctgttaaacctcttccctttctgtgtgtttttattttagcagatagttcaaagcaataaaagatttcttttttaatttgaggtattactgcttttggaaaagttattttataaatatgtgcatattgtcataaaatattgtatgattaattgatttaaataatgcttagccttaattttagataatgtaaatttagaggaatgcactttacaagatagattgtataagaagccaaataatgaaagcctagaaaaaactaattcatacttatctgaaggttacaaattacactctctaaattttctttgtagttaggcggagttatgacggttggcctaacaaaagacaaaccctgggatttttcgtgcccatgttttggtcaatattagaatttgcatccccttgagtcaacataccccacaagaaaaacgcaagcctttcacagattctctttggtcctgtgggaaggaagcaagaaattaatcctcccccctcagtctttaattccctggtcacccggacaactaacggcaagttaaccgccaaacggacccttttgaactccattctgtcccatccccccttcataaatattacggcatagggagaactttaatacaaacagatatgtgtagaggaccgagggaagacaccccaacacgggggcataacatcaaaataattgggggcggcccctcccacaccaatgccggggaagggagggccgcaggccaaaagcgccgcccgtcccggccccccgcccaantagtaaaccaccccccccattgtgcancggacagcggcaaaacgcccccgtccacgcaccgcccgggncgccgcccccaacgccagaacagataaccccccgtctcccacaccgcgctagaaaaataaaaacaagcatcaaccgacacccttcgcgtcccgncaggtaaccaccaaggaccccccccggcactgaccccacccagtgaccancagacggccaacgcccnaccaagagaccaccgaccctcgcntaagcgcccgagaattcagcgccggcgaaatgcaagtgcacagaaaatctctcgacagacctcgaaacccgccacgcgcccncacgccaccactcacncatcactagcaacgcagatacccaacantgtccccacaataatatncgaacacncacccgacaacnccgaccccgcgtactacccacntaagtaccncccacacacccacctcaacgtcac

SEQ ID NO: 3426 - DNA, 611 bp, Homo Sapiens
cccataatattttatacagcatcgagtctaagaatattttatgcatttaatccataccaatgcactacggaagcttttattaaacggagtcactattgcccagacagtaaatggtttacaaatgtacaataacgtatgtttctaaataatgcagaagtggcaaagtattattcctattctcatctgactttaattttcaatttatttttcattgccttcataattttttatttcatgagtctaagaaacaaacaccagttttccttttcctttcaataacatagttctatacctagaaatctgatgttcatttatcttccctttaaagttgtgtaaatcctgggaaagaaatcgctgtgcagtgttctcccagaaaccaggcttctgcttgaaagagcaaagtttaaaagtctagtcacaagtagcccatatctggtctacttcaaaaagtttccatttatactaccaccttaaaaatttcctcaagcataaaacatgtttataaagttacaaatttgaatgtaactaaagatacatagacattttattattacactttcatgtactgcttgataaattatgtatcagttaaaaacactaaattatctcaa

SEQ ID NO: 3427 - DNA, 1235 bp, Homo Sapiens
ggtgcctgagggccaggcagctgctgcctccactatcgatgcctcctgaactgcacactgaggactgggactggggttgagttctgtctggcttttgttgccattttggtttgggaggctggaaaagcaccccaagagctattacagagactggagtcaggagagagcaggaggccctcatgttcaccagggaacaggaccacaccggccactgaaggagggcaggagcagtcctccctctgaatggctgcagagttaatgttcccagcccagtcccctttcgggggccttgggagagtttaaggcacctgctggttccaggacctcgctttccatctgttcttgttgcaatgccatcttcaaaccgttttatttattgaagtgtttgttcagttaggggctggagagagggagcttgctgcctcctgccttgctacactaatgtttacagcacctaagcttagcctccagggccccacctctcccagctgatggtgagctgacagtgtccacaggttccaggaccatttgagattggaagctacactcaaagacactcccaccaggctctttctcccttttcctcttgctcactgccctggaatcaacaggctggttgctggttagattttctgaaacaggaggtaaaatttttctttggcagaggcccctaagcaagggaggggtgttggagagccagtgcccttaagactggagaaagctgcaatttaccaagttgccttttgccactgtagctgaccaggggactaggttgtagaggtgggaaggccccctctgggctgatcttgtgccattcttgaccttggacctgcttggttaaggagggagtgggccagaccagagtgccaggagctaatggagccaggcctgactcctaggagtggtccaaaggccttcagcctagatggtgcaaagctggggccagcctgtcttcaccggcaccctcacctgtgacaccaagacccaccccaatcccagacttcacacagtattctcccccacgccgtcctatgaccaaaggcccctgccaggtgtgggccacagcagcaggtatgtgtgaaagcaacgtagcgccccgcggactgcagtgcgcttaaccaactcacctcccttctcttagcccaagcctgtccctcgcacagcctcgcacaaaccacattgcctggtggggcccagtgtactgaaataaagtcgttccgatagacacgtcaaaa

SEQ ID NO: 3428 - DNA, 820 bp, Homo Sapiens
cctaaaccccccctaaacaaaaaaaagaaataatttggtcgaagaaacggtccggaattctcgggattgaaatagggagctggctaacagcgttgagtcccctgtaaagccaaaccccctaaaggtctccacactgctgtttaacggcacacttgacaatggcttcagcagcacgcttgacaatgatgtgggaggaggtcacatgccctatctgcctggaccccttcgtggagcctgtgagcatcgagtgtggccacagcttctgccaggaatgcatctctcaggttgggaaaggtgggggcagcgtctgtcctgtgtgccggcagcgctttctgctcaagaatctccggcccaatcgacagctagccaacatggtgaacaaccttaaagaaatcagccaggaggccagagagggcacacagggggaacggtgtgcagtgcatggagagagacttcacctgttctgtgagaaagatgggaaggccctttgctgggtatgtgcccagtctcggaaacaccgtgaccacgccatggtccctcttgaggaggctgcacaggagtaccaggagaagctccaggtggcattaggggaactgagaagaaagcaggagttggctgagaagttggaagtggaaattgcaataaagagagcagactggaagaaaacagtggaaacacagaaatctaggattcacgcagagttcgtgcagcaaaaaaacttcctggttgaagaagaacagaggcagctgcaggagctggagaaggatgagagggagcagctgagaaatcctgggggcagaacggaggccaagctggccca

SEQ ID NO: 3429 - DNA, 1719 bp, Homo Sapiens
  misc_feature (88)..(137): n is a, c, g, or t
  misc_feature (207)..(233): n is a, c, g, or t
agaaagagaagcccgggacgagacccccaaacaagatggtacggtccggaattcccgggatcgagactgtggaggacctggagctggnnnnnnnnnnnnnnnnnnnnnnnnnnnnnnnnnnnnnnnnnnnnnnnnnntgttcacggtgagaccaaaagtcaggtaggagcctccggggtccctgctgtgtcacccggacaggccgtnnnnnnnnnnnnnnnnnnnnnnnnnnncctgaccacagcggccgagttcagtcctgctctccgcacgccaccttaggcccgcagccgtgccgggtgctcttcagcatgtccttcatcccggtggccgaggattccgacttccccatccacaacctgccctacggcgtcttctcgaccagaggcgacccaagaccgaggataggtgtggccattggcgaccagatcctggacctcagcatcatcaagcacctctttactggtcctgtcctctccaaacaccaggatgtcttcaatcagcctacactcaacagcttcatgggcctgggtcaggctgcctggaaggaggcgagagtgttcttgcagaacttgctgtctgtgagccaagccaggctcagagatgacaccgaacttcggaagtgtgcattcatctcccaggcttctgccacgatgcaccttccagccaccataggagactacacagacttctattcctctcggcagcatgctaccaacgtcggaatcatgttcagggacaaggagaatgcgttgatgccaaattggctgcacttaccagtgggctaccatggccgtgcctcctctgtcgtggtgtctggcaccccaatccgaaggcccatgggacagatgaaacctgatgactctaagcctcccgtatatggtgcctgcaagctcttggacatggagctggaaatggctttttttgtaggccctggaaacagattgggagagccgatccccatttccaaggcccatgagcacatttttggaatggtccttatgaacgactggagtgcacgagacattcagaagtgggagtatgtccctctcgggccattccttgggaagagttttgggaccactgtctctccgtgggtggtgcccatggatgctctcatgccctttgctgtgccaacccgaagcaggaccccaggcccctgccgtatctgtgccatgacgagccctacacatttgacatcaacctctctgttaacctgaaaggagaaggaatgagccaggcggctaccatatgcaagtccaattttaagtacatgtactggacgatgctgcagcagctcactcaccactctgtcaacggctgcaacctgcggccgggggacctcctggcttctgggaccatcagcgggccggagccagaaaacttcggctccatgttggaactgtcgtggaagggaacgaagcccatagacctggggaatggtcagaccaggaagtttctgctggacggggatgaagtcatcataacagggtactgccagggggatggttaccgcatcggctttggccagtgtgctggaaaagtgctgcctgctctcctgccatcatgagattttctctgctcttctggaaacaaagggctcaagcacccctttcaaccctgtgactggggtcctccctcgggctgtaggcctggtccgccattcagtgacaaataaagccattgtgctctgaggcctgcactgccgcagatgcaaaa

SEQ ID NO: 3430 - DNA, 1227 bp, Homo Sapiens
  misc_feature (1183)..(1183): n is a, c, g, or t
tgaggactccctgtcattatggcaaggccaagaagtcggtggacaagaacagcaacgagtaccgggtgcggcgcgagcgcaacaacatcgcggtgcgcaagagccgcgacaaggccaagcagcgcaacgtggagacgcagcagaaggtgctggagctgaccagtgacaatgaccgcctgcgcaagcgggtggaacagctgagccgcgaactggacacgctgcggggcatcttccgccagctgccagagagctccttggtcaaggccatgggcaactgcgcgtgaggcgcgcggctgtgggaccgccctgggccagcctccggcggggacccagggagtggtttggggtcgccggatctcgaggcttgcccgagccgtgcgagccaggactaggagattccggtgcctcctgaaagcctggcctgctccgcgtgtcccctcccttcctctgcgccggacttggtgcgtctaagatgagggggccaggcggtggcttctccctgcgaggaggggagaattcttggggctgagctgggagcccggcaactctagtatttaggataaccttgtgccttggaaatgcaaactcaccgctccaatgcctactgagtagggggagcaaatcgtgccttgtcattttatttggaggtttcctgcctccttcccgaggctacagcagacccccatgagagaaggaggggagcaggcccgtggcaggaggagggctcagggagctgagatcccgacaagcccgccagccccagccgctcctccacgcctgtccttagaaaggggtggaaacatagggacttggggcttggaacctaaggttgttcccctagttctacatgaaggtggagggtctctagttccacgcctctcccacctccctccgcacacaccccaccccagcctgctataggctgcacttccccttgggccggaactcactgcgatgggggtcaccaggtgacatgtgggagcccccaccccgagtcacaccagaaagctaggtcgtgggtcagctctgaggatgtatacccctggtgggaagagggagacctagagatctggctgtggggcgggcatggggggtgaagggccactgggacccctcagccttgtttgtacttgtaatgcccttcagcatttgcctaggaacacgaagcacgatcagttccatnccagaggacccggagttaatgacaaagctttccaaaatattttt

SEQ ID NO: 3431 - DNA, 691 bp, Homo Sapiens
  misc_feature (86)..(86): n is a, c, g, or t
ccccctgtaatatttttaaaactttttagatgagctggatgaaaccttagtacattggagctggagttgtattgagtacagccccnactctgaagccttatattcatgtcttaagtaccattgattgttctgtgaattgttgttagtttcatatttgacattgtagtaatccaccttgcattttagtctttccaaaaaggatattgctaggtatattcttatttctgatttgagtattgaatttacatttttcagaatttcattctttgtcattataatccaaaaacaatgtccacatcagacttggaacttctcacttcaaaaatgaaatacagatttagcagtgttgtacataatgatgtccaagcatttttccacctgtttactgagttttccaaccatttactatgtgttgagattggtgggttttctggctgtttttctgaggtgaatgacttgttacagagcctcagtaagaaatttcaactaaaatcacaaaaacataaagtccaggaaaccaccagaagatggatttttagtgtttttgaaatcttgtatttccttttgatatcatttactcattttaattttacgactgccaacttgttacgggataattatatggatggggttatatggatgcatataatatatggataaggaaatgaagaataaagttaagatttgggtt

SEQ ID NO: 3432 - DNA, 217 bp, Homo Sapiens
tagaacaagcacggaccatcaagaccctgggctgtaggccagggcaaccacagcggcgtggaccgaggatcccagcctgcaggctccccgcagagagcacaggaagaggcagggggcggggtccccagcacttgttacaaacacacgatgcaccttaactcacccaccacgagcaccgtacagactgggggaggggtccgcggtctgagggatcctc

SEQ ID NO: 3433 - DNA, 803 bp, Homo Sapiens
  misc_feature (614)..(634): n is a, c, g, or t
gtggccacttttcgggcaaaaggggtttcaggggccaaaatttttttcgggggaccccttccaggatttctccatggcccgtaattttttccccgtgggccaattctgtaccaatcaagggcctttttcataccactcttcataagaaccccagcatagatttgccctgagacaagtccaagaatagcaggtaccggattcagaatctcacaatgtacaagtgagtaattaacaaaaactggctgctccattaaaaagtaaaaggtcaaccatatcccctcatccatgaaatctagtaacgaaaaacaaaaaacccactataaaatatttcttctgaggctacgatatccatctcgttctgcaaaccacatggcagggttattagaaggtaaatggcaggtggcagtcatagtatctttttaatgtaatacttgtaagatttccttaaaattattttttcacaattacaattatcctatttccacaatagtggcatttcaggttactcttcataactatgggggaggttatagttagatataatgataaccatgaaaacattcttcacagaaatttggttagctacatatggttatttctactgacagaaaccnnnnnnnnnnnnnnnnnnnnncccttcaaattggtactttgtttctccacctaaaggaagagaataaagactaaaataacagcaaaacatagaacagctttcgagaaacgcttaatttctatatacaggcatcagctcaatattttatgatttttctttcccattctaagggagtccttttctttcttac

SEQ ID NO: 3434 - DNA, 229 bp, Homo Sapiens
ggcctttagttaacatccgagtgacgaagccgggttccccagtacagctgtcttttgggtgcggtcattgtgaggaaggggatgagtgagtgtgggtgtggctggaggaggagctagatgccggtggacagtgggcaggtggatttggggaggagaggatcagcagcagcagaagtactcagtgatagggggctggctgggtcaggaatggtgagatgaacatgcaagt

SEQ ID NO: 3435 - DNA, 290 bp, Homo Sapiens
gatttacgtatttcgagctcggtagccttcacgatcagccggagaccccactgcactccagcccagaaaaaaagaaaatgtctgtttgcaaaaatttcattttcctatcaaaaatgcataattacagaatatttagcccagtcctttgagtaaactgcctttgccaattgtgaattaaggctgtgattaaaacagacaattccaaaacaaaaatcccaaatataatccagtgctttaactcatcctgccaaaaaatgttcaaaacagggggtccgctgtcagagggatgc

SEQ ID NO: 3436 - DNA, 518 bp, Homo Sapiens
  misc_feature (63)..(63): n is a, c, g, or t
ctgcatcaggccacaggtcttggctttctccttatcaccatttgctgttatcacggcacacangcaggaatcccaggcccccccgccaagtggttacccaagtcaccactcctgacccaaaaatcaggcatggcattaaaacgttgcaaattcctttactgttatcccccccaccaccaggaccatgtagggtgcagtctttactcactaacccgtttcccgaaaaaggtgctacctccttttccagacagatgagagagggcaggacttcaggctggatccaccactgggctctccctcccccagcctggagcacgggaggggaggtgacggctggtgactgatggatgggtagtgggctgagaagaggggactaggaagggctattccaggctcagccctgctcctgcagctttgccgctgagtgtaggaaaaacaggcatgacagaccaggtgagggtgtgcccagctgggccacggccatgcgtggggtggcccaataaacaccgtggactccc

SEQ ID NO: 3437 - DNA, 258 bp, Homo Sapiens
  misc_feature (163)..(163): n is a, c, g, or t
  misc_feature (198)..(198): n is a, c, g, or t
  misc_feature (220)..(220): n is a, c, g, or t
actctgaggatccctcagacagcggacccctcgggaattatggtggaggcacctcttcacaaggtggcaggagagagaatgagtacccagcgaagggagaaacctcttataaaaccatcagatctcgtgagaactcactcactattacgagaacaggatgganggaaaccatcctcatagattcatgttatctccacncttgtccctctcatgacacgtngggattatgggagctacaattcaagacgagatttgggt

SEQ ID NO: 3438 - DNA, 551 bp, Homo Sapiens
  misc_feature (76)..(88): n is a, c, g, or t
  misc_feature (379)..(388): n is a, c, g, or t
ggaatgtgataagaagtttgtatacatttctggattatagattattatttatcttttgaaccagagctaaatggtnnnnnnnnnnnnntcagtgatgattgttatgttgatctcccacaattaatttatcttttgacaaaggggataaagagtttcagtttagctccttttgattgtatattattttttgcttttttattgtgaaaagaggtaggttttatttgtggagagagagttgaagattagggaaccagtgattttaattatgctactttttcttctaagagataaattgatatatcattcagtgtcatgaaaaacatgaatgttgtacaattttcttcctcaaataaacttatttaaatgtaagtatccttannnnnnnnnnaaaagagcacaatgtaggtgtatttgagtattttcaagaaaagaataaaaacattaatgcagtattaggttaactggatatcaactaagccttgttaacagttaaagtattataactttttttacttctgaaaattaaaaataaaatttatttctgcaatttc

SEQ ID NO: 3439 - DNA, 302 bp, Homo Sapiens
tcagccagcccggccccactttcctgacatgcacactcccaccacttctggtacaccgcctgggacctgtgccccatatagaattgccatagtatcctatcgactgccccgtagtgtcactcctggttaagctgcagcctggtttagggttgcacttccttcccagaccacgcaagacttggaaggaagaggggaagtttcctgatctggctaaagcatgttgagcacctgaaatcacaggatactacaagtttccttgtgtcttatcaccgcacacaactggcttgggggtccgctgtcta

SEQ ID NO: 3440 - DNA, 579 bp, Homo Sapiens
gggagactagcgaacaatacagtcaggatggctaaaggtgaccccaagaaaccaaagggcaagatgtccgcttatgccttctttgtgcagacatgcagagaagaacataagaagaaaaacccagaggtccctgtcaattttgcggaattttccaagaagtgctctgagaggtggaagacgatgtccgggaaagagaaatctaaatttgatgaaatggcaaaggcagataaagtgcgctatgatcgggaaatgaaggattatggaccagctaagggaggcaagaagaagaaggatcctaatgctcccaaaaggccaccgtctggattcttcctgttctgttcagaattccgccccaagatcaaatccacaaaccccggcatctctattggagacgtggcaaaaaagctgggtgagatgtggaataatttaaatgacagtgaaaagcagccttacatcactaaggcggcaaagctgaaggagaagtatgagaaggatgttgctgactataagtcgaaaggaaagtttgatggtgcaaagggtcctgctaaagttgcccggaaaaaggtggaagaggaagat

SEQ ID NO: 3441 - DNA, 1139 bp, Homo Sapiens
taacatttatctatgtattcagaatcacacacaagttacctttacagttcaatttactatatagaaatcattgggttttatatttgcagttaacttttgaactgagattacaatattataacaaaaaactttacattaattcagaactttttagcataccaaattgaaatacataggttcaaatttcagatttatggcaaacagtcttcaaatacaatacagacatttcttaaaagttaccgtatcattcacatgtgatatttgcaactctgagctatttcatatagaacagctctcctgcagatatggcaaagttgatatgccatgaagttcaaggcctgtatagtcaagccaaggactcaaagttgcaccatctttaaaaaggtttggcatttctggaccacaacaatgcacaacatgtaaagaaggtaggaaacagttccccctccttgttaaatggttaaaaaaagttacatggtagcttggaattttgcataaaaccccataatataccttggaaaagtccaagggcaatttgatggcaatggattggggccctatatatatatatttttaatagaacccatgagatttaaatgggcattaatcaaatcaaaaaatattaagcacctactggtttaagagatttaaatttattagagattcatgatcaatttctttccacctcgaaatcaaggtgtaaaaaccagctattaagtgcattccaaacttctcctatgtagcacaggtagaactttctgtccattggcaccaaagtgaagtcacatttcctcttgggagacagaaattccacacctgaacacagagtaagttaggaaaaaatgacccctgttgtttattactattgtgattctgagatctaggatttctaatatactagcagtaaacaaagcaaattcctggcaacaactgtcaggttagtgatgctaactcccttcccccaaccaccataaaattttagtaagaaaagaattaaaagtaatgactaagcagaacaaattggaaataacaagaaactaaggggacagttcaaaccaacaacaaaagatcctaaatttgaaatcactgcaactgaagataataagtgtgcttcaccccaacccccatcccaactctcc

SEQ ID NO: 3442 - DNA, 579 bp, Homo Sapiens
  misc_feature (20)..(20): n is a, c, g, or t
cagacagcggaccccacccncatatatatagagcacttttaggtagtaatttttattgttatacaccaacttagaagtgaatccatgttatgagtttactttggatatatactgtttaaatctgctctgtcactgacatttaaaaatttggttacgttaggaagatcattttaatttccatagtacatgatgctaaaattaaagacactgagtactaaatgaacttcatcctagtaaataattatgaaccaaattattctatatagtttcggccttaagtatactaagagcatacaatataataaaatccagcttctctgggcctttgttttcaatgtgtatttttctaaatctgaaaatacctattcggcagcaagtataacaaaagcaaagacacaaattaaaactattgattattctgtttaaggccagggtttctgagttttagtctgattttaaaaaacctccgtctgtccctctctccctccctccctctcacggtaacagccggagaggcaagtatggtaaggtcgacctttaaacgtttgctggatcagcactgggtggggataccagggg

SEQ ID NO: 3443 - DNA, 743 bp, Homo Sapiens
aacataagacagacattcccagagcggccatttatagacctcaccccaaggaatgcattcagttcccagggtattaatattaatattccttgctaggaaaagaatttagtgatatctctcctacttgcacgtccgtttataggctctctgcaagaagaaaaatatggctctttttgcccgaccccgcaggcagtcagaccttatggttgtcttcccttgttccctaaaaatcgctgttattctgttctttttcaaggtgcactgatttcatattgttcaaacacatgttttacaatcaatttgtacagttaacacaattatcacagtggtcctgaggtgatgtacatcctcagcttacgaatataacaggattaagagattaaagtaaagacaggcataagaaattataaaagcattatttgggaactgataaatgtccatgaaatcttcacaatttatgttcctctgccgtggctccagccagtccctccatttggggtccctgacttcccacaacaagaaataataagaggttaaggtggagaagaagcaaggaagtccactttataaaggggtcaggaaaaagctctctgtggaagcaccatcttagctgagacctaaaggatggtctaatttggggaggtgcagaggaaaatcattccaggctgaagcagcaagtgcaaaggccctgttgtggagaaaggtttgaaagtccaaggaaacaaaggaggccagagtgtctg

SEQ ID NO: 3444 - DNA, 486 bp, Homo Sapiens
  misc_feature (11)..(11): n is a, c, g, or t
ggatgttcacntctgaaaaaaatctaaatgactgaaatgtacagaaataaaaattagcaaacaattattctagggatattttcagattttacttcatttcttgaaatgcgtgtgccatatgcaattgcatttcttgtgccaagaaactaatagaacttatttcactttacctttttttaaaatgtgaatttagttattatagttcaattttatggccttacagatggcttttattttgtttgcagctgacactgcagttcctttcatgcaaaataccataaactgtttgatgaaaatcatgcccctaatggaaactctctagtttttccatataactatcctactgtacatgtttaaacatattttatttttgctccaatggcttaatgtgaaaagctcctgcagataagtggacctgtcatgtggttaatcttgtttaagccaattcattaactgtgtactgatactgatgctatgtttttttta

SEQ ID NO: 3445 - DNA, 654 bp, Homo Sapiens
  misc_feature (567)..(609): n is a, c, g, or t
ggggcaaacgccgggagtagccgaaggggacgccgggaacaggaatttcttcacatggctcctggagaagtgaccatcacagttcgcctcatccgttcctttgaacatcgcaatttcaaacctgtagtgtatcacggagtgaatttggaccaaactgtaaaggaatttatcgtatttctaaagcaagatatccctttaaggaccaacctgccaccaccattcagaaattataaatatgatgcactaaagattattcatcaagcacataaatcaaagacaaatgaacttgtgttgagtttggaagatgacgaaagactcctgctgaaagaagacagcactctgaaagcagctggaatcgccagtgaaactgaaattgcattcttctgtgaagaagattataagaactacaaagctaatcccatttcatcctggtgaaaacatctcgagggcttcctttttgcatacctgtattaagctctttattccactgctgaatttttgaaattgacaaacaaatcttaaaaaaattaatcccaggctatactctttgagctaaaatctggttannnnnnnnnnnnnnnnnnnnnnnnnnnnnnnnnnnnnnnnnnnggtggtggaaaataatatattatgagaaaaacatttgatcttttt

SEQ ID NO: 3446 - DNA, 1177 bp, Homo Sapiens
atgggacccaggtaggacgacagcgtcacggagtcactgccaggaacgtgctaaggaatggagtggcccacggcggccctgcggttgaagggcacccagacctgtgacagccactccaggaactcccgggggtgctccaacctccgcgttttcctgtgctgccaagctcagaagccagaggcgggtttggtagtggctaatgggacaatgtgctgtccagcaaagcacacatggagaagcggccccaaaattcccaccttgatttccatcctgccccttcttctactccacggaggcgctgtctcactacggtcccctccccaaggctcagctgctaagacctgcacctgcttctcgtggcccctgcgtgacagacaagtccattccctccttagctcagaacaccaaatatcaccagactgcctaagagactgtgatgacacctcccggaatgctctacggggtggggttcacctctccttgtccgtgcacccactgcataggccacattactcgtttctgctcacatcccacttgcccggctacaaggcctgcccacggcccttaaacttgctgggcaggtttggagcccatgggaccccgtgggtctctgtccaggagcagcagaggaggctgacaggccctgctccctctgctctgggggtgtctgggagccccagctcacaccctcccaatgcttatatgctgaagctcacagaatgggcttcttgcctgacagcaagtcaaagaatgagtttaatatcaaagtgtaagcttactttccatccccaagccagcctgccccctgccccatttcccatgagcacacttctggggaaggaaaacaggctcctggccttcactctcagcagagctttggagatgccccaggcatgccctgagctccttctgtgtacctgctcccacttctgagccacccgctgcccctccgcactgctggcaaacccagttcctgcctcagccaggtctccttccctggtttccagtcacacagagcccagcagctttctctttcagtcccataagggcagccttgtgtccctggccacacttccacccgccagggtcttcctccccatctttccatccttcctgctgagcttccacagagctcgtttgcaaacagggggattaaagcatcactgcgcattcgaaa

SEQ ID NO: 3447 - DNA, 1004 bp, Homo Sapiens
ggcagagctcttccctcctggttacagctctaaggccctggagccccagctgtcaggtaagatgctggtcctggattatattctggcggtgacccgaagccgtagcagtgacaaagtagtgctggtgtcgaattacacccagactttggatctctttgagaagctgtgccgtgcccgaagtacttatacgtccgcctggatggcacgatgtccattaagaagcgagccaaggttgtagaacgcttcaatagtccatcgagccctgactttgtcttcatgctgagcagcaaagctgggggctgtggcctcaatctcattggggctaaccggctggtcatgtttgaccctgactggaacccagccaatgatgaacaagccatggcccgggtctggcgagatggtcaaaagaagacttgctatatctaccgcctgctgtctgcagggaccattgaggagaagatcttccagcgtcagagccacaagaaggcactgagcagctgtgtggtggatgaggagcaggatgtagagcgccactttctctctgggcgagttgaaggagctgtttatcctggatgaagctagcctcagtgacacacatgacaggttgcactgccgacgttgtgtcaacagccgtcagatccggccaccccctgatggttctgactgcacttcagacctggcagggtggaaccactgcactgataagtgggggctccgggatgaggtactccaggctgcctgggatgctgcctccactgccatcaccttcgtcttccaccagcgttctcatgaggagcagcggggcctccgctgataaccagctggtctgggtgtagctcttagaggaaggagatagggaaaaggggctccttgctccacagggccctgttgaattttgttctctgggagaaaatcatcaagaagggctgcatgatgtttgcccaaaatttattttataagaaaaacttttttggttaaaaaaaagaataaaggtatgaaagggt

SEQ ID NO: 3448 - DNA, 596 bp, Homo Sapiens
ggagataagaagaagaataattttgatgttggtatgcttgccctgttacttatagacagtctttgtcataggcaaacttgaatttgatttaaaatagggctgggaaaaatattcaataactgtaagcccccttttggatgccaaacttagaattttgtacattctctgatgaacaagcatttagatcgtaacatggtaaagcctattaccagccaatgttgttagcatctttgtatgcacatcactgtttgtgcaatatatgaatattttgttgcattgtattcttatataaaaataagtagaaaacataaaattgaaattgctgatgagaagccttgtctcgtgaatgtgatacacttgagacacggatggaactgatcaggagtgccaagtcaaaagcagcagatcttaagccctcactggttgttcctttaacatccaaaatggttggttatatgtaaaagaagaaaatgaaataatctggatgaaacactgggactgtgttatcaaagaatgtctgtagtgatgaggtgaaaattttcattttccagaaacagaactgctcatttataacataaatatattcaacttccaca

SEQ ID NO: 3449 - DNA, 865 bp, Homo Sapiens
ggggagctgcgcctgcgcaactcattggcgccaagatggcgatggagatgaggcttccagtggctcgcaagcctcttagcgagagactgggccgcgacactaagaaacatctagtggtgccgggggatacaatcactacggacacaggattcatgcggggccatggaacgtatatgggagaagagaagctcattgcatctgttgctggctctgtggagagagtaaacaagttgatctgtgtgaaagctttgaaaaccagatacattggtgaagtaggagacatcgtagtgggacgaatcacagaggttcaacagaagaggtggaaggtggagaccaactccaggctggattcggtcttgctgctctcgtccatgaaccttcctggaggagagctgaggagaagatctgcagaagatgagcttgcaatgagaggtttcttacaggaaggggaccttatcagtgctgaggtccaggcagtgttctctgacggagctgtctctttgcacacgaggagcctggaatatggaaaactaagtcagggggttttggtccaggtttccccctccctggtgaaaacgcaaaagaccccctttcatgatttgccatggggtgcctcagtgattctcgggaaacaacggccttcatctggaatttacccaacacctggagcaccaaagaagaaggaaaccggggggccttcatttgccaaacctgggaagccggcctcctcctggctgatccgagaaggggaaaatcccgggcttccggaactggcactcctcttcggttgggaaacctcccaggaatgatgctggtaatgaataccagccatcctggaactgctattgagaacattccccttcca

SEQ ID NO: 3450 - DNA, 814 bp, Homo Sapiens
gggagcccagagtaactgcacgcctttgtgcagctctggagctccaccaactctcggcctgccagttctcaagcgagctaatcttgtcattaatcgatagaagctaacttccgaagttaggacctagttactttgctctcaacatttaaaataatgcagttgctctagtgaatggggcgttaggggcctgtctctgcacctgtctgtccatctgcatgcagtattctcacccatgttgaatgcctgctgcttgtttaccctttggaaaccctggggtgaccaaggtttggaaagccacctgagaccacttcatagcaagggaaggctttaagcagttactagaaagagatggggatttggcccctggctcctccagcctgaatgagctatttaatccactgtccatgttcctcatcagtcaaatccaaagtcaaaggatttgaacctgcatctggaaacgtaaccactcacagcacctgggcccgccaaggttgggaggattgtacactactttcatttaaaggggaaagtttgataatacgggaattaattaatatgaatgagatgcattaataagaacctgagcatgctgagagttgcaatttgtggttttctggtttgattgatttccttttttctaaacccatcaaagtcaaaaaagatgggttttacctttactgacccagctggacataggtaactaagactgtttttaaaaggcctttcctcatgaaaagcttcatgggggctccagaaaacctggatcaccctgggtaaggtgggaattggggcactttatatttttttctaaaac

SEQ ID NO: 3451 - DNA, 1046 bp, Homo Sapiens
gggaggctcccctgtgacagccgcggcaggaagcaggcgggcgctccccggccacaggcctgttgttctcggaagggagaaagcaggacatttccccacgtaactcccagctctgggcctagagtgcgtgcatggcgaagtccccggagaactctaccctggaggagattctggggcagtatcaacggagtctccgggaacatgccagcagaagcattcaccaactgacatgtgccctgaaagaaggcgatgtcactattggagaagatgcaccaaatctttcttttagcaccagtgtgggaaatgaggacgccaggacagcctggcccgaattacaacagagccatgctgttaatcagctcaaagatttgttgcgccaacaagcagataaggaaagtgaagtatctccgtcaagaagaagaaaaatgacccccttgaggtcattagaacatgaggaaaccaatatgcctactatgcacgaccttgttcatactattaatgaccagtctcaatatattcatcatttagaggcagaagttaagttctgcaaggaggaactctctggaatgaaaaatacaaatacaagtagtcgtgcttgacaacgaagggctccagcaacagctaaaatctcaaagacaagaggagacacctgagggacacaaacacttctggatgcatccggaaacatgcacaatacttggattacaacaggtgcaagattcctggggtgggacgaaagcctccaaaggagacccatattccccatgacaaatggcacgaactccggcgcaaaagggcgggcagattctggcggggccggcaccagcgacagaacacctgggacgacacagacagaccagcgcgacgcgtcatgagggcaccaagcggggggacaatagggacggcaaaccccacgccgcacggtcacaaggcaggggcacggacggatcggccggaacgaccagcaggaccacgggcgcggaaccaccacgaggagaccaacacacagagccaacagaaacaccacccgcgacgagcgcaaatgc

SEQ ID NO: 3452 - DNA, 584 bp, Homo Sapiens
gctaagccgtcctaccagcaatctctctttctcctaagaatgtcatgccttctcaagacctgatgaaaggaataagatatttgtgcctttttataatagcatctattacgaaagtaaaattcagttgcttacagttttggccgctttgtagcactattataaacagcccaaatttatggccttggacttactgcatgacacatggcctggttacctgtcatggaatgctgcagtggtggtttgccaagcttctgtggatgtttgaagactttatttttgcagtcttaaccttgggctggacctaagtgtatgtaaaccatatgatgtctgtattgtttatagatgctgacaaaagaaaactagacctttggttttttgttgtaagatttttgttttcatgcctatgctcatagtagatagtttgcaaatgaaagttgatttgccatacttttaaataatattgttttagcttgaatattctataatacacttttatagagtataacatgctaaatcactgttttgttgtaagaaaggtggaaacattttgttaataaaatgctatggttacgaatgtccccccc

SEQ ID NO: 3453 - DNA, 928 bp, Homo Sapiens
gaagaaaggaggatttgaagggggaggattccttggaagaaagaaagttccctatctggcatcatcaccaagtacttccgatggaggaactgactcacctggtactgcgtccccatctcctacaaagactactccatctcctcggcataaaaaaagtgattcttcaggtcaggagtacagcttgtgaaaactcaccaaaatgaatagttgtttcgtaacatttagatgaaagttaaactttactgaatttcagtacattagtttttacactaaaactttacaagataaaattggacttcatttagtatctttttaacagaattacttggaataatgagatacaataatcatatctcttttgacattttggaaatttttttaattttacaagtacatttaacagatcatttataaagcaggagtccattttaacacttaccgactttttttggtttggaaacatattaccacgtcttaataggatggtgcccatataggtgagcatccctttagatcatgggaaccagcagactgcattcctaatcttcattatgcctgagacttgtcttacaatgttacctttaagtgaatcacataattgtctttggaacttggtctcccaacacttattgtgattgcaaagtgtttaccagatatttgatgaggtgctatgtttgtgaaaaacatatcatgtaattcaaaaacactattgatattgaataccagataccactatgtagtaagtcttttaggatgattttaatttagtcgtgcgtcattttctgattctcatcattgggagatcttaaatcttagcaagcattagcaatattaaatgccaaaattccattgaaactttcaagttggagcaattgtctgtgtttgaaaagatgaaataaaaataataatcaagggcaaagctttgagt

SEQ ID NO: 3454 - DNA, 1807 bp, Homo Sapiens
gggtccggaattcccgggatcttcacctcactttaccttctcctccagcacaggaactaggaactacggagagagaagccaagggagaggaggaggaggaaactaacgattccctgcccacccccacacccagcaccaccaacaggtgggcaagcttgccgagaaaacgcagagggcatcctgtgagcagcaaacacatctgagcctggaaaagacgcagagaagtaaaagatcaaagtctgattggcaccggctcccattccggctccagcctccaatccgacccccatttcggctgcagcctcggacctagctccggccctcggtctatccggttgcatcctccctccctgttccggatcttatcttgcgccagcgcctactccaggatcccgtagccagacctcaagccatggctggtcccttctcccgtctgctgtccgcccgcccgggactcaggctcctggctttggccggagcggggtctctagccgctgggtttctgctccgaccggaacctgtacgagctgccagtgaacgacggaggctgtatcccccgagcgctgagtacccagacctccgaaagcacaacaactgcatggccagtcacctgaccccagcagtctatgcacggctctgcgacaagaccacacccactggttggacgctagatcagtgtatccagactggcgtggacaaccctggccaccccttcatcaagactgtgggcatggtggctggagatgaggagacctatgaggtatttgctgacctgtttgaccctgtgatccaagagcgacacaatggatatgacccccggacaatgaagcacaccacggatctagatgccagtaaaatccgttctggctactttgatgagaggtatgtattgtcctctagagtcagaactggccgaagcatccgaggactcagtctgcctccagcttgcactcgagcaaagcgacgagaggtggaaacgtgttgtggtggatgcactgagtgggcctgaagggggacctggctggacgttactataaggctcagtgagatgacaagaggctggaacagcagcagcttattgatgaccactttctgtttgataagcctgtgtccccgttgctgactgcagcaggaatggctcgagactggccagatgctcgtggaatttggcacaacaatgagaagagcttcctgatctgggtgaatgaggaggatcatacacgggtgatctccatggagaagggtggtaacatgaagagagtgtttgaaagattctgccgaggcctcaaagaggtggagagacttatccaagaacgtggctgggagttcatgtggaatgagcgtttgggatacatcttgacctgtccatctaacctgggcactggacttcgggcaggagtgcacatcaaactgcccctgctaagcaaagatagccgcttcccaaagatcctggagaacctaagactccaaaaacgtggtactggaggagtggacactgctgctacaggcggtgtctttgatatttctaatttggaccgactaggcaaatcagaggtggagctggtgcaactggtcatcgatggagtaaactatttgattgattgtgaacggcgtctggagagaggccaggatatccgcatccccacacctgtcatccacaccaagcattaactccccatcgccagctgatgactcaagattcccaggagttctgctcattctaatgatggcccattctacttgctctggacctgcccccgcatcccctgcctccatcctagtaaagactccttgctatgcttgcaaa

SEQ ID NO: 3455 - DNA, 939 bp, Homo Sapiens
ggaaccgaaattgattttcatttccaaaacaaacactggcaccaacatttttactttgggaagacttggcagagtgttagtcatgatctgttacttacgtgttcagtctgttttctcacccccttcttagttaccatctcttttttaagaagaaaaaagaaaagccacagtattatcaaggtctctacacttggactgggggaaaatttgaaattaagcacataacttttgaattagttctttgtttcaatgttgaatgtggcgcagttatgcagatgattaatcaggctgcactgatggaagttttgactttgtccctggtataatttgcattgaaatgctttatgaaataaaaggttctactagaactgatgttagcacattccactgagcaaaactatcagactgacacttgttaaattgcttactggactgaataaactctgttttgtccagttaaaagggttttctctttgttacaagtgttatttgtaaagtcctgtcacattcatggtcgaaactgggttgaaagaattgaaaattgtccaacagatagatagataggaaaccgcctggagtggaggagggttgtatctaagcctccactatcagtcatgttaattcaaggggccacagtggaggaaaataaatccaccaaagtagattatctaattaccatcaaaatgagtcagaaaccaaaaacaacacctccaacagctcttaggagtacaccctgttctgctactaaaatactagactcatttcccctggtggtgagcggggaatgcaggtatacgcatcagaaatatcactccaccttaaacttacgtactaatgatcaccattatttcaacatgaactcctgctggatgtacagttctaacattttataaggcatttgtgttagccactcagtcatctttgggtgctgcctgtgtg

SEQ ID NO: 3456 - DNA, 1107 bp, Homo Sapiens
gggatcccacggcttcacggaacttcatgtagatgacgctccttctgttgattcctacagccgagacaagatgtgatcacaggagactccaaaatctcaaactgggcttgagtaacaccctagataaacatcaggaaccccactgaggctgaagtactgaaactgtggcccatgtgaaaaagaggtgcaagtgcacaaagattcatgcagagcctgctggaacagagggtggtggcggcgggttagtccacacttacacaccagcaggtatgctggggaagggccccccaggtggagtgcctgacatagggctcgctccagaggcgtctgactcagaagctcctgagagaggtgtctacttgaggtggggaggagtactatggttaatgaatacaagaaggtgtttcaggataaataggtccaggagggttaggtcattttggttttgacctattaatacttaacataaatgaagagttacataacagagtcagtctttccaagatgtgttctgtcatcatgagctgagcctattgggctggtgacatccagaatgatcccattcattggctggaggtaggacctagtgccgcagattgttctgggaagctggcagagaagatgatttgcacaatgaagtcaccactaagccactgcttaagtccagtcctcggccttctttttctgctctgtagtccaaaaacatttctttaaaagccagaaaatctgtgaaggtgagcagcatgtcgaatatgtcaccagccacttcatccttatggtgctgtaatgttgtggtgaaggctgccatgttgaactcaggaatccgctgcagcagctgttcttcaatgtatttttctaccaaagaaatgtattcattaaaaataggtgtgtagatgagtttattctcttctgtgtcttcaaactccaggtagtacttgtccatgaaatttctctgtaataactggaactcgtcatccatgataatgtcctctaaatatccaaccacagcatcaaattctgcatcagaggcggaggagaaagacagcgcaaagctctctccttctaaggcgtccatcgcagtcgccccgagtaggctccaaccccgcc

SEQ ID NO: 3457 - DNA, 650 bp, Homo Sapiens
  misc_feature (106)..(114): n is a, c, g, or t
ggggttttaggataaaaatgcactggtgaagcaaatgtagtgccaacagaaggtgattttccagttgtaaatgtcatgcagcatttgaagggactgtgttttcttnnnnnnnnntcacagttacttctaaaccagatttcatttctttcattgttttatgtgccaaaccacgaagtgcattgggcttcaatctctgaacactgtagacccattagaagactgttccgattgttacaaattgtagtgcctgaaaacactcttaagctgattgtcttaacaaaatgaaagttctccaaagacaaaacagaacaattattataacaaaataattatggttgaaatgtctgtggttccttggaaatgctgcgctctttgtgtttttccatcattagtgcagttggaatgaatgtgtataggtcagaggtcttcgtgttcacattttaaaattaggtaaatgacctcatctttcaagcttgaattcatttttaattttaattttattttatacaatgtgtagacagttccctgttctctgcatttagaagtatacacaatataaatctgttaattctgtaagtaatttttataattatgatgtaactctatcttatccttaaaacatttaaaataaaccctttatgtgcaaaaaa

SEQ ID NO: 3458 - DNA, 791 bp, Homo Sapiens
  misc_feature (175)..(223): n is a, c, g, or t
  misc_feature (692)..(700): n is a, c, g, or t
ggactgtacaatgactttattgcatctgggtagctgtaaggcatgaaggatgccaagaagtttaaggaatatgggagaaatagtgtggaaattaagaagaaactaggtctgatattcaaatggacaaactgccagttttgtttcctttcactggccacagttgtttgatgcattnnnnnnnnnnnnnnnnnnnnnnnnnnnnnnnnnnnnnnnnnnnnnnnnngttgtaggcgaatcatttgttcaaagctgttggcctctgcaaaggaaataccagttctgggcaatcagtgttaccgttcaccagttgccgttgagggtttcagagagcctttttctaggcctacatgctttgtgaacaagtccctgtaattgttgtttgtatgtataattcaaagcaccaaaataagaaaagatgtagatttatttcatcatattatacagaccgaactgttgtataaatttatttactgctagtcttaagaactgctttctttcgtttgtttgtttcaatattttccttctctctcaatttttggttgaataaactagattacattcagttggcctaaggtggttgtgctcggagggtttcttgtttcttttccatttttggtttttggatgatatttatttaaatagctttctaagaggtcaaaagacagctacggaagagaaaagaaaaaactctnnnnnnnnncgccctcggcccccctgcgaagaaaccttttccaaaaaacacatttccttttggggccccccgcggggccccccaatatagggggaaaagg

SEQ ID NO: 3459 - DNA, 303 bp, Homo Sapiens
atgttcattgcagcgttattcacaatacccgagatatggaaacaacctaaaaatttttggtgtttaatgacaatgtggttgtgtgtacacaactgaatattattcagctatgaaaacgaaggagatcctgtcatgtgtgacaacgtggatgaacccaaagtcattatgttaagtgaaacgacccaggcacagaaagacagatactgcatgttactcatatgtggatctaaaactgtcacagctcacagaaacagagtaggacagtggtccagggctggggtccgctgtctagggtcgtagaca

SEQ ID NO: 3460 - DNA, 497 bp, Homo Sapiens
gggtacttgcaaaacttgtaaattagcagatgacttttttccattgttttctccagagagaatgtgctatatttttgtatatacaataatatttgcaactgtgaaaaacaagttgtgccatactacatggcacagacacaaaatattatactaatatgttgtacattcggaagaatgtgaatcaatcagtatgtttttagattgtattttgccttacagaaagcctttattgtaagactctgatttccctttggacttcatgtatattgtacagttacagtaaaattcaacctttattttctaattttttcaacatattgtttagtgtaaagaatatttatttgaagttttattattttataaaaaagaatatttattttaagaggcatcttacaaattttgccccttttatgaggatgtgatagttgctgcaaatgaggggttacagatgcatatgtccaatataaaatagaaaatatattaacgtttgaaattaa

SEQ ID NO: 3461 - DNA, 175 bp, Homo Sapiens
ctttgtgctctgaggatccctcagacagcggacccctcctcgggctgtcgtgaggaggagggcgcttcgtccggctgctcgtcaccgcgaaggctccaaagaagtgttgcgcagccgtgctggtataactgagggtgtcctggcgaagcccagcccctggcgccctggtgaccgg

SEQ ID NO: 3462 - DNA, 834 bp, Homo Sapiens
gggggagtctgcaggatggcaccggacccctggttctccacatacgattctacttgtcaaattgcccaagaaattgctgagaaaattcaacaacgaaatcaatatgaaagaaaaggtgaaaaggcaccaaagcttaccgtgacaatcagagctttgttgcagaacctgaaggaaaagatcgcccttttgaaggacttattgctaagagctgtgtcaacacatcagataacacagcttgaaggggaccgaagacagaacctcttggatgatcttgtaactcgagagagactacttctggcatcctttaagaatgagggtgccgaaccagatctaatcaggtccagcctgatgagtgaagaggctaagcgaggagcacccaacccttggctctttgaggagccagaggagaccagaggcttgggttttgatgaaatccggcaacagcagcagaaaattatccaagaacaggatgcaggccttgatgccctttcctctatcataagtcgccaaaaacaaatggggcaggaaattgggaatgaattggatgaaccaaatgagataattgacgaccttgccaacctagtggaggacacagatgaaaaacttcgcaatgaaaccagggggggtaaacatggtggacagaaaagcagccctcttgtgggatgatcatggggattttactgctgcttggggctatccggggtgggtggagtccggcccgacaactggatgggcagtaaaaaaccccccgcagtgacccctgtgcaatggacaaatgcaagccccaccccccttttggggaaccaaaaacccggctctccaaaaaattcccct

SEQ ID NO: 3463 - DNA, 259 bp, Homo Sapiens
tggggctgcgaccttagacagcggacccccacatttcagactcacagtctccaaatatacgcataactccatgttgagtacagattttcaggctaggaaaatacattttcctgttctgaattgttccaaccctaaccaaaatgtcatctctgaagaagctagggttgcctgttttacttctgtgggatctgtgttttcaggaagcaatcagttcctatagtaagtaactttgtggaactcaattacttgcagacgtgca

SEQ ID NO: 3464 - DNA, 1133 bp, Homo Sapiens
  misc_feature (172)..(172): n is a, c, g, or t
  misc_feature (182)..(197): n is a, c, g, or t
  misc_feature (291)..(301): n is a, c, g, or t
  misc_feature (771)..(771): n is a, c, g, or t
atgggggggatcccaccccctattttcggccccggggtttcttttgggaccaaatttggccccatgtttccctttccccggggggccccggccccaaaggaaagtgttgaaaaagttttttgggggcccgagggggggccccccaaaggcttctctcttcgggcgcgcgggnccaacgcccnnnnnnnnnnnnnnnncttcgcggcctgctcgcgcctctcctctgtcgggcgcggggccgggtcttttccctctcgccctctccttttttggaggaagtttattaaattnnnnnnnnnnnctacaaatgagtaattataaaatataatttcactcttttcattatttcccacaaaaatttaaaaataccaatatacagacgagcacaagtgaactggaaaagagctaaaaattgtataaaagacaaatctaaactcaagaatatatgagaagtgacatacaccatacactctcaagtgagttcagaaagccatgttccggtgctgggcaggttttcttttccaggtcagtttttattgccactacacctggaaagctctctaacccaaagttcttatgtgtcaggatcttcctagacctcccttggaaagcatttctcataaaacaactcacaccagacaggctgacttattgtaggcacaaaaatcataaatgcctctcataggccccatggagcttggaaaaaaaagatctgctaatgaaagcattacaaaaacagaaaagtggcacctagtggccacttagcagctnttctttatggcttctagctaatcatagatgtcggcctgtctgcccgtaacattgtgctgggcaagtatgagtctccaattccagggctcagtgatgacccacctgagggggagatacctcttggcagcatgatctgaaactggacactactaaacatggtctgggaactaaatattggctatttcttgtacctgtgccccagattttacggagatccctcaaagactatgacaacaaagacatccttttctgtcgtgacactgtaaataaacactttcctttaaattccatttatttactaaaagtctctattctgtactttcctgtttgtctttgtttccaatagatttctaaatttagcc

SEQ ID NO: 3465 - DNA, 203 bp, Homo Sapiens
ttccttactcacctcccttgtaaccaaagatggtcaggaggttcagttctggccaatgaaatgccagcagaaaattcctgtagcttaaggagagttttttaaaaagggtcaaacttgaccttttgattcttgtcctttcaccctcctgcactcctacttgaaaacatggatgagatgcttggggtccgctgtcagaggtcctc

SEQ ID NO: 3466 - DNA, 341 bp, Homo Sapiens
aaatctagagtcagcaaaccctctgctctgcccccatacctgggtagcagttcctctttgatcccacctctgagtatctgtccagaacctctctccgtgtcccacttttcccgccacttcatcactcccctttcttacctggcttctagctcccagctcccagtccatctgactggtccacgccccattcattttcatttacatccctctccctctgccacactccagctccagaacctcccatgggtccctactgccagcccagccaggccaagcctgtccccacacccccaacacgctgagttagagcaagagcacagatgtgggaggcagcagcaggg

SEQ ID NO: 3467 - DNA, 932 bp, Homo Sapiens
ggctctcgaggatcgccagacagcggaccccctggacttgaactcttgggttttgagtctgaaaaattccagaaaagggattcattggcccatcttggatcatggagctcacacttaggctagtcagcttgtaccctgggggctgtcctgccataggtggggagcaaggggaagatgtgttctccagaagagagctggtggagggcagtgatgagctgtcatcctcatagcaggcccctgcagtcactaaatcatatatgtgatcatgagcttgtgggtgatgtcctcagtctatcctgagtcattcagagaaggttcagctggaagaaactcatggtctatgtgtactacatagaatcaaatcctcttcttcccctgaacacagagagtgattgtggtgagtgaaaagtgagtccacgtggactggaggagttgggcaggtttcacagagtgggggttgtgtaagacagacgtatgagaagacagctcagggcatcatgtatggaatgaactggaaaaagattggagacagagaaactgctgcattacagggtagcagggatgcaaagggagagcccacttgaaaatgattctttatggagattggatgtggagagaggaaggggaaggggtagtgagagaagaggaggaagatttgggtttctagatttgtatgatggtgattcccttaacctgagacaagtaatgtaggtttgggagaaacttggtgactttgactttgatcaggactagagccctgactctgactttgaactggagccctttgaactctagccctgaaaagggtcagggctagagatgaaggttgagaagtcattagataggggagtgtgtattcaaaccaggagtccagaatgagcttgtccagaaaagagtatagactaggaagagagaaggggtacagcaggaca

SEQ ID NO: 3468 - DNA, 207 bp, Homo Sapiens
ggggctgaggatcctagacagcggacccaattctaagtcgctaacccacgagttcccagcagatctgggccctgacaacagaatcagcaccaagaggacttaagtctggaagcctgctcaaggcatcgatccggcaagtgtgtgcatcaaccttcgctagatccaaatgccaataaaagaagagaaagccagggattaaacacgggg

SEQ ID NO: 3469 - DNA, 444 bp, Homo Sapiens
ggcaggctggtctcatgccaacctaggagatgtaccatagcagtatgagcagaattcctcaggaggaacaattagcaaaaactgcagttgcctctcgataggcctgagcagagagaggaacaatagctctcacgtctctcctcatcagattctaactaagcagatgttctcatgcttttttcttcttcctatgttctgtatactgacacctcttctcagtggcatatgaaatatgaaatgtcatgtgttgtgagtttgtataaatataaaggaatatatatacacagtagcaaaagagaagatctcatttacaaatatctatggtgtttccttgttctgtgttgatctgttttattgatacaaactgaattttcttaatgtatcttctatctctattatagtggcaatgatggtatatgcattaaagttcttctgaattgcaaa

SEQ ID NO: 3470 - DNA, 179 bp, Homo Sapiens
gggtcgtctctagagttccctcagacagcggacccctttaatgaaagagatactgcaagactcattcttgggcagtgtaggcaggagagaacgaatacatagtgagaggatagaggattcatgcaataacatcccaaggaggtggatccaaagccagccggggggtccgtgctgtctga

SEQ ID NO: 3471 - DNA, 1515 bp, Homo Sapiens
  misc_feature (944)..(945): n is a, c, g, or t
  misc_feature (1024)..(1024): n is a, c, g, or t
  misc_feature (1180)..(1180): n is a, c, g, or t
  misc_feature (1205)..(1223): n is a, c, g, or t
  misc_feature (1274)..(1274): n is a, c, g, or t
  misc_feature (1320)..(1320): n is a, c, g, or t
  misc_feature (1325)..(1325): n is a, c, g, or t
  misc_feature (1361)..(1361): n is a, c, g, or t
gggcctctctgctctcgcggccgactcgcaagatggcgccgcagaaagacaggaagcccaagaggtcaacctggaggtttaatttggaccttactcatccagtagaagatggaatttttgattctggaaattttgagcaatttctacgggagaaggttaaagtcaatggcaaaactggaaatctcgggaatgttgttcacattgaacgcttcaagaataaaatcacagttgtttctgagaaacagttctctaaaaggtatttgaaataccttaccaagaaataccttaagaagaacaatcttcgtgattggcttcgagtggttgcatctgacaaggagacctacgaacttcgttacttccagattagtcaagatgaagatgaatcagagtcggaggactaggcaaaggctccccttacagggctttgcttattaataaaataaatgaagtatacatgagaaataccaagaaattggcttttagtttatcagtgaataaaaaatattatactcttccacccgagccacaagccagccaaacacgcaggaagaaaaacacccggcggggcgccgcaaataagaaaaacgaacaattcctgccggcgccgccctcggcgccctcaaaaaaccttctgaaaacgcccctttctttggggccctgggggggcaccccgacccacgcaagcggaaaacgtcgggatccacagaccgcgtttccccggtggggcaaacacgtggccgccccagaaaaaaaggagcgcgcgtgtggcaatccgttccacccctgcaacataataataaagccgcccacggcggtggggatgaaaccagcggaaggccgtgggttcctctcgtgaaacaacataatctctccaccagaaagagagagcacactcctgtggacgagggcgggtgccaccctgcaaccacacaggagaaaaacgnnctatcatactcaaccaaccgcggagagcggggtcatgctctctcaacccagccccactcatataatctcgctcgtcgancactatgtacctttctggacgcgtattattgcgccgggcgtcgcgcccataccacgcatactctttgataactaccacaatgcgggatacagcgcgccccccgggatacctcacggggcgtgtgcgggcccaatatattccctctcatttatatanatacccccatcccggcgtgtgtggnnnnnnnnnnnnnnnnnnntggagtagggggggcgattccacgcatatcacgcgtcgcgcgtacgggccncccacggcgaggtgagggtggagacaccccccctgcccaacggttnttgtngcccaccagcgcggcgggcgggaactcacctgcgcnccagaacccggtctgtgagccggcgagcggccgaccatctcggaggaaaatacgacaaaaaacacgcggttcgccccacccactataataagatcgcgtagtgcccaacttagcggaggttgtcccgccgcacaacgataccacttttttttct

SEQ ID NO: 3472 - DNA, 282 bp, Homo Sapiens
atcgctctagagttccctcagacagcggaccccctttacagtcaaattaaagaagatgtcaaaaagcgtgctgtggcagtggatgaagccatttctcaatcaactcagttccatgacaagatagatcagatccttgagagcctggaacgcatcgtggaaggtctgaggcagccaccctctatctctgcagaggttgagaagatcaaggaacagatcagtgaaaataagaatgtgtcagtagacatggaaaagctacagccgttgtatgaaactcttaaaact

SEQ ID NO: 3473 - DNA, 721 bp, Homo Sapiens
gagctcggtaccccttaagttgccaaatcccagtcagaggaacaggacacctcctcctaccacgaggcaaatggcaactctgtaagaagcacttcacggttctcatcttcctccaccagggagggcagagagatgcacaagttctccaggtccacgtacaacgagacctcaagttcccgagaggagagcccagagccctacttcttccgccggaccccagagtcctcagaaagggaagagtccccagaaccacagcgcccaaattgggccaggtccagggactgggaagatgtggaagagtcatccaagtcagacttctctgaatttggagccaagaggaagttcacccagagctttatgaggtctgaagaagagggagagaaagagaggacagaaaacagagaagaagggaggtttgcatctggacggcggtcccagtatcggagaagcactgacagggaggaagaggaagaaatggacgatgaagccatcattgctgcttggagacgccggcaagaagaaaccaggaccaagctgcagaaaaggagggaggactgagctggggaaaatctgagaacactgaaagaaaccactcacgttagcatagggctcagggcacacgttgccaccactcatcgcaggatgaggatacagagaggatcttccagaggggcagagccaaaatgagaggtaccagcattgggcaacttcagggaccgcc

SEQ ID NO: 3474 - DNA, 279 bp, Homo Sapiens
atcagccactatgcccggatgggatcatatgttccacacatgtttgttcaataagcatggactgcaaccacctacatgaatattcatagctcctcctgtagcctgttgaatatgtatgtttagccaacctcttcagcataaagctcctgcccaaacccctcctgctcctagatgtctgtctctggtgttaaccagaggctgctcttcccaggctgctggatggctaccttgcaggctgtcacccttaacaagaaataaagtgtcctttgcaaatgcata

SEQ ID NO: 3475 - DNA, 1157 bp, Homo Sapiens
  misc_feature (353)..(395): n is a, c, g, or t
  misc_feature (502)..(573): n is a, c, g, or t
  misc_feature (728)..(728): n is a, c, g, or t
  misc_feature (1111)..(1111): n is a, c, g, or t
  misc_feature (1115)..(1115): n is a, c, g, or t
gggttcttggttataaaaatgttaattcagaattagtttaatgccttaattaaactaattaatagctttggacacttaaaagagctctaaatttgcttgtacataaaggcttaatttgttttccttgttagggtcaagggtgtcctccactctttaacagctgctggacagacacattagagcagctgtttgttattgataataaaatattataaacctaggaaaaaaaacaaacaaacgcatcaaaccacaaaataaacccgtccaccatccgcatcccgcaaacactccttcacacccacgcattccggcctctgataccctattcgcgccacgcgaccccagcccgtacnnnnnnnnnnnnnnnnnnnnnnnnnnnnnnnnnnnnnnnnnnntcggcttccctatcacaacccccccacgcccctccgcttcttcccctctccgcgaccatctccccgtccttgccatacccaccgcagcttgcccgcgcgcgttatgnnnnnnnnnnnnnnnnnnnnnnnnnnnnnnnnnnnnnnnnnnnnnnnnnnnnnnnnnnnnnnnnnnnnnnnnttgacgaatttccccgaccgctccccccctcgcgccctattctctcctgtctcgtattgcgcatacccgttttccgctacgacctcgccgcgcccgccccacattccctattctcccgccgcgttcggtttatcgccctttccatccccgttaantccctgcccgcgcgcccgccctcttgtttgaccgccgcgccctccaccgccttatccgcgcccgccctattcatcacccatttataccctcatgccacgctgttcgtaccgcgcgcatcctctttatctccccctatccccaccccttctctttgtcccgccctacatgtgccaccaatctcaccttcctctggctgtcccgcccctatataaaccactctgccaagcgctctcgtttcccgcttacgcggcgttattccataccgccacgcggcgctatgtctccgcctatatttacctatttaccgcttcacctctgttgatacgccccgtgtcgtgcgccggatatcccaccccgtactctaaccgccccgcctccctgnctancgcccgcatatttttcccctctttccgccgccctgttgtccc

SEQ ID NO: 3476 - DNA, 1160 bp, Homo Sapiens
  misc_feature (1026)..(1026): n is a, c, g, or t
  misc_feature (1079)..(1079): n is a, c, g, or t
aatgaaggggaaagactaactgtctaacccaattgaaaatcaaatgatgaccaaacttcaattgtagtatttgtgctgattgcttggatactgtttcttcagaaactatgctcaagtcacagtttgtccctaaccacatcctaccaccacatcctgctgggctaaaatcccaaaaagtaataagagacgcattcaactttatgagaggaaagcaaaacctaatctttcaggtggtgaggtccacccagtatggagctcaaaggtgccattgttctgctcatgtttataaagggagctgccatgtttctctcaacgcagagttgggagcaactccagagcctccttcaagatgctgctggtcctgctctcagtggtccttctggctctgagctcagctcagagcacagataatgatgtgaactatgaagactttactttcaccataccagatgtagaggactcaagtcagagaccagatcagggaccccagagacctcctcctgaaggactcctacctagaccccctggtgatagtggtaaccaagatgatggtcctcagcagagaccaccaaaaccaggaggccatcaccgccatcctcccccacctccttttcaaaatcagcaacgaccaccccaacgaggacaccgtcaactctctctaccccgatttccttctgtcagcctgcaggaagcatcatcattcttccggagggacagaccagcaagacctccccaggagcaaccactctggtaatctagaattcagtggcagaaaataaataagaagataacttccttcacaaagccatgacattgaaataatgtggtcataactcctttcttcagtatacccataaaatattaatagcagtgcgaaaaaagacaaaccccaatagcccaccaaagccccaaagaatcgcccgtccgtcctgaacacccggcccgggtctcgagcacgacgaaggcgcgccgcaaaacacctccgcctgcggtattcagtcgaacacgcgaaataaagaccggcgnccggaccatccaaagaagtcgggtgggggcgcgcccgcttcgcgcgcgcccanttggaagagaaaagagggtcttgttacgtaaaacacgactttttttcgcccctttcttgtgacccgcccccgcggcctccc

SEQ ID NO: 3477 - DNA, 865 bp, Homo Sapiens
  misc_feature (807)..(807): n is a, c, g, or t
ggcagcagtactaccaggccctgagcagcagctccatcatgaacaaggaggggctcaacagcgtgattaaagccacacaatacaagcctgtgcccgacgaagaaccaaattgaacagacgtataggaaacgctggaacggataaagaacaacgacccaaaacttgaagaagttaacctcaataatatccggaatatccccatccccaccctcaaggcatatgcagaagccctgaaagaaaactcatatgtgaagaagttcagcatcgtggggacacggagtaatgaccccgtggcgtatgcccttgctgagatgctcaaggagaacaaggtgttgaagacactgaatgtggaatccaacttcatttctggagctgggattctgcgcctggtagaagccctcccatacaacacttctctggaggaaatgaaaattgacaaccatagccagcccctgggcaacaaagtggaaatggagattgtgagcatgttggaaaaaaacgcaacacttctcaaattcggctaccactttacccagcaaggaccccggcttcgggcagccaacgcaatgatgaacaacaatgaccttgtgaaggaaaaggaggctttggcggacctgaagtggggaccatcatttcccaaatggccggaaatgggagtcctatggggggggccgagggaaatccccatgccctttcgaactgggatggggtctcctattggaaggaaacttggggcctctggcaggggggaaaaacccttaaaggggcgaacattggctttggccggccactggaagaacctctttnttttggcggggatcgaagttgtccctttttaatgcccccttaaagggggtgttttaat

SEQ ID NO: 3478 - DNA, 1238 bp, Homo Sapiens
  misc_feature (155)..(164): n is a, c, g, or t
  misc_feature (728)..(736): n is a, c, g, or t
tcctctacctatcatggtttctgcagctatgcatgtatttctgttttatagctgctttatagctacttcagactccagatatgctttaatgtgtataactgcatccacacgcagcagaatactcttacaatagcaactggggaaagagatctggnnnnnnnnnntacatgagtaccaggaaacaaacatggcccagtaaaatatgaggcaaaaatgcctacaatgagatgcgtttttcatttaagatttctttcccagggttgtattttctttttttaaaccagttctggtcattagaatgtatctgacagtgctctggaacaactgtgattatagcaaagttattgtttttaaaaatgttatttatacctgttacattcacttctcaccctctaaatactgatgacagatgtcaaagaggcaaaaaccagcacaaatgggaagaccataaaaatgagtatcaccttgtgctttcagatacatttaagcatttcagtgtacaatagtcctttcatttcacatttttagtaagatactgatgcagtgcagcaaatatgcaaagcatcttctttcacacagtccgtgcacgacatctaatttttgtttaagttctgagataaaaatgatttaaaaaaatccaggatgaacaagtttcaaaatgcatagtgttctgtgcatgagtccattttctttaaactctgaaagaataaagtggtaagaacacaagnnnnnnnnnctgctgctgcattctctgatcttctccattttgctggtcagtactctactctggcatataaggacggaggtgatcctctatggtgccaactgcccagtgggtgagctgttcctgtggcaggtagaggcagatgctgcataacttgaagattgtagctttgttttttggagtctgcaagtgctgtctgtcaatgaagagaaacactgactggttaggattgttgacaacgattccagtcttgtccttgcggctcagtacatgcagaaactgtttttcatagtcaccatgatgaaactcaaatttggcctgaacaggcctaaaaggctcatcagattctttccacctagaaaacaggagacagacgattttttcaatatcattctgaggccaaagaatgaaatccatctcctgagtacagccaattacatcccttctcatagactgatatcgaggagcatggagctgtaccacatccttctgtaaaagctctagggaacttttc

SEQ ID NO: 3479 - DNA, 797 bp, Homo Sapiens
gggcttttttttccaaaatggcagcctccagtcgcgcacaagtgttagctctgtaccgggcgatgctgagagagagcaagcgtttcagcgcctacaattacagaacatatgctgtcaggaggataagagatgccttcagagaaaataaaaatgtaaaggatcctgtagaaattcaaaccctagtgaataaagccaagagagaccttggagtaattcgtcgacaggtccacattggccaactgtattcaactgacaagctgatcattgagaatcgagacatgcccaggacctagcaagccggggaccagccaccagtggcggccagggaccaccttcagcatccactctctgtttgagatgggggctcccaaaaccagcttacaatagccttttgcgctgcctgtcctgtgggagctgataaaccaagtcacatttgcattctgttgcaggcttagtgaaaaaggactgctgtctttccttggttcaagtgttagaatggagagctggagttcgttcagaatagtgctgtgtgttaccacgtctcccctgcaccccattcctaccttgtagctcatgaccattgtgtatagcatttctacactttgtttcttggtccttggcaataaaaagaatgatctcccctgagccctttgaccccaggataaaccccctcccaatttaatgcataattccttttccctactgaatacaagggccctggaaaaaggggctggtttgggggggcccctcccgggggaaggggtttccaacttccttggaaaacccaagaaacctgg

SEQ ID NO: 3480 - DNA, 674 bp, Homo Sapiens
  misc_feature (53)..(54): n is a, c, g, or t
  misc_feature (59)..(59): n is a, c, g, or t
  misc_feature (62)..(71): n is a, c, g, or t
  misc_feature (73)..(74): n is a, c, g, or t
  misc_feature (76)..(86): n is a, c, g, or t
  misc_feature (89)..(91): n is a, c, g, or t
  misc_feature (93)..(143): n is a, c, g, or t
  misc_feature (145)..(152): n is a, c, g, or t
  misc_feature (311)..(323): n is a, c, g, or t
cacaccaattttaaattacttttttggaaagctttcccaaagagaatggtttnnaaacnttnnnnnnnnnncnnannnnnnnnnnncannntnnnnnnnnnnnnnnnnnnnnnnnnnnnnnnnnnnnnnnnnnnnnnnnnnnncnnnnnnnnttgaaattaaatacccaactttataaatacggtctgatacaaaccagaaaatgaccctttgattatgaagctacttggtgttcaggcaaaaccagaaagaatcaagaagtcaatccatccaaagccagaaggttctcacttcctactttgtgttccacnnnnnnnnnnnnncaaaggaaatgaactggcatatacgaatacaaacacgaaaacatcctgctagggaatggtaattttctgatgatatctgtgttcagaagggactgaaatttatacatttacctctttgaactcagaaagtatcagaggactgcaacataaaaccgccccatacaagagggccccggctcgaagacaagggtcttgccccacgctcgcctccctcccagctttgccgggaacgccgtcccactcaggggttcaatgcagaaacaccctcctaagggaaaacgggacgccactccctacccaggagacgcccccacaggctgggagcttctattcgaagcccatttctaagga

SEQ ID NO: 3481 - DNA, 1172 bp, Homo Sapiens
tatttattgtttgaccaagaagatttacttcgtcgattcccagatcttaaccgacttgccaagaagtttcaaagacaagcagcaaacttacaagattgttaccgactctatcagggtataaatcaactacctaatgttatacaggctctggaaaaacatgaaggaaaacaccagaaattattgttggcagtttttgtgactcctcttactgatcttcgttctgacttctccaagtttcaggaaatgatagaaacaactttagatatggatcaggtggaaaaccatgaattccttgtaaaaccttcatttgatcctaatctcagtgaattaagagaaataatgaatgacttggaaaagaagatgcagtcaacattaataagtgcagccagagatcttggcttggaccctggcaaacagattaaactggattccagtgcacagtttggatattactttcgtgtaacctgtaaggaagaaaaagtccttcgtaacaataaaaactttagtactgtagatatccagaagaatggtgttaaatttaccaacagcaaattgacttctttaaatgaagagtataccaaaaataaaacagaatatgaagaagcccaggatgccattgttaaagaaattgtcaatatttcttcaggctatgtagaaccaatgcagacactcaatgatgtgttagctcagctagatgctgttgtcagctttgctcacgtgtcaaatggagcacctgttccatatgtacgaccagccattttggagaaaggacaaggaagaattatattaaaagcatccaggcatgcttgtgttgaagttcaagatgaaattgcatgtattcctaatgacgtatactttgaaaaagataaacagatgttccacatcattactggccccaatatgggaggtgaatcaacatatattcgacaaactggggtgaaagtactcctggcccaaattgggtgttttgtgccctgtggagtcagcaaaagtgtcccatgtgggactgcatcttaaccccaatagggggctggtgaccattcaattggaaagggatcctcccccttcctggggctgaaataggttgggaaaactggccttctaatccctccaaggggttggcaaccccaaggaatttccctttaaataaatcccctaaaaatggaaattga

SEQ ID NO: 3482 - DNA, 511 bp, Homo Sapiens
aaaaccgtgcccttgttcactgccaacacaacatctgggtggacatgaactcattacaacaaattcttatgtggatgttgtaagaagtcactcaatgtctgtggatttaataagtcacttcacaccacagaaaatatttaataaatccaaaaaaaggaaagaagaatataacgacagaagagcttctgtctcagttctctgaaactgagtcccctataggaaactggtcccaaagttctcgaggggtcattgaagaaacttcggtttgctaatttttttcatccttttagtgttcaaaagttctagaaagactcctcgctgttttcagtttttaaacagtcaaatctccatctcccccagaaggtaacagtctggtgcagatccataaaaacgtgggaggaaggcgcgctggggagaggcctgtccctcttggaaggggccccacctctacatccgcaggaagagaaggaaccaaacagggctccagcacctctctcctgcaaacgagctc

SEQ ID NO: 3483 - DNA, 799 bp, Homo Sapiens
gggggggcggaagaggcacgtgcgctgctgaatggagctggtcgctggttgctacgagcaggtcctctttgggttcgctgtacacccggagcccgaggcttgcggcgaccacgagcaatggactcttgtggctgacttcactcaccatgctcacactgcctccttgtcagcagtagctgtaaatagtcgttttgtggtcactgggagcaaagatgaaacaattcacatttatgacatgaaaaagaagattgagcatggggctctagtgcatcacagtggtacaataacttgcctgaaattctatggcaacaggcatttaatcagtgaaacggaaaatgaactcatctgtatctgggatgcaaaaaaatgggaatgcctcaagtcaattaaagctcacaaaagacaggtgaccttcctttcaattcacccatctggcaagttggccctgtcggttggtacagataaaactttaagaacgtggaatcttgtagaaggaagatcagcattcataaaaaatataaaacaaaatgctcacatagtagaatggtcccccagaggagagcagtatgtagttatcatacagaataaaatagacatctatcagcttgacactgcatccattaggggcaccatcacaaatgaaaagagaatttcctctgttaaaatttctttcaaagtctgtcccttgcaggggctggagatgaagaaagttataaaggttttttgactggggaattccctaaatgggccctcttgccaaattttaaaggcttcatgaaaaaccggggttaaaagggat

SEQ ID NO: 3484 - DNA, 540 bp, Homo Sapiens
atgccgtctgggtctgggacattcagaagctgaggctgttcgcggtgctcgagcagctgtccccagtgcgcgcgtttcagtgggacccgcagcagccgcggctggccatctgcacgggaggcagcaggctctacctgtggtccccagcgggctgcatgtcggtgcaggtgcctggggaaggcgactttgcagtgctctctctgtgctggcatttaagcggagactcgatggccctcctcagcaaggatcacttctgcctctgcttcctggagacagaggcagtggtcggcacagcctgcagacagctgggcggccacacgtagcagcggtgcactaacgtgtgcagaaacagggctactctgtgtttccagtgtgggaaaaaacacagcttcaccaggaggttctccactgtggtggtctggattcagtgattgattctatttttctatagcaaagcatttttgtaaatatgtatggtataaaactgtagttttattatttaaaataaatacttgctgatttataacaacaacaacaaaa

SEQ ID NO: 3485 - DNA, 907 bp, Homo Sapiens
  misc_feature (354)..(388): n is a, c, g, or t
  misc_feature (730)..(730): n is a, c, g, or t
ttccagaaagggacaaattaaaggatgaaccaaagattaagctgctcaagaagccagaaaaaggagatgaaaaagaattggacaaaagagaaaaagccaagaaattggacaaagagaatctcagtgatgaaagagccagtgggcaaagttgtacattgcccaagcgttctgatagcgaacttaaagatgaaaaaccaaagagacctgaagatgagagcggcagagactatagggagagggaacgggaatatgaacgagatcaggagcgcatacttcgagaaagagagaggctgaagcggcaagaagaagagcgccgtaggcagaaggagcgctatgagaaagagaagacttttnnnnnnnnnnnnnnnnnnnnnnnnnnnnnnnnnnncacacttcgggataaaggaaagaaggctgaaagtacagaatcaataggcagctcagaaaaaactgaaaagaaagaagaagtggtcaagagagatcgaataagaaacaaagatcgtccagcgatgcagctttaccaaccaggagctcgaagccgaaatcgactctgtcccccctgatgacagcaccaagtctggagattcagcagcagaaaggaagcaggaaagtggtattaccccatagaaaagaaagaggagaggagtgataagtccagatggcctttagtgtcctgactgtctaggcagccaaagagcacaccgttaagcaatccagaaggtgccttcanggccaaagaatatgagagaaagggaagccgctggtgctggtggggttacacctgcagagggagtaaagtcttgtgggcaaagcagggaatctgattcaaagggttcaaaaattgggaagatacaattttcctttggcttttggcaatttcctaccaatttaatttttagaaggggcc

SEQ ID NO: 3486 - DNA, 187 bp, Homo Sapiens
agtgtaaaacgacggccagtgcatggtcatagctgttagtgtaaaacgacggccagtgcatggtcatagctgttagtgtaaaacgacggccagtgcatggtcatagctgttagtgtaaaacgacggccagtgcattgtcatagctgttagtgtaaaacgacggccagtgcatggtcatagctgttag

SEQ ID NO: 3487 - DNA, 326 bp, Homo Sapiens
cttaagatggacacagctgactggacccccatcctgcctcacccatgggtgctgcaccccagacccatcctgccacttctatgtctctggaccacaggatggtggtggcattgcaggttggcaagtgggctgatggggtccgccctcctcactgctgagctcctcacctggacagtctcctggacgaggagtttccagctgctggctggagtctcaggccaaattgcagagggtcctccagggtcctgaagagcactggactaagagtctagtggttccagggccctgaccagtaggtgctcaataaatgtttgttgttgaatgaa

SEQ ID NO: 3488 - DNA, 406 bp, Homo Sapiens
ttccccgcctgctctgtggggcacctgggccagggctgggccagagcccggacgcttcccagtgccatggtgcctcctgctgacttcaattcccacaggcagacctggcgcctgggaaccaagaggggaggggcatgggcaccagttccggaaggagccacaggcaccaggcagagaaactgtccagggtatttccaagtgacaggccagggtgggtggggcaaagggaaagagctctgaggaccccctacccgggttctagggttctggggttggaaggggcatcagggtcctggtctgggacccacccccaccaggccttgctatgccaagaggactgcaggactttcctgaagtagaaaccactgagggcagatcctgatgcggggtccgctgtctgagggtc

SEQ ID NO: 3489 - DNA, 160 bp, Homo Sapiens
tgactctgaggatccctcagacagcggacccccaacaacaaaaatcagaaacagaagaaaattaaaaaaccaccctgccactaaattgagtaatttccagaatgcagtatccctatatttctacagcaggtcagtgaagatggctataaacagagtccag

SEQ ID NO: 3490 - DNA, 413 bp, Homo Sapiens
gcccttggccacatgccccatcccaggaccgcctagttgtgagagaagcccccgtgggagaaggcagggaggtcgggggcacaggcagcagcctggggcaggcaagctagggggttgacctcgcaggccccagcatactggtcccctcggaagtagatggagtcggcagagtagaaggaggggtcttcgtcaaagaagttatagggtcggaggaagaagcccacgccgttccccacagtcactgtgttaggaatgtcctctgcatgtgggatatgcagaaaaccagctgtcacccaggccaccaaatcctttccagcaatggctctcattgttgatgaagtcactgaaatccccgtgcggctccaggtcatttctgcattgtaacctgctcctactggctcctcctcctccct

SEQ ID NO: 3491 - DNA, 718 bp, Homo Sapiens
tgggcttccaacagggccacggccatgtcggatggcagcaggtctttcttcagggcattgtagatactcagcttctgccccacctcctccagccatacacccgcgatgacgttggcaccccggagagcccggtccgaacagtgtccacctcggctacgtctcgcacagagacgctcacctcgctgcagctgctggtagagctcgcggtcgatgaccctgctctccagcagctcggcggctggcaccaggctgcgcaggccctcaaagcaaagccggcccttctgctcctgctcctccaccaccgtgatgatgatcttgatgatcttctccactgtgatccggcccgtgcggaactgccgcagcaggtcccgccgctgctctgccgtgaagtattccgagttgatgatctcccaaatggtcaccgtcttgccctggaacttgccgaacggcgcagacacggtggccttctcaaagacgtcccgggcctcggagtcagtgtagaccagctccccgcccttggcagccttatccgtgagtggcagaaggcacaggcccgtctcggggtcctccacgcagcgctccagtagctgcaggtacgtgaggttctcgtgcgtgttggggtcaaagaagcccttggtgtcgtcgctggggtccgccaggacgcggttcatctcctcgtcgaagtagccgtccgtagccgatctgaggtaccgactac

SEQ ID NO: 3492 - DNA, 1205 bp, Homo Sapiens
  misc_feature (725)..(725): n is a, c, g, or t
caccttgtttggtctcccatccaatggattgtgtccacatcgtctattgatgatgtcgcgaataagatgcttttggcccgtaatatgttgttagaatactgattttgtcaagcagggtaaccaagtaaacacatgtacataaaaagtgctacttacatattctgcctctccaagattctgatagaagtaaggattaggttcagattctcccactccttgaaaatcttcaacattaatgagctggaagtcatacagtaagccagcatttgctgtactaaactctggcaagagctgcacatggggtaagtttcctagattcttgtatcgccagttgtagaggttgcacaagcttgctctggctctcccttgagcatcaaggtcaacagtcggaactccaacgcgaacaaagcgagtgaagagagactgctccatgtttgagtacttttgaaaggccatgttcttaataactggaggtaactggtgatgatcgccaatcataatccatcgttttagtcggctaaatccatcctgaggattctgtagaagaagagggataaaagtttctatctccagaatctgagcagcctcttccatcaaaatgttgtcatacttgaaacctagcttgaccaagtcatgtcgttttaaggcagcatgagtacaggtcatagcaataattttggcttctttcactaaaaggtatttagatactgtccagtccacttcgnaagcaattcagaggctctgaattcctcaagctgcgtaaagattttcttaatatgccatgaaacatccttcagcaatttccatgtcttcttcataagatcttcctttaaaaatgggttgaggagcatttgcaaagtatgcatggaaacgggaagaaagtggatgacttccgtaacagtcgtggacaatgtactacctttatttttcactatagctgatatactcttcccagcgagacattacctggtataagaagaaatagcctgcagtttcacaggtatatgaggcatctcctggaacccctagactcttttgcaatcgtttgacttcttctaaaagttctattcttcgagccagaacataattaactcttccatacctgctgaaatctttctctgtctccagctcttcttctccatgaccaagacgcagtaggtggcgctcatcaatgtctaatgccatgattttctcaaacaactggt

SEQ ID NO: 3493 - DNA, 1362 bp, Homo Sapiens
  misc_feature (807)..(821): n is a, c, g, or t
ggggaaattcaaaaacagcaacgggtggcagaagctgtgggtggtgttcacaaacttctgcctgttcttctacaaatcacaccaggacaatcatccccttgccagcctgcctctgctcggctactcgctcaccatcccctctgagtccgagaacatccagaaagactacgtgttcaagctgcacttcaagtcccacgtctactacttcagggcggaaagcgagtacacgttcgaaaggtggatggaagtgatccgcagtgccaccagctctgcctcgcgaccccacgtgttgagtcacaaagagtctcttgtgtattgatggccggacacactcgtttccgcagtggctgctttcctggaagacgtttcctttcttctgtattaatgaagcctggtaaaattaacacctgtctgaaaatcaaaaacatggcttcccagcagctctcctgtctccacagccgcgttttttaaccccgacctctcagcgtctgaatgaacagcgctcccacctccagtcctggcatccgctgggggcgctgttctttagctagtgccagtattaaaacattgtcattacgagagtgccaaatgacatcttccctccaccctgcccctgaaaaacagtacacacacatccgttcaacacaagacagggcaagtgtttttcttcctaaaaaaagttctttcttttattattttcacctattggctgctgcattttacgaagtggacttcccggtgtttgtttgtttgtttgcaatacactcagtgcagccttaagcaaatgagatcattttcagatttcannnnnnnnnnnnnnncagtctttctacttttgtaataataggaagttagtaggactcacttctctgattaataagcaatttgcagcacacagcgttccactgcggggtttcacgctcacctgaaaacacctgttcccaacctacttcttggtgcaagttgaccaaatcgttttaagtggtaactctttccaaccgtagcagggttgttttctgttaagcaaagccgagatccagtgcaatacctggactgtcaccgtcctgtgagtggtgtacacaatggggaagataataagcccgtggtgtttttgctgtctgtctgtgtcacaagcatgaaaacccgtgtgtcattgatcagcacccatttgtggtatgttcccgtgaatgagcggtttagttgagccctgcttggcctgcagaagcacctatgaaaaatccatgggtaccgtaggtcccccgggccaccctgtcccgttatttcccttatatccctccatggccaaactgcggggttttggaaaacctgccgccattttctcctaggtaagcaaatatatct

SEQ ID NO: 3494 - DNA, 623 bp, Homo Sapiens
caagatattctacttggtgccggcagcgttcatcatcaaatatctgtggagatttcttgtcattgggtttgatgcaacgaacgtaatatggttcctttgatgcaaggttgtctactagagcaatcatagaattcttaaacaaggtagcagcagtcagaggtcgcttggtcacctctgtaatgctcagtttgccttcaggccacatattcttgagcacaggatttgaactgttatacataaggcgcttgaaatcttgaaataaagtatctttatttttgtcaataaaaccaatgacagaatagactacatcgcctgcataatgtcgaattcgaaaatctcgatcaaactccagaattttgtctgaggcacagagctttcggctggaaaaatgggcgtgtttgcccaatttactgttaagtgcttcaagaaacatttcatcggtgactttgccgacattcatgcaagcatcatcaaggattgcaatgatccctttgtgctgttgctccacgaggtcaacaatgatctgattgttgaagtagtcaatatgtttccaggggatcccttcccgctggtattcctcttgttcttgcttcagaaccagctgaataaatagctgctgcagt

SEQ ID NO: 3495 - DNA, 428 bp, Homo Sapiens
caatgtaataactacagttttttacaaattggaacagctttggtgtgtcgtaatcaagggttttgtttgtttgtttgtttcaaataagccatctgattgtggtgactggggcccatgtccaagacaattcctggcatattctgtcaccctcccgtggggcgatcactgtgtggggaccccattccccagttaaagtgtgtctctgtaccttacaacagcgattcaggacccaagtgtgaacaacactcagcccgccctctggagcgtgtgctgtctttagggctctacccaaagtcactgtaacagttaagtgtgtcattaacctttctgtctctttgcgccataaaaaaatgctcaaagttttagatgtagccactgtatgttgtacaaacgttggcgacatgtaaaataaaagtcataaaatgcta

SEQ ID NO: 3496 - DNA, 608 bp, Homo Sapiens
  misc_feature (284)..(284): n is a, c, g, or t
  misc_feature (286)..(286): n is a, c, g, or t
  misc_feature (289)..(289): n is a, c, g, or t
  misc_feature (291)..(292): n is a, c, g, or t
  misc_feature (396)..(396): n is a, c, g, or t
ccccatagtgcggcagcgattacaatttatcttgcaatttttagtgatcacctatggcctcgggaagaaaaaccttatagactcattaatttaacagtgacagaacgacaggcagtgcccataagcaaacaacacacagtctgaattcaaatctgaataacagctcaaacactactaggttctacacagagttaaactgagtatctgctatgacttttcattgttctcacttcatgacaagcaggagagcttctggaagggaagcccgttatgctttataaacntnggntnnggtttcaatgtgtttaacatgtaaaattacatgtaatttttggtgatcctggaagtagcaacacaaattaatggagattacaaagccccctccactgaattccnttttatatagtttgggtttcagcctctggtctataactcctattacactactggggcaaatcgctttctgccctttccaatgtcaaaaataagcctgccaaattagaatgatttacaattggcaggctgaacctttactataagcaagataaaaattgtctctaactacattatatagtcataatgtcagctgacatgataatagaattaaa

SEQ ID NO: 3497 - DNA, 1341 bp, Homo Sapiens
  misc_feature (191)..(191): n is a, c, g, or t
  misc_feature (233)..(233): n is a, c, g, or t
  misc_feature (393)..(393): n is a, c, g, or t
  misc_feature (461)..(461): n is a, c, g, or t
  misc_feature (778)..(793): n is a, c, g, or t
  misc_feature (809)..(947): n is a, c, g, or t
  misc_feature (1012)..(1028): n is a, c, g, or t
cccaccgcctccgcgcggtggagggaggtgttcctcgcccgcacctgtctcccttgcgcgttattatacataagcgggggccccccgagtatggtgtgcgaccccacctcgtgttgtcgtgccgacccggcctgtttgtgtctgcccgcgtgagggggcgcagagttttctattgttttttcccgcacgcngagggcggaccacaaggcgcgggagggtgtagagaggtaccnccggcgctggggagagaacagtcgagaggttgtctccgccacacgcgccgccccgttgctgttccggagtgagggtctctccttgctacgtgcgtcgcccacgcaaggaagacgtttcttggtttgagagtatatgttcgcccgccgcccctccgtctcncacaccgggtaatgttccaccgcgaggggcggtgggcgcgccgccccctttttgtcttatcttgcaanggcgttcgcgccctcggcgggtgcccccccctgcgtttgaagaagaccgccgccccaaaatgcgccgccccccgggacggccccccttctgcggttttgtgttctcaacagccaccgatgggtgttcgcgcccgccgggggtttctttcttttgttggggggggtcccagccccccttttgtgcttgccccggggttttctcggggggaacaagagatttaccccgttgtcgctctttccttgtggggcccgcccgccccacacaagaggtttttaaaaacttttttgtgggggggaggagggcgggcacaaaccgnnnnnnnnnnnnnnnnggggtcgtcggggccnnnnnnnnnnnnnnnnnnnnnnnnnnnnnnnnnnnnnnnnnnnnnnnnnnnnnnnnnnnnnnnnnnnnnnnnnnnnnnnnnnnnnnnnnnnnnnnnnnnnnnnnnnnnnnnnnnnnnnnnnnnnnnnnnnnnnnnnnnnaaacataagtgactttaggagttttatttatggagcagttatctttttaatcaccaagtgatttnnnnnnnnnnnnnnnnnaattttcttcctttcctttgtggtttttcgccccggtgcttggaaagatggaggcaggggttctggtcctgcagtctgagggcaggctctcctggcaaggccgtgtctaagagcagattgtaggacatgcgatggactccccaggttcctctgtcccccaacagagacacttctttcctccacatggaccaaccctcacctctaaaaaccatttcccctcacagtcccaaagaaaaggaaaacccagcaagggcatggtccatctgctgccttttctgggctcccttttctgctgaccaatttacgtgcacgg

SEQ ID NO: 3498 - DNA, 899 bp, Homo Sapiens
  misc_feature (857)..(857): n is a, c, g, or t
  misc_feature (859)..(859): n is a, c, g, or t
  misc_feature (872)..(872): n is a, c, g, or t
aagggacggctggttatgccattttctgcacggcaagaaaatgaagtctaaccttgattcccattaactactccaactcaaagattacaatgctgggaatcaaggagatctaggtgggtccacagatccagataaaggtctcttcatctctctaccccagttgccaccctctgctgtccccgcagagtttgcttggactataaagctgacaggagtgaagtaatcatttgagtgcaagaagaaagaggcgctgctcactgttttcctgcttcagtttttctcttatagtaccatcactataatcaacgaacttctcttctccacccagagatggcttttccaacacattttaattaaaggaactgagtacattaccctgatgtctaaatggaccaaagatctgagatccattgtgattatatctgtatcaggtcagcagaagaaggaactgagcagttgaactctgagttcatcaattgtaatatttggaaattatctacaatggaatcttccctctgttctctgataacctacttgcttactcaatgcctttaagccaagtcaccctgttgcctatgggaggaggtggaaggatttggcaagctcaaccacatgctatttagttagcatcagttgtcaccaacagtctttctgcaaagggcaggagagctttgggggaaaggaaaaggcttaccaggctgctatggtcaactcttcagaaattttcagagcaatctaaaagcgccaaaattcgctatgtttacagtgatactattaagaaaatgaatgtgattctgctctgtctttttaagtatgatcaaataaaaaatttgtacatcacaatcattttctacccntntcaactctgcagnctttccctgccctccggaattccggtc

SEQ ID NO: 3499 - DNA, 570 bp, Homo Sapiens
tttcatacaataacataatgcttttttcttttcacattactggcttaccccaaaaagcatggcaatatacattttcaaaaacaatcttcccctgtaattacaatgaaaaacaagaagcagaatacccatcatcattacagaaacaatgattgtatacttttaacataatattcaggtatttttaatcactatcttaaaccaatttttaattatataagttaactgtatatgcttactggctgaaaaaatactggcacaacctacctactgcttttaatacacaacgtggtaacttgtgtcttctgcctaatagcacaattatcagaaaaagaatgcaaaaggtatattagagaaatgaagaaagcatcagaaaaatttcctcagccttggtttatcatctctttgtctttcctttgtatatatactgaagttgactggtcctctttcattactctattcctacccaaagaccttttgggtttcaaagtgacagcagccatatcatgttgtctattgttgctattgaattagcctcaattacaggcccccactaaaaaggataaagaaata

SEQ ID NO: 3500 - DNA, 832 bp, Homo Sapiens
ggtgcctccaagcggccctgtgtgtttgacatgtgaagctatttgatatgcaccaggtctcaaggttctcatttctcaggtgacgtgattctaaggcaggaatttgagagttcacagaaggatcgtgtctgctgactgtttcattcactgtgcactttgctcaaaattttaaaaataccaatcacaaggataatagagtagcctaaaattactattcttggttcttatttaagtatggaatattcattttactcagaatagctgttttgtgtatattggtgtatattatataactctttgagcctttattggtaaattctggtatacattgaattcattataatttgggtgactagaacaacttgaagattgtagcaataagctggactagtgtcctaaaaatggctaactgatgaattagaagccatctgacagcaggccactagtgacagtttcttttgtgttcctatggaaacattttatactgtacatgctatgctgaagacattcaaaacgtgatgttttgaatgtggataaaactgtgtaaaccacataatttttgtacatcccaaaggatgagaatgtgacctttaagaaaaatgaaaacttttgtaaattattgatgaattgtggaattcctattgactaaatttttcttttaagccatttggaaatttaaaatagccatactgtgctatggttttataatccaaatgcccttcctgaaatcttttcctaaacatataataatattttgggaaaccattggttaaagagaattgtggagttaaggcctttaatggtaaaaggattgggtttttctaacccttat

SEQ ID NO: 3501 - DNA, 830 bp, Homo Sapiens
ggggcacttggcttcaaagctggctcttggaaattgagcggagagcgacgcggttgttgtagctgccgctgcggccgccgcggaataataagccgggatctaccatacccattgactaactatggaagattataccaaaatagagaaaattggagaaggtacctatggagttgtgtataagggtagacacaaaactacaggtcaagtggtagccatgaaaaaaatcagactagaaagtgaagaggaaggggttcctagtactgcaattcgggaaatttctctattaaaggaacttcgtcatccaaatatagtcagtcttcaggatgtgcttatgcaggattccaggttatatctcatctttgagtttctttccatggatctgaagaaatacttggattctatccctcctggtcagtacatggattcttcacttgttaagagttatttataccaaatcctacaggggattgtgttttgtcactctagaagagttcttcacagagacttaaaacctcaaaatctcttgattgatgacaaaggaacaattaaactggctgattttggccttgccagagcttttggaatacctatcagagtatatacacatgaggtagtaacactctggtacagatctccagaagtattgctggggtcagctcgttactcaactccagttgacatttggagtataggcaccatatttgctgaactagcaactaagaaaccacttttccatggggatttccgaaaatggatcactcttcagggattttcaaaaatttttgttttccgggtttttaaaagctttggggcctccccattaatgaagg

SEQ ID NO: 3502 - DNA, 859 bp, Homo Sapiens
  misc_feature (701)..(701): n is a, c, g, or t
ggatattctgtcaacacaaatctatgaatttagtttatttaaaatcagaacaatttcctacaaaatttttctggaaaatagactcctaacagacctaccagaatcatgcttaaagtgctcccttgacacttattctatactgaaggataaattttaaaaaatctttataggctactgtcagaagtatcctatccttgtttacgatgtataaaaagatgtgaataaattatatggaccccctaagtcttattttctagtaaactgatgatactggaaattcttttacttcaaatgcaaaagaataagctggaggcaattatttcctttcatacagagttcatgaattgttttaaatgcttcttaaagtctggctttataaccgtttaaaatcaacaatgttgattttagataaccaaggaagtattataatacaaaataattttaagtgtaagaaactaaagtataatcaaagtaaattcagttattgtatttgtggtgttgccttgccttgcatgatgctgggggaaaaagagaaaagaaatggttttctttttgtactttcattcagtgtagagggaaaaaagcatgtattgggccaccggaagacaagctaataaataggctgggagtaatattctaccagcaggaactcaacagctccagttaaatgctttgatataggggctcctttgcagagcccnaacaagatttattaaatttccttcaaactgtttatcttttaaaacaaatataagggttttaattatactggctgaaaccaaaatggggaatgcccaaaagactaatgttttttgcaggtttttgccttttccctccccaataaaattatttaagggga

SEQ ID NO: 3503 - DNA, 888 bp, Homo Sapiens
  misc_feature (532)..(567): n is a, c, g, or t
  misc_feature (811)..(819): n is a, c, g, or t
gggttcatgcaaactttattttgtgtttaggaactactgaggatcagagtaatccaagcaaatgtgaatcattttacctttgacaaaggtaaatcagactatgaagttttttttatacaggatgatgactatggaaagagtactcttgtttccttatattatgcaggcaggagtttcgttttcaaaattgttacaaattgtagaagccacggtgttctgtgatataagtgtgtgtttttcataaagcaggcagaactcatctaggtaaattacagttcctaggtataattcacattgtattcagagttgatggttgtacatataagtgatcgctggttttagttgcaactttgtataaaagggactgagaaatttataaacttttttcttactgtcttttttctaaagtaaaaacaaagaaattatgtgccagatttatgcatattattttatgttgcatagaataaaatttttaatctttaattttacatttcctaaatatattttaagacgaaacatttgttctatagcnnnnnnnnnnnnnnnnnnnnnnnnnnnnnnnnnnnnctgaattattttctctccgtgagtatattgatcccagaaaaaaaacttgtattatgtgtgttttaaaatgagaaatctaaaaaacgaaaagtcctccaaagcctcctggaaatttgaaacactttggcataacgtataaaagcctgtttaagagacagccaactatggcctgtggatcaaatccagcctgctgcctgctttttatggcctgtgagctaggaattgtgtttataattttaaatgnnnnnnnnnaaagacttttatgatacttgaaaattaacatgaatatttagtgttcataaataaagtttgttgaaacac

SEQ ID NO: 3504 - DNA, 824 bp, Homo Sapiens
  misc_feature (549)..(723): n is a, c, g, or t
ggggccacagcatgggaggaaagacagccatgctgctggcactacagaggccagagctggtggaacgtctcattgctgtagatatcagcccagtggaaagcacaggtgtctcccactttgcaacctacgtggcagccatgagggccatcaacatcgcagatgagctgccccgctcccgtgcccgaaaactggcggatgaacagctcagttctgtcatccaggacatggccgtgcggcagcacctgctcactaacctggtagaggtagacgggcgcttcgtgtggagggtgaacttggatgccctgacccagcacctagacaagatcttggctttcccacagaggcaggagtcctacctggggccaacactctttctccttggtggaaactcccagttcgtgcatcccagccaccaccctgagattatgcggctcttccctcgggcccagatgcagacggtgccgaacgctggccactggatccacgctgaccgcccacaggacttcatagctgccatccgaggcttcctggtctaagagttgctggcannnnnnnnnnnnnnnnnnnnnnnnnnnnnnnnnnnnnnnnnnnnnnnnnnnnnnnnnnnnnnnnnnnnnnnnnnnnnnnnnnnnnnnnnnnnnnnnnnnnnnnnnnnnnnnnnnnnnnnnnnnnnnnnnnnnnnnnnnnnnnnnnnnnnnnnnnnnnnnnnnnnnnnnnnnnnnnacttggaaagctggagcaagaaaaatcctttaaacccggaagcccggaggtttgttggtgacccaaaatcccccccatttgcacttccaaactgggccaac

SEQ ID NO: 3505 - DNA, 842 bp, Homo Sapiens
ggcacataatttcatggaaggaaaggtagcttgatatttagattgtaagatataatctgaaaggaaactaattatgttctctacacttactgtaatactgattattcttacatatcaaattattgaactttaaaaatttcattgtatagtcattaaactgagttgggttttttcttaaagggtttagcatcactcatttgatttacacattcacattataatatttaattatcatgggtgtatgctttacataaaaaaggtttataaaagttatttatgctatattgaaagtcatcttaagaatctccaggttatttaaagtagttataggagcagagaacaagcacctttatcaaaatctggtcctatgtgccttgctttaccaaatacctgatttttctggagggtgttcctgtaattcacaactgtagacacatgggcaaaattaggatttttaagaataaatacatttctatttttttggttgtttcaacattagctcttcaaattcattaacaaaattaaaataggtatattacaaaagcataaacatttgtgaacagtacttaaataaattgtgatactattgctccatcattgaactttttgaaactttaacaattgtataaaactgtcagtttgttgtttcatttgtaattacaaaataatttaaaaactttttaaaataatttggatcctgactttgtctatatctgtatttcatttgtttagaaagattcttttgggtttgataatgtaatttgtatatttaaattttttatggacataattcaaaggaatgtataaattggtcttttgttaaatggctttttaattgataa

SEQ ID NO: 3506 - DNA, 1024 bp, Homo Sapiens
  misc_feature (839)..(839): n is a, c, g, or t
  misc_feature (842)..(861): n is a, c, g, or t
aatagaaacatgcacatggaaacccatgagctaggattctaccgaggaaaacatctagtgggattagcaaggtgaagggaaagcatctggtggcatggcagcatggggaggctcacacacagaagttgcacgtggacatctgttttaatcagcacaagtgaattaaccatgcttcttcatttttttactttagttaaaaaagaggacatttaatattctacatgctgtaactatcaggacatggttagcaatctcaatttcatttttgatattcaaattaattcttacagcttgagcatatcagccttattaccagagcaaatccttccttcagatgggatagtttactgactagttggagcatttgtaagcacatggtgaaatcagcccctgcccaccaaaataatctttatgttaccaagtgattcccatttgtctaaggatttgaagggggtctaaattggatgtatcttagtctaaagaaccaaaaccatccctgaaatgccttgctaatacaactaatccttccatatatgtgccatacttatttttttcctcagtgtatactttatgttaacagggttattacaaagcacattttctgaatctgcaatcattcctttgacaattactggacccaaaggaaaattcattttctttgcattattccagtaatatataaaaactgtgtcttgttatagtagtacattatgaatcacatataaaatcttacaatacagaacaactgttaagatggaaaacagtgccaaacctccacagctcatttctttgtaatataatcagaatgaaaaataattttaagaagacagaagactggnacnnnnnnnnnnnnnnnnnnnncctctagctttatcccctgcacaatttattaagagttgaaatgaaaaaaccacttttccctggctttcccaattggtttataaaaattcctaaagcttaaaagaatataaaagtggggtttctttttaacttgaacctggaaattccaattttaccaaattta

SEQ ID NO: 3507 - DNA, 250 bp, Homo Sapiens
tcaagcagtcgcgccagaaatcatagaagatttggcctactactctagtacagtagtatctctatagatgacctgtgtagaaaaagcaggaacagatgagaaaatgcttatgaaggtctctccgctgctcttggtgaagtcggtttaacttgaggagttttggacagtaacttcatggctaacaataaattactagcactcctttgtgaggttttgcaacaggataagacctcgtataaccatacatgaa

SEQ ID NO: 3508 - DNA, 346 bp, Homo Sapiens
ttcaggtccacaggttgcgttccggggagtcaaacttccaggagatggttatgcccccgatatctgagtcactaaagcgcaacaagaaggtcccgtcgttcttgtggatgagcaggtcgtggtcctgttgcttattcacaaaacctaggatggccccatcattccatgtgggggcttgtggtgcttcttcaacacatccatcaccccgttcaaaccagtgccagaaggtgtagttccagcccggaaagttctccctgttgaaccgggaacaggacacggacaggccactgtagtcctccaggtggctgctgctgttgttgaacagtttctgcgccaggaacacgag

SEQ ID NO: 3509 - DNA, 500 bp, Homo Sapiens
agcagtagcagccctagatttcggttgtggtggttgtaaaaggagagaccaactaagtgggggttgaagtcagattagaccaaaagtgaatggcagagagtaccataatgtccatgaagggctgctagagtcaccgcgatcatagcccaagcagagacagagaaaggaagatgtgagcagagtttggggcctcaaacaatggaggttattcgtgcagcccaggaaaggctccccaaagccaggatcaacatcccttgcaggcggtccccctcatggaggcatggccaggcaccttagatttgagaccagctgcgttgcggctgaccagctgtgtgaccctgggctggtttccttccatacaatgggagagccaacggctgcatgcatgcaaagaccgtctgaggataggaggaagcaatctgttgagcacccgtgtacctgagtgtcatcacctcccaagggcatccttcgttccagagctgagctgaggaccatcgttg

SEQ ID NO: 3510 - DNA, 251 bp, Homo Sapiens
gcgatagaggaccccatcacagagagcagctatggcatggaggctgaaattgttaagtgtagaagttcagatagactctagagtttcaggatacttacatctgagttcggctagtacattttttgtcttggtatagtaatggattccgggcgttttctgtcctcccatcttccctgatatccttttctttttcgtcttcatcgtctttgttttcatcgtcttggtcctcttcgtcatctttgtttcttcat

SEQ ID NO: 3511 - DNA, 360 bp, Homo Sapiens
ccatacagcagtagcagctcatggttagaggagattctgtaattatctagtgttttacttaaagtccttgttaagtgacaggaactgctcacctgatttgtacattccatggacaaatctttattaagtgcctattctctgtatgaagataaacacttatacagaagctagtgaagaacgtcataataatatttacatcatcacatctcttgatttctgtcagttatataatcattcaactctcaggagttcaaggtagagaaatggcggtggtaatcccacacgggtccccctcaacatctttgttatcttagaacaggtctaagggatagaaaagataaagagaaagacctgctgcta

SEQ ID NO: 3512 - DNA, 196 bp, Homo Sapiens
agccctgaggtgaagtagactctcagaggacacaaggaaagagtgtactgataagaaatctacagcaaaggtgtagcacatcatcatttgatcttgatacacttgactgtgggcaaagtacctgttatgtaaaacatgctttgttagttagggccatgataagctgctactgatgtgaatgggggtaccgagctcg

SEQ ID NO: 3513 - DNA, 682 bp, Homo Sapiens
  misc_feature (526)..(534): n is a, c, g, or t
gggatccctgactcggggtcgcctttggagcagagaggaggcaatggccaccatggagaacaaggtgatctgcgccctggtcctggtgtccatgctggccctcggcaccctggccgaggcccagacagagacgtgtacagtggccccccgtgaaagacagaattgtggttttcctggtgtcacgccctcccagtgtgcaaataagggctgctgtttcgacgacaccgttcgtggggtcccctggtgcttctatcctaataccatcgacgtccctccagaagaggagtgtgaattttagacacttctgcagggatctgcctgcatcctgacgcggtgccgtccccagcacggtgattagtcccagagctcggctgccacctccaccggacacctcagacacgcttctgcagctgtgcctcggctcacaacacagattgactgctctgactttgactactcaaaattggcctaaaaattaaaagagatcgatattaagaaaaacacaaaaactagaacctatagaaannnnnnnnntcccatccaagagagagtgtatctcccctcaggagggggccccccaatgtcttttaaagccgttacccgcgagattatctcgtgggtgccacaacggggtgtgtcccactaatttagaggacggtcgccgaatattacaatgcccatt

SEQ ID NO: 3514 - DNA, 797 bp, Homo Sapiens
  misc_feature (86)..(86): n is a, c, g, or t
tggggcccggccgcgcccccaaaggaagttggtttaagaaaagtcttttccgacgggcccaaggggccccggacaaggccaatttngtgttgcgtagcggagacttttttggggacatttctggtactgggagttattttccacagcatcctcctcgtccactgatgggtaaaagggcaaagagctcggcctggcctgttggtcctcccgggcctcctcgttctgcttctcaaagtcctcggcactcacttgctgcaggaggttttctagccgcttgtcaggctgcaggctgcggaggtcaaagtcacaggcagtgacggggcctttcccagacacgtcgcacagcacgtttaagtggcgggggcctgcctgagcagcgggttcactgcactccaaggtttccgactcaaacgtctgtttcggaagcgtcttgtgaaaatcttttcgagatccagtctttttaaagccacagatttctggacttccttggtttttccggatcacgattagccactcacggatgtaggtctgaacacagtccctgacatgagggtccagttcaaccccttcctccggcaaagagggctgcaaagtcctacattcctttgtcgtgaacaccacgtccaagtcgtcatcagtgaagtccccgagctcctgggcaagctgcacatccaggctgttcaggtgtgtcatcagaagtccttcaaagtccactggctccacagggtcataaaactgaggctttgaaagattcacagttacacggcgcgtaaattgttacaggagacaaaatgccc

SEQ ID NO: 3515 - DNA, 609 bp, Homo Sapiens
cgtccacagagacagcactgaggggttagtgactcccttctgaatgatggaatatgacacagatgatgtgaatagcacttctggtgctagttcagtgctgttacagcaaacgaaagagctgtaacgtgcctggtggagctcatcaacaaacagaactgtatttctccctgtaactggaggctggaagttggatatcagagtagcagcgtggtcgggcttagtggtgacactgccgccccattcattgagcttttataggtgctgtcctttccttggaggacgcctcaactttaggagcatgggtagacctccattcaaagcccagctcccccttgtagcttggtgatcgtgaggaagtcatagaacatccctgtgcctgttttctcctcagagaaatggcgtcagtgagaattgtttccctttttaatcaccagaaaaataaagcatgcgaagaagttaactttggtgccattgggcagagggtgagagcccagcaaaacggagagatcagctgcccacatcagtggcgaggagtgcggagagtgggtgaaggtggggcaggaagcaggccaggcttgcagagccaggaacaggactgttgaagtcaca

SEQ ID NO: 3516 - DNA, 807 bp, Homo Sapiens
acagtggatagatttgactccaagtatctcttaaggggccacttccaggccaacaccttactctcactccatgaaggtttctcccgacgtgtgtcctctgacacgtgacaagtaatgatgtccacgtacagctctgtccacattaccttacaaacaaggcttctccctaagcatttccgctggtgtggctgatggctgacttgtagctaaaatcacatcctcactccttgcacctctaaagcttttccccgagtgtatcttctggtgtatgatgagctgtgactttctcctaaagcttttgcccacaactccacgcatgcataaggcttcttcccccgagtgtatcctctgatggtaagctgagagtggacttgtggctaaagtttcgcccacactcgatgcatgcgtaaggtttctctcctgtgtggtgtcctccagtgtctgtagaggagttatcttccggcaaaatccccgcccacattccccacacacataaggcttctcccctgaatgtgtctgctcgcgtgcgaggagagttgatttatcacaaaagcctcgcccacactggctgcacacataaggtttttccttggagtgtgtactcccgtggtagtggagggttgactgagctataaagcctcgcccacactctccgcagacataaggcttttctcctgtgtgtgtcctctggtgtctgatgagctgtgatttcgtgataaagccttgcccacactccgtgcatgcataaggcttctccccagagtgtatcctctgatgtacactaagagcggacttgaggctaaagtt

SEQ ID NO: 3517 - DNA, 953 bp, Homo Sapiens
  misc_feature (164)..(172): n is a, c, g, or t
  misc_feature (174)..(185): n is a, c, g, or t
atttggtgaggaattcccaagcacttagtccatggcccagggatctccctagggaaaccagcttatgacccatggttcacttaccctgactggggcccggcgcgccaaaaccgaatggttctagaaaagcttctccgagggccgaggccgggccgacatgtttnnnnnnnnntnnnnnnnnnnnnttttgcaatgaaatgaatcatttaatgagaatcttcaaactgtggcactggctgagtactaagcaaatccaggggaagacgtgaagcccaccaaggcgcacagcctcaactccggtgcctgcccctgatctgaaatacaacatccaagagctcgaggcctttttaccacccgtttgtggagcacctgcacctttctgacaacaactctcaagccaactttcagagagaaaacatgaagggaaaaaatagatttcctttggccagacagctctttcttcctcaataaataggaaccacacttggaacaaagagacagcgtgagctcggtgggggaagcacaagctttattggctgaaagttcttctcaggagcctggtctgctgggactgcatgttcctggatgggctcccccaggcctaagctccaggtttcctctggccttccgaaggattttgtgggttacgaccaattgatcaaagatgactttttcctggcgcttgctcagctgcaaaagcttcatggtgttttgcaacttcttttcttgttcaaacaattttttatgtagtttggtgacctctgccttcatttctccaatctgctcacagtgaagggggcactggccatcctcggggagtgagactctccagagaagcttcagccgcctgtaggcctcttccagggtcagcttggccgtgctcacactgctcacaaacttgctcagtggtgctgggtgtggaccctttgttcccagctcttgacttgtggagc

SEQ ID NO: 3518 - DNA, 1058 bp, Homo Sapiens
aggaaagaaaaccttctgccacccagcagaagaaaaacaccaaactctctagcaaaaccactgctaagttatccactagtgctaaaagaattcagaaggagctagctgaaataacccttgatcctcctcctaattgcagtgctgggcctaaaggagataacatttatgaatggagatcaactatacttggtccaccgggttctgtatatgaaggtggtgtgttttttctggatatcacattttcatcagattatccatttaagccaccaaaggttactttccgcaccagaatctatcactgcaacatcaacagtcagggagtcatctgtctggacatccttaaagacaactggagtcccgctttgactatttcaaaggttttgctgtctatttgttcccttttgacagactgcaaccctgcggatcctctggttggaagcatagccactcagtatttgaccaacagagcagaacacgacaggatagccagacagtggaccaagagatacgcaacataattcacataatttgtatgcagtgtgaaggagcagaaggcatcttctcactgtgctgcaaatctttatagcctttacaatacggacttctgtgtatatgttatactgattctactctgcttttatcctttggagcctgggagactccccaaaaaggtaaatgctatcaagagtagaactttgtagctgtagattagttatgtttaaaacgcctacttgcaagtcttgcttctttgggatatcaaaatgtattttgtgatgtactaaggatactggtcctgaagtctaccaaatattatagtgcattttagcctaattcattatctgtatgaagttataaaagtagctgtagatggctaggaattatgtcatttgtattaaacccagatctatttctgagtatgtggttcatgctgttgtgaaaaatgttttaccttttacctttgtcagtttgtaatgagaggatttccttttaccctttgtagctcagagagcacctgatgtatcatctcaaacacaataaacatgctcctgaaggcataa

SEQ ID NO: 3519 - DNA, 1427 bp, Homo Sapiens
  misc_feature (45)..(45): n is a, c, g, or t
  misc_feature (91)..(91): n is a, c, g, or t
  misc_feature (148)..(148): n is a, c, g, or t
  misc_feature (1105)..(1224): n is a, c, g, or t
  misc_feature (1258)..(1258): n is a, c, g, or t
gcatgatttcccagagttcctttgtgattaccattatgggttctntgatgtgatcccacctaattgtatccagttaagaaatttgatcctnagtgcctttccaagaaacatgaggctccccgacccattcactcctaatctaaaggtngacatgttgagttgaatattaacagttgctccccggatttctcaccaattgcactggagtaatgccacctcagttcaaaaaggatttggattcctatcttaaaactcgatcaccagtcactttccttgtccgagctgcgcagcaacctacaggtatccaatgaacctgggaatcgctacaacctccagctcatcaatgcactggtgctctatgtcgggactcaggccattgcgcacatccacaacaagggcagcacaccttcaatgagcaccatcactcactcagcacacatggatatcttccagaatttggctgtggacttggacactgagggtcgctatctctttttgaatgcaattgcaaatcagctccggtacccaaatagccacactcactacttcagttgcaccatgctgtacctttttgcagaggccaatacggaagccatccaagaacagatcacaagagttctcttggaacggttgattgtaaataggccacatccttggggtcttcttattaccttcattgagctgattaaaaacccagcgtttaagttctggaaccatgaatttgtacactgtgccccagaaatcgaaaagttattccagtcggtcgcacagtgctgcatgggacagaagcaggcccagcaagtaatggaagggacaggtgccagttagacgaaactgcatctctgttgtacgtgtcagtctagaggtctcactgcaccgagttcataaactgactgaagaatcctttcagctcttcctgactttcccagccctttggtttgtgggtatctgccccaactactgttgggatcagcctcctgtcttatgtgggcacgttccaaagtttaaatgcatttttttgactcttggccaaaatttagaagatgctgtgaatatcattttgaacttgtgtaaatacatgaaagagaaaccacacaacacaacnnnnnnnnnnnnnnnnnnnnnnnnnnnnnnnnnnnnnnnnnnnnnnnnnnnnnnnnnnnnnnnnnnnnnnnnnnnnnnnnnnnnnnnnnnnnnnnnnnnnnnnnnnnnnnnnnnnnnnnnaccacgcaccaacctacccctacccccttcgttnttttcaaatttgtgcgggcgtttcccctccccaaaaacacttttttcccaaaccttcttttttgggggcgcgccgcccccacccgggaccactgcaaactgtccgtatccctttccctccccacagaaaaaccccgcgcccaaaaatcggccctgtgctgtcccccccc

SEQ ID NO: 3520 - DNA, 1265 bp, Homo Sapiens
  misc_feature (591)..(620): n is a, c, g, or t
  misc_feature (1089)..(1150): n is a, c, g, or t
ggctgggattacaggggtgagccaccgtgcccaacctcacttgcttcttatccttacactcccccagccccagagaaactgccacatacaccacaaaaaccaaacatcccccaatgaccttagccccattgctccattcactcccaggtgagaattcaggcaaacgtccacaaaggtcacaggcagcgtacatacggttctgttataccccatatattaccccttcatgtcctaaagaagacattttctcttagagattttcattttagtgtatctttaaaaaaaaatcttgtgttaacttgcctccatctttttcttgggtgaggacacccaggaatgacccttttgtgtctatgatgttgctgttcacagcttttcttgataggcctagtacaatcttgggaacagggttactgtatactgaaggtctgacagtagctcttagactcgcctatcttaggtagtcatgctgtgcatttttttgttcattggtgtactgtgtttgatttgtctcatatatttggagtttttctgaaaaatggagcagtaatgcagcatcaacctattaaaatacattttaagccttttacnnnnnnnnnnnnnnnnnnnnnnnnnnnnnngggggggccgccacaagaagatcccccgggggggccaaagttttacgcgttcccacagttttttggctaacaaaaggggccccaaaaggcggaggcgactcaacaacagcccgaggcccgagcggccggaccgaataaaccaacggccgcgcggcgccaggggcaaaaccgtgcctcacaacgcggagcaacctctcgcgcagacagggccaccccaccacctctccgaggggggggagaaccccacacgtgggagcaccaaaccgcactcagcggaacatacaaagcccccaacgagcacactaccaacaactccacacgcggtcatcaaagctccgcccaaccccaagccgccgcgtaaacatcgcaccgcgcgcagtagacccagatctagcgcgcacaaggagcagctagtacttacgtagagaccaccaactactcacaccgggacgccgctcacgaaaataannnnnnnnnnnnnnnnnnnnnnnnnnnnnnnnnnnnnnnnnnnnnnnnnnnnnnnnnnnnnngcacgagaaccaaccagacaacccacacgcgacatgaaacacacacaccaaccgcagaagccagaacaccaccaaccacgcaaagaacacccagacgcgacagatcgaccagcaa

SEQ ID NO: 3521 - DNA, 1372 bp, Homo Sapiens
taaggtcccgtaaaaattagccccccctcaaagttggcggttattgtcaagaggtctattgattccccccttatttccccagttgtgaccgagggatttttttaaaccggttcaagaaattatatttggcgcattcccaaatttaaagccctttgtttttttaaagaagttcttaccagaaaagtgaaatattgggtggcaaaaaaatttaccaacagttgggttcagaattccagaggttttttaaagaaactggcctttgcctgagatttaacccaaaaaggttcaagaccaattaggaattcaatattgtttcgcgtgccataaaaaagtttggatttgaatgcctgggtggtgaattgaaatttagtctcaaaagcttcataaaataaaaatgtgacttaagacgtagtcatcccagtataccaattctcccatcccttggactttcggcagaggagattagagcaaaaaatatcagggagaacagtggagttacattgtattatgtatgtttaatataatatcaattttaaggttaaggttaaggaaatcttaattttaaggttaagcctggagtactagttatagaacttaatattcctggttaaagagtaagttaactgggttattatgtggccttggtcgaagaccataaattatgcatttatgcatttgtggttgctttggttctcaatacattgaatatgcatagccccttctagaaatatatatagtgagaaatctgtaaaatgggggagttagactaagtgtgaactaaaatcttcccactgtgtacaggacacatcagctgagagcaaatcagtttttatgtttactcagcaccatcctcactaaaactattatttttgtcttattttcacccataaaaagtaatgtgggtcatactttattatttaatatgcatttacaaagatctaactattttagggattagcttttttaagcattcttaaagatgaaaaatacaaaaatgacttgtttttatgaattgacatgcttaagatcaactgaaaaaccaagattgagaggcttacaataaatcttttgtaaatgaaataaatggattgcagctgatttattgaaaagtcaatagatttttttgaaacagccaagatcactgaaaatattcagactctcctcacatctagtaagcgttaataaatacagttgtaccttggtatccacaggggactgattcccagatcgcccccctgcacatactaaaatcgggcacagatgttcaagtcacttatataaaagggcatagtgcttgcatataacctattcacatcctcctgtatacttaaatcatctttacattacttgtaatacctaatgtaaatgctac

SEQ ID NO: 3522 - DNA, 750 bp, Homo Sapiens
tcccacttcagcccctccggagtagaatatccctagtctttctggggttatttatgtcctcagtgacactcctggcctatttgtcgtagagctcctggtggagcatgggttccggcggcgccagactcagtgctgctgtggagctaggtgcttcccccttcccctgagactggtggactgaactccagtcaagttgagttcaagtgaaagattcttccagggttttattttttcccctcctaacaaagtctcatagtgttaacactggttctgcaatatctctgaggtgcaaagaatgcacttttccctatggggcccagagtttgccttttctgccaggcagtcaccacgcttccctaccccagcctgtttcttttggcttggtttggaccacagtcctctgctacccagggttttagagcccctgctctaggaaacagtttaagaaatcattggccccttcccagcacattgaatgggtaagcagacaggccatgatttagttggccagcactaactccacctctgttctccttgaacagcttcccctccagcccactgctttaggatgacacaatgaataacacctagtcatagaaatcagtctctctggtttgttttgtattatgttgtacatcattaaagatctaaatacaaaggatatacagtcttgaatctaaaataatttgctaactaactattttgattcttcagagagaactactaataaaaatctaaaaggtaaaaaaa

SEQ ID NO: 3523 - DNA, 899 bp, Homo Sapiens
ggggcattgcagggggagagtgaactgacagactcagtcactgaagagggaaaaggagtgagaagacaaagccgtcaaagccccaacagctttgtatttctccagcccggcgcagaccccggagctcccgaggcactccctccatctttggaacacgccagtaattgattgataacaggaagctatgagggaccctgtgagtagccagtacagttcctttcttttctggaggatgcccatcccagaactggatctgtcggagctggaaggcctgggtctgtcagatacagccacctacaaggtcaaagacagcagcgttggcaaaatgatcgggcaagcaactgcagcagaccaggagaaaaaccctgaaggtgatggcctccttgagtacagcaccttcaacttctggagagctcccattgccagcatccactccttcgaactggacttgctctaaggccaagacttctctctcccatcaccttgccctcattgtcttccctctcaagccccttcctttccactcctttccccattttaatcttgttctctccctactgtgttggtggggctgatgaaatctgccagagttgagttccatgaatttatttatctatctggccactccattttctctcaaaaacccctcaagtcacaaaagtaaatgggttcaagcaatggaagtactgggttcccaggggattccctcccttttccccccccaaataatttaacttccacaaaacctaaggccctggactggggggaaccaccctgtagaagataggtattagataatgtgcccacaaatggggaaaagaacggggaatttttttggaccccccacatttataagatccccggccctttcccgaaaaaaatttccctcttgaaaacat

SEQ ID NO: 3524 - DNA, 1506 bp, Homo Sapiens
  misc_feature (1088)..(1208): n is a, c, g, or t
  misc_feature (1219)..(1230): n is a, c, g, or t
  misc_feature (1288)..(1410): n is a, c, g, or t
  misc_feature (1450)..(1464): n is a, c, g, or t
gggagtggatgtaggctgggcgccgcgatgttcgacgggacaccggcggagagcgacctcggggttaaggggtggggctgacgtcaggagccaagatggcggcggtggtcgcactctccttgaggcgccggttgccggccacaacccttggcggagcctgcctgcaggcctcccgaggagcccagacagctgcagccacagctccccgtatcaagaaatttgccatctatcgatgggacccagacaaggctggagacaaacctcatatgcagacttatgaagttgaccttaataaatgtggccccatggtattggatgctttaatcaagattaagaatgaagttgactctactttgaccttccgaagatcatgcagagaaggcatctgtggctcttgtgcaatgaacatcaatggaggcaacactctagcttgcacccgaaggattgacaccaacctcaataaggtctcaaaaatctaccctcttccacacatgtatgtgataaaggatcttgttcccgatttgagcaacttctatgcacagtacaaatccattgagccttatttgaagaagaaggatgaatctcaggaaggcaagcagcagtatctgcagtccatagaagagcgtgagaaactggacgggctctacgagtgcattctctgtgcctgctgtagcaccagctgccccagctactggtggaacggagacaaatatctggggcctgcagttcttatgcaggcctatcgctggatgattgactccagagatgacttcacagaggagcgcctggccaagctgcaggacccattctctctataccgctgccacaccatcatgaactgcacaaggacctgtcctaagggtctgaatccagggaaagctattgcagagatcaagaaaatgatggcaacctataaggagaagaaagcttcagtttaactgtttccatgctaaacatgatttataaccagctcagagctgaacataatttatatctaatttgagttcctttaaagatcttggttttccatgaatacagcatgtataataaaaattttaagaaataaatgttattctactttattaacnnnnnnnnnnnnnnnnnnnnnnnnnnnnnnnnnnnnnnnnnnnnnnnnnnnnnnnnnnnnnnnnnnnnnnnnnnnnnnnnnnnnnnnnnnnnnnnnnnnnnnnnnnnnnnnnnnnnnnnnnttttggggccnnnnnnnnnnnnaaaaaatttttaaaaacctttttttggggccggggccccaaaaggaaaggaaaagggnnnnnnnnnnnnnnnnnnnnnnnnnnnnnnnnnnnnnnnnnnnnnnnnnnnnnnnnnnnnnnnnnnnnnnnnnnnnnnnnnnnnnnnnnnnnnnnnnnnnnnnnnnnnnnnnnnnnnnnnnnntctttcaaagagggccccagggggtttcaatttaaattannnnnnnnnnnnnnnttctcgggaaagggggggaatttctaaaaacttcggccccca

SEQ ID NO: 3525 - DNA, 1078 bp, Homo Sapiens
ggggctgtttttcgtcttccctaggctatttctgccgggcgctccgcgaagatgcagctcaagccgatggagatcaaccccgagatgctgaacaaagtgctgtaccggctgggggtcgccggccagtggcgcttcgtggacgtgctggggctggaagaggagtctctgggctcggtgccagcgcctgcctgcgcgctgctgctgctgtttcccctcacggcccagcatgagaacttcaggaaaaagcagattgaagagctgaagggacaagaagttagtcctaaagtgtacttcatgaagcagaccattgggaattcctgtggcacaatcggacttattcacgcagtggccaataatcaagacaaactgggatttgaggatggatcagttctgaaacagtttctttctgaaacagagaaaatgtcccctgaagacagagcaaaatgctttgaaaagaatgaggccatacaggcagcccatgatgccgtggcacaggaaggccaatgtcgggtagatgacaaggtgaatttccattttattctgtttaacaacgtggatggccacctctatgaacttgatggacgaatgccttttccggtgaaccatggcgccagttcagaggacaccctgctgaaggacgctgccaaggtctgcagagaattcaccgagcgtgagcaaggagaagtccgcttctctgccgtggctctctgcaaggcagcctaatgctctgtgggagggactttgctgatttcccctcttcccttcaacatgaaaatatatacccccccatgcagtctaaaatgcttcagtacttgtgaaacacagctgttcttctgttctgcagacacgccttcccctcagccacacccaggcacttaagcacaagcagagtgcacagctgtccactgggccattgtggtgtgagcttcagatggtgaagcattctccccagtgtatgtcttgtatccgatatctaacgctttaaatggctactttggtttctgtctgtaagttaagaccttggatgtggtttaattgtttgtcctcaaaaggaataaaacttttctgctgataagat

SEQ ID NO: 3526 - DNA, 975 bp, Homo Sapiens
  misc_feature (668)..(689): n is a, c, g, or t
cagtaggtttgctctgtacccatgtgtacagcctacccatgcagggactgggattcgaggacttcagggcgcatagggtagaaccaaatgatagggtaggagcatgtgttctttagggccttgtaaggctgtttccttttgcatctggaactgactatataattgtcttcaatgaagactaattcaattttgcatatagaggagccaaagagagatttcagctctgtatttgtggtatcagtttggacaaaaaaatctgatactccatttgattattgtaaatatttgatcttgaatcacttgacagtgtttgtttgaattgtgtttgttttttcctttgatgggcttaaaagaaattatccaaagggagaaagagcagtatgccacttcttaaaacagaacaaaacaaaaaaaggaaattgtgctcttttctaatccaaagggtatatttgcagcatgcttgactttaccaattctgatgacatctttacggacactattatcactaagaccttgttatggcgaagtctttagtctttttcatgtattttcctcatgattttttctctttatgtagtttgactatgccttacctttgtaaatatttttgcttgtgttgtcgcaaaggggataatctgggaaagacaccaaatcatgggctcactttnnnnnnnnnnnnnnnnnnnnnnccttcagctgtgctaaacagtatattacctctgtataaaattcttcagggagtgtcacctcaaatgcaatactttgggttggtttctttcctttaaaaaaatttgtataaaactggaagtgtgtgtgtgtgagcatgggtacccatttgataagagaaatgcatttgattgtgaagaagggagagttaaattctccattatgttcgtggtgtaaagtttagagctggaatttattataagaatgtaaaaccttaaattattaataaataactattttggctattga

SEQ ID NO: 3527 - DNA, 596 bp, Homo Sapiens
gggccctatccaaattcacttgcagctggtggaccccaggggcatcttccgagtggttccacagacagtcctgaatgaagcccaagtcacaatcattgtggagaactcagctgccattgactgtgaaaagtccaaagtattaaccctcaagctcctggctgttgaagtgaacaccccagagaagttcagttccacagcggatgttgtgatccagctcctggacaccaatgacaatgtccccaagttcgactccctctactacgttgccaggattcctgagaacgccccagggggctccagcgtggtggctgtcacagctgtggatccagatacaggaccctggggcgaagtgaaatattccacctatgggactggggcagacctcttcctgatccacccatccactgggcttatctacacccagccctgggctagcctggacgctgaggccactgccaggtacaacttctatgtgaaggcagaggacatggaaggcaagtacagcgtagctgaggtgtttatcacactgctggatgtcaatgaccacccccctcagtttggaaagttcgttcagaagaagacgatggtgctaggga

SEQ ID NO: 3528 - DNA, 498 bp, Homo Sapiens
tgtgaaataagagttgtctgctacacgtgatttttacctttctgtcttctccattgacttagtaatgagacagatcagcacgaggataacttggtagccatacacctggcaggttctgcaagtcagagaactgtaaccacatgctgggccttagagcaatcttagggcacctgcttttctcctgcctacccattttatagaaaaaacaagagaggctccttccatggctggtagcacagggcaaagtaaggaaagggatgtgccagcagtgggtttgaatgaggatctgggtgaccagcggtgaatgtatgttgtctgttagtccagaatctacatgctgggcacgttagggatccctctggggaggggcgcctttggcttgccttgttggtgtgagccgagcacgcgtgcttgtttcaatcctgaccgccggtcaatttgtggaacaagtcctcatcgagtgtttcattctggtccttggagcgggtggaccagaaa

SEQ ID NO: 3529 - DNA, 270 bp, Homo Sapiens
ccctgtgtcataccatggtggggaggggcacgcatgcaaagtagagacgaggtagagaaagtagaagtattctttaaggtaaagatataaaaatattctgtagataacatgtaacttaagtggccctacctgggagcttcgtatgtaggtgagtttttatatgccacttctgtttctctcatttagatggatatatgcaatgccaaagacaaaagcttatgttaacaatcacggtaagttaaattatgctggggtatgaacaacagtgca

SEQ ID NO: 3530 - DNA, 538 bp, Homo Sapiens
tgtgaggcctggatgacgaagtgtgacttgttgtcgacctcgatggccgaacgcggattgtgcgccgaggccttggagtcgatcaccggagtctgtccccacaccgttaggcacctagtagagtgtcggcaccggcgcgtccggaggcattgatgacgacagtgcccaacgcacgtactaccacgacgcaacagcactgtcctgcctgggccaaaggcacttttgagctgggttagggagttcaacgggctcgtatcggtccccctgccgggcgtgggagccggaacaatctacataggtcgtggtggtcctggcgggaagcggtgggggctgcgactgcgcctggagcaccgccaatgagcgctccaaacagtgccagggtgacagcggaaccgaaacctcatcggctctccttacggtgcggtgctgggaccatcaggtgagaaccagcagccttgctgaccctcatcacgtgccgaccatgtcgtcggctccaatggcatgggatagtcaacgccgtctacaccagagttgtcaa

SEQ ID NO: 3531 - DNA, 705 bp, Homo Sapiens
accctgttcagtgtcttcgagtgggtcgagtgggtcagtgtccacctttcagacccagttgcaccatcttctgcaggactgtattttgagcctgaaccaatttcgtccacgcccaattatttgcaacggggagaatgtaccagttgtgtttcatgtgaagaaaactcaagctgcctcgaccagatctttgattcctaccttcagacagagatgcacccggagcctttgctcaattccacacaaagtgctccacaccatttcccagacagcttccaggccacccctttctgctttaaccagagcctgatcccaggatcaccttcaaattcctccattctctctggctccttagactacagttactcgccagtgcagctgccttcatatgctccagagaattacaattcccctgcttctctggacaccagaacctgtggctaccccccagaagaccattcctaccaacacttgtcctcacacgcccagtacagctgcttctcctcggccaccacctccatctgctactgcgcatcgtgtgaggcagaggacttggatgctctccaggcagcagagtacttctacccgagcacagactgtgtggactttgccccctcagcagccgccaccagtgatttctataagagggaaacaaactgtgacatctgctatagttaatagaaattacagtaattcagaacatggcat

SEQ ID NO: 3532 - DNA, 286 bp, Homo Sapiens
acggacacaacattggctcgacatggacaggactacatgcttcccatcactgaaacatacaggatcaccaggtatctgtggtcggattccaggccagagagggtgatgtcattccggtcacctcctatgcggaccatttggagttgcccgtctctatctgtgtactggatttcgaaggagtcaaattctccctcagtcaccatccaggagagatgcagggtgtgtgacgtggcctcctccactgtcaactccccgaggtggggctcagcgctggatggtcgagcca

SEQ ID NO: 3533 - DNA, 388 bp, Homo Sapiens
cacacatggcgtcgagctcccaagtgctggaattacaggcatgaaccaccgaccggcagagtccaggtcttctgactccaaatgcaattttcttcaaatttacttctagtgatttgttgaagatttgtacagaatacacaaaaatgagtagatcctgaaaacaacagggcagctcctgaagaacataaatactattgaggcagagtcggagttgaggagccagtgtttagcaaagtaatgcaaaaaataaacaaacttctcttatagcaagtttgagctgtacaaagaaggcaacaggaacacatctcatatttcgttaaaatcacccctctccccaacgatggtacttagcacatagtatcttgaggagtctcacgtgttttcccag

SEQ ID NO: 3534 - DNA, 675 bp, Homo Sapiens
  misc_feature (463)..(542): n is a, c, g, or t
gggtgtgctgcggcattcacgtgatctgcacgggcgcagatgtaggcaccggtccgagtgcctgccctctgtccccgcggctgggtctcgtctgctccggttcctgggctcctaattcttggtccagcttcttccaggtctgcgcgtctgttgttcccagcgctctgcgaagcctgaaaaggaggagcaacctgtccagaatccccgcaggacaggaaaaggaggggaaatctcgacatggaaaaactctacagtgaaaatgaaggaatggcttcaaaccaaggaaagatggaaaatgaagaacagccacaagacgagagaaagccagaagtaacttgtactctggaagacaagaagttagaaaacgagggaaagacagaaaacaagggcaaaacaggagatgaggaaatgttaaaggataaaggaaagccagagagtgagggagaggcaaaagaaggaaagnnnnnnnnnnnnnnnnnnnnnnnnnnnnnnnnnnnnnnnnnnnnnnnnnnnnnnnnnnnnnnnnnnnnnnnnnnnnnnnntgaaggagagccagggagtgaaacaagggctgcaggaaagcgcccagctgaggatgatgtacccaggaaagccaaaagaaaaactaataaggggctggctcattacctcaaggagtataaagaggccatacac

SEQ ID NO: 3535 - DNA, 1425 bp, Homo Sapiens
  misc_feature (699)..(699): n is a, c, g, or t
  misc_feature (701)..(701): n is a, c, g, or t
  misc_feature (848)..(848): n is a, c, g, or t
  misc_feature (850)..(851): n is a, c, g, or t
  misc_feature (866)..(885): n is a, c, g, or t
  misc_feature (1219)..(1227): n is a, c, g, or t
  misc_feature (1266)..(1297): n is a, c, g, or t
gggggggttggagcggaagcgcacgcctgctaggatcagcggtggtggttccgcgatggtaggcggcggcggggtcggcggcggcctcctggagaatgccaaccccctcatctaccagcgctctggggagcggcctgtgacggcaggcgaggaggacgagcaggttcccgacagcatcgacgcacgcgagatcttcgatctgattcgctccatcaatgacccggagcatccactgacgctagaggagttgaacgtagtagagcaggtgcgggttcaggttagcgaccccgagagtacagtggctgtggctttcacaccaaccattccgcactgcagcatggccacccttattggtctgtccatcaaggtcaagcttctgcgctcccttcctcagcgtttcaagatggacgtgcacattactccggggacccatgcctcagagcatgcagtgaacaagcaacttgcagataaggagcgggtggcagctgccctggagaacacccacctcttggaggttgtgaatcagtgcctgtcagcccgctcctgagcctggcctttgacccctcagcctgcatactggtatcctggtcccagctcctgccagggctgttaccgttgttttcttgaatcactcacaatgagaaactaacattttgctttttgtaataaagttaatttatattcagttcccagcaaaananaaaaacaacacaacccggaacaaaaagccccgacagaaaaagcggatacgcaacacgcacgaccaaaataaaagcgaaacacaccacggacaagcgtaacagatcgcgcgcccgatgcccccttgatacagaaatcccgtccatacngnncttttttggtggcgnnnnnnnnnnnnnnnnnnnnaaaaacaagttttctcaaaaccacctctttttgcgggggcggcgcggggccccgcaacaaaagaacgaagagaaaaacagcgcccgattataggcgtcctccccaaaaggaaaacccactctccggccgtaagcaaaaacggcgtttcgcggcggttcctccccccccacaaaaaacaaagaacgcccccgcgggggagcaaaacccgccgatcggtgccgccaaacaaaaccccccaaggggcggggtttttgggggcgcccctttatgggggatccccacaaaagcgggggttcccccaagcgggggtgcccttatatcatataatattctnnnnnnnnnggtcgcggctttttttcccgaagaaagaaggtgttgcgnnnnnnnnnnnnnnnnnnnnnnnnnnnnnnnngcggtgagaacccctcctccaaaccgggggttgtgtgagagaccactatcccgccccggggggtataccccgcccctgggtcgccgtcccataaaaaatacccccctccgcgtgggcagaaacacgtg

SEQ ID NO: 3536 - DNA, 478 bp, Homo Sapiens
aaaggccaacacttgaaagttattaaatacacagcttgcggactgggagttgatagcaaccaaatggctaccttacaaaggcagctttaggtccagacttggttttataaaattgggaattcggacttacttaacaaggtttgggatggagatggtctgcatcagctttttgtattaacaaagttactggctctttgtgtgtcaccaggtaaatttgcttgattaaacagcaaagccatattctaaattcactgttgaatgcctgtcccagtccaaattgtctgtctgctcttatttttgtaccatattgctcttaaaaatcttggtttggtacagttcataattcaccaaaagttcatataatttaaaaaaacactaaattagtttaaaatgaagcaatttatatctttatgcaaaaacatatgtctgtctttgcaaaggactgtaagcagattacaataaatcctttactttaatc

SEQ ID NO: 3537 - DNA, 1862 bp, Homo Sapiens
ctcaaggtctgtgtggatatcccaggaacgtccaagctgctgctggagctgccactggtgatcggcaccattcccttgcacccttttggcagccgttcctccagcgtgggcagccacgccagcttcctgctggactggaggctgggggccttgccggagcggcctgaggctcctcctgagtactcggaggtggtagccgacactgaggaggcagccttggggcagagccccttcccgcttccgcaggaccccgacatgagccttgaaggcccgttcttcgcctacatccaagagttccgctaccgcccgccacccctgtactctgaggaggatccaaacccactcttgggggacatgaggccgcgctgcatgacttgctgaacggcacagggacccctcgaggaacaaggttgcacaccagctttcagccaccatgactgtggggagtggctggaccaagggctgacctccccgactgcatcaaagttggggaaccaagtctcagagtgaggcgggggcctttcggatatcacatgggacagaggaagagcccggctggaatctgacttacctggaccgctgtccttgtgaggcattgaatgcccagtgcagtatccgagagactgtttaataacctgtcttcccagccaattggtggtgctggaatcccctaggagccttcagtctgggagaaacagagccagacatagacagttccagcatcacagaaccagaagaagagacctgcaactgtgagagtccagacaggaagcagagaagggcgtccttgcggaaagggcattctagctgaggctttggagtacgaataggagctcagcaggcagaccaatgaggaataaaggtcagagaaggtcagagctgagtgacgtttggaatccaccccgtttattgtagaactgggggttcagagggcaggtgcctcagagttgaggccacacagtgaggtctggtgggtgaaaggacccaggaacgaggcgttcaggaaagcaggttgtcagagctatgtggagtctgtgggtggcaggggcagccgctccagccttgtgaagactttgaaagccagagattcctggcgcaggcttggacttcctgggagctcctccaagtacccaggggcatcagagctgcctgggtgttacatggcccagggaacccaggttcagggtaggacaggcaagaccagatacccaatgtgcaaagtgaaaacactgggctccctgttaaacgatgaagaattcaagacagtgacagcattacgtcacccctggggacagaggtcagcctaaggtgacacacggggactactgtgcttccggaggctccctgtgtcctggaggagaaaagcattagagggggcagctggacaagctcccaactgcagagtcccagccctggctggggcagggccccggcctgggactcagcatttctgatatgccttaagaattcattctgttttgtacaattattttttaaaagtaaacgtgtggcgaacgcacccacgccatccgctcccggcaccctcagccgcatctgcgggcggcccctgcctccgaaagaattgctcaaccctcttttcgtggcgcgccgccccaatgcgagccggaaaagcccctaccgtgttctccccgaagaccatggggcataagcaccgggttgggatattccccaaacgaaaaaacaccccgcgtggcgaaccagccctcccgtgaaacccacccccaagcgcgttcccccggggtatctcctgggggttcccttacccgcggatgcttccgacgggcgctcgctgcacgatttaaaatcatcctcgcccccgcccctgttacccccttctatcc

SEQ ID NO: 3538 - DNA, 1184 bp, Homo Sapiens
  misc_feature (348)..(360): n is a, c, g, or t
  misc_feature (552)..(561): n is a, c, g, or t
  misc_feature (715)..(715): n is a, c, g, or t
  misc_feature (851)..(851): n is a, c, g, or t
  misc_feature (1036)..(1036): n is a, c, g, or t
  misc_feature (1044)..(1044): n is a, c, g, or t
ggagggtcggctttgggcggaactggctttgttgaccgggagaaacgagatgggggtgaagctggagatatttcggatgataatctacctcactttccctgtggctatgttctgggtttccaatcaggccgagtggtttgaggacgatgtcatacagcgcaagagggagctgtggccacctgagaagcttcaagagatagaggaattcaaagagaggttacggaagcggcgggaggagaagctccttcgcgacgcccagcagaactcctgaggcctccaagtgggagtcctagcccctcccctgatgaaatatacatatactcagttccttgttattcaaaaagcggnnnnnnnnnnnnncagggaacatgtcggggcgcctccggccctcggagaaggttttcctagacccattccgtttggggggcggcgggcccaggtagggtaaggtgaaacatgggcgccatagcctggtgttcctagggaggatccctggggcccatgacctagcgggctttgggattccctcacccaactaaaaacaaccgcccnnnnnnnnnncaaacgcgggaggcggtctcttgggaacaaaaatccccaggagtgggagggttcctggaaggggtccacttaacttgggggagtcttaattcaaacgaggcgaaggtccgagaccgcgcgaggccctgcgcgattaactctacgacatatcacncggcgcccccggcgcccctggggccacgctttcagtgcgcggagaggaaagggtggtgtggagaaagcttcccatttatagaggcccattctctggcgccgccaaccatggtgagaaacacctcactccgcccaanacgccgggcgcgttgagattggagaaacctcctggagaattcgcgcccccagcgcgggggagatttcacgagcccaaccccctctgggtcccgcgcgcttcggcgtcgggaacataagataatttctttgcgcgccacgttgaggctgggaaagaaaaacggcgcggcgtgccacacaacacaanagtgtggngtctcaccataattcggggggcgccagcgggttgttaaatcactcccacacggacctggggtggcgagacaacctctcgccccccacgaggggaaggtgggcgttgttggaagaatgtcggacaccatgctctatatttc

SEQ ID NO: 3539 - DNA, 1141 bp, Homo Sapiens
  misc_feature (111)..(126): n is a, c, g, or t
  misc_feature (135)..(252): n is a, c, g, or t
  misc_feature (1082)..(1091): n is a, c, g, or t
ggggggaatccaaccctttttcttggccgggttttcttgggaaacagttttgcccctgttctttttcctttgggggcccgggccccaaaaaaggttttaaaaaattttttnnnnnnnnnnnnnnnncgcaaaaannnnnnnnnnnnnnnnnnnnnnnnnnnnnnnnnnnnnnnnnnnnnnnnnnnnnnnnnnnnnnnnnnnnnnnnnnnnnnnnnnnnnnnnnnnnnnnnnnnnnnnnnnnnnnnnnnnnnngtgctatctgaaaaccatttattgcaacgacaaaactagaggttaattactttttattattgaattatattgtaaagtctacatctacaatttaatcagaaagaaatgctttgcatttacatcaaggacacatttattctaatggaataaaacagacacacacaaaagaccaagtacatgtttttaaaaaatgactacatgtttcacctggtcctatttttgctatttggaccatacttttaagtgaattgatcttacatacatgttaagtctgatttatctccccacatttttaaacactaaatgaagcttctcacaatttctaattataaacaaaaggctgaaaacagtatgggaaacaaagtttcaaaacaaagaaaagttgagtaaaaggtgccccctctatggctcatctgaaagaaacattttactcagagaggcaaacatttctgatctaggagtaagtttcccactcactttgcaaggacccactcattctgcagaaagacctacaagtctttctggtctcaattgcaaagtacgtgaaaatgtgtatgaaagatctaaaagctaaatattagaataaggctaattgaaatcaaaattgtgtgctggtctaaatatacatcttcggcttcttcctttttagtaagtatttttatttcagatgtatttaaaaataacttacatttttagtgtgctttatggtcaatgactgtaaagttgaaactcaaatgagtcagtttaaaatttttgtctcatttgattctattgaaattttaatcacctactactttaatcaagttattcatgaggtaagtttcagcttnnnnnnnnnntcatccacaaagataaccatttcaagagtacaaaaaatcataatgcccgg

SEQ ID NO: 3540 - DNA, 1122 bp, Homo Sapiens
  misc_feature (676)..(1054): n is a, c, g, or t
  misc_feature (1081)..(1081): n is a, c, g, or t
cgcgtttggttcccggtggtgcttcctgttcgcagctgcggcagtgacttcaaggttactgactttttatgatgtttggtggctatgagactatagaagcatacgaagatgatctttatcgagatgagtcatctagtgaactgagtgttgatagtgaggtggaatttcaactctatagccaaattcattatgcccaagatcttgatgatgtcatcagggaggaagagcatgaagaaaagaactctgggaattcggaatcttcgagtagtaaaccaaatcagaagaagctaatcgtcctttcagatagtgaggtcatccagctgtcagatgggtcagaggtcatcactttgtctgatgaagacagtatttatagatgtaaaggaaagaatgttagagttcaagcacaagaaaatgcccatggtctttcttcttctcttcaatctaatgagctggttgataagaaatgcaagagtgatattgagaagcctaaatctgaagagagatcaggtgtaatccgagaggtcatgattatagaggtcagttcaagtgaagaggaagagagcaccatttcagaaggtgataatgtggaaagctggatgctactgggatgtgaagtagatgataaagatgatgatatccttctcaaccttgtgggatgtgaaaactctgttactgnnnnnnnnnnnnnnnnnnnnnnnnnnnnnnnnnnnnnnnnnnnnnnnnnnnnnnnnnnnnnnnnnnnnnnnnnnnnnnnnnnnnnnnnnnnnnnnnnnnnnnnnnnnnnnnnnnnnnnnnnnnnnnnnnnnnnnnnnnnnnnnnnnnnnnnnnnnnnnnnnnnnnnnnnnnnnnnnnnnnnnnnnnnnnnnnnnnnnnnnnnnnnnnnnnnnnnnnnnnnnnnnnnnnnnnnnnnnnnnnnnnnnnnnnnnnnnnnnnnnnnnnnnnnnnnnnnnnnnnnnnnnnnnnnnnnnnnnnnnnnnnnnnnnnnnnnnnnnnnnnnnnnnnnnnnnnnnnnnnnnnnnnnnnnnnnnnnnnnnnnnnnnnnnnnnnnnnnnnntaaaccccaaatcgcaccaactgcagnttcgccctggccaacagaatggagaatctggtctcaaaaac

SEQ ID NO: 3541 - DNA, 1446 bp, Homo Sapiens
  misc_feature (115)..(115): n is a, c, g, or t
  misc_feature (1386)..(1399): n is a, c, g, or t
tttagggcgccctcaacggggcgcgcatgcctaatggggatgtccgatgctcgctgtggaacggcccgcattttttgcttgggttattcccaaaagggcgctcaatagggggggngggttcttcccccttttttgcccctgaaccgtgtgaggaaggcaaagccggaatcctgggttgatgggtggggttcccctggtttttgctggtattgggaaggaaggtgcttcgaaaggggggattgtaaaggccagccatcccaagctttttttcccaggaggaggaaagcttttcctgctgggggttctgttccacctttgtgtggggaaacccgaggaatggaggggacagcaaaaggggtggccccagatctgggcttggcccccttgaggaagtcttaggggaactagatggtgctggggctggagaagtcagggacattgcctgccgggggaggtagagctggtgcctactgcagggagaggaggctggcagtgctggcctgggctggacccactgccataacagttgccttacttggggtccctgggtaagatggagtgggtggggtcccaggggctttggtgctttctggtgattgggaccctgatgccaagtgcccactttgcaaagaagaaaaagttaatgaccctgctcccttggctcctgtccatgcttgcctggcctcctagagttggaggaacaagccctctcctggcagaggcaggagagcaagtgctctcctatgatccaatacatcaggcgggagtgctgagtccgtcaggacaccactcctcgcagcatcaaggtccagtggggttgggtcagggcagtgagaaggggtggcaagaggtaccaagaagctctcaaccaggcaggggcacaaatgcactcaacacctccaaactaagagaccccaaagtctcaactccaggctcagggctgcccccgcacagacactaactctaaaatcccaccctgcctctctgcccacccccaagggtgctcaggtgagcagctccctctgggctaaggccaaacaacaggagggttgaagtccagggacttctcataggcatcaggggcttgggtattccctctgcccttcagagctaacttattattatttttttggtcaaaaacaaaactgcagatccttccacagtctgcaaaccagttccttctgcagtgttttcctctgggagtgtcttgggctaagccacagcggtgtcaccccaccacacacactgccctgcaaaaggactgccaatacccccagcccattccccagcctcacatataaataaggacttgcgacccagaatcacatccagaagggaagtttcacatggcttggaatcctttaaaaaaggacagcaaaccaaatnnnnnnnnnnnnnnccctccctacccacaacatccagcctgatcccgggaattccggaccg

SEQ ID NO: 3542 - DNA, 1442 bp, Homo Sapiens
tcctcaaaaatcccgaggccccccaatttggtgaatatagtggtttaagggaactttttccaaaataatttaaccccttatatttcgcccagtatttggttcaaatccagtgattttgcattccacagacttggaataaaaccacccccttttaaactagggtcaaaccgaacctcccgagtgtcaaaataaattgatatggaagtatttttggtaaagttgcccataggaggagtttaaaaagcagcccctgttttttatagaaaaagttgtgacagggaataactcatcacattctgtgcaatactactcagcattcatatacactcaggggagcaataccctggacacatagcttatttcacattagtgaacaaactcaagatttttataaagttctgactttgggccagaagataaaatgtcccatatatacatatatacaaaccctaattcctaccctcttaaatcctttagttctaagaatggctttttgacttgtctttaagtttagaaaggaaaaagtgtgcaatgcgcttgcatctgtacttgctgaattatgaaacaaatgtgttaaatgagaaaaaaaccttgggatggtactaatacacttcgattatatacatgatctttgggtattcatgacaatcagtttaaccatctgttgccttatgaaaaacttaatttcctaagttacccaggaaatgtatttaaccatttacaaaaacaaaaattctaatatgcactttagaaaatcgtggtcttatatacctgcatatttcttccataagacaggtacacattaaaaaatattgctcaatgacataaaaatatatttatttctttcctttgccatttatgcatataatatttcaccgaagaagatgcatcattcaataaacaaatgcaaaaactactttatataaagtgtggttctctatttagcaatataaaatataaaatgataataatacagttagctattaaagagctaaattcaagaaatttgcaaaccagtacagcagtgaacagtcccttgtataatacaaaagtccattatgaaaaagtcaagtctattttgtaacaggttacataaaaatatgggccaataaatgcattatgaatgcagaaacagcactgctccatcagcacattcttcagtcttgtttggactagatgccaaacttactgttcatttttcggttcatcttgttttccattaagttcttgatcaactctgtttaatgaagaatatataaaataagaaaccagcaactgaacaattttctttctaaaaataatgactattttagcatagaatattactctgttaaagacaaagctttgcaaagaagcagacatagtaaaaacagttaccaaacatcatttccccaaccagaaaagagaatttttaaaggcaggaggacactggcaagaaatgt

SEQ ID NO: 3543 - DNA, 531 bp, Homo Sapiens
gagaaagtgactctgttctcttagcaaccgtctgtagcaaagaagtgcttccagcatcactccagcaacacgcccatgcgtcttctctcagcgtatttgggtcttctttgcccaaaagaacacaaaagcctttttccattgtatggaagatagtttttaagacatttgaaactttctactatagtttacagaacaaattattttatttttattgtaaatcttagtgtggaagagctgatttctaaaatatgattaaagtaaatatatacctatgaatatcaagagtcgtctccctgagcctgtagttggaagtgacgactgtaatggaatgatgtcttgtatagaaatgcccttctctgaaataaagagaactcctgggctttctaaagaggctgcgggaagccatcctccactcccactgtgtgtgagagcagtgcttctgatcctgctgtcaccccgacctctggcaggagccggcgccagtaggaaagacctccttcctaaataaaagaagtgtctcccatggaaaaa

SEQ ID NO: 3544 - DNA, 1200 bp, Homo Sapiens
  misc_feature (80)..(80): n is a, c, g, or t
  misc_feature (90)..(90): n is a, c, g, or t
  misc_feature (213)..(213): n is a, c, g, or t
taaaaaaataattttagctttaaaatacggatgagtatacatttctggatacaattatacaattttgctatgttttaacntttctctagnaatgttcatactctgaaaaataagatcaaatgaagctcacctgctttacaatatacatttttctaagcacacttgatatatatgtaaatatgtgtcagagtctatacatatatatgcagtatnttccacaattctctggaatgttatattaaaatctgatgttattatcactattaaaatatttttccagaaagtttctatttcattttctcaatgtcgtctcactttcttggatcttgatttctttctttttacactgtattttttctcaaaaagtttcttctcaactaagctcacttcttcatggagaagggaagtctttattctgagcaggaaggagaagagatttagtataaactgataactcagagaataatttgattcttcataggttgtcacatgtgtacaatagcatctgcagaatttctgtgtactaagccaatataatgaattcttagtcagcagtgattggcctttctctttcaggactccctgaaggctgtgtccatggaaacacattctatcagtgtcctcttcagtccagttgaactgaaaacttgaagggcttttttttccagcagttgctgttgaatcgaccagtgtgctaaattgtttctgtagattcaccaccatttctctttttttatatgctactggtttgtcgacaaatgagtagtagagtggcttttcacttttccacaggtacttggcccttgcttcttcccatttttgttttttctcatcaaaagctttcttcataatttggtaccactttctgaaatcaaaccatggcttatcttttttgttcttttcattatgcttttcagcaagattagacaaagaccactcgaaactgtcatccaatagaaagagcagtttcaataccaccacaatgatagctacagcttgtacatcgtacttaacagcttttgccattttggctataggatcaaatgtcagaaaatccacttctcccattccagtcatttttaccacgtggcaagttaagctatgcatttcatcagggaggttgacttccatcaagtatttcatacacagtatgttgggatgaagatagcagtcttcagttatgtctggaaaacgaggccc

SEQ ID NO: 3545 - DNA, 1177 bp, Homo Sapiens
  misc_feature (101)..(101): n is a, c, g, or t
  misc_feature (166)..(166): n is a, c, g, or t
  misc_feature (247)..(247): n is a, c, g, or t
  misc_feature (330)..(330): n is a, c, g, or t
  misc_feature (342)..(342): n is a, c, g, or t
ttccccttaacccggtttatgggttgttgaccggccaatccattcttccaggtgggccaataagggaatcccccccgattttccaaatcttaaaattcccnctatgattccccccagggaaaccaaattcaaggaaaaaattaaaccctctttctctttattatgnccataccatcccaccaagataaattagatgagtgtcacaccatgattctcattttgcaaaattaattaacacacaaaaatncctgttggggtggcaggaaattccaccaatgaaaaaactgaattccacaactgacaactgaaatttcagttttctagacaatntaaaattttacncaaatcccataaaaataaacataattccatttcacgaaaaccactggataatgtttaacaaagtctttgtagccaataggtttataaatacctgaattacaaataaatcagtcattattatgggaagtaggaatattatagaagagggcaaacaaaatcacttaaaatggccaaattccagaaacaggatttcagataagagggtacaagttttttaaaaatgaccactagccggtaagatcagaaccaatcatcctgccatatcatccattatttttaattaccatcttccgctttccctcttcacgtgagtaccaaattgaagggtttagaggccctcaaatgggtatcactcataaaggcaattttcatggtttaatatagaaattactctaatgtgagaacacaacatgggaactattcaaaatacacctttctatgcaaaattgagtttgtatctattttagcattttaaatgagcactctgcaactgagaccaaatatcaatcatctcttgaggttttctactatgtactaacatcagatctacataggagcagatgttatttttgtttttctcctcgatatcaaatgtcctgaagcctttgtgtttctctggaacgaggccgagtttctgaaggcacattccagtataaacgtcatcaatggggtagagatggacctggtcagtgatatggtacagcctcagggccaggtggccggagtagaggaacctccctacacctgcatatggtgtgtagaggccagagtaaacaactactgagatgtagtacttcagctacttatcacgatgaggtccagcattgtggatcac

SEQ ID NO: 3546 - DNA, 586 bp, Homo Sapiens
agtcatttatggctaataaccagtctttctacagcaatagagaacaataccgacagcatctgaaggagaaatttaataaatactgccggttaaatgatcacaagaggcccatttgtagtggctggttgacaacggctggagcaaattaaataaataaaatagctctgtctttcaatgaaacactcacgatgactactgcgccttctctttcgaaaaactcttaatttagtgacttatggcaaaattttatcttaaatcaatgtgattctttcttgttttgggagacggtggaggtatcctcattagttctttcttcaggcttgtgtctttagttgcgtggctgcgcaggcctgccatatgatttaagccatctcttttcattaaatgtttctcttcctgtgagacttactaaagcaacttagtggcaaaaagtaatgttgtacttataattctgtacagaaatgacaatgagctgaatatatggttttacaaagtagacatccacttgcaaaatgtttggatgtaatgttaaagcgcaatgtgcaaaatttaaaataaagaatatttattaatacgcacagcaaaa

SEQ ID NO: 3547 - DNA, 753 bp, Homo Sapiens
acctctccacgggaaactctataatatcacagggccgagtgctatatacaaataatcaccttagcagagacatagaggttaaatagctggaatcaccaaaagtatacaatatggacaacacaggagagtctacaaaagtataaacagccaagagattatgctgctattcttcagacatattgcaaccatgaggagacaggcagaatatcagatacactaacagccaacactggacttcaggtgctcaagataatcattgcaatggtatgggtctcaccagggcaaactcattcccattactctttaaaattgggacaagagtaaaactagaccagatgcgacttggctgaccaccaccaaatgtgacttggtgggacgataagtgaagagaaataaatggttctcttggaaggcacactacataaaatatgtgtgtgggaccacctcgaaatttccatcagacacaccaacacagtgaaatacagtacttgagaattcatgcaccaggtcagaaagttgtaaagttaacatcgagttttaacaaacccttctgtatatgccctgataaacaagtgaacttaagagcttctagctagtaaataaataagtcagtcctgtggcaaatattacaagtgttgaatcacttactagaagaatacttaattccgaaactcggttgggctggttttatttttttatcatgtggagttgccaaacattaaaccagaagttgcatggaagttttttaaaaat

SEQ ID NO: 3548 - DNA, 389 bp, Homo Sapiens
ttgtggggggattcgattattcaaggatgttcctgatagccggattttggtgtgtggtggagacggcacagtaggctggattctagagaccattgacaaagctaacttgccagttttgcctcctgttgctgtgttgcccctgggtactggaaatgatctggctcgatgcctaagatggggaggaggttatgaaggacagaatctggcaaagatcctcaaggatttagagatgagtaaagtggtacatatggatcgatggtctgtggaggtgatacctcaacaaactgaagaaaaaagtgacccagtcccctttcaaatcatcaataactacttctctattggcgtggatgcctctattgctcatcgattccacatcatgcgagagaaat

SEQ ID NO: 3549 - DNA, 701 bp, Homo Sapiens
ggcactttgaactgagtcaaattccaccatcgcctgaactccattcttcctgaaaatgacaattctctggacagggccacaaggattacagatagtgtaaagaacatccgtggtgatcgaataaatggggttcaggatggtaaagagaagcacactgttcacgctccgggagtcatccgagtccccagggcgggagatcttctggctggtagagtagttgacaaaagctgggtgaccagcaatgtatatttggttgtcggctgcgtagttcactgcgttgcaagcccccaacacatcttcaaactccaccagtgcttgtctctttttaggcattaccaccacatagctgatgggtccaaactcctgcaaggcctccacaaggtctgcttccaccacaccgtcaatcaggcccctgatgtggacaactggggaggcaggggttttgtgcgggtcatcgtagttctccccaccgccgccgccagcccgccgccccaggctcctccaccgccacacagccgccgcctccgtgctggtcgccggcgttgtcagtcttgagccgcttaggggcccggccgccctcactgccagccgccgtagtagcggccaccgccgcactccgccagcccgccgccgccattctccaccatcgctcccgaccgcctccgctgctcagtccgcatgctgcctctgctccagccgcc

SEQ ID NO: 3550 - DNA, 553 bp, Homo Sapiens
ctaggtttcatgaacgtccagacgaaactacaatactgcgcgactgggagctgctgaagttggctgaatggtattgggagtgagcgacggtgacccggcctgtttcgaatggagacaatcgcgatcacctgacacgtttgatgttgcaagcaaacaccgtcctcggagaatatgcgccgatgatgaagcgaccgggggctatgcgcgggagatgctaatagtccctggaacctaagatcattcacttgatggctgcgtcggttgcgggtttggccatcgctcgtttcagcacgaatataagatcggtaactacgtcgatcacgtccagaagacggacatatacgtactctataaataatcgcgtatagtggcacttcttaaaggcatcggaacagtcggcgagaaagacctgctcaacacggtgacccgatccctcgcccaggctgcggctacggtaggcaaattcatcgacagaccttgctacgtcatcgaggggaactggtcggtcagattccgggacgtcgatacgtaggacgttgtttttcccgatcag

SEQ ID NO: 3551 - DNA, 386 bp, Homo Sapiens
acccccgtaagttgcccaaagtccttcaaattggaatggatgataatgaaagagactgagttttccaaagctgaagtttaacaacacaaaaatcacatttcatatcactaattagtgaaaagttttgctggtgacaaaaatttttcaaatgggtggttactgttggtgttttaacttcctctaaatagaactctgaattctggggcaaactctgcagaagttaaaatcactgatgttctctggttggctgatacattttagtactgctgatagaaataaaaatttctttctacccaccagagggttaagggctcccggggttaagggctcccggggtaaagggctcccggagggtaaagggctcccggaggattaagggctcccgg

SEQ ID NO: 3552 - DNA, 790 bp, Homo Sapiens
aattcccgggatctttaaatgttctgccatcatttcacctgatgagcattcttggagcctgccagatattgttaggtcctggggctgcaaagaggtcctcaacaggatgtaaagcaaacttaattgtaattaatttattcagcccattaagaaagtactaaagttttatctctgtagttcctcaaattggcatctggtaatgtacattgtgaggtagactgataatgaaatgacagtgcaacatcttaaccaagaagtaaatatgacctcagtgtcctataaataatgtaagagcaggatttgaaacttggagagctgttttctcatttcatgtacacttgccccaaattgtctttgaagtcgtgtgcattgcacgttggatgagccagggaaattattacattaacaagcattttgtgtgtacgtagtagttactttgtactgagagaacttgctttggggtgcaattaataaactgattttatttgggagaaacaaggaagggtgcacttaactagcaacctaatcatgatttttcagcttttgccccttagggtttaaattacaattccaaaatgctagacatactgtattttttcgttcagtgtggcctttaattttcccctcttgcaagtttgttctgcaatgaccttttacatttgaacacatagtttatgctttttagattttggatgctttctttgccaaaataaagcgctaactgtgatttcaaacttgacttttctttcccttttcctgttattttttccttcccaaaatggccctattt

SEQ ID NO: 3553 - DNA, 435 bp, Homo Sapiens
tcgagccggtaccaacctgaagttgccaaatgtaaagcttcttcaaaagaataactcatatattttgacactcaccatgttgctagcctgaatgcgtggaagacaaaaacacacaaatcaagtctcttacatttctggaggcacaatatttaacatctgctctgagtttaaatgttaattaaataaagactaatctcctctcacatatctacagtaatctatcacttgcccacacataccaactatctggaaagctacagggtgaaaaaagccagtaaagtgagatatcccaaagaagtaaagtccatcacttggcttctatgaagctcaagagaaaaagaaagtacagaactgagagggagtataagaaaaaattctagacgccaggtgcagtggcacacacctgcagtcccagctatttggcacttaggggac

SEQ ID NO: 3554 - DNA, 252 bp, Homo Sapiens
tgagccggtaccaaccctgaagtgccaaatacttgctgtggcattgaaagtgttctttattttatcttggtgcctgacacactaatctgtcctgtgctgcttcaaggaagcatttgccaattttaagaacatagggcatcttgaagacttaccatgccagctttgatcactgaagtaagtggacggataggcagttagcaacaattaagttattcttttactctgttgcctttgggaatcagaagtgaatgg

SEQ ID NO: 3555 - DNA, 487 bp, Homo Sapiens
atgagccggctccaaccgaagtgccaaatatttgtgaaaagtcttaagaagtaagcaattttaattatgtatcttgatacagagcccagaaaaaaggacagagttatgaaagcaatgcctggagaaccaacccctcccagcattttcaggaggcacaagtgagccagggaagacatgtagcgtagctctgccccacagctcttggcctaggtgctgcagacatccacgtgtccccaggccttcccgtggccacttgtctataccccagaatcaaacaggtatcaacaatatcacagaagcaacagttttatgaccttaaacacctaccagaaataggctaaacctatttgactagtagacccaggcaaaaatctctaaattaaattctgaaaatatttctattttattttaccaacaattttaaaactagcctcatttaccaaagattactgaagtcacatgaacttgaaaagcattgggcacttca

SEQ ID NO: 3556 - DNA, 728 bp, Homo Sapiens
  misc_feature (607)..(607): n is a, c, g, or t
  misc_feature (622)..(622): n is a, c, g, or t
gacaggcattaatatcatcaccgagaccctcgattttgggcgtcattctgctagtattggtggcaggaacaattcatatacaggtgacatctgatgtgctagaacaaagaatagtacagcaggttacaggaatacttaaagatgcgggagtaaacaatttaacaattcaagtggaaaaggaggcatactttcaacatatgtctggcctaagtactggatttcatgatgttctggctatgacaaaacaaatggaatccatgaaatactgcaaagatggtacttacatcatgtgagataactcaagaattacccctggagaataaacaatgaagattaaatgactcagtatttgtaatattgccagaaggataaaaattacacattaactgtacagaaacagagttccctactactggatcaaggaatcttttttgaaggaaatttaaatacagaatgaaacattaatggtaaaagtggagtaattatttaaattatgtgtataaaaggaatcaaattttgagtaaacatgatgtattacatcatcttcaaaaatagatatgatggattctagtgaagaccaaaattacttctgtttactttctatcangaagcatctccattngtaatatgtatttacatgtttattacaaagacccaaatgaaaaatttttagtccattttttgcatagcctaaagataaaataggaataaaagttctgtatttatgc

SEQ ID NO: 3557 - DNA, 1212 bp, Homo Sapiens
  misc_feature (936)..(1074): n is a, c, g, or t
  misc_feature (1078)..(1078): n is a, c, g, or t
  misc_feature (1086)..(1156): n is a, c, g, or t
tgtggtggctgcaatcgcccagtgttggaaaactacctttcagccatggacactgtctggcacccagagtgctttgtttgtggggactgcttcaccagtttttctactggctccttctttgaactggatggacgtccattctgtgagctccattaccatcaccgccggggaacgctctgccatgggtgtgggcagcccatcactggccgttgtatcagtgccatggggtacaagttccatcctgagcactttgtgtgtgctttctgcctgacacagttgtcgaagggcattttcagggagcagaatgacaagacctattgtcaaccttgcttcaataagctcttcccactgtaatgccaactgatccatagcctcttcagattccttataaaatttaaaccaagagaggagaggaaagggtaaattttctgttactgaccttctgcttaatagtcttatagaaaaaggaaaggtgatgagcaaataaaggaacttctagactttacatgactaggctgataatcttattttttaggcttctatacagttaattctataaattctctttctccctctcttctccaatcaagcacttggagttagatctaggtccttctatctcgtccctctacagatgtattttccacttgcataattcatgccaacactggttttcttaggtttctccattttcacctctagtgatggccctactcatatcttctctaatttggtcctgatacttgtttcttttcacgttttcccatttccctgtggctcactgtcttacaatcactgctgtggaatcatgataccacttttagctctttgcatcttccttcagtgtatttttgtttttcaagaggaagtagattttaactggacaactttgagtactgacatcattgataaataaactggcttgtggtttcaatnnnnnnnnnnnnnnnnnnnnnnnnnnnnnnnnnnnnnnnnnnnnnnnnnnnnnnnnnnnnnnnnnnnnnnnnnnnnnnnnnnnnnnnnnnnnnnnnnnnnnnnnnnnnnnnnnnnnnnnnnnnnnnnnnnnnnnnnnnncaanttgttggnnnnnnnnnnnnnnnnnnnnnnnnnnnnnnnnnnnnnnnnnnnnnnnnnnnnnnnnnnnnnnnnnnnnnnnggggcaacatgttttttcaaaaaaaccccggccaaaaaaaggggtgttttcccccc

SEQ ID NO: 3558 - DNA, 867 bp, Homo Sapiens
  misc_feature (836)..(836): n is a, c, g, or t
ggggcagaaaggcacaggactcgctaagtgttcgctacgcggggctaccggatcggtcggaaatggcagaggtggaggagacactgaagcgactgcagagccagaagggagtgcagggaatcatcgtcgtgaacacagaaggcattcccatcaagagcaccatggacaaccccaccaccacccagtatgccagcctcatgcacagcttcatcctgaaggcacggagcaccgtgcgtgacatcgacccccagaacgatctcaccttccttcgaattcgctccaagaaaaatgaaattatggttgcaccagataaagactatttcctgattgtgattcagaatccaaccgaataagccactctcttggctccctgtgtcattccttaatttaatgccccccaagaatgttaatgtcaatcatgtcagtggactagcacatggcagtcgcttggaacccactcacaccaatccagtgaccgtgtgtgggctggcggctcttctcccccaccaacggaacccctgtgtgcaccaaccttccccagagctccggagcgccctctcctcacttccaggttttggagcaagagcttgcaggaagcccgcacccagcttccttctgaccttcagttcactttgtcgcccttggagaaagctgtttttctttaactaaaaataaccaaaatgctcaaataccataacattaacaaaaaaccaaaaattggtcggccggcctcggcccctcgaagaagccttcctagacccattcgtttgggcgcgcgggccccattaggtaaggggaacatggccccataccgtttttcctaggagaacccgggncatggactaggggcttggattttccaccaaa

SEQ ID NO: 3559 - DNA, 598 bp, Homo Sapiens
  misc_feature (424)..(424): n is a, c, g, or t
  misc_feature (428)..(428): n is a, c, g, or t
  misc_feature (434)..(442): n is a, c, g, or t
gtcccactttgtaacatgggaagagtagaagagaaaattaaatgtggaaatcataaatgcttttctaacagggttatgctattctgtaacactaaatgtctgtcttttctcttaaaagattaagttttattaattttgtcatacatttctctatttgaatatatcttaaccattttatgttccaaattcgttttttgtccaagacattctatcagaattttacttgcctctataatctgaaaaatgggttctagaatgtcccacttgctgtctcttagaggctgagcttcatttctatgagcaaagagctcatttagcaatgtagttatttcagtatttatttctattatggaatccctggggttcagaatgtaactttgtacatgagatatatataaatatgtatatgaacataccccccacncccnaaaccnnnnnnnnnccctgtgcggccccctccggcccccccaaaagctttccaaaacctttcgtttgtgcgcgcgcggcccccgtaaggaaagggaaaattgggcctaagctggttccccaaggaaaaccccgggtcaatgaccaagggcgttgggattcccctcccaat

SEQ ID NO: 3560 - DNA, 885 bp, Homo Sapiens
gggtttgtatcatggggtgcctactgctgtctaaactctgctctcctaattagctgactcttgaaaatgaaatcctaacctctttcctgcctcttttctttctcttttcaggaagagtgtgggtagaaagtccggagggcaacttccaatttaattctgctctgtccggcgcataggctgaattccaaaagaactttcttcctaggatgtggcgcttaacgcaccgtcatgtgggtggatcagataattgctcctgtggggccctggcttccttctctgtttgtgcagtatttgtttttgctgtccttgttgagaaatatcccctgtgcaacccacccttggttgaggatcacaaattgaggtgccttacttgtacgctttctgttagtatttttcgtttctgttccttaactgctgagcctcagccagcgtgggtcctgggggaaataccattccaaaggaagccatccctatggggaaattggttttactgggtaaattaatacttttatttcttcccctatcccttccttcctagttgtgataaacatgggagaggagtgactttgactgctggggaatttcctcctaagaaccttattcccaaaataagccagggattatgtcaaggcttctttcaaggaggctcataaaagcagtgacctcatccggggctttggatagagtgagaattccccaactaaattggacttctctgctttatccccttctcttccttcaccatctgcactacatttctggctgatcccaatcagattcccgctaatggaagaagtttagaatctttcaggtggaataaagtcacatgaaaacaaaacacaactatatatattttcagtttttttgccttattgatttttttcc

SEQ ID NO: 3561 - DNA, 1359 bp, Homo Sapiens
  misc_feature (201)..(281): n is a, c, g, or t
  misc_feature (918)..(976): n is a, c, g, or t
  misc_feature (1239)..(1310): n is a, c, g, or t
gtgggagataagatagatgaagtgtgaaattgtgaagaatcttttattcagccaaagactttggacttgatgctgtagatagtcaggaaaccattgggaaattttaagtaatggtaaggggcaaaggagggggtggatactagaggaccgatttgaaagcgattgtagaaagtattaagaaatgacaggatttgttacatnnnnnnnnnnnnnnnnnnnnnnnnnnnnnnnnnnnnnnnnnnnnnnnnnnnnnnnnnnnnnnnnnnnnnnnnnnnnnnnnncattcagttcttatcaaagaaataacccagacttaatcttgaatgatacgattatgcccaatattaagtaaaaaatataagaaaaggttatcttaaatagatcttaggcaaaataccagctgatgaaggcatctgatgccttcatctgttcagtcatctccaaaaacagtaaaaataaccactttttgttgggcaatatgaaatttttaaaggagtagaataccaaatgatagaaacagactgcctgaattgagaattttgattttttaaagtgtgtttctttctaaattgctgttccttaatttgattaatttaattcatgtattatgattaaatctgaggcagatgagcttacaagtattgaaataattactaattaatcacaaatgtgaagttatgcatgatgtaaaaaatacaaacattctaattaaaggctttgcaacacccaccacaagacacaaacacaaaccccacaaccgacactaacacctcactctacctaaagatcaacgcgcgcccgaccatggttggaccacacttagcgactgcaaactcccctccaccgctcgcccgtctaccgccgccctgagcccacaaatagcagctcgcgccgccactcccgtccgccgtcgcgcgnnnnnnnnnnnnnnnnnnnnnnnnnnnnnnnnnnnnnnnnnnnnnnnnnnnnnnnnnnncgcctgcccgcggcctccccgcgccgatgtaagccgatccccgccactctccgtcccaaccactccgctcccgcctcgcccgtagagacgcgcccttcgccctcgtacccgcccccttctccgccccgtcgcgcatcctatccgcccccgcacctaaatactctcctccctgcgcccgggcctatatcccccgccgctgtatcgatcgccgctatccggcggcgtgccggtgtttaccgggagcgccccgttaccgctttcgnnnnnnnnnnnnnnnnnnnnnnnnnnnnnnnnnnnnnnnnnnnnnnnnnnnnnnnnnnnnnnnnnnnnnnnngtcttgtttccgcccttctccccggtcgcgcgtagcgcggccccaaatc

SEQ ID NO: 3562 - DNA, 881 bp, Homo Sapiens
  misc_feature (25)..(25): n is a, c, g, or t
  misc_feature (57)..(57): n is a, c, g, or t
  misc_feature (159)..(159): n is a, c, g, or t
agagctgtgtgatgtggccatgagnttggagcaatcacctcgtggaattaggttcangcattgggcctttatggggctcgaggcggagggattggggatcggaaggaagtcatgccaaaaatggacatcatttctggaacactggcaaaagccttgggntgtgttggagggtacatcgccggcacgagtcctctgattgacaccgtacggtcctatgctgctggcttcatcttcaccactctctgccacccatgctgctggctggagccctggagtctgtgcggatctgaaagagcgctgagggacgggtgcttcgccgccagcaccagcgcaacgtcaaactcatgagacagatgctaatggatgccggcctccctgttgtccactgccccagccacatcatccctgtgcgggttgcagatgctgctaaaaacacagaagtctgtgatgaactaatgagcagacataacatctacgtgcaagcaatcaattaccctacggtgccccggggagaagagctcctacggattgcccccacccctcaccacacaccccagatgatgaactacttccttgagaatctgctagtcacatggaagcaagtggggctggaactgaagcctcattcctcagctgagtgcaacttctgcaggaggccactgcattttgaagtgatgagtgaaagagagaagtcctatttctcaggcttgagcaagttggtatctgctcaggcctgagcatgacctcaattatttcacttaaccccaggccattatcatatccagatggtcttcagagttgtctttatatgtgaattaagttatattaaattttaatctatagtaaaaacatagtcctggaaataaattcttgcttaaatg

SEQ ID NO: 3563 - DNA, 743 bp, Homo Sapiens
ggactgagtttggacattccagtttcgaccaggctgaaatttcccacagtgaatccgaacatctcccagctagggattctccttcacttagtgaaaatcccacaacggatgaagatgacagtgagtatgaggactgtccagaggaggaggaagacgactggcagacgtgctcagaagaagacggtcccaaggaagaggactgcagccaggactggaaggaaagctctactgcagattctgaggctcggagcaggaaaaccccacagaagaggcagatacacaattttagccatctggtatccaagcaggagttactggagctctttaaggagctacacactgggagaaaggtgaaagatgggcaacttacggtcggactggtgggctaccctaatgttggtaagagttcaacaatcaacaccatcatgggcaacaagaaagtatctgtgtctgccacacctggtcacacaaagcactttcagactctctatgtggagcctggcctctgcctgtgtgactgtcctggcttggtgatgccatcttttgtgtctaccaaggcagaaatgacttgcagcggaatcctcccaattgatcagatgagagatcatgttcctcctgtatcactaatcataacgcctagagaggatgaagatccccaccgacctccaacatcggaagaactgttgacagcttatggatagtaagttgtagattcatcagtaaaatgtgaacaaaagtaacag

SEQ ID NO: 3564 - DNA, 735 bp, Homo Sapiens
acaggatcttctgtgaccgagacgacctcccaaagtgctgtgattacacacgtgagcactacaccaggccggaagactggatttttgttaacagatgacagttacagaataagagtttatacttagtatctgaagttgaggttcatttctgcatactgtcccttttccactgactaccatgaaataagtagttgcttaattttataaaattaatttcccctgcccaagcaacagtaaaagccaaaacaaaaaacaaagaatcatgtcaagcagaacttatgtaacagttcccaaagaaaacaaagaatactttttttgttaatccacatttcattgaagttattttgagctgcttttagaggaaacagccggaagtttaaatgagcatgttccttagaacacacaatgggaagacagtttgggaacaaaaagcatcaaggtacataaattttgggggtctaatttaaaatatgagcatgagttttaaaagctggaaaacttgactatgaattccagctctaccacaaactggtcacttgtcttctcacctctttgcaactcacgttcccatctgtaaggtgaagatactcacatctgctctagcagtttcacaggttgctatgaggtgctaatgagatcatttaaaaatccaactatcattggtatctcagtaagaatctggcattgggagctcaaacactgcaagattcatgcgggggatcataattcttgccc

SEQ ID NO: 3565 - DNA, 986 bp, Homo Sapiens
ggggagggcggtggctcaggctcctggaaaggaccgtccacccctccgcgctggcggtgtggacgcggaactcagcggagaaacgcgattgagaaatggaaaagaaaatgaaataaatcagcagttatgaggcagagcctaagagaactatggcaacatcaggtgactgtcccagaagtgaatcgcagggagaagagcctgctgagtgcagtgaggcgggtctcctgcaggagggagtacagccagaggagtttgtggccatcgcggactacgctgccaccgatgagacccagctcagttttttgagaggagaaaaaattcttatcctgagacaaaccactgcagattggtggtggggtgagcgtgcgggctgctgtgggtacattccggcaaaccatgtggggaagcacgtggatgagtacgaccccgaggacacgtggcaggatgaagagtacttcggcagctatggaactctgaaactccacttggagatgttggcagaccagccacgaacaactaaataccacagtgtcatcctgcagaataaagaatccctgacggataaagtcatcctggacgtgggctgtgggactgggatcatcagtctcttctgtgcacactatgcgcggcctagagcggtgtacgcggtggaggccagtgagatggcacagcacacggggcagctggtcctgcagaacggctttgctgacatcatcaccgtgtaccagcagaaggtggaggatgtggtgctgcccgagaaggtggacgtgctggtgtctgagtggatggggacctgcctgctggtgagggcgggcgtgcgggcagctgggggccggagctggggggcttctgagcacgggctcggctgggccaacctcaggatctcaagggtcgtgcgtgattcattttgatgttttccctaatgtgaggtctaattaatttcttgtgtgctagtaaccacgttctcctgatcaaatatccctgtc

SEQ ID NO: 3566 - DNA, 947 bp, Homo Sapiens
  misc_feature (484)..(493): n is a, c, g, or t
ggatcattaggtaaaggaaaaccaatgaggagttctgcagttttcttttaataagtaaagtgagacttgggtggtgggaagaaggaaggtgggaagaaggaattagacactctgcctgccactctgcgtgtgtgtgctctcgcgcacgtgctgtctatatggaagccactcccttttctttcctttgaaactggtaaggttaaaataggggagaaatcctacatgttggaatgatagctttttggaaaattttaaaaaactctccaggctctccatcttgatttatgcttgagttgttatgtgccatatttgctttgaactctgattatcagaagttttactaaaactttgaaataattcactttcatctgctttctagattttgtacatctcagtccataaagcaaagcttgttgatagtgtagttttctaaacgctgcaaatttgcagcctttaccactacaaagaagtttggatgagggannnnnnnnnnctttgtcaaaatagttcctgtttctgtagaaatttcatttttagattaaactgtgatggatgagctatcataattcaagtatacatttcttttttctatcagatattcattgtcatgcagtagtagtaaaaacatcaaagatgcagcaagcttattaagtattatttttctaaaagaaataggaggcattttcatctttattaatggacttttggttatgcaaacactttgataatataaacagttatgtcccctataaatctggtcagcaacctccttttgattttgtggggtaagttaaatagtctgtagtaaggaaaagtactgggtacaagtggttcccaaactaagataaaagactaaaataaaatggctaaatcttaaaagaaactgggtttatgcactaaacgttttgtgccttggtctaatattaacatgatgtatgtgtaaactg

SEQ ID NO: 3567 - DNA, 1706 bp, Homo Sapiens
  misc_feature (980)..(1083): n is a, c, g, or t
  misc_feature (1089)..(1091): n is a, c, g, or t
  misc_feature (1257)..(1266): n is a, c, g, or t
  misc_feature (1296)..(1304): n is a, c, g, or t
  misc_feature (1484)..(1484): n is a, c, g, or t
  misc_feature (1518)..(1530): n is a, c, g, or t
ggggacctgttgggaactctgacctctcaccttatccttgccatccacctaagacagcacaacagaatggtgacactccagaagcccaaggattagacatcacaacatatggggagtcaaacttggtagctgagcctcagaaggtaaataaaattgaaattcactatgccaagactgccaaaaagatggacatgaagaaactgaagcagagcatgtggagtctgctgacagcgctctccggaaaggaggcagatgcagaggcaaaccacagggaagctggaaaagaagcggccctggcagaagtggctgacgagaagatgcttagcgggctcacgaaggacctgcagaggagcctgccccctgtcatggctcagaacctctccatacctctggcttttgcctgtctcctacatttagccaatgaaaagaaatctaaactggaaggaacagaggacctctctgatgttcttgtgaggcaaggagattgagttcactatggagaagtcagcagcaggaggcccatcccttactcagttgccgggacatccccagtctcgggggaagaagatgccatgggcttatacccaggctgtagccaactaccaacgtgcctgtttgtttgttgctctttccttctctccatcatagtctgggtgccagcgccctgaagctccgtgctcaactgattaaactttactgccctatggtgaccatctaggagaggggagggcagagggggtgagggtactattctggattgagaaaacctatatccattctttatatcaatgtatagttttagtctcctaaattgatctgttattttccaaactattctcttgtagaaaattttccagtgggcacttaatggtgcccttgaagaacttcctaatccatgtacataaaatacatcatatgtacacttataaatgtatatagaatgctcaaaaataaaattcttaataatagaactggcaaannnnnnnnnnnnnnnnnnnnnnnnnnnnnnnnnnnnnnnnnnnnnnnnnnnnnnnnnnnnnnnnnnnnnnnnnnnnnnnnnnnnnnnnnnnnnnnnnnnnnnnnacgggnnngggggacggggccccacaaaaaaactttctgaaccccttcgttgggcgcccgcgcgccccccaaagggaaggagcgcacccgccacataaagtgtctccccctacgagaaacctcccggccaattcacaatgagggggttgaagattccccacccataaaaaaaannnnnnnnnnacgggggcaaacacaaaatggtgttttttnnnnnnnnntcctcctcggaggggcggttgttgtggagggcccaattacttgggggaatgtacttcaaacaggggatccctccccagggggaagtcccgtaaaactcataacataatttccccccgtgccgcccttttgacccccttaataaaaaggagaaaaatggtgtgggcaacaattcactatanaacatactcttgtggcagcaaccagtgcagaggnnnnnnnnnnnnnagatgggggttttagtttgcacaccctctatattaccacccacaggggaggtgttgcccgcaacgccctgtggtcgcgcctgttggggcaaagacacaatatttcgcccaccgcgtgggcgagagacctgggggcacgaaaagaaagtctgcctgctataatgttcaccgccccct

SEQ ID NO: 3568 - DNA, 1229 bp, Homo Sapiens
  misc_feature (427)..(427): n is a, c, g, or t
  misc_feature (1055)..(1055): n is a, c, g, or t
gggggagtcggcgccatgaccccatcgaggcttccctggttgcttagctgggtctcggccacggcgtggagagcggcaagatcaccccttctgtgtcattctctgaggaaaacaagttcttctcaaggaggaaagtctgaacttgtcaaacagtcccttaagaagccgaagttaccagaaggtcgttttgatgcaccagaggattcccatttagagaaagaaccactggaaaaatttccagatgatgttaatccagtgaccaaagaaaaaggtggacccaggggcccagaacctacccgatatggagattgggaacgaaaaggacgctgtattgatttttaagtcgcatattctttaacttcaatattgttttctgaatatgtacatctgaattaacttatctcctgattattttcctttcttttgnaaagccccgcactccagataaaaaccctcccatgaactgattctccccccctaaatacccccgtaattgccacacactaccagtccctttcccatagcatgtatctactaacctcccgaccgcccaatcccctccgtctttgtcgctacccccccagtgaagaattttatgctcgcttttttgctgttgtggcgccctcctttatctcccaccctctccaagagaagaccattcttttcttagaaacacccctcctcattcttttattgtgagcggctccggcggcgcggcttcccccctatcggacggatggttaagctcgccaaaactcagtgcggcgccacaaccacgatgtggtggtttactcccacaagagaggagacatatcctcgctggtgccaccaccacaaatagtaggaggtctgtgcgcggctatcttcccacacactaagagataataaacaagctcgtgtgccgcgcgtgcggctctaatccgactgagagtgtctgttcctgtgtgtacacaccaacatcacccactaaatttgcggtatgactctcctcagcgcggcgcgcttatttatgactgcgcgcgggcgcatatatcacgacgacacttacgtgattnttccttctccccgcgcgcgcactctctctatgtatctctattattactttattgctcaccacgactctgtcggtttctctcttttatcttgatccacacacatggtattcggcacgcccatcccacttagtcgcgacgtttgtcgtctcccgcacgagtagtagagacgccctc

SEQ ID NO: 3569 - DNA, 506 bp, Homo Sapiens
cacaagggtgttttgttgcgtcggcctttgtatttgccgttgcgtccgtttcctgtgttgtgtcggcctgaaagaaaaaggtgtttatttaggccatcaactaggatcataataaataacgtaatatactaatgtaataacagatcttctcatgcatttatcgtgtttataaatatagaagaaagctggcttacagggctgttgggacaaatttggaaaagtgtatttggcaattacacagtaaaagttaacagtgttgactatcagattctcttttctgtcagtttttagaatacatcccctatacatctgtgaataaatggtaatggtctcttagagtttctactttttgtgaacatacaagagttaagtaaattgtcaaaggatccaggttgacaatgtgttatttgtcaatatttctaatgaaaaacagatcttagaaaaatgaactcttctgcatttcattgtagaggctgatatattacaagccggaatcattcaaacaa

SEQ ID NO: 3570 - DNA, 546 bp, Homo Sapiens
ggggcggcggcgcggtgtaccctgggatagggagcgatctccgagcgaggcggcaagatggacgcgggatttttccgcggaacaagtgcagaacaggataatcggttcagcaacaaacagaagaaactactgaagcagctgaaatttgcagaatgcctagaaaaaaaggtggacatgagcaaagtaaatttggaggttataaagccttggataacaaaaagagtaacggaaatccttgggtttgaagatgatgttgtgattgagtttatattcaaccagctggaagtgaagaatccagactccaaaatgatgcaaatcaacctgactggatttttgaatggaaaaaatgctcgagaatttatgggagaactgtggcccctgctgctaagtgcacaagaaaacatcgcgggaatcccttctgctttcctagaactgaagaaagaagaaataaaacaaagacagattgaacaagaaaaactggcatctatgaaaaagcaagatgaagacaaagataaaagagataaggaagaaaaagaaagcagcaaa

SEQ ID NO: 3571 - DNA, 972 bp, Homo Sapiens
  misc_feature (775)..(795): n is a, c, g, or t
ctggtccctgacccttgcaggaactgcccaaaggtgaagcgcgtcttcaggtcaatagataatctactagagattgtccccagagaacagaactgggccctgaggcccaccgttgccctttcctgagagtcccagcccagtgaaaggaacacagttgacatgttgttgaagccggagatgttgcctgtatgcgtaaaagagctctctgtttcaggctcatgtacagtcaggaatggttccttctcatccaactgcccatgcgccaatgatgctaatgacgacacagccacccggcggtccccaggccgccctcgctcaaagtgcactacagcccattccagtctcgacaacagcgcatttcccctatatgacgcacccttcagtacaagcccaccaccaacagcagttgtaaaggctgccctggaggaaccgaaaggccaaattccctcctcccttctactgcttctaccaactggaagcacagaaaactagaatttcatttattttgtttttaaaatatatatgttgatttcttgtaacatccaataggaatgctaacagttcacttgcagtggaagatacttggaccgagtagaggcatttaggaacttgggggctattccataattccatatgctgtttcagagtcccgcaggtaccccagctctgcttgccgaaactggaagttatttattttttaataacccttgaaagtcatgaacacatcagctagcaaaagaagtaacaagagtgattcttgctgctattactgctnnnnnnnnnnnnnnnnnnnnntcaagacttggaacgcccttttactaaacttgacaaagtttcagtaaattcttaccgtcaaactgacggattattatttataaatcaagtttgatgaggtgatcactgtctacagtggttcaacttttaagttaagggaaaaacttttactttgtagataatataaaataaaaactt

SEQ ID NO: 3572 - DNA, 1418 bp, Homo Sapiens
  misc_feature (126)..(126): n is a, c, g, or t
  misc_feature (256)..(256): n is a, c, g, or t
  misc_feature (368)..(368): n is a, c, g, or t
  misc_feature (372)..(372): n is a, c, g, or t
  misc_feature (385)..(385): n is a, c, g, or t
  misc_feature (614)..(670): n is a, c, g, or t
gggaagtaccgggcgcggggtacgggcgcgaaaatagtgggcgggaaataaatagcggtgccggcgcgagaacagatatcgcgcggcgccataactgagcgtgtgtactggcgcgtatctcatgcnccgcatagtgcataaatagtggacaataatcgcggtatatattctgcgcgcggcgcggatgaataataggcgcgaatgcgcggatctaggcgcgcgtccgcgcccggtataatatagggcgtgatccaancgagtgatggcgaacagcgtggacaacacgggtgggtataagagaacggcggcggcataacggacacactagagtctccgcgcgaggagtacgaggggggcctacgcggtanaganagcgcggaacganacggcgcgcgcgccttaaacgcgcacgcggcgcggctgtccacgaatcggcgggcgaccagcgcggcgacccgcaatacgcgcgcaatcataggtggaaaaatggagaggtggggtggtacggcaaacggggcgggcgacggccggttagcggtatcgggacgcggaataaaacgacgtgagatcggcgcgtgcggggaaaggtcttccaaatgaaggtaacggcggannnnnnnnnnnnnnnnnnnnnnnnnnnnnnnnnnnnnnnnnnnnnnnnnnnnnnnnncgacgaaggcggaatgcaggaggggccggcggaacaggggtggttggagagggcacacggttgggggcggtggttcgcagaggacgggacgggcgctcggtgttctcgcctgatcactcggcaaggctttcgagtggtgtgggagcgggagtccgcgtgcttcttgttttttggtaggtttctggcagagttttgggatgggtatgtgcaccggtggtttgcgcgcactcttcgtttggagtaaatacatttattgatacccatttcatatatagttcaatgaaataatctataaatataaaaagcatttttcttttggatatcaccatggtccatgtaaatactcaagtcagaatcatctgcaggaagcactccaagtcacactgttagctttacagacctgaatatacatattgcattaaacagtggcacttatgtactcaagtggtccagtggctttggaatatatgtctactgggcatgtggaatagaaataatgtgttaggtttaaatcaatggaaagggtatcaaccatcaacaaaagcaacaattatgaattcatatcctaggcaaagaaagtaccacagttgacacttggtgtcagaatactggagacaaagtatgtaaaacaatgcctgttgcagcaccacgtgctcactccaactccccagtggacagtcccccaatgccttatggtcacttcgtggtcaaccaaatgcaatcaagaagctcgatagcttagataaaa

SEQ ID NO: 3573 - DNA, 954 bp, Homo Sapiens
  misc_feature (173)..(182): n is a, c, g, or t
  misc_feature (689)..(689): n is a, c, g, or t
  misc_feature (697)..(697): n is a, c, g, or t
ggatttccatggtggctgacacacttgtcatgtggtctgttagtgtttgccaagaaccattgcaaataaattgaacatcaaagatccaagtttgtactatccctaaagactggagataagcattggaggctcttttaaaaaatgctagttactgaattttgtattgttttacnnnnnnnnnnatttcaatatatacagtttgatgatgtgcttgaaattggtgcaaatatatacacacccttgtaagtgcaaagtatgtaagaagttttaacatttacttcacaggacttgtgattgtgttaaattctcactattgtgttttcttttgctcactgtttaggacaatttttctttaaaatagttttgcagattaaaattgcttaaataagtggattaaaaaactgacaatgcatgctactgttctctttcaaaaggaagagcaaccgtgttgaatactaataatgatgaattagtattcagtgtttagaatcattgggactacccacaaagtgagcatttctttttaaattttcttgacatttccaagcttattatgaataatattgcagtgtgtcttgtcagctgtaggtggcaaaggtgcccttataaaaaaggaaactggcttttcaaatgggctatgggagcacaagctgaagctttagtgccttctacaatgtggtatactggtntctagaantttatatgtgctagtcattctccattcatatggaatctagatggatgtttcatgcatacccatagagaaatgtgtaagtgatatgtcaaaagagcttcttactgatttcacctaaaatgagaaggaagtcctgtttttcaagaatgacatacgagtcatgcagctttgggaccatcagttttatactgtgataattgaaaatgaaacatgttcttattttcctaaattgaagaaccctttagtgtctacgcgtacga

SEQ ID NO: 3574 - DNA, 1005 bp, Homo Sapiens
ggatcgaagtatgggatcaagctgagaaacaacttgaaaacagtctgaatgaatttcggtgaaaagtgggagttaaactctggagatggagctttctatggcccaaagattgacatacagattaaagatgcgattgggcggtaccaccagtgtgcaaccatccagctggatttccagttgcccatcagatttaatcttacttatgtaagccatgatggtgatgataagaaaaggccagtgattgttcatcgagccatcttgggatcagtggaaagaatgattgctatcctcacagaaaactatgggggcaaatggcccttttggctgtcccctcgccaggtaatggtagttccagtgggaccaacctgtgatgaatatgcccaaaaggtacgacaacaattccacgatgccaaattcatggcagacattgatctggatccaggctgtacattgaataaaaagattcgaaatgcacagttagcacagtataacttcattttagttgttggtgaaaaagagaaaatcagtggcactgttaatatccgcacaagagacaataaggtccacggggaacgcaccatttctgaaactatcgagcggctacagcagctcaaagagttccgcagcaaacaggcagaagaagaattttaatgaaaaaattacccagattggctccatggaaaaggaggaacagcgtttccgtaaaattgactttgtactctgaaaacgtcaatttatattgaacttggaggagtttggcaaagtctgaataggtcaacctgcaggcgtaactatttttgacctagtcagtttttaaacaatgtgcatttgaaggagttaattaaaagagagccaataaaatgattttactcattcagtatctgagtactggaagtgaaacatgaggaatgctttagtgtaatgtgggagaacttttttgtaaatttaatgcaattgaaaaagttttcaaattcaattaagataactagaattggattatggtgt

SEQ ID NO: 3575 - DNA, 468 bp, Homo Sapiens
ttttttgcatttcttaatttatttttaataagtaaaaaatactcattgaaactgtacaaaaatcaaatcattaatttttgcacctggtatttcagtcatcaacagcaatctcatggtacagaaataaaataatgggaattatcattaacttcaccctggctttctagcttagtagaaccaaacagaagaaatcatggcaataaccattaactatagaaaaaaagtaatggaaaaatggttgcaggtttaatcacaaaatgaacttaatttttgttgattttgttttatctgctaaaacactaatatctataaatatgaactgacagcatcgttctaaatttacttctgaagagctgtcgagacttcaataaaatataagcaagttactggatcatatttatggactgctgaattaactacccgaaaagtatcagttactttcaaagaacacaaaacaaagtgaacgtg

SEQ ID NO: 3576 - DNA, 1543 bp, Homo Sapiens
  misc_feature (394)..(414): n is a, c, g, or t
cgtgggggggcgggactgcggcctgggaggcagcacgggaggtcgcacaccccaggtgttacactcggaggtccgcagggcatcagtcggtggggtagaatcgagggggggagcgggcttgggtccgcgttgcggcggaagagaggcccggtatggggggacaacaggatattaggggggagaggggagaagccgtggggatggctcccgtccgcgcctgacaaacagggggggatgttggcgggcgtatcggcggtggtaccaatagcgcggtggaggcgacgagaactccggggtctagaacggcgggcgttttatgccgcgccgaccgcgagaggggggtggggacccgataggtgccccccccgtaatgcgggcgggaagtccggcggtnnnnnnnnnnnnnnnnnnnnntcccattgatttaaggcggggccgccaataaacgggtggggccaacgtcccgccggaaacggcatagtaagttgatgaacgcggtgggccggactttcaagggggtgagggcgcatgacccaagtttcggggcgccggtattttggcagaagcccgggtccccgggcattgaggcataccttaggcggccatgcgcggcggggcaatggggcggcgaatgccgtggcctgccttgggctggccgggcatggttgcttaacagggccaagggtactgaaagttagtcccactgtcccctggccatgcatgttggagggaccaggccatcgtggtggggtgggaccaggagtatagttgtggccaagggcttgtgagtgggcctcctactccccagcacaggtgcaggaggaactctggaagcactgctctctgtcagtgatacagcttccaagggtgttcttgagtagcagacattgtccctcagaaggggtgaccccacgggcatgcgcaccctgttccagcgggggccttttttgtagatgggcttgacggagccaggagcccagcgcgtcaggtaccggttgagttggggtttgctcttcggaacaactccttcaggaagccgaggcctgtgatttggtaatagacctgctcggtgggccatcttcacacactcctcgatcttgcggtgttcttcctggcataggcctgtgatctttcggggcagcatgcctccatgaggccggatgaactggctaagcagcagaacatcgtcatagttatacttgtgcttcaggttccaacggcagatggggcactggccagaggggttaggaggatttggactctccttgggagtcgctgtgatacggccttcaattatagttgtcttcccttcttgggtctccaccacttccctgaacccgcgagctggaagccgagaccagctggtcgctgccgggcccgctagtagcccacggagaagccgcccacagccggacaccagagccttgagggccgccatcttcaaaaacctaccctgacctctcgatcccgaaaattccggatcccggctcggcgtcgctggccctccgttgtccctgcgcggccgccccggtacggagtattt

SEQ ID NO: 3577 - DNA, 1582 bp, Homo Sapiens
  misc_feature (1124)..(1386): n is a, c, g, or t
gggcagcaccaccggctttgccttgaatttaaaaccactggcgccagccgggatccccagcaatacagcagctgccgtgaccgctccacctggccctggcgcagctgcaggggcggctgccagctccgccatgacctacgcgcagctggagagcctgatcaacaaatggagcctggagctagaggaccaggagcggcacttcctccagcaggccacccaggtcaacgcctgggaccgcacgctgatcgagaatggagaaaagatcaccagcctgcaccgcgaggtggagaaggtgaagctggaccagaagaggctggaccaggagctcgacttcatcctgtcccagcagaaggagctggaagacctgctgagcccactggaggagttggtcaaggagcagagcgggaccatctacctgcagcacgcggatgaggagcgtgagaaaacctacaagctggctgagaacatcgacgcacagctcaagcgcatggcccaagatctcaaggacatcatcgagcacctgaacacgtccggggcccccgccgacaccagtgacccactgcagcagatctgcaagatcctcaatgcgcacatggactcactgcaggggatcaaccaaaactcgcccctgctgcagaggaaggtggaggaggtgaccaaggtgtgcgagggccggcgcaaggagcaggagcgcagttccggatcacctttgactgagcgacagcagccctggggcccgcagtccctagggagttcatgaggggaatgcgccctgttgtctgtagtttggggttgtggcaagatacttgtttgtttgtttctttctttcacatgactgcccttgacatgatcgctgtgtgctttgcgtttttccatttaggagggtattctgggccttctgcccaggcagcagcctcatgggtgtggcttctgtggctttcatttgagtatctttggccccttttcacctactgcgaccacccacctcatcctggctcagcctggtgatggagaagtgctgatggtcttggtcccagccagggtcgtgggggcagccactctctccaaagcatagtcatgggtgtcatgaaaaaataccaaatgtaagagaacctccaagtcannnnnnnnnnnnnnnnnnnnnnnnnnnnnnnnnnnnnnnnnnnnnnnnnnnnnnnnnnnnnnnnnnnnnnnnnnnnnnnnnnnnnnnnnnnnnnnnnnnnnnnnnnnnnnnnnnnnnnnnnnnnnnnnnnnnnnnnnnnnnnnnnnnnnnnnnnnnnnnnnnnnnnnnnnnnnnnnnnnnnnnnnnnnnnnnnnnnnnnnnnnnnnnnnnnnnnnnnnnnnnnnnnnnnnnnnnnnnnnnnnnnnnnnnnnnnnnnnnnnnnntactctgtccccggaatcacttataaaagaaaaatgaaaaaacctggcgggaccccctcggcccctcaaaaagctttctaaaccatttcatttgagggacccggaccccttaaggtaaggggaacttgggtcataacattatttcccaaagaaaatcccggaacctgaacttaacgccttgggattcctccacaat

SEQ ID NO: 3578 - DNA, 2275 bp, Homo Sapiens
  misc_feature (1107)..(1107): n is a, c, g, or t
  misc_feature (1149)..(1149): n is a, c, g, or t
  misc_feature (1192)..(1192): n is a, c, g, or t
  misc_feature (1283)..(1283): n is a, c, g, or t
  misc_feature (1286)..(1295): n is a, c, g, or t
  misc_feature (1645)..(1674): n is a, c, g, or t
gcgaattacccgccctaccagacccaaccagcccacataaaaaagaaggctggtagagggccggaattttccagatccgcaggtttgtagataaatttttatcaaggagtgataacaagacaagttattgcagagtcagggtgcttttatatataagagcagcagccgcctttgtaaagtgtgatctatgagaattggagacacttctttactgttcaccaaagaaatgggtaatctgtgctgatctccttatttttacctttttacagggtttctaggacattgccattattcttcctccatctatctgattccattccttccacacccagctacagttagaggagatacatatagaatctattttagattattgctaactatttgcatcaaattaagatacacaaatggccatggatgttgccttagccttaaacattactaatagcttcacatcacctcactgcacgcatcgaaggatctgattcgaacctgccgagggaattcttttgagagcaggattctccaggctaaatcagaacgcagctaatcctgtccctgaaggagaagctacgggaacctgaggcttgctattgaagtgggcaagctggccaaaaaattggaacacacagaaccaaaccaggtgtgttctacacctgcatgagtgaaggatttccacgtagacacctaggaagagcccgcatgccctagactcactccagaggaaggattgatttgcaaccagaaagggagctgaaaaccacggagctccatggctcttcattcaaaagggaaaataatgattccacgttgctttttagagttcaaatcaacatctttctggataaatctattttttaacaatctttttattatttgtaaaagatataaaaacaactcccatcagtagcaatacaaggttatacattttaaccagattttctcaggccttttttggatacctttagtagttaactctcttttgtcaaaccctcttgtatataaccatcgcacaacatacagaaccctgggaaatacagccaagggcactgctcactgtggcccgtgtattcattcccacaggctgcactgaaataacctggtaanacaacaccctccctccattttgcgtctatttcttctaatggngcttctttggggataggaaaagagaacataactactgttccanggtaacgtctgtatcatacagttagtggtgccagtgaaacgttcccagatacaaagaaattgtgcttttaattccatttcacaatctgttntgnnnnnnnnnngtcattgtctgaccaaaattccttctgcacatgaggccagtataggcaacgtcacatttgtttgtttcaaatatgcagtgtggtattttgtttactttgcatttaccgtgagcaaagatacttcttggaatggctgcagtgaggccgtgtcattggctcacaaaagtgactcataggtaatttctgtgtttgcattccactgctctgctccctaaggtccttgactttctccccaggaattcacttaaaaagggactgagcattgtgtcaacctgttgcagtgtttttcatatatgtgttcactctaaaaatgcaaataaagactgcttccttagagggtgctcataccnnnnnnnnnnnnnnnnnnnnnnnnnnnnnngggggggcggactaaatgtccccccaggggccccacattacggttcccccagtttcttgtacaaagtgtgcccccataatgcggcgagcagcacattaaacaaccaagcacgaccggaccggaacgactataacaacccgccagtcaacctgggacaaaacgcgcatacatggagcaccagtgcgaaggaaccccattaaccgtggggcgcgcaacaacgggggcacaacccccacgcacgcacaagttcaccccgcccacgagcaaacgaacaacattctacgagtgcacacgcggctaccaccacagcgcatacgcaccgggaacaaagggacacggggatggaaacagagaacagattctcccgcggcgctaggtaaccatcgacccatgaacgcgcaaaggacaggaaaaaaagaagcgaaaacgagaccacacgcaaagccacgacagcagcccgaacacacaggccccccaccacaaggcaccggagcagacagaaactaacacgagcaagaccgccaacaccatgccacagacgcaaccgcacaccacagacgccacccccaccacaacaccacaaaccgaagcaaaagcacga

SEQ ID NO: 3579 - DNA, 800 bp, Homo Sapiens
  misc_feature (63)..(76): n is a, c, g, or t
  misc_feature (265)..(265): n is a, c, g, or t
  misc_feature (364)..(387): n is a, c, g, or t
  misc_feature (461)..(472): n is a, c, g, or t
gctttgtgggattttatttaggtccaagttcttagtacacggcaacaattccaaatccaattnnnnnnnnnnnnnngtgatgttcctccactcatctggaggtggtttaatggcacacaaggaacattactggcaacagactgctccctcaagttcccctggatggtttttactcaactcataataccaccaactctccctctgggagctaaaagtacaactggccagatcacaaattgtttacattcttttttgtaagccattntaagaaaaatggtgcatggacacaaaatatgataaaaactgcttttccatagaattcttaagttgcaaaagaggtttcattttaatgtgaaaataagcnnnnnnnnnnnnnnnnnnnnnnnncttacaaaaaaccttaagatattcagcaaggatcatttatacacagctaggccccgccgtttcgttttaattgnnnnnnnnnnnnaataattatatgagattctcaaaacaggaacaaaggtcagcacaaagtaaacttaaaggtaatgagctcaatgcctccatttaatcacttttataaggctctctccaataaggctgctgtgctgtgctcctgccagtgttggagtaatataacatttttactgcacacaccttatgggaaagtgtttatactgagtgtagttttaggaggggtaaatgaagattatttccacaaattaagattgcacttagtacacgcctttacacaactctgatggtatttaccaaaacatggcatgtcttttcacgtatattcctgaaaacaccaa

SEQ ID NO: 3580 - DNA, 978 bp, Homo Sapiens
  misc_feature (694)..(771): n is a, c, g, or t
  misc_feature (774)..(805): n is a, c, g, or t
  misc_feature (807)..(807): n is a, c, g, or t
  misc_feature (812)..(812): n is a, c, g, or t
  misc_feature (882)..(883): n is a, c, g, or t
ctttttggtgaactttagtggacttctgtgagattgtagttgtactttgtatctctaaatctaaagatagttttttaaaactcccaaagaaaatctgctctcctttctgatctaaaaactcatctttggggtaaagagttaagtgtccaaaggttgtcacagttcatgaggtcagagggagctagcctggcacctggactctgcccatccacagctgacagattccaacagaagtgtatttaaattctccagtagacaatgctgggtaagggagggggtagggctgggttattaagatacaggctgctgtattttacattggttgtgggggaaggggagcctggagaaaacaaagtcactattcccttttttgaaacaggaaaaaaaattattttttgttcagtaaaaatggtagagaattccaatgtccctagccacaagggaccagttccactgagaagtgaacagtgggaactcaaaatttcagaaacattgggggaagggaaaattggctttctcttaattggcagatgttccagtggggcgggggggctctgtttttgttgggatgtgttatgttgtatgtacgcatatatggaccggagtctgctgagtttataaggttccaaaaatatggtaaaatcttggtttttgttaatttatctcaataaaagcccactggaactccaaaaannnnnnnnnnnnnnnnnnnnnnnnnnnnnnnnnnnnnnnnnnnnnnnnnnnnnnnnnnnnnnnnnnnnnnnnnnnnnnccnnnnnnnnnnnnnnnnnnnnnnnnnnnnnnnncntgggngggcccggctcgcgcccttccaaaaaatttttctaaaaaccttttcgttgtggcgcccgcggcccccccnnaagggaaagggggaacccgggggcccaaaactcttggtttctcccaaagagaaaaccccggggcccaaaaaaacaaagggggggtttgggaattt

SEQ ID NO: 3581 - DNA, 464 bp, Homo Sapiens
ggcagttagggtccctcttaagcaggcttctatttcttaccactaaattggtttcctttttcatccagaagttagaactccccagatattcacactataggatctgaattccgagattctaaaatatcttaaaccacaagagagaaaatctagttctgcctcagccccagtcagcaggccatctgtcccttcctctcctctgagtcagacagctctggcaagcaaggctccttggctagttcctaatgcactgacaggagccctcccattaaggacgacttctactcaaaatgcgactctccctctgaacttcagatgcctctgttagcaggaaaaggcattgattggattggatatatttatgtgactgcgggcatttgtggctgtagaatccgtgaccgtaatgttatatgtaatgggaactatcttataaacttgaaaaaaataaagtttttattttctat

SEQ ID NO: 3582 - DNA, 662 bp, Homo Sapiens
  misc_feature (166)..(167): n is a, c, g, or t
  misc_feature (172)..(172): n is a, c, g, or t
  misc_feature (175)..(176): n is a, c, g, or t
  misc_feature (184)..(184): n is a, c, g, or t
ggtggctccactgaagagacagacgagtcggagacttgaggagtccaaagggtcctgcccacagcgccctgtacctgctcccacccagcccttggtgtgcccacccagcctcctctccagcaccttgctgtgctgccctctgctgctgacaaggtgaataacagcnncccanagnnacccaagnccagaggggctctgatgatcagcccagccagtggccccggaaggtgaatggcctgctctccctggccctatcagcctgtgaacttcacttaggccccaagctgacagactgtgctgaggccaccttgtcacgccgtagcctgttagtcctcctaacctcttaagagcagtctcttctgagccagcctctgcgggtcccccaataaggttcatctcctcacagcaactccattaagggggagaacccgaatagccacgcagggccttgcaccatcaagggtgacacctgcgacgcaagtaccaggaggacataaccgctgtggcctgttggagaacagccagtagccttggtaatatgaagggtgggccagaagatgatttcacttgcaaaaactgcttcaagtcttgacccctttgtgtctaatagctaaacaaacatgtgaaacgaataaaaagtccctcatgtctggtaaaaaaaa

SEQ ID NO: 3583 - DNA, 924 bp, Homo Sapiens
  misc_feature (574)..(610): n is a, c, g, or t
  misc_feature (781)..(797): n is a, c, g, or t
  misc_feature (799)..(804): n is a, c, g, or t
  misc_feature (806)..(806): n is a, c, g, or t
ttctttttctttatttttaatcctcttagttttaaatatattgcctagagactcagttactacccagtttgtggttttttgggagaaatgtaactggacagttagcttttcaattaaaaagacacttaacccatgtgggatgtcatctttttataattagtgttcccatgtggagaaaattattcacactacttgcatgtaaagaataatttaacttttaacattaaaatatgtggtaaaacccagaaagcatccatcatgaatgcaagatactttcaataaaaagtaagttatatagtaggtagttaagtttgctttgtggacttaaatgtgtctcttcacttaaatgggttgaatgtgtatatatttgttcagcttgaaaagacttagtttatatcctagctcactggaggctgctgacataaccataacttctgtcccttctaattgtcatttatatgcctaactggagctagtactttaattcttaacacaaaattactctgccattgtttccagcttccctcctacaatagaatgaagtttttttgatggcttgagatggctcacaaannnnnnnnnnnnnnnnnnnnnnnnnnnnnnnnnnnnnctccttgcttttccagttaacatctatattcacatgtaatcttgttttctcttcacattcactgagttgttcaggctcagatcatcccttgacagtagtttgccttcatctcacctttcatttgtcccaaattcaccttatttaataaagtcccatatgttgtctcacccnnnnnnnnnnnnnnnnnannnnnnanaaaaacatgtccggccgccctcggccccttcgagaaagcttttcctagaccatttccgttttgggcgccgccggggccccaatttaggggtaaaatggaaaacattggggcccattat

SEQ ID NO: 3584 - DNA, 923 bp, Homo Sapiens
  misc_feature (559)..(568): n is a, c, g, or t
  misc_feature (682)..(720): n is a, c, g, or t
  misc_feature (723)..(751): n is a, c, g, or t
gggacacagcacgctgccacgccgacgcagacccctctctgcacgccagcccgcccgcacccaccatggccacagttcagcagctggaaggaagatggcgcctggtggacagcaaaggctttgatgaatacatgaaggagctaggagtgggaatagctttgcgaaaaatgggcgcaatggccaagccagattgtatcatcacttgtgatggtaaaaacctcaccataaaaactgagagcactttgaaaacaacacagttttcttgtaccctgggagagaagtttgaagaaaccacagctgatggcagaaaaactcagactgtctgcaactttacagatggtgcattggttcagcatcaggagtgggatgggaaggaaagcacaataacaagaaaattgaaagatgggaaattagtggtggagtgtgtcatgaacaatgtcacctgtactcggatctatgaaaaagtagaataaaaattccatcatcactttggacaggagttaattaagagaatgaccaagctcagttcaatgagcaaatctccatactgtttctttcnnnnnnnnnncattactgtgttcaattatctttatcataaacattttacatgcagctatttcaaagtgtgttggattaattaggatcatccctttggttaataaataaatgtgtttgtgctaannnnnnnnnnnnnnnnnnnnnnnnnnnnnnnnnnnnnnnccnnnnnnnnnnnnnnnnnnnnnnnnnnnnnaatatgttcgggccgcctcgggcccttcaaaaaactttttcaagaaccatttcgttttggcccccgcgggccccaatagggtaaagtgaaaacttggcccataccttgttttcccataggaaaatcccctgggccattgaacaaaggggcttggggatttcctccacccatt

SEQ ID NO: 3585 - DNA, 458 bp, Homo Sapiens
ggtcaggtgaagagtgaggttgtcatggcctcagctatgcttcctggctctccctcaagagtgcagccttggctagagaactcacagctctgggaaaaagaggagcagacagggttccctgggcccagtctcagcccagccactgatgctggatgaccttggcctgaccctggtctggtctcagaatcacttttcccatctgtaaaattgagatgaattttggtgttgaaagttcttcctggagcagatgtcctagaaggttttaggaatagtgacagagtcaggccaccccaagggccatgggagccagctgacctgcttgaccgaaggatttctgacagactatctttggggatgttttcaagaagggatataagttatttactttgggcatttaaaagaaaatttctctcgggaataattttatagaaaaataaagcttctgtgtctaaggcaaa

SEQ ID NO: 3586 - DNA, 470 bp, Homo Sapiens
gggggctgcgaggccagggaagccctgagtttctggcggggctgaccagtgggggagcattgtgttgtgggtgtctgtgtgtgaggtcaccctcaaactgcaccgccggccagataccctcctgaccccgaggacttggtctggtctctctggtggctacaaccccagagttttaaggacttggaaaggaaagcacaatcagagaagaaaacagcccccgaaccagcaggagtggcctggcacatggaccggcctgagcgatgtgcactccacccaagccaggctcccagggggcctgatttctctctcactgtctctttttttaaaatggttgcacggctctgccccatggggggccttttttacacactgcgaggcccagctttctaggggacttttgcacatgtcatgcagctcagctgggagctgcttaggtggaaaactccaaataaagtgcggctgtcgcagaa

SEQ ID NO: 3587 - DNA, 521 bp, Homo Sapiens
  misc_feature (360)..(382): n is a, c, g, or t
  misc_feature (384)..(388): n is a, c, g, or t
gggagtggtatcaacgcagagtgcccattacggccggggaagatttaaactttgcactccaaaagcttatttggatttttttcttgcactgttttgtgtaatgcagaataatgattttatttctacagctttgtagattctaacatttatgtatctttattttcatattgtacagtaattttactttaaattatttaaataggctattttatttatttcaaatgcagttgtattagttctcattattgaactgtctgtgcactgtatgtagcaagcatttttcatctgttgtatacaagtggaaagggtattagaagtgtaactgtgctattatttcaataaagacctcttgacatttannnnnnnnnnnnnnnnnnnnnnnannnnnacctggtcggccgccccggccctcaaaagcttttcaaaaccttcctttggcgcccggggcccggaaggaaagggacctgggccttacttgtttctaagaaaacccgggccttggatagggctggaatcccccc

SEQ ID NO: 3588 - DNA, 1407 bp, Homo Sapiens
ttcagaaattgaaaaagatgtattaaaatattcacaaaaatacaactgaagatcaaaaaataataatgagcttgatggtttttccctagctgatatatttccattgaaaaactagagatagtttgaaatttcaatctctaagtaatgccttttgagtgctcccatacagaattagcgcataattttaagacgaccctgtttgccaggacgaagacatggagagggcagatctgccctttaggcaaccttagttcgttatctgcaaccaggaaaggagtgctgaggcacagggaaaaggggagccaaaagggctgcaggggtgggtgtgcagggcttgggaagaggtcctgccctgagaggctcatctcagtgtgagcagcttccttcagggaaacctgtcctggcagagcaccatgctggcagctgcccttgcctggggggaaggttggtgagaactggtgaggattctctgccagaatgccagggcactgacagagtttgaggtgtctggttgggcaggaggccaagaagtcgggctggggaagggagtggtaagggaggaacaggcctccaggtgtcattcgagtgagtggcccccacagcaccagcttcaccaacacatggtcccggcaccgcaagaagaagtgaaggctcttgctctcagggagctccgaaatgtttcatttattcacaggaactgttgagaaagcagtgaaaaaacaatgccccttttctctgtaaaaaacgactgtaaggaaacatgacacaggcctgtctacaatgtgtgtcctctgtacctcaagcacagccctggtcagctatgtggttttcatggtggcaaaggctcaccaggagtctcagcttgaaggatggtgacaatctcaacacccttcccctccaaacataagaggccttccaaaggctcctatagttttcaaaatagatgcccaaaaagttttaggatgcaaggcagagttgaccactttgtggaaatgtctcagggccagcactgtgtgtcactctcttgggctgggcctatgaacatggaaggcagcagggcaggcgtttttttctccattccacacagaacacagagcagacgctgcccagcttcagacatgtgtggtgaccaaacctgatccctgttgactcacacagacgtggcatgtaaggtggagcgttacaagaataacaaaaatagctcctcaaaaaacaaaaggcttcatgtatgcaacagcattagttttgaagctcatatgccctttatcttaccaccttgtgcacacctcaaaatctcaatcctgttttattccctttgtgaattctgttggaactcagccttcaaacatccccagaagatgacaagatgagaagaaaaagcagcagctcataatggactccaaaccc

SEQ ID NO: 3589 - DNA, 795 bp, Homo Sapiens
  misc_feature (45)..(45): n is a, c, g, or t
agttgctgacccaagcccgattgccatgaaaccccatctaaaaantttttctgcctttaaaaaccctggcagcctgccttgatgctcaaattgatcatcttcacagagaaagttatggcaaaaagaacaactgaatattctgcctccatggtcccacacgcctcgttcacattcaacacactcagcatcggtaagagggcaggcacaagcatgtgtactgagacatttcctaccatggcaaacccaagcttcacagaagtcacatattgcacccaccattgcaaggccagtactgtatacaccagcatgctttatgacacagtctgaagacttcatcatgcactttgttttcccacactgtgcacaaattggtaacttctgtacagaattacaaaagtagcaaaatgctctattcttctgccgcctctgacacttgtcacattccattgaggcattacatggatgtttagctaaatctatagtgcttcttgatgctcttagttgtttttcacgttctcggcggttctcagccttcttcctcgcaccagtcttttttttaggcattttcccctcgtgcgcgctccgggcaaacctcgctcactttcgccgggagaccggactcactcagggggccgagggacagggaatggcgtgaggcccacccgcgacagcagtaaatccaactcgtggaccaggactccgggaaagaaggtactaacagccagggaggctgacagccgattccggacactaggagacggaccggacgtccttttacgacagcagcgccttccc

SEQ ID NO: 3590 - DNA, 839 bp, Homo Sapiens
gggaaaggtcagaggtaaagaagtcatggcggcgctgtgtcggacccgtgctgtggctgccgagagccattttctgcgagtgtttctcttcttcaggccctttcggggtgtaggcactgagagtggatccgaaagtggtagttccaatgccaaggagcctaagacgcgcgcaggcggtttcgcgagcgcgttggagcggcactcggagcttctacagaagggttctccaaaaaatgtggaatcctttgcatctatgctgagacattctcctcttacacagatgggacctgcaaaggataaactggtcattggacggatctttcatattgtggagaatgatctgtacatagattttggtggaaagtttcattgtgtatgtagaagaccagaagtggatggagagaaataccagaaaggaaccagggtccggttgcggctattagatcttgaacttacgtctaggttcctgggagcaacaacagatacaactgtactagaggctaatgcagttctcttgggaatccaggagagtaaagactcaagatcgaaagaagaacatcatgaaaaataaatgaactttgcttagtggattgactcctttgctgaagtcagttattcatcaagaatgcaattagactaattgtgaataaatgattgaatgaagatataataaataaaagctataattatagataactcttattagaattttctttagcaatattcccaccccccaccccttgttttgctcttaatgtttttttcctttggtggggatagtatacactgtactaagaaattgtcattcaataaatacgttttgagtgctgtccaaaaaa

SEQ ID NO: 3591 - DNA, 1176 bp, Homo Sapiens
ccacctctcagcatagagactggtgcccttgggtgaatatcacacttggcaaagaaagcaggagaatggtggaactgaaccagatgccagcgccccagcagagccaggctggaaagcagtgctgaccatcctcttggcgcacaaacagtctagccagccagctgaaacggactccatgagtctctctgagaaatcaaggaaagtattccgaatatttcggcagtgggaatctctgtgctcatgctgaagatactccagcgccttcctggagatagctggaatgagagtgactttttgaaaaattaaggctgagttcctttcggtcagctgacactaagtttttcctgttctgggttaatcataaggagccccctgccatagcaaaggcagtgagtgtcaactatctgcatctggctgagagagacccgtttcctttcagggatgtggacagggtaagggcagcaagcatggttctgttaaaggagtgtggggttaacagactagaaggaagactaaggacctgaccacccatttcagcatcttcaatgtggagcagtgttctgaggactcttctatcctaggactatgacagtgtgtattaataaaatatttgctaagtaaaaaactaacccacaactacaattaatgggccgtgtcgggccgccctcgggcccttcgaaaaagtttttcctagaccaattccgatttgggcgcccccggccccccggtagggtaaaggggaaacctggggcccaatagcccggttttcccctaggggagaaatcccttgggcccacttgaacctaaagggcctttgggggaattccctaccaccaatttacaaaaacaaccgcccccgggagggggcaaacccccggaggcgggtttcctggaaaccaaaacatcccagggaaggtgggagctctcctggaagagggccattttaacggggggagtccttacccggcgccaggggaagtgccacaagcggagagcttccgaaataattcaacaattagggcccccgccgccaacgtgcccagttgctattcggaagggaacccgggcaccgcaagattgtcaatggaaaagaccaattctggggcgcgaaacagtggggaagaccctcttcccaaataagcgggggattgggtccacaactcctggaagcccccc

SEQ ID NO: 3592 - DNA, 905 bp, Homo Sapiens
gtcagatatcagcaggcctaatgaaatctccaggatctagtgaatgaactaaaaccctacataagcttcctgactcagatgccgtcccctgtcagcgagcatgcacaagcgccatcaagttccttaacaaggaaatcaccagtgtggtgcagtcccaagcgggaagaggaggcaaagtcagaacttcgagcagccattgatcggtatgtgcaagagaagattgtgctagcagctcaggcaatttcacgctttgcttaccagaagatcagtaatggagatgtgatcctggtatatggatgctcatctctggtatcacgaattcttcaggaggcttggacagagggccggcggtttcgggtggtagtggtggacagccggccatggctggaaggaaggcacacactacgttctctagtccatgctggtgtcccagcctcctacctgctgattcctgcagcctcctatgtgctcccagaggtttccaaggtgctattgggagctcatgcactcttggccaacgggtctgtgatgtcacgggtagggacagcacagttagccctggtggctcgagcccataatgtaccagtgctggtttgctgtgaaacatacaagttctgtgagcgtgtgcagactgatgcctttgtctctaatgagctagatgaccctgatgatctgcaatgtaagcggggagaacatgttgcgctggctaactggcagaaccacgcattcctacggttgttgaatctagtctatgatgtgactcccccagagcttgtggatctggtgatcacggagctggggatgatcccttgcagttctgtacctgttgttctacgagtcaagagcagtgaccagtgacgggggaaacacagggttaataaatgccatactccctaccctcagct

SEQ ID NO: 3593 - DNA, 777 bp, Homo Sapiens
  misc_feature (405)..(415): n is a, c, g, or t
  misc_feature (465)..(465): n is a, c, g, or t
  misc_feature (469)..(505): n is a, c, g, or t
  misc_feature (535)..(535): n is a, c, g, or t
  misc_feature (619)..(632): n is a, c, g, or t
gggggcagaaacccggattccggttccggtgggcctccatcagcaagctccagtgctacgtgtccctggcattttaggtgtcggttgggtaggcagtcatggatcaggtaatgcagtttgttgagccaagtcggcagtttgtaaaggactccattcggctggttaaaagatgcactaaacctgatagaaaagaattccagaagattgccatggcaacagcaataggatttgctataatgggattcattggcttctttgtgaaattgatccatattcctattaataacatcattgttggtggctgaatacattttggaagagagtttttcatcttagagattggtgaacaagtgtgagggtgtgagaaactcacagaatacaaatttgcctgtatgttttgtgggnnnnnnnnnnncctttcaagatgttttctatttctaaattaaagtaatttcaaagtaaaanacannnnnnnnnnnnnnnnnnnnnnnnnnnnnnnnnnnnnccacacaccctcctattcacaaaatataanattataccatccttaaaccatttcttttcccctccgaccccctctcgttacacaccaaaacaatattatttctttgtgggccgnnnnnnnnnnnnnnaaaaaaattttctccaaaacctttcctgggggggcgccggcgcgccccacaaagagaagaagccaacgggggcataacgcctggtttcccacacaaagaacacccgcccggtataaaaaaaggggggtggtgagctccctccacc

SEQ ID NO: 3594 - DNA, 604 bp, Homo Sapiens
  misc_feature (234)..(249): n is a, c, g, or t
  misc_feature (392)..(510): n is a, c, g, or t
ggtattccttgggtgttggtggaataagcagtggaatttgaacaaggaagaggagaaaagggaattttgtctttatggggtggggtgattttctcctagggttatgtccagttggggtttttaaggcagcacagactgccaagtactgttttttttaaccgactgaaatcactttgggatattttttcctgcaacactggaaagttttagttttttaagaagtactcatgcagnnnnnnnnnnnnnnnnttttcccagtcctttttttaagagacggtctttattgggtctgcacctccatccttgatcttgttagcaatgctgtttttgctgttagtcgggttagagttggctctacgcgaggtttgttaataaaagtttgttaaaagttnnnnnnnnnnnnnnnnnnnnnnnnnnnnnnnnnnnnnnnnnnnnnnnnnnnnnnnnnnnnnnnnnnnnnnnnnnnnnnnnnnnnnnnnnnnnnnnnnnnnnnnnnnnnnnnnnnnnnnnccatgctttgggcgcgggccccccaaaggaagggaaacagggccaaacgggttcccaagaaaacccgggcccggaccggggctgtggatccccc

SEQ ID NO: 3595 - DNA, 1087 bp, Homo Sapiens
  misc_feature (162)..(189): n is a, c, g, or t
  misc_feature (579)..(602): n is a, c, g, or t
attgtgggggaggaatccccaagcccctatgttcatgcccccagggttttccctagggaaaccaggttatgcccacgtttcccctttcctctcctggggcccccgccgccaaaacgaaaggttttggaaaactttttgggggccggggccgcccgacatgtnnnnnnnnnnnnnnnnnnnnnnnnnnnngctagattttactaaacacatgtatcacattcatatatattgtttcttggccccactgccaaaggaagtcagtcagtaatttcacaaccgttatcagagtttggaagcagaaatagctgttaactaaaatctcccactgctcagactactttctgccctaatggccattactatccagtctgtattgctacaagggacccactggtaccccttttagattctatcaaaaggaacagggttttcctagaggcaggcagcctggtggtatggcacagcagaagcttactgctaatgaaatgggaacctccccctcccttgtggtttcagcacagaacctgaatgccaggaaaaattcctgggccaagaagctaaagctaaagaaaccttccnnnnnnnnnnnnnnnnnnnnnnnncaaactgtagggtcacttttgattgaggcaaaggggtcctactgtaagtggaaaagactcactcccctaacataagttttcactgtggtgggatggtgccgcccgatatgcttgatatgcttttccttccacatgttaagctaggaaacctaacaggatgtcagcagggcagttaactctggactcagagccctcaagggcatgtggcagaacctcatggacatcacaagaccatcagtctgaatccaggtcgtgggggctgtcatagccgaactccttctgcacatccagagggtacttgctccacatccgctgtctgctgctgcctctttcctcctcactcaggctgttgtagtcagcagagcctagaatgacatcccgggagtggattctaaatgtgattttcctaggctactgcaggaggccccttctcttctcaaaaaggcctgtttttgttcccgattgtaaggcaaaatccttgctcc

SEQ ID NO: 3596 - DNA, 818 bp, Homo Sapiens
ggggcgccggccggaaacccagcaggcggcgaagatggcggagaacagcggtcgcgccggcaagagcagcgggagcggcgcggggaagggggcggtgtccgcagagcaggtgattgctggcttcaaccgccttcggcaggaacagcgaggcctggcatccaaagcagctgagttggagatggagttgaatgagcacagcctagtgatcgatacactgaaggaggtagatgaaactcgtaagtgctaccgcatggttggaggagtgctggtggagcgaactgtcaaagaggtgctgcccgctttggagaacaacaaggagcagatacagaagatcattgagacactgacacagcagcttcaggcaaagggaaaagaactaaatgaattccgggaaaagcacaacattcgtctcatgggagaagatgagaagccagcagccaaggaaaactcagaaggggctggggctaaggccagctcagctggagtgttggtctcctagggaccaaggcctttgcatttttttctaccctgactcccacttctaatttctctttattgttattattattattttctctgctattgtaatatttttttgttaattaaatgttttggtcagaatcttaacccacgggcctgccctcgttcctgtccccaccccatgtgccccaaaccacaggcacttcctaggccctcagcaacaccccgaatgaatatttgcaaattgggttttttgggggtcccccttggcccctttaaaaggatttttcctaaacctttggctttgggccgccgcgggcccccgaagggataggttt

SEQ ID NO: 3597 - DNA, 838 bp, Homo Sapiens
  misc_feature (539)..(539): n is a, c, g, or t
ggtggtctggggtggggaggctgctgctgtgaccttaggggtagggttggggatcaagggaggctttgtcaagggagagtgaccatgttgctccctacatccatgcaataggacccagcctgcacctcctaggcctacactggggaaagcctgacagaaatcagtacctcctaacggggtctgccaggttcaccaaggcatgggcacagaggaatatgacaagttttgaaggcaggcaggaaagggcccaagcctgcaagggtaagacaattcattctttgaagttaaaggccatattcacttgatgatttctacacacactaagaattgtgagagtgtcctttgaaggagatcacaaagtaacctggttgactgtggcacagggtccgtggattccatctctcccaggcactgagggcgcagaggcgaaggagcaagccctgcatattggcagggctgtgaccatcgcacttagatcagaccccccgacctgtgttgggatgtgagggatgccctcctgccccacccatccacatggnttctgggcagctctgttttattcctgtgccttccctgatggatgagtattaagacagcatgtctggtttttaaacagacattttgggagcttgcacctccctgatggagcaaggacatcactggttggtggcccttaagggaaattacaccgctcacctttgggtggggttcccctattggttcggaaagcccttctgaaaaatggcccttgggccaacccttaaaaaatgggccgaagggccttttggaaattcctttctttaaggaaactgggtaaaagtgggccccatttggaagg

SEQ ID NO: 3598 - DNA, 1233 bp, Homo Sapiens
ggctgtggttgtaggaaccaccctacagcctagaagactttattaagatcttattgcttatgcagttaaagagacactgattgagctacaggtttcctgtacctggtctcaggtcactctgtgcagagcttccccaggctgttgggagctgggagactgctaggcaggggcaggccccagagtgggaagcatggtacctcctaggagcctcagagtgggtagcgggcttcaagacagccctcagggtgaacagagaggtcaggagtgtcggcttaagccagggcccaggggctacattccctgagatgagtcaagcccagccctctctggggtttccagaacaaaggctaggtgtggggagcagcactgtggagagggcagggagcatgtctctaggcattgctggaactggaggagactgtcagagtggtttgggtaatggttgtataatctgtggcaactgggccttcttgcatgaaagtggaagggtgaggatcccttatggaagagtcatgcaccatggctgggctggactagccagctccagtggctctgctgggtgactaaagtaggcaaggaaagccacttgttgcccacaccccactttcatcaactctgttcatgcaggacaaagcagggagctgcccaacaaggatggggttatttctcaggcctaggtattgatgttaccttaattctttagtctggaagaacttggttgggggtgggggatggtaagcatttccttaaccaaacccacacttcacatctcctaggggtaccccttcatccaccaacctccagagaataacctggctgccctcacttctccagcttttctcacaaggcacttgttacagggctgctgatgggagagggaggaaggcctgggagggggatctggtggtggcgcccaatctacagggtccggaatcagggtggaagttgtcagggactagcggctgccatagtacaggcgcatggccaggccaatgagcaatgtggccaggaagaaggcggctgtgagctgcagccgtagcaggactgctgagagcacggcgttgaccaccagcgagcaggacaccacaaagaggcgtgtgatgctgctgccatgcttcatgacagcagacatgagcagtccatttagtgcctggctcagcaccacgagtgctgcccatcctgagaaaccttccaggaggcctgggccagagccgccgccagcatgcagaccta

SEQ ID NO: 3599 - DNA, 749 bp, Homo Sapiens
tcgcaccacagcgctccagcctggtcgacagagtgagactccatctcaagaaaaaataaaaataaagttgttctctgaagagcaaatgtctcattccagtaatgacccactcagcaggaatatggtggagttcagtccaattcaggtcagccatatccaaaagaccacaagtcattactaagttgagcaaaagagtttttatctattagcagaaagggcctctctggcagcagagattaaaaactggcccaacttcatttccatacttcagggaacagcaaattgaggatttacttatctaggacttgaattccttctttgggaccaagttaataaaagaccaagaaactcctgattaaactggataatgaaggattctgtagacagggctgcacgtatcggctttgtttgacttctcttttctcagttaacatctcagagctagaacattccacattccccagcagcgtgtgggggctgactaaagtttacaattccaactaaaaatcaccctgcttctggcttatctgaatcccttacccaccccaccccaccaccctactcctatttattcagcaccacactacccaggaaatacactagcaaattgtgcaatggaataaaatccacactttagattcttgcaactgtatcatatgtaatagtatcactttttctacattttggcgcaaataaatttttacataaactacgggaggccaagggagctcgatataaaaaacatgtcg

SEQ ID NO: 3600 - DNA, 694 bp, Homo Sapiens
ttgcctggggcccttagggtaccccgggtttttggtttggccggggcccccaaagccccccagcagggcccctgtagctgaagaatgctgtcaacagcctccggcaaacagagggctgcagagaagagaaaaagtctctggaggaagcaaagaactcctgcacgtgggctctctgctcttcagcctttgcttttaaagatttgggaagaaggttcaccacttccggctccaaacaaacagggcaggtatacgccttgggtaaaatctccaggtaaggcttccaaagagatcggtgcccagcatgcttttctgaaactaaaaaggtgcacagcgccagcagaggagatggaggaggcttccacttagtaatgtatgcccctaagtagcttcgaatcactgtgtccgtagtgagcaggcaactctcaggcaacgaaataatcatctgtccctcctgcagggatgtttgactcatcagccctcttcctgtacctggaaaacaagcaggcgctaagtttgaatcttgaaacttcctagctttcagccacttcctcagctctataaattcagacttgtggctctcattcactcctcttgattcagaacttccgcagagttttcgtcttctgatccggcttgttctcccttttcctttctgcatgctaaaactgtagtttcttttttctgaaatacagtt

SEQ ID NO: 3601 - DNA, 968 bp, Homo Sapiens
  misc_feature (521)..(533): n is a, c, g, or t
  misc_feature (573)..(625): n is a, c, g, or t
  misc_feature (725)..(738): n is a, c, g, or t
ggggtcctcgccgctgtcgccgccgcggagacaaagatggctgcgagagtcggcgccttcctcaagaatgcctgggacaaggagccagtgctggtcgtgtccttcgtcgtcgggggcctcgctgtaattctgcccccattgagcccctacttcaagtactccgtcatgatcaacaaggccacgccctacaactacccagtgcccgtccgtgatgatgggaacatgcccgacgtgcccagccacccccaggaccctcagggccccagcctggagtggctgaagaaactgtgagcacctccactgacagaggcggcccctcccacggctcccaataaaaatgtgaaaatcccaaccccaccgcaccactccccataccttatacccccccgatgtcttatttttcccccccataataccatatcaaaaccctaattggtcgggcggctttgtccccccccaaaattgttttaaacccctccccttggggtgcgcggccccccccaggttaagggccccctggnnnnnnnnnnnnncccaaggaacaatttggcccccgccttatgggtttggcannnnnnnnnnnnnnnnnnnnnnnnnnnnnnnnnnnnnnnnnnnnnnnnnnnnngacaaatcctaaatagcgccattttttgggggcccttttactggttctccccaaaccggggatgccccagttttagccctcttatcccaccatttaattnnnnnnnnnnnnnntttccttttgcaccaccgtgggtggaaattctcttttaaccctcctctccgtgcccatggaaatagccttttcccccccgcggttcgcacggctatttttcacctcccccacccgattgctgctcttattacccgtttcgcccttcgtcgccacaccacatatatttttgcacccggtgttaatataccacccgcgcgccaaaacaatcctcgctccactattgtggcac

SEQ ID NO: 3602 - DNA, 676 bp, Homo Sapiens
  misc_feature (83)..(101): n is a, c, g, or t
  misc_feature (111)..(112): n is a, c, g, or t
  misc_feature (117)..(271): n is a, c, g, or t
  misc_feature (274)..(274): n is a, c, g, or t
gggggaaccacgttttgcccccttttcttctttccttgtgggggggcccgcccccccaaaagaagtgttttaaaaaatttttnnnnnnnnnnnnnnnnnnncaaaattggnnttttnnnnnnnnnnnnnnnnnnnnnnnnnnnnnnnnnnnnnnnnnnnnnnnnnnnnnnnnnnnnnnnnnnnnnnnnnnnnnnnnnnnnnnnnnnnnnnnnnnnnnnnnnnnnnnnnnnnnnnnnnnnnnnnnnnnnnnnnnnnnnnnnnnnnnnnnnnnttnttttctgagtctggttgtttattgaatgcaaattcattcatagaaaacggaaatgcaaccatagcatggagacgctctgagaaaagatccagacccacctcatctcccagcccttcaagcagagctataaaaacaagtttgggagaaaaacacattcccatccccaaagcagaggccccgcctgagctcccccatcctcagcatctggggtggaccaggtgggacgaaggggatccaaggaccagggtggccagggtgcccagagctggggcaattctttgtaaactccaaggtttcataggtatgtgtgtgcatgactaacacagaacttgcctgaagactggacggaaacttagaagccagccctgggtcctagagcgaggctaggactgggcacgtaga

SEQ ID NO: 3603 - DNA, 449 bp, Homo Sapiens
tttttcggtgaaagcctcggtttaattggagacaagatcgaaggattattgatcaacggaccgaatgactgatcgtcaaagtggacaatacacaagcagcttacagaggtcctgtgctcaccctggggagaggagccctgcttgggggtgggtctgtctctccagtcaccccctggctcctggagaaggggggaggggacaggctctgcccagccccaacccctaggatgacacgacttcccataaaacaacagcggtgagtccacccttttcccaggactatggtacagtttgtataatacagcaggaacagagactctcccaacgggagacctccttccctaccttcccgactgggtcagccagggaagggcaagtttttattttccctttttgcctccgtagaataattacaaaccaaccttaccgtttgttcaaaaaagaaagaa

SEQ ID NO: 3604 - DNA, 533 bp, Homo Sapiens
  misc_feature (426)..(426): n is a, c, g, or t
ttcacaaaacaacagactttaatggaaatcatgaaggagggaagcgggcggaccgggaaggggctgagtgacatcgcccatgccgctccctccgacaagcctgtagcagctcctgatgccaccctctcctcacactccccagatcttttggcaggagggcagaaggttggaggccccttgcttcagcatgcctgcagtgagcccagtgaggatgcggtggtagaaacggagctggggcagtagagtgggctcagcgggagtgagcaacaggaggaggtgttgtttaagccagaatgattcccaagtttccccaaggaagggctgtttgtctcctggggctcggaggagtggggattggaggaagtcaattgcccccagcgcgggcctggtaccattaaaaggggcacagggtgggggagatgccancctgagaaggacaggtgtgagcttggtggcactgtggttgttggcttaagggggaggggaacagagtgccctgcttgtgcccagagtggtgcttgtggggttgacca

SEQ ID NO: 3605 - DNA, 501 bp, Homo Sapiens
aggacacatccgcgagtacgaacagcgcctgaaagtgctggagcgggaggtccagcagtgtagccgcgtcctggggtgggtgccgaggccctgagccgctctgccttgctgcccccaggtgggccgccaacccctggacctgccggggtccaaagactgagccctgctggcggacttcaaggagaagcccccacaggggattttgctcctagagtaaggctcatctgggcctcggcccccgcacctggtggccttgtccttgaggtgagccccatgtccatctgggccactgtcaggaccacctttgggagtgtcatccttacaaaccacagcatgcccggctcctcccagaaccagtcccagcctgggaggatcaaggcctggatcccgggccgttatccatctggaggctgcagggtccttggggtaacagggaccacagacccctcaccactcacagattcctcacactggggaaataaagccatttcagaggaaaaa

SEQ ID NO: 3606 - DNA, 480 bp, Homo Sapiens
ctgggcctggtcccaggcccacgaaagacggtgactcttggctctgcccgaggatgtggccgttccctgcctgggcaggggctccaaggaggggccatctggaaacttgtggacagagaagaagaccacgactggagaagccccctttctgagtgcaggggggctgcatgcgttgcctcctgagatcgaggctgcaggatatgctcagactctagaggcgtggaccaaggggcatggagcttcactccttgctggccagggagttggggactcagagggaccacttggggccagccagactggcctcaatggcggactcagtcacattgactgacggggaccagggcttgtgtgggtcgagagcgccctcatggtgctggtgctgttgtgtgtaggtcccctggggacacaagcaggcgccaatggtatctgggcggagctcacagagttcttggaataaaagcaacctcagaacaaaaa

SEQ ID NO: 3607 - DNA, 690 bp, Homo Sapiens
catcaagttggacttccctatgtgaaaccatatactgacctgaggaagatactgaggggagaggggctgtgtaacggtgactgcctctaggccagccttctgccaggcagagaacaggaagctggcatgcagcgtgtctggcactggtaaaatgacaccatgtttgtaagtgcacttgtcctggcttttggtgggccgtgcaggagttcctgcctgaattatagtctttccatctcatatcttcatgtggagccctcaagctttagacaagtcttttatctccgttttcaggtggctcccattatcttgagacctcataatgctgctttccttaaatttgttttacactgacgctagtcagcacagagctactcacatttctggccaccactcggctccattatcttgacttctctcctgcccttttacgtggcatttcttcttttacaccactgttttacatgttgctcctccttagccattggttcctgttggcttttgttcttttacctgagttggaaatctgggaagacaattccaactcagtggtctgggcattctggtggtgctgccaaccccagggcaggaagaacagtgagtgagatactgtgccattacctgcttctccagccttgaagcccaaagcagccaaataactctcaaatgacgatcacttttactcaaaaaaaa

SEQ ID NO: 3608 - DNA, 1147 bp, Homo Sapiens
aagcaacaggcagagctggggcagccgtaccctgagcataagagtagccgcgcacggagccggaggcgagaggtccgctctaagacctttgactgggctgagttccgtcccatccagcaggccctggctcaggagcgggtgggcggcgtggggcctgctgacacccacgagcccctgcgccctgaggcggagcctggggagctggagcgggagcgtgcacggaggcgggaggagcgccgcaagcgcttcgggatgctcgacgccacagacgggccaggcactgaggatgcagccctgcgcatggaggtggaccggagcccagggctgcctatgagcgacctcaaaacgcataacgtccacgtggagattgagcagcggtggcatcaggtggagaccacacctctccgggaagagaagcaggtgcccatcgcgcccgtccacctgtcttctgaagatgggggtgaccggctctccacacacgagctgacctctctgctcgagaaggagctggagcagagccagaaggaggcctcagaccttctggagcagaaccggctcctgcaggaccagctgagggtggccctgggccgggagcagagcgcccgtgagggctacgtgctgcaggccacgtgcgagcgagggtttgcagcaatggaagaaacgcaccagaagaagattgaagatctccagaggcagcaccagcgggagctagagaaacttcgagaagagaaagaccgcctcctagccgaggagacagcggccaccatctcagccatcgaagccatgaagaacgcccaccgggaggaaatggagcgggagctggagaagagccagcggtcccagatcagcagcgtcaactcggatgttgaggccctgcggcgccagtacctggaggagctgcagtcggtgcagcgggaaatggaggtcctctcggagcagtactcgcagaagtgcctggagaatgcccatctggcccaggcgctggaggccgagcggcaggccctgcaggcagtgccagcgtgaggaccaggagctcaatgcccacaaccaggagctgaacaaccgcctggctgcagagatcacacggttgcagacgctgctgactggggacggcggtggggaggccactgggcacccctgcacaagg

SEQ ID NO: 3609 - DNA, 615 bp, Homo Sapiens
  misc_feature (365)..(365): n is a, c, g, or t
  misc_feature (374)..(374): n is a, c, g, or t
  misc_feature (413)..(433): n is a, c, g, or t
cgtgcaacctatgatcgatcaatccaaccgcacagggcagggtgcagccttcagcccagagggccagcccatcgggggctataccgagacacagccacacgtggccgtccggcctccagcatcagtggggatgagtttgaactcggaaggagaatggcattatctatagaggctgatgcaggagagacccagcctccggctgtgacccccagcctcacacctgcctctggttcccgcctggtcctccagcttcaggaccccacctccaaaggcccctccgctcaacgcctacctccctagggccctgctggaacatggcggcctgagtgcccacccaaggggctctcaaggacaccggcaaggcntccaggccntgagccccacttctgccttcacctctgcctgggacccgnnnnnnnnnnnnnnnnnnnnntccccagaagatggcggctagggcctcgccgccaggacagagaaggcacggggtggctgggcagtcagggaaggagggtcgcccggatccgacattttggagagattccttcactctcctgtcccccctacctcccttctctaatttcttcttttttttaatgataaagtcttaaaaacacg

SEQ ID NO: 3610 - DNA, 307 bp, Homo Sapiens
  misc_feature (43)..(84): n is a, c, g, or t
  misc_feature (97)..(110): n is a, c, g, or t
gagatggaattttgctcttgttgcccaggctggagtgcaaagnnnnnnnnnnnnnnnnnnnnnnnnnnnnnnnnnnnnnnnnnnagactttgtctcnnnnnnnnnnnnnncaacaaatatttggtttagtctacaactataccttccttataacttaaccatatgcatttattaggaaaagtttatgtaatgcagacaggaagctctatgttcccttctctggggcatcctgaacgtctgaagggtcacagatgtctgtgtagagatctgtaagatgtcaaagaataaagataatttatagactaaa

SEQ ID NO: 3611 - DNA, 495 bp, Homo Sapiens
  misc_feature (225)..(225): n is a, c, g, or t
tgtaactgcctccctttagttcaatggacagacctcccaaggcaaaaactaccttctgacttgggttgaggctgggttcccctctattgttcccctatcataagagctaggccaagcctatgggaccttgagtcatgcaggatgggatctgtggtcaaaggacaggcgaggagctgtgggcgcagggcctgccgccactgcctacatcttctctcttccccatcntgcattggaggtcccagaaaacaattagcttctggcaaagggggtacccacttctttccctgttgactttgctgtttcccaggctcctttttgtgtttttataactgtcaccagttagccactgtttaaattgtatatattgttttgaggcgcctggcctgtcccttcagtgagccatgcccacccttgtgttgtagtgagaagctgttgtcacgactaaccttctgtctctgaaattgtttgtttcaaataaagagttaaaattgaaaa

SEQ ID NO: 3612 - DNA, 549 bp, Homo Sapiens
gcggccagctacgtcaacaggatgaccaatgaggcgctgcacaaagggtgctccctgaaggttctggcggacagcgagcgatatacgtggatcgtgctgtgagggccaggccgccccggacactgactccaactacctccgtggcctgggaccggcccccttcctggggtggcctcttcctggccggctggcccaccgactgatgaccggcactagtgttagcctgcggaacggggctgggcagggcagcctctgttggcctgagggtctggacgctttttatttatgcctatttaagttgggaaggggcagagagagggcgccccctgccccaccagcctgagtgccccgccttcaccccgagctgggcatgggcctggcccctcgtgcatttgcccttttctcggctacagctgtggacgttgccctcggggaggtcgaatggaccccattccccctgccctgcccgcccccagcctccccacccaggccggcaacctggccatccccattccgttcttcttcatgtaataaatgttttaatttctg

SEQ ID NO: 3613 - DNA, 656 bp, Homo Sapiens
gcacgagaggaggcagtcttccccaggaagacccaccaacctggtctgaggaagaagatggggcctccgagcgagggaatgtggtggtggaaacactccacagggcccggcttcggggccagcttccctcctccccaacccatgctgactctgccgggggaaagcccctgggagtcctcaggggaggaggaagaagaggggcctctgttcctgaaacctggccacacatacctgcgcccaatgcaggactgaggacatgctcagagagatccgggaggagctggccagccaaaggattgagggggccgaggagccccgggacagcaggccacggaagctgactcgggcccagctgcagaggatgcgggggccccacatcattcagcaggacacccctctgtccgcatcagaggtatgaggaatgcagaggacctttggcatgcatctctcccagaggagatctctccccagtagtgctggtcaccctccggcatctgtgactctacctcaaggaccacatttcccaaaggaagcctggcccaggcaccctgcctcctgctctgtttggggatcaagaactgtaaatttatgtatcataggtgcacctgagccccacagaaagttgtgcataaaaatgactgccctggctggcatgg

SEQ ID NO: 3614 - DNA, 455 bp, Homo Sapiens
acagccgcaagatggcctttcgcgccaaatccaagtcctgccacgacctctaggttctctaggtcccaccccgctcccactatggtgggagacgaacggaagggttggtgggctggcccagccaactgccccgggtgcctcagagcaggctcagactctgggtccctcggagctgccagccgggcacccccaacctcatggtcatggacagatagacagtgctgccctgcgaagtggctctcaggggccagtgagggctgggcccacagatgatgcatgcgcaggctcatatgcgtcccaagctagccgcagcgcagccgccgggcaggcctgcgtgccgggagaggactctgccttttttcacagcccgggtgtgcctgccctggagggaggctcttcagtgcggtagctatttgtttacatgcagatttttgtaataaaggctatttcctgat

SEQ ID NO: 3615 - DNA, 494 bp, Homo Sapiens
  misc_feature (86)..(95): n is a, c, g, or t
taaaggggagggggagttttcaacgtcattcaggataactattttcctggtataaaaagacattattctcaaacaataactttctnnnnnnnnnntacatcatgcaatcaaagttttaaaaagtttcactgaatgtttcaaacctctgggaacaaatcatgtagtaaccattttgaccagtttttgcctgaataaacgcaaaatcttgcaagtcaacacagatgcaggctttgctgcaaaaagaaccgctgatcagagccaaaaccagtttccaaggagggcacctgccagaaaacaggggcctcagcagagagccagaatgactccgtgtgttggcacaaactcctacgcctttggagtctgtggcagctgcacacccagcagcaccacctctgcccaagcaaaagccagtcctttactggagaaacagggaacatcacggttctttctcctcaattacttttaaagtcccattaaactaaaaagcaacaaaa

SEQ ID NO: 3616 - DNA, 839 bp, Homo Sapiens
  misc_feature (56)..(73): n is a, c, g, or t
  misc_feature (766)..(783): n is a, c, g, or t
ggaggcgcaaaagccaagatggcactttcccttggcagtggtcacctacatccacnnnnnnnnnnnnnnnnnncctgctgggcgaccgctggattcctcacagctgcccaccaccctgtatcccaaggaacacgaagcgcaaagcaacgcctctttggatgtgttcctgggcaacacaaatgtggaagagctcatgaagctaggaaatcaaccccatccgcagggtcagcgtccacccggactaccgtcaggatgagtcctacaattttgagggggacatcgccctgctggagctggaaaatagtgtcaccctgggtcccaacctcctccccatctgcctccctgacaacgataccttctacgacctgggcttgatgggctatgtcagtggcttcggggtcatggaggagaagattgctcatgacctcaggtttgtccgtctgcccgtagctaatccacaggcctgtgagaactggctccggggaaagaataggatggatgtgttctctcaaaacatgttctgtgctggacacccatctctaaagcaggacgcctgccagggggatagtgggggcgtttttgcagtaagggacccgaacactgatcgctgggtggccacgggcatcgtgtcctggggcatcgggtgcagcaggggctatggcttctacaccaaagtgctcaactacgtggactggatcaagaaagagatggaggaggaggactgagcccagaattcactaggttcgaatccagagagcagtgtggnnnnnnnnnnnnnnnnnncaactgaccagttgttgataaccactaagagtctctattaaaattactgatgcaga

SEQ ID NO: 3617 - DNA, 520 bp, Homo Sapiens
ttggaaaggaattaatggtgtatttccattagggaaagtgctgacaagccgcaagggatcccttgatggttctgggcatgggcgcccagcctgggctctggctttgggagcagcgaggggaatgtgtctctcacccctaggcctcctggtctggctcctgctcaggccacacggcgcacccacccccagcgcgcctcagtccaggtcactgggcagggtgtttactgctgcgctccaacccaagcatgtagatttcagaaagggactaggacccccggcaggtgtttgagaccaccggctcccaagtgcgtcgccttgggggtttgcatcggctcctcagcctccccaggcaatctctgtgtagggtcgggaacgggaggtctgagttgagccgggtgcctgagatctccggtgcagggcctcaaactctgcgtaaaaagctccccgctgatgccaatgtggtggtggtcagaacaaactcttcctccaaacggaaatgttaaagggtggtaattccaaa

SEQ ID NO: 3618 - DNA, 428 bp, Homo Sapiens
gcacccacagctccgcagctggcaggtggaaaggacaggccaggccaggccaggccagggctgtgactccacagctcagatacagcagcagccccagcctgggcagcccaagccccgcactcagagcaggtagccctggtcttggcagacaggcccacctctgcctgagttctgtttgtgcccaggctggagaccagggcaggtgtgcatgtcacccaagtgacaccagcgtctggccatagctcacacgcacctgagccaatgtggggcggaagtgaggacctgctgtcctaggttttcacacctaacttgtttgatgtcagcgcgagttggagaagcatctgctgtttttcagctttctggaggggtttgtggaagactggtgttatttctatctcaaatatttagtaaaggtcatttgtgaatcc

SEQ ID NO: 3619 - DNA, 436 bp, Homo Sapiens
  misc_feature (98)..(98): n is a, c, g, or t
  misc_feature (132)..(132): n is a, c, g, or t
acattagggggaagtgagcgcctcccatgtgcagacagtgtgtctttatagatttttctaaggctttccccaatgatgtcggtaatttctgatgtttntgaagttcccaggactcacacacccgttcccatntcacttgcccacccagtgtgacaaccctcggtgtggatatacccccgtggactcatggctcttccccacccccactttctataaatgtaggcctagaatacgcttctctgttgcaaaactcagctaagttcctgcttcccccttgatgttgaaatatcttatgtaagagggcaggggatgtcgtgaagatggcaagaagaacccagtttcaaatttctggaaaagagcctgtggtggagatctaaagatgtttagggaagagctcgactaaagaacaatgaaataaatggtccaaggggaagtc

SEQ ID NO: 3620 - DNA, 583 bp, Homo Sapiens
gcggccgcttgggagccccccattggcgccgccctactggggaagccggtccgtacgtaggccttgcatctcgccacctccacttctgtcctcaagaacaagtcctaggtcaagggaaacagcacagcctgtttataattaggaaacacttaaaacagcctggcatttgggaacagccatgttaacgtgagcaaattcctctcatgaaatagcctgcagctattaagaagcacgtgtgtgcaggaagcggaggcgcaggacctcaccgcgccagcgtgaagttcccgggcatggtcatgaaagcgtggttctgtaagaaatcagagggagaaagggagagaagggggagggagacaacccaaacgttggagggtatttgttgtaaacttcaaacttttggcaggtttgaaatttttcataactccggggaggagcaagaggggtgaaaagaaacaagttctctacttgtgatcagcagctggtcatagtggttgcctggagtatatgcctttttgtatcctttgaatttccagccatgtaaatgtattatttattccaaaaataaagcagatttacattttaa

SEQ ID NO: 3621 - DNA, 182 bp, Homo Sapiens
cggtgcagcgtggccaatgcgcggcgctgcgcgggggacagagcaggaggcggtctgtcacctcagccactgctgacctgggctggcctcccccagccctcccgtggcggagccggcagcgatgctacaggcctaagttattgtttgcataaaaagaatcatgttccctgtgtacatttaag

SEQ ID NO: 3622 - DNA, 414 bp, Homo Sapiens
  misc_feature (74)..(143): n is a, c, g, or t
gcacgaggactaaagttgttgtagtctccacttcagtcagaaactgatgtttcagctaggcacagtggtacatnnnnnnnnnnnnnnnnnnnnnnnnnnnnnnnnnnnnnnnnnnnnnnnnnnnnnnnnnnnnnnnnnnnnnnagcacccagatctcttgtcctgtcctaaaaccaccctgccacaatcaaacctgaaaggagaaaacaaaagccctggtgttccaaactcagtctttcctgaagaagaggatctgagttatcttctgaaacagcgttctcccttcccagttgtatcactcttataaaaagactgtccagtctatgtcatgccctaggagacaaactgttcctcccagccccctttgagtattgagcagaagaatcaaattattaaatacgtatgtttgtacag

SEQ ID NO: 3623 - DNA, 754 bp, Homo Sapiens
  misc_feature (663)..(676): n is a, c, g, or t
ctctccggcccccaccgcggatcatgtaccaggattatcccgggaactttgacacctcgtcccggggcagcagcggctctcctgcgcacgccgagtcctactccagcggcggcggcggccagcagaaattccgggtagatatgcctggctcaggcagtgcattcatccccaccatcaacgccatcacgaccagccaggacctgcagtggatggtgcagcccacagtgatcacctccatgtccaacccataccctcgctcgcacccctacagccccctgccgggcctggcctctgtccctggacacatggccctcccaagacctggcgtgatcaagaccattggcaccaccgtgggccgcaggaggagagatgagcagctgtctcctgaagaggaggagaagcgtcgcatcacggcgggagaggaacaagctggctgcagccaagtgccggaaccgacgccgggagctgacagagaagctgcaggcggagaggaactctgcgtagggtgggagcacctctgggtgggctggagtgagagccccgggggtcctgatcctctctcccacagctgtctccttaaccacaaatgccctacagatgagtcagtggagatagagctttccttcctttggacacatgggtcagcattgtgttgattgaaannnnnnnnnnnnnnggaggtggcgtttacaccagccaggccagagggaaggaatgacaacaatctgtgggggtgctagccacgtttttataa

SEQ ID NO: 3624 - DNA, 440 bp, Homo Sapiens
gccctgctctgctccccttactattctggcaacccaggccccgagtccaagatctcgcctttctgggtgatgcctcctcccgagcaaaggcccagtgactatggcatccccatggatgtggagatggcctacgtccaggacagcttcctgaccaatgacatccttcacgagatgatgctgctggtggagttctacaagggttcccctgacctcgtgaggctccaggaaccctggagccaggagcacacctacctcgacaagcttaagatctccttggccagcaggacgcccaaggaccagagcctgtgtcacgtcctggaacaggtgtgcggcgtcctcaagcaggggagctgagccttccagggcagggtgggctccagttgtcttgagggtccggatgggctcaggtaataaagaaacggaagcagcagccaaaaaaa

SEQ ID NO: 3625 - DNA, 811 bp, Homo Sapiens
  misc_feature (161)..(161): n is a, c, g, or t
  misc_feature (291)..(291): n is a, c, g, or t
agcagccccaaaagcggggcccccaggctggtgcacccttttttctaccaagcaactcaacaacaaagctcacccccacgtgacctgccgacgaaaggcgaaggtcagacctgcttgttggctgctgggccccgaggggactaacacctccagaaagcctntacagtggctgcagaaccctgttccactgcaactccggaacccccactggggagcttccctttctccccggaggccccccagaatatggcctgggagaccctccaccgccccctggcttgttgcagcccnccaccctggccccctggcagccctcgaggggtgatgggccccccgccgtgtcctcccagcccagtgggggccgaagcctgggcgaggagggtcccccaaacccgcggcgcctccccgccgacccccccagtcagcatcaagtctgagcgcctctctccggcccccgggggccccggcgactttcctaagaccttcccctatcccttgctcctcgcccggtccctggcagagcctttgcggcctgggcccgccctgcgccggctgcccttggccgacggctggccccggtaggagatcacccggtggcaccagcccagagcgctcgccaggtacggcgagggcacgtggggaccccacctccctccaggcctcttcagagaagacccaacagtgacgcccccctccgcggtgggggcttggaggtgggcggctggactcaatccaccctggggggctcctttccttcttcctatttgtgtgtatatccacaaataaaacgcgcgtggcgtccgtggaccag

SEQ ID NO: 3626 - DNA, 493 bp, Homo Sapiens
tacacagagggtcgcacttggactctgagggttgggtgtggaagggggaaaaggggatggagacctgctccccagctcttcctgtcagccggtttacatgggaacagggttaacatctgtgttaggggaggtcaccttaccctttttcataggggaagagtgtcacactcctggctatctcagggggaatggggaaaagaatctttcaagggcaaagaactcgtgggaggatgtctgttgtatgtaatactcacaatggcttttggttagtgttgaaggtgggaagagcatttgtaggtccagaagagtgaaagagagggaggggtgcagcaacatgtgcacaggcacgcacatgtgtgcacgcacacatacaatctgggttatctttgtgctatatagtggattataattctgtgaaaccaagtttgtatattgaattacattaaggagtgttctttaaaaagagaaataaatatacaattacaagcttcaa

SEQ ID NO: 3627 - DNA, 544 bp, Homo Sapiens
  misc_feature (251)..(251): n is a, c, g, or t
tggctaaggaggcccgcagcgatccaaacaatatgtatcaaagctgtcgaccgaagggtgacttgggcccagttcagcaagacaacgcccactgtaccaaatctgccgcgcctggatgcgcaacagcccctctcgtgcgcgagcgtgaatgctctccccagctcaccccctgcccccgctgcctgaggatgaggagggctcagaggtaaccaacagcaagagtcgtgatgtgtacaagctgccgccacccnacacccccggggccacccggagatgcctgcagatcccgcatcccatctccactgcagcctgagatgcagggcacccctgacgatgagccctctgagcccgagccctcaccctccacactcatctatcgcaacatgcagcgctggaaacgcatccgccagaggtggaaggaggcctctcatcggaaccagcttcgttactcagaaagcatgaagatcctacgagagatgtacgaacgacagtgatgttcccaggtccccccacaccagtaaacatcccccagctccacaaaaaa

SEQ ID NO: 3628 - DNA, 623 bp, Homo Sapiens
  misc_feature (537)..(537): n is a, c, g, or t
  misc_feature (555)..(555): n is a, c, g, or t
gcggccgcaggtccagactaacgtactgctgagcccccgccgtgtacgggggccattgtggggccttggggtctcggggctcattgggatcccctgtgcgggcaaagttggcccagtatcgcatcagtcgctgggcgaagattttctcctctgccgtgtagtttcgagaggggtccagggggatcccaaagatgaactcgatctcgtagccgtggggcacccccatccacaggggccaggagagcgtggaagcacggtgttcaaagacgtaggcgtagacccgggcaccctgggcagccagtcgcccagccagctgggccacggggcacacgacattgtggtcgcccaccacatcgctcagggcctccctaaggcgtgccgggtcctcgggatgcagccagtctgtgtaatgcaggaccacagcctcggctgccaggtcacttacctggggaaccccgacccgcacccctgccaggaacctcgcccggctgatgagagaactcgtgtctttgctgaagccctgggccccgtaaccangaaatacgagccctcatncttcaccacacccaccagcaccctgcagccgtggaagtctcccgcgtgatgagggcctcctgggtgtc

SEQ ID NO: 3629 - DNA, 420 bp, Homo Sapiens
  misc_feature (152)..(152): n is a, c, g, or t
atcttaattgtaaaaggtttatcaagaaaaaagattcaaggagcagcatccaggaggagaccatgacccccccgggggcagaggggggcagtggtgacacatgtcagcaccccacagcaagctgctggaccacaccctgacctgggtggggnaggaggcagaaacccctcggggatgtaaacataggtcagagacagcacaacctgacggggagcaggggcccacattccagcgaggcaaacagaggccaggtgggcatggaatccctcgcatggctgggcaagcaggcccctgtctttttcctcttaggtttcccattgtgcaacaggaaggatcttgggaagacagtgccacagagcccaaggaccctgggatcctgggtttggacctgcttcgagtgtggggagttattgctggtga

SEQ ID NO: 3630 - DNA, 830 bp, Homo Sapiens
tctatagacgaggatgctcacacggcaggcacatggtccggacgctcgacggacgcacctaccgcacgctgctgcagctcaccaggatgtaccccggcctgcaggtgtacaccttcacggagcgcatgatggcctactgcgaccagatcttccaggacgagacgggcaagaaccggaggcagtcgggctccttcctcagcaccggctggttcaccatgatcctcgcgctggagctgtgtgaggagatcgtggtctatgggatggtcagcgacagctactgcagggagaagagccacccctcagtgccttaccactactttgagaagggccggctagatgagtgtcagatgtacctggcacacgagcaggcgccccgaagcgcccaccgcttcatcactgagaaggcggtcttctcccgctgggccaagaagaggcccatcgtgttcgcccatccgtcctggaggactgagtagcttccgtcgtcctgccagccgccatgccgttgcgaggcctccgggatgtcccatcccaagccatcacactccactccctgagtaattcatggcatttgggggctcaccccacctccaggtctgtcaagtggccttttgcccctggggctgatggcccccaactcaccagcatcatgaccttgtgccagtcctggtcctccctccccagccgcccctaccaccttttggtgccacacttctcaggctggccgccctggttggggcaaccgagagcctggggttcattggtgaaggggccttggagttgtgactgccggggccgtatcaggaacgtacgggtaaacgtgtgttttctgg

SEQ ID NO: 3631 - DNA, 1665 bp, Homo Sapiens
  misc_feature (829)..(829): n is a, c, g, or t
gaaaagggcagcccctcccaggctggtacggtccggaaactccggatcttctgggaggagaagaggcctgaccttggcgctggggtccagtgggcgctgctctggtccgaggctgctgctcttgacctctgctctgcggctgttttccattggagtagaggctcctcctgtcctgtcctgcctgtggagggaagcaaaccttcccctggaccagagagaggagaaagcggagacaggtagcaacgctgtggactggtgatgacaggctcttcagctccctgcaagtgaccgggcctggggaacagggcatggcacaggcacacaggaccccccagcccagggctgaccccagacagccccgtgtgttcaagctggtactcctgggaaagtggctccgtgggtaagtccagcttggctcttcggtacgtgaagaacgactacaagagtatcctgcctacggtgagctgtgcagtcttcacaaaggtggtggatgtgggtgccacctctctgaagcttgagatctgggacacagctggccaggagaagtaccacagcgtctgccacctctacttcagggtgtgccaacgctgcgcttctggtgtactgacatcaccaggaatggattccttcctcaaggctcagcagttggcttgaaggcacctggaggaggagctgcacccaggagaagtcctggtgatgctgtgtggtgcaacaatgactggacctcagccaggagcgggaggtgaccttccaggaagggaaggagtttgccgacagccagaagttgctgttcatggaaacttcggccaaactgaaccaccaggtgtcnggaggtgttcaatacagtggcccaagagctactgcagagaagcgacgaggagggccaggctctacggggggatgcagctgtggctctgaacaaggggcccgcgaggcaggccaaatgctgcgcccactaggtgcagccactcctgggggctgtggggaagacaccccctgcctgggccatggccagctctaggtggattctgattcactgtcaatgctgggttgctcccgagccctagatgttcctggaagttggccccctttatgaaaaccacttcccacagccagttgggaactgccagaggcaagatctggcgtcaacatggctcccaggaaagtgctgtgccctatccccactgataccatctgataccccgaatgcctgtgcctgttccacctggacggtggccccctcagcctggcagcctctggacagagaggaaggaaggattggaaaagtccccgcagcacagcgacggtgggaagatgccttacgtctgatcttgatgggggcactggcctggagcctgggcccacctgcttctggggggttggggagcaggccagatggaggtggtggtgccaggaagaaatggagcgatgactgactgtggggtgggcccaggatttccacatcttggtgaagttgcccctgggaagggcagctgggggcagtggcgccagttcccttccatggtctcccggctggcaatgtggtgaagctgagtttctgtccaatgagcaggaagattctgagacatttcgcctgagatataagttgtactgcgtatgcagtttttcctccaaaaattaaattgcttttgacaatcaaaaaaa

SEQ ID NO: 3632 - DNA, 873 bp, Homo Sapiens
cgttgtggtacttgattgggcagccggcggtttgcgggcaccactcagctctggggctcctggggagcctcgcccccctcttccccggcgttgtcggccgtccacagtgtcaggttgtctcgcagcagctgcatgatgagggtgctgtctttgtaggagtcctcgctgagggtgtgcagatcagccatggcctcgtcgaaagtggtcttggccagagagatggcctcctcggggctgttggcgatctcgtagtggaagacggaaaagttcagggccaggcccaggcggatggggttggtgggcggcatctccttcttgctgatgtccatggcctcctggtaggctgaccgggctgagtcaatgatgcgcttcttgtcgtcaccggtggccacctcggccaggtagcggtagtagtcacccttcatcttcaggtagaagacccggctctcggcgtccccggcctccttgatgaggtggctgtccagcaggcccagcacggtgtcgcacacgccctggagctcagtctccaccttctcccggtactcacgcacctcgggccccttctcctccgagccctcctcgttgcttttctgctcaatactggacagcaccctccaggcagccctctggccgcccaccacgttcttataggctactgagagcaggtttcgctcttcgcaggagagctcctcgcccttctccacggcgcctttcatgaaggctgccatgtcctcatagcgttcggcctgctctgccagcttggccttctggatcagactggctctctccatggctctggggacacacagcgggcggcgggctaactgctgcctggcctcgtgccgattaaaccacccagcctcgtacctagcg

SEQ ID NO: 3633 - DNA, 446 bp, Homo Sapiens
gctccacaaatggccaggtccccccaggggaaggcttccggctgttatcggctgcctcagggggcgagtaccttggagggcctgcttcaatggagggtgccccctggagggcacacaccagcctagtgcttaccttggctcctacctgtaccagctccatgactctgctcgggtgaacagccttggctctcagacagccattctaacactgccagtgcagaggggcctcagacgctggagtgtagcagtggctgcacctgcacagggattatgctgccagcagccaccctgctggcgtcccagcacacacctcctcactccctgcattggagggagtgtcattttaagggacatttttatgacttttatgtgtatgtttatgtagaaatttggaaaatacagaaaactgtaaagaaaataaaagccctttatatcaacgtcaaaaa

SEQ ID NO: 3634 - DNA, 914 bp, Homo Sapiens
cgagctcagtaccctgtcgtgcccacgactcgacagacaccaaaacagtcctggaagtgctaattacaggaccccccaagtcttcctaccctctgcaccctcaagaaacccccagtgccttgtatgaagcccaccccacatggcccacagctcctgtgctggccagactcccagaaaattctctattttttaagtaacgacttccccctttgggggaccccaaaatttggaggccccattctaggactctggggatcccaaaccctagagtacacacgtcccaaactcccctgtgccctcaagtcctacagcccctagaagaccccaatgccgtaactcctaggacccccaaatcatggaatccctaatccccagggaatcccaaatttgaaaatccaatcccaagtccccaggaaacccaatcatgaggtccttgtgcctggtatggaggagactgcagtcaggatatgcattccaggctcccagacacctcaagccctattcacaggcaccaggaaaccccacacaggaattcccatccctggaaactggagaatttcaatgccccgagtccatgggtttcaagacaccaaattccaagagccccagccctaagggaaccccaaatcctaaagcctccatctctaataaatggaaggccccaaggccctgaggggatctcaaatcctggaaccccgatttcaatctacgttctagtcactggcctcaaaggaccccacagcacctgggccagaccaacagctcgagggagaacctgaaggcccagggggtccagggcggacctggggccccgaccaccaaggacagctcacgactgccccttcactgcatgtccccaaactcagcatgactcctgtcctcttcaataaagacgtttctatggccaaaaaaaa

SEQ ID NO: 3635 - DNA, 507 bp, Homo Sapiens
  misc_feature (28)..(28): n is a, c, g, or t
ggcctctaccccattaccagttggaggnccaggattggtggttgagctttagggagcagctgctcgtttggagtcctggacgttggagggattacccactactgatacctgcagaatggactgcagaaaagtctcaaaaaataatgcctttattcctttccctcccttaaggaggcaaagagttgatttaccttttgtgaagagaaaacccttatcctaggacatccacagggtagaggttgggtgtgtgtacgggagtgtctgaggcccagtgtgttttttagggttaccccatgtaaagcacttaccgctgtgcttggaattcagcagctgtcaaaggtgcaatttcaggggcagggaacctttgaggatctgggcccgaccctcactacccctgagatattagttcccaggcctgttttcccacaggattgtgggctctctgcttccttagtcggaagtgttttcaactaatcaaataaatgaatgaatgatgaataagaaaaa

SEQ ID NO: 3636 - DNA, 429 bp, Homo Sapiens
taactctcatttgagtctgaccaacagacagggtagatgagctctctcaagattctcagctttatgttttttgttccctctcaatacctttatgcaaatgaaactgaaaccaccataagaaatccttgttaaggggaaaagaggcaaaaagacctctaaatatagtcaaggttaaccctagttctcaatttcctaatctgtgacaaaagaggggcaggaatctctaccctaaattgatgttgaggtatcgatgctaaagagtcatttcctgttactatcgttgggaaggaatgagacagctgcagagagcttcaccagaacctcaatgatggacaggtagtcattgaaaaaataagacaacttgacggcaggaaaacaaaatactgaatgggcagatgagaaacagaattatcatcagagtctcgctac

SEQ ID NO: 3637 - DNA, 514 bp, Homo Sapiens
  misc_feature (166)..(166): n is a, c, g, or t
caaaacccaagggtcatcattgtccaggcctgcagaggtgaaaaaccatgggggactctggggtcagagactctccaagcatccttggcagtcatctcttcacagtcatctgagaacctggaggcagattctgtttgcaagatccaccgaggagaaggacttcatntgctttctgttcttcaacaccaacataacgtgtcctggagagaccgcacaaggggctccatcttcattacggaactcatcacatgcttccagaaatattcttgctgctgccacctaatggaaatatttcggaaggtacagaaatcatttgaagttccacaggctaaagcccagatgcccaccatagaacgagcaaccttgacaagagatttctacctctttcctggcaattgaaaatgaaaccacaggcagcccagccctcctctgtcaacatcaaagagcacatttaccagtatagcttgcatagtcaatatttggtatttcaataaaagtaaagcctgtaaaaaaa

SEQ ID NO: 3638 - DNA, 489 bp, Homo Sapiens
gaggtgtcctgttctccctcccttcttgccatctccagcatcttcttccccttccctggcctgcagggccttctccagctccctttggttagtccctggccatccctcctgtcctggatcccttctccctaactgcaaaatgcctgcagcttccagctccttcgtccctgatcctcaagcggttccctcccgtctcagctcagcggatcccccagagtggaggaggcctctccatgaggaggggagcagcccaaggcacctgtcctctgacccaccggcagcgagtgcgcaggtgtgagtgtaagttcatgtaggagagtgtatgcgtgtgcgcctgtgccccgcttgcaggcaagcagggctccctcatgtagcccggccttccccctgctgggggtccaccacatcgctgctctttctcacagtctgcctctgatgagggcgaattgctatgacattccaagctccaataaagcctgtcccagaaaa

SEQ ID NO: 3639 - DNA, 196 bp, Homo Sapiens
ttttttttctgtttcgatagttttattggaacacgatggtaacacaaacatggatttggggtcccaccacaaatgttcctcctccaggcagcatgcaccccacttctgcagccagcaaaggctccaggaggcctgcaaaaggtggaggcagcccaaaaacagacgtggaggcgtcttctgcagtggcgggtgggcg

SEQ ID NO: 3640 - DNA, 586 bp, Homo Sapiens
tatgccaacagccagcctgcagccagctgagatggagggcctggcacagcggggcgtgcactgccccagccccccgtagcaggggcatgactgtttcccaaccagcacccaaagacgggcgccattgccaagtcacaggatgtgatctaccccggacttcctatctgagcttcaagggagacatctcagggcaaagctttcgtgatggaggaggcaaagacagtagccccctccttatttcttttttctatctgttcctcttagcccccaaactcccagggtctcacttccctcttctggagggtttaaccagatcctccccacccccgctccctcatagtctacccccacgcctcagtgtctcctcaggcacaggaagtgggcggtgggggaggggtaagggcctgacagtgagtggctggccatattcctcaggagtccacagactggagtggacctggaacttagagacgggagggacccgagcctggcttttgacctaagaaccctagcaggagaatacagtctccatcctgctgtctctgtcctgtccccaagttttcaaataaaactttccaaaaagtga

SEQ ID NO: 3641 - DNA, 463 bp, Homo Sapiens
caatattcctaagtagcaatggggttggctcaagtctttattaacaaagaacattctctttcatctataaagaaattcttaaagatgcattgacagtgttgaattaccaacagcctgtgaagatcagtttgaccggtgtggacacgtgctggttaagcactcaggcctacgtgggccgagcgggatcttgatcatggggctggtgtatggatccaccgtcggattccgtctgcagaggaggacgtagggggccgtcacacccaccaggcctccctgctgtgctttaacacaggcagaagaggttcatggcaatataatagtcaatgaactttcagtttaaattgtgtacatttttaaattgtaagatttttactgtatattgatgcatagtgtgattcaataaattgcttgtaatttaaaaactatttaatattcaaaataaatatagttatatatttataaa

SEQ ID NO: 3642 - DNA, 529 bp, Homo Sapiens
acacactgacccttcttttgagtaaggttaccagggtaaggtataccccttcaagcacctttcacatgactctcaaattgtgtttcctggacaagcagcacagcatcacctgggaacttgttagaaatgcaagttattgggcgccatcccaaatctaacgtgccagaaatgctgggagtggtgcccagcactcttttgacaagaccttccgtgatgctgatccttccttaagtttgagaaccaatggcctagctccctgttgctgtgaagctaaccgtgcacctgggctctagtcctctatgcctgggctcatttatttttctagcttcacgtcccccaagcaaccgaccttctctcccaccaaagtggacacattcccagccttggctcaggcccttttcgcaatcttctctttcaagttctgtccctaaatgctctggccttcaagcacacaggaaaagctgctcttatagagctgctgcagaccggcacgggagggaaggaggctgtggtgcagaattggatctca

SEQ ID NO: 3643 - DNA, 385 bp, Homo Sapiens
  misc_feature (47)..(59): n is a, c, g, or t
gccctgtggggtcaacccttttggaaactgtaaagatctcactctgnnnnnnnnnnnnnatcttcgggaccaggatttgcacagaagcacatgcacctacccaacaccccccttttttgagcacagatgttcccccatctcgctccctcccaggactctgaccccagcattctcaggcaccagtccctgtccggaatgccacccacatcttccatttccagtgtcccctcccagagctggtggacccagggaacagccactcccctccactctctaccagataactgaggaggggagaggtgggccgtaacgggcacggatcacgatgtaaattattaagcattttggttggatttcttttgtaataaactatttttgtaccatt

SEQ ID NO: 3644 - DNA, 590 bp, Homo Sapiens
gtgcaggacaagctgcgaatctccaccaagaagctggaggagtatgagacccgttcaagtgccaggaggagacgacgcagaagctggtgctggagtaccaggcacggctggaggagggcgaggagcggctgcggcggcagcaggaggacaaggacatccagatgaagggcatcatcagcaggttgatgtccgtggaggaagaactgaagaaggaccacgcagagatgcaagcggctgtgactccaaacagaagatcattgatgccccggggaagcggcttttgcctcgttggatgccgccaatgcccgcctcatgagtgccctgacccagctgaaagagaggtacagcatgcaagcccgtaacggcatctcccccaccaaccccaccaaattgcagattactgagaacggcgagttcagaaacagcagcaattgttaacctgcctgaggagggaggaagctacccaaggagagggggactatggtggccaagggcagggtctcggcctggggaggcacccacggttgcagccccagcgcgggtgtcatggccgagcctcccctccctgccgctgtccaggaggcggttcc

SEQ ID NO: 3645 - DNA, 458 bp, Homo Sapiens
ttctcttctggcctgtgagtttctcctccagaacggggcgaacgtgaaccaagcggacagtgcgggccggggcccgctgcaccacgcaaccattcttggccacacggggctcgcctgcctgttcctgaaacggggagctgatctgggggctcgagactctgaaggcaagggaccctttgaccatcgccatggaaacagccaacgctgacatcgtcaccctgctacgactggcaaagatgagggaggctgaagcggcccaggggcaggcaggagatgagacgtatcttgacatcttccgcgacttctccctcatggcgtcagacgacccggagaagctgagccgtcgcagtcatgacctccacacgctgtgacccgaggcccacggggcccgcgcctgcctccacaaccccgccaccgggccctctgccattaaagcctccgtgcttcgctattcaaaa

SEQ ID NO: 3646 - DNA, 665 bp, Homo Sapiens
  misc_feature (201)..(201): n is a, c, g, or t
tggggcatcaagaaggagcagctccttccagtgtgcttctggctcctgtcaggatcaccccagcaatgctcacattgtctgtatatgccaagcaccagctcgttttccggcattgtcagagccagcttcattatgccctcccccagcagagcactggctgaccctcaaaggcctgagtatttgattcatgcccctcacttntaagctcttgagacaccagaaccagccaaacaaaaatctctccttagagatctgggtcccatttctgtggcgtccctcctcccaactctaggtcctgatggcctcacccttccgtttgttaccccagacacgggggtagaagcagcattctgtgggtacagccttggttgccccgatgccttctttgcctcctcagtctcagtcccatgcctgtctaaccagcttcttatattaaagtctctatgttgaaccatctagttggtttcttcctgactagaccctgaaagttaccttgttcaggttgtgggtacacctggctatgaggttccccagctcggcatgatggccctacatggcaaaggacaactccactttcggcctactgagctgactagcatcagcctccagcttcacactgagagatactgacctctgccctagcctctcgtcgggtgggcaataga

SEQ ID NO: 3647 - DNA, 575 bp, Homo Sapiens
  misc_feature (530)..(530): n is a, c, g, or t
  misc_feature (543)..(543): n is a, c, g, or t
gcggccgccgggcgcgtccagcgtcggggagttgacgaagatggggtgctcgccgcggttgtaggcccacacgccgtcgggctccttgctgagcaggatgccgaagccgatcttgctgcgcgttcgccgcaccgactcgctgcgctgctccaggttgagctggcccaggcagaagccgctgccctgaggtaggtcgtagaagatgctgacggcctggtcgtacaccgcatagaggcggcccacgcgcgtccggtgctcccagtacgccacgctgcaccagtggctcggcttggtggcgtccggagacatgctggcgtctgagaattcacccggagcagtgatgagggagttggtagcctccgtttcagtgtaagacaatgtggaatcggacagatccagtggcttgtactcgtcgcgaggagacagccgagagtagggaggtggcggagatttttgtgtctctatgggtttgcccattctggacatttcatttcatacaatatatggccttttgtggctggcttcttctntcatgtggcacanagtcatcgaagttcatccatgttgtagcacgt

SEQ ID NO: 3648 - DNA, 506 bp, Homo Sapiens
ccaagttcccagttcatgtcagacactgaagacacacttgtgaggatcgggaagccccgcggtagccccagtcgacctctgggtgccacgtggcacctccactgttgtgactacacacacaagcccgggacacccacttgttagctcaggaaccaggcggccagcagatatctgctcagatgaacgtccagagactcaatcctctggcattctcaggtacaaggttggaaaacgcattaagacgagagccacacagtcagcagaatctgcgccattagctttctcgtacttaaacgtctgtctaaataagagtcaaaagcacaaaatgaaaaggaatatcttactagggattgtgacttgcacttgccatattttgaaagtactggttcctatcttgctctctcaaactgcatttaagaaaccctacatcagaagttattttcatttcttatgtgaaaaacagaaaatcaataaaagactggaaattcatttgacatatacaaaaa

SEQ ID NO: 3649 - DNA, 436 bp, Homo Sapiens
  misc_feature (61)..(61): n is a, c, g, or t
cctggatgcggaagaggagaacatccaagaaggccctaaggagaccattgaaatagaaacncaagttcctgagaagaaaaaaggaatcttcaggagagcctatgacctattttgtgggctagagcagcacggtgcacccaagatgactgaggaagaggagaaagccatgaagatgaagatgacggacacctctgagaagcctttgtggaggacagtgttgaacgtcaatggcatcatcctggtgaccgtggctgtcttttgccatgcatattttgcctgagtcctaccttttgctgtagatttaccatggctggactcttactcaccttcctttagtctcgtcctgtggtgttgaagggaaatcagccagttgtaaattttgcccaggtggataaaagtgtacatgtgtaattataggctagctggaagaaaaaaa

SEQ ID NO: 3650 - DNA, 524 bp, Homo Sapiens
cgtgacgacaaggcagtgtgaaagttctcgtgcagctcacacaggccgcgctgctgtgtcgcttctcttaacgctctgaattcaggagcgagggcggcaagagcagtgttgggatgaggagcagtctgcacactggctgccctcctgggccctcaccccagcccctgtgctcctcccccttcccctgatgccagccctgctcctggatgcttcctcagcacttgctgcttccctctggggggtgaggagctgcacagcctcttcctgagctcttccatgtctgtgaacgcctctcccagcctgaccagaggttggacctcaaggctcagacccctgtcctctatttccagctcaccgtgcagtgctaagcgcctgcatgtccaggggactgacctgaggagcaggtgctgtggcatcattcacaccaccagcagagtcccttccaagaggggtctggcccactcttccggttcagtgctcccattctgccaccacctgcctcccaaggctcctatctgtcaggc

SEQ ID NO: 3651 - DNA, 579 bp, Homo Sapiens
gtatccacattgaaaactggaaattagtatttgaaaggtgagtctaaggatgctgtctgtcagcatgcttcaaaggacagcacacctcaaaaataagatttcagcctggtaagaatgggtacagaaccataaagaatgaatgatcagaggatggctccagatccaaagtagggttgtccctatagagaaaagattttaccaatcttttaagacagggattggtaaatactttcttaaagggcctgacagctaatattttagggtttatggcccatacagtctctgtctcaactgtttctgctgttttagcacaaaaatagctacagacaaaacttaaatgaatggacgtgactgtgtttcaataaagctttatttataaaagcaggaagtgggccagatttggcctatgtggtttgtctaacatggttataagaagaaggaattggtggataaatatcatgactttgttaatgcctatttaatcatgttccttaaatatattgtttagtaaacttctttatagaattacccatatagtaatttttgttttcaaataataaacttaaaatgatactaaaa

SEQ ID NO: 3652 - DNA, 752 bp, Homo Sapiens
agggctgggagaaagcttacagagtgtgcctttgaaatcccaatacccagtcatggtgatttatgagaccttaccagcttgcatatgtgatggcccactgagtttgtttactttagttttagctcagttacccagcactctatgatagcctattttttatttacactctcactaactcctttattatgatttctttgaaagaatatgaagacagccataaaaaagactcttattgaagttgagagggtctcctgtaggtcttcacttcactgtgtctaaacattggtctgttgcttgtgctttgcttttctctcaccctggatgaccttcaaggctcttccaaatgatttctctgattccctgaaatactgaaattgtgattaacagaagtttcaagtgttaatcaatatcaagatagtagttgtctcttcctggggaaactagaaatgaaaaccaaacataggcctctgtaatcattgcacagattaaaaatgaaaatgcagctgagaaacagaggaatgaatgagaaaaccctaaacctagttctagccccaggatgaggtctttgtcatgagtctgacgctagccacagccggtaagagaaggaattccctagtagtgtagttgttacaagggaatgagtcattttgcaggtaattgttcttcttccattttccacttgctgtcagccactttacagaggagtcggactttgttctgcttaagagaagtctctttccttttattgttta

SEQ ID NO: 3653 - DNA, 552 bp, Homo Sapiens
tgttaccatttattagtcttccctccaataaagcatgctagtatggataaaagagtaacattttagccaaaggaggttgatgaaagggaagaaatttaatgaagacaaagtaagcagcatgtggatcttctgctgcaagagtatgatttgctgcattcaaacattccaagacagcttaacatctacatacagtagtatgttcctggtcttcccagtgcaggttagaagacagacagaagaatgggtggggtttgcacattggtctcaaagtcaggacagacctgggaactacgttccaaatcagttatgaccacatttcctgggttagaaaacaccttctcctatctcgttcctcaaagtgcccaatcccaatcccaaaattattattttgggtcccaggaacttcctcaaacaatactgataaaaaggtcactttacctctaacagtcattaacctaaaataagccatctaccaagatcttgttcctccagaccacttggcgtggttagctgttttttctaaaataaacatttcaagaacaagatgtcaaa

SEQ ID NO: 3654 - DNA, 312 bp, Homo Sapiens
ggagccaggccctgagtgggtgccagaaggcttgctccaatgccactgagccctgctccctctgccactgtggacacatcctctccaccctctgggcctcagtgtcttgatgtatcattcatggagcaggcaaaaccagacgtctgggaagaccgtgaacttaaggagtctgattctccgacacaggctggtggaccacgtaccccactgagaccacctctcagggtgcctgccctggttcctccccagcctgagtcaactgtctggactgcaaagagggtggggacggggggttaaccctgttccccccaa

SEQ ID NO: 3655 - DNA, 496 bp, Homo Sapiens
cactgcctgaaccccgtagcccactccggctgcccgggctcttctgccttctcctggcaccagcctccgggcccgggccagctgctaggagagcgagaacactgtttctgaagggtgctgcttgcttctttgttcccggtttccgaagcgcgaatcccgaacgccgtgagaaacctcaggctcgggcggcagcgcgggagtctggggcgctggaggccggcgccggctgcggaggaggagcgccctctatccggaggtcccgccagggagaggcggaaacgcggagtctgattcgaaggcgggcactggggaccctgccccgggccgaaagccccctggaggacagtggtgtttggcttcggtcccaacatacaggccctgggcagtcgcagggatggcagctttcaaactgaaacccaagaagtgatcatgcagaccctgcctcaagtggcatcacttcttaattgaaaagaggccgaggcgaggcgggaatgaa

SEQ ID NO: 3656 - DNA, 412 bp, Homo Sapiens
cctccctctctccaaagatctttgtgaggtgacccttgccagcagtggggagtctgcacaaggagaggcggggaagcattctccctgtgacaaccccactgagcagcagatcatgcaactgcttcatgagatgcagaacctccaggagcacccaggcttgggcagcagcccttgcattccttttttgtaccagactgaataagaacaatgaggtgaagatcaccatcatctaaaagccggccactgtcagcaaaacctggggaagtggggctggaggctctgcccctaccatgtccctaccaccccttcccagtcaaccctttaccctcacagtagcaagcataagacccctgtctaatgtggggagacaggtggagatgaggtgaagatcaccataatctaaaaggccacc

SEQ ID NO: 3657 - DNA, 598 bp, Homo Sapiens
ttcacacattttcccactcttacagttcatttttcatagtaggaaggcccttggcctccccagtgcctcttccagagcctccaccagcactaagctcagaggaaagaagaaaagggccaggagtcagacgtcacacccgggggctcccctttcccatgtagaagtgttggcatgcgtcagtctcctttacagaggggtggatgtatccgtggaggaggggccttctctctttctaattgcactatacttgttctagcttcagtctggagatacttaagacctccatggggtcgtgatccatagacttagcaagtcttgccttatctatggagctcgatggtgagaattgtgaccattgtctgatgtccatagttccttccccctagattgtttctttccacggattgtgttcatctgaaccattttattttttatttaccaaagtactgtacttggctatttgcagtgttttcaaaaccaaatgtttctttttttgtgtttttaatcttcgatacttggtgcaatagaagctgcaaagatgtgccactttatctatgaaatggagttttgtataccaataaattctagtttaaaaaca

SEQ ID NO: 3658 - DNA, 488 bp, Homo Sapiens
ataataaacaaaactttattttcctttaatgcaaaattaaatagcaaggggttttctttgtacagtgataaattagaaatttacagtacagacatcgatgcagacatacttttgtacatccttaaaagcagggtccatttcctttgaaatttagcaattcattcagggcatgtgtagcaggaagtttgcctggtacctctttgtcaaacatctgaaagtcccccagattggcttcaaggttcctggagctgtggggtggcatgaggacccaagaaaggccacagagcatccagcccgactgctgcacagagcaggggaagtcacattttatctttttttcagattacatccgatatttcatctacctttcttacaaagagctcaaggggccatcattttttgaccttttcaagcctcacaacatccctgtgaggtagacaaaattcagaaacacctccatgccccactgggagagatctagaaagcag

SEQ ID NO: 3659 - DNA, 1059 bp, Homo Sapiens
ggaggacctccgcagactgacccccctcaagcctgtgaagaaaaagaagcaccgctttgggctacccgtatgacacattcccatgctgggggtgacgggagggccccgccagccgctggtgtgcagaggtcatcccgcagcatcgttccttaccctctctctgcccttcctttctacctctgctcctcttgctgtctctgcccgctctcgcctgcccccagactactgtgacttaaaaagagggaagaggagccagcgcccgagggggccactggcggctggaggtccccattcagttgcactacaaacactgaccaaatatgcaaggaaggagctgtgtttgtttgttgtcgtcccagacagtgttgtgagggacctgaggccctgccccgtgtccgaccaccgagtggcaaggtggaaggaagcacaggcacacagaccgtgggtgggtctcctcaccgtggctgtgggcagtgcgaacacgtaacaccctcgggctaaaagtgactcgttgaccaagttggaaccggaatgctttcttactcaaaatggcttttgtaactattgatttctgaagctggttctatgagttgtgacaatgttaccaggtagggggtatgtgtaatttcctacaaagtacttacgggactaatgggcaaaacagacgatcctaacgtcttcaaacaccactcccacacctacacatcgaacatacaacatacgtgtcttgtacctaccgtaggccagatctcttgtggcgcgtccactctaaatcacatcaccggacggaggcagccacaaaaacgatatcggaagcaacccactttgtgtactatactacccgaacaaagggctggcgccacgcatgtagatcgaggccaccgatcaatacaagtcgactaggctgtcggctctcgcccggcctctttaatcaaacaccgccggccaagccggcgtacacaaacttaagcgtgtgtggcgacacttgtgtggagtcgacaaacccatctactgtcggtgtacgctggctgcagataactttagcagcacagaccagcc

SEQ ID NO: 3660 - DNA, 591 bp, Homo Sapiens
gtccttcagcccttggactctaaattgaggggattaaaaagaatttaaaataattttgaacgaatttattttcccctcagtttttgagggcattaaaaaggcattaaatcaagacaaatcatgtgcttgagaaaaataaaattaatgaaaacacagcacttatgttggtttagctgcagcctccttggaggtagaatttatttatttaaaattactggttgcatcaagaacccatagggtgtacaaaaggttctataaaatctgcattatagagacaaagaggcaggcaaatccatgtcacaagggtaaagcttacagtttacaaactgggaacgccagggtgtaggatataaaaacgcactcttgagaaaacaaatgtaatcagggtgctgaaaacttgcatggtgctttcagacattagccttgttcaacaaatttcttgtattgacagatccatagtgtgcatgggcagacacattttgcctctatgtctcttaaaattttaattaaaaatactctttccagtaatcctaatttgcacgaagatataatgtccacattacgtgccttgccttgaaatctaaaaaagca

SEQ ID NO: 3661 - DNA, 817 bp, Homo Sapiens
attgtcaattattttattcaaatgtttggaacttaaacacaaaatcatcattaagttttcacaaaatgaggcatctgtcgcttgaaaggcaaaaaatatttcagaaatatgtttacagaaatgtaaaaatattaggcatcaagacagatgtgaacgtattcagtagcttgtcttgtctgtcagtcttcctctgagccgaagatcttactgtactcactcagcatgagctcagctatctggttctggtagaccatgtggatcgccatgtttcctgtttcattttcagctcgcagaagggtaggtccaaatacaatccccaagctttgcgtggacatgaggttcttggaggctttggccactatcttagttagatgtccaaagaggactttcatggtgtcacgatttggcggagggagtttttgtacaagagattttacagcttcaattcttgtgttgttgtcttgctttttgatcgcttccacaaactgctcaaagaaactgtaagggaagagcggctcaggcagctcccggaaaaacatcttcagtgctccggtgacaacgtggatgtcctcccactggctgtcgtccaaattcagcttctcttcagtttaatgaagtgacaaattattggcttgctctggaggtcaaatgaccactgtgaaaaatctgcagcttactaggggtgtccacaggtctccatccagttctgatagaagggctggtattccagaaacgacttggttgacaataaatcttaacttctgtattgttgccagattgccactaactcgatatattccatcaacatctagacctc

SEQ ID NO: 3662 - DNA, 578 bp, Homo Sapiens
tcattccatgctgtaccagtcacctcttgcaggggcatatttgactcgctgggcacttagtgtttgttgttccatcattatgcaaacagccgcctcttgatgaaccttcagtgacccagaagaaggtgtgagaagtgtggctggaccccgctttcggaaatgctctggactcccctaacgtcctggggaattacagggttccttcacatgtttccagttggaagcaagtactccacttactttggcttttgaaaactatttccctagccatcgacgagtacaagccccaggatgctaccaccaacccgtccctgatcctggccgcagcacagatgcccgcttaccaggagctggtggaggaggcgattgcctatggccggaagctgggcgggtgagtgcctggactcgggagggtcccagctaggccctcgtgctagtctagttggccttgcttccctccctaactgaattttagttctcaaacaccaggaactcaaggggggaaaaaaaccctatctttttgcacattttcctttgaccagcgttctcccaggttcacgccactcccgtaccagggg

SEQ ID NO: 3663 - DNA, 851 bp, Homo Sapiens
gcctggtacgggagtgggtactgatgctgtcatttatttgaaggctctttcaagtgagtcatttgagagacttccagttttgaataagtccgcatggcgccattacaagaccacgcctgaagccgatgattggagcaatcccagcagtgaacccagggatgcttcaaaatacaaagcaaaacaagacaagatcaagactaatagaactttctagaggactgaatgctgtggtcctctctgtgaagaaagattgccttctgcaagtcaaacagagagaactgctttctcccacctgctctgagcgtggcatcacagttattcctagtgcttaaatgtgtattttctctctaccacctggactttcccaaagagtttttcctgtagctactccagatcttccactaaagtagtaactttttaatgacatcttgctgtggtgtgattgatgcctgtcaccgaagagcacagagcctccttacagctcttgtgccctcgtactctccatcttgttatcatagcatctgatgtcttcagtccctccaggattctgtgcgcctttcccattccagatacagcagatcgtactgttgctccttgtgaccaaataccatatttgtcccaaacctccacctagggccctgggaccctgaaagtggaagacatcaggtggccatgccctgatgatttagtcccagagccctccgtctctcccgtgcctccctccgccactctatgatttagacttttgccttcttccatctgatcggattctcattgtgagatgtggtgactttcatgttagatcttcttcattgatgccttggttttattttaaaattcatttgtatatg

SEQ ID NO: 3664 - DNA, 495 bp, Homo Sapiens
gagctcggtacccctggtacgggagtgggaacctaggtaagtcatctgtagagcatctttgcaccttaagagaagtttctgattagcctcaattcagtttagtagaatattagtgtggatatctggtggcaaaacctattcttggtgcaatttggcttttcgtggcctcaggcatagagctgacttggtagtggaccctctgtccacacccacccggcccttgcgcctttctagcataaagtggtgtgtcagagccactgtctccacagaaagcaccacgtttgtttcatttgacttatttgaacccgtttctcctgcctttgcctttttaaataaaaatagcaaaaattgattcaagtgaatctattagaattttctaaaatggagcccatttgtcttttcagtcttgcaagtaaagtctttaaaacaattaagcctcccaatgatttaaccgtattttcttaccccaccaccccgccactcccgtaccagggg

SEQ ID NO: 3665 - DNA, 858 bp, Homo Sapiens
tcagtccaagcaatatataggatgagtaggtgtacagagctcttgacctacaattttttaagagtgttttggtaccttcccgttgtatactctataactcagtcctaacatactctgcactcgagttaccagccatccacactgacatcagatttcaaccagaaccatcactgagtgacagcagtacttctcagaggtatttgcagcttgatgcaaagtagtctctaatgagtaggcattcaggtggttcttcccagcaggtggagaagaaagggaggagatgaagaacactgagaggggagtggcaccttcccaggctgcccagctcagtctcttgccctgttcctgtgactcagctgcccactcccccaactttgtttccctccctcccagtctctgaaagatcaggtgtttctctcctcacagtctcttttgcagcaacagtaagacaaaattcaaggcagccttttaaagttacgaacagttattagcatgtatttacagacctaagcagaatgagagtttatacattgttttagttgcctgtatttatagccaaaagtatattaccttaaagttgagatctttctcttcttttcctaaattttggtaaagtgtgcttcatgaaacaaacatctggaaaactccaagtataagagaccctggactgatgatggcccagccaagtatatggagggacagagttctctctgtcattaatgaggacatcggttctcacaattgaacctcatgcactgtccacagcatctcacctagctcctgtatctcctgatctgctctttaaaaatagttagttaggctgccttttacaccacctctctctcgccaccagtcccc

SEQ ID NO: 3666 - DNA, 541 bp, Homo Sapiens
ctggtacgggagtggtgaccgctgactatgaggggcgcactaacaagcctgtcagcttcctccacgatggaacttcacaccatgaccccagtcgtctctgcagataacgtggccagtgctgaccccaggacatcacaggcagcactttcctcctctgcttccctccggatatttcacaaagcgcagttttgtgtttttcacttgctagaataataaagctgaataaatggctgcattaggcaggaatggttttgcttccagaacacataaatcgtgcatctgtgtttgttcttcatgtgttttcagccagtcatggatatttctattctttattttctctccatatcatgcgtgaatgtttttgtatttctccccagggctgtgacccagatatctacgcactggtcctttaaaaggagaacagagaaaaaatcagtagctgtgtcctataatttttgtgcactgtctatctgcatagatatcccaccaactgttcacaacaatctgctctttccactcccgtaccaggggtaccgagctc

SEQ ID NO: 3667 - DNA, 946 bp, Homo Sapiens
ccctgaggatccgcgcgtgtgtttacttcgtgtgtttaacgtaaatatatgtcagagtttagaatctgcctgcagttgtgaaaaagaaagcttaagtgatgcagttattggcaagattgcaatgattatggaaaaatagaaagcgaatactcagtttaagccaaggaaaatattgtggatttaatatttgataaaactgattttgtttaacaggaaatttttagcattcagtcatataacatctggttatcaatgcacgtatacacaataaatacttgagtggaggaaagttaaaagatgagcaatagagtagaaaatatatcttaaactagttgacctagattgtattaatagctacttaagatgtttcaaagataggaagctattgcttggacagagaacttgaaataagtggacccatgtataaaagctttgacttaaacattgatatttcagaatgtgttaaatagattaagacacagtaagttaaccctacatgttataaagatggcgactgttaacaaaggctgtaacagattaagtactattttatatccagaaagtcttctctatgtagagaagtcagagagactagatgctttcactagggaatgtcttcccacccagccatcacaaatgtggacaatcactgcatccacatctgtaggcatatttctatggaagtttaattgacagctatattcattatttattttacaatttcatttttctacacctttgagatttatgaatgcagttttttcttaaaatttattttaacttgacagtatgtttttagttcccccaatttaattaatggaccatgtgcatatatatgggagtgtgcttacatgttaataatttacttgcatacttatgagaatttcacattggaattcataatggtaaaaaacataatctggcatatacgttttctgtggttaag

SEQ ID NO: 3668 - DNA, 1054 bp, Homo Sapiens
cgagcagtacgaggagctggtggacgtgaactgcagcgccgtgctgcgcttcttcctctgtgccatgtacgcgcccatttgcaccctggagttcctgcacgaccctatcaagccgtgcaagtcggtgtgccaacgcgcgcgcgacgactgcgagcccctcatgaagatgtacaaccacagctggcccgaaagcctggcctgcgacgagctgcctgtctatgaccgtggcgtgtgcatctcgcctgaagccatcgtcacggacctcccggaggatgttaagtggatagacatcacaccagacatgatggtacaggaaaggcctcttgatgttgactgtaaacgcctaagccccgatcggtgcaagtgtaaaaaggtgaagccaactttggcaacatatctcagcaaaaactacagctatgttattcatgccaaaataaaagctgtgcagaggagtggctgcaatgaggtcacaacggtggtggatgtaaaagagatcttcaagtcctcatcacccatccctcgaactcaagtcccgctcattacaaattcttcttgccagtgtccacacatcctgccccatcaagatgttctcatcatgtgttacgagtggcgctcaaggatgatgcttcttgaaaattgcttagttgaaaaatggagagatcagcttagtaaaagatccatacagtgggaagagaggctgcaggaacagcggagaacagttcaggacaagaagaaaacagccgggcgcaccagtcgtagtaatccccccaaaccaaaagggaaagactcctgctcccaaacaagccagtcccaagaagaacattaaaactaggagtgcccagaagagaacaaacccgaaaagagtgtgagctaactagtttccaaagcggagacttccgacttccttacaggatgaggctgggcattgcctgggacagcctatgtaaggccatgtgccccttgccctaacaactcactgcagtgctcttcatagacacatcttgcagcatttttcttaaggctatgcttcagtttttctttgtaagccatcaca

SEQ ID NO: 3669 - DNA, 600 bp, Homo Sapiens
  misc_feature (290)..(304): n is a, c, g, or t
tagaaagtagaaacaaatgaactaagttttcttcatcaaaatagcccaattatttatcatatcacaataactggtgactacctgtacagttgcactatgttcttcatacttacactatacaaaatttacattcaagctgggtctttactactgaaaataaataccataagtaaattgccattagtgttagaaatatgccaggattcttttgttcaattattgcctaaacgttttatctattaaatgcaatcctgtctttcacttcctttactgatacttataattattcnnnnnnnnnnnnnnngttctgtgacattgttcatgtacattatgaaaatagcagccctgtaataaataaaacacaaataaatgaaaacttatgtaggcaaatgttactgaatcagaaagaaaagtggctctttagatgaactgttatttataatgtgataggaaggctcagggtaaatccatgggtaataggaaacatgggagagccaccaaaactcttaaagaccccactcatgcgcaccaggtaaaatgcagactttgctcgctttaataaaccccatctattattctccttgtgtacttgatgaccat

SEQ ID NO: 3670 - DNA, 709 bp, Homo Sapiens
  misc_feature (518)..(581): n is a, c, g, or t
actgcggatccccattatggccgtggacaggccggtgtgctcatctgtgcgctgcatgagcagcaaagatttgccaacaatttcctgctcttggaaagctgtcgcctgctccgggaatccagcctcagtaaaatattcgacgacatccatcacggtccactcgacgggatcagatggcttctctttgcgcccgggaggacagccaaagggggtcccgtcggccccaggtagggctggtttgcctgggggcaaaggcacgggggacggggagtctggcccggtggcaacagaagctgttcccccttccttgttcatggctgccatggagaacacctggcgggtgccgctgcccggggctggcccccgcccttcatcctggccctggtgcggtccgcagggggtccactccttgaccctctccttggcactctgaggtccccgctcgccgttaagctggtggtgctgggcacctgcaggacggtcactctcgggcacttcagagccctctgacacatcannnnnnnnnnnnnnnnnnnnnnnnnnnnnnnnnnnnnnnnnnnnnnnnnnnnnnnnnnnnnnnncacctctcttgctgcgagacgggcgggcgctggcggccggcggcgcccgtccgggcctgtccccgcggggcagcgcaagcgctccgagacgggtgcgctccagacggcctcgagccgccgcctcctcc

SEQ ID NO: 3671 - DNA, 675 bp, Homo Sapiens
  misc_feature (50)..(63): n is a, c, g, or t
  misc_feature (356)..(513): n is a, c, g, or t
gccccatcgccccaccgcagctactcccctttcttccaaacttttgcagnnnnnnnnnnnnnnctacaaccaaaagcagccctctgcctcctccccagggaagaccctgaccgtgtacatagccctggtgctcctgcccagccaccccttcagatgcgcttccctctggccctggggtgtgtctcggtgacgttttctatcagacgtcctccctcccatcctccagccctgcccaccctccctccactcatctcaactgcctcagcgatttcaagaaggaaataaagggataaagaaattcatgcttgcaccgagtacaaggacagacagcaggcacggcccgcagcctggcatcnnnnnnnnnnnnnnnnnnnnnnnnnnnnnnnnnnnnnnnnnnnnnnnnnnnnnnnnnnnnnnnnnnnnnnnnnnnnnnnnnnnnnnnnnnnnnnnnnnnnnnnnnnnnnnnnnnnnnnnnnnnnnnnnnnnnnnnnnnnnnnnnnnnnnnnnnnnnnntctgtgtgcgtggctatcaggagttctaggaactcagtgcaatacgggagtgacccagctactgaaccagccacgaacagcccgccagaggcctgaagctgagcgtgtacgttaatgtgaatgtatatagtctttgcagaggtccaaatgatattcatgatg

SEQ ID NO: 3672 - DNA, 1042 bp, Homo Sapiens
  misc_feature (968)..(968): n is a, c, g, or t
ggaattcccgggatccttcccagcccagtgcagccaggcacccgggttcggcttgctcaggtctctgtccgggactgggaagccacggagggccgggaaagtggcacactcctggagctcaagcttcctactctctcatcgctgaataactaccgggcaggactgggtggaacagacagcatatttaggtcattgatgggctgctgggtggatggagctggaaagtgatgggcactgctttctggggctgcccaggttcctttccgagggctcgcttttcctgggcagagcgggaaagaggaggggcaggccggtcgcgaaacgcaaatagtcgagaatagcgatccggggagaagcaggtgtctgtggggcccaagagaagtaccatctcgttaaaaattcagattgaactatcttacaaatggctcccagaagatccactccctgtgggaacacagcagttgtggaagtgaagacaggactggacccagaataagggttcaaatatgtggggaaatctgacctctaaattcttataagtcagagagtgactgaacaacagcagtgagacatcgaagagttttaatatctgctgtaaaccttggcacagatcatttacttctctaagactgaatccaaaaagcacaatggaatactataataagctgagacagcatggtgaaattccagacaagcctgagcattccctatagccagagaaggaggcccaacacctaacatagcccttggatgcagaactgatagaaacttgggggaaaagtgatgaagtagttgacctcaccctgtgaatctctagcacctgtagtgattgacctaactcaccgcggactctgtagtggattattgaaccaaagggaggagggcccaagaggcaaccccaagggccactcccaagaccaccacctggccagattgtggtgggtgaacacatggatcagggaagggantggaaaaggggcccgaagaatgtattgtattaaccaaccaggggcccccccaaaatttcccctgtgcaaaaaaa

SEQ ID NO: 3673 - DNA, 565 bp, Homo Sapiens
aaaggcaggacgaggggccaagaccctggcaggtagggcctggcaagccagatctggagctgctgctccctgctgcggagaccgcggaggcttcgcgttgaccaagttccttaaagaactggctgatggggcaggaggtccaggcctgggctctcgggccctcctagagggccattggagcttgcagctcagacccccactttgagttttatttatttaaatagtagttggatgcttggcacgtcgtcctgtaataggaaacccttgcctcatcagttttcctgatttacaagtgcaatattttagccaatgccttgggagaagctgccatgcaaaggtggacaccattctccagcttcaggggatatgctcgtcccgggcaccggtggcaggcagctggccttctggactaaggcagcctggggggacactgcagtcctggctacacacagagacctggcaccccctgggtggagtgtccctcgggggctttgggaaagcatggcaccctcagaccacacagtagccaagttctggagcaaataaaaggcctgtgttatttaat

SEQ ID NO: 3674 - DNA, 760 bp, Homo Sapiens
  misc_feature (48)..(56): n is a, c, g, or t
agtcaagacactgccttacaaatgaactccaagactatagaaatgatnnnnnnnnntcttgttcaaatatacagtatctgctattataggaaacatcagggcgtacatatttaacacagctgaacagtaagatacaggagccagaggaaaggacagcgaagctggaagcatctccacagtcctgctaagcagaagctaacccacagatctgcagccagctcaggaacattcccctccagaagtgggggttgatgggcctgagctgtgggtgccaagccagagaaggagggattgattctagggtgcaagcacttaggatgctttttggaataaatatattatttttcgatttaaatagatgccaataccctgatcctggacctcagcacattctcagggcagcctcagggaccccaaaagctgcgggctgtaagcagcaggggacttgcctgggagcagtcggcactaggtagcaggcaagccagccagcacaaaataggtagttttaggggagtaggtagtagtgagattcactttcttgcgggtctgggagggtggtgctgggtgtctgccagtgttgggatacatagggacttcctgggaatggaggccctctggggctggatacataggtagtttgggggtgcctcgagcagaggcctgtgctaggtagtattttggacgcgccagagcagggccggctggcctggggttgggggtgtcttttggggtcctcgaaggcagagggaatccaaggcga

SEQ ID NO: 3675 - DNA, 719 bp, Homo Sapiens
gtctgtgtatgtcattcacacttaggcaagcatacacaggcacatggctttaagaaccacactgatgccttgataattaaaaagaatacaagcattccatgtacacatgttaattagcagttagtgactgggccaacactttctcataaaaattggccttttacatgttgtctaattatcatttttccccaaattttgcgttgtaggactactgttcgaagatttttggaagaatactgagaacggcataaagtgaagatcgacatttaaaaaatgaggtgaaagaaagctatagtggcatagaaaaagtataaagctcagttagtttttttattattattattattaaaagttaattcaggactgatgtgacctaccagatttcagaacatgtgttaatagtatatatgccactgaaaacttaggtcctgtatcatacttttttctttaagactttttaagaaatattacttaaacatgtggcttgctcagtgtttaattgcaagttttcaatcttggactttgaaaacaggattaaacgttagtattcgtgtgaatcagactaagtgggatttcatttttacaactctgctctacttagcctttggatttagaagtaaaaataaagtatctctgactttctgttacaaagttgattgtctctgtcattgaaaagttttagtattaatctttttctaataaagttattgactctgaaa

SEQ ID NO: 3676 - DNA, 415 bp, Homo Sapiens
  misc_feature (76)..(89): n is a, c, g, or t
caattaactttattgaatagccaagttgataagttagcatagatcaaacaatggtctgcatgggttacaaatgacnnnnnnnnnnnnnnaacaggaataaaacagtgaaaattacaaactgtaaaaaggaagacaaatcttgtctccaacttttcagagaagcaagatttaacacagcacattgaagatcaatacatatttgaatttaagaacaagaatttaatattacaatattatacactactttacaaaattaaaatttctatataaggattacatttgtaatagttaacaaaattttgaaatcacatttggtggtcccctagataatagctgttatgcatctttgattagaagaaataaatctttattctaattattgcaaaacagtctattagactcaatacattaaatt

SEQ ID NO: 3677 - DNA, 616 bp, Homo Sapiens
ctgaacatcatgcagagctgaccgacgggcgggacctgtcagcctggccagctgcccccgacctgcacgtgctcagcgaagaccggctgctgtggaagaaactctgccagtaccacttctccgagcggcagatccgcaaacgattaattctgtcagacaaagggcagctggattggaagaagatgtatttcaaacttgtccgatgttacccaaggaaagagcagtatggagatacccttcagctctgcaaacactgtcacatcctttcctggaagggcactgaccatccgtgcactgccaataacccagagagctgctccgtttcactttcaccccaggactttatcaacttgttcaagttctgaatcccagcacatgacaacacttcagaagggtccccctgctgactggagagctgggaatatggcatttggacacttcatttgtaaatagtgtacattttaaacattggctcgaaacttcagagataagtcatggagaggacattggaggggagaaatgcagttgctgactgggaatttaagaatgtgaacttctcactagaattggtatggaaaagcaaaatactgtaaataaacttttttactaacaattt

SEQ ID NO: 3678 - DNA, 492 bp, Homo Sapiens
gagtggctggttgctccaagcgtggatctccaagctttctagttggatagtcttcctgaacaatatgatctagttaagtgtgtgtagcttagggtcatggcatgcttatgtatttctgttaccatctgaccatggtactatgccaagttctcttaggggacctgaatctttccagtagaccacatttgagagagtatagagtcaactgggcatagttcccaacaacccaaaatacatacgtacttcactgaagcagatctcatgattccattgacttcatttctaaaatgggactttgagcagccaatttctaaggattaaaaagaaactttaatgcattgtagacctctgtacacagaaaaatcttggtaacttttgggcttaattttcattcttaaaaaatctggtaactttttcaaatgcaaccactgtcagtttgctgtgaggctaggcaaacaacacaaggtatagaatttcccactcccgtaccag

SEQ ID NO: 3679 - DNA, 341 bp, Homo Sapiens
ctgtgacgggagtggtagtagtaatttcgttgccacctctggcccctcgcacagtaatagacagccgtgtccgcggcggtcacagaattcagattcaaggagaagtggttcctcgacgtgtcttctgatatggtgactcgactcttgagggacgggttatagttggtgctgcccctctcatttatctgcccaatccactccagtcccttcccggggggctggcggacccagctccagtagtaaccactgaaggacgagccgtagacagcgcaagtgaggacagggtctccgagggcttcaccagcactgcgccccactcccgtaccggggataactacgag

SEQ ID NO: 3680 - DNA, 504 bp, Homo Sapiens
  misc_feature (90)..(98): n is a, c, g, or t
ctggtacgggagtggggagttcctgacagcatagcatactgccttctgacagactgggataagctaccaaaaatgacaaccagggattcnnnnnnnnntttttggtcattaaatcgaatgtatattattactttttaattttctaagtatttatcacaggactttaacaccatatatttccctcccagtttttctccccttttggtttaatagttaaaacatttttcataattagtgctgtacatttgattgcaaacaaattggtgatacttctaaactataactataaatctctagaattctgtgaatttcaacattatttgaagtagttattcagttatatttacatgtgttgtaaatatgtaaatatacttttagcttaggaagtcttccagaatacaaactactcccagttagatatcagtgagtttgaataactgaagaaatgttgacaatgttaagtgtttgattgtatataacaagcttattaaatatatttttgtg

SEQ ID NO: 3681 - DNA, 855 bp, Homo Sapiens
cagaaagacttccagtttggagtcgtttgctgcggggagggaatgaatgggcgctgggaacacgcccgcgaggtggggacgcgccggccgtagcgaggtccttagcgtgtgagtggccggggtcgggtcgcttccccgcagcatggaggacgatgcaccagtgatctacgggctggagttccaggcacgtgccttaacacctcaaactgcagaaacagatgccattcggtttttggttgggacgcagtctcttaaatatgataatcagatccatatcatagattttgacgatgaaaacaacattataaataaaaatgtcctcctccatcaagcgggtgaaatctggcatattagcgctagccctgcagacagaggtgtgctgacgacctgctacaacagaacttcagacagcaaagtcctgacatgtgcagccgtgtggaggatgccgaaggaattggaatcaggcagccacgagtcccctgatgattcatccagcactgcacagaccctggagctgctctgtcaccttgacaacacagcccatggcaacatggcctgtgtcgtgtgggagccaatgggagatgggaagaaaatcatttccttggctgataaccatatcctgctgtgggatttacaggaaagctcgagccaggctgtgctggccagctcagcgtccctggaagggaagggacaactgaagttcacctcaggacggtggagcccacatcataactgcacccaggtggccacagcgaacgaaaccaccctccgtggctgggacacccggagcatgagccagatctactgcatagagaatgccacggacagtggtgccgggacttgactttaatcccc

SEQ ID NO: 3682 - DNA, 816 bp, Homo Sapiens
aggctgaccgggattcccggtacgggagtggcagacggctaagggtggccggtatggctgctggtgttttccaacggccaggccacttttggtcagtgtggaagcaggtgtgaccgacttagaggaatggttcagatgctcctggctagaggtactggagtccagtgaggagctctgatttatccacatatcactatcagactttcggtccatagctgcctctattcgatgccgctcaagttggtaagctttatcttctcgaagttcttcttgggaacgtgtaacacgctgaattgcaatactggaatgattactatctgtgtgcatatgtggcttttcctcataatttggccactggttctgaggaggagccatccgatcctgggatttggaagctgggaaggtaaaatactctctggtgtacgtctgagtggggatggggtaggcttcaggtctaggcggaggcgtctgctcctcagtgcagaggtttccagtagagacagatgttatcttcgctgttgttccagaggcatatgcacttttccctccaggactaggaggctgatttgctacgttggggctggaacggtgatcagctctatttttcatcagtctgtcatcaccaggcaatttctttggttcactatattctgcccaaggcagctgaggactctcaggagacccattttgagttgaattattatagagctcaaagccttcactctattggtcggggtttacctgagccacgacgatctgaaaagtgtgggctccaggtcagaaggttcacatggtatcccagcccagagaccgatt

SEQ ID NO: 3683 - DNA, 820 bp, Homo Sapiens
gcctgatcgatctgactcgtacctgttcggagtgattggagctgacaccaagcgggagccccttacctgccctccacctcactggctgccaggacatcttcaacgctgtgatcaaggagcacccggggctagtgcagcgtctgccttgtgtctggaatgtgcagctgtcagatcacacactggccgagcgctgctactctgaggcgtctgacctcaaggtgatccactggaactcaccaaagaagcttcgggtgaagaacaagcatgtcgaattcttacgcaaattctacctgaccttcctggagtacgatgggaacctgctgcggagagagctctttgtgtgccccagccagcccccacctggtgctgagcagttgcagcaggccctggcacaactggacgaggaagacccctgctttgagttccggcagcagcagctcactgtgcaccgtgtgcatgtcactttcctgccccatgaaccgccacccccccggcctcacgatgtcacccttgtggcccagctgtccatggaccggctgcagatgttggaagccctgtgcaggcactggcctggccccatgagcctggccttgtacctgacagacgcagaagctcagcagttcctgcatttcgtcgaggcctcaccagtgcttgctgcccggcaggacgtggcctaccatgtggtgtaccgtgaggggcccctataccccgttcaaccagcttcgcaacgtggccttggcccaggccctcacgccttacgtcttcctcagtgacattgacttcctgcctgccattcacccactaatgcaggccgggtgat

SEQ ID NO: 3684 - DNA, 583 bp, Homo Sapiens
atttgggtaatgcgctacctgtcccagctggccctgtgcctccaacccagagctccccacagacctggtgtaatttcacaagggccatccctttccccaggcttccctgagggaggcggaagtttgaaccattatgtggggttcattgggctagggtagtggtatgaggtttaaaactatttaaggattaggaggagaaagagtcttcaggaaactcttgtttcactggactctgcagcctgcagaactggggcaagggtaggagttccagtaggggaaggaccaggtagactcttcagctgcctcagctgggactgaagacctaagctgattctctttcgtggtccactcctacagaagcacttttctgttgcctctccttccaccactttttactttctgctatctcccatctcccgcttcccttccatttcctttctagaaaaccctggtatttagctcaggccaaactgcctcagcagaaaggtggccttggacaaaactgggtccaaagaactttgacagcggacagtacttgacggattggctctgtccagcaaggcctcagcttgcttgtcctgta

SEQ ID NO: 3685 - DNA, 646 bp, Homo Sapiens
cgtgtaggtgcatcccgccgggcctttggggctcctggcagatgatgcatgtcagcgtctccgccatcttgtctggcttcccagcccgctgctctgacgtcctcgtggacggtttgggcatttctacgcggttgtgcgaccaacagctgcccgttcaggtcaaggtccccatctcctctcattttcttcttcacgggctccaaatcctcctgatcctggggttccaaacgacgaaataggacgcagtctttctgtctgggagagctgaggcaaagctggagacttcatcacttgccacagagggaccacttcctttaggggagatgccaccacccccagacccaaaggattcttgtgtcatgccttgcttttcacttaaagattcatagaggtatgccacgttgtgttccggttcattcttcctgtacaccaagtagatgacatccccagtctgtaaagggcatgtctgcttcttaacaaccttcagcttgttaatcactgttccactggtgctggtatcttccagtgtcacctgacctgatttttcatccactacaattctacagtgatctccagagaccagtttattgctggggaaggaaaggtcgcaacctcgtctccgcccgatggccactcccgtaccagg

SEQ ID NO: 3686 - DNA, 210 bp, Homo Sapiens
agggttccctggccccaaaagtcaaaatatattgtatcctgttctttcgcacagtagtacaaggcggggtcttcatttcttagactggtcatttgtagatacagggagtttttgctgttgtcactggagatggtgaatcggcccttcacagagtctgcatagtacgtagtaccagcccgatcaataataacaacccgctcccgtaccagg

SEQ ID NO: 3687 - DNA, 442 bp, Homo Sapiens
gagccaattcgcccagtgataaatgcttgttttaagcttctgggttttggggtggtgtgttagacagcctcactggggcagtggctgacgggtacaatcagatgaaccctgaggcccctggaagcttcgagtgtctatgagggacctttcccggcctttcagccaaattggaagacccacttctctggactggatgctgcattgaattgagcaaaggaactgagtgcccggggagctcaaagggaagcagcccagccttccttccggggcagagcagtggtggggacctgtttccagctgcttgtgccccccacttcatggaggagggaccagggatcctcagaggagagggtgatgtttgacagtggctgcctgccctgaaaatcgcccttgtctgtccagcctggcctgaatttcacccacatcaacccacatgggatac

SEQ ID NO: 3688 - DNA, 411 bp, Homo Sapiens
gcagcacaaggacaagggcgcctggcggtggcgagatgggggtgatggcacacagccgtgagcctccgtgaagggcgcagggccaggcaggtgaaagcctgcaccagggcaggcagtcacaggatcctggggccaggcgtggcagctcggcccaggctgagcagcccctggcgcaggtggaccggctgatcatctgcgtgttcctcgagaaggacgaggacatctaccggagccggctcccccactacttccccgtggcctgaggctcccgcagaccaccctgaccgggactgacccgccttcgggaccccgctcccagctctgagaggtcgccaaagcctgcagcctggcctgggcctggccaccccttctttccctccgcgccccgcccccgaggagcctaataaagat

SEQ ID NO: 3689 - DNA, 440 bp, Homo Sapiens
caggcagaaggtgacaattgacacgatttcctgcacgcgtcctcctctaccttggaagcagttagaatctaccaggcacagatgaggccgcccttgcctgacggagcttgatgagcagcccttggtctccggttccaggactgagagcccagctgcctctgcccacccttccccaggcctctgcaagcctctggctgcacggtcaggccctgccccatggcaggcctgccagagcttggctggggacccctcccgcctctggctccctgatgggctggatgtaacttgtgtcttctagccccttaaggagcccaggtgttttaaggaatgaattggtcactgcatcttgtatcgattatggttctgagaaaagcaaatatcacttttggctgcattaaaagaagcatcatatataaaataaagaagatgaaggtctaaaa

SEQ ID NO: 3690 - DNA, 590 bp, Homo Sapiens
gtttctgaaacccacgaggacatttgcatggcatggtttactcactgatggggtcctcatgactcaagggcaaaaacgtccgttcggaaactgacccgaggctgccccaggccccggcatcctcccctcgctgcacgtggtcacttccgaagcagcgctccctgtggccgcagagacagagcccgcaccctggctgtctgtggtgcctgggccccagctcccgcccgccacccgccctgttgagtgcggcctccagactcgagtccagaatctgtttctgtcaagtcagtcgtccccagctgcacacggggactgctgagcgctgcgctctcacgggtctgttccggacagagggtggcaggggtgagccctgatcccttacaaaaaataccagcttcccagggagtaatggcgccttcactgaagccattttgtacatggggacggggtggggacgtctcttttttggtgttggacgtttgaccagtggggaggggttcagaggcggcggtcctgtccttggctccgtctgtccgtgtggccttgctgccattccgtctgatcattaaacacagcttttgatacatatg

SEQ ID NO: 3691 - DNA, 671 bp, Homo Sapiens
  misc_feature (39)..(39): n is a, c, g, or t
gtggatatctccgaattgactgtaatgacgatccactgntcagtttcatatattaggcatgaaatgtaagattgtgaatcctataatactgctcaagctggaggacgtagaatttcactggatcagcaatgacgagcctacacagtactggagaacttggcattttctgatatagaaaaagcttttccttggtatcgtgttatcatgtgtcgtcatctatgcattagagttgatgtgttttgtactagtgtcacagcataaaatcatattacaagtacgtaaggattcagggtctcttgatagacttatcatagctctatattgaatgaaagccactgtgcttgtgttttgattggaaattcctttagtgtcagttttttggaagccaatgatgtttgccactgatacattcatagaagtgtattatattttcatgaagctttgctttaagtgacactacgcgtgcagttcatttctagttcttgatagaactgcacttaattttcagtagtagtcttgactttttaagggctgtgttatattaagttctcccttactgttaaaacctaattaaatatgctttagaattttctaagacagtcctctggatcctctaaatgtgaattttgatgtaataactgctaataaaattatattgaaactgttttata

SEQ ID NO: 3692 - DNA, 1065 bp, Homo Sapiens
  misc_feature (311)..(311): n is a, c, g, or t
cacgtgatggctggagtctgctggagtcgcggcgctccctggggcgcgatcgacctcgcgccatggggccaagttgactgtgtggaccacggtgtgtcgggtgcggccatcggcgagtctcgagtgtatctagcaccggtgtgagtgatcctcgcgcggaaaggatgacatatgtggttggcacctgggaacacagcaaatttctcgtgcatagcatccttatgatcgcgaatacctctatgctcggtcgcgcattctcgtgcatgcatcacgttcttacagctttggtctcgggagctcgcgtcacactnacagtgagggttagtgcgcatgaagctaagctgggaagaaagagcattattaggcactgtagcaatttgcattttaaaatgcgtgagcatttattaagcttctttggtattcacttgggtatgataatatgatctgagctacctcattgaatgttttcgggaaaggtgtcttgggtatgcaagtcagctttgcctcacagttgaaaatgttcggtcatgattgcttttgaaaccaaaggggaaggtaccgatatcattgagctatttaaagttgccagtttgggctccagtaatgctttctggtgggtaaaattccacattcaggccacgagagcatctacagtttgtactctggggctgcaggcatcctgggacgctgtacgcaattcagtggtctagtcctttataccgactcagattccttaagcatgcagagtcactcgaatgaaaaaaccgatactcgaactctccctaaaaagatgttggcaacccaggttctctgaattccaccacaaaaagagaccctgaataagaagagcagttttcctatgcatatagagggtgtgtcaaaggtgagctttttggggaccgggaaaaacaaagttgcctgattccgcgcaggtgcacaggccccggatgtacacccggaaaggggagtgtggctgtagaatcatccatccgtctacagctaaaacaatttgccaataaagtacatgtttttcctaagccaaaaataaatacgttaacagaaaaa

SEQ ID NO: 3693 - DNA, 435 bp, Homo Sapiens
catcacgccggctcaccgaggtctggaggccaggcgggaggtggttctccgcaatgacgtggcaccaaccatcatcccgacacccatgtaccgtcctaggccagccaacccagatgaaatcggcaactttataattgagaacctgaaggcggctaacacagaccccacagccccgccctacgacaccctcttggtgtgcgactatgagggcagcggctccgacgccgcgtccctgagctccctcacctcctccgcctccgaccaagaccaagattacgattatctgaacgagtggggcagccgcttcaagaagctggcagacatgtacggtggcggggaggacgactagcggcctgcctgcagggctggggaccaacgtcagccacagagcatctccagggtctcagttcccccttcagctgaggaccatcgttg

SEQ ID NO: 3694 - DNA, 1117 bp, Homo Sapiens
  misc_feature (454)..(512): n is a, c, g, or t
cggtccggaattcccgggatctggacctacatgcttcctgctgtggctgtctcggaacccgtggtcctccgcttcatgattttctgccgtctcttggcaaaaatggcaaataatgatgctgttctgaagagactggagcagaagggtgcagaggcagatcaaatcattgaatatcttaagcagcaagtttctctacttaaggagaaagcaattttgcaggcaactttgagggaagagaagaaacttcgagttgaaaatgctaaactgaagaaagaaattgaagaactgaaacaagagctaattcaggcagaaattcaaaatggagtgaagcaaataccatttccatctggtactccactgcacgctaattctatggtttctgaaaatgtgatacagtctacagcagtaacaaccgtatcttctggtaccaaagaacagataaaaggaggaacannnnnnnnnnnnnnnnnnnnnnnnnnnnnnnnnnnnnnnnnnnnnnnnnnnnnnnnnnnacagcaatcaatagctggaagtgccgactctaagccaatagatgtttcccgtctggatcttcgaattggttgcatcataactgctagaaaacaccctgatgcagattctttgtatgtggaagaagtagatgtcggagaaatagccccaaggacagttgtcagtggcctggtgaatcatgttcctcttgaacagatgcaaaatcggatggtgattttactttgtaacctgaaacctgcaaagatgaggggagtattatctcaagcaatggtcatgtgtgctagttcaccagagaaaattgaaatcttggctcctccaaatgggtctgttcctggagacagaattacttttgatgctttcccaggagagcctgacaaggagctgaatcctaagaagaagatttgggagcagatccagcctgatcttcacactaatgatgagtgtgtggctacatacaaaggagttccctttgaggtgaaagggaagggagtatgtagggctcaaaccatgagcaacagtggaatcaaataaaatgcttccactaccaaaagacattagagaaaaccttaaaagtaataaagagaaatatatttgtcacttataccta

SEQ ID NO: 3695 - DNA, 1239 bp, Homo Sapiens
gggtccggaattcccgggattctgagcctgggatgtgctttgagatccctccccggtggctggacctgactgttgtgaaggccaaggggcagccagacttgccagaggggtctctccccatagccacagtggaggagctgacagacaccttctattatcgtcttcggaagttaccagcctgtgagatccaagcccccccacccaggccccctaaaaatcagggcctcagcaagcagaggagacacagcagtgagggaggcgtcaagtcttctcaagtcttaggattgcaacaacacgctcggctgcccaaacccaaggcgaagaccttgccagagttcatcaaggatggctccagtacgtacagcaagattcctgcccacaggaagggccacaggcccgctaagccccaaaggcaggatctagatgatgatgaacatgattatgaagaaatacttgagcaatttcagaaaaccatctaagtgctggaggaaccacgcttcctaactgctgcttctcagggaatccgacaccagccaaccattttaagcctctaaaagacctcgggcaagtctcacagaaactgagctgcagacggggagtagctttgtggaaactgatttgatggacactgcaccagcttccttcaggttctagattctggctacttagggcgggctggtttggacctaacatctcgcacgtgactccctcagcctcagagccttgggatgcagagcagctggcagggttcctctcaatcctgcaaccccagctgtcccaccggtggatgcagaggggaatccgaggccatcaaccttggtgacagcagcgcagtgccaatgctgatcacactgcatgggagattttgttaacgtctgccacccccactctcacccccaagctctaagcccccgggaggcctggactgtcttcctcatctctgtagcaccaagcctgatagatctgtatatggtaaacaggggtttaaccacatgtggttaacatggattaatgtgggaacttggcttcaagaacacaaccttaggaccttgggccccaaaagctggtggtgaaatgaggaggagccaatttaagaagacccttatggagacctgaggctgcagaaactggtaggtttcatcaggtggttaaagtcgtcaaagttgtaagtgactaaccaagattatttcattttaaaaccatagaataaaaatgacacctgagcttctctatgaatga

SEQ ID NO: 3696 - DNA, 714 bp, Homo Sapiens
ccgtctactgtctctcggctctactgctctctggattggcttggagtttaacccttctgccaatccagaggcaagcacaatattccagaggaactctcaaacagatgttgtagaaataagaagaagcaactgtacaaaccatgtatctactgtgcgtttcagtcaacaatacagcttgtgttcgacaatattccttgatgacagcacagccatccagcattatcttacaatgacaataatatctgtgaccttagagatacctcatcatatcacacaaagagatgcagatagatctttgagcatacctgatgaacagttacactcatttgcggtttccaccgtgtcacattgacgaagaaaagaaatggaggtgggagtttaaataactattcctcctccattccaccgactcccagcaccagccaggaggaccctcagttcagtgttcctcccactgccaacacacccacccccgtttgcaagcggtccatgcgctggtccaacctgtttacatctgagaaagggagtgacccagacaaagagaggaaagccccggagaatcatgctgacaccatcgggagcggcagagccatccccattaaacagggcatgctcttaaagcgaagtgggaaatggctgaagacatggaaaaagaaatacgtcaccctgtgttccaatggcgtgctcacctaagcttgaataataggtgagcac

SEQ ID NO: 3697 - DNA, 1115 bp, Homo Sapiens
atatactatacgtagtgataataaaatctctgcatgttcagcatcctgtctctcgcgtctgtctctgtctccttcttgtctgtttttccaccaagccaggattaggtgagactgaatactaccccacattagtagctgaacgggggagggaggagctcttaaaactgaagcatcccatctgctgtatacataaaagggggaggaggaggaaacaagaccctaaaagtacttccagccttagtcccaattttgtagcgaatcagaattctagctaatggcatatgtgtcgcctttgttgagtagtttaaagacatctaaggaatatactctgaatttcacaatcaacgttaaattcattaagcaatagtaaaagtgatgataaacccgccaacccccagtataatatctccatctacatagtaattgcttcaatggaagaattttatgttttagtattacacacccgaatcagattttagatttctattttagctgttttatacttgatatactcccacacctattcacatacgtagatgaatactgaacacgttctcaaaatatccgtattttaagacgggaagttttcaaattatcatactactgcctagaccaaaatatcaaactgaatgaaagaaacttgtttctggaaatactttctcttgctgtatgcagatttggatatttagtacccgaatgtatttaatcttactattgtggaacctcaaaaccaaaggttaatagctttcattacctgtgaagtggagcctgcttttaatgaatgggaatagatttgccctagggggttttgggtaaattctgaattcaaaagtgaacattggggaccatcaaacacatgtccttttaatttataacatttaaataatcgatgttagactgtaataccaaggccggggattcttaatttcagaaatgagctttgattctgcccatacaaagcagacagtcgcacagagcggtcaggactcactccctttcactctaaggtggttgctttaagagtctgggggccagaatcagatttcagatttgtacacgaggcctgaagctcgctcccctccctgtcatctgtgtttctgagattctccggacct

SEQ ID NO: 3698 - DNA, 581 bp, Homo Sapiens
ggacctcggctctacttgtcttcattgtttgtgtgacaatgaaatgtatcatacctaaagtacctaccacacaggaactcagtgttttttccttcttagataatttgatctcaagaaaatggtgttactttataaagagcagcattacagaatcaatatcttcttttaaaaatataacacagcattgtacttctacatactcagaacgtaagagaaagaactaagccattttagtacagtgcttagactgtatactttcagtgaggtatagtctacaaacaaaagcaaagaaatgttgagtttggttggtagtggtacatatatagcaaatctagaactcttatgtattttaagttgagcaaatgagtacatatgatgttgctgggagtcagggttttcttggtggaagaaaggagatatggaatggaataagagaaggaagaatcctctggggctttaagaaattagaattaacaataaaagcatgaactataatagtgtaaaacaatgtatgcatatgataggcatatatgcataggcctagaaacaatgacaccctggcaattagcacagctgttctg

SEQ ID NO: 3699 - DNA, 729 bp, Homo Sapiens
ggtgaggtgtctcgttcatctctcagaagcaccttggggcctcgccagggccgtggtcttcaccgaggcgtgggtgggcagccgttccccaggctgtgtggggtcctgctttcttctgctgagacagtgacgctttccagtttccaccctaatcagccactgctggtcacagccccacagccatgggtatttctgtggtctcctcgcttcattgaagcaaagcatgagccttcctagacaagggcagctggggaggggaagggaccggaagtttgtgaagttgaacagtccatccatctgcactgagaggctggatcctgagtcccggggcagcaggatcccaggaaccttcctcctccagggcagcacaggactcagccgtgtctggaccggccctgctgaggctacagtcactctggaagctctgcgcttcatcaggaggcaggactgtggcgggaggggtccttgaagatgggtgtggggagcagtgggtcaggaagtgggagccagaggtttgactcactttgctttatttttcaggctacaatacaggtcagagacaatggcttataaaggtttagtgtggtctcaggatgtgacaggcagtccagcctgacctttctgcacactccagacaaacttcccagacaagctcctttgtgcctctacgtggagagggtgtggaaagttatcacattaaaagatggaggatttgctctgtaaaaaaaa

SEQ ID NO: 3700 - DNA, 450 bp, Homo Sapiens
gattccccccagtgctgctgctaaccccacaccacccaggcctccacctccccagggagtctccaagagcctcgatcctctgctcactcagcccagccatccatagccctgggaattccacctgccaaggatcccagcaggctggatgagggatagtagggcatgaggagaaggagccctgtaaggactgaggccccggccagcccttctcctccaccagttccccagagcagagctggagctgatgcctggacacagctgctgagcctggcctgggcctcttacccacttggttgttttcttgtccctctgtctgtctgtctatctacttgtctgtctgggccactcctgcctgtgtgttggtctattcctgggaagctcatcactacaggccctggcaaccttcccagtctgtcccatactgttacccataaaactatctctttaaaa

SEQ ID NO: 3701 - DNA, 275 bp, Homo Sapiens
ccccgactagcccgacaggtggacaggactgaccctgaggaggccttgcctgcagggtctttgtcccaccatttggtggagtatcacacaggttctctgaggtccggggcctcagctgtttaagtttaccaggtattactgagctcggcatttggagagggagctctgaacgtcgtctggggaggtaccgctgtgcgtggggtcaggtgtttccgtaccacagcaggagcaggccgcccgcatcccagctgtggccttcggctatcgggggacag

SEQ ID NO: 3702 - DNA, 454 bp, Homo Sapiens
tgcgaccgcacacgtcctccatgtccgcgcccagccgggcctgcgccgcctgcagctccttggacagccgtgcccgcgtctcctccgccaccggggtcagttgttcctccagttccgatttgtaggccttcaactccttcatggtctcgtccatcagcgccctcagttcctgggtgacctgggagctgagcagctcctcctgcacctgctcagacagtgtctgcacccagcgcaggtaatcccaaaagcgacccagtgccagttcccagcgctggccgctctgccactcggtctgctggcgcagctcgggctccggctctgtctccaccgcttgctccaccttggcctggcatcctgccaggaatgtgaccagcaacgcagcccacagaaccttcatcttcctgcctgtgattggccagtcggctcctggggaaggacgtccttcacctccgct

SEQ ID NO: 3703 - DNA, 574 bp, Homo Sapiens
gctgggaggacacgcaagttcagctccagccgactggggcattggtggtagcccctggagacattgtgcaatggggctacgaggctgcatctggctccagggaagcgtgttgcaatccatgagtgatgtctgccatgcgtacaggcatggagagtgaggcgcctgtactgtctttctgtagaccctagactggtggggcctctgaaatgcatccagacactgtgctgggtgtgttgcatggccctcccaaccaattcagtatttttctccccattttccagggagaaatctaaggcgtcagaatgtaaggttcttattggaacccaggctccagggtccctggttttctgtgacatcatgctgcaggaccctgtttctctctttgctttggctgctggggagctcagaagggagctttaggcttgctctcagtcaccacattagctcaggggtttgggcatttttgtcgccgtctcctttgggctctgtctcctccctgctgtgcttcctgaggagcaggccggatgtaagttatcaactataaataaaaccaagacttccgttctggctctca

SEQ ID NO: 3704 - DNA, 997 bp, Homo Sapiens
  misc_feature (969)..(969): n is a, c, g, or t
ggtaccggtccggaattcccgggatgcggcggccgggagcggacttaccttaccttctctgccttcggcgcgcttctcagcagggccgccgacccaaaggagccgtccgactatgtctaacatggagaaacacctgttcaacctgaagttcgcggccaaagaactgagtaggagtgccaaaaaatgcgataaggaggaaaaggccgaaaaggccaaaattaaaaaggccattcagaagggcaacatggaagttgcgaggatacacgccgaaaatgccatccgccagaagaaccaggcggtgaatttcttgagaatgagtgcgcgagtcgatgcagtggctgccagggtccagacggcggtgacgatgggcaaggtgaccaagtcgatggctggtgtggttaagtcgatggatgcgacattgaagaccatgaatctggagaagatttctgctttgatggacaaattcgagcaccagtttgagactctggacgtccagacgcagcaaatggaagacacgatgagcagcacgacgacgctcaccactccccagaaccaagtggatatgctgctccaggaaatggcagatgaggcgggcctcgacctcaacatggagctgccgcagggccagaccggctccgtgggcacgagcgtggcttcggcggagcaggatgaactgtctcagagactggcccgccttcgggatcaagtgtgacggcagaacccgctctgaggtttcctggccatagccacccttttgaaatgctctctgtgtgttagagagatactatacccttagaaactctggaacacgccagaatgctgaaatgcccttctacctttgggtttacagccccctccacataaattaagaaattcagtatttctgcactcttagctgggattctaaagtctgtatagctcgtaatgatggtattttatagcaggcttttaacagactagttaatttcnggatatgaatcctttctcgaagatctgg

SEQ ID NO: 3705 - DNA, 460 bp, Homo Sapiens
cgaaaggcggaggacagaagtactccataaacgaaaactcgggccagaatgacacagaggttggagagggaacgggagcctcttgggagagtattagaccttgacaaaaaccaggtgggcagagtgcaccaggtcagccacatacgccagtaggttgatggccgtcaggatggccacagccagtcggcggtcccaggcacacacgtagtaggcatggctgcggctgcagcttacatctctcgagcgccgaggctggccgccatacttctcatcgaactggtagaggggccagagaacaagggcggtggcatagaggaggacagacagcaaggccagccccgacaggaagctggggaaggggatgggtagcacgttggtgcactcccccaggttcagcaggatggcgatggccgctaggatgaagccgatggcgtacaccgccacgcaccactccagggcc

SEQ ID NO: 3706 - DNA, 430 bp, Homo Sapiens
aactcaggggcgagctgcacgatccagttgttgatcttgtctcggcggcgacgctccacttcattatgctgagccctgcgtgtctcatcccgagtcgtccggggagcttctgacttcggggaataagggtgagtcctaggggcaattgagcgctggcttcctccctgcagtacttcttgtggtgacatcatcacaaagaattgaccagtgccaggaggggtcgcctgccccagcagtgcctctgaggcctgggtagtaacaacagcagctgtactccccgatgtggtaccccctgccccatctcccactcccgtgctggggaagtaagtatagtgcgtctcagcagctgtcccctccgtgtcaactgcatcatcactggtgaaagcatcgttggagtcaccgcctgggtcatggacgacatcgtatcctc

SEQ ID NO: 3707 - DNA, 398 bp, Homo Sapiens
agtggggacccagctgtactctcccgccacctgtgggtgctgctcttgcggcagcctcgtaggtgagggataatgtggttcagccaacctgactacatccaagctgggatgatgaggacagcaagaaggcacactggctctgcaagtcctgtaggcctgggtccctcgagacaaagctcagatggcttctgtatcaaattcaaggacccagcatggtggctgctgctttgctcaccttcagaggcctggaagctggtgtttcctgcatgtgtaactgacggccccagtcccacatttgttagaaaaaaaccttcactttgatgagagtacagtactcctggctttttgtaattcaattgaaactcactgccactcccggggatacactctagagtcac

SEQ ID NO: 3708 - DNA, 418 bp, Homo Sapiens
agcacccagacaataggctgaggtgaatagtaagaacatgaacccagccagtaggctgtgtcggcaggaggctggcctgtgtacataccagcagcaggaggccctacccatgcttcctgcactctcagtgttgggccatgtgtgctggaaggatccattctgagtccaagggacaggaagggggctcctgagggcaaagaacagaggcctatgtagtcctctctacatgcctgtagattataggccacccttctgctttcctcttttcttcacagctgctacaacctgccctgtcttttccaccctatcaatctgagtggctgaaatgggttcagttagggtaccactatcatggaataggtcccagggccctgaaggccttgggtaattggcacagagttagagtgtctatagctgt

SEQ ID NO: 3709 - DNA, 541 bp, Homo Sapiens
gtgagccacatgcctggcccaaaatgtttcttaacccatggttcagaattatattcaatcgacatgaaaatgatagaatggaagagttatatcaactcacctgcagtgtattattttgcatacatgtgcatgcagagattcctacactcgacaggattaaaagggaactgcatgccaggaatggttctgggtgctgggtagacattgttatataaagcagacatggtttgtacccttaaaagagatgacacctcagctgaagcgtggtaggattgattttttgcactggcacattgataacagaacttataccaaagaaggcatatttaggaaaagttttgtttctcagtgtttcttattcttaaccctcaaaatcaaattcatcatgcttgcatgtcagcagctcagctaggtcagtgctgtcatgatttaatctcaggatgtataggttaatatactgtagaatgtatacttaaactttattctctttgccacttttgtttaatctttgacttctttcttccactccccacatcatgca

SEQ ID NO: 3710 - DNA, 621 bp, Homo Sapiens
cagtatagtaatgtttcactacgtaatatgaacttgaccaacgtggatatgggtatgtaggaaaaaaaagagaaactatggcaaagacatcaagaaatctctgctctcagaccccgaaaaatgaaagaaagtttactagagataagcaaaagacatgcaaattaaaggaagaagcaatctgtgtttaagcttttcttcaatcaggaggtcagcagccaaatattagttaccacagatcgcataaacaacaaaaagcaaaacggaagacaagttttcttatcctttcctaaaagcaagcgggactaagcaatgtcttgaaataggcacacattgcctttcatttctaatcttcctatcaattttttttaccttctcaccaggtgtcgagacctcacattacccaagccccatatcggctcacatatgccctggtctaagaattaaaggcaggcaatctgaacacattcaataggaacccttaaaacttgcacatgaactgtctgtcggcatttgtacttccatagtccacaactctatgtatgaattcagcacacaccaagagaatgaatctaccaggatttaaggaggagattaggcatgaagccactgcaaacaattcag

SEQ ID NO: 3711 - DNA, 345 bp, Homo Sapiens
agctagtgataaagaaacaggaaactgggtccccttagtagaggtccatatcagataggccaggaagtaaaaatgtaaaccatagttcaccattttaatgtaggggacaacaacatggaaagtgaaatttagaactgattttaaaactataggctgtatcttgaaagtgatcaaatttaactggaaaattatttggatattccctagtggttaggaataaataaataaatacataatttggtcatggtgctttcctctggaagaagttaagtaaaacttccatttatttaatagttaaaggttttctctttttatattatatattggaacccataccagaaccag

SEQ ID NO: 3712 - DNA, 452 bp, Homo Sapiens
caccacccaaccagcaggcaaccccgaagagccggtgacgggcacatcctggcccatttcaagaggggctggaggaccgagaggggtctcaggctggcgattcaccccgttctccacccaccctgggaaatgctctgcggcccctcccacagcccagcacctgctccctgaggggtgtggggactggaggcgggatcactcaggctccagcccagccctacccctgctgtgcactgcagccgttcccaggcagtgcccacgctctgggaggcaacggaccactcggacccccacccctgcccgccaagctccaagcacaatcttggtacgccccctcgtgggctgacagcaaacagatgtctggcagtgagggtggagggagacagtgggcggcagcaccctcgaagaccgggtcccctgagtgacggagaataaacacttgaagaaccgtg

SEQ ID NO: 3713 - DNA, 1283 bp, Homo Sapiens
gggtgggccggggttgctgcgccgtcctccactactggctactggcgctgcagccatgcagaccccgcccccgggcccgcgtgggcgactgcctgcgggactgggaggatctacagcaggacttccagaacatccaggagacccatcggctctaccgcctgaagctggaggagctgaccaaacttcagaacaattgcaccagctccatcacgcggcagaagaagcggctccaggagctggccctcgccctgaagaaatgcaaaccctccctcccagcagaggccgagggggccgcacaggagctggagaaccagatgaaagagcgccaaggcctcttctttgacatggaggcctatttgcctaagaagaatggattgtacctgagcctggttctggggaacgtcaacgtcacgctcctgagcaagcaggctaagtttgcctacaaggacgagtatgagaagttcaagctctacctcaccatcatcctcatcctcatctccttcacttgccgcttcctgctcaactccagggtgacagatgctgccttcaacttcctgctggtctggtactactgcaccctgaccatccgggagagcatcctcatcaacaacggctcccggatcaaaggctggtgggtgttccatcactacgtgtccaccttcctgtcgggagtcatgctgacgtggcccgacggtctcatgtaccagaaattccggaaccaattcctctccttttccatgtaccagagcttcgtgcagtttctccagtactactaccagagcggctgcctctaccgcctgcgggcgctgggcgagcggcacaccatggacctcactggtggagggcttccagtcctggatgtggcggggcctcaccttcctgctgccttttcttttcttgggacacttctggcagctttttaacgcgctgacgttgttcaacctggcccaggaccctcagtgcaaggagtggcaggtgcttatgtgcggctttcccttcctcctccttttcctcggcaatttcttcaccaccctgagggttgtgcaccacaagtttcacagtcagcggcacgggagcaagaaggattgaggtctgggccttcccctgccggcccagaggggcttctgtcctgtgtgttgtgggaggggatgggaggcgcccctcgagtgtgcgtgtatcagggggtctcttctattctcccttgggttttatgggcgctgtgggccctgaaggaagacctgggcccagtgccctcaataaagagaggcccagaggtggaaaaa

SEQ ID NO: 3714 - DNA, 839 bp, Homo Sapiens
agcaataaaatgcaaactttattgcatttccagtaaaatctctcccactttgagcaggaagcactcacaaaaaacgcatatacatgtcaacgttgtgagctcatcagagttttagaaatcaacttccacagtgaaagccaatgtaggcagaaggtttataacagaatccccaggcagagaagtgaatttcagagcatttcagggaggaaactcctctgcacatgtcagcatgtttaacatcgatgatggcaggttgtgtgctggcagccagagtctgaggccactgtccaaagttcagcgtcagtggttcctgttgctggtcatggagagagacaactggaaagtcaggtgtcttcacgctctaactagagcacagggatggaccatagccatgctaacctttgttaacccctaggacttgtcaaggtgtttaagcagtaggaatgaggaaacaacgttctgattcaagtaaatgtaactagaagtaaaaatttaaaaacttgtaagctcactaaagtgaagctctgcagacacggttcatatcctggtggctgagggcacataaccaagaacttacacaagcacccccaagccacaaagatcccagctgctatggttgaggggtaacctgccagcactggagccaagtgttggagctactgatccaaagttagctcacttctgcagaggctctgaaccagagcaaagaaatggcccagtgcaagcccagtgtgagccaagagttggccatgtaatcagttctggcccaaccaggtttgaaaggtagaggagcagtactgggttttggagagggaaggttggaacaaagccctttgcag

SEQ ID NO: 3715 - DNA, 905 bp, Homo Sapiens
actggttgaacagcaaagagaaacccgggtctccagaatcacagtttagtccttctatattactgcaagtgacctgttttttctgaaggctccccgcaaatgaagtcctggaatggaaaaaatccataagtccataaattaacttgataaatatttagaacagacaaaagaaaatattgagtgatgtagttctaatcctcctaatatggaacctggcaagactgaatcattactgtgaaatatataaacactatagaatgagccaacatgatggtttctctccagtaagagtttttcttttggaaatgaggttaacctagccccaaatctagcaattctcataaaatccgattttagaattagcctcccagattaatctgaatgattgacttattttttcttaggcaagtcagtaagccacccactagacagccatatccagcaaaataagagaagtttccagatgccaaatgataagccaccatcaacccagaggggaagccttctggttggtttggctgtatgagattcaggaaggccagaatacccaaaattattcacacgacgttaacttattggtactggctaagcaatacatgtatttcctaaaggaggagatggtcttttggttgatttatggacacacttgtttcatctgactgtaaatatattgcatgctttattctgatggtgcactatttcatccagcaagcttttcatctgagaatgtttaatgttgaccttattcttagagcaagtagatctaaatatttttcagctgagttattagggagtcattattctgtggtacaatgctgcaaaaagcatcatgtggaagaatgggaactatgcttactttatgaagtgatgtataacacaatgaaatctgttttacaactaaaaaa

SEQ ID NO: 3716 - DNA, 299 bp, Homo Sapiens
ccttgagaagggcctccccggccaggacaaggcaagggaatctgtgcacctggccagacccagaacacacagtgtcagggacctgacagtcacactctgaccccatagaatttccaccactgacacacagatcaggatgtgtcagcctgagagatgacaccacaaatctggctttcacatattgattccacacacatcccatcactgacaccagattccctcatcactgaccctacatacccacaatcattgattccatggacctcatcactatcacaaagaccacccatcacaaacta

SEQ ID NO: 3717 - DNA, 366 bp, Homo Sapiens
agtttgtgatgggtacaaacataccaaagtgtaaggtgagcaaaacaacttttcaattttgcaatatgtttttctttttcaataatattgggtccttggaagtgatgggggccaaggttggaataccttaggagaccaggactctaataacatgtgcacacgtgacagctggtaagggttggttgtcttctcttgtggtcctacaggggagtagtaacacaccctgacacgatgggactcccctgctgcctggtttcttctcaagccacagctctcattctacctttcacagaaaaccctcttgggatcttgccaactgcaccaaaacctgagctggatccactgtatgggctcacccatcacaaa

SEQ ID NO: 3718 - DNA, 591 bp, Homo Sapiens
gaggaactgaggtttggaaggaatgccaggtctcgcacagcttggcctcgagaaggtgagaggaaggcaaaggccagggaggggacccagagaggcctggcacacaaggcccaagcaccaccgtcaacacagcccagtccatacagaaatgggtttcatgcctgaaaagctttttacagaaagatgccgcctgtagccagtgacagccgcaaccctacaggcctcagttccttgcaaaggtgaggggtagagagtcagcctctctcccttccagcagcgacccagcttccctccacttccaggtggtgctgggctcaccaagggagcactggtgggtgctctgaaaacccacaggatcccacctccaggcccacctgggtcccatctcactctcttcttctttcaccaattgctaacatagaccttgttgggatcacgatggcttcacaagccagctgttgggtttgctatgtcactgtggctcagtcacatccctgcgtgtatactgtctgcggggcacatatgtatccatttagagctaaaggaatcagtgtacactacagctaatcctaataaatccgatgttttcgg

SEQ ID NO: 3719 - DNA, 459 bp, Homo Sapiens
  misc_feature (367)..(388): n is a, c, g, or t
attgtcgctctccaaatagggttagacagagaaggtccaaaaaggtaccagaaggtgtacacacgttattccagccagatcaaataaaggatttggaatctatagagagaaaaagaaggacttccatataataatccaaagaacaatttaattttatcacccattgatatgtggtattctgctttcagcctgcttacactgcaaagcaatatatgggatccttgatcactactggattgttcaaaaggaggttaggcaaacatcctaatgtgtctagaagctgggtctcatattcaccttaggtgtacaatctgatcacagaaaaccaaggtgtcctttagcttatattactcatggctaaggcacnnnnnnnnnnnnnnnnnnnnnncccatcacatgagaactggataaagtaagtggacctgcaggaatttaatcgcgttcagttgattcctggat

SEQ ID NO: 3720 - DNA, 238 bp, Homo Sapiens
ccccgactagcccgacagggctgaccgctctggcccagggtggtatgtaattttcgctcggcctgggacggggcccaggccgggcccagcctggtggagcgtccaggtctgggtgcgaagccaggcccctgggcggaggtgacggctggtctgaggagtgatgtggagttaaggcgccatcctcaccggtgactgtgcaggcacctagcatgttgacaggcgggacgcgagcacctgg

SEQ ID NO: 3721 - DNA, 690 bp, Homo Sapiens
  misc_feature (123)..(123): n is a, c, g, or t
  misc_feature (215)..(215): n is a, c, g, or t
  misc_feature (339)..(339): n is a, c, g, or t
gttaccgtggaaatttctgcatgatagagtacggtccatgtagcaatgggagggttagtgtcccttgtacgtgtggcgtgtggatcttaaaaaaatcaggccgacgattttctttgtctagcnccaactaacaccgaggcggcgccgtgctgaaataggtggtgtctgtgcggacccagctagtagcctactagtacgactggtgggcctacttngttagtaactgaggaggcaggaggcggggcctaagtgtaggttcacaccttgatccagcgggtaatcacttggtcataacctggtttcctgctgcagaagtaaggggctatagccttggccaanggtgtaataccctcgcctgcagagagtcttagcaggcaaagtagcctctttctaacacttcctgcagcgggcacggctagccctggggggatctaggataggtgatgtctacttcttcgtggtctaagcagtcttcaaagttgcaaacgagagggtgcctgcataggagcggtacttagcgcagtctgctgccacagtggcagcgagccagtacgagacagatgtagtttcctacttgttcccccgaacgtcagaggtagcaccctctgctgctggccggggccgaggacgagccgccccctagtgtggctcccctccctactctttcatcagggggtaccacatgtgacg

SEQ ID NO: 3722 - DNA, 582 bp, Homo Sapiens
tataatatacaggaccaacaataacagatgcaagtctgtcgctccaagcagaagaatgcaaaatgacacagcagaaaatgaaactaccgagaaggaagaaaaaagtgaaagtcgccaagaaagatacgagatagaggaaacagaaacagtcaccaagtcctaccagaagaatgattggagggatgctgaagaaaacaagaaagaagacaaggaaaaggaggaggaggaagaggagaagccaaagcgagggagcattggagaaaatcaggtagaggtgatggtggaagagaaaacaactgaaagccaggaggaaacagtggtaatgtcattaaaaaatgggcagatcagttcagaagagcctaaacaagaggaggagagggaacaaggttcagatgagatttcccatcatgaaaagatggaagaggaagacaaggaaagagctgaggcagagagggcaaggttggaagcagatagaaagaggaaagaattaatagccggagcaagacaaaaagatagcagatgaacgagcaagaattgaaccagaagaaaagccctgcccaagaaatagaggagcgcagctgg

SEQ ID NO: 3723 - DNA, 2049 bp, Homo Sapiens
  misc_feature (1044)..(1101): n is a, c, g, or t
  misc_feature (1233)..(1262): n is a, c, g, or t
  misc_feature (1621)..(1621): n is a, c, g, or t
actggacagcacgaggctcaggtcggccctgatgagcgggtaggcaggaaggactgtcccagacgaggggcttcctctagagtctcactgctggggaggagaggactgggcctgatggaagttaacccggagctaagtcacccagagcacaggagctgccatgtcagatgggaaatctgcctatgtcataccgtgacagcccgcaggatcaggtgacttctagcagagaccctggtttttttcctgtgcccactccggcttgtcctcatctctacccatcccctgatgcccaggtcaccgggagggctgctgggagcctctcctgtccccgccgggcagtgtcactgagtccttgaaatcctcccctgccccgcgggtctctggattgggacgcacagtgcagttgaggtctgcgtcgggcttggcttttcacaaaggctgatgtcttaactgtcacccatatggtccctgggccaccgggcagcctggggcggtgtgtgtgccatgtcacagcatggcctctcggccttgggaaggaaggcagtgcctgctctgctgtgagccgccaggaaccctcctcctgtcaatgggggtgtagtatttttgccaaaatatcatgttcaatttcagtagtttgatcagttgaaggctagaagtgtgaagtgcagatgagtgtgtgttcttccccaaggtccccccacagctccaggacaccgctgtcctggcatttgtggccactcactttgtaggaaactcatctccttcctgaggagccgggaggctggaccagtcccgtcgtgcagtcaggtgggcggtgtgtctttccagaaggtcacgtggaaatgtctcgggacttgggtcccggagtgcccgtgaagcgtgtttttgctcctgaggtgcattttctcatcatccttgctttaccacaatgagcaatgaggtcgggttttatatgcaacttattgtatctgaattcctgtagcacacctcataggtatgatttttttaaattaaagaattcagaataaacattttttgactccnnnnnnnnnnnnnnnnnnnnnnnnnnnnnnnnnnnnnnnnnnnnnnnnnnnnnnnnnngaaggggggggcgcgcgcctacaaaaataatcccccgcgggggggccccacgttttggcgcgcgctccccgcgcttttttgtgtaaacacagggggcgcgccccatatgtaggggggcgcgatataataaannnnnnnnnnnnnnnnnnnnnnnnnnnnnntttataacaacaggagcgctgcccggaggtggagggaacacagtcggtcgcccgcgtggggaactcctctgcgtgcgaaaaagcggacacccccctatcctctgctgggggggcggcgcccgctatgttcgcgggcacaccacctctccaccgcagcaagagatatatgtaagagcgccgctcgagaggcgggaacaatctacaaacacttacgagggcgttctatcatgtggtgtgctaccaccagcagcgcgcatataattgccgcgcgcggtatgaaaaaaatttaggcacccccgcgggaagtatgtatgtacttttcgggagcaacaattcttatttacccgccggggagtctngttgttgttaagaataaaaacaggcgcgcacactccacgacctaacgacagtgacccctggtacagccaacgagcagcaagctgaaccaaccgactgctatgcacacaactagagagtcgggacgaccaggcaacgaggagaatcgtccgcggcaggcgagcgagacagtcgcgacgacgcagcagggcaggggctacagcagcaccaagcgaccgcaccgcggcagacggaggcacggagcgacagaaggaaagcgggcgagctagccaacgcacccgcaggagcagtacgcccaggcagccagcagccagacagcgaacagtcaagcccgcgagaggacacaagcggcgaatcagacagcaggaccagcgcgagccagccacccagacgagacaggagagcacaaaacacgcgcccgcacggccgc

SEQ ID NO: 3724 - DNA, 650 bp, Homo Sapiens
ctgcccagagtatgattacgaagcctcagagcccttgtcaaagcagtcctggaggacacgaccctggaggaggccgtggggcttctcaggagggtggacggcttctgctgctgccgcgcacggaaccatccccaactactccaggtgagcagctgccacgagctcggtgcgtccccagagaggcccacagggaaatggcacccagcctgcctcggtttcctcctcctggcaggaggcagctgggtcagggcctctgctggtctctgcagggctcagcagcagctcatagccctcatccaggacatgactcagcagtgcaccgtgacccgcaaggtgaggctccagggaggggcctggaccccaactggggtgggctggaagaggggctcggtgctggcagtgctggcaggaggcactcaggctgtactcagagcatctgcgcctctgcatcactcccaggtcgccctagtgccaatcatctcccctgaattcccattcctgttgatggctacaacagctcctcctcatcctttctttgtccctcctttagccatcttctgggggaccacagaggctggtccgatcgtcagtatggacaagccaggccagcctctgcgttgccttgacagggccgtggacccacaggagga

SEQ ID NO: 3725 - DNA, 546 bp, Homo Sapiens
cctgtggcatgcgcgcacgaaccctcggacgagacgatacctctgaagttcccatccagagacctgctgaaggggcactgagcggagcagtgaccgtctgaacgccctgaccaacacccggcctgtgcccgccctcctccacaggccacggtttatgaggaacagcttcagctggagcgggccctccaggaaagcctgcagctgtccacagagcccaggggcccaggatcccctcccaggacacccccagcccccggtccacccagctttgaagagcagctgcgcctggccctggagttgtcttcacgggagcaggaggagcgggagcggcgcgggcagcaggaggaggaggacttacagcggatcctgcagctgtcactcactgagcactgagccatagccccgggagggctggccaggccactccctgcccgcttttgtaatttatttatttataaactctctgctgctgagcttggggcctggagccccaggaatgagcaggcaggggagactgagatggaaataaagagactgtcgcagcaa

SEQ ID NO: 3726 - DNA, 665 bp, Homo Sapiens
aggaaaagtgaaaaaacagcaatttaggaagctttcaccgaagcaggtgctcaagttcagactcaaatcgtccaactctggtaataaaaatgagaggtcagaataccacaaactaatcaaatcaatcaaacaaagcgggaaacaggtggctgacaccagactgggcagggttttcctaaattgagcttaccttcactaatccaaatcagttttcagaaatggcttctacaaaaactacccaaacatccccctaataatttgcactcctcctccacaatagggaagccaagccgtttatttcccagaaggtttactttctctttcaagctctgctggcttcttcctgccccgcatacggccaggaaaaaagaaaagcactgccttttctttcctgccttctctaaaactggggagatggggtgagagaacctgtttcatggacaagctgggtggttcttaactgcaacactgttctgaatacagattagtttgcaaaggaaagttacaggacaggaaaataaaggtctacccctccaactaactcatacacatgtacatttgcatgtacgcacacacacagatgtgagggcacatttaattcagctgagtaatgtgcagcaatcagctcccagcttcatacctgccatacggatgcgtcccctctt

SEQ ID NO: 3727 - DNA, 546 bp, Homo Sapiens
tgatcgtctttcgttagagcccagctagtgctggatccatcttgacgcctggcagaagggcatgcgtcaccaaaccttgcagacaggctctctctggggcacaggtctcccgggtgccaggaggacaggcctggcctagcacatggtttgccacgctgtgtactgttgcccaaaaggagagtgcttgtcggtacagacgtgtgaggcccggattgtgtgtgctcgaggccaggaagaggaagggagctgctgcacctgcttgggtgacaaacagtgatgaatagcacctcacagcaattaggatgactgtcatcaaagacacagaaaatagcaagtgtgagcgaggatgcagaaaccctcatgcacagctgctgggagtatgaaagggtgcaaccactgtggaaaacacgttggtagttccccaacaagtggaacaccatcaccatgtgacccagcaattccgccctgcgcatgtatccgaaatagctgaacacagactcaagcggatgtgcgtattcccacgtctataacagcgttgttcccact

SEQ ID NO: 3728 - DNA, 481 bp, Homo Sapiens
ctagaacttagtctaacgtgccctctcaatgactgtgatgcagatctaccttacagcgctgttgtggtaccacggttccccatgatggctcctcagcttggcattcaaagccctagaagatctggctccaatttcctactctccctccttgtaatctacaggtactcatggcattcctcgaatactttcctgtgttttgcccttctcccatttcccttttgcaagtttagagtattgtccccaagatgtctgtccgatgctacacaatggcccttcaaagtcctattcaaatggcattgttctagtaacagcctcctgggtccaaactgaaggcattttcccctcttctatgcttcgagaaacaatttatccctcctagtgcccacatccatttcttcttcttaatgtagttattgttcatcccattttttctgagcataaactccttgaaagcatggtctagagtgtccgggtcgcgaga

SEQ ID NO: 3729 - DNA, 388 bp, Homo Sapiens
ctggtacgggagtgggatggtggggtgcagtggagaggggcaatgcagaaaagaagaaaaacaggacaagcatttcgggggtgctcatgacatccattaactaaagcactgtgattaactgtcacagcactgtgcctcatttatggtaaatactaaagaaatgctaatgactatcatattattatgcagtgtgaaaaatattttgtaatcaacgaaatatagactagtaattggtttttattaagttggcttgcaaaggcagaaggttatattgcttgctagcaattcctatcaagttctgtccatcacccgaaactctgaatagagcatccattcatggtaaaatatacctatgtacatacaaacatcaattccactcccgtaccag

SEQ ID NO: 3730 - DNA, 210 bp, Homo Sapiens
ctgaattcggaatgttcaactggcaagtgtaagcataatgcaaatattccaaaaccctaaaaaatctggaatccaaaaaacttctgatctcaggcatttttgataagggatattcaactgggattactatacaaacacaccaaccaaaaaagatagaaaaattctaacagccacatgctattgactgccactcccgtaccaggcctaccg

SEQ ID NO: 3731 - DNA, 234 bp, Homo Sapiens
ctggtacgggagtggcttctgccctgtgatgagggacactcaggtcccaggcccttgctacagaaccacaactctctgggtgtgtcctttcttcccctctatgccatccctgctggtcttcccaatgcactccctccagtcctggcttcaacagttctttgacccccaccaggacctgtaaccaattgatcttgctatcattctcccactcccgtacaggggatactctagagt

SEQ ID NO: 3732 - DNA, 198 bp, Homo Sapiens
aagagtttctggcttctgtaacaaaataagaaagtaggcctttttctctccaccatgaaaatttgttggaatgctttgtcctccatacctataaaagttgccagtgttacaacaggcataccacccaactctagcttccaaaaaatgttgaaactatcattcagcatattctgagacattctagtgtcttacgggata

SEQ ID NO: 3733 - DNA, 183 bp, Homo Sapiens
ctgctacgggagtggacactcgattaggatcctgtgtcgcaaggagagggaatgaagcagcacaaactatcccaggagtaccgtgtgtcaccatccacacatgcactacttaatacaaataggcagaggtgcactctcccttgaggttttttctactacattttatgtccactcccgttaccg

SEQ ID NO: 3734 - DNA, 586 bp, Homo Sapiens
  misc_feature (70)..(330): n is a, c, g, or t
tcatgggggcagatcccttatgactggcttggtgctcgtctaggttatgagtgaattcttgctctatcgnnnnnnnnnnnnnnnnnnnnnnnnnnnnnnnnnnnnnnnnnnnnnnnnnnnnnnnnnnnnnnnnnnnnnnnnnnnnnnnnnnnnnnnnnnnnnnnnnnnnnnnnnnnnnnnnnnnnnnnnnnnnnnnnnnnnnnnnnnnnnnnnnnnnnnnnnnnnnnnnnnnnnnnnnnnnnnnnnnnnnnnnnnnnnnnnnnnnnnnnnnnnnnnnnnnnnnnnnnnnnnnnnnnnnnnnnnnnnnnnnnnnnnnnnnnnnnnnnnnnnctaatatctcacacattttctgtccttacaactttgtggatggttaatcaagataatgtgcataaagaactacataatgctatgtagtaggcactaaaagacactggcttcttctatcttacctaagaacaaacttgagattataaaaaaatgaaaagttaaaatctctatcttgcaagtttcattttgcctctaaaaaattttaaaagtatatctaaatgccactcccgtaccaggggtccgagctcgaatcgta

SEQ ID NO: 3735 - DNA, 541 bp, Homo Sapiens
aggtttaatcctctccctgaatgccaactgtgtgcatggtaaggtggctgggagtgaggacagtgccatagccagggtggctgtagacagctccctgaggggtagcccatgaacaagacctaaacggtgcaaaggaggcagggcaggaaggtctgagggaagagggttccaagcaggaggagcagcctgtgcaaaggccctgaggcaggacccagctcggcatggttcagggactggatgaaagttggagttccttgcacggacggaaggacagggcagcagctgagagatgagtcccagagcttgaggggccatgggagctggatagggtttgacttcttttttaaatgtcatgcaaagccaccccaggggcctggcctggcccaggtcacctagggctgctgggtttcatcacatagggcagaggctggcttttgctctcacactctcagggacggtgccctgactgcccaggccccacctcatgctcaaggttaccagaacgtgctctccactcccgtaccggggaacctctagatca

SEQ ID NO: 3736 - DNA, 402 bp, Homo Sapiens
ttagccagtgcaaaaccatagcaaatcccatttcttaagctcctgtagtgtgtcagggactttacctacttcctcttacttacttttcataggtaagaaaacagacagagggtaagggcttcgctgcagtctcacagcaaggaaatggcacagctgggactagaactcaggcctccggcactggtagcctcttttgtctcctagtagctgtgtcttagtagaaaaaatgacttgaagttcagtgggaaagacgagaatgttattcggcagttgctatagccagcaccctgccagtgctgtatatgtataagctcctcaaatccttcccaacattcacacacagggaatagttacttttttggtaggtaaaggaattccggatcctctagagcgcctcccccc

SEQ ID NO: 3737 - DNA, 356 bp, Homo Sapiens
gatcgagctcggtaccggtctcttcctgacgcgagatgaagtctgataatgtgaggataaagatgcaaaaattagcttcctacagagaggccatagacgtggttgtaatggtgtcgggagagccactgttggccaaaccagcccgaatcgtggcggggcatgagcctgaaagaacaaacgagctgctccagacaattggaaaatgctgtctcaacaagctctctagtgacgatgcggtgcggagggttttagctggagagaagggagaagtgaaaggccgggcctcactgacctcaagatctcaggaattggataataagaatgtgcgagaagaagagtccagagttcacaataac

SEQ ID NO: 3738 - DNA, 464 bp, Homo Sapiens
gtccgtgtagttacatgaaaattctgtactagaagtagctgagacaatataggatgcagaagttgttacagtactgtgcgggtgctatgataacagtatcttgtgactggctaccagctgatgtctgttgagatgaagtttgcacaggttggggtgatgtggtgattaactgttgaccctgtgaaactgtagaagtacatgctggtatgttctgtactctgccaaacatatgactctgtgggacagctggtcgaattactgtaacaggagtgcctgaagggatctgtcctggtaccactgtgtgtaatggagactgctgtggaatcacagatggatggtgaagcaatgtctgagaattcacaactgtaacaggttgtggccctgtactatgattctgaacaacagagctctgtggaggtcctcctccaacagcaatactatcaggaactcctgtctggggtatg

SEQ ID NO: 3739 - DNA, 560 bp, Homo Sapiens
tgttataggaggtgtgaggtagtaacggggaggctggagcggggcattggtgaaacgaaggatgtctctgaaaggctgacgggacacagtggacgaggggagagtcctcatctgctggcattttgtggggtgttagtgccaaacttgaataggggctggggtgctgtcttccactgacacccaaatccagaatccctggtcttgagtccccagaactttgcctcttgactgtcccttctcttcctacctccatccatggaaaattagttattttctgatcctttcccctgcctggtctagctcctctccaaacagccatgccctccaaatgctagagacctgggccctgaaccctgtagacagatgccctcagaattggggcatgggaggggggctgggggaccccatgattcagccacggactccaatgcccagctcctctccccaaaacaatcccgacaatcccttatccctaccccaaccctttgcggctctgtacacatttttaaacctggcaaaagatgaagagaatattgtaaatataaaagtttaactgttaa

SEQ ID NO: 3740 - DNA, 1115 bp, Homo Sapiens
ggacctcagcagtctcaataacagctggacaggaaggacaatcacgaacaacttcctggaggacctctatccaagacacatcagcttcttctcagaaccactggactcggagcacgcagaccaccagggaatctcaaaccagcaccctaacacacagaaccacttcaactccttctttctctccaagtgtacacaatgtgacaggaactgtttctcagaagacatctccttcaggtgaaacagctacctcatccctctgtagtgtcacaaacacatccatgatgacatcagagaagataacagtgacaacctccacaggctccactcttggaaacccaggggagacatcatcagtacctgttactggaagtcttatgccagtcacctcagcagccttagtaacagttgatccagaaggacaatcaccagcaactttctcaaggacttctactcaggacacaacagctttttctaagaaccaccagactcagagcgtggagaccaccagagtatctcaaatcaacaccctcaacaccctcacaccggttacaacatcaactgttttatcctcaccaagtggattcaacccaagtggaacagtttctcaggagacattcccttctggtgaaacaaccatctcatccccttccagtgtcagcaatacattcctggtaacatcaaaggtgttcagaatgccaatctccagagactctactcttggaaacacagaggagacatcactatctgtaagtggaaccatttctgcaatcacttccaaagtttcaaccatatggtggtcagacactctgtcaacagcactcgcccccagttctcgacctccaaaaatatccacagctttccacacccagcagagtgaaggtgcagagaccacaggacggcctcatgagaggagctcattctctccaggtgtgtctcaagaaatatttactctacatgaaacaacaacatggccttcctcattctccagccaaggccacacaacttgctcacaaacagaactgccctcaacatcaacatgtgctcccactaggcttgttcacacggttatccatctaccagccgctgactaggcactatccccatgtgatcccctg

SEQ ID NO: 3741 - DNA, 1483 bp, Homo Sapiens
  misc_feature (1082)..(1123): n is a, c, g, or t
actcgcagggagctcactggagatgagggggaggcaactgtcccacagacaagacagtaggaggtgggggtcaagagtggaaactgcaccgaggcaagagtccatggatggggccaagagggggcaggagtggcgctgtatccacattcacttcagaagttgaagattccaaagaggagaataagtggggagaggggagacaaggaagagggtttggccctgcttcagggcccactgggtgggtaggtgtggggaggaagatggggacagatgggaggagagctcagagccagggttcacccaccgcccccaggcttcttcagatagtcaccaccaccccggccatcagtggagatttcccggaaaacagtgagcatggagtgccggactctgtcagccagagctgggacgtcatctggtgtcagcccttccgtgggcactgggggcagcacccgcacctgacattgtcccgaggtgaagcgacgctccttcttgcagtagaagtcttggtaggaggacatgactatggggacaatgggaacctgggcctgcactgcaagatggaaggcgccacgtttgaagggcagcatggagccattgtggtttctcgttccctcaggaaacacccagaccctcacgtcctgggtgagcagggtctgggcgacctcagacatgacactgatggcatcccccgtgcgcttccggtcgatgaagatgactcctgccagccagcaggccagcccggcagagccagcccacagtagctcgcgcttggcaatgggcacacagcggcctggcagtacctccatcatcccaagcagatcgagagagctctggtggttggagacaacaacatagggctgcgagggagggaagtggtgagcccctcgcacctccactcggatcccgtacaggtatttgatgtggagcagcattagacgcaagatcttcatgttctcgacgttgcgtcctcgcacggcacacacagggatggcgagcacagccaggaagaggatccagccattgtagaaggccatcttgaagaagtacttggcactggggctgcagaaccacagggtggnnnnnnnnnnnnnnnnnnnnnnnnnnnnnnnnnnnnnnnnnntccatgcccctggccacaaatccattctggccacctcagaggggtaggggcctggggggctggccccctccccagccagctcgcatcgtgtggcggatggctggtctctgtctctgtcgtgggtgtacggtgccaagcgggcgactgggattctgggtggtgtccttaagccccggccggattgggagtgggaaggtggggagtggctgatggttgggagccccatagcccgggtagggaactgggtggaggggcttgttcacccgccaagcacccctgcccttcccctccccttttctgcctgttctctcttgaggggcttgggggctgcttgcccgccggctattttcacccgccaca

SEQ ID NO: 3742 - DNA, 2012 bp, Homo Sapiens
cccccaacccgtggagtccacactggctccctttgcctggcccttcagggtgcggcgtggccccctttatgcgacgccagtcgcttcatgtgtcccactggtactgaccatgtgatcttcgcttaacaggcccttgcgtaaggcttaggtaagatctgggtgtatcgtagcttgtcacagccggacccgtgggaggctcccggtagccagacagtcactttaagtaacgtgctgttcttcacagtaggccaccccctagggcaacctttaacaacggtccatgaaggcttcatatcctaaggcgttttgttattcaggagcacagggacagcagagtcctgcctgcgcagggacccttaagcagagtgtcagtgggataacaaacttgcagccaaaggcgatgttagttgatgcccacctccctgaagaacctgtctggggaatccaatgtcgcacaaatagatacggcctgcgtgctcccccagtggcagaggcaggcccagtgccagtgaccatttaggcatcaatgccctgttcgacttcatgcacaggagggtctatgctgagtactggtgcccggttctggttggcccaggccacagctgccttgtaccagggttgatcgcgcaggaagacgttctcagggcaatccaggcagttgatgaccaggtccacagggctagtgggcagatctttgaggctagacacttgttggccttgggtcttgctgaagagcgacagctcattggtgatagattccaacatcttgacaaaattgggcaggaaaaggatgacctggacatcatggttggctaggtgccttccacagctgataccctgagcccccttcacatgaggtccacacagtagagccactgtaggcctctggtgaacatttttgggattcaacctgttaggtcctccgaggagggtcagtgccatctgactggcacacacacctgtcatctccagtctccgctcaagggtcagcccatgcttctcagccacggacaacagctttttatgcagctcataggaaatacttgggacaaccaggccagagtccgtgcagaactccttgctcacgttgtggggcactatgatccgtcgatagacaatgggctcggactccaagatgttctcatcatggcggtaccgagtgggcctttcatttgggatgccccgggaacgggtaccacttctcctttcataggtatcaatctcctcaaacacagctgccttgtcaaaaagagccaggttcccttcaaaatcaaaatctgtgtctgggatctcctcaatatcatccccgaagcactcgtcatctttattcttcatctggccattctttaaaccacttttcttgggagttgcctgatttgggtgcctgctactagatgaccaggagttgtgccgacgacggaaacttttggactgactcaaggattccatgtgcctgtcgacatagctctttgagcactgttgctgctgcggggaaacggcaacatcctggctcttcacatctgtcctcttagggatattctgaggggcactgctggaagaggctggcttcttgacaaacttgcctgtgccattctgattgatgcccacttggcagccagcaccagaggggcctaattctgtttgatgaaggtctccaaaatgttggttgtctccaggtcctggtatctccagaatttttaactccgtaatgtcacctgccctgaaggtgacttctggaacaagacacttcactccattatggaaaggccgggtgagagaaatggtctggctgacctgatccacagctgacactcttacctgatagacacccaagctatctccacaattgatggacacaatacttcccagccaatctgtagccatgtttcacacgtgagaccactccgcgccgacgggcctggagctcctccgcacaccacaccaagccgaccactccacaccagaggacccacagaagaattctctccacgcccacccccacagcatcggcc

SEQ ID NO: 3743 - DNA, 430 bp, Homo Sapiens
atcaggcgaagacttggtcagggggccgagcccctgggcccccctacagccctgtgtctctgcagaatcagaaagtctggtaaatgggaaccacaccccacagactgctacacggggaccctctgcctgtgccagccacagttgcctggtgagctctattgagaaggacctgcaagagatcatggactcactggtgctagaggagcctggagctgctggcaagaagcctgccgcaacctctccactgtcaccgatggctaatggtgggcgctacctgctgtctcccccaaccagccccggcgccatgtctgtgggctccagctatgagaacacctctccagccttctcgccactctcttcaccagccagtcagtggaagctgtgccaggcactcacacagtgggcaagagccaggaccttctgggccccg

SEQ ID NO: 3744 - DNA, 454 bp, Homo Sapiens
tgacctagagttacccctggtacgggagtggtgttagatagtgggtgcaggaggtggatcacagcacgggcctttaggactttgcggcgaggccctgccaccatccacagataaccactctcctttggagagacagggcttggcctgctgccgtgccttagtagaaactgaatgtttgaccatgggccaccaagttaccctgtgatctgagctgcccaccatgaactggggaattatctgacccacgtagccataaagttgggcatgcacagcagtgctccgtcatccaacagagaggtatatacatgatccggcctgagcacatcctgaagacacaagtaagttacatgaagaagtggcccaaatgcccgtggtccccattcctgctatgaagacacaagtaagttacatgaagaagtggcccaagtgcccgtggtccccactcccgtaccag

SEQ ID NO: 3745 - DNA, 335 bp, Homo Sapiens
ctggtacgggagtggaggaacggggtgggggggcatctccccattctgggaagcttcagttccttggcagaagtgagaaagctactcctgaccgtgggcatcggatgggcggtgatcaaactaggatgcattccctccctggcttttagtgtctgttggttagccagggaacttgagttaggcactgtattaagcatgtctttttattctgatgttttgacatctggggtcttactgactccagctcccagggctagctgcccttccctgggctagcttacaaagcacacctttcaaatgcaaaccaaccaatccagatcccactcccgtaccag

SEQ ID NO: 3746 - DNA, 685 bp, Homo Sapiens
ccctataacctgttcccatctatcctgacggatgctgggattgccccactgccagaggactgaaggcacgcatggcaggtgacctcggaaaggtccaagtcactgcagggccaccaaaggctgggattccgtttccagttcaccaaggctgtcctgaaaaagcctcccacagggagagggctctgaagacatgtggatgcagcaggtgtgttcgggcaccccggagggcatgccccgcctgccgccttcccttccctccctcgaaatcccactgccttcgtgactgtggcatatccttactgactcaggaggcaagatccaggtgctgatatatttctactggttttcagtcctgctggaatctctgcagggacgtgtgcacctactctctgaatctcacagttaatgacctgcacaaacagcccttttacggatcaagagtcaagcacacaaacatgaacacagtgccttccagagtggtcagggcattctgtcatttaagttcaggggtccctaaatgtgcaacagcggagttgcctcggaccctccttccttgcaagctgaaaagacaggacctcccattacattcagaaagagatggcagagttgtcaacagctgccactttttctggtccctactacacccacctccccactcccgtaccggggatactctagaggtcac

SEQ ID NO: 3747 - DNA, 371 bp, Homo Sapiens
ctataaagtaacaaagggataatatgaaaaagggtgattctgtaagtaaatgaaccactgaggtcaatcagccgcctatggttccattattttgcagacaaggaagctgcaaaggagacggggtgctgtctggggtctcccagcagcagctggggccaggcttctgactctagccatgttccacccattgccgtcctgggtctcagcttcaggcaagtcttcacagtctaagttttttgtaggtctttgagccaatagacaggaatgctcttggagttgatctcagttctgtatcgtcagcttcctatttagaagagaaccttaaaattccaaagttcaggtaaccactcccgtaccggggaatactctat

SEQ ID NO: 3748 - DNA, 335 bp, Homo Sapiens
ctggtacgggagtggttaacagcctcagtttcctcacctgtaaaatggggacaaaaacacctaccctgcgttactgttgtggggatcaagcaacgcgtgtaaagtacttgtcacatagtaggtactccctactccctgctaattaatggcagctcctgctaatggcatgaacacagctgggttctttcaccccggtaacacagcagagcacgtggagaatggagagggttggggagctggccagatgttgccacctccctgtggtgaaggccttggggtcccaggatagcagcttctctttacaattctctccactcccgtaccggggataatcc

SEQ ID NO: 3749 - DNA, 322 bp, Homo Sapiens
agtggaacacagtttaggaaattctgatataagaaaaaagaacataggctctacagtctaaagaactcaccaccacctgccagctgtgagatcctgggaaagttacttaacgtctctggacctcagttttctgtctgtaaaatgaaaaatcacactacccacctgagggcttggcacacaaaaagatcctcaataaattattcagtccctcaaatttttcatataatggattgtatgttggccttgtgacagcatgagttttattatataaatgtttatttatgttaaacatattatatttttttgaacggagtctgctgga

SEQ ID NO: 3750 - DNA, 539 bp, Homo Sapiens
tctagtggatccccctggtacgggagtggcggatcaggcacagacttgggaagacagactgtctagcttcagatttaggcttcttactagtctgaagtagaatggttgtctgttcctccactgcttcatctggaaaacaggggcaggcatcccagggtgtctgagagatcatatcagatggagaggccagagtttttagccgatacatcatagacattccccaaaggacagttattgttatcattgggtggatggggaatattgagcctccagccctaggcatcgtggatcaatttgttcttcacttatctttggaataatttaaatacactggattgggaagacaaagctatcaccctcctgatgggagagtgctgggtaccaagcaggtgctcagtagttaatgaatgaatgagtaagaacagaacaggtcctaggccctgccctgaagaggctcacagtgcaggacaaggcctggagtcaggccagggttttgtggttgtctttaaaaagaaacaaaacaaagaaccactcccgta

SEQ ID NO: 3751 - DNA, 1055 bp, Homo Sapiens
  misc_feature (791)..(791): n is a, c, g, or t
gggtccggaattcccgggatgcagccgccacgccggggccgccgagatcgggtgcccgggatgagcctcatccggaaaaagggcttctacaagcaggacgtcaacaagaccgcctgggagctgcccaagacctacgtgtccccgacgcacgtcggcagcggggcctatggctccgtgtgctcggccatcgacaagcggtcaggggagaaggtggccatcaagaagctgagccgaccctttcagtccgagatcttcgccaagcgcgcctaccgggagctgctgctgctgaagcacatgcagcatgagaacgtcattgggctcctggatgtcttcaccccagcctcctccctgcgcaacttctatgacttctacctggtgatgcccttcatgcagacggatctgcagaagatcatggggatggagttcagtgaggagaagatccagtacctggtgtatcagatgctcaaaggccttaagtacatccactctgctggggtcgtgcacagggacctgaagccaggcaacctggctgtgaatgaggactgtgaactgaagattctggattttgggctggcgcgacatgcagacgccgagatgactggctacgtggtgacccgctggtaccgagcccccgaggtgatcctcagctggatgcactacaaccagacagtggacatctgggtctgtgggctgtatcatggcagagatgctgacagggaaaactctgttcaaggggaaagattacctggaccagctgacccagatcctgaaaagtgaccggggtgccctgnaacggaattttgtgcaaaagctggacgacaaaagcggcccaattctacatccagtccctgccacagaacccccaggaaggattttccttccagttgtttcccacggggcccaaccccccaggtctgcggaacctgctttggagaaaaagtctggaatctaaaccgggacaaaggcccttggaaggccccccatgggcccttcccccatccccttctttagaccccttccggggaccctgaggaaagacaacggaggccccacca

SEQ ID NO: 3752 - DNA, 918 bp, Homo Sapiens
caaggagtatctatcatctctggcaactgaatcatcacttaccttgaaacctgcccacatcactttataaagtcagcaggatgtcttctcacccaccctgtgcgtggtgtctaacaaatttatcttgtcatgctcaaatgtgtttggcagccacaccgatcggctgggtgctgaaccgcctctctgtaattgtagcatcaaaatgacaacagcagcagagcagcgaatcttgcacagccccacagcatgcctgagacaagactccaacaagtaataattagctttttttctcctgccgcctacagtacctgtctaactaaagagcttcccaaagtggagggaaaggccatagaatccaggtgtcattcagagccagtccttgctgaaatgtggtcttccagtggaagcacctgtattattgagaggaaaaagtgttggatgcaaagtaacaccaggactagagagaaagagaaaggtgaaccatcctaaggagctttggatacttttttagaaggataaatattatgcttactgaggagaaaaaaagaagcgatcacagaaaaatttcacagctaatatttttacaaaagttgtgccagacattacagagtgaaaacgtctctcaaggtggaatgctttagagagcaaaggcttagcatagacctagacccttgtgtgggtatgacatgacatgacatgtccatgtcaaaattcactttagtcagaaccagagtattgataaacaaaatgtcagttacctggagcagtcctggagaggttaagacattctatactgttctacgtcaaccatttctacaaagttgtccagacacctaaaagcagctttctgggttatccagatgccagaatcaaccttgtatctgacaatgcacatctgtagattctaaagtatattta

SEQ ID NO: 3753 - DNA, 612 bp, Homo Sapiens
  misc_feature (376)..(416): n is a, c, g, or t
gagtaagggtccagtatatcatgttactgtatttttgtagcttcaatgttattaagaaaagactaattacttgtcaatttaccagaatttaccatacccggatcactcccctttgtattttattgccatgtaatgggatgttctttaaattctctgttgaatgaatgagactaggtctgagtgtacaacaattaaagtgacatcaacattctttaaaccagagttgttttggagaaattcccagagaggctctttcttaagacatgaggctagggaactagatgtgatttagtgtagaagtcctatccccttggaaccaaagcagaacctattattcactaagggtggagtcgacaggaggtaggtgacttaaacnnnnnnnnnnnnnnnnnnnnnnnnnnnnnnnnnnnnnnnnngcaatccaatgagattaagacagatactattcctgccttgtagagcttacagcctggtggaagaattggaaatcttattactagaaataaaggtgagaataagatggaagtgatccccttaccacctcagagagaataaagaattatacagaagaaaacctgtaagactttacattttttgtttataactcctcgt

SEQ ID NO: 3754 - DNA, 414 bp, Homo Sapiens
ggatcccggacatgccattggttgcatgaggatatctgaccgccaagctgtcccacagggtcggagtccgtcagaaatcaggtgggagttcagcctgctcgaacaccccccatgctcagaccagtcgatccccagatcccacatctggtagctgtaaaatcccagggacctgccttgaccgcctcccagtcagtgcacgagcagcccacaaagggcctctctgggtttcaggaggctctgaacgtgacctcccactcgcgtggagatgccacgcctagaactctagatcccacctcggaaaatcctcctctccccactcgcattgaaaagtgtgaccgaagctcttggttacgacaggaagaagacattccaccaaaggtgcctcaaagaacaacttctatatcctccacgcta

SEQ ID NO: 3755 - DNA, 1016 bp, Homo Sapiens
ggaaagtcccccggctctggggccccggtgacccagagtaagcctccaagaaggaggaggaggagagaaaggcggctcttcccgtgcccctaccagaggcttcggtgggcccaccttgtgacctccgcggccggcccctcagtggaactgcgtcccacgcggggggcgtcccgaccgtgggggccgcggcccgcgctgaccctggacgtcgccgcgcagcccctggttccccaaggcagaggaaataccctggtggagccctccttccatagaaccagagatggcatctgtggatttcaagacctatgtggatcaggcctgcagagctgctgaggagtttgtcaacgtctactacaccacctatggataagcggcggcgtatgctgtcccgcctgtacatgggcacagccaccctggtctggaatggcaatgctgtttcaggacaagaatccttgagtgagttttttgaaatgttgccttccagcgagttccaaatcagcgtggtagactgccagcctgttcatgatgaagccacaccaagccagaccacggtccttgttgtcatctgtggatcagtgaagtttgaggggaacaaacaacgggacttcaaccagaacttcatcctgaccgcccaggcctcacccagcaacacagtgtggaagatcgcaagtgactgcttccgcttccaggactgggccagctagtgggggtggcagaggtctctttgcttcattcagccctagctctgtagagaaatgcaaacctcgactctcaaggatgtgaggaacacaagttcatttctgttgttgcggagacactgcagactccactgtgccgaggttgaactcttttttgttgctcaagttctaggagtccctttcctgaatatatacttgtttgtcatagtttccttttcaaagtagtaaacttttctatttttctacttgcccagtagagactctgattctggaaattctgacaaataatttaataatacacatgttgcttcttaaaaa

SEQ ID NO: 3756 - DNA, 1172 bp, Homo Sapiens
gtggatgcactgaagaagatgttgttggattcaggggggctttgcaccgtgtgttctaggctgctttctaccactggtaggggcacttaatggactgtcagcccaggacaactgggccaaactacagcgggattatcctgatgcccttatcaccaactactatctatggcctgctgtgcagttagccaacttctacctggtcccccttcattacaggttggccgttgtccaatgtgttgctgttatctggaactcctacctgtcctggaaggcacatcggctctaagcctgcctcactccatcgtttccaccttgcagtgatgcagcttgaccctggaacggtcagacaacctcctcaaagtgggcataccagtttccacggggttgggttgccggtcagagcttaagaggactagcaccctgcaatgcccctcttcactctaaaatgtacactgactgctttagagcccttgataatagtcttattcccaccacatactaggcactccataaatatctgttgaaccttcatgaccttatcaactttacacccatatcccagcaaatgccactcatccccactcttcatagacacatttgttactctaaccctgcctaggcttcttgtagctccagctctttagagactcccggaaccctttatatggtgcctcagtaaatatgttattaaatatgtaatccggaaaacacgaagcacatgactactcagccaccaagagcaagtcgaacgagcgaggtacagccaaaagaaagacaaggagaggagatacacgacaggacaacacgcagacgacggcagacagcgaagaagaagcctcaaaggcacaggggagcgggagcaaagagcaccgcgcagtgcagaggacaaacaagcgagccaccacgacgaccgagacaacaaaggagaacaacaaagcggaggaacatcacaaacacactggacgcacgagcgaatagagaagaacgaacgacgaggcaacagccgcaccaacggcgtagcgcgaggaagacaccatcgtcccgggagacaggaagatgagaagacaacaaaacacatatgagcagcgcggcgagtaaaacatctgatggaaacggagacgcaaagcaaacaaagcgaagaaaagccaccaggcaaagggaaaaaaataaag

SEQ ID NO: 3757 - DNA, 596 bp, Homo Sapiens
atgagccaccgtgcccggcttcacacccatttctttaaaaaggatcccgtagcaggcagaaaagccccttccatcctgctcctctgatactgtgcccccttggagatatttccgtcctcaacccacgtgtctgtggctggaactgcccagcctgctcctggccccctggaagcctccccacagctggtaatctggacataaggatagaagggccaccgcctctctgcctaccaccattccatatttaagtggagcccctacgtagaaaggccccggggctttacttaaatacggaaagttggtacaagagacaatcccggcattggacatggagttcgggctgatctgtcctacctgaacaccgcttccgttcctgggctgtcgtcttcaccgcctggttttccatggaaaggaagcctccccagtggccttttgaaaaggcactgtggcgtggtccgataagtctctgcagaggcaccagggatgctttcaggacacagcacccagaacggaggctcgatggtttaaagtttggctctgcatacaccttagggtcgctgacacaatatctggacacgacgtcagacatgatatgc

SEQ ID NO: 3758 - DNA, 632 bp, Homo Sapiens
tgctggctcacatactccacgtatgtgcccttcaggctgaccagtgcagctcacgagccctgctgtcagtgtcgttcacagaagtttgggtactcataggaatatggtcacagaagtgtctggcactacaaaccctgctggagtggctgaattaagcagtgttgtgccatgtattcctatcggccaaatccgcgtgccaggccatcagaacctaagtaccccaggcttgcagtcactcccctcgttaagcatggaaaccgtcaatattgtaggcctagccaatacaaatatggccccacaagtccatccaccaggactggctctgaagtgctgtcggactgcaggttctgactgcaaacccttcatcacaaagcagccccgcccctcaggcacacattccaggtctccagatcctgaacatagcattgcccaacttaatcccctcagtcagtcaagtagccgttgatgcacagggagctccagaaatgccagcttcccaaagcaaagcatgcgagacacaacccaagcagacttctgtagccagcgcaaaccaggtcagcaggaccgagtctcctcaggggttacctacagtccagcgggaaacatgcaaaaaaagttccgtcgaagccgtc

SEQ ID NO: 3759 - DNA, 422 bp, Homo Sapiens
gcctttcaaccgcacgtgagggaaaaaaaggagagcaggcttggcttctcgctcacctgcacatagctccccacgctctcctggtagatcataaaggaaagcaggctgccctggggtgaaatccccatccttgcatctgctgcagcccacagctcagcatcagcatctgcacccccaagtgcagcaccctccttacgagcaggtacaaggcgcgttccaggtctctccgccaatacagctgccgacattgttcaagggcccctttatagcgacagacttcatgctcctcggcaccaaaacagcgaacggtctgcagccctccaacggcttcccgcaccacctgccccgccctggccactgcatcctggatctcccgaagcacttcctgacggcgggtgttgtacaccttctccgctgctatt

SEQ ID NO: 3760 - DNA, 744 bp, Homo Sapiens
caatgaaggggttctgataactgttgggtttggtattgatggccgaggtgtgtgaacggctgaggagacctgccctgggaacacaggaaggacagtattcagcaggttcattccagaaacggtggcagctgctgatgctgatggatgattaattgccttgactggggatgcagtaggaacaggagttgcagcaggtgttgaaggattagaaccatgaggagaaaagagttgacttgctggggtggaaaatgtttgattctgtataggttttgacggattcgaaaggtcttcattctctgttcctacaggattaggagtatatggaggtggaggtggagctatgacattcgctaatggtaccagacctgcattgttataagcacttggtgcaatagttgcatgtggtcggcatggaggtatcggataaggaacaggtttatgtggattatatgttgaaggaggtggtttggatggcccaagaattcgtgcagctattcctttgccttcgttagtacattcttcaccatcttttttcaaaggagttcctgggaaaattccatttatgcggctaggtcttcctttgggatatggatttcctgggattgttccacaagaagatatcatagcatgaggagctttgcagccccccttgaaagcctgttcaagtattctcctgcaccgtttcttctcagacatactttaccctgaataaatcttcaataggacgagattctgtgcacgccg

SEQ ID NO: 3761 - DNA, 711 bp, Homo Sapiens
aaagttctagtgagaacaccacagcctctatcaactgcaagtctgagggaagatgccagtcccaccaattctgaccaatggttctgggttgagttaaatgaatatagtaccacattctgctcctcactaagcttcttcgttaacacacctataacaactactttagtagcctgagcacaaagctctggaaagctgtctttgcccttctttcactatgcctcgatcgatcatgggagccaaggaagcacctgctggccttgtgagtgcctcttaggatctagcacctaactggttaaggtctgttatccatgactagctctattttatggccttcatacagtacatgttgcagcactgctcaatttgcaaacagtgaaatttatcaggaatctatattctcttgaatctgatcttaagtgctaaacctctcattagcattaaaaattcttttttatagtatgtccacattaaatgctcaataaagaagtgttacttagagaaaacatggaagatttctttaagaaaggaaccatgctttcctctccagcgcagccaatgggctgaaggcctgtttccattctccattcttccagcataaatctacaactcactggcagcacaacctgatttaacaggcacccatcagccagaccagaacacctatggcatgtaaacagggtgagatggcaaaaagtacaaattcataggtcc

SEQ ID NO: 3762 - DNA, 1426 bp, Homo Sapiens
  misc_feature (898)..(910): n is a, c, g, or t
tcaacgctttatacttcctagttatgttggcatagcaaaaggaaatggcattctctcaaaagcaggaattctcaagaaatttgaggaagaagattggatgacattttaaggaaaagattgaaggactcaagtgaaatacctggtgctctgtggcatatttatactgggaaagatgttgacaagataagggaatttcttcaaaagatttcaaaagaacaaggccttgaagttctaccagaacatgatccaatacgtgaccaaagttggtatgtgaacaaaaagctccgtcaaaggctgcttgaagaatatggagtcagaacctgtactcttattcagttccttggtgatgctattgttttgccagcgggagcacttcatcaggttcagaattttcacagctgtattcaggtaactgaagattttgtgtctccagaacatcttgtagagtcatttcatttaacacaggaactgagacttttgaaggaagaaatcaattatgatgataaactacaggttaaaaatatttcgtatcatgcagtcaaagaaatggtgagagccttgaagatacacgaggatgaagtagaggatatggaagaaaattaagtgtgactccagtttgatatttttaggttgttgaactgggattacttaaccttgaatgatgatatgtatgcacactgactttaagcttcataaaaccatcagtgccaagaaattctctttgtagtaattacttgttactgacaccacagcagtatagcatatgtcacagctcctgtgattcaatgttataaaaccagcagaattttaaaagcagcactatatagctgttttgtattatagtgtatatgatgtttgtgaaaatgccagatttaaaatgatgtatttatttttggtnnnnnnnnnnnnnttctatgctatattgttgatcaagtgtaaatgtgaccttgtacagtttactaaaattactgatatttttcactacattgagacagttactgtgagaataggacacaaacaccagctattgcctgcatctgggaaattgctgaatcgcacagcagtcatgtcataatcagaaaattactgccaaataattgtaaaatttgtaaagtataaagtatataaagtagatactaaatacagacacttcaatattttgttgaagctattgactgtacaattaaacattttcaaaaggtgtaatttatttaaaattgtctcattttggtaaaatttatgtgaacttttaaagctaaatattaaacttaatatgctatgtaaatatatacatatatacatttaatgatgtatttttttaaaacattggcttgcttttgttaaagtgcaagtgttacatatggctttgtacattaaagttgaaaggggtttaaaattttccattaaaaggactttatcaaaaaac

SEQ ID NO: 3763 - DNA, 879 bp, Homo Sapiens
  misc_feature (107)..(177): n is a, c, g, or t
  misc_feature (189)..(249): n is a, c, g, or t
ttagaggatccctgttcgacggtgtctgctacattgctggccatagaaaccaatcacgtagctaggaaatagtctagtggttaagaacttgagcttgggagtctttnnnnnnnnnnnnnnnnnnnnnnnnnnnnnnnnnnnnnnnnnnnnnnnnnnnnnnnnnnnnnnnnnnnnnnngttaagagggannnnnnnnnnnnnnnnnnnnnnnnnnnnnnnnnnnnnnnnnnnnnnnnnnnnnnnnnnnnntacagtccctgcaatattgtaagcattccatcagtataatagctgttactacatactgccatagacacacctttactagcaacacatgaaactcacttgtgggtactaaaatcgatcatcacggaatggcatttgttgactaactcttcatccacacaccgccttgtttctgtattccacagccacaggactgtgggacctggtgctttcccaaatcaggaggtgccacccccaaacctcaccagttgttccacacacggagttatccttgaaataatttcagcatcattagaatacataaaagctgtccacgtgcatactttctgatgctcttaaaacagtttcaccactctcagatcggctttggttgtttctcaacaagacagtctgtggctgtgtgagaagacctgtgagacaggaatgctgtcttctcctcagtattctccgtgggaactgacggaactgtggaaactgaaggaacggtgcggtgatccttgtcagatgtcaagcaagataacagggacttgaattagcagagtctaaaatcaggcaggcaaacgataatctgagtgcagagtctgaggagtcccaggtttagcagtagactgtatggtctttcaagagattaaa

SEQ ID NO: 3764 - DNA, 231 bp, Homo Sapiens
ctttcagatgttgccatgccattaaaattgctgatgattaaaatagaacatcctgagttacagaaattcagccctagtgtatcctggcctaaaaatacagaacaatcaagttgagtggttggaaatgagaggctaggcagggttggaaacatgctaatgtttactgagtgaaatctttccttctcagtagagttgcccttgcagctgaaagtcactgaaagattcaaacaa

SEQ ID NO: 3765 - DNA, 601 bp, Homo Sapiens
accccttcgacggtgtctaggggtggtggggctggggaactcaggccacagtcatgaaaggatgaatacaatttctaggtttaataggttcaccatatcggagtctttgaaaatcccatattggatattcattaatttggcaaagggtagagaaagcagttctcaacttttgcaaatgaaatacagtggaaaaacactgttgtatatattccaaataaatagtctcgatttcaatgctaacaaaacaacaggaagggtactcgtgagcatctcacggttaagtcagaaatgatcgttcacacacgtctgatttcagaagtacaacagcaaggtgcagcaccatagacacatcggtttcggctgttaaaagatggatcgttttaaaaactgtgttttccttccttaatttttggtcagtgaagctagcacttgtttgctgaactgtggaagaactgcaaggtcacacacattattcatgataaagcaaccgagctgacgagtcatagatgcataattgcaagatataaccagtaggagagagagaatacacaaggagtataaccaccatcggcggtgctctctcaaaaggaagaaaggctta

SEQ ID NO: 3766 - DNA, 536 bp, Homo Sapiens
ccggatgctgtcataggcacccaggaagtttgaatgtttgagcaagtcaagatgctggtcgagctgccgcagtgtgagattaagtgcaagcctatatcgctccagaccacttagtgcatggttggcattgaagttctcatcttgcacaatctgtcaggtctgcctcgagctgagtcaggtgcctcagaggcctccccaatttcacgccgcagctcctctgtagcctacacaagcctgagtgcagtggaggcggctgaggtgtagcgggcacctacgatgccctgcacaatgcccagcttctcctgcatgtgccagaagctgctctcaaaggcacccagcacacccgtctgttgcaactcctgcgcccgctgctctaggcgctgtgtacgggctgccaagtcctgcaccactcggtcccaatccccgaagcatgcatggcagggatggcaggcaggaaagattcctgagaagccacgggcacactggtcaacagcgcacaccagacacccctgggcggcagttgcagtgacctgtga

SEQ ID NO: 3767 - DNA, 654 bp, Homo Sapiens
  misc_feature (98)..(114): n is a, c, g, or t
gtgttctggatctcaaaccgccgctgatacttggctgtgaggcaaaaaaggagaatttatgatatcaccaatgtcttagagggaattgacttgagtgnnnnnnnnnnnnnnnnncagtatccagtggaaaggtgtagttgctggctgtaatactaaagaagtcatagatagattaagatatcttaaagctgaaattgaagatctagaactgaaggaaagagaacttgatcagcagaagttgtggctacaacaaagcatcaaaaatgtgatggacgattccattaataatagattttcctatgtaactcttgaagacatctgtaattgctttaatggtgatacacttttggccattcaggcaccttctggtacacaactggaggtacccattccagaaatgggtcagaatggacaaaagaaataccagatcaatgctaaagagtcattcagggacctatccatgtgctgcttataaataaagagtcgagttcatctaagcccgtggtttttcctgttcccccacctggatgacctcacacagccttcctcccagtccttgactccagtgactccacagaaatccagcatggcaactcaaaatctgcctgagcaacatgtctctgaaagaagccaggctctgcagcagacaccgtc

SEQ ID NO: 3768 - DNA, 521 bp, Homo Sapiens
  misc_feature (403)..(447): n is a, c, g, or t
tgctgctgttctcctcctcgaatgaggtgtctgggtatcatagtctatccagcccttcaccagaagaccttaagagtcgatgtctgtaccaccgacaggagccatctggaagagtgcctgggaggcgcccagatcagcctggcggaggtctgccggtctggggagaggtcgactcgctggtacaaccttctcagctacaaatacttgaagaaacagagcagggagctcaagccagtgggagtcatggcccctgcctcagggcctgccagcacggacgctgtgtctgctctgttggaacagacagcagtggagctggagaagaggcaggagggcaggagcagcacacagacactggaagacagctggaggtatgaggagaccagtgagaatgaggcagtagccnnnnnnnnnnnnnnnnnnnnnnnnnnnnnnnnnnnnnnnnnnnnntgttttcaccgaggaaagcctcaactgatatggctgggtacccagcattaaatggttgggcaaagagaacaaca

SEQ ID NO: 3769 - DNA, 743 bp, Homo Sapiens
  misc_feature (488)..(675): n is a, c, g, or t
  misc_feature (685)..(698): n is a, c, g, or t
gggctggttgtggagtgcttatccttgacaggtatggggccaggtgagggcaggggacaaggtgcagctgaggccgagcccaactaggtcctgggcacccctgcaggtgggagtggtccttgtcctcctggtatccagcagctgggaaaggaaggaaagtgaccccactttcactcctgcacagcccactggttaccaaaaccaccgtgcaagtcgggatgacagcagggacttctggccaggtgggaaaggtgcctggaagcgggatgcgcctgtgcgtctcttggccatgatgttcttgtgggcatgttattcttggtgctgcctggggtgttgctgagcggacaggctctccagctggagtccatggagaggccagaggctggcggccctgcctgggccttcggagcctcctgcctgcaccctccacctcttctaaaccatgatgtggcacattttggtgttaataaaacacaacacacaaagtnnnnnnnnnnnnnnnnnnnnnnnnnnnnnnnnnnnnnnnnnnnnnnnnnnnnnnnnnnnnnnnnnnnnnnnnnnnnnnnnnnnnnnnnnnnnnnnnnnnnnnnnnnnnnnnnnnnnnnnnnnnnnnnnnnnnnnnnnnnnnnnnnnnnnnnnnnnnnnnnnnnnnnnnnnnnnnnnnnnnnnnnnnnnatttgggggnnnnnnnnnnnnnngaaaaattttttaaaacattttttggggggcggggcccccaaggg

SEQ ID NO: 3770 - DNA, 560 bp, Homo Sapiens
gctgactctagaggataaacagcctcgctggcgctgcacaggtggctggactgtcccaccttctgtggacagagccacttggtgctgcgaccatccaggcaggggtatccgtgcgtaattcagggaaggaggaaacagctatggggtggggattatgtgtggccctggcttaaaaacaggggtggagaaacctgaccgggcgtgggcacatgtacctagtgggctagtgaaggtgggcgccaccccgggggctctaccagccagtgtctgtactggggaagcggggctgaaaaacccctccttccatgaaagcactcctgacgtgcgccttcctggtcacaccggtgccgcctttctttcccgaggggctgtgctgacattgttcccgagagcacctcgggccagcggacaggtgggctgggctgccagagcctgagttcagcgcagaccacagccccttgcctctcccatgtttgcagtgacctgagggtggacagccagaagcagaggcacccgtccggcggcgtctctgtgtcttccgagaaggtctttgagctaga

SEQ ID NO: 3771 - DNA, 1024 bp, Homo Sapiens
gagagtggctgccactcggagaaggagaagcagatcgtcctgaactgcagccggctgctcacccgcgtgctgccctacatctttgaggaccccgactggaggggcttcttctggtccacagtgcccggggcagggcgaggagggcagggagaagaggatgatgagcatgccaggcccctggccgagtccctgctcctggccattgctgacctgctcttctgcccggacttcacggttcagagccaccggaggagcactgtgtgactcggcagaggacgtccactccctgtgacagctgtgaatacatctggggaggctggtgtgggcttcgctcactccccccagcctaactacatccatcgatatgaaccggatggagctgcgttgaaactgctgctgacatgcttctccgaggccatgtacctgccccccagctccggaaagtggcagcaccaacccagtgggttcagttcttatgttccacaggagaacagacatgccctgcccctcttcacctccctcctcaagcaccgatgtgtgcctatgaccctgtgggctacagggatcccctacaaccacctgctcttctctgactaccgggaacccctggtgtgaggaggctgcccaggtgctacattgtcactttggaccacgacaagtgccagcagtgccagccccactgtggacggttaccaccactggcaccggcatggatgatgccgatcctccaggccctgagaacctgttatgtgaactacctgtcccgcatccatcgtgaggaggacttccaagtacatcctcaaggggtatagccccgggtgcttgtccaacccccatgcgtccagaacctaccatgcctaactccaccaaggaagatccagtttcccaccaggactgcaagttctctatcggaaagctcagcgaacttctccaagaaattctcttgttcgtggcttaagagcagcgacgccttacatctgttcccatcccttttcccaggagccgggcgacaaactgggaggca

SEQ ID NO: 3772 - DNA, 928 bp, Homo Sapiens
attggaagtggatggacatttgttaccatgcagatttgggacacggcaggtcaggagcgattccgaagcctgaggacaccattttacagaggttctgactgctgcctgcttacttttagtgtcgatgattcacaaagcttccagaacttaagtaactggaagaaagaattcatatattatgcagatgtgaaagagcctgagagctttccttttgtgattctgggtaacaagattgacataagcgaacggcaggtgtctacagaagaagcccaagcttggtgcagggacaacggcgactatccttattttgaaacaagtgcaaaagatgccacaaatgtggcagcagcctttgaggaagcggttcgaagagttcttgctaccgaggataggtcagatcatttgattcagacagacacagtcaatcttcaccgaaagcccaagcctagctcatcttgctgttgattgttagattgttgatgcattctaaccaactcacacatatacacaaaatcaacatggggatggagaagagaattagcgtttgcagcagtgtatcatctactaataaaattaaactaatgttgctgcttcattagttggtgggagaagggacacatccactcttggaggaatatatttactcaataatggcaccttacatttataaattgtaacagttgtctaataacgtttctttaatttaaatatgtaagttgcagagctaataaatgaaatgaccaagactttaattataataaaaataagaaacttgactattctagaagttatacttggatttcatcctggggaaaatggagaactactttttatatgtgtatgtttttatgcaattagcattgtattcttggttcagggaaatactttcctaaagcaataatgttagatattaaagattaaaatctaatgt

SEQ ID NO: 3773 - DNA, 276 bp, Homo Sapiens
ctctagaggatcgcttggtgctcatcccccatgtgggtgatcagtttcttcatctcgcttgtgttaacgagcagtcccaatcatacaccgacttccggcagggctctggaggcaaacatctgcttgactcgggaaggccggcacatgaccccagggctgtcgctcagcatgaagatcagttcatcgacgtcctggggtccgaaggtccagtttttactagttggcaaggaaatcagtttagccctttcagtgactggagcattttcatcgatgttt

SEQ ID NO: 3774 - DNA, 489 bp, Homo Sapiens
  misc_feature (80)..(80): n is a, c, g, or t
gcattccttccacagaaaggaaggctcacaagctttatggctgtcccagctcttgctgcatctctggaataaatgccgtntgaacttaattgccctactgaaaaacactgcttttcagtatacaacttattctgcactaatagaaaaggttaacagctccttgccaaaaagccaagattcatctgcaacaacccagactacaaggcaatataaaactttttttcaatagtcttttgcactaatttttttggcataattaaaagttgtacacatttttcaactgttttaccatctaagttaccaaaacacaaaatggccaatgtaattatccgcctaccaaagtcctgattttcagtacttcaaaataaaactcatttcaaaatgtcaataaaaacagcactacccatttaaaagagacagaaatagtccttttcctagttagtctatgtaaatctaagaaacatttgtcatcagctatcaaaaacaatg

SEQ ID NO: 3775 - DNA, 1761 bp, Homo Sapiens
ctgctgatatttgttggtgaacgacccctccaagccacactgcccccacagcagctccacgaccaagcgcccggccgtcactgtgcccgggggcggtaaaacgaccccacacaaggactgcaccccatctcccctctgccagctcatcaaggacagcctgtttgcccagtgccacgcactggtgcccccgcagcactactacgatgcctgcgtgttcgacagctgcttcatgccgggctcgagcctggagtgcgccagtctgcaggcctacgcagccctctgtgcccagcagaacatctgcctcgactggcggaaccacacgcatggggcctgcttggtggagtgcccatctcacagggagtaccaggcctgtggccctgcagaagagcccacgtgcaaatccagctcctcccagcagaacaacacagtcctggtggaaggctgcttctgtcctgagggcaccatgaactacgctcctggctttgatgtctgcgtgaagacctgcggctgtgtgggacctgacaatgtgcccagagagtttggggagcacttcgagttcgactgcaagaactgtgtctgcctggagggtggaagtggcatcatctgccaacccaagaggtgcagccagaagcccgttacccactgcgtggaagacggcacctacctcgccacggaggtcaaccctgccgacacctgctgcaacattaccgtctgcaagtgcaacaccagcctgtgcaaagagaagccctccgtgtgcccgctgggattcgaagtgaagagcaagatggtgcctggaaggtgctgtcctttctactggtgtgagtccaagggggtgtgtgttcacgggaatgctgagtaccagcccggttctccagtttattcctccaagtgccaggactgcgtgtgcacggacaaggtggacaacaacaccctgctcaacgtcatcgcctgcacccacgtgccctgcaacacctcctgcagccctggcttcgaactcatggaggcccccggggagtgctgtaagaagtgtgaacagacgcactgtatcatcaaacggcccgacaaccagcacgtcatcctgaagcccggggacttcaagagcgacccgaagaacaactgcacattcttcagctgcgtgaagatccacaaccagctcatctcgtccgtctccaacatcacctgccccaactttgatgccagcatttgcatcccgggctccatcacattcatgcccaatggatgctgcaagacctgcacccctcgcaatgagaccagggtgccctgctccaccgtccccgtcaccacggaggtttcgtacgccggctgcaccaagaccgtcctcatgaatcattgctccgggtcctgcgggacatttgtcatgtactcggccaaggcccaggccctggaccacagctgctcctgctgcaaagaggagaaaaccagccagcgtgaggtggtcctgagctgccccaatggcggctcgctgacacacacctacacccacatcgagagctgccagtgccaggacaccgtctgcgggctccccaccggcacctcccgccgggcccggcgctcccctaggcatctggggagcgggtgagcggggtgggcacagcccccttcactgccctcgacagctttacctcccccggaccctctgagcctcctaagctcggcttcctctcttcagatatttattgtctgagtctttgttcagtccttgctttccaataataaactcagggggacatgctaaaaaaa

SEQ ID NO: 3776 - DNA, 554 bp, Homo Sapiens
aagcgtcgtgcacatggtcatgagaagatgattcctgtgatgcttcttcatccattggtttattaacccatgtgaggaatttttctaccttactcagaattttgctttgtcttgaaaaatggtttttctgactctttggtaaagaagatgtgtttgtttttcatctttatttgtctgcgcatgtctaggtacttagacttaagcttcacattcttctctaaatacctgacctgccgatgactgaaatttgggattccaccatatttttgtcctgagccatacttgaatcctagaagggaaccactgtcatcaaagtctgaagctgggttttcatcaatgtccagttcatggctcctcttcagtttgcttggcttatgctcaggtgggtcttcctcactttcatctccatcagtaccactggcatgtggtctgtctttgcttgtgtttgctcctgaagacttctgtgaatctaaagaggcagaaatactgcagtagcttttcccccttggtttgacaacttttctgctatttgcaaagccaatgaaaatatttta

SEQ ID NO: 3777 - DNA, 474 bp, Homo Sapiens
gatgctggccccaggcaacctgcgctgcaagcctcagaaccctgctctggcctcctgttagcttctttgtcaggtttaagacacaggtctctactgtcagggcactctgggcactcaggaaaccctgtcgcccaggggttgtgtctctctgctgctgttggtggtaggatggggggtacaagagcgggctcgttcctcaccgtaatgaccacatactcagactcctccacctctcctttctccaaggctgttatgatcttgctcccatttaaaacttggtcaccttcaccatgattgccactccaggtcagctggttctcttgtagctcagagcaacggagaaagtaggtcaggacataaagtattcgctggactaagtccttctgcttccctaccactacggtgcgagtcagtctcactaaaaaagcctatggctccgtaaagatcccctagagagcagaaggtcgacggggg

SEQ ID NO: 3778 - DNA, 242 bp, Homo Sapiens
tccagctgtgtgggacaggtcagcacttatcaccccgcacctgtctctccaggacattccacagccgtgctcagtctgcctggctcccagcaacacctctcaggcacagatgatttgtaccatgcctctactcagggccacacatcacttgctcactagacaccatccactcttcctggactttattccaacagctcttccctctgttctctctctcatctcaaaccgttaattgtaccacc

SEQ ID NO: 3779 - DNA, 449 bp, Homo Sapiens
ttggtggaaaagggtggccactccacaggatagaggacatgttggtctcagaggaagggcacgactctactacctgagcatgggtatcctcagggtcctcccccggcaggtggcctgagtcactgtctgagttggctggtggacctggatcccggggcttggatgctgtcttcttggtggggccagccagagttctgcactgacatttgtggcaaagcctgcttccttcctcttctgtccttcaggtcaggtttcctgtggaaggtggccaggatgggctgttcacaccatggagtagccactaacagcactgcccctgctccaggcagcaagaaaggagggggcgtctggggccccaggcagggacttgcaccctcttccactttggctctagtttgcatagaattgtccaacacagaaacaacactcaggggggatggagcacccat

SEQ ID NO: 3780 - DNA, 532 bp, Homo Sapiens
  misc_feature (388)..(388): n is a, c, g, or t
  misc_feature (512)..(512): n is a, c, g, or t
ccaattaggaggaatctagagaagtggtctggccacagccactttgccacgcccagcccagacttcccagcctcagcactgtcaggggaaaactgcctattcaagcctcagtaatggcggatgcccctcccgcaaccaagcttgatcatatcaggtggacttcagactgctgtgcttgcaccaaaatttcaagctagtggaccttagcttgctgggtttcatgggagttggacccgccgagcaagaccacttggctccctggcttcagccccctttccaggggagcaaacggttctgtctcactctcgttccaggcgccactggggtatgaaacagccacacagttttgtgcttgaaactcagggccctggtggtttaggcacacggnggaatctcctgatctacagattgcagaaaccgtgggaaaagcatagtaaccagtccctcacagctttccttggctgtgggagggagttccctgactccttgcacttcctgggtaaagcgacacnccaccctacttctgttcatc

SEQ ID NO: 3781 - DNA, 474 bp, Homo Sapiens
cttcaaggcccaccgtgtggtgcaccatggtgttcagcagctgggtcacctcacccgactgcagcttgtcaaagtagatggtggcacccacaatctggtccccctccttgaccaccccagtgcgggccgcaggggagttctgcgtcacctcctgcacaaacacacagtcgtccctctgggcgatggtcagcccgtgggagccactaccctgccagttgggcagcagcagctcccgggttgtctcctccttctccatctttgcaggattccgctcaggagcgaatgccttgccaggagcccgcccctccttcctctcttcccctcagtctctctcgtcgggaatctcggtcacaacctgagggctcagccccagggcacggccatagccggcgcgaggcccaaggctgcggtgctgcggctactggcggcgacgagccccgttccgggcgggtctggcagagaggggcggagcag

SEQ ID NO: 3782 - DNA, 557 bp, Homo Sapiens
  misc_feature (485)..(505): n is a, c, g, or t
tggactggcttggtgccttggtccatgttgcatgtgttgtgcaaatgcctttcaaccctcaaacagagtgagatagatagggtagaaattctcctactgaaataagaagcctaaaaaggcctccctttggaaatgggaggtctctatgggatccctgaggaaggagagtggataaagtagtgaatgctgggtagttcacttcccattggttaagctaacagcccacttttatgtttccagagaaattggatggccacagctagcatggcattctagctccttcttgaaagttgattcaatcatggcatttctgtcactggctggctctccaaagtaagaactgttgttaagtgcaggaatgcttttagactataggctgcaacttccagagagaaatccacaaatctgagcctccttcactccagcttttatttcagtgactttagaataattattgatttaactgttttgggaggaaaatagannnnnnnnnnnnnnnnnnnnnaaatggatgtcttttaaaaaacataacaaactcatgttccagacaccgtcga

SEQ ID NO: 3783 - DNA, 619 bp, Homo Sapiens
ggcgggtgctgggaaccgagcctcggcttgcggccggcagtttccctgggtctgtgaagaggtcggcgccccctccgggcgccagtcagcctttaagaaaaagtagagatcacttctgactgtactgaacagcaaaaattaagtgacttgctgccctgcacatcatggcactgccattccgtaaggacttagaaaagtacaaagaccttgatgaagatgagctccttgggaatctgtcagaaacagaactgaaacaactggaaactgttttggatgatcttgaccccgagaatgcccttctgcctgcagggttccggcagaagaaccagacatcaaagtccaccacagggccatttgatagagagcatctcctttcatatctggagaaagaagcataggagcataaagacagggaagactatgtgccctacactggagaaaaaaaagggaaaatatttatccccacacacgaaacctgtacagacttttacagaagaaaaagtgtctcttgatccagaattagaagaagctttgacagtgcttctgatacagaattgtgtgacctcgcagcattcttgggatgcaccattgataacgatacaagttccgttgagcctcg

SEQ ID NO: 3784 - DNA, 598 bp, Homo Sapiens
ggggaaagagggggagaggaagagtgctgtgcaggtagtgagcgctgtgcgaagctgcaggaaagtggttgtaggagaggagaaggtcgtcaggagcatgtttgagtggttaggagcgagacacctgccagctgttatgtatgggcttcctttttggaaacttatgaacttgctatgtgagcttctgcaaattggttcaaaagcacatttaaggagttgataatttaagactatatgaatcagaattttaacactccattaaaataagagctgaaatttttggcatttatcttcagaacaccgtcgaaggtgttctgaaatggagatggggaccaaatgctgaagggggatggggagcacggaggatgtggggaagcttcaggagggaatggaacagtgaactggttctacaaggatgactaggaatttttcctgtggaactgagggaagaaagtacattatggtcagaataggatgtataaaggcaaagaaacacaaaagaatatgttgttactgggccaaagagtccatgtggcagaagctttgggtatatgacaggaggcagcgtttgagagaaagatggcctgaggtgggacta

SEQ ID NO: 3785 - DNA, 302 bp, Homo Sapiens
aaggatcccccttcgacggtgtctgagtgtctatgtgagggcaaggacaacagtgcagtccagaaacacagaaaatatgctttttgcagctgagctctgttttgagatttcattttgttactggacagcgcttaatccataccaaagtctttggaacactgcagatttgctttagaggtagataaaacagaaatcatgcagttaagtcaattgagaaaaacaaagggatttgtagtctttacagaacatcatgactacaagttgatcctttgctcttggtgcacatttacagatttttacct

SEQ ID NO: 3786 - DNA, 604 bp, Homo Sapiens
  misc_feature (130)..(130): n is a, c, g, or t
  misc_feature (166)..(403): n is a, c, g, or t
  misc_feature (432)..(440): n is a, c, g, or t
cactaaaaacaaaaagtaaaaacagggcttcatgaagaaatggctcattccatgtctcacacagcacaagtagcagataagcctggaacctcttgtcaggcagatagcaaggactcaggaggcagattanagaggcttccaatggccaggtgcagtggctcacacnnnnnnnnnnnnnnnnnnnnnnnnnnnnnnnnnnnnnnnnnnnnnnnnnnnnnnnnnnnnnnnnnnnnnnnnnnnnnnnnnnnnnnnnnnnnnnnnnnnnnnnnnnnnnnnnnnnnnnnnnnnnnnnnnnnnnnnnnnnnnnnnnnnnnnnnnnnnnnnnnnnnnnnnnnnnnnnnnnnnnnnnnnnnnnnnnnnnnnnnnnnnnnnnnnnnnnnnnnnnnnnnnnnnnnnnnnnnnntgacaaagggaaactccatcttggggggnnnnnnnnngtttaagaagcacaatgttgaatcctctctttcatcttgtgaagctggtttaacaccacccctcccctactccaaagaatggtagtgtattttccaccagtgatttttgttttctcaagaaataaaacaactgaaagatggggttattgtataaaatgataaca

SEQ ID NO: 3787 - DNA, 461 bp, Homo Sapiens
ctgtacagaattttcatcatgggatagttttttcaagaaacacatcatagaacgtatgatctacggatcaccattaaagttatccatggtttgcctaaacagcttcctgattcattacgagaatattccccaaacaagaaaaatgaaacatactttaagtacctggaaaggatctgttttttgaaaagcatacacccaagttttacttttgaaatcctaaggtcttggttttgaaaaccccaggcgctaaggaaattacatgttttaaaatcctaaaggttggggaattaatattctaaacttcaaatttgtgaataatcatgacgttatgggcaaatacatataaataaacatataaccagaacacgtctttcccctttatccaatggaaatacgatcaagcatcactcttagcagaagataccagacacttgtagggacacgaaaagcgatataaaaca

SEQ ID NO: 3788 - DNA, 357 bp, Homo Sapiens
gagtactcactaagcatacactacgacatgatatcttctgtatgtatacgtcataaaggagggaataatattagaggactgtcttccattgcacattcaaagtctatttattcaagctcttcatgtgctacatttacatcatcaatagagccattttagataacctagcaattttctaagccacatcatttcaaaatgtcacagaagttggttaagataaactactttatgaatctgtggataatgtcattatgggaagtttatcttaagccacaagtaccctttggcataaaattacgacaaacgattctttcattggtcctgtaagtgaaattgaatactagtattattaaaaat

SEQ ID NO: 3789 - DNA, 355 bp, Homo Sapiens
tggtgtctggagccaggagtatgccttagacatttgcccttcttcctgcctcctccatccgttcacttgaaactgtagagacttaaacagtttgataccaaattctggtattgaaactaaaatccttcccaggagacaaaactttaacttcacttcctatgaaaaattaccctttgtgaaatataatttgaactctggccagtgctttgattgaactcgggccagctccttgcattattgtaggaagccataatgtctaaagatatttattgtctgcaccttcacagttcactgaccttcagtattcttcctgaacttagccttgtatgtaatgttactcagaacaccgtagaag

SEQ ID NO: 3790 - DNA, 295 bp, Homo Sapiens
aattgccaaaccaaaatggcatttggaaaagaaaaccaaattcaccgtgaatggaatccagtgaagaaatgctaatctagttagtgggtgggctttggttgtcatggaaactcagctctgtcatcctgtgttgttactaggcaggagccagccaggtcattccataaatcatttctgtcatagctgacggtgatgcattccatctgctccatcactgcatgccatagtctgcacatttcaaatcccttccttcaatccatctgcttccccacttcccagcagaacaccgtcgaag

SEQ ID NO: 3791 - DNA, 872 bp, Homo Sapiens
ggggagtcctgagctgcgtcccggagcccacggtggtcatggctgccagagcgctctgcatgctggggctggtcctggccttgctgtcctccagctctgctgaggagtacgtgggcctgtctgcaaaccagtgtgccgtgccagccaaggacagggtggactgcggctacccccatgtcacccccaaggagtgcaacaaccggggctgctgctttgactccaggatccctggagtgccttggtgtttcaagcccctgcaggaagcagaatgcaccttctgaggcacctccagctgcccccggccgggggatgcgaggctcggagcacccttgcccggctgtgattgctgccaggcactgttcatctcagcttttctgtccctttgctcccggcaagcgcttctgctgaaagttcatatctggagcctgatgtcttaacgaataaaggtcccatgctccacccgaggacagttcttcgtgcctgagactttctgaggttgtgctttatttctgctgcgtcgtgggagagggcgggagggtgtcaggggagagtctgcccaggcctcaagggcaggaaaagactccctaaggagctgcagtgcatgcaaggatattttgaatccagactggcacccacgtcacaggaaagcctaggaacactgtaagtgccgcttcctcgggaaagcagaaaaaatacatttcaggtagaagttttcaaaaatcacaagtctttcttggtgaagacagcaagccaataaaactgtcttccaaagtggtcctttatttcacaaccactctcgctactgttcaatacttgtactattcctgggttttgtttctttgtacagtaaacattatgaacaaacaggcaaa

SEQ ID NO: 3792 - DNA, 274 bp, Homo Sapiens
ttcgagctcggtatcccatgggtgctccatcccccctggccagcaccagcccaggcgcctgttaggttttagttcactcactcctctctgcaaccccataggatacgagttaccgattctatgtcacaaattggaagagtgaggctcagagaggcaaggccacttgcccaatgtctcacagtggctcagtgtcgaggcaaggcctgtgtatcttccccattcccagaacctgctggaagtcaagggcagcacttcaggccccagctctgccccg

SEQ ID NO: 3793 - DNA, 948 bp, Homo Sapiens
agcaacagaggtgcttgcccagtgtctctggaggggcttcccttagaggtgggcagtgtgatcccctgccaggagggggcgatgggggccacttgttcattaacgatgttaggctcaaggtaactgaactttttttgcacatgcctctctgcagagagttgtgcataaacacaccgctcggcaggacagagcaagattgggaactgagggcaaatcccttcctccgtgcgtcgaactcttgatcccaggccttaaaagtgggatctctgcactctgggctttctctagcttccccagggaagggaggctcggggtgaggtgggcacggggcatctttcctgcccaactgtgaagtcctaaaaagcttcacaaagtttctattgaatgacagctttcttcttctctttctccagggttgagttccagaataaattctacagcgggaccggtttcaagttcttacccttctccttcgagcatattcgggaagggaagtttgaagagtgagtccctgtgagggccgtgtgccccatgctaccctccccgcctccctccacagtgatcagctgtgcctctctgcctgttggttgtgatctgtgggcaccagctcattcgtgtcaccctgtctgtgagtcatttagatagaatagtcctccttgggtctcccaccacccctagctttgtgtgtagtgtagtgattttctggctgtcactcatactcactgggcaccagccttgccctcttagcctccatccatccagacagcccttcccacctcctggtggtgagccagtctgcattcccacgccatcccaaagccctttcatcttacccgtgcattgtagatggaaggagcacccatgccattcacatctagactttgagtttcctgcatctgccaccgtagtttctagcaggagtagtggggggagtaatacagattcttc

SEQ ID NO: 3794 - DNA, 411 bp, Homo Sapiens
atgttttgaatctttgtaaaaattgatattctgtataacagagtgcctctctgttacttttggcctatgttgttagaaataagatgctatcttgcatagttagaattaagcgtttgtccatctctagataacattgaaaagtttgagtgttacaggctctaaagtgcaatggagaacaattgcttaggaggaggaaggggaaagtatacttatgttggtgtgtaagcatgcatggaggcctcgaggcaccacaacaaggccaggttcttagcacatcctctgttctctacctgtcatgcttcaagagttccagctggcctgctgtgaagccagtagctattttaaaagtgctggctgcaggattaagccaaccctttacaactggcccagaccgtaatggccatttcttct

SEQ ID NO: 3795 - DNA, 493 bp, Homo Sapiens
ttgctggtgatatagtgcatgattgttcatcagcatgtgtcgtctgaggccagtgcttgagttggggcatcctggcacagcctcatgccctctcctcccgcacccttcgctccaccctcctagccatctggtgctccctagctcgcggaccccgcttcacgtgagcttccttacagatggctgtttccctgtagattccagaagtcctgcagtctagctggatgactgtttcgtgctccccaaaagacatttcccagagttgtgccatctacccatccccaattcacttgtatcttcctcattgtttacctgtaacagtattattggtcacctcaacaggtgagaggaaaagccaacatacagggctccagaccctcactccaaccccagttgttacaaaatttattttctatagtggacttcacatgtaatttttatccaacaaagtattcaattgaatggaagcaggaaattgaaatcactatatacagct

SEQ ID NO: 3796 - DNA, 322 bp, Homo Sapiens
catccctggaggtgattggcttgtgtggacatgctgcttggatggatctggcgaccaggcgctgcgctgcttcggtccccacagcacccactccttccagcccagagcgccgaatgtagtgctctggaccgtgcctctgggccacacgggcaatgacaccaccgcggccgccgcctctcacccaacgcactacgacgccctcatcctcgtcacccctgggtgccccaactgagaaggactgggcccaggtccaggccttgctgctaccagatgcgcctcttgtctgcgtgcgcacaagacggcgagggcgaggatccggagt

SEQ ID NO: 3797 - DNA, 1083 bp, Homo Sapiens
  misc_feature (938)..(959): n is a, c, g, or t
gccttatcattcattcttagctcttaattgttcattttgagctgaaatgctgcattttaattttaaccaaaacatgtctcctatatcctggtttttgtagccttcctccacatcctttctaaacaagattttaaagacatgtaggtgtttgttcatctgtaactctaaaagatcctttttaaattcagtcctaagaaagaggagtgcttgtcccctaagagtgtttaatggcaaggcagccctgtctgaaggacacttcctgcctaagggagagtggtatttgcagactagaattctagtgctgctgaagatgaatcaatgggaaatactactcctgtaattcctacctccctgcaaccaactacaaccaagctctctgcatctactcccaagtatggggttcaagagagtaatgggtttcatatttcttatcaccacagtaagttcctactaggcaaaatgagagggcagtgtttcctttttggtacttattactgctaagtatttcccagcacatgaaaccttattttttcccaaagccagaaccagatgagtaaaggagtaagaaccttgcctgaacatccttccttcccacccatcgctgtgtgttagttcccaacatcgaatgtgtacaacttaagttggtcctttacactcaggctttcactatttcctttaaaatgaggatgattattttcaaggccctcagcatatttgtatagttgcttgcctgatataaatgcaatattaatgcctttaaagtatgaatctatgccaaagatcacttgttgttttactaaagaaagattacttagaggaaataagaaaaatcatgtttgctctcccggttcttccagtggtttgagacactggtttacactttatgccggatgtgcttttctccaatatcagtgctcgagacacagtgaagcaaattnnnnnnnnnnnnnnnnnnnnnntccctgaatgatgattagagacatcaccgctaaaaaactacatttataagctaggatttgttatatgcaaatattttctgcctcttcttttgttctgtttaaaacaataaaatgcatttgtata

SEQ ID NO: 3798 - DNA, 769 bp, Homo Sapiens
  misc_feature (68)..(68): n is a, c, g, or t
  misc_feature (78)..(96): n is a, c, g, or t
tcccggtgtctgtcacatgaagatgaaaagttctcccctcattttaaacttcagattctatatggaanacagcaattnnnnnnnnnnnnnnnnnnngatgagtttatgaatacaaaaccattttagaaaaattcgtgaacccaataaattcaaaataaatgattgtcaaacctatttaaagtactgattctagaagtctgaggcatgcatttggacccaatgtttataaatcctggtccctgtttgaaaatggccatggacactcattgttatttaatatgggagccaaagaaacactgtgataactcttctattaacaacctcatgaacgtcttctgaagttgatttccatactgtattgccaatgggtgtcttcaaacatccctatcccatcataaggaagcaggctgtttttagagggttcagttaatagttccaatacagaaggtggagagtgcatctggcagacagaatgtgccataaatcctcactaatggctagaacagcaggtcctccaaatggaggcggaataaggatggaactgccaaggacccatggggccattcagcaagacgcaaaggggaaaaacaagcattgcagctccctaatgagagatggcagcagaggaaaaagcccttcctaatgaaaacctgtccaaggagtaagcatgcctggtagcggccaattcccattttttgtgcaagacacaagaataaaccagctgcatcaggaatgtacaatctaatctgaccagcagaacaccgtcgaa

SEQ ID NO: 3799 - DNA, 343 bp, Homo Sapiens
  misc_feature (134)..(134): n is a, c, g, or t
  misc_feature (224)..(224): n is a, c, g, or t
tattttctggaagaaattatatacagttgctattaattgttttttagacatttgctacaattcttcattgaaatcatttgggcctagagatgggggagagccaaattacaaattcaatttccttaaaaataatnagagcgtattcaaattatccatttgatagttaagttgtggtagtttgtgcttttcaaaaaattggtccatctcatctcagtcatgaaatntgatatgcgcagagttgttcagagtattattcccctagacgtttttggtatctgcatggtgacatcaacagtgacagcctccattttattttttatattaataattgtatctatttttt

SEQ ID NO: 3800 - DNA, 591 bp, Homo Sapiens
atagcaatgcacagttacaggaaacgctaaagtagaaagtgtgagagctgttggagcatgtctgtgaggattaagttcctgggatgagcacagtggtgtcactgggcctcacaaagagaacaaactgtagctttgaaaagtgctgaaccatgaaatatattttagatttaaatttggaataacaggaatagtaaaagaataggatcaccacttggacatgatggtgtgataggatagatatggagaaaagaaagaccaattcacatcttcatttacttctatttttttctttctagaagagctaataatcttcaaattgggacagggaggacaagacatatgaatatgaacaactaattaattcctaaggtagatgaggagaaaatagaaggtctaggcactgtcactgccccagacacagatgtagaacttcttaggtattaaagaatgtgaagatttggccctggaaatggtggagttctgcaggcacttatggagcttaagaagaatctgaggatggagaggtattgagattttcaacaaaggtaccaagattttcggaaagtcagaacaccgtcgcaagggtaccga

SEQ ID NO: 3801 - DNA, 571 bp, Homo Sapiens
cgaggattacttcgacggtgtctggataagggactgactttaatatttttgaggatttaatcagtattggaatagtttttggatcttgaaatgttctgatgtcaccgctcttgtcttgtgtgtcaattccagaattagtaatacggcaattaagtagttaaactgttagttcatcacattactcttaagctttatcaattcggtgaagatcaaaagtactgattttttttaaagtagtacgttgctagattttacgtgactgttgatactaaggtactgaaaaataggctgctaccatagagtacaaataagccactgataagaatcgttagattctttctcctttttcaacgtatgttggtaatattggggacttaacaaggaggatacaatgtgacgagcagtcttttctgtgactctgactgtgtttggaggccttttccttcagatcagtaatgctgatgtgtaattattagcagttcggggtgctcaaagttactgcgttggatgagtctgaagtggagttccacttaggtaagggcattattcaggtcactaaattttttcacac

SEQ ID NO: 3802 - DNA, 644 bp, Homo Sapiens
  misc_feature (101)..(101): n is a, c, g, or t
atcatttttcagaaactgcagaaattagacctagtacacaggggccccccacccctgtttccagatgccttctagaaagaggactgggagtgtgaatgagnccatgtgggctttgtttgaccctgtggttgtcatgacaatttctcaaagcttagctgggacaggaagaagaaaggggagaataccggtgtgttcagtgtgtgagctcctaaaagctcttgggtcactgttcccaggggatgatgaccctctatggcagatcagttgcaatgtgcaatatgagctttccctgcctcccgtgggttagcatgttccacactcaccttctcaaagcaaagtctcccttaggggacccttggtatcctgttcatctgccaaatctcagcaccaatagaaacaccatagaacatggattcatcaaaggaaaaatgttgaagtttccatttttatgcttcctggtaatccttcagcccttgatggaaatttccagacctaaaccagtgaattaagagtatggggaagaggagccctcatacagttctgttaaatggtccttgaatattcttcttcagagtgacgggtaccccttgcctatacattttcaaaatctacactaacttccaaacatttctatcagaacacct

SEQ ID NO: 3803 - DNA, 260 bp, Homo Sapiens
  misc_feature (188)..(188): n is a, c, g, or t
  misc_feature (225)..(225): n is a, c, g, or t
ttcgacggtgtctgcagttcactagaacacatttccaccctacctggtgaaaaaatagaggcacagggcagggagagctctccccgaagtcagccgcgctctagagacagcaaggagggcagggcacagccgatggggctgggaagtcgattccatcttccgacctgccagcatcatgatttcataancaggcacagatatgcctcagaacgcagatttgagcancagtggctcaatgccttgttaatcccaagcacaat

SEQ ID NO: 3804 - DNA, 520 bp, Homo Sapiens
tgagcactgcgtatgtacgactcagagaattctttatgtatactgtggtgagagactgtttacccgtggtgaactaacattaggtttctttaaatctgctattgaaacgcagagtggccatttgtaactttaggagcataagagctgggttcatgatgtaagtgaacagaggactacccttaaagttatttcccaaggccctgggaatgcgattctcttagtttatttgttacaagggagtgttttgtacattggtagaggaaaatactatgaaacaaaatcaaacaaaaacatcattacattttaaaatcattttgcaacactgagcaggtatgaatttggtactttgcttgtaattggaaaactggaaagttgaaaatttaagtatggatattgtgatttccaatttttagaagatgtatagtatataatgcagtttgcatttgatgttagaaagaatagcatctcaagggaaaacaaaaatgctttccgttccagacgccgtcgaaggggatcctaa

SEQ ID NO: 3805 - DNA, 495 bp, Homo Sapiens
ccccttcgacggtgttctgtaaagcaaatgctacggagacgtaaattgccaattaaactaaagagcttctacatagcaaaacaaaccatcatcagagtaaacagacaacctacagaatgggagaaaatttttacaaactatgcatccaacaatagtctagcagccagaatctgtaagaaactaacaactaaacaaggaaaaaacaaccccattaaaaagtggccaaaagacatggacatacaagcagccaacaaacatgacaaaacgctcaacataactcatcattagagaaatgcaaatcaaaaccacaatgagataccatctcacagacagtcagaatggctattattaaaaagtcaaaacacaacagatactggcggggctgtagagaaaaggaaatgcttgtaccctgctggtgggaatgtaaagtaatgcagccactgtggaaagcagtttggagatttctcaaagaacttaaaccagaacaccgtcgaa

SEQ ID NO: 3806 - DNA, 1071 bp, Homo Sapiens
  misc_feature (730)..(730): n is a, c, g, or t
  misc_feature (776)..(776): n is a, c, g, or t
gtttccgggatcgccgctccgccgggacgctttcgccggggcgcgcggtgcttggctgcggtgctcacactcatgaggagccggaagtcacaggtgggatgagagcagaaagggaagcactgctgtcctgcctctcctgggaagacaccccgctgcctgggagctggggaggtggccctgtgttcttggctgcagcaggatggagctcaagtgccacagactctccatgtccttaccaaatgtatgtaggtgttctggagcaagtgtttcttcatttgctgggtgcccatagcaccatttccaaaggctctctaaatggctgttttgggactgctcattactctctgagaaggtcagtgaagctcctcgagccatcatgttgaagtcagtctcggccagcccttttggagaaaccatgtttgtgcttctgacataccagttattaaacaatctactggaatgaggagaatctcaatgatgagaaagtctttcctttttttggactgtgggagcagtccaagctgcccagctgcagagcaggaatctgcaagtgagactgtgaccaattcttgacattttggagttgacaccttggaggtggttaatccatgacgaaactgaagctaaaccgatctcatgttttgactcctgtcaatccggagaggacagcaaatggcctgctcaggtgtctgttaacagccagcgcttccagcccagcagatcatctggncttttctctgcagaagggggcaaaaaggtcaccctgatgaaactgntgcacgcgaaaagttcaagaaccactgctgccaagatgctgacagaagccttgagaagcacctgctgccgggaaagacgtgcaggcgtaaaacacagagcgggtggcagcgtccttccgttcaatccccacctcaggcggattggtggggggtcatatcttaaggctcccggggtgcagtgcggggtcttcgggccggctttaaagcccacgaaaatttgttctcggaaggccaggttgggccctcttgccccaggacaaattgctgggttctcccgttcttgccacaacaaaac

SEQ ID NO: 3807 - DNA, 978 bp, Homo Sapiens
  misc_feature (922)..(931): n is a, c, g, or t
gcggaggtgattccacactgaggcgagcgcggcggccggggtggtagtggcagtgttcgtgtgctcaggtctgaatcgccgagggaggaggcggtggaggaagaggtggcggcggtggcggtggtcgtagcggtggcggaggaggcgggtacgaatcagctgcgggcggagacatggccaacatcgcggtgcagcgaatcaagcgggagttcaaggaggtgctgaagagcgaggagacgagcaaaaatcaaattaaagtagatcttgtagatgagaattttacagaattaagaggagaaatcagcaggaccctcccagacacaccatatgaaggaaggaagataccaactagagataaaaataccagaaaacatacccatttaattccccctaaggtccggtttatcactaaaatatggcatcctaatattagttccgtcacaggggctatttgtttggatatcctgaaagatcaatgggcagctgcaatgactctccgcacggtattattgtcattgcaagcactattggcagctgcagagccagatgatccacaggatgctgtagtagcaaatcagtacaaacaaaatcccgaaatgttcaaacagacagctcgactttgggcacatgtgtatgctggagcaccagtttctagtccagaatacaccaaaaaaatagaaaacctatgtgctatgggctttgataggaatgcagtaatagtggccttgtcttcaaaatcatgggatgtagagactgcaacagaattgcttctgagtaactgaggcatagagagctgctgatatagtcaagcttgcctcttcttgaggagcaccaacatctgttatttttaggattctgcatagatttcttttaaactggcattcttgcctaatgatgttatctaggcaccattggagactgnnnnnnnnnntccctgctctgtaaataaagctaattaaacgtctgtgtaaatttaaa

SEQ ID NO: 3808 - DNA, 1158 bp, Homo Sapiens
ggggtctgagcgcccggcggaaaaccgaagttggaagtgtctcttagcagcgcgcggagaagaacggggagccagcatcatggcagaacaggatgtggaaaacgatcttttggattacgatgaagaggaagagccccaggctcctcaagagagcacaccagctccccctaagaaagacatcaagggatcctacgtttccatccacagctctggcttccgggactttctgctgaagccggagctcctgcgggccatcgtggactgtggctttgagcatccttctgaggtccagcatgagtgcattccccaggccatcctgggcatggacgtcctgtgccaggccaagtccgggatgggcaagacagcggtcttcgtgctggccaccctacagcagattgagcctgtcaacggacaggtgacggtcctggtcatgtgccacacgagggagctggccttccagatcagcaaggaatatgagcgcttttccaagtacatgcccagcgtcaaggtgtctgtgttcttcggtggtctctccatcaagaaggatgaagaagtgttgaagaagaactgtccccatgtcgtggtggggaccccgggccgcatcctggcgctcgtgcggaataggagcttcagcctaaagaatgtgaagcacttcgtgctggacgagtgtgacaagatgctggagcagctggacatgcggccgggatgtggcaggagatcttcccgcctgacaccacaacgagaaacagtgcatgatgttcagcggcccccctgagcaaaggacatcccggcctgggtggcagggaagttcatggcaggaatccccatgggagggggtttggtgggaccgacgagaaccaaggttccccgctggcacggccctgcgagcaggaactaccttcaaacttccaaagaacgtggagaaagcaccgcgcaagcttcctttggatcctcttggggagggggctggggagtttaacccaggggggaaaattctttcgtccaaggccaggggcacaccccttccaggggccctgggcccacagttcctccgggggagaaaaaactttccggggccaacggccattcacccggggggataggggccccaggaggggaggcgccgtggtaccgcctatcagcggagtctctggggac

SEQ ID NO: 3809 - DNA, 1471 bp, Homo Sapiens
  misc_feature (1155)..(1165): n is a, c, g, or t
  misc_feature (1343)..(1356): n is a, c, g, or t
attgaaaaccctgagaaatacggctatgaaccaaagaagctgttggaccaactgacgaatattaacttacagctggactgtgctcggttcgcgaaagccattgctgacgaccagagatcctacagtaaggaattgtttgaagaagttatttcaaagatgcggaaggcagggatcaaatccacaatagcaatagaaaaatttaagctgctcgccgagaaagtggaggagatagtggccaagaacgcacgcgcagaaatcgactacagcgacgctcctgatgagttcagagaccctctgatggacaccctcatgacagaccccgtgcggctgccctctggcaccatcatggaccgctccatcatcctgcggcacctgctcaactcccccacggaccccttcaaccggcagacgctgacagagagcatgctggaaccagtgccagaactgaaagagcagattcaggcgtggatgagagagaaacagaacagcgatcactaaaccgttccgccgcccaccctctgctagacacagccaaggccaacgaggcaagcagaagcagcggctgaggaagtggcgtcatgtgtgggaggccaaatgtggcaaaccaaccccaggcccacccagagcgagcaaacgctgagacctgaaaggacatggatgagaagaggagcccgcttcctgtacatatatttaagtgacaaacacggtcaaaagcttaagggacaggttttatggttgcttgtgtaataaagcatgtccttcgtatgtcacagtttggggcaacggaagtcttttagtgatggctaatgggtctgggcagcatcccttcatgaattttttgttaatccaatatccgttgatttgattgtgattagagaaccttggacattttgctgctaaagaatcttttttcccctctcccccttcctgaccctacttgcactgctgtggatttttttaagagaagcaaaaacaaaagtaaactcctttccctggccctccaaacatatattctgtgagataactgtgcctgctaccaagtgttaatcctgggatcgtatttttatatcatattcacatatttgtttttttaattggtgttagatgacatgattaataaaaaaggcaagatattttcagaatttgaatttcagnnnnnnnnnnncttttgaaatgtccctttaagatttttttattctaaacaaaataaagaaaatcctgctgctctggtccttgtgataagcctctcttcggcatctgaggagcagctgcagcaaaatctaggggtgtaagtgtatcaggacttatgtgacttatattttgggaagatgaaggtttgggannnnnnnnnnnnnnacggctagcgcgaaaagtttggaatccttccccggttatcccccgtgggaggtaaatcacaattctttcaaccccttgggggtgtgttaaattttgaaaggcaagggtccatttc

SEQ ID NO: 3810 - DNA, 1134 bp, Homo Sapiens
  misc_feature (71)..(71): n is a, c, g, or t
aggactgggaaatgacttcccaagctttgcccacttaattagcccacataacaaggcaaaatcacattctntaattctcattttaaaaataaaagatgcctcaaggagattattttgacaatccctagcagatcaaagttctaaaaagctaaaaataactgatttaagttaccctctaaatcaaatatgactaatgctaacaacaacaaaccaaaaccaagaatttccttttaacatgattggtttaacaagcctttgaagaaaaatatttaaaacttgtcttcaagtctactaattgtacggcaatcatttaaaatagtaaaactatttacaatctaaacaaaaatgtagtgtgtggaggtggggagaaaagggatcattaaatgcaatgcaagaacatccaagcagaattaaaataaagaaataatgtaaacaggataagatagcaaaagctttttctaaggaacaactgtttcaaagcatgcagtgtgaaattttgcaatctatcccaaacaatatactgcataggcatcgtctttaaatacacacattttctgtttccaagtactacagataactcataattcctataaaaaattacacaatttaatcaagatggtagtacgtggagattatttccttcttagtttattgtttaaatacatgtcttgccaatcacaaaatatctagtgtagccaaagacataagaaatccctgtatgaatcaaaaagtgcccttcttgcagctttctgtcacaaggatgctgagaaatgtactgtaacagtttaggaaacacaagattgtctcaattttaagtttcaatcattaatcctcttcagaactggaatcaccctcttggtcagaaagttcgggaacagggaagcggagaatggcagctaccccagtcaactggctgagctgttccccagaaacgtgaagactagagaatatcctaacggtgcctgcattctctttcacactgtccaccagcctcacataccggctccgtgtggctacatcctgatgcctgaacagctcatcgctgatgagcaatgtgtcaattgccatggcttcattggccttattcacctgcttgagtccatagaaagctcgatcccggtcatgctttaacat

SEQ ID NO: 3811 - DNA, 1007 bp, Homo Sapiens
  misc_feature (413)..(433): n is a, c, g, or t
  misc_feature (888)..(921): n is a, c, g, or t
aaatcaaaactgtttattgtaaaaaaaacttgataattgttttttaaaaaagaaacattgatttcacaagtcttcaggttgtttatagacatagctatagacaacatctcagtttcatacagaactcattcaatcatataaaaataaacacaaatttacattgactcatcaactatacaatttaaaaaggcacttggaaggggtattgtattattgcatttgtggtatgcatttgaaatagtttaagtacattaatgaatttgtaagaatcctcttttgcacttattcccatctttaattaattttcaaaaattattaaaatgttttaaaatagtaagacaatggagcatgcgccaggaatgttcaaagctaatctttccctcctcccccaaggcacatactgttaattggcnnnnnnnnnnnnnnnnnnnnntacttttaatacattctcctgtgttttattcttgttatttttttcctcccttttaaaaatatactttaaagcactacaggtaatcaaaaaaaggctttagttcaacaatggcaaccagacaaccgacatgtaatggagtaaacttggaatactttttaaggcacctgagttcgcgtctggcagatctcttcctatgggaaatcctattacagactctattacaaagcaatactgttcttttcagttgaaatgatttggcagcaatgtaaatctttgcatttttttaggaagaaaagatgcaatgtgcttttcattttatctttgaagagaaaggttactgtcttttattctctcaatctagccatcagcaaatatatagtaattttaaacttcacatggaaaggattatctttaaacacatgaattccatgctcttgcagctctctctctgtggnnnnnnnnnnnnnnnnnnnnnnnnnnnnnnnnnnctatacatattatttggttggtcagcaaaggagaaaatgcctttggactttatttgtcatttggcttcggagtgaagaaatgcacc

SEQ ID NO: 3812 - DNA, 1332 bp, Homo Sapiens
cgcgggagtcgcggcgctgcgggtaggacccgggttgcgggagaccccaggttcggttgggattcccagccagaacggagcttaagccgggcaggcgagcgaatgacggagtagcgagctgcacggcggcgtgctgcgctgttgaggacgctgtcccgcgcgctcccaggccgccccgaggcttggggtcttcgaaggataatcggcgcccggggccgaacagcgggggcacacggggcgctgccgaagtgcaaggccacggccagagctcgagcccgacgcgctgtctggagtcgtaggaccctgacgtggctgaagcggccccgggagcatgagcgggcagcgcgtggacgtcaaggtggtgatgctgggcaaggagtacgtgggcaagactagcctggtggagcgctacgtgcacgaccgctttctggtggggccttatcagaacgtgagtgcatccggaggggccaggcacggtgggcgggggagtggggggccggtaatctgcacctatggccccgatctcttccctctcgttgcagaccatcggggccgccttcgtggccaaggtgatgtcggtcggagaccggactgtgacattaggtatttgggacacagcaggctctgagcgctatgaggccatgagtagaatctactatcggggtgccaaggctgccatcgtctgctattgacctcacagacagcagcagcttttgagcgagcaaagttctgggtgaaggaactgcgcagcctagaggagggctgccaaatctacttatgtggcaccaagagtgacctgctggaagaagaccggaggcgtcgacgtgtggacttccacggacgtccagggactatgcagacaatatcaaagctcagctctttgaaacatccagcaagacaggccagagtgtggacgagctcttccagaaagtggcagaggattacgtcagtgtggctgccttccaggtgatgacagaggacaagggcgtggatctgggccagaagccaaacccctacttctacagctgttgtcatcactgagtcagcactcacctggcctgggggaattaaaggaattccccgtaagggctggacccagctcctttctgggcttgggtagtcaaatgtctgagctaccccaggtcctcatgtcagcagagtggcgcctgcctgtgctggcccatggaacggagacagcattgggctgactgtgggcatgaggagggataaggctgatttggaccccaggcttctgccctggacagcacttgtgtctgcagattatttaagtggcttttgatctgtaaataaaatcagtgcactgtgaatcac

SEQ ID NO: 3813 - DNA, 1381 bp, Homo Sapiens
  misc_feature (29)..(29): n is a, c, g, or t
  misc_feature (33)..(33): n is a, c, g, or t
  misc_feature (372)..(372): n is a, c, g, or t
  misc_feature (396)..(396): n is a, c, g, or t
  misc_feature (585)..(599): n is a, c, g, or t
  misc_feature (834)..(835): n is a, c, g, or t
  misc_feature (837)..(838): n is a, c, g, or t
tgtgttttgtttgtttaccaagtacaaantctntgtgcacaagaactggcggccgatggtaggagaggataatttttgctggggggagccccagtgattcttatatatgtgacatctttcgtgtggtcacacatccgtaattgttgggtctgtgcggaggaggaatgctgggagggaggcggggcgcggccggggtttgttggtgtgccttgcattcgtgctgcttgtggattattttcgtatgtggagtgggcggctcttcatagtttggttgaagagatctacctcctgccgaggagagaggcgctcgtcggtggagtgcggtcatgggggaggcattgattatgggaaggtgttgttgaggaggacaangccaaaccccgtctcgcgtttgcnccacagacccgccacgggagaccagggtgcatgattctaaagctgtcgtggtcggggggggagtattctctccccgggtgtattggtgattattgtgttaacacattgaatgtttctcctcgttatttatggaaacaaatatataattaagccccgtttttctcctccattgggcggtggggggcggannnnnnnnnnnnnnnactccacgaggtgtgtggtgtgaacagctatcttcgcgcggcgcgcccagagggggccccgttcagaagaaagtgtgtaaaggcggggatatagggacagctttctcctgtggggtgggtgtagcaacacgcctctctttcacgggaggggggcgcggctggcgtttgatttggtattatagcaacacatagtagaatagtctgtgggtgtgggtagcgtcgttggcttcgctgnntnntgtttttttgacttgaaaacagtttatttaatttatacaaataactactaaatacaaaaagtagattaaaacaaaatagttatttttttctggcagagtttaaatgcacgtaatggataattctgaagaaaatgcattttccccgtagcgttcaggactaaaattctactgaaatctttgcttctaaatcagtaatatattcggtggtgtcacgtgggtaatggctaaatacgttctgcatatgaactgaaaaaaagttacagtctacacacatacaaatgtgaagcacttaaaatgtgattttaactgataataaaagaaaatgtccattttagagtatagtgttaaaaacatttctgtaataaaatcataagaccacataaaaataagctttaacatatgcacaaagcagttttggaaaaactactaagtgcacaagtaataaataatttggcaagttgtgtataaacaattcctaatgttcggcatcattgtaaacatcagcacatgtgtaaaatggcagcaagtctgacattacatttg

SEQ ID NO: 3814 - DNA, 658 bp, Homo Sapiens
gctttaaggagagagaactgtggatacgggatagaatttccatgtcaacatagtccaggcactgtgggactttaccaaatcggtttgtaataacacctagaagacgctatccgatccatcaggcccagtattcctgtctgggggtacttcccaccgtgtgctggaatggttatcacaagaaggctgtgctgtcccctcgcaactccaggatggtgtgtagcccagtgactgtgaggatcgcccctcctgacagaagattttcgcgttctgcgataccagagcagataatcagctcaacactgtcctcaccatcaagtaacgccccagacccatgtgcaaaggagacagtactgagtgccctcaaagagaaggagaagaaaaggacagtggaggaagaagaccaaatattccttgatggccaggaaaataaaagaaggcgccatgatagcagtggcagtggacattcagcatttgagcccctggtggccaatggagtccccgcttcttttgtgcctaagcctgggtctctgaagagaggcctcaattctcagagctcagatgaccacttgaataagagatcccgaagctcttccatgagctccttgacaggcgcttacgcaagtggcatccctagctccagccacaatggcacgtggat

SEQ ID NO: 3815 - DNA, 1154 bp, Homo Sapiens
gctgtgttggtttggggaactaatttccaaggacggctgcccgtggacaccaggtggactggttcactaatacaagtcagccatattgttctctggctaagtttggttccagccaacgtcatctgctcttcagttcctcactgccttcttgggatactaagacttgaattttttggggactattaagggtgttagtcttggagaagacacagcctcaccttctcacttgctgtgggtgaggggccatttaagtggactgggagacagtgcgcagtttgtatataattccctttcttgtggaacagaagactgaggcctgcaggttccgatgtgtctccatgggctgtgctcccctcttcctactgtcagtttctgaaacttctgactggcctcccagttatgcctcctcctcaagttcctggcccgtggatgttaaagctgctcgattcccaggatctcggctgccttttcctctatcttgagccctataaatgcccacgggacccccaccaccagcctcttgaagtggctccacagctcctgtccctggaacatcctgtcaggttggtcataaaccctgagccagatgaaatgagccaccgtgaacagacatctgccatgcccccaggtgggctttcggtggcccctacccggtaccagttctctctgagaaactggaagatgtcttgttagcataagtggtcttcattcccaccctggaagggttcttgggcataaggaacccaagccgggtgggaaacttagttaactgaagcttaccaaaaacttcgaaataagtcccgtcctggaattgggaaggccccccccgttgaacaaaaaccggcggccccacaggaggtgcttggccctcccctccacggccgattccgcctgggccccgagccgccgccctctaacgcgccggagctccccgaagtggcgttttgggaaccacttcgggtgttgcgataacacccctccacccacgtggggcataaccctggggctacatgccaacccccagtggaaacacttctcgaacgtttccggggagacacattacatcagagaaagcccctactgtcgcggtgtgagggccccccccaccgtaaaaatctttttggtgggggcgtggtgggacctctataatcacc

SEQ ID NO: 3816 - DNA, 470 bp, Homo Sapiens
aacattcatcagggaactttcctgaagttcagctcaagactaccctacctgctgtgtttgtgagaagagtaggatcacacacacaggtgcaatcttgaccacacttacctgcaagaggagtaaccagaggacacacttccttccttctttggtgtctgaggagtgtgaactgttggggtcagttaagacccaacataactctatcagaagaaaactgttgtttgacctttcaaccttgttttacagttctgcagtgtaatggaggacgggcaacgtgcatgtgcaggctcaccactcccaggcctctgacatgagggacatgtgacagtgtcattcagtattatgttcaaaagacatttttatcctgatcataattaatttgaaaactctttaagttcatgttatacaagatgatttactgtattatacttttccttttttatataatgtctaacaaaaaatacagctgc

SEQ ID NO: 3817 - DNA, 1245 bp, Homo Sapiens
  misc_feature (842)..(851): n is a, c, g, or t
  misc_feature (955)..(955): n is a, c, g, or t
  misc_feature (992)..(1002): n is a, c, g, or t
  misc_feature (1064)..(1064): n is a, c, g, or t
  misc_feature (1081)..(1090): n is a, c, g, or t
  misc_feature (1124)..(1133): n is a, c, g, or t
gggggttcgcctccggagccatggcggcggcactgaagtgtctactgacattaggaagatggtgccccggccttggagtggctccccaggcccgggcgctcgccgccttagtacccggagtgacccaggtagataacaagtccggtttcctgcagaagaggcctcatcgccagcaccctggcatcctaaagctgccgcacgtgcggctgccacaggcactggctaacggtgcccagttattgctacttgggagcgctgggcccactatggagaatcaggtgcaaacactgaccagttatctctggagcagacatttgcctgtagagccagaggagttgcaaagacgggctaggcatcttgagaaaaaattcctggaaaacccagacttatctcagacagaggagaaacttcgtggagcagtgctacacgcactacgtaaaactacctaccattggcaagaactgagctacactgagggactgagcctggtgtatatggcagcaagactggatggtggctttgcagcagtctccagagcattccatgagatccgggctcgaaatccagcatttcagccacaaactttgatggactttggctcaggtactggttctgtcaccctgggctgctccacagtatttgggggccagaacctacgtgaatatatgtgtgtgggaacgaatcagctgcccatggttggtttttggccagaaaaaacttacctgaaaaggggggttacaggaaatctggggggaggccctttaataatttcccggggggggtcctttttttcccgggacaaggtttttcctaaccccggggtgattccaccccccccaaannnnnnnnnnccgcggatttgtggggatagggtaagccttaaaatgggggtacacaggcccttttttattttccccccctcttaaaaagggtggaaagaccttgggccccccgnagcacaaaagggggtttttgaagccgggcgccccccnnnnnnnnnnntaaaagttttcccaaaaaaccccctttttatgtgggcgggcgttaaaaagaaaacggggggncccattttttccccctnnnnnnnnnnagggtttgagagaaatgttccccctatgggactnnnnnnnnnntgaaagcggccgttgttggaagagcgcggctctttttccttgggggggatttttcccgggggcccctttatggggtcccctctctcaagaatgggccctctcagaatatccc

SEQ ID NO: 3818 - DNA, 358 bp, Homo Sapiens
cttattgtaatctcaccactgctttgtgaggtagatacactgccatctccacattaccgaaagggaatctgggcctcagagaggacaagtcagttgcccaaagccatgcagttgggacttgaactcagttctggctgactctagaatctacttctaccaaccgtgatagatgtgattttctgagatcctgagagtttcctctcctaacatctcaggcagaaaactccagcaggaagtagaatcctggtgtttaatgatttcttctctgtcgtactcattctgacagtaaagcaaggtggagatcaaaatatgcattattggctgagtcgagtggctcacacctgttatccctgtactt

SEQ ID NO: 3819 - DNA, 427 bp, Homo Sapiens
tactagctcggaccgcaccgtggttatactggggaaggagacctgtgagctgaaagcaggtaaaggaagtatccagacagaggcactggtaaaagacctggagctgggaagggtctagggaccagggacaggttgtactgtaattctggaaacctgtgaggctcaaagaaagggcagagagctcaggtgggaaatagaaaaggcacctgaacagtccagggatggctttcgactacttgaaacagccttgggagtttcagaagctattggaatgctccttactgttcagccttctaagaaccagtcttagaggtagggtgtctgaggtccagtgagggacacaagtaggaggggagcccagatcttgttccctttaccttgcctatatttcttaacaccacttcagctgcctcacaaaagcctttgt

SEQ ID NO: 3820 - DNA, 1244 bp, Homo Sapiens
cctctcgctctcgcgcgtggcgtggcgctggcgcgctacgcgctcggctcgttcttcgctccgatccgctgtggctgcgaccatccgtgctcggcgccgtttgtcgcccgttgtcgcgggagcccaagagtggtgtggcccggcttcgccagggggggtccagtctgggtgcaggccgggcctgggcgtgcttggcgagtggctgggcctggccgactccagcgtggatttgggagaggaaactggtcacgcgtcgccagatagggccacgtcgggccgccgggttttggctcagcataacgttgggtacagggacgagatgacgcggagaaccaccggcagcagggacatcctcacaactgaggttccaggagggtcctgaaagagactcagagagaccatgcagagccggagttactgccgatacgagcaacgagggtgtcgaggatgtgtggggttcatccggtgcaacaacaggaatcgcaggaaggtacggacaaagcaggctctgagatactccgtaggaaaagttccaggtaggcggtactggcgatcatctcctccacagaggtcttgtgcaaggcaggacccatgacaggcaccaggaacccattatggatataatcaaccaactgcttctgcaccagggggtgagccacctgaattactgcattgcagaactccagggaactcatgaagagtacaagggctggcactcccagccagtcttcccgtcgcagacagtgccaatcatcccctggaacctcaatctttcgaggcagtgatgagtacagggcactgagccctgtggccagcaccgggcagaagtaagagtgatccgcgatgtagcggcccacagtggggctcccagctgacaaagccatgagaagaagtagggcatcacgggcctgctggcccagggtgccctctcgatgcacaaaagggacaaggcgagaaaagagaagaagacggggagcggctccaggctcaggaggtggctgcaggaagaactcgagcaatgaaggctcctgggccacacaaacacacagctggctgagaagtagcaccaagccttctatccagttgctgggcttactgggcacagggctgccacaggcatccagcagggtgagcagagcctcacgaactggaccatgccgcaacagtggctggcgagcttcgatcactagcatttcaaatagtttaagttgctcagcccgccgtcccaaagcaaagactcctgt

SEQ ID NO: 3821 - DNA, 789 bp, Homo Sapiens
ggcttattcgacggtgttctgtcatgacagaactatgcagatattgtttacacattggtaccaggcctccaagaagcggaaatgagaaagcagagggagttctatcacaaattgggcatggaggtgccgggagacatcaagggggagacctgctctgcaaaacagcacttagattcccatcggaatggtgaaaccaaagcagacgacagttcaaacaaagaggccgcggaggagaagccggaggaggacaacgactaccaccgcagcgacgagcaggtgagcatctgcctggagtgtaacagcagcaaactgcgcgggctgaagcggaagtggatccgctgctcagcccaggcgaccgtcttgcatctgaagaagttcatcgccaaaaaactcaacctttcatcctttaacgagctggacatttttatgcatacgaggagatccctgggcaaggaccacacactcaagttcgtggttgtcactaggtggagattcaagaaggcgccgttcctgctgcactacagacccaagatggacttgctgtgaatggggccacacagcacccacagtactgggccctcgcacccttgggtgctcccggccgccgcgcttaagaacattgcctctgggtgtcatgtggaccagacttctgaatagagaatatttataacttttgtatgagagagaattcacactcaacaagacactaccagcaccacgtttacagaggatgaaaacacttcacagtctcccagagccgatcgtcctctcccccgccccaaccccgag

SEQ ID NO: 3822 - DNA, 392 bp, Homo Sapiens
cggcttccagagcctcttccaggcactccaaagtgcagtgaccctcagactggaactcaggcatccctggagggatggtatggaagaggctcaccccagaggcccagcctcagatcaccgccagcatcaatatttccgttatatccattggtgtaaaataacctcagtccagaattatctattaagccttcctcataagtgggattatcataatggacttctaggagcacataatgcggatctaatggagtgccagggataatccaacatgaggtggataagaaaagccctctccaccaatagcccagccaaaaatcacagtgtcacaggtgaggaatgcatggggcatgttgggtgatagcactagccgactccagacaccgtcgaagtac

SEQ ID NO: 3823 - DNA, 555 bp, Homo Sapiens
cgtctagcaggatcctgcttcgacggtgttctgggcttgagcctactattaccaggcatagttgagggtggaggtaagactctacattaagaacaggattaagtaaaattctctatgctgaatggtgattccctcttcctaccacttcctctgtttaactgccagaatgccaataggcaggagagtagatatgtcttctctgggtagttgaccaggtacaggaaagacctacaaattcactggcttttccacaatgaaatagccagctgccttgtcatcttacggtgaaggcctccagtagctaagttttattagcaaatagagattttagtttttagtttcttgtcattaaataaaaagccaataaaaagcaagctgatttgtgctgtagacttcatggggaggctcaggaatttgaagcattgggttctttcttgggacacttggtctctgggttagcctaaaacagggattagttaaaaatctgagaagcagatccttttccttagctcagagcaaatgcgctctccttccccatcagacaccagaatacgc

SEQ ID NO: 3824 - DNA, 670 bp, Homo Sapiens
  misc_feature (318)..(568): n is a, c, g, or t
  misc_feature (585)..(598): n is a, c, g, or t
tacgggacgttacggaagaacattaggtatgtctccctaattgcattttattatactcttctgtaagagcttatgatatcttctaaatacagtgtggatttctctttctgtagacaatggaagaaacgtagaaataaatagtcaacacacagctatctctatagaagtgctagatattatgtttgacacacaaagggatattcagtatctggaggagctggaacaagtgtgttgtcttcagagatgacaatgtccaatggtgtctttaaagaaagaaaggtcagaatctaaaaagtgtggccgggcgtgttggctcannnnnnnnnnnnnnnnnnnnnnnnnnnnnnnnnnnnnnnnnnnnnnnnnnnnnnnnnnnnnnnnnnnnnnnnnnnnnnnnnnnnnnnnnnnnnnnnnnnnnnnnnnnnnnnnnnnnnnnnnnnnnnnnnnnnnnnnnnnnnnnnnnnnnnnnnnnnnnnnnnnnnnnnnnnnnnnnnnnnnnnnnnnnnnnnnnnnnnnnnnnnnnnnnnnnnnnnnnnnnnnnnnnnnnnnnnnnnnnnnnnnnnnnnnnaatactccatctcaggnnnnnnnnnnnnnngaatgagatcatgtcctttgtagggacatggatggagctggaagccatcgttctcagcaaacatacacaggg

SEQ ID NO: 3825 - DNA, 400 bp, Homo Sapiens
tctccggagcttattcgacggtgtctgaattatcgttgctttgtcctgaagatgaaagaaaagtggtacgacttaagaagaaatatctgcattacagagtatcctcagtcccttcccaaataaaaaccagactgtcattagaacataaccactaattacaaattttataatacacaatatttttatgtaatggggaagaactaacaaatatcaataaccttttcctcagtgactcatggtatactaaatatagtatacaaaggtctcaatactaggaataaatatattaaacttaccttcaaaacaaacagtaaagaaaaagttactacataatgattacctttatgacgcatggtatttactttaggttctttctccctcttcaccatttttttcccct

SEQ ID NO: 3826 - DNA, 953 bp, Homo Sapiens
gagaactggggctcctgctcccaggagctccaggcccctctctcctcccacctggaggggggggaactgagaaacactttcctggagctgctggcttttgcacttttttgatggcagaagtgtgacctgagagtcccaccttctcttcaggaacgtagatgttggggtgtcttgccctggggggcttggaacctctgaaggtggggagcggaacacctggcatccttccccagcacttgcattaccgtccctgctcttcccaggtggggacagtggcccaagcaaggcctcactcgcagccacttcttcaagagctgcctgcacactgtcttggagcatctgccttgtgcctggcactctgccggtgccttgggaaggtcggaagagtggactttgtcctggccttcccttcatggcgtctatgacacttttgtggtgatggaaagcatgggacctgtcgtctcagcctgttggtttctcctcattgcctcaaaccctggggtaggtgggacggggggtctcgtgcccagatgaaaccatttggaaactcggcagcagagtttgtccaaatgacccttttcaggatgtctcaaagcttgtgccaaaggtcacttttctttcctgccttctgctgtgagccctgagatcctcctcccagctcaagggacaggtcctgggtgagggtgggagatttagacacctgaaactgggcgtggagagaagagccgttgctgtttgttttttgggaagagcttttaaagaatgcatgtttttttcctggttggaattgagttgggaactgaggcctggcttcagtatgggtacactcccgtggggggcttttcctgctggaaccttcaagccttccccgcccgttgcccccctttggctggcgtctgctggaagatgtctcctgtcccatcccgcgttccaggcccccagtttctcttctc

SEQ ID NO: 3827 - DNA, 894 bp, Homo Sapiens
aagaaataactagtcaacccaaaaggcagtatcttttacttcattccttgaaggaaattattagctctgcatcagtggtgggccttaaaccatatgttgaaaacatctgggccttattactaaagcactgtgagtgtgcagaggaaggaaccagaaatgttgttgctgaatgtctaggaaaactcactctaattgatccagaaactctccttccacggcttaaggggtacttgatatcaggctcatcatatgcccgaagctcagtggttacggctgtgaaatttacaatttctgaccatccacaacctattgatccactgttaaagaactgcataggtgatttcctaaaaactttggaagacccagatttgaatgtgagaagagtagccttggtcacatttaattcagcagcacataacaagccatcattaataagggatctattggatactgttcttccacatctttacaatgaaacaaaagttagaaaggagcttataagagaggtagaaatgggtccatttaaacatacggttgatgatggtctggatattagaaaggcagcatttgagtgtatgtacacacttctagacagttgtcttgaaagacttgatatctttgaatttctaaatcatggtgaagatggtttgaaggaccattatgatattaagatgctgacgtttttaatgttggtgagactgtctaccctttgtccaagtgcagtactgcagaggttggaccgacttgttgagccatagcgtgcaacatgtacaactaaggtaaaggcaaactcagtaaagcaggagtttgaaaaaccaagatgaattaaagcgatctgccatgagagcagtaacagcactactaaccatttcaagaagcagtaactgggtccga

SEQ ID NO: 3828 - DNA, 419 bp, Homo Sapiens
cctcgtgtatattgaagtgaatggaacagaagccaagcaacggtggagtgtgggtcagacccagaggagaacagtgccaggtcaccagatggaaagcgaaaaagaaagaacggccaatgttccctgaaaaccagcatgtcagggtatatccctagttacctggacaaagacgagcagtgtgtcgtgtgtggggacaaggcaactggttatcactaccgctgtatcacttgtgagggcttttatggcttctttcgccgcacaatccagaagaacctccatcccacctattcctgcaaatatgacagctgctgtgtcattgacaagatcacccgcaatcagtgccagctgtgccgcttcaagaagtgcatcgccgtgggcctggccacggacttggctctagatgacctcgaagcgggtgg

SEQ ID NO: 3829 - DNA, 424 bp, Homo Sapiens
ctcatcatacctggtcacatcaattgtatccgtacccacagcacccatcccgatgatgaagacagtggcaaattacaagcacatctctcctggggacaccaaggtggtggtggagaatggggagctgatcatgggcatcctgtgtaagaagtctctgggcacgtcagctggctccctggtccacatctcctacctagagatgggtcatgacatcactcgcctcttctactccaacattcagactgtcattaacaaatggctcctcatcgagggtcatactattggcatttggggactccattgctgattctaagacttaccaggacattcagaacactattaagaaggccaagcaggacgtaatagaggtcatcgagaagcacacaacaatgagctgagcccaccccggtactcgtttggtcca

SEQ ID NO: 3830 - DNA, 310 bp, Homo Sapiens
aggagcttattcgacggtgtctgactgggctgcgtgtatccagtctcctccccttccgtctagtctccacactgttcctattaccatcctaattcagctctgtctgacttgagctctggttaagtctgcaccctgttcaaaaaccagcagctgcaaaagccctcacagtagtcaaaaatccttagcttgacatttgagggctctctggccagagcccttaccatgctgcagacccttcctgccctgtcccccaacattcctgcaggtacccggcagcccctgttcactgcctggcacagaatgggcatac

SEQ ID NO: 3831 - DNA, 497 bp, Homo Sapiens
  misc_feature (123)..(123): n is a, c, g, or t
tgcttcgaggtgttctggggtgaggggagggtgaaacgacaacatttaggagaactagcaatttaaggagccaagagcaatgcagcctacaagtaatggaaatgataacaattccttgtactngtacggtgctctataggccctatgcccgctgacccccgtgtgtactcatggctgcctgactgtcagaggtgatgctgctaatcctagctcctaacttccaggacacaccacggagaagatctgttttctgagcctgagcgcatcatcccagatgatggcttcaatgggcttacacgcttaatttggtacaaactaacttggcagtaagatttattgccattgtctagtattgtatctgggtttattaaaaatccccatcacatcttttccacaaagggctagcattcctgcaagcatcattaggtagtcaatgatttcagctgacacacccatgggacaatcacagtttggtggaggagctgtgtatatatata

SEQ ID NO: 3832 - DNA, 826 bp, Homo Sapiens
tttcagggagatttctatcctcctgaattcaagaaggtggttcctctagctgatagacaattcaggccccctctctgcaagtgccaccacagccatggggtatatcacgtcagcacagtaacacctttcagggagttgcaaaaccatcatagggatttgacgatcgagtatcccaaaactttaaagtcttatcccagctcccagtcatcacacagctgtagtttggagctttgatccaatggatggttttaacaggagcatcatgctgtgcgatctgtatcgcttggttactgctgaggtcccacattttggcagttttatcacacgatgccgtaaacactttgctcccatcgtcactccagcagacatcaagcacaggcccagtgtgcatctgctgggcttttggaatggtctgtccactgtcttgaacttcccagcagcgaacatcattagcccatgatcctgcaataagaaagttccccggcaaggttggtgggctaaaagacagacaaccaatgctatcatcaggagatgatgttacttcaatatccttcatgggattgtgattgtctgtagttgcactgccaaacatgctggtcccactggttccaaaacctgaggttgttccaaacaggctcattttgaacctgggggtctcgccccggcggaaagcggcggccgggagcagaagggtctgaggagtttgcgaacctgctctggcgcgaaggacgagggccaggagcgcggacagaaatcccaggagcccgaagcctccttaagcctgcggtagaaactgccctgactaccgcgggaaacaacgcgcccc

SEQ ID NO: 3833 - DNA, 833 bp, Homo Sapiens
  misc_feature (252)..(260): n is a, c, g, or t
gggcctgtttcctcctctgtaaaataatgtctacttcacaaggctgtttcaaaggttaaaaaagatagcatatgtaaactgtcttagctcagcgcttgacatttcctaagtgtgccataaatattaatctctttccttactcccagctccaatacagcgtaacagtgctttaaaatgtatgtccttcatttctccttcatttctcagtcacctttgtctcttccctagggcatatccccaaattcttaaacnnnnnnnnntgatttttttccccttcatcaaacttttcactggctcccttagcacccagtagaaggtcccaactccttacagagtctgggttttcatgtccctgtttgcttacacagcttaatcttttgccactttccccctcacattgattaaggtagccaagtttaactatttacacaactattcacacaagttattctctgggcctgcagcagaaacatgattaacaattttaatgcccagagtaaacaacagaaatttttcttaaattaaaggaatagtgtgaaaatgctgtaagtacagaaaatgcaaccctccattccagtagaacaattttcctttgccttgtcccttggctctccaaaactgttcattttattgtggggtctttttaaaattttagtgcccctggggacaaagatctaattttcccccacccctacttttttgacctctatccctggaactaaccttttccctcaacctctattctcctcctcaaacccagaacttaaacctcttttaatttcccttataaactttggaaggaattgccatccccccttcctttataaaagaac

SEQ ID NO: 3834 - DNA, 1341 bp, Homo Sapiens
  misc_feature (1037)..(1037): n is a, c, g, or t
  misc_feature (1061)..(1070): n is a, c, g, or t
  misc_feature (1317)..(1317): n is a, c, g, or t
ggtgctgcctggtcttgagcaccactgggggcccttccccagatacttgttcccaggaccttaactcacgtgtgaagccaggatttcctaaaacaataaagaccaatgacccaggagtcctccaagcagccagatacagtgttgaaaagttcaacaactgcacgaacgacatgttcttgttcaaggagtcccgcatcacaagggccctagttcagatagtgaaaggcctgaaatatatgctcgaggtggaaattggcagaactacctgcaagaaaaaccagcacctgcgtctggatgactgtgacttccaaaccaaccacaccttgaagcagactctgagctgctactctgaagtctgggtcgtgccctggctccagcacttcgaggtgcctgttctccgttgtcactgacccccgcctcttcagcaagaccacagccatgacaaacaccaggatgcatgctccttgtcccctcccacccgcctcatgacccagcctcacagaccctctcaagcctctgacaagtgagcggggtgaagtgcccactggggtcaccgcagggcagctgggaatgggcagcatggtacccccctcctaacaaattaaatagatccccttgggctgtctgggaacagggcgaaaagcgcaccaaaccctatacacacctcgtcggggctgccctcgggtccttcgggggaaagcttctccctagaacaccatttcgctattgggggcggtgccgggccccccagtctagaggccagagcggcgacacacattgtggccccatcaaaaccctcttatatctcccctcacacgggaaagacatccccctcggggcgtcccccgacgcagcacactaatgagggggccttgttggggcgtaattacccccctcgggacacagcgattcaataacacacatttgggccctccgccgcgcggcgacgcacgacaccccgcgaaatgcgggggtttttcatggccaaaaacaaaaagattaccctcagaaagacggcgagcaaaggtcttcgctgntcaaggggcgcgcagtgattgacnnnnnnnnnnagtccattaattccggaaaagccgggcgagcagtctgcgccagtggcccggaagtcgcccggcgcacacctatcttcctaatttttttgacccccgcgcccctttcacctgcatctacctcaacctgctcgtctcccccaccgctcacttcgcggaggggagataactttccaaccatgaagggcccgagttttttgtgcggaacaaagtttaagggaatcatctacttcttagtaacaaacccggnggggactatataatgggcggcacc

SEQ ID NO: 3835 - DNA, 703 bp, Homo Sapiens
aaaataaaatgggttttattcatgttttacaaagtctttattatctggattggggatgcacaacccacacttaaccccaggtcttaggtccagagtgggggtggaggactttagcccaaatccagtgacaggacaagtaaacaatgacacattgggctttctgccctcaggttacagtatctccacatgtaagtgcttaaaatatagtgcagtgaataataagaatagagaaaactgagcaagggctctccagtggccaaagattctcattcctgagaagcaaaaattaggtgaggtaacttgtcagaggaagcaaattcagggctcactagagagcacagagcatttgtccatcagcagttcagtcatcgccagctctcctggtaccctcgaacacttcagaaacacacacaagtcaagtccctcgatggctacactaggcgcctatggctggagcctccttggcacgagcgcaccatccgaggcacagctgcacttctgcaccctcatgttgggcaggctgaccacctggggcctggtcctgcctccctccttgatgctgacgatcatgggcagcgagtcagtctccgaggcgatgcactgtcgaggccccagaaacggccacttgaaggccagggcctccgggggctgccggcaggtgcccacacactcataagccaggaagcccgggggctccagcacc

SEQ ID NO: 3836 - DNA, 822 bp, Homo Sapiens
  misc_feature (139)..(155): n is a, c, g, or t
ggggggagaaagggaaccttttcttaaaatgaaaataattactgctattttaaaatttcttgatcattgaatgtgagacccttctaacatgatttgagaagctgtacaagtataggcagagttattttcctgtttacannnnnnnnnnnnnnnnnggggaaaaaattggtaggtgtctaattactgtttacttcattgttatattgcagtaaaagttttaaaacaaccattgcatgtttgcttttgatgtatccctttgtgaaattagcacttttggggccaatggagaaatgcagcattcactctccctgtcttttccccttccctcagcagaaacgtgtttatcagcaagtcgtgagtcaaactgctgccttttaaaaaacccacaaaatgctgattcagttcaaaattaatgcaaatgtttcaaaactgggtttctgatatttgtaaatgtgtttctttattagataagagtgtattaccattaaagtcattagtataatattgctttcaaaaagaaatggtagacaaaactataatccagcatcttttattgcattggaaagactggcaaagtcttttggatgggttgggagatgtggctggaaagtactttggaaaatatacaatcaagatatctcatggcatattaaaagaaaaatcttaatagcagtgttggcttttatttggattttttcatctcagttttttctgtggaatctccttcattggcattgttatttaatcataaacggggcagatgtctacttgttcagtttttcaaatctgttttcctgagtataaataagagtatttaaagaa

SEQ ID NO: 3837 - DNA, 1051 bp, Homo Sapiens
  misc_feature (1012)..(1012): n is a, c, g, or t
  misc_feature (1021)..(1021): n is a, c, g, or t
  misc_feature (1024)..(1024): n is a, c, g, or t
gggtccggaattcccgggatgctgagaattgcagctgagggctccggggtaggtgggtgacggcggtcggaggtgtaggagggagccgtggaggtccaggtgactgcttagaaaactgcacagcatctgatgaaattagcgaataagaacatcaaccatgtcttacactccaggagttggtggtgaccccgcccagttggcccagaggatctcttctaacatccagaagatcacacagtgttctgtggaaatacaaagaactctgaatcaacttggaacacctcaagattcacctgaattgaggcaacagttgcaacagaagcagcagtatactaaccagcttgccaaagaaacagataagtacattaaagagtttggatctctgcccaccacccccagtgaacagcgtcaaaggaaaatacagaaggatcgcttagtggcagagttcacaacatcactgacaaacttccagaaggtccagaggcaggctgctgagcgagagaaagagtttgttgctcgagtaagagccagttccagagtgtctggcagttttcctgaggacagctcaaaagaaaggaatcttgtatcctgggaaagccaaactcaacctcaagtgcaggtgcaggatgaagaaattacagaggatgacctccgtcttattcatgaaagagaatcttctatcaggcaacttgaagctgatattatggatattaatgaaatatttaaagatttgggaatgatgattcatgaacaaggagatgtaatagatagcatagaagcccaatgtggaaaatgcagaggtgcacgttcagcaagcaaatcagcagctgtcaagggcagcagattatcagcgcaaattcagaaaaaaccctgtgcatcatcattcttatcccttgtcattggagttgcgattatcagtctcatcatatgggggattgaaccactgaaagttataaaggagcacactggtcgcactacattgttctaaaattatgtagggaagatccctggnaatcatggnttnttttaataattaattttaaagcctatg

SEQ ID NO: 3838 - DNA, 308 bp, Homo Sapiens
atggatatgcaggggataaatttccagatgaataatgctaaggaaagcatgtaatcctgtgacacaccgatggagatacagaaaaagttaacgactggattctatcttcattttagacttttggtctgtgggccatttaacctggatgccaccattttatggggataatgatgcttaccatggttaatgttttggaagagctttttatttatagcattgtttactcagtcaagttcaccatggccgtaatccttctaagggaaacactaaagttgttgtagtctccacttcagtcagaaactgatgtt

SEQ ID NO: 3839 - DNA, 1590 bp, Homo Sapiens
  misc_feature (769)..(824): n is a, c, g, or t
  misc_feature (1332)..(1442): n is a, c, g, or t
  misc_feature (1444)..(1447): n is a, c, g, or t
  misc_feature (1457)..(1470): n is a, c, g, or t
tagttagaagttcactagcgtagaagacaaagtgtaatagaaggcaacaactgcacatttgttcgtgactcgagtagaattaaacccttcacagaacacagaaacattagaattactactgaaggaattttttgagtattttggcaattttgctttcgataaaaattccataaatattcgacagggaagggagcaaaacaaacctgattcttctcctctgtacattcagaatccatttgaaacttctctcaacataagcaaaaatgtaagtcaaagccagctgcaaaaatttgtagatttggcccgagaaagtgcctggattttacaacaggaagatacagatcgaccttccatatcaagtaatcggccctgggggctggtatccctattgctaccatctgctccaaacagaaagtcctttaccaagaagaaaagcaataagtttgcaattgaaacagtcacaaaacttgcgagaatctttaaaaggtaacagaacagaaaatttcacgaaaaccagtgggaagagaacaattagtactcagacatgatggctgctacattgtgtaaagaactgggcttagcctatcaaatggtctgtggacttacttggaaaaactgatttgaaactttcacagatctcagctttcatctgatgtcacttttcatgatcttctcattggcccccttaacctggtctgaagttctgggatgttttcagtttgatcagtctgatactcagtggcactttattaaaacatcagctgtggannnnnnnnnnnnnnnnnnnnnnnnnnnnnnnnnnnnnnnnnnnnnnnnnnnnnnnntcttgagcccaggattttgaatccatcgtggacaacatagcaagactccatctctaaaaaaaatgaaaataaacataagccacaaggaatgggtgaaagattattgtaatgtgctttaactaaataggtaaatatactaaacaaatgctaaaactcagttttaggatgaaaccattgttgatatccacatcagtccctgtttagaaaacatttaaaatgacttttagttatgtacagtacgttggcaatgaatacattaagcttcaaaatttggtagtgctctcgaatatgtatatttgtatttttcaagcgaagttctcttattcacatataaattaaagtgggttggtactgatatcaaaaaatgtttatgtttttagaacagacatttcagtcactgcattcttaggtattccaaaccaaatatgatgacatcaatagattgcattttaaaaatattgtttgatttttctattttcaaaaataaaattctgtttctaactagaannnnnnnnnnnnnnnnnnnnnnnnnnnnnnnnnnnnnnnnnnnnnnnnnnnnnnnnnnnnnnnnnnnnnnnnnnnnnnnnnnnnnnnnnnnnnnnnnnnnnnnnnnnnnnnannnnatttgggggnnnnnnnnnnnnnnaaaaaaatttttaaaacctttgtttgggcgcgcggcccccaaaagggaaaggaaaaaggggcaaaaccttgttcccaaagaaaacccggggacagaaaaagagggttggatttccccccc

SEQ ID NO: 3840 - DNA, 420 bp, Homo Sapiens
aaagagaactgtggggccctttgggtcaaaatgggtcatctgccatgggaatagatgttgaagaacacatcaaactttggaaggtgcttcctatggcccatatgaaaccagtgtgagatgctggggtttgcacgggaatcagctgtgagtgcttatcagggggtgatgggtaaacccaggccatgtgacttcacaaagcctcttcttagcttataacagtctgggtcaagttttctttaaaagtaaaccagcaagttttgccatctgcctttgtttgagaagagatgggacactcataaaaattgcttaaaatggaagtgcgcagagaaaccgttggcagccagccagggaaattttctttgtaaagggcatgtaagcgagaagcttgttctgggacagaaaaagggaagagttcgatta

SEQ ID NO: 3841 - DNA, 1700 bp, Homo Sapiens
  misc_feature (86)..(98): n is a, c, g, or t
  misc_feature (100)..(359): n is a, c, g, or t
gaggcctactgtgggagaacaaatagggatcaccaggctaatggggggcgtcagcagctttctctccctcctatcttggcctgtcnnnnnnnnnnnnngnnnnnnnnnnnnnnnnnnnnnnnnnnnnnnnnnnnnnnnnnnnnnnnnnnnnnnnnnnnnnnnnnnnnnnnnnnnnnnnnnnnnnnnnnnnnnnnnnnnnnnnnnnnnnnnnnnnnnnnnnnnnnnnnnnnnnnnnnnnnnnnnnnnnnnnnnnnnnnnnnnnnnnnnnnnnnnnnnnnnnnnnnnnnnnnnnnnnnnnnnnnnnnnnnnnnnnnnnnnnnnnnnnnnnnnnnnnnnnnnnnnnnnnnnnnnnnnnnnnnatgagccatgtgcctggtccaccttggcctgttttgttttctttccttgggctcagcaattcaaattctagttgttattatggtaggaagcagtagcccaaccccagtttaggggaaggtagcacagggcagagccactgggcactttgtttccttggccctccgaagctcactgttgcatatacccccaagcctttgctctaggccagatcttgtttggtgcaggtgatggagaacacagatgactcgggcatgggtcttggagatcttctgttcaaagtacagtgctggcactggggcaccagaagtgcccaacgttaagccccgggctctgatagagaggtaggaggcacgttcttggtcactgttccattgcagaccagacttgctggcctgaccacaagggagtggctgggaactcacagccagcatagggacatccccctgcagccttctgacctgcaatcaaggctggggaggggtttgcaggcaggaatatgctgacctttcaccctgccatcccatcccaaccccagctcactagccttcatatatgccttatacttggagtcacaggggccaaaggcctgagaccccaccctgcccccaaactggctaagacagctttcagttcctgactccccaacttggtctctgccctgaagcagggcactgaactctgggctgcttctctgtgtgtaaaatgggcacatcttcctaatctgttaatggtcagtggtgtccccaaggatagtgctggcttccatggaaaccctcactcctggagattccattccattttcaagtgtacagccacagcaaggagcccgacactgatttgatcgattctgtgacacaaaccccaccaattgttaatgcaagtttttatttggctgtatatacaatttaagctattaaaatttgtacaatatttacaaattaaataatcatctgaaactgtctccaacaactcttgtaacacaaaaccaaggggaaaagacaggggcaggcaggtcccagctcctgtggtccctccttggcacagagccttttctaaactggaaagaccaggagtctggcactcctgttcctctttcccgggattaagcattcaacttcaaaagacaaaatttaagccaaaagacactagtaaggaagtaattccaattctaaacttcagaagttctgccagttgagaagtggccttccttgggcgctgggattgcagtggtcaggagcaggcgcactggcccttgcctggagtgcggctgggcagtggctgctgggtgagacaggtcagtctcacttgagaagctgcagaggaaaggggcctggggggag

SEQ ID NO: 3842 - DNA, 413 bp, Homo Sapiens
  misc_feature (11)..(11): n is a, c, g, or t
caggatcttanaaggtggaggggacgacattcacttcattccaccatcttgtccgcgcttcgacatgatcttcatcgtcaaggatgagcacaatgaggagagggatgtgatgctggccaagcatgtcatcactctgcacgtgaggcgcactgacacagacacaggctgtggagggcgagattgacctggccaaagctgaagaagtttattgcctactgccgagtgaagtgtggcccccggctgtcagcagaggctgcagagaaactgaagaaccgctacatcatcatgcggagggggcccgtcagcacgagagggacagtgaccgccgctccagcatccccatcactgtgcggcaattggagcgcacttgtgcgcatcgcgggaacccctcagcacgatgaagctgcagccct

SEQ ID NO: 3843 - DNA, 844 bp, Homo Sapiens
gggacagtctggggtttggctgtccggacggtgcagcggcgaggccggccgcgaagatgccagtggcggtgatggcggaaagcgcctttagtttcaaaaagttgctggatcagtgcgagaaccaggagctcgaggcccctggaggaattgctacacccccagtgtatggtcagcttctagctttatatttgctccataatgacatgaataatgcaagatatctttggaaaagaataccacctgctataaaatctgcaaattctgaacttgggggaatttggtcagtaggacaaagaatctggcagagagatttccctgggatctatacaaccatcaacgctcaccagtggtctgagacggtccagccaattatggaagcacttagagatgcaacaaggagacgcgcctttgccctggtctctcaagcgtatacttcaatcatcgccgatgattttgcagcctttgttggacttcctgtagaagaggctgtgaaaggcatattagaacaaggatggcaagctgattccaccacaagaatggttctgcccagaaagccagttgcaggggccctggatgtttcctttaacaagtttattcccttatcagagcctgctccagttcccccaatacccaatgaacagcagttagccagactgacggattatgtgggctttccttgaaaactgatttatcactctgagttcaagattcatctttcagaatcctgtatactgacaaacgtagaaattgtaaacgtttgtattttccaatttattggcatggcttaagcacctcagcattccttactatgtgataaaatacatatagaatataagatatacta

SEQ ID NO: 3844 - DNA, 595 bp, Homo Sapiens
acatacagcatggtgtagtcgaagaggctggactcgatgtggaagggatataggtataagtacccctgctggaagatctggcagacggccgttgctgcagaggcaggagtctcctccgaccggcttgtctgcatgctggtcagagatgagacgggcgtggctggcgttgctgtgagaactgctgtaggagtgggattggtgcacagattcatccaccacggccgccatccagatggccaggttggtggtgagtgtgaacatgagaccacaccaggtcagatccaggtggacggtgaacgcagtctttagcagagacccagagaaagtaggtctggatgatgacaaacacagcctggatgagggggtgcaggatcttgatggctgactggcactcaaagaaactggagtagtagccggtcttgaagacatccatgatgagggtgcagattccaaacagcaccagcccacctcggagccagatggggccagcgtgcgcgtcccggtagggtaccgcgcaggggcagcccacggttcggaggaggtagaagaggatccagagcgttgccagcagcatcatcgcagtgagctacgcgaa

SEQ ID NO: 3845 - DNA, 203 bp, Homo Sapiens
tcaggctttttttatggaagagaaaatagacaccaaagtagccttcttctaaccttaacggacctacagtgcaaaaagttatcaagagactgcattatagagcgcacaaaggagaaaaaaagtaatctaagatgctttgttagaaaaatagcgctctcgggatgcatttttgtagaacaaaaaagaagtatagattctttgtt

SEQ ID NO: 3846 - DNA, 1085 bp, Homo Sapiens
gtccgtcttagaagaggcattgtaaccataaaaatataagcacggctgcccctcctttgggaggcagctggtgctcactgagatggtaggttttcctattttcctgctacatctgcacaagctacatctagaatgaagccaccaatttcaatgtgaccaggcaatggcagccagcactgccttacactggtttgattctgattccctaattctggccactgcaggtgatgagtaagggtggggatcagggaggaagtccagaagccagtctttgtctccctttcctgcttctatttaagtgcctatttacatgggttaatcagctaacgccagtcagcatcatgaaatccagcaatagtctttcaatcccctgaaaatgacttagtaccgaacatgtaacagttcctccatattttcttcatacaatcgtctcgggtatgcgccctccccttagtgctttggcctctgctccccgtgttcctgaaggaggatgtcagggtggttttgtttgctaattctagtgagtcctcccttctctgacatgcctgaaaatgcttttgagtccacagctcagagatggcctcacaatagcaccctgctctgtgactaaggcagagtggaatgggcaccttcccaactgaagcaagtagatgctttttcaaaaggaaaccaaagcaattgtttatatgcttggaagatgtcttattcattggaggctgaatgctgagtctgtttttgaaaactgcattttcttgaggcaggtcgcacgttctaggagtccacactgatgcaagcacagaaaagaaggaagccaaggagaagtgatcctgggggttttctcaagcccatagttccagaaggtgcaataccagcattggtttatgatcagtctttcaatcaacaatttgatgattagggatctctacattcgtatttcaggtcagagaagaacaccatttcttgagagaagacaaacaaccctagtctaccaccagcataggttttatcatagattgggtccctgagtcagccatgaattttcttcccttcatacatcaccaactctaatgaaaccccgtctttgg

SEQ ID NO: 3847 - DNA, 598 bp, Homo Sapiens
  misc_feature (547)..(547): n is a, c, g, or t
ctgaggatgaaagaatgtctaaatcagaagaaagaaagtttatcattaaaatctcattagtttagaatttccagacatggtaggactgaaatttgcctagcaaattctttcttttatggtttagatgaatggtgttaagatgcctggcaaacatatactttgaaggccagctgttttcaggcatttttggaggacatgttcatggaagaaattgatacttaaattttacatcattatttatcataaaggtccccatgtcccatcagaagccacattctggggggttcacatgtctttcaccgcagcatcatgggcctaggtgaatgcctgtgggttgttggcacacgtgggtcctgggccctgccagtgcctcctaaccccaagttgcctgaggtacctgggggaggacaggtattcagaaggctgtcttcgtccttccaggcaggctgagttgttgtgtggcttcagtaggaacaggttggctgtgacggggttgcacaggcctcagttggccctgtggtaatgcgcacagtcactgtaaagtggngtggactcctgagaccacatggtgagattcaccattttttgatacccctcc

SEQ ID NO: 3848 - DNA, 512 bp, Homo Sapiens
cgaagtgtaggctgccaaaaggttgtccacgaaaaagaactggatggtgtacaggcgatctcctcgattagagatgcccagctagaggacgaggcagaacctgatcaggaggtggaggacctggctggaccatgtgggcctggaggacctaagggtggacgtggtggagtctgtccagctgagaaaaggtgggtggtaggccctcctggtcctgctggccctaggaaaatctgtccccatccaggaacagcccctggaaaacggccccgtcctctaccaccttgtggaaatgctgcacgggaactgcctcctggaggaccagcttgaccttccccagacatttgtccggattgtgtagttatcctggactgcatttcaaattgactcaggaactgtatattgcatggagttacaacaggattctgaccatgaagttctctaataggtaacagatccattaacttaattgaagatgctcaaatccaacaccaacaagggcaaacccctttgag

SEQ ID NO: 3849 - DNA, 309 bp, Homo Sapiens
  misc_feature (209)..(263): n is a, c, g, or t
gtgctgctagggcttgctgtatatatctcttcatttgcctgggctgatttatattaaactagatatagcaccagaagataactgcagtgtgatgggatacactcttgcctgaagaacttcctccatctcacagggcagatctactggcaacaaaccccaaaacttttgtctgaggaagacttgtgtgggactaggtctcactctatcannnnnnnnnnnnnnnnnnnnnnnnnnnnnnnnnnnnnnnnnnnnnnnnnnnnnnngctcaagcagtccttccacctcaacccctcaagtagctggaactac

SEQ ID NO: 3850 - DNA, 733 bp, Homo Sapiens
ggttcatagtagaagagcgatggtgagagctaaggtcggggcggtgagtagctgggtgacgttggcgaatagctgggtgatgtgggactatagttgggactggttggagaataggatggagaggtaggggagtaggagggtgaagtgggggaataagagggactctggggtgtgtagcccccaggagagcggggctcgtaggcaggtgacgttggcgagtagctgggagacatggcaccacctggtgaagggatgtaggggcttgagggacctggggaccccggggagcccggtgtgggagaccaggcaggggagtaacctgggctgaagccgctggcatctgacgcaacactgggagagaagccggctgcccctggggtcattccactcccaacacatgggggaccaggcgccataggcaggggttgcaccctggttccaaggtgtcatggcaggagagattccacccatgggactgggtgctgaaccaaagaacatgccggtgggtccagcagaccccaggccgagaatattggtggggatctccatgccatacttgcacttctctgcatcaagcaggaggtcaaagcaaccagtgccggccggagccagctgccccagcatgatattctcaggagacccccttgcatggggtcactctcaccgtgtcggctgcttccataagcacgtccaccgtttcctcaaaggacacttcatgagtggtcctgtagtc

SEQ ID NO: 3851 - DNA, 195 bp, Homo Sapiens
aggatccccttgtggttacaaaataagagtttccttcatggtacacatagaaggtcatttatgtggtggtttagctgcgaatttaaatactgagctcatttttttctttccccacttactccagaaacattaaaagcaaccatgcaacctcattatattagctagcattccaaaaatatttcaaagggcagtatg

SEQ ID NO: 3852 - DNA, 909 bp, Homo Sapiens
cccagcccctcaggcagtctcaggcccagatgtatctacggccacagctgggaaacctatagcaggtaaaccgaaccctgggtcggaatgtgcctctagcctcccaactcatcctgatgcctaatggggcggtggctgcagtccagcaggaggtgccatctgctcagtctcctggagttcatgcagatgcagatcaggttcagaacttggcagtaaggaatcaacaggcctcagctcaaggacctcagatgcaaggctccactcagaaggccattcctccaggagcctcccctgtctctagcctctcccaggcctctagccaggccctagcggtggcacaggcttcctctggggccacaaaccagtccctcaaccttagtcaagctggtggaggcagtgggaatagcatcccagggtccatgggtccaggtggaggtgggcaggcacatggtggtttgggtcagttgccttcctcaggaatgggtggtgggagctgtcccaggaagggtacaggagtggtgcagcccttgcctgcagcccaaacagtgactgtgagccagggcagccagacagaggcagaaagtgcagcagccaagaaggcagaagcagatgggagtggccagcagaatgtgggcatgaacctgacacggacagccacacctgcgcccagccagacacttattagctcagccacctacacacagatccagccccattcactgattcagcaacagcaacagatccacctccagcagaaacaggtggtgatccagcagcagattgccatccaccaccagcagcaagtccagcaccggcagtccccgctccttcacacagtacacacctccagttgggcgcagcagccagcagcaggcaaaacagcaacagagaacaagagcaggcgaagca

SEQ ID NO: 3853 - DNA, 471 bp, Homo Sapiens
tagcggagcttattcgacggtgtctgcttcttactgatgtttcacatagcactgtacttattttcacacgagtggtaagtgtatttataagataaattcctggggaaggaatcgctgtgtcaaagggttgttcataattttttacagaatttttttatagaacttcccaaggtgaatacatttcatttttgaataggtatcatgtgcacacggtacattaaaaaaatgtaaacagaagtcaaagtattggttcataatttacagaatatgtctctcatagatcttcctgaggtgaagaatacatttcatttttgaataggtatcgtgtgtacatggtacattttaaaagacaatgtaaacagaagtttccacacactcttcccccaaccaccaagttcctttcacttcctagaaaccaccataagcaacttattatgtacctttccccatctgtgtgtgtgagcgtgtaga

SEQ ID NO: 3854 - DNA, 588 bp, Homo Sapiens
gctatgtcggagacctcgctgaaaggagaaaggatcctgggttatgctaaggagccctgctatctctggtttgtcatggagttctgtgaaggtggagacctgaatcagtatgtcctgtcccggaggccagacccagccaccaacaaaagtttcatgctacagctgacgagcgccattgccttcctgcacaaaaaccatattgtgcacagggacctgaagccagacaacatcctcatcacagagcggtctggcacccccatcctcaaagtggccgactttggactaagcaaggtctgtgctgggctggcaccccgaggcaaagagggcaatcaagacaacaaaaatgtgaatgtgaataagtactggctgtcctcagcctgcggttcggacttctacatggctcctgaagtctgggagggacactacacagccaaggcggacatctttgccctgggcattatcatctgggcaatgatagaaagaatcacttttattgactctgagaccaagaaggagctcctggggacctacattaaacaggggactgagatcgtcccttgtggtgaggcgctgctagaaaacccaaaa

SEQ ID NO: 3855 - DNA, 559 bp, Homo Sapiens
  misc_feature (375)..(375): n is a, c, g, or t
  misc_feature (547)..(547): n is a, c, g, or t
gacgacgcttcgacggtgtctggatattgtctttattccatacagttactatttagaacaagacaagcatggcattggaaaatggttagcttttaaggttgtaacatagatttctaaaacaaagaaactaaaattacagtgttctggaagtctgtaacatgatgtgttgagaactagaatctgtgtttcccgggaggcctttcctgtaacataagccttttggcctgatttctaggcagcccgttggagtcttaataaaagcctcacaaatagggtaaaataatactttggtggtcaaatattttctgactgattatcaggttttggctgggttttgttaactgctgagctctttgaacaaataaaatatttggnctacaagtgctctgattatgaggtgggtgaacctgtagccttgccagtcaccctcctttaccaccttaacaggtcctcactatttaaaaatcactgttttgagttccctgttaggagactcagattctcccaataaggcattgctattaagcttaatttaagtacagaacancgtcgaaggggt

SEQ ID NO: 3856 - DNA, 945 bp, Homo Sapiens
  misc_feature (257)..(319): n is a, c, g, or t
atccctgtgctcttgatgtctctgcacaaagcttatggtttgatcaggatatattcacacagcgggagtcttcaccaggatatgagaatgccaagctggatcatctcttccaggacgaggtggccacggcacagcatctgcgtgaggagcagcagcggcagcagcatcagatggagcatgaacggcagcggctggtggccagcatggaggaggcgcggcggcggcagcatgaggccgacgagggcgtgcggcgcaannnnnnnnnnnnnnnnnnnnnnnnnnnnnnnnnnnnnnnnnnnnnnnnnnnnnnnnnnnnnnngaaccagaggctgcgtgagcagctgcagctcctggaggagcatcaccgggccgcgctggcgcactcagaggaggtcactgcctcgcaggtggctgccacaaagaccctgcccaatggccgggatgcacttgatggccccgcagcacaggcagagccggatcacagcttcgatggcctgcggcggaaggtgtcagctcagaggctgcaggaggccggcatcctgagtgcggaggagctgcagcgtgttggcgcaggcacacaccacggtggacgagctcgcacggcgggaagacgtgcgccactacctgcagggcctgcagcagtatctgcaaggctgttgctgaaggccaccaatgagaagctgagtgtttacgccgccctgcagaggcagctgctgagtcccggcacggtcctcatcctgctggaggcgcaggcgtgctcaggcttcctgctggaccctgtgcggaaccggtggctgacctgtcaacgaggctgtgaaggagggttgtggtgagccccgagctgcaccacaagctgctgtcggccgagcgcgccgtcacttggctacaaggacccctacactggccagcagatctctctcttccaagccacgcagaaagcgccta

SEQ ID NO: 3857 - DNA, 971 bp, Homo Sapiens
atgtctgactggttgcgggctgagtaagtaacttcctgggagacagcagcttccccacactccacgggaagatggcgcgcgggggctggttaggacaaggagcacgtgaggctcccgggaagcagacaggaacgtctcgacagcagaggaagacacaggaggtaaaacttggaggtgaaactctacacagaagtggtcactcggtcaatggcatgattgacctcgtttttggttgagtccagtcctttagcagcattcatgtcattccgtaaattctccactgtctttttcatgtgctttaactcccctgggtgtggagtggctcgccttagaagtgttctcgtctcattgtcttcttcatctttctcatcctccacaaatcggatcgcactgactctgttgacagcacgctcgttccaggcttcatcagagacatcatttaccaagttctccagtgcaccacagcgaggcagattctcttgacaagtaggttcagaaggcagctgaggaagtaagacacaggttaaaatcttctctcctgtggtgtagtctgtgtctgtctggaatgtaagcaggggctgggactggttgtcagatagccacagagccttcaacttcaaggcagtcagggataaaggtagatgcagcaacctgttccctgccacatccaggacatgaagttctgttgcctgtgacacctctgcaggtatccgagttagtctgttgtcacgtacacagaacacagtgaggctgcagcacccgccgatctatggtgagaaagaaaatacatcttttttccagttttctaggggagatggagtaggatcagagtaccttgtttaccaaacagtataaaaaggatgcataaacttataccacataactcaccggtctcactgatgaccactatcattaatttaaatcttacaaagcgcagccccatatgttcataaaatctctgcaaaatgtta

SEQ ID NO: 3858 - DNA, 637 bp, Homo Sapiens
gaggtcctttttcatgataatggtagtgtaaaagaaattgccactaacgatgtagggatacaaaaggatggtgcaccaaaggcaacatttgagagaggactggaactacatgctaaagtcacaatttttgcagaaggttgccatggacatctagccaagcaactatataagaagtttgatttgagagcaaattgtgaaccgcaaacctacgggattggactgaaggagttatgggttattgatgaaaagaactggaaacctgggagagtagatcacactgttggttggcccttggacagacatacctatggaggatctttcctctatcatttgaatgaaggtgaacccctagtagctcttggtcttgtggttggtctagactatcagaatccatacctgagtccatttagagagttccaaaggtggaaacaccatcctagcattcggccaaccttggaaggtggaaaaaggattgcatacggagccagagctctcaatgaaggtggctttcagtctataccaaaactcacctttcctggtggtttactaattggttgtagtcctggttttatgaatgttcccaagatcaaaggtactcacacagcaatgaaaagtggaactgtagcagcaggacatc

SEQ ID NO: 3859 - DNA, 465 bp, Homo Sapiens
ggaggctgcacacagcaaccggattctccacctcctgacccaggaggctctctcaatccatggagtcaaggaggccgtgcaactggtgaataccagagaagaagttgaagatctttgccgcctagacaaaatgatagatctgatcattccacgtggctcttcccagctggtcagagacatccagaaagctgctaaggggattccagtgatggggcacagcgaagggatctgtcacatgtatgtggattccgaggccagtgttgataaggtcaccaggctagtcagagactctaaatgtgaatatccagctgcctgtaatgctttggagactttgttaatccaccgggatctgctcaggacaccattatttgaccagatcattgatatgctgagagtggaacaggtaaaaattcatgcaggccccaaatttgcctcctatctgaccttcagcccctccgaagtgaa

SEQ ID NO: 3860 - DNA, 626 bp, Homo Sapiens
  misc_feature (578)..(578): n is a, c, g, or t
tcctgctgatgaattgtatggaatagttggtgctaaccttaagaggagctttgatgtcttagaggtcattgctagaatcgtggatggaagcagattcactgagttcaaagccttttatggagacacattagttacaggatttgctcgaatatttgggtacccagtaggtatcgttggaaacaacggagttctcttttctgaatctgcaaaaaagggtactcactttgtccagttatgctgccaaagaaatattcctctgctgttccttcaaaacattactggatttatggttggtagagagtatgaagctgaaggaattgccaaggatggtgccaagatggtggccgctgtggcctgtgcccaagtgcctaagataaccctcatcattgggggctcctatggagccggaaactatgggatgtgtggcagagcgtatagcccaagatttctctacatttggccaaatgctcgtatctcagtgatgggaggagagcaggcagccaatgtgttggccacgataacaaaggaccaaagagcccgggaaggaaagcagttcttcagtgctgaggaagcggctntaaaagagcccatcattaagaagtttgaagaggaaggaaacccttact

SEQ ID NO: 3861 - DNA, 454 bp, Homo Sapiens
agccctgccagttccagccttgtgacagtgatactagccgacagttagaatcagaaactgggaccacagaggagcacagtctaaataaggaagctcgaaaatgggccacacgtgtggcacgtgagcataaaaacattgttcaccaacaacgggttctaaatgatctggagtgtcatggaaatgctgtatcagaacaaagccgagcagagctagaacagaaaattagatgaagctagagaaaatattcgtaaagcagagataattaaattggaaagctgaagcccggttggacactgctaaagcagattggtgtttctgtggacacatggctaaagagtgccatgaaccaagtaatggaagaactggaaaatgagcgatgggcccgccctccatgcagtgaccagtaatggcacataacactcgcttaatgcagacaccgtcgaagggatcttat

SEQ ID NO: 3862 - DNA, 681 bp, Homo Sapiens
tccctcccaaggaaggatgtatctttaatatttagaatcaagcttctgagacttgctactcaaatttattcacagatttttaaagtatacaattaatttacagaaatgtattttatttaaagtattcattcagatactatattacagtagatgacatactccaagtgtgtgaagcataaaataatttatctcattatcccaaacatgagtaggagaatatctagctatcttttccagtttcaatgacgtgtaagactataccagtatcaaccttctcccacagaattagagagccaatttcttaaaccacttgaggatctggaggccaaatgtctacactaatttctatctctgatcaaagattacctggttgcttactccatacccagctctccagaattgacttggccccatatacaggtgcaggagtttcatcttttttctctctgtcatccacatcttctttctttgttccacttggttcaacactatcatctgcagaattaaaatttttttaatctgtaaccgcttttcagaatgccataccatctgtcagtctctgcaaatgtccctccccgaaaagttacaacacacatcattaactgaatgtttgacaacttaaaaataaaatacatcaatcgtacctgtaacagatccagtataattttcataaagcaatat

SEQ ID NO: 3863 - DNA, 213 bp, Homo Sapiens
  misc_feature (192)..(192): n is a, c, g, or t
tataaccactaaactatattaactggtaattctaagtacagacgcggtaaagaattcaaaggaaaagaataaagtactgtgagagatgataccatgggataaaagtccttgagatgtcctgtctatttcaaccaacaggcaatttatacgctgcagttttccatgcccagcaacaccgtcgcaaggggtacncgagctcgacattcgtcaatc

SEQ ID NO: 3864 - DNA, 1355 bp, Homo Sapiens
agcgacatttgctgctcactgtattgggtaccctgtgtaactttggggttgggcttcaaaagttacgtaagctacaaaatgcggttaaggaagcaaaaagaagtacaaaaagagaacgagttttaccatgcaacttcttcaacaagctctccctccagagcaacagatgctacagaagcaagaaaaagaggccgaggaagcagccaaagtattacctgatatggattcttcgatccttatacaccacaatggaggtatcccagccaacaaaaaactctccacaactttgccagagatagaataccgagaaaacgggaaagaaaaggacaaggatgccaaaaaacacaaccttggaataaataacaacaatattctacaacctgtagactctaaaatacaagagattgagtatatggaaaaccatatcaatagtaaaagattaaataatgatcttgtgggaagtacagaaaatctcttgaaagaggactcatgcactgcttcctcaaaaaattacaaaaatgccagctgagttgtgaactcttcacctcgaagtcatagcgccacaaatgggagcattccttcctcatctagtaaaaatgagaagaagcagaaatgcactagcaagagcccaagtacacacaaggacttaatggaaaactgtattcctaataaccagctaagcaaaccagacgcactggtcaggctggaacaagacattaaaaagttaaaggctgacctgcaagccagcagacaagtggaacaagagctccgcagtcagatcagctccctttcgagcaccgagcgagggatccgctcagaaatgggccagcttcggcaggagaacgagctgctgcagaacaagttacataatgctgtgcaaatgaagcaaaaagacaagcagaatatcagccagttggagaaaaagctaaaagctgagcaggaagcccgaagttttgtagagaaacagttaatggaagagaaaaagaggaagaagttagaagaagccactgctgcccgggctgttgcgtttgctgctgcatctaggggagaatgcaccgaaaccttacggaatcggatcagagaactagaagcagagggcaagaagctcacgatggacatgaaggtgaaagaagaccaaatcagagaactagaactaaaagtccaggagcttcggaaatataaggaaaatgagaaggacactgaggtgttaatgtcagccctctcagccatgcaagacaaaacacagcacctggagaacagcttaagtgcagagacgagaatcaagctggacctgttctccgcactgggcgatgcaaatcgcagctcgagactgcccaggacaatccttcagcaac

SEQ ID NO: 3865 - DNA, 446 bp, Homo Sapiens
cggtcgttctgcttaaacatgtctcagtccatattttctggtagagaagtggaaggcaaggtataggagttgagtaaatttatgagcctactcagttcctatccctgattgttttcctcaccttcttaaggcagaagccagttctggcttgataacaactttgaaaatgttttggctcatcagaacattctattcttgggtaactaagtcaactttaggttaacattacaattaaatttcatcttcagttttatctaggcaagtttataaagctagcttctttcaggtaaaatgagaccatttggcttcttagctagttctcatttggggagggtgtgtgtgtctcttttattctgtatgttcagggttctaattacctagcagcttttaaataattggacaatgccagtttatgatttacaaagcagcaacattataggaggtaa

SEQ ID NO: 3866 - DNA, 618 bp, Homo Sapiens
tattagcaggaggtttgacggtgtctggcgtgaaaggggggtgccgggccctctcaggcaccagtgttgcttctccagtggttgcaggtgctgtcaccttgttagtgagcacagtccagaagcgtgagctggtgaatcctgccagtatgaagcaggccctgatcgcgtcagcccggaggctccccggggtcaacatgtttgagcaaggccacggcaagctcgatctgctcagagcctatcagatcctcaacagctacaagccacaggcaagtttgagccccagctacatagatctgactgagtgtccctacatgtggccctactgctcccagcccatctactatggaggaatgccgacagttgttaatgtcacccatcctcaacggcactgggagtcacaggaagaattgtagataagcctgactggcagccctattgtggccacagaacggagacaacattgaagttgacttctcctactcctcggtcttatggccttggtcgggctacctggccatctccatttctgtgaccaagaaagcggcttcctgggaaggcattgctcagggccatgtcatgatcactgtggcttccccagcagagacagagtcaaaatgg

SEQ ID NO: 3867 - DNA, 591 bp, Homo Sapiens
gtagagcagtgcttactgtgcataagctattaagtagccatctgtaacaccattgatattttccagtttctgaaatagtccaaatacttcattctgtaaatagcagtacttttcagaacctctgaagttggcaagcatatctttaagctggttgagaacctcagcaattgcttgtgaatcattctgcacactcttaagctcgttaattttcactgtgatgtggtgagaagacccctggtctgcttagagggaggttaaagagagtcatcctgccctcgcagtgctctatctgcctgcgaatcttctgcagctccatcagcatccatgtatcttgcttgtcattttctctgttggttacaattactttattatggttgacatcttggcaggttccatgatgagtgatttcagtagtggtcactgtctggtgctggggatagccagggagctgaatgaccagggtctggtaatgcttctgggcatcggtgaactgagactgtattttccgcttgtcatcatctccaaacatctctaagccttggctatttctgatgaactcttggcactgtaactcaaggtcggatatcgtct

SEQ ID NO: 3868 - DNA, 536 bp, Homo Sapiens
tgcagactccgtttatacggtgtctgctacactgcagcggagtaggattcaatcagacatgcgatatggcccgtcaacagagggcccagactttacgagttcggaccaaacacacttcaggtctcagttatgggcaagaatctggaccagatgacatcaagccatgcccacgatgcagtgcatacattatcaagaagaatgatggaagctgtaatcacatgacctgtgcagtgtgtggctgtgaattctgttggctttgtatgacaagagatctcagacttgcattacctcagcccctctggctgtacattctggggcaagaagccatggagccgtaagaagaaaattctttggcagctgggcacgttgataggtgctccagtggggatttctctcattgctggcattgccattcctgccatggtcattggcattcctgtttatgtaggaaggaagattcacagcaggtatgagggaaggaaaacctccaaacacaagaggaatttggctatcactggaggagtgacttagtcggt

SEQ ID NO: 3869 - DNA, 892 bp, Homo Sapiens
gggacatccgccgcctgggcgcccaattccggaaggtgctgcacagctgtggcggcgggtactgcgttagtgattagagtttcttccctgccggaggtgggatacacggtagcatcatggtcgaggaggtacagaaacattctgtacacacccttgtgttcaggtcgttgaagaggacccatgacatgtttgtagctgataatggaaaacctgtgcctttagatgaagagagtcacaaacgaaaaatggcaatcaagcttcgtaatgagtatggtcctgtgttgcatatgcctacttcaaaagaaaatcttaaagagaagggtcctcagaatgcaacggattcatatgttcataaacagtaccctgccaatcaaggacaagaagttgaatactttgtggcaggtacacatccatacccaccaggacctggggttgctttgacagcagatactaagatccagagaatgccaagtgaatcagctgcacagtccttagcggtggcattacctttgcagaccaaggctgatgcaaatcgtactgccccctagtggaagtgaataccgacatcctgggggcttctgaccgtccacagcctacagcgatgaattcaattgtcatggagactggcaataccaagaactctgcactgatggctaaaaaagcccctacaatgccaaaaccccagtggcacccaccgtgggaaactctacagggttatcaggggggcctcttggctggggttccaagttttggtgcctgaacctggaaaatcaccggtctggtactggatcttgctgacaaaaacctataccatcttggcacctggccctccggcaaattaaaaccgcccttgaacggtgaattatcactcccctgtcgggcgtgggcaaaa

SEQ ID NO: 3870 - DNA, 1045 bp, Homo Sapiens
gagatgtcaggatgttgctccatcctttgtcttggaaccaccagtctagtccgtcctggcacttaagaggagtcaagtaatggaggtcccagccctgggggtttaagctctgccccttccccatgaaccctgccctgctctgcccaggcaaggaacagaagtgaggatgagacccagccccttcccctgggaactctcctggccttctaggaatggaggagccaggccccaccccttccctataggaacagcccagcacaggtatttcaggtgtgaaagaatcagtaggaccaggccaccgctagtgcttgtggagatcacagccccacccttgtccctcagcaacatcccatctaagcattccacactgcagggaggagtggtacttaagctcccctgccttaacctgggaccaacctgacctaacctaggagggctctgagccaaccttgctcttggggaaggggacagattatgaaaatttcatggatgaattttccagacctatatctggagtgagaggcccccacccttgggcagagtcctgccttcttccttgaggggcagtttgggaaagtgatgggtattagtgggggactgagttcaggttaccagaaaccagtacctcagtatttctttttcaacatgtaagggcaagaggatgaaggaaggggctatcctgggacctccccagcccaggaaaaactggaagccttcccccagcaaggcagaagcttggaggagggttgtaaaagcatattgtaccccctcatttgtttatctgatttttttattgctccgcatactgagaatctaggccaccccaacctctgttccccacccagttcttcatttggaggaatcaccccatttcagagttatcaagagacactcccccctccattcccacccctcatacctacacccaaggttgtcagctttggattgctggggccaggccccatggagggtatactgaggggtctataggtttgtgattaaaataataaaagctaggcgtgtttgatgcgcttttaactttggc

SEQ ID NO: 3871 - DNA, 644 bp, Homo Sapiens
  misc_feature (174)..(183): n is a, c, g, or t
ggtgctaatgggttaatgcaccagcaagcaaaatattttatgttttgggggtttgaaaaatcaaagataattaaccaaggatcttaactgtgttcgcattttttatccaagcacttagaaaacctacaatcctaattttgatgtccattgttaagaggtggtgatagatactannnnnnnnnncatattgtatagcggttattagaaaagttggggattttcttgatctttattgctgcttaccattgaaacttaacccagctgtgttccccaactctgttctgcgcacgaaacagtatctgtttgaggcataatcttaagtggccacacacaatgttttctcttatgttatctggcagtaactgtaacttgaattacattagcacattctgcttagctaaaattgttaaaataaactttaataaacccatgtagccctctcatttgattgacagtattttagttatttttggcattcttaaagctgggcaatgtaatgatcagatctttgtttgtctgaacaggtatttttatacatgctttttgtaaaccaaaaacttttaaatttcttcaggttttctaacatgcttaccactgggctactgtaaatgagaaaagaataaaattatttaatgttttaaaaa

SEQ ID NO: 3872 - DNA, 668 bp, Homo Sapiens
  misc_feature (644)..(644): n is a, c, g, or t
gcaggacaacgtttagcagcatgtcgtcaaagatggacttcctgaaccgaatccacaagaagcacccccctaaccggcgtgtgctccagtcggtcaaaagaagaagcttgaaggttcctgatgctataaaatctcagtaccagtttccaccccctctcattgcacccgcggacattcaggacggggagctgatctgcaatgggatccctgaggaatcacagatgcaccttttgaactctgagcacttagccacccaagcagagcagcaagagtggctctgtagtgttgttgcgctccagtgcagcatattgaaacatttatctgctaagcagatgccttcgcattgggactctgaacagacagagaaggctgatattaagcctgttattgtgactgacagctcagtcaccacctccctgcaaacagctgacaagacacctacaccttcccactaccccttgtcctgcccctcagggattagcacccagaattccctgagctgctctccaccccaccagtccccagccctagaggacatcggctgcagttcttgtgcggaaaaatccatgaaaaccccttgtgggactgccaatgggccagtgaacacagaggtgaaagctaatggcccacacctctacagcagncctactgattccacggacccccgg

SEQ ID NO: 3873 - DNA, 1016 bp, Homo Sapiens
  misc_feature (281)..(281): n is a, c, g, or t
gggaacttattaaaaggaaaagaggaacagatgaataccatgaaggctgttttggaagagaaagagaaagacctagccaatacagggaagtggttacaggatcttcaagaagaaaatgaatctttaaaagcacatgttcaggaagtagcacaacataacttgaaagaggcctcttctgcatcacagtttgaagaacttgagattgtgttgaaagaaaaggaaaatgaattgaagaggttagaagccatgctaaaagagagggagagtgatctttctagcanaacacagctgttacaggatgtacaagatgaaaacaaattgtttaagtcccaaattgagcagcttaaacaacaaaactaccaacaggcatcttcttttccccctcatgaagaattattaaaagtaatttcagaaagagagaaagaaataagtggtctctggaatgagttagattctttgaaggatgcagttgaacaccagaggaagaaaaacaatgaccttcgggagaaaaactgggaagcaatggaagcattggcatcaactgaaaaaatgctgcaggacaaagtgaacaagacttccaaggaaaggcagcaacagggtggaagctgttgagttggaaggctaaagaaagttctcaaaaaattatttccaaaggtgtctgtcccttctaatttgagttatggtgaatggttgcatggatttgaaaaaaaggcaaaagaatgtatggctggaacttcagggtcagaggaggttaaggttctagagcacaagttgaaagaagctgatgaaatgcacacattgttacagctagagtgtgaaaaatacaaatccgtccttgcagaaacagaaggaattttacagaagctacagagaagtgttgagcaagaagaaaataaatggaaagttaaggtcgatgaatcacacaagactattaaccagatgcagtcatcatttacatcttcagaacaagagctagagtgattaagaagcgaaaataaggatattaaagtctagaa

SEQ ID NO: 3874 - DNA, 993 bp, Homo Sapiens
gccagggccaggattaagctcattacctttcaaaaggttcattggggaaaccggggccccaaggaggataagggttggagcttctatttgttccccgttattcttcgggatcccagctggctttaaatatcttggaatagcgtttcccagccggaacccaaacccccgaaccaaaattatcaaaatcgatgatgagctggtcatctgcaaaccgagcaaccgatgacttggtggagttgacagggcatctgaaaacctgcttcttctaatgccttccgcatttcataggaattcatggtaccagacctgtcaacgtcgatttctcggtaaattttttggtatttttgaatcttcgtccagagaatgtagaactccttcagcccccagcttgccactcccgtccgaatctagcatgtcaaccataattttgcatgtctcgatgctgaagccatctgactggatatcttggcgctttgctagaacccttctcaggatggtctgcagctcaaaggcagagatctccgcatcctctcctgccaactgggcaaacagtctcctgaatccatcatcaatgtcatcctcgctgatgtcgaactcttcaagattggcctcgatttcatcatcgacagcttggtagtcagctttcttttcagaaaagacccggatgcagaaatccccatccttgttgggttcgaaggtggaaggcacgagaatgtactctcctggcggcagcttgaagcggttgagcacctcccggaggttgatgaaggtgtctgagcgctccctggcgcgattcgtcaggaagaagtttttgctgaggtggatgttggtctgcccacttaactcctctggaacctcatagatgccaaagccgatggtgtgcatgtcctcgcccatcttcctctgccgccgtcggtgcttctgaatgagccccaccaggaaggtgcaccgctctccccatcctcctcgtcctcatcctcctcccctattgga

SEQ ID NO: 3875 - DNA, 286 bp, Homo Sapiens
  misc_feature (136)..(154): n is a, c, g, or t
ggggcatttcgttgataccaccagtggggcatttcgttgataccaccagtggggcatggggtgcagcaggaaaattagaatggcaggaggttcttatttattattaagcactgttgaccaaacctctatcttagannnnnnnnnnnnnnnnnnngagacaagagtctcactctgttacccaggctggagtgcagtaccatttattgaaaagacagtcttttctccactgaactgcctttgcatgtttgtcaaaaatcaattaactatatctgtgtgggtctggcca

SEQ ID NO: 3876 - DNA, 694 bp, Homo Sapiens
  misc_feature (548)..(599): n is a, c, g, or t
cctgcacagcgctgacgtgtatagaaaacacccaggaactaggaaggcgcttctgcctgaggggcagctgcttgccaactcctgctctgttcgcctcggatcagctgagccttccgagctggctctcactgcctccccaaggccccctgcctgccctgtcaggaggcagaaggaaagcaggtgtgaagggcaatgcaaggaggggaagcacaaccccccagctcccgctccgggctccgacttgtgcacaggcagagcccagaccctggaggaaatcctacctttgaattcaagaacatttggggaatttggaaatctctttgcccccaaacccccattctgtcctacctttaatcaggtcctgctcagcagtgagagcagatgaggtgaaaaggccaagaggtttggctcctgcccaatgatagcccctctccccgacatgtgtttgtgtgtcaagtggcaaagctgttcttcctggtgaccctgattatatccagtaacacatagactgtgcgcataggcctgctttgtctcctctatcctgggcnnnnnnnnnnnnnnnnnnnnnnnnnnnnnnnnnnnnnnnnnnnnnnnnnnnncgccccgactagacacacaaagcagttgaatttttatatatatatctgtatattgcacaattataaactcattttgcttgtggctccacacacac

SEQ ID NO: 3877 - DNA, 326 bp, Homo Sapiens
  misc_feature (32)..(32): n is a, c, g, or t
taagatccgagatgctgaacagttcacagagngcaactccaccagcatggggcaacaggaattcaaactttttggccatcagcaatactgagaggttctcattgacactgcccagtctgcaactgtcaatctggaggaactgcagggccttcgcctgtaggagttgcttaaatatcactctattgtggcactgtactcctgtggcaataccaatacctaatgggaccagtgccttggaaaatggtggagtgccccagacatgtcatcaggggaggttggctcctcaatccacaatggcttgaacttggccagcttggacatacact

SEQ ID NO: 3878 - DNA, 193 bp, Homo Sapiens
aacattttaagcagactgctaaactgttctctgtataagttatggtatgcatgagctgtgtaaattttgtgaatatgtattatattaaaaccaggcaacttggaatccctaaattctgtaaaaagacaattcatctcattgtgagtggaagtagttatctggaataaaaaaagaagatacctattgaaaaaaa

SEQ ID NO: 3879 - DNA, 1060 bp, Homo Sapiens
ggggtccctagcccgggagccgggtctctggagtcgcggcccggggttcacgatgtccgacgaggaagcgaggcagagcggaggctcctcgcaggccggcgccgtgactgtcagcgacgtccaggagctgatgcggcgcaaggaggagatagaagcgcagatcaaggccaactatgacgtgctggaaagccaaaaaggcattgggatgaacgagccgctggtggactgtgagggctacccccggtcagacgtggacctgtaccaagtccgcaccgccaggcacaacatcatatgcctgcagaatgatcacaaggcagtgatgaagcaggtggaggaggccctgcaccagctgcacgctcgcgacaaggagaagcaggcccgggacatggctgaggcccacaaagaggccatgagccgcaaactgggtcagagtgagagccagggccctccacgggccttcgccaaagtgaacagcatcagccccggctccccagccagcatcgcgggtctgcaagtggatgatgagattgtggagttcggctctgtgaacacccagaacttccagtcactgcataacattggcagtgtggtgcagcacagtgaggggaagcccctgaatgtgacagtgatccgcaggggggaaaaacaccagcttagacttgttccaacacgctgggcaggaaaaggactgctgggctgcaacattattcctctgcaaagatgattgtccctggggaacagtaacaggaaagcatcttcccttgccctggacttgggtctagggatttccaacttgtcttctctccctgaagcataaggatctggaagaggcttgtaacctgaacttctgtgtggtggcagtactgtggcccaccagtgtaatctccctggattaaggcattcttaaaaacttaggcttggcctctttcacaaattaggccacggccctaaataggaattccctggattgtgggcaagtgggcggaagttattctggcaggtactggtgtgattattattattatttttaataaagagttttacagtgctgatatgaaaa

SEQ ID NO: 3880 - DNA, 251 bp, Homo Sapiens
gttccgtctggcttcttgattctgggacagcaagtctgtgattggactgtactcccctgccctcaacaagatgttttgccaactggccaagacctgccctgtcaagcctgtgggttgattccacacccccgcccgacacccgcgtccgccacagggccatctaacaagcagtcacagcacatgacggaggatgtggaggcgctcgccccaacaattgagcgcttgtcaaaattaggcgaatgtcctgggcc

SEQ ID NO: 3881 - DNA, 1144 bp, Homo Sapiens
  misc_feature (448)..(448): n is a, c, g, or t
tttagtaatcactcctaaaaatcttcatttggcaccagatggtgtgtttaaaacaccctaggatgttttgaatcaggcttgattttgttagttgagttacaggagaattttaagggtgagggtatgggggtcagggaagaaaaggaaatgggaaatggaccagaaaaaatcttgagtcatcatctaaatcaacaaagcactgatagctccaaatattaggtcagacactaaaacgactgatataggctcaagtggtttataaaacctataaaaagactacaccagcaaagtccctgtcaatctgtcagagttcagaaactaaaacagggagtaacattttagcttaaaaccttatctcaagagaatcatatacacttcacatgaataaaaatacctgaaaccaaacatttttaaaagctccagtacccaaaatataaagaaaaaaaantccagaagactgaatcaatccatggaatcacaaagcggcccggacaatctatatctcccctccacactaaccatcccatggaagaccaagggagatcagaccttccagacctatgcaccatctggtcgccgcaaaattctacggagattccttgtggaaaagcagtttcccatcttttgtgtctctccctaccatgcaggaagcaagtctggctgtgctattctattaccattatatatcacccatctgcaacaaggtactgtacagacaagtaagaagtatgttatctagttccctttcccccagaaggttgaggctcaggtataggggtaattctcctgtgcagtctttatttatgctgactcagtgacttcaacaggcttaatcatgtggtcaggtttgttgccagctgcataatgctcccacatctgtagatagagccgctctagttccattgtgtattgtttggtgttgaacagagggctagatattctttgcttccagactttgccacgaactttcttcaggtattctagatcagttcccagccttcacagctatgtcttcatattcttgtctgtttttagcaataagctcaagacaacctaagcaagtgagctgggatgctgcaactcgagaagcaagagtctctcctggcatagtcaccatggggtccgctgtctggggtcctctagg

SEQ ID NO: 3882 - DNA, 1006 bp, Homo Sapiens
agctcgccagcgacatttgcaggtcagattcggatctgtgcttggggtgtctcctttaaagcggcagtcggggacatttcgagggtagtttggtggtcctagagaggtgtttttgagattcctgagacaaagtggtctacagtgaaggccaggcttacgtatctctgcgcctcgctgaggggctggctcacgggggacagcgtggcatggacagagggcagcagcaggggactgcttagcaaggcctggtgtctgtcctgtcttgggactgaagcatcctttttgaagttgcccatttcctgaaaactcagtgctaagatattaactgaatgtagcacacagatttttatgttggcccctgagtcaaagatactccccagttgcatttaagcaatgctgtgtgactcctaacgctgtggcctgacgggccccaaaagttctctatccttcttccatggcctgtgccctctcttcacagaaccgctaagcatgtatggagaagggaccagcacccatgccacagtttacagctaagtaattgttactcctttttacctgacgtaggcctgtaaaagaggaaattcagacatcgtacgactcgtaattgaatgtggagctgactgcaatattttgtcaaagcaccagaatagtgccctgcactttgcgaagcagtctaacaatgtgcttgtgtacgacttgctgaagaaccatttagagacgtaagtgagaagcgactgtgccacagttaagtcacatatcatacatctgtttatgtagacatattataattggagtggcctgtgtgtaactgctcagaaaaacatccagcacaagtcctgatggttttgtttccagtagatcacagatttaataaatggcatatgaattatttttctgcaagttatttaactctcagaaaatttcaaacttaacactggcctatctgggagtattttcctttaaatattaagtatgctctaatttggtagcaaatgtcgctggccgg

SEQ ID NO: 3883 - DNA, 703 bp, Homo Sapiens
cccacttgttattagatgttacctacagacagaacatcttaaagcattcaactgttcataagtaactctgaagaaacaactaattcatccattctgtgaaaatgtattttaaatatgttcaactatatttggttttaaataagctgtaatgttatattttatgacatactaacattctttataaagtttgtacctaaataatagttcaaaatatctccatgagttagtttggtctattaggtaaattatacatcgtaaaacctgagtatttacaagttaacttgtcaaaataggaaacctcacactgaagttctgaaaagcttggggtttggttttcctattaccattattaaaagtcagaaggagaaacatgaagaactaagtgacaagataatgagaaatatttgaggctgtaaaataagcagaaaagtacagcaacaggctggtgtgtacatattttatatgtgctgtagtttctaggcacaagttaagggttaaattaacagttttagattcttcagacctaacaaatttaaaatacagttcatatttccccaaatgtttaacaatccaacatattttaactaagttccttttatgactcctatagtgcaagcaacataaaatattctaaaagttgatgaaattattttgattattcattagttctacatatgctgggtgagtatctggttatattcgc

SEQ ID NO: 3884 - DNA, 463 bp, Homo Sapiens
  misc_feature (358)..(358): n is a, c, g, or t
tgaggtagcggcatcagtgtaggccacttaaattagtccagagcagtgcatcaaagtgctttgtcctatcattctaactgcagactacccaattaatctggctgcaatcaaaatgcgcaccaaagtgatagagagagtgtccaaggaaaccctaaacctgcttttgccagagattatgccaggtctaatacagggttatgataattcagagagcactgttcggaaagcttgtgtctttctgcctggtggccgttcatgacggtaattggtgatgaactaaaaccacatctcagtcaactcactggcagtaaaatgaagctactgaatctttacatcaaacgtgcacaaacaggttctngaggagctgatcccactactgatgtttctggacaaagttagtgaagctcatcacagcgaaccaggtctctcaaaagaaaggacagatagaccaccctcatcaatg

SEQ ID NO: 3885 - DNA, 502 bp, Homo Sapiens
ggctggcgtaaaccctgctgccaggccctctccccactgccccaaaccggcctagacacgaagaccaaagcagcctgcacagggcaaggcccccgcggaatcctgcagagcaaactcaggttaacttgggtccatgaccgtttgcattcgaaacacaatacactgcctcgttctctcagttagcagctgggcagcagcgcaccattcatcatttaggcttgtggtttgttgtttactctaccaatgttatgtcgaaactgcattgtaaaaagagaagaaaatggcaggttttccaggtccacggaaaggtttggcctgacgctggagtgcggtgatgaacttacgtgacaatgattgtattcctcagtagcactttaaacgccgaagacagccctgcagcaagcctgcacacgggcttgggtgggttcctttggagaagatgtggctggaacacaaacaatctttgaaagaaataaatgtgcacacagaacactaaaaaaaa

SEQ ID NO: 3886 - DNA, 810 bp, Homo Sapiens
ccgacatttgcctgcttgtatgggatcaaagaggacagcctttctccctcaccttctccaaatctaggtgaaatcacagagtacaaaaagtgagaatgctgaatgtgtaaagttgcagagggatccctaatttgaagactttgacacagaactaacttcttttgacttaaatgaatttaaaatgagccaaaggaccctgaaaagaagacatgttgatttcccactcctagatgctaaagagacttggcaccagctttgttcaaactgtaaaaatagcaatttgcccctactcgctcagagtgggacagtagtgaacagagctgggattccatgcgacagcttgaatgctgaccttcagacatgagacatagggatttggaggccccttagaatgggtagatggtgttatgttcccttcctggcatagcattcacttggtgctttggagattaggtgagggccctataggtagttggcctgttggcagaatttatttaggaacagcccttttgaaagtgtcccagtaacaacgcacccagctgcagcaaggaggtggggaaggagggcaccccaaaggacagcgccttcttctcttccacccaatgcacggccttgggtgatggaggcgggttccctgtggctgcgtggatcccataggatcaagcccttcttgcatgaagcagtgttgtgactcttctctctccccttcctctgcacttcctttctgtaatccctactgttcttcttagtcccagcttctgcccagggagcttctacccagacttctttgcaaatgtcgctggtccacta

SEQ ID NO: 3887 - DNA, 977 bp, Homo Sapiens
  misc_feature (325)..(325): n is a, c, g, or t
ttaaccatcccaggatctggaacatctgatcctagctggaaatccacaccccaacattgggtgcctcgactaggcgtgttgaataatagcaggcacaatgccaaatacaggtatctcttgtacattctcacactgaagctttccacacaaagctattcccagtggcacacttcttgtattcatggccagagtaaccacaattgccaaatctgtcacctgtgtagaatgtcacttccatggaacaatctttggggcacacttggcttttgtgccaaagatgacttgacattgagcatcataaaactggcacatgccgttgtagcanataggctttgttattctggcaaggatatccattctgaataaaaacatctggctgacagaaactgagaagaaccactggcagtactctggaacatcacactcactggtttttcctcggcataaagtacctcctggataggaaccgacagtctttacaacagccaccatatgcacactcagcaaatgatttaagcttacaggtacttcccttcgcagcaagggtccaattcacattcctttggagtaccacagtcacactcttccccagcgtccaccaacttattaccacaggagggagcactataggcttcatcaggctttggaatattaagaaggcagtttcctcctttatttaaagttaacttctcaaagtcctccgcactgcaactgctaaagtttctggaacacgatgctcctgaattcatgatgcagctctttgctccacaggaacaatctctcccatcatcgtgattcattccaagattatgacccaattcatgagcaacaatggaagcaaatgtctccacagtgatttgtccaaacacattaatcccgcctgcgtggctccttgaacacactgttcccacaaatgccattcctgcagttccaccccgacctttctttagaactagctgtgtactgtcatgatgtct

SEQ ID NO: 3888 - DNA, 912 bp, Homo Sapiens
aggacattgctgtagtcagcagtgtctgacctgtctttatctagcagtaattaaaggttactgcctgaaatacgagaatagcaaagaggctggagcttaaactttggtgtgctttgtttagcttgaagaagcaaacagcatgctaaccaaagatattgaaatattaagaagagagaatgaagagctaacagagaaaatgaagaaggcagaggaagaatataaactggagaaggaggaggagatcagtaatcttaaggctgcctttgaaaagaatatcaacactgaacgaacccttaaaacacaggctgttaacaaattggcagaaataatgaatcgaaaagattttaaaattgatagaaagaaagctaatacacaagatttgagaaagaaagaaaaggaaaatcgaaagctgcaactggaactcaaccaagaaagagagaaactcaaccagatggtagtgaaacatcagaaggaacggaatgacatgcaagcccaaatggtagaagaatgggcacataggaatgagcttcagaagcagttggccagcaaagagagtgatatggagcaattgcgtgctaaacttttggacctctcggattctacaagtgttgctagttttcctagtgctgatgaaactgatggtaacctcccagagtccagaattgaaggttggctttcagtacccaatagaggaaatatcaaacgatatggctggaagaaacagtatgttgtggtaagcagcaaaaaaattttgttctataatgacgaacaagataaggagcaatccaatccatctatggtgttggacatagataaactgtttcacgttagaccctgtaccctaggagatgtgtatagagctgatactgaagaattccttaaatattccagatactaaagcaaatgtcgcct

SEQ ID NO: 3889 - DNA, 755 bp, Homo Sapiens
actgatgcatggttagaactggatcagcctcagatatgcaagtggcataaatgtcaacctgcagaagaatttaacccttcccaaaaacttactgaataaagaagaaaacacactgaaaaacacaattgttttcagtaatccttcttcagaatgtagtatgaaggagggaatacagacatgtatgtttcctaaggaaactgacattaaaacttcagagaacacagccgagttcaaggaacgggagctctgtccactgaagacctccaagaaactacctgaaaaccatttaccaagaaactcacctcagtaccaccagccagacttgccagaaatttccaggaaaaataatgggaataaccagcaagtacctgtcaagaatgaagtagatcattgtgaaaatttgaagaaggtggacacaaagccttcttcagaaaagaagattcacaaaacatctagagaagacatgttttctgagaaacaggacatacctttcgtagagcaagaagatccttataggaagaaaaagcttcaggagaaaagagaaggaaatttacaaaatttaaattggagtaaaagtcgaacatgtagaaagaacaagaaaaggggtgttgctccagtctcaaggcctcctgaacagagtgatctaaagcttgtgtgcagtgactttgagaggtctgaactgagcagtgacatcaatgtaagaagctgcgtgtatacaagaaagcactagggaggttgtaaagcaaatgtcgctg

SEQ ID NO: 3890 - DNA, 1126 bp, Homo Sapiens
gggtccggaattcccgggatggattgggaagcggatggctgagaaaatcatagagatcctggagagcgggcatttgcggaagctggaccatatcagtgagagcgtgcctgtcttggagctcttctccaacatctggggagctgggaccaagactgcccagatgtggtaccaacagggcttccgaagtctggaaaacattccgcagccaggcctccctgacaacccagcaggccatcggcctaaagcattacagtgacttcctggaacgtatgcccagggaggaggctacagagattgagcagacagtccagaaagcagcccaggcctttaactctgggctgctgtgtgtggcatgtggttcataccgacggggaaaggcgacctgtggtgatgtcgacgtgctcatcactcacccagatggccggtcccaccggggtatcttcagccgcctccttgacagtcttcggcaggaagggtccctcaacagatgacgtggtgacccaagaggagaatggtcagcaacagaagtactcgggggtgtgccggctcccaggcccagggcggcggcaccggcgcctggacatcatcgtggtgccctatagcgagtttgcctgtgccctgctctacttcaccggctctgcacacttcaaccgctccatgcgagccctggccaaaaaccaagggcatgagtctgtcagaacatgccctcagcactgctgtggtccggaacacccatggctgcaaggtggggcctggccgagtgctgcccactcccactgagaaggatgtcttcaggctcttaggcctcccctaccgagaacctgctgagcgggactggtgacccatggctgggggtgctgaggagagccgagttggactggctacccctcctggccacccagtactccctccagcctcagctggctgaacctcgccgctccaaccaccagcttcctcagcgagcagggcccagggctctgggcctgaagcaagagccagcccggctcccagtgtctgcccggctcccagtgtctgcccagccctctcccagacaggagcaggctgccaccccttctacctcaccactgcccctcgaagaatttgcaaatgtcgctggtccgataat

SEQ ID NO: 3891 - DNA, 710 bp, Homo Sapiens
  misc_feature (57)..(108): n is a, c, g, or t
  misc_feature (112)..(146): n is a, c, g, or t
  misc_feature (185)..(350): n is a, c, g, or t
cccctcctccccgcttcccaccacccgcccacacacaccaatcacttagggcgctannnnnnnnnnnnnnnnnnnnnnnnnnnnnnnnnnnnnnnnnnnnnnnnnnnnccgnnnnnnnnnnnnnnnnnnnnnnnnnnnnnnnnnnncagtcgacggtaccggacatatgcccgggaattcggccnnnnnnnnnnnnnnnnnnnnnnnnnnnnnnnnnnnnnnnnnnnnnnnnnnnnnnnnnnnnnnnnnnnnnnnnnnnnnnnnnnnnnnnnnnnnnnnnnnnnnnnnnnnnnnnnnnnnnnnnnnnnnnnnnnnnnnnnnnnnnnnnnnnnnnnnnnnnnnnnnnnnnnccaaagggaaacactaaaaattccctatagatatattccacgaaatatttcaattgggctgattttaattaggctgtatcattgatgcattactggaatcgatcttatgtcttttgcattttaatcacttgagttaatcaaccactggcaaatcccatttgacaaagattaccattgtaaaaaacagatactgtggtacatccctagaaattcattcacatttaacacttctaaaaatggaataatagccttttgtttttcatgagcatattcgcacccctatatgaattacagcatttaaaggttcaaaaatcagtaacttttaatctaggaaattggaaaaatatttaagtggcaaag

SEQ ID NO: 3892 - DNA, 926 bp, Homo Sapiens
  misc_feature (312)..(353): n is a, c, g, or t
  misc_feature (367)..(385): n is a, c, g, or t
cttggccatttgcgtttgtggttttaggcgaggccatgtaaaataaagtcacttaggccctgttaaaattccatttggtaaacattccagaagggtaagttattggagttagttgggggaatagtattggcattctcctgggttacaaagttgcagtttggaatgaaagaggatggtgaacttcaagcccgaagaaaaagcaccgttggtcaaccatcttatgtcaaaaggtattccttgaagtaacacatatgcttaatttgaggtaaggtggtattcaggtctttcatggaaactgatgcacaatgaaannnnnnnnnnnnnnnnnnnnnnnnnnnnnnnnnnnnnnnnnngattgccccccccnnnnnnnnnnnnnnnnnnnaaattgatgtataactatagcaaaagaaatttagatttcgctcctcccacctcataattaggtgagttcatcatgcattattctgttgtaccttttcattaaattacaaagaggataattttacttgtctagtttccttaaatgctctgaggctgacaagtgttatttattgctaaatggcattttggctctgtaggaagtagatttcctgaaaatgaagtgttgtcctgaaaacaagtgctgtgagtaaatttattactcctgctgatatgtgtgatatccataaatagaagagttggcaatatttgtttgcttacttccctttttgaaaaatgaacataaccttttctagtttgttagctgaatgaaaggatacatcagcatttcgtctcatttagaaataaaaagttaaaaatcatcaagtaagtgtctacaagattatacgaaaaagagaaagtagtatctagtccttatctttggtgttctaaacagaggattcactacagggagtgggttggggtggtatttgaggtgtacacag

SEQ ID NO: 3893 - DNA, 864 bp, Homo Sapiens
gggacatttctccgtcactgttggataatcagagaaaaaaaggacgttcagaacaccaaggtgcttggtacaattatgccaagtgccctgtctttaaagggagtagcctaattctcagcatttgggagtttttgactaaatgtgtggatatgatttgtatttcctatttcttaatatatatgtgaagatacaatactgacaagtacttagatttggaggttttgcggtactgaggggagttgggggaagaatggaaataccattgacctcctaaaaagttgttacttgcaaagtttgggaggtgacatcaaaaactcaactgcccttacaatagtcattccatccatctgttgcctatttgaattctcatttatttttactttatggcattaaaatacaataaatctgtcaattatgtattttatattagtagtagcttaagattgggtcacttcatttcggtagatataattgttagtattatccttcaggacaaaaagcatctgctaacaacctgtggtttaaaaatataggccaactttatgttcaaacattatgttgataatatttttagcagtattacacagtgggaggtccaaattggattagactttggcattgaattccaaagtattggtaagtctagcacatactataaaggctttgctaaattctggtgggtacattatttttaaaacctgtctgtctgtcggtatcacacagaggtcacttcttgagtaaaataagatgaccttaagaattcacataattcttgaagaagaatataagtcacgatgcttccacatgaggccgcgtcacaccaccatcgtttggaaatccagcacctcagccgttttaccctaa

SEQ ID NO: 3894 - DNA, 962 bp, Homo Sapiens
gccgagcgccggagccccggcccgcccgcgagcgccgagacttgttggccgcggagactgcgaccctcttctctcagtctgccttactaccatgccgctctacgagggcctggggagcggcggggagaagacggcggtcgtgatcgacctgggagaggcctttaccaagtgtggatttgctggagaaactggtccaagatgtataattcctagtgtgataaaaagagctgggatgcctaagcctgtcagagttgttcagtataatatcaatacagaagaattatattcctacctaaaggaattcatccacatactatatttcaggcatctattggtgaatcccagagaccgccgagttgtgattatcgaatcggtattatgtccttctcacttcagagagacactcactcgtgttcttttcaaatattttgaggttccatctgtcttgcttgctccaagtcatctaatggctcttctgacgcttggaattaattctgccatggtcctagattgtggatatagggaaagcctggtgttacccatatatgaaggaatcccagttctaaattgtctggggagcactaaccctaggaggaaaagctcttcacaaagagttggaaactcaactattggaacaatgtactgttgacacaagtgttgctaaagaacagagccttccctcagtgatgggttcagttccggaaggtgtcttagaggacattaaagcgcgtacttgctttgtaagtgatctgaagcgaggactaaaaatccaagcagcaaaatttaatattgatgggaataatgagcgtccctccccacccccaaatgttgactatccattagatggagagaagattacacatatccttggctcaatcagagattcagtcgtggaacttcttttagaacacgctaatgaagagcaatcagttgccactttaatattggattcccttatacag

SEQ ID NO: 3895 - DNA, 433 bp, Homo Sapiens
tgagtgggggtccgtcgccgatagaggttaagcgagcacccgcacggagtaggtctcgtcctcctagcaggctgcccacggttggtcagcaggctgtcgttccacgttgtgcttctgcctagttgcccacggggtgctccggttccatggtgtagtagacgcggtagccgcggatcaggccgttgggctccaccggctcctcccactgcacaatcatggtggtcgcgctgagcatccgggcttgcacgttccgcggcgcgctggccggggcctgctcgccatgatgcgggatgaccacggactcgctggggggccccatggccgatggagttgacggccgacacccagatctcgtactccgagataggggctcaggccgccgatactgtaacgtgtggtggtgatgtcctctttaatctgatacggcccgtct

SEQ ID NO: 3896 - DNA, 823 bp, Homo Sapiens
  misc_feature (414)..(471): n is a, c, g, or t
ggggccactgcgaagattcaaaacctacaaaagcctgccgcagacattgaagaaccaatatatacaatggacaaacaatccagtgccggcggggtgaagaggagcgtcccctgtgaatccaacgaggtgaatgagacgatgccggagaccccaactggggactcagacccgcaacctgctcctaaaaaaatgaaaacatctgagtcctcgaccatactagtggttcgctacaggaggaacgtgaaaagaacatctccagaggaactgctgaatgaccacgcccgagagaacagaatcaaccccctccaaatggaggaggaggaattcatggaaataatggttgaaatacctgcaaagtagcaagaagctacatctctcaaccttgggcaatgaaaataaagtttgagaagctgnnnnnnnnnnnnnnnnnnnnnnnnnnnnnnnnnnnnnnnnnnnnnnnnnnnnnnnnnnccccctagaccaaaccaccccgcccgtatccagaccacagaacaaccccgccacacacccagctaacccccacaccacccacctgcacgggcggctcccgcggccacagactccacgcaatcggcctctgccactccatacgtctacaccacgaagagaaaaattccgcttcctgcggggggccatcccgcgcgccgccctaacaaagaatgttgtctgcagccaccctccttctttaatacacaacccgctgcactcccacgcacgcgttcgaaaggacaacaatgctgggcgcgcgcgagaccgcggagggacgccgaaagaaacaacaggcgcgagtctggctgtacac

SEQ ID NO: 3897 - DNA, 331 bp, Homo Sapiens
ctggggcactagagggggctggctgcttccggatgtcactggagaagtcaatggcgctgaagaaggggtgggccttcaggccatcggccccattccgccccaggcggtggtcttgcggagcagcacagcttggtgatgaggtccctggcctcagggctcagcttcacctgggctggaatgtggagcgtgttctcccagttgatcaccttcagctgggtttctgtgggagtaggtgccaaaaagggcggctgccccaccagcatctcgaagagaatcactccgaacactccaccagtcacagagttgagtgtacaccttggcggacgagcat

SEQ ID NO: 3898 - DNA, 397 bp, Homo Sapiens
gctccggctccacttccaggtcatgttctggagctcgctcaggggacaatgggggtcgagcctccacctccttggcagggggctctggagacagcaacatggccccttcctggctcaggcctggttcctcaggcggctacctggagtccgctggctcttcaacacccacaggcaaggggggctcgtccagcatggagggccgctcctcaggggccacagcctcagtctcgatgtccacctcctcttccatgcccaacgagtccactgcaggtgcccccggggccagagccgcttcctccccgtcctgctcaaagtcctcagggcctgcagaagccatgctttcctcggccaccatctcctcctcctcctcttcttcctcctcgtcctggcctgagat

SEQ ID NO: 3899 - DNA, 735 bp, Homo Sapiens
  misc_feature (401)..(412): n is a, c, g, or t
gggttttccccccagtgggagggggttaaatgaagaaacacttttggttcaggcagggaaggccggtttccaaaaatccggggttcccttaagctggacttcccagatcacagactacgggtggaatagagtcaagatgtctatccagtccattctgttctctgctttctctaagatcacttctcttcaggctgacaattattgagggttggcctgcttctcctcttcatcttggaaggcagggggagtaagtgcttattctgcccttcatatatataggccacttaattactattttcttggctctaaagagacagaagccaactaacaagtccggctctctttgtgaaagtcggcttgaaagagcccttgtgttggcaaaactgcctctgcaaatgggnnnnnnnnnnnngagcctaccccttatagaccctccccaagcttgttcagacacctcaattgtgtgagatgtgggcagaaaagacttggtccctctccagagttggattaagcaatcccatctttgactggagatagggatgagaaagcaggtgctagcaggggaaagaaccggggaaagcaaggcagtttacactaggttgcagattcaagcctatggattgtgaagagccacctaagctccagagaagaggaaatctctgacacgatatgaacaagtgaatattttagcggcaaccctgtaattcccatagactaaaagagaatggtcaaaaa

SEQ ID NO: 3900 - DNA, 839 bp, Homo Sapiens
ggggcttggaggagccggggcctcggcctacagcgaccccgtgcggctgcgtgaagccggctctggagacagggaatcttttaactgagccagtcggctacttggaatcttgtttctcggccaagaatggtactccaagacagccatccatttgtagctattctcgagcctgtttgaggattagaaagaggatctttaataatcctgaacattccttgatgggcctagaacagttttctcatgtttggattttgtttgtttttcacaaaaacggtcatttgagctgtaaggcaaaagtgcagcctcctaggctgaatggtgcaaagactggagttttttccacaaggagccctcatcgtcccaatgcaataggactgaccctggccaagctggaaaaggtagaaggtggagctatatacctttctggaattgacatgatacatggcacacccgtactagacatcaagccctacatagctgagtatgactcaccgacaaaatgtgatggagcctttagcagactttaatttacagaagtaaccaacataaaacaaaaaatgtgtcccagtctgacagcaagactgacagctgtgaccagcgacagctctcagggtgtgatgagccacaaaccaacatagcactaagaggaaacctaaatgtcctgaagacagaacttcagaagaaacctagctggacaagagtgatcacagccagaatttcagcaaggcatttcctatgcacgggagattagcagtggattccggctttggaatcacgaccgtgttcagagttccagctgtgtcacgaagatcaaactgggccatattggccagagaaaa

SEQ ID NO: 3901 - DNA, 796 bp, Homo Sapiens
caacgtggctcatcatggagcccatcgtgctgcagtacgtgcctcatgatcgctttgacaagacctgttacatttgcgaggagcagggccgggagagcaaggcggcctcgggagcctgcatgacctgtaaccgccatggatgtcgacaagctttccacgtcacctgtgcccaaatggcaggcttgctgtgtgaggaagaagtgctggaggtggacaacgtcaagtactgcggctactgcaaataccacttcagcaagatgaagacatcccggcacagcagcgggggaggcggaggaggcgctggaggaggaggtggcagcatggggggaggtggcagtggtttcatctctgggaggagaagccggtcagcctcaccatccacgcagcaggagaagcaccccacccaccacgagaggggccagaagaagagtcgaaaggacaaagaacgccttaagcagaattagccagcttgcctcctgcaccccacccccaccaaccaggggagccactaagctgactaacaactgtcccctcacccaccagctatttccccagggtagagtgggcaattctcaccttcaaagagtccccgcctgcccaggcctttggcacagaggctgagtggacagtcaggagagaggcgagaggcaaggcgaagcctgtgtccctgtttcagttgcactggggttggagcccagggtaggggtttccagcttccccaggctccggccttgtcagtctctttgcatgtgtggatttttctgtgtgtgtttctgtttgggtttttgttgttggg

SEQ ID NO: 3902 - DNA, 1516 bp, Homo Sapiens
  misc_feature (1361)..(1407): n is a, c, g, or t
attccgcatgcagcagaagatattcaaggagatgaccgatggatgtctcagcacaacagatttgttttggactgtaaagacaaagagcctgatgtactgttcgtgggagactccatggtgcagttaatgcagcaatatgagatatggcgagagcttttttccccacttcatgcactgaattttggaattgggggagatacaacaagacatgttttgtggagactaaagaatggagaactggagaatattaagcctaaagtcattgttgtctgggtaggaacaaataaccacgaaaatacagcagaagaagtagcaggtgggatcgaggccattgtacaacttatcaacacaaggcagccacaggccaaaatcattgtattgggtttgttacctcgaggtgagaaacccaatcctttgaggcaaaagaacgccaaggtgaaccaactcctcaaggtttcgctgccgaagcttgccaacgtgcagctcctggataccgacgggggttctgtgcactcggacggtgccatctcctgccacgacatgtttgattctctgcatctgacaggagggggctatgcaaagatctgcaaacccctgcatgaactgatcatgcagttgttggaggaaacacctgaggagaaacaaaccaccattgcctgactggctcttatcagtgttaatagcatctcagcttcctcagatcagttctatcactggcactacagaatccttctctttcttaaggcactttgcattgtagaatgttcctggatgttcatatctagtgtttgaaggggaggagggatttaaactggtcctgtacatagaaggtttgtttgacagaggagaaaaattagccaaggaagattgttgtttaaattcatttgaaaccagaaggggactttttagttgtatgtgtaacacattcattgaattattatcactgttttcttgggacaacatcaagcctaaatactgaacaatatgaagattcttttcttggcctttctgtggattatgtcatatataataattatcagaatcattctacttggctttaaaacatgttttctccaatttttttaaggttcataatttagccttttgtttttatgttgcttagattcttatgtatactgaatattttattaacatgtagcatcaggttgaacatgcttgtcattgatatatggaagatgctatagttagaagtgaatttgttctgctttcttaatcttttccatgcttagcagtgaaaaacaggttttgccccagtagagggattctttggagggtattattttttatgctgctgaatatcatgtctataatagacccgtgcatgcagcctttcctccttnnnnnnnnnnnnnnnnnnnnnnnnnnnnnnnnnnnnnnnnnnnnnnntagcaatatcaacccattaaccccttccctctacacttaatcatctttcacaaattcctaattcttacctgaactaatcctaagaaaatcgcttggtcggccctttaat

SEQ ID NO: 3903 - DNA, 629 bp, Homo Sapiens
  misc_feature (33)..(33): n is a, c, g, or t
tcgaaccaccgggttcggcgagtggcttccccnacctggcggccctttctgtttgtgggcgcccaaggcaaaggtccgccttttaccacctgttgcgcaggagctcaccaaagaagctgatgcccaactgcaagtgggtgtccagcctggcgggtgcaccctgcaggtgacaacgtcatctgtgggagctacgatagcaagctggtgtggtttgacctggatctttccaccaagccatacaggatgctgagacaccacaagaaggctctgcgggctgtggccttccacccgcggtacccactctttgcgtcaggctcggacgacggcagtgtcatcgtctgccatggcatggtgtacaatgaccttctgcagaaccccttgctggtgcccgtcaaggtgctgaagggacacgtgctgacccgagatctgggagtgctggacgtcatcttccaccccacccagccgtgggtcttctcctcgggggcagacgggactgtccgcctcttcacctagctgttctgcctgcctggggctggggtggtcgtgctgaagtcaacagagcctttaccctgtgctgcctggtgctccccccttcttgaattggggttgccaacaaagccgcccccccc

SEQ ID NO: 3904 - DNA, 460 bp, Homo Sapiens
atcaaccaactcctcgaaaagttacaaactgtttacatattaagagggtagttggcattgcctgtggtcagacttcatccatggctgttctggacaatggcgaggtatatggctggggttacaatggcaacggtcagctgggcttgggaaacaatggcaaccagctgacccctgtgagagtggcagctttgcacagcgtgtgtgtgaaccagattgtctgcggttacgcacatactctagcactaacagatgagggcttgctgtatgcctggggagctaacacatatgggcagctgggaactggcaataaaaataacctgctaagcccagcacacatcatggtggagaaagaaagggtggtagagattgcagcctgtcactctgcccacacgtctgcagccaagacgcagggtgggcacgtgtacatgtggggccagtgccggggtcagtccgtgatcca

SEQ ID NO: 3905 - DNA, 1020 bp, Homo Sapiens
atttccgggataacagctgacccttttgcgtccttaaaaaaagtcggccaagattccatagtgctgctgatctgcattacagtgtttctctcctacctaccggaggcaggccaatattccagcttttttttatacctcagacagaccatagtcttgagtttacttatgaggtcaattggaaataagaacaccattttactgggtctaggatttcaaatattacagttggcatggtatggctttggttcagaaccttggatgatgtgggctgctggggcagtagcagccatgtctagcatcacctttcctgctgtcagtgcacttgtttcacgaactgctgatgctgatcaacagggtgtcgttcaaggaatgataacaggaattcgaggattatgcaatggtctgggaccggccctctatggatacattttctacatattccatgtggaacttaaagaactgccaataacaggaacagacttgggaacaaacacaagccctcagcaccactttgaacagaattccatcatccctggccctcccttcctatttggagcctgttcagtactgctggctctgcttgttgccttgtttattccggaacataccaatttaagcttaaggtccagcagttggagaaagcactgtggcagtcacagccatcctcataatacacaagcgccaggagaggccaaagaacctttactccaggacacaaatgtgtgacgactgaaatcaggaagatttttctatcagcacccaggtcttagttttcacctctagttctggatgtacattccatttccatccacagtgtactttaagattgtcttaagaaatgtatctgcatgaactccgtgggaactaaaggaagtgggaacttagaaccagacagttttccaaagatgttacaatttcttttgaccaccttttgtttattagcaccaatttcttgccactaagctatttgttttattatacatccttaattaaaaacctatatatgtacttcttagatag

SEQ ID NO: 3906 - DNA, 907 bp, Homo Sapiens
catgctttaagaaaaaggaatgtgggttaggtggtgtaaggccctctggaagaccagaaaccagccagggggaagggctgaaccagtggtgggtgctcttcccagagacacttccaggtggcacttccaggtggcacttccagagacattgggtggttgcacttccagagacatcaacccatggatgcaatgttcccagttctctttcttaggttttcttgaggtagttctgacaggctcttgccatgtctttcaagaagttaggaactccattcttggcggcccagttaatgagccaggacggaatttggccacccgggttatcgaagtaatacatgaaaactttgctccccttcttgccgtcactctcaatcgccaggctctgcttgtattgcttcacccggatcaccccagacctctcgccaagctgaggcatggaggtgctccgggccaggatcacatggatcttcctcccttccatgtccaggtctcgccgctgccgaaggtagacatagtctctgttggacatgggaaaagggtacttcacttcccagtagaccacagtctctccgttgcattcttgttcatagagttctttaacatactggtcccattgttttctgtaatctgagtccatatagatgtctgccagtagagttggtgagcagtcctccagaacaccaaagactttatactcataaagtccagtcttcttgtccagcagccggtagatgctgatgcccgaggtctccactaggagctgccagtcggccccggccagagcgggctgctggagctcggcgcaggcctcccagaactgctcctccgagaagcttccggcggccagctccatccttccgcagtccgggctcctccgcctggagggcaggccgcggcggacgcgtgg

SEQ ID NO: 3907 - DNA, 1083 bp, Homo Sapiens
actcaatccctcctattggtctcattctgagaataccccccttctcaaaaacaatgccttctttgggtgctctgaggggtggagaccataaaatatttcctaatcagtcacatgtcaaatgatagcgttataacaagatcctattgtacgtgtatgagaccatttggttatttatggaagactctgggaattacagaacatttcaaaaatttttagcatttgctataatatggacctaaaaattttaatccccaaagcatggtgaaattctgctaatgctctgctctgaatggcgtccttagaagtggcagttattcaaagatgtcagtgagtaatccatcttctctaaacgttagtcccttttgtcctggtttctggcaagtgcttcacatgggcactgccagtattaaaaggagaagactcaaacaccagtgcatttgatgggtattgattatagacttcagctgtgggctccgtcagactacttctagatgtctctattatagaatgcctcattgtatcattcgtttcaatcatttcaaaatccatttcattccatttttctgcatcctcctcttcattctcttcctcatattcatttagcccggagctagagagcagagctttctggtcctcactctttctgtcttcttttcgctggcgatcaagaggtgaagtggctaatttatatagcacaggaaataaaataccagtagctattgatgctcccaaagaggtatacagaactacaggcaaatcagggtattttccttgaagaattccaatgactgcaggaatagccatttctcccagggaagcaccaattacaaaaaatgctgcagatttcacatggatggtcgtgtactgctcaatccaagaaacaccactcggaaatgtggttgccactgaagccccatacactgaagttgctatccagagacaaattgggttcttgtcaaaaagcaccaggaaataaagatgaagtcaggctgccaatgttgctcaacacaatcatggttccaggcctgtaaacaggtagcaaaaaagagtgccagcccctcagctcaaattcgctggtccgct

SEQ ID NO: 3908 - DNA, 626 bp, Homo Sapiens
aatctgtttaatcaaaatggaaggctcagtaatctcatgggaaaccttggtttttcattaagtgctaccaactttcaagtgaatcttgtatttgatttcctaaaatcatgtcttgaaaacatgttttctcatgaaacttgaatactatctcaaataggaatataaacctggagtcaacaagcttaggcagcattgatttaggtcactttcccagtgaggaaaatttctgtgttttcagaatttccatttctactaacctcttggagaaaaagaaattgaattagaggtaaatagaagacgtcactgtggctgcttctggaagtgctggaagcatcaccccaattggctccaaatactgtcatgttttcttgcacactgacttctggtttccactgtatcagtatgtacctttgtaattgttatttttatgtcttttatgcccttgattattagttgggctcttcataaacagaggccatctctactactgtttatttttccctgctgtgcccagaacaattggcgtagacacagtaagaacctagtaaatattactgtttctagccatcagggagattgtggactcctcccagtataatttttacaaactccagcaattccgctgg

SEQ ID NO: 3909 - DNA, 663 bp, Homo Sapiens
gactttgcaagaagctctctgatgtccaccccctgtggctgttcgctcctattgctgtttctgagagagagggagaatgtctgtatgtacaaattggtaaagcctcaggtttatgaatataagaaagtacaagtcggatagactaatggaaaaaaaactcaaaggatttagagtttagatttgggaccaattcttggattaagtcccaaacctgtttacttatctgtaagaatgtagctggctaagggtgttgcttctgagcttcaactaagataatatgtcaaagaacatagtaagccacgagatgctatataaatgtggactaatttactctgtgggcaggattatttgtatagatgtgcaaagggccaggtcttcccaaatacagccagctgcatcttagttggtgctattcacacagtatgaggattttattacttttagtttcctcttgctatcctgacagaaattataccaactagagattcacttggattaataaatgcatacttagttatacatttttcgaggactgttgaaatgatggtcatattttagtttaaatggtttccttttagcagcgtactataacgcaagaaaagttaagacactaagctttaggatcaattgggttgaatctaactcggaattacaggcaatacc

SEQ ID NO: 3910 - DNA, 641 bp, Homo Sapiens
ggaccagcgacatttgccttagcacaactcttggttctccatagcacagcacggtaagcttctccctgcgagatccccagttgcacggtgaaaatgagcagatcacagatgagaagcctgagagctacagaataggaagggccctcatttaatacagcccttgactgccaactactgtgctgacttaattcactgaaaagaaaggaggacgttctgattctggccagaacggagtaagcccactgctgcctctctcctgccgactgccagcaaaacctatggacaaaacacaaaaacaaacacctgaggactctggggagtcaactcaagctgatggattgcagaggagagtcaaacccatggaagtggctgtacaggggaagagtttcccatgtttttccctttttcctcttgcagccttgccctgagtatgggctccaacatgcagaactgtgtggtggtgcaagaagctagaactccaatagaaactccatctttctgactagaggaacaaaagggggcccctgccgtcctcaaagaataggggtgagggttatagtaggtttaatactctttcttgtggctgtgcccaaggacagtccccagtcacatgctgcatggtggcggcgataccggaggta

SEQ ID NO: 3911 - DNA, 562 bp, Homo Sapiens
tgagccaccacacctggctgtcttttcattatgggtgtgaactcatgagttctcatattttccatagtttatcattcattactattctcactgttttcatacttgaattgtcccaaatttggcccatgagagccccctcagttgatgcttttgtatgcttctatcatttggggagattatttccttactttctagaataacaagatgttccgggtttactgtgtacctatcctgccttaattctagaatcagctctttctccaacaagctttggttcttcttagtggcgcatgatatgtattagagaccaagatacgggcactaggtatgggcattattactgggatgtctttgtttctgggccctttaagtagacagaggtagaaaatacatgcatgtattaatacatatactgacaccctagtatacacatatacaagtgttttctcagtcttggcacgattgacattttgggccaaataattccttattgtggggtcagccttgtatagttttggttgttagcacatctctgggttcacccactaatgcttccagaaat

SEQ ID NO: 3912 - DNA, 675 bp, Homo Sapiens
gctctagagaccccagcgacatttgcagctcctgcagcagccctaaggttgagtgaaggacagtgatgttgactgggaatttctgagtaaagctttggctgtgcttatgtcatctgctaatcaggagcacctctctatcagatccaaatgctttccaatctggagaccaaaaacgttccctataggctcagttagctatttttctagaatacgatgccaattacataggatttttatatttttacagctgctgatgttatatcaaaagttatcctgtgtgaaacctgtgggaagttgaatgtgtttatttggtagcattttgtgaatattgtctttgtgtgctttactgtattttgttttaaactctttaaacacagttattttatggtcatttctggatatcagctgcttatttatttttcagatgcttcaaaatgaataaaatgcatttcatggtgggggaaactaagaaaacactttgacagaattagttcctttctatgagcaattggagattattacattgcactaattaaactatgccatgctgcatttaaagagaatgggctaaatagttcattctttttatctgagtttagacctgttctaaaactgaaacagtgtgatgaactaacctgcgtttcttgtggcatatgtccgctgggggatcctcta

SEQ ID NO: 3913 - DNA, 922 bp, Homo Sapiens
tatgaaggcagtgcttgatgtatggtccttgagatgaatggattcaggcatactaagaaagtggtacgagggagacacattaaaatgagtttttaccctttcattgtgagagtcgaatgacaattgctagacatttgcctatgtagttttagaaagattctaactggagcagcgcttggctggaggaggtcaattgtatgtctgcggaaagggttcagacagacttgtcatcatttcctggcgctgaccctggctcttacctggaaagcccttaaaccacccaccccagggatccacggtgcagggaaggtggtcatgcagaaaacaacctctagcgagttgctcggctgaggccctctgtaggtgaccttgtcttgcctccaaaagactggacctccttttcttcttcagtggtaaaaggagtttcttggtgccaccgtgggctctgggcagagactgtgccttcctcccttttgtgtctgagtcgccccgcatgctttggcgcagggagtttgggccagagcgatctccagccccttccagttcactggctctgtgataaggttcctggggattttgtgtcatgttgcttggaaaccagatggaaataggccaattaccattgaagtggggcggctcctgaatgttccaggaccaggagatttgagctaggcttgggaccttctctttgctgggtctctccctggtcctgcctcctaagaaagagaaaacaagcaaatactctgtctacattcagatacgatgccttacatgagagtaagagagcaggaggaaactgctcagctgcctcattttcctcctggggtggaggtggatgattgtcttgccttcaatctttaagaggctgaaccagcctctgacaccttggcatgatggctgacccgcaaatgacgctggtccg

SEQ ID NO: 3914 - DNA, 329 bp, Homo Sapiens
ggactctttttgttgggagaaagaaatgaatggaagaaaaaaatatgttgcttttatttgaatattgattactaacaacttataaactacattgcaggaaatgaagaaatattttgaaattagcaaaatagcaacagtattcaagtatctgaaattttaatatggtgagtcttagagctttagactttcctataagtgacagtatctaagttattcttaatagtcacacttgataattctgctgaccataagcagctaacctacagttgaagatatttatgtgacatgaatagcctgtgttttaaaaattaaatattttatataaaact

SEQ ID NO: 3915 - DNA, 792 bp, Homo Sapiens
ggattctgaaatagatatggctgtgctagaatgaaggaatctagaaaggaatgcccctggaagctcatcttgaagagaggatctttttcagcagatcagcaaaacgctggctcagcacctctgagttagctcagtgaaagaaaaggctgacgcctgccagtgagctccggaggcttcccctttctaacaaggtcatttcttcaaatagggagttcccattgtttcagagtcacttagatgttccaggcactaagacaggtctctctctagggtcttcccaatttagccagcgtaaaaacaatggtggaaaggaaaaacctggaaactttgcacagcccagagcctggtcatgggccacacccgctataagggaagctgagacacatagctcctagctgagcagctacatgcccagaaaagactcgtattaccaacgaaagcatgagcgcaatctcactggagctagtagcctctgcaatgctgggtgggataggcagggtgtaagtgatttttctggaaactgtgaactccgtaaaaatgtttacttggatggccccagaacttaaattagtatatggttcatgaggatccttccccacccccagttctgaatggaaactgccacgaacaagaatgtatctcttgaagatggcagcctttgctgacagaaccacatgaaaggcaggaaggagatccggcacgctcccaccgttacgctaacgtcgcagtatctcctaggtgaactgcatttgtttctcagattctttttagttttctttttcatcttcccta

SEQ ID NO: 3916 - DNA, 480 bp, Homo Sapiens
gtctgatgctggggtcatcaggacggacccatcatggctgtctttttgcccccaccccctgcccgtccagttctttcctttctccgtggctggcttccccgcactagggaacgggttgtaaaatggggaacatgacttccttccggagtccttgagcacctcagctaaggaccgcagtgccctgtagagttcctagattacctcactgggaatagcattgtgcgtgtccggaaaagggctccatttggttccagcccactcccctctgcaagtgccgcagcttccctcagagcatactctccagtggatccaagtactctctctcctaaagacaccaccttcctgccagctgtttgcccttaggccagtacacagaattaaagtgggggagatggcagacgctttctgggacctgcccaagatatgtattctctgacactcttatttggtcataaaacaataaatggtgtcaatttcaaa

SEQ ID NO: 3917 - DNA, 1106 bp, Homo Sapiens
  misc_feature (1038)..(1056): n is a, c, g, or t
gggacttccggggcggggctatctggccctttcctttccgcgtgtagaatgtggggcgcctgtaaagttaaggttcacgattccttggccaccatttccatcactctgagacggtacctgagattgggggcgaccatggcaaaaagcaagttcgagtacgtgagggacttcgaggctgacgacacctgcctggcacactgctgggtggtagtgcggctggacggccggaatttccatcggtttgctgagaagcacaactttgcaaaacccaatgacagccgtgctctccagctgatgaccaaatgtgcgcagactgtgatggaagaactagaggatattgtgatcgcgtatggacagagtgatgagtacagctttgtgttcaagcggaaaaccaattggtttaaaagaagagccagtaagttcatgactcacgtggcctcccagtttgcctccagctatgtgttttattggcgggattactttgaggaccagccccttctgtatcccccaggctttgacggaagagtcgtggtgtatcccagcaaccagactttaaaggactacctcagctggcgacaagcagattgtcacatcaataatctttataatacagttttctgggcacttatacaacaatctggactaacaccagtacaagcccaagggagattacagggaactcttgcagcagacaagaatgagattttgttttctgaatccaccatccactcatataatgaacctgccccatgttatagaaaagggactgtggttgatatggccacaaggtgggatgaagccgatgaccaaagaaaatttaccctgcccaccctgaaatggcaaagaaaccaaaaatggccacggacccggcacccgggaaaaagtccccctgccccttgcaccttgcaaaaaccattggctgaatgcttttctgggaaagcgcacctctccccaaaaattcttacaatgaaaacacacctctacccctttctgcccctttccctttcccggtgggcgcctttaatccataggacaaannnnnnnnnnnnnnnnnnnagggggcttcctttgctcctctagagggcgttggcaacacatctccacac

SEQ ID NO: 3918 - DNA, 623 bp, Homo Sapiens
ccatgctcggtaccaacctgaagttgccaaataaagcaattaatggaaattaataagtgagcagtgtggatttaatgagctgcctatgaatactatgacatgcgctcgttttgtcggctccctggcggggcatggggacagatcgcagcacttcaacgtctgtatttataaacatgcattcctggacttcaggcagcgcgcatactccatcattggttctgctgtgagtcctacattcaacggagatgtattttgatctctgttgaagacagagcaatcgacggcattcagtttgcactgcactgatttgggattccagtacattgcccagtccctgttagtctatattgggcagcatgtcccattcaggagctccatttgacatcaccgaacgttctccaatgaaggtgtcaggcagttgaggtccatagaggaatcccagcaacttcctttgagaggctcacggccattctgctgctagactgaaaatgcgtttcctctgatttccttagtgaggaagcattcatttaggagccatttaaactgtgtttttctcaaagaagatgtaagtacatttcctgtttatttctcaacttagattaattgggcacttcaggtgcgct

SEQ ID NO: 3919 - DNA, 993 bp, Homo Sapiens
ggaacatgagattttatgctgctcttcctggtcagcagcactgctatttcctcaacaaggatgctcctcttccagatggccgaagtctacagggaacccttgttagcaaaatcacctttcagcaccctggccgagttcctcttatcctaaatctgatcagacaccaagtggcctataacaccctcattggaagctgtgtcaaaagaactattctgaaagaagattctcctgggcttctccaatttgaagtgtgtcctctctcagagtctcgtttcagcgtatcttttcagcaccctgtgaatgactccctggtgtgtgtggtaatggatgtgcaggactcaacacatgtgagctgtaaactctacaaagggctgtcggatgcactgatctgcacagatgacttcattgccaaagttgttcaaagatgtatgtccatccctgtgacgatgagggctattcggaggaaagctgaaaccattcaagccgacaccccagcactgtccctcattgcagagacagttgaagacatggtgaaaaagaacctgcccccggctagcagcccagggtatggcatgaccacaggcaacaacccaatgagtggtaccactacaccaaccaacacctttccgggggggtcccattaccaccttgtttaatatgagcatgagcatcaaagatcggcatgagtcggtgggccatggggaggacttcagcaaggtgtctcagaacccaattcttaccagtttgttgcaaatcacagggaacggggggtctaccattggctcgagtccaacccctcctcatcacaacgcgccacctgtctcttcgatggccggccacaaccagaaccaccccgatgctcatgaaccttccttaagaaaatcccgcccaagaatttctcaaccctttatgaaaccagccctttagaaagggcagaactcctctttccggctccccccgcatggaaaatatgctcgggaagcaacaaaacca

SEQ ID NO: 3920 - DNA, 190 bp, Homo Sapiens
aaatctccatattgaatagggaggtcctgattgccaacattatttattttggatttggggattccatgattcagtagccatagtcacattgccttttgcctatggttgctggacttgctgtcctattctcaagaaaacaacatattctttttgcttttagaagagtgaggagaaatcagtgatatcatct

SEQ ID NO: 3921 - DNA, 656 bp, Homo Sapiens
ggctagaatagttgatggtccatttatttcaaatagtagctggtgtaacaaattctaaaatgtgtttttcatctggagttgcacagaatcatggaattttgtgttgagtgacataataggtatggaaatatgaggggaaatagacattgcaaatgtgaagcatggtggttatttgttaagaatgagaactcctctgactctaaatatttgggcctgtgggctggggaaggctggagccatctgccttgttctggagatcatctgggttctatcagtccttctcaagtactgtgctcacccagaaaagcagtgtgaagtgaatttggactcatttggagtgagatggagggaatccccccactcagtgttatgagtctccaaccccagtttaagctatttccatggcagtttagggtcacaggtttgatcccggtgtgcccagccagtggtattaatggatggcattatgtttggaggcagcagcatagaggactgttgtttatagagaaaagatttgggaaggactgtttacaatgtgggtcagcctgaagcctgggcactttcttctgtgaccttggggttgtgtattatatgaatgatgctgtttttaagtaaaccattcaacagcaattaaataattccttcattcacggcta

SEQ ID NO: 3922 - DNA, 255 bp, Homo Sapiens
caaattgcaaaaagattaacaaaatgtacatattcatctgatagactaataaccagcagtaaaaagtaactactgatacacataacaacatgggtgaatctcaaatgcattgtattaagtgaaagaagacatattcaaaaggctacatactatatgattgcatttgtatgacattccgggaaagaaaaatctgtaagacataaaataaatcagtgtgccaggtaattgggatctggcaacttcaggattggtgcc

SEQ ID NO: 3923 - DNA, 658 bp, Homo Sapiens
  misc_feature (516)..(538): n is a, c, g, or t
aggagaggaagaaggagaaaattgccaaagctctgcaggaatttgacttggccttaagaggaaagaagaaaaggaagaagtttatgaaggatgccaaaaaaaagggggagatgacagcagaggaaaggtctcagtttgaaatcctcaaggcgcagatgtttgctgaacggctagcgaagaggaatcgcagagccaagcgggcccgagcaatgcccgaggaggagccagtgagaggtcctgccaagaagcaaaagcaggggaagaaatctgtatttgatgaagaactcaccaacacaagcaagaaggccctgaaacagtatcgagctagcccttcctttgaagaaaggaaacagttgggcttgccccaccagagacgaggaggaaactttaaatctaaatccagatacaagaggaggaagtagctgtcgtggcctgaagaaattcatgggggcagcccttaaatcccttccctgtgggaagtcatcctggctggtctgtcttttctccatttgtttnnnnnnnnnnnnnnnnnnnnnnncaacactttggtgtggtggtatggtacgtagctattttcctaagcatgtctgtcaatctcccttcttgctgattagctttcatatgactatattaaatggaagtatttttgggaaaagag

SEQ ID NO: 3924 - DNA, 772 bp, Homo Sapiens
caaatcactgaccattagagaaatgcaaatcaaaaccacagtgagatagcatctcacaccagtcagaataactattattaaaaagtcaaaaataagatgcttattttgagggtatggagaaaagggaatcctaatacactgttggtggagtgtaaactagttcaaccattgtggaaagcaatatggtgattcctcagctaaaaatagaactaccatttgacccagcaatcccattactggttatatatactcaaaggaatataaattgttctaccataaagatatgtacacatgtgtgttcactgcagcactattcacaatagcaaagacatggaatccactgaaatgcctgtcagtggcagattggataaagaaaatttggtacatttatatcatggggtacgatgtaactgtaagaaagaatgagatcctcctgtcttttgcaagaacgtggttgggagctggaggccattatcctcagcaaacgaatgcaggaacataaaaccaagtaccgaatgttctcacttataagtgggagctaagtgatgagaacacatggacacaaagaagggaacaaccgacagtagggcctacttgagggtggaaggtgggaagagggagaggatcagaaaaaataaccattgggttctaggcttcgtacctgggttacaaagtaatctgtacatcaaaccctggtgacaggagtttacctgtataacaaacctgcacatgtacttctgaacctaaaataaaagctaacaaaaaatatctt

SEQ ID NO: 3925 - DNA, 938 bp, Homo Sapiens
gggtaaagaagagaaaacagtggcgacttaagagatggtgaatctggtgcaccatgcactttcctgctagactctggcctagttcaagctgaccaatggcagaggactgcctgaagagtaaaactgtgtgaacaatgactgactgccagtgttttccatgtatgcataggttctaacagcagggtttggaaacctgtctctaagtaatgcattacttctgtcagaagtgtcttagggtggttatctagttcagtactccaaattattggggaccttgaggcttaagtaagtatttttctgaatataatgctaaaggtaagttgcattcatttaaactaatagagcagacagaattcagcactacttaatagtttataaatcagtggtttcagttgtatatatgttaggaaatggagaggtatagagagagcaggttccatagctcagcacttttaagtggaagatcatttgaatctcagtcttcagcctgcactgatttgtagcctgcactgtcttactgatttacaaactgaaatcactgagaaatgtctttagttcagtgagaagaaaccagaacacttgttcctagtgttgtgttgttttttttaagcaaattacttactgtatttttatggcaggagggagaaaaagtgttacaacggtttctaatgaagtccggtatttaaatgataaatgactaatgtgtttagtagagacaaaataaaccaataaatgattgttctttgccatttatgcaggaaactacccttttctcaatataaccaaacaaaggctaatttataaatgctttattcgaacaaatacacttatcttcatatcaaattacagtagcagtatcttgagaagtttatcaacatatttttgcagaacactattctaattgaacaatgtaagttccatatttctctcagcaatat

SEQ ID NO: 3926 - DNA, 570 bp, Homo Sapiens
cagcgacattgtccaactgggggctgtgactgcttggacaagaggagcactttttctaatccgcacagagggcaagataagcactgcaggctagccagaggccctagctgagtcaagttctttcagtttgaagttgactgtcctaggtacaagggtgaatgactttctattatctcttaatgagaaaaaacttccttctcccaacaagaatttccagttgtggttattagcctaggtgtaaccgaaattgaaaagtaattatatttctcttagcagctaagattgcctccagcaacctgcccatttcctgctttcactcttaggaggacagtcttttgccttgtattcttttttccccttctctacattgactttagggtccagttttaagtcccagacctgtttagtaactagctttaatcccagggcaccaagtctctggcctctccatgcttcccccttcccttccctgggtcttaaccagggcagggagcactacctacctaagtacgcagagcagtggtgagaggtggccagggagccatctcagggaaccattaagataaaggg

SEQ ID NO: 3927 - DNA, 507 bp, Homo Sapiens
  misc_feature (247)..(272): n is a, c, g, or t
gcaacaaataacaggattgcttcgcaatatgtatcaccatatttccctcccaaaggactgtactaatttgctgttctgtcagtttagactttatcacttagtgatagtgggtttaaaaataaaaattgtttttgttttagttaacattttattattattcaccagccattaaggaacacattaattactatttattctttctcgttgaatctgtgcaattttctgagaagtaagtaaacccgccccnnnnnnnnnnnnnnnnnnnnnnnnnnagatgcaatttgtgtggtgctagaaattgagaaattacagtaatttcttattattctggtcagagatccctggaatatcaaaattgtctgcaatctatagtcactgttttcaagtctatagggtcctctgggagaaatacttatattaaatatttgcactgacaaatggacaacaaaggactctacgttttatctctaagtaggatctggcaacttcaggtgcgtaccgactgat

SEQ ID NO: 3928 - DNA, 612 bp, Homo Sapiens
agaggaccccagcgacatttgcaaggaattcagtcacttcagtttaccaatatccagcagcatcagggtcaagaagaccctttagatatatggcatccttataatttcaaagagccttttcccaagccagcatcattgctgtctatcttgcactcactccaagttctttgtagtccacaatggtgggtttatattatctgagcagcaacagagagatactattgccaagctgatgcaatatatttacctcctcatcaggctatgtcaagggaagtggttattaaagggtatattagttccctagggtggctgtaacaaagtaccacaaactgagtggcttaaaacagcagaaatttattgtcttatagttctggaaactaaaagtccaaaatcaaagtgttatcagtgccatggttctctctccctagaggagagaatcctttcttcctcttgttagcatctggtggttttcaataatccttggggctcttaggcttgccctgctccattttaatctctccctctgtcctcacatggcattttccattacttacagagacactagacatattggattagaccccactctagtgatgccatcttattacagct

SEQ ID NO: 3929 - DNA, 841 bp, Homo Sapiens
gctgaggtgatctagaggatcccaacctgaagttgccaaatctgggtaatttttaagcctgaactatgtagtttcttgatacacaatttgtagttatgcagcagccacaatttgcattgccaggaaataggctccaggttatcttcatgcctctgggtgctcattcagctgtcaagtttccatgaacttacacttatttatgattgcgtttctgacctgagatgtatgctgcctgttattgcagtagcattagtttcagattcttttgccattgcaaagtaccccttataaaccagcaatgtcatctgtgaggaagcaaattctcaagtgtctgtcatttacttggttctttttctttgtggtcttcacccttataccctggaaaagtctgtaattaccttagccaggaagatagatggtcatggcaagcgcacagcaccagacttactggctcaccaagatgatggaaaaaggcagatgattttttaaaaagccgtaatgactcctttagaccagccatttagcgtggtaattttgaaaggcctagctccattgcagacttccaaagggtcagctctgagactgccctccaggtgggcagttgattatttccaccagtgttttccagagccttaaactgtcctaaagtgacaactacctcagttggcaggaaagagacatatagtagaaagtgaaaaatgagcagtatttgtgcagatgctatgggttacagttgaagggtaaaaggaactttacattgggaaacctttatacccttgtgaattatgtacatggtaaaatgttctctctctacaaagaactattaaaacttctgaaatat

SEQ ID NO: 3930 - DNA, 373 bp, Homo Sapiens
gtcacgacagcgcacatttgcggttattaatgcgcttcctttggtccaccctgacgtctgcatgaccatggtaagttcctgccagagcatccgctccctgaaggcagggcccatgtcttttccatccttcaggctgcacctgggaccctgctctggggactcagtggcaccatgctggctgaccccctctggttctagaacaggtatcagtggaaaagcataaatcgctgtccctgcctggatgtggtggtgacctcctccaaagggtcaagactgactgatacccctggagtttctgatcaccaagcaaagctgggattccagggacagaagcatctgcttggtggatgcatggcttttaaaaccaagagga

SEQ ID NO: 3931 - DNA, 604 bp, Homo Sapiens
  misc_feature (342)..(350): n is a, c, g, or t
aaggtttgtagaaagacttacctagtcaaaagtggttaattgaacttttcaaacgtgcaaaagcatatacatgggatatcataatctagagatagcaattctaagaaaaaaatatttgcttcaatgtctaaagaaatccagtgaaagttttagaaacattgccagctagacgtctccgagttagagttgattgatatactggattgggatggagaggatgagaactgaaaaagaactgctccagcctctgcctcagaagaggaaactcagctcggagatgacagaattgggtagcggagtagatgctagagcccatgacagatagaaaactacccccatttnnnnnnnnncaacaactcattaactctatctctttgaggttttggagaacaggaagtttatgtgaagattattgaacacgtcatattaagaacaatttacataaactaacacccaaaccaaaatgtagatgcatagctagctgtgcaagcttcccaatgctcttcctatctcctaataagtcacacagaaagactatgtgatagcctggattttcttgaagaaattttaaaagaactgattttcctatcatcctgtttgtgga

SEQ ID NO: 3932 - DNA, 304 bp, Homo Sapiens
ccagccttgtcctctttaaatcaaagacagtatagcagatgcacacttgtggagtggagaacctaatttgcatggaataatttacataggcattatttgcaagattttgaaatttggaaattatgtcttttttaaattggttctctttatactagaaaacattattaatatatttgactgagctttccaattcatgaacatgagttgtctctttgtttacttaggtcttctttgatttgttccatgacattgttaagtttatacctatgatctcattttcttttgacgattgcaaatggcgctg

SEQ ID NO: 3933 - DNA, 794 bp, Homo Sapiens
  misc_feature (154)..(246): n is a, c, g, or t
cggtccacctgcgaagttgccagatctgcactgtagcataaaaatagccatagacatccttaaatggatgggtttggctgtgttctgataaaacgttatttatagaaatggctgggaaaccagaccgtgctttgccaaccctgctctagaggannnnnnnnnnnnnnnnnnnnnnnnnnnnnnnnnnnnnnnnnnnnnnnnnnnnnnnnnnnnnnnnnnnnnnnnnnnnnnnnnnnnnnnnnnnnnactctcttataagatagtgcttacctcacgtatttgtgaaagtgagatgagaatgatgcatagaacatgtccagcaaattgtcacacaatagaaagggacaataaacatcagtttcctttttctctctctacctctgtttcccagatttaatgctacactatatcttgatcaaatatctagatcacttattaagaatttagggcaaatagcaatagaaggtggcatatatgatgtgtatgttttaccagctataaactctgtgagaataagaatcatatgttattcctctcggtaatcacttgctttacatagaatatggatgcaggaaatcttagttgaactagtttgacttgaattaacttgagcttgcccagccagttaaggcattaaatgatccccagattaagactccaaggcctaaaccaatggttttgataattgggacaacagcaatgttccctgtagatgtaatatacagaagaaacatgttatttccatatagaaaatacatttataaatagaattagtttttattctacttcaacct

SEQ ID NO: 3934 - DNA, 578 bp, Homo Sapiens
ctagaggatcccccaccggacatttgctagaagagcaccacagccaaagctgatcaatatagcctaaccaaagatcctgactgaaccccatagcaccctcatctaaaaaggctgcacagccccttcatgccctctctgcttctcctgaagtagcctttgagcctcaggccttatatgagccaaataatatactacaatgtgtatgtctgagccataacccatggtaaagagggcacaagcagcctgcctcctgctgcttaacaggaagggcaggacccaagtgactgagaatatggcactgtggatagaaagcgcagtgctttccatctacatgccaaagtcttctacctgcagttggcatctggaagcccacaagacatatactcatatacctccatgccctccacccacaggccagtggcttccgggataacaaaagaattctgttctatcttgtcttagctatattgaatatttgggaatgaaaactgcctgcaagactcatcttcatcaacaaagcaccatcaccattaccactacgaggagtattagcaccgtcattttgcaaatgtccgcta

SEQ ID NO: 3935 - DNA, 1042 bp, Homo Sapiens
ctgatatttctggagatgatattaactatccccataaatacggtcctcaggagggctgtgcagatcattcagtatttgaaagaatgaggaaataccagatgactggtgtagaggaagtaacacagatacctcaagaagaacatgctgctaatggtccagaacttctgaggaaaaaaacgtacaacttcagctgaaaaaaatacttgtcagctttatattcagactgatcatttgttctttaaatattacggaacacgagaagctgtgattgcccagatatccagtcatgttaaagcgattgatacaatttaccagaccacagacttctccggaatccgtaacatcagtttcatggtgaaacgcataagaatcaatacaactgctgatgagaaggaccctacaaatcctttccgttccccaaatattggtgtggagaagtttctggaattgaattctgagcagaatcatgatgactactgtttggcctatgtcttcacagaccgagattttgatgatggcgtacttggtctggcttgggttggagcaccttcaggaagctctggaggaatatgtgaaaaaaagtaaactctattcagatggtaagaagaagtccttaaacactggaattattactgttcagaactatgggtctcatgtacctcccaaagtctctcacattacttttgctcacgaagttggacataactttggatccccacatgattctggaacagagtgcacaccaggagaatctaagaatttgggtcaaaaagaaaatggcaattacatcatgtatgcaagagcaacatctggggacaaacttaacaacaataaattctcactctgtagtattagaaatataagccaagttcttgagaagaagagaaacaactgttttgttgaatctggccaacctatttgtggaaatggaatggtagaacaaggtgaagaatgtgattgtggctatagtgaccagtgtaaagatgaatgctgcttcgatgcaaatcaaccagagggaagaaaatgcaaactgaaacctggg

SEQ ID NO: 3936 - DNA, 469 bp, Homo Sapiens
  misc_feature (357)..(398): n is a, c, g, or t
cgaccagcgacatttgcagaaacaagtagattgtattcttaggcattgttgcaggaaaaatttagagtggaaatgtaattttttcttttgctgccagtggaggtgctggttcattctttgttgtatgcccagtagtagagatcttgctatcaaaagtgtaagtttctttgaaaggtttaactgaaggaagatgtagaattataaatagaattggctggaaaatttgtgataaaaaataattttaattagatctacaaagagggataaccagcaatcttgctctgctatagaagataaatagttggtacaaagaggaatttgaatttcctccataatatggaagaggatttagggtcnnnnnnnnnnnnnnnnnnnnnnnnnnnnnnnnnnnnnnnnnnggtgcacgggatctcactcttgtggcccaggctgaagtgcggggcgccaaatcatcgatccttatgacctt

SEQ ID NO: 3937 - DNA, 696 bp, Homo Sapiens
aaatgtccttgtcttctccagaacctaccctccttgtctcctccactctggagattcttctagccttgttatttcatgaccttgaatgctttctgaagacggctggtgatgtattttgtagaagtcctttttcagtttggttttgtcttttctcatgatttagatgagggaatacaaattttggaggaggaatgccatagaggtgactggtatttaggttgtttgcaaacaatggtgcaaaaaataactatgtatatgtattattgtttaggtctgcagtttatgtgtaggataaattgctgtttggtaaactgcactctgatagctactacaatagtaccaacttagcattgtatcttcctttgatattgtaattaactattagtaaaacaacatactttttagcctattatatctttattcatgtgtcattaccacctaccagtaacacatgaggctgcccatgctccacacttgtaccagcactgtgagcaatacaattttggggtttctgctaatctgatatgtgaaaatttgtatttcagtgtagtttcatcttgtttcgtcactttttataagcaaggctgaaaattttttcacatggtattgggtttcttgtttccttaactgtaagctgtctgtttataccatttgctgttgattatctaaaaactgatttctagacactctttgtat

SEQ ID NO: 3938 - DNA, 872 bp, Homo Sapiens
  misc_feature (53)..(53): n is a, c, g, or t
attttctttgacagtgaaaaccagatattaaagtgataggagagaaaccgaanagcatcagaggggacgactgggttacttaactgttggggagcaatctgaggagttggttaccagagaaactggcgatggccgatcccgtgagcaacatctctcagacccattttaaatgccgggggaaacttaatcatgctgaaaaacagcagagccctgaggttttggacaacatgtcgcagaaagaagagaaatatatacgtcaacaaaaagcacatacgatatcgcaacagtgcatatcatctagtctgttgttagatgatgcacaaaatcagaaccaaccgaaggctgacaaagatgagtccaccatgatcaatgaaatcaccctagcaaagctggccaaggacagcattgtggcacagactcagaagttagaagaccagaaggaggaaaggttacatcatccattaaggaaggacactgagtcatgcacaagtccttgccttcttggtgcccctcggaaagcacaagacccctcctctgctgggtgtgatcaaatacatggtgcctttgcgaagaaaggagttcttcccttaaagaagcagccccatcgaacttgtaagaaagtttcctatcaggagcaaatcattgttgggagaaaaataggtaaaatcagaagttctgcctttttaaagagttcttccaatcccatccccacaaaagcgcacagacttctcagtttgtgtactctgtctgcacctacacgattagaacctgaaacagcacctaccaagagcttggttagtcacataccaaagcaaatgtctacaccgtgccatcccttgaggagcctgaattttaggaagactaccaaagac

SEQ ID NO: 3939 - DNA, 665 bp, Homo Sapiens
ctactggcccagcgacatttgcaggtggggcaggacagcccttcccagctgccgaggaggtggatgctggtgtggggtgacgtgggcactcaggaaagacccacgcctctcccaccgtgccagcctgccctggggctcaggccttcggtgtccgaactgccctttccccgaatctgttgtgttttgtttttaagctagacctgacctctttggttagactaaggcagcaaacactggatagcagttcttataaccgcaatttactgaccacctactatgtgctattcactttactcgcactatctcactgaatcctcatattatcccattgtggtgggtactgttagcccagggtcacacagtggcacagatgggcagagcagggattcaaacctgggtgtcctgaagccagagtatgtgataccacttctcacgtctaggtcctgaacagcagtgggagtctaggcttggagtcacgagttagtattcttctctggaaatcagccagttacaggagaagattcaggaaggggcatgtgggtactcacttgggcagagatagcgactgagtacaggtctcttaagtctctgaccctcatcagcctcccatggcagctccacccatttactctgtcacttacccctctgctgggcccttgagagcc

SEQ ID NO: 3940 - DNA, 711 bp, Homo Sapiens
ctgcagtgactgacatatgaactagcaactccctcatcctctgtcccctttcccagtcttctttttttcgtgacagtaacacattacatcacacaattgatggctgtctgcttccccacgaggatatcaggtacctgaaaggcatatttctgtatcatcagttcctaaacagtgtctggcacacaacaggaaatatatctatcatgattagtctactcaaacactcagctagcatccatcccaccagcaggtaacatgcatggagccagtgtcgctggactctaatgcaggagcactgtgcaacaattcctcttatgctatgattaggtaacatgagttaaaactgtaaaaacaaaaattcattaataaatagaaattaaaatcagttctttccaggaccatcaaaaagattagtaacataaagcaatggtggttaaaacaatatggggctaatatctattgagaataaaatttttaacatagtatggcaggaaattaatttagtaagaaccatctaccagtgaaagtcagtggaaatactgaaatgagtaacatactttccaaagatttaaaacataacaaatctcagaaggaaagatatgcaatgaataatatattaaatcctctttgaatggtatattcttctctacacaattctcaagggcaaattcaaaagccaaaatatatttcaaacatattggcaattccgcg

SEQ ID NO: 3941 - DNA, 926 bp, Homo Sapiens
gggagtgacggcagttccgagtccagtgggggcggtgggagcgatgagggtctgaggcggtgggagcggttgtgtgaagatggagtttcccggaggaaatgacaattacctgacgatcacagggccttcgcaccccttcctgtcaggggccgagacattccatacaccaagcttgggtgatgaggaatttgaaatcccacctatctccttggattctgatccctcattggctgtctcagatgtggttggccactttgatgacctggcagacccttcctcttcacaggatggcagtttttcagcccagtatggggtccagacattggacatgcctgtgggcatgacccatggcttgatggagcagggcggggggctcctgagtgggggcttgaccatggacttggaccactctataggaactcagtatagtgccaacccacctgttacaattgatgtaccaatgacagacatgacatctggcttgatggggcatagccagttgaccaccattgatcagtcagaactgagttcccagctgggtttgagcctagggggtggcaccatcctgccacctgcccagtcacctgaagatcgtctttcaaccaccccttcacctactagttcacttcacgaggatggtgttgaggatttccggaggcaacttcccagccagaagacagtcgtggtggaagcagggaaaaagcagaaggccccaaagaagagaaaaaagaaagatcctaatgaacctcagaaaccagtttcagccatatgctttaatctttcgagatacacaggctgccatcaaggggacagaatcctaatgccacttttggtgagggttccaaaattgtgggcccccctgcggggataatcttggcaaaggaactaaaacccggtattttaaaaaggaaaaactggaggttgcc

SEQ ID NO: 3942 - DNA, 893 bp, Homo Sapiens
gtccaaaacaacttcggtagaaattgttatgaggatgcgacatcgacaaggccttgcaggatctgcctgggcaccttgaaacggcacataggagcagacctgaagcatgttcactcatctcttctggggtagacgggatcaagggaatcttctccacggcggccagagccctgcaagttctttgagcccgttgtacaaattgattgtcagttgagtactgcaggccagcaggacacacgagacacaggctggagacatccgatgggtagtaagcagcatacaccccagccacctggccacccatggaggtgcctaccaggtggaaaggttttttgttcagcttcaggcattctacaaactggtgtatcctcttaacttgcccatctatggacaggtcatccagggaggagcgggtggtgccctcatgtcctggcatgtccacgcagaccaagtgcaggttctttggaaggaacttgaccacactgagccacatatccttgtgggcagagaatccgtggagcatgaggatggagggtttgtgcccaggcctgccccggaaggaataacagaactgatagtcttcatggtgaacatagcggacttgcatgcccaatgtcctccgccagtaccaataatagattcttatcagtgctgaaggccacagaagaaatgaagccacaaatgccaggattgggatggccagcgtgccgcccgcaatcacaaacatgttaaccacatcaagatccatcctgctctttcaggctggctgactcctgaccagcctcaaccgcctgggtcccgccgccgggcccggaccccggccctcggtctctagccccgggctgggacctgccgccgggctcctacccgcgcggctcccagctccggcgccc

SEQ ID NO: 3943 - DNA, 991 bp, Homo Sapiens
gggagtgagggtggctgcgtgtttccggaagacgtggcggctctcgcctgggctgtttcccggcttcatttctcccgactcagcttcccaccctgggctttccgaggtgctgtcgccgctgtccccaccactgcagccatgatctccttaacggacacgcagaaaattggaatgggattaacaggatttggagtgtttttcctgttctttggaatgattctcttttttgacaaagcactactggctattggaaatgttttatttgtagccggcttggcttttgtaattggtttagaaagaacattcagattcttcttccaaaaacataaaatgaaagctacaggtttttttctgggtggtgtatttgtagtccttattggttggcctttgataggcatgatcttcgaaatttatggattttttctcttgttcaggggcttctttcctgtcgttgttggctttattagaagagtgccagtccttggatccctcctaaatttacctggaattagatcatttgtagataaagttggagaaagcaacaatatggtataacaacaagtgaaatttggaagactcatttaaaatattgtgttatttataaagtcatttgaagaatattcagcacaaaattaaattacatgaaaatagcttgtaatggttctttacaggaattaaaaacgtatagcctacaaagtaccaccagcaaattagcaaagaagcagtgaaaaccgggcttctactcaagtgaaactaagaaaaagtccagccagccaaactggaaagaggtgaaaaccctggttaatgatggctaaaaaaactcttgaaaggctatttgggtttgtttttcccacaatggggcgaaaactccacccatcctttaaaaaaactgcggggggccccgggtccccttttcctttttaaactttggaaagggctctcaggaaccatccccatagggcatttttggctttttttaaaaaatcgcccc

SEQ ID NO: 3944 - DNA, 754 bp, Homo Sapiens
ggtcaataggtgactacttactacacatgaaccataatgctgcttcttgtgcatgtctgctctgatatacgtcgaacaatgtagcagccactgtcatttctcagtggttttgcctaaccaaacttcttcctaaggagatttatattctggcctacacagcagtccttgatggctgacagccacagaattccaaaccaagtagtgtctgtcagccctcttaactctgtgcacgccctatttcagtcttttacatttgttcttctagggaatgtatgcatctctatatatattttccctctcaaaaccagaacatcaacagtgctgtttctgacacttcagacatcccacgcaaagccacattgaatttttgccaaatgaaaaacacatccaacaatcaagtttctaagaaggtgtcaagtggggaataataataatgtataataatcaagaaattagtttattaaaaggaagcagaagcattgaccattttttcccagagaagaggagaaatctgtagtgagcaaaggacagaccatgaatcctccttgagaagtagtactctcagaaaggagaagcgccactcaagttcttttaacccaagactttagagaaattaggtccaagatttttatatgttcagttgtttatgtataaaaataactttctggattttgtggggaggagcaggagaggaaggaagttaatacctatgtaatacatagaaacttccacaataaaatgccattgatggttg

SEQ ID NO: 3945 - DNA, 997 bp, Homo Sapiens
aaatggttgaaagggggcggttcaaagaatttgaagggatttggggcagggagacagggggaccgtattcggcctcctagaattaagttttagggtttttggctttttaatcccccattcttatatcaatggttattttagactggagcagatgatcatcttcatctaaagtcattctttttgactgagtagggcaggattagagggaatgggcagtatagatcaatgtctttttctgtaaagtataggaaaaaccagagaggaaaaaaagagctgacaattggaaggtagtagaaaattgacgataatttcttcttaacaaataatagttgtatatacaaggaggctagtcaaccagattttatttgttgagggcgagcagtctacagcaaccagacctaggccttgtttgacgagatgtagagtcgagtcatgtaatcacaattggcctagagagagacaaggatataaacaaactatttccaatgtttaaccagtgcattcattcgagtagctcaggatagctggcctttaaattgactgggaagtaaagaatgagttttctcatgacacacatcaaagtctccttgttcaacatgatctggtctgagagttcataaactgaatccttcctgctgaaacagataagttgtctttatgtctgttacaatgcctgccttaaatatatatcatggcaaggaatgaagtcagctgctctgagtcagtgtaaaatgacagtattgagactgatgtggttccactaaaatatccacaaggacaaaagctcttaagtctaccgataaaatccttagctgcagtcttcatagattttgtttttcaaatcagtttgtttccagcaaaaaggtaggcaataagctatgcggaaatgcccagcaagtaagctaatggcctgctcaaagggccagcctccaactctccctaccacctatatttggtggtatcagacatcaaaagattcatcttaaaagaacatccc

SEQ ID NO: 3946 - DNA, 807 bp, Homo Sapiens
  misc_feature (285)..(285): n is a, c, g, or t
  misc_feature (694)..(702): n is a, c, g, or t
gggccctgtaaggattttgcccactgggcaactcagaaatacttcgatctcccaagatataagaggcagcagcaaacgtgcctattgacgtctgtttcatagttaccacttacgcgagtagacagaactcggcttttcagaaaataggtgtcaagtccactttataagaacctttttttctaaaataagataaaaggtggctttgcatttttctgattaaaacgactgtgtctttgtcacctctgcttaactttagaagtatccattcctgtgattgtagacttnttgttgatatttcctcccggaagaaatatcattcttttcttgaagggtttggtttactagaaatatccaaaatcaatcatgaaggcagttactattttgagtctaaaggttttctaaaaattaacctccacatcccttctgttagggtctttcagaatatcttttataaacagaagcatttgaagtcattgcttttgctacatgatttgtgtgtgtgaaggacataccacgtttaaatcattaattgaaaaacatcatataagccccaactttgtttggaggaagagacggaggttgaggtttttccttctgtataagcacctactgacaaaatgtagaggccattcaaccgtcaaacaccatttggttatatcgcagaggagacggatgtgtaaattactgcattgcnnnnnnnnncagtttgtataacctctaatctccgtttgcatgatacgctttgttagaaacattaattgtagtttggaagcaagtgtgtatgaataaagataatgatcattaaaa

SEQ ID NO: 3947 - DNA, 1011 bp, Homo Sapiens
  misc_feature (524)..(524): n is a, c, g, or t
  misc_feature (627)..(683): n is a, c, g, or t
  misc_feature (900)..(932): n is a, c, g, or t
gggaaaaattccgctatccatttgctccaatgtatggaggttttccagtgaagttacggacctatttaggcgaccccattccgtatgacccacagataacagcggaagaattagctgaaaagacgaagaatgctgttcaagctttgattgataagcaccaaagaataccaggaaacattatgagtgctttgttagaacgttttcattgataacaaagggtcaactagaagatgatttagtacatttatattaaatgtttgtatctaaggtactgtcttctgaattttgtaggtcctataattagtattttttaaaaaaatcatgttaataagcatctttcacagaattcgtttctttaaaatagtcaattttgtttttgcaattgtgtcaaatactaacaaattacacacctagtaattcagaaaaagatgtcttatttgtaaattcctaacaatttatgctaaacatatagattcttaagtttattaataacagcagtttaggttaaacaaacattcctggantaatgcgttaaatttctgtatctgtcgccctgagctgattttgaaagatggtataagctaggggctagtatagttgtttaagttagaaaaaacatgctgttgnnnnnnnnnnnnnnnnnnnnnnnnnnnnnnnnnnnnnnnnnnnnnnnnnnnnnnnnnacaattcactttttaaaaacatgatcgtatgatgaatgatattattttgttatttatatttactgtgattgataactgttgaaccaaaataataaaataattaatttaaacaatgtccaaatccctttagcagtaatggatataattttctccattgtgtggttaaaatttccatgtccagttggccagcacaatgaaaaagaaggattattttttnnnnnnnnnnnnnnnnnnnnnnnnnnnnnnnnntcccaatttatattttttaggatggaaattttttaacaaaaaatcctatataggaaaaaacattatagggggtgggctt

SEQ ID NO: 3948 - DNA, 630 bp, Homo Sapiens
tcaggctcggtcccctgaagttgccaaatgctcaggtgggcgctggtgaaatattttctattcgacccaaatttccaggaggaaacagctctcctgaggggcatcttttttaccacaacgatgatgttttgctgtcagggcctgcggtcatcctggtcatggtctccgggtgctcaccctcgacggctcgctctttccttgtcttcagttccaaaccaggcgacgtgacttcctccgttcaaaggagctgcaggcgcctcctcttggcttcgtagaagcaagcattcagattggacagcagcattttgcccaaataatttttctatctttgtgaaactgaacttctaggggaagtttagtctcggggcgatgttgggcagcgcagtcacggattaagatgtgatggtgactttcgcatggtcccatttccttatgccttgaagttccaggagctgaatttatgtgcatgctccaagacagctcctgaacacacaccctgaggaagagggtgaactcctccggacgcccagtccaagaaggaagcagctaggaagctgactctgttatctggagtgcagaaaacggagcttcgggtcaccaaatgatttgggcaacttgaggattggtaga

SEQ ID NO: 3949 - DNA, 593 bp, Homo Sapiens
  misc_feature (67)..(67): n is a, c, g, or t
gcaaaggacagcgggagaccggccgtcatacgcgagcctcatgaaagaaagatcctggcactgctgnaatgctctgagtacggtgcatagtcagaagatgaagaaggccaaggagcagcggcacctgcacaataaagagcacttcagagccaagcagaaggaggaggaggagaagctgaagcggcagaaggacctcaggaagaagctcttcagaattcaggggcagaaggaaagaagaaaccagaagtccagtttgaagggggctgagggccaattgcagtgagcctttggactggagggactgtccctggatctgcggaggtagacagtttcaaacatcacagtttgaatgcctgtgaatgacaagtcagtgggaaagagctcaagagatgtctctactcaaactgtgcctgcaggaggaggaacagagaagcctgggctgctgggactgggttcattctcatgacttggggctgtcgagatttaaagtgatgtaagctgtggttatgtggattctcttactttcctctgcctgcctcagtttaattattttgtcctacagaaatatcattaaaatatttttttgttaaaaa

SEQ ID NO: 3950 - DNA, 674 bp, Homo Sapiens
ggatcccccccgaagtggcccaaatgaccaaagttaacattactagtgttaagtcatattggtgtcatatatcctctgatgggtgatgaaaagggtacttcacccctgtggtattccaaaaatagacccacgtatatatggaaaactgattttcaaaagtgcaaaaggcaattcagtttcaacaaacggtgctggaacaattggatttcaattggatatcacactctatataaaaattattacaaaatatattgtagacctaaaagtaaaatagaaagtcactcagctcttagaagaaaatgtaggggtaaatctttgtgatttggggttaggcaaagatttcttaggtatgataccataaacatgggcagtgacctaatttccaaataaagtcccacaggtatggaagttaagacttcagcatgtctttggagataacacaattcaacctgcaacaaatataatggttcccaattaggactgctttcatgtttaatacagagaaactgagaatctctatatgagtttagtgcttttcacatactacctaagaaatgcatcttccacatttacatttagtcttccaatgtgttggtgttgtcattaacaaaatacaaattctcctaaaaatattatgaattgtagatttggcacttcaggttggtacggactga

SEQ ID NO: 3951 - DNA, 424 bp, Homo Sapiens
ccagccctttaaaggcatctatctatcaaaggaaaatttgggtgttagattttcttgggaccgtttctgtaacctttgcccttcacaatatagaaaatattggttttgccattacattttaatgccaggtttaaaacctgttgaaagctgcagctttatacagctttcttctccctgtgaaatcactttgtttatgtgatggcatttaaaaaatagcatgttctttttaaactgaattttatatctaatcaatgtcttcagtcttgaagaagaatttgcattgttgtgtttgtatatagagtattgcagtgcatgaattagctttatgcattttattaaatgctgtttcaatgtggcattattgttgtggcttaatactactacctaaatgaggtttatactattaaaagtgaattaaagactc

SEQ ID NO: 3952 - DNA, 819 bp, Homo Sapiens
gaacgtgccagatggtactacaacgatatttcatcttacaataagattcagcaatacctagatgatacattgatgaaaatataagttatttaacagtttgtttacataaattataggataagtacagaaaattaagctatgccactagatgatgacttcctgaatagatagttcagctttttattgaaagagggattgattggctaaattgaagttacagtgacatatattcctattagtgttctgtcattgccttctgtaaaggaatatgacttcaggtaagctcaaacctgagtctactgaaggtatggcacacctggaaaattgattttcaattttctaatgtacctacaaacctctcagaagtatgctggctattggtgagtggaaaagggctagaaggtatctacaacttcacacataaccaaaaacagagaagtggtgaagtggtgaaaggagtttctcaaagcctgtcttcagtcaagtgatttcattggcagcaatgggccagtatgagaacttgaaagctgcagatgcttatcaagctctccagaagtaccgctggctagccattttattccgtgtaacaatttctagatttgtagataggggttttattaatcacctatgttaaataaaagtgtggcgtgtcttttgctggtgttttttggtgtctctccatggtgactatcactcttatgcaattgtacatcaccattggagtcaaaatataaagttttaataggtgagaataataaataatagtgctgagaagaaaaatacagtgaatttggccaacttcggttggaccggctcatt

SEQ ID NO: 3953 - DNA, 1007 bp, Homo Sapiens
gcagttgagaaaaacccaacctggaagcttggtttttccaaggatggttcctgttgtcctttcaaaatggaaattccatgttatttctttcttgcccttaagcttttattcctttcaaatgacctaaagctgatgaactgagtaaaccacaacctgctgcagttatcaattagcaagcctagttcaacaatacttcaaaataaacagacttcacaagttatttccattcctaacagtggaataataacttaattttgtttacttttgtctttgtagatttctgtctgcagctccagtaagaatgccaaatcagatggctttagggaaatgctcataggagagaactagagttattcctcacactgaatttaagtcttaccagatttctgcaggttcatatgttaacgttctgatctagcctacctgtaagtctagtttatttctgtacacacttccaaatactcttcataaattttcacttctgactgaaatataacaccttgattgataaaatagtttcataactatagaattttagtgaagatataaaacattaatgaatacttgtgttttaatacatcactactcctatttattacatgttccaataaaccaatagaatgaagcactaagacacggtgaaatctaaacttaaaacccagatggaactgccatatagattacaaatgggtctccccaccacagaattcatatacaaaagcccttcggtatgtagcttttcctgaacaaatacattaatacactttttgttttttacatttgtaaaaattcaaggttttaataacatttctttgcaagacatttggtataaggtggttaataaatattaggaaacaaacactgtaccaaaatggatatgacttgtgaataaaccctaaataaagtggcttttggaagaactggattttgcagcaaccaactttataaagaggtccatccgctctcaatggaaaacacccaagcatatcttctatgtgtccgccgcc

SEQ ID NO: 3954 - DNA, 849 bp, Homo Sapiens
  misc_feature (373)..(433): n is a, c, g, or t
  misc_feature (516)..(627): n is a, c, g, or t
  misc_feature (636)..(670): n is a, c, g, or t
actgtgctccgcccgcataggtatagtcgtaacatgtacctcaacacctatgtctctattttaacttaattgcataatactgaaaaaaaatcttgaggcacacaaagtaagtggctacagtggtaacgggttgctttgcaatctcagggaaattgtcacttaaacagaaacagcatgagaaactttgttctaacatctatataaagacaaactaatgtgctgacctgaaccgtgttaatatttaaatcagacaacagttaaaatgggccccttttactgtctctaattatccctcaaaaaagttgattaaaaattaatacctatgtgcatactgccctaccatttaaaaaataagaaaagtcggtggtttatnnnnnnnnnnnnnnnnnnnnnnnnnnnnnnnnnnnnnnnnnnnnnnnnnnnnnnnnnnnnnagcatcctggctaacacgggggaaccctgtctctcctaaagatgccaaaaattatccaggcgtggtcacggggtgcctgtagnnnnnnnnnnnnnnnnnnnnnnnnnnnnnnnnnnnnnnnnnnnnnnnnnnnnnnnnnnnnnnnnnnnnnnnnnnnnnnnnnnnnnnnnnnnnnnnnnnnnnnnnnnnnnnnntccatctcnnnnnnnnnnnnnnnnnnnnnnnnnnnnnnnnnnntaggaaacacactagcagtgtgtttataccattgaatatcctgcaccactgttgtgggcactacaccagaaataggaaaaaatgtgatgatgagctgagctaattgagatgagggttatgggaatgacagaggagtgatggaagagatttggatcttttaagtgcaaatgtcgctggtc

SEQ ID NO: 3955 - DNA, 573 bp, Homo Sapiens
  misc_feature (198)..(207): n is a, c, g, or t
atcagctcggtaccaacctgaagtgccaaataaggaagggggtggggtggataaaggactaaacaaaattaattaaaatttagaaatttttctctcagaaggaattcatgcccataaaacaaagaccaggatacattcgtattttatcggtaaataccaatagattataaatcacttttctcgtatacataattgtgnnnnnnnnnnccatccaggtatgcatgttatttattcattgagaggatatacatctctcaggtgttttttgtcgtatgtgtacttttgtgtagtctgcctgtttattctttttgaataggatgatatgtacaattaaaaaaaatcttttgtgaaatgtggttttcttaaatacattattgcatttcatacacagtgatgaagggaaaaactacaaagctagacagattgcaaattagtattgcagtagtgaggtaatagagcaatacccaaatgttttcttaaaatatatgtaggtgatgcctgtgttctttacttttgtgtgtgtgtatgtgtttttaaacaagattcattgtagtcttttagatataattataa

SEQ ID NO: 3956 - DNA, 362 bp, Homo Sapiens
ctccacccgacggggtggtgaaacagtttaaatcccatcctctgcttgtggcaaatgatgcataaatgcctgctgctcacagtaaaagggcttcttcctcttttactgggtgatccccctgaaggcccagcctatcccaactccacagtcaggaaggcctacgtccttggtccacagacggagctgggccaggtttaaaagactcagtctaggcttgcctttgcaaaccaaaaacgaggacaggtctgaagtgggaagaaagctccgaaatagaaaacggttaggtcctattctatccccagcaaatctaagcaagaaatctctttatacaccacatggcccccccaccccgtcgggtggag

SEQ ID NO: 3957 - DNA, 693 bp, Homo Sapiens
aaataaaaagcaaaaagtcaaacagcagtagtcaaaaaactaatcccctaagtagaggctccatgtgcaaagtccagattgcaggtaggacagtcggcaaggcctccctgtttcacagctctcttcccaacccgtggacaaagactacggtctgccgccaggagcggaatgccagatagaccttgggtttctcagtgacacttccaaagacacatttgcatctcaacactttttccaaaaagcaagctgaaacatgtattggtaattaaaatgagaagatggccacatagatggacatatagtaacaaaaactgaaatgtctaaaccacaaatgatagtataactcacaaaccatggcactcaccaagtcaaagaagtcaaataaaaccagaccaactgaatgctagctaaaaagggcggaactcagaatcagaagaaacaggaagaagacatgcaccacaaacacaacactagaaaacagcacccagagccatacaagtcattctgctgcagacaaacaataaattgcacatcaatcctcctgaaaatcaactacagtacaaggagaaatgaaccgatttatatcaggctgtgtaagtctcattctgttggccaatagccagatccacttgggaatctcctattttaaaaatatgagtaatgtacttgtagagagcctatttagttcaccta

SEQ ID NO: 3958 - DNA, 418 bp, Homo Sapiens
gaacagtggggagagggagaggagtgacccggaacacagaggtgaccaacaaggagagcaagaggaactggagaggggagggctgaatggagaaagatgatggggaagcaaggaccaggacaagggttgggggctgggggaggcctgcggccaggagctggtctgaggggcggtgcgaggcggaaggatgggaagagcaaaggcagaagggagcttggcaccacatacgttttgatcatggccttgagggcgaccttgcgctcccgatctgcaaacttgtccacgaggtagccagacatgcagggtgcatggcagtagagccggaaaaagcggtggtagttgcccagggcccaggctatccttaatgccaaggcgtgggccacgcaaggatctgccttcagttctcgtgtgaggtatg

SEQ ID NO: 3959 - DNA, 752 bp, Homo Sapiens
acgattcagaatgttcctgtggcatagtcacccagttcccttttatgtctccattgctactcactgggctatacattaccagcttgatctcccatccaccaacacctctggacacttctatcagccatctttcagcctggcttgttttgcttcccagcctggtccattgtttcaacaacgcttttgctaacacgaatcccgagtaaagtccactacaatttactctgcctaactccagggggcttcaactctactcagcaatccacaatttcattgccgtgtgcctattttatttcccatggcatctatcccaaaccttttctgttttaagctcctaataccattcctcctctcctctccactacccaatggataggatggcctctccctactccaccaagaaaatcacagccaaagcaaaagagttcttacactccccaccctccacctcggtctactgcttgcatatcctttcctcagctaaccgtcctcctgggcccttctgcttctgaccccctcaggaccttaggacataatcactccctgcttctatcttcagtatctcctcattacaaataaagcatttgctgcagctcatttaactcttgtgtccacagtgagtctcttccattacttaatcacacttaattctctgtcctgactcctgtccccagccttttctttcactttgcccgtctgtcaggctctcatgcttctccatttggcaacttcaggaaggtacgcgagctccc

SEQ ID NO: 3960 - DNA, 556 bp, Homo Sapiens
gttgtctgaagtacttgggtgtcttggtgaagtggatctggtagggagaggtcacgatggggatcccgctgcgctctgcctgcaccatgtcactgcctgagtgcaagatgaaatgatggtagacggcagccttgacttccacttcctgcaggccggtctttagcggcacgatgacatatggaacggacaacgaggacttgggggggatggttacggtctgctggtgacgcctcttggtggtggccaggctgcagaaggctggattgtggagtagttccaccctcaccttgagctcttggttctgccggtaattgtagagaacggctcggatttccacctgctcgtttcgaacaacagagtagggtagccgcaggtcgatgaagaagtcctgcattactgtgacctcgaaggggtctgccacacagatccctttcttgtccgacatgctgacagccagaatctcccacgtggtgatggagtctttcaaaaatatattcatgagcttcgtagagattccatttttcggtggctctttcaagtcctcaacgttccacag

SEQ ID NO: 3961 - DNA, 865 bp, Homo Sapiens
  misc_feature (105)..(324): n is a, c, g, or t
tcgaaatcaaagcattaaatgcaagaaggtaaattctaatctatatcatgctcctttctgaattctacatcagctgggactttctttttttatcttaagacagannnnnnnnnnnnnnnnnnnnnnnnnnnnnnnnnnnnnnnnnnnnnnnnnnnnnnnnnnnnnnnnnnnnnnnnnnnnnnnnnnnnnnnnnnnnnnnnnnnnnnnnnnnnnnnnnnnnnnnnnnnnnnnnnnnnnnnnnnnnnnnnnnnnnnnnnnnnnnnnnnnnnnnnnnnnnnnnnnnnnnnnnnnnnnnnnnnnnnnnnnnnnnnnnnnnnnnnnnnncaccatcagcctcccaaagtgcgtgggattacaggcatgagccatcacgcctagcctatcagctggactttcttctgtctttcagtagcatcacaatccttaggcccccacacacaatcatattctactaattgtgaattacagaaagaacagcttactcgtttctctaagagacagtacacagagctaagacctttgtttctacctctggctacaaaactgtgactcctccaatttcccatttgtaaatagatctccaaaagaaatcagcccgagggcactaaatggctacagatctctgcagaagcactgtaggctgacagtagcaaacctcagtgagcttctcagataggagatacagagtgccttattcagacacttccttccaagccctctaacaactccagctctgtcaaccttcatctgattttcatttataaatgaagttgcacaaatctccaacaataaagaatattgacaaaatctttgttaacatttggcatttctcattttctaaaaaacaaaaacaagattcccattt

SEQ ID NO: 3962 - DNA, 301 bp, Homo Sapiens
atagatagacagtttggcttatttccagttaagtggagacaatcttttaaatcacaggaacaacaaactcaaacagacaaatagctatgcaaaccacctgagttttaaaaagatactttgtaattttcccactgctttccaatttacagaagaagaaaaagaaaccaaataaccccagacttcagccgacagtcacatgataagaaagataaattgcaggacagaactaggctaagaaaagcacaatcaatggtaagtattgtttatgaaagattcatcaccataacattaatgaaaatct

SEQ ID NO: 3963 - DNA, 631 bp, Homo Sapiens
aagaacaccctttcaaaaaatgtgcctgggaaaattggctagcaacatgtaggagaatgaaactggatccttatctctcatcttatacaaaaatcaactcaagatggattaagggcttaaacctaaaacctgaaactataaaaattctaaaagaaacattggaaaaacccttctagacaatggcttaggcaaggatttcatgaccaagaacccgaaagcaaatgtaataaaaacaaaggtaaatagctgggacctaattaaactaaagagcttttgcatggcaaaaggaacagtcagcagagtaaacagacaacccacagaatgggagaaaatcttcacaatctatacatctgacaaaggactaatatccagaatctacaacaaactcaaacaaatcagtaagaaaaaaacaaataatctaatcaaaaagtgagctaaggacatgaatagacaattctcaaaagaagatatacaaatagccaacaaacttatgaaaaaatgttcaacatcactaatgatcagggaaatgcaaattgaaaccataatgcgataccaccttactcctgcaagaatggccataatcaaagaatcaagaaacagtagatgttggcgtggatcttggcacttcagg

SEQ ID NO: 3964 - DNA, 492 bp, Homo Sapiens
gacctgtggttgtaaacaggtgtggttacaggtgtggttatgtatctgagtgttgcggtcatactctcctccagtccaatcctgagcatcttcatcttattaattagctgttcgtttctttgtgcactcattcttttatttttacttctttttaatgttatggtatccagttgtttccagtagcagtttcttgaacttctggcctgtactactaactgcagacctccagagtcactggcctttctgtgctctacatattattttaggggccacatcagttgccaagagcaacatacataccgacctggctgaattattgccagtgaaaacaacctgtacgaagcctttgctcaggttctaaaatatgtttgtccttgcacgaattttgtatatttcaaatatttctgtaaaggtttcttcttttctgttagagtgtggtgttaagccagagtcagtggtttgtgttctcattaaaatgtttgtttaaatcct

SEQ ID NO: 3965 - DNA, 635 bp, Homo Sapiens
agaataaaaaatagcatgcagaagaatgagtacttcataagacagttctagtgtccccaaatcatatgaaattatgaacacctacttaactcagtcatcaaagaaatgcatatttaaaacacagtgagaaactactgtacaatcagtggaaaaatgaaaattttaattccaagtgttggtaagaatgtagaataagtaaaaccctctaatactactgttggagcataaatctgtacaaccttgtgaccagcaaatccattcttgggtataagcccagcaggactgagtatgcatgttcaccaaaagacatgtgcaagaatgttgatagcatcagcattcataatagttccaagctaaaaacaacccaaatgtctgtcagcagtgcaatgtataaataaatggtggcatattcataaagtgaaatattgtactgcaaataaatgaaagaaccattgctttatacaataacatgaatgaatttcgcaaacacaatcttaagggagagaaaccagatgcaagagagtatgtatatatacatttatataaattatgtaagtttcagaaacaggcaaaactaatcaatgatattagaaatcagcatattatttacttgaagaggatttgggcaacttagg

SEQ ID NO: 3966 - DNA, 275 bp, Homo Sapiens
  misc_feature (44)..(96): n is a, c, g, or t
gacacttaacagatgcaagtgctactgattgtttcattgcgaannnnnnnnnnnnnnnnnnnnnnnnnnnnnnnnnnnnnnnnnnnnnnnnnnnnnaaagtcaggtccaatttgtaaaaacagcattgctttctgaaattagggcccaattaataatcagcaagaatttgatcgttccagttcccacttggaggcctttcatccctcgggtgtgctatggatggcttctaacaaaaactacacatatgtattcctgatcgccaacctttccccca

SEQ ID NO: 3967 - DNA, 232 bp, Homo Sapiens
ataaacctgttttgcagaactcatttattcagcaaatatttattgagtgcctaccagatgccagtcaccgcacaaggcactgggtatatggtatccccaaacaagagacataatcccggtccttaggtagtgctagtgtagtctgtaatatcttactaaggcctttggtatacgacccagagataacacgatgcgtattttagttttgcaaagaaggggtttggtctctgtg

SEQ ID NO: 3968 - DNA, 2069 bp, Homo Sapiens
  misc_feature (1302)..(1406): n is a, c, g, or t
  misc_feature (1408)..(1409): n is a, c, g, or t
  misc_feature (1411)..(1411): n is a, c, g, or t
  misc_feature (1417)..(1417): n is a, c, g, or t
  misc_feature (1419)..(1419): n is a, c, g, or t
  misc_feature (1423)..(1423): n is a, c, g, or t
  misc_feature (1427)..(1428): n is a, c, g, or t
  misc_feature (1431)..(1438): n is a, c, g, or t
  misc_feature (1442)..(1450): n is a, c, g, or t
  misc_feature (1453)..(1453): n is a, c, g, or t
  misc_feature (1460)..(1467): n is a, c, g, or t
  misc_feature (1469)..(1479): n is a, c, g, or t
  misc_feature (1483)..(1483): n is a, c, g, or t
  misc_feature (1487)..(1495): n is a, c, g, or t
  misc_feature (1503)..(1522): n is a, c, g, or t
  misc_feature (1656)..(1668): n is a, c, g, or t
  misc_feature (1720)..(1834): n is a, c, g, or t
  misc_feature (1893)..(1902): n is a, c, g, or t
  misc_feature (1927)..(2019): n is a, c, g, or t
gtgtgctttaggcgtgggctgaccaggcttcttcctacatcttcttcccagtaagtttcccctctggcttgacagcatgaggtgttgtgcatttgttcagctcccccaggctgttctccaggcttcacagtctggtgcttgggagagtcaggcagggttaaactgcaggagcagtttgccacccctgtccagattattggctgctttgcctctaccagttggcagacagccgtttgttctacatggctttgataattgtttgaggggaggagatggaaacaatgtggagtctccctctgattggttttggggaaatgtggagaagagtgccctgctttgcaaacatcaacctggcaaaaatgcaacaaatgaattttccacgcagttctttccatgggcataggtaagctgtgccttcagctgttgcagatgaaatgttctgttcaccctgcattacatgtgtttattcatccagcagtgttgctcagctcctacctctgtgccagggcagcattttcatatccaagatcaattccctctctcagcacagcctggggagggggtcattgttctcctcgtccatcagggatctcagaggctcagagactgcaagctgcttgcccaagtcacacagctagtgaagaccagagcagtttcatctggttgtgactctaagctcagtgctctctccactaccccacaccagccttggtgccaccaaaagtgctccccaaaaggaaggagaatgggatttttcttttgaggcatgcacatctggaattaaggtcaaactaattctcacatccctctaaaagtaaactactgttaggaacagcagtgttctcacagtgtggggcagccgtccttctaatgaagacaatgatattgacactgtccctcttgggcagttgcattagtaactttgaaaggtatatgactgagcgtagcatacaggttaacctgcagaaacagtacttaggtaattgtagggcgaggattataaatgaaatttgcaaaatcacttagcagcaactgaagacaattatcaaccacgtggagaaaatcaaaccgagcagggctgtgtgaaacatggttgtaatatgcgactgcgaacactgaactctacgccactccacaaatgatgttttcaggtgtcatggactgttgccaccatgtattcatccagagttcttaaagtttaaagttgcacatgattgtataagcatgctttctttgagttttaaattatgtataaacataagttgcatttagaaatcaagcataaatcacttcaactgctannnnnnnnnnnnnnnnnnnnnnnnnnnnnnnnnnnnnnnnnnnnnnnnnnnnnnnnnnnnnnnnnnnnnnnnnnnnnnnnnnnnnnnnnnnnnnnnnnnnnnnnnannanaaaaananaaanaaannaannnnnnnnaaannnnnnnnnaanaaaaaannnnnnnnannnnnnnnnnnaaanaaannnnnnnnnaaaatttnnnnnnnnnnnnnnnnnnnnaaaaaaattttttcaaacctcttcttggggcgggggggccccccaagaagaaagaaaaaaaagggggcattttgttttctcccaaagaaaaaacccgcgccacaaaaaagagtgggggttttcccctctccccnnnnnnnnnnnnnccccgccgggggagacacccaaaggggtttttataaaaaaaaccccagggannnnnnnnnnnnnnnnnnnnnnnnnnnnnnnnnnnnnnnnnnnnnnnnnnnnnnnnnnnnnnnnnnnnnnnnnnnnnnnnnnnnnnnnnnnnnnnnnnnnnnnnnnnnnnnnnnngaggagagtggtgggggaataataattaataaacactcctccccgcgcgcggggggagnnnnnnnnnnacagggcgtgtgagtaacccttagnnnnnnnnnnnnnnnnnnnnnnnnnnnnnnnnnnnnnnnnnnnnnnnnnnnnnnnnnnnnnnnnnnnnnnnnnnnnnnnnnnnnnnnnnnnnngcccccccttttaataaaaggggggggaacacccccccggggtggttggg

SEQ ID NO: 3969 - DNA, 929 bp, Homo Sapiens
ggggcggactgtcctttcgtggctcactccctttcctctgctgccgctcggtcacgcttgctctttcaccatgcctggatcacttcctttgaatgcagaagcttgctggccaaaagatgtgggaattgttgcccttgagatctattttccttctcaatatgttgatcaagcagagttggaaaaatatgatggtgtagatgctggaaagtataccattggcttgggccaggccaagatgggcttctgcacagatagagaagatattaactctctttgcatgactgtggttcagaatcttatggagagaaataacctttcctatgattgcattgggcggctggaagttggaacagagacaatcatcgacaaatcaaagtctgtgaagactaatttgatgcagctgtttgaagagtctgggaatacagatatagaaggaatcgacacaactaatgcatgctatggaggcacagctgctgtcttcaatgctgttaactggattgagtccagctcttgggatggacggtatgccctggtagttgcaggagatattgctgtatatgccacaggaaatgctagacctacaggtggagttggagcagtagctctgctaattgggccaaatgctcctttaatttttgaacgagggcttcgtgggacacatatgcaacatgcctatgatttttacaagcctgatatgctatctgaatatcctatagtagatggaaaactctccatacagtgctacctcagtgcattaaaccgctgctactctgtctactgcaaaaagatccatgcccagtggcagaaagagggaaatgataaagattttaccttgaatgattttggcttcatgatctttcacccacccatattgtaaactggttcaaaaatctctaacttcggatgttgctgaatgacttccttaatga

(The sequence listing continues in the following parts.)
